United States Patent Application Publication US 2015/0232836 A1 - sequence listing, part 44

SEQ ID NO: 1750433 - DNA, 15 bp, Homo sapiens
aatttaaatattaaa

SEQ ID NO: 1750434 - DNA, 15 bp, Homo sapiens
atttaaatattaaat

SEQ ID NO: 1750435 - DNA, 15 bp, Homo sapiens
tttaaatattaaatg

SEQ ID NO: 1750436 - DNA, 15 bp, Homo sapiens
ttaaatattaaatgt

SEQ ID NO: 1750437 - DNA, 15 bp, Homo sapiens
taaatattaaatgta

SEQ ID NO: 1750438 - DNA, 15 bp, Homo sapiens
aaatattaaatgtag

SEQ ID NO: 1750439 - DNA, 15 bp, Homo sapiens
aatattaaatgtagt

SEQ ID NO: 1750440 - DNA, 15 bp, Homo sapiens
atattaaatgtagta

SEQ ID NO: 1750441 - DNA, 15 bp, Homo sapiens
tattaaatgtagtat

SEQ ID NO: 1750442 - DNA, 15 bp, Homo sapiens
attaaatgtagtatc

SEQ ID NO: 1750443 - DNA, 15 bp, Homo sapiens
ttaaatgtagtatct

SEQ ID NO: 1750444 - DNA, 15 bp, Homo sapiens
taaatgtagtatctc

SEQ ID NO: 1750445 - DNA, 15 bp, Homo sapiens
aaatgtagtatctct

SEQ ID NO: 1750446 - DNA, 15 bp, Homo sapiens
aatgtagtatctctg

SEQ ID NO: 1750447 - DNA, 15 bp, Homo sapiens
atgtagtatctctgg

SEQ ID NO: 1750448 - DNA, 15 bp, Homo sapiens
tgtagtatctctggc

SEQ ID NO: 1750449 - DNA, 15 bp, Homo sapiens
gtagtatctctggca

SEQ ID NO: 1750450 - DNA, 15 bp, Homo sapiens
tagtatctctggcag

SEQ ID NO: 1750451 - DNA, 15 bp, Homo sapiens
agtatctctggcaga

SEQ ID NO: 1750452 - DNA, 15 bp, Homo sapiens
gtatctctggcagat

SEQ ID NO: 1750453 - DNA, 15 bp, Homo sapiens
tatctctggcagatg

SEQ ID NO: 1750454 - DNA, 15 bp, Homo sapiens
atctctggcagatga

SEQ ID NO: 1750455 - DNA, 15 bp, Homo sapiens
tctctggcagatgaa

SEQ ID NO: 1750456 - DNA, 15 bp, Homo sapiens
ctctggcagatgaaa

SEQ ID NO: 1750457 - DNA, 15 bp, Homo sapiens
tctggcagatgaaac

SEQ ID NO: 1750458 - DNA, 15 bp, Homo sapiens
ctggcagatgaaact

SEQ ID NO: 1750459 - DNA, 15 bp, Homo sapiens
tggcagatgaaacta

SEQ ID NO: 1750460 - DNA, 15 bp, Homo sapiens
ggcagatgaaactat

SEQ ID NO: 1750461 - DNA, 15 bp, Homo sapiens
gcagatgaaactata

SEQ ID NO: 1750462 - DNA, 15 bp, Homo sapiens
cagatgaaactatag

SEQ ID NO: 1750463 - DNA, 15 bp, Homo sapiens
agatgaaactataga

SEQ ID NO: 1750464 - DNA, 15 bp, Homo sapiens
gatgaaactatagag

SEQ ID NO: 1750465 - DNA, 15 bp, Homo sapiens
atgaaactatagagg

SEQ ID NO: 1750466 - DNA, 15 bp, Homo sapiens
tgaaactatagagga

SEQ ID NO: 1750467 - DNA, 15 bp, Homo sapiens
gaaactatagaggac

SEQ ID NO: 1750468 - DNA, 15 bp, Homo sapiens
aaactatagaggact

SEQ ID NO: 1750469 - DNA, 15 bp, Homo sapiens
aactatagaggactt

SEQ ID NO: 1750470 - DNA, 15 bp, Homo sapiens
actatagaggacttt

SEQ ID NO: 1750471 - DNA, 15 bp, Homo sapiens
ctatagaggactttt

SEQ ID NO: 1750472 - DNA, 15 bp, Homo sapiens
tatagaggactttta

SEQ ID NO: 1750473 - DNA, 15 bp, Homo sapiens
atagaggacttttat

SEQ ID NO: 1750474 - DNA, 15 bp, Homo sapiens
tagaggacttttatt

SEQ ID NO: 1750475 - DNA, 15 bp, Homo sapiens
agaggacttttattt

SEQ ID NO: 1750476 - DNA, 15 bp, Homo sapiens
gaggacttttattta

SEQ ID NO: 1750477 - DNA, 15 bp, Homo sapiens
aggacttttatttag

SEQ ID NO: 1750478 - DNA, 15 bp, Homo sapiens
ggacttttatttagt

SEQ ID NO: 1750479 - DNA, 15 bp, Homo sapiens
gacttttatttagtc

SEQ ID NO: 1750480 - DNA, 15 bp, Homo sapiens
acttttatttagtca

SEQ ID NO: 1750481 - DNA, 15 bp, Homo sapiens
cttttatttagtcat

SEQ ID NO: 1750482 - DNA, 15 bp, Homo sapiens
ttttatttagtcata

SEQ ID NO: 1750483 - DNA, 15 bp, Homo sapiens
tttatttagtcatat

SEQ ID NO: 1750484 - DNA, 15 bp, Homo sapiens
ttatttagtcatata

SEQ ID NO: 1750485 - DNA, 15 bp, Homo sapiens
tatttagtcatatat

SEQ ID NO: 1750486 - DNA, 15 bp, Homo sapiens
atttagtcatatatt

SEQ ID NO: 1750487 - DNA, 15 bp, Homo sapiens
tttagtcatatattt

SEQ ID NO: 1750488 - DNA, 15 bp, Homo sapiens
ttagtcatatatttt

SEQ ID NO: 1750489 - DNA, 15 bp, Homo sapiens
tagtcatatattttt

SEQ ID NO: 1750490 - DNA, 15 bp, Homo sapiens
agtcatatattttta

SEQ ID NO: 1750491 - DNA, 15 bp, Homo sapiens
gtcatatatttttag

SEQ ID NO: 1750492 - DNA, 15 bp, Homo sapiens
tcatatatttttagt

SEQ ID NO: 1750493 - DNA, 15 bp, Homo sapiens
catatatttttagtg

SEQ ID NO: 1750494 - DNA, 15 bp, Homo sapiens
atatatttttagtgt

SEQ ID NO: 1750495 - DNA, 15 bp, Homo sapiens
tatatttttagtgtt

SEQ ID NO: 1750496 - DNA, 15 bp, Homo sapiens
atatttttagtgttt

SEQ ID NO: 1750497 - DNA, 15 bp, Homo sapiens
tatttttagtgtttg

SEQ ID NO: 1750498 - DNA, 15 bp, Homo sapiens
atttttagtgtttga

SEQ ID NO: 1750499 - DNA, 15 bp, Homo sapiens
tttttagtgtttgag

SEQ ID NO: 1750500 - DNA, 15 bp, Homo sapiens
ttttagtgtttgagt

SEQ ID NO: 1750501 - DNA, 15 bp, Homo sapiens
tttagtgtttgagtc

SEQ ID NO: 1750502 - DNA, 15 bp, Homo sapiens
ttagtgtttgagtct

SEQ ID NO: 1750503 - DNA, 15 bp, Homo sapiens
tagtgtttgagtctt

SEQ ID NO: 1750504 - DNA, 15 bp, Homo sapiens
agtgtttgagtctta

SEQ ID NO: 1750505 - DNA, 15 bp, Homo sapiens
gtgtttgagtcttat

SEQ ID NO: 1750506 - DNA, 15 bp, Homo sapiens
tgtttgagtcttata

SEQ ID NO: 1750507 - DNA, 15 bp, Homo sapiens
gtttgagtcttatat

SEQ ID NO: 1750508 - DNA, 15 bp, Homo sapiens
tttgagtcttatatt

SEQ ID NO: 1750509 - DNA, 15 bp, Homo sapiens
ttgagtcttatatta

SEQ ID NO: 1750510 - DNA, 15 bp, Homo sapiens
tgagtcttatattac

SEQ ID NO: 1750511 - DNA, 15 bp, Homo sapiens
gagtcttatattaca

SEQ ID NO: 1750512 - DNA, 15 bp, Homo sapiens
agtcttatattacat

SEQ ID NO: 1750513 - DNA, 15 bp, Homo sapiens
gtcttatattacatt

SEQ ID NO: 1750514 - DNA, 15 bp, Homo sapiens
tcttatattacattt

SEQ ID NO: 1750515 - DNA, 15 bp, Homo sapiens
cttatattacatttt

SEQ ID NO: 1750516 - DNA, 15 bp, Homo sapiens
ttatattacattttt

SEQ ID NO: 1750517 - DNA, 15 bp, Homo sapiens
tatattacattttta

SEQ ID NO: 1750518 - DNA, 15 bp, Homo sapiens
atattacatttttaa

SEQ ID NO: 1750519 - DNA, 15 bp, Homo sapiens
tattacatttttaat

SEQ ID NO: 1750520 - DNA, 15 bp, Homo sapiens
attacatttttaatc

SEQ ID NO: 1750521 - DNA, 15 bp, Homo sapiens
ttacatttttaatca

SEQ ID NO: 1750522 - DNA, 15 bp, Homo sapiens
tacatttttaatcat

SEQ ID NO: 1750523 - DNA, 15 bp, Homo sapiens
acatttttaatcata

SEQ ID NO: 1750524 - DNA, 15 bp, Homo sapiens
catttttaatcataa

SEQ ID NO: 1750525 - DNA, 15 bp, Homo sapiens
atttttaatcataaa

SEQ ID NO: 1750526 - DNA, 15 bp, Homo sapiens
tttttaatcataaaa

SEQ ID NO: 1750527 - DNA, 15 bp, Homo sapiens
ttttaatcataaaaa

SEQ ID NO: 1750528 - DNA, 15 bp, Homo sapiens
tttaatcataaaaac

SEQ ID NO: 1750529 - DNA, 15 bp, Homo sapiens
ttaatcataaaaacc

SEQ ID NO: 1750530 - DNA, 15 bp, Homo sapiens
taatcataaaaacct

SEQ ID NO: 1750531 - DNA, 15 bp, Homo sapiens
aatcataaaaacctt

SEQ ID NO: 1750532 - DNA, 15 bp, Homo sapiens
atcataaaaaccttg

SEQ ID NO: 1750533 - DNA, 15 bp, Homo sapiens
tcataaaaaccttga

SEQ ID NO: 1750534 - DNA, 15 bp, Homo sapiens
cataaaaaccttgag

SEQ ID NO: 1750535 - DNA, 15 bp, Homo sapiens
ataaaaaccttgagt

SEQ ID NO: 1750536 - DNA, 15 bp, Homo sapiens
taaaaaccttgagtg

SEQ ID NO: 1750537 - DNA, 15 bp, Homo sapiens
aaaaaccttgagtgg

SEQ ID NO: 1750538 - DNA, 15 bp, Homo sapiens
aaaaccttgagtggt

SEQ ID NO: 1750539 - DNA, 15 bp, Homo sapiens
aaaccttgagtggta

SEQ ID NO: 1750540 - DNA, 15 bp, Homo sapiens
aaccttgagtggtag

SEQ ID NO: 1750541 - DNA, 15 bp, Homo sapiens
accttgagtggtagt

SEQ ID NO: 1750542 - DNA, 15 bp, Homo sapiens
ccttgagtggtagtg

SEQ ID NO: 1750543 - DNA, 15 bp, Homo sapiens
cttgagtggtagtgg

SEQ ID NO: 1750544 - DNA, 15 bp, Homo sapiens
ttgagtggtagtgga

SEQ ID NO: 1750545 - DNA, 15 bp, Homo sapiens
tgagtggtagtggat

SEQ ID NO: 1750546 - DNA, 15 bp, Homo sapiens
gagtggtagtggata

SEQ ID NO: 1750547 - DNA, 15 bp, Homo sapiens
agtggtagtggataa

SEQ ID NO: 1750548 - DNA, 15 bp, Homo sapiens
gtggtagtggataac

SEQ ID NO: 1750549 - DNA, 15 bp, Homo sapiens
tggtagtggataact

SEQ ID NO: 1750550 - DNA, 15 bp, Homo sapiens
ggtagtggataactt

SEQ ID NO: 1750551 - DNA, 15 bp, Homo sapiens
gtagtggataacttt

SEQ ID NO: 1750552 - DNA, 15 bp, Homo sapiens
tagtggataactttg

SEQ ID NO: 1750553 - DNA, 15 bp, Homo sapiens
agtggataactttgt

SEQ ID NO: 1750554 - DNA, 15 bp, Homo sapiens
gtggataactttgtg

SEQ ID NO: 1750555 - DNA, 15 bp, Homo sapiens
tggataactttgtga

SEQ ID NO: 1750556 - DNA, 15 bp, Homo sapiens
ggataactttgtgaa

SEQ ID NO: 1750557 - DNA, 15 bp, Homo sapiens
gataactttgtgaag

SEQ ID NO: 1750558 - DNA, 15 bp, Homo sapiens
ataactttgtgaaga

SEQ ID NO: 1750559 - DNA, 15 bp, Homo sapiens
taactttgtgaagat

SEQ ID NO: 1750560 - DNA, 15 bp, Homo sapiens
aactttgtgaagata

SEQ ID NO: 1750561 - DNA, 15 bp, Homo sapiens
actttgtgaagataa

SEQ ID NO: 1750562 - DNA, 15 bp, Homo sapiens
ctttgtgaagataag

SEQ ID NO: 1750563 - DNA, 15 bp, Homo sapiens
tttgtgaagataagt

SEQ ID NO: 1750564 - DNA, 15 bp, Homo sapiens
ttgtgaagataagtt

SEQ ID NO: 1750565 - DNA, 15 bp, Homo sapiens
tgtgaagataagtta

SEQ ID NO: 1750566 - DNA, 15 bp, Homo sapiens
gtgaagataagttat

SEQ ID NO: 1750567 - DNA, 15 bp, Homo sapiens
tgaagataagttatg

SEQ ID NO: 1750568 - DNA, 15 bp, Homo sapiens
gaagataagttatgc

SEQ ID NO: 1750569 - DNA, 15 bp, Homo sapiens
aagataagttatgcc

SEQ ID NO: 1750570 - DNA, 15 bp, Homo sapiens
agataagttatgcca

SEQ ID NO: 1750571 - DNA, 15 bp, Homo sapiens
gataagttatgccac

SEQ ID NO: 1750572 - DNA, 15 bp, Homo sapiens
ataagttatgccaca

SEQ ID NO: 1750573 - DNA, 15 bp, Homo sapiens
taagttatgccacac

SEQ ID NO: 1750574 - DNA, 15 bp, Homo sapiens
aagttatgccacaca

SEQ ID NO: 1750575 - DNA, 15 bp, Homo sapiens
agttatgccacacaa

SEQ ID NO: 1750576 - DNA, 15 bp, Homo sapiens
gttatgccacacaaa

SEQ ID NO: 1750577 - DNA, 15 bp, Homo sapiens
ttatgccacacaaac

SEQ ID NO: 1750578 - DNA, 15 bp, Homo sapiens
tatgccacacaaaca

SEQ ID NO: 1750579 - DNA, 15 bp, Homo sapiens
atgccacacaaacag

SEQ ID NO: 1750580 - DNA, 15 bp, Homo sapiens
tgccacacaaacagg

SEQ ID NO: 1750581 - DNA, 15 bp, Homo sapiens
gccacacaaacagga

SEQ ID NO: 1750582 - DNA, 15 bp, Homo sapiens
ccacacaaacaggat

SEQ ID NO: 1750583 - DNA, 15 bp, Homo sapiens
cacacaaacaggata

SEQ ID NO: 1750584 - DNA, 15 bp, Homo sapiens
acacaaacaggatac

SEQ ID NO: 1750585 - DNA, 15 bp, Homo sapiens
cacaaacaggatact

SEQ ID NO: 1750586 - DNA, 15 bp, Homo sapiens
acaaacaggatactg

SEQ ID NO: 1750587 - DNA, 15 bp, Homo sapiens
caaacaggatactgt

SEQ ID NO: 1750588 - DNA, 15 bp, Homo sapiens
aaacaggatactgtg

SEQ ID NO: 1750589 - DNA, 15 bp, Homo sapiens
aacaggatactgtgt

SEQ ID NO: 1750590 - DNA, 15 bp, Homo sapiens
acaggatactgtgta

SEQ ID NO: 1750591 - DNA, 15 bp, Homo sapiens
caggatactgtgtat

SEQ ID NO: 1750592 - DNA, 15 bp, Homo sapiens
aggatactgtgtatt

SEQ ID NO: 1750593 - DNA, 15 bp, Homo sapiens
ggatactgtgtattt

SEQ ID NO: 1750594 - DNA, 15 bp, Homo sapiens
gatactgtgtatttt

SEQ ID NO: 1750595 - DNA, 15 bp, Homo sapiens
atactgtgtattttt

SEQ ID NO: 1750596 - DNA, 15 bp, Homo sapiens
tactgtgtatttttc

SEQ ID NO: 1750597 - DNA, 15 bp, Homo sapiens
actgtgtatttttcc

SEQ ID NO: 1750598 - DNA, 15 bp, Homo sapiens
ctgtgtatttttcct

SEQ ID NO: 1750599 - DNA, 15 bp, Homo sapiens
tgtgtatttttcctg

SEQ ID NO: 1750600 - DNA, 15 bp, Homo sapiens
gtgtatttttcctgt

SEQ ID NO: 1750601 - DNA, 15 bp, Homo sapiens
tgtatttttcctgtg

SEQ ID NO: 1750602 - DNA, 15 bp, Homo sapiens
gtatttttcctgtga

SEQ ID NO: 1750603 - DNA, 15 bp, Homo sapiens
tatttttcctgtgag

SEQ ID NO: 1750604 - DNA, 15 bp, Homo sapiens
atttttcctgtgaga

SEQ ID NO: 1750605 - DNA, 15 bp, Homo sapiens
tttttcctgtgagaa

SEQ ID NO: 1750606 - DNA, 15 bp, Homo sapiens
ttttcctgtgagaat

SEQ ID NO: 1750607 - DNA, 15 bp, Homo sapiens
tttcctgtgagaata

SEQ ID NO: 1750608 - DNA, 15 bp, Homo sapiens
ttcctgtgagaataa

SEQ ID NO: 1750609 - DNA, 15 bp, Homo sapiens
tcctgtgagaataat

SEQ ID NO: 1750610 - DNA, 15 bp, Homo sapiens
cctgtgagaataatt

SEQ ID NO: 1750611 - DNA, 15 bp, Homo sapiens
ctgtgagaataattg

SEQ ID NO: 1750612 - DNA, 15 bp, Homo sapiens
tgtgagaataattga

SEQ ID NO: 1750613 - DNA, 15 bp, Homo sapiens
gtgagaataattgac

SEQ ID NO: 1750614 - DNA, 15 bp, Homo sapiens
tgagaataattgaca

SEQ ID NO: 1750615 - DNA, 15 bp, Homo sapiens
gagaataattgacat

SEQ ID NO: 1750616 - DNA, 15 bp, Homo sapiens
agaataattgacatt

SEQ ID NO: 1750617 - DNA, 15 bp, Homo sapiens
gaataattgacatta

SEQ ID NO: 1750618 - DNA, 15 bp, Homo sapiens
aataattgacattat

SEQ ID NO: 1750619 - DNA, 15 bp, Homo sapiens
ataattgacattata

SEQ ID NO: 1750620 - DNA, 15 bp, Homo sapiens
taattgacattatag

SEQ ID NO: 1750621 - DNA, 15 bp, Homo sapiens
aattgacattataga

SEQ ID NO: 1750622 - DNA, 15 bp, Homo sapiens
attgacattatagag

SEQ ID NO: 1750623 - DNA, 15 bp, Homo sapiens
ttgacattatagaga

SEQ ID NO: 1750624 - DNA, 15 bp, Homo sapiens
tgacattatagagaa

SEQ ID NO: 1750625 - DNA, 15 bp, Homo sapiens
gacattatagagaag

SEQ ID NO: 1750626 - DNA, 15 bp, Homo sapiens
acattatagagaagg

SEQ ID NO: 1750627 - DNA, 15 bp, Homo sapiens
cattatagagaaggg

SEQ ID NO: 1750628 - DNA, 15 bp, Homo sapiens
attatagagaaggga

SEQ ID NO: 1750629 - DNA, 15 bp, Homo sapiens
ttatagagaagggat

SEQ ID NO: 1750630 - DNA, 15 bp, Homo sapiens
tatagagaagggata

SEQ ID NO: 1750631 - DNA, 15 bp, Homo sapiens
atagagaagggatat

SEQ ID NO: 1750632 - DNA, 15 bp, Homo sapiens
tagagaagggatatg

SEQ ID NO: 1750633 - DNA, 15 bp, Homo sapiens
agagaagggatatgg

SEQ ID NO: 1750634 - DNA, 15 bp, Homo sapiens
gagaagggatatggc

SEQ ID NO: 1750635 - DNA, 15 bp, Homo sapiens
agaagggatatggca

SEQ ID NO: 1750636 - DNA, 15 bp, Homo sapiens
gaagggatatggcat

SEQ ID NO: 1750637 - DNA, 15 bp, Homo sapiens
aagggatatggcata

SEQ ID NO: 1750638 - DNA, 15 bp, Homo sapiens
agggatatggcatag

SEQ ID NO: 1750639 - DNA, 15 bp, Homo sapiens
gggatatggcataga

SEQ ID NO: 1750640 - DNA, 15 bp, Homo sapiens
ggatatggcatagat

SEQ ID NO: 1750641 - DNA, 15 bp, Homo sapiens
gatatggcatagata

SEQ ID NO: 1750642 - DNA, 15 bp, Homo sapiens
atatggcatagatac

SEQ ID NO: 1750643 - DNA, 15 bp, Homo sapiens
tatggcatagataca

SEQ ID NO: 1750644 - DNA, 15 bp, Homo sapiens
atggcatagatacat

SEQ ID NO: 1750645 - DNA, 15 bp, Homo sapiens
tggcatagatacatt

SEQ ID NO: 1750646 - DNA, 15 bp, Homo sapiens
ggcatagatacattt

SEQ ID NO: 1750647 - DNA, 15 bp, Homo sapiens
gcatagatacatttg

SEQ ID NO: 1750648 - DNA, 15 bp, Homo sapiens
catagatacatttgc

SEQ ID NO: 1750649 - DNA, 15 bp, Homo sapiens
atagatacatttgcg

SEQ ID NO: 1750650 - DNA, 15 bp, Homo sapiens
tagatacatttgcgt

SEQ ID NO: 1750651 - DNA, 15 bp, Homo sapiens
agatacatttgcgtt

SEQ ID NO: 1750652 - DNA, 15 bp, Homo sapiens
gatacatttgcgttt

SEQ ID NO: 1750653 - DNA, 15 bp, Homo sapiens
atacatttgcgtttt

SEQ ID NO: 1750654 - DNA, 15 bp, Homo sapiens
tacatttgcgttttc

SEQ ID NO: 1750655 - DNA, 15 bp, Homo sapiens
acatttgcgttttca

SEQ ID NO: 1750656 - DNA, 15 bp, Homo sapiens
catttgcgttttcac

SEQ ID NO: 1750657 - DNA, 15 bp, Homo sapiens
atttgcgttttcaca

SEQ ID NO: 1750658 - DNA, 15 bp, Homo sapiens
tttgcgttttcacag

SEQ ID NO: 1750659 - DNA, 15 bp, Homo sapiens
ttgcgttttcacaga

SEQ ID NO: 1750660 - DNA, 15 bp, Homo sapiens
tgcgttttcacagac

SEQ ID NO: 1750661 - DNA, 15 bp, Homo sapiens
gcgttttcacagact

SEQ ID NO: 1750662 - DNA, 15 bp, Homo sapiens
cgttttcacagactt

SEQ ID NO: 1750663 - DNA, 15 bp, Homo sapiens
gttttcacagacttt

SEQ ID NO: 1750664 - DNA, 15 bp, Homo sapiens
ttttcacagactttt

SEQ ID NO: 1750665 - DNA, 15 bp, Homo sapiens
tttcacagacttttt

SEQ ID NO: 1750666 - DNA, 15 bp, Homo sapiens
ttcacagactttttt

SEQ ID NO: 1750667 - DNA, 15 bp, Homo sapiens
tcacagacttttttt

SEQ ID NO: 1750668 - DNA, 15 bp, Homo sapiens
cacagactttttttt

SEQ ID NO: 1750669 - DNA, 15 bp, Homo sapiens
acagactttttttta

SEQ ID NO: 1750670 - DNA, 15 bp, Homo sapiens
cagacttttttttaa

SEQ ID NO: 1750671 - DNA, 15 bp, Homo sapiens
gacttttttttaaaa

SEQ ID NO: 1750672 - DNA, 15 bp, Homo sapiens
acttttttttaaaat

SEQ ID NO: 1750673 - DNA, 15 bp, Homo sapiens
cttttttttaaaatt

SEQ ID NO: 1750674 - DNA, 15 bp, Homo sapiens
ttttttttaaaattt

SEQ ID NO: 1750675 - DNA, 15 bp, Homo sapiens
tttttttaaaatttg

SEQ ID NO: 1750676 - DNA, 15 bp, Homo sapiens
ttttttaaaatttga

SEQ ID NO: 1750677 - DNA, 15 bp, Homo sapiens
tttttaaaatttgaa

SEQ ID NO: 1750678 - DNA, 15 bp, Homo sapiens
tttaaaatttgaaat

SEQ ID NO: 1750679 - DNA, 15 bp, Homo sapiens
ttaaaatttgaaata

SEQ ID NO: 1750680 - DNA, 15 bp, Homo sapiens
taaaatttgaaatat

SEQ ID NO: 1750681 - DNA, 15 bp, Homo sapiens
aaaatttgaaatata

SEQ ID NO: 1750682 - DNA, 15 bp, Homo sapiens
aaatttgaaatataa

SEQ ID NO: 1750683 - DNA, 15 bp, Homo sapiens
aatttgaaatataac

SEQ ID NO: 1750684 - DNA, 15 bp, Homo sapiens
atttgaaatataaca

SEQ ID NO: 1750685 - DNA, 15 bp, Homo sapiens
tttgaaatataacac

SEQ ID NO: 1750686 - DNA, 15 bp, Homo sapiens
ttgaaatataacaca

SEQ ID NO: 1750687 - DNA, 15 bp, Homo sapiens
tgaaatataacacat

SEQ ID NO: 1750688 - DNA, 15 bp, Homo sapiens
gaaatataacacata

SEQ ID NO: 1750689 - DNA, 15 bp, Homo sapiens
aaatataacacatat

SEQ ID NO: 1750690 - DNA, 15 bp, Homo sapiens
aatataacacatatt

SEQ ID NO: 1750691 - DNA, 15 bp, Homo sapiens
atataacacatatta

SEQ ID NO: 1750692 - DNA, 15 bp, Homo sapiens
tataacacatattaa

SEQ ID NO: 1750693 - DNA, 15 bp, Homo sapiens
ataacacatattaag

SEQ ID NO: 1750694 - DNA, 15 bp, Homo sapiens
taacacatattaaga

SEQ ID NO: 1750695 - DNA, 15 bp, Homo sapiens
aacacatattaagaa

SEQ ID NO: 1750696 - DNA, 15 bp, Homo sapiens
acacatattaagaaa

SEQ ID NO: 1750697 - DNA, 15 bp, Homo sapiens
cacatattaagaaaa

SEQ ID NO: 1750698 - DNA, 15 bp, Homo sapiens
acatattaagaaaag

SEQ ID NO: 1750699 - DNA, 15 bp, Homo sapiens
catattaagaaaagt

SEQ ID NO: 1750700 - DNA, 15 bp, Homo sapiens
atattaagaaaagta

SEQ ID NO: 1750701 - DNA, 15 bp, Homo sapiens
tattaagaaaagtat

SEQ ID NO: 1750702 - DNA, 15 bp, Homo sapiens
attaagaaaagtata

SEQ ID NO: 1750703 - DNA, 15 bp, Homo sapiens
ttaagaaaagtatat

SEQ ID NO: 1750704 - DNA, 15 bp, Homo sapiens
taagaaaagtatata

SEQ ID NO: 1750705 - DNA, 15 bp, Homo sapiens
aagaaaagtatatat

SEQ ID NO: 1750706 - DNA, 15 bp, Homo sapiens
agaaaagtatatatc

SEQ ID NO: 1750707 - DNA, 15 bp, Homo sapiens
gaaaagtatatatct

SEQ ID NO: 1750708 - DNA, 15 bp, Homo sapiens
aaaagtatatatctc

SEQ ID NO: 1750709 - DNA, 15 bp, Homo sapiens
aaagtatatatctca

SEQ ID NO: 1750710 - DNA, 15 bp, Homo sapiens
aagtatatatctcaa

SEQ ID NO: 1750711 - DNA, 15 bp, Homo sapiens
agtatatatctcaag

SEQ ID NO: 1750712 - DNA, 15 bp, Homo sapiens
gtatatatctcaagt

SEQ ID NO: 1750713 - DNA, 15 bp, Homo sapiens
tatatatctcaagtg

SEQ ID NO: 1750714 - DNA, 15 bp, Homo sapiens
atatatctcaagtga

SEQ ID NO: 1750715 - DNA, 15 bp, Homo sapiens
tatatctcaagtgac

SEQ ID NO: 1750716 - DNA, 15 bp, Homo sapiens
atatctcaagtgaca

SEQ ID NO: 1750717 - DNA, 15 bp, Homo sapiens
tatctcaagtgacag

SEQ ID NO: 1750718 - DNA, 15 bp, Homo sapiens
atctcaagtgacagt

SEQ ID NO: 1750719 - DNA, 15 bp, Homo sapiens
tctcaagtgacagtt

SEQ ID NO: 1750720 - DNA, 15 bp, Homo sapiens
ctcaagtgacagttt

SEQ ID NO: 1750721 - DNA, 15 bp, Homo sapiens
tcaagtgacagtttg

SEQ ID NO: 1750722 - DNA, 15 bp, Homo sapiens
caagtgacagtttgg

SEQ ID NO: 1750723 - DNA, 15 bp, Homo sapiens
aagtgacagtttggt

SEQ ID NO: 1750724 - DNA, 15 bp, Homo sapiens
agtgacagtttggtg

SEQ ID NO: 1750725 - DNA, 15 bp, Homo sapiens
gtgacagtttggtga

SEQ ID NO: 1750726 - DNA, 15 bp, Homo sapiens
tgacagtttggtgaa

SEQ ID NO: 1750727 - DNA, 15 bp, Homo sapiens
gacagtttggtgaat

SEQ ID NO: 1750728 - DNA, 15 bp, Homo sapiens
acagtttggtgaatt

SEQ ID NO: 1750729 - DNA, 15 bp, Homo sapiens
cagtttggtgaattt

SEQ ID NO: 1750730 - DNA, 15 bp, Homo sapiens
agtttggtgaatttg

SEQ ID NO: 1750731 - DNA, 15 bp, Homo sapiens
gtttggtgaatttgt

SEQ ID NO: 1750732 - DNA, 15 bp, Homo sapiens
tttggtgaatttgtc

SEQ ID NO: 1750733 - DNA, 15 bp, Homo sapiens
ttggtgaatttgtca

SEQ ID NO: 1750734 - DNA, 15 bp, Homo sapiens
tggtgaatttgtcac

SEQ ID NO: 1750735 - DNA, 15 bp, Homo sapiens
ggtgaatttgtcaca

SEQ ID NO: 1750736 - DNA, 15 bp, Homo sapiens
gtgaatttgtcacaa

SEQ ID NO: 1750737 - DNA, 15 bp, Homo sapiens
tgaatttgtcacaaa

SEQ ID NO: 1750738 - DNA, 15 bp, Homo sapiens
gaatttgtcacaaat

SEQ ID NO: 1750739 - DNA, 15 bp, Homo sapiens
aatttgtcacaaatt

SEQ ID NO: 1750740 - DNA, 15 bp, Homo sapiens
atttgtcacaaattg

SEQ ID NO: 1750741 - DNA, 15 bp, Homo sapiens
tttgtcacaaattga

SEQ ID NO: 1750742 - DNA, 15 bp, Homo sapiens
ttgtcacaaattgaa

SEQ ID NO: 1750743 - DNA, 15 bp, Homo sapiens
tgtcacaaattgaac

SEQ ID NO: 1750744 - DNA, 15 bp, Homo sapiens
gtcacaaattgaaca

SEQ ID NO: 1750745 - DNA, 15 bp, Homo sapiens
tcacaaattgaacac

SEQ ID NO: 1750746 - DNA, 15 bp, Homo sapiens
cacaaattgaacaca

SEQ ID NO: 1750747 - DNA, 15 bp, Homo sapiens
acaaattgaacacat

SEQ ID NO: 1750748 - DNA, 15 bp, Homo sapiens
caaattgaacacatc

SEQ ID NO: 1750749 - DNA, 15 bp, Homo sapiens
aaattgaacacatcc

SEQ ID NO: 1750750 - DNA, 15 bp, Homo sapiens
aattgaacacatccg

SEQ ID NO: 1750751 - DNA, 15 bp, Homo sapiens
attgaacacatccgt

SEQ ID NO: 1750752 - DNA, 15 bp, Homo sapiens
ttgaacacatccgtg

SEQ ID NO: 1750753 - DNA, 15 bp, Homo sapiens
tgaacacatccgtgt

SEQ ID NO: 1750754 - DNA, 15 bp, Homo sapiens
gaacacatccgtgta

SEQ ID NO: 1750755 - DNA, 15 bp, Homo sapiens
aacacatccgtgtaa

SEQ ID NO: 1750756 - DNA, 15 bp, Homo sapiens
acacatccgtgtaaa

SEQ ID NO: 1750757 - DNA, 15 bp, Homo sapiens
cacatccgtgtaaac

SEQ ID NO: 1750758 - DNA, 15 bp, Homo sapiens
acatccgtgtaaaca

SEQ ID NO: 1750759 - DNA, 15 bp, Homo sapiens
catccgtgtaaacaa

SEQ ID NO: 1750760 - DNA, 15 bp, Homo sapiens
atccgtgtaaacaac

SEQ ID NO: 1750761 - DNA, 15 bp, Homo sapiens
tccgtgtaaacaaca

SEQ ID NO: 1750762 - DNA, 15 bp, Homo sapiens
ccgtgtaaacaacac

SEQ ID NO: 1750763 - DNA, 15 bp, Homo sapiens
cgtgtaaacaacacc

SEQ ID NO: 1750764 - DNA, 15 bp, Homo sapiens
gtgtaaacaacaccc

SEQ ID NO: 1750765 - DNA, 15 bp, Homo sapiens
tgtaaacaacaccca

SEQ ID NO: 1750766 - DNA, 15 bp, Homo sapiens
gtaaacaacacccag

SEQ ID NO: 1750767 - DNA, 15 bp, Homo sapiens
taaacaacacccaga

SEQ ID NO: 1750768 - DNA, 15 bp, Homo sapiens
aaacaacacccagat

SEQ ID NO: 1750769 - DNA, 15 bp, Homo sapiens
aacaacacccagata

SEQ ID NO: 1750770 - DNA, 15 bp, Homo sapiens
acaacacccagataa

SEQ ID NO: 1750771 - DNA, 15 bp, Homo sapiens
caacacccagataaa

SEQ ID NO: 1750772 - DNA, 15 bp, Homo sapiens
aacacccagataaag

SEQ ID NO: 1750773 - DNA, 15 bp, Homo sapiens
acacccagataaagg

SEQ ID NO: 1750774 - DNA, 15 bp, Homo sapiens
cacccagataaaggc

SEQ ID NO: 1750775 - DNA, 15 bp, Homo sapiens
acccagataaaggcc

SEQ ID NO: 1750776 - DNA, 15 bp, Homo sapiens
cccagataaaggccc

SEQ ID NO: 1750777 - DNA, 15 bp, Homo sapiens
ccagataaaggccca

SEQ ID NO: 1750778 - DNA, 15 bp, Homo sapiens
cagataaaggcccag

SEQ ID NO: 1750779 - DNA, 15 bp, Homo sapiens
agataaaggcccaga

SEQ ID NO: 1750780 - DNA, 15 bp, Homo sapiens
gataaaggcccagag

SEQ ID NO: 1750781 - DNA, 15 bp, Homo sapiens
ataaaggcccagagc

SEQ ID NO: 1750782 - DNA, 15 bp, Homo sapiens
taaaggcccagagca

SEQ ID NO: 1750783 - DNA, 15 bp, Homo sapiens
aaaggcccagagcaa

SEQ ID NO: 1750784 - DNA, 15 bp, Homo sapiens
cccagagcaagcttt

SEQ ID NO: 1750785 - DNA, 15 bp, Homo sapiens
ccagagcaagctttc

SEQ ID NO: 1750786 - DNA, 15 bp, Homo sapiens
cagagcaagctttca

SEQ ID NO: 1750787 - DNA, 15 bp, Homo sapiens
agagcaagctttcat

SEQ ID NO: 1750788 - DNA, 15 bp, Homo sapiens
gagcaagctttcata

SEQ ID NO: 1750789 - DNA, 15 bp, Homo sapiens
agcaagctttcatag

SEQ ID NO: 1750790 - DNA, 15 bp, Homo sapiens
gcaagctttcatagt

SEQ ID NO: 1750791 - DNA, 15 bp, Homo sapiens
caagctttcatagtc

SEQ ID NO: 1750792 - DNA, 15 bp, Homo sapiens
aagctttcatagtct

SEQ ID NO: 1750793 - DNA, 15 bp, Homo sapiens
agctttcatagtctt

SEQ ID NO: 1750794 - DNA, 15 bp, Homo sapiens
gctttcatagtcttt

SEQ ID NO: 1750795 - DNA, 15 bp, Homo sapiens
ctttcatagtctttt

SEQ ID NO: 1750796 - DNA, 15 bp, Homo sapiens
tttcatagtcttttg

SEQ ID NO: 1750797 - DNA, 15 bp, Homo sapiens
ttcatagtcttttga

SEQ ID NO: 1750798 - DNA, 15 bp, Homo sapiens
tcatagtcttttgat

SEQ ID NO: 1750799 - DNA, 15 bp, Homo sapiens
catagtcttttgatt

SEQ ID NO: 1750800 - DNA, 15 bp, Homo sapiens
atagtcttttgattc

SEQ ID NO: 1750801 - DNA, 15 bp, Homo sapiens
tagtcttttgattct

SEQ ID NO: 1750802 - DNA, 15 bp, Homo sapiens
agtcttttgattctg

SEQ ID NO: 1750803 - DNA, 15 bp, Homo sapiens
gtcttttgattctgt

SEQ ID NO: 1750804 - DNA, 15 bp, Homo sapiens
tcttttgattctgtg

SEQ ID NO: 1750805 - DNA, 15 bp, Homo sapiens
cttttgattctgtgt

SEQ ID NO: 1750806 - DNA, 15 bp, Homo sapiens
ttttgattctgtgtc

SEQ ID NO: 1750807 - DNA, 15 bp, Homo sapiens
tttgattctgtgtca

SEQ ID NO: 1750808 - DNA, 15 bp, Homo sapiens
ttgattctgtgtcat

SEQ ID NO: 1750809 - DNA, 15 bp, Homo sapiens
gattctgtgtcataa

SEQ ID NO: 1750810 - DNA, 15 bp, Homo sapiens
attctgtgtcataat

SEQ ID NO: 1750811 - DNA, 15 bp, Homo sapiens
ttctgtgtcataata

SEQ ID NO: 1750812 - DNA, 15 bp, Homo sapiens
tctgtgtcataataa

SEQ ID NO: 1750813 - DNA, 15 bp, Homo sapiens
ctgtgtcataataaa

SEQ ID NO: 1750814 - DNA, 15 bp, Homo sapiens
tgtgtcataataaaa

SEQ ID NO: 1750815 - DNA, 15 bp, Homo sapiens
gtgtcataataaaaa

SEQ ID NO: 1750816 - DNA, 15 bp, Homo sapiens
tgtcataataaaaaa

SEQ ID NO: 1750817 - DNA, 15 bp, Homo sapiens
gtcataataaaaaat

SEQ ID NO: 1750818 - DNA, 15 bp, Homo sapiens
tcataataaaaaatt

SEQ ID NO: 1750819 - DNA, 15 bp, Homo sapiens
cataataaaaaattc

SEQ ID NO: 1750820 - DNA, 15 bp, Homo sapiens
ataataaaaaattct

SEQ ID NO: 1750821 - DNA, 15 bp, Homo sapiens
taataaaaaattctc

SEQ ID NO: 1750822 - DNA, 15 bp, Homo sapiens
aataaaaaattctcg

SEQ ID NO: 1750823 - DNA, 15 bp, Homo sapiens
ataaaaaattctcgt

SEQ ID NO: 1750824 - DNA, 15 bp, Homo sapiens
taaaaaattctcgtt

SEQ ID NO: 1750825 - DNA, 15 bp, Homo sapiens
aaaaaattctcgtta

SEQ ID NO: 1750826 - DNA, 15 bp, Homo sapiens
aaaaattctcgttaa

SEQ ID NO: 1750827 - DNA, 15 bp, Homo sapiens
aaaattctcgttaaa

SEQ ID NO: 1750828 - DNA, 15 bp, Homo sapiens
aaattctcgttaaaa

SEQ ID NO: 1750829 - DNA, 15 bp, Homo sapiens
aattctcgttaaaac

SEQ ID NO: 1750830 - DNA, 15 bp, Homo sapiens
attctcgttaaaact

SEQ ID NO: 1750831 - DNA, 15 bp, Homo sapiens
ttctcgttaaaactg

SEQ ID NO: 1750832 - DNA, 15 bp, Homo sapiens
tctcgttaaaactgt

SEQ ID NO: 1750833 - DNA, 15 bp, Homo sapiens
ctcgttaaaactgta

SEQ ID NO: 1750834 - DNA, 15 bp, Homo sapiens
tcgttaaaactgtag

SEQ ID NO: 1750835 - DNA, 15 bp, Homo sapiens
cgttaaaactgtaga

SEQ ID NO: 1750836 - DNA, 15 bp, Homo sapiens
gttaaaactgtagat

SEQ ID NO: 1750837 - DNA, 15 bp, Homo sapiens
ttaaaactgtagatt

SEQ ID NO: 1750838 - DNA, 15 bp, Homo sapiens
taaaactgtagattg

SEQ ID NO: 1750839 - DNA, 15 bp, Homo sapiens
aaaactgtagattga

SEQ ID NO: 1750840 - DNA, 15 bp, Homo sapiens
aaactgtagattgat

SEQ ID NO: 1750841 - DNA, 15 bp, Homo sapiens
aactgtagattgata

SEQ ID NO: 1750842 - DNA, 15 bp, Homo sapiens
actgtagattgatag

SEQ ID NO: 1750843 - DNA, 15 bp, Homo sapiens
ctgtagattgatagg

SEQ ID NO: 1750844 - DNA, 15 bp, Homo sapiens
tgtagattgatagga

SEQ ID NO: 1750845 - DNA, 15 bp, Homo sapiens
gtagattgataggaa

SEQ ID NO: 1750846 - DNA, 15 bp, Homo sapiens
tagattgataggaac

SEQ ID NO: 1750847 - DNA, 15 bp, Homo sapiens
agattgataggaaca

SEQ ID NO: 1750848 - DNA, 15 bp, Homo sapiens
gattgataggaacat

SEQ ID NO: 1750849 - DNA, 15 bp, Homo sapiens
attgataggaacata

SEQ ID NO: 1750850 - DNA, 15 bp, Homo sapiens
ttgataggaacatat

SEQ ID NO: 1750851 - DNA, 15 bp, Homo sapiens
tgataggaacatatt

SEQ ID NO: 1750852 - DNA, 15 bp, Homo sapiens
gataggaacatattc

SEQ ID NO: 1750853 - DNA, 15 bp, Homo sapiens
ataggaacatattca

SEQ ID NO: 1750854 - DNA, 15 bp, Homo sapiens
taggaacatattcac

SEQ ID NO: 1750855 - DNA, 15 bp, Homo sapiens
aggaacatattcaca

SEQ ID NO: 1750856 - DNA, 15 bp, Homo sapiens
ggaacatattcacac

SEQ ID NO: 1750857 - DNA, 15 bp, Homo sapiens
gaacatattcacaca

SEQ ID NO: 1750858 - DNA, 15 bp, Homo sapiens
aacatattcacacag

SEQ ID NO: 1750859 - DNA, 15 bp, Homo sapiens
acatattcacacaga

SEQ ID NO: 1750860 - DNA, 15 bp, Homo sapiens
catattcacacagag

SEQ ID NO: 1750861 - DNA, 15 bp, Homo sapiens
atattcacacagagt

SEQ ID NO: 1750862 - DNA, 15 bp, Homo sapiens
tattcacacagagtt

SEQ ID NO: 1750863 - DNA, 15 bp, Homo sapiens
attcacacagagttg

SEQ ID NO: 1750864 - DNA, 15 bp, Homo sapiens
ttcacacagagttgt

SEQ ID NO: 1750865 - DNA, 15 bp, Homo sapiens
tcacacagagttgtt

SEQ ID NO: 1750866 - DNA, 15 bp, Homo sapiens
cacacagagttgttg

SEQ ID NO: 1750867 - DNA, 15 bp, Homo sapiens
acacagagttgttga

SEQ ID NO: 1750868 - DNA, 15 bp, Homo sapiens
cacagagttgttgac

SEQ ID NO: 1750869 - DNA, 15 bp, Homo sapiens
acagagttgttgact

SEQ ID NO: 1750870 - DNA, 15 bp, Homo sapiens
cagagttgttgactg

SEQ ID NO: 1750871 - DNA, 15 bp, Homo sapiens
agagttgttgactga

SEQ ID NO: 1750872 - DNA, 15 bp, Homo sapiens
gagttgttgactgag

SEQ ID NO: 1750873 - DNA, 15 bp, Homo sapiens
agttgttgactgagg

SEQ ID NO: 1750874 - DNA, 15 bp, Homo sapiens
gttgttgactgaggg

SEQ ID NO: 1750875 - DNA, 15 bp, Homo sapiens
ttgttgactgaggga

SEQ ID NO: 1750876 - DNA, 15 bp, Homo sapiens
tgttgactgagggaa

SEQ ID NO: 1750877 - DNA, 15 bp, Homo sapiens
gttgactgagggaaa

SEQ ID NO: 1750878 - DNA, 15 bp, Homo sapiens
ttgactgagggaaat

SEQ ID NO: 1750879 - DNA, 15 bp, Homo sapiens
tgactgagggaaatt

SEQ ID NO: 1750880 - DNA, 15 bp, Homo sapiens
gactgagggaaattt

SEQ ID NO: 1750881 - DNA, 15 bp, Homo sapiens
actgagggaaatttc

SEQ ID NO: 1750882 - DNA, 15 bp, Homo sapiens
ctgagggaaatttca

SEQ ID NO: 1750883 - DNA, 15 bp, Homo sapiens
tgagggaaatttcaa

SEQ ID NO: 1750884 - DNA, 15 bp, Homo sapiens
gagggaaatttcaaa

SEQ ID NO: 1750885 - DNA, 15 bp, Homo sapiens
agggaaatttcaaat

SEQ ID NO: 1750886 - DNA, 15 bp, Homo sapiens
gggaaatttcaaatg

SEQ ID NO: 1750887 - DNA, 15 bp, Homo sapiens
ggaaatttcaaatga

SEQ ID NO: 1750888 - DNA, 15 bp, Homo sapiens
gaaatttcaaatgag

SEQ ID NO: 1750889 - DNA, 15 bp, Homo sapiens
aaatttcaaatgagg

SEQ ID NO: 1750890 - DNA, 15 bp, Homo sapiens
aatttcaaatgaggt

SEQ ID NO: 1750891 - DNA, 15 bp, Homo sapiens
atttcaaatgaggtg

SEQ ID NO: 1750892 - DNA, 15 bp, Homo sapiens
tttcaaatgaggtgc

SEQ ID NO: 1750893 - DNA, 15 bp, Homo sapiens
ttcaaatgaggtgct

SEQ ID NO: 1750894 - DNA, 15 bp, Homo sapiens
tcaaatgaggtgctg

SEQ ID NO: 1750895 - DNA, 15 bp, Homo sapiens
caaatgaggtgctgc

SEQ ID NO: 1750896 - DNA, 15 bp, Homo sapiens
aaatgaggtgctgct

SEQ ID NO: 1750897 - DNA, 15 bp, Homo sapiens
aatgaggtgctgctt

SEQ ID NO: 1750898 - DNA, 15 bp, Homo sapiens
atgaggtgctgctta

SEQ ID NO: 1750899 - DNA, 15 bp, Homo sapiens
tgaggtgctgcttac

SEQ ID NO: 1750900 - DNA, 15 bp, Homo sapiens
gaggtgctgcttact

SEQ ID NO: 1750901 - DNA, 15 bp, Homo sapiens
aggtgctgcttactt

SEQ ID NO: 1750902 - DNA, 15 bp, Homo sapiens
ggtgctgcttacttc

SEQ ID NO: 1750903 - DNA, 15 bp, Homo sapiens
gtgctgcttacttct

SEQ ID NO: 1750904 - DNA, 15 bp, Homo sapiens
tgctgcttacttctc

SEQ ID NO: 1750905 - DNA, 15 bp, Homo sapiens
gctgcttacttctct

SEQ ID NO: 1750906 - DNA, 15 bp, Homo sapiens
ctgcttacttctctc

SEQ ID NO: 1750907 - DNA, 15 bp, Homo sapiens
tgcttacttctctcc

SEQ ID NO: 1750908 - DNA, 15 bp, Homo sapiens
gcttacttctctcct

SEQ ID NO: 1750909 - DNA, 15 bp, Homo sapiens
cttacttctctcctg

SEQ ID NO: 1750910 - DNA, 15 bp, Homo sapiens
ttacttctctcctgc

SEQ ID NO: 1750911 - DNA, 15 bp, Homo sapiens
tacttctctcctgcc

SEQ ID NO: 1750912 - DNA, 15 bp, Homo sapiens
acttctctcctgcca

SEQ ID NO: 1750913 - DNA, 15 bp, Homo sapiens
cttctctcctgccaa

SEQ ID NO: 1750914 - DNA, 15 bp, Homo sapiens
ttctctcctgccaat

SEQ ID NO: 1750915 - DNA, 15 bp, Homo sapiens
tctctcctgccaata

SEQ ID NO: 1750916 - DNA, 15 bp, Homo sapiens
ctctcctgccaataa

SEQ ID NO: 1750917 - DNA, 15 bp, Homo sapiens
tctcctgccaataat

SEQ ID NO: 1750918 - DNA, 15 bp, Homo sapiens
ctcctgccaataatt

SEQ ID NO: 1750919 - DNA, 15 bp, Homo sapiens
tcctgccaataattt

SEQ ID NO: 1750920 - DNA, 15 bp, Homo sapiens
cctgccaataattta

SEQ ID NO: 1750921 - DNA, 15 bp, Homo sapiens
ctgccaataatttaa

SEQ ID NO: 1750922 - DNA, 15 bp, Homo sapiens
tgccaataatttaat

SEQ ID NO: 1750923 - DNA, 15 bp, Homo sapiens
gccaataatttaatg

SEQ ID NO: 1750924 - DNA, 15 bp, Homo sapiens
ccaataatttaatga

SEQ ID NO: 1750925 - DNA, 15 bp, Homo sapiens
caataatttaatgaa

SEQ ID NO: 1750926 - DNA, 15 bp, Homo sapiens
aataatttaatgaaa

SEQ ID NO: 1750927 - DNA, 15 bp, Homo sapiens
ataatttaatgaaag

SEQ ID NO: 1750928 - DNA, 15 bp, Homo sapiens
taatttaatgaaaga

SEQ ID NO: 1750929 - DNA, 15 bp, Homo sapiens
aatttaatgaaagaa

SEQ ID NO: 1750930 - DNA, 15 bp, Homo sapiens
atttaatgaaagaaa

SEQ ID NO: 1750931 - DNA, 15 bp, Homo sapiens
tttaatgaaagaaag

SEQ ID NO: 1750932 - DNA, 15 bp, Homo sapiens
ttaatgaaagaaaga

SEQ ID NO: 1750933 - DNA, 15 bp, Homo sapiens
taatgaaagaaagaa

SEQ ID NO: 1750934 - DNA, 15 bp, Homo sapiens
aatgaaagaaagaac

SEQ ID NO: 1750935 - DNA, 15 bp, Homo sapiens
atgaaagaaagaaca

SEQ ID NO: 1750936 - DNA, 15 bp, Homo sapiens
tgaaagaaagaacat

SEQ ID NO: 1750937 - DNA, 15 bp, Homo sapiens
gaaagaaagaacatc

SEQ ID NO: 1750938 - DNA, 15 bp, Homo sapiens
aaagaaagaacatca

SEQ ID NO: 1750939 - DNA, 15 bp, Homo sapiens
aagaaagaacatcat

SEQ ID NO: 1750940 - DNA, 15 bp, Homo sapiens
agaaagaacatcatc

SEQ ID NO: 1750941 - DNA, 15 bp, Homo sapiens
gaaagaacatcatct

SEQ ID NO: 1750942 - DNA, 15 bp, Homo sapiens
aaagaacatcatctt

SEQ ID NO: 1750943 - DNA, 15 bp, Homo sapiens
aagaacatcatctta

SEQ ID NO: 1750944 - DNA, 15 bp, Homo sapiens
agaacatcatcttat

SEQ ID NO: 1750945 - DNA, 15 bp, Homo sapiens
gaacatcatcttatt

SEQ ID NO: 1750946 - DNA, 15 bp, Homo sapiens
aacatcatcttattt

SEQ ID NO: 1750947 - DNA, 15 bp, Homo sapiens
acatcatcttatttt

SEQ ID NO: 1750948 - DNA, 15 bp, Homo sapiens
catcatcttattttt

SEQ ID NO: 1750949 - DNA, 15 bp, Homo sapiens
atcatcttattttta

SEQ ID NO: 1750950 - DNA, 15 bp, Homo sapiens
tcatcttatttttaa

SEQ ID NO: 1750951 - DNA, 15 bp, Homo sapiens
catcttatttttaat

SEQ ID NO: 1750952 - DNA, 15 bp, Homo sapiens
atcttatttttaatg

SEQ ID NO: 1750953 - DNA, 15 bp, Homo sapiens
tcttatttttaatgg

SEQ ID NO: 1750954 - DNA, 15 bp, Homo sapiens
cttatttttaatggt

SEQ ID NO: 1750955 - DNA, 15 bp, Homo sapiens
ttatttttaatggtt

SEQ ID NO: 1750956 - DNA, 15 bp, Homo sapiens
tatttttaatggttg

SEQ ID NO: 1750957 - DNA, 15 bp, Homo sapiens
atttttaatggttgt

SEQ ID NO: 1750958 - DNA, 15 bp, Homo sapiens
tttttaatggttgtg

SEQ ID NO: 1750959 - DNA, 15 bp, Homo sapiens
ttttaatggttgtgt

SEQ ID NO: 1750960 - DNA, 15 bp, Homo sapiens
tttaatggttgtgtg

SEQ ID NO: 1750961 - DNA, 15 bp, Homo sapiens
ttaatggttgtgtgg

SEQ ID NO: 1750962 - DNA, 15 bp, Homo sapiens
taatggttgtgtggg

SEQ ID NO: 1750963 - DNA, 15 bp, Homo sapiens
aatggttgtgtgggg

SEQ ID NO: 1750964 - DNA, 15 bp, Homo sapiens
atggttgtgtgggga

SEQ ID NO: 1750965 - DNA, 15 bp, Homo sapiens
tggttgtgtggggaa

SEQ ID NO: 1750966 - DNA, 15 bp, Homo sapiens
ggttgtgtggggaac

SEQ ID NO: 1750967 - DNA, 15 bp, Homo sapiens
gttgtgtggggaact

SEQ ID NO: 1750968 - DNA, 15 bp, Homo sapiens
ttgtgtggggaactg

SEQ ID NO: 1750969 - DNA, 15 bp, Homo sapiens
tgtgtggggaactgg

SEQ ID NO: 1750970 - DNA, 15 bp, Homo sapiens
gtgtggggaactggg

SEQ ID NO: 1750971 - DNA, 15 bp, Homo sapiens
tgtggggaactgggt

SEQ ID NO: 1750972 - DNA, 15 bp, Homo sapiens
gtggggaactgggtt

SEQ ID NO: 1750973 - DNA, 15 bp, Homo sapiens
tggggaactgggttc

SEQ ID NO: 1750974 - DNA, 15 bp, Homo sapiens
ggggaactgggttca

SEQ ID NO: 1750975 - DNA, 15 bp, Homo sapiens
gggaactgggttcag

SEQ ID NO: 1750976 - DNA, 15 bp, Homo sapiens
ggaactgggttcagc

SEQ ID NO: 1750977 - DNA, 15 bp, Homo sapiens
gaactgggttcagca

SEQ ID NO: 1750978 - DNA, 15 bp, Homo sapiens
aactgggttcagcat

SEQ ID NO: 1750979 - DNA, 15 bp, Homo sapiens
actgggttcagcatt

SEQ ID NO: 1750980 - DNA, 15 bp, Homo sapiens
ctgggttcagcattt

SEQ ID NO: 1750981 - DNA, 15 bp, Homo sapiens
tgggttcagcatttt

SEQ ID NO: 1750982 - DNA, 15 bp, Homo sapiens
gggttcagcattttt

SEQ ID NO: 1750983 - DNA, 15 bp, Homo sapiens
ggttcagcatttttg

SEQ ID NO: 1750984 - DNA, 15 bp, Homo sapiens
gttcagcatttttgc

SEQ ID NO: 1750985 - DNA, 15 bp, Homo sapiens
ttcagcatttttgct

SEQ ID NO: 1750986 - DNA, 15 bp, Homo sapiens
tcagcatttttgctt

SEQ ID NO: 1750987 - DNA, 15 bp, Homo sapiens
cagcatttttgcttg

SEQ ID NO: 1750988 - DNA, 15 bp, Homo sapiens
agcatttttgcttga

SEQ ID NO: 1750989 - DNA, 15 bp, Homo sapiens
gcatttttgcttgac

SEQ ID NO: 1750990 - DNA, 15 bp, Homo sapiens
catttttgcttgaca

SEQ ID NO: 1750991 - DNA, 15 bp, Homo sapiens
atttttgcttgacag

SEQ ID NO: 1750992 - DNA, 15 bp, Homo sapiens
tttttgcttgacagc

SEQ ID NO: 1750993 - DNA, 15 bp, Homo sapiens
ttttgcttgacagcc

SEQ ID NO: 1750994 - DNA, 15 bp, Homo sapiens
tttgcttgacagcct

SEQ ID NO: 1750995 - DNA, 15 bp, Homo sapiens
ttgcttgacagcctt

SEQ ID NO: 1750996 - DNA, 15 bp, Homo sapiens
tgcttgacagccttg

SEQ ID NO: 1750997 - DNA, 15 bp, Homo sapiens
gcttgacagccttga

SEQ ID NO: 1750998 - DNA, 15 bp, Homo sapiens
cttgacagccttgag

SEQ ID NO: 1750999 - DNA, 15 bp, Homo sapiens
ttgacagccttgaga

SEQ ID NO: 1751000 - DNA, 15 bp, Homo sapiens
tgacagccttgagat

SEQ ID NO: 1751001 - DNA, 15 bp, Homo sapiens
gacagccttgagata

SEQ ID NO: 1751002 - DNA, 15 bp, Homo sapiens
acagccttgagataa

SEQ ID NO: 1751003 - DNA, 15 bp, Homo sapiens
cagccttgagataaa

SEQ ID NO: 1751004 - DNA, 15 bp, Homo sapiens
agccttgagataaaa

SEQ ID NO: 1751005 - DNA, 15 bp, Homo sapiens
gccttgagataaaat

SEQ ID NO: 1751006 - DNA, 15 bp, Homo sapiens
ccttgagataaaata

SEQ ID NO: 1751007 - DNA, 15 bp, Homo sapiens
cttgagataaaataa

SEQ ID NO: 1751008 - DNA, 15 bp, Homo sapiens
ttgagataaaataaa

SEQ ID NO: 1751009 - DNA, 15 bp, Homo sapiens
tgagataaaataaat

SEQ ID NO: 1751010 - DNA, 15 bp, Homo sapiens
gagataaaataaatc

SEQ ID NO: 1751011 - DNA, 15 bp, Homo sapiens
agataaaataaatcc

SEQ ID NO: 1751012 - DNA, 15 bp, Homo sapiens
gataaaataaatcca

SEQ ID NO: 1751013 - DNA, 15 bp, Homo sapiens
ataaaataaatccat

SEQ ID NO: 1751014 - DNA, 15 bp, Homo sapiens
taaaataaatccata

SEQ ID NO: 1751015 - DNA, 15 bp, Homo sapiens
aaaataaatccataa

SEQ ID NO: 1751016 - DNA, 15 bp, Homo sapiens
aaataaatccataag

SEQ ID NO: 1751017 - DNA, 15 bp, Homo sapiens
aataaatccataagg

SEQ ID NO: 1751018 - DNA, 15 bp, Homo sapiens
ataaatccataagga

SEQ ID NO: 1751019 - DNA, 15 bp, Homo sapiens
taaatccataaggaa

SEQ ID NO: 1751020 - DNA, 15 bp, Homo sapiens
aaatccataaggaaa

SEQ ID NO: 1751021 - DNA, 15 bp, Homo sapiens
aatccataaggaaaa

SEQ ID NO: 1751022 - DNA, 15 bp, Homo sapiens
atccataaggaaaaa

SEQ ID NO: 1751023 - DNA, 15 bp, Homo sapiens
tccataaggaaaaag

SEQ ID NO: 1751024 - DNA, 15 bp, Homo sapiens
ccataaggaaaaagc

SEQ ID NO: 1751025 - DNA, 15 bp, Homo sapiens
cataaggaaaaagcc

SEQ ID NO: 1751026 - DNA, 15 bp, Homo sapiens
ataaggaaaaagccc

SEQ ID NO: 1751027 - DNA, 15 bp, Homo sapiens
taaggaaaaagccca

SEQ ID NO: 1751028 - DNA, 15 bp, Homo sapiens
aaggaaaaagcccac

SEQ ID NO: 1751029 - DNA, 15 bp, Homo sapiens
aggaaaaagcccact

SEQ ID NO: 1751030 - DNA, 15 bp, Homo sapiens
ggaaaaagcccactt

SEQ ID NO: 1751031 - DNA, 15 bp, Homo sapiens
gaaaaagcccacttc

SEQ ID NO: 1751032 - DNA, 15 bp, Homo sapiens
aaaaagcccacttct

SEQ ID NO: 1751033 - DNA, 15 bp, Homo sapiens
aaaagcccacttctg

SEQ ID NO: 1751034 - DNA, 15 bp, Homo sapiens
aaagcccacttctgt

SEQ ID NO: 1751035 - DNA, 15 bp, Homo sapiens
aagcccacttctgtt

SEQ ID NO: 1751036 - DNA, 15 bp, Homo sapiens
agcccacttctgttt

SEQ ID NO: 1751037 - DNA, 15 bp, Homo sapiens
gcccacttctgtttc

SEQ ID NO: 1751038 - DNA, 15 bp, Homo sapiens
cccacttctgtttct

SEQ ID NO: 1751039 - DNA, 15 bp, Homo sapiens
ccacttctgtttctt

SEQ ID NO: 1751040 - DNA, 15 bp, Homo sapiens
cacttctgtttcttt

SEQ ID NO: 1751041 - DNA, 15 bp, Homo sapiens
acttctgtttctttt

SEQ ID NO: 1751042 - DNA, 15 bp, Homo sapiens
cttctgtttcttttc

SEQ ID NO: 1751043 - DNA, 15 bp, Homo sapiens
ttctgtttcttttca

SEQ ID NO: 1751044 - DNA, 15 bp, Homo sapiens
tctgtttcttttcat

SEQ ID NO: 1751045 - DNA, 15 bp, Homo sapiens
ctgtttcttttcatc

SEQ ID NO: 1751046 - DNA, 15 bp, Homo sapiens
tgtttcttttcatcc

SEQ ID NO: 1751047 - DNA, 15 bp, Homo sapiens
gtttcttttcatccc

SEQ ID NO: 1751048 - DNA, 15 bp, Homo sapiens
tttcttttcatccca

SEQ ID NO: 1751049 - DNA, 15 bp, Homo sapiens
tcttttcatcccaga

SEQ ID NO: 1751050 - DNA, 15 bp, Homo sapiens
cttttcatcccagag

SEQ ID NO: 1751051 - DNA, 15 bp, Homo sapiens
ttttcatcccagaga

SEQ ID NO: 1751052 - DNA, 15 bp, Homo sapiens
tttcatcccagagag

SEQ ID NO: 1751053 - DNA, 15 bp, Homo sapiens
ttcatcccagagaga

SEQ ID NO: 1751054 - DNA, 15 bp, Homo sapiens
tcatcccagagagat

SEQ ID NO: 1751055 - DNA, 15 bp, Homo sapiens
catcccagagagatt

SEQ ID NO: 1751056 - DNA, 15 bp, Homo sapiens
atcccagagagatta

SEQ ID NO: 1751057 - DNA, 15 bp, Homo sapiens
tcccagagagattaa

SEQ ID NO: 1751058 - DNA, 15 bp, Homo sapiens
cccagagagattaat

SEQ ID NO: 1751059 - DNA, 15 bp, Homo sapiens
ccagagagattaatg

SEQ ID NO: 1751060 - DNA, 15 bp, Homo sapiens
cagagagattaatgg

SEQ ID NO: 1751061 - DNA, 15 bp, Homo sapiens
agagagattaatggg

SEQ ID NO: 1751062 - DNA, 15 bp, Homo sapiens
gagagattaatgggc

SEQ ID NO: 1751063 - DNA, 15 bp, Homo sapiens
agagattaatgggca

SEQ ID NO: 1751064 - DNA, 15 bp, Homo sapiens
gagattaatgggcaa

SEQ ID NO: 1751065 - DNA, 15 bp, Homo sapiens
agattaatgggcaat

SEQ ID NO: 1751066 - DNA, 15 bp, Homo sapiens
gattaatgggcaata

SEQ ID NO: 1751067 - DNA, 15 bp, Homo sapiens
attaatgggcaatat

SEQ ID NO: 1751068 - DNA, 15 bp, Homo sapiens
ttaatgggcaatata

SEQ ID NO: 1751069 - DNA, 15 bp, Homo sapiens
taatgggcaatatat

SEQ ID NO: 1751070 - DNA, 15 bp, Homo sapiens
aatgggcaatatatg

SEQ ID NO: 1751071 - DNA, 15 bp, Homo sapiens
atgggcaatatatga

SEQ ID NO: 1751072 - DNA, 15 bp, Homo sapiens
tgggcaatatatgag

SEQ ID NO: 1751073 - DNA, 15 bp, Homo sapiens
gggcaatatatgagt

SEQ ID NO: 1751074 - DNA, 15 bp, Homo sapiens
ggcaatatatgagtg

SEQ ID NO: 1751075 - DNA, 15 bp, Homo sapiens
gcaatatatgagtgt

SEQ ID NO: 1751076 - DNA, 15 bp, Homo sapiens
caatatatgagtgta

SEQ ID NO: 1751077 - DNA, 15 bp, Homo sapiens
aatatatgagtgtaa

SEQ ID NO: 1751078 - DNA, 15 bp, Homo sapiens
atatatgagtgtaag

SEQ ID NO: 1751079 - DNA, 15 bp, Homo sapiens
tatatgagtgtaaga

SEQ ID NO: 1751080 - DNA, 15 bp, Homo sapiens
atatgagtgtaagat

SEQ ID NO: 1751081 - DNA, 15 bp, Homo sapiens
tatgagtgtaagata

SEQ ID NO: 1751082 - DNA, 15 bp, Homo sapiens
atgagtgtaagatac

SEQ ID NO: 1751083 - DNA, 15 bp, Homo sapiens
tgagtgtaagatact

SEQ ID NO: 1751084 - DNA, 15 bp, Homo sapiens
gagtgtaagatactg

SEQ ID NO: 1751085 - DNA, 15 bp, Homo sapiens
agtgtaagatactgg

SEQ ID NO: 1751086 - DNA, 15 bp, Homo sapiens
gtgtaagatactgga

SEQ ID NO: 1751087 - DNA, 15 bp, Homo sapiens
tgtaagatactggaa

SEQ ID NO: 1751088 - DNA, 15 bp, Homo sapiens
gtaagatactggaaa

SEQ ID NO: 1751089 - DNA, 15 bp, Homo sapiens
taagatactggaaaa

SEQ ID NO: 1751090 - DNA, 15 bp, Homo sapiens
aagatactggaaaag

SEQ ID NO: 1751091 - DNA, 15 bp, Homo sapiens
agatactggaaaagt

SEQ ID NO: 1751092 - DNA, 15 bp, Homo sapiens
gatactggaaaagtc

SEQ ID NO: 1751093 - DNA, 15 bp, Homo sapiens
atactggaaaagtct

SEQ ID NO: 1751094 - DNA, 15 bp, Homo sapiens
tactggaaaagtctg

SEQ ID NO: 1751095 - DNA, 15 bp, Homo sapiens
actggaaaagtctgt

SEQ ID NO: 1751096 - DNA, 15 bp, Homo sapiens
ctggaaaagtctgtt

SEQ ID NO: 1751097 - DNA, 15 bp, Homo sapiens
tggaaaagtctgttg

SEQ ID NO: 1751098 - DNA, 15 bp, Homo sapiens
gaaaagtctgttgag

SEQ ID NO: 1751099 - DNA, 15 bp, Homo sapiens
aaaagtctgttgaga

SEQ ID NO: 1751100 - DNA, 15 bp, Homo sapiens
aaagtctgttgagaa

SEQ ID NO: 1751101 - DNA, 15 bp, Homo sapiens
aagtctgttgagaaa

SEQ ID NO: 1751102 - DNA, 15 bp, Homo sapiens
agtctgttgagaaac

SEQ ID NO: 1751103 - DNA, 15 bp, Homo sapiens
gtctgttgagaaacc

SEQ ID NO: 1751104 - DNA, 15 bp, Homo sapiens
tctgttgagaaacct

SEQ ID NO: 1751105 - DNA, 15 bp, Homo sapiens
ctgttgagaaaccta

SEQ ID NO: 1751106 - DNA, 15 bp, Homo sapiens
tgttgagaaacctag

SEQ ID NO: 1751107 - DNA, 15 bp, Homo sapiens
gttgagaaacctagt

SEQ ID NO: 1751108 - DNA, 15 bp, Homo sapiens
ttgagaaacctagtg

SEQ ID NO: 1751109 - DNA, 15 bp, Homo sapiens
tgagaaacctagtga

SEQ ID NO: 1751110 - DNA, 15 bp, Homo sapiens
gagaaacctagtgaa

SEQ ID NO: 1751111 - DNA, 15 bp, Homo sapiens
agaaacctagtgaaa

SEQ ID NO: 1751112 - DNA, 15 bp, Homo sapiens
gaaacctagtgaaat

SEQ ID NO: 1751113 - DNA, 15 bp, Homo sapiens
aaacctagtgaaatc

SEQ ID NO: 1751114 - DNA, 15 bp, Homo sapiens
aacctagtgaaatct

SEQ ID NO: 1751115 - DNA, 15 bp, Homo sapiens
acctagtgaaatctc

SEQ ID NO: 1751116 - DNA, 15 bp, Homo sapiens
cctagtgaaatctca

SEQ ID NO: 1751117 - DNA, 15 bp, Homo sapiens
ctagtgaaatctcat

SEQ ID NO: 1751118 - DNA, 15 bp, Homo sapiens
tagtgaaatctcatt

SEQ ID NO: 1751119 - DNA, 15 bp, Homo sapiens
agtgaaatctcattc

SEQ ID NO: 1751120 - DNA, 15 bp, Homo sapiens
gtgaaatctcattct

SEQ ID NO: 1751121 - DNA, 15 bp, Homo sapiens
tgaaatctcattctc

SEQ ID NO: 1751122 - DNA, 15 bp, Homo sapiens
gaaatctcattctct

SEQ ID NO: 1751123 - DNA, 15 bp, Homo sapiens
aaatctcattctctg

SEQ ID NO: 1751124 - DNA, 15 bp, Homo sapiens
aatctcattctctga

SEQ ID NO: 1751125 - DNA, 15 bp, Homo sapiens
atctcattctctgaa

SEQ ID NO: 1751126 - DNA, 15 bp, Homo sapiens
tctcattctctgaaa

SEQ ID NO: 1751127 - DNA, 15 bp, Homo sapiens
ctcattctctgaaaa

SEQ ID NO: 1751128 - DNA, 15 bp, Homo sapiens
tcattctctgaaaag

SEQ ID NO: 1751129 - DNA, 15 bp, Homo sapiens
cattctctgaaaagt

SEQ ID NO: 1751130 - DNA, 15 bp, Homo sapiens
attctctgaaaagtt

SEQ ID NO: 1751131 - DNA, 15 bp, Homo sapiens
ttctctgaaaagttg

SEQ ID NO: 1751132 - DNA, 15 bp, Homo sapiens
tctctgaaaagttgg

SEQ ID NO: 1751133 - DNA, 15 bp, Homo sapiens
ctctgaaaagttggg

SEQ ID NO: 1751134 - DNA, 15 bp, Homo sapiens
tctgaaaagttgggg

SEQ ID NO: 1751135 - DNA, 15 bp, Homo sapiens
ctgaaaagttggggg

SEQ ID NO: 1751136 - DNA, 15 bp, Homo sapiens
tgaaaagttggggga

SEQ ID NO: 1751137 - DNA, 15 bp, Homo sapiens
gaaaagttgggggat

SEQ ID NO: 1751138 - DNA, 15 bp, Homo sapiens
aaaagttgggggatt

SEQ ID NO: 1751139 - DNA, 15 bp, Homo sapiens
aaagttgggggatta

SEQ ID NO: 1751140 - DNA, 15 bp, Homo sapiens
aagttgggggattac

SEQ ID NO: 1751141 - DNA, 15 bp, Homo sapiens
agttgggggattaca

SEQ ID NO: 1751142 - DNA, 15 bp, Homo sapiens
gttgggggattacag

SEQ ID NO: 1751143 - DNA, 15 bp, Homo sapiens
ttgggggattacagg

SEQ ID NO: 1751144 - DNA, 15 bp, Homo sapiens
tgggggattacaggt

SEQ ID NO: 1751145 - DNA, 15 bp, Homo sapiens
gggggattacaggtg

SEQ ID NO: 1751146 - DNA, 15 bp, Homo sapiens
ggggattacaggtgc

SEQ ID NO: 1751147 - DNA, 15 bp, Homo sapiens
ggattacaggtgcta

SEQ ID NO: 1751148 - DNA, 15 bp, Homo sapiens
gattacaggtgctat

SEQ ID NO: 1751149 - DNA, 15 bp, Homo sapiens
attacaggtgctatc

SEQ ID NO: 1751150 - DNA, 15 bp, Homo sapiens
ttacaggtgctatcg

SEQ ID NO: 1751151 - DNA, 15 bp, Homo sapiens
tacaggtgctatcga

SEQ ID NO: 1751152 - DNA, 15 bp, Homo sapiens
acaggtgctatcgaa

SEQ ID NO: 1751153 - DNA, 15 bp, Homo sapiens
caggtgctatcgaat

SEQ ID NO: 1751154 - DNA, 15 bp, Homo sapiens
aggtgctatcgaatg

SEQ ID NO: 1751155 - DNA, 15 bp, Homo sapiens
ggtgctatcgaatgc

SEQ ID NO: 1751156 - DNA, 15 bp, Homo sapiens
gtgctatcgaatgca

SEQ ID NO: 1751157 - DNA, 15 bp, Homo sapiens
tgctatcgaatgcat

SEQ ID NO: 1751158 - DNA, 15 bp, Homo sapiens
gctatcgaatgcatc

SEQ ID NO: 1751159 - DNA, 15 bp, Homo sapiens
ctatcgaatgcatca

SEQ ID NO: 1751160 - DNA, 15 bp, Homo sapiens
tatcgaatgcatcat

SEQ ID NO: 1751161 - DNA, 15 bp, Homo sapiens
atcgaatgcatcata

SEQ ID NO: 1751162 - DNA, 15 bp, Homo sapiens
tcgaatgcatcatac

SEQ ID NO: 1751163 - DNA, 15 bp, Homo sapiens
cgaatgcatcatacc

SEQ ID NO: 1751164 - DNA, 15 bp, Homo sapiens
gaatgcatcatacct

SEQ ID NO: 1751165 - DNA, 15 bp, Homo sapiens
aatgcatcataccta

SEQ ID NO: 1751166 - DNA, 15 bp, Homo sapiens
atgcatcatacctaa

SEQ ID NO: 1751167 - DNA, 15 bp, Homo sapiens
tgcatcatacctaag

SEQ ID NO: 1751168 - DNA, 15 bp, Homo sapiens
gcatcatacctaagg

SEQ ID NO: 1751169 - DNA, 15 bp, Homo sapiens
catcatacctaaggg

SEQ ID NO: 1751170 - DNA, 15 bp, Homo sapiens
atcatacctaagggt

SEQ ID NO: 1751171 - DNA, 15 bp, Homo sapiens
tcatacctaagggtt

SEQ ID NO: 1751172 - DNA, 15 bp, Homo sapiens
catacctaagggtta

SEQ ID NO: 1751173 - DNA, 15 bp, Homo sapiens
atacctaagggttag

SEQ ID NO: 1751174 - DNA, 15 bp, Homo sapiens
tacctaagggttaga

SEQ ID NO: 1751175 - DNA, 15 bp, Homo sapiens
acctaagggttagat

SEQ ID NO: 1751176 - DNA, 15 bp, Homo sapiens
cctaagggttagatg

SEQ ID NO: 1751177 - DNA, 15 bp, Homo sapiens
ctaagggttagatga

SEQ ID NO: 1751178 - DNA, 15 bp, Homo sapiens
taagggttagatgaa

SEQ ID NO: 1751179 - DNA, 15 bp, Homo sapiens
aagggttagatgaaa

SEQ ID NO: 1751180 - DNA, 15 bp, Homo sapiens
agggttagatgaaat

SEQ ID NO: 1751181 - DNA, 15 bp, Homo sapiens
gggttagatgaaatg

SEQ ID NO: 1751182 - DNA, 15 bp, Homo sapiens
ggttagatgaaatga

SEQ ID NO: 1751183 - DNA, 15 bp, Homo sapiens
gttagatgaaatgac

SEQ ID NO: 1751184 - DNA, 15 bp, Homo sapiens
ttagatgaaatgact

SEQ ID NO: 1751185 - DNA, 15 bp, Homo sapiens
tagatgaaatgactt

SEQ ID NO: 1751186 - DNA, 15 bp, Homo sapiens
agatgaaatgacttc

SEQ ID NO: 1751187 - DNA, 15 bp, Homo sapiens
gatgaaatgacttcc

SEQ ID NO: 1751188 - DNA, 15 bp, Homo sapiens
atgaaatgacttcca

SEQ ID NO: 1751189 - DNA, 15 bp, Homo sapiens
tgaaatgacttccaa

SEQ ID NO: 1751190 - DNA, 15 bp, Homo sapiens
gaaatgacttccaag

SEQ ID NO: 1751191 - DNA, 15 bp, Homo sapiens
aaatgacttccaaga

SEQ ID NO: 1751192 - DNA, 15 bp, Homo sapiens
aatgacttccaagag

SEQ ID NO: 1751193 - DNA, 15 bp, Homo sapiens
atgacttccaagagt

SEQ ID NO: 1751194 - DNA, 15 bp, Homo sapiens
tgacttccaagagtt

SEQ ID NO: 1751195 - DNA, 15 bp, Homo sapiens
gacttccaagagttt

SEQ ID NO: 1751196 - DNA, 15 bp, Homo sapiens
acttccaagagtttg

SEQ ID NO: 1751197 - DNA, 15 bp, Homo sapiens
cttccaagagtttgg

SEQ ID NO: 1751198 - DNA, 15 bp, Homo sapiens
ttccaagagtttggc

SEQ ID NO: 1751199 - DNA, 15 bp, Homo sapiens
tccaagagtttggcc

SEQ ID NO: 1751200 - DNA, 15 bp, Homo sapiens
ccaagagtttggccc

SEQ ID NO: 1751201 - DNA, 15 bp, Homo sapiens
caagagtttggccct

SEQ ID NO: 1751202 - DNA, 15 bp, Homo sapiens
aagagtttggcccta

SEQ ID NO: 1751203 - DNA, 15 bp, Homo sapiens
agagtttggccctat

SEQ ID NO: 1751204 - DNA, 15 bp, Homo sapiens
gagtttggccctatt

SEQ ID NO: 1751205 - DNA, 15 bp, Homo sapiens
agtttggccctatta

SEQ ID NO: 1751206 - DNA, 15 bp, Homo sapiens
gtttggccctattaa

SEQ ID NO: 1751207 - DNA, 15 bp, Homo sapiens
tttggccctattaaa

SEQ ID NO: 1751208 - DNA, 15 bp, Homo sapiens
ttggccctattaaat

SEQ ID NO: 1751209 - DNA, 15 bp, Homo sapiens
tggccctattaaatc

SEQ ID NO: 1751210 - DNA, 15 bp, Homo sapiens
ggccctattaaatct

SEQ ID NO: 1751211 - DNA, 15 bp, Homo sapiens
gccctattaaatctg

SEQ ID NO: 1751212 - DNA, 15 bp, Homo sapiens
ccctattaaatctgt

SEQ ID NO: 1751213 - DNA, 15 bp, Homo sapiens
cctattaaatctgtt

SEQ ID NO: 1751214 - DNA, 15 bp, Homo sapiens
ctattaaatctgtta

SEQ ID NO: 1751215 - DNA, 15 bp, Homo sapiens
tattaaatctgttaa

SEQ ID NO: 1751216 - DNA, 15 bp, Homo sapiens
attaaatctgttaag

SEQ ID NO: 1751217 - DNA, 15 bp, Homo sapiens
ttaaatctgttaaga

SEQ ID NO: 1751218 - DNA, 15 bp, Homo sapiens
taaatctgttaagag

SEQ ID NO: 1751219 - DNA, 15 bp, Homo sapiens
aaatctgttaagagg

SEQ ID NO: 1751220 - DNA, 15 bp, Homo sapiens
aatctgttaagaggt

SEQ ID NO: 1751221 - DNA, 15 bp, Homo sapiens
atctgttaagaggtt

SEQ ID NO: 1751222 - DNA, 15 bp, Homo sapiens
tctgttaagaggttt

SEQ ID NO: 1751223 - DNA, 15 bp, Homo sapiens
ctgttaagaggttta

SEQ ID NO: 1751224 - DNA, 15 bp, Homo sapiens
tgttaagaggtttat

SEQ ID NO: 1751225 - DNA, 15 bp, Homo sapiens
gttaagaggtttata

SEQ ID NO: 1751226 - DNA, 15 bp, Homo sapiens
ttaagaggtttataa

SEQ ID NO: 1751227 - DNA, 15 bp, Homo sapiens
taagaggtttataat

SEQ ID NO: 1751228 - DNA, 15 bp, Homo sapiens
aagaggtttataatg

SEQ ID NO: 1751229 - DNA, 15 bp, Homo sapiens
agaggtttataatgc

SEQ ID NO: 1751230 - DNA, 15 bp, Homo sapiens
gaggtttataatgcc

SEQ ID NO: 1751231 - DNA, 15 bp, Homo sapiens
aggtttataatgcca

SEQ ID NO: 1751232 - DNA, 15 bp, Homo sapiens
ggtttataatgccag

SEQ ID NO: 1751233 - DNA, 15 bp, Homo sapiens
gtttataatgccagc

SEQ ID NO: 1751234 - DNA, 15 bp, Homo sapiens
tttataatgccagca

SEQ ID NO: 1751235 - DNA, 15 bp, Homo sapiens
ttataatgccagcag

SEQ ID NO: 1751236 - DNA, 15 bp, Homo sapiens
tataatgccagcagg

SEQ ID NO: 1751237 - DNA, 15 bp, Homo sapiens
ataatgccagcaggt

SEQ ID NO: 1751238 - DNA, 15 bp, Homo sapiens
taatgccagcaggtg

SEQ ID NO: 1751239 - DNA, 15 bp, Homo sapiens
aatgccagcaggtga

SEQ ID NO: 1751240 - DNA, 15 bp, Homo sapiens
atgccagcaggtgat

SEQ ID NO: 1751241 - DNA, 15 bp, Homo sapiens
tgccagcaggtgatg

SEQ ID NO: 1751242 - DNA, 15 bp, Homo sapiens
gccagcaggtgatga

SEQ ID NO: 1751243 - DNA, 15 bp, Homo sapiens
ccagcaggtgatgaa

SEQ ID NO: 1751244 - DNA, 15 bp, Homo sapiens
cagcaggtgatgaaa

SEQ ID NO: 1751245 - DNA, 15 bp, Homo sapiens
agcaggtgatgaaat

SEQ ID NO: 1751246 - DNA, 15 bp, Homo sapiens
gcaggtgatgaaatg

SEQ ID NO: 1751247 - DNA, 15 bp, Homo sapiens
caggtgatgaaatga

SEQ ID NO: 1751248 - DNA, 15 bp, Homo sapiens
aggtgatgaaatgaa

SEQ ID NO: 1751249 - DNA, 15 bp, Homo sapiens
ggtgatgaaatgaaa

SEQ ID NO: 1751250 - DNA, 15 bp, Homo sapiens
gtgatgaaatgaaat

SEQ ID NO: 1751251 - DNA, 15 bp, Homo sapiens
tgatgaaatgaaatt

SEQ ID NO: 1751252 - DNA, 15 bp, Homo sapiens
gatgaaatgaaattt

SEQ ID NO: 1751253 - DNA, 15 bp, Homo sapiens
atgaaatgaaatttg

SEQ ID NO: 1751254 - DNA, 15 bp, Homo sapiens
tgaaatgaaatttgg

SEQ ID NO: 1751255 - DNA, 15 bp, Homo sapiens
gaaatgaaatttgga

SEQ ID NO: 1751256 - DNA, 15 bp, Homo sapiens
aaatgaaatttggat

SEQ ID NO: 1751257 - DNA, 15 bp, Homo sapiens
aatgaaatttggatg

SEQ ID NO: 1751258 - DNA, 15 bp, Homo sapiens
atgaaatttggatgc

SEQ ID NO: 1751259 - DNA, 15 bp, Homo sapiens
tgaaatttggatgcc

SEQ ID NO: 1751260 - DNA, 15 bp, Homo sapiens
gaaatttggatgcct

SEQ ID NO: 1751261 - DNA, 15 bp, Homo sapiens
aaatttggatgcctt

SEQ ID NO: 1751262 - DNA, 15 bp, Homo sapiens
aatttggatgcctta

SEQ ID NO: 1751263 - DNA, 15 bp, Homo sapiens
atttggatgccttag

SEQ ID NO: 1751264 - DNA, 15 bp, Homo sapiens
tttggatgccttagt

SEQ ID NO: 1751265 - DNA, 15 bp, Homo sapiens
ttggatgccttagtt

SEQ ID NO: 1751266 - DNA, 15 bp, Homo sapiens
tggatgccttagttt

SEQ ID NO: 1751267 - DNA, 15 bp, Homo sapiens
ggatgccttagtttc

SEQ ID NO: 1751268 - DNA, 15 bp, Homo sapiens
gatgccttagtttca

SEQ ID NO: 1751269 - DNA, 15 bp, Homo sapiens
atgccttagtttcag

SEQ ID NO: 1751270 - DNA, 15 bp, Homo sapiens
tgccttagtttcagt

SEQ ID NO: 1751271 - DNA, 15 bp, Homo sapiens
gccttagtttcagta

SEQ ID NO: 1751272 - DNA, 15 bp, Homo sapiens
ccttagtttcagtat

SEQ ID NO: 1751273 - DNA, 15 bp, Homo sapiens
cttagtttcagtatt

SEQ ID NO: 1751274 - DNA, 15 bp, Homo sapiens
ttagtttcagtattt

SEQ ID NO: 1751275 - DNA, 15 bp, Homo sapiens
tagtttcagtatttt

SEQ ID NO: 1751276 - DNA, 15 bp, Homo sapiens
agtttcagtattttc

SEQ ID NO: 1751277 - DNA, 15 bp, Homo sapiens
gtttcagtattttca

SEQ ID NO: 1751278 - DNA, 15 bp, Homo sapiens
tttcagtattttcag

SEQ ID NO: 1751279 - DNA, 15 bp, Homo sapiens
ttcagtattttcaga

SEQ ID NO: 1751280 - DNA, 15 bp, Homo sapiens
tcagtattttcagaa

SEQ ID NO: 1751281 - DNA, 15 bp, Homo sapiens
cagtattttcagaat

SEQ ID NO: 1751282 - DNA, 15 bp, Homo sapiens
agtattttcagaatt

SEQ ID NO: 1751283 - DNA, 15 bp, Homo sapiens
gtattttcagaattt

SEQ ID NO: 1751284 - DNA, 15 bp, Homo sapiens
tattttcagaattta

SEQ ID NO: 1751285 - DNA, 15 bp, Homo sapiens
attttcagaatttat

SEQ ID NO: 1751286 - DNA, 15 bp, Homo sapiens
ttttcagaatttatc

SEQ ID NO: 1751287 - DNA, 15 bp, Homo sapiens
tttcagaatttatca

SEQ ID NO: 1751288 - DNA, 15 bp, Homo sapiens
ttcagaatttatcat

SEQ ID NO: 1751289 - DNA, 15 bp, Homo sapiens
tcagaatttatcata

SEQ ID NO: 1751290 - DNA, 15 bp, Homo sapiens
cagaatttatcatat

SEQ ID NO: 1751291 - DNA, 15 bp, Homo sapiens
agaatttatcatatt

SEQ ID NO: 1751292 - DNA, 15 bp, Homo sapiens
gaatttatcatattt

SEQ ID NO: 1751293 - DNA, 15 bp, Homo sapiens
aatttatcatatttt

SEQ ID NO: 1751294 - DNA, 15 bp, Homo sapiens
atttatcatattttt

SEQ ID NO: 1751295 - DNA, 15 bp, Homo sapiens
tttatcatatttttt

SEQ ID NO: 1751296 - DNA, 15 bp, Homo sapiens
ttatcatattttttc

SEQ ID NO: 1751297 - DNA, 15 bp, Homo sapiens
tatcatattttttca

SEQ ID NO: 1751298 - DNA, 15 bp, Homo sapiens
atcatattttttcaa

SEQ ID NO: 1751299 - DNA, 15 bp, Homo sapiens
tcatattttttcaat

SEQ ID NO: 1751300 - DNA, 15 bp, Homo sapiens
catattttttcaata

SEQ ID NO: 1751301 - DNA, 15 bp, Homo sapiens
atattttttcaataa

SEQ ID NO: 1751302 - DNA, 15 bp, Homo sapiens
tattttttcaataaa

SEQ ID NO: 1751303 - DNA, 15 bp, Homo sapiens
attttttcaataaat

SEQ ID NO: 1751304 - DNA, 15 bp, Homo sapiens
ttttttcaataaatg

SEQ ID NO: 1751305 - DNA, 15 bp, Homo sapiens
tttttcaataaatgt

SEQ ID NO: 1751306 - DNA, 15 bp, Homo sapiens
ttttcaataaatgtt

SEQ ID NO: 1751307 - DNA, 15 bp, Homo sapiens
tttcaataaatgttt

SEQ ID NO: 1751308 - DNA, 15 bp, Homo sapiens
tcaataaatgtttat

SEQ ID NO: 1751309 - DNA, 15 bp, Homo sapiens
caataaatgtttata

SEQ ID NO: 1751310 - DNA, 15 bp, Homo sapiens
aataaatgtttataa

SEQ ID NO: 1751311 - DNA, 15 bp, Homo sapiens
ataaatgtttataaa

SEQ ID NO: 1751312 - DNA, 15 bp, Homo sapiens
taaatgtttataaat

SEQ ID NO: 1751313 - DNA, 15 bp, Homo sapiens
aaatgtttataaatc

SEQ ID NO: 1751314 - DNA, 15 bp, Homo sapiens
aatgtttataaatca

SEQ ID NO: 1751315 - DNA, 15 bp, Homo sapiens
atgtttataaatcaa

SEQ ID NO: 1751316 - DNA, 15 bp, Homo sapiens
tgtttataaatcaaa

SEQ ID NO: 1751317 - DNA, 15 bp, Homo sapiens
gtttataaatcaaag

SEQ ID NO: 1751318 - DNA, 15 bp, Homo sapiens
ataaatcaaagtatg

SEQ ID NO: 1751319 - DNA, 15 bp, Homo sapiens
taaatcaaagtatgt

SEQ ID NO: 1751320 - DNA, 15 bp, Homo sapiens
aaatcaaagtatgtc

SEQ ID NO: 1751321 - DNA, 15 bp, Homo sapiens
aatcaaagtatgtca

SEQ ID NO: 1751322 - DNA, 15 bp, Homo sapiens
atcaaagtatgtcag

SEQ ID NO: 1751323 - DNA, 15 bp, Homo sapiens
tcaaagtatgtcaga

SEQ ID NO: 1751324 - DNA, 15 bp, Homo sapiens
caaagtatgtcagat

SEQ ID NO: 1751325 - DNA, 15 bp, Homo sapiens
aaagtatgtcagatg

SEQ ID NO: 1751326 - DNA, 15 bp, Homo sapiens
aagtatgtcagatgc

SEQ ID NO: 1751327 - DNA, 15 bp, Homo sapiens
agtatgtcagatgct

SEQ ID NO: 1751328 - DNA, 15 bp, Homo sapiens
gtatgtcagatgctt

SEQ ID NO: 1751329 - DNA, 15 bp, Homo sapiens
tatgtcagatgcttt

SEQ ID NO: 1751330 - DNA, 15 bp, Homo sapiens
atgtcagatgcttta

SEQ ID NO: 1751331 - DNA, 15 bp, Homo sapiens
tgtcagatgctttat

SEQ ID NO: 1751332 - DNA, 15 bp, Homo sapiens
gtcagatgctttatt

SEQ ID NO: 1751333 - DNA, 15 bp, Homo sapiens
tcagatgctttattc

SEQ ID NO: 1751334 - DNA, 15 bp, Homo sapiens
cagatgctttattcc

SEQ ID NO: 1751335 - DNA, 15 bp, Homo sapiens
agatgctttattccc

SEQ ID NO: 1751336 - DNA, 15 bp, Homo sapiens
gatgctttattccct

SEQ ID NO: 1751337 - DNA, 15 bp, Homo sapiens
atgctttattcccta

SEQ ID NO: 1751338 - DNA, 15 bp, Homo sapiens
tgctttattccctat

SEQ ID NO: 1751339 - DNA, 15 bp, Homo sapiens
gctttattccctata

SEQ ID NO: 1751340 - DNA, 15 bp, Homo sapiens
ctttattccctatat

SEQ ID NO: 1751341 - DNA, 15 bp, Homo sapiens
tttattccctatatg

SEQ ID NO: 1751342 - DNA, 15 bp, Homo sapiens
ttattccctatatga

SEQ ID NO: 1751343 - DNA, 15 bp, Homo sapiens
tattccctatatgat

SEQ ID NO: 1751344 - DNA, 15 bp, Homo sapiens
attccctatatgatc

SEQ ID NO: 1751345 - DNA, 15 bp, Homo sapiens
ttccctatatgatct

SEQ ID NO: 1751346 - DNA, 15 bp, Homo sapiens
tccctatatgatctg

SEQ ID NO: 1751347 - DNA, 15 bp, Homo sapiens
ccctatatgatctgt

SEQ ID NO: 1751348 - DNA, 15 bp, Homo sapiens
cctatatgatctgtc

SEQ ID NO: 1751349 - DNA, 15 bp, Homo sapiens
ctatatgatctgtct

SEQ ID NO: 1751350 - DNA, 15 bp, Homo sapiens
tatatgatctgtctt

SEQ ID NO: 1751351 - DNA, 15 bp, Homo sapiens
atatgatctgtcttt

SEQ ID NO: 1751352 - DNA, 15 bp, Homo sapiens
tatgatctgtctttc

SEQ ID NO: 1751353 - DNA, 15 bp, Homo sapiens
atgatctgtctttcc

SEQ ID NO: 1751354 - DNA, 15 bp, Homo sapiens
tgatctgtctttcct

SEQ ID NO: 1751355 - DNA, 15 bp, Homo sapiens
gatctgtctttcctg

SEQ ID NO: 1751356 - DNA, 15 bp, Homo sapiens
atctgtctttcctgg

SEQ ID NO: 1751357 - DNA, 15 bp, Homo sapiens
tctgtctttcctgga

SEQ ID NO: 1751358 - DNA, 15 bp, Homo sapiens
ctgtctttcctggac

SEQ ID NO: 1751359 - DNA, 15 bp, Homo sapiens
tgtctttcctggact

SEQ ID NO: 1751360 - DNA, 15 bp, Homo sapiens
gtctttcctggacta

SEQ ID NO: 1751361 - DNA, 15 bp, Homo sapiens
tctttcctggactat

SEQ ID NO: 1751362 - DNA, 15 bp, Homo sapiens
ctttcctggactatt

SEQ ID NO: 1751363 - DNA, 15 bp, Homo sapiens
tttcctggactattc

SEQ ID NO: 1751364 - DNA, 15 bp, Homo sapiens
ttcctggactattct

SEQ ID NO: 1751365 - DNA, 15 bp, Homo sapiens
tcctggactattctg

SEQ ID NO: 1751366 - DNA, 15 bp, Homo sapiens
cctggactattctgg

SEQ ID NO: 1751367 - DNA, 15 bp, Homo sapiens
ctggactattctgga

SEQ ID NO: 1751368 - DNA, 15 bp, Homo sapiens
tggactattctggac

SEQ ID NO: 1751369 - DNA, 15 bp, Homo sapiens
ggactattctggact

SEQ ID NO: 1751370 - DNA, 15 bp, Homo sapiens
gactattctggactc

SEQ ID NO: 1751371 - DNA, 15 bp, Homo sapiens
actattctggactct

SEQ ID NO: 1751372 - DNA, 15 bp, Homo sapiens
ctattctggactctt

SEQ ID NO: 1751373 - DNA, 15 bp, Homo sapiens
tattctggactcttc

SEQ ID NO: 1751374 - DNA, 15 bp, Homo sapiens
attctggactcttcc

SEQ ID NO: 1751375 - DNA, 15 bp, Homo sapiens
ttctggactcttcct

SEQ ID NO: 1751376 - DNA, 15 bp, Homo sapiens
tctggactcttccta

SEQ ID NO: 1751377 - DNA, 15 bp, Homo sapiens
ctggactcttcctat

SEQ ID NO: 1751378 - DNA, 15 bp, Homo sapiens
tggactcttcctatt

SEQ ID NO: 1751379 - DNA, 15 bp, Homo sapiens
ggactcttcctattg

SEQ ID NO: 1751380 - DNA, 15 bp, Homo sapiens
gactcttcctattga

SEQ ID NO: 1751381 - DNA, 15 bp, Homo sapiens
actcttcctattgat

SEQ ID NO: 1751382 - DNA, 15 bp, Homo sapiens
ctcttcctattgatc

SEQ ID NO: 1751383 - DNA, 15 bp, Homo sapiens
tcttcctattgatct

SEQ ID NO: 1751384 - DNA, 15 bp, Homo sapiens
cttcctattgatctc

SEQ ID NO: 1751385 - DNA, 15 bp, Homo sapiens
ttcctattgatctct

SEQ ID NO: 1751386 - DNA, 15 bp, Homo sapiens
tcctattgatctctc

SEQ ID NO: 1751387 - DNA, 15 bp, Homo sapiens
cctattgatctctca

SEQ ID NO: 1751388 - DNA, 15 bp, Homo sapiens
ctattgatctctcat

SEQ ID NO: 1751389 - DNA, 15 bp, Homo sapiens
tattgatctctcatt

SEQ ID NO: 1751390 - DNA, 15 bp, Homo sapiens
attgatctctcattt

SEQ ID NO: 1751391 - DNA, 15 bp, Homo sapiens
ttgatctctcatttg

SEQ ID NO: 1751392 - DNA, 15 bp, Homo sapiens
tgatctctcatttgc

SEQ ID NO: 1751393 - DNA, 15 bp, Homo sapiens
gatctctcatttgct

SEQ ID NO: 1751394 - DNA, 15 bp, Homo sapiens
atctctcatttgcta

SEQ ID NO: 1751395 - DNA, 15 bp, Homo sapiens
tctctcatttgctac

SEQ ID NO: 1751396 - DNA, 15 bp, Homo sapiens
ctctcatttgctacc

SEQ ID NO: 1751397 - DNA, 15 bp, Homo sapiens
tctcatttgctacct

SEQ ID NO: 1751398 - DNA, 15 bp, Homo sapiens
ctcatttgctacctt

SEQ ID NO: 1751399 - DNA, 15 bp, Homo sapiens
tcatttgctaccttg

SEQ ID NO: 1751400 - DNA, 15 bp, Homo sapiens
catttgctaccttga

SEQ ID NO: 1751401 - DNA, 15 bp, Homo sapiens
atttgctaccttgag

SEQ ID NO: 1751402 - DNA, 15 bp, Homo sapiens
tttgctaccttgaga

SEQ ID NO: 1751403 - DNA, 15 bp, Homo sapiens
ttgctaccttgagac

SEQ ID NO: 1751404 - DNA, 15 bp, Homo sapiens
tgctaccttgagacc

SEQ ID NO: 1751405 - DNA, 15 bp, Homo sapiens
gctaccttgagacca

SEQ ID NO: 1751406 - DNA, 15 bp, Homo sapiens
ctaccttgagaccat

SEQ ID NO: 1751407 - DNA, 15 bp, Homo sapiens
taccttgagaccatt

SEQ ID NO: 1751408 - DNA, 15 bp, Homo sapiens
accttgagaccattt

SEQ ID NO: 1751409 - DNA, 15 bp, Homo sapiens
ccttgagaccatttc

SEQ ID NO: 1751410 - DNA, 15 bp, Homo sapiens
cttgagaccatttct

SEQ ID NO: 1751411 - DNA, 15 bp, Homo sapiens
ttgagaccatttctc

SEQ ID NO: 1751412 - DNA, 15 bp, Homo sapiens
tgagaccatttctct

SEQ ID NO: 1751413 - DNA, 15 bp, Homo sapiens
gagaccatttctctc

SEQ ID NO: 1751414 - DNA, 15 bp, Homo sapiens
agaccatttctctca

SEQ ID NO: 1751415 - DNA, 15 bp, Homo sapiens
gaccatttctctcac

SEQ ID NO: 1751416 - DNA, 15 bp, Homo sapiens
accatttctctcaca

SEQ ID NO: 1751417 - DNA, 15 bp, Homo sapiens
ccatttctctcacag

SEQ ID NO: 1751418 - DNA, 15 bp, Homo sapiens
catttctctcacagc

SEQ ID NO: 1751419 - DNA, 15 bp, Homo sapiens
atttctctcacagca

SEQ ID NO: 1751420 - DNA, 15 bp, Homo sapiens
tttctctcacagcag

SEQ ID NO: 1751421 - DNA, 15 bp, Homo sapiens
ttctctcacagcagc

SEQ ID NO: 1751422 - DNA, 15 bp, Homo sapiens
tctctcacagcagcc

SEQ ID NO: 1751423 - DNA, 15 bp, Homo sapiens
ctctcacagcagcca

SEQ ID NO: 1751424 - DNA, 15 bp, Homo sapiens
tctcacagcagccag

SEQ ID NO: 1751425 - DNA, 15 bp, Homo sapiens
ctcacagcagccaga

SEQ ID NO: 1751426 - DNA, 15 bp, Homo sapiens
tcacagcagccagag

SEQ ID NO: 1751427 - DNA, 15 bp, Homo sapiens
cacagcagccagaga

SEQ ID NO: 1751428 - DNA, 15 bp, Homo sapiens
acagcagccagagaa

SEQ ID NO: 1751429 - DNA, 15 bp, Homo sapiens
cagcagccagagaaa

SEQ ID NO: 1751430 - DNA, 15 bp, Homo sapiens
agcagccagagaaat

SEQ ID NO: 1751431 - DNA, 15 bp, Homo sapiens
gcagccagagaaatc

SEQ ID NO: 1751432 - DNA, 15 bp, Homo sapiens
cagccagagaaatct

SEQ ID NO: 1751433 - DNA, 15 bp, Homo sapiens
agccagagaaatctg

SEQ ID NO: 1751434 - DNA, 15 bp, Homo sapiens
gccagagaaatctgc

SEQ ID NO: 1751435 - DNA, 15 bp, Homo sapiens
ccagagaaatctgct

SEQ ID NO: 1751436 - DNA, 15 bp, Homo sapiens
cagagaaatctgctc

SEQ ID NO: 1751437 - DNA, 15 bp, Homo sapiens
agagaaatctgctca

SEQ ID NO: 1751438 - DNA, 15 bp, Homo sapiens
gagaaatctgctcat

SEQ ID NO: 1751439 - DNA, 15 bp, Homo sapiens
agaaatctgctcata

SEQ ID NO: 1751440 - DNA, 15 bp, Homo sapiens
gaaatctgctcataa

SEQ ID NO: 1751441 - DNA, 15 bp, Homo sapiens
aaatctgctcataat

SEQ ID NO: 1751442 - DNA, 15 bp, Homo sapiens
aatctgctcataatg

SEQ ID NO: 1751443 - DNA, 15 bp, Homo sapiens
atctgctcataatgt

SEQ ID NO: 1751444 - DNA, 15 bp, Homo sapiens
tctgctcataatgta

SEQ ID NO: 1751445 - DNA, 15 bp, Homo sapiens
ctgctcataatgtaa

SEQ ID NO: 1751446 - DNA, 15 bp, Homo sapiens
tgctcataatgtaaa

SEQ ID NO: 1751447 - DNA, 15 bp, Homo sapiens
gctcataatgtaaat

SEQ ID NO: 1751448 - DNA, 15 bp, Homo sapiens
ctcataatgtaaatc

SEQ ID NO: 1751449 - DNA, 15 bp, Homo sapiens
tcataatgtaaatct

SEQ ID NO: 1751450 - DNA, 15 bp, Homo sapiens
cataatgtaaatctc

SEQ ID NO: 1751451 - DNA, 15 bp, Homo sapiens
ataatgtaaatctca

SEQ ID NO: 1751452 - DNA, 15 bp, Homo sapiens
taatgtaaatctcat

SEQ ID NO: 1751453 - DNA, 15 bp, Homo sapiens
atgtaaatctcatca

SEQ ID NO: 1751454 - DNA, 15 bp, Homo sapiens
tgtaaatctcatcat

SEQ ID NO: 1751455 - DNA, 15 bp, Homo sapiens
gtaaatctcatcatg

SEQ ID NO: 1751456 - DNA, 15 bp, Homo sapiens
taaatctcatcatgc

SEQ ID NO: 1751457 - DNA, 15 bp, Homo sapiens
aaatctcatcatgct

SEQ ID NO: 1751458 - DNA, 15 bp, Homo sapiens
aatctcatcatgcta

SEQ ID NO: 1751459 - DNA, 15 bp, Homo sapiens
atctcatcatgctaa

SEQ ID NO: 1751460 - DNA, 15 bp, Homo sapiens
tctcatcatgctaat

SEQ ID NO: 1751461 - DNA, 15 bp, Homo sapiens
ctcatcatgctaatt

SEQ ID NO: 1751462 - DNA, 15 bp, Homo sapiens
tcatcatgctaattc

SEQ ID NO: 1751463 - DNA, 15 bp, Homo sapiens
catcatgctaattcc

SEQ ID NO: 1751464 - DNA, 15 bp, Homo sapiens
atcatgctaattcct

SEQ ID NO: 1751465 - DNA, 15 bp, Homo sapiens
tcatgctaattcctc

SEQ ID NO: 1751466 - DNA, 15 bp, Homo sapiens
catgctaattcctca

SEQ ID NO: 1751467 - DNA, 15 bp, Homo sapiens
atgctaattcctcag

SEQ ID NO: 1751468 - DNA, 15 bp, Homo sapiens
tgctaattcctcagg

SEQ ID NO: 1751469 - DNA, 15 bp, Homo sapiens
gctaattcctcaggt

SEQ ID NO: 1751470 - DNA, 15 bp, Homo sapiens
ctaattcctcaggta

SEQ ID NO: 1751471 - DNA, 15 bp, Homo sapiens
taattcctcaggtaa

SEQ ID NO: 1751472 - DNA, 15 bp, Homo sapiens
aattcctcaggtaaa

SEQ ID NO: 1751473 - DNA, 15 bp, Homo sapiens
attcctcaggtaaaa

SEQ ID NO: 1751474 - DNA, 15 bp, Homo sapiens
ttcctcaggtaaaaa

SEQ ID NO: 1751475 - DNA, 15 bp, Homo sapiens
tcctcaggtaaaaaa

SEQ ID NO: 1751476 - DNA, 15 bp, Homo sapiens
cctcaggtaaaaaac

SEQ ID NO: 1751477 - DNA, 15 bp, Homo sapiens
ctcaggtaaaaaacc

SEQ ID NO: 1751478 - DNA, 15 bp, Homo sapiens
tcaggtaaaaaacct

SEQ ID NO: 1751479 - DNA, 15 bp, Homo sapiens
caggtaaaaaacctc

SEQ ID NO: 1751480 - DNA, 15 bp, Homo sapiens
aggtaaaaaacctcc

SEQ ID NO: 1751481 - DNA, 15 bp, Homo sapiens
ggtaaaaaacctcct

SEQ ID NO: 1751482 - DNA, 15 bp, Homo sapiens
gtaaaaaacctcctg

SEQ ID NO: 1751483 - DNA, 15 bp, Homo sapiens
taaaaaacctcctgt

SEQ ID NO: 1751484 - DNA, 15 bp, Homo sapiens
aaaaaacctcctgtg

SEQ ID NO: 1751485 - DNA, 15 bp, Homo sapiens
aaaaacctcctgtgg

SEQ ID NO: 1751486 - DNA, 15 bp, Homo sapiens
aaaacctcctgtgga

SEQ ID NO: 1751487 - DNA, 15 bp, Homo sapiens
aaacctcctgtggag

SEQ ID NO: 1751488 - DNA, 15 bp, Homo sapiens
aacctcctgtggagg

SEQ ID NO: 1751489 - DNA, 15 bp, Homo sapiens
acctcctgtggagga

SEQ ID NO: 1751490 - DNA, 15 bp, Homo sapiens
cctcctgtggaggac

SEQ ID NO: 1751491 - DNA, 15 bp, Homo sapiens
ctcctgtggaggaca

SEQ ID NO: 1751492 - DNA, 15 bp, Homo sapiens
tcctgtggaggacat

SEQ ID NO: 1751493 - DNA, 15 bp, Homo sapiens
cctgtggaggacata

SEQ ID NO: 1751494 - DNA, 15 bp, Homo sapiens
ctgtggaggacatat

SEQ ID NO: 1751495 - DNA, 15 bp, Homo sapiens
tgtggaggacatatt

SEQ ID NO: 1751496 - DNA, 15 bp, Homo sapiens
gtggaggacatattc

SEQ ID NO: 1751497 - DNA, 15 bp, Homo sapiens
tggaggacatattca

SEQ ID NO: 1751498 - DNA, 15 bp, Homo sapiens
ggaggacatattcat

SEQ ID NO: 1751499 - DNA, 15 bp, Homo sapiens
gaggacatattcatc

SEQ ID NO: 1751500 - DNA, 15 bp, Homo sapiens
aggacatattcatct

SEQ ID NO: 1751501 - DNA, 15 bp, Homo sapiens
ggacatattcatctg

SEQ ID NO: 1751502 - DNA, 15 bp, Homo sapiens
gacatattcatctgg

SEQ ID NO: 1751503 - DNA, 15 bp, Homo sapiens
acatattcatctggt

SEQ ID NO: 1751504 - DNA, 15 bp, Homo sapiens
catattcatctggta

SEQ ID NO: 1751505 - DNA, 15 bp, Homo sapiens
atattcatctggtaa

SEQ ID NO: 1751506 - DNA, 15 bp, Homo sapiens
tattcatctggtaat

SEQ ID NO: 1751507 - DNA, 15 bp, Homo sapiens
attcatctggtaatg

SEQ ID NO: 1751508 - DNA, 15 bp, Homo sapiens
ttcatctggtaatgt

SEQ ID NO: 1751509 - DNA, 15 bp, Homo sapiens
tcatctggtaatgtt

SEQ ID NO: 1751510 - DNA, 15 bp, Homo sapiens
catctggtaatgttg

SEQ ID NO: 1751511 - DNA, 15 bp, Homo sapiens
atctggtaatgttgg

SEQ ID NO: 1751512 - DNA, 15 bp, Homo sapiens
tctggtaatgttgga

SEQ ID NO: 1751513 - DNA, 15 bp, Homo sapiens
ctggtaatgttggaa

SEQ ID NO: 1751514 - DNA, 15 bp, Homo sapiens
tggtaatgttggaag

SEQ ID NO: 1751515 - DNA, 15 bp, Homo sapiens
ggtaatgttggaaga

SEQ ID NO: 1751516 - DNA, 15 bp, Homo sapiens
gtaatgttggaagaa

SEQ ID NO: 1751517 - DNA, 15 bp, Homo sapiens
taatgttggaagaag

SEQ ID NO: 1751518 - DNA, 15 bp, Homo sapiens
aatgttggaagaaga

SEQ ID NO: 1751519 - DNA, 15 bp, Homo sapiens
atgttggaagaagac

SEQ ID NO: 1751520 - DNA, 15 bp, Homo sapiens
tgttggaagaagacc

SEQ ID NO: 1751521 - DNA, 15 bp, Homo sapiens
gttggaagaagaccc

SEQ ID NO: 1751522 - DNA, 15 bp, Homo sapiens
ttggaagaagaccct

SEQ ID NO: 1751523 - DNA, 15 bp, Homo sapiens
tggaagaagacccta

SEQ ID NO: 1751524 - DNA, 15 bp, Homo sapiens
ggaagaagaccctac

SEQ ID NO: 1751525 - DNA, 15 bp, Homo sapiens
gaagaagaccctacc

SEQ ID NO: 1751526 - DNA, 15 bp, Homo sapiens
aagaagaccctacca

SEQ ID NO: 1751527 - DNA, 15 bp, Homo sapiens
agaagaccctaccat

SEQ ID NO: 1751528 - DNA, 15 bp, Homo sapiens
gaagaccctaccata

SEQ ID NO: 1751529 - DNA, 15 bp, Homo sapiens
aagaccctaccatat

SEQ ID NO: 1751530 - DNA, 15 bp, Homo sapiens
agaccctaccatatg

SEQ ID NO: 1751531 - DNA, 15 bp, Homo sapiens
gaccctaccatatgg

SEQ ID NO: 1751532 - DNA, 15 bp, Homo sapiens
accctaccatatggc

SEQ ID NO: 1751533 - DNA, 15 bp, Homo sapiens
ccctaccatatggct

SEQ ID NO: 1751534 - DNA, 15 bp, Homo sapiens
cctaccatatggctt

SEQ ID NO: 1751535 - DNA, 15 bp, Homo sapiens
ctaccatatggcttt

SEQ ID NO: 1751536 - DNA, 15 bp, Homo sapiens
taccatatggctttc

SEQ ID NO: 1751537 - DNA, 15 bp, Homo sapiens
accatatggctttct

SEQ ID NO: 1751538 - DNA, 15 bp, Homo sapiens
ccatatggctttctg

SEQ ID NO: 1751539 - DNA, 15 bp, Homo sapiens
catatggctttctgc

SEQ ID NO: 1751540 - DNA, 15 bp, Homo sapiens
atatggctttctgca

SEQ ID NO: 1751541 - DNA, 15 bp, Homo sapiens
tatggctttctgcaa

SEQ ID NO: 1751542 - DNA, 15 bp, Homo sapiens
atggctttctgcaaa

SEQ ID NO: 1751543 - DNA, 15 bp, Homo sapiens
tggctttctgcaaaa

SEQ ID NO: 1751544 - DNA, 15 bp, Homo sapiens
ggctttctgcaaaaa

SEQ ID NO: 1751545 - DNA, 15 bp, Homo sapiens
gctttctgcaaaaaa

SEQ ID NO: 1751546 - DNA, 15 bp, Homo sapiens
ctttctgcaaaaaag

SEQ ID NO: 1751547 - DNA, 15 bp, Homo sapiens
tttctgcaaaaaaga

SEQ ID NO: 1751548 - DNA, 15 bp, Homo sapiens
ttctgcaaaaaagac

SEQ ID NO: 1751549 - DNA, 15 bp, Homo sapiens
tctgcaaaaaagacc

SEQ ID NO: 1751550 - DNA, 15 bp, Homo sapiens
ctgcaaaaaagacca

SEQ ID NO: 1751551 - DNA, 15 bp, Homo sapiens
tgcaaaaaagaccac

SEQ ID NO: 1751552 - DNA, 15 bp, Homo sapiens
gcaaaaaagaccact

SEQ ID NO: 1751553 - DNA, 15 bp, Homo sapiens
caaaaaagaccacta

SEQ ID NO: 1751554 - DNA, 15 bp, Homo sapiens
aaaaaagaccactat

SEQ ID NO: 1751555 - DNA, 15 bp, Homo sapiens
aaaaagaccactata

SEQ ID NO: 1751556 - DNA, 15 bp, Homo sapiens
aaaagaccactatac

SEQ ID NO: 1751557 - DNA, 15 bp, Homo sapiens
aaagaccactatact

SEQ ID NO: 1751558 - DNA, 15 bp, Homo sapiens
aagaccactatacta

SEQ ID NO: 1751559 - DNA, 15 bp, Homo sapiens
agaccactatactac

SEQ ID NO: 1751560 - DNA, 15 bp, Homo sapiens
gaccactatactacc

SEQ ID NO: 1751561 - DNA, 15 bp, Homo sapiens
accactatactacct

SEQ ID NO: 1751562 - DNA, 15 bp, Homo sapiens
ccactatactacctg

SEQ ID NO: 1751563 - DNA, 15 bp, Homo sapiens
cactatactacctgt

SEQ ID NO: 1751564 - DNA, 15 bp, Homo sapiens
actatactacctgtt

SEQ ID NO: 1751565 - DNA, 15 bp, Homo sapiens
ctatactacctgttt

SEQ ID NO: 1751566 - DNA, 15 bp, Homo sapiens
tatactacctgtttg

SEQ ID NO: 1751567 - DNA, 15 bp, Homo sapiens
atactacctgtttgg

SEQ ID NO: 1751568 - DNA, 15 bp, Homo sapiens
tactacctgtttgga

SEQ ID NO: 1751569 - DNA, 15 bp, Homo sapiens
actacctgtttggaa

SEQ ID NO: 1751570 - DNA, 15 bp, Homo sapiens
ctacctgtttggaat

SEQ ID NO: 1751571 - DNA, 15 bp, Homo sapiens
tacctgtttggaata

SEQ ID NO: 1751572 - DNA, 15 bp, Homo sapiens
acctgtttggaatac

SEQ ID NO: 1751573 - DNA, 15 bp, Homo sapiens
cctgtttggaataca

SEQ ID NO: 1751574 - DNA, 15 bp, Homo sapiens
ctgtttggaatacaa

SEQ ID NO: 1751575 - DNA, 15 bp, Homo sapiens
tgtttggaatacaaa

SEQ ID NO: 1751576 - DNA, 15 bp, Homo sapiens
gtttggaatacaaaa

SEQ ID NO: 1751577 - DNA, 15 bp, Homo sapiens
tttggaatacaaaaa

SEQ ID NO: 1751578 - DNA, 15 bp, Homo sapiens
ttggaatacaaaaag

SEQ ID NO: 1751579 - DNA, 15 bp, Homo sapiens
tggaatacaaaaagt

SEQ ID NO: 1751580 - DNA, 15 bp, Homo sapiens
ggaatacaaaaagta

SEQ ID NO: 1751581 - DNA, 15 bp, Homo sapiens
gaatacaaaaagtaa

SEQ ID NO: 1751582 - DNA, 15 bp, Homo sapiens
aatacaaaaagtaac

SEQ ID NO: 1751583 - DNA, 15 bp, Homo sapiens
atacaaaaagtaact

SEQ ID NO: 1751584 - DNA, 15 bp, Homo sapiens
tacaaaaagtaactg

SEQ ID NO: 1751585 - DNA, 15 bp, Homo sapiens
acaaaaagtaactga

SEQ ID NO: 1751586 - DNA, 15 bp, Homo sapiens
caaaaagtaactgac

SEQ ID NO: 1751587 - DNA, 15 bp, Homo sapiens
aaaaagtaactgact

SEQ ID NO: 1751588 - DNA, 15 bp, Homo sapiens
aaaagtaactgactg

SEQ ID NO: 1751589 - DNA, 15 bp, Homo sapiens
aaagtaactgactga

SEQ ID NO: 1751590 - DNA, 15 bp, Homo sapiens
aagtaactgactgaa

SEQ ID NO: 1751591 - DNA, 15 bp, Homo sapiens
agtaactgactgaaa

SEQ ID NO: 1751592 - DNA, 15 bp, Homo sapiens
gtaactgactgaaat

SEQ ID NO: 1751593 - DNA, 15 bp, Homo sapiens
taactgactgaaatt

SEQ ID NO: 1751594 - DNA, 15 bp, Homo sapiens
aactgactgaaatta

SEQ ID NO: 1751595 - DNA, 15 bp, Homo sapiens
actgactgaaattac

SEQ ID NO: 1751596 - DNA, 15 bp, Homo sapiens
ctgactgaaattact

SEQ ID NO: 1751597 - DNA, 15 bp, Homo sapiens
tgactgaaattactg

SEQ ID NO: 1751598 - DNA, 15 bp, Homo sapiens
gactgaaattactgg

SEQ ID NO: 1751599 - DNA, 15 bp, Homo sapiens
actgaaattactgga

SEQ ID NO: 1751600 - DNA, 15 bp, Homo sapiens
ctgaaattactggac

SEQ ID NO: 1751601 - DNA, 15 bp, Homo sapiens
tgaaattactggaca

SEQ ID NO: 1751602 - DNA, 15 bp, Homo sapiens
gaaattactggacag

SEQ ID NO: 1751603 - DNA, 15 bp, Homo sapiens
aaattactggacagg

SEQ ID NO: 1751604 - DNA, 15 bp, Homo sapiens
aattactggacagga

SEQ ID NO: 1751605 - DNA, 15 bp, Homo sapiens
attactggacaggaa

SEQ ID NO: 1751606 - DNA, 15 bp, Homo sapiens
ttactggacaggaag

SEQ ID NO: 1751607 - DNA, 15 bp, Homo sapiens
tactggacaggaaga

SEQ ID NO: 1751608 - DNA, 15 bp, Homo sapiens
actggacaggaagaa

SEQ ID NO: 1751609 - DNA, 15 bp, Homo sapiens
ctggacaggaagaac

SEQ ID NO: 1751610 - DNA, 15 bp, Homo sapiens
tggacaggaagaaca

SEQ ID NO: 1751611 - DNA, 15 bp, Homo sapiens
ggacaggaagaacag

SEQ ID NO: 1751612 - DNA, 15 bp, Homo sapiens
gacaggaagaacaga

SEQ ID NO: 1751613 - DNA, 15 bp, Homo sapiens
acaggaagaacagat

SEQ ID NO: 1751614 - DNA, 15 bp, Homo sapiens
caggaagaacagatg

SEQ ID NO: 1751615 - DNA, 15 bp, Homo sapiens
aggaagaacagatgc

SEQ ID NO: 1751616 - DNA, 15 bp, Homo sapiens
ggaagaacagatgct

SEQ ID NO: 1751617 - DNA, 15 bp, Homo sapiens
gaagaacagatgcta

SEQ ID NO: 1751618 - DNA, 15 bp, Homo sapiens
aagaacagatgctag

SEQ ID NO: 1751619 - DNA, 15 bp, Homo sapiens
agaacagatgctagt

SEQ ID NO: 1751620 - DNA, 15 bp, Homo sapiens
gaacagatgctagtt

SEQ ID NO: 1751621 - DNA, 15 bp, Homo sapiens
aacagatgctagttg

SEQ ID NO: 1751622 - DNA, 15 bp, Homo sapiens
acagatgctagttga

SEQ ID NO: 1751623 - DNA, 15 bp, Homo sapiens
cagatgctagttgag

SEQ ID NO: 1751624 - DNA, 15 bp, Homo sapiens
agatgctagttgaga

SEQ ID NO: 1751625 - DNA, 15 bp, Homo sapiens
gatgctagttgagaa

SEQ ID NO: 1751626 - DNA, 15 bp, Homo sapiens
atgctagttgagaaa

SEQ ID NO: 1751627 - DNA, 15 bp, Homo sapiens
tgctagttgagaaag

SEQ ID NO: 1751628 - DNA, 15 bp, Homo sapiens
gctagttgagaaaga

SEQ ID NO: 1751629 - DNA, 15 bp, Homo sapiens
ctagttgagaaagag

SEQ ID NO: 1751630 - DNA, 15 bp, Homo sapiens
tagttgagaaagaga

SEQ ID NO: 1751631 - DNA, 15 bp, Homo sapiens
agttgagaaagagaa

SEQ ID NO: 1751632 - DNA, 15 bp, Homo sapiens
gttgagaaagagaag

SEQ ID NO: 1751633 - DNA, 15 bp, Homo sapiens
ttgagaaagagaaga

SEQ ID NO: 1751634 - DNA, 15 bp, Homo sapiens
tgagaaagagaagag

SEQ ID NO: 1751635 - DNA, 15 bp, Homo sapiens
gagaaagagaagagg

SEQ ID NO: 1751636 - DNA, 15 bp, Homo sapiens
agaaagagaagaggg

SEQ ID NO: 1751637 - DNA, 15 bp, Homo sapiens
gaaagagaagagggg

SEQ ID NO: 1751638 - DNA, 15 bp, Homo sapiens
aaagagaagagggga

SEQ ID NO: 1751639 - DNA, 15 bp, Homo sapiens
aagagaagaggggag

SEQ ID NO: 1751640 - DNA, 15 bp, Homo sapiens
agagaagaggggagc

SEQ ID NO: 1751641 - DNA, 15 bp, Homo sapiens
gagaagaggggagct

SEQ ID NO: 1751642 - DNA, 15 bp, Homo sapiens
agaagaggggagctg

SEQ ID NO: 1751643 - DNA, 15 bp, Homo sapiens
gaagaggggagctgg

SEQ ID NO: 1751644 - DNA, 15 bp, Homo sapiens
aagaggggagctggg

SEQ ID NO: 1751645 - DNA, 15 bp, Homo sapiens
agaggggagctggga

SEQ ID NO: 1751646 - DNA, 15 bp, Homo sapiens
aggggagctgggagc

SEQ ID NO: 1751647 - DNA, 15 bp, Homo sapiens
ggggagctgggagcc

SEQ ID NO: 1751648 - DNA, 15 bp, Homo sapiens
gggagctgggagcct

SEQ ID NO: 1751649 - DNA, 15 bp, Homo sapiens
ggagctgggagcctg

SEQ ID NO: 1751650 - DNA, 15 bp, Homo sapiens
gagctgggagcctga

SEQ ID NO: 1751651 - DNA, 15 bp, Homo sapiens
agctgggagcctgag

SEQ ID NO: 1751652 - DNA, 15 bp, Homo sapiens
gctgggagcctgagg

SEQ ID NO: 1751653 - DNA, 15 bp, Homo sapiens
ctgggagcctgagga

SEQ ID NO: 1751654 - DNA, 15 bp, Homo sapiens
tgggagcctgaggag

SEQ ID NO: 1751655 - DNA, 15 bp, Homo sapiens
gggagcctgaggaga

SEQ ID NO: 1751656 - DNA, 15 bp, Homo sapiens
ggagcctgaggagaa

SEQ ID NO: 1751657 - DNA, 15 bp, Homo sapiens
gagcctgaggagaag

SEQ ID NO: 1751658 - DNA, 15 bp, Homo sapiens
agcctgaggagaagg

SEQ ID NO: 1751659 - DNA, 15 bp, Homo sapiens
gcctgaggagaaggc

SEQ ID NO: 1751660 - DNA, 15 bp, Homo sapiens
cctgaggagaaggct

SEQ ID NO: 1751661 - DNA, 15 bp, Homo sapiens
ctgaggagaaggctt

SEQ ID NO: 1751662 - DNA, 15 bp, Homo sapiens
tgaggagaaggcttt

SEQ ID NO: 1751663 - DNA, 15 bp, Homo sapiens
gaggagaaggctttt

SEQ ID NO: 1751664 - DNA, 15 bp, Homo sapiens
aggagaaggctttta

SEQ ID NO: 1751665 - DNA, 15 bp, Homo sapiens
ggagaaggcttttag

SEQ ID NO: 1751666 - DNA, 15 bp, Homo sapiens
gagaaggcttttagt

SEQ ID NO: 1751667 - DNA, 15 bp, Homo sapiens
agaaggcttttagtc

SEQ ID NO: 1751668 - DNA, 15 bp, Homo sapiens
gaaggcttttagtct

SEQ ID NO: 1751669 - DNA, 15 bp, Homo sapiens
aaggcttttagtcta

SEQ ID NO: 1751670 - DNA, 15 bp, Homo sapiens
aggcttttagtctag

SEQ ID NO: 1751671 - DNA, 15 bp, Homo sapiens
ggcttttagtctagg

SEQ ID NO: 1751672 - DNA, 15 bp, Homo sapiens
gcttttagtctaggg

SEQ ID NO: 1751673 - DNA, 15 bp, Homo sapiens
cttttagtctagggc

SEQ ID NO: 1751674 - DNA, 15 bp, Homo sapiens
ttttagtctagggct

SEQ ID NO: 1751675 - DNA, 15 bp, Homo sapiens
tttagtctagggcta

SEQ ID NO: 1751676 - DNA, 15 bp, Homo sapiens
ttagtctagggctaa

SEQ ID NO: 1751677 - DNA, 15 bp, Homo sapiens
tagtctagggctaag

SEQ ID NO: 1751678 - DNA, 15 bp, Homo sapiens
agtctagggctaagt

SEQ ID NO: 1751679 - DNA, 15 bp, Homo sapiens
gtctagggctaagtg

SEQ ID NO: 1751680 - DNA, 15 bp, Homo sapiens
tctagggctaagtgc

SEQ ID NO: 1751681 - DNA, 15 bp, Homo sapiens
ctagggctaagtgca

SEQ ID NO: 1751682 - DNA, 15 bp, Homo sapiens
tagggctaagtgcag

SEQ ID NO: 1751683 - DNA, 15 bp, Homo sapiens
agggctaagtgcagt

SEQ ID NO: 1751684 - DNA, 15 bp, Homo sapiens
gggctaagtgcagta

SEQ ID NO: 1751685 - DNA, 15 bp, Homo sapiens
ggctaagtgcagtag

SEQ ID NO: 1751686 - DNA, 15 bp, Homo sapiens
gctaagtgcagtagg

SEQ ID NO: 1751687 - DNA, 15 bp, Homo sapiens
ctaagtgcagtaggt

SEQ ID NO: 1751688 - DNA, 15 bp, Homo sapiens
taagtgcagtaggta

SEQ ID NO: 1751689 - DNA, 15 bp, Homo sapiens
aagtgcagtaggtat

SEQ ID NO: 1751690 - DNA, 15 bp, Homo sapiens
agtgcagtaggtata

SEQ ID NO: 1751691 - DNA, 15 bp, Homo sapiens
gtgcagtaggtatag

SEQ ID NO: 1751692 - DNA, 15 bp, Homo sapiens
tgcagtaggtatagg

SEQ ID NO: 1751693 - DNA, 15 bp, Homo sapiens
gcagtaggtataggg

SEQ ID NO: 1751694 - DNA, 15 bp, Homo sapiens
cagtaggtataggga

SEQ ID NO: 1751695 - DNA, 15 bp, Homo sapiens
agtaggtatagggaa

SEQ ID NO: 1751696 - DNA, 15 bp, Homo sapiens
gtaggtatagggaag

SEQ ID NO: 1751697 - DNA, 15 bp, Homo sapiens
taggtatagggaagg

SEQ ID NO: 1751698 - DNA, 15 bp, Homo sapiens
aggtatagggaagga

SEQ ID NO: 1751699 - DNA, 15 bp, Homo sapiens
ggtatagggaaggac

SEQ ID NO: 1751700 - DNA, 15 bp, Homo sapiens
gtatagggaaggaca

SEQ ID NO: 1751701 - DNA, 15 bp, Homo sapiens
tatagggaaggacag

SEQ ID NO: 1751702 - DNA, 15 bp, Homo sapiens
atagggaaggacagt

SEQ ID NO: 1751703 - DNA, 15 bp, Homo sapiens
tagggaaggacagta

SEQ ID NO: 1751704 - DNA, 15 bp, Homo sapiens
agggaaggacagtaa

SEQ ID NO: 1751705 - DNA, 15 bp, Homo sapiens
gggaaggacagtaag

SEQ ID NO: 1751706 - DNA, 15 bp, Homo sapiens
ggaaggacagtaagg

SEQ ID NO: 1751707 - DNA, 15 bp, Homo sapiens
gaaggacagtaaggt

SEQ ID NO: 1751708 - DNA, 15 bp, Homo sapiens
aaggacagtaaggta

SEQ ID NO: 1751709 - DNA, 15 bp, Homo sapiens
aggacagtaaggtag

SEQ ID NO: 1751710 - DNA, 15 bp, Homo sapiens
ggacagtaaggtagg

SEQ ID NO: 1751711 - DNA, 15 bp, Homo sapiens
gacagtaaggtaggg

SEQ ID NO: 1751712 - DNA, 15 bp, Homo sapiens
acagtaaggtagggc

SEQ ID NO: 1751713 - DNA, 15 bp, Homo sapiens
cagtaaggtagggca

SEQ ID NO: 1751714 - DNA, 15 bp, Homo sapiens
agtaaggtagggcag

SEQ ID NO: 1751715 - DNA, 15 bp, Homo sapiens
gtaaggtagggcagg

SEQ ID NO: 1751716 - DNA, 15 bp, Homo sapiens
taaggtagggcaggg

SEQ ID NO: 1751717 - DNA, 15 bp, Homo sapiens
aaggtagggcaggga

SEQ ID NO: 1751718 - DNA, 15 bp, Homo sapiens
aggtagggcagggat

SEQ ID NO: 1751719 - DNA, 15 bp, Homo sapiens
ggtagggcagggatg

SEQ ID NO: 1751720 - DNA, 15 bp, Homo sapiens
gtagggcagggatgt

SEQ ID NO: 1751721 - DNA, 15 bp, Homo sapiens
tagggcagggatgtc

SEQ ID NO: 1751722 - DNA, 15 bp, Homo sapiens
agggcagggatgtca

SEQ ID NO: 1751723 - DNA, 15 bp, Homo sapiens
gggcagggatgtcag

SEQ ID NO: 1751724 - DNA, 15 bp, Homo sapiens
ggcagggatgtcagt

SEQ ID NO: 1751725 - DNA, 15 bp, Homo sapiens
gcagggatgtcagtg

SEQ ID NO: 1751726 - DNA, 15 bp, Homo sapiens
cagggatgtcagtgg

SEQ ID NO: 1751727 - DNA, 15 bp, Homo sapiens
agggatgtcagtggg

SEQ ID NO: 1751728 - DNA, 15 bp, Homo sapiens
gggatgtcagtggga

SEQ ID NO: 1751729 - DNA, 15 bp, Homo sapiens
ggatgtcagtgggaa

SEQ ID NO: 1751730 - DNA, 15 bp, Homo sapiens
gatgtcagtgggaaa

SEQ ID NO: 1751731 - DNA, 15 bp, Homo sapiens
atgtcagtgggaaaa

SEQ ID NO: 1751732 - DNA, 15 bp, Homo sapiens
tgtcagtgggaaaac

SEQ ID NO: 1751733 - DNA, 15 bp, Homo sapiens
gtcagtgggaaaact

SEQ ID NO: 1751734 - DNA, 15 bp, Homo sapiens
tcagtgggaaaacta

SEQ ID NO: 1751735 - DNA, 15 bp, Homo sapiens
cagtgggaaaactat

SEQ ID NO: 1751736 - DNA, 15 bp, Homo sapiens
agtgggaaaactatg

SEQ ID NO: 1751737 - DNA, 15 bp, Homo sapiens
gtgggaaaactatgg

SEQ ID NO: 1751738 - DNA, 15 bp, Homo sapiens
tgggaaaactatggg

SEQ ID NO: 1751739 - DNA, 15 bp, Homo sapiens
gggaaaactatgggt

SEQ ID NO: 1751740 - DNA, 15 bp, Homo sapiens
ggaaaactatgggtc

SEQ ID NO: 1751741 - DNA, 15 bp, Homo sapiens
gaaaactatgggtct

SEQ ID NO: 1751742 - DNA, 15 bp, Homo sapiens
aaaactatgggtctc

SEQ ID NO: 1751743 - DNA, 15 bp, Homo sapiens
aaactatgggtctct

SEQ ID NO: 1751744 - DNA, 15 bp, Homo sapiens
aactatgggtctctt

SEQ ID NO: 1751745 - DNA, 15 bp, Homo sapiens
actatgggtctcttc

SEQ ID NO: 1751746 - DNA, 15 bp, Homo sapiens
ctatgggtctcttca

SEQ ID NO: 1751747 - DNA, 15 bp, Homo sapiens
tatgggtctcttcac

SEQ ID NO: 1751748 - DNA, 15 bp, Homo sapiens
atgggtctcttcacc

SEQ ID NO: 1751749 - DNA, 15 bp, Homo sapiens
tgggtctcttcacca

SEQ ID NO: 1751750 - DNA, 15 bp, Homo sapiens
gggtctcttcaccag

SEQ ID NO: 1751751 - DNA, 15 bp, Homo sapiens
ggtctcttcaccagg

SEQ ID NO: 1751752 - DNA, 15 bp, Homo sapiens
gtctcttcaccagga

SEQ ID NO: 1751753 - DNA, 15 bp, Homo sapiens
tctcttcaccaggaa

SEQ ID NO: 1751754 - DNA, 15 bp, Homo sapiens
ctcttcaccaggaaa

SEQ ID NO: 1751755 - DNA, 15 bp, Homo sapiens
tcttcaccaggaaaa

SEQ ID NO: 1751756 - DNA, 15 bp, Homo sapiens
cttcaccaggaaaac

SEQ ID NO: 1751757 - DNA, 15 bp, Homo sapiens
ttcaccaggaaaact

SEQ ID NO: 1751758 - DNA, 15 bp, Homo sapiens
tcaccaggaaaactg

SEQ ID NO: 1751759 - DNA, 15 bp, Homo sapiens
caccaggaaaactgg

SEQ ID NO: 1751760 - DNA, 15 bp, Homo sapiens
accaggaaaactgga

SEQ ID NO: 1751761 - DNA, 15 bp, Homo sapiens
ccaggaaaactggaa

SEQ ID NO: 1751762 - DNA, 15 bp, Homo sapiens
caggaaaactggaaa

SEQ ID NO: 1751763 - DNA, 15 bp, Homo sapiens
aggaaaactggaaaa

SEQ ID NO: 1751764 - DNA, 15 bp, Homo sapiens
ggaaaactggaaaat

SEQ ID NO: 1751765 - DNA, 15 bp, Homo sapiens
gaaaactggaaaatt

SEQ ID NO: 1751766 - DNA, 15 bp, Homo sapiens
aaaactggaaaattg

SEQ ID NO: 1751767 - DNA, 15 bp, Homo sapiens
aaactggaaaattga

SEQ ID NO: 1751768 - DNA, 15 bp, Homo sapiens
aactggaaaattgaa

SEQ ID NO: 1751769 - DNA, 15 bp, Homo sapiens
actggaaaattgaag

SEQ ID NO: 1751770 - DNA, 15 bp, Homo sapiens
ctggaaaattgaagc

SEQ ID NO: 1751771 - DNA, 15 bp, Homo sapiens
tggaaaattgaagct

SEQ ID NO: 1751772 - DNA, 15 bp, Homo sapiens
ggaaaattgaagcta

SEQ ID NO: 1751773 - DNA, 15 bp, Homo sapiens
gaaaattgaagctag

SEQ ID NO: 1751774 - DNA, 15 bp, Homo sapiens
aaaattgaagctagg

SEQ ID NO: 1751775 - DNA, 15 bp, Homo sapiens
aaattgaagctaggg

SEQ ID NO: 1751776 - DNA, 15 bp, Homo sapiens
aattgaagctaggga

SEQ ID NO: 1751777 - DNA, 15 bp, Homo sapiens
attgaagctagggaa

SEQ ID NO: 1751778 - DNA, 15 bp, Homo sapiens
ttgaagctagggaaa

SEQ ID NO: 1751779 - DNA, 15 bp, Homo sapiens
tgaagctagggaaac

SEQ ID NO: 1751780 - DNA, 15 bp, Homo sapiens
gaagctagggaaacc

SEQ ID NO: 1751781 - DNA, 15 bp, Homo sapiens
aagctagggaaacct

SEQ ID NO: 1751782 - DNA, 15 bp, Homo sapiens
agctagggaaacctt

SEQ ID NO: 1751783 - DNA, 15 bp, Homo sapiens
gctagggaaaccttg

SEQ ID NO: 1751784 - DNA, 15 bp, Homo sapiens
ctagggaaaccttgg

SEQ ID NO: 1751785 - DNA, 15 bp, Homo sapiens
tagggaaaccttggc

SEQ ID NO: 1751786 - DNA, 15 bp, Homo sapiens
agggaaaccttggcc

SEQ ID NO: 1751787 - DNA, 15 bp, Homo sapiens
gggaaaccttggcca

SEQ ID NO: 1751788 - DNA, 15 bp, Homo sapiens
ggaaaccttggccac

SEQ ID NO: 1751789 - DNA, 15 bp, Homo sapiens
gaaaccttggccact

SEQ ID NO: 1751790 - DNA, 15 bp, Homo sapiens
aaaccttggccactg

SEQ ID NO: 1751791 - DNA, 15 bp, Homo sapiens
aaccttggccactga

SEQ ID NO: 1751792 - DNA, 15 bp, Homo sapiens
accttggccactgaa

SEQ ID NO: 1751793 - DNA, 15 bp, Homo sapiens
ccttggccactgaag

SEQ ID NO: 1751794 - DNA, 15 bp, Homo sapiens
cttggccactgaaga

SEQ ID NO: 1751795 - DNA, 15 bp, Homo sapiens
ttggccactgaagag

SEQ ID NO: 1751796 - DNA, 15 bp, Homo sapiens
tggccactgaagaga

SEQ ID NO: 1751797 - DNA, 15 bp, Homo sapiens
ggccactgaagagag

SEQ ID NO: 1751798 - DNA, 15 bp, Homo sapiens
gccactgaagagagt

SEQ ID NO: 1751799 - DNA, 15 bp, Homo sapiens
ccactgaagagagtg

SEQ ID NO: 1751800 - DNA, 15 bp, Homo sapiens
cactgaagagagtgg

SEQ ID NO: 1751801 - DNA, 15 bp, Homo sapiens
actgaagagagtgga

SEQ ID NO: 1751802 - DNA, 15 bp, Homo sapiens
ctgaagagagtggaa

SEQ ID NO: 1751803 - DNA, 15 bp, Homo sapiens
tgaagagagtggaag

SEQ ID NO: 1751804 - DNA, 15 bp, Homo sapiens
gaagagagtggaaga

SEQ ID NO: 1751805 - DNA, 15 bp, Homo sapiens
aagagagtggaagaa

SEQ ID NO: 1751806 - DNA, 15 bp, Homo sapiens
agagagtggaagaat

SEQ ID NO: 1751807 - DNA, 15 bp, Homo sapiens
gagagtggaagaatc

SEQ ID NO: 1751808 - DNA, 15 bp, Homo sapiens
agagtggaagaatcc

SEQ ID NO: 1751809 - DNA, 15 bp, Homo sapiens
gagtggaagaatcct

SEQ ID NO: 1751810 - DNA, 15 bp, Homo sapiens
agtggaagaatcctg

SEQ ID NO: 1751811 - DNA, 15 bp, Homo sapiens
gtggaagaatcctgc

SEQ ID NO: 1751812 - DNA, 15 bp, Homo sapiens
tggaagaatcctgca

SEQ ID NO: 1751813 - DNA, 15 bp, Homo sapiens
ggaagaatcctgcaa

SEQ ID NO: 1751814 - DNA, 15 bp, Homo sapiens
gaagaatcctgcaag

SEQ ID NO: 1751815 - DNA, 15 bp, Homo sapiens
aagaatcctgcaagg

SEQ ID NO: 1751816 - DNA, 15 bp, Homo sapiens
agaatcctgcaaggg

SEQ ID NO: 1751817 - DNA, 15 bp, Homo sapiens
gaatcctgcaaggga

SEQ ID NO: 1751818 - DNA, 15 bp, Homo sapiens
aatcctgcaagggaa

SEQ ID NO: 1751819 - DNA, 15 bp, Homo sapiens
atcctgcaagggaaa

SEQ ID NO: 1751820 - DNA, 15 bp, Homo sapiens
tcctgcaagggaaag

SEQ ID NO: 1751821 - DNA, 15 bp, Homo sapiens
cctgcaagggaaaga

SEQ ID NO: 1751822 - DNA, 15 bp, Homo sapiens
ctgcaagggaaagag

SEQ ID NO: 1751823 - DNA, 15 bp, Homo sapiens
tgcaagggaaagagc

SEQ ID NO: 1751824 - DNA, 15 bp, Homo sapiens
gcaagggaaagagcc

SEQ ID NO: 1751825 - DNA, 15 bp, Homo sapiens
caagggaaagagcca

SEQ ID NO: 1751826 - DNA, 15 bp, Homo sapiens
aagggaaagagccaa

SEQ ID NO: 1751827 - DNA, 15 bp, Homo sapiens
agggaaagagccaag

SEQ ID NO: 1751828 - DNA, 15 bp, Homo sapiens
gggaaagagccaaga

SEQ ID NO: 1751829 - DNA, 15 bp, Homo sapiens
ggaaagagccaagaa

SEQ ID NO: 1751830 - DNA, 15 bp, Homo sapiens
gaaagagccaagaaa

SEQ ID NO: 1751831 - DNA, 15 bp, Homo sapiens
aaagagccaagaaag

SEQ ID NO: 1751832 - DNA, 15 bp, Homo sapiens
aagagccaagaaagg

SEQ ID NO: 1751833 - DNA, 15 bp, Homo sapiens
agagccaagaaaggg

SEQ ID NO: 1751834 - DNA, 15 bp, Homo sapiens
gagccaagaaagggt

SEQ ID NO: 1751835 - DNA, 15 bp, Homo sapiens
agccaagaaagggta

SEQ ID NO: 1751836 - DNA, 15 bp, Homo sapiens
gccaagaaagggtac

SEQ ID NO: 1751837 - DNA, 15 bp, Homo sapiens
ccaagaaagggtacc

SEQ ID NO: 1751838 - DNA, 15 bp, Homo sapiens
caagaaagggtaccc

SEQ ID NO: 1751839 - DNA, 15 bp, Homo sapiens
aagaaagggtaccca

SEQ ID NO: 1751840 - DNA, 15 bp, Homo sapiens
agaaagggtacccag

SEQ ID NO: 1751841 - DNA, 15 bp, Homo sapiens
gaaagggtacccaga

SEQ ID NO: 1751842 - DNA, 15 bp, Homo sapiens
aaagggtacccagat

SEQ ID NO: 1751843 - DNA, 15 bp, Homo sapiens
aagggtacccagatt

SEQ ID NO: 1751844 - DNA, 15 bp, Homo sapiens
agggtacccagattc

SEQ ID NO: 1751845 - DNA, 15 bp, Homo sapiens
gggtacccagattct

SEQ ID NO: 1751846 - DNA, 15 bp, Homo sapiens
ggtacccagattctg

SEQ ID NO: 1751847 - DNA, 15 bp, Homo sapiens
gtacccagattctgt

SEQ ID NO: 1751848 - DNA, 15 bp, Homo sapiens
tacccagattctgtc

SEQ ID NO: 1751849 - DNA, 15 bp, Homo sapiens
acccagattctgtct

SEQ ID NO: 1751850 - DNA, 15 bp, Homo sapiens
cccagattctgtctg

SEQ ID NO: 1751851 - DNA, 15 bp, Homo sapiens
ccagattctgtctga

SEQ ID NO: 1751852 - DNA, 15 bp, Homo sapiens
cagattctgtctgaa

SEQ ID NO: 1751853 - DNA, 15 bp, Homo sapiens
agattctgtctgaaa

SEQ ID NO: 1751854 - DNA, 15 bp, Homo sapiens
gattctgtctgaaat

SEQ ID NO: 1751855 - DNA, 15 bp, Homo sapiens
attctgtctgaaatc

SEQ ID NO: 1751856 - DNA, 15 bp, Homo sapiens
ttctgtctgaaatct

SEQ ID NO: 1751857 - DNA, 15 bp, Homo sapiens
tctgtctgaaatctg

SEQ ID NO: 1751858 - DNA, 15 bp, Homo sapiens
ctgtctgaaatctga

SEQ ID NO: 1751859 - DNA, 15 bp, Homo sapiens
tgtctgaaatctgaa

SEQ ID NO: 1751860 - DNA, 15 bp, Homo sapiens
gtctgaaatctgaat

SEQ ID NO: 1751861 - DNA, 15 bp, Homo sapiens
tctgaaatctgaata

SEQ ID NO: 1751862 - DNA, 15 bp, Homo sapiens
ctgaaatctgaataa

SEQ ID NO: 1751863 - DNA, 15 bp, Homo sapiens
tgaaatctgaataat

SEQ ID NO: 1751864 - DNA, 15 bp, Homo sapiens
gaaatctgaataatt

SEQ ID NO: 1751865 - DNA, 15 bp, Homo sapiens
aaatctgaataattc

SEQ ID NO: 1751866 - DNA, 15 bp, Homo sapiens
aatctgaataattcc

SEQ ID NO: 1751867 - DNA, 15 bp, Homo sapiens
atctgaataattcct

SEQ ID NO: 1751868 - DNA, 15 bp, Homo sapiens
tctgaataattcctg

SEQ ID NO: 1751869 - DNA, 15 bp, Homo sapiens
ctgaataattcctgt

SEQ ID NO: 1751870 - DNA, 15 bp, Homo sapiens
tgaataattcctgtg

SEQ ID NO: 1751871 - DNA, 15 bp, Homo sapiens
gaataattcctgtgt

SEQ ID NO: 1751872 - DNA, 15 bp, Homo sapiens
aataattcctgtgtg

SEQ ID NO: 1751873 - DNA, 15 bp, Homo sapiens
ataattcctgtgtgt

SEQ ID NO: 1751874 - DNA, 15 bp, Homo sapiens
taattcctgtgtgtc

SEQ ID NO: 1751875 - DNA, 15 bp, Homo sapiens
aattcctgtgtgtca

SEQ ID NO: 1751876 - DNA, 15 bp, Homo sapiens
attcctgtgtgtcac

SEQ ID NO: 1751877 - DNA, 15 bp, Homo sapiens
ttcctgtgtgtcaca

SEQ ID NO: 1751878 - DNA, 15 bp, Homo sapiens
tcctgtgtgtcacag

SEQ ID NO: 1751879 - DNA, 15 bp, Homo sapiens
cctgtgtgtcacaga

SEQ ID NO: 1751880 - DNA, 15 bp, Homo sapiens
ctgtgtgtcacagac

SEQ ID NO: 1751881 - DNA, 15 bp, Homo sapiens
tgtgtgtcacagact

SEQ ID NO: 1751882 - DNA, 15 bp, Homo sapiens
gtgtgtcacagactc

SEQ ID NO: 1751883 - DNA, 15 bp, Homo sapiens
tgtgtcacagactca

SEQ ID NO: 1751884 - DNA, 15 bp, Homo sapiens
gtgtcacagactcag

SEQ ID NO: 1751885 - DNA, 15 bp, Homo sapiens
tgtcacagactcaga

SEQ ID NO: 1751886 - DNA, 15 bp, Homo sapiens
gtcacagactcagag

SEQ ID NO: 1751887 - DNA, 15 bp, Homo sapiens
tcacagactcagagc

SEQ ID NO: 1751888 - DNA, 15 bp, Homo sapiens
cacagactcagagca

SEQ ID NO: 1751889 - DNA, 15 bp, Homo sapiens
acagactcagagcag

SEQ ID NO: 1751890 - DNA, 15 bp, Homo sapiens
cagactcagagcagc

SEQ ID NO: 1751891 - DNA, 15 bp, Homo sapiens
agactcagagcagcc

SEQ ID NO: 1751892 - DNA, 15 bp, Homo sapiens
gactcagagcagcca

SEQ ID NO: 1751893 - DNA, 15 bp, Homo sapiens
actcagagcagccaa

SEQ ID NO: 1751894 - DNA, 15 bp, Homo sapiens
ctcagagcagccaaa

SEQ ID NO: 1751895 - DNA, 15 bp, Homo sapiens
tcagagcagccaaat

SEQ ID NO: 1751896 - DNA, 15 bp, Homo sapiens
cagagcagccaaatg

SEQ ID NO: 1751897 - DNA, 15 bp, Homo sapiens
agagcagccaaatga

SEQ ID NO: 1751898 - DNA, 15 bp, Homo sapiens
gagcagccaaatgaa

SEQ ID NO: 1751899 - DNA, 15 bp, Homo sapiens
agcagccaaatgaag

SEQ ID NO: 1751900 - DNA, 15 bp, Homo sapiens
gcagccaaatgaagg

SEQ ID NO: 1751901 - DNA, 15 bp, Homo sapiens
cagccaaatgaaggg

SEQ ID NO: 1751902 - DNA, 15 bp, Homo sapiens
agccaaatgaagggc

SEQ ID NO: 1751903 - DNA, 15 bp, Homo sapiens
gccaaatgaagggca

SEQ ID NO: 1751904 - DNA, 15 bp, Homo sapiens
ccaaatgaagggcaa

SEQ ID NO: 1751905 - DNA, 15 bp, Homo sapiens
caaatgaagggcaaa

SEQ ID NO: 1751906 - DNA, 15 bp, Homo sapiens
aaatgaagggcaaaa

SEQ ID NO: 1751907 - DNA, 15 bp, Homo sapiens
aatgaagggcaaaag

SEQ ID NO: 1751908 - DNA, 15 bp, Homo sapiens
atgaagggcaaaaga

SEQ ID NO: 1751909 - DNA, 15 bp, Homo sapiens
tgaagggcaaaagat

SEQ ID NO: 1751910 - DNA, 15 bp, Homo sapiens
gaagggcaaaagatc

SEQ ID NO: 1751911 - DNA, 15 bp, Homo sapiens
aagggcaaaagatct

SEQ ID NO: 1751912 - DNA, 15 bp, Homo sapiens
agggcaaaagatctg

SEQ ID NO: 1751913 - DNA, 15 bp, Homo sapiens
gggcaaaagatctga

SEQ ID NO: 1751914 - DNA, 15 bp, Homo sapiens
ggcaaaagatctgaa

SEQ ID NO: 1751915 - DNA, 15 bp, Homo sapiens
gcaaaagatctgaac

SEQ ID NO: 1751916 - DNA, 15 bp, Homo sapiens
caaaagatctgaact

SEQ ID NO: 1751917 - DNA, 15 bp, Homo sapiens
aaaagatctgaactg

SEQ ID NO: 1751918 - DNA, 15 bp, Homo sapiens
aaagatctgaactga

SEQ ID NO: 1751919 - DNA, 15 bp, Homo sapiens
aagatctgaactgaa

SEQ ID NO: 1751920 - DNA, 15 bp, Homo sapiens
agatctgaactgaaa

SEQ ID NO: 1751921 - DNA, 15 bp, Homo sapiens
gatctgaactgaaac

SEQ ID NO: 1751922 - DNA, 15 bp, Homo sapiens
atctgaactgaaact

SEQ ID NO: 1751923 - DNA, 15 bp, Homo sapiens
tctgaactgaaactg

SEQ ID NO: 1751924 - DNA, 15 bp, Homo sapiens
ctgaactgaaactgg

SEQ ID NO: 1751925 - DNA, 15 bp, Homo sapiens
tgaactgaaactgga

SEQ ID NO: 1751926 - DNA, 15 bp, Homo sapiens
gaactgaaactggag

SEQ ID NO: 1751927 - DNA, 15 bp, Homo sapiens
aactgaaactggagt

SEQ ID NO: 1751928 - DNA, 15 bp, Homo sapiens
actgaaactggagtt

SEQ ID NO: 1751929 - DNA, 15 bp, Homo sapiens
ctgaaactggagttg

SEQ ID NO: 1751930 - DNA, 15 bp, Homo sapiens
tgaaactggagttgc

SEQ ID NO: 1751931 - DNA, 15 bp, Homo sapiens
gaaactggagttgct

SEQ ID NO: 1751932 - DNA, 15 bp, Homo sapiens
aaactggagttgctg

SEQ ID NO: 1751933 - DNA, 15 bp, Homo sapiens
aactggagttgctgc

SEQ ID NO: 1751934 - DNA, 15 bp, Homo sapiens
actggagttgctgcc

SEQ ID NO: 1751935 - DNA, 15 bp, Homo sapiens
ctggagttgctgccc

SEQ ID NO: 1751936 - DNA, 15 bp, Homo sapiens
tggagttgctgccca

SEQ ID NO: 1751937 - DNA, 15 bp, Homo sapiens
ggagttgctgcccaa

SEQ ID NO: 1751938 - DNA, 15 bp, Homo sapiens
gagttgctgcccaat

SEQ ID NO: 1751939 - DNA, 15 bp, Homo sapiens
agttgctgcccaata

SEQ ID NO: 1751940 - DNA, 15 bp, Homo sapiens
gttgctgcccaataa

SEQ ID NO: 1751941 - DNA, 15 bp, Homo sapiens
ttgctgcccaataaa

SEQ ID NO: 1751942 - DNA, 15 bp, Homo sapiens
tgctgcccaataaac

SEQ ID NO: 1751943 - DNA, 15 bp, Homo sapiens
gctgcccaataaaca

SEQ ID NO: 1751944 - DNA, 15 bp, Homo sapiens
ctgcccaataaacag

SEQ ID NO: 1751945 - DNA, 15 bp, Homo sapiens
tgcccaataaacaga

SEQ ID NO: 1751946 - DNA, 15 bp, Homo sapiens
gcccaataaacagaa

SEQ ID NO: 1751947 - DNA, 15 bp, Homo sapiens
cccaataaacagaac

SEQ ID NO: 1751948 - DNA, 15 bp, Homo sapiens
ccaataaacagaaca

SEQ ID NO: 1751949 - DNA, 15 bp, Homo sapiens
caataaacagaacag

SEQ ID NO: 1751950 - DNA, 15 bp, Homo sapiens
aataaacagaacagt

SEQ ID NO: 1751951 - DNA, 15 bp, Homo sapiens
ataaacagaacagtt

SEQ ID NO: 1751952 - DNA, 15 bp, Homo sapiens
taaacagaacagttc

SEQ ID NO: 1751953 - DNA, 15 bp, Homo sapiens
aaacagaacagttca

SEQ ID NO: 1751954 - DNA, 15 bp, Homo sapiens
aacagaacagttcaa

SEQ ID NO: 1751955 - DNA, 15 bp, Homo sapiens
acagaacagttcaag

SEQ ID NO: 1751956 - DNA, 15 bp, Homo sapiens
cagaacagttcaagt

SEQ ID NO: 1751957 - DNA, 15 bp, Homo sapiens
agaacagttcaagtt

SEQ ID NO: 1751958 - DNA, 15 bp, Homo sapiens
gaacagttcaagtta

SEQ ID NO: 1751959 - DNA, 15 bp, Homo sapiens
aacagttcaagttaa

SEQ ID NO: 1751960 - DNA, 15 bp, Homo sapiens
acagttcaagttaag

SEQ ID NO: 1751961 - DNA, 15 bp, Homo sapiens
cagttcaagttaagc

SEQ ID NO: 1751962 - DNA, 15 bp, Homo sapiens
agttcaagttaagca

SEQ ID NO: 1751963 - DNA, 15 bp, Homo sapiens
gttcaagttaagcaa

SEQ ID NO: 1751964 - DNA, 15 bp, Homo sapiens
ttcaagttaagcaaa

SEQ ID NO: 1751965 - DNA, 15 bp, Homo sapiens
tcaagttaagcaaag

SEQ ID NO: 1751966 - DNA, 15 bp, Homo sapiens
caagttaagcaaaga

SEQ ID NO: 1751967 - DNA, 15 bp, Homo sapiens
aagttaagcaaagat

SEQ ID NO: 1751968 - DNA, 15 bp, Homo sapiens
agttaagcaaagata

SEQ ID NO: 1751969 - DNA, 15 bp, Homo sapiens
gttaagcaaagataa

SEQ ID NO: 1751970 - DNA, 15 bp, Homo sapiens
ttaagcaaagataat

SEQ ID NO: 1751971 - DNA, 15 bp, Homo sapiens
taagcaaagataatt

SEQ ID NO: 1751972 - DNA, 15 bp, Homo sapiens
aagcaaagataattg

SEQ ID NO: 1751973 - DNA, 15 bp, Homo sapiens
agcaaagataattgc

SEQ ID NO: 1751974 - DNA, 15 bp, Homo sapiens
gcaaagataattgct

SEQ ID NO: 1751975 - DNA, 15 bp, Homo sapiens
caaagataattgctt

SEQ ID NO: 1751976 - DNA, 15 bp, Homo sapiens
aaagataattgcttc

SEQ ID NO: 1751977 - DNA, 15 bp, Homo sapiens
aagataattgcttct

SEQ ID NO: 1751978 - DNA, 15 bp, Homo sapiens
agataattgcttctt

SEQ ID NO: 1751979 - DNA, 15 bp, Homo sapiens
gataattgcttctta

SEQ ID NO: 1751980 - DNA, 15 bp, Homo sapiens
ataattgcttcttac

SEQ ID NO: 1751981 - DNA, 15 bp, Homo sapiens
taattgcttcttaca

SEQ ID NO: 1751982 - DNA, 15 bp, Homo sapiens
aattgcttcttacaa

SEQ ID NO: 1751983 - DNA, 15 bp, Homo sapiens
attgcttcttacaac

SEQ ID NO: 1751984 - DNA, 15 bp, Homo sapiens
ttgcttcttacaaca

SEQ ID NO: 1751985 - DNA, 15 bp, Homo sapiens
tgcttcttacaacaa

SEQ ID NO: 1751986 - DNA, 15 bp, Homo sapiens
gcttcttacaacaaa

SEQ ID NO: 1751987 - DNA, 15 bp, Homo sapiens
cttcttacaacaaaa

SEQ ID NO: 1751988 - DNA, 15 bp, Homo sapiens
ttcttacaacaaaac

SEQ ID NO: 1751989 - DNA, 15 bp, Homo sapiens
tcttacaacaaaacc

SEQ ID NO: 1751990 - DNA, 15 bp, Homo sapiens
cttacaacaaaacca

SEQ ID NO: 1751991 - DNA, 15 bp, Homo sapiens
ttacaacaaaaccat

SEQ ID NO: 1751992 - DNA, 15 bp, Homo sapiens
tacaacaaaaccatt

SEQ ID NO: 1751993 - DNA, 15 bp, Homo sapiens
acaacaaaaccattc

SEQ ID NO: 1751994 - DNA, 15 bp, Homo sapiens
caacaaaaccattct

SEQ ID NO: 1751995 - DNA, 15 bp, Homo sapiens
aacaaaaccattctc

SEQ ID NO: 1751996 - DNA, 15 bp, Homo sapiens
acaaaaccattctca

SEQ ID NO: 1751997 - DNA, 15 bp, Homo sapiens
caaaaccattctcat

SEQ ID NO: 1751998 - DNA, 15 bp, Homo sapiens
aaaaccattctcatt

SEQ ID NO: 1751999 - DNA, 15 bp, Homo sapiens
aaaccattctcattt

SEQ ID NO: 1752000 - DNA, 15 bp, Homo sapiens
aaccattctcatttt

SEQ ID NO: 1752001 - DNA, 15 bp, Homo sapiens
accattctcatttta

SEQ ID NO: 1752002 - DNA, 15 bp, Homo sapiens
ccattctcattttag

SEQ ID NO: 1752003 - DNA, 15 bp, Homo sapiens
cattctcattttaga

SEQ ID NO: 1752004 - DNA, 15 bp, Homo sapiens
attctcattttagaa

SEQ ID NO: 1752005 - DNA, 15 bp, Homo sapiens
ttctcattttagaaa

SEQ ID NO: 1752006 - DNA, 15 bp, Homo sapiens
tctcattttagaaaa

SEQ ID NO: 1752007 - DNA, 15 bp, Homo sapiens
ctcattttagaaaaa

SEQ ID NO: 1752008 - DNA, 15 bp, Homo sapiens
tcattttagaaaaat

SEQ ID NO: 1752009 - DNA, 15 bp, Homo sapiens
cattttagaaaaata

SEQ ID NO: 1752010 - DNA, 15 bp, Homo sapiens
attttagaaaaataa

SEQ ID NO: 1752011 - DNA, 15 bp, Homo sapiens
ttttagaaaaataac

SEQ ID NO: 1752012 - DNA, 15 bp, Homo sapiens
tttagaaaaataaca

SEQ ID NO: 1752013 - DNA, 15 bp, Homo sapiens
ttagaaaaataacag

SEQ ID NO: 1752014 - DNA, 15 bp, Homo sapiens
tagaaaaataacaga

SEQ ID NO: 1752015 - DNA, 15 bp, Homo sapiens
agaaaaataacagaa

SEQ ID NO: 1752016 - DNA, 15 bp, Homo sapiens
gaaaaataacagaat

SEQ ID NO: 1752017 - DNA, 15 bp, Homo sapiens
aaaaataacagaatt

SEQ ID NO: 1752018 - DNA, 15 bp, Homo sapiens
aaaataacagaattt

SEQ ID NO: 1752019 - DNA, 15 bp, Homo sapiens
aaataacagaattta

SEQ ID NO: 1752020 - DNA, 15 bp, Homo sapiens
aataacagaatttag

SEQ ID NO: 1752021 - DNA, 15 bp, Homo sapiens
ataacagaatttagg

SEQ ID NO: 1752022 - DNA, 15 bp, Homo sapiens
taacagaatttagga

SEQ ID NO: 1752023 - DNA, 15 bp, Homo sapiens
aacagaatttaggat

SEQ ID NO: 1752024 - DNA, 15 bp, Homo sapiens
acagaatttaggatc

SEQ ID NO: 1752025 - DNA, 15 bp, Homo sapiens
cagaatttaggatct

SEQ ID NO: 1752026 - DNA, 15 bp, Homo sapiens
agaatttaggatctt

SEQ ID NO: 1752027 - DNA, 15 bp, Homo sapiens
gaatttaggatcttc

SEQ ID NO: 1752028 - DNA, 15 bp, Homo sapiens
aatttaggatcttca

SEQ ID NO: 1752029 - DNA, 15 bp, Homo sapiens
atttaggatcttcac

SEQ ID NO: 1752030 - DNA, 15 bp, Homo sapiens
tttaggatcttcaca

SEQ ID NO: 1752031 - DNA, 15 bp, Homo sapiens
ttaggatcttcacaa

SEQ ID NO: 1752032 - DNA, 15 bp, Homo sapiens
taggatcttcacaat

SEQ ID NO: 1752033 - DNA, 15 bp, Homo sapiens
aggatcttcacaatg

SEQ ID NO: 1752034 - DNA, 15 bp, Homo sapiens
ggatcttcacaatgt

SEQ ID NO: 1752035 - DNA, 15 bp, Homo sapiens
gatcttcacaatgta

SEQ ID NO: 1752036 - DNA, 15 bp, Homo sapiens
atcttcacaatgtaa

SEQ ID NO: 1752037 - DNA, 15 bp, Homo sapiens
tcttcacaatgtaac

SEQ ID NO: 1752038 - DNA, 15 bp, Homo sapiens
cttcacaatgtaaca

SEQ ID NO: 1752039 - DNA, 15 bp, Homo sapiens
ttcacaatgtaacat

SEQ ID NO: 1752040 - DNA, 15 bp, Homo sapiens
tcacaatgtaacatt

SEQ ID NO: 1752041 - DNA, 15 bp, Homo sapiens
cacaatgtaacattt

SEQ ID NO: 1752042 - DNA, 15 bp, Homo sapiens
acaatgtaacattta

SEQ ID NO: 1752043 - DNA, 15 bp, Homo sapiens
caatgtaacatttat

SEQ ID NO: 1752044 - DNA, 15 bp, Homo sapiens
aatgtaacatttatg

SEQ ID NO: 1752045 - DNA, 15 bp, Homo sapiens
atgtaacatttatga

SEQ ID NO: 1752046 - DNA, 15 bp, Homo sapiens
tgtaacatttatgat

SEQ ID NO: 1752047 - DNA, 15 bp, Homo sapiens
gtaacatttatgatg

SEQ ID NO: 1752048 - DNA, 15 bp, Homo sapiens
taacatttatgatgt

SEQ ID NO: 1752049 - DNA, 15 bp, Homo sapiens
aacatttatgatgtt

SEQ ID NO: 1752050 - DNA, 15 bp, Homo sapiens
acatttatgatgttc

SEQ ID NO: 1752051 - DNA, 15 bp, Homo sapiens
catttatgatgttca

SEQ ID NO: 1752052 - DNA, 15 bp, Homo sapiens
atttatgatgttcag

SEQ ID NO: 1752053 - DNA, 15 bp, Homo sapiens
tttatgatgttcagg

SEQ ID NO: 1752054 - DNA, 15 bp, Homo sapiens
ttatgatgttcagga

SEQ ID NO: 1752055 - DNA, 15 bp, Homo sapiens
tatgatgttcaggat

SEQ ID NO: 1752056 - DNA, 15 bp, Homo sapiens
atgatgttcaggata

SEQ ID NO: 1752057 - DNA, 15 bp, Homo sapiens
tgatgttcaggatac

SEQ ID NO: 1752058 - DNA, 15 bp, Homo sapiens
gatgttcaggataca

SEQ ID NO: 1752059 - DNA, 15 bp, Homo sapiens
atgttcaggatacag

SEQ ID NO: 1752060 - DNA, 15 bp, Homo sapiens
tgttcaggatacagt

SEQ ID NO: 1752061 - DNA, 15 bp, Homo sapiens
gttcaggatacagtt

SEQ ID NO: 1752062 - DNA, 15 bp, Homo sapiens
ttcaggatacagttc

SEQ ID NO: 1752063 - DNA, 15 bp, Homo sapiens
tcaggatacagttct

SEQ ID NO: 1752064 - DNA, 15 bp, Homo sapiens
caggatacagttcta

SEQ ID NO: 1752065 - DNA, 15 bp, Homo sapiens
aggatacagttctaa

SEQ ID NO: 1752066 - DNA, 15 bp, Homo sapiens
ggatacagttctaaa

SEQ ID NO: 1752067 - DNA, 15 bp, Homo sapiens
gatacagttctaaaa

SEQ ID NO: 1752068 - DNA, 15 bp, Homo sapiens
atacagttctaaaat

SEQ ID NO: 1752069 - DNA, 15 bp, Homo sapiens
tacagttctaaaatt

SEQ ID NO: 1752070 - DNA, 15 bp, Homo sapiens
acagttctaaaatta

SEQ ID NO: 1752071 - DNA, 15 bp, Homo sapiens
cagttctaaaattat

SEQ ID NO: 1752072 - DNA, 15 bp, Homo sapiens
agttctaaaattatc

SEQ ID NO: 1752073 - DNA, 15 bp, Homo sapiens
gttctaaaattatcc

SEQ ID NO: 1752074 - DNA, 15 bp, Homo sapiens
ttctaaaattatcca

SEQ ID NO: 1752075 - DNA, 15 bp, Homo sapiens
tctaaaattatccag

SEQ ID NO: 1752076 - DNA, 15 bp, Homo sapiens
ctaaaattatccagc

SEQ ID NO: 1752077 - DNA, 15 bp, Homo sapiens
taaaattatccagca

SEQ ID NO: 1752078 - DNA, 15 bp, Homo sapiens
aaaattatccagcat

SEQ ID NO: 1752079 - DNA, 15 bp, Homo sapiens
aaattatccagcata

SEQ ID NO: 1752080 - DNA, 15 bp, Homo sapiens
aattatccagcatag

SEQ ID NO: 1752081 - DNA, 15 bp, Homo sapiens
attatccagcataga

SEQ ID NO: 1752082 - DNA, 15 bp, Homo sapiens
ttatccagcatagaa

SEQ ID NO: 1752083 - DNA, 15 bp, Homo sapiens
tatccagcatagaaa

SEQ ID NO: 1752084 - DNA, 15 bp, Homo sapiens
atccagcatagaaag

SEQ ID NO: 1752085 - DNA, 15 bp, Homo sapiens
tccagcatagaaaga

SEQ ID NO: 1752086 - DNA, 15 bp, Homo sapiens
ccagcatagaaagaa

SEQ ID NO: 1752087 - DNA, 15 bp, Homo sapiens
cagcatagaaagaag

SEQ ID NO: 1752088 - DNA, 15 bp, Homo sapiens
agcatagaaagaagg

SEQ ID NO: 1752089 - DNA, 15 bp, Homo sapiens
gcatagaaagaaggt

SEQ ID NO: 1752090 - DNA, 15 bp, Homo sapiens
catagaaagaaggtc

SEQ ID NO: 1752091 - DNA, 15 bp, Homo sapiens
atagaaagaaggtca

SEQ ID NO: 1752092 - DNA, 15 bp, Homo sapiens
tagaaagaaggtcaa

SEQ ID NO: 1752093 - DNA, 15 bp, Homo sapiens
agaaagaaggtcaaa

SEQ ID NO: 1752094 - DNA, 15 bp, Homo sapiens
gaaagaaggtcaaag

SEQ ID NO: 1752095 - DNA, 15 bp, Homo sapiens
aaagaaggtcaaaga

SEQ ID NO: 1752096 - DNA, 15 bp, Homo sapiens
aagaaggtcaaagaa

SEQ ID NO: 1752097 - DNA, 15 bp, Homo sapiens
agaaggtcaaagaaa

SEQ ID NO: 1752098 - DNA, 15 bp, Homo sapiens
gaaggtcaaagaaac

SEQ ID NO: 1752099 - DNA, 15 bp, Homo sapiens
aaggtcaaagaaacc

SEQ ID NO: 1752100 - DNA, 15 bp, Homo sapiens
aggtcaaagaaacca

SEQ ID NO: 1752101 - DNA, 15 bp, Homo sapiens
ggtcaaagaaaccaa

SEQ ID NO: 1752102 - DNA, 15 bp, Homo sapiens
tcaaagaaaccaaat

SEQ ID NO: 1752103 - DNA, 15 bp, Homo sapiens
caaagaaaccaaatg

SEQ ID NO: 1752104 - DNA, 15 bp, Homo sapiens
aaagaaaccaaatgc

SEQ ID NO: 1752105 - DNA, 15 bp, Homo sapiens
aagaaaccaaatgct

SEQ ID NO: 1752106 - DNA, 15 bp, Homo sapiens
agaaaccaaatgctg

SEQ ID NO: 1752107 - DNA, 15 bp, Homo sapiens
gaaaccaaatgctgg

SEQ ID NO: 1752108 - DNA, 15 bp, Homo sapiens
aaaccaaatgctggt

SEQ ID NO: 1752109 - DNA, 15 bp, Homo sapiens
aaccaaatgctggtt

SEQ ID NO: 1752110 - DNA, 15 bp, Homo sapiens
accaaatgctggttt

SEQ ID NO: 1752111 - DNA, 15 bp, Homo sapiens
ccaaatgctggttta

SEQ ID NO: 1752112 - DNA, 15 bp, Homo sapiens
caaatgctggtttat

SEQ ID NO: 1752113 - DNA, 15 bp, Homo sapiens
aaatgctggtttata

SEQ ID NO: 1752114 - DNA, 15 bp, Homo sapiens
aatgctggtttatag

SEQ ID NO: 1752115 - DNA, 15 bp, Homo sapiens
atgctggtttataga

SEQ ID NO: 1752116 - DNA, 15 bp, Homo sapiens
tgctggtttatagaa

SEQ ID NO: 1752117 - DNA, 15 bp, Homo sapiens
gctggtttatagaat

SEQ ID NO: 1752118 - DNA, 15 bp, Homo sapiens
ctggtttatagaata

SEQ ID NO: 1752119 - DNA, 15 bp, Homo sapiens
tggtttatagaatag

SEQ ID NO: 1752120 - DNA, 15 bp, Homo sapiens
ggtttatagaatagg

SEQ ID NO: 1752121 - DNA, 15 bp, Homo sapiens
gtttatagaatagga

SEQ ID NO: 1752122 - DNA, 15 bp, Homo sapiens
tttatagaataggag

SEQ ID NO: 1752123 - DNA, 15 bp, Homo sapiens
ttatagaataggagc

SEQ ID NO: 1752124 - DNA, 15 bp, Homo sapiens
tatagaataggagct

SEQ ID NO: 1752125 - DNA, 15 bp, Homo sapiens
atagaataggagctt

SEQ ID NO: 1752126 - DNA, 15 bp, Homo sapiens
tagaataggagcttt

SEQ ID NO: 1752127 - DNA, 15 bp, Homo sapiens
agaataggagcttta

SEQ ID NO: 1752128 - DNA, 15 bp, Homo sapiens
gaataggagctttag

SEQ ID NO: 1752129 - DNA, 15 bp, Homo sapiens
aataggagctttagg

SEQ ID NO: 1752130 - DNA, 15 bp, Homo sapiens
ataggagctttaggc

SEQ ID NO: 1752131 - DNA, 15 bp, Homo sapiens
taggagctttaggcc

SEQ ID NO: 1752132 - DNA, 15 bp, Homo sapiens
aggagctttaggcca

SEQ ID NO: 1752133 - DNA, 15 bp, Homo sapiens
ggagctttaggccag

SEQ ID NO: 1752134 - DNA, 15 bp, Homo sapiens
gagctttaggccagg

SEQ ID NO: 1752135 - DNA, 15 bp, Homo sapiens
agctttaggccaggt

SEQ ID NO: 1752136 - DNA, 15 bp, Homo sapiens
gctttaggccaggtg

SEQ ID NO: 1752137 - DNA, 15 bp, Homo sapiens
ctttaggccaggtgt

SEQ ID NO: 1752138 - DNA, 15 bp, Homo sapiens
tttaggccaggtgtg

SEQ ID NO: 1752139 - DNA, 15 bp, Homo sapiens
ttaggccaggtgtgt

SEQ ID NO: 1752140 - DNA, 15 bp, Homo sapiens
taggccaggtgtgtg

SEQ ID NO: 1752141 - DNA, 15 bp, Homo sapiens
aggccaggtgtgtgg

SEQ ID NO: 1752142 - DNA, 15 bp, Homo sapiens
ggccaggtgtgtggt

SEQ ID NO: 1752143 - DNA, 15 bp, Homo sapiens
gccaggtgtgtggtg

SEQ ID NO: 1752144 - DNA, 15 bp, Homo sapiens
aggtgtgtggtgcac

SEQ ID NO: 1752145 - DNA, 15 bp, Homo sapiens
ggtgtgtggtgcaca

SEQ ID NO: 1752146 - DNA, 15 bp, Homo sapiens
gtgtgtggtgcacac

SEQ ID NO: 1752147 - DNA, 15 bp, Homo sapiens
tgtgtggtgcacacc

SEQ ID NO: 1752148 - DNA, 15 bp, Homo sapiens
gtgtggtgcacacct

SEQ ID NO: 1752149 - DNA, 15 bp, Homo sapiens
tgtggtgcacaccta

SEQ ID NO: 1752150 - DNA, 15 bp, Homo sapiens
gtggtgcacacctaa

SEQ ID NO: 1752151 - DNA, 15 bp, Homo sapiens
tggtgcacacctaat

SEQ ID NO: 1752152 - DNA, 15 bp, Homo sapiens
ggtgcacacctaatc

SEQ ID NO: 1752153 - DNA, 15 bp, Homo sapiens
gtgcacacctaatcc

SEQ ID NO: 1752154 - DNA, 15 bp, Homo sapiens
tgcacacctaatccc

SEQ ID NO: 1752155 - DNA, 15 bp, Homo sapiens
gcacacctaatccca

SEQ ID NO: 1752156 - DNA, 15 bp, Homo sapiens
cacacctaatcccag

SEQ ID NO: 1752157 - DNA, 15 bp, Homo sapiens
acacctaatcccagc

SEQ ID NO: 1752158 - DNA, 15 bp, Homo sapiens
cacctaatcccagca

SEQ ID NO: 1752159 - DNA, 15 bp, Homo sapiens
acctaatcccagcat

SEQ ID NO: 1752160 - DNA, 15 bp, Homo sapiens
cctaatcccagcatt

SEQ ID NO: 1752161 - DNA, 15 bp, Homo sapiens
ctaatcccagcattt

SEQ ID NO: 1752162 - DNA, 15 bp, Homo sapiens
aggtgggaggatcat

SEQ ID NO: 1752163 - DNA, 15 bp, Homo sapiens
tcatttgagcccaga

SEQ ID NO: 1752164 - DNA, 15 bp, Homo sapiens
catttgagcccagaa

SEQ ID NO: 1752165 - DNA, 15 bp, Homo sapiens
atttgagcccagaag

SEQ ID NO: 1752166 - DNA, 15 bp, Homo sapiens
tttgagcccagaagt

SEQ ID NO: 1752167 - DNA, 15 bp, Homo sapiens
gcccagaagttcaag

SEQ ID NO: 1752168 - DNA, 15 bp, Homo sapiens
cccagaagttcaaga

SEQ ID NO: 1752169 - DNA, 15 bp, Homo sapiens
aaagcaagaccccat

SEQ ID NO: 1752170 - DNA, 15 bp, Homo sapiens
aagcaagaccccatc

SEQ ID NO: 1752171 - DNA, 15 bp, Homo sapiens
aagaccccatctctt

SEQ ID NO: 1752172 - DNA, 15 bp, Homo sapiens
agaccccatctctta

SEQ ID NO: 1752173 - DNA, 15 bp, Homo sapiens
gaccccatctcttaa

SEQ ID NO: 1752174 - DNA, 15 bp, Homo sapiens
accccatctcttaaa

SEQ ID NO: 1752175 - DNA, 15 bp, Homo sapiens
ccccatctcttaaaa

SEQ ID NO: 1752176 - DNA, 15 bp, Homo sapiens
cccatctcttaaaaa

SEQ ID NO: 1752177 - DNA, 15 bp, Homo sapiens
aaaaaaaaaaagcta

SEQ ID NO: 1752178 - DNA, 15 bp, Homo sapiens
aaaaaaaaaagctag

SEQ ID NO: 1752179 - DNA, 15 bp, Homo sapiens
aaaaaaaaagctagg

SEQ ID NO: 1752180 - DNA, 15 bp, Homo sapiens
aaaaaaaagctaggt

SEQ ID NO: 1752181 - DNA, 15 bp, Homo sapiens
aaaaaaagctaggtg

SEQ ID NO: 1752182 - DNA, 15 bp, Homo sapiens
aaaaaagctaggtgt

SEQ ID NO: 1752183 - DNA, 15 bp, Homo sapiens
aaaaagctaggtgtg

SEQ ID NO: 1752184 - DNA, 15 bp, Homo sapiens
aaaagctaggtgtga

SEQ ID NO: 1752185 - DNA, 15 bp, Homo sapiens
aaagctaggtgtgat

SEQ ID NO: 1752186 - DNA, 15 bp, Homo sapiens
aagctaggtgtgatg

SEQ ID NO: 1752187 - DNA, 15 bp, Homo sapiens
agctaggtgtgatgg

SEQ ID NO: 1752188 - DNA, 15 bp, Homo sapiens
gctaggtgtgatggc

SEQ ID NO: 1752189 - DNA, 15 bp, Homo sapiens
ctaggtgtgatggca

SEQ ID NO: 1752190 - DNA, 15 bp, Homo sapiens
taggtgtgatggcat

SEQ ID NO: 1752191 - DNA, 15 bp, Homo sapiens
aggtgtgatggcatg

SEQ ID NO: 1752192 - DNA, 15 bp, Homo sapiens
ggtgtgatggcatgg

SEQ ID NO: 1752193 - DNA, 15 bp, Homo sapiens
gtgtgatggcatggt

SEQ ID NO: 1752194 - DNA, 15 bp, Homo sapiens
tgtgatggcatggtg

SEQ ID NO: 1752195 - DNA, 15 bp, Homo sapiens
gtgatggcatggtgg

SEQ ID NO: 1752196 - DNA, 15 bp, Homo sapiens
tgatggcatggtggc

SEQ ID NO: 1752197 - DNA, 15 bp, Homo sapiens
gatggcatggtggca

SEQ ID NO: 1752198 - DNA, 15 bp, Homo sapiens
atggcatggtggcat

SEQ ID NO: 1752199 - DNA, 15 bp, Homo sapiens
tggcatggtggcatg

SEQ ID NO: 1752200 - DNA, 15 bp, Homo sapiens
gcatggtggcatgtt

SEQ ID NO: 1752201 - DNA, 15 bp, Homo sapiens
catggtggcatgttc

SEQ ID NO: 1752202 - DNA, 15 bp, Homo sapiens
atggtggcatgttcc

SEQ ID NO: 1752203 - DNA, 15 bp, Homo sapiens
tggtggcatgttcct

SEQ ID NO: 1752204 - DNA, 15 bp, Homo sapiens
ggtggcatgttcctg

SEQ ID NO: 1752205 - DNA, 15 bp, Homo sapiens
gtggcatgttcctgt

SEQ ID NO: 1752206 - DNA, 15 bp, Homo sapiens
tggcatgttcctgtg

SEQ ID NO: 1752207 - DNA, 15 bp, Homo sapiens
ggcatgttcctgtgg

SEQ ID NO: 1752208 - DNA, 15 bp, Homo sapiens
gcatgttcctgtggt

SEQ ID NO: 1752209 - DNA, 15 bp, Homo sapiens
catgttcctgtggtc

SEQ ID NO: 1752210 - DNA, 15 bp, Homo sapiens
atgttcctgtggtcc

SEQ ID NO: 1752211 - DNA, 15 bp, Homo sapiens
tgttcctgtggtcct

SEQ ID NO: 1752212 - DNA, 15 bp, Homo sapiens
gttcctgtggtccta

SEQ ID NO: 1752213 - DNA, 15 bp, Homo sapiens
ttcctgtggtcctag

SEQ ID NO: 1752214 - DNA, 15 bp, Homo sapiens
tcctgtggtcctagg

SEQ ID NO: 1752215 - DNA, 15 bp, Homo sapiens
cctgtggtcctaggt

SEQ ID NO: 1752216 - DNA, 15 bp, Homo sapiens
ctgtggtcctaggta

SEQ ID NO: 1752217 - DNA, 15 bp, Homo sapiens
tgtggtcctaggtac

SEQ ID NO: 1752218 - DNA, 15 bp, Homo sapiens
gtggtcctaggtact

SEQ ID NO: 1752219 - DNA, 15 bp, Homo sapiens
tggtcctaggtactt

SEQ ID NO: 1752220 - DNA, 15 bp, Homo sapiens
ggtcctaggtacttg

SEQ ID NO: 1752221 - DNA, 15 bp, Homo sapiens
gtcctaggtacttgg

SEQ ID NO: 1752222 - DNA, 15 bp, Homo sapiens
tcctaggtacttggg

SEQ ID NO: 1752223 - DNA, 15 bp, Homo sapiens
cctaggtacttggga

SEQ ID NO: 1752224 - DNA, 15 bp, Homo sapiens
ctaggtacttgggag

SEQ ID NO: 1752225 - DNA, 15 bp, Homo sapiens
taggtacttgggagg

SEQ ID NO: 1752226 - DNA, 15 bp, Homo sapiens
aggtacttgggaggc

SEQ ID NO: 1752227 - DNA, 15 bp, Homo sapiens
ggtacttgggaggct

SEQ ID NO: 1752228 - DNA, 15 bp, Homo sapiens
gtacttgggaggctg

SEQ ID NO: 1752229 - DNA, 15 bp, Homo sapiens
ggaggctgaggcaac

SEQ ID NO: 1752230 - DNA, 15 bp, Homo sapiens
gaggctgaggcaaca

SEQ ID NO: 1752231 - DNA, 15 bp, Homo sapiens
aggctgaggcaacac

SEQ ID NO: 1752232 - DNA, 15 bp, Homo sapiens
ggctgaggcaacaca

SEQ ID NO: 1752233 - DNA, 15 bp, Homo sapiens
gctgaggcaacacag

SEQ ID NO: 1752234 - DNA, 15 bp, Homo sapiens
ctgaggcaacacagc

SEQ ID NO: 1752235 - DNA, 15 bp, Homo sapiens
tgaggcaacacagcg

SEQ ID NO: 1752236 - DNA, 15 bp, Homo sapiens
gaggcaacacagcga

SEQ ID NO: 1752237 - DNA, 15 bp, Homo sapiens
aggcaacacagcgag

SEQ ID NO: 1752238 - DNA, 15 bp, Homo sapiens
ggcaacacagcgaga

SEQ ID NO: 1752239 - DNA, 15 bp, Homo sapiens
gcaacacagcgagac

SEQ ID NO: 1752240 - DNA, 15 bp, Homo sapiens
caacacagcgagact

SEQ ID NO: 1752241 - DNA, 15 bp, Homo sapiens
aacacagcgagactc

SEQ ID NO: 1752242 - DNA, 15 bp, Homo sapiens
acacagcgagactct

SEQ ID NO: 1752243 - DNA, 15 bp, Homo sapiens
cacagcgagactctg

SEQ ID NO: 1752244 - DNA, 15 bp, Homo sapiens
acagcgagactctgt

SEQ ID NO: 1752245 - DNA, 15 bp, Homo sapiens
cagcgagactctgtc

SEQ ID NO: 1752246 - DNA, 15 bp, Homo sapiens
caaaaaaataaaaaa

SEQ ID NO: 1752247 - DNA, 15 bp, Homo sapiens
ataaaaaataaaaac

SEQ ID NO: 1752248 - DNA, 15 bp, Homo sapiens
taaaaaataaaaaca

SEQ ID NO: 1752249 - DNA, 15 bp, Homo sapiens
aaaataaaaacaaaa

SEQ ID NO: 1752250 - DNA, 15 bp, Homo sapiens
aaataaaaacaaaaa

SEQ ID NO: 1752251 - DNA, 15 bp, Homo sapiens
aataaaaacaaaaaa

SEQ ID NO: 1752252 - DNA, 15 bp, Homo sapiens
ataaaaacaaaaaaa

SEQ ID NO: 1752253 - DNA, 15 bp, Homo sapiens
taaaaacaaaaaaac

SEQ ID NO: 1752254 - DNA, 15 bp, Homo sapiens
aaaaacaaaaaaact

SEQ ID NO: 1752255 - DNA, 15 bp, Homo sapiens
aaaacaaaaaaacta

SEQ ID NO: 1752256 - DNA, 15 bp, Homo sapiens
aacaaaaaaactaga

SEQ ID NO: 1752257 - DNA, 15 bp, Homo sapiens
acaaaaaaactagaa

SEQ ID NO: 1752258 - DNA, 15 bp, Homo sapiens
caaaaaaactagaat

SEQ ID NO: 1752259 - DNA, 15 bp, Homo sapiens
aaaaaaactagaatg

SEQ ID NO: 1752260 - DNA, 15 bp, Homo sapiens
aaaaaactagaatgg

SEQ ID NO: 1752261 - DNA, 15 bp, Homo sapiens
aaaaactagaatggg

SEQ ID NO: 1752262 - DNA, 15 bp, Homo sapiens
aaaactagaatggga

SEQ ID NO: 1752263 - DNA, 15 bp, Homo sapiens
aaactagaatgggag

SEQ ID NO: 1752264 - DNA, 15 bp, Homo sapiens
aactagaatgggagc

SEQ ID NO: 1752265 - DNA, 15 bp, Homo sapiens
actagaatgggagct

SEQ ID NO: 1752266 - DNA, 15 bp, Homo sapiens
ctagaatgggagctt

SEQ ID NO: 1752267 - DNA, 15 bp, Homo sapiens
tagaatgggagcttt

SEQ ID NO: 1752268 - DNA, 15 bp, Homo sapiens
agaatgggagcttta

SEQ ID NO: 1752269 - DNA, 15 bp, Homo sapiens
gaatgggagctttaa

SEQ ID NO: 1752270 - DNA, 15 bp, Homo sapiens
aatgggagctttaag

SEQ ID NO: 1752271 - DNA, 15 bp, Homo sapiens
atgggagctttaagt

SEQ ID NO: 1752272 - DNA, 15 bp, Homo sapiens
tgggagctttaagtt

SEQ ID NO: 1752273 - DNA, 15 bp, Homo sapiens
gggagctttaagtta

SEQ ID NO: 1752274 - DNA, 15 bp, Homo sapiens
ggagctttaagttaa

SEQ ID NO: 1752275 - DNA, 15 bp, Homo sapiens
gagctttaagttaac

SEQ ID NO: 1752276 - DNA, 15 bp, Homo sapiens
agctttaagttaact

SEQ ID NO: 1752277 - DNA, 15 bp, Homo sapiens
gctttaagttaactt

SEQ ID NO: 1752278 - DNA, 15 bp, Homo sapiens
ctttaagttaacttt

SEQ ID NO: 1752279 - DNA, 15 bp, Homo sapiens
tttaagttaactttg

SEQ ID NO: 1752280 - DNA, 15 bp, Homo sapiens
ttaagttaactttgg

SEQ ID NO: 1752281 - DNA, 15 bp, Homo sapiens
taagttaactttggt

SEQ ID NO: 1752282 - DNA, 15 bp, Homo sapiens
aagttaactttggtt

SEQ ID NO: 1752283 - DNA, 15 bp, Homo sapiens
agttaactttggtta

SEQ ID NO: 1752284 - DNA, 15 bp, Homo sapiens
gttaactttggttag

SEQ ID NO: 1752285 - DNA, 15 bp, Homo sapiens
ttaactttggttagg

SEQ ID NO: 1752286 - DNA, 15 bp, Homo sapiens
taactttggttaggc

SEQ ID NO: 1752287 - DNA, 15 bp, Homo sapiens
aactttggttaggca

SEQ ID NO: 1752288 - DNA, 15 bp, Homo sapiens
actttggttaggcat

SEQ ID NO: 1752289 - DNA, 15 bp, Homo sapiens
ctttggttaggcatt

SEQ ID NO: 1752290 - DNA, 15 bp, Homo sapiens
tttggttaggcattg

SEQ ID NO: 1752291 - DNA, 15 bp, Homo sapiens
ttggttaggcattgc

SEQ ID NO: 1752292 - DNA, 15 bp, Homo sapiens
tggttaggcattgct

SEQ ID NO: 1752293 - DNA, 15 bp, Homo sapiens
ggttaggcattgcta

SEQ ID NO: 1752294 - DNA, 15 bp, Homo sapiens
gttaggcattgctaa

SEQ ID NO: 1752295 - DNA, 15 bp, Homo sapiens
ttaggcattgctaaa

SEQ ID NO: 1752296 - DNA, 15 bp, Homo sapiens
taggcattgctaaat

SEQ ID NO: 1752297 - DNA, 15 bp, Homo sapiens
aggcattgctaaatg

SEQ ID NO: 1752298 - DNA, 15 bp, Homo sapiens
ggcattgctaaatga

SEQ ID NO: 1752299 - DNA, 15 bp, Homo sapiens
gcattgctaaatgat

SEQ ID NO: 1752300 - DNA, 15 bp, Homo sapiens
cattgctaaatgatg

SEQ ID NO: 1752301 - DNA, 15 bp, Homo sapiens
attgctaaatgatgg

SEQ ID NO: 1752302 - DNA, 15 bp, Homo sapiens
ttgctaaatgatggg

SEQ ID NO: 1752303 - DNA, 15 bp, Homo sapiens
tgctaaatgatgggg

SEQ ID NO: 1752304 - DNA, 15 bp, Homo sapiens
gctaaatgatgggga

SEQ ID NO: 1752305 - DNA, 15 bp, Homo sapiens
ctaaatgatggggat

SEQ ID NO: 1752306 - DNA, 15 bp, Homo sapiens
taaatgatggggata

SEQ ID NO: 1752307 - DNA, 15 bp, Homo sapiens
aaatgatggggatac

SEQ ID NO: 1752308 - DNA, 15 bp, Homo sapiens
aatgatggggataca

SEQ ID NO: 1752309 - DNA, 15 bp, Homo sapiens
atgatggggatacat

SEQ ID NO: 1752310 - DNA, 15 bp, Homo sapiens
tgatggggatacatt

SEQ ID NO: 1752311 - DNA, 15 bp, Homo sapiens
gatggggatacattc

SEQ ID NO: 1752312 - DNA, 15 bp, Homo sapiens
atggggatacattct

SEQ ID NO: 1752313 - DNA, 15 bp, Homo sapiens
tggggatacattcta

SEQ ID NO: 1752314 - DNA, 15 bp, Homo sapiens
ggggatacattctag

SEQ ID NO: 1752315 - DNA, 15 bp, Homo sapiens
gggatacattctagg

SEQ ID NO: 1752316 - DNA, 15 bp, Homo sapiens
ggatacattctagga

SEQ ID NO: 1752317 - DNA, 15 bp, Homo sapiens
gatacattctaggaa

SEQ ID NO: 1752318 - DNA, 15 bp, Homo sapiens
atacattctaggaaa

SEQ ID NO: 1752319 - DNA, 15 bp, Homo sapiens
tacattctaggaaat

SEQ ID NO: 1752320 - DNA, 15 bp, Homo sapiens
acattctaggaaata

SEQ ID NO: 1752321 - DNA, 15 bp, Homo sapiens
attctaggaaatact

SEQ ID NO: 1752322 - DNA, 15 bp, Homo sapiens
ttctaggaaatactt

SEQ ID NO: 1752323 - DNA, 15 bp, Homo sapiens
tctaggaaatacttc

SEQ ID NO: 1752324 - DNA, 15 bp, Homo sapiens
ctaggaaatacttca

SEQ ID NO: 1752325 - DNA, 15 bp, Homo sapiens
taggaaatacttcat

SEQ ID NO: 1752326 - DNA, 15 bp, Homo sapiens
aggaaatacttcatt

SEQ ID NO: 1752327 - DNA, 15 bp, Homo sapiens
ggaaatacttcattt

SEQ ID NO: 1752328 - DNA, 15 bp, Homo sapiens
gaaatacttcattta

SEQ ID NO: 1752329 - DNA, 15 bp, Homo sapiens
aaatacttcatttag

SEQ ID NO: 1752330 - DNA, 15 bp, Homo sapiens
aatacttcatttagg

SEQ ID NO: 1752331 - DNA, 15 bp, Homo sapiens
atacttcatttaggc

SEQ ID NO: 1752332 - DNA, 15 bp, Homo sapiens
tacttcatttaggca

SEQ ID NO: 1752333 - DNA, 15 bp, Homo sapiens
acttcatttaggcaa

SEQ ID NO: 1752334 - DNA, 15 bp, Homo sapiens
cttcatttaggcaac

SEQ ID NO: 1752335 - DNA, 15 bp, Homo sapiens
ttcatttaggcaact

SEQ ID NO: 1752336 - DNA, 15 bp, Homo sapiens
tcatttaggcaactt

SEQ ID NO: 1752337 - DNA, 15 bp, Homo sapiens
catttaggcaacttt

SEQ ID NO: 1752338 - DNA, 15 bp, Homo sapiens
atttaggcaactttg

SEQ ID NO: 1752339 - DNA, 15 bp, Homo sapiens
tttaggcaactttgt

SEQ ID NO: 1752340 - DNA, 15 bp, Homo sapiens
ttaggcaactttgtc

SEQ ID NO: 1752341 - DNA, 15 bp, Homo sapiens
taggcaactttgtca

SEQ ID NO: 1752342 - DNA, 15 bp, Homo sapiens
aggcaactttgtcat

SEQ ID NO: 1752343 - DNA, 15 bp, Homo sapiens
ggcaactttgtcatt

SEQ ID NO: 1752344 - DNA, 15 bp, Homo sapiens
gcaactttgtcattg

SEQ ID NO: 1752345 - DNA, 15 bp, Homo sapiens
caactttgtcattgt

SEQ ID NO: 1752346 - DNA, 15 bp, Homo sapiens
aactttgtcattgtg

SEQ ID NO: 1752347 - DNA, 15 bp, Homo sapiens
actttgtcattgtgt

SEQ ID NO: 1752348 - DNA, 15 bp, Homo sapiens
ctttgtcattgtgtg

SEQ ID NO: 1752349 - DNA, 15 bp, Homo sapiens
tttgtcattgtgtga

SEQ ID NO: 1752350 - DNA, 15 bp, Homo sapiens
ttgtcattgtgtgaa

SEQ ID NO: 1752351 - DNA, 15 bp, Homo sapiens
tgtcattgtgtgaac

SEQ ID NO: 1752352 - DNA, 15 bp, Homo sapiens
gtcattgtgtgaaca

SEQ ID NO: 1752353 - DNA, 15 bp, Homo sapiens
tcattgtgtgaacat

SEQ ID NO: 1752354 - DNA, 15 bp, Homo sapiens
cattgtgtgaacatc

SEQ ID NO: 1752355 - DNA, 15 bp, Homo sapiens
attgtgtgaacatca

SEQ ID NO: 1752356 - DNA, 15 bp, Homo sapiens
tgtgaacatcataga

SEQ ID NO: 1752357 - DNA, 15 bp, Homo sapiens
gtgaacatcatagag

SEQ ID NO: 1752358 - DNA, 15 bp, Homo sapiens
tgaacatcatagagt

SEQ ID NO: 1752359 - DNA, 15 bp, Homo sapiens
gaacatcatagagtg

SEQ ID NO: 1752360 - DNA, 15 bp, Homo sapiens
aacatcatagagtgt

SEQ ID NO: 1752361 - DNA, 15 bp, Homo sapiens
acatcatagagtgtg

SEQ ID NO: 1752362 - DNA, 15 bp, Homo sapiens
catcatagagtgtgc

SEQ ID NO: 1752363 - DNA, 15 bp, Homo sapiens
atcatagagtgtgct

SEQ ID NO: 1752364 - DNA, 15 bp, Homo sapiens
tcatagagtgtgctt

SEQ ID NO: 1752365 - DNA, 15 bp, Homo sapiens
catagagtgtgctta

SEQ ID NO: 1752366 - DNA, 15 bp, Homo sapiens
atagagtgtgcttac

SEQ ID NO: 1752367 - DNA, 15 bp, Homo sapiens
tagagtgtgcttaca

SEQ ID NO: 1752368 - DNA, 15 bp, Homo sapiens
agagtgtgcttacac

SEQ ID NO: 1752369 - DNA, 15 bp, Homo sapiens
gagtgtgcttacaca

SEQ ID NO: 1752370 - DNA, 15 bp, Homo sapiens
agtgtgcttacacaa

SEQ ID NO: 1752371 - DNA, 15 bp, Homo sapiens
gtgtgcttacacaaa

SEQ ID NO: 1752372 - DNA, 15 bp, Homo sapiens
tgtgcttacacaaac

SEQ ID NO: 1752373 - DNA, 15 bp, Homo sapiens
gtgcttacacaaacc

SEQ ID NO: 1752374 - DNA, 15 bp, Homo sapiens
tgcttacacaaacct

SEQ ID NO: 1752375 - DNA, 15 bp, Homo sapiens
gcttacacaaaccta

SEQ ID NO: 1752376 - DNA, 15 bp, Homo sapiens
cttacacaaacctag

SEQ ID NO: 1752377 - DNA, 15 bp, Homo sapiens
ttacacaaacctagg

SEQ ID NO: 1752378 - DNA, 15 bp, Homo sapiens
tacacaaacctaggt

SEQ ID NO: 1752379 - DNA, 15 bp, Homo sapiens
acacaaacctaggtg

SEQ ID NO: 1752380 - DNA, 15 bp, Homo sapiens
cacaaacctaggtgg

SEQ ID NO: 1752381 - DNA, 15 bp, Homo sapiens
acaaacctaggtggt

SEQ ID NO: 1752382 - DNA, 15 bp, Homo sapiens
caaacctaggtggta

SEQ ID NO: 1752383 - DNA, 15 bp, Homo sapiens
aaacctaggtggtat

SEQ ID NO: 1752384 - DNA, 15 bp, Homo sapiens
aacctaggtggtata

SEQ ID NO: 1752385 - DNA, 15 bp, Homo sapiens
acctaggtggtatag

SEQ ID NO: 1752386 - DNA, 15 bp, Homo sapiens
cctaggtggtatagc

SEQ ID NO: 1752387 - DNA, 15 bp, Homo sapiens
ctaggtggtatagcc

SEQ ID NO: 1752388 - DNA, 15 bp, Homo sapiens
taggtggtatagcct

SEQ ID NO: 1752389 - DNA, 15 bp, Homo sapiens
aggtggtatagcctg

SEQ ID NO: 1752390 - DNA, 15 bp, Homo sapiens
ggtggtatagcctgc

SEQ ID NO: 1752391 - DNA, 15 bp, Homo sapiens
gtggtatagcctgct

SEQ ID NO: 1752392 - DNA, 15 bp, Homo sapiens
tggtatagcctgcta

SEQ ID NO: 1752393 - DNA, 15 bp, Homo sapiens
ggtatagcctgctac

SEQ ID NO: 1752394 - DNA, 15 bp, Homo sapiens
gtatagcctgctaca

SEQ ID NO: 1752395 - DNA, 15 bp, Homo sapiens
tatagcctgctacac

SEQ ID NO: 1752396 - DNA, 15 bp, Homo sapiens
atagcctgctacaca

SEQ ID NO: 1752397 - DNA, 15 bp, Homo sapiens
tagcctgctacacat

SEQ ID NO: 1752398 - DNA, 15 bp, Homo sapiens
agcctgctacacatc

SEQ ID NO: 1752399 - DNA, 15 bp, Homo sapiens
gcctgctacacatca

SEQ ID NO: 1752400 - DNA, 15 bp, Homo sapiens
cctgctacacatcag

SEQ ID NO: 1752401 - DNA, 15 bp, Homo sapiens
ctgctacacatcagg

SEQ ID NO: 1752402 - DNA, 15 bp, Homo sapiens
tgctacacatcaggg

SEQ ID NO: 1752403 - DNA, 15 bp, Homo sapiens
gctacacatcagggt

SEQ ID NO: 1752404 - DNA, 15 bp, Homo sapiens
ctacacatcagggta

SEQ ID NO: 1752405 - DNA, 15 bp, Homo sapiens
tacacatcagggtag

SEQ ID NO: 1752406 - DNA, 15 bp, Homo sapiens
acacatcagggtagg

SEQ ID NO: 1752407 - DNA, 15 bp, Homo sapiens
cacatcagggtagga

SEQ ID NO: 1752408 - DNA, 15 bp, Homo sapiens
acatcagggtaggaa

SEQ ID NO: 1752409 - DNA, 15 bp, Homo sapiens
catcagggtaggaat

SEQ ID NO: 1752410 - DNA, 15 bp, Homo sapiens
atcagggtaggaata

SEQ ID NO: 1752411 - DNA, 15 bp, Homo sapiens
tcagggtaggaatag

SEQ ID NO: 1752412 - DNA, 15 bp, Homo sapiens
cagggtaggaatagc

SEQ ID NO: 1752413 - DNA, 15 bp, Homo sapiens
agggtaggaatagcc

SEQ ID NO: 1752414 - DNA, 15 bp, Homo sapiens
gggtaggaatagcct

SEQ ID NO: 1752415 - DNA, 15 bp, Homo sapiens
ggtaggaatagcctg

SEQ ID NO: 1752416 - DNA, 15 bp, Homo sapiens
gtaggaatagcctgt

SEQ ID NO: 1752417 - DNA, 15 bp, Homo sapiens
taggaatagcctgtt

SEQ ID NO: 1752418 - DNA, 15 bp, Homo sapiens
aggaatagcctgttg

SEQ ID NO: 1752419 - DNA, 15 bp, Homo sapiens
ggaatagcctgttgc

SEQ ID NO: 1752420 - DNA, 15 bp, Homo sapiens
gaatagcctgttgct

SEQ ID NO: 1752421 - DNA, 15 bp, Homo sapiens
aatagcctgttgctt

SEQ ID NO: 1752422 - DNA, 15 bp, Homo sapiens
atagcctgttgcttc

SEQ ID NO: 1752423 - DNA, 15 bp, Homo sapiens
tagcctgttgcttct

SEQ ID NO: 1752424 - DNA, 15 bp, Homo sapiens
agcctgttgcttcta

SEQ ID NO: 1752425 - DNA, 15 bp, Homo sapiens
gcctgttgcttctag

SEQ ID NO: 1752426 - DNA, 15 bp, Homo sapiens
cctgttgcttctaga

SEQ ID NO: 1752427 - DNA, 15 bp, Homo sapiens
ctgttgcttctagac

SEQ ID NO: 1752428 - DNA, 15 bp, Homo sapiens
tgttgcttctagact

SEQ ID NO: 1752429 - DNA, 15 bp, Homo sapiens
gttgcttctagacta

SEQ ID NO: 1752430 - DNA, 15 bp, Homo sapiens
ttgcttctagactac

SEQ ID NO: 1752431 - DNA, 15 bp, Homo sapiens
tgcttctagactaca

SEQ ID NO: 1752432 - DNA, 15 bp, Homo sapiens
gcttctagactacag

SEQ ID NO: 1752433 - DNA, 15 bp, Homo sapiens
cttctagactacaga

SEQ ID NO: 1752434 - DNA, 15 bp, Homo sapiens
ttctagactacagac

SEQ ID NO: 1752435 - DNA, 15 bp, Homo sapiens
tctagactacagacc

SEQ ID NO: 1752436 - DNA, 15 bp, Homo sapiens
ctagactacagacct

SEQ ID NO: 1752437 - DNA, 15 bp, Homo sapiens
aaacaaaacaagcaa

SEQ ID NO: 1752438 - DNA, 15 bp, Homo sapiens
aacaaaacaagcaaa

SEQ ID NO: 1752439 - DNA, 15 bp, Homo sapiens
acaaaacaagcaaac

SEQ ID NO: 1752440 - DNA, 15 bp, Homo sapiens
caaaacaagcaaaca

SEQ ID NO: 1752441 - DNA, 15 bp, Homo sapiens
aaaacaagcaaacaa

SEQ ID NO: 1752442 - DNA, 15 bp, Homo sapiens
aaacaagcaaacaac

SEQ ID NO: 1752443 - DNA, 15 bp, Homo sapiens
aacaagcaaacaacc

SEQ ID NO: 1752444 - DNA, 15 bp, Homo sapiens
acaagcaaacaaccc

SEQ ID NO: 1752445 - DNA, 15 bp, Homo sapiens
caagcaaacaacccc

SEQ ID NO: 1752446 - DNA, 15 bp, Homo sapiens
aagcaaacaacccca

SEQ ID NO: 1752447 - DNA, 15 bp, Homo sapiens
agcaaacaaccccaa

SEQ ID NO: 1752448 - DNA, 15 bp, Homo sapiens
gcaaacaaccccaaa

SEQ ID NO: 1752449 - DNA, 15 bp, Homo sapiens
caaacaaccccaaaa

SEQ ID NO: 1752450 - DNA, 15 bp, Homo sapiens
aaacaaccccaaaac

SEQ ID NO: 1752451 - DNA, 15 bp, Homo sapiens
aacaaccccaaaaca

SEQ ID NO: 1752452 - DNA, 15 bp, Homo sapiens
acaaccccaaaacaa

SEQ ID NO: 1752453 - DNA, 15 bp, Homo sapiens
caaccccaaaacaaa

SEQ ID NO: 1752454 - DNA, 15 bp, Homo sapiens
aaccccaaaacaaac

SEQ ID NO: 1752455 - DNA, 15 bp, Homo sapiens
accccaaaacaaaca

SEQ ID NO: 1752456 - DNA, 15 bp, Homo sapiens
ccccaaaacaaacaa

SEQ ID NO: 1752457 - DNA, 15 bp, Homo sapiens
cccaaaacaaacaaa

SEQ ID NO: 1752458 - DNA, 15 bp, Homo sapiens
ccaaaacaaacaaac

SEQ ID NO: 1752459 - DNA, 15 bp, Homo sapiens
aaacaaacaaaaagt

SEQ ID NO: 1752460 - DNA, 15 bp, Homo sapiens
aacaaacaaaaagta

SEQ ID NO: 1752461 - DNA, 15 bp, Homo sapiens
acaaacaaaaagtaa

SEQ ID NO: 1752462 - DNA, 15 bp, Homo sapiens
caaacaaaaagtaac

SEQ ID NO: 1752463 - DNA, 15 bp, Homo sapiens
aaacaaaaagtaaca

SEQ ID NO: 1752464 - DNA, 15 bp, Homo sapiens
aacaaaaagtaacag

SEQ ID NO: 1752465 - DNA, 15 bp, Homo sapiens
acaaaaagtaacagg

SEQ ID NO: 1752466 - DNA, 15 bp, Homo sapiens
caaaaagtaacagga

SEQ ID NO: 1752467 - DNA, 15 bp, Homo sapiens
aaaaagtaacaggat

SEQ ID NO: 1752468 - DNA, 15 bp, Homo sapiens
aaaagtaacaggata

SEQ ID NO: 1752469 - DNA, 15 bp, Homo sapiens
aaagtaacaggatat

SEQ ID NO: 1752470 - DNA, 15 bp, Homo sapiens
aagtaacaggatatt

SEQ ID NO: 1752471 - DNA, 15 bp, Homo sapiens
agtaacaggatattt

SEQ ID NO: 1752472 - DNA, 15 bp, Homo sapiens
gtaacaggatatttc

SEQ ID NO: 1752473 - DNA, 15 bp, Homo sapiens
taacaggatatttca

SEQ ID NO: 1752474 - DNA, 15 bp, Homo sapiens
aacaggatatttcat

SEQ ID NO: 1752475 - DNA, 15 bp, Homo sapiens
acaggatatttcatt

SEQ ID NO: 1752476 - DNA, 15 bp, Homo sapiens
caggatatttcatta

SEQ ID NO: 1752477 - DNA, 15 bp, Homo sapiens
aggatatttcattaa

SEQ ID NO: 1752478 - DNA, 15 bp, Homo sapiens
ggatatttcattaaa

SEQ ID NO: 1752479 - DNA, 15 bp, Homo sapiens
gatatttcattaaat

SEQ ID NO: 1752480 - DNA, 15 bp, Homo sapiens
cattaaataattcat

SEQ ID NO: 1752481 - DNA, 15 bp, Homo sapiens
attaaataattcatt

SEQ ID NO: 1752482 - DNA, 15 bp, Homo sapiens
ttaaataattcattc

SEQ ID NO: 1752483 - DNA, 15 bp, Homo sapiens
taaataattcattca

SEQ ID NO: 1752484 - DNA, 15 bp, Homo sapiens
aaataattcattcat

SEQ ID NO: 1752485 - DNA, 15 bp, Homo sapiens
aataattcattcatt

SEQ ID NO: 1752486 - DNA, 15 bp, Homo sapiens
ataattcattcatta

SEQ ID NO: 1752487 - DNA, 15 bp, Homo sapiens
taattcattcattaa

SEQ ID NO: 1752488 - DNA, 15 bp, Homo sapiens
aattcattcattaaa

SEQ ID NO: 1752489 - DNA, 15 bp, Homo sapiens
attcattcattaaat

SEQ ID NO: 1752490 - DNA, 15 bp, Homo sapiens
ttcattcattaaata

SEQ ID NO: 1752491 - DNA, 15 bp, Homo sapiens
tcattcattaaataa

SEQ ID NO: 1752492 - DNA, 15 bp, Homo sapiens
cattcattaaataat

SEQ ID NO: 1752493 - DNA, 15 bp, Homo sapiens
attcattaaataatg

SEQ ID NO: 1752494 - DNA, 15 bp, Homo sapiens
ttcattaaataatga

SEQ ID NO: 1752495 - DNA, 15 bp, Homo sapiens
tcattaaataatgaa

SEQ ID NO: 1752496 - DNA, 15 bp, Homo sapiens
cattaaataatgaag

SEQ ID NO: 1752497 - DNA, 15 bp, Homo sapiens
attaaataatgaagt

SEQ ID NO: 1752498 - DNA, 15 bp, Homo sapiens
ttaaataatgaagtt

SEQ ID NO: 1752499 - DNA, 15 bp, Homo sapiens
taaataatgaagttg

SEQ ID NO: 1752500 - DNA, 15 bp, Homo sapiens
aaataatgaagttga

SEQ ID NO: 1752501 - DNA, 15 bp, Homo sapiens
aataatgaagttgaa

SEQ ID NO: 1752502 - DNA, 15 bp, Homo sapiens
ataatgaagttgaac

SEQ ID NO: 1752503 - DNA, 15 bp, Homo sapiens
taatgaagttgaacg

SEQ ID NO: 1752504 - DNA, 15 bp, Homo sapiens
aatgaagttgaacgt

SEQ ID NO: 1752505 - DNA, 15 bp, Homo sapiens
atgaagttgaacgta

SEQ ID NO: 1752506 - DNA, 15 bp, Homo sapiens
tgaagttgaacgtaa

SEQ ID NO: 1752507 - DNA, 15 bp, Homo sapiens
gaagttgaacgtaat

SEQ ID NO: 1752508 - DNA, 15 bp, Homo sapiens
aagttgaacgtaatg

SEQ ID NO: 1752509 - DNA, 15 bp, Homo sapiens
agttgaacgtaatga

SEQ ID NO: 1752510 - DNA, 15 bp, Homo sapiens
gttgaacgtaatgaa

SEQ ID NO: 1752511 - DNA, 15 bp, Homo sapiens
ttgaacgtaatgaat

SEQ ID NO: 1752512 - DNA, 15 bp, Homo sapiens
tgaacgtaatgaatt

SEQ ID NO: 1752513 - DNA, 15 bp, Homo sapiens
gaacgtaatgaattt

SEQ ID NO: 1752514 - DNA, 15 bp, Homo sapiens
aacgtaatgaattta

SEQ ID NO: 1752515 - DNA, 15 bp, Homo sapiens
acgtaatgaatttaa

SEQ ID NO: 1752516 - DNA, 15 bp, Homo sapiens
cgtaatgaatttaat

SEQ ID NO: 1752517 - DNA, 15 bp, Homo sapiens
gtaatgaatttaatg

SEQ ID NO: 1752518 - DNA, 15 bp, Homo sapiens
taatgaatttaatga

SEQ ID NO: 1752519 - DNA, 15 bp, Homo sapiens
aatgaatttaatgaa

SEQ ID NO: 1752520 - DNA, 15 bp, Homo sapiens
atgaatttaatgaag

SEQ ID NO: 1752521 - DNA, 15 bp, Homo sapiens
tgaatttaatgaagt

SEQ ID NO: 1752522 - DNA, 15 bp, Homo sapiens
gaatttaatgaagtt

SEQ ID NO: 1752523 - DNA, 15 bp, Homo sapiens
aatttaatgaagttt

SEQ ID NO: 1752524 - DNA, 15 bp, Homo sapiens
atttaatgaagttta

SEQ ID NO: 1752525 - DNA, 15 bp, Homo sapiens
tttaatgaagtttaa

SEQ ID NO: 1752526 - DNA, 15 bp, Homo sapiens
ttaatgaagtttaat

SEQ ID NO: 1752527 - DNA, 15 bp, Homo sapiens
taatgaagtttaata

SEQ ID NO: 1752528 - DNA, 15 bp, Homo sapiens
aatgaagtttaatag

SEQ ID NO: 1752529 - DNA, 15 bp, Homo sapiens
atgaagtttaatagg

SEQ ID NO: 1752530 - DNA, 15 bp, Homo sapiens
tgaagtttaataggt

SEQ ID NO: 1752531 - DNA, 15 bp, Homo sapiens
gaagtttaataggtg

SEQ ID NO: 1752532 - DNA, 15 bp, Homo sapiens
aagtttaataggtgt

SEQ ID NO: 1752533 - DNA, 15 bp, Homo sapiens
agtttaataggtgta

SEQ ID NO: 1752534 - DNA, 15 bp, Homo sapiens
gtttaataggtgtag

SEQ ID NO: 1752535 - DNA, 15 bp, Homo sapiens
tttaataggtgtagt

SEQ ID NO: 1752536 - DNA, 15 bp, Homo sapiens
ttaataggtgtagtg

SEQ ID NO: 1752537 - DNA, 15 bp, Homo sapiens
taataggtgtagtgg

SEQ ID NO: 1752538 - DNA, 15 bp, Homo sapiens
aataggtgtagtggg

SEQ ID NO: 1752539 - DNA, 15 bp, Homo sapiens
ataggtgtagtggga

SEQ ID NO: 1752540 - DNA, 15 bp, Homo sapiens
taggtgtagtgggag

SEQ ID NO: 1752541 - DNA, 15 bp, Homo sapiens
aggtgtagtgggagt

SEQ ID NO: 1752542 - DNA, 15 bp, Homo sapiens
ggtgtagtgggagta

SEQ ID NO: 1752543 - DNA, 15 bp, Homo sapiens
gtgtagtgggagtaa

SEQ ID NO: 1752544 - DNA, 15 bp, Homo sapiens
tgtagtgggagtaac

SEQ ID NO: 1752545 - DNA, 15 bp, Homo sapiens
gtagtgggagtaaca

SEQ ID NO: 1752546 - DNA, 15 bp, Homo sapiens
tagtgggagtaacaa

SEQ ID NO: 1752547 - DNA, 15 bp, Homo sapiens
agtgggagtaacaat

SEQ ID NO: 1752548 - DNA, 15 bp, Homo sapiens
gtgggagtaacaatg

SEQ ID NO: 1752549 - DNA, 15 bp, Homo sapiens
tgggagtaacaatga

SEQ ID NO: 1752550 - DNA, 15 bp, Homo sapiens
gggagtaacaatgag

SEQ ID NO: 1752551 - DNA, 15 bp, Homo sapiens
ggagtaacaatgaga

SEQ ID NO: 1752552 - DNA, 15 bp, Homo sapiens
gagtaacaatgagaa

SEQ ID NO: 1752553 - DNA, 15 bp, Homo sapiens
agtaacaatgagaat

SEQ ID NO: 1752554 - DNA, 15 bp, Homo sapiens
gtaacaatgagaatg

SEQ ID NO: 1752555 - DNA, 15 bp, Homo sapiens
taacaatgagaatga

SEQ ID NO: 1752556 - DNA, 15 bp, Homo sapiens
aacaatgagaatgaa

SEQ ID NO: 1752557 - DNA, 15 bp, Homo sapiens
acaatgagaatgaaa

SEQ ID NO: 1752558 - DNA, 15 bp, Homo sapiens
caatgagaatgaaag

SEQ ID NO: 1752559 - DNA, 15 bp, Homo sapiens
aatgagaatgaaagt

SEQ ID NO: 1752560 - DNA, 15 bp, Homo sapiens
atgagaatgaaagtg

SEQ ID NO: 1752561 - DNA, 15 bp, Homo sapiens
tgagaatgaaagtgt

SEQ ID NO: 1752562 - DNA, 15 bp, Homo sapiens
gagaatgaaagtgta

SEQ ID NO: 1752563 - DNA, 15 bp, Homo sapiens
agaatgaaagtgtag

SEQ ID NO: 1752564 - DNA, 15 bp, Homo sapiens
gaatgaaagtgtagg

SEQ ID NO: 1752565 - DNA, 15 bp, Homo sapiens
aatgaaagtgtagga

SEQ ID NO: 1752566 - DNA, 15 bp, Homo sapiens
atgaaagtgtaggag

SEQ ID NO: 1752567 - DNA, 15 bp, Homo sapiens
tgaaagtgtaggagg

SEQ ID NO: 1752568 - DNA, 15 bp, Homo sapiens
gaaagtgtaggaggt

SEQ ID NO: 1752569 - DNA, 15 bp, Homo sapiens
aaagtgtaggaggtt

SEQ ID NO: 1752570 - DNA, 15 bp, Homo sapiens
aagtgtaggaggttg

SEQ ID NO: 1752571 - DNA, 15 bp, Homo sapiens
agtgtaggaggttgt

SEQ ID NO: 1752572 - DNA, 15 bp, Homo sapiens
gtgtaggaggttgta

SEQ ID NO: 1752573 - DNA, 15 bp, Homo sapiens
tgtaggaggttgtag

SEQ ID NO: 1752574 - DNA, 15 bp, Homo sapiens
gtaggaggttgtagt

SEQ ID NO: 1752575 - DNA, 15 bp, Homo sapiens
taggaggttgtagtc

SEQ ID NO: 1752576 - DNA, 15 bp, Homo sapiens
aggaggttgtagtca

SEQ ID NO: 1752577 - DNA, 15 bp, Homo sapiens
ggaggttgtagtcaa

SEQ ID NO: 1752578 - DNA, 15 bp, Homo sapiens
gaggttgtagtcaaa

SEQ ID NO: 1752579 - DNA, 15 bp, Homo sapiens
aggttgtagtcaaag

SEQ ID NO: 1752580 - DNA, 15 bp, Homo sapiens
ggttgtagtcaaaga

SEQ ID NO: 1752581 - DNA, 15 bp, Homo sapiens
gttgtagtcaaagag

SEQ ID NO: 1752582 - DNA, 15 bp, Homo sapiens
ttgtagtcaaagagt

SEQ ID NO: 1752583 - DNA, 15 bp, Homo sapiens
tgtagtcaaagagtt

SEQ ID NO: 1752584 - DNA, 15 bp, Homo sapiens
gtagtcaaagagttg

SEQ ID NO: 1752585 - DNA, 15 bp, Homo sapiens
tagtcaaagagttgt

SEQ ID NO: 1752586 - DNA, 15 bp, Homo sapiens
agtcaaagagttgtt

SEQ ID NO: 1752587 - DNA, 15 bp, Homo sapiens
gtcaaagagttgttt

SEQ ID NO: 1752588 - DNA, 15 bp, Homo sapiens
tcaaagagttgtttc

SEQ ID NO: 1752589 - DNA, 15 bp, Homo sapiens
caaagagttgtttca

SEQ ID NO: 1752590 - DNA, 15 bp, Homo sapiens
aaagagttgtttcac

SEQ ID NO: 1752591 - DNA, 15 bp, Homo sapiens
aagagttgtttcacc

SEQ ID NO: 1752592 - DNA, 15 bp, Homo sapiens
agagttgtttcacct

SEQ ID NO: 1752593 - DNA, 15 bp, Homo sapiens
gagttgtttcacctt

SEQ ID NO: 1752594 - DNA, 15 bp, Homo sapiens
agttgtttcacctta

SEQ ID NO: 1752595 - DNA, 15 bp, Homo sapiens
gttgtttcaccttag

SEQ ID NO: 1752596 - DNA, 15 bp, Homo sapiens
ttgtttcaccttaga

SEQ ID NO: 1752597 - DNA, 15 bp, Homo sapiens
tgtttcaccttagaa

SEQ ID NO: 1752598 - DNA, 15 bp, Homo sapiens
gtttcaccttagaat

SEQ ID NO: 1752599 - DNA, 15 bp, Homo sapiens
tttcaccttagaatt

SEQ ID NO: 1752600 - DNA, 15 bp, Homo sapiens
ttcaccttagaattt

SEQ ID NO: 1752601 - DNA, 15 bp, Homo sapiens
tcaccttagaatttc

SEQ ID NO: 1752602 - DNA, 15 bp, Homo sapiens
caccttagaatttct

SEQ ID NO: 1752603 - DNA, 15 bp, Homo sapiens
accttagaatttctg

SEQ ID NO: 1752604 - DNA, 15 bp, Homo sapiens
ccttagaatttctgg

SEQ ID NO: 1752605 - DNA, 15 bp, Homo sapiens
cttagaatttctgga

SEQ ID NO: 1752606 - DNA, 15 bp, Homo sapiens
ttagaatttctggag

SEQ ID NO: 1752607 - DNA, 15 bp, Homo sapiens
tagaatttctggaga

SEQ ID NO: 1752608 - DNA, 15 bp, Homo sapiens
agaatttctggagac

SEQ ID NO: 1752609 - DNA, 15 bp, Homo sapiens
gaatttctggagaca

SEQ ID NO: 1752610 - DNA, 15 bp, Homo sapiens
aatttctggagacag

SEQ ID NO: 1752611 - DNA, 15 bp, Homo sapiens
atttctggagacaga

SEQ ID NO: 1752612 - DNA, 15 bp, Homo sapiens
tttctggagacagaa

SEQ ID NO: 1752613 - DNA, 15 bp, Homo sapiens
ttctggagacagaac

SEQ ID NO: 1752614 - DNA, 15 bp, Homo sapiens
tctggagacagaaca

SEQ ID NO: 1752615 - DNA, 15 bp, Homo sapiens
ctggagacagaacat

SEQ ID NO: 1752616 - DNA, 15 bp, Homo sapiens
tggagacagaacatt

SEQ ID NO: 1752617 - DNA, 15 bp, Homo sapiens
ggagacagaacattt

SEQ ID NO: 1752618 - DNA, 15 bp, Homo sapiens
gagacagaacatttc

SEQ ID NO: 1752619 - DNA, 15 bp, Homo sapiens
agacagaacatttct

SEQ ID NO: 1752620 - DNA, 15 bp, Homo sapiens
gacagaacatttctg

SEQ ID NO: 1752621 - DNA, 15 bp, Homo sapiens
acagaacatttctgg

SEQ ID NO: 1752622 - DNA, 15 bp, Homo sapiens
cagaacatttctggg

SEQ ID NO: 1752623 - DNA, 15 bp, Homo sapiens
agaacatttctgggt

SEQ ID NO: 1752624 - DNA, 15 bp, Homo sapiens
gaacatttctgggta

SEQ ID NO: 1752625 - DNA, 15 bp, Homo sapiens
aacatttctgggtag

SEQ ID NO: 1752626 - DNA, 15 bp, Homo sapiens
acatttctgggtagt

SEQ ID NO: 1752627 - DNA, 15 bp, Homo sapiens
catttctgggtagtt

SEQ ID NO: 1752628 - DNA, 15 bp, Homo sapiens
atttctgggtagttt

SEQ ID NO: 1752629 - DNA, 15 bp, Homo sapiens
tttctgggtagttta

SEQ ID NO: 1752630 - DNA, 15 bp, Homo sapiens
ttctgggtagtttac

SEQ ID NO: 1752631 - DNA, 15 bp, Homo sapiens
tctgggtagtttact

SEQ ID NO: 1752632 - DNA, 15 bp, Homo sapiens
ctgggtagtttactg

SEQ ID NO: 1752633 - DNA, 15 bp, Homo sapiens
tgggtagtttactgt

SEQ ID NO: 1752634 - DNA, 15 bp, Homo sapiens
gggtagtttactgta

SEQ ID NO: 1752635 - DNA, 15 bp, Homo sapiens
ggtagtttactgtat

SEQ ID NO: 1752636 - DNA, 15 bp, Homo sapiens
gtagtttactgtatt

SEQ ID NO: 1752637 - DNA, 15 bp, Homo sapiens
tagtttactgtattt

SEQ ID NO: 1752638 - DNA, 15 bp, Homo sapiens
agtttactgtatttt

SEQ ID NO: 1752639 - DNA, 15 bp, Homo sapiens
gtttactgtatttta

SEQ ID NO: 1752640 - DNA, 15 bp, Homo sapiens
tttactgtattttaa

SEQ ID NO: 1752641 - DNA, 15 bp, Homo sapiens
ttactgtattttaag

SEQ ID NO: 1752642 - DNA, 15 bp, Homo sapiens
tactgtattttaaga

SEQ ID NO: 1752643 - DNA, 15 bp, Homo sapiens
actgtattttaagaa

SEQ ID NO: 1752644 - DNA, 15 bp, Homo sapiens
ctgtattttaagaaa

SEQ ID NO: 1752645 - DNA, 15 bp, Homo sapiens
tgtattttaagaaat

SEQ ID NO: 1752646 - DNA, 15 bp, Homo sapiens
gtattttaagaaatg

SEQ ID NO: 1752647 - DNA, 15 bp, Homo sapiens
tattttaagaaatga

SEQ ID NO: 1752648 - DNA, 15 bp, Homo sapiens
attttaagaaatgat

SEQ ID NO: 1752649 - DNA, 15 bp, Homo sapiens
ttttaagaaatgatc

SEQ ID NO: 1752650 - DNA, 15 bp, Homo sapiens
tttaagaaatgatct

SEQ ID NO: 1752651 - DNA, 15 bp, Homo sapiens
ttaagaaatgatctt

SEQ ID NO: 1752652 - DNA, 15 bp, Homo sapiens
taagaaatgatcttg

SEQ ID NO: 1752653 - DNA, 15 bp, Homo sapiens
aagaaatgatcttgg

SEQ ID NO: 1752654 - DNA, 15 bp, Homo sapiens
agaaatgatcttggg

SEQ ID NO: 1752655 - DNA, 15 bp, Homo sapiens
gaaatgatcttggga

SEQ ID NO: 1752656 - DNA, 15 bp, Homo sapiens
aaatgatcttgggag

SEQ ID NO: 1752657 - DNA, 15 bp, Homo sapiens
aatgatcttgggagt

SEQ ID NO: 1752658 - DNA, 15 bp, Homo sapiens
atgatcttgggagtg

SEQ ID NO: 1752659 - DNA, 15 bp, Homo sapiens
tgatcttgggagtgc

SEQ ID NO: 1752660 - DNA, 15 bp, Homo sapiens
gatcttgggagtgca

SEQ ID NO: 1752661 - DNA, 15 bp, Homo sapiens
atcttgggagtgcat

SEQ ID NO: 1752662 - DNA, 15 bp, Homo sapiens
tcttgggagtgcatg

SEQ ID NO: 1752663 - DNA, 15 bp, Homo sapiens
cttgggagtgcatga

SEQ ID NO: 1752664 - DNA, 15 bp, Homo sapiens
ttgggagtgcatgag

SEQ ID NO: 1752665 - DNA, 15 bp, Homo sapiens
tgggagtgcatgagg

SEQ ID NO: 1752666 - DNA, 15 bp, Homo sapiens
gggagtgcatgagga

SEQ ID NO: 1752667 - DNA, 15 bp, Homo sapiens
ggagtgcatgaggat

SEQ ID NO: 1752668 - DNA, 15 bp, Homo sapiens
gagtgcatgaggatc

SEQ ID NO: 1752669 - DNA, 15 bp, Homo sapiens
agtgcatgaggatcc

SEQ ID NO: 1752670 - DNA, 15 bp, Homo sapiens
gtgcatgaggatcct

SEQ ID NO: 1752671 - DNA, 15 bp, Homo sapiens
tgcatgaggatcctg

SEQ ID NO: 1752672 - DNA, 15 bp, Homo sapiens
gcatgaggatcctgg

SEQ ID NO: 1752673 - DNA, 15 bp, Homo sapiens
catgaggatcctggc

SEQ ID NO: 1752674 - DNA, 15 bp, Homo sapiens
atgaggatcctggcc

SEQ ID NO: 1752675 - DNA, 15 bp, Homo sapiens
tgaggatcctggcca

SEQ ID NO: 1752676 - DNA, 15 bp, Homo sapiens
gaggatcctggccaa

SEQ ID NO: 1752677 - DNA, 15 bp, Homo sapiens
aggatcctggccaag

SEQ ID NO: 1752678 - DNA, 15 bp, Homo sapiens
ggatcctggccaagg

SEQ ID NO: 1752679 - DNA, 15 bp, Homo sapiens
gatcctggccaagga

SEQ ID NO: 1752680 - DNA, 15 bp, Homo sapiens
atcctggccaaggag

SEQ ID NO: 1752681 - DNA, 15 bp, Homo sapiens
tcctggccaaggagc

SEQ ID NO: 1752682 - DNA, 15 bp, Homo sapiens
cctggccaaggagcc

SEQ ID NO: 1752683 - DNA, 15 bp, Homo sapiens
ctggccaaggagcca

SEQ ID NO: 1752684 - DNA, 15 bp, Homo sapiens
tggccaaggagccag

SEQ ID NO: 1752685 - DNA, 15 bp, Homo sapiens
ggccaaggagccaga

SEQ ID NO: 1752686 - DNA, 15 bp, Homo sapiens
gccaaggagccagaa

SEQ ID NO: 1752687 - DNA, 15 bp, Homo sapiens
ccaaggagccagaaa

SEQ ID NO: 1752688 - DNA, 15 bp, Homo sapiens
caaggagccagaaag

SEQ ID NO: 1752689 - DNA, 15 bp, Homo sapiens
aaggagccagaaagt

SEQ ID NO: 1752690 - DNA, 15 bp, Homo sapiens
aggagccagaaagta

SEQ ID NO: 1752691 - DNA, 15 bp, Homo sapiens
ggagccagaaagtac

SEQ ID NO: 1752692 - DNA, 15 bp, Homo sapiens
gagccagaaagtaca

SEQ ID NO: 1752693 - DNA, 15 bp, Homo sapiens
agccagaaagtacag

SEQ ID NO: 1752694 - DNA, 15 bp, Homo sapiens
gccagaaagtacagt

SEQ ID NO: 1752695 - DNA, 15 bp, Homo sapiens
ccagaaagtacagtg

SEQ ID NO: 1752696 - DNA, 15 bp, Homo sapiens
cagaaagtacagtga

SEQ ID NO: 1752697 - DNA, 15 bp, Homo sapiens
agaaagtacagtgag

SEQ ID NO: 1752698 - DNA, 15 bp, Homo sapiens
gaaagtacagtgagc

SEQ ID NO: 1752699 - DNA, 15 bp, Homo sapiens
aaagtacagtgagca

SEQ ID NO: 1752700 - DNA, 15 bp, Homo sapiens
aagtacagtgagcaa

SEQ ID NO: 1752701 - DNA, 15 bp, Homo sapiens
agtacagtgagcaag

SEQ ID NO: 1752702 - DNA, 15 bp, Homo sapiens
gtacagtgagcaaga

SEQ ID NO: 1752703 - DNA, 15 bp, Homo sapiens
tacagtgagcaagag

SEQ ID NO: 1752704 - DNA, 15 bp, Homo sapiens
acagtgagcaagagt

SEQ ID NO: 1752705 - DNA, 15 bp, Homo sapiens
cagtgagcaagagtc

SEQ ID NO: 1752706 - DNA, 15 bp, Homo sapiens
agtgagcaagagtcc

SEQ ID NO: 1752707 - DNA, 15 bp, Homo sapiens
gtgagcaagagtcca

SEQ ID NO: 1752708 - DNA, 15 bp, Homo sapiens
tgagcaagagtccag

SEQ ID NO: 1752709 - DNA, 15 bp, Homo sapiens
gagcaagagtccagg

SEQ ID NO: 1752710 - DNA, 15 bp, Homo sapiens
agcaagagtccagga

SEQ ID NO: 1752711 - DNA, 15 bp, Homo sapiens
gcaagagtccaggac

SEQ ID NO: 1752712 - DNA, 15 bp, Homo sapiens
caagagtccaggaca

SEQ ID NO: 1752713 - DNA, 15 bp, Homo sapiens
aagagtccaggacat

SEQ ID NO: 1752714 - DNA, 15 bp, Homo sapiens
agagtccaggacatg

SEQ ID NO: 1752715 - DNA, 15 bp, Homo sapiens
gagtccaggacatgt

SEQ ID NO: 1752716 - DNA, 15 bp, Homo sapiens
agtccaggacatgta

SEQ ID NO: 1752717 - DNA, 15 bp, Homo sapiens
gtccaggacatgtag

SEQ ID NO: 1752718 - DNA, 15 bp, Homo sapiens
tccaggacatgtagc

SEQ ID NO: 1752719 - DNA, 15 bp, Homo sapiens
ccaggacatgtagca

SEQ ID NO: 1752720 - DNA, 15 bp, Homo sapiens
caggacatgtagcaa

SEQ ID NO: 1752721 - DNA, 15 bp, Homo sapiens
aggacatgtagcaag

SEQ ID NO: 1752722 - DNA, 15 bp, Homo sapiens
ggacatgtagcaagg

SEQ ID NO: 1752723 - DNA, 15 bp, Homo sapiens
gacatgtagcaagga

SEQ ID NO: 1752724 - DNA, 15 bp, Homo sapiens
acatgtagcaaggag

SEQ ID NO: 1752725 - DNA, 15 bp, Homo sapiens
catgtagcaaggagg

SEQ ID NO: 1752726 - DNA, 15 bp, Homo sapiens
atgtagcaaggagga

SEQ ID NO: 1752727 - DNA, 15 bp, Homo sapiens
tgtagcaaggaggaa

SEQ ID NO: 1752728 - DNA, 15 bp, Homo sapiens
gtagcaaggaggaat

SEQ ID NO: 1752729 - DNA, 15 bp, Homo sapiens
tagcaaggaggaatg

SEQ ID NO: 1752730 - DNA, 15 bp, Homo sapiens
agcaaggaggaatgt

SEQ ID NO: 1752731 - DNA, 15 bp, Homo sapiens
gcaaggaggaatgtg

SEQ ID NO: 1752732 - DNA, 15 bp, Homo sapiens
caaggaggaatgtga

SEQ ID NO: 1752733 - DNA, 15 bp, Homo sapiens
aaggaggaatgtgac

SEQ ID NO: 1752734 - DNA, 15 bp, Homo sapiens
aggaggaatgtgact

SEQ ID NO: 1752735 - DNA, 15 bp, Homo sapiens
ggaggaatgtgactg

SEQ ID NO: 1752736 - DNA, 15 bp, Homo sapiens
gaggaatgtgactga

SEQ ID NO: 1752737 - DNA, 15 bp, Homo sapiens
aggaatgtgactgaa

SEQ ID NO: 1752738 - DNA, 15 bp, Homo sapiens
ggaatgtgactgaaa

SEQ ID NO: 1752739 - DNA, 15 bp, Homo sapiens
gaatgtgactgaaat

SEQ ID NO: 1752740 - DNA, 15 bp, Homo sapiens
aatgtgactgaaata

SEQ ID NO: 1752741 - DNA, 15 bp, Homo sapiens
atgtgactgaaataa

SEQ ID NO: 1752742 - DNA, 15 bp, Homo sapiens
tgtgactgaaataaa

SEQ ID NO: 1752743 - DNA, 15 bp, Homo sapiens
gtgactgaaataaag

SEQ ID NO: 1752744 - DNA, 15 bp, Homo sapiens
tgactgaaataaaga

SEQ ID NO: 1752745 - DNA, 15 bp, Homo sapiens
gactgaaataaagac

SEQ ID NO: 1752746 - DNA, 15 bp, Homo sapiens
actgaaataaagact

SEQ ID NO: 1752747 - DNA, 15 bp, Homo sapiens
ctgaaataaagacta

SEQ ID NO: 1752748 - DNA, 15 bp, Homo sapiens
tgaaataaagactaa

SEQ ID NO: 1752749 - DNA, 15 bp, Homo sapiens
gaaataaagactaat

SEQ ID NO: 1752750 - DNA, 15 bp, Homo sapiens
aaataaagactaatg

SEQ ID NO: 1752751 - DNA, 15 bp, Homo sapiens
aataaagactaatgt

SEQ ID NO: 1752752 - DNA, 15 bp, Homo sapiens
ataaagactaatgtc

SEQ ID NO: 1752753 - DNA, 15 bp, Homo sapiens
taaagactaatgtct

SEQ ID NO: 1752754 - DNA, 15 bp, Homo sapiens
aaagactaatgtctt

SEQ ID NO: 1752755 - DNA, 15 bp, Homo sapiens
aagactaatgtcttc

SEQ ID NO: 1752756 - DNA, 15 bp, Homo sapiens
agactaatgtcttca

SEQ ID NO: 1752757 - DNA, 15 bp, Homo sapiens
gactaatgtcttcag

SEQ ID NO: 1752758 - DNA, 15 bp, Homo sapiens
actaatgtcttcagt

SEQ ID NO: 1752759 - DNA, 15 bp, Homo sapiens
ctaatgtcttcagtg

SEQ ID NO: 1752760 - DNA, 15 bp, Homo sapiens
taatgtcttcagtgc

SEQ ID NO: 1752761 - DNA, 15 bp, Homo sapiens
aatgtcttcagtgct

SEQ ID NO: 1752762 - DNA, 15 bp, Homo sapiens
atgtcttcagtgctt

SEQ ID NO: 1752763 - DNA, 15 bp, Homo sapiens
tgtcttcagtgcttg

SEQ ID NO: 1752764 - DNA, 15 bp, Homo sapiens
gtcttcagtgcttga

SEQ ID NO: 1752765 - DNA, 15 bp, Homo sapiens
tcttcagtgcttgag

SEQ ID NO: 1752766 - DNA, 15 bp, Homo sapiens
cttcagtgcttgagg

SEQ ID NO: 1752767 - DNA, 15 bp, Homo sapiens
ttcagtgcttgaggg

SEQ ID NO: 1752768 - DNA, 15 bp, Homo sapiens
tcagtgcttgagggg

SEQ ID NO: 1752769 - DNA, 15 bp, Homo sapiens
cagtgcttgagggga

SEQ ID NO: 1752770 - DNA, 15 bp, Homo sapiens
agtgcttgaggggag

SEQ ID NO: 1752771 - DNA, 15 bp, Homo sapiens
gtgcttgaggggagt

SEQ ID NO: 1752772 - DNA, 15 bp, Homo sapiens
tgcttgaggggagta

SEQ ID NO: 1752773 - DNA, 15 bp, Homo sapiens
gcttgaggggagtaa

SEQ ID NO: 1752774 - DNA, 15 bp, Homo sapiens
cttgaggggagtaac

SEQ ID NO: 1752775 - DNA, 15 bp, Homo sapiens
ttgaggggagtaacc

SEQ ID NO: 1752776 - DNA, 15 bp, Homo sapiens
tgaggggagtaacca

SEQ ID NO: 1752777 - DNA, 15 bp, Homo sapiens
gaggggagtaaccag

SEQ ID NO: 1752778 - DNA, 15 bp, Homo sapiens
aggggagtaaccagg

SEQ ID NO: 1752779 - DNA, 15 bp, Homo sapiens
ggggagtaaccagga

SEQ ID NO: 1752780 - DNA, 15 bp, Homo sapiens
gggagtaaccaggag

SEQ ID NO: 1752781 - DNA, 15 bp, Homo sapiens
ggagtaaccaggaga

SEQ ID NO: 1752782 - DNA, 15 bp, Homo sapiens
gagtaaccaggagac

SEQ ID NO: 1752783 - DNA, 15 bp, Homo sapiens
agtaaccaggagaca

SEQ ID NO: 1752784 - DNA, 15 bp, Homo sapiens
gtaaccaggagacaa

SEQ ID NO: 1752785 - DNA, 15 bp, Homo sapiens
taaccaggagacaag

SEQ ID NO: 1752786 - DNA, 15 bp, Homo sapiens
aaccaggagacaagt

SEQ ID NO: 1752787 - DNA, 15 bp, Homo sapiens
accaggagacaagtg

SEQ ID NO: 1752788 - DNA, 15 bp, Homo sapiens
ccaggagacaagtgg

SEQ ID NO: 1752789 - DNA, 15 bp, Homo sapiens
caggagacaagtggg

SEQ ID NO: 1752790 - DNA, 15 bp, Homo sapiens
aggagacaagtggga

SEQ ID NO: 1752791 - DNA, 15 bp, Homo sapiens
ggagacaagtgggac

SEQ ID NO: 1752792 - DNA, 15 bp, Homo sapiens
gagacaagtgggact

SEQ ID NO: 1752793 - DNA, 15 bp, Homo sapiens
agacaagtgggacta

SEQ ID NO: 1752794 - DNA, 15 bp, Homo sapiens
gacaagtgggactaa

SEQ ID NO: 1752795 - DNA, 15 bp, Homo sapiens
acaagtgggactaaa

SEQ ID NO: 1752796 - DNA, 15 bp, Homo sapiens
caagtgggactaaat

SEQ ID NO: 1752797 - DNA, 15 bp, Homo sapiens
aagtgggactaaatg

SEQ ID NO: 1752798 - DNA, 15 bp, Homo sapiens
agtgggactaaatgg

SEQ ID NO: 1752799 - DNA, 15 bp, Homo sapiens
gtgggactaaatggg

SEQ ID NO: 1752800 - DNA, 15 bp, Homo sapiens
tgggactaaatgggg

SEQ ID NO: 1752801 - DNA, 15 bp, Homo sapiens
gggactaaatggggc

SEQ ID NO: 1752802 - DNA, 15 bp, Homo sapiens
ggactaaatggggca

SEQ ID NO: 1752803 - DNA, 15 bp, Homo sapiens
gactaaatggggcag

SEQ ID NO: 1752804 - DNA, 15 bp, Homo sapiens
actaaatggggcaga

SEQ ID NO: 1752805 - DNA, 15 bp, Homo sapiens
ctaaatggggcagag

SEQ ID NO: 1752806 - DNA, 15 bp, Homo sapiens
taaatggggcagagg

SEQ ID NO: 1752807 - DNA, 15 bp, Homo sapiens
aaatggggcagaggg

SEQ ID NO: 1752808 - DNA, 15 bp, Homo sapiens
aatggggcagagggc

SEQ ID NO: 1752809 - DNA, 15 bp, Homo sapiens
atggggcagagggct

SEQ ID NO: 1752810 - DNA, 15 bp, Homo sapiens
tggggcagagggcta

SEQ ID NO: 1752811 - DNA, 15 bp, Homo sapiens
ggggcagagggctag

SEQ ID NO: 1752812 - DNA, 15 bp, Homo sapiens
gggcagagggctaga

SEQ ID NO: 1752813 - DNA, 15 bp, Homo sapiens
ggcagagggctagag

SEQ ID NO: 1752814 - DNA, 15 bp, Homo sapiens
gcagagggctagaga

SEQ ID NO: 1752815 - DNA, 15 bp, Homo sapiens
cagagggctagagag

SEQ ID NO: 1752816 - DNA, 15 bp, Homo sapiens
agagggctagagagg

SEQ ID NO: 1752817 - DNA, 15 bp, Homo sapiens
gagggctagagaggt

SEQ ID NO: 1752818 - DNA, 15 bp, Homo sapiens
agggctagagaggtc

SEQ ID NO: 1752819 - DNA, 15 bp, Homo sapiens
gggctagagaggtcc

SEQ ID NO: 1752820 - DNA, 15 bp, Homo sapiens
ggctagagaggtcct

SEQ ID NO: 1752821 - DNA, 15 bp, Homo sapiens
gctagagaggtcctg

SEQ ID NO: 1752822 - DNA, 15 bp, Homo sapiens
ctagagaggtcctga

SEQ ID NO: 1752823 - DNA, 15 bp, Homo sapiens
tagagaggtcctgaa

SEQ ID NO: 1752824 - DNA, 15 bp, Homo sapiens
agagaggtcctgaaa

SEQ ID NO: 1752825 - DNA, 15 bp, Homo sapiens
gagaggtcctgaaag

SEQ ID NO: 1752826 - DNA, 15 bp, Homo sapiens
agaggtcctgaaagc

SEQ ID NO: 1752827 - DNA, 15 bp, Homo sapiens
gaggtcctgaaagca

SEQ ID NO: 1752828 - DNA, 15 bp, Homo sapiens
aggtcctgaaagcaa

SEQ ID NO: 1752829 - DNA, 15 bp, Homo sapiens
ggtcctgaaagcaaa

SEQ ID NO: 1752830 - DNA, 15 bp, Homo sapiens
gtcctgaaagcaaaa

SEQ ID NO: 1752831 - DNA, 15 bp, Homo sapiens
tcctgaaagcaaaac

SEQ ID NO: 1752832 - DNA, 15 bp, Homo sapiens
cctgaaagcaaaact

SEQ ID NO: 1752833 - DNA, 15 bp, Homo sapiens
ctgaaagcaaaactc

SEQ ID NO: 1752834 - DNA, 15 bp, Homo sapiens
tgaaagcaaaactcc

SEQ ID NO: 1752835 - DNA, 15 bp, Homo sapiens
gaaagcaaaactcct

SEQ ID NO: 1752836 - DNA, 15 bp, Homo sapiens
aaagcaaaactcctg

SEQ ID NO: 1752837 - DNA, 15 bp, Homo sapiens
aagcaaaactcctgg

SEQ ID NO: 1752838 - DNA, 15 bp, Homo sapiens
agcaaaactcctggc

SEQ ID NO: 1752839 - DNA, 15 bp, Homo sapiens
gcaaaactcctggct

SEQ ID NO: 1752840 - DNA, 15 bp, Homo sapiens
caaaactcctggctc

SEQ ID NO: 1752841 - DNA, 15 bp, Homo sapiens
aaaactcctggctca

SEQ ID NO: 1752842 - DNA, 15 bp, Homo sapiens
aaactcctggctcac

SEQ ID NO: 1752843 - DNA, 15 bp, Homo sapiens
aactcctggctcact

SEQ ID NO: 1752844 - DNA, 15 bp, Homo sapiens
actcctggctcactt

SEQ ID NO: 1752845 - DNA, 15 bp, Homo sapiens
ctcctggctcactta

SEQ ID NO: 1752846 - DNA, 15 bp, Homo sapiens
tcctggctcacttaa

SEQ ID NO: 1752847 - DNA, 15 bp, Homo sapiens
cctggctcacttaaa

SEQ ID NO: 1752848 - DNA, 15 bp, Homo sapiens
ctggctcacttaaaa

SEQ ID NO: 1752849 - DNA, 15 bp, Homo sapiens
tggctcacttaaaaa

SEQ ID NO: 1752850 - DNA, 15 bp, Homo sapiens
ggctcacttaaaaaa

SEQ ID NO: 1752851 - DNA, 15 bp, Homo sapiens
gctcacttaaaaaaa

SEQ ID NO: 1752852 - DNA, 15 bp, Homo sapiens
ctcacttaaaaaaaa

SEQ ID NO: 1752853 - DNA, 15 bp, Homo sapiens
cacttaaaaaaaaac

SEQ ID NO: 1752854 - DNA, 15 bp, Homo sapiens
acttaaaaaaaaact

SEQ ID NO: 1752855 - DNA, 15 bp, Homo sapiens
cttaaaaaaaaacta

SEQ ID NO: 1752856 - DNA, 15 bp, Homo sapiens
ttaaaaaaaaactaa

SEQ ID NO: 1752857 - DNA, 15 bp, Homo sapiens
taaaaaaaaactaat

SEQ ID NO: 1752858 - DNA, 15 bp, Homo sapiens
aaaaaaaaactaatc

SEQ ID NO: 1752859 - DNA, 15 bp, Homo sapiens
aaaaaaaactaatct

SEQ ID NO: 1752860 - DNA, 15 bp, Homo sapiens
aaaaaaactaatctc

SEQ ID NO: 1752861 - DNA, 15 bp, Homo sapiens
aaaaaactaatctct

SEQ ID NO: 1752862 - DNA, 15 bp, Homo sapiens
aaaaactaatctctc

SEQ ID NO: 1752863 - DNA, 15 bp, Homo sapiens
aaaactaatctctct

SEQ ID NO: 1752864 - DNA, 15 bp, Homo sapiens
aaactaatctctctc

SEQ ID NO: 1752865 - DNA, 15 bp, Homo sapiens
aactaatctctctct

SEQ ID NO: 1752866 - DNA, 15 bp, Homo sapiens
actaatctctctctc

SEQ ID NO: 1752867 - DNA, 15 bp, Homo sapiens
ctaatctctctctca

SEQ ID NO: 1752868 - DNA, 15 bp, Homo sapiens
taatctctctctcaa

SEQ ID NO: 1752869 - DNA, 15 bp, Homo sapiens
aatctctctctcaat

SEQ ID NO: 1752870 - DNA, 15 bp, Homo sapiens
atctctctctcaata

SEQ ID NO: 1752871 - DNA, 15 bp, Homo sapiens
tctctctctcaatac

SEQ ID NO: 1752872 - DNA, 15 bp, Homo sapiens
ctctctctcaatacc

SEQ ID NO: 1752873 - DNA, 15 bp, Homo sapiens
tctctctcaatacct

SEQ ID NO: 1752874 - DNA, 15 bp, Homo sapiens
ctctctcaataccta

SEQ ID NO: 1752875 - DNA, 15 bp, Homo sapiens
tctctcaatacctaa

SEQ ID NO: 1752876 - DNA, 15 bp, Homo sapiens
ctctcaatacctaat

SEQ ID NO: 1752877 - DNA, 15 bp, Homo sapiens
tctcaatacctaatc

SEQ ID NO: 1752878 - DNA, 15 bp, Homo sapiens
ctcaatacctaatct

SEQ ID NO: 1752879 - DNA, 15 bp, Homo sapiens
tcaatacctaatcta

SEQ ID NO: 1752880 - DNA, 15 bp, Homo sapiens
caatacctaatctaa

SEQ ID NO: 1752881 - DNA, 15 bp, Homo sapiens
aatacctaatctaat

SEQ ID NO: 1752882 - DNA, 15 bp, Homo sapiens
atacctaatctaatg

SEQ ID NO: 1752883 - DNA, 15 bp, Homo sapiens
tacctaatctaatgt

SEQ ID NO: 1752884 - DNA, 15 bp, Homo sapiens
acctaatctaatgtc

SEQ ID NO: 1752885 - DNA, 15 bp, Homo sapiens
cctaatctaatgtct

SEQ ID NO: 1752886 - DNA, 15 bp, Homo sapiens
ctaatctaatgtcta

SEQ ID NO: 1752887 - DNA, 15 bp, Homo sapiens
taatctaatgtctaa

SEQ ID NO: 1752888 - DNA, 15 bp, Homo sapiens
aatctaatgtctaac

SEQ ID NO: 1752889 - DNA, 15 bp, Homo sapiens
atctaatgtctaaca

SEQ ID NO: 1752890 - DNA, 15 bp, Homo sapiens
tctaatgtctaacat

SEQ ID NO: 1752891 - DNA, 15 bp, Homo sapiens
ctaatgtctaacata

SEQ ID NO: 1752892 - DNA, 15 bp, Homo sapiens
taatgtctaacatat

SEQ ID NO: 1752893 - DNA, 15 bp, Homo sapiens
aatgtctaacatata

SEQ ID NO: 1752894 - DNA, 15 bp, Homo sapiens
atgtctaacatatag

SEQ ID NO: 1752895 - DNA, 15 bp, Homo sapiens
tgtctaacatataga

SEQ ID NO: 1752896 - DNA, 15 bp, Homo sapiens
gtctaacatatagaa

SEQ ID NO: 1752897 - DNA, 15 bp, Homo sapiens
tctaacatatagaat

SEQ ID NO: 1752898 - DNA, 15 bp, Homo sapiens
ctaacatatagaatt

SEQ ID NO: 1752899 - DNA, 15 bp, Homo sapiens
taacatatagaattt

SEQ ID NO: 1752900 - DNA, 15 bp, Homo sapiens
aacatatagaattta

SEQ ID NO: 1752901 - DNA, 15 bp, Homo sapiens
acatatagaatttag

SEQ ID NO: 1752902 - DNA, 15 bp, Homo sapiens
catatagaatttagg

SEQ ID NO: 1752903 - DNA, 15 bp, Homo sapiens
atatagaatttaggt

SEQ ID NO: 1752904 - DNA, 15 bp, Homo sapiens
tatagaatttaggtg

SEQ ID NO: 1752905 - DNA, 15 bp, Homo sapiens
atagaatttaggtgc

SEQ ID NO: 1752906 - DNA, 15 bp, Homo sapiens
tagaatttaggtgca

SEQ ID NO: 1752907 - DNA, 15 bp, Homo sapiens
agaatttaggtgcat

SEQ ID NO: 1752908 - DNA, 15 bp, Homo sapiens
gaatttaggtgcata

SEQ ID NO: 1752909 - DNA, 15 bp, Homo sapiens
aatttaggtgcataa

SEQ ID NO: 1752910 - DNA, 15 bp, Homo sapiens
atttaggtgcataaa

SEQ ID NO: 1752911 - DNA, 15 bp, Homo sapiens
tttaggtgcataaag

SEQ ID NO: 1752912 - DNA, 15 bp, Homo sapiens
ttaggtgcataaagc

SEQ ID NO: 1752913 - DNA, 15 bp, Homo sapiens
taggtgcataaagca

SEQ ID NO: 1752914 - DNA, 15 bp, Homo sapiens
aggtgcataaagcat

SEQ ID NO: 1752915 - DNA, 15 bp, Homo sapiens
ggtgcataaagcatt

SEQ ID NO: 1752916 - DNA, 15 bp, Homo sapiens
gtgcataaagcatta

SEQ ID NO: 1752917 - DNA, 15 bp, Homo sapiens
tgcataaagcattag

SEQ ID NO: 1752918 - DNA, 15 bp, Homo sapiens
gcataaagcattaga

SEQ ID NO: 1752919 - DNA, 15 bp, Homo sapiens
cataaagcattagat

SEQ ID NO: 1752920 - DNA, 15 bp, Homo sapiens
ataaagcattagatt

SEQ ID NO: 1752921 - DNA, 15 bp, Homo sapiens
taaagcattagattt

SEQ ID NO: 1752922 - DNA, 15 bp, Homo sapiens
aaagcattagatttg

SEQ ID NO: 1752923 - DNA, 15 bp, Homo sapiens
aagcattagatttgt

SEQ ID NO: 1752924 - DNA, 15 bp, Homo sapiens
agcattagatttgta

SEQ ID NO: 1752925 - DNA, 15 bp, Homo sapiens
gcattagatttgtaa

SEQ ID NO: 1752926 - DNA, 15 bp, Homo sapiens
cattagatttgtaat

SEQ ID NO: 1752927 - DNA, 15 bp, Homo sapiens
attagatttgtaatg

SEQ ID NO: 1752928 - DNA, 15 bp, Homo sapiens
ttagatttgtaatgt

SEQ ID NO: 1752929 - DNA, 15 bp, Homo sapiens
tagatttgtaatgtc

SEQ ID NO: 1752930 - DNA, 15 bp, Homo sapiens
agatttgtaatgtcc

SEQ ID NO: 1752931 - DNA, 15 bp, Homo sapiens
gatttgtaatgtcct

SEQ ID NO: 1752932 - DNA, 15 bp, Homo sapiens
atttgtaatgtcctt

SEQ ID NO: 1752933 - DNA, 15 bp, Homo sapiens
tttgtaatgtccttt

SEQ ID NO: 1752934 - DNA, 15 bp, Homo sapiens
ttgtaatgtcctttg

SEQ ID NO: 1752935 - DNA, 15 bp, Homo sapiens
tgtaatgtcctttga

SEQ ID NO: 1752936 - DNA, 15 bp, Homo sapiens
gtaatgtcctttgat

SEQ ID NO: 1752937 - DNA, 15 bp, Homo sapiens
taatgtcctttgatg

SEQ ID NO: 1752938 - DNA, 15 bp, Homo sapiens
aatgtcctttgatga

SEQ ID NO: 1752939 - DNA, 15 bp, Homo sapiens
atgtcctttgatgaa

SEQ ID NO: 1752940 - DNA, 15 bp, Homo sapiens
tgtcctttgatgaat

SEQ ID NO: 1752941 - DNA, 15 bp, Homo sapiens
gtcctttgatgaatt

SEQ ID NO: 1752942 - DNA, 15 bp, Homo sapiens
tcctttgatgaattt

SEQ ID NO: 1752943 - DNA, 15 bp, Homo sapiens
cctttgatgaattta

SEQ ID NO: 1752944 - DNA, 15 bp, Homo sapiens
ctttgatgaatttac

SEQ ID NO: 1752945 - DNA, 15 bp, Homo sapiens
tttgatgaatttacc

SEQ ID NO: 1752946 - DNA, 15 bp, Homo sapiens
ttgatgaatttacct

SEQ ID NO: 1752947 - DNA, 15 bp, Homo sapiens
tgatgaatttacctc

SEQ ID NO: 1752948 - DNA, 15 bp, Homo sapiens
gatgaatttacctct

SEQ ID NO: 1752949 - DNA, 15 bp, Homo sapiens
atgaatttacctctt

SEQ ID NO: 1752950 - DNA, 15 bp, Homo sapiens
tgaatttacctcttt

SEQ ID NO: 1752951 - DNA, 15 bp, Homo sapiens
gaatttacctcttta

SEQ ID NO: 1752952 - DNA, 15 bp, Homo sapiens
aatttacctctttaa

SEQ ID NO: 1752953 - DNA, 15 bp, Homo sapiens
atttacctctttaat

SEQ ID NO: 1752954 - DNA, 15 bp, Homo sapiens
tttacctctttaatc

SEQ ID NO: 1752955 - DNA, 15 bp, Homo sapiens
ttacctctttaatca

SEQ ID NO: 1752956 - DNA, 15 bp, Homo sapiens
tacctctttaatcat

SEQ ID NO: 1752957 - DNA, 15 bp, Homo sapiens
acctctttaatcatt

SEQ ID NO: 1752958 - DNA, 15 bp, Homo sapiens
cctctttaatcatta

SEQ ID NO: 1752959 - DNA, 15 bp, Homo sapiens
ctctttaatcattat

SEQ ID NO: 1752960 - DNA, 15 bp, Homo sapiens
tctttaatcattata

SEQ ID NO: 1752961 - DNA, 15 bp, Homo sapiens
ctttaatcattataa

SEQ ID NO: 1752962 - DNA, 15 bp, Homo sapiens
tttaatcattataaa

SEQ ID NO: 1752963 - DNA, 15 bp, Homo sapiens
ttaatcattataaaa

SEQ ID NO: 1752964 - DNA, 15 bp, Homo sapiens
taatcattataaaat

SEQ ID NO: 1752965 - DNA, 15 bp, Homo sapiens
aatcattataaaatg

SEQ ID NO: 1752966 - DNA, 15 bp, Homo sapiens
atcattataaaatga

SEQ ID NO: 1752967 - DNA, 15 bp, Homo sapiens
tcattataaaatgac

SEQ ID NO: 1752968 - DNA, 15 bp, Homo sapiens
cattataaaatgacc

SEQ ID NO: 1752969 - DNA, 15 bp, Homo sapiens
attataaaatgaccc

SEQ ID NO: 1752970 - DNA, 15 bp, Homo sapiens
ttataaaatgaccct

SEQ ID NO: 1752971 - DNA, 15 bp, Homo sapiens
tataaaatgaccctc

SEQ ID NO: 1752972 - DNA, 15 bp, Homo sapiens
ataaaatgaccctct

SEQ ID NO: 1752973 - DNA, 15 bp, Homo sapiens
taaaatgaccctctc

SEQ ID NO: 1752974 - DNA, 15 bp, Homo sapiens
aaaatgaccctctct

SEQ ID NO: 1752975 - DNA, 15 bp, Homo sapiens
aaatgaccctctctt

SEQ ID NO: 1752976 - DNA, 15 bp, Homo sapiens
aatgaccctctcttt

SEQ ID NO: 1752977 - DNA, 15 bp, Homo sapiens
atgaccctctcttta

SEQ ID NO: 1752978 - DNA, 15 bp, Homo sapiens
tgaccctctctttat

SEQ ID NO: 1752979 - DNA, 15 bp, Homo sapiens
gaccctctctttatc

SEQ ID NO: 1752980 - DNA, 15 bp, Homo sapiens
accctctctttatcc

SEQ ID NO: 1752981 - DNA, 15 bp, Homo sapiens
ccctctctttatccc

SEQ ID NO: 1752982 - DNA, 15 bp, Homo sapiens
cctctctttatccct

SEQ ID NO: 1752983 - DNA, 15 bp, Homo sapiens
ctctctttatccctc

SEQ ID NO: 1752984 - DNA, 15 bp, Homo sapiens
tctctttatccctcg

SEQ ID NO: 1752985 - DNA, 15 bp, Homo sapiens
ctctttatccctcgt

SEQ ID NO: 1752986 - DNA, 15 bp, Homo sapiens
tctttatccctcgta

SEQ ID NO: 1752987 - DNA, 15 bp, Homo sapiens
ctttatccctcgtaa

SEQ ID NO: 1752988 - DNA, 15 bp, Homo sapiens
tttatccctcgtaat

SEQ ID NO: 1752989 - DNA, 15 bp, Homo sapiens
ttatccctcgtaata

SEQ ID NO: 1752990 - DNA, 15 bp, Homo sapiens
tatccctcgtaatat

SEQ ID NO: 1752991 - DNA, 15 bp, Homo sapiens
atccctcgtaatatt

SEQ ID NO: 1752992 - DNA, 15 bp, Homo sapiens
tccctcgtaatattg

SEQ ID NO: 1752993 - DNA, 15 bp, Homo sapiens
ccctcgtaatattgt

SEQ ID NO: 1752994 - DNA, 15 bp, Homo sapiens
cctcgtaatattgtt

SEQ ID NO: 1752995 - DNA, 15 bp, Homo sapiens
ctcgtaatattgttt

SEQ ID NO: 1752996 - DNA, 15 bp, Homo sapiens
tcgtaatattgtttg

SEQ ID NO: 1752997 - DNA, 15 bp, Homo sapiens
cgtaatattgtttgc

SEQ ID NO: 1752998 - DNA, 15 bp, Homo sapiens
gtaatattgtttgct

SEQ ID NO: 1752999 - DNA, 15 bp, Homo sapiens
taatattgtttgctc

SEQ ID NO: 1753000 - DNA, 15 bp, Homo sapiens
aatattgtttgctct

SEQ ID NO: 1753001 - DNA, 15 bp, Homo sapiens
atattgtttgctctg

SEQ ID NO: 1753002 - DNA, 15 bp, Homo sapiens
tattgtttgctctga

SEQ ID NO: 1753003 - DNA, 15 bp, Homo sapiens
attgtttgctctgaa

SEQ ID NO: 1753004 - DNA, 15 bp, Homo sapiens
ttgtttgctctgaaa

SEQ ID NO: 1753005 - DNA, 15 bp, Homo sapiens
tgtttgctctgaaaa

SEQ ID NO: 1753006 - DNA, 15 bp, Homo sapiens
gtttgctctgaaaac

SEQ ID NO: 1753007 - DNA, 15 bp, Homo sapiens
tttgctctgaaaact

SEQ ID NO: 1753008 - DNA, 15 bp, Homo sapiens
ttgctctgaaaacta

SEQ ID NO: 1753009 - DNA, 15 bp, Homo sapiens
tgctctgaaaactac

SEQ ID NO: 1753010 - DNA, 15 bp, Homo sapiens
gctctgaaaactact

SEQ ID NO: 1753011 - DNA, 15 bp, Homo sapiens
ctctgaaaactactt

SEQ ID NO: 1753012 - DNA, 15 bp, Homo sapiens
tctgaaaactacttg

SEQ ID NO: 1753013 - DNA, 15 bp, Homo sapiens
ctgaaaactacttgt

SEQ ID NO: 1753014 - DNA, 15 bp, Homo sapiens
tgaaaactacttgtg

SEQ ID NO: 1753015 - DNA, 15 bp, Homo sapiens
gaaaactacttgtgc

SEQ ID NO: 1753016 - DNA, 15 bp, Homo sapiens
aaaactacttgtgcc

SEQ ID NO: 1753017 - DNA, 15 bp, Homo sapiens
aaactacttgtgcct

SEQ ID NO: 1753018 - DNA, 15 bp, Homo sapiens
aactacttgtgcctg

SEQ ID NO: 1753019 - DNA, 15 bp, Homo sapiens
actacttgtgcctga

SEQ ID NO: 1753020 - DNA, 15 bp, Homo sapiens
ctacttgtgcctgat

SEQ ID NO: 1753021 - DNA, 15 bp, Homo sapiens
tacttgtgcctgata

SEQ ID NO: 1753022 - DNA, 15 bp, Homo sapiens
acttgtgcctgatac

SEQ ID NO: 1753023 - DNA, 15 bp, Homo sapiens
cttgtgcctgatact

SEQ ID NO: 1753024 - DNA, 15 bp, Homo sapiens
ttgtgcctgatacta

SEQ ID NO: 1753025 - DNA, 15 bp, Homo sapiens
tgtgcctgatactag

SEQ ID NO: 1753026 - DNA, 15 bp, Homo sapiens
gtgcctgatactagt

SEQ ID NO: 1753027 - DNA, 15 bp, Homo sapiens
tgcctgatactagtg

SEQ ID NO: 1753028 - DNA, 15 bp, Homo sapiens
gcctgatactagtga

SEQ ID NO: 1753029 - DNA, 15 bp, Homo sapiens
cctgatactagtgaa

SEQ ID NO: 1753030 - DNA, 15 bp, Homo sapiens
ctgatactagtgaag

SEQ ID NO: 1753031 - DNA, 15 bp, Homo sapiens
tgatactagtgaagc

SEQ ID NO: 1753032 - DNA, 15 bp, Homo sapiens
gatactagtgaagcc

SEQ ID NO: 1753033 - DNA, 15 bp, Homo sapiens
atactagtgaagcca

SEQ ID NO: 1753034 - DNA, 15 bp, Homo sapiens
tactagtgaagccat

SEQ ID NO: 1753035 - DNA, 15 bp, Homo sapiens
actagtgaagccatt

SEQ ID NO: 1753036 - DNA, 15 bp, Homo sapiens
ctagtgaagccattc

SEQ ID NO: 1753037 - DNA, 15 bp, Homo sapiens
tagtgaagccattcc

SEQ ID NO: 1753038 - DNA, 15 bp, Homo sapiens
agtgaagccattcca

SEQ ID NO: 1753039 - DNA, 15 bp, Homo sapiens
gtgaagccattccag

SEQ ID NO: 1753040 - DNA, 15 bp, Homo sapiens
tgaagccattccagc

SEQ ID NO: 1753041 - DNA, 15 bp, Homo sapiens
gaagccattccagct

SEQ ID NO: 1753042 - DNA, 15 bp, Homo sapiens
aagccattccagctt

SEQ ID NO: 1753043 - DNA, 15 bp, Homo sapiens
agccattccagcttt

SEQ ID NO: 1753044 - DNA, 15 bp, Homo sapiens
gccattccagctttc

SEQ ID NO: 1753045 - DNA, 15 bp, Homo sapiens
ccattccagctttct

SEQ ID NO: 1753046 - DNA, 15 bp, Homo sapiens
cattccagctttctt

SEQ ID NO: 1753047 - DNA, 15 bp, Homo sapiens
attccagctttcttc

SEQ ID NO: 1753048 - DNA, 15 bp, Homo sapiens
ttccagctttcttcc

SEQ ID NO: 1753049 - DNA, 15 bp, Homo sapiens
tccagctttcttccc

SEQ ID NO: 1753050 - DNA, 15 bp, Homo sapiens
ccagctttcttccca

SEQ ID NO: 1753051 - DNA, 15 bp, Homo sapiens
cagctttcttcccat

SEQ ID NO: 1753052 - DNA, 15 bp, Homo sapiens
agctttcttcccatt

SEQ ID NO: 1753053 - DNA, 15 bp, Homo sapiens
gctttcttcccatta

SEQ ID NO: 1753054 - DNA, 15 bp, Homo sapiens
ctttcttcccattaa

SEQ ID NO: 1753055 - DNA, 15 bp, Homo sapiens
tttcttcccattaat

SEQ ID NO: 1753056 - DNA, 15 bp, Homo sapiens
ttcttcccattaata

SEQ ID NO: 1753057 - DNA, 15 bp, Homo sapiens
tcttcccattaatat

SEQ ID NO: 1753058 - DNA, 15 bp, Homo sapiens
cttcccattaatatc

SEQ ID NO: 1753059 - DNA, 15 bp, Homo sapiens
ttcccattaatatca

SEQ ID NO: 1753060 - DNA, 15 bp, Homo sapiens
tcccattaatatcaa

SEQ ID NO: 1753061 - DNA, 15 bp, Homo sapiens
cccattaatatcaac

SEQ ID NO: 1753062 - DNA, 15 bp, Homo sapiens
ccattaatatcaaca

SEQ ID NO: 1753063 - DNA, 15 bp, Homo sapiens
cattaatatcaacat

SEQ ID NO: 1753064 - DNA, 15 bp, Homo sapiens
attaatatcaacatg

SEQ ID NO: 1753065 - DNA, 15 bp, Homo sapiens
ttaatatcaacatgg

SEQ ID NO: 1753066 - DNA, 15 bp, Homo sapiens
taatatcaacatggc

SEQ ID NO: 1753067 - DNA, 15 bp, Homo sapiens
aatatcaacatggca

SEQ ID NO: 1753068 - DNA, 15 bp, Homo sapiens
atatcaacatggcat

SEQ ID NO: 1753069 - DNA, 15 bp, Homo sapiens
tatcaacatggcata

SEQ ID NO: 1753070 - DNA, 15 bp, Homo sapiens
atcaacatggcatat

SEQ ID NO: 1753071 - DNA, 15 bp, Homo sapiens
tcaacatggcatatt

SEQ ID NO: 1753072 - DNA, 15 bp, Homo sapiens
caacatggcatattt

SEQ ID NO: 1753073 - DNA, 15 bp, Homo sapiens
aacatggcatatttt

SEQ ID NO: 1753074 - DNA, 15 bp, Homo sapiens
acatggcatattttc

SEQ ID NO: 1753075 - DNA, 15 bp, Homo sapiens
catggcatattttcc

SEQ ID NO: 1753076 - DNA, 15 bp, Homo sapiens
atggcatattttccc

SEQ ID NO: 1753077 - DNA, 15 bp, Homo sapiens
tggcatattttcccc

SEQ ID NO: 1753078 - DNA, 15 bp, Homo sapiens
ggcatattttcccca

SEQ ID NO: 1753079 - DNA, 15 bp, Homo sapiens
gcatattttccccat

SEQ ID NO: 1753080 - DNA, 15 bp, Homo sapiens
catattttccccatt

SEQ ID NO: 1753081 - DNA, 15 bp, Homo sapiens
atattttccccattc

SEQ ID NO: 1753082 - DNA, 15 bp, Homo sapiens
tattttccccattct

SEQ ID NO: 1753083 - DNA, 15 bp, Homo sapiens
attttccccattctt

SEQ ID NO: 1753084 - DNA, 15 bp, Homo sapiens
ttttccccattcttt

SEQ ID NO: 1753085 - DNA, 15 bp, Homo sapiens
tttccccattcttta

SEQ ID NO: 1753086 - DNA, 15 bp, Homo sapiens
ttccccattctttat

SEQ ID NO: 1753087 - DNA, 15 bp, Homo sapiens
tccccattctttatt

SEQ ID NO: 1753088 - DNA, 15 bp, Homo sapiens
ccccattctttattt

SEQ ID NO: 1753089 - DNA, 15 bp, Homo sapiens
cccattctttattta

SEQ ID NO: 1753090 - DNA, 15 bp, Homo sapiens
ccattctttatttaa

SEQ ID NO: 1753091 - DNA, 15 bp, Homo sapiens
cattctttatttaac

SEQ ID NO: 1753092 - DNA, 15 bp, Homo sapiens
attctttatttaact

SEQ ID NO: 1753093 - DNA, 15 bp, Homo sapiens
ttctttatttaactt

SEQ ID NO: 1753094 - DNA, 15 bp, Homo sapiens
tctttatttaactta

SEQ ID NO: 1753095 - DNA, 15 bp, Homo sapiens
ctttatttaacttat

SEQ ID NO: 1753096 - DNA, 15 bp, Homo sapiens
tttatttaacttata

SEQ ID NO: 1753097 - DNA, 15 bp, Homo sapiens
ttatttaacttatac

SEQ ID NO: 1753098 - DNA, 15 bp, Homo sapiens
tatttaacttatacg

SEQ ID NO: 1753099 - DNA, 15 bp, Homo sapiens
atttaacttatacgt

SEQ ID NO: 1753100 - DNA, 15 bp, Homo sapiens
tttaacttatacgtg

SEQ ID NO: 1753101 - DNA, 15 bp, Homo sapiens
ttaacttatacgtgt

SEQ ID NO: 1753102 - DNA, 15 bp, Homo sapiens
taacttatacgtgtc

SEQ ID NO: 1753103 - DNA, 15 bp, Homo sapiens
aacttatacgtgtct

SEQ ID NO: 1753104 - DNA, 15 bp, Homo sapiens
acttatacgtgtctt

SEQ ID NO: 1753105 - DNA, 15 bp, Homo sapiens
cttatacgtgtcttt

SEQ ID NO: 1753106 - DNA, 15 bp, Homo sapiens
ttatacgtgtcttta

SEQ ID NO: 1753107 - DNA, 15 bp, Homo sapiens
tatacgtgtctttat

SEQ ID NO: 1753108 - DNA, 15 bp, Homo sapiens
atacgtgtctttatt

SEQ ID NO: 1753109 - DNA, 15 bp, Homo sapiens
tacgtgtctttattc

SEQ ID NO: 1753110 - DNA, 15 bp, Homo sapiens
acgtgtctttattct

SEQ ID NO: 1753111 - DNA, 15 bp, Homo sapiens
cgtgtctttattctt

SEQ ID NO: 1753112 - DNA, 15 bp, Homo sapiens
gtgtctttattctta

SEQ ID NO: 1753113 - DNA, 15 bp, Homo sapiens
tgtctttattcttaa

SEQ ID NO: 1753114 - DNA, 15 bp, Homo sapiens
gtctttattcttaaa

SEQ ID NO: 1753115 - DNA, 15 bp, Homo sapiens
tctttattcttaaag

SEQ ID NO: 1753116 - DNA, 15 bp, Homo sapiens
ctttattcttaaaga

SEQ ID NO: 1753117 - DNA, 15 bp, Homo sapiens
tttattcttaaagaa

SEQ ID NO: 1753118 - DNA, 15 bp, Homo sapiens
ttattcttaaagaag

SEQ ID NO: 1753119 - DNA, 15 bp, Homo sapiens
tattcttaaagaagt

SEQ ID NO: 1753120 - DNA, 15 bp, Homo sapiens
attcttaaagaagtg

SEQ ID NO: 1753121 - DNA, 15 bp, Homo sapiens
ttcttaaagaagtga

SEQ ID NO: 1753122 - DNA, 15 bp, Homo sapiens
tcttaaagaagtgat

SEQ ID NO: 1753123 - DNA, 15 bp, Homo sapiens
cttaaagaagtgatt

SEQ ID NO: 1753124 - DNA, 15 bp, Homo sapiens
ttaaagaagtgattt

SEQ ID NO: 1753125 - DNA, 15 bp, Homo sapiens
taaagaagtgatttt

SEQ ID NO: 1753126 - DNA, 15 bp, Homo sapiens
aaagaagtgattttc

SEQ ID NO: 1753127 - DNA, 15 bp, Homo sapiens
aagaagtgattttct

SEQ ID NO: 1753128 - DNA, 15 bp, Homo sapiens
agaagtgattttctt

SEQ ID NO: 1753129 - DNA, 15 bp, Homo sapiens
gaagtgattttctta

SEQ ID NO: 1753130 - DNA, 15 bp, Homo sapiens
aagtgattttcttat

SEQ ID NO: 1753131 - DNA, 15 bp, Homo sapiens
agtgattttcttata

SEQ ID NO: 1753132 - DNA, 15 bp, Homo sapiens
gtgattttcttatag

SEQ ID NO: 1753133 - DNA, 15 bp, Homo sapiens
tgattttcttatagg

SEQ ID NO: 1753134 - DNA, 15 bp, Homo sapiens
gattttcttataggc

SEQ ID NO: 1753135 - DNA, 15 bp, Homo sapiens
attttcttataggca

SEQ ID NO: 1753136 - DNA, 15 bp, Homo sapiens
ttttcttataggcag

SEQ ID NO: 1753137 - DNA, 15 bp, Homo sapiens
tttcttataggcagc

SEQ ID NO: 1753138 - DNA, 15 bp, Homo sapiens
ttcttataggcagca

SEQ ID NO: 1753139 - DNA, 15 bp, Homo sapiens
tcttataggcagcat

SEQ ID NO: 1753140 - DNA, 15 bp, Homo sapiens
cttataggcagcata

SEQ ID NO: 1753141 - DNA, 15 bp, Homo sapiens
ttataggcagcatat

SEQ ID NO: 1753142 - DNA, 15 bp, Homo sapiens
tataggcagcatatt

SEQ ID NO: 1753143 - DNA, 15 bp, Homo sapiens
ataggcagcatattg

SEQ ID NO: 1753144 - DNA, 15 bp, Homo sapiens
taggcagcatattgt

SEQ ID NO: 1753145 - DNA, 15 bp, Homo sapiens
aggcagcatattgtt

SEQ ID NO: 1753146 - DNA, 15 bp, Homo sapiens
ggcagcatattgttg

SEQ ID NO: 1753147 - DNA, 15 bp, Homo sapiens
gcagcatattgttgg

SEQ ID NO: 1753148 - DNA, 15 bp, Homo sapiens
cagcatattgttggg

SEQ ID NO: 1753149 - DNA, 15 bp, Homo sapiens
agcatattgttgggt

SEQ ID NO: 1753150 - DNA, 15 bp, Homo sapiens
gcatattgttgggtg

SEQ ID NO: 1753151 - DNA, 15 bp, Homo sapiens
catattgttgggtgt

SEQ ID NO: 1753152 - DNA, 15 bp, Homo sapiens
atattgttgggtgtt

SEQ ID NO: 1753153 - DNA, 15 bp, Homo sapiens
tattgttgggtgttg

SEQ ID NO: 1753154 - DNA, 15 bp, Homo sapiens
attgttgggtgttgc

SEQ ID NO: 1753155 - DNA, 15 bp, Homo sapiens
ttgttgggtgttgct

SEQ ID NO: 1753156 - DNA, 15 bp, Homo sapiens
tgttgggtgttgctt

SEQ ID NO: 1753157 - DNA, 15 bp, Homo sapiens
gttgggtgttgcttt

SEQ ID NO: 1753158 - DNA, 15 bp, Homo sapiens
ttgggtgttgctttc

SEQ ID NO: 1753159 - DNA, 15 bp, Homo sapiens
tgggtgttgctttct

SEQ ID NO: 1753160 - DNA, 15 bp, Homo sapiens
gggtgttgctttctt

SEQ ID NO: 1753161 - DNA, 15 bp, Homo sapiens
ggtgttgctttctta

SEQ ID NO: 1753162 - DNA, 15 bp, Homo sapiens
gtgttgctttcttaa

SEQ ID NO: 1753163 - DNA, 15 bp, Homo sapiens
tgttgctttcttaaa

SEQ ID NO: 1753164 - DNA, 15 bp, Homo sapiens
gttgctttcttaaat

SEQ ID NO: 1753165 - DNA, 15 bp, Homo sapiens
ttgctttcttaaatc

SEQ ID NO: 1753166 - DNA, 15 bp, Homo sapiens
tgctttcttaaatct

SEQ ID NO: 1753167 - DNA, 15 bp, Homo sapiens
gctttcttaaatctt

SEQ ID NO: 1753168 - DNA, 15 bp, Homo sapiens
ctttcttaaatcttg

SEQ ID NO: 1753169 - DNA, 15 bp, Homo sapiens
tttcttaaatcttgc

SEQ ID NO: 1753170 - DNA, 15 bp, Homo sapiens
ttcttaaatcttgcc

SEQ ID NO: 1753171 - DNA, 15 bp, Homo sapiens
tcttaaatcttgcct

SEQ ID NO: 1753172 - DNA, 15 bp, Homo sapiens
cttaaatcttgccta

SEQ ID NO: 1753173 - DNA, 15 bp, Homo sapiens
ttaaatcttgcctaa

SEQ ID NO: 1753174 - DNA, 15 bp, Homo sapiens
taaatcttgcctaac

SEQ ID NO: 1753175 - DNA, 15 bp, Homo sapiens
aaatcttgcctaaca

SEQ ID NO: 1753176 - DNA, 15 bp, Homo sapiens
aatcttgcctaacag

SEQ ID NO: 1753177 - DNA, 15 bp, Homo sapiens
atcttgcctaacagt

SEQ ID NO: 1753178 - DNA, 15 bp, Homo sapiens
tcttgcctaacagta

SEQ ID NO: 1753179 - DNA, 15 bp, Homo sapiens
cttgcctaacagtat

SEQ ID NO: 1753180 - DNA, 15 bp, Homo sapiens
ttgcctaacagtatc

SEQ ID NO: 1753181 - DNA, 15 bp, Homo sapiens
tgcctaacagtatct

SEQ ID NO: 1753182 - DNA, 15 bp, Homo sapiens
gcctaacagtatctg

SEQ ID NO: 1753183 - DNA, 15 bp, Homo sapiens
cctaacagtatctgc

SEQ ID NO: 1753184 - DNA, 15 bp, Homo sapiens
ctaacagtatctgcc

SEQ ID NO: 1753185 - DNA, 15 bp, Homo sapiens
taacagtatctgcct

SEQ ID NO: 1753186 - DNA, 15 bp, Homo sapiens
aacagtatctgcctt

SEQ ID NO: 1753187 - DNA, 15 bp, Homo sapiens
acagtatctgccttt

SEQ ID NO: 1753188 - DNA, 15 bp, Homo sapiens
cagtatctgcctttt

SEQ ID NO: 1753189 - DNA, 15 bp, Homo sapiens
agtatctgcctttta

SEQ ID NO: 1753190 - DNA, 15 bp, Homo sapiens
gtatctgccttttaa

SEQ ID NO: 1753191 - DNA, 15 bp, Homo sapiens
tatctgccttttaat

SEQ ID NO: 1753192 - DNA, 15 bp, Homo sapiens
atctgccttttaatt

SEQ ID NO: 1753193 - DNA, 15 bp, Homo sapiens
gccttttaattggga

SEQ ID NO: 1753194 - DNA, 15 bp, Homo sapiens
ccttttaattgggat

SEQ ID NO: 1753195 - DNA, 15 bp, Homo sapiens
cttttaattgggatg

SEQ ID NO: 1753196 - DNA, 15 bp, Homo sapiens
ttttaattgggatgt

SEQ ID NO: 1753197 - DNA, 15 bp, Homo sapiens
tttaattgggatgtt

SEQ ID NO: 1753198 - DNA, 15 bp, Homo sapiens
ttaattgggatgttt

SEQ ID NO: 1753199 - DNA, 15 bp, Homo sapiens
taattgggatgttta

SEQ ID NO: 1753200 - DNA, 15 bp, Homo sapiens
aattgggatgtttag

SEQ ID NO: 1753201 - DNA, 15 bp, Homo sapiens
attgggatgtttaga

SEQ ID NO: 1753202 - DNA, 15 bp, Homo sapiens
ttgggatgtttagat

SEQ ID NO: 1753203 - DNA, 15 bp, Homo sapiens
tgggatgtttagatt

SEQ ID NO: 1753204 - DNA, 15 bp, Homo sapiens
gggatgtttagattt

SEQ ID NO: 1753205 - DNA, 15 bp, Homo sapiens
ggatgtttagattta

SEQ ID NO: 1753206 - DNA, 15 bp, Homo sapiens
gatgtttagatttaa

SEQ ID NO: 1753207 - DNA, 15 bp, Homo sapiens
atgtttagatttaaa

SEQ ID NO: 1753208 - DNA, 15 bp, Homo sapiens
tgtttagatttaaat

SEQ ID NO: 1753209 - DNA, 15 bp, Homo sapiens
gtttagatttaaatt

SEQ ID NO: 1753210 - DNA, 15 bp, Homo sapiens
tttagatttaaattt

SEQ ID NO: 1753211 - DNA, 15 bp, Homo sapiens
ttagatttaaattta

SEQ ID NO: 1753212 - DNA, 15 bp, Homo sapiens
tagatttaaatttaa

SEQ ID NO: 1753213 - DNA, 15 bp, Homo sapiens
agatttaaatttaat

SEQ ID NO: 1753214 - DNA, 15 bp, Homo sapiens
gatttaaatttaatg

SEQ ID NO: 1753215 - DNA, 15 bp, Homo sapiens
atttaaatttaatgt

SEQ ID NO: 1753216 - DNA, 15 bp, Homo sapiens
tttaaatttaatgtg

SEQ ID NO: 1753217 - DNA, 15 bp, Homo sapiens
ttaaatttaatgtga

SEQ ID NO: 1753218 - DNA, 15 bp, Homo sapiens
taaatttaatgtgac

SEQ ID NO: 1753219 - DNA, 15 bp, Homo sapiens
aaatttaatgtgact

SEQ ID NO: 1753220 - DNA, 15 bp, Homo sapiens
aatttaatgtgacta

SEQ ID NO: 1753221 - DNA, 15 bp, Homo sapiens
atttaatgtgactat

SEQ ID NO: 1753222 - DNA, 15 bp, Homo sapiens
tttaatgtgactatt

SEQ ID NO: 1753223 - DNA, 15 bp, Homo sapiens
ttaatgtgactattg

SEQ ID NO: 1753224 - DNA, 15 bp, Homo sapiens
taatgtgactattga

SEQ ID NO: 1753225 - DNA, 15 bp, Homo sapiens
aatgtgactattgat

SEQ ID NO: 1753226 - DNA, 15 bp, Homo sapiens
atgtgactattgata

SEQ ID NO: 1753227 - DNA, 15 bp, Homo sapiens
tgtgactattgatat

SEQ ID NO: 1753228 - DNA, 15 bp, Homo sapiens
gtgactattgatatg

SEQ ID NO: 1753229 - DNA, 15 bp, Homo sapiens
tgactattgatatgg

SEQ ID NO: 1753230 - DNA, 15 bp, Homo sapiens
gactattgatatggt

SEQ ID NO: 1753231 - DNA, 15 bp, Homo sapiens
actattgatatggtt

SEQ ID NO: 1753232 - DNA, 15 bp, Homo sapiens
ctattgatatggttg

SEQ ID NO: 1753233 - DNA, 15 bp, Homo sapiens
tattgatatggttgg

SEQ ID NO: 1753234 - DNA, 15 bp, Homo sapiens
attgatatggttggg

SEQ ID NO: 1753235 - DNA, 15 bp, Homo sapiens
ttgatatggttgggt

SEQ ID NO: 1753236 - DNA, 15 bp, Homo sapiens
tgatatggttgggtt

SEQ ID NO: 1753237 - DNA, 15 bp, Homo sapiens
gatatggttgggttt

SEQ ID NO: 1753238 - DNA, 15 bp, Homo sapiens
atatggttgggttta

SEQ ID NO: 1753239 - DNA, 15 bp, Homo sapiens
tatggttgggtttaa

SEQ ID NO: 1753240 - DNA, 15 bp, Homo sapiens
atggttgggtttaaa

SEQ ID NO: 1753241 - DNA, 15 bp, Homo sapiens
tggttgggtttaaat

SEQ ID NO: 1753242 - DNA, 15 bp, Homo sapiens
ggttgggtttaaatt

SEQ ID NO: 1753243 - DNA, 15 bp, Homo sapiens
gttgggtttaaattc

SEQ ID NO: 1753244 - DNA, 15 bp, Homo sapiens
ttgggtttaaattct

SEQ ID NO: 1753245 - DNA, 15 bp, Homo sapiens
tgggtttaaattctc

SEQ ID NO: 1753246 - DNA, 15 bp, Homo sapiens
gggtttaaattctcc

SEQ ID NO: 1753247 - DNA, 15 bp, Homo sapiens
ggtttaaattctcca

SEQ ID NO: 1753248 - DNA, 15 bp, Homo sapiens
gtttaaattctccat

SEQ ID NO: 1753249 - DNA, 15 bp, Homo sapiens
tttaaattctccatc

SEQ ID NO: 1753250 - DNA, 15 bp, Homo sapiens
ttaaattctccatct

SEQ ID NO: 1753251 - DNA, 15 bp, Homo sapiens
taaattctccatctt

SEQ ID NO: 1753252 - DNA, 15 bp, Homo sapiens
aaattctccatctta

SEQ ID NO: 1753253 - DNA, 15 bp, Homo sapiens
aattctccatcttat

SEQ ID NO: 1753254 - DNA, 15 bp, Homo sapiens
attctccatcttatt

SEQ ID NO: 1753255 - DNA, 15 bp, Homo sapiens
ttctccatcttatta

SEQ ID NO: 1753256 - DNA, 15 bp, Homo sapiens
tctccatcttattat

SEQ ID NO: 1753257 - DNA, 15 bp, Homo sapiens
ctccatcttattatt

SEQ ID NO: 1753258 - DNA, 15 bp, Homo sapiens
tccatcttattattc

SEQ ID NO: 1753259 - DNA, 15 bp, Homo sapiens
ccatcttattattca

SEQ ID NO: 1753260 - DNA, 15 bp, Homo sapiens
catcttattattcat

SEQ ID NO: 1753261 - DNA, 15 bp, Homo sapiens
atcttattattcatt

SEQ ID NO: 1753262 - DNA, 15 bp, Homo sapiens
tcttattattcattt

SEQ ID NO: 1753263 - DNA, 15 bp, Homo sapiens
cttattattcatttt

SEQ ID NO: 1753264 - DNA, 15 bp, Homo sapiens
ttattattcattttc

SEQ ID NO: 1753265 - DNA, 15 bp, Homo sapiens
tattattcattttct

SEQ ID NO: 1753266 - DNA, 15 bp, Homo sapiens
attattcattttcta

SEQ ID NO: 1753267 - DNA, 15 bp, Homo sapiens
ttattcattttctat

SEQ ID NO: 1753268 - DNA, 15 bp, Homo sapiens
tattcattttctatt

SEQ ID NO: 1753269 - DNA, 15 bp, Homo sapiens
attcattttctattt

SEQ ID NO: 1753270 - DNA, 15 bp, Homo sapiens
ttcattttctatttg

SEQ ID NO: 1753271 - DNA, 15 bp, Homo sapiens
tcattttctatttgt

SEQ ID NO: 1753272 - DNA, 15 bp, Homo sapiens
cattttctatttgtc

SEQ ID NO: 1753273 - DNA, 15 bp, Homo sapiens
attttctatttgtct

SEQ ID NO: 1753274 - DNA, 15 bp, Homo sapiens
ttttctatttgtctc

SEQ ID NO: 1753275 - DNA, 15 bp, Homo sapiens
tttctatttgtctca

SEQ ID NO: 1753276 - DNA, 15 bp, Homo sapiens
ttctatttgtctcat

SEQ ID NO: 1753277 - DNA, 15 bp, Homo sapiens
tatttgtctcatctc

SEQ ID NO: 1753278 - DNA, 15 bp, Homo sapiens
atttgtctcatctcc

SEQ ID NO: 1753279 - DNA, 15 bp, Homo sapiens
tttgtctcatctccc

SEQ ID NO: 1753280 - DNA, 15 bp, Homo sapiens
ttgtctcatctccct

SEQ ID NO: 1753281 - DNA, 15 bp, Homo sapiens
tgtctcatctccctt

SEQ ID NO: 1753282 - DNA, 15 bp, Homo sapiens
gtctcatctcccttt

SEQ ID NO: 1753283 - DNA, 15 bp, Homo sapiens
tctcatctccctttt

SEQ ID NO: 1753284 - DNA, 15 bp, Homo sapiens
ctcatctcccttttc

SEQ ID NO: 1753285 - DNA, 15 bp, Homo sapiens
tcatctcccttttcc

SEQ ID NO: 1753286 - DNA, 15 bp, Homo sapiens
catctcccttttcct

SEQ ID NO: 1753287 - DNA, 15 bp, Homo sapiens
atctcccttttcctc

SEQ ID NO: 1753288 - DNA, 15 bp, Homo sapiens
tctcccttttcctcc

SEQ ID NO: 1753289 - DNA, 15 bp, Homo sapiens
ctcccttttcctccc

SEQ ID NO: 1753290 - DNA, 15 bp, Homo sapiens
tcccttttcctccct

SEQ ID NO: 1753291 - DNA, 15 bp, Homo sapiens
cccttttcctccctt

SEQ ID NO: 1753292 - DNA, 15 bp, Homo sapiens
ccttttcctcccttt

SEQ ID NO: 1753293 - DNA, 15 bp, Homo sapiens
cttttcctccctttc

SEQ ID NO: 1753294 - DNA, 15 bp, Homo sapiens
ttttcctccctttcc

SEQ ID NO: 1753295 - DNA, 15 bp, Homo sapiens
tttcctccctttcct

SEQ ID NO: 1753296 - DNA, 15 bp, Homo sapiens
ttcctccctttcctc

SEQ ID NO: 1753297 - DNA, 15 bp, Homo sapiens
tcctccctttcctct

SEQ ID NO: 1753298 - DNA, 15 bp, Homo sapiens
cctccctttcctctt

SEQ ID NO: 1753299 - DNA, 15 bp, Homo sapiens
ctccctttcctcttt

SEQ ID NO: 1753300 - DNA, 15 bp, Homo sapiens
tccctttcctctttt

SEQ ID NO: 1753301 - DNA, 15 bp, Homo sapiens
ccctttcctcttttt

SEQ ID NO: 1753302 - DNA, 15 bp, Homo sapiens
cctttcctctttttc

SEQ ID NO: 1753303 - DNA, 15 bp, Homo sapiens
ctttcctctttttct

SEQ ID NO: 1753304 - DNA, 15 bp, Homo sapiens
tttcctctttttctg

SEQ ID NO: 1753305 - DNA, 15 bp, Homo sapiens
ttcctctttttctgc

SEQ ID NO: 1753306 - DNA, 15 bp, Homo sapiens
tcctctttttctgcc

SEQ ID NO: 1753307 - DNA, 15 bp, Homo sapiens
cctctttttctgcct

SEQ ID NO: 1753308 - DNA, 15 bp, Homo sapiens
ctctttttctgcctt

SEQ ID NO: 1753309 - DNA, 15 bp, Homo sapiens
tctttttctgccttc

SEQ ID NO: 1753310 - DNA, 15 bp, Homo sapiens
ctttttctgccttct

SEQ ID NO: 1753311 - DNA, 15 bp, Homo sapiens
tttttctgccttctt

SEQ ID NO: 1753312 - DNA, 15 bp, Homo sapiens
ttttctgccttcttt

SEQ ID NO: 1753313 - DNA, 15 bp, Homo sapiens
tttctgccttctttt

SEQ ID NO: 1753314 - DNA, 15 bp, Homo sapiens
ttctgccttcttttg

SEQ ID NO: 1753315 - DNA, 15 bp, Homo sapiens
tctgccttcttttgg

SEQ ID NO: 1753316 - DNA, 15 bp, Homo sapiens
ctgccttcttttgga

SEQ ID NO: 1753317 - DNA, 15 bp, Homo sapiens
tgccttcttttggat

SEQ ID NO: 1753318 - DNA, 15 bp, Homo sapiens
gccttcttttggatt

SEQ ID NO: 1753319 - DNA, 15 bp, Homo sapiens
ccttcttttggattg

SEQ ID NO: 1753320 - DNA, 15 bp, Homo sapiens
cttcttttggattga

SEQ ID NO: 1753321 - DNA, 15 bp, Homo sapiens
ttcttttggattgaa

SEQ ID NO: 1753322 - DNA, 15 bp, Homo sapiens
tcttttggattgaat

SEQ ID NO: 1753323 - DNA, 15 bp, Homo sapiens
cttttggattgaatt

SEQ ID NO: 1753324 - DNA, 15 bp, Homo sapiens
ttttggattgaattt

SEQ ID NO: 1753325 - DNA, 15 bp, Homo sapiens
tttggattgaatttt

SEQ ID NO: 1753326 - DNA, 15 bp, Homo sapiens
ttggattgaattttt

SEQ ID NO: 1753327 - DNA, 15 bp, Homo sapiens
tggattgaattttta

SEQ ID NO: 1753328 - DNA, 15 bp, Homo sapiens
ggattgaatttttaa

SEQ ID NO: 1753329 - DNA, 15 bp, Homo sapiens
gattgaatttttaaa

SEQ ID NO: 1753330 - DNA, 15 bp, Homo sapiens
attgaatttttaaaa

SEQ ID NO: 1753331 - DNA, 15 bp, Homo sapiens
ttgaatttttaaaat

SEQ ID NO: 1753332 - DNA, 15 bp, Homo sapiens
tgaatttttaaaatt

SEQ ID NO: 1753333 - DNA, 15 bp, Homo sapiens
gaatttttaaaattc

SEQ ID NO: 1753334 - DNA, 15 bp, Homo sapiens
aatttttaaaattct

SEQ ID NO: 1753335 - DNA, 15 bp, Homo sapiens
atttttaaaattctg

SEQ ID NO: 1753336 - DNA, 15 bp, Homo sapiens
tttttaaaattctgt

SEQ ID NO: 1753337 - DNA, 15 bp, Homo sapiens
ttttaaaattctgtt

SEQ ID NO: 1753338 - DNA, 15 bp, Homo sapiens
tttaaaattctgttt

SEQ ID NO: 1753339 - DNA, 15 bp, Homo sapiens
ttaaaattctgtttt

SEQ ID NO: 1753340 - DNA, 15 bp, Homo sapiens
taaaattctgtttta

SEQ ID NO: 1753341 - DNA, 15 bp, Homo sapiens
aaattctgttttatc

SEQ ID NO: 1753342 - DNA, 15 bp, Homo sapiens
aattctgttttatct

SEQ ID NO: 1753343 - DNA, 15 bp, Homo sapiens
attctgttttatctt

SEQ ID NO: 1753344 - DNA, 15 bp, Homo sapiens
ttctgttttatcttc

SEQ ID NO: 1753345 - DNA, 15 bp, Homo sapiens
tctgttttatcttct

SEQ ID NO: 1753346 - DNA, 15 bp, Homo sapiens
ctgttttatcttctt

SEQ ID NO: 1753347 - DNA, 15 bp, Homo sapiens
tgttttatcttcttt

SEQ ID NO: 1753348 - DNA, 15 bp, Homo sapiens
gttttatcttctttg

SEQ ID NO: 1753349 - DNA, 15 bp, Homo sapiens
ttttatcttctttgt

SEQ ID NO: 1753350 - DNA, 15 bp, Homo sapiens
tttatcttctttgta

SEQ ID NO: 1753351 - DNA, 15 bp, Homo sapiens
ttatcttctttgtag

SEQ ID NO: 1753352 - DNA, 15 bp, Homo sapiens
tatcttctttgtagg

SEQ ID NO: 1753353 - DNA, 15 bp, Homo sapiens
atcttctttgtaggc

SEQ ID NO: 1753354 - DNA, 15 bp, Homo sapiens
tcttctttgtaggct

SEQ ID NO: 1753355 - DNA, 15 bp, Homo sapiens
cttctttgtaggctt

SEQ ID NO: 1753356 - DNA, 15 bp, Homo sapiens
ttctttgtaggctta

SEQ ID NO: 1753357 - DNA, 15 bp, Homo sapiens
tctttgtaggcttac

SEQ ID NO: 1753358 - DNA, 15 bp, Homo sapiens
ctttgtaggcttact

SEQ ID NO: 1753359 - DNA, 15 bp, Homo sapiens
tttgtaggcttactg

SEQ ID NO: 1753360 - DNA, 15 bp, Homo sapiens
ttgtaggcttactgt

SEQ ID NO: 1753361 - DNA, 15 bp, Homo sapiens
tgtaggcttactgtc

SEQ ID NO: 1753362 - DNA, 15 bp, Homo sapiens
gtaggcttactgtct

SEQ ID NO: 1753363 - DNA, 15 bp, Homo sapiens
taggcttactgtcta

SEQ ID NO: 1753364 - DNA, 15 bp, Homo sapiens
aggcttactgtctat

SEQ ID NO: 1753365 - DNA, 15 bp, Homo sapiens
ggcttactgtctata

SEQ ID NO: 1753366 - DNA, 15 bp, Homo sapiens
gcttactgtctatac

SEQ ID NO: 1753367 - DNA, 15 bp, Homo sapiens
cttactgtctatact

SEQ ID NO: 1753368 - DNA, 15 bp, Homo sapiens
ttactgtctatactt

SEQ ID NO: 1753369 - DNA, 15 bp, Homo sapiens
tactgtctatacttc

SEQ ID NO: 1753370 - DNA, 15 bp, Homo sapiens
actgtctatacttct

SEQ ID NO: 1753371 - DNA, 15 bp, Homo sapiens
ctgtctatacttctt

SEQ ID NO: 1753372 - DNA, 15 bp, Homo sapiens
tgtctatacttcttt

SEQ ID NO: 1753373 - DNA, 15 bp, Homo sapiens
gtctatacttcttta

SEQ ID NO: 1753374 - DNA, 15 bp, Homo sapiens
tctatacttctttat

SEQ ID NO: 1753375 - DNA, 15 bp, Homo sapiens
ctatacttctttatt

SEQ ID NO: 1753376 - DNA, 15 bp, Homo sapiens
tatacttctttattt

SEQ ID NO: 1753377 - DNA, 15 bp, Homo sapiens
atacttctttatttt

SEQ ID NO: 1753378 - DNA, 15 bp, Homo sapiens
tacttctttattttg

SEQ ID NO: 1753379 - DNA, 15 bp, Homo sapiens
acttctttattttgt

SEQ ID NO: 1753380 - DNA, 15 bp, Homo sapiens
cttctttattttgta

SEQ ID NO: 1753381 - DNA, 15 bp, Homo sapiens
ttctttattttgtaa

SEQ ID NO: 1753382 - DNA, 15 bp, Homo sapiens
tctttattttgtaat

SEQ ID NO: 1753383 - DNA, 15 bp, Homo sapiens
ctttattttgtaatt

SEQ ID NO: 1753384 - DNA, 15 bp, Homo sapiens
tttattttgtaattg

SEQ ID NO: 1753385 - DNA, 15 bp, Homo sapiens
ttattttgtaattgt

SEQ ID NO: 1753386 - DNA, 15 bp, Homo sapiens
tattttgtaattgtt

SEQ ID NO: 1753387 - DNA, 15 bp, Homo sapiens
attttgtaattgttt

SEQ ID NO: 1753388 - DNA, 15 bp, Homo sapiens
ttttgtaattgtttt

SEQ ID NO: 1753389 - DNA, 15 bp, Homo sapiens
tttgtaattgttttt

SEQ ID NO: 1753390 - DNA, 15 bp, Homo sapiens
ttgtaattgtttttt

SEQ ID NO: 1753391 - DNA, 15 bp, Homo sapiens
tgtaattgttttttg

SEQ ID NO: 1753392 - DNA, 15 bp, Homo sapiens
gtaattgttttttga

SEQ ID NO: 1753393 - DNA, 15 bp, Homo sapiens
taattgttttttgat

SEQ ID NO: 1753394 - DNA, 15 bp, Homo sapiens
aattgttttttgatt

SEQ ID NO: 1753395 - DNA, 15 bp, Homo sapiens
attgttttttgattt

SEQ ID NO: 1753396 - DNA, 15 bp, Homo sapiens
ttgttttttgattta

SEQ ID NO: 1753397 - DNA, 15 bp, Homo sapiens
tgttttttgatttat

SEQ ID NO: 1753398 - DNA, 15 bp, Homo sapiens
gttttttgatttata

SEQ ID NO: 1753399 - DNA, 15 bp, Homo sapiens
ttttttgatttataa

SEQ ID NO: 1753400 - DNA, 15 bp, Homo sapiens
tttttgatttataat

SEQ ID NO: 1753401 - DNA, 15 bp, Homo sapiens
ttttgatttataata

SEQ ID NO: 1753402 - DNA, 15 bp, Homo sapiens
tttgatttataatat

SEQ ID NO: 1753403 - DNA, 15 bp, Homo sapiens
ttgatttataatatg

SEQ ID NO: 1753404 - DNA, 15 bp, Homo sapiens
tgatttataatatga

SEQ ID NO: 1753405 - DNA, 15 bp, Homo sapiens
gatttataatatgaa

SEQ ID NO: 1753406 - DNA, 15 bp, Homo sapiens
atttataatatgaat

SEQ ID NO: 1753407 - DNA, 15 bp, Homo sapiens
tttataatatgaatc

SEQ ID NO: 1753408 - DNA, 15 bp, Homo sapiens
ttataatatgaatct

SEQ ID NO: 1753409 - DNA, 15 bp, Homo sapiens
tataatatgaatctt

SEQ ID NO: 1753410 - DNA, 15 bp, Homo sapiens
ataatatgaatcttt

SEQ ID NO: 1753411 - DNA, 15 bp, Homo sapiens
taatatgaatcttta

SEQ ID NO: 1753412 - DNA, 15 bp, Homo sapiens
aatatgaatctttaa

SEQ ID NO: 1753413 - DNA, 15 bp, Homo sapiens
atatgaatctttaat

SEQ ID NO: 1753414 - DNA, 15 bp, Homo sapiens
tatgaatctttaatc

SEQ ID NO: 1753415 - DNA, 15 bp, Homo sapiens
atgaatctttaatct

SEQ ID NO: 1753416 - DNA, 15 bp, Homo sapiens
tgaatctttaatctt

SEQ ID NO: 1753417 - DNA, 15 bp, Homo sapiens
gaatctttaatcttt

SEQ ID NO: 1753418 - DNA, 15 bp, Homo sapiens
aatctttaatcttta

SEQ ID NO: 1753419 - DNA, 15 bp, Homo sapiens
atctttaatctttaa

SEQ ID NO: 1753420 - DNA, 15 bp, Homo sapiens
tctttaatctttaat

SEQ ID NO: 1753421 - DNA, 15 bp, Homo sapiens
ctttaatctttaata

SEQ ID NO: 1753422 - DNA, 15 bp, Homo sapiens
tttaatctttaatag

SEQ ID NO: 1753423 - DNA, 15 bp, Homo sapiens
ttaatctttaatagt

SEQ ID NO: 1753424 - DNA, 15 bp, Homo sapiens
taatctttaatagtc

SEQ ID NO: 1753425 - DNA, 15 bp, Homo sapiens
aatctttaatagtct

SEQ ID NO: 1753426 - DNA, 15 bp, Homo sapiens
atctttaatagtctt

SEQ ID NO: 1753427 - DNA, 15 bp, Homo sapiens
tctttaatagtcttt

SEQ ID NO: 1753428 - DNA, 15 bp, Homo sapiens
ctttaatagtctttc

SEQ ID NO: 1753429 - DNA, 15 bp, Homo sapiens
tttaatagtctttct

SEQ ID NO: 1753430 - DNA, 15 bp, Homo sapiens
ttaatagtctttctt

SEQ ID NO: 1753431 - DNA, 15 bp, Homo sapiens
taatagtctttcttt

SEQ ID NO: 1753432 - DNA, 15 bp, Homo sapiens
aatagtctttcttta

SEQ ID NO: 1753433 - DNA, 15 bp, Homo sapiens
atagtctttctttaa

SEQ ID NO: 1753434 - DNA, 15 bp, Homo sapiens
tagtctttctttaaa

SEQ ID NO: 1753435 - DNA, 15 bp, Homo sapiens
agtctttctttaaat

SEQ ID NO: 1753436 - DNA, 15 bp, Homo sapiens
gtctttctttaaata

SEQ ID NO: 1753437 - DNA, 15 bp, Homo sapiens
tctttctttaaatag

SEQ ID NO: 1753438 - DNA, 15 bp, Homo sapiens
ctttctttaaatagt

SEQ ID NO: 1753439 - DNA, 15 bp, Homo sapiens
tttctttaaatagta

SEQ ID NO: 1753440 - DNA, 15 bp, Homo sapiens
ttctttaaatagtat

SEQ ID NO: 1753441 - DNA, 15 bp, Homo sapiens
tctttaaatagtatt

SEQ ID NO: 1753442 - DNA, 15 bp, Homo sapiens
ctttaaatagtatta

SEQ ID NO: 1753443 - DNA, 15 bp, Homo sapiens
tttaaatagtattac

SEQ ID NO: 1753444 - DNA, 15 bp, Homo sapiens
ttaaatagtattaca

SEQ ID NO: 1753445 - DNA, 15 bp, Homo sapiens
taaatagtattacac

SEQ ID NO: 1753446 - DNA, 15 bp, Homo sapiens
aaatagtattacact

SEQ ID NO: 1753447 - DNA, 15 bp, Homo sapiens
aatagtattacacta

SEQ ID NO: 1753448 - DNA, 15 bp, Homo sapiens
atagtattacactac

SEQ ID NO: 1753449 - DNA, 15 bp, Homo sapiens
tagtattacactact

SEQ ID NO: 1753450 - DNA, 15 bp, Homo sapiens
agtattacactactt

SEQ ID NO: 1753451 - DNA, 15 bp, Homo sapiens
gtattacactacttc

SEQ ID NO: 1753452 - DNA, 15 bp, Homo sapiens
tattacactacttca

SEQ ID NO: 1753453 - DNA, 15 bp, Homo sapiens
attacactacttcac

SEQ ID NO: 1753454 - DNA, 15 bp, Homo sapiens
ttacactacttcaca

SEQ ID NO: 1753455 - DNA, 15 bp, Homo sapiens
tacactacttcacat

SEQ ID NO: 1753456 - DNA, 15 bp, Homo sapiens
acactacttcacata

SEQ ID NO: 1753457 - DNA, 15 bp, Homo sapiens
cactacttcacatac

SEQ ID NO: 1753458 - DNA, 15 bp, Homo sapiens
actacttcacataca

SEQ ID NO: 1753459 - DNA, 15 bp, Homo sapiens
ctacttcacatacag

SEQ ID NO: 1753460 - DNA, 15 bp, Homo sapiens
tacttcacatacagt

SEQ ID NO: 1753461 - DNA, 15 bp, Homo sapiens
acttcacatacagta

SEQ ID NO: 1753462 - DNA, 15 bp, Homo sapiens
cttcacatacagtat

SEQ ID NO: 1753463 - DNA, 15 bp, Homo sapiens
ttcacatacagtata

SEQ ID NO: 1753464 - DNA, 15 bp, Homo sapiens
tcacatacagtataa

SEQ ID NO: 1753465 - DNA, 15 bp, Homo sapiens
cacatacagtataag

SEQ ID NO: 1753466 - DNA, 15 bp, Homo sapiens
acatacagtataaga

SEQ ID NO: 1753467 - DNA, 15 bp, Homo sapiens
catacagtataagaa

SEQ ID NO: 1753468 - DNA, 15 bp, Homo sapiens
atacagtataagaat

SEQ ID NO: 1753469 - DNA, 15 bp, Homo sapiens
tacagtataagaatc

SEQ ID NO: 1753470 - DNA, 15 bp, Homo sapiens
acagtataagaatct

SEQ ID NO: 1753471 - DNA, 15 bp, Homo sapiens
cagtataagaatctt

SEQ ID NO: 1753472 - DNA, 15 bp, Homo sapiens
agtataagaatctta

SEQ ID NO: 1753473 - DNA, 15 bp, Homo sapiens
gtataagaatcttag

SEQ ID NO: 1753474 - DNA, 15 bp, Homo sapiens
tataagaatcttaga

SEQ ID NO: 1753475 - DNA, 15 bp, Homo sapiens
ataagaatcttagaa

SEQ ID NO: 1753476 - DNA, 15 bp, Homo sapiens
taagaatcttagaat

SEQ ID NO: 1753477 - DNA, 15 bp, Homo sapiens
aagaatcttagaata

SEQ ID NO: 1753478 - DNA, 15 bp, Homo sapiens
agaatcttagaatag

SEQ ID NO: 1753479 - DNA, 15 bp, Homo sapiens
gaatcttagaatagt

SEQ ID NO: 1753480 - DNA, 15 bp, Homo sapiens
aatcttagaatagta

SEQ ID NO: 1753481 - DNA, 15 bp, Homo sapiens
atcttagaatagtat

SEQ ID NO: 1753482 - DNA, 15 bp, Homo sapiens
tcttagaatagtata

SEQ ID NO: 1753483 - DNA, 15 bp, Homo sapiens
cttagaatagtatat

SEQ ID NO: 1753484 - DNA, 15 bp, Homo sapiens
ttagaatagtatatt

SEQ ID NO: 1753485 - DNA, 15 bp, Homo sapiens
tagaatagtatattt

SEQ ID NO: 1753486 - DNA, 15 bp, Homo sapiens
agaatagtatatttc

SEQ ID NO: 1753487 - DNA, 15 bp, Homo sapiens
gaatagtatatttcc

SEQ ID NO: 1753488 - DNA, 15 bp, Homo sapiens
aatagtatatttcca

SEQ ID NO: 1753489 - DNA, 15 bp, Homo sapiens
atagtatatttccat

SEQ ID NO: 1753490 - DNA, 15 bp, Homo sapiens
tagtatatttccatt

SEQ ID NO: 1753491 - DNA, 15 bp, Homo sapiens
agtatatttccattt

SEQ ID NO: 1753492 - DNA, 15 bp, Homo sapiens
gtatatttccatttt

SEQ ID NO: 1753493 - DNA, 15 bp, Homo sapiens
tatatttccattttc

SEQ ID NO: 1753494 - DNA, 15 bp, Homo sapiens
atatttccattttcc

SEQ ID NO: 1753495 - DNA, 15 bp, Homo sapiens
tatttccattttccc

SEQ ID NO: 1753496 - DNA, 15 bp, Homo sapiens
atttccattttccct

SEQ ID NO: 1753497 - DNA, 15 bp, Homo sapiens
tttccattttccctt

SEQ ID NO: 1753498 - DNA, 15 bp, Homo sapiens
ttccattttcccttt

SEQ ID NO: 1753499 - DNA, 15 bp, Homo sapiens
tccattttccctttt

SEQ ID NO: 1753500 - DNA, 15 bp, Homo sapiens
ccattttcccttttc

SEQ ID NO: 1753501 - DNA, 15 bp, Homo sapiens
cattttcccttttcc

SEQ ID NO: 1753502 - DNA, 15 bp, Homo sapiens
attttcccttttcca

SEQ ID NO: 1753503 - DNA, 15 bp, Homo sapiens
ttttcccttttccaa

SEQ ID NO: 1753504 - DNA, 15 bp, Homo sapiens
tttcccttttccaac

SEQ ID NO: 1753505 - DNA, 15 bp, Homo sapiens
ttcccttttccaacc

SEQ ID NO: 1753506 - DNA, 15 bp, Homo sapiens
tcccttttccaacct

SEQ ID NO: 1753507 - DNA, 15 bp, Homo sapiens
cccttttccaacctt

SEQ ID NO: 1753508 - DNA, 15 bp, Homo sapiens
ccttttccaaccttt

SEQ ID NO: 1753509 - DNA, 15 bp, Homo sapiens
cttttccaacctttg

SEQ ID NO: 1753510 - DNA, 15 bp, Homo sapiens
ttttccaacctttgg

SEQ ID NO: 1753511 - DNA, 15 bp, Homo sapiens
tttccaacctttggg

SEQ ID NO: 1753512 - DNA, 15 bp, Homo sapiens
ttccaacctttgggc

SEQ ID NO: 1753513 - DNA, 15 bp, Homo sapiens
tccaacctttgggct

SEQ ID NO: 1753514 - DNA, 15 bp, Homo sapiens
ccaacctttgggctg

SEQ ID NO: 1753515 - DNA, 15 bp, Homo sapiens
caacctttgggctgt

SEQ ID NO: 1753516 - DNA, 15 bp, Homo sapiens
aacctttgggctgtt

SEQ ID NO: 1753517 - DNA, 15 bp, Homo sapiens
acctttgggctgttg

SEQ ID NO: 1753518 - DNA, 15 bp, Homo sapiens
cctttgggctgttgt

SEQ ID NO: 1753519 - DNA, 15 bp, Homo sapiens
ctttgggctgttgtt

SEQ ID NO: 1753520 - DNA, 15 bp, Homo sapiens
tttgggctgttgttg

SEQ ID NO: 1753521 - DNA, 15 bp, Homo sapiens
ttgggctgttgttgt

SEQ ID NO: 1753522 - DNA, 15 bp, Homo sapiens
tgggctgttgttgtc

SEQ ID NO: 1753523 - DNA, 15 bp, Homo sapiens
gggctgttgttgtca

SEQ ID NO: 1753524 - DNA, 15 bp, Homo sapiens
ggctgttgttgtcat

SEQ ID NO: 1753525 - DNA, 15 bp, Homo sapiens
gctgttgttgtcata

SEQ ID NO: 1753526 - DNA, 15 bp, Homo sapiens
ctgttgttgtcatac

SEQ ID NO: 1753527 - DNA, 15 bp, Homo sapiens
tgttgttgtcataca

SEQ ID NO: 1753528 - DNA, 15 bp, Homo sapiens
gttgttgtcatacat

SEQ ID NO: 1753529 - DNA, 15 bp, Homo sapiens
ttgttgtcatacatt

SEQ ID NO: 1753530 - DNA, 15 bp, Homo sapiens
tgttgtcatacattt

SEQ ID NO: 1753531 - DNA, 15 bp, Homo sapiens
gttgtcatacatttt

SEQ ID NO: 1753532 - DNA, 15 bp, Homo sapiens
ttgtcatacattttg

SEQ ID NO: 1753533 - DNA, 15 bp, Homo sapiens
tgtcatacattttgc

SEQ ID NO: 1753534 - DNA, 15 bp, Homo sapiens
gtcatacattttgct

SEQ ID NO: 1753535 - DNA, 15 bp, Homo sapiens
tcatacattttgctt

SEQ ID NO: 1753536 - DNA, 15 bp, Homo sapiens
catacattttgcttc

SEQ ID NO: 1753537 - DNA, 15 bp, Homo sapiens
atacattttgcttcg

SEQ ID NO: 1753538 - DNA, 15 bp, Homo sapiens
tacattttgcttcga

SEQ ID NO: 1753539 - DNA, 15 bp, Homo sapiens
acattttgcttcgac

SEQ ID NO: 1753540 - DNA, 15 bp, Homo sapiens
cattttgcttcgaca

SEQ ID NO: 1753541 - DNA, 15 bp, Homo sapiens
attttgcttcgacag

SEQ ID NO: 1753542 - DNA, 15 bp, Homo sapiens
ttttgcttcgacaga

SEQ ID NO: 1753543 - DNA, 15 bp, Homo sapiens
tttgcttcgacagaa

SEQ ID NO: 1753544 - DNA, 15 bp, Homo sapiens
ttgcttcgacagaag

SEQ ID NO: 1753545 - DNA, 15 bp, Homo sapiens
tgcttcgacagaagt

SEQ ID NO: 1753546 - DNA, 15 bp, Homo sapiens
gcttcgacagaagtt

SEQ ID NO: 1753547 - DNA, 15 bp, Homo sapiens
cttcgacagaagtta

SEQ ID NO: 1753548 - DNA, 15 bp, Homo sapiens
ttcgacagaagttat

SEQ ID NO: 1753549 - DNA, 15 bp, Homo sapiens
tcgacagaagttata

SEQ ID NO: 1753550 - DNA, 15 bp, Homo sapiens
cgacagaagttataa

SEQ ID NO: 1753551 - DNA, 15 bp, Homo sapiens
gacagaagttataag

SEQ ID NO: 1753552 - DNA, 15 bp, Homo sapiens
acagaagttataagc

SEQ ID NO: 1753553 - DNA, 15 bp, Homo sapiens
cagaagttataagct

SEQ ID NO: 1753554 - DNA, 15 bp, Homo sapiens
agaagttataagctc

SEQ ID NO: 1753555 - DNA, 15 bp, Homo sapiens
gaagttataagctct

SEQ ID NO: 1753556 - DNA, 15 bp, Homo sapiens
aagttataagctcta

SEQ ID NO: 1753557 - DNA, 15 bp, Homo sapiens
agttataagctctac

SEQ ID NO: 1753558 - DNA, 15 bp, Homo sapiens
gttataagctctaca

SEQ ID NO: 1753559 - DNA, 15 bp, Homo sapiens
ttataagctctacaa

SEQ ID NO: 1753560 - DNA, 15 bp, Homo sapiens
tataagctctacaat

SEQ ID NO: 1753561 - DNA, 15 bp, Homo sapiens
ataagctctacaata

SEQ ID NO: 1753562 - DNA, 15 bp, Homo sapiens
taagctctacaatac

SEQ ID NO: 1753563 - DNA, 15 bp, Homo sapiens
aagctctacaataca

SEQ ID NO: 1753564 - DNA, 15 bp, Homo sapiens
agctctacaatacac

SEQ ID NO: 1753565 - DNA, 15 bp, Homo sapiens
gctctacaatacact

SEQ ID NO: 1753566 - DNA, 15 bp, Homo sapiens
ctctacaatacactc

SEQ ID NO: 1753567 - DNA, 15 bp, Homo sapiens
tctacaatacactca

SEQ ID NO: 1753568 - DNA, 15 bp, Homo sapiens
ctacaatacactcat

SEQ ID NO: 1753569 - DNA, 15 bp, Homo sapiens
tacaatacactcata

SEQ ID NO: 1753570 - DNA, 15 bp, Homo sapiens
acaatacactcataa

SEQ ID NO: 1753571 - DNA, 15 bp, Homo sapiens
caatacactcataac

SEQ ID NO: 1753572 - DNA, 15 bp, Homo sapiens
aatacactcataact

SEQ ID NO: 1753573 - DNA, 15 bp, Homo sapiens
atacactcataactt

SEQ ID NO: 1753574 - DNA, 15 bp, Homo sapiens
tacactcataacttt

SEQ ID NO: 1753575 - DNA, 15 bp, Homo sapiens
acactcataactttt

SEQ ID NO: 1753576 - DNA, 15 bp, Homo sapiens
cactcataacttttg

SEQ ID NO: 1753577 - DNA, 15 bp, Homo sapiens
actcataacttttgt

SEQ ID NO: 1753578 - DNA, 15 bp, Homo sapiens
ctcataacttttgtt

SEQ ID NO: 1753579 - DNA, 15 bp, Homo sapiens
tcataacttttgttt

SEQ ID NO: 1753580 - DNA, 15 bp, Homo sapiens
cataacttttgtttt

SEQ ID NO: 1753581 - DNA, 15 bp, Homo sapiens
ataacttttgtttta

SEQ ID NO: 1753582 - DNA, 15 bp, Homo sapiens
taacttttgttttaa

SEQ ID NO: 1753583 - DNA, 15 bp, Homo sapiens
aacttttgttttaaa

SEQ ID NO: 1753584 - DNA, 15 bp, Homo sapiens
acttttgttttaaac

SEQ ID NO: 1753585 - DNA, 15 bp, Homo sapiens
cttttgttttaaacc

SEQ ID NO: 1753586 - DNA, 15 bp, Homo sapiens
ttttgttttaaacca

SEQ ID NO: 1753587 - DNA, 15 bp, Homo sapiens
tttgttttaaaccaa

SEQ ID NO: 1753588 - DNA, 15 bp, Homo sapiens
ttgttttaaaccaat

SEQ ID NO: 1753589 - DNA, 15 bp, Homo sapiens
tgttttaaaccaatt

SEQ ID NO: 1753590 - DNA, 15 bp, Homo sapiens
gttttaaaccaatta

SEQ ID NO: 1753591 - DNA, 15 bp, Homo sapiens
ttttaaaccaattat

SEQ ID NO: 1753592 - DNA, 15 bp, Homo sapiens
tttaaaccaattatc

SEQ ID NO: 1753593 - DNA, 15 bp, Homo sapiens
ttaaaccaattatct

SEQ ID NO: 1753594 - DNA, 15 bp, Homo sapiens
taaaccaattatctc

SEQ ID NO: 1753595 - DNA, 15 bp, Homo sapiens
aaaccaattatctct

SEQ ID NO: 1753596 - DNA, 15 bp, Homo sapiens
aaccaattatctctt

SEQ ID NO: 1753597 - DNA, 15 bp, Homo sapiens
accaattatctctta

SEQ ID NO: 1753598 - DNA, 15 bp, Homo sapiens
ccaattatctcttaa

SEQ ID NO: 1753599 - DNA, 15 bp, Homo sapiens
caattatctcttaaa

SEQ ID NO: 1753600 - DNA, 15 bp, Homo sapiens
aattatctcttaaag

SEQ ID NO: 1753601 - DNA, 15 bp, Homo sapiens
attatctcttaaaga

SEQ ID NO: 1753602 - DNA, 15 bp, Homo sapiens
ttatctcttaaagag

SEQ ID NO: 1753603 - DNA, 15 bp, Homo sapiens
tatctcttaaagaga

SEQ ID NO: 1753604 - DNA, 15 bp, Homo sapiens
atctcttaaagagaa

SEQ ID NO: 1753605 - DNA, 15 bp, Homo sapiens
tctcttaaagagaat

SEQ ID NO: 1753606 - DNA, 15 bp, Homo sapiens
ctcttaaagagaatt

SEQ ID NO: 1753607 - DNA, 15 bp, Homo sapiens
tcttaaagagaattc

SEQ ID NO: 1753608 - DNA, 15 bp, Homo sapiens
cttaaagagaattca

SEQ ID NO: 1753609 - DNA, 15 bp, Homo sapiens
ttaaagagaattcaa

SEQ ID NO: 1753610 - DNA, 15 bp, Homo sapiens
taaagagaattcaaa

SEQ ID NO: 1753611 - DNA, 15 bp, Homo sapiens
aaagagaattcaaaa

SEQ ID NO: 1753612 - DNA, 15 bp, Homo sapiens
aagagaattcaaaac

SEQ ID NO: 1753613 - DNA, 15 bp, Homo sapiens
agagaattcaaaaca

SEQ ID NO: 1753614 - DNA, 15 bp, Homo sapiens
gagaattcaaaacaa

SEQ ID NO: 1753615 - DNA, 15 bp, Homo sapiens
agaattcaaaacaag

SEQ ID NO: 1753616 - DNA, 15 bp, Homo sapiens
gaattcaaaacaaga

SEQ ID NO: 1753617 - DNA, 15 bp, Homo sapiens
aattcaaaacaagag

SEQ ID NO: 1753618 - DNA, 15 bp, Homo sapiens
attcaaaacaagaga

SEQ ID NO: 1753619 - DNA, 15 bp, Homo sapiens
ttcaaaacaagagaa

SEQ ID NO: 1753620 - DNA, 15 bp, Homo sapiens
tcaaaacaagagaaa

SEQ ID NO: 1753621 - DNA, 15 bp, Homo sapiens
caaaacaagagaaaa

SEQ ID NO: 1753622 - DNA, 15 bp, Homo sapiens
aaaacaagagaaaaa

SEQ ID NO: 1753623 - DNA, 15 bp, Homo sapiens
aaacaagagaaaaaa

SEQ ID NO: 1753624 - DNA, 15 bp, Homo sapiens
aacaagagaaaaaag

SEQ ID NO: 1753625 - DNA, 15 bp, Homo sapiens
acaagagaaaaaaga

SEQ ID NO: 1753626 - DNA, 15 bp, Homo sapiens
caagagaaaaaagat

SEQ ID NO: 1753627 - DNA, 15 bp, Homo sapiens
aagagaaaaaagatg

SEQ ID NO: 1753628 - DNA, 15 bp, Homo sapiens
agagaaaaaagatgt

SEQ ID NO: 1753629 - DNA, 15 bp, Homo sapiens
gagaaaaaagatgtt

SEQ ID NO: 1753630 - DNA, 15 bp, Homo sapiens
agaaaaaagatgttt

SEQ ID NO: 1753631 - DNA, 15 bp, Homo sapiens
gaaaaaagatgtttt

SEQ ID NO: 1753632 - DNA, 15 bp, Homo sapiens
aaaaaagatgttttt

SEQ ID NO: 1753633 - DNA, 15 bp, Homo sapiens
aaaaagatgttttta

SEQ ID NO: 1753634 - DNA, 15 bp, Homo sapiens
aaaagatgtttttat

SEQ ID NO: 1753635 - DNA, 15 bp, Homo sapiens
aaagatgtttttatt

SEQ ID NO: 1753636 - DNA, 15 bp, Homo sapiens
aagatgtttttattt

SEQ ID NO: 1753637 - DNA, 15 bp, Homo sapiens
agatgtttttatttg

SEQ ID NO: 1753638 - DNA, 15 bp, Homo sapiens
gatgtttttatttga

SEQ ID NO: 1753639 - DNA, 15 bp, Homo sapiens
atgtttttatttgat

SEQ ID NO: 1753640 - DNA, 15 bp, Homo sapiens
tgtttttatttgatt

SEQ ID NO: 1753641 - DNA, 15 bp, Homo sapiens
gtttttatttgatta

SEQ ID NO: 1753642 - DNA, 15 bp, Homo sapiens
tttttatttgattac

SEQ ID NO: 1753643 - DNA, 15 bp, Homo sapiens
ttttatttgattaca

SEQ ID NO: 1753644 - DNA, 15 bp, Homo sapiens
tttatttgattacat

SEQ ID NO: 1753645 - DNA, 15 bp, Homo sapiens
ttatttgattacata

SEQ ID NO: 1753646 - DNA, 15 bp, Homo sapiens
tatttgattacatat

SEQ ID NO: 1753647 - DNA, 15 bp, Homo sapiens
atttgattacatatt

SEQ ID NO: 1753648 - DNA, 15 bp, Homo sapiens
tttgattacatattt

SEQ ID NO: 1753649 - DNA, 15 bp, Homo sapiens
ttgattacatattta

SEQ ID NO: 1753650 - DNA, 15 bp, Homo sapiens
tgattacatatttac

SEQ ID NO: 1753651 - DNA, 15 bp, Homo sapiens
gattacatatttacc

SEQ ID NO: 1753652 - DNA, 15 bp, Homo sapiens
attacatatttacct

SEQ ID NO: 1753653 - DNA, 15 bp, Homo sapiens
ttacatatttacctt

SEQ ID NO: 1753654 - DNA, 15 bp, Homo sapiens
tacatatttaccttt

SEQ ID NO: 1753655 - DNA, 15 bp, Homo sapiens
acatatttacctttc

SEQ ID NO: 1753656 - DNA, 15 bp, Homo sapiens
catatttacctttcc

SEQ ID NO: 1753657 - DNA, 15 bp, Homo sapiens
atatttacctttcca

SEQ ID NO: 1753658 - DNA, 15 bp, Homo sapiens
tatttacctttccag

SEQ ID NO: 1753659 - DNA, 15 bp, Homo sapiens
atttacctttccagt

SEQ ID NO: 1753660 - DNA, 15 bp, Homo sapiens
tttacctttccagta

SEQ ID NO: 1753661 - DNA, 15 bp, Homo sapiens
ttacctttccagtac

SEQ ID NO: 1753662 - DNA, 15 bp, Homo sapiens
tacctttccagtact

SEQ ID NO: 1753663 - DNA, 15 bp, Homo sapiens
acctttccagtactc

SEQ ID NO: 1753664 - DNA, 15 bp, Homo sapiens
cctttccagtactct

SEQ ID NO: 1753665 - DNA, 15 bp, Homo sapiens
ctttccagtactctt

SEQ ID NO: 1753666 - DNA, 15 bp, Homo sapiens
tttccagtactcttc

SEQ ID NO: 1753667 - DNA, 15 bp, Homo sapiens
ttccagtactcttca

SEQ ID NO: 1753668 - DNA, 15 bp, Homo sapiens
tccagtactcttcat

SEQ ID NO: 1753669 - DNA, 15 bp, Homo sapiens
ccagtactcttcatt

SEQ ID NO: 1753670 - DNA, 15 bp, Homo sapiens
cagtactcttcattc

SEQ ID NO: 1753671 - DNA, 15 bp, Homo sapiens
agtactcttcattcc

SEQ ID NO: 1753672 - DNA, 15 bp, Homo sapiens
gtactcttcattcct

SEQ ID NO: 1753673 - DNA, 15 bp, Homo sapiens
tactcttcattcctt

SEQ ID NO: 1753674 - DNA, 15 bp, Homo sapiens
actcttcattccttg

SEQ ID NO: 1753675 - DNA, 15 bp, Homo sapiens
ctcttcattccttgt

SEQ ID NO: 1753676 - DNA, 15 bp, Homo sapiens
tcttcattccttgtg

SEQ ID NO: 1753677 - DNA, 15 bp, Homo sapiens
cttcattccttgtgt

SEQ ID NO: 1753678 - DNA, 15 bp, Homo sapiens
ttcattccttgtgta

SEQ ID NO: 1753679 - DNA, 15 bp, Homo sapiens
tcattccttgtgtag

SEQ ID NO: 1753680 - DNA, 15 bp, Homo sapiens
cattccttgtgtaga

SEQ ID NO: 1753681 - DNA, 15 bp, Homo sapiens
attccttgtgtagat

SEQ ID NO: 1753682 - DNA, 15 bp, Homo sapiens
ttccttgtgtagatc

SEQ ID NO: 1753683 - DNA, 15 bp, Homo sapiens
tccttgtgtagatcc

SEQ ID NO: 1753684 - DNA, 15 bp, Homo sapiens
ccttgtgtagatcca

SEQ ID NO: 1753685 - DNA, 15 bp, Homo sapiens
cttgtgtagatccag

SEQ ID NO: 1753686 - DNA, 15 bp, Homo sapiens
ttgtgtagatccaga

SEQ ID NO: 1753687 - DNA, 15 bp, Homo sapiens
tgtgtagatccagat

SEQ ID NO: 1753688 - DNA, 15 bp, Homo sapiens
gtgtagatccagatt

SEQ ID NO: 1753689 - DNA, 15 bp, Homo sapiens
tgtagatccagattc

SEQ ID NO: 1753690 - DNA, 15 bp, Homo sapiens
gtagatccagattcc

SEQ ID NO: 1753691 - DNA, 15 bp, Homo sapiens
tagatccagattcct

SEQ ID NO: 1753692 - DNA, 15 bp, Homo sapiens
agatccagattcctt

SEQ ID NO: 1753693 - DNA, 15 bp, Homo sapiens
gatccagattccttt

SEQ ID NO: 1753694 - DNA, 15 bp, Homo sapiens
atccagattcctttt

SEQ ID NO: 1753695 - DNA, 15 bp, Homo sapiens
tccagattccttttg

SEQ ID NO: 1753696 - DNA, 15 bp, Homo sapiens
ccagattccttttgt

SEQ ID NO: 1753697 - DNA, 15 bp, Homo sapiens
cagattccttttgtt

SEQ ID NO: 1753698 - DNA, 15 bp, Homo sapiens
agattccttttgttt

SEQ ID NO: 1753699 - DNA, 15 bp, Homo sapiens
gattccttttgtttt

SEQ ID NO: 1753700 - DNA, 15 bp, Homo sapiens
attccttttgttttc

SEQ ID NO: 1753701 - DNA, 15 bp, Homo sapiens
ttccttttgttttcc

SEQ ID NO: 1753702 - DNA, 15 bp, Homo sapiens
tccttttgttttcct

SEQ ID NO: 1753703 - DNA, 15 bp, Homo sapiens
ccttttgttttcctt

SEQ ID NO: 1753704 - DNA, 15 bp, Homo sapiens
cttttgttttccttc

SEQ ID NO: 1753705 - DNA, 15 bp, Homo sapiens
ttttgttttccttct

SEQ ID NO: 1753706 - DNA, 15 bp, Homo sapiens
tttgttttccttctg

SEQ ID NO: 1753707 - DNA, 15 bp, Homo sapiens
ttgttttccttctga

SEQ ID NO: 1753708 - DNA, 15 bp, Homo sapiens
tgttttccttctgac

SEQ ID NO: 1753709 - DNA, 15 bp, Homo sapiens
gttttccttctgact

SEQ ID NO: 1753710 - DNA, 15 bp, Homo sapiens
ttttccttctgactg

SEQ ID NO: 1753711 - DNA, 15 bp, Homo sapiens
tttccttctgactgt

SEQ ID NO: 1753712 - DNA, 15 bp, Homo sapiens
ttccttctgactgta

SEQ ID NO: 1753713 - DNA, 15 bp, Homo sapiens
tccttctgactgtaa

SEQ ID NO: 1753714 - DNA, 15 bp, Homo sapiens
ccttctgactgtaaa

SEQ ID NO: 1753715 - DNA, 15 bp, Homo sapiens
cttctgactgtaaaa

SEQ ID NO: 1753716 - DNA, 15 bp, Homo sapiens
ttctgactgtaaaac

SEQ ID NO: 1753717 - DNA, 15 bp, Homo sapiens
tctgactgtaaaact

SEQ ID NO: 1753718 - DNA, 15 bp, Homo sapiens
ctgactgtaaaactt

SEQ ID NO: 1753719 - DNA, 15 bp, Homo sapiens
tgactgtaaaacttt

SEQ ID NO: 1753720 - DNA, 15 bp, Homo sapiens
gactgtaaaactttt

SEQ ID NO: 1753721 - DNA, 15 bp, Homo sapiens
actgtaaaacttttt

SEQ ID NO: 1753722 - DNA, 15 bp, Homo sapiens
ctgtaaaactttttt

SEQ ID NO: 1753723 - DNA, 15 bp, Homo sapiens
tgtaaaacttttttt

SEQ ID NO: 1753724 - DNA, 15 bp, Homo sapiens
gtaaaactttttttg

SEQ ID NO: 1753725 - DNA, 15 bp, Homo sapiens
taaaactttttttgg

SEQ ID NO: 1753726 - DNA, 15 bp, Homo sapiens
aaaactttttttggc

SEQ ID NO: 1753727 - DNA, 15 bp, Homo sapiens
aaactttttttggcc

SEQ ID NO: 1753728 - DNA, 15 bp, Homo sapiens
aactttttttggcca

SEQ ID NO: 1753729 - DNA, 15 bp, Homo sapiens
actttttttggccag

SEQ ID NO: 1753730 - DNA, 15 bp, Homo sapiens
ctttttttggccagg

SEQ ID NO: 1753731 - DNA, 15 bp, Homo sapiens
tttttttggccaggg

SEQ ID NO: 1753732 - DNA, 15 bp, Homo sapiens
ttttttggccagggg

SEQ ID NO: 1753733 - DNA, 15 bp, Homo sapiens
tttttggccaggggc

SEQ ID NO: 1753734 - DNA, 15 bp, Homo sapiens
ttttggccaggggca

SEQ ID NO: 1753735 - DNA, 15 bp, Homo sapiens
tttggccaggggcag

SEQ ID NO: 1753736 - DNA, 15 bp, Homo sapiens
ttggccaggggcagt

SEQ ID NO: 1753737 - DNA, 15 bp, Homo sapiens
tggccaggggcagtg

SEQ ID NO: 1753738 - DNA, 15 bp, Homo sapiens
ggccaggggcagtgg

SEQ ID NO: 1753739 - DNA, 15 bp, Homo sapiens
gccaggggcagtggc

SEQ ID NO: 1753740 - DNA, 15 bp, Homo sapiens
ccaggggcagtggct

SEQ ID NO: 1753741 - DNA, 15 bp, Homo sapiens
caggggcagtggctc

SEQ ID NO: 1753742 - DNA, 15 bp, Homo sapiens
aggggcagtggctca

SEQ ID NO: 1753743 - DNA, 15 bp, Homo sapiens
ggggcagtggctcat

SEQ ID NO: 1753744 - DNA, 15 bp, Homo sapiens
gggcagtggctcata

SEQ ID NO: 1753745 - DNA, 15 bp, Homo sapiens
ggcagtggctcatac

SEQ ID NO: 1753746 - DNA, 15 bp, Homo sapiens
gcagtggctcatacc

SEQ ID NO: 1753747 - DNA, 15 bp, Homo sapiens
cagtggctcataccc

SEQ ID NO: 1753748 - DNA, 15 bp, Homo sapiens
agtggctcatacccg

SEQ ID NO: 1753749 - DNA, 15 bp, Homo sapiens
gtggctcatacccgt

SEQ ID NO: 1753750 - DNA, 15 bp, Homo sapiens
tggctcatacccgta

SEQ ID NO: 1753751 - DNA, 15 bp, Homo sapiens
ggctcatacccgtaa

SEQ ID NO: 1753752 - DNA, 15 bp, Homo sapiens
gctcatacccgtaat

SEQ ID NO: 1753753 - DNA, 15 bp, Homo sapiens
ctcatacccgtaatc

SEQ ID NO: 1753754 - DNA, 15 bp, Homo sapiens
tcatacccgtaatcc

SEQ ID NO: 1753755 - DNA, 15 bp, Homo sapiens
catacccgtaatccc

SEQ ID NO: 1753756 - DNA, 15 bp, Homo sapiens
atacccgtaatccca

SEQ ID NO: 1753757 - DNA, 15 bp, Homo sapiens
tacccgtaatcccaa

SEQ ID NO: 1753758 - DNA, 15 bp, Homo sapiens
acccgtaatcccaac

SEQ ID NO: 1753759 - DNA, 15 bp, Homo sapiens
cccgtaatcccaaca

SEQ ID NO: 1753760 - DNA, 15 bp, Homo sapiens
ccgtaatcccaacac

SEQ ID NO: 1753761 - DNA, 15 bp, Homo sapiens
cgtaatcccaacact

SEQ ID NO: 1753762 - DNA, 15 bp, Homo sapiens
taatcccaacactta

SEQ ID NO: 1753763 - DNA, 15 bp, Homo sapiens
aatcccaacacttag

SEQ ID NO: 1753764 - DNA, 15 bp, Homo sapiens
atcccaacacttagt

SEQ ID NO: 1753765 - DNA, 15 bp, Homo sapiens
tcccaacacttagtg

SEQ ID NO: 1753766 - DNA, 15 bp, Homo sapiens
cccaacacttagtgg

SEQ ID NO: 1753767 - DNA, 15 bp, Homo sapiens
ccaacacttagtggg

SEQ ID NO: 1753768 - DNA, 15 bp, Homo sapiens
caacacttagtgggg

SEQ ID NO: 1753769 - DNA, 15 bp, Homo sapiens
aacacttagtggggc

SEQ ID NO: 1753770 - DNA, 15 bp, Homo sapiens
acacttagtggggct

SEQ ID NO: 1753771 - DNA, 15 bp, Homo sapiens
cacttagtggggctg

SEQ ID NO: 1753772 - DNA, 15 bp, Homo sapiens
acttagtggggctga

SEQ ID NO: 1753773 - DNA, 15 bp, Homo sapiens
cttagtggggctgag

SEQ ID NO: 1753774 - DNA, 15 bp, Homo sapiens
ttagtggggctgagg

SEQ ID NO: 1753775 - DNA, 15 bp, Homo sapiens
tagtggggctgaggc

SEQ ID NO: 1753776 - DNA, 15 bp, Homo sapiens
agtggggctgaggcg

SEQ ID NO: 1753777 - DNA, 15 bp, Homo sapiens
gtggggctgaggcgg

SEQ ID NO: 1753778 - DNA, 15 bp, Homo sapiens
tggggctgaggcggg

SEQ ID NO: 1753779 - DNA, 15 bp, Homo sapiens
ggggctgaggcggga

SEQ ID NO: 1753780 - DNA, 15 bp, Homo sapiens
gggctgaggcgggag

SEQ ID NO: 1753781 - DNA, 15 bp, Homo sapiens
ggctgaggcgggagg

SEQ ID NO: 1753782 - DNA, 15 bp, Homo sapiens
gctgaggcgggagga

SEQ ID NO: 1753783 - DNA, 15 bp, Homo sapiens
ctgaggcgggaggat

SEQ ID NO: 1753784 - DNA, 15 bp, Homo sapiens
gaggcgggaggatct

SEQ ID NO: 1753785 - DNA, 15 bp, Homo sapiens
aggcgggaggatctc

SEQ ID NO: 1753786 - DNA, 15 bp, Homo sapiens
ggcgggaggatctct

SEQ ID NO: 1753787 - DNA, 15 bp, Homo sapiens
gcgggaggatctctt

SEQ ID NO: 1753788 - DNA, 15 bp, Homo sapiens
cgggaggatctcttg

SEQ ID NO: 1753789 - DNA, 15 bp, Homo sapiens
ggaggatctcttgaa

SEQ ID NO: 1753790 - DNA, 15 bp, Homo sapiens
gaggatctcttgaag

SEQ ID NO: 1753791 - DNA, 15 bp, Homo sapiens
aggatctcttgaagc

SEQ ID NO: 1753792 - DNA, 15 bp, Homo sapiens
ggatctcttgaagcc

SEQ ID NO: 1753793 - DNA, 15 bp, Homo sapiens
gatctcttgaagcca

SEQ ID NO: 1753794 - DNA, 15 bp, Homo sapiens
atctcttgaagccag

SEQ ID NO: 1753795 - DNA, 15 bp, Homo sapiens
tctcttgaagccagg

SEQ ID NO: 1753796 - DNA, 15 bp, Homo sapiens
ctcttgaagccagga

SEQ ID NO: 1753797 - DNA, 15 bp, Homo sapiens
tcttgaagccaggag

SEQ ID NO: 1753798 - DNA, 15 bp, Homo sapiens
tgaagccaggagttc

SEQ ID NO: 1753799 - DNA, 15 bp, Homo sapiens
gaagccaggagttca

SEQ ID NO: 1753800 - DNA, 15 bp, Homo sapiens
aagccaggagttcaa

SEQ ID NO: 1753801 - DNA, 15 bp, Homo sapiens
agccaggagttcaaa

SEQ ID NO: 1753802 - DNA, 15 bp, Homo sapiens
ttcaaaaccagccta

SEQ ID NO: 1753803 - DNA, 15 bp, Homo sapiens
tcaaaaccagcctag

SEQ ID NO: 1753804 - DNA, 15 bp, Homo sapiens
caaaaccagcctagg

SEQ ID NO: 1753805 - DNA, 15 bp, Homo sapiens
aaaaccagcctaggc

SEQ ID NO: 1753806 - DNA, 15 bp, Homo sapiens
aaaccagcctaggca

SEQ ID NO: 1753807 - DNA, 15 bp, Homo sapiens
aaccagcctaggcaa

SEQ ID NO: 1753808 - DNA, 15 bp, Homo sapiens
agcctaggcaacaaa

SEQ ID NO: 1753809 - DNA, 15 bp, Homo sapiens
gcctaggcaacaaag

SEQ ID NO: 1753810 - DNA, 15 bp, Homo sapiens
cctaggcaacaaagc

SEQ ID NO: 1753811 - DNA, 15 bp, Homo sapiens
ctaggcaacaaagca

SEQ ID NO: 1753812 - DNA, 15 bp, Homo sapiens
taggcaacaaagcaa

SEQ ID NO: 1753813 - DNA, 15 bp, Homo sapiens
aggcaacaaagcaaa

SEQ ID NO: 1753814 - DNA, 15 bp, Homo sapiens
ggcaacaaagcaaaa

SEQ ID NO: 1753815 - DNA, 15 bp, Homo sapiens
gcaacaaagcaaaac

SEQ ID NO: 1753816 - DNA, 15 bp, Homo sapiens
caacaaagcaaaact

SEQ ID NO: 1753817 - DNA, 15 bp, Homo sapiens
aacaaagcaaaactc

SEQ ID NO: 1753818 - DNA, 15 bp, Homo sapiens
acaaagcaaaactct

SEQ ID NO: 1753819 - DNA, 15 bp, Homo sapiens
caaagcaaaactctg

SEQ ID NO: 1753820 - DNA, 15 bp, Homo sapiens
aaagcaaaactctgt

SEQ ID NO: 1753821 - DNA, 15 bp, Homo sapiens
aagcaaaactctgtc

SEQ ID NO: 1753822 - DNA, 15 bp, Homo sapiens
agcaaaactctgtct

SEQ ID NO: 1753823 - DNA, 15 bp, Homo sapiens
gcaaaactctgtctc

SEQ ID NO: 1753824 - DNA, 15 bp, Homo sapiens
caaaactctgtctct

SEQ ID NO: 1753825 - DNA, 15 bp, Homo sapiens
aaaactctgtctcta

SEQ ID NO: 1753826 - DNA, 15 bp, Homo sapiens
aaactctgtctctat

SEQ ID NO: 1753827 - DNA, 15 bp, Homo sapiens
aactctgtctctatt

SEQ ID NO: 1753828 - DNA, 15 bp, Homo sapiens
actctgtctctattc

SEQ ID NO: 1753829 - DNA, 15 bp, Homo sapiens
ctctgtctctattct

SEQ ID NO: 1753830 - DNA, 15 bp, Homo sapiens
tctgtctctattctt

SEQ ID NO: 1753831 - DNA, 15 bp, Homo sapiens
ctgtctctattctta

SEQ ID NO: 1753832 - DNA, 15 bp, Homo sapiens
tgtctctattcttat

SEQ ID NO: 1753833 - DNA, 15 bp, Homo sapiens
gtctctattcttata

SEQ ID NO: 1753834 - DNA, 15 bp, Homo sapiens
tctctattcttataa

SEQ ID NO: 1753835 - DNA, 15 bp, Homo sapiens
ctctattcttataaa

SEQ ID NO: 1753836 - DNA, 15 bp, Homo sapiens
tctattcttataaaa

SEQ ID NO: 1753837 - DNA, 15 bp, Homo sapiens
ctattcttataaaac

SEQ ID NO: 1753838 - DNA, 15 bp, Homo sapiens
tattcttataaaaca

SEQ ID NO: 1753839 - DNA, 15 bp, Homo sapiens
attcttataaaacaa

SEQ ID NO: 1753840 - DNA, 15 bp, Homo sapiens
ttcttataaaacaaa

SEQ ID NO: 1753841 - DNA, 15 bp, Homo sapiens
tcttataaaacaaac

SEQ ID NO: 1753842 - DNA, 15 bp, Homo sapiens
cttataaaacaaaca

SEQ ID NO: 1753843 - DNA, 15 bp, Homo sapiens
ttataaaacaaacaa

SEQ ID NO: 1753844 - DNA, 15 bp, Homo sapiens
tataaaacaaacaaa

SEQ ID NO: 1753845 - DNA, 15 bp, Homo sapiens
ataaaacaaacaaaa

SEQ ID NO: 1753846 - DNA, 15 bp, Homo sapiens
taaaacaaacaaaaa

SEQ ID NO: 1753847 - DNA, 15 bp, Homo sapiens
aaaacaaacaaaaag

SEQ ID NO: 1753848 - DNA, 15 bp, Homo sapiens
aaacaaacaaaaagc

SEQ ID NO: 1753849 - DNA, 15 bp, Homo sapiens
aacaaacaaaaagca

SEQ ID NO: 1753850 - DNA, 15 bp, Homo sapiens
acaaacaaaaagcat

SEQ ID NO: 1753851 - DNA, 15 bp, Homo sapiens
caaacaaaaagcatt

SEQ ID NO: 1753852 - DNA, 15 bp, Homo sapiens
aaacaaaaagcattt

SEQ ID NO: 1753853 - DNA, 15 bp, Homo sapiens
aacaaaaagcatttc

SEQ ID NO: 1753854 - DNA, 15 bp, Homo sapiens
acaaaaagcatttct

SEQ ID NO: 1753855 - DNA, 15 bp, Homo sapiens
caaaaagcatttcta

SEQ ID NO: 1753856 - DNA, 15 bp, Homo sapiens
aaaaagcatttctat

SEQ ID NO: 1753857 - DNA, 15 bp, Homo sapiens
aaaagcatttctatt

SEQ ID NO: 1753858 - DNA, 15 bp, Homo sapiens
aaagcatttctattt

SEQ ID NO: 1753859 - DNA, 15 bp, Homo sapiens
aagcatttctatttt

SEQ ID NO: 1753860 - DNA, 15 bp, Homo sapiens
agcatttctattttt

SEQ ID NO: 1753861 - DNA, 15 bp, Homo sapiens
gcatttctatttttt

SEQ ID NO: 1753862 - DNA, 15 bp, Homo sapiens
catttctattttttt

SEQ ID NO: 1753863 - DNA, 15 bp, Homo sapiens
atttctatttttttt

SEQ ID NO: 1753864 - DNA, 15 bp, Homo sapiens
tctattttttttttc

SEQ ID NO: 1753865 - DNA, 15 bp, Homo sapiens
ctattttttttttct

SEQ ID NO: 1753866 - DNA, 15 bp, Homo sapiens
tattttttttttctt

SEQ ID NO: 1753867 - DNA, 15 bp, Homo sapiens
tttctttttgagatg

SEQ ID NO: 1753868 - DNA, 15 bp, Homo sapiens
ttctttttgagatgg

SEQ ID NO: 1753869 - DNA, 15 bp, Homo sapiens
tctttttgagatgga

SEQ ID NO: 1753870 - DNA, 15 bp, Homo sapiens
ctttttgagatggag

SEQ ID NO: 1753871 - DNA, 15 bp, Homo sapiens
gagatggagtctctc

SEQ ID NO: 1753872 - DNA, 15 bp, Homo sapiens
agatggagtctctct

SEQ ID NO: 1753873 - DNA, 15 bp, Homo sapiens
gatggagtctctctc

SEQ ID NO: 1753874 - DNA, 15 bp, Homo sapiens
atggagtctctctct

SEQ ID NO: 1753875 - DNA, 15 bp, Homo sapiens
tggagtctctctctg

SEQ ID NO: 1753876 - DNA, 15 bp, Homo sapiens
ggagtctctctctgt

SEQ ID NO: 1753877 - DNA, 15 bp, Homo sapiens
agtctctctctgtca

SEQ ID NO: 1753878 - DNA, 15 bp, Homo sapiens
gattacaggcacacg

SEQ ID NO: 1753879 - DNA, 15 bp, Homo sapiens
attacaggcacacgc

SEQ ID NO: 1753880 - DNA, 15 bp, Homo sapiens
ttacaggcacacgcc

SEQ ID NO: 1753881 - DNA, 15 bp, Homo sapiens
ggcacacgccaccat

SEQ ID NO: 1753882 - DNA, 15 bp, Homo sapiens
gcacacgccaccatg

SEQ ID NO: 1753883 - DNA, 15 bp, Homo sapiens
cacacgccaccatgc

SEQ ID NO: 1753884 - DNA, 15 bp, Homo sapiens
acacgccaccatgcc

SEQ ID NO: 1753885 - DNA, 15 bp, Homo sapiens
acgccaccatgccta

SEQ ID NO: 1753886 - DNA, 15 bp, Homo sapiens
cgccaccatgcctag

SEQ ID NO: 1753887 - DNA, 15 bp, Homo sapiens
cctagctaattttta

SEQ ID NO: 1753888 - DNA, 15 bp, Homo sapiens
ctagctaatttttat

SEQ ID NO: 1753889 - DNA, 15 bp, Homo sapiens
tagctaatttttata

SEQ ID NO: 1753890 - DNA, 15 bp, Homo sapiens
tttttagtagagaaa

SEQ ID NO: 1753891 - DNA, 15 bp, Homo sapiens
ttttagtagagaaag

SEQ ID NO: 1753892 - DNA, 15 bp, Homo sapiens
tttagtagagaaagg

SEQ ID NO: 1753893 - DNA, 15 bp, Homo sapiens
ttagtagagaaaggg

SEQ ID NO: 1753894 - DNA, 15 bp, Homo sapiens
tagtagagaaagggt

SEQ ID NO: 1753895 - DNA, 15 bp, Homo sapiens
agtagagaaagggtt

SEQ ID NO: 1753896 - DNA, 15 bp, Homo sapiens
gtagagaaagggttt

SEQ ID NO: 1753897 - DNA, 15 bp, Homo sapiens
tagagaaagggtttc

SEQ ID NO: 1753898 - DNA, 15 bp, Homo sapiens
agagaaagggtttca

SEQ ID NO: 1753899 - DNA, 15 bp, Homo sapiens
gagaaagggtttcac

SEQ ID NO: 1753900 - DNA, 15 bp, Homo sapiens
agaaagggtttcacc

SEQ ID NO: 1753901 - DNA, 15 bp, Homo sapiens
gaaagggtttcacca

SEQ ID NO: 1753902 - DNA, 15 bp, Homo sapiens
aaagggtttcaccat

SEQ ID NO: 1753903 - DNA, 15 bp, Homo sapiens
aagggtttcaccatg

SEQ ID NO: 1753904 - DNA, 15 bp, Homo sapiens
tttcaccatgttgat

SEQ ID NO: 1753905 - DNA, 15 bp, Homo sapiens
ttcaccatgttgatc

SEQ ID NO: 1753906 - DNA, 15 bp, Homo sapiens
tcaccatgttgatca

SEQ ID NO: 1753907 - DNA, 15 bp, Homo sapiens
caccatgttgatcag

SEQ ID NO: 1753908 - DNA, 15 bp, Homo sapiens
accatgttgatcagg

SEQ ID NO: 1753909 - DNA, 15 bp, Homo sapiens
ccatgttgatcaggc

SEQ ID NO: 1753910 - DNA, 15 bp, Homo sapiens
catgttgatcaggct

SEQ ID NO: 1753911 - DNA, 15 bp, Homo sapiens
atgttgatcaggctg

SEQ ID NO: 1753912 - DNA, 15 bp, Homo sapiens
tgttgatcaggctgg

SEQ ID NO: 1753913 - DNA, 15 bp, Homo sapiens
gttgatcaggctggt

SEQ ID NO: 1753914 - DNA, 15 bp, Homo sapiens
ttgatcaggctggtc

SEQ ID NO: 1753915 - DNA, 15 bp, Homo sapiens
tgatcaggctggtct

SEQ ID NO: 1753916 - DNA, 15 bp, Homo sapiens
gatcaggctggtctc

SEQ ID NO: 1753917 - DNA, 15 bp, Homo sapiens
atcaggctggtctcg

SEQ ID NO: 1753918 - DNA, 15 bp, Homo sapiens
cctgacctcgtgatt

SEQ ID NO: 1753919 - DNA, 15 bp, Homo sapiens
ctgacctcgtgattt

SEQ ID NO: 1753920 - DNA, 15 bp, Homo sapiens
tgacctcgtgatttg

SEQ ID NO: 1753921 - DNA, 15 bp, Homo sapiens
gacctcgtgatttgc

SEQ ID NO: 1753922 - DNA, 15 bp, Homo sapiens
acctcgtgatttgcc

SEQ ID NO: 1753923 - DNA, 15 bp, Homo sapiens
cctcgtgatttgcct

SEQ ID NO: 1753924 - DNA, 15 bp, Homo sapiens
ctcgtgatttgcctg

SEQ ID NO: 1753925 - DNA, 15 bp, Homo sapiens
tcgtgatttgcctgc

SEQ ID NO: 1753926 - DNA, 15 bp, Homo sapiens
cgtgatttgcctgcc

SEQ ID NO: 1753927 - DNA, 15 bp, Homo sapiens
tgatttgcctgcctc

SEQ ID NO: 1753928 - DNA, 15 bp, Homo sapiens
gatttgcctgcctcg

SEQ ID NO: 1753929 - DNA, 15 bp, Homo sapiens
atttgcctgcctcgg

SEQ ID NO: 1753930 - DNA, 15 bp, Homo sapiens
tttgcctgcctcggc

SEQ ID NO: 1753931 - DNA, 15 bp, Homo sapiens
ttgcctgcctcggcc

SEQ ID NO: 1753932 - DNA, 15 bp, Homo sapiens
tgcctcggcctcctc

SEQ ID NO: 1753933 - DNA, 15 bp, Homo sapiens
gcctcggcctcctcc

SEQ ID NO: 1753934 - DNA, 15 bp, Homo sapiens
cctcggcctcctccc

SEQ ID NO: 1753935 - DNA, 15 bp, Homo sapiens
ctcggcctcctccca

SEQ ID NO: 1753936 - DNA, 15 bp, Homo sapiens
tcggcctcctcccaa

SEQ ID NO: 1753937 - DNA, 15 bp, Homo sapiens
cggcctcctcccaaa

SEQ ID NO: 1753938 - DNA, 15 bp, Homo sapiens
ggcctcctcccaaag

SEQ ID NO: 1753939 - DNA, 15 bp, Homo sapiens
gcctcctcccaaagg

SEQ ID NO: 1753940 - DNA, 15 bp, Homo sapiens
cctcctcccaaaggg

SEQ ID NO: 1753941 - DNA, 15 bp, Homo sapiens
ctcctcccaaagggc

SEQ ID NO: 1753942 - DNA, 15 bp, Homo sapiens
tcctcccaaagggct

SEQ ID NO: 1753943 - DNA, 15 bp, Homo sapiens
ctcccaaagggctgg

SEQ ID NO: 1753944 - DNA, 15 bp, Homo sapiens
tcccaaagggctggg

SEQ ID NO: 1753945 - DNA, 15 bp, Homo sapiens
agggctgggattact

SEQ ID NO: 1753946 - DNA, 15 bp, Homo sapiens
gggctgggattactg

SEQ ID NO: 1753947 - DNA, 15 bp, Homo sapiens
ggctgggattactgg

SEQ ID NO: 1753948 - DNA, 15 bp, Homo sapiens
ctgggattactggca

SEQ ID NO: 1753949 - DNA, 15 bp, Homo sapiens
tgggattactggcat

SEQ ID NO: 1753950 - DNA, 15 bp, Homo sapiens
gggattactggcatg

SEQ ID NO: 1753951 - DNA, 15 bp, Homo sapiens
ggattactggcatga

SEQ ID NO: 1753952 - DNA, 15 bp, Homo sapiens
gattactggcatgag

SEQ ID NO: 1753953 - DNA, 15 bp, Homo sapiens
attactggcatgagc

SEQ ID NO: 1753954 - DNA, 15 bp, Homo sapiens
ttactggcatgagcc

SEQ ID NO: 1753955 - DNA, 15 bp, Homo sapiens
tactggcatgagcca

SEQ ID NO: 1753956 - DNA, 15 bp, Homo sapiens
actggcatgagccac

SEQ ID NO: 1753957 - DNA, 15 bp, Homo sapiens
ctggcatgagccacc

SEQ ID NO: 1753958 - DNA, 15 bp, Homo sapiens
tggcatgagccaccg

SEQ ID NO: 1753959 - DNA, 15 bp, Homo sapiens
accgcacccagccaa

SEQ ID NO: 1753960 - DNA, 15 bp, Homo sapiens
ccgcacccagccaac

SEQ ID NO: 1753961 - DNA, 15 bp, Homo sapiens
cgcacccagccaaca

SEQ ID NO: 1753962 - DNA, 15 bp, Homo sapiens
gcacccagccaacaa

SEQ ID NO: 1753963 - DNA, 15 bp, Homo sapiens
cacccagccaacaaa

SEQ ID NO: 1753964 - DNA, 15 bp, Homo sapiens
acccagccaacaaaa

SEQ ID NO: 1753965 - DNA, 15 bp, Homo sapiens
cccagccaacaaaaa

SEQ ID NO: 1753966 - DNA, 15 bp, Homo sapiens
ccagccaacaaaaaa

SEQ ID NO: 1753967 - DNA, 15 bp, Homo sapiens
cagccaacaaaaaac

SEQ ID NO: 1753968 - DNA, 15 bp, Homo sapiens
agccaacaaaaaaca

SEQ ID NO: 1753969 - DNA, 15 bp, Homo sapiens
gccaacaaaaaacat

SEQ ID NO: 1753970 - DNA, 15 bp, Homo sapiens
ccaacaaaaaacatt

SEQ ID NO: 1753971 - DNA, 15 bp, Homo sapiens
caacaaaaaacattt

SEQ ID NO: 1753972 - DNA, 15 bp, Homo sapiens
aacaaaaaacatttc

SEQ ID NO: 1753973 - DNA, 15 bp, Homo sapiens
acaaaaaacatttct

SEQ ID NO: 1753974 - DNA, 15 bp, Homo sapiens
caaaaaacatttctt

SEQ ID NO: 1753975 - DNA, 15 bp, Homo sapiens
aaaaaacatttcttg

SEQ ID NO: 1753976 - DNA, 15 bp, Homo sapiens
aaaaacatttcttgt

SEQ ID NO: 1753977 - DNA, 15 bp, Homo sapiens
aaaacatttcttgtg

SEQ ID NO: 1753978 - DNA, 15 bp, Homo sapiens
aaacatttcttgtgt

SEQ ID NO: 1753979 - DNA, 15 bp, Homo sapiens
aacatttcttgtgtg

SEQ ID NO: 1753980 - DNA, 15 bp, Homo sapiens
acatttcttgtgtgc

SEQ ID NO: 1753981 - DNA, 15 bp, Homo sapiens
catttcttgtgtgca

SEQ ID NO: 1753982 - DNA, 15 bp, Homo sapiens
atttcttgtgtgcat

SEQ ID NO: 1753983 - DNA, 15 bp, Homo sapiens
tttcttgtgtgcatg

SEQ ID NO: 1753984 - DNA, 15 bp, Homo sapiens
ttcttgtgtgcatgt

SEQ ID NO: 1753985 - DNA, 15 bp, Homo sapiens
tcttgtgtgcatgtc

SEQ ID NO: 1753986 - DNA, 15 bp, Homo sapiens
cttgtgtgcatgtct

SEQ ID NO: 1753987 - DNA, 15 bp, Homo sapiens
ttgtgtgcatgtcta

SEQ ID NO: 1753988 - DNA, 15 bp, Homo sapiens
tgtgtgcatgtctac

SEQ ID NO: 1753989 - DNA, 15 bp, Homo sapiens
gtgtgcatgtctact

SEQ ID NO: 1753990 - DNA, 15 bp, Homo sapiens
tgtgcatgtctacta

SEQ ID NO: 1753991 - DNA, 15 bp, Homo sapiens
gtgcatgtctactag

SEQ ID NO: 1753992 - DNA, 15 bp, Homo sapiens
tgcatgtctactagt

SEQ ID NO: 1753993 - DNA, 15 bp, Homo sapiens
gcatgtctactagtg

SEQ ID NO: 1753994 - DNA, 15 bp, Homo sapiens
catgtctactagtga

SEQ ID NO: 1753995 - DNA, 15 bp, Homo sapiens
atgtctactagtgat

SEQ ID NO: 1753996 - DNA, 15 bp, Homo sapiens
tgtctactagtgatg

SEQ ID NO: 1753997 - DNA, 15 bp, Homo sapiens
gtctactagtgatga

SEQ ID NO: 1753998 - DNA, 15 bp, Homo sapiens
tctactagtgatgaa

SEQ ID NO: 1753999 - DNA, 15 bp, Homo sapiens
ctactagtgatgaat

SEQ ID NO: 1754000 - DNA, 15 bp, Homo sapiens
tactagtgatgaatt

SEQ ID NO: 1754001 - DNA, 15 bp, Homo sapiens
actagtgatgaattc

SEQ ID NO: 1754002 - DNA, 15 bp, Homo sapiens
ctagtgatgaattct

SEQ ID NO: 1754003 - DNA, 15 bp, Homo sapiens
tagtgatgaattctt

SEQ ID NO: 1754004 - DNA, 15 bp, Homo sapiens
agtgatgaattcttc

SEQ ID NO: 1754005 - DNA, 15 bp, Homo sapiens
gtgatgaattcttcc

SEQ ID NO: 1754006 - DNA, 15 bp, Homo sapiens
tgatgaattcttcca

SEQ ID NO: 1754007 - DNA, 15 bp, Homo sapiens
gatgaattcttccag

SEQ ID NO: 1754008 - DNA, 15 bp, Homo sapiens
atgaattcttccagc

SEQ ID NO: 1754009 - DNA, 15 bp, Homo sapiens
tgaattcttccagct

SEQ ID NO: 1754010 - DNA, 15 bp, Homo sapiens
gaattcttccagctt

SEQ ID NO: 1754011 - DNA, 15 bp, Homo sapiens
aattcttccagcttt

SEQ ID NO: 1754012 - DNA, 15 bp, Homo sapiens
attcttccagctttt

SEQ ID NO: 1754013 - DNA, 15 bp, Homo sapiens
ttcttccagctttta

SEQ ID NO: 1754014 - DNA, 15 bp, Homo sapiens
tcttccagcttttat

SEQ ID NO: 1754015 - DNA, 15 bp, Homo sapiens
cttccagcttttatg

SEQ ID NO: 1754016 - DNA, 15 bp, Homo sapiens
ttccagcttttatgt

SEQ ID NO: 1754017 - DNA, 15 bp, Homo sapiens
tccagcttttatgtc

SEQ ID NO: 1754018 - DNA, 15 bp, Homo sapiens
ccagcttttatgtct

SEQ ID NO: 1754019 - DNA, 15 bp, Homo sapiens
cagcttttatgtctg

SEQ ID NO: 1754020 - DNA, 15 bp, Homo sapiens
agcttttatgtctgg

SEQ ID NO: 1754021 - DNA, 15 bp, Homo sapiens
gcttttatgtctgga

SEQ ID NO: 1754022 - DNA, 15 bp, Homo sapiens
cttttatgtctggaa

SEQ ID NO: 1754023 - DNA, 15 bp, Homo sapiens
ttttatgtctggaaa

SEQ ID NO: 1754024 - DNA, 15 bp, Homo sapiens
tttatgtctggaaaa

SEQ ID NO: 1754025 - DNA, 15 bp, Homo sapiens
ttatgtctggaaaaa

SEQ ID NO: 1754026 - DNA, 15 bp, Homo sapiens
tatgtctggaaaaaa

SEQ ID NO: 1754027 - DNA, 15 bp, Homo sapiens
atgtctggaaaaaaa

SEQ ID NO: 1754028 - DNA, 15 bp, Homo sapiens
tgtctggaaaaaaac

SEQ ID NO: 1754029 - DNA, 15 bp, Homo sapiens
gtctggaaaaaaaca

SEQ ID NO: 1754030 - DNA, 15 bp, Homo sapiens
tctggaaaaaaacat

SEQ ID NO: 1754031 - DNA, 15 bp, Homo sapiens
ctggaaaaaaacatt

SEQ ID NO: 1754032 - DNA, 15 bp, Homo sapiens
tggaaaaaaacattt

SEQ ID NO: 1754033 - DNA, 15 bp, Homo sapiens
ggaaaaaaacatttt

SEQ ID NO: 1754034 - DNA, 15 bp, Homo sapiens
gaaaaaaacatttta

SEQ ID NO: 1754035 - DNA, 15 bp, Homo sapiens
aaaaaaacattttac

SEQ ID NO: 1754036 - DNA, 15 bp, Homo sapiens
aaaaaacattttacc

SEQ ID NO: 1754037 - DNA, 15 bp, Homo sapiens
aaaaacattttacct

SEQ ID NO: 1754038 - DNA, 15 bp, Homo sapiens
aaaacattttacctt

SEQ ID NO: 1754039 - DNA, 15 bp, Homo sapiens
aaacattttaccttt

SEQ ID NO: 1754040 - DNA, 15 bp, Homo sapiens
aacattttaccttta

SEQ ID NO: 1754041 - DNA, 15 bp, Homo sapiens
acattttacctttat

SEQ ID NO: 1754042 - DNA, 15 bp, Homo sapiens
cattttacctttatt

SEQ ID NO: 1754043 - DNA, 15 bp, Homo sapiens
attttacctttattt

SEQ ID NO: 1754044 - DNA, 15 bp, Homo sapiens
ttttacctttatttt

SEQ ID NO: 1754045 - DNA, 15 bp, Homo sapiens
tttacctttattttt

SEQ ID NO: 1754046 - DNA, 15 bp, Homo sapiens
ttacctttattttta

SEQ ID NO: 1754047 - DNA, 15 bp, Homo sapiens
tacctttatttttaa

SEQ ID NO: 1754048 - DNA, 15 bp, Homo sapiens
acctttatttttaaa

SEQ ID NO: 1754049 - DNA, 15 bp, Homo sapiens
cctttatttttaaaa

SEQ ID NO: 1754050 - DNA, 15 bp, Homo sapiens
ctttatttttaaaag

SEQ ID NO: 1754051 - DNA, 15 bp, Homo sapiens
tttatttttaaaagg

SEQ ID NO: 1754052 - DNA, 15 bp, Homo sapiens
ttatttttaaaaggt

SEQ ID NO: 1754053 - DNA, 15 bp, Homo sapiens
tatttttaaaaggtc

SEQ ID NO: 1754054 - DNA, 15 bp, Homo sapiens
atttttaaaaggtct

SEQ ID NO: 1754055 - DNA, 15 bp, Homo sapiens
tttttaaaaggtctt

SEQ ID NO: 1754056 - DNA, 15 bp, Homo sapiens
ttttaaaaggtcttt

SEQ ID NO: 1754057 - DNA, 15 bp, Homo sapiens
tttaaaaggtctttt

SEQ ID NO: 1754058 - DNA, 15 bp, Homo sapiens
ttaaaaggtcttttg

SEQ ID NO: 1754059 - DNA, 15 bp, Homo sapiens
taaaaggtcttttgc

SEQ ID NO: 1754060 - DNA, 15 bp, Homo sapiens
aaaaggtcttttgct

SEQ ID NO: 1754061 - DNA, 15 bp, Homo sapiens
aaaggtcttttgctg

SEQ ID NO: 1754062 - DNA, 15 bp, Homo sapiens
aaggtcttttgctgg

SEQ ID NO: 1754063 - DNA, 15 bp, Homo sapiens
aggtcttttgctggg

SEQ ID NO: 1754064 - DNA, 15 bp, Homo sapiens
ggtcttttgctgggt

SEQ ID NO: 1754065 - DNA, 15 bp, Homo sapiens
gtcttttgctgggta

SEQ ID NO: 1754066 - DNA, 15 bp, Homo sapiens
tcttttgctgggtat

SEQ ID NO: 1754067 - DNA, 15 bp, Homo sapiens
cttttgctgggtatt

SEQ ID NO: 1754068 - DNA, 15 bp, Homo sapiens
ttttgctgggtattg

SEQ ID NO: 1754069 - DNA, 15 bp, Homo sapiens
tttgctgggtattga

SEQ ID NO: 1754070 - DNA, 15 bp, Homo sapiens
ttgctgggtattgaa

SEQ ID NO: 1754071 - DNA, 15 bp, Homo sapiens
tgctgggtattgaat

SEQ ID NO: 1754072 - DNA, 15 bp, Homo sapiens
gctgggtattgaatt

SEQ ID NO: 1754073 - DNA, 15 bp, Homo sapiens
ctgggtattgaattc

SEQ ID NO: 1754074 - DNA, 15 bp, Homo sapiens
tgggtattgaattct

SEQ ID NO: 1754075 - DNA, 15 bp, Homo sapiens
gggtattgaattcta

SEQ ID NO: 1754076 - DNA, 15 bp, Homo sapiens
ggtattgaattctag

SEQ ID NO: 1754077 - DNA, 15 bp, Homo sapiens
gtattgaattctagg

SEQ ID NO: 1754078 - DNA, 15 bp, Homo sapiens
tattgaattctaggt

SEQ ID NO: 1754079 - DNA, 15 bp, Homo sapiens
attgaattctaggtt

SEQ ID NO: 1754080 - DNA, 15 bp, Homo sapiens
ttgaattctaggttg

SEQ ID NO: 1754081 - DNA, 15 bp, Homo sapiens
tgaattctaggttga

SEQ ID NO: 1754082 - DNA, 15 bp, Homo sapiens
gaattctaggttgac

SEQ ID NO: 1754083 - DNA, 15 bp, Homo sapiens
aattctaggttgaca

SEQ ID NO: 1754084 - DNA, 15 bp, Homo sapiens
attctaggttgacag

SEQ ID NO: 1754085 - DNA, 15 bp, Homo sapiens
ttctaggttgacagt

SEQ ID NO: 1754086 - DNA, 15 bp, Homo sapiens
tctaggttgacagtc

SEQ ID NO: 1754087 - DNA, 15 bp, Homo sapiens
ctaggttgacagtct

SEQ ID NO: 1754088 - DNA, 15 bp, Homo sapiens
taggttgacagtctt

SEQ ID NO: 1754089 - DNA, 15 bp, Homo sapiens
aggttgacagtcttt

SEQ ID NO: 1754090 - DNA, 15 bp, Homo sapiens
ggttgacagtctttt

SEQ ID NO: 1754091 - DNA, 15 bp, Homo sapiens
gttgacagtcttttt

SEQ ID NO: 1754092 - DNA, 15 bp, Homo sapiens
ttgacagtctttttg

SEQ ID NO: 1754093 - DNA, 15 bp, Homo sapiens
tgacagtctttttgt

SEQ ID NO: 1754094 - DNA, 15 bp, Homo sapiens
gacagtctttttgtt

SEQ ID NO: 1754095 - DNA, 15 bp, Homo sapiens
acagtctttttgttt

SEQ ID NO: 1754096 - DNA, 15 bp, Homo sapiens
cagtctttttgtttt

SEQ ID NO: 1754097 - DNA, 15 bp, Homo sapiens
agtctttttgttttt

SEQ ID NO: 1754098 - DNA, 15 bp, Homo sapiens
gtctttttgtttttt

SEQ ID NO: 1754099 - DNA, 15 bp, Homo sapiens
tctttttgttttttc

SEQ ID NO: 1754100 - DNA, 15 bp, Homo sapiens
ctttttgttttttct

SEQ ID NO: 1754101 - DNA, 15 bp, Homo sapiens
tttttgttttttctt

SEQ ID NO: 1754102 - DNA, 15 bp, Homo sapiens
tttgttttttctttg

SEQ ID NO: 1754103 - DNA, 15 bp, Homo sapiens
ttgttttttctttga

SEQ ID NO: 1754104 - DNA, 15 bp, Homo sapiens
tgttttttctttgag

SEQ ID NO: 1754105 - DNA, 15 bp, Homo sapiens
gttttttctttgagt

SEQ ID NO: 1754106 - DNA, 15 bp, Homo sapiens
ttttttctttgagtg

SEQ ID NO: 1754107 - DNA, 15 bp, Homo sapiens
tttttctttgagtgc

SEQ ID NO: 1754108 - DNA, 15 bp, Homo sapiens
ttttctttgagtgct

SEQ ID NO: 1754109 - DNA, 15 bp, Homo sapiens
tttctttgagtgctt

SEQ ID NO: 1754110 - DNA, 15 bp, Homo sapiens
ttctttgagtgcttt

SEQ ID NO: 1754111 - DNA, 15 bp, Homo sapiens
tctttgagtgcttta

SEQ ID NO: 1754112 - DNA, 15 bp, Homo sapiens
ctttgagtgctttaa

SEQ ID NO: 1754113 - DNA, 15 bp, Homo sapiens
tttgagtgctttaaa

SEQ ID NO: 1754114 - DNA, 15 bp, Homo sapiens
ttgagtgctttaaaa

SEQ ID NO: 1754115 - DNA, 15 bp, Homo sapiens
tgagtgctttaaaaa

SEQ ID NO: 1754116 - DNA, 15 bp, Homo sapiens
gagtgctttaaaaat

SEQ ID NO: 1754117 - DNA, 15 bp, Homo sapiens
agtgctttaaaaata

SEQ ID NO: 1754118 - DNA, 15 bp, Homo sapiens
gtgctttaaaaatat

SEQ ID NO: 1754119 - DNA, 15 bp, Homo sapiens
tgctttaaaaatatt

SEQ ID NO: 1754120 - DNA, 15 bp, Homo sapiens
gctttaaaaatattg

SEQ ID NO: 1754121 - DNA, 15 bp, Homo sapiens
ctttaaaaatattgc

SEQ ID NO: 1754122 - DNA, 15 bp, Homo sapiens
tttaaaaatattgct

SEQ ID NO: 1754123 - DNA, 15 bp, Homo sapiens
ttaaaaatattgctc

SEQ ID NO: 1754124 - DNA, 15 bp, Homo sapiens
taaaaatattgctcc

SEQ ID NO: 1754125 - DNA, 15 bp, Homo sapiens
aaaaatattgctcca

SEQ ID NO: 1754126 - DNA, 15 bp, Homo sapiens
aaaatattgctccac

SEQ ID NO: 1754127 - DNA, 15 bp, Homo sapiens
aaatattgctccact

SEQ ID NO: 1754128 - DNA, 15 bp, Homo sapiens
aatattgctccactg

SEQ ID NO: 1754129 - DNA, 15 bp, Homo sapiens
atattgctccactgt

SEQ ID NO: 1754130 - DNA, 15 bp, Homo sapiens
tattgctccactgtc

SEQ ID NO: 1754131 - DNA, 15 bp, Homo sapiens
attgctccactgtct

SEQ ID NO: 1754132 - DNA, 15 bp, Homo sapiens
ttgctccactgtctt

SEQ ID NO: 1754133 - DNA, 15 bp, Homo sapiens
tgctccactgtcttc

SEQ ID NO: 1754134 - DNA, 15 bp, Homo sapiens
gctccactgtcttct

SEQ ID NO: 1754135 - DNA, 15 bp, Homo sapiens
ctccactgtcttctg

SEQ ID NO: 1754136 - DNA, 15 bp, Homo sapiens
tccactgtcttctgg

SEQ ID NO: 1754137 - DNA, 15 bp, Homo sapiens
ccactgtcttctggt

SEQ ID NO: 1754138 - DNA, 15 bp, Homo sapiens
cactgtcttctggtt

SEQ ID NO: 1754139 - DNA, 15 bp, Homo sapiens
actgtcttctggttt

SEQ ID NO: 1754140 - DNA, 15 bp, Homo sapiens
ctgtcttctggtttg

SEQ ID NO: 1754141 - DNA, 15 bp, Homo sapiens
tgtcttctggtttgc

SEQ ID NO: 1754142 - DNA, 15 bp, Homo sapiens
gtcttctggtttgcc

SEQ ID NO: 1754143 - DNA, 15 bp, Homo sapiens
tcttctggtttgcct

SEQ ID NO: 1754144 - DNA, 15 bp, Homo sapiens
cttctggtttgcctt

SEQ ID NO: 1754145 - DNA, 15 bp, Homo sapiens
ttctggtttgccttg

SEQ ID NO: 1754146 - DNA, 15 bp, Homo sapiens
tctggtttgccttgt

SEQ ID NO: 1754147 - DNA, 15 bp, Homo sapiens
ctggtttgccttgtt

SEQ ID NO: 1754148 - DNA, 15 bp, Homo sapiens
tggtttgccttgttt

SEQ ID NO: 1754149 - DNA, 15 bp, Homo sapiens
ggtttgccttgtttc

SEQ ID NO: 1754150 - DNA, 15 bp, Homo sapiens
gtttgccttgtttct

SEQ ID NO: 1754151 - DNA, 15 bp, Homo sapiens
tttgccttgtttctt

SEQ ID NO: 1754152 - DNA, 15 bp, Homo sapiens
ttgccttgtttcttt

SEQ ID NO: 1754153 - DNA, 15 bp, Homo sapiens
tgccttgtttctttt

SEQ ID NO: 1754154 - DNA, 15 bp, Homo sapiens
gccttgtttcttttt

SEQ ID NO: 1754155 - DNA, 15 bp, Homo sapiens
ccttgtttctttttt

SEQ ID NO: 1754156 - DNA, 15 bp, Homo sapiens
cttgtttcttttttt

SEQ ID NO: 1754157 - DNA, 15 bp, Homo sapiens
ttgtttctttttttc

SEQ ID NO: 1754158 - DNA, 15 bp, Homo sapiens
tgtttctttttttct

SEQ ID NO: 1754159 - DNA, 15 bp, Homo sapiens
gtttctttttttctt

SEQ ID NO: 1754160 - DNA, 15 bp, Homo sapiens
tctttttttcttttt

SEQ ID NO: 1754161 - DNA, 15 bp, Homo sapiens
ctttttttctttttt

SEQ ID NO: 1754162 - DNA, 15 bp, Homo sapiens
ttttttgagatgaag

SEQ ID NO: 1754163 - DNA, 15 bp, Homo sapiens
tttttgagatgaagc

SEQ ID NO: 1754164 - DNA, 15 bp, Homo sapiens
ttttgagatgaagcc

SEQ ID NO: 1754165 - DNA, 15 bp, Homo sapiens
tttgagatgaagcct

SEQ ID NO: 1754166 - DNA, 15 bp, Homo sapiens
ttgagatgaagcctc

SEQ ID NO: 1754167 - DNA, 15 bp, Homo sapiens
tgagatgaagcctcg

SEQ ID NO: 1754168 - DNA, 15 bp, Homo sapiens
gagatgaagcctcgc

SEQ ID NO: 1754169 - DNA, 15 bp, Homo sapiens
agatgaagcctcgct

SEQ ID NO: 1754170 - DNA, 15 bp, Homo sapiens
gatgaagcctcgctc

SEQ ID NO: 1754171 - DNA, 15 bp, Homo sapiens
atgaagcctcgctct

SEQ ID NO: 1754172 - DNA, 15 bp, Homo sapiens
tgaagcctcgctctt

SEQ ID NO: 1754173 - DNA, 15 bp, Homo sapiens
gaagcctcgctcttt

SEQ ID NO: 1754174 - DNA, 15 bp, Homo sapiens
aagcctcgctctttt

SEQ ID NO: 1754175 - DNA, 15 bp, Homo sapiens
agcctcgctcttttg

SEQ ID NO: 1754176 - DNA, 15 bp, Homo sapiens
gcctcgctcttttgc

SEQ ID NO: 1754177 - DNA, 15 bp, Homo sapiens
cctcgctcttttgcc

SEQ ID NO: 1754178 - DNA, 15 bp, Homo sapiens
ctcgctcttttgccc

SEQ ID NO: 1754179 - DNA, 15 bp, Homo sapiens
tcgctcttttgccca

SEQ ID NO: 1754180 - DNA, 15 bp, Homo sapiens
cgctcttttgcccag

SEQ ID NO: 1754181 - DNA, 15 bp, Homo sapiens
gctcttttgcccagg

SEQ ID NO: 1754182 - DNA, 15 bp, Homo sapiens
ctcttttgcccaggc

SEQ ID NO: 1754183 - DNA, 15 bp, Homo sapiens
tcttttgcccaggct

SEQ ID NO: 1754184 - DNA, 15 bp, Homo sapiens
cttttgcccaggctg

SEQ ID NO: 1754185 - DNA, 15 bp, Homo sapiens
gcagtggcatgatcc

SEQ ID NO: 1754186 - DNA, 15 bp, Homo sapiens
cagtggcatgatccc

SEQ ID NO: 1754187 - DNA, 15 bp, Homo sapiens
agtggcatgatccca

SEQ ID NO: 1754188 - DNA, 15 bp, Homo sapiens
gtggcatgatcccag

SEQ ID NO: 1754189 - DNA, 15 bp, Homo sapiens
tggcatgatcccagc

SEQ ID NO: 1754190 - DNA, 15 bp, Homo sapiens
ggcatgatcccagct

SEQ ID NO: 1754191 - DNA, 15 bp, Homo sapiens
gcatgatcccagctc

SEQ ID NO: 1754192 - DNA, 15 bp, Homo sapiens
catgatcccagctca

SEQ ID NO: 1754193 - DNA, 15 bp, Homo sapiens
atgatcccagctcac

SEQ ID NO: 1754194 - DNA, 15 bp, Homo sapiens
tgatcccagctcact

SEQ ID NO: 1754195 - DNA, 15 bp, Homo sapiens
gatcccagctcactg

SEQ ID NO: 1754196 - DNA, 15 bp, Homo sapiens
caagcgattcttctg

SEQ ID NO: 1754197 - DNA, 15 bp, Homo sapiens
aagcgattcttctgc

SEQ ID NO: 1754198 - DNA, 15 bp, Homo sapiens
agcgattcttctgcc

SEQ ID NO: 1754199 - DNA, 15 bp, Homo sapiens
gcgattcttctgcct

SEQ ID NO: 1754200 - DNA, 15 bp, Homo sapiens
cgattcttctgcctc

SEQ ID NO: 1754201 - DNA, 15 bp, Homo sapiens
tcagcctcctgagtg

SEQ ID NO: 1754202 - DNA, 15 bp, Homo sapiens
cagcctcctgagtga

SEQ ID NO: 1754203 - DNA, 15 bp, Homo sapiens
agcctcctgagtgac

SEQ ID NO: 1754204 - DNA, 15 bp, Homo sapiens
gcctcctgagtgact

SEQ ID NO: 1754205 - DNA, 15 bp, Homo sapiens
cctcctgagtgactg

SEQ ID NO: 1754206 - DNA, 15 bp, Homo sapiens
ctcctgagtgactgg

SEQ ID NO: 1754207 - DNA, 15 bp, Homo sapiens
tcctgagtgactggg

SEQ ID NO: 1754208 - DNA, 15 bp, Homo sapiens
cctgagtgactggga

SEQ ID NO: 1754209 - DNA, 15 bp, Homo sapiens
ctgagtgactgggac

SEQ ID NO: 1754210 - DNA, 15 bp, Homo sapiens
tgagtgactgggact

SEQ ID NO: 1754211 - DNA, 15 bp, Homo sapiens
gagtgactgggacta

SEQ ID NO: 1754212 - DNA, 15 bp, Homo sapiens
agtgactgggactaa

SEQ ID NO: 1754213 - DNA, 15 bp, Homo sapiens
gtgactgggactaaa

SEQ ID NO: 1754214 - DNA, 15 bp, Homo sapiens
tgactgggactaaag

SEQ ID NO: 1754215 - DNA, 15 bp, Homo sapiens
gactgggactaaagg

SEQ ID NO: 1754216 - DNA, 15 bp, Homo sapiens
actgggactaaaggc

SEQ ID NO: 1754217 - DNA, 15 bp, Homo sapiens
ctgggactaaaggca

SEQ ID NO: 1754218 - DNA, 15 bp, Homo sapiens
tgggactaaaggcac

SEQ ID NO: 1754219 - DNA, 15 bp, Homo sapiens
gggactaaaggcaca

SEQ ID NO: 1754220 - DNA, 15 bp, Homo sapiens
ggactaaaggcacat

SEQ ID NO: 1754221 - DNA, 15 bp, Homo sapiens
gactaaaggcacatg

SEQ ID NO: 1754222 - DNA, 15 bp, Homo sapiens
actaaaggcacatgc

SEQ ID NO: 1754223 - DNA, 15 bp, Homo sapiens
ctaaaggcacatgcc

SEQ ID NO: 1754224 - DNA, 15 bp, Homo sapiens
taaaggcacatgcca

SEQ ID NO: 1754225 - DNA, 15 bp, Homo sapiens
aaaggcacatgccac

SEQ ID NO: 1754226 - DNA, 15 bp, Homo sapiens
aaggcacatgccacc

SEQ ID NO: 1754227 - DNA, 15 bp, Homo sapiens
atgccaccatgcccg

SEQ ID NO: 1754228 - DNA, 15 bp, Homo sapiens
ctgatctcaggtgac

SEQ ID NO: 1754229 - DNA, 15 bp, Homo sapiens
tgatctcaggtgacc

SEQ ID NO: 1754230 - DNA, 15 bp, Homo sapiens
gatctcaggtgaccc

SEQ ID NO: 1754231 - DNA, 15 bp, Homo sapiens
atctcaggtgaccca

SEQ ID NO: 1754232 - DNA, 15 bp, Homo sapiens
tctcaggtgacccac

SEQ ID NO: 1754233 - DNA, 15 bp, Homo sapiens
caggtgacccaccca

SEQ ID NO: 1754234 - DNA, 15 bp, Homo sapiens
aggtgacccacccac

SEQ ID NO: 1754235 - DNA, 15 bp, Homo sapiens
ggtgacccacccacc

SEQ ID NO: 1754236 - DNA, 15 bp, Homo sapiens
gtgacccacccacct

SEQ ID NO: 1754237 - DNA, 15 bp, Homo sapiens
tgacccacccacctt

SEQ ID NO: 1754238 - DNA, 15 bp, Homo sapiens
caagcatgagccacc

SEQ ID NO: 1754239 - DNA, 15 bp, Homo sapiens
accacgcctggcctt

SEQ ID NO: 1754240 - DNA, 15 bp, Homo sapiens
ccacgcctggccttg

SEQ ID NO: 1754241 - DNA, 15 bp, Homo sapiens
cacgcctggccttgt

SEQ ID NO: 1754242 - DNA, 15 bp, Homo sapiens
acgcctggccttgtt

SEQ ID NO: 1754243 - DNA, 15 bp, Homo sapiens
cgcctggccttgttc

SEQ ID NO: 1754244 - DNA, 15 bp, Homo sapiens
gcctggccttgttct

SEQ ID NO: 1754245 - DNA, 15 bp, Homo sapiens
cctggccttgttctt

SEQ ID NO: 1754246 - DNA, 15 bp, Homo sapiens
ctggccttgttcttt

SEQ ID NO: 1754247 - DNA, 15 bp, Homo sapiens
tggccttgttctttt

SEQ ID NO: 1754248 - DNA, 15 bp, Homo sapiens
ggccttgttcttttt

SEQ ID NO: 1754249 - DNA, 15 bp, Homo sapiens
gccttgttctttttt

SEQ ID NO: 1754250 - DNA, 15 bp, Homo sapiens
ccttgttcttttttt

SEQ ID NO: 1754251 - DNA, 15 bp, Homo sapiens
cttgttctttttttg

SEQ ID NO: 1754252 - DNA, 15 bp, Homo sapiens
ttgttctttttttgc

SEQ ID NO: 1754253 - DNA, 15 bp, Homo sapiens
tgttctttttttgct

SEQ ID NO: 1754254 - DNA, 15 bp, Homo sapiens
gttctttttttgctg

SEQ ID NO: 1754255 - DNA, 15 bp, Homo sapiens
ttctttttttgctgt

SEQ ID NO: 1754256 - DNA, 15 bp, Homo sapiens
tctttttttgctgta

SEQ ID NO: 1754257 - DNA, 15 bp, Homo sapiens
ctttttttgctgtat

SEQ ID NO: 1754258 - DNA, 15 bp, Homo sapiens
tttttttgctgtatc

SEQ ID NO: 1754259 - DNA, 15 bp, Homo sapiens
ttttttgctgtatct

SEQ ID NO: 1754260 - DNA, 15 bp, Homo sapiens
tttttgctgtatctt

SEQ ID NO: 1754261 - DNA, 15 bp, Homo sapiens
ttttgctgtatcttt

SEQ ID NO: 1754262 - DNA, 15 bp, Homo sapiens
tttgctgtatctttt

SEQ ID NO: 1754263 - DNA, 15 bp, Homo sapiens
ttgctgtatcttttt

SEQ ID NO: 1754264 - DNA, 15 bp, Homo sapiens
tgctgtatctttttc

SEQ ID NO: 1754265 - DNA, 15 bp, Homo sapiens
gctgtatctttttcc

SEQ ID NO: 1754266 - DNA, 15 bp, Homo sapiens
ctgtatctttttcct

SEQ ID NO: 1754267 - DNA, 15 bp, Homo sapiens
tgtatctttttcctg

SEQ ID NO: 1754268 - DNA, 15 bp, Homo sapiens
gtatctttttcctgc

SEQ ID NO: 1754269 - DNA, 15 bp, Homo sapiens
tatctttttcctgca

SEQ ID NO: 1754270 - DNA, 15 bp, Homo sapiens
atctttttcctgcag

SEQ ID NO: 1754271 - DNA, 15 bp, Homo sapiens
tctttttcctgcagg

SEQ ID NO: 1754272 - DNA, 15 bp, Homo sapiens
ctttttcctgcaggt

SEQ ID NO: 1754273 - DNA, 15 bp, Homo sapiens
tttttcctgcaggtt

SEQ ID NO: 1754274 - DNA, 15 bp, Homo sapiens
ttttcctgcaggttt

SEQ ID NO: 1754275 - DNA, 15 bp, Homo sapiens
tttcctgcaggtttt

SEQ ID NO: 1754276 - DNA, 15 bp, Homo sapiens
ttcctgcaggttttt

SEQ ID NO: 1754277 - DNA, 15 bp, Homo sapiens
tcctgcaggtttttc

SEQ ID NO: 1754278 - DNA, 15 bp, Homo sapiens
cctgcaggtttttct

SEQ ID NO: 1754279 - DNA, 15 bp, Homo sapiens
ctgcaggtttttctt

SEQ ID NO: 1754280 - DNA, 15 bp, Homo sapiens
tgcaggtttttcttt

SEQ ID NO: 1754281 - DNA, 15 bp, Homo sapiens
gcaggtttttctttc

SEQ ID NO: 1754282 - DNA, 15 bp, Homo sapiens
caggtttttctttct

SEQ ID NO: 1754283 - DNA, 15 bp, Homo sapiens
aggtttttctttctg

SEQ ID NO: 1754284 - DNA, 15 bp, Homo sapiens
ggtttttctttctgt

SEQ ID NO: 1754285 - DNA, 15 bp, Homo sapiens
gtttttctttctgta

SEQ ID NO: 1754286 - DNA, 15 bp, Homo sapiens
tttttctttctgtat

SEQ ID NO: 1754287 - DNA, 15 bp, Homo sapiens
ttttctttctgtatt

SEQ ID NO: 1754288 - DNA, 15 bp, Homo sapiens
tttctttctgtattt

SEQ ID NO: 1754289 - DNA, 15 bp, Homo sapiens
ttctttctgtatttc

SEQ ID NO: 1754290 - DNA, 15 bp, Homo sapiens
tctttctgtatttca

SEQ ID NO: 1754291 - DNA, 15 bp, Homo sapiens
ctttctgtatttcat

SEQ ID NO: 1754292 - DNA, 15 bp, Homo sapiens
tttctgtatttcatg

SEQ ID NO: 1754293 - DNA, 15 bp, Homo sapiens
ttctgtatttcatgt

SEQ ID NO: 1754294 - DNA, 15 bp, Homo sapiens
tctgtatttcatgtt

SEQ ID NO: 1754295 - DNA, 15 bp, Homo sapiens
ctgtatttcatgttg

SEQ ID NO: 1754296 - DNA, 15 bp, Homo sapiens
tgtatttcatgttga

SEQ ID NO: 1754297 - DNA, 15 bp, Homo sapiens
gtatttcatgttgaa

SEQ ID NO: 1754298 - DNA, 15 bp, Homo sapiens
tatttcatgttgaat

SEQ ID NO: 1754299 - DNA, 15 bp, Homo sapiens
atttcatgttgaata

SEQ ID NO: 1754300 - DNA, 15 bp, Homo sapiens
tttcatgttgaatac

SEQ ID NO: 1754301 - DNA, 15 bp, Homo sapiens
ttcatgttgaatacc

SEQ ID NO: 1754302 - DNA, 15 bp, Homo sapiens
tcatgttgaatacct

SEQ ID NO: 1754303 - DNA, 15 bp, Homo sapiens
catgttgaatacctt

SEQ ID NO: 1754304 - DNA, 15 bp, Homo sapiens
atgttgaataccttc

SEQ ID NO: 1754305 - DNA, 15 bp, Homo sapiens
tgttgaataccttct

SEQ ID NO: 1754306 - DNA, 15 bp, Homo sapiens
gttgaataccttcta

SEQ ID NO: 1754307 - DNA, 15 bp, Homo sapiens
ttgaataccttctaa

SEQ ID NO: 1754308 - DNA, 15 bp, Homo sapiens
tgaataccttctaaa

SEQ ID NO: 1754309 - DNA, 15 bp, Homo sapiens
gaataccttctaaag

SEQ ID NO: 1754310 - DNA, 15 bp, Homo sapiens
aataccttctaaagc

SEQ ID NO: 1754311 - DNA, 15 bp, Homo sapiens
ataccttctaaagct

SEQ ID NO: 1754312 - DNA, 15 bp, Homo sapiens
taccttctaaagcta

SEQ ID NO: 1754313 - DNA, 15 bp, Homo sapiens
accttctaaagctat

SEQ ID NO: 1754314 - DNA, 15 bp, Homo sapiens
ccttctaaagctatg

SEQ ID NO: 1754315 - DNA, 15 bp, Homo sapiens
cttctaaagctatgt

SEQ ID NO: 1754316 - DNA, 15 bp, Homo sapiens
ttctaaagctatgtc

SEQ ID NO: 1754317 - DNA, 15 bp, Homo sapiens
tctaaagctatgtct

SEQ ID NO: 1754318 - DNA, 15 bp, Homo sapiens
ctaaagctatgtctt

SEQ ID NO: 1754319 - DNA, 15 bp, Homo sapiens
taaagctatgtcttc

SEQ ID NO: 1754320 - DNA, 15 bp, Homo sapiens
aaagctatgtcttca

SEQ ID NO: 1754321 - DNA, 15 bp, Homo sapiens
aagctatgtcttcaa

SEQ ID NO: 1754322 - DNA, 15 bp, Homo sapiens
agctatgtcttcaag

SEQ ID NO: 1754323 - DNA, 15 bp, Homo sapiens
gctatgtcttcaagt

SEQ ID NO: 1754324 - DNA, 15 bp, Homo sapiens
ctatgtcttcaagtt

SEQ ID NO: 1754325 - DNA, 15 bp, Homo sapiens
tatgtcttcaagttt

SEQ ID NO: 1754326 - DNA, 15 bp, Homo sapiens
atgtcttcaagttta

SEQ ID NO: 1754327 - DNA, 15 bp, Homo sapiens
tgtcttcaagtttat

SEQ ID NO: 1754328 - DNA, 15 bp, Homo sapiens
gtcttcaagtttatt

SEQ ID NO: 1754329 - DNA, 15 bp, Homo sapiens
tcttcaagtttatta

SEQ ID NO: 1754330 - DNA, 15 bp, Homo sapiens
cttcaagtttattaa

SEQ ID NO: 1754331 - DNA, 15 bp, Homo sapiens
ttcaagtttattaat

SEQ ID NO: 1754332 - DNA, 15 bp, Homo sapiens
tcaagtttattaatt

SEQ ID NO: 1754333 - DNA, 15 bp, Homo sapiens
caagtttattaattt

SEQ ID NO: 1754334 - DNA, 15 bp, Homo sapiens
aagtttattaatttt

SEQ ID NO: 1754335 - DNA, 15 bp, Homo sapiens
agtttattaattttt

SEQ ID NO: 1754336 - DNA, 15 bp, Homo sapiens
gtttattaatttttt

SEQ ID NO: 1754337 - DNA, 15 bp, Homo sapiens
tttattaattttttt

SEQ ID NO: 1754338 - DNA, 15 bp, Homo sapiens
ttattaatttttttc

SEQ ID NO: 1754339 - DNA, 15 bp, Homo sapiens
tattaatttttttct

SEQ ID NO: 1754340 - DNA, 15 bp, Homo sapiens
attaatttttttctt

SEQ ID NO: 1754341 - DNA, 15 bp, Homo sapiens
ttaatttttttcttc

SEQ ID NO: 1754342 - DNA, 15 bp, Homo sapiens
aatttttttcttctg

SEQ ID NO: 1754343 - DNA, 15 bp, Homo sapiens
atttttttcttctga

SEQ ID NO: 1754344 - DNA, 15 bp, Homo sapiens
tttttttcttctgag

SEQ ID NO: 1754345 - DNA, 15 bp, Homo sapiens
ttttttcttctgagg

SEQ ID NO: 1754346 - DNA, 15 bp, Homo sapiens
tttttcttctgaggt

SEQ ID NO: 1754347 - DNA, 15 bp, Homo sapiens
ttttcttctgaggta

SEQ ID NO: 1754348 - DNA, 15 bp, Homo sapiens
tttcttctgaggtat

SEQ ID NO: 1754349 - DNA, 15 bp, Homo sapiens
ttcttctgaggtatc

SEQ ID NO: 1754350 - DNA, 15 bp, Homo sapiens
tcttctgaggtatct

SEQ ID NO: 1754351 - DNA, 15 bp, Homo sapiens
cttctgaggtatcta

SEQ ID NO: 1754352 - DNA, 15 bp, Homo sapiens
ttctgaggtatctaa

SEQ ID NO: 1754353 - DNA, 15 bp, Homo sapiens
tctgaggtatctaat

SEQ ID NO: 1754354 - DNA, 15 bp, Homo sapiens
ctgaggtatctaatc

SEQ ID NO: 1754355 - DNA, 15 bp, Homo sapiens
tgaggtatctaatct

SEQ ID NO: 1754356 - DNA, 15 bp, Homo sapiens
gaggtatctaatctg

SEQ ID NO: 1754357 - DNA, 15 bp, Homo sapiens
aggtatctaatctgc

SEQ ID NO: 1754358 - DNA, 15 bp, Homo sapiens
ggtatctaatctgct

SEQ ID NO: 1754359 - DNA, 15 bp, Homo sapiens
gtatctaatctgcta

SEQ ID NO: 1754360 - DNA, 15 bp, Homo sapiens
tatctaatctgctat

SEQ ID NO: 1754361 - DNA, 15 bp, Homo sapiens
atctaatctgctatt

SEQ ID NO: 1754362 - DNA, 15 bp, Homo sapiens
tctaatctgctatta

SEQ ID NO: 1754363 - DNA, 15 bp, Homo sapiens
ctaatctgctattaa

SEQ ID NO: 1754364 - DNA, 15 bp, Homo sapiens
taatctgctattaat

SEQ ID NO: 1754365 - DNA, 15 bp, Homo sapiens
aatctgctattaatc

SEQ ID NO: 1754366 - DNA, 15 bp, Homo sapiens
atctgctattaatct

SEQ ID NO: 1754367 - DNA, 15 bp, Homo sapiens
tctgctattaatctc

SEQ ID NO: 1754368 - DNA, 15 bp, Homo sapiens
ctgctattaatctca

SEQ ID NO: 1754369 - DNA, 15 bp, Homo sapiens
tgctattaatctcat

SEQ ID NO: 1754370 - DNA, 15 bp, Homo sapiens
gctattaatctcatt

SEQ ID NO: 1754371 - DNA, 15 bp, Homo sapiens
ctattaatctcattt

SEQ ID NO: 1754372 - DNA, 15 bp, Homo sapiens
tattaatctcattta

SEQ ID NO: 1754373 - DNA, 15 bp, Homo sapiens
attaatctcatttat

SEQ ID NO: 1754374 - DNA, 15 bp, Homo sapiens
ttaatctcatttatt

SEQ ID NO: 1754375 - DNA, 15 bp, Homo sapiens
taatctcatttattg

SEQ ID NO: 1754376 - DNA, 15 bp, Homo sapiens
aatctcatttattgt

SEQ ID NO: 1754377 - DNA, 15 bp, Homo sapiens
atctcatttattgta

SEQ ID NO: 1754378 - DNA, 15 bp, Homo sapiens
tctcatttattgtat

SEQ ID NO: 1754379 - DNA, 15 bp, Homo sapiens
ctcatttattgtatt

SEQ ID NO: 1754380 - DNA, 15 bp, Homo sapiens
tcatttattgtattt

SEQ ID NO: 1754381 - DNA, 15 bp, Homo sapiens
catttattgtatttt

SEQ ID NO: 1754382 - DNA, 15 bp, Homo sapiens
atttattgtattttt

SEQ ID NO: 1754383 - DNA, 15 bp, Homo sapiens
tttattgtattttta

SEQ ID NO: 1754384 - DNA, 15 bp, Homo sapiens
ttattgtatttttag

SEQ ID NO: 1754385 - DNA, 15 bp, Homo sapiens
tattgtatttttagt

SEQ ID NO: 1754386 - DNA, 15 bp, Homo sapiens
attgtatttttagtc

SEQ ID NO: 1754387 - DNA, 15 bp, Homo sapiens
ttgtatttttagtct

SEQ ID NO: 1754388 - DNA, 15 bp, Homo sapiens
tgtatttttagtctt

SEQ ID NO: 1754389 - DNA, 15 bp, Homo sapiens
gtatttttagtctta

SEQ ID NO: 1754390 - DNA, 15 bp, Homo sapiens
tatttttagtcttac

SEQ ID NO: 1754391 - DNA, 15 bp, Homo sapiens
atttttagtcttact

SEQ ID NO: 1754392 - DNA, 15 bp, Homo sapiens
tttttagtcttacta

SEQ ID NO: 1754393 - DNA, 15 bp, Homo sapiens
ttttagtcttactat

SEQ ID NO: 1754394 - DNA, 15 bp, Homo sapiens
tttagtcttactata

SEQ ID NO: 1754395 - DNA, 15 bp, Homo sapiens
ttagtcttactatag

SEQ ID NO: 1754396 - DNA, 15 bp, Homo sapiens
tagtcttactatagt

SEQ ID NO: 1754397 - DNA, 15 bp, Homo sapiens
agtcttactatagtt

SEQ ID NO: 1754398 - DNA, 15 bp, Homo sapiens
gtcttactatagttt

SEQ ID NO: 1754399 - DNA, 15 bp, Homo sapiens
tcttactatagtttt

SEQ ID NO: 1754400 - DNA, 15 bp, Homo sapiens
cttactatagttttc

SEQ ID NO: 1754401 - DNA, 15 bp, Homo sapiens
ttactatagttttca

SEQ ID NO: 1754402 - DNA, 15 bp, Homo sapiens
tactatagttttcat

SEQ ID NO: 1754403 - DNA, 15 bp, Homo sapiens
actatagttttcatt

SEQ ID NO: 1754404 - DNA, 15 bp, Homo sapiens
ctatagttttcattt

SEQ ID NO: 1754405 - DNA, 15 bp, Homo sapiens
tatagttttcatttc

SEQ ID NO: 1754406 - DNA, 15 bp, Homo sapiens
atagttttcatttct

SEQ ID NO: 1754407 - DNA, 15 bp, Homo sapiens
tagttttcatttcta

SEQ ID NO: 1754408 - DNA, 15 bp, Homo sapiens
agttttcatttctag

SEQ ID NO: 1754409 - DNA, 15 bp, Homo sapiens
gttttcatttctaga

SEQ ID NO: 1754410 - DNA, 15 bp, Homo sapiens
ttttcatttctagaa

SEQ ID NO: 1754411 - DNA, 15 bp, Homo sapiens
tttcatttctagaaa

SEQ ID NO: 1754412 - DNA, 15 bp, Homo sapiens
ttcatttctagaaat

SEQ ID NO: 1754413 - DNA, 15 bp, Homo sapiens
tcatttctagaaatt

SEQ ID NO: 1754414 - DNA, 15 bp, Homo sapiens
catttctagaaattt

SEQ ID NO: 1754415 - DNA, 15 bp, Homo sapiens
atttctagaaatttg

SEQ ID NO: 1754416 - DNA, 15 bp, Homo sapiens
tttctagaaatttga

SEQ ID NO: 1754417 - DNA, 15 bp, Homo sapiens
ttctagaaatttgat

SEQ ID NO: 1754418 - DNA, 15 bp, Homo sapiens
tctagaaatttgatt

SEQ ID NO: 1754419 - DNA, 15 bp, Homo sapiens
ctagaaatttgattt

SEQ ID NO: 1754420 - DNA, 15 bp, Homo sapiens
tagaaatttgatttg

SEQ ID NO: 1754421 - DNA, 15 bp, Homo sapiens
agaaatttgatttgg

SEQ ID NO: 1754422 - DNA, 15 bp, Homo sapiens
gaaatttgatttggg

SEQ ID NO: 1754423 - DNA, 15 bp, Homo sapiens
aaatttgatttgggt

SEQ ID NO: 1754424 - DNA, 15 bp, Homo sapiens
aatttgatttgggtc

SEQ ID NO: 1754425 - DNA, 15 bp, Homo sapiens
atttgatttgggtcc

SEQ ID NO: 1754426 - DNA, 15 bp, Homo sapiens
tttgatttgggtcct

SEQ ID NO: 1754427 - DNA, 15 bp, Homo sapiens
ttgatttgggtcctt

SEQ ID NO: 1754428 - DNA, 15 bp, Homo sapiens
tgatttgggtccttt

SEQ ID NO: 1754429 - DNA, 15 bp, Homo sapiens
gatttgggtcctttt

SEQ ID NO: 1754430 - DNA, 15 bp, Homo sapiens
atttgggtccttttt

SEQ ID NO: 1754431 - DNA, 15 bp, Homo sapiens
tttgggtccttttta

SEQ ID NO: 1754432 - DNA, 15 bp, Homo sapiens
ttgggtcctttttat

SEQ ID NO: 1754433 - DNA, 15 bp, Homo sapiens
tgggtcctttttata

SEQ ID NO: 1754434 - DNA, 15 bp, Homo sapiens
gggtcctttttatat

SEQ ID NO: 1754435 - DNA, 15 bp, Homo sapiens
ggtcctttttatatc

SEQ ID NO: 1754436 - DNA, 15 bp, Homo sapiens
gtcctttttatatct

SEQ ID NO: 1754437 - DNA, 15 bp, Homo sapiens
tcctttttatatctt

SEQ ID NO: 1754438 - DNA, 15 bp, Homo sapiens
cctttttatatcttc

SEQ ID NO: 1754439 - DNA, 15 bp, Homo sapiens
ctttttatatcttcc

SEQ ID NO: 1754440 - DNA, 15 bp, Homo sapiens
tttttatatcttcca

SEQ ID NO: 1754441 - DNA, 15 bp, Homo sapiens
ttttatatcttccat

SEQ ID NO: 1754442 - DNA, 15 bp, Homo sapiens
tttatatcttccata

SEQ ID NO: 1754443 - DNA, 15 bp, Homo sapiens
ttatatcttccatat

SEQ ID NO: 1754444 - DNA, 15 bp, Homo sapiens
tatatcttccatatc

SEQ ID NO: 1754445 - DNA, 15 bp, Homo sapiens
atatcttccatatct

SEQ ID NO: 1754446 - DNA, 15 bp, Homo sapiens
tatcttccatatcta

SEQ ID NO: 1754447 - DNA, 15 bp, Homo sapiens
atcttccatatctat

SEQ ID NO: 1754448 - DNA, 15 bp, Homo sapiens
tcttccatatctatt

SEQ ID NO: 1754449 - DNA, 15 bp, Homo sapiens
cttccatatctattt

SEQ ID NO: 1754450 - DNA, 15 bp, Homo sapiens
ttccatatctatttt

SEQ ID NO: 1754451 - DNA, 15 bp, Homo sapiens
tccatatctattttt

SEQ ID NO: 1754452 - DNA, 15 bp, Homo sapiens
ccatatctattttta

SEQ ID NO: 1754453 - DNA, 15 bp, Homo sapiens
catatctatttttat

SEQ ID NO: 1754454 - DNA, 15 bp, Homo sapiens
atatctatttttatt

SEQ ID NO: 1754455 - DNA, 15 bp, Homo sapiens
tatctatttttatta

SEQ ID NO: 1754456 - DNA, 15 bp, Homo sapiens
atctatttttattat

SEQ ID NO: 1754457 - DNA, 15 bp, Homo sapiens
tctatttttattatg

SEQ ID NO: 1754458 - DNA, 15 bp, Homo sapiens
ctatttttattatgt

SEQ ID NO: 1754459 - DNA, 15 bp, Homo sapiens
tatttttattatgtt

SEQ ID NO: 1754460 - DNA, 15 bp, Homo sapiens
atttttattatgttt

SEQ ID NO: 1754461 - DNA, 15 bp, Homo sapiens
tttttattatgttta

SEQ ID NO: 1754462 - DNA, 15 bp, Homo sapiens
ttttattatgtttat

SEQ ID NO: 1754463 - DNA, 15 bp, Homo sapiens
tttattatgtttatg

SEQ ID NO: 1754464 - DNA, 15 bp, Homo sapiens
ttattatgtttatgc

SEQ ID NO: 1754465 - DNA, 15 bp, Homo sapiens
tattatgtttatgct

SEQ ID NO: 1754466 - DNA, 15 bp, Homo sapiens
attatgtttatgctt

SEQ ID NO: 1754467 - DNA, 15 bp, Homo sapiens
ttatgtttatgcttt

SEQ ID NO: 1754468 - DNA, 15 bp, Homo sapiens
tatgtttatgctttt

SEQ ID NO: 1754469 - DNA, 15 bp, Homo sapiens
atgtttatgcttttc

SEQ ID NO: 1754470 - DNA, 15 bp, Homo sapiens
tgtttatgcttttct

SEQ ID NO: 1754471 - DNA, 15 bp, Homo sapiens
gtttatgcttttctt

SEQ ID NO: 1754472 - DNA, 15 bp, Homo sapiens
tttatgcttttcttt

SEQ ID NO: 1754473 - DNA, 15 bp, Homo sapiens
ttatgcttttcttta

SEQ ID NO: 1754474 - DNA, 15 bp, Homo sapiens
tatgcttttctttac

SEQ ID NO: 1754475 - DNA, 15 bp, Homo sapiens
atgcttttctttacc

SEQ ID NO: 1754476 - DNA, 15 bp, Homo sapiens
tgcttttctttacct

SEQ ID NO: 1754477 - DNA, 15 bp, Homo sapiens
gcttttctttacctt

SEQ ID NO: 1754478 - DNA, 15 bp, Homo sapiens
cttttctttaccttc

SEQ ID NO: 1754479 - DNA, 15 bp, Homo sapiens
ttttctttaccttct

SEQ ID NO: 1754480 - DNA, 15 bp, Homo sapiens
tttctttaccttctt

SEQ ID NO: 1754481 - DNA, 15 bp, Homo sapiens
ttctttaccttcttg

SEQ ID NO: 1754482 - DNA, 15 bp, Homo sapiens
tctttaccttcttga

SEQ ID NO: 1754483 - DNA, 15 bp, Homo sapiens
ctttaccttcttgaa

SEQ ID NO: 1754484 - DNA, 15 bp, Homo sapiens
tttaccttcttgaac

SEQ ID NO: 1754485 - DNA, 15 bp, Homo sapiens
ttaccttcttgaaca

SEQ ID NO: 1754486 - DNA, 15 bp, Homo sapiens
taccttcttgaacat

SEQ ID NO: 1754487 - DNA, 15 bp, Homo sapiens
accttcttgaacata

SEQ ID NO: 1754488 - DNA, 15 bp, Homo sapiens
ccttcttgaacatat

SEQ ID NO: 1754489 - DNA, 15 bp, Homo sapiens
cttcttgaacatatg

SEQ ID NO: 1754490 - DNA, 15 bp, Homo sapiens
ttcttgaacatatgg

SEQ ID NO: 1754491 - DNA, 15 bp, Homo sapiens
tcttgaacatatggg

SEQ ID NO: 1754492 - DNA, 15 bp, Homo sapiens
cttgaacatatggga

SEQ ID NO: 1754493 - DNA, 15 bp, Homo sapiens
ttgaacatatgggat

SEQ ID NO: 1754494 - DNA, 15 bp, Homo sapiens
tgaacatatgggata

SEQ ID NO: 1754495 - DNA, 15 bp, Homo sapiens
gaacatatgggatat

SEQ ID NO: 1754496 - DNA, 15 bp, Homo sapiens
aacatatgggatata

SEQ ID NO: 1754497 - DNA, 15 bp, Homo sapiens
acatatgggatatag

SEQ ID NO: 1754498 - DNA, 15 bp, Homo sapiens
catatgggatatagg

SEQ ID NO: 1754499 - DNA, 15 bp, Homo sapiens
atatgggatataggt

SEQ ID NO: 1754500 - DNA, 15 bp, Homo sapiens
tatgggatataggta

SEQ ID NO: 1754501 - DNA, 15 bp, Homo sapiens
atgggatataggtat

SEQ ID NO: 1754502 - DNA, 15 bp, Homo sapiens
tgggatataggtatt

SEQ ID NO: 1754503 - DNA, 15 bp, Homo sapiens
gggatataggtatta

SEQ ID NO: 1754504 - DNA, 15 bp, Homo sapiens
ggatataggtattat

SEQ ID NO: 1754505 - DNA, 15 bp, Homo sapiens
gatataggtattata

SEQ ID NO: 1754506 - DNA, 15 bp, Homo sapiens
atataggtattataa

SEQ ID NO: 1754507 - DNA, 15 bp, Homo sapiens
tataggtattataac

SEQ ID NO: 1754508 - DNA, 15 bp, Homo sapiens
ataggtattataact

SEQ ID NO: 1754509 - DNA, 15 bp, Homo sapiens
taggtattataactt

SEQ ID NO: 1754510 - DNA, 15 bp, Homo sapiens
aggtattataacttt

SEQ ID NO: 1754511 - DNA, 15 bp, Homo sapiens
ggtattataactttt

SEQ ID NO: 1754512 - DNA, 15 bp, Homo sapiens
gtattataacttttt

SEQ ID NO: 1754513 - DNA, 15 bp, Homo sapiens
tattataacttttta

SEQ ID NO: 1754514 - DNA, 15 bp, Homo sapiens
attataactttttaa

SEQ ID NO: 1754515 - DNA, 15 bp, Homo sapiens
ttataactttttaaa

SEQ ID NO: 1754516 - DNA, 15 bp, Homo sapiens
tataactttttaaat

SEQ ID NO: 1754517 - DNA, 15 bp, Homo sapiens
ataactttttaaatg

SEQ ID NO: 1754518 - DNA, 15 bp, Homo sapiens
taactttttaaatgt

SEQ ID NO: 1754519 - DNA, 15 bp, Homo sapiens
aactttttaaatgtc

SEQ ID NO: 1754520 - DNA, 15 bp, Homo sapiens
actttttaaatgtcc

SEQ ID NO: 1754521 - DNA, 15 bp, Homo sapiens
ctttttaaatgtccc

SEQ ID NO: 1754522 - DNA, 15 bp, Homo sapiens
tttttaaatgtccct

SEQ ID NO: 1754523 - DNA, 15 bp, Homo sapiens
ttttaaatgtccctg

SEQ ID NO: 1754524 - DNA, 15 bp, Homo sapiens
tttaaatgtccctgt

SEQ ID NO: 1754525 - DNA, 15 bp, Homo sapiens
ttaaatgtccctgtt

SEQ ID NO: 1754526 - DNA, 15 bp, Homo sapiens
taaatgtccctgtta

SEQ ID NO: 1754527 - DNA, 15 bp, Homo sapiens
aaatgtccctgttac

SEQ ID NO: 1754528 - DNA, 15 bp, Homo sapiens
aatgtccctgttact

SEQ ID NO: 1754529 - DNA, 15 bp, Homo sapiens
atgtccctgttacta

SEQ ID NO: 1754530 - DNA, 15 bp, Homo sapiens
tgtccctgttactaa

SEQ ID NO: 1754531 - DNA, 15 bp, Homo sapiens
gtccctgttactaag

SEQ ID NO: 1754532 - DNA, 15 bp, Homo sapiens
tccctgttactaagt

SEQ ID NO: 1754533 - DNA, 15 bp, Homo sapiens
ccctgttactaagtc

SEQ ID NO: 1754534 - DNA, 15 bp, Homo sapiens
cctgttactaagtct

SEQ ID NO: 1754535 - DNA, 15 bp, Homo sapiens
ctgttactaagtcta

SEQ ID NO: 1754536 - DNA, 15 bp, Homo sapiens
tgttactaagtctag

SEQ ID NO: 1754537 - DNA, 15 bp, Homo sapiens
gttactaagtctagt

SEQ ID NO: 1754538 - DNA, 15 bp, Homo sapiens
ttactaagtctagta

SEQ ID NO: 1754539 - DNA, 15 bp, Homo sapiens
tactaagtctagtac

SEQ ID NO: 1754540 - DNA, 15 bp, Homo sapiens
actaagtctagtacc

SEQ ID NO: 1754541 - DNA, 15 bp, Homo sapiens
ctaagtctagtacct

SEQ ID NO: 1754542 - DNA, 15 bp, Homo sapiens
taagtctagtaccta

SEQ ID NO: 1754543 - DNA, 15 bp, Homo sapiens
aagtctagtacctat

SEQ ID NO: 1754544 - DNA, 15 bp, Homo sapiens
agtctagtacctatg

SEQ ID NO: 1754545 - DNA, 15 bp, Homo sapiens
gtctagtacctatgt

SEQ ID NO: 1754546 - DNA, 15 bp, Homo sapiens
tctagtacctatgtc

SEQ ID NO: 1754547 - DNA, 15 bp, Homo sapiens
ctagtacctatgtct

SEQ ID NO: 1754548 - DNA, 15 bp, Homo sapiens
tagtacctatgtctt

SEQ ID NO: 1754549 - DNA, 15 bp, Homo sapiens
agtacctatgtcttt

SEQ ID NO: 1754550 - DNA, 15 bp, Homo sapiens
gtacctatgtctttt

SEQ ID NO: 1754551 - DNA, 15 bp, Homo sapiens
tacctatgtcttttt

SEQ ID NO: 1754552 - DNA, 15 bp, Homo sapiens
acctatgtcttttta

SEQ ID NO: 1754553 - DNA, 15 bp, Homo sapiens
cctatgtctttttag

SEQ ID NO: 1754554 - DNA, 15 bp, Homo sapiens
ctatgtctttttagg

SEQ ID NO: 1754555 - DNA, 15 bp, Homo sapiens
tatgtctttttaggt

SEQ ID NO: 1754556 - DNA, 15 bp, Homo sapiens
atgtctttttaggtc

SEQ ID NO: 1754557 - DNA, 15 bp, Homo sapiens
tgtctttttaggtct

SEQ ID NO: 1754558 - DNA, 15 bp, Homo sapiens
gtctttttaggtctg

SEQ ID NO: 1754559 - DNA, 15 bp, Homo sapiens
tctttttaggtctgt

SEQ ID NO: 1754560 - DNA, 15 bp, Homo sapiens
ctttttaggtctgtt

SEQ ID NO: 1754561 - DNA, 15 bp, Homo sapiens
tttttaggtctgttt

SEQ ID NO: 1754562 - DNA, 15 bp, Homo sapiens
ttttaggtctgtttc

SEQ ID NO: 1754563 - DNA, 15 bp, Homo sapiens
tttaggtctgtttct

SEQ ID NO: 1754564 - DNA, 15 bp, Homo sapiens
ttaggtctgtttctc

SEQ ID NO: 1754565 - DNA, 15 bp, Homo sapiens
taggtctgtttctct

SEQ ID NO: 1754566 - DNA, 15 bp, Homo sapiens
aggtctgtttctctt

SEQ ID NO: 1754567 - DNA, 15 bp, Homo sapiens
ggtctgtttctcttg

SEQ ID NO: 1754568 - DNA, 15 bp, Homo sapiens
gtctgtttctcttga

SEQ ID NO: 1754569 - DNA, 15 bp, Homo sapiens
tctgtttctcttgac

SEQ ID NO: 1754570 - DNA, 15 bp, Homo sapiens
ctgtttctcttgact

SEQ ID NO: 1754571 - DNA, 15 bp, Homo sapiens
tgtttctcttgactg

SEQ ID NO: 1754572 - DNA, 15 bp, Homo sapiens
gtttctcttgactga

SEQ ID NO: 1754573 - DNA, 15 bp, Homo sapiens
tttctcttgactgat

SEQ ID NO: 1754574 - DNA, 15 bp, Homo sapiens
ttctcttgactgata

SEQ ID NO: 1754575 - DNA, 15 bp, Homo sapiens
tctcttgactgatag

SEQ ID NO: 1754576 - DNA, 15 bp, Homo sapiens
ctcttgactgatagt

SEQ ID NO: 1754577 - DNA, 15 bp, Homo sapiens
tcttgactgatagtt

SEQ ID NO: 1754578 - DNA, 15 bp, Homo sapiens
cttgactgatagttc

SEQ ID NO: 1754579 - DNA, 15 bp, Homo sapiens
ttgactgatagttct

SEQ ID NO: 1754580 - DNA, 15 bp, Homo sapiens
tgactgatagttctc

SEQ ID NO: 1754581 - DNA, 15 bp, Homo sapiens
gactgatagttctct

SEQ ID NO: 1754582 - DNA, 15 bp, Homo sapiens
actgatagttctctc

SEQ ID NO: 1754583 - DNA, 15 bp, Homo sapiens
ctgatagttctctct

SEQ ID NO: 1754584 - DNA, 15 bp, Homo sapiens
tgatagttctctctc

SEQ ID NO: 1754585 - DNA, 15 bp, Homo sapiens
gatagttctctctct

SEQ ID NO: 1754586 - DNA, 15 bp, Homo sapiens
atagttctctctctc

SEQ ID NO: 1754587 - DNA, 15 bp, Homo sapiens
tagttctctctctct

SEQ ID NO: 1754588 - DNA, 15 bp, Homo sapiens
agttctctctctctc

SEQ ID NO: 1754589 - DNA, 15 bp, Homo sapiens
gttctctctctctct

SEQ ID NO: 1754590 - DNA, 15 bp, Homo sapiens
tctctctttttttta

SEQ ID NO: 1754591 - DNA, 15 bp, Homo sapiens
ctctcttttttttaa

SEQ ID NO: 1754592 - DNA, 15 bp, Homo sapiens
tctcttttttttaag

SEQ ID NO: 1754593 - DNA, 15 bp, Homo sapiens
ctcttttttttaaga

SEQ ID NO: 1754594 - DNA, 15 bp, Homo sapiens
tcttttttttaagag

SEQ ID NO: 1754595 - DNA, 15 bp, Homo sapiens
cttttttttaagagt

SEQ ID NO: 1754596 - DNA, 15 bp, Homo sapiens
ttttttttaagagtc

SEQ ID NO: 1754597 - DNA, 15 bp, Homo sapiens
tttttttaagagtcg

SEQ ID NO: 1754598 - DNA, 15 bp, Homo sapiens
ttttttaagagtcgt

SEQ ID NO: 1754599 - DNA, 15 bp, Homo sapiens
tttttaagagtcgta

SEQ ID NO: 1754600 - DNA, 15 bp, Homo sapiens
ttttaagagtcgtat

SEQ ID NO: 1754601 - DNA, 15 bp, Homo sapiens
tttaagagtcgtatg

SEQ ID NO: 1754602 - DNA, 15 bp, Homo sapiens
ttaagagtcgtatgt

SEQ ID NO: 1754603 - DNA, 15 bp, Homo sapiens
taagagtcgtatgtt

SEQ ID NO: 1754604 - DNA, 15 bp, Homo sapiens
aagagtcgtatgttt

SEQ ID NO: 1754605 - DNA, 15 bp, Homo sapiens
agagtcgtatgtttc

SEQ ID NO: 1754606 - DNA, 15 bp, Homo sapiens
gagtcgtatgtttct

SEQ ID NO: 1754607 - DNA, 15 bp, Homo sapiens
agtcgtatgtttctg

SEQ ID NO: 1754608 - DNA, 15 bp, Homo sapiens
gtcgtatgtttctgc

SEQ ID NO: 1754609 - DNA, 15 bp, Homo sapiens
tcgtatgtttctgct

SEQ ID NO: 1754610 - DNA, 15 bp, Homo sapiens
cgtatgtttctgctt

SEQ ID NO: 1754611 - DNA, 15 bp, Homo sapiens
gtatgtttctgcttt

SEQ ID NO: 1754612 - DNA, 15 bp, Homo sapiens
tatgtttctgctttt

SEQ ID NO: 1754613 - DNA, 15 bp, Homo sapiens
atgtttctgcttttt

SEQ ID NO: 1754614 - DNA, 15 bp, Homo sapiens
tgtttctgctttttt

SEQ ID NO: 1754615 - DNA, 15 bp, Homo sapiens
gtttctgcttttttg

SEQ ID NO: 1754616 - DNA, 15 bp, Homo sapiens
tttctgcttttttga

SEQ ID NO: 1754617 - DNA, 15 bp, Homo sapiens
ttctgcttttttgac

SEQ ID NO: 1754618 - DNA, 15 bp, Homo sapiens
tctgcttttttgact

SEQ ID NO: 1754619 - DNA, 15 bp, Homo sapiens
ctgcttttttgactg

SEQ ID NO: 1754620 - DNA, 15 bp, Homo sapiens
tgcttttttgactgc

SEQ ID NO: 1754621 - DNA, 15 bp, Homo sapiens
gcttttttgactgct

SEQ ID NO: 1754622 - DNA, 15 bp, Homo sapiens
cttttttgactgctt

SEQ ID NO: 1754623 - DNA, 15 bp, Homo sapiens
ttttttgactgcttg

SEQ ID NO: 1754624 - DNA, 15 bp, Homo sapiens
tttttgactgcttgg

SEQ ID NO: 1754625 - DNA, 15 bp, Homo sapiens
ttttgactgcttggt

SEQ ID NO: 1754626 - DNA, 15 bp, Homo sapiens
tttgactgcttggtg

SEQ ID NO: 1754627 - DNA, 15 bp, Homo sapiens
ttgactgcttggtga

SEQ ID NO: 1754628 - DNA, 15 bp, Homo sapiens
tgactgcttggtgat

SEQ ID NO: 1754629 - DNA, 15 bp, Homo sapiens
gactgcttggtgatt

SEQ ID NO: 1754630 - DNA, 15 bp, Homo sapiens
actgcttggtgattt

SEQ ID NO: 1754631 - DNA, 15 bp, Homo sapiens
ctgcttggtgatttt

SEQ ID NO: 1754632 - DNA, 15 bp, Homo sapiens
tgcttggtgattttt

SEQ ID NO: 1754633 - DNA, 15 bp, Homo sapiens
gcttggtgatttttt

SEQ ID NO: 1754634 - DNA, 15 bp, Homo sapiens
cttggtgattttttt

SEQ ID NO: 1754635 - DNA, 15 bp, Homo sapiens
ttggtgatttttttg

SEQ ID NO: 1754636 - DNA, 15 bp, Homo sapiens
tggtgatttttttgt

SEQ ID NO: 1754637 - DNA, 15 bp, Homo sapiens
ggtgatttttttgtt

SEQ ID NO: 1754638 - DNA, 15 bp, Homo sapiens
gtgatttttttgtta

SEQ ID NO: 1754639 - DNA, 15 bp, Homo sapiens
tgatttttttgttag

SEQ ID NO: 1754640 - DNA, 15 bp, Homo sapiens
gatttttttgttagg

SEQ ID NO: 1754641 - DNA, 15 bp, Homo sapiens
atttttttgttaggt

SEQ ID NO: 1754642 - DNA, 15 bp, Homo sapiens
tttttttgttaggtg

SEQ ID NO: 1754643 - DNA, 15 bp, Homo sapiens
ttttttgttaggtgc

SEQ ID NO: 1754644 - DNA, 15 bp, Homo sapiens
tttttgttaggtgcc

SEQ ID NO: 1754645 - DNA, 15 bp, Homo sapiens
ttttgttaggtgcca

SEQ ID NO: 1754646 - DNA, 15 bp, Homo sapiens
tttgttaggtgccag

SEQ ID NO: 1754647 - DNA, 15 bp, Homo sapiens
ttgttaggtgccaga

SEQ ID NO: 1754648 - DNA, 15 bp, Homo sapiens
tgttaggtgccagat

SEQ ID NO: 1754649 - DNA, 15 bp, Homo sapiens
gttaggtgccagata

SEQ ID NO: 1754650 - DNA, 15 bp, Homo sapiens
ttaggtgccagatat

SEQ ID NO: 1754651 - DNA, 15 bp, Homo sapiens
taggtgccagatatc

SEQ ID NO: 1754652 - DNA, 15 bp, Homo sapiens
aggtgccagatatca

SEQ ID NO: 1754653 - DNA, 15 bp, Homo sapiens
ggtgccagatatcat

SEQ ID NO: 1754654 - DNA, 15 bp, Homo sapiens
gtgccagatatcatg

SEQ ID NO: 1754655 - DNA, 15 bp, Homo sapiens
tgccagatatcatga

SEQ ID NO: 1754656 - DNA, 15 bp, Homo sapiens
gccagatatcatgaa

SEQ ID NO: 1754657 - DNA, 15 bp, Homo sapiens
ccagatatcatgaat

SEQ ID NO: 1754658 - DNA, 15 bp, Homo sapiens
cagatatcatgaatt

SEQ ID NO: 1754659 - DNA, 15 bp, Homo sapiens
agatatcatgaattt

SEQ ID NO: 1754660 - DNA, 15 bp, Homo sapiens
gatatcatgaatttt

SEQ ID NO: 1754661 - DNA, 15 bp, Homo sapiens
atatcatgaattttg

SEQ ID NO: 1754662 - DNA, 15 bp, Homo sapiens
tatcatgaattttgc

SEQ ID NO: 1754663 - DNA, 15 bp, Homo sapiens
atcatgaattttgct

SEQ ID NO: 1754664 - DNA, 15 bp, Homo sapiens
tcatgaattttgctt

SEQ ID NO: 1754665 - DNA, 15 bp, Homo sapiens
catgaattttgcttt

SEQ ID NO: 1754666 - DNA, 15 bp, Homo sapiens
atgaattttgcttta

SEQ ID NO: 1754667 - DNA, 15 bp, Homo sapiens
tgaattttgctttag

SEQ ID NO: 1754668 - DNA, 15 bp, Homo sapiens
gaattttgctttagt

SEQ ID NO: 1754669 - DNA, 15 bp, Homo sapiens
aattttgctttagtg

SEQ ID NO: 1754670 - DNA, 15 bp, Homo sapiens
attttgctttagtgg

SEQ ID NO: 1754671 - DNA, 15 bp, Homo sapiens
ttttgctttagtggg

SEQ ID NO: 1754672 - DNA, 15 bp, Homo sapiens
tttgctttagtgggt

SEQ ID NO: 1754673 - DNA, 15 bp, Homo sapiens
ttgctttagtgggtc

SEQ ID NO: 1754674 - DNA, 15 bp, Homo sapiens
tgctttagtgggtcc

SEQ ID NO: 1754675 - DNA, 15 bp, Homo sapiens
gctttagtgggtcct

SEQ ID NO: 1754676 - DNA, 15 bp, Homo sapiens
ctttagtgggtcctg

SEQ ID NO: 1754677 - DNA, 15 bp, Homo sapiens
tttagtgggtcctgg

SEQ ID NO: 1754678 - DNA, 15 bp, Homo sapiens
ttagtgggtcctgga

SEQ ID NO: 1754679 - DNA, 15 bp, Homo sapiens
tagtgggtcctggat

SEQ ID NO: 1754680 - DNA, 15 bp, Homo sapiens
agtgggtcctggata

SEQ ID NO: 1754681 - DNA, 15 bp, Homo sapiens
gtgggtcctggatat

SEQ ID NO: 1754682 - DNA, 15 bp, Homo sapiens
tgggtcctggatatt

SEQ ID NO: 1754683 - DNA, 15 bp, Homo sapiens
gggtcctggatattt

SEQ ID NO: 1754684 - DNA, 15 bp, Homo sapiens
ggtcctggatatttt

SEQ ID NO: 1754685 - DNA, 15 bp, Homo sapiens
gtcctggatattttt

SEQ ID NO: 1754686 - DNA, 15 bp, Homo sapiens
tcctggatatttttg

SEQ ID NO: 1754687 - DNA, 15 bp, Homo sapiens
cctggatatttttgt

SEQ ID NO: 1754688 - DNA, 15 bp, Homo sapiens
ctggatatttttgta

SEQ ID NO: 1754689 - DNA, 15 bp, Homo sapiens
tggatatttttgtat

SEQ ID NO: 1754690 - DNA, 15 bp, Homo sapiens
ggatatttttgtatt

SEQ ID NO: 1754691 - DNA, 15 bp, Homo sapiens
gatatttttgtattc

SEQ ID NO: 1754692 - DNA, 15 bp, Homo sapiens
atatttttgtattcc

SEQ ID NO: 1754693 - DNA, 15 bp, Homo sapiens
tatttttgtattcct

SEQ ID NO: 1754694 - DNA, 15 bp, Homo sapiens
atttttgtattcctt

SEQ ID NO: 1754695 - DNA, 15 bp, Homo sapiens
tttttgtattccttt

SEQ ID NO: 1754696 - DNA, 15 bp, Homo sapiens
ttttgtattcctttc

SEQ ID NO: 1754697 - DNA, 15 bp, Homo sapiens
tttgtattcctttca

SEQ ID NO: 1754698 - DNA, 15 bp, Homo sapiens
ttgtattcctttcac

SEQ ID NO: 1754699 - DNA, 15 bp, Homo sapiens
tgtattcctttcact

SEQ ID NO: 1754700 - DNA, 15 bp, Homo sapiens
gtattcctttcacta

SEQ ID NO: 1754701 - DNA, 15 bp, Homo sapiens
tattcctttcactat

SEQ ID NO: 1754702 - DNA, 15 bp, Homo sapiens
attcctttcactatt

SEQ ID NO: 1754703 - DNA, 15 bp, Homo sapiens
ttcctttcactattt

SEQ ID NO: 1754704 - DNA, 15 bp, Homo sapiens
tcctttcactatttt

SEQ ID NO: 1754705 - DNA, 15 bp, Homo sapiens
cctttcactattttg

SEQ ID NO: 1754706 - DNA, 15 bp, Homo sapiens
ctttcactattttga

SEQ ID NO: 1754707 - DNA, 15 bp, Homo sapiens
tttcactattttgac

SEQ ID NO: 1754708 - DNA, 15 bp, Homo sapiens
ttcactattttgacc

SEQ ID NO: 1754709 - DNA, 15 bp, Homo sapiens
tcactattttgacct

SEQ ID NO: 1754710 - DNA, 15 bp, Homo sapiens
cactattttgacctg

SEQ ID NO: 1754711 - DNA, 15 bp, Homo sapiens
actattttgacctgt

SEQ ID NO: 1754712 - DNA, 15 bp, Homo sapiens
ctattttgacctgtg

SEQ ID NO: 1754713 - DNA, 15 bp, Homo sapiens
tattttgacctgtgt

SEQ ID NO: 1754714 - DNA, 15 bp, Homo sapiens
attttgacctgtgtt

SEQ ID NO: 1754715 - DNA, 15 bp, Homo sapiens
ttttgacctgtgttt

SEQ ID NO: 1754716 - DNA, 15 bp, Homo sapiens
tttgacctgtgtttt

SEQ ID NO: 1754717 - DNA, 15 bp, Homo sapiens
ttgacctgtgttttg

SEQ ID NO: 1754718 - DNA, 15 bp, Homo sapiens
tgacctgtgttttgg

SEQ ID NO: 1754719 - DNA, 15 bp, Homo sapiens
gacctgtgttttgga

SEQ ID NO: 1754720 - DNA, 15 bp, Homo sapiens
acctgtgttttggaa

SEQ ID NO: 1754721 - DNA, 15 bp, Homo sapiens
cctgtgttttggaac

SEQ ID NO: 1754722 - DNA, 15 bp, Homo sapiens
ctgtgttttggaaca

SEQ ID NO: 1754723 - DNA, 15 bp, Homo sapiens
tgtgttttggaacac

SEQ ID NO: 1754724 - DNA, 15 bp, Homo sapiens
gtgttttggaacaca

SEQ ID NO: 1754725 - DNA, 15 bp, Homo sapiens
tgttttggaacacaa

SEQ ID NO: 1754726 - DNA, 15 bp, Homo sapiens
gttttggaacacaat

SEQ ID NO: 1754727 - DNA, 15 bp, Homo sapiens
ttttggaacacaatt

SEQ ID NO: 1754728 - DNA, 15 bp, Homo sapiens
tttggaacacaatta

SEQ ID NO: 1754729 - DNA, 15 bp, Homo sapiens
ttggaacacaattaa

SEQ ID NO: 1754730 - DNA, 15 bp, Homo sapiens
tggaacacaattaaa

SEQ ID NO: 1754731 - DNA, 15 bp, Homo sapiens
ggaacacaattaaat

SEQ ID NO: 1754732 - DNA, 15 bp, Homo sapiens
gaacacaattaaatt

SEQ ID NO: 1754733 - DNA, 15 bp, Homo sapiens
aacacaattaaatta

SEQ ID NO: 1754734 - DNA, 15 bp, Homo sapiens
acacaattaaattat

SEQ ID NO: 1754735 - DNA, 15 bp, Homo sapiens
cacaattaaattatc

SEQ ID NO: 1754736 - DNA, 15 bp, Homo sapiens
caattaaattatctg

SEQ ID NO: 1754737 - DNA, 15 bp, Homo sapiens
aattaaattatctgg

SEQ ID NO: 1754738 - DNA, 15 bp, Homo sapiens
attaaattatctgga

SEQ ID NO: 1754739 - DNA, 15 bp, Homo sapiens
ttaaattatctggaa

SEQ ID NO: 1754740 - DNA, 15 bp, Homo sapiens
taaattatctggaaa

SEQ ID NO: 1754741 - DNA, 15 bp, Homo sapiens
aaattatctggaaat

SEQ ID NO: 1754742 - DNA, 15 bp, Homo sapiens
aattatctggaaata

SEQ ID NO: 1754743 - DNA, 15 bp, Homo sapiens
attatctggaaataa

SEQ ID NO: 1754744 - DNA, 15 bp, Homo sapiens
ttatctggaaataat

SEQ ID NO: 1754745 - DNA, 15 bp, Homo sapiens
tatctggaaataatt

SEQ ID NO: 1754746 - DNA, 15 bp, Homo sapiens
atctggaaataattt

SEQ ID NO: 1754747 - DNA, 15 bp, Homo sapiens
tctggaaataatttg

SEQ ID NO: 1754748 - DNA, 15 bp, Homo sapiens
ctggaaataatttga

SEQ ID NO: 1754749 - DNA, 15 bp, Homo sapiens
tggaaataatttgac

SEQ ID NO: 1754750 - DNA, 15 bp, Homo sapiens
ggaaataatttgact

SEQ ID NO: 1754751 - DNA, 15 bp, Homo sapiens
gaaataatttgactt

SEQ ID NO: 1754752 - DNA, 15 bp, Homo sapiens
aaataatttgacttt

SEQ ID NO: 1754753 - DNA, 15 bp, Homo sapiens
aataatttgactttt

SEQ ID NO: 1754754 - DNA, 15 bp, Homo sapiens
ataatttgacttttt

SEQ ID NO: 1754755 - DNA, 15 bp, Homo sapiens
taatttgactttttt

SEQ ID NO: 1754756 - DNA, 15 bp, Homo sapiens
aatttgactttttta

SEQ ID NO: 1754757 - DNA, 15 bp, Homo sapiens
atttgacttttttaa

SEQ ID NO: 1754758 - DNA, 15 bp, Homo sapiens
tttgacttttttaag

SEQ ID NO: 1754759 - DNA, 15 bp, Homo sapiens
ttgacttttttaagg

SEQ ID NO: 1754760 - DNA, 15 bp, Homo sapiens
tgacttttttaaggc

SEQ ID NO: 1754761 - DNA, 15 bp, Homo sapiens
gacttttttaaggct

SEQ ID NO: 1754762 - DNA, 15 bp, Homo sapiens
acttttttaaggctt

SEQ ID NO: 1754763 - DNA, 15 bp, Homo sapiens
cttttttaaggcttc

SEQ ID NO: 1754764 - DNA, 15 bp, Homo sapiens
ttttttaaggcttca

SEQ ID NO: 1754765 - DNA, 15 bp, Homo sapiens
tttttaaggcttcat

SEQ ID NO: 1754766 - DNA, 15 bp, Homo sapiens
ttttaaggcttcatt

SEQ ID NO: 1754767 - DNA, 15 bp, Homo sapiens
tttaaggcttcattt

SEQ ID NO: 1754768 - DNA, 15 bp, Homo sapiens
ttaaggcttcattta

SEQ ID NO: 1754769 - DNA, 15 bp, Homo sapiens
taaggcttcatttat

SEQ ID NO: 1754770 - DNA, 15 bp, Homo sapiens
aaggcttcatttatt

SEQ ID NO: 1754771 - DNA, 15 bp, Homo sapiens
aggcttcatttattt

SEQ ID NO: 1754772 - DNA, 15 bp, Homo sapiens
ggcttcatttattta

SEQ ID NO: 1754773 - DNA, 15 bp, Homo sapiens
gcttcatttatttat

SEQ ID NO: 1754774 - DNA, 15 bp, Homo sapiens
cttcatttatttatt

SEQ ID NO: 1754775 - DNA, 15 bp, Homo sapiens
ttcatttatttattt

SEQ ID NO: 1754776 - DNA, 15 bp, Homo sapiens
tcatttatttattta

SEQ ID NO: 1754777 - DNA, 15 bp, Homo sapiens
catttatttatttat

SEQ ID NO: 1754778 - DNA, 15 bp, Homo sapiens
atttatttatttatc

SEQ ID NO: 1754779 - DNA, 15 bp, Homo sapiens
tttatttatttatct

SEQ ID NO: 1754780 - DNA, 15 bp, Homo sapiens
atttatttatctggt

SEQ ID NO: 1754781 - DNA, 15 bp, Homo sapiens
tttatttatctggtt

SEQ ID NO: 1754782 - DNA, 15 bp, Homo sapiens
ttatttatctggttt

SEQ ID NO: 1754783 - DNA, 15 bp, Homo sapiens
tatttatctggtttt

SEQ ID NO: 1754784 - DNA, 15 bp, Homo sapiens
atttatctggttttt

SEQ ID NO: 1754785 - DNA, 15 bp, Homo sapiens
tttatctggtttttg

SEQ ID NO: 1754786 - DNA, 15 bp, Homo sapiens
ttatctggtttttgt

SEQ ID NO: 1754787 - DNA, 15 bp, Homo sapiens
tatctggtttttgtt

SEQ ID NO: 1754788 - DNA, 15 bp, Homo sapiens
atctggtttttgttt

SEQ ID NO: 1754789 - DNA, 15 bp, Homo sapiens
tctggtttttgtttt

SEQ ID NO: 1754790 - DNA, 15 bp, Homo sapiens
ctggtttttgttttt

SEQ ID NO: 1754791 - DNA, 15 bp, Homo sapiens
ggtttttgtttttgg

SEQ ID NO: 1754792 - DNA, 15 bp, Homo sapiens
gtttttgtttttgga

SEQ ID NO: 1754793 - DNA, 15 bp, Homo sapiens
tttttgtttttggac

SEQ ID NO: 1754794 - DNA, 15 bp, Homo sapiens
ttttgtttttggaca

SEQ ID NO: 1754795 - DNA, 15 bp, Homo sapiens
tttgtttttggacac

SEQ ID NO: 1754796 - DNA, 15 bp, Homo sapiens
ttgtttttggacaca

SEQ ID NO: 1754797 - DNA, 15 bp, Homo sapiens
tgtttttggacacag

SEQ ID NO: 1754798 - DNA, 15 bp, Homo sapiens
gtttttggacacaga

SEQ ID NO: 1754799 - DNA, 15 bp, Homo sapiens
tttttggacacagag

SEQ ID NO: 1754800 - DNA, 15 bp, Homo sapiens
ttttggacacagagc

SEQ ID NO: 1754801 - DNA, 15 bp, Homo sapiens
tttggacacagagca

SEQ ID NO: 1754802 - DNA, 15 bp, Homo sapiens
ttggacacagagcag

SEQ ID NO: 1754803 - DNA, 15 bp, Homo sapiens
tggacacagagcagt

SEQ ID NO: 1754804 - DNA, 15 bp, Homo sapiens
ggacacagagcagtc

SEQ ID NO: 1754805 - DNA, 15 bp, Homo sapiens
gacacagagcagtct

SEQ ID NO: 1754806 - DNA, 15 bp, Homo sapiens
acacagagcagtctt

SEQ ID NO: 1754807 - DNA, 15 bp, Homo sapiens
cacagagcagtcttt

SEQ ID NO: 1754808 - DNA, 15 bp, Homo sapiens
acagagcagtcttta

SEQ ID NO: 1754809 - DNA, 15 bp, Homo sapiens
cagagcagtctttaa

SEQ ID NO: 1754810 - DNA, 15 bp, Homo sapiens
agagcagtctttaat

SEQ ID NO: 1754811 - DNA, 15 bp, Homo sapiens
gagcagtctttaatc

SEQ ID NO: 1754812 - DNA, 15 bp, Homo sapiens
agcagtctttaatca

SEQ ID NO: 1754813 - DNA, 15 bp, Homo sapiens
gcagtctttaatcaa

SEQ ID NO: 1754814 - DNA, 15 bp, Homo sapiens
cagtctttaatcaat

SEQ ID NO: 1754815 - DNA, 15 bp, Homo sapiens
agtctttaatcaata

SEQ ID NO: 1754816 - DNA, 15 bp, Homo sapiens
gtctttaatcaatag

SEQ ID NO: 1754817 - DNA, 15 bp, Homo sapiens
tctttaatcaatagc

SEQ ID NO: 1754818 - DNA, 15 bp, Homo sapiens
ctttaatcaatagcc

SEQ ID NO: 1754819 - DNA, 15 bp, Homo sapiens
tttaatcaatagccg

SEQ ID NO: 1754820 - DNA, 15 bp, Homo sapiens
ttaatcaatagccga

SEQ ID NO: 1754821 - DNA, 15 bp, Homo sapiens
taatcaatagccgat

SEQ ID NO: 1754822 - DNA, 15 bp, Homo sapiens
aatcaatagccgatt

SEQ ID NO: 1754823 - DNA, 15 bp, Homo sapiens
atcaatagccgattt

SEQ ID NO: 1754824 - DNA, 15 bp, Homo sapiens
tcaatagccgatttt

SEQ ID NO: 1754825 - DNA, 15 bp, Homo sapiens
caatagccgattttc

SEQ ID NO: 1754826 - DNA, 15 bp, Homo sapiens
aatagccgattttcc

SEQ ID NO: 1754827 - DNA, 15 bp, Homo sapiens
atagccgattttcct

SEQ ID NO: 1754828 - DNA, 15 bp, Homo sapiens
tagccgattttcctt

SEQ ID NO: 1754829 - DNA, 15 bp, Homo sapiens
agccgattttccttc

SEQ ID NO: 1754830 - DNA, 15 bp, Homo sapiens
gccgattttccttca

SEQ ID NO: 1754831 - DNA, 15 bp, Homo sapiens
ccgattttccttcac

SEQ ID NO: 1754832 - DNA, 15 bp, Homo sapiens
cgattttccttcact

SEQ ID NO: 1754833 - DNA, 15 bp, Homo sapiens
gattttccttcacta

SEQ ID NO: 1754834 - DNA, 15 bp, Homo sapiens
attttccttcactat

SEQ ID NO: 1754835 - DNA, 15 bp, Homo sapiens
ttttccttcactatc

SEQ ID NO: 1754836 - DNA, 15 bp, Homo sapiens
tttccttcactatcc

SEQ ID NO: 1754837 - DNA, 15 bp, Homo sapiens
ttccttcactatcca

SEQ ID NO: 1754838 - DNA, 15 bp, Homo sapiens
tccttcactatccag

SEQ ID NO: 1754839 - DNA, 15 bp, Homo sapiens
ccttcactatccagg

SEQ ID NO: 1754840 - DNA, 15 bp, Homo sapiens
cttcactatccaggc

SEQ ID NO: 1754841 - DNA, 15 bp, Homo sapiens
ttcactatccaggca

SEQ ID NO: 1754842 - DNA, 15 bp, Homo sapiens
tcactatccaggcat

SEQ ID NO: 1754843 - DNA, 15 bp, Homo sapiens
cactatccaggcatt

SEQ ID NO: 1754844 - DNA, 15 bp, Homo sapiens
actatccaggcattg

SEQ ID NO: 1754845 - DNA, 15 bp, Homo sapiens
ctatccaggcattgc

SEQ ID NO: 1754846 - DNA, 15 bp, Homo sapiens
tatccaggcattgct

SEQ ID NO: 1754847 - DNA, 15 bp, Homo sapiens
atccaggcattgctc

SEQ ID NO: 1754848 - DNA, 15 bp, Homo sapiens
tccaggcattgctct

SEQ ID NO: 1754849 - DNA, 15 bp, Homo sapiens
ccaggcattgctctt

SEQ ID NO: 1754850 - DNA, 15 bp, Homo sapiens
caggcattgctcttc

SEQ ID NO: 1754851 - DNA, 15 bp, Homo sapiens
aggcattgctcttct

SEQ ID NO: 1754852 - DNA, 15 bp, Homo sapiens
ggcattgctcttctg

SEQ ID NO: 1754853 - DNA, 15 bp, Homo sapiens
gcattgctcttctga

SEQ ID NO: 1754854 - DNA, 15 bp, Homo sapiens
cattgctcttctgag

SEQ ID NO: 1754855 - DNA, 15 bp, Homo sapiens
attgctcttctgagt

SEQ ID NO: 1754856 - DNA, 15 bp, Homo sapiens
ttgctcttctgagta

SEQ ID NO: 1754857 - DNA, 15 bp, Homo sapiens
tgctcttctgagtac

SEQ ID NO: 1754858 - DNA, 15 bp, Homo sapiens
gctcttctgagtact

SEQ ID NO: 1754859 - DNA, 15 bp, Homo sapiens
ctcttctgagtactc

SEQ ID NO: 1754860 - DNA, 15 bp, Homo sapiens
tcttctgagtactct

SEQ ID NO: 1754861 - DNA, 15 bp, Homo sapiens
cttctgagtactcta

SEQ ID NO: 1754862 - DNA, 15 bp, Homo sapiens
ttctgagtactctac

SEQ ID NO: 1754863 - DNA, 15 bp, Homo sapiens
tctgagtactctact

SEQ ID NO: 1754864 - DNA, 15 bp, Homo sapiens
ctgagtactctactg

SEQ ID NO: 1754865 - DNA, 15 bp, Homo sapiens
tgagtactctactga

SEQ ID NO: 1754866 - DNA, 15 bp, Homo sapiens
gagtactctactgaa

SEQ ID NO: 1754867 - DNA, 15 bp, Homo sapiens
agtactctactgaat

SEQ ID NO: 1754868 - DNA, 15 bp, Homo sapiens
gtactctactgaata

SEQ ID NO: 1754869 - DNA, 15 bp, Homo sapiens
tactctactgaatat

SEQ ID NO: 1754870 - DNA, 15 bp, Homo sapiens
actctactgaatatc

SEQ ID NO: 1754871 - DNA, 15 bp, Homo sapiens
ctctactgaatatcc

SEQ ID NO: 1754872 - DNA, 15 bp, Homo sapiens
tctactgaatatccc

SEQ ID NO: 1754873 - DNA, 15 bp, Homo sapiens
ctactgaatatccca

SEQ ID NO: 1754874 - DNA, 15 bp, Homo sapiens
tactgaatatcccat

SEQ ID NO: 1754875 - DNA, 15 bp, Homo sapiens
actgaatatcccata

SEQ ID NO: 1754876 - DNA, 15 bp, Homo sapiens
ctgaatatcccatat

SEQ ID NO: 1754877 - DNA, 15 bp, Homo sapiens
tgaatatcccatata

SEQ ID NO: 1754878 - DNA, 15 bp, Homo sapiens
gaatatcccatatat

SEQ ID NO: 1754879 - DNA, 15 bp, Homo sapiens
aatatcccatatatg

SEQ ID NO: 1754880 - DNA, 15 bp, Homo sapiens
atatcccatatatga

SEQ ID NO: 1754881 - DNA, 15 bp, Homo sapiens
tatcccatatatgac

SEQ ID NO: 1754882 - DNA, 15 bp, Homo sapiens
atcccatatatgaca

SEQ ID NO: 1754883 - DNA, 15 bp, Homo sapiens
tcccatatatgacaa

SEQ ID NO: 1754884 - DNA, 15 bp, Homo sapiens
cccatatatgacaag

SEQ ID NO: 1754885 - DNA, 15 bp, Homo sapiens
ccatatatgacaagg

SEQ ID NO: 1754886 - DNA, 15 bp, Homo sapiens
catatatgacaaggt

SEQ ID NO: 1754887 - DNA, 15 bp, Homo sapiens
atatatgacaaggtt

SEQ ID NO: 1754888 - DNA, 15 bp, Homo sapiens
tatatgacaaggttt

SEQ ID NO: 1754889 - DNA, 15 bp, Homo sapiens
atatgacaaggtttt

SEQ ID NO: 1754890 - DNA, 15 bp, Homo sapiens
tatgacaaggttttt

SEQ ID NO: 1754891 - DNA, 15 bp, Homo sapiens
atgacaaggtttttc

SEQ ID NO: 1754892 - DNA, 15 bp, Homo sapiens
tgacaaggtttttcc

SEQ ID NO: 1754893 - DNA, 15 bp, Homo sapiens
gacaaggtttttcca

SEQ ID NO: 1754894 - DNA, 15 bp, Homo sapiens
acaaggtttttccac

SEQ ID NO: 1754895 - DNA, 15 bp, Homo sapiens
caaggtttttccact

SEQ ID NO: 1754896 - DNA, 15 bp, Homo sapiens
aaggtttttccactc

SEQ ID NO: 1754897 - DNA, 15 bp, Homo sapiens
aggtttttccactct

SEQ ID NO: 1754898 - DNA, 15 bp, Homo sapiens
ggtttttccactctg

SEQ ID NO: 1754899 - DNA, 15 bp, Homo sapiens
gtttttccactctgg

SEQ ID NO: 1754900 - DNA, 15 bp, Homo sapiens
tttttccactctggc

SEQ ID NO: 1754901 - DNA, 15 bp, Homo sapiens
ttttccactctggct

SEQ ID NO: 1754902 - DNA, 15 bp, Homo sapiens
tttccactctggcta

SEQ ID NO: 1754903 - DNA, 15 bp, Homo sapiens
ttccactctggctag

SEQ ID NO: 1754904 - DNA, 15 bp, Homo sapiens
tccactctggctagt

SEQ ID NO: 1754905 - DNA, 15 bp, Homo sapiens
ccactctggctagtt

SEQ ID NO: 1754906 - DNA, 15 bp, Homo sapiens
cactctggctagttg

SEQ ID NO: 1754907 - DNA, 15 bp, Homo sapiens
actctggctagttga

SEQ ID NO: 1754908 - DNA, 15 bp, Homo sapiens
ctctggctagttgaa

SEQ ID NO: 1754909 - DNA, 15 bp, Homo sapiens
tctggctagttgaaa

SEQ ID NO: 1754910 - DNA, 15 bp, Homo sapiens
ctggctagttgaaag

SEQ ID NO: 1754911 - DNA, 15 bp, Homo sapiens
tggctagttgaaagc

SEQ ID NO: 1754912 - DNA, 15 bp, Homo sapiens
ggctagttgaaagca

SEQ ID NO: 1754913 - DNA, 15 bp, Homo sapiens
gctagttgaaagcag

SEQ ID NO: 1754914 - DNA, 15 bp, Homo sapiens
ctagttgaaagcaga

SEQ ID NO: 1754915 - DNA, 15 bp, Homo sapiens
tagttgaaagcagaa

SEQ ID NO: 1754916 - DNA, 15 bp, Homo sapiens
agttgaaagcagaac

SEQ ID NO: 1754917 - DNA, 15 bp, Homo sapiens
gttgaaagcagaact

SEQ ID NO: 1754918 - DNA, 15 bp, Homo sapiens
ttgaaagcagaactc

SEQ ID NO: 1754919 - DNA, 15 bp, Homo sapiens
tgaaagcagaactct

SEQ ID NO: 1754920 - DNA, 15 bp, Homo sapiens
gaaagcagaactctt

SEQ ID NO: 1754921 - DNA, 15 bp, Homo sapiens
aaagcagaactcttc

SEQ ID NO: 1754922 - DNA, 15 bp, Homo sapiens
aagcagaactcttcc

SEQ ID NO: 1754923 - DNA, 15 bp, Homo sapiens
agcagaactcttcct

SEQ ID NO: 1754924 - DNA, 15 bp, Homo sapiens
gcagaactcttcctg

SEQ ID NO: 1754925 - DNA, 15 bp, Homo sapiens
cagaactcttcctga

SEQ ID NO: 1754926 - DNA, 15 bp, Homo sapiens
agaactcttcctgac

SEQ ID NO: 1754927 - DNA, 15 bp, Homo sapiens
gaactcttcctgacc

SEQ ID NO: 1754928 - DNA, 15 bp, Homo sapiens
aactcttcctgaccc

SEQ ID NO: 1754929 - DNA, 15 bp, Homo sapiens
actcttcctgaccct

SEQ ID NO: 1754930 - DNA, 15 bp, Homo sapiens
ctcttcctgaccctg

SEQ ID NO: 1754931 - DNA, 15 bp, Homo sapiens
tcttcctgaccctgt

SEQ ID NO: 1754932 - DNA, 15 bp, Homo sapiens
cttcctgaccctgtg

SEQ ID NO: 1754933 - DNA, 15 bp, Homo sapiens
ttcctgaccctgtgt

SEQ ID NO: 1754934 - DNA, 15 bp, Homo sapiens
tcctgaccctgtgtc

SEQ ID NO: 1754935 - DNA, 15 bp, Homo sapiens
cctgaccctgtgtca

SEQ ID NO: 1754936 - DNA, 15 bp, Homo sapiens
ctgaccctgtgtcag

SEQ ID NO: 1754937 - DNA, 15 bp, Homo sapiens
tgaccctgtgtcagc

SEQ ID NO: 1754938 - DNA, 15 bp, Homo sapiens
gaccctgtgtcagct

SEQ ID NO: 1754939 - DNA, 15 bp, Homo sapiens
accctgtgtcagctc

SEQ ID NO: 1754940 - DNA, 15 bp, Homo sapiens
ccctgtgtcagctcc

SEQ ID NO: 1754941 - DNA, 15 bp, Homo sapiens
cctgtgtcagctcct

SEQ ID NO: 1754942 - DNA, 15 bp, Homo sapiens
ctgtgtcagctcctg

SEQ ID NO: 1754943 - DNA, 15 bp, Homo sapiens
tgtgtcagctcctgg

SEQ ID NO: 1754944 - DNA, 15 bp, Homo sapiens
gtgtcagctcctgga

SEQ ID NO: 1754945 - DNA, 15 bp, Homo sapiens
tgtcagctcctggaa

SEQ ID NO: 1754946 - DNA, 15 bp, Homo sapiens
gtcagctcctggaag

SEQ ID NO: 1754947 - DNA, 15 bp, Homo sapiens
tcagctcctggaagg

SEQ ID NO: 1754948 - DNA, 15 bp, Homo sapiens
cagctcctggaagga

SEQ ID NO: 1754949 - DNA, 15 bp, Homo sapiens
agctcctggaaggat

SEQ ID NO: 1754950 - DNA, 15 bp, Homo sapiens
gctcctggaaggatt

SEQ ID NO: 1754951 - DNA, 15 bp, Homo sapiens
ctcctggaaggattc

SEQ ID NO: 1754952 - DNA, 15 bp, Homo sapiens
tcctggaaggattct

SEQ ID NO: 1754953 - DNA, 15 bp, Homo sapiens
cctggaaggattcta

SEQ ID NO: 1754954 - DNA, 15 bp, Homo sapiens
ctggaaggattctac

SEQ ID NO: 1754955 - DNA, 15 bp, Homo sapiens
tggaaggattctact

SEQ ID NO: 1754956 - DNA, 15 bp, Homo sapiens
ggaaggattctactc

SEQ ID NO: 1754957 - DNA, 15 bp, Homo sapiens
gaaggattctactcc

SEQ ID NO: 1754958 - DNA, 15 bp, Homo sapiens
aaggattctactcct

SEQ ID NO: 1754959 - DNA, 15 bp, Homo sapiens
aggattctactcctt

SEQ ID NO: 1754960 - DNA, 15 bp, Homo sapiens
ggattctactccttc

SEQ ID NO: 1754961 - DNA, 15 bp, Homo sapiens
gattctactccttcc

SEQ ID NO: 1754962 - DNA, 15 bp, Homo sapiens
attctactccttccc

SEQ ID NO: 1754963 - DNA, 15 bp, Homo sapiens
ttctactccttccca

SEQ ID NO: 1754964 - DNA, 15 bp, Homo sapiens
tctactccttcccat

SEQ ID NO: 1754965 - DNA, 15 bp, Homo sapiens
ctactccttcccatg

SEQ ID NO: 1754966 - DNA, 15 bp, Homo sapiens
tactccttcccatgg

SEQ ID NO: 1754967 - DNA, 15 bp, Homo sapiens
actccttcccatggt

SEQ ID NO: 1754968 - DNA, 15 bp, Homo sapiens
ctccttcccatggtt

SEQ ID NO: 1754969 - DNA, 15 bp, Homo sapiens
tccttcccatggttc

SEQ ID NO: 1754970 - DNA, 15 bp, Homo sapiens
ccttcccatggttct

SEQ ID NO: 1754971 - DNA, 15 bp, Homo sapiens
cttcccatggttctt

SEQ ID NO: 1754972 - DNA, 15 bp, Homo sapiens
ttcccatggttcttc

SEQ ID NO: 1754973 - DNA, 15 bp, Homo sapiens
tcccatggttcttcc

SEQ ID NO: 1754974 - DNA, 15 bp, Homo sapiens
cccatggttcttccc

SEQ ID NO: 1754975 - DNA, 15 bp, Homo sapiens
ccatggttcttccct

SEQ ID NO: 1754976 - DNA, 15 bp, Homo sapiens
catggttcttccctg

SEQ ID NO: 1754977 - DNA, 15 bp, Homo sapiens
atggttcttccctgg

SEQ ID NO: 1754978 - DNA, 15 bp, Homo sapiens
tggttcttccctggt

SEQ ID NO: 1754979 - DNA, 15 bp, Homo sapiens
ggttcttccctggtt

SEQ ID NO: 1754980 - DNA, 15 bp, Homo sapiens
gttcttccctggttt

SEQ ID NO: 1754981 - DNA, 15 bp, Homo sapiens
ttcttccctggtttt

SEQ ID NO: 1754982 - DNA, 15 bp, Homo sapiens
tcttccctggttttg

SEQ ID NO: 1754983 - DNA, 15 bp, Homo sapiens
cttccctggttttga

SEQ ID NO: 1754984 - DNA, 15 bp, Homo sapiens
ttccctggttttgag

SEQ ID NO: 1754985 - DNA, 15 bp, Homo sapiens
tccctggttttgagt

SEQ ID NO: 1754986 - DNA, 15 bp, Homo sapiens
ccctggttttgagta

SEQ ID NO: 1754987 - DNA, 15 bp, Homo sapiens
cctggttttgagtag

SEQ ID NO: 1754988 - DNA, 15 bp, Homo sapiens
ctggttttgagtagt

SEQ ID NO: 1754989 - DNA, 15 bp, Homo sapiens
tggttttgagtagta

SEQ ID NO: 1754990 - DNA, 15 bp, Homo sapiens
ggttttgagtagtat

SEQ ID NO: 1754991 - DNA, 15 bp, Homo sapiens
gttttgagtagtatc

SEQ ID NO: 1754992 - DNA, 15 bp, Homo sapiens
ttttgagtagtatca

SEQ ID NO: 1754993 - DNA, 15 bp, Homo sapiens
tttgagtagtatcat

SEQ ID NO: 1754994 - DNA, 15 bp, Homo sapiens
ttgagtagtatcatc

SEQ ID NO: 1754995 - DNA, 15 bp, Homo sapiens
tgagtagtatcatca

SEQ ID NO: 1754996 - DNA, 15 bp, Homo sapiens
gagtagtatcatcac

SEQ ID NO: 1754997 - DNA, 15 bp, Homo sapiens
agtagtatcatcaca

SEQ ID NO: 1754998 - DNA, 15 bp, Homo sapiens
gtagtatcatcacat

SEQ ID NO: 1754999 - DNA, 15 bp, Homo sapiens
tagtatcatcacatc

SEQ ID NO: 1755000 - DNA, 15 bp, Homo sapiens
agtatcatcacatcc

SEQ ID NO: 1755001 - DNA, 15 bp, Homo sapiens
gtatcatcacatcca

SEQ ID NO: 1755002 - DNA, 15 bp, Homo sapiens
tatcatcacatccat

SEQ ID NO: 1755003 - DNA, 15 bp, Homo sapiens
atcatcacatccatg

SEQ ID NO: 1755004 - DNA, 15 bp, Homo sapiens
tcatcacatccatgc

SEQ ID NO: 1755005 - DNA, 15 bp, Homo sapiens
catcacatccatgca

SEQ ID NO: 1755006 - DNA, 15 bp, Homo sapiens
atcacatccatgcac

SEQ ID NO: 1755007 - DNA, 15 bp, Homo sapiens
cacatccatgcactg

SEQ ID NO: 1755008 - DNA, 15 bp, Homo sapiens
acatccatgcactga

SEQ ID NO: 1755009 - DNA, 15 bp, Homo sapiens
catccatgcactgat

SEQ ID NO: 1755010 - DNA, 15 bp, Homo sapiens
atccatgcactgatc

SEQ ID NO: 1755011 - DNA, 15 bp, Homo sapiens
tccatgcactgatca

SEQ ID NO: 1755012 - DNA, 15 bp, Homo sapiens
ccatgcactgatcag

SEQ ID NO: 1755013 - DNA, 15 bp, Homo sapiens
catgcactgatcagt

SEQ ID NO: 1755014 - DNA, 15 bp, Homo sapiens
atgcactgatcagta

SEQ ID NO: 1755015 - DNA, 15 bp, Homo sapiens
tgcactgatcagtac

SEQ ID NO: 1755016 - DNA, 15 bp, Homo sapiens
gcactgatcagtact

SEQ ID NO: 1755017 - DNA, 15 bp, Homo sapiens
cactgatcagtactc

SEQ ID NO: 1755018 - DNA, 15 bp, Homo sapiens
actgatcagtactca

SEQ ID NO: 1755019 - DNA, 15 bp, Homo sapiens
ctgatcagtactcag

SEQ ID NO: 1755020 - DNA, 15 bp, Homo sapiens
tgatcagtactcagc

SEQ ID NO: 1755021 - DNA, 15 bp, Homo sapiens
gatcagtactcagct

SEQ ID NO: 1755022 - DNA, 15 bp, Homo sapiens
atcagtactcagctg

SEQ ID NO: 1755023 - DNA, 15 bp, Homo sapiens
tcagtactcagctga

SEQ ID NO: 1755024 - DNA, 15 bp, Homo sapiens
cagtactcagctgaa

SEQ ID NO: 1755025 - DNA, 15 bp, Homo sapiens
agtactcagctgaag

SEQ ID NO: 1755026 - DNA, 15 bp, Homo sapiens
gtactcagctgaaga

SEQ ID NO: 1755027 - DNA, 15 bp, Homo sapiens
tactcagctgaagac

SEQ ID NO: 1755028 - DNA, 15 bp, Homo sapiens
actcagctgaagact

SEQ ID NO: 1755029 - DNA, 15 bp, Homo sapiens
ctcagctgaagactc

SEQ ID NO: 1755030 - DNA, 15 bp, Homo sapiens
tcagctgaagactca

SEQ ID NO: 1755031 - DNA, 15 bp, Homo sapiens
cagctgaagactcaa

SEQ ID NO: 1755032 - DNA, 15 bp, Homo sapiens
agctgaagactcaag

SEQ ID NO: 1755033 - DNA, 15 bp, Homo sapiens
gctgaagactcaagc

SEQ ID NO: 1755034 - DNA, 15 bp, Homo sapiens
ctgaagactcaagct

SEQ ID NO: 1755035 - DNA, 15 bp, Homo sapiens
tgaagactcaagctt

SEQ ID NO: 1755036 - DNA, 15 bp, Homo sapiens
gaagactcaagctta

SEQ ID NO: 1755037 - DNA, 15 bp, Homo sapiens
aagactcaagcttaa

SEQ ID NO: 1755038 - DNA, 15 bp, Homo sapiens
agactcaagcttaac

SEQ ID NO: 1755039 - DNA, 15 bp, Homo sapiens
gactcaagcttaacc

SEQ ID NO: 1755040 - DNA, 15 bp, Homo sapiens
actcaagcttaaccc

SEQ ID NO: 1755041 - DNA, 15 bp, Homo sapiens
ctcaagcttaaccct

SEQ ID NO: 1755042 - DNA, 15 bp, Homo sapiens
tcaagcttaaccctc

SEQ ID NO: 1755043 - DNA, 15 bp, Homo sapiens
caagcttaaccctct

SEQ ID NO: 1755044 - DNA, 15 bp, Homo sapiens
aagcttaaccctctg

SEQ ID NO: 1755045 - DNA, 15 bp, Homo sapiens
agcttaaccctctgc

SEQ ID NO: 1755046 - DNA, 15 bp, Homo sapiens
gcttaaccctctgca

SEQ ID NO: 1755047 - DNA, 15 bp, Homo sapiens
cttaaccctctgcag

SEQ ID NO: 1755048 - DNA, 15 bp, Homo sapiens
ttaaccctctgcaga

SEQ ID NO: 1755049 - DNA, 15 bp, Homo sapiens
taaccctctgcagac

SEQ ID NO: 1755050 - DNA, 15 bp, Homo sapiens
aaccctctgcagacc

SEQ ID NO: 1755051 - DNA, 15 bp, Homo sapiens
accctctgcagacct

SEQ ID NO: 1755052 - DNA, 15 bp, Homo sapiens
ccctctgcagacctc

SEQ ID NO: 1755053 - DNA, 15 bp, Homo sapiens
cctctgcagacctct

SEQ ID NO: 1755054 - DNA, 15 bp, Homo sapiens
ctctgcagacctctg

SEQ ID NO: 1755055 - DNA, 15 bp, Homo sapiens
tctgcagacctctgg

SEQ ID NO: 1755056 - DNA, 15 bp, Homo sapiens
ctgcagacctctgga

SEQ ID NO: 1755057 - DNA, 15 bp, Homo sapiens
tgcagacctctggag

SEQ ID NO: 1755058 - DNA, 15 bp, Homo sapiens
gcagacctctggagt

SEQ ID NO: 1755059 - DNA, 15 bp, Homo sapiens
cagacctctggagtt

SEQ ID NO: 1755060 - DNA, 15 bp, Homo sapiens
agacctctggagttc

SEQ ID NO: 1755061 - DNA, 15 bp, Homo sapiens
gacctctggagttct

SEQ ID NO: 1755062 - DNA, 15 bp, Homo sapiens
acctctggagttctc

SEQ ID NO: 1755063 - DNA, 15 bp, Homo sapiens
cctctggagttctct

SEQ ID NO: 1755064 - DNA, 15 bp, Homo sapiens
ctctggagttctctt

SEQ ID NO: 1755065 - DNA, 15 bp, Homo sapiens
tctggagttctcttt

SEQ ID NO: 1755066 - DNA, 15 bp, Homo sapiens
ctggagttctctttt

SEQ ID NO: 1755067 - DNA, 15 bp, Homo sapiens
tggagttctcttttt

SEQ ID NO: 1755068 - DNA, 15 bp, Homo sapiens
ggagttctctttttg

SEQ ID NO: 1755069 - DNA, 15 bp, Homo sapiens
gagttctctttttgt

SEQ ID NO: 1755070 - DNA, 15 bp, Homo sapiens
agttctctttttgta

SEQ ID NO: 1755071 - DNA, 15 bp, Homo sapiens
gttctctttttgtag

SEQ ID NO: 1755072 - DNA, 15 bp, Homo sapiens
ttctctttttgtagc

SEQ ID NO: 1755073 - DNA, 15 bp, Homo sapiens
tctctttttgtagct

SEQ ID NO: 1755074 - DNA, 15 bp, Homo sapiens
ctctttttgtagctt

SEQ ID NO: 1755075 - DNA, 15 bp, Homo sapiens
tctttttgtagcttt

SEQ ID NO: 1755076 - DNA, 15 bp, Homo sapiens
ctttttgtagctttc

SEQ ID NO: 1755077 - DNA, 15 bp, Homo sapiens
tttttgtagctttct

SEQ ID NO: 1755078 - DNA, 15 bp, Homo sapiens
ttttgtagctttctt

SEQ ID NO: 1755079 - DNA, 15 bp, Homo sapiens
tttgtagctttcttc

SEQ ID NO: 1755080 - DNA, 15 bp, Homo sapiens
ttgtagctttcttct

SEQ ID NO: 1755081 - DNA, 15 bp, Homo sapiens
tgtagctttcttctc

SEQ ID NO: 1755082 - DNA, 15 bp, Homo sapiens
gtagctttcttctct

SEQ ID NO: 1755083 - DNA, 15 bp, Homo sapiens
tagctttcttctctc

SEQ ID NO: 1755084 - DNA, 15 bp, Homo sapiens
agctttcttctctct

SEQ ID NO: 1755085 - DNA, 15 bp, Homo sapiens
gctttcttctctcta

SEQ ID NO: 1755086 - DNA, 15 bp, Homo sapiens
ctttcttctctctag

SEQ ID NO: 1755087 - DNA, 15 bp, Homo sapiens
tttcttctctctagt

SEQ ID NO: 1755088 - DNA, 15 bp, Homo sapiens
ttcttctctctagta

SEQ ID NO: 1755089 - DNA, 15 bp, Homo sapiens
tcttctctctagtat

SEQ ID NO: 1755090 - DNA, 15 bp, Homo sapiens
cttctctctagtatt

SEQ ID NO: 1755091 - DNA, 15 bp, Homo sapiens
ttctctctagtattc

SEQ ID NO: 1755092 - DNA, 15 bp, Homo sapiens
tctctctagtattct

SEQ ID NO: 1755093 - DNA, 15 bp, Homo sapiens
ctctctagtattctg

SEQ ID NO: 1755094 - DNA, 15 bp, Homo sapiens
tctctagtattctgt

SEQ ID NO: 1755095 - DNA, 15 bp, Homo sapiens
ctctagtattctgtc

SEQ ID NO: 1755096 - DNA, 15 bp, Homo sapiens
tctagtattctgtcc

SEQ ID NO: 1755097 - DNA, 15 bp, Homo sapiens
ctagtattctgtcct

SEQ ID NO: 1755098 - DNA, 15 bp, Homo sapiens
tagtattctgtcctg

SEQ ID NO: 1755099 - DNA, 15 bp, Homo sapiens
agtattctgtcctgc

SEQ ID NO: 1755100 - DNA, 15 bp, Homo sapiens
gtattctgtcctgct

SEQ ID NO: 1755101 - DNA, 15 bp, Homo sapiens
tattctgtcctgcta

SEQ ID NO: 1755102 - DNA, 15 bp, Homo sapiens
attctgtcctgctaa

SEQ ID NO: 1755103 - DNA, 15 bp, Homo sapiens
ttctgtcctgctaat

SEQ ID NO: 1755104 - DNA, 15 bp, Homo sapiens
tctgtcctgctaatt

SEQ ID NO: 1755105 - DNA, 15 bp, Homo sapiens
ctgtcctgctaattt

SEQ ID NO: 1755106 - DNA, 15 bp, Homo sapiens
tgtcctgctaatttt

SEQ ID NO: 1755107 - DNA, 15 bp, Homo sapiens
gtcctgctaatttta

SEQ ID NO: 1755108 - DNA, 15 bp, Homo sapiens
tcctgctaattttag

SEQ ID NO: 1755109 - DNA, 15 bp, Homo sapiens
cctgctaattttagt

SEQ ID NO: 1755110 - DNA, 15 bp, Homo sapiens
ctgctaattttagtt

SEQ ID NO: 1755111 - DNA, 15 bp, Homo sapiens
tgctaattttagttt

SEQ ID NO: 1755112 - DNA, 15 bp, Homo sapiens
gctaattttagtttg

SEQ ID NO: 1755113 - DNA, 15 bp, Homo sapiens
ctaattttagtttgc

SEQ ID NO: 1755114 - DNA, 15 bp, Homo sapiens
taattttagtttgcc

SEQ ID NO: 1755115 - DNA, 15 bp, Homo sapiens
aattttagtttgcct

SEQ ID NO: 1755116 - DNA, 15 bp, Homo sapiens
attttagtttgcctt

SEQ ID NO: 1755117 - DNA, 15 bp, Homo sapiens
ttttagtttgccttg

SEQ ID NO: 1755118 - DNA, 15 bp, Homo sapiens
tttagtttgccttgg

SEQ ID NO: 1755119 - DNA, 15 bp, Homo sapiens
ttagtttgccttggc

SEQ ID NO: 1755120 - DNA, 15 bp, Homo sapiens
tagtttgccttggca

SEQ ID NO: 1755121 - DNA, 15 bp, Homo sapiens
agtttgccttggcat

SEQ ID NO: 1755122 - DNA, 15 bp, Homo sapiens
gtttgccttggcatc

SEQ ID NO: 1755123 - DNA, 15 bp, Homo sapiens
tttgccttggcatct

SEQ ID NO: 1755124 - DNA, 15 bp, Homo sapiens
ttgccttggcatctc

SEQ ID NO: 1755125 - DNA, 15 bp, Homo sapiens
tgccttggcatctcc

SEQ ID NO: 1755126 - DNA, 15 bp, Homo sapiens
gccttggcatctccc

SEQ ID NO: 1755127 - DNA, 15 bp, Homo sapiens
ccttggcatctccca

SEQ ID NO: 1755128 - DNA, 15 bp, Homo sapiens
cttggcatctcccat

SEQ ID NO: 1755129 - DNA, 15 bp, Homo sapiens
ttggcatctcccatt

SEQ ID NO: 1755130 - DNA, 15 bp, Homo sapiens
tggcatctcccattt

SEQ ID NO: 1755131 - DNA, 15 bp, Homo sapiens
ggcatctcccatttc

SEQ ID NO: 1755132 - DNA, 15 bp, Homo sapiens
gcatctcccatttct

SEQ ID NO: 1755133 - DNA, 15 bp, Homo sapiens
catctcccatttctt

SEQ ID NO: 1755134 - DNA, 15 bp, Homo sapiens
atctcccatttctta

SEQ ID NO: 1755135 - DNA, 15 bp, Homo sapiens
tctcccatttcttaa

SEQ ID NO: 1755136 - DNA, 15 bp, Homo sapiens
ctcccatttcttaac

SEQ ID NO: 1755137 - DNA, 15 bp, Homo sapiens
tcccatttcttaact

SEQ ID NO: 1755138 - DNA, 15 bp, Homo sapiens
cccatttcttaactc

SEQ ID NO: 1755139 - DNA, 15 bp, Homo sapiens
ccatttcttaactct

SEQ ID NO: 1755140 - DNA, 15 bp, Homo sapiens
catttcttaactctg

SEQ ID NO: 1755141 - DNA, 15 bp, Homo sapiens
atttcttaactctgt

SEQ ID NO: 1755142 - DNA, 15 bp, Homo sapiens
tttcttaactctgtt

SEQ ID NO: 1755143 - DNA, 15 bp, Homo sapiens
ttcttaactctgttt

SEQ ID NO: 1755144 - DNA, 15 bp, Homo sapiens
tcttaactctgtttc

SEQ ID NO: 1755145 - DNA, 15 bp, Homo sapiens
cttaactctgtttct

SEQ ID NO: 1755146 - DNA, 15 bp, Homo sapiens
ttaactctgtttctt

SEQ ID NO: 1755147 - DNA, 15 bp, Homo sapiens
taactctgtttcttc

SEQ ID NO: 1755148 - DNA, 15 bp, Homo sapiens
aactctgtttcttca

SEQ ID NO: 1755149 - DNA, 15 bp, Homo sapiens
actctgtttcttcaa

SEQ ID NO: 1755150 - DNA, 15 bp, Homo sapiens
ctctgtttcttcaac

SEQ ID NO: 1755151 - DNA, 15 bp, Homo sapiens
tctgtttcttcaact

SEQ ID NO: 1755152 - DNA, 15 bp, Homo sapiens
ctgtttcttcaactg

SEQ ID NO: 1755153 - DNA, 15 bp, Homo sapiens
tgtttcttcaactgg

SEQ ID NO: 1755154 - DNA, 15 bp, Homo sapiens
gtttcttcaactggg

SEQ ID NO: 1755155 - DNA, 15 bp, Homo sapiens
tttcttcaactgggg

SEQ ID NO: 1755156 - DNA, 15 bp, Homo sapiens
ttcttcaactggggg

SEQ ID NO: 1755157 - DNA, 15 bp, Homo sapiens
tcttcaactggggga

SEQ ID NO: 1755158 - DNA, 15 bp, Homo sapiens
cttcaactgggggac

SEQ ID NO: 1755159 - DNA, 15 bp, Homo sapiens
ttcaactgggggacc

SEQ ID NO: 1755160 - DNA, 15 bp, Homo sapiens
tcaactgggggacca

SEQ ID NO: 1755161 - DNA, 15 bp, Homo sapiens
caactgggggaccac

SEQ ID NO: 1755162 - DNA, 15 bp, Homo sapiens
aactgggggaccact

SEQ ID NO: 1755163 - DNA, 15 bp, Homo sapiens
actgggggaccactg

SEQ ID NO: 1755164 - DNA, 15 bp, Homo sapiens
ctgggggaccactgg

SEQ ID NO: 1755165 - DNA, 15 bp, Homo sapiens
tgggggaccactggg

SEQ ID NO: 1755166 - DNA, 15 bp, Homo sapiens
gggggaccactgggc

SEQ ID NO: 1755167 - DNA, 15 bp, Homo sapiens
ggggaccactgggct

SEQ ID NO: 1755168 - DNA, 15 bp, Homo sapiens
gggaccactgggctg

SEQ ID NO: 1755169 - DNA, 15 bp, Homo sapiens
ggaccactgggctgc

SEQ ID NO: 1755170 - DNA, 15 bp, Homo sapiens
gaccactgggctgca

SEQ ID NO: 1755171 - DNA, 15 bp, Homo sapiens
accactgggctgcat

SEQ ID NO: 1755172 - DNA, 15 bp, Homo sapiens
ccactgggctgcatt

SEQ ID NO: 1755173 - DNA, 15 bp, Homo sapiens
cactgggctgcattc

SEQ ID NO: 1755174 - DNA, 15 bp, Homo sapiens
actgggctgcattcc

SEQ ID NO: 1755175 - DNA, 15 bp, Homo sapiens
ctgggctgcattcca

SEQ ID NO: 1755176 - DNA, 15 bp, Homo sapiens
tgggctgcattccag

SEQ ID NO: 1755177 - DNA, 15 bp, Homo sapiens
gggctgcattccagt

SEQ ID NO: 1755178 - DNA, 15 bp, Homo sapiens
ggctgcattccagtt

SEQ ID NO: 1755179 - DNA, 15 bp, Homo sapiens
gctgcattccagttt

SEQ ID NO: 1755180 - DNA, 15 bp, Homo sapiens
ctgcattccagtttc

SEQ ID NO: 1755181 - DNA, 15 bp, Homo sapiens
tgcattccagtttct

SEQ ID NO: 1755182 - DNA, 15 bp, Homo sapiens
gcattccagtttctc

SEQ ID NO: 1755183 - DNA, 15 bp, Homo sapiens
cattccagtttctca

SEQ ID NO: 1755184 - DNA, 15 bp, Homo sapiens
attccagtttctcat

SEQ ID NO: 1755185 - DNA, 15 bp, Homo sapiens
ttccagtttctcatc

SEQ ID NO: 1755186 - DNA, 15 bp, Homo sapiens
tccagtttctcatct

SEQ ID NO: 1755187 - DNA, 15 bp, Homo sapiens
ccagtttctcatctc

SEQ ID NO: 1755188 - DNA, 15 bp, Homo sapiens
cagtttctcatctct

SEQ ID NO: 1755189 - DNA, 15 bp, Homo sapiens
agtttctcatctctg

SEQ ID NO: 1755190 - DNA, 15 bp, Homo sapiens
gtttctcatctctgg

SEQ ID NO: 1755191 - DNA, 15 bp, Homo sapiens
tttctcatctctgga

SEQ ID NO: 1755192 - DNA, 15 bp, Homo sapiens
ttctcatctctggac

SEQ ID NO: 1755193 - DNA, 15 bp, Homo sapiens
tctcatctctggact

SEQ ID NO: 1755194 - DNA, 15 bp, Homo sapiens
ctcatctctggactg

SEQ ID NO: 1755195 - DNA, 15 bp, Homo sapiens
tcatctctggactgt

SEQ ID NO: 1755196 - DNA, 15 bp, Homo sapiens
catctctggactgtg

SEQ ID NO: 1755197 - DNA, 15 bp, Homo sapiens
atctctggactgtgg

SEQ ID NO: 1755198 - DNA, 15 bp, Homo sapiens
tctctggactgtgga

SEQ ID NO: 1755199 - DNA, 15 bp, Homo sapiens
ctctggactgtggac

SEQ ID NO: 1755200 - DNA, 15 bp, Homo sapiens
tctggactgtggacc

SEQ ID NO: 1755201 - DNA, 15 bp, Homo sapiens
ctggactgtggacca

SEQ ID NO: 1755202 - DNA, 15 bp, Homo sapiens
tggactgtggaccat

SEQ ID NO: 1755203 - DNA, 15 bp, Homo sapiens
ggactgtggaccata

SEQ ID NO: 1755204 - DNA, 15 bp, Homo sapiens
gactgtggaccataa

SEQ ID NO: 1755205 - DNA, 15 bp, Homo sapiens
actgtggaccataaa

SEQ ID NO: 1755206 - DNA, 15 bp, Homo sapiens
ctgtggaccataaac

SEQ ID NO: 1755207 - DNA, 15 bp, Homo sapiens
tgtggaccataaact

SEQ ID NO: 1755208 - DNA, 15 bp, Homo sapiens
gtggaccataaactg

SEQ ID NO: 1755209 - DNA, 15 bp, Homo sapiens
tggaccataaactgt

SEQ ID NO: 1755210 - DNA, 15 bp, Homo sapiens
ggaccataaactgtc

SEQ ID NO: 1755211 - DNA, 15 bp, Homo sapiens
gaccataaactgtcc

SEQ ID NO: 1755212 - DNA, 15 bp, Homo sapiens
accataaactgtccc

SEQ ID NO: 1755213 - DNA, 15 bp, Homo sapiens
ccataaactgtcccc

SEQ ID NO: 1755214 - DNA, 15 bp, Homo sapiens
cataaactgtcccca

SEQ ID NO: 1755215 - DNA, 15 bp, Homo sapiens
ataaactgtccccag

SEQ ID NO: 1755216 - DNA, 15 bp, Homo sapiens
taaactgtccccagg

SEQ ID NO: 1755217 - DNA, 15 bp, Homo sapiens
aaactgtccccaggc

SEQ ID NO: 1755218 - DNA, 15 bp, Homo sapiens
aactgtccccaggca

SEQ ID NO: 1755219 - DNA, 15 bp, Homo sapiens
actgtccccaggcag

SEQ ID NO: 1755220 - DNA, 15 bp, Homo sapiens
ctgtccccaggcagt

SEQ ID NO: 1755221 - DNA, 15 bp, Homo sapiens
tgtccccaggcagta

SEQ ID NO: 1755222 - DNA, 15 bp, Homo sapiens
gtccccaggcagtaa

SEQ ID NO: 1755223 - DNA, 15 bp, Homo sapiens
tccccaggcagtaag

SEQ ID NO: 1755224 - DNA, 15 bp, Homo sapiens
ccccaggcagtaagc

SEQ ID NO: 1755225 - DNA, 15 bp, Homo sapiens
cccaggcagtaagct

SEQ ID NO: 1755226 - DNA, 15 bp, Homo sapiens
ccaggcagtaagctg

SEQ ID NO: 1755227 - DNA, 15 bp, Homo sapiens
caggcagtaagctgt

SEQ ID NO: 1755228 - DNA, 15 bp, Homo sapiens
aggcagtaagctgtg

SEQ ID NO: 1755229 - DNA, 15 bp, Homo sapiens
ggcagtaagctgtgg

SEQ ID NO: 1755230 - DNA, 15 bp, Homo sapiens
gcagtaagctgtggc

SEQ ID NO: 1755231 - DNA, 15 bp, Homo sapiens
cagtaagctgtggca

SEQ ID NO: 1755232 - DNA, 15 bp, Homo sapiens
agtaagctgtggcaa

SEQ ID NO: 1755233 - DNA, 15 bp, Homo sapiens
gtaagctgtggcaat

SEQ ID NO: 1755234 - DNA, 15 bp, Homo sapiens
taagctgtggcaata

SEQ ID NO: 1755235 - DNA, 15 bp, Homo sapiens
aagctgtggcaataa

SEQ ID NO: 1755236 - DNA, 15 bp, Homo sapiens
agctgtggcaataat

SEQ ID NO: 1755237 - DNA, 15 bp, Homo sapiens
gctgtggcaataatg

SEQ ID NO: 1755238 - DNA, 15 bp, Homo sapiens
ctgtggcaataatga

SEQ ID NO: 1755239 - DNA, 15 bp, Homo sapiens
tgtggcaataatgag

SEQ ID NO: 1755240 - DNA, 15 bp, Homo sapiens
gtggcaataatgagg

SEQ ID NO: 1755241 - DNA, 15 bp, Homo sapiens
tggcaataatgaggc

SEQ ID NO: 1755242 - DNA, 15 bp, Homo sapiens
ggcaataatgaggct

SEQ ID NO: 1755243 - DNA, 15 bp, Homo sapiens
gcaataatgaggctc

SEQ ID NO: 1755244 - DNA, 15 bp, Homo sapiens
caataatgaggctca

SEQ ID NO: 1755245 - DNA, 15 bp, Homo sapiens
aataatgaggctcac

SEQ ID NO: 1755246 - DNA, 15 bp, Homo sapiens
ataatgaggctcacc

SEQ ID NO: 1755247 - DNA, 15 bp, Homo sapiens
taatgaggctcacca

SEQ ID NO: 1755248 - DNA, 15 bp, Homo sapiens
aatgaggctcaccat

SEQ ID NO: 1755249 - DNA, 15 bp, Homo sapiens
atgaggctcaccatt

SEQ ID NO: 1755250 - DNA, 15 bp, Homo sapiens
tgaggctcaccattt

SEQ ID NO: 1755251 - DNA, 15 bp, Homo sapiens
gaggctcaccatttg

SEQ ID NO: 1755252 - DNA, 15 bp, Homo sapiens
aggctcaccatttgt

SEQ ID NO: 1755253 - DNA, 15 bp, Homo sapiens
ggctcaccatttgtt

SEQ ID NO: 1755254 - DNA, 15 bp, Homo sapiens
gctcaccatttgttt

SEQ ID NO: 1755255 - DNA, 15 bp, Homo sapiens
ctcaccatttgtttt

SEQ ID NO: 1755256 - DNA, 15 bp, Homo sapiens
tcaccatttgttttc

SEQ ID NO: 1755257 - DNA, 15 bp, Homo sapiens
caccatttgttttcc

SEQ ID NO: 1755258 - DNA, 15 bp, Homo sapiens
accatttgttttcct

SEQ ID NO: 1755259 - DNA, 15 bp, Homo sapiens
ccatttgttttcctt

SEQ ID NO: 1755260 - DNA, 15 bp, Homo sapiens
catttgttttccttc

SEQ ID NO: 1755261 - DNA, 15 bp, Homo sapiens
atttgttttccttct

SEQ ID NO: 1755262 - DNA, 15 bp, Homo sapiens
tttgttttccttctc

SEQ ID NO: 1755263 - DNA, 15 bp, Homo sapiens
ttgttttccttctcc

SEQ ID NO: 1755264 - DNA, 15 bp, Homo sapiens
tgttttccttctccc

SEQ ID NO: 1755265 - DNA, 15 bp, Homo sapiens
gttttccttctccca

SEQ ID NO: 1755266 - DNA, 15 bp, Homo sapiens
tttccttctcccagg

SEQ ID NO: 1755267 - DNA, 15 bp, Homo sapiens
ttccttctcccaggg

SEQ ID NO: 1755268 - DNA, 15 bp, Homo sapiens
tccttctcccaggga

SEQ ID NO: 1755269 - DNA, 15 bp, Homo sapiens
ccttctcccagggat

SEQ ID NO: 1755270 - DNA, 15 bp, Homo sapiens
cttctcccagggatt

SEQ ID NO: 1755271 - DNA, 15 bp, Homo sapiens
ttctcccagggattg

SEQ ID NO: 1755272 - DNA, 15 bp, Homo sapiens
tctcccagggattgc

SEQ ID NO: 1755273 - DNA, 15 bp, Homo sapiens
ctcccagggattgct

SEQ ID NO: 1755274 - DNA, 15 bp, Homo sapiens
tcccagggattgctg

SEQ ID NO: 1755275 - DNA, 15 bp, Homo sapiens
cccagggattgctgt

SEQ ID NO: 1755276 - DNA, 15 bp, Homo sapiens
ccagggattgctgtt

SEQ ID NO: 1755277 - DNA, 15 bp, Homo sapiens
cagggattgctgttc

SEQ ID NO: 1755278 - DNA, 15 bp, Homo sapiens
agggattgctgttct

SEQ ID NO: 1755279 - DNA, 15 bp, Homo sapiens
gggattgctgttctg

SEQ ID NO: 1755280 - DNA, 15 bp, Homo sapiens
ggattgctgttctgt

SEQ ID NO: 1755281 - DNA, 15 bp, Homo sapiens
gattgctgttctgta

SEQ ID NO: 1755282 - DNA, 15 bp, Homo sapiens
attgctgttctgtac

SEQ ID NO: 1755283 - DNA, 15 bp, Homo sapiens
ttgctgttctgtact

SEQ ID NO: 1755284 - DNA, 15 bp, Homo sapiens
tgctgttctgtactg

SEQ ID NO: 1755285 - DNA, 15 bp, Homo sapiens
gctgttctgtactgc

SEQ ID NO: 1755286 - DNA, 15 bp, Homo sapiens
ctgttctgtactgcc

SEQ ID NO: 1755287 - DNA, 15 bp, Homo sapiens
tgttctgtactgcct

SEQ ID NO: 1755288 - DNA, 15 bp, Homo sapiens
gttctgtactgcctg

SEQ ID NO: 1755289 - DNA, 15 bp, Homo sapiens
ttctgtactgcctgt

SEQ ID NO: 1755290 - DNA, 15 bp, Homo sapiens
tctgtactgcctgtt

SEQ ID NO: 1755291 - DNA, 15 bp, Homo sapiens
ctgtactgcctgttg

SEQ ID NO: 1755292 - DNA, 15 bp, Homo sapiens
tgtactgcctgttgt

SEQ ID NO: 1755293 - DNA, 15 bp, Homo sapiens
gtactgcctgttgtt

SEQ ID NO: 1755294 - DNA, 15 bp, Homo sapiens
tactgcctgttgttt

SEQ ID NO: 1755295 - DNA, 15 bp, Homo sapiens
actgcctgttgttta

SEQ ID NO: 1755296 - DNA, 15 bp, Homo sapiens
ctgcctgttgtttat

SEQ ID NO: 1755297 - DNA, 15 bp, Homo sapiens
tgcctgttgtttatt

SEQ ID NO: 1755298 - DNA, 15 bp, Homo sapiens
gcctgttgtttattg

SEQ ID NO: 1755299 - DNA, 15 bp, Homo sapiens
cctgttgtttattgt

SEQ ID NO: 1755300 - DNA, 15 bp, Homo sapiens
ctgttgtttattgtg

SEQ ID NO: 1755301 - DNA, 15 bp, Homo sapiens
tgttgtttattgtgt

SEQ ID NO: 1755302 - DNA, 15 bp, Homo sapiens
gttgtttattgtgta

SEQ ID NO: 1755303 - DNA, 15 bp, Homo sapiens
ttgtttattgtgtaa

SEQ ID NO: 1755304 - DNA, 15 bp, Homo sapiens
tgtttattgtgtaaa

SEQ ID NO: 1755305 - DNA, 15 bp, Homo sapiens
gtttattgtgtaaaa

SEQ ID NO: 1755306 - DNA, 15 bp, Homo sapiens
tttattgtgtaaaaa

SEQ ID NO: 1755307 - DNA, 15 bp, Homo sapiens
ttattgtgtaaaaag

SEQ ID NO: 1755308 - DNA, 15 bp, Homo sapiens
tattgtgtaaaaaga

SEQ ID NO: 1755309 - DNA, 15 bp, Homo sapiens
attgtgtaaaaagaa

SEQ ID NO: 1755310 - DNA, 15 bp, Homo sapiens
ttgtgtaaaaagaat

SEQ ID NO: 1755311 - DNA, 15 bp, Homo sapiens
tgtgtaaaaagaatt

SEQ ID NO: 1755312 - DNA, 15 bp, Homo sapiens
gtgtaaaaagaattc

SEQ ID NO: 1755313 - DNA, 15 bp, Homo sapiens
tgtaaaaagaattct

SEQ ID NO: 1755314 - DNA, 15 bp, Homo sapiens
gtaaaaagaattctt

SEQ ID NO: 1755315 - DNA, 15 bp, Homo sapiens
taaaaagaattcttt

SEQ ID NO: 1755316 - DNA, 15 bp, Homo sapiens
aaaaagaattctttt

SEQ ID NO: 1755317 - DNA, 15 bp, Homo sapiens
aaaagaattctttta

SEQ ID NO: 1755318 - DNA, 15 bp, Homo sapiens
aaagaattcttttat

SEQ ID NO: 1755319 - DNA, 15 bp, Homo sapiens
aagaattcttttatt

SEQ ID NO: 1755320 - DNA, 15 bp, Homo sapiens
agaattcttttattt

SEQ ID NO: 1755321 - DNA, 15 bp, Homo sapiens
gaattcttttattta

SEQ ID NO: 1755322 - DNA, 15 bp, Homo sapiens
aattcttttatttat

SEQ ID NO: 1755323 - DNA, 15 bp, Homo sapiens
attcttttatttatg

SEQ ID NO: 1755324 - DNA, 15 bp, Homo sapiens
ttcttttatttatgt

SEQ ID NO: 1755325 - DNA, 15 bp, Homo sapiens
tcttttatttatgtt

SEQ ID NO: 1755326 - DNA, 15 bp, Homo sapiens
cttttatttatgttg

SEQ ID NO: 1755327 - DNA, 15 bp, Homo sapiens
ttttatttatgttgt

SEQ ID NO: 1755328 - DNA, 15 bp, Homo sapiens
tttatttatgttgtt

SEQ ID NO: 1755329 - DNA, 15 bp, Homo sapiens
ttatttatgttgttc

SEQ ID NO: 1755330 - DNA, 15 bp, Homo sapiens
tatttatgttgttca

SEQ ID NO: 1755331 - DNA, 15 bp, Homo sapiens
atttatgttgttcaa

SEQ ID NO: 1755332 - DNA, 15 bp, Homo sapiens
tttatgttgttcaat

SEQ ID NO: 1755333 - DNA, 15 bp, Homo sapiens
ttatgttgttcaatt

SEQ ID NO: 1755334 - DNA, 15 bp, Homo sapiens
tatgttgttcaattt

SEQ ID NO: 1755335 - DNA, 15 bp, Homo sapiens
atgttgttcaatttt

SEQ ID NO: 1755336 - DNA, 15 bp, Homo sapiens
tgttgttcaattttg

SEQ ID NO: 1755337 - DNA, 15 bp, Homo sapiens
gttgttcaattttgt

SEQ ID NO: 1755338 - DNA, 15 bp, Homo sapiens
ttgttcaattttgtg

SEQ ID NO: 1755339 - DNA, 15 bp, Homo sapiens
tgttcaattttgtgg

SEQ ID NO: 1755340 - DNA, 15 bp, Homo sapiens
gttcaattttgtggt

SEQ ID NO: 1755341 - DNA, 15 bp, Homo sapiens
ttcaattttgtggtt

SEQ ID NO: 1755342 - DNA, 15 bp, Homo sapiens
tcaattttgtggttg

SEQ ID NO: 1755343 - DNA, 15 bp, Homo sapiens
caattttgtggttgt

SEQ ID NO: 1755344 - DNA, 15 bp, Homo sapiens
aattttgtggttgtt

SEQ ID NO: 1755345 - DNA, 15 bp, Homo sapiens
attttgtggttgttt

SEQ ID NO: 1755346 - DNA, 15 bp, Homo sapiens
ttttgtggttgttta

SEQ ID NO: 1755347 - DNA, 15 bp, Homo sapiens
tttgtggttgtttaa

SEQ ID NO: 1755348 - DNA, 15 bp, Homo sapiens
ttgtggttgtttaaa

SEQ ID NO: 1755349 - DNA, 15 bp, Homo sapiens
tgtggttgtttaaac

SEQ ID NO: 1755350 - DNA, 15 bp, Homo sapiens
gtggttgtttaaacg

SEQ ID NO: 1755351 - DNA, 15 bp, Homo sapiens
tggttgtttaaacga

SEQ ID NO: 1755352 - DNA, 15 bp, Homo sapiens
ggttgtttaaacgaa

SEQ ID NO: 1755353 - DNA, 15 bp, Homo sapiens
gttgtttaaacgaat

SEQ ID NO: 1755354 - DNA, 15 bp, Homo sapiens
ttgtttaaacgaatc

SEQ ID NO: 1755355 - DNA, 15 bp, Homo sapiens
tgtttaaacgaatct

SEQ ID NO: 1755356 - DNA, 15 bp, Homo sapiens
gtttaaacgaatctg

SEQ ID NO: 1755357 - DNA, 15 bp, Homo sapiens
tttaaacgaatctgg

SEQ ID NO: 1755358 - DNA, 15 bp, Homo sapiens
ttaaacgaatctggt

SEQ ID NO: 1755359 - DNA, 15 bp, Homo sapiens
taaacgaatctggtc

SEQ ID NO: 1755360 - DNA, 15 bp, Homo sapiens
aaacgaatctggtcc

SEQ ID NO: 1755361 - DNA, 15 bp, Homo sapiens
aacgaatctggtccc

SEQ ID NO: 1755362 - DNA, 15 bp, Homo sapiens
acgaatctggtccct

SEQ ID NO: 1755363 - DNA, 15 bp, Homo sapiens
cgaatctggtccctg

SEQ ID NO: 1755364 - DNA, 15 bp, Homo sapiens
gaatctggtccctgt

SEQ ID NO: 1755365 - DNA, 15 bp, Homo sapiens
aatctggtccctgtt

SEQ ID NO: 1755366 - DNA, 15 bp, Homo sapiens
atctggtccctgttt

SEQ ID NO: 1755367 - DNA, 15 bp, Homo sapiens
tctggtccctgtttc

SEQ ID NO: 1755368 - DNA, 15 bp, Homo sapiens
ctggtccctgtttct

SEQ ID NO: 1755369 - DNA, 15 bp, Homo sapiens
tggtccctgtttctt

SEQ ID NO: 1755370 - DNA, 15 bp, Homo sapiens
ggtccctgtttcttc

SEQ ID NO: 1755371 - DNA, 15 bp, Homo sapiens
gtccctgtttcttca

SEQ ID NO: 1755372 - DNA, 15 bp, Homo sapiens
tccctgtttcttcat

SEQ ID NO: 1755373 - DNA, 15 bp, Homo sapiens
ccctgtttcttcatc

SEQ ID NO: 1755374 - DNA, 15 bp, Homo sapiens
cctgtttcttcatca

SEQ ID NO: 1755375 - DNA, 15 bp, Homo sapiens
ctgtttcttcatcag

SEQ ID NO: 1755376 - DNA, 15 bp, Homo sapiens
tgtttcttcatcaga

SEQ ID NO: 1755377 - DNA, 15 bp, Homo sapiens
gtttcttcatcagag

SEQ ID NO: 1755378 - DNA, 15 bp, Homo sapiens
tttcttcatcagagc

SEQ ID NO: 1755379 - DNA, 15 bp, Homo sapiens
ttcttcatcagagct

SEQ ID NO: 1755380 - DNA, 15 bp, Homo sapiens
tcttcatcagagctg

SEQ ID NO: 1755381 - DNA, 15 bp, Homo sapiens
cttcatcagagctgg

SEQ ID NO: 1755382 - DNA, 15 bp, Homo sapiens
ttcatcagagctggc

SEQ ID NO: 1755383 - DNA, 15 bp, Homo sapiens
tcatcagagctggca

SEQ ID NO: 1755384 - DNA, 15 bp, Homo sapiens
catcagagctggcag

SEQ ID NO: 1755385 - DNA, 15 bp, Homo sapiens
atcagagctggcagg

SEQ ID NO: 1755386 - DNA, 15 bp, Homo sapiens
tcagagctggcaggg

SEQ ID NO: 1755387 - DNA, 15 bp, Homo sapiens
cagagctggcagggt

SEQ ID NO: 1755388 - DNA, 15 bp, Homo sapiens
agagctggcagggtt

SEQ ID NO: 1755389 - DNA, 15 bp, Homo sapiens
gagctggcagggtta

SEQ ID NO: 1755390 - DNA, 15 bp, Homo sapiens
agctggcagggttac

SEQ ID NO: 1755391 - DNA, 15 bp, Homo sapiens
gctggcagggttact

SEQ ID NO: 1755392 - DNA, 15 bp, Homo sapiens
ctggcagggttacta

SEQ ID NO: 1755393 - DNA, 15 bp, Homo sapiens
tggcagggttactaa

SEQ ID NO: 1755394 - DNA, 15 bp, Homo sapiens
ggcagggttactaaa

SEQ ID NO: 1755395 - DNA, 15 bp, Homo sapiens
gcagggttactaaac

SEQ ID NO: 1755396 - DNA, 15 bp, Homo sapiens
cagggttactaaacg

SEQ ID NO: 1755397 - DNA, 15 bp, Homo sapiens
agggttactaaacgt

SEQ ID NO: 1755398 - DNA, 15 bp, Homo sapiens
gggttactaaacgta

SEQ ID NO: 1755399 - DNA, 15 bp, Homo sapiens
ggttactaaacgtaa

SEQ ID NO: 1755400 - DNA, 15 bp, Homo sapiens
gttactaaacgtaag

SEQ ID NO: 1755401 - DNA, 15 bp, Homo sapiens
ttactaaacgtaagg

SEQ ID NO: 1755402 - DNA, 15 bp, Homo sapiens
tactaaacgtaaggc

SEQ ID NO: 1755403 - DNA, 15 bp, Homo sapiens
actaaacgtaaggct

SEQ ID NO: 1755404 - DNA, 15 bp, Homo sapiens
ctaaacgtaaggctt

SEQ ID NO: 1755405 - DNA, 15 bp, Homo sapiens
taaacgtaaggctta

SEQ ID NO: 1755406 - DNA, 15 bp, Homo sapiens
aaacgtaaggcttag

SEQ ID NO: 1755407 - DNA, 15 bp, Homo sapiens
aacgtaaggcttagt

SEQ ID NO: 1755408 - DNA, 15 bp, Homo sapiens
acgtaaggcttagtg

SEQ ID NO: 1755409 - DNA, 15 bp, Homo sapiens
cgtaaggcttagtga

SEQ ID NO: 1755410 - DNA, 15 bp, Homo sapiens
gtaaggcttagtgat

SEQ ID NO: 1755411 - DNA, 15 bp, Homo sapiens
taaggcttagtgatt

SEQ ID NO: 1755412 - DNA, 15 bp, Homo sapiens
aaggcttagtgattg

SEQ ID NO: 1755413 - DNA, 15 bp, Homo sapiens
aggcttagtgattga

SEQ ID NO: 1755414 - DNA, 15 bp, Homo sapiens
ggcttagtgattgat

SEQ ID NO: 1755415 - DNA, 15 bp, Homo sapiens
gcttagtgattgatg

SEQ ID NO: 1755416 - DNA, 15 bp, Homo sapiens
cttagtgattgatga

SEQ ID NO: 1755417 - DNA, 15 bp, Homo sapiens
ttagtgattgatgaa

SEQ ID NO: 1755418 - DNA, 15 bp, Homo sapiens
tagtgattgatgaag

SEQ ID NO: 1755419 - DNA, 15 bp, Homo sapiens
agtgattgatgaagt

SEQ ID NO: 1755420 - DNA, 15 bp, Homo sapiens
gtgattgatgaagta

SEQ ID NO: 1755421 - DNA, 15 bp, Homo sapiens
tgattgatgaagtat

SEQ ID NO: 1755422 - DNA, 15 bp, Homo sapiens
gattgatgaagtatt

SEQ ID NO: 1755423 - DNA, 15 bp, Homo sapiens
attgatgaagtattt

SEQ ID NO: 1755424 - DNA, 15 bp, Homo sapiens
ttgatgaagtattta

SEQ ID NO: 1755425 - DNA, 15 bp, Homo sapiens
tgatgaagtatttac

SEQ ID NO: 1755426 - DNA, 15 bp, Homo sapiens
gatgaagtatttaca

SEQ ID NO: 1755427 - DNA, 15 bp, Homo sapiens
atgaagtatttacaa

SEQ ID NO: 1755428 - DNA, 15 bp, Homo sapiens
tgaagtatttacaaa

SEQ ID NO: 1755429 - DNA, 15 bp, Homo sapiens
gaagtatttacaaat

SEQ ID NO: 1755430 - DNA, 15 bp, Homo sapiens
aagtatttacaaata

SEQ ID NO: 1755431 - DNA, 15 bp, Homo sapiens
agtatttacaaatat

SEQ ID NO: 1755432 - DNA, 15 bp, Homo sapiens
gtatttacaaatatg

SEQ ID NO: 1755433 - DNA, 15 bp, Homo sapiens
tatttacaaatatga

SEQ ID NO: 1755434 - DNA, 15 bp, Homo sapiens
atttacaaatatgaa

SEQ ID NO: 1755435 - DNA, 15 bp, Homo sapiens
tttacaaatatgaaa

SEQ ID NO: 1755436 - DNA, 15 bp, Homo sapiens
ttacaaatatgaaat

SEQ ID NO: 1755437 - DNA, 15 bp, Homo sapiens
tacaaatatgaaata

SEQ ID NO: 1755438 - DNA, 15 bp, Homo sapiens
acaaatatgaaatat

SEQ ID NO: 1755439 - DNA, 15 bp, Homo sapiens
caaatatgaaatatg

SEQ ID NO: 1755440 - DNA, 15 bp, Homo sapiens
aaatatgaaatatgt

SEQ ID NO: 1755441 - DNA, 15 bp, Homo sapiens
aatatgaaatatgta

SEQ ID NO: 1755442 - DNA, 15 bp, Homo sapiens
atatgaaatatgtac

SEQ ID NO: 1755443 - DNA, 15 bp, Homo sapiens
tatgaaatatgtaca

SEQ ID NO: 1755444 - DNA, 15 bp, Homo sapiens
atgaaatatgtacac

SEQ ID NO: 1755445 - DNA, 15 bp, Homo sapiens
tgaaatatgtacact

SEQ ID NO: 1755446 - DNA, 15 bp, Homo sapiens
gaaatatgtacactt

SEQ ID NO: 1755447 - DNA, 15 bp, Homo sapiens
aaatatgtacactta

SEQ ID NO: 1755448 - DNA, 15 bp, Homo sapiens
aatatgtacacttac

SEQ ID NO: 1755449 - DNA, 15 bp, Homo sapiens
atatgtacacttaca

SEQ ID NO: 1755450 - DNA, 15 bp, Homo sapiens
tatgtacacttacag

SEQ ID NO: 1755451 - DNA, 15 bp, Homo sapiens
atgtacacttacaga

SEQ ID NO: 1755452 - DNA, 15 bp, Homo sapiens
tgtacacttacagaa

SEQ ID NO: 1755453 - DNA, 15 bp, Homo sapiens
gtacacttacagaat

SEQ ID NO: 1755454 - DNA, 15 bp, Homo sapiens
tacacttacagaata

SEQ ID NO: 1755455 - DNA, 15 bp, Homo sapiens
acacttacagaatat

SEQ ID NO: 1755456 - DNA, 15 bp, Homo sapiens
cacttacagaatatt

SEQ ID NO: 1755457 - DNA, 15 bp, Homo sapiens
acttacagaatattt

SEQ ID NO: 1755458 - DNA, 15 bp, Homo sapiens
cttacagaatattta

SEQ ID NO: 1755459 - DNA, 15 bp, Homo sapiens
ttacagaatatttag

SEQ ID NO: 1755460 - DNA, 15 bp, Homo sapiens
tacagaatatttagg

SEQ ID NO: 1755461 - DNA, 15 bp, Homo sapiens
acagaatatttaggg

SEQ ID NO: 1755462 - DNA, 15 bp, Homo sapiens
cagaatatttagggt

SEQ ID NO: 1755463 - DNA, 15 bp, Homo sapiens
agaatatttagggta

SEQ ID NO: 1755464 - DNA, 15 bp, Homo sapiens
gaatatttagggtat

SEQ ID NO: 1755465 - DNA, 15 bp, Homo sapiens
aatatttagggtatc

SEQ ID NO: 1755466 - DNA, 15 bp, Homo sapiens
atatttagggtatca

SEQ ID NO: 1755467 - DNA, 15 bp, Homo sapiens
tatttagggtatcat

SEQ ID NO: 1755468 - DNA, 15 bp, Homo sapiens
atttagggtatcatt

SEQ ID NO: 1755469 - DNA, 15 bp, Homo sapiens
tttagggtatcattt

SEQ ID NO: 1755470 - DNA, 15 bp, Homo sapiens
ttagggtatcatttc

SEQ ID NO: 1755471 - DNA, 15 bp, Homo sapiens
tagggtatcatttcc

SEQ ID NO: 1755472 - DNA, 15 bp, Homo sapiens
agggtatcatttccg

SEQ ID NO: 1755473 - DNA, 15 bp, Homo sapiens
gggtatcatttccgc

SEQ ID NO: 1755474 - DNA, 15 bp, Homo sapiens
ggtatcatttccgct

SEQ ID NO: 1755475 - DNA, 15 bp, Homo sapiens
gtatcatttccgctt

SEQ ID NO: 1755476 - DNA, 15 bp, Homo sapiens
tatcatttccgcttc

SEQ ID NO: 1755477 - DNA, 15 bp, Homo sapiens
atcatttccgcttcc

SEQ ID NO: 1755478 - DNA, 15 bp, Homo sapiens
tcatttccgcttcct

SEQ ID NO: 1755479 - DNA, 15 bp, Homo sapiens
catttccgcttcctt

SEQ ID NO: 1755480 - DNA, 15 bp, Homo sapiens
atttccgcttccttg

SEQ ID NO: 1755481 - DNA, 15 bp, Homo sapiens
tttccgcttccttgt

SEQ ID NO: 1755482 - DNA, 15 bp, Homo sapiens
ttccgcttccttgtg

SEQ ID NO: 1755483 - DNA, 15 bp, Homo sapiens
tccgcttccttgtgt

SEQ ID NO: 1755484 - DNA, 15 bp, Homo sapiens
ccgcttccttgtgtt

SEQ ID NO: 1755485 - DNA, 15 bp, Homo sapiens
cgcttccttgtgtta

SEQ ID NO: 1755486 - DNA, 15 bp, Homo sapiens
gcttccttgtgttaa

SEQ ID NO: 1755487 - DNA, 15 bp, Homo sapiens
cttccttgtgttaaa

SEQ ID NO: 1755488 - DNA, 15 bp, Homo sapiens
ttccttgtgttaaat

SEQ ID NO: 1755489 - DNA, 15 bp, Homo sapiens
tccttgtgttaaatg

SEQ ID NO: 1755490 - DNA, 15 bp, Homo sapiens
ccttgtgttaaatgc

SEQ ID NO: 1755491 - DNA, 15 bp, Homo sapiens
cttgtgttaaatgca

SEQ ID NO: 1755492 - DNA, 15 bp, Homo sapiens
ttgtgttaaatgcat

SEQ ID NO: 1755493 - DNA, 15 bp, Homo sapiens
tgtgttaaatgcatc

SEQ ID NO: 1755494 - DNA, 15 bp, Homo sapiens
gtgttaaatgcatca

SEQ ID NO: 1755495 - DNA, 15 bp, Homo sapiens
tgttaaatgcatcag

SEQ ID NO: 1755496 - DNA, 15 bp, Homo sapiens
gttaaatgcatcagg

SEQ ID NO: 1755497 - DNA, 15 bp, Homo sapiens
ttaaatgcatcaggt

SEQ ID NO: 1755498 - DNA, 15 bp, Homo sapiens
taaatgcatcaggtc

SEQ ID NO: 1755499 - DNA, 15 bp, Homo sapiens
aaatgcatcaggtct

SEQ ID NO: 1755500 - DNA, 15 bp, Homo sapiens
aatgcatcaggtctt

SEQ ID NO: 1755501 - DNA, 15 bp, Homo sapiens
atgcatcaggtcttc

SEQ ID NO: 1755502 - DNA, 15 bp, Homo sapiens
tgcatcaggtcttct

SEQ ID NO: 1755503 - DNA, 15 bp, Homo sapiens
gcatcaggtcttctg

SEQ ID NO: 1755504 - DNA, 15 bp, Homo sapiens
catcaggtcttctga

SEQ ID NO: 1755505 - DNA, 15 bp, Homo sapiens
atcaggtcttctgac

SEQ ID NO: 1755506 - DNA, 15 bp, Homo sapiens
tcaggtcttctgact

SEQ ID NO: 1755507 - DNA, 15 bp, Homo sapiens
caggtcttctgactg

SEQ ID NO: 1755508 - DNA, 15 bp, Homo sapiens
aggtcttctgactga

SEQ ID NO: 1755509 - DNA, 15 bp, Homo sapiens
ggtcttctgactgat

SEQ ID NO: 1755510 - DNA, 15 bp, Homo sapiens
gtcttctgactgatg

SEQ ID NO: 1755511 - DNA, 15 bp, Homo sapiens
tcttctgactgatgc

SEQ ID NO: 1755512 - DNA, 15 bp, Homo sapiens
cttctgactgatgca

SEQ ID NO: 1755513 - DNA, 15 bp, Homo sapiens
ttctgactgatgcat

SEQ ID NO: 1755514 - DNA, 15 bp, Homo sapiens
tctgactgatgcatt

SEQ ID NO: 1755515 - DNA, 15 bp, Homo sapiens
ctgactgatgcatta

SEQ ID NO: 1755516 - DNA, 15 bp, Homo sapiens
tgactgatgcattat

SEQ ID NO: 1755517 - DNA, 15 bp, Homo sapiens
gactgatgcattata

SEQ ID NO: 1755518 - DNA, 15 bp, Homo sapiens
actgatgcattatac

SEQ ID NO: 1755519 - DNA, 15 bp, Homo sapiens
ctgatgcattatact

SEQ ID NO: 1755520 - DNA, 15 bp, Homo sapiens
tgatgcattatactg

SEQ ID NO: 1755521 - DNA, 15 bp, Homo sapiens
gatgcattatactgt

SEQ ID NO: 1755522 - DNA, 15 bp, Homo sapiens
atgcattatactgtt

SEQ ID NO: 1755523 - DNA, 15 bp, Homo sapiens
tgcattatactgttt

SEQ ID NO: 1755524 - DNA, 15 bp, Homo sapiens
gcattatactgtttc

SEQ ID NO: 1755525 - DNA, 15 bp, Homo sapiens
cattatactgtttca

SEQ ID NO: 1755526 - DNA, 15 bp, Homo sapiens
attatactgtttcag

SEQ ID NO: 1755527 - DNA, 15 bp, Homo sapiens
ttatactgtttcaga

SEQ ID NO: 1755528 - DNA, 15 bp, Homo sapiens
tatactgtttcagag

SEQ ID NO: 1755529 - DNA, 15 bp, Homo sapiens
atactgtttcagagg

SEQ ID NO: 1755530 - DNA, 15 bp, Homo sapiens
tactgtttcagaggg

SEQ ID NO: 1755531 - DNA, 15 bp, Homo sapiens
actgtttcagagggg

SEQ ID NO: 1755532 - DNA, 15 bp, Homo sapiens
ctgtttcagaggggt

SEQ ID NO: 1755533 - DNA, 15 bp, Homo sapiens
tgtttcagaggggtg

SEQ ID NO: 1755534 - DNA, 15 bp, Homo sapiens
gtttcagaggggtgc

SEQ ID NO: 1755535 - DNA, 15 bp, Homo sapiens
tttcagaggggtgct

SEQ ID NO: 1755536 - DNA, 15 bp, Homo sapiens
ttcagaggggtgctt

SEQ ID NO: 1755537 - DNA, 15 bp, Homo sapiens
tcagaggggtgctta

SEQ ID NO: 1755538 - DNA, 15 bp, Homo sapiens
cagaggggtgcttac

SEQ ID NO: 1755539 - DNA, 15 bp, Homo sapiens
agaggggtgcttact

SEQ ID NO: 1755540 - DNA, 15 bp, Homo sapiens
gaggggtgcttacta

SEQ ID NO: 1755541 - DNA, 15 bp, Homo sapiens
aggggtgcttactat

SEQ ID NO: 1755542 - DNA, 15 bp, Homo sapiens
ggggtgcttactata

SEQ ID NO: 1755543 - DNA, 15 bp, Homo sapiens
gggtgcttactatat

SEQ ID NO: 1755544 - DNA, 15 bp, Homo sapiens
ggtgcttactatatg

SEQ ID NO: 1755545 - DNA, 15 bp, Homo sapiens
gtgcttactatatgg

SEQ ID NO: 1755546 - DNA, 15 bp, Homo sapiens
tgcttactatatgga

SEQ ID NO: 1755547 - DNA, 15 bp, Homo sapiens
gcttactatatggag

SEQ ID NO: 1755548 - DNA, 15 bp, Homo sapiens
cttactatatggaga

SEQ ID NO: 1755549 - DNA, 15 bp, Homo sapiens
ttactatatggagaa

SEQ ID NO: 1755550 - DNA, 15 bp, Homo sapiens
tactatatggagaac

SEQ ID NO: 1755551 - DNA, 15 bp, Homo sapiens
actatatggagaaca

SEQ ID NO: 1755552 - DNA, 15 bp, Homo sapiens
ctatatggagaacat

SEQ ID NO: 1755553 - DNA, 15 bp, Homo sapiens
tatatggagaacata

SEQ ID NO: 1755554 - DNA, 15 bp, Homo sapiens
atatggagaacatag

SEQ ID NO: 1755555 - DNA, 15 bp, Homo sapiens
tatggagaacataga

SEQ ID NO: 1755556 - DNA, 15 bp, Homo sapiens
atggagaacatagaa

SEQ ID NO: 1755557 - DNA, 15 bp, Homo sapiens
tggagaacatagaag

SEQ ID NO: 1755558 - DNA, 15 bp, Homo sapiens
ggagaacatagaagt

SEQ ID NO: 1755559 - DNA, 15 bp, Homo sapiens
gagaacatagaagta

SEQ ID NO: 1755560 - DNA, 15 bp, Homo sapiens
agaacatagaagtac

SEQ ID NO: 1755561 - DNA, 15 bp, Homo sapiens
gaacatagaagtact

SEQ ID NO: 1755562 - DNA, 15 bp, Homo sapiens
aacatagaagtacta

SEQ ID NO: 1755563 - DNA, 15 bp, Homo sapiens
acatagaagtactag

SEQ ID NO: 1755564 - DNA, 15 bp, Homo sapiens
catagaagtactagt

SEQ ID NO: 1755565 - DNA, 15 bp, Homo sapiens
atagaagtactagtt

SEQ ID NO: 1755566 - DNA, 15 bp, Homo sapiens
tagaagtactagtta

SEQ ID NO: 1755567 - DNA, 15 bp, Homo sapiens
agaagtactagttat

SEQ ID NO: 1755568 - DNA, 15 bp, Homo sapiens
gaagtactagttatt

SEQ ID NO: 1755569 - DNA, 15 bp, Homo sapiens
aagtactagttatta

SEQ ID NO: 1755570 - DNA, 15 bp, Homo sapiens
actagttattaacta

SEQ ID NO: 1755571 - DNA, 15 bp, Homo sapiens
ctagttattaactat

SEQ ID NO: 1755572 - DNA, 15 bp, Homo sapiens
tagttattaactatt

SEQ ID NO: 1755573 - DNA, 15 bp, Homo sapiens
agttattaactattt

SEQ ID NO: 1755574 - DNA, 15 bp, Homo sapiens
gttattaactatttt

SEQ ID NO: 1755575 - DNA, 15 bp, Homo sapiens
ttattaactattttt

SEQ ID NO: 1755576 - DNA, 15 bp, Homo sapiens
tattaactatttttt

SEQ ID NO: 1755577 - DNA, 15 bp, Homo sapiens
attaactattttttt

SEQ ID NO: 1755578 - DNA, 15 bp, Homo sapiens
ttaactatttttttg

SEQ ID NO: 1755579 - DNA, 15 bp, Homo sapiens
taactatttttttgt

SEQ ID NO: 1755580 - DNA, 15 bp, Homo sapiens
aactatttttttgta

SEQ ID NO: 1755581 - DNA, 15 bp, Homo sapiens
actatttttttgtat

SEQ ID NO: 1755582 - DNA, 15 bp, Homo sapiens
ctatttttttgtatt

SEQ ID NO: 1755583 - DNA, 15 bp, Homo sapiens
tatttttttgtatta

SEQ ID NO: 1755584 - DNA, 15 bp, Homo sapiens
atttttttgtattaa

SEQ ID NO: 1755585 - DNA, 15 bp, Homo sapiens
tttttttgtattaaa

SEQ ID NO: 1755586 - DNA, 15 bp, Homo sapiens
ttttttgtattaaat

SEQ ID NO: 1755587 - DNA, 15 bp, Homo sapiens
tttttgtattaaatt

SEQ ID NO: 1755588 - DNA, 15 bp, Homo sapiens
ttttgtattaaattt

SEQ ID NO: 1755589 - DNA, 15 bp, Homo sapiens
tttgtattaaatttt

SEQ ID NO: 1755590 - DNA, 15 bp, Homo sapiens
ttgtattaaattttg

SEQ ID NO: 1755591 - DNA, 15 bp, Homo sapiens
tgtattaaattttgg

SEQ ID NO: 1755592 - DNA, 15 bp, Homo sapiens
gtattaaattttggt

SEQ ID NO: 1755593 - DNA, 15 bp, Homo sapiens
tattaaattttggta

SEQ ID NO: 1755594 - DNA, 15 bp, Homo sapiens
attaaattttggtac

SEQ ID NO: 1755595 - DNA, 15 bp, Homo sapiens
ttaaattttggtacg

SEQ ID NO: 1755596 - DNA, 15 bp, Homo sapiens
taaattttggtacgt

SEQ ID NO: 1755597 - DNA, 15 bp, Homo sapiens
aaattttggtacgtc

SEQ ID NO: 1755598 - DNA, 15 bp, Homo sapiens
aattttggtacgtca

SEQ ID NO: 1755599 - DNA, 15 bp, Homo sapiens
attttggtacgtcac

SEQ ID NO: 1755600 - DNA, 15 bp, Homo sapiens
ttttggtacgtcaca

SEQ ID NO: 1755601 - DNA, 15 bp, Homo sapiens
tttggtacgtcacat

SEQ ID NO: 1755602 - DNA, 15 bp, Homo sapiens
ttggtacgtcacata

SEQ ID NO: 1755603 - DNA, 15 bp, Homo sapiens
tggtacgtcacataa

SEQ ID NO: 1755604 - DNA, 15 bp, Homo sapiens
ggtacgtcacataaa

SEQ ID NO: 1755605 - DNA, 15 bp, Homo sapiens
gtacgtcacataaac

SEQ ID NO: 1755606 - DNA, 15 bp, Homo sapiens
tacgtcacataaaca

SEQ ID NO: 1755607 - DNA, 15 bp, Homo sapiens
acgtcacataaacat

SEQ ID NO: 1755608 - DNA, 15 bp, Homo sapiens
cgtcacataaacatt

SEQ ID NO: 1755609 - DNA, 15 bp, Homo sapiens
gtcacataaacattg

SEQ ID NO: 1755610 - DNA, 15 bp, Homo sapiens
tcacataaacattga

SEQ ID NO: 1755611 - DNA, 15 bp, Homo sapiens
cacataaacattgag

SEQ ID NO: 1755612 - DNA, 15 bp, Homo sapiens
acataaacattgagt

SEQ ID NO: 1755613 - DNA, 15 bp, Homo sapiens
cataaacattgagtc

SEQ ID NO: 1755614 - DNA, 15 bp, Homo sapiens
ataaacattgagtct

SEQ ID NO: 1755615 - DNA, 15 bp, Homo sapiens
taaacattgagtctc

SEQ ID NO: 1755616 - DNA, 15 bp, Homo sapiens
aaacattgagtctcc

SEQ ID NO: 1755617 - DNA, 15 bp, Homo sapiens
aacattgagtctcct

SEQ ID NO: 1755618 - DNA, 15 bp, Homo sapiens
acattgagtctcctt

SEQ ID NO: 1755619 - DNA, 15 bp, Homo sapiens
cattgagtctccttt

SEQ ID NO: 1755620 - DNA, 15 bp, Homo sapiens
attgagtctccttta

SEQ ID NO: 1755621 - DNA, 15 bp, Homo sapiens
ttgagtctcctttaa

SEQ ID NO: 1755622 - DNA, 15 bp, Homo sapiens
tgagtctcctttaaa

SEQ ID NO: 1755623 - DNA, 15 bp, Homo sapiens
gagtctcctttaaat

SEQ ID NO: 1755624 - DNA, 15 bp, Homo sapiens
agtctcctttaaatg

SEQ ID NO: 1755625 - DNA, 15 bp, Homo sapiens
gtctcctttaaatgt

SEQ ID NO: 1755626 - DNA, 15 bp, Homo sapiens
tctcctttaaatgtg

SEQ ID NO: 1755627 - DNA, 15 bp, Homo sapiens
ctcctttaaatgtgt

SEQ ID NO: 1755628 - DNA, 15 bp, Homo sapiens
tcctttaaatgtgtc

SEQ ID NO: 1755629 - DNA, 15 bp, Homo sapiens
cctttaaatgtgtca

SEQ ID NO: 1755630 - DNA, 15 bp, Homo sapiens
ctttaaatgtgtcaa

SEQ ID NO: 1755631 - DNA, 15 bp, Homo sapiens
tttaaatgtgtcaaa

SEQ ID NO: 1755632 - DNA, 15 bp, Homo sapiens
ttaaatgtgtcaaat

SEQ ID NO: 1755633 - DNA, 15 bp, Homo sapiens
taaatgtgtcaaatg

SEQ ID NO: 1755634 - DNA, 15 bp, Homo sapiens
aaatgtgtcaaatgt

SEQ ID NO: 1755635 - DNA, 15 bp, Homo sapiens
aatgtgtcaaatgta

SEQ ID NO: 1755636 - DNA, 15 bp, Homo sapiens
atgtgtcaaatgtag

SEQ ID NO: 1755637 - DNA, 15 bp, Homo sapiens
tgtgtcaaatgtagc

SEQ ID NO: 1755638 - DNA, 15 bp, Homo sapiens
gtgtcaaatgtagct

SEQ ID NO: 1755639 - DNA, 15 bp, Homo sapiens
tgtcaaatgtagctg

SEQ ID NO: 1755640 - DNA, 15 bp, Homo sapiens
gtcaaatgtagctga

SEQ ID NO: 1755641 - DNA, 15 bp, Homo sapiens
tcaaatgtagctgac

SEQ ID NO: 1755642 - DNA, 15 bp, Homo sapiens
caaatgtagctgact

SEQ ID NO: 1755643 - DNA, 15 bp, Homo sapiens
aaatgtagctgactt

SEQ ID NO: 1755644 - DNA, 15 bp, Homo sapiens
aatgtagctgactta

SEQ ID NO: 1755645 - DNA, 15 bp, Homo sapiens
atgtagctgacttac

SEQ ID NO: 1755646 - DNA, 15 bp, Homo sapiens
tgtagctgacttact

SEQ ID NO: 1755647 - DNA, 15 bp, Homo sapiens
gtagctgacttacta

SEQ ID NO: 1755648 - DNA, 15 bp, Homo sapiens
tagctgacttactaa

SEQ ID NO: 1755649 - DNA, 15 bp, Homo sapiens
agctgacttactaat

SEQ ID NO: 1755650 - DNA, 15 bp, Homo sapiens
gctgacttactaatt

SEQ ID NO: 1755651 - DNA, 15 bp, Homo sapiens
ctgacttactaattg

SEQ ID NO: 1755652 - DNA, 15 bp, Homo sapiens
tgacttactaattgg

SEQ ID NO: 1755653 - DNA, 15 bp, Homo sapiens
gacttactaattgga

SEQ ID NO: 1755654 - DNA, 15 bp, Homo sapiens
acttactaattggat

SEQ ID NO: 1755655 - DNA, 15 bp, Homo sapiens
cttactaattggatt

SEQ ID NO: 1755656 - DNA, 15 bp, Homo sapiens
ttactaattggattc

SEQ ID NO: 1755657 - DNA, 15 bp, Homo sapiens
tactaattggattct

SEQ ID NO: 1755658 - DNA, 15 bp, Homo sapiens
actaattggattctg

SEQ ID NO: 1755659 - DNA, 15 bp, Homo sapiens
ctaattggattctgt

SEQ ID NO: 1755660 - DNA, 15 bp, Homo sapiens
taattggattctgtc

SEQ ID NO: 1755661 - DNA, 15 bp, Homo sapiens
aattggattctgtca

SEQ ID NO: 1755662 - DNA, 15 bp, Homo sapiens
attggattctgtcat

SEQ ID NO: 1755663 - DNA, 15 bp, Homo sapiens
ttggattctgtcata

SEQ ID NO: 1755664 - DNA, 15 bp, Homo sapiens
tggattctgtcatac

SEQ ID NO: 1755665 - DNA, 15 bp, Homo sapiens
ggattctgtcatact

SEQ ID NO: 1755666 - DNA, 15 bp, Homo sapiens
gattctgtcatactc

SEQ ID NO: 1755667 - DNA, 15 bp, Homo sapiens
attctgtcatactct

SEQ ID NO: 1755668 - DNA, 15 bp, Homo sapiens
ttctgtcatactctt

SEQ ID NO: 1755669 - DNA, 15 bp, Homo sapiens
tctgtcatactcttt

SEQ ID NO: 1755670 - DNA, 15 bp, Homo sapiens
ctgtcatactctttt

SEQ ID NO: 1755671 - DNA, 15 bp, Homo sapiens
tgtcatactcttttt

SEQ ID NO: 1755672 - DNA, 15 bp, Homo sapiens
gtcatactctttttc

SEQ ID NO: 1755673 - DNA, 15 bp, Homo sapiens
tcatactctttttct

SEQ ID NO: 1755674 - DNA, 15 bp, Homo sapiens
catactctttttctg

SEQ ID NO: 1755675 - DNA, 15 bp, Homo sapiens
atactctttttctgt

SEQ ID NO: 1755676 - DNA, 15 bp, Homo sapiens
tactctttttctgtg

SEQ ID NO: 1755677 - DNA, 15 bp, Homo sapiens
actctttttctgtgg

SEQ ID NO: 1755678 - DNA, 15 bp, Homo sapiens
ctctttttctgtggt

SEQ ID NO: 1755679 - DNA, 15 bp, Homo sapiens
tctttttctgtggtc

SEQ ID NO: 1755680 - DNA, 15 bp, Homo sapiens
ctttttctgtggtca

SEQ ID NO: 1755681 - DNA, 15 bp, Homo sapiens
tttttctgtggtcac

SEQ ID NO: 1755682 - DNA, 15 bp, Homo sapiens
ttttctgtggtcacc

SEQ ID NO: 1755683 - DNA, 15 bp, Homo sapiens
tttctgtggtcacca

SEQ ID NO: 1755684 - DNA, 15 bp, Homo sapiens
ttctgtggtcaccaa

SEQ ID NO: 1755685 - DNA, 15 bp, Homo sapiens
tctgtggtcaccaaa

SEQ ID NO: 1755686 - DNA, 15 bp, Homo sapiens
ctgtggtcaccaaat

SEQ ID NO: 1755687 - DNA, 15 bp, Homo sapiens
tgtggtcaccaaata

SEQ ID NO: 1755688 - DNA, 15 bp, Homo sapiens
gtggtcaccaaatat

SEQ ID NO: 1755689 - DNA, 15 bp, Homo sapiens
tggtcaccaaatatt

SEQ ID NO: 1755690 - DNA, 15 bp, Homo sapiens
ggtcaccaaatatta

SEQ ID NO: 1755691 - DNA, 15 bp, Homo sapiens
gtcaccaaatattag

SEQ ID NO: 1755692 - DNA, 15 bp, Homo sapiens
tcaccaaatattagc

SEQ ID NO: 1755693 - DNA, 15 bp, Homo sapiens
caccaaatattagca

SEQ ID NO: 1755694 - DNA, 15 bp, Homo sapiens
accaaatattagcaa

SEQ ID NO: 1755695 - DNA, 15 bp, Homo sapiens
ccaaatattagcaaa

SEQ ID NO: 1755696 - DNA, 15 bp, Homo sapiens
caaatattagcaaat

SEQ ID NO: 1755697 - DNA, 15 bp, Homo sapiens
aaatattagcaaatt

SEQ ID NO: 1755698 - DNA, 15 bp, Homo sapiens
aatattagcaaattt

SEQ ID NO: 1755699 - DNA, 15 bp, Homo sapiens
atattagcaaatttc

SEQ ID NO: 1755700 - DNA, 15 bp, Homo sapiens
tattagcaaatttct

SEQ ID NO: 1755701 - DNA, 15 bp, Homo sapiens
attagcaaatttctt

SEQ ID NO: 1755702 - DNA, 15 bp, Homo sapiens
ttagcaaatttcttc

SEQ ID NO: 1755703 - DNA, 15 bp, Homo sapiens
tagcaaatttcttca

SEQ ID NO: 1755704 - DNA, 15 bp, Homo sapiens
agcaaatttcttcat

SEQ ID NO: 1755705 - DNA, 15 bp, Homo sapiens
gcaaatttcttcatt

SEQ ID NO: 1755706 - DNA, 15 bp, Homo sapiens
caaatttcttcattc

SEQ ID NO: 1755707 - DNA, 15 bp, Homo sapiens
aaatttcttcattca

SEQ ID NO: 1755708 - DNA, 15 bp, Homo sapiens
aatttcttcattcag

SEQ ID NO: 1755709 - DNA, 15 bp, Homo sapiens
atttcttcattcagt

SEQ ID NO: 1755710 - DNA, 15 bp, Homo sapiens
tttcttcattcagtt

SEQ ID NO: 1755711 - DNA, 15 bp, Homo sapiens
ttcttcattcagtta

SEQ ID NO: 1755712 - DNA, 15 bp, Homo sapiens
tcttcattcagttac

SEQ ID NO: 1755713 - DNA, 15 bp, Homo sapiens
cttcattcagttaca

SEQ ID NO: 1755714 - DNA, 15 bp, Homo sapiens
ttcattcagttacac

SEQ ID NO: 1755715 - DNA, 15 bp, Homo sapiens
tcattcagttacaca

SEQ ID NO: 1755716 - DNA, 15 bp, Homo sapiens
cattcagttacacaa

SEQ ID NO: 1755717 - DNA, 15 bp, Homo sapiens
attcagttacacaag

SEQ ID NO: 1755718 - DNA, 15 bp, Homo sapiens
ttcagttacacaagt

SEQ ID NO: 1755719 - DNA, 15 bp, Homo sapiens
tcagttacacaagta

SEQ ID NO: 1755720 - DNA, 15 bp, Homo sapiens
cagttacacaagtac

SEQ ID NO: 1755721 - DNA, 15 bp, Homo sapiens
agttacacaagtact

SEQ ID NO: 1755722 - DNA, 15 bp, Homo sapiens
gttacacaagtactt

SEQ ID NO: 1755723 - DNA, 15 bp, Homo sapiens
ttacacaagtacttg

SEQ ID NO: 1755724 - DNA, 15 bp, Homo sapiens
tacacaagtacttgg

SEQ ID NO: 1755725 - DNA, 15 bp, Homo sapiens
acacaagtacttggc

SEQ ID NO: 1755726 - DNA, 15 bp, Homo sapiens
cacaagtacttggcc

SEQ ID NO: 1755727 - DNA, 15 bp, Homo sapiens
acaagtacttggcca

SEQ ID NO: 1755728 - DNA, 15 bp, Homo sapiens
caagtacttggccaa

SEQ ID NO: 1755729 - DNA, 15 bp, Homo sapiens
aagtacttggccaac

SEQ ID NO: 1755730 - DNA, 15 bp, Homo sapiens
agtacttggccaaca

SEQ ID NO: 1755731 - DNA, 15 bp, Homo sapiens
gtacttggccaacat

SEQ ID NO: 1755732 - DNA, 15 bp, Homo sapiens
tacttggccaacata

SEQ ID NO: 1755733 - DNA, 15 bp, Homo sapiens
acttggccaacatac

SEQ ID NO: 1755734 - DNA, 15 bp, Homo sapiens
cttggccaacatact

SEQ ID NO: 1755735 - DNA, 15 bp, Homo sapiens
ttggccaacatactt

SEQ ID NO: 1755736 - DNA, 15 bp, Homo sapiens
tggccaacatacttt

SEQ ID NO: 1755737 - DNA, 15 bp, Homo sapiens
ggccaacatactttt

SEQ ID NO: 1755738 - DNA, 15 bp, Homo sapiens
gccaacatactttta

SEQ ID NO: 1755739 - DNA, 15 bp, Homo sapiens
ccaacatacttttac

SEQ ID NO: 1755740 - DNA, 15 bp, Homo sapiens
caacatacttttaca

SEQ ID NO: 1755741 - DNA, 15 bp, Homo sapiens
aacatacttttacat

SEQ ID NO: 1755742 - DNA, 15 bp, Homo sapiens
acatacttttacata

SEQ ID NO: 1755743 - DNA, 15 bp, Homo sapiens
catacttttacataa

SEQ ID NO: 1755744 - DNA, 15 bp, Homo sapiens
atacttttacataag

SEQ ID NO: 1755745 - DNA, 15 bp, Homo sapiens
tacttttacataaga

SEQ ID NO: 1755746 - DNA, 15 bp, Homo sapiens
acttttacataagaa

SEQ ID NO: 1755747 - DNA, 15 bp, Homo sapiens
cttttacataagaaa

SEQ ID NO: 1755748 - DNA, 15 bp, Homo sapiens
ttttacataagaaaa

SEQ ID NO: 1755749 - DNA, 15 bp, Homo sapiens
tttacataagaaaat

SEQ ID NO: 1755750 - DNA, 15 bp, Homo sapiens
ttacataagaaaata

SEQ ID NO: 1755751 - DNA, 15 bp, Homo sapiens
tacataagaaaatac

SEQ ID NO: 1755752 - DNA, 15 bp, Homo sapiens
acataagaaaatact

SEQ ID NO: 1755753 - DNA, 15 bp, Homo sapiens
cataagaaaatactt

SEQ ID NO: 1755754 - DNA, 15 bp, Homo sapiens
ataagaaaatactta

SEQ ID NO: 1755755 - DNA, 15 bp, Homo sapiens
taagaaaatacttag

SEQ ID NO: 1755756 - DNA, 15 bp, Homo sapiens
aagaaaatacttagg

SEQ ID NO: 1755757 - DNA, 15 bp, Homo sapiens
agaaaatacttagga

SEQ ID NO: 1755758 - DNA, 15 bp, Homo sapiens
gaaaatacttaggat

SEQ ID NO: 1755759 - DNA, 15 bp, Homo sapiens
aaaatacttaggatg

SEQ ID NO: 1755760 - DNA, 15 bp, Homo sapiens
aaatacttaggatgg

SEQ ID NO: 1755761 - DNA, 15 bp, Homo sapiens
aatacttaggatggg

SEQ ID NO: 1755762 - DNA, 15 bp, Homo sapiens
atacttaggatgggc

SEQ ID NO: 1755763 - DNA, 15 bp, Homo sapiens
tacttaggatgggct

SEQ ID NO: 1755764 - DNA, 15 bp, Homo sapiens
acttaggatgggctg

SEQ ID NO: 1755765 - DNA, 15 bp, Homo sapiens
cttaggatgggctgg

SEQ ID NO: 1755766 - DNA, 15 bp, Homo sapiens
ttaggatgggctggc

SEQ ID NO: 1755767 - DNA, 15 bp, Homo sapiens
taggatgggctggca

SEQ ID NO: 1755768 - DNA, 15 bp, Homo sapiens
aggatgggctggcaa

SEQ ID NO: 1755769 - DNA, 15 bp, Homo sapiens
ggatgggctggcaag

SEQ ID NO: 1755770 - DNA, 15 bp, Homo sapiens
gatgggctggcaaga

SEQ ID NO: 1755771 - DNA, 15 bp, Homo sapiens
atgggctggcaagat

SEQ ID NO: 1755772 - DNA, 15 bp, Homo sapiens
tgggctggcaagata

SEQ ID NO: 1755773 - DNA, 15 bp, Homo sapiens
gggctggcaagatag

SEQ ID NO: 1755774 - DNA, 15 bp, Homo sapiens
ggctggcaagatagc

SEQ ID NO: 1755775 - DNA, 15 bp, Homo sapiens
gctggcaagatagcc

SEQ ID NO: 1755776 - DNA, 15 bp, Homo sapiens
ctggcaagatagcca

SEQ ID NO: 1755777 - DNA, 15 bp, Homo sapiens
tggcaagatagccaa

SEQ ID NO: 1755778 - DNA, 15 bp, Homo sapiens
ggcaagatagccaaa

SEQ ID NO: 1755779 - DNA, 15 bp, Homo sapiens
gcaagatagccaaat

SEQ ID NO: 1755780 - DNA, 15 bp, Homo sapiens
caagatagccaaata

SEQ ID NO: 1755781 - DNA, 15 bp, Homo sapiens
aagatagccaaatag

SEQ ID NO: 1755782 - DNA, 15 bp, Homo sapiens
agatagccaaatagg

SEQ ID NO: 1755783 - DNA, 15 bp, Homo sapiens
gatagccaaatagga

SEQ ID NO: 1755784 - DNA, 15 bp, Homo sapiens
atagccaaataggaa

SEQ ID NO: 1755785 - DNA, 15 bp, Homo sapiens
tagccaaataggaac

SEQ ID NO: 1755786 - DNA, 15 bp, Homo sapiens
agccaaataggaaca

SEQ ID NO: 1755787 - DNA, 15 bp, Homo sapiens
gccaaataggaacag

SEQ ID NO: 1755788 - DNA, 15 bp, Homo sapiens
ccaaataggaacagc

SEQ ID NO: 1755789 - DNA, 15 bp, Homo sapiens
caaataggaacagct

SEQ ID NO: 1755790 - DNA, 15 bp, Homo sapiens
aaataggaacagctc

SEQ ID NO: 1755791 - DNA, 15 bp, Homo sapiens
aataggaacagctct

SEQ ID NO: 1755792 - DNA, 15 bp, Homo sapiens
ataggaacagctctg

SEQ ID NO: 1755793 - DNA, 15 bp, Homo sapiens
taggaacagctctgg

SEQ ID NO: 1755794 - DNA, 15 bp, Homo sapiens
aggaacagctctggt

SEQ ID NO: 1755795 - DNA, 15 bp, Homo sapiens
ggaacagctctggtc

SEQ ID NO: 1755796 - DNA, 15 bp, Homo sapiens
gaacagctctggtct

SEQ ID NO: 1755797 - DNA, 15 bp, Homo sapiens
aacagctctggtctg

SEQ ID NO: 1755798 - DNA, 15 bp, Homo sapiens
acagctctggtctgc

SEQ ID NO: 1755799 - DNA, 15 bp, Homo sapiens
cagctctggtctgca

SEQ ID NO: 1755800 - DNA, 15 bp, Homo sapiens
agctctggtctgcag

SEQ ID NO: 1755801 - DNA, 15 bp, Homo sapiens
gctctggtctgcagc

SEQ ID NO: 1755802 - DNA, 15 bp, Homo sapiens
ctctggtctgcagct

SEQ ID NO: 1755803 - DNA, 15 bp, Homo sapiens
tctggtctgcagctg

SEQ ID NO: 1755804 - DNA, 15 bp, Homo sapiens
ctggtctgcagctgc

SEQ ID NO: 1755805 - DNA, 15 bp, Homo sapiens
tggtctgcagctgcc

SEQ ID NO: 1755806 - DNA, 15 bp, Homo sapiens
ggtctgcagctgcca

SEQ ID NO: 1755807 - DNA, 15 bp, Homo sapiens
gtctgcagctgccag

SEQ ID NO: 1755808 - DNA, 15 bp, Homo sapiens
tctgcagctgccagc

SEQ ID NO: 1755809 - DNA, 15 bp, Homo sapiens
ctgcagctgccagcg

SEQ ID NO: 1755810 - DNA, 15 bp, Homo sapiens
tgcagctgccagcga

SEQ ID NO: 1755811 - DNA, 15 bp, Homo sapiens
gcagctgccagcgag

SEQ ID NO: 1755812 - DNA, 15 bp, Homo sapiens
cagctgccagcgaga

SEQ ID NO: 1755813 - DNA, 15 bp, Homo sapiens
agctgccagcgagat

SEQ ID NO: 1755814 - DNA, 15 bp, Homo sapiens
gctgccagcgagatc

SEQ ID NO: 1755815 - DNA, 15 bp, Homo sapiens
ctgccagcgagatca

SEQ ID NO: 1755816 - DNA, 15 bp, Homo sapiens
tgccagcgagatcaa

SEQ ID NO: 1755817 - DNA, 15 bp, Homo sapiens
gccagcgagatcaac

SEQ ID NO: 1755818 - DNA, 15 bp, Homo sapiens
ccagcgagatcaacc

SEQ ID NO: 1755819 - DNA, 15 bp, Homo sapiens
cagcgagatcaaccc

SEQ ID NO: 1755820 - DNA, 15 bp, Homo sapiens
agcgagatcaaccca

SEQ ID NO: 1755821 - DNA, 15 bp, Homo sapiens
gcgagatcaacccag

SEQ ID NO: 1755822 - DNA, 15 bp, Homo sapiens
cgagatcaacccaga

SEQ ID NO: 1755823 - DNA, 15 bp, Homo sapiens
gagatcaacccagaa

SEQ ID NO: 1755824 - DNA, 15 bp, Homo sapiens
agatcaacccagaag

SEQ ID NO: 1755825 - DNA, 15 bp, Homo sapiens
gatcaacccagaagg

SEQ ID NO: 1755826 - DNA, 15 bp, Homo sapiens
atcaacccagaaggc

SEQ ID NO: 1755827 - DNA, 15 bp, Homo sapiens
tcaacccagaaggca

SEQ ID NO: 1755828 - DNA, 15 bp, Homo sapiens
caacccagaaggcag

SEQ ID NO: 1755829 - DNA, 15 bp, Homo sapiens
aacccagaaggcagg

SEQ ID NO: 1755830 - DNA, 15 bp, Homo sapiens
acccagaaggcaggt

SEQ ID NO: 1755831 - DNA, 15 bp, Homo sapiens
cccagaaggcaggtg

SEQ ID NO: 1755832 - DNA, 15 bp, Homo sapiens
ccagaaggcaggtga

SEQ ID NO: 1755833 - DNA, 15 bp, Homo sapiens
cagaaggcaggtgat

SEQ ID NO: 1755834 - DNA, 15 bp, Homo sapiens
agaaggcaggtgatt

SEQ ID NO: 1755835 - DNA, 15 bp, Homo sapiens
gaaggcaggtgattt

SEQ ID NO: 1755836 - DNA, 15 bp, Homo sapiens
aaggcaggtgatttc

SEQ ID NO: 1755837 - DNA, 15 bp, Homo sapiens
aggcaggtgatttct

SEQ ID NO: 1755838 - DNA, 15 bp, Homo sapiens
ggcaggtgatttctc

SEQ ID NO: 1755839 - DNA, 15 bp, Homo sapiens
gcaggtgatttctcc

SEQ ID NO: 1755840 - DNA, 15 bp, Homo sapiens
caggtgatttctcca

SEQ ID NO: 1755841 - DNA, 15 bp, Homo sapiens
aggtgatttctccat

SEQ ID NO: 1755842 - DNA, 15 bp, Homo sapiens
ggtgatttctccatt

SEQ ID NO: 1755843 - DNA, 15 bp, Homo sapiens
gtgatttctccattt

SEQ ID NO: 1755844 - DNA, 15 bp, Homo sapiens
tgatttctccatttc

SEQ ID NO: 1755845 - DNA, 15 bp, Homo sapiens
gatttctccatttcc

SEQ ID NO: 1755846 - DNA, 15 bp, Homo sapiens
atttctccatttcca

SEQ ID NO: 1755847 - DNA, 15 bp, Homo sapiens
tttctccatttccaa

SEQ ID NO: 1755848 - DNA, 15 bp, Homo sapiens
ttctccatttccaac

SEQ ID NO: 1755849 - DNA, 15 bp, Homo sapiens
tctccatttccaact

SEQ ID NO: 1755850 - DNA, 15 bp, Homo sapiens
ctccatttccaactg

SEQ ID NO: 1755851 - DNA, 15 bp, Homo sapiens
tccatttccaactga

SEQ ID NO: 1755852 - DNA, 15 bp, Homo sapiens
ccatttccaactgag

SEQ ID NO: 1755853 - DNA, 15 bp, Homo sapiens
ccaactgaggtacct

SEQ ID NO: 1755854 - DNA, 15 bp, Homo sapiens
caactgaggtacctg

SEQ ID NO: 1755855 - DNA, 15 bp, Homo sapiens
aactgaggtacctgg

SEQ ID NO: 1755856 - DNA, 15 bp, Homo sapiens
actgaggtacctggc

SEQ ID NO: 1755857 - DNA, 15 bp, Homo sapiens
ctgaggtacctggct

SEQ ID NO: 1755858 - DNA, 15 bp, Homo sapiens
tgaggtacctggctc

SEQ ID NO: 1755859 - DNA, 15 bp, Homo sapiens
gaggtacctggctca

SEQ ID NO: 1755860 - DNA, 15 bp, Homo sapiens
aggtacctggctcat

SEQ ID NO: 1755861 - DNA, 15 bp, Homo sapiens
ggtacctggctcatc

SEQ ID NO: 1755862 - DNA, 15 bp, Homo sapiens
gtacctggctcatct

SEQ ID NO: 1755863 - DNA, 15 bp, Homo sapiens
tacctggctcatctc

SEQ ID NO: 1755864 - DNA, 15 bp, Homo sapiens
acctggctcatctca

SEQ ID NO: 1755865 - DNA, 15 bp, Homo sapiens
cctggctcatctcat

SEQ ID NO: 1755866 - DNA, 15 bp, Homo sapiens
ctggctcatctcatt

SEQ ID NO: 1755867 - DNA, 15 bp, Homo sapiens
tggctcatctcattg

SEQ ID NO: 1755868 - DNA, 15 bp, Homo sapiens
ggctcatctcattgg

SEQ ID NO: 1755869 - DNA, 15 bp, Homo sapiens
gctcatctcattggg

SEQ ID NO: 1755870 - DNA, 15 bp, Homo sapiens
ctcatctcattggga

SEQ ID NO: 1755871 - DNA, 15 bp, Homo sapiens
tcatctcattgggac

SEQ ID NO: 1755872 - DNA, 15 bp, Homo sapiens
catctcattgggact

SEQ ID NO: 1755873 - DNA, 15 bp, Homo sapiens
atctcattgggactg

SEQ ID NO: 1755874 - DNA, 15 bp, Homo sapiens
tctcattgggactgg

SEQ ID NO: 1755875 - DNA, 15 bp, Homo sapiens
ctcattgggactggt

SEQ ID NO: 1755876 - DNA, 15 bp, Homo sapiens
tcattgggactggtt

SEQ ID NO: 1755877 - DNA, 15 bp, Homo sapiens
cattgggactggtta

SEQ ID NO: 1755878 - DNA, 15 bp, Homo sapiens
attgggactggttag

SEQ ID NO: 1755879 - DNA, 15 bp, Homo sapiens
ttgggactggttaga

SEQ ID NO: 1755880 - DNA, 15 bp, Homo sapiens
tgggactggttagac

SEQ ID NO: 1755881 - DNA, 15 bp, Homo sapiens
gggactggttagaca

SEQ ID NO: 1755882 - DNA, 15 bp, Homo sapiens
ggactggttagacag

SEQ ID NO: 1755883 - DNA, 15 bp, Homo sapiens
gactggttagacagt

SEQ ID NO: 1755884 - DNA, 15 bp, Homo sapiens
actggttagacagtg

SEQ ID NO: 1755885 - DNA, 15 bp, Homo sapiens
ctggttagacagtgg

SEQ ID NO: 1755886 - DNA, 15 bp, Homo sapiens
tggttagacagtgga

SEQ ID NO: 1755887 - DNA, 15 bp, Homo sapiens
ggttagacagtggat

SEQ ID NO: 1755888 - DNA, 15 bp, Homo sapiens
gttagacagtggatg

SEQ ID NO: 1755889 - DNA, 15 bp, Homo sapiens
ttagacagtggatgc

SEQ ID NO: 1755890 - DNA, 15 bp, Homo sapiens
tagacagtggatgca

SEQ ID NO: 1755891 - DNA, 15 bp, Homo sapiens
agacagtggatgcag

SEQ ID NO: 1755892 - DNA, 15 bp, Homo sapiens
gacagtggatgcagc

SEQ ID NO: 1755893 - DNA, 15 bp, Homo sapiens
acagtggatgcagcc

SEQ ID NO: 1755894 - DNA, 15 bp, Homo sapiens
cagtggatgcagccc

SEQ ID NO: 1755895 - DNA, 15 bp, Homo sapiens
agtggatgcagccca

SEQ ID NO: 1755896 - DNA, 15 bp, Homo sapiens
gtggatgcagcccac

SEQ ID NO: 1755897 - DNA, 15 bp, Homo sapiens
tggatgcagcccacg

SEQ ID NO: 1755898 - DNA, 15 bp, Homo sapiens
ggatgcagcccacgg

SEQ ID NO: 1755899 - DNA, 15 bp, Homo sapiens
gatgcagcccacgga

SEQ ID NO: 1755900 - DNA, 15 bp, Homo sapiens
atgcagcccacggag

SEQ ID NO: 1755901 - DNA, 15 bp, Homo sapiens
tgcagcccacggagg

SEQ ID NO: 1755902 - DNA, 15 bp, Homo sapiens
gcagcccacggaggg

SEQ ID NO: 1755903 - DNA, 15 bp, Homo sapiens
cagcccacggagggc

SEQ ID NO: 1755904 - DNA, 15 bp, Homo sapiens
agcccacggagggca

SEQ ID NO: 1755905 - DNA, 15 bp, Homo sapiens
gcccacggagggcaa

SEQ ID NO: 1755906 - DNA, 15 bp, Homo sapiens
cccacggagggcaag

SEQ ID NO: 1755907 - DNA, 15 bp, Homo sapiens
ccacggagggcaagc

SEQ ID NO: 1755908 - DNA, 15 bp, Homo sapiens
cacggagggcaagct

SEQ ID NO: 1755909 - DNA, 15 bp, Homo sapiens
acggagggcaagctg

SEQ ID NO: 1755910 - DNA, 15 bp, Homo sapiens
cggagggcaagctga

SEQ ID NO: 1755911 - DNA, 15 bp, Homo sapiens
ggagggcaagctgaa

SEQ ID NO: 1755912 - DNA, 15 bp, Homo sapiens
gagggcaagctgaag

SEQ ID NO: 1755913 - DNA, 15 bp, Homo sapiens
agggcaagctgaagc

SEQ ID NO: 1755914 - DNA, 15 bp, Homo sapiens
gggcaagctgaagca

SEQ ID NO: 1755915 - DNA, 15 bp, Homo sapiens
ggcaagctgaagcag

SEQ ID NO: 1755916 - DNA, 15 bp, Homo sapiens
gcaagctgaagcagg

SEQ ID NO: 1755917 - DNA, 15 bp, Homo sapiens
caagctgaagcagga

SEQ ID NO: 1755918 - DNA, 15 bp, Homo sapiens
aagctgaagcaggat

SEQ ID NO: 1755919 - DNA, 15 bp, Homo sapiens
agctgaagcaggatg

SEQ ID NO: 1755920 - DNA, 15 bp, Homo sapiens
gctgaagcaggatgg

SEQ ID NO: 1755921 - DNA, 15 bp, Homo sapiens
ctgaagcaggatggg

SEQ ID NO: 1755922 - DNA, 15 bp, Homo sapiens
tgaagcaggatgggg

SEQ ID NO: 1755923 - DNA, 15 bp, Homo sapiens
gaagcaggatggggc

SEQ ID NO: 1755924 - DNA, 15 bp, Homo sapiens
aagcaggatggggca

SEQ ID NO: 1755925 - DNA, 15 bp, Homo sapiens
agcaggatggggcat

SEQ ID NO: 1755926 - DNA, 15 bp, Homo sapiens
gcaggatggggcatc

SEQ ID NO: 1755927 - DNA, 15 bp, Homo sapiens
caggatggggcatca

SEQ ID NO: 1755928 - DNA, 15 bp, Homo sapiens
aggatggggcatcac

SEQ ID NO: 1755929 - DNA, 15 bp, Homo sapiens
ggatggggcatcacc

SEQ ID NO: 1755930 - DNA, 15 bp, Homo sapiens
gatggggcatcacct

SEQ ID NO: 1755931 - DNA, 15 bp, Homo sapiens
atggggcatcacctc

SEQ ID NO: 1755932 - DNA, 15 bp, Homo sapiens
tggggcatcacctca

SEQ ID NO: 1755933 - DNA, 15 bp, Homo sapiens
ggggcatcacctcac

SEQ ID NO: 1755934 - DNA, 15 bp, Homo sapiens
gggcatcacctcacc

SEQ ID NO: 1755935 - DNA, 15 bp, Homo sapiens
ggcatcacctcaccc

SEQ ID NO: 1755936 - DNA, 15 bp, Homo sapiens
gcatcacctcacccg

SEQ ID NO: 1755937 - DNA, 15 bp, Homo sapiens
catcacctcacccgg

SEQ ID NO: 1755938 - DNA, 15 bp, Homo sapiens
atcacctcacccggg

SEQ ID NO: 1755939 - DNA, 15 bp, Homo sapiens
tcacctcacccggga

SEQ ID NO: 1755940 - DNA, 15 bp, Homo sapiens
cacctcacccgggaa

SEQ ID NO: 1755941 - DNA, 15 bp, Homo sapiens
acctcacccgggaag

SEQ ID NO: 1755942 - DNA, 15 bp, Homo sapiens
cctcacccgggaagc

SEQ ID NO: 1755943 - DNA, 15 bp, Homo sapiens
ctcacccgggaagca

SEQ ID NO: 1755944 - DNA, 15 bp, Homo sapiens
tcacccgggaagcac

SEQ ID NO: 1755945 - DNA, 15 bp, Homo sapiens
cacccgggaagcaca

SEQ ID NO: 1755946 - DNA, 15 bp, Homo sapiens
acccgggaagcacaa

SEQ ID NO: 1755947 - DNA, 15 bp, Homo sapiens
cccgggaagcacaag

SEQ ID NO: 1755948 - DNA, 15 bp, Homo sapiens
ccgggaagcacaagg

SEQ ID NO: 1755949 - DNA, 15 bp, Homo sapiens
cgggaagcacaaggg

SEQ ID NO: 1755950 - DNA, 15 bp, Homo sapiens
gggaagcacaagggg

SEQ ID NO: 1755951 - DNA, 15 bp, Homo sapiens
ggaagcacaaggggt

SEQ ID NO: 1755952 - DNA, 15 bp, Homo sapiens
gaagcacaaggggtt

SEQ ID NO: 1755953 - DNA, 15 bp, Homo sapiens
aagcacaaggggttg

SEQ ID NO: 1755954 - DNA, 15 bp, Homo sapiens
agcacaaggggttgg

SEQ ID NO: 1755955 - DNA, 15 bp, Homo sapiens
gcacaaggggttggg

SEQ ID NO: 1755956 - DNA, 15 bp, Homo sapiens
cacaaggggttgggg

SEQ ID NO: 1755957 - DNA, 15 bp, Homo sapiens
acaaggggttgggga

SEQ ID NO: 1755958 - DNA, 15 bp, Homo sapiens
caaggggttggggaa

SEQ ID NO: 1755959 - DNA, 15 bp, Homo sapiens
aaggggttggggaac

SEQ ID NO: 1755960 - DNA, 15 bp, Homo sapiens
aggggttggggaact

SEQ ID NO: 1755961 - DNA, 15 bp, Homo sapiens
ggggttggggaactc

SEQ ID NO: 1755962 - DNA, 15 bp, Homo sapiens
gggttggggaactcc

SEQ ID NO: 1755963 - DNA, 15 bp, Homo sapiens
ggttggggaactccc

SEQ ID NO: 1755964 - DNA, 15 bp, Homo sapiens
gttggggaactccct

SEQ ID NO: 1755965 - DNA, 15 bp, Homo sapiens
ttggggaactccctc

SEQ ID NO: 1755966 - DNA, 15 bp, Homo sapiens
tggggaactccctcc

SEQ ID NO: 1755967 - DNA, 15 bp, Homo sapiens
ggggaactccctccc

SEQ ID NO: 1755968 - DNA, 15 bp, Homo sapiens
gggaactccctcccc

SEQ ID NO: 1755969 - DNA, 15 bp, Homo sapiens
ggaactccctcccct

SEQ ID NO: 1755970 - DNA, 15 bp, Homo sapiens
gaactccctccccta

SEQ ID NO: 1755971 - DNA, 15 bp, Homo sapiens
aactccctcccctag

SEQ ID NO: 1755972 - DNA, 15 bp, Homo sapiens
actccctcccctagc

SEQ ID NO: 1755973 - DNA, 15 bp, Homo sapiens
ctccctcccctagcc

SEQ ID NO: 1755974 - DNA, 15 bp, Homo sapiens
tccctcccctagcca

SEQ ID NO: 1755975 - DNA, 15 bp, Homo sapiens
ccctcccctagccaa

SEQ ID NO: 1755976 - DNA, 15 bp, Homo sapiens
cctcccctagccaag

SEQ ID NO: 1755977 - DNA, 15 bp, Homo sapiens
ctcccctagccaagg

SEQ ID NO: 1755978 - DNA, 15 bp, Homo sapiens
cccctagccaaggga

SEQ ID NO: 1755979 - DNA, 15 bp, Homo sapiens
ccctagccaagggaa

SEQ ID NO: 1755980 - DNA, 15 bp, Homo sapiens
gaagctgtgacagac

SEQ ID NO: 1755981 - DNA, 15 bp, Homo sapiens
aagctgtgacagact

SEQ ID NO: 1755982 - DNA, 15 bp, Homo sapiens
agctgtgacagactg

SEQ ID NO: 1755983 - DNA, 15 bp, Homo sapiens
gctgtgacagactgt

SEQ ID NO: 1755984 - DNA, 15 bp, Homo sapiens
ctgtgacagactgtg

SEQ ID NO: 1755985 - DNA, 15 bp, Homo sapiens
tgtgacagactgtgt

SEQ ID NO: 1755986 - DNA, 15 bp, Homo sapiens
gtgacagactgtgtc

SEQ ID NO: 1755987 - DNA, 15 bp, Homo sapiens
tgacagactgtgtca

SEQ ID NO: 1755988 - DNA, 15 bp, Homo sapiens
gacagactgtgtcat

SEQ ID NO: 1755989 - DNA, 15 bp, Homo sapiens
acagactgtgtcatg

SEQ ID NO: 1755990 - DNA, 15 bp, Homo sapiens
cagactgtgtcatga

SEQ ID NO: 1755991 - DNA, 15 bp, Homo sapiens
agactgtgtcatgag

SEQ ID NO: 1755992 - DNA, 15 bp, Homo sapiens
gactgtgtcatgagg

SEQ ID NO: 1755993 - DNA, 15 bp, Homo sapiens
actgtgtcatgagga

SEQ ID NO: 1755994 - DNA, 15 bp, Homo sapiens
ctgtgtcatgaggaa

SEQ ID NO: 1755995 - DNA, 15 bp, Homo sapiens
tgtgtcatgaggaac

SEQ ID NO: 1755996 - DNA, 15 bp, Homo sapiens
gtgtcatgaggaaca

SEQ ID NO: 1755997 - DNA, 15 bp, Homo sapiens
tgtcatgaggaacat

SEQ ID NO: 1755998 - DNA, 15 bp, Homo sapiens
gtcatgaggaacatt

SEQ ID NO: 1755999 - DNA, 15 bp, Homo sapiens
tcatgaggaacattg

SEQ ID NO: 1756000 - DNA, 15 bp, Homo sapiens
catgaggaacattgc

SEQ ID NO: 1756001 - DNA, 15 bp, Homo sapiens
atgaggaacattgca

SEQ ID NO: 1756002 - DNA, 15 bp, Homo sapiens
tgaggaacattgcat

SEQ ID NO: 1756003 - DNA, 15 bp, Homo sapiens
gaggaacattgcatt

SEQ ID NO: 1756004 - DNA, 15 bp, Homo sapiens
aggaacattgcattc

SEQ ID NO: 1756005 - DNA, 15 bp, Homo sapiens
ggaacattgcattcc

SEQ ID NO: 1756006 - DNA, 15 bp, Homo sapiens
gaacattgcattcca

SEQ ID NO: 1756007 - DNA, 15 bp, Homo sapiens
aacattgcattccag

SEQ ID NO: 1756008 - DNA, 15 bp, Homo sapiens
acattgcattccagc

SEQ ID NO: 1756009 - DNA, 15 bp, Homo sapiens
gattcctcaaggatc

SEQ ID NO: 1756010 - DNA, 15 bp, Homo sapiens
ctcaaggatctagag

SEQ ID NO: 1756011 - DNA, 15 bp, Homo sapiens
tcaaggatctagagc

SEQ ID NO: 1756012 - DNA, 15 bp, Homo sapiens
caaggatctagagcc

SEQ ID NO: 1756013 - DNA, 15 bp, Homo sapiens
aaggatctagagcca

SEQ ID NO: 1756014 - DNA, 15 bp, Homo sapiens
aggatctagagccag

SEQ ID NO: 1756015 - DNA, 15 bp, Homo sapiens
ggatctagagccaga

SEQ ID NO: 1756016 - DNA, 15 bp, Homo sapiens
gatctagagccagaa

SEQ ID NO: 1756017 - DNA, 15 bp, Homo sapiens
atctagagccagaaa

SEQ ID NO: 1756018 - DNA, 15 bp, Homo sapiens
tctagagccagaaat

SEQ ID NO: 1756019 - DNA, 15 bp, Homo sapiens
ctagagccagaaata

SEQ ID NO: 1756020 - DNA, 15 bp, Homo sapiens
tagagccagaaataa

SEQ ID NO: 1756021 - DNA, 15 bp, Homo sapiens
agagccagaaataat

SEQ ID NO: 1756022 - DNA, 15 bp, Homo sapiens
gagccagaaataata

SEQ ID NO: 1756023 - DNA, 15 bp, Homo sapiens
agccagaaataatat

SEQ ID NO: 1756024 - DNA, 15 bp, Homo sapiens
gccagaaataatatt

SEQ ID NO: 1756025 - DNA, 15 bp, Homo sapiens
ccagaaataatattt

SEQ ID NO: 1756026 - DNA, 15 bp, Homo sapiens
cagaaataatatttg

SEQ ID NO: 1756027 - DNA, 15 bp, Homo sapiens
agaaataatatttga

SEQ ID NO: 1756028 - DNA, 15 bp, Homo sapiens
gaaataatatttgac

SEQ ID NO: 1756029 - DNA, 15 bp, Homo sapiens
aaataatatttgacc

SEQ ID NO: 1756030 - DNA, 15 bp, Homo sapiens
aataatatttgaccc

SEQ ID NO: 1756031 - DNA, 15 bp, Homo sapiens
ataatatttgaccca

SEQ ID NO: 1756032 - DNA, 15 bp, Homo sapiens
taatatttgacccag

SEQ ID NO: 1756033 - DNA, 15 bp, Homo sapiens
aatatttgacccagt

SEQ ID NO: 1756034 - DNA, 15 bp, Homo sapiens
atatttgacccagta

SEQ ID NO: 1756035 - DNA, 15 bp, Homo sapiens
tatttgacccagtaa

SEQ ID NO: 1756036 - DNA, 15 bp, Homo sapiens
atttgacccagtaat

SEQ ID NO: 1756037 - DNA, 15 bp, Homo sapiens
tttgacccagtaatc

SEQ ID NO: 1756038 - DNA, 15 bp, Homo sapiens
ttgacccagtaatcc

SEQ ID NO: 1756039 - DNA, 15 bp, Homo sapiens
tgacccagtaatccc

SEQ ID NO: 1756040 - DNA, 15 bp, Homo sapiens
gacccagtaatccca

SEQ ID NO: 1756041 - DNA, 15 bp, Homo sapiens
acccagtaatcccat

SEQ ID NO: 1756042 - DNA, 15 bp, Homo sapiens
cccagtaatcccatt

SEQ ID NO: 1756043 - DNA, 15 bp, Homo sapiens
ccagtaatcccatta

SEQ ID NO: 1756044 - DNA, 15 bp, Homo sapiens
cagtaatcccattac

SEQ ID NO: 1756045 - DNA, 15 bp, Homo sapiens
agtaatcccattact

SEQ ID NO: 1756046 - DNA, 15 bp, Homo sapiens
gtaatcccattactg

SEQ ID NO: 1756047 - DNA, 15 bp, Homo sapiens
taatcccattactga

SEQ ID NO: 1756048 - DNA, 15 bp, Homo sapiens
aatcccattactgag

SEQ ID NO: 1756049 - DNA, 15 bp, Homo sapiens
atcccattactgagc

SEQ ID NO: 1756050 - DNA, 15 bp, Homo sapiens
tcccattactgagca

SEQ ID NO: 1756051 - DNA, 15 bp, Homo sapiens
cccattactgagcat

SEQ ID NO: 1756052 - DNA, 15 bp, Homo sapiens
ccattactgagcata

SEQ ID NO: 1756053 - DNA, 15 bp, Homo sapiens
cattactgagcatat

SEQ ID NO: 1756054 - DNA, 15 bp, Homo sapiens
attactgagcatata

SEQ ID NO: 1756055 - DNA, 15 bp, Homo sapiens
ttactgagcatatac

SEQ ID NO: 1756056 - DNA, 15 bp, Homo sapiens
tactgagcatatacc

SEQ ID NO: 1756057 - DNA, 15 bp, Homo sapiens
actgagcatataccc

SEQ ID NO: 1756058 - DNA, 15 bp, Homo sapiens
ctgagcatataccca

SEQ ID NO: 1756059 - DNA, 15 bp, Homo sapiens
tgagcatatacccaa

SEQ ID NO: 1756060 - DNA, 15 bp, Homo sapiens
gagcatatacccaaa

SEQ ID NO: 1756061 - DNA, 15 bp, Homo sapiens
agcatatacccaaag

SEQ ID NO: 1756062 - DNA, 15 bp, Homo sapiens
gcatatacccaaagg

SEQ ID NO: 1756063 - DNA, 15 bp, Homo sapiens
catatacccaaagga

SEQ ID NO: 1756064 - DNA, 15 bp, Homo sapiens
ggattataaatcatt

SEQ ID NO: 1756065 - DNA, 15 bp, Homo sapiens
gattataaatcattc

SEQ ID NO: 1756066 - DNA, 15 bp, Homo sapiens
attataaatcattct

SEQ ID NO: 1756067 - DNA, 15 bp, Homo sapiens
ttataaatcattcta

SEQ ID NO: 1756068 - DNA, 15 bp, Homo sapiens
tataaatcattctac

SEQ ID NO: 1756069 - DNA, 15 bp, Homo sapiens
ataaatcattctact

SEQ ID NO: 1756070 - DNA, 15 bp, Homo sapiens
taaatcattctacta

SEQ ID NO: 1756071 - DNA, 15 bp, Homo sapiens
aaatcattctactaa

SEQ ID NO: 1756072 - DNA, 15 bp, Homo sapiens
aatcattctactaaa

SEQ ID NO: 1756073 - DNA, 15 bp, Homo sapiens
atcattctactaaaa

SEQ ID NO: 1756074 - DNA, 15 bp, Homo sapiens
tcattctactaaaaa

SEQ ID NO: 1756075 - DNA, 15 bp, Homo sapiens
cattctactaaaaag

SEQ ID NO: 1756076 - DNA, 15 bp, Homo sapiens
attctactaaaaaga

SEQ ID NO: 1756077 - DNA, 15 bp, Homo sapiens
ttctactaaaaagaa

SEQ ID NO: 1756078 - DNA, 15 bp, Homo sapiens
tctactaaaaagaac

SEQ ID NO: 1756079 - DNA, 15 bp, Homo sapiens
ctactaaaaagaaca

SEQ ID NO: 1756080 - DNA, 15 bp, Homo sapiens
tactaaaaagaacat

SEQ ID NO: 1756081 - DNA, 15 bp, Homo sapiens
actaaaaagaacatg

SEQ ID NO: 1756082 - DNA, 15 bp, Homo sapiens
ctaaaaagaacatgc

SEQ ID NO: 1756083 - DNA, 15 bp, Homo sapiens
taaaaagaacatgca

SEQ ID NO: 1756084 - DNA, 15 bp, Homo sapiens
aaaaagaacatgcac

SEQ ID NO: 1756085 - DNA, 15 bp, Homo sapiens
aaaagaacatgcaca

SEQ ID NO: 1756086 - DNA, 15 bp, Homo sapiens
aaagaacatgcacac

SEQ ID NO: 1756087 - DNA, 15 bp, Homo sapiens
aagaacatgcacaca

SEQ ID NO: 1756088 - DNA, 15 bp, Homo sapiens
agaacatgcacacat

SEQ ID NO: 1756089 - DNA, 15 bp, Homo sapiens
gaacatgcacacata

SEQ ID NO: 1756090 - DNA, 15 bp, Homo sapiens
aacatgcacacatat

SEQ ID NO: 1756091 - DNA, 15 bp, Homo sapiens
acatgcacacatatg

SEQ ID NO: 1756092 - DNA, 15 bp, Homo sapiens
catgcacacatatgt

SEQ ID NO: 1756093 - DNA, 15 bp, Homo sapiens
atgcacacatatgtt

SEQ ID NO: 1756094 - DNA, 15 bp, Homo sapiens
tgcacacatatgttt

SEQ ID NO: 1756095 - DNA, 15 bp, Homo sapiens
gcacacatatgttta

SEQ ID NO: 1756096 - DNA, 15 bp, Homo sapiens
cacacatatgtttat

SEQ ID NO: 1756097 - DNA, 15 bp, Homo sapiens
acacatatgtttatt

SEQ ID NO: 1756098 - DNA, 15 bp, Homo sapiens
cacatatgtttattg

SEQ ID NO: 1756099 - DNA, 15 bp, Homo sapiens
acatatgtttattgc

SEQ ID NO: 1756100 - DNA, 15 bp, Homo sapiens
catatgtttattgca

SEQ ID NO: 1756101 - DNA, 15 bp, Homo sapiens
atatgtttattgcag

SEQ ID NO: 1756102 - DNA, 15 bp, Homo sapiens
tatgtttattgcagc

SEQ ID NO: 1756103 - DNA, 15 bp, Homo sapiens
atgtttattgcagca

SEQ ID NO: 1756104 - DNA, 15 bp, Homo sapiens
tgtttattgcagcac

SEQ ID NO: 1756105 - DNA, 15 bp, Homo sapiens
gtttattgcagcact

SEQ ID NO: 1756106 - DNA, 15 bp, Homo sapiens
tttattgcagcacta

SEQ ID NO: 1756107 - DNA, 15 bp, Homo sapiens
ttattgcagcactat

SEQ ID NO: 1756108 - DNA, 15 bp, Homo sapiens
tattgcagcactatt

SEQ ID NO: 1756109 - DNA, 15 bp, Homo sapiens
attgcagcactattc

SEQ ID NO: 1756110 - DNA, 15 bp, Homo sapiens
ttgcagcactattca

SEQ ID NO: 1756111 - DNA, 15 bp, Homo sapiens
tgcagcactattcac

SEQ ID NO: 1756112 - DNA, 15 bp, Homo sapiens
gcagcactattcaca

SEQ ID NO: 1756113 - DNA, 15 bp, Homo sapiens
cagcactattcacaa

SEQ ID NO: 1756114 - DNA, 15 bp, Homo sapiens
atagcaaagacttga

SEQ ID NO: 1756115 - DNA, 15 bp, Homo sapiens
tagcaaagacttgaa

SEQ ID NO: 1756116 - DNA, 15 bp, Homo sapiens
agcaaagacttgaaa

SEQ ID NO: 1756117 - DNA, 15 bp, Homo sapiens
gcaaagacttgaaac

SEQ ID NO: 1756118 - DNA, 15 bp, Homo sapiens
caaagacttgaaacc

SEQ ID NO: 1756119 - DNA, 15 bp, Homo sapiens
aaagacttgaaacca

SEQ ID NO: 1756120 - DNA, 15 bp, Homo sapiens
aagacttgaaaccaa

SEQ ID NO: 1756121 - DNA, 15 bp, Homo sapiens
agacttgaaaccaac

SEQ ID NO: 1756122 - DNA, 15 bp, Homo sapiens
gacttgaaaccaacc

SEQ ID NO: 1756123 - DNA, 15 bp, Homo sapiens
acttgaaaccaaccc

SEQ ID NO: 1756124 - DNA, 15 bp, Homo sapiens
cttgaaaccaaccca

SEQ ID NO: 1756125 - DNA, 15 bp, Homo sapiens
ttgaaaccaacccaa

SEQ ID NO: 1756126 - DNA, 15 bp, Homo sapiens
tgaaaccaacccaaa

SEQ ID NO: 1756127 - DNA, 15 bp, Homo sapiens
gaaaccaacccaaat

SEQ ID NO: 1756128 - DNA, 15 bp, Homo sapiens
aaaccaacccaaatg

SEQ ID NO: 1756129 - DNA, 15 bp, Homo sapiens
ccaaatgcccatcag

SEQ ID NO: 1756130 - DNA, 15 bp, Homo sapiens
caaatgcccatcagt

SEQ ID NO: 1756131 - DNA, 15 bp, Homo sapiens
aaatgcccatcagtg

SEQ ID NO: 1756132 - DNA, 15 bp, Homo sapiens
aatgcccatcagtgg

SEQ ID NO: 1756133 - DNA, 15 bp, Homo sapiens
atgcccatcagtggt

SEQ ID NO: 1756134 - DNA, 15 bp, Homo sapiens
tgcccatcagtggta

SEQ ID NO: 1756135 - DNA, 15 bp, Homo sapiens
gcccatcagtggtag

SEQ ID NO: 1756136 - DNA, 15 bp, Homo sapiens
cccatcagtggtaga

SEQ ID NO: 1756137 - DNA, 15 bp, Homo sapiens
ccatcagtggtagac

SEQ ID NO: 1756138 - DNA, 15 bp, Homo sapiens
catcagtggtagact

SEQ ID NO: 1756139 - DNA, 15 bp, Homo sapiens
atcagtggtagactg

SEQ ID NO: 1756140 - DNA, 15 bp, Homo sapiens
tcagtggtagactgg

SEQ ID NO: 1756141 - DNA, 15 bp, Homo sapiens
cagtggtagactgga

SEQ ID NO: 1756142 - DNA, 15 bp, Homo sapiens
agtggtagactggat

SEQ ID NO: 1756143 - DNA, 15 bp, Homo sapiens
gtggtagactggata

SEQ ID NO: 1756144 - DNA, 15 bp, Homo sapiens
tggtagactggataa

SEQ ID NO: 1756145 - DNA, 15 bp, Homo sapiens
ggtagactggataaa

SEQ ID NO: 1756146 - DNA, 15 bp, Homo sapiens
gtagactggataaag

SEQ ID NO: 1756147 - DNA, 15 bp, Homo sapiens
tagactggataaaga

SEQ ID NO: 1756148 - DNA, 15 bp, Homo sapiens
agactggataaagaa

SEQ ID NO: 1756149 - DNA, 15 bp, Homo sapiens
gactggataaagaaa

SEQ ID NO: 1756150 - DNA, 15 bp, Homo sapiens
actggataaagaaaa

SEQ ID NO: 1756151 - DNA, 15 bp, Homo sapiens
ctggataaagaaaat

SEQ ID NO: 1756152 - DNA, 15 bp, Homo sapiens
tggataaagaaaatg

SEQ ID NO: 1756153 - DNA, 15 bp, Homo sapiens
ggataaagaaaatgt

SEQ ID NO: 1756154 - DNA, 15 bp, Homo sapiens
gataaagaaaatgtg

SEQ ID NO: 1756155 - DNA, 15 bp, Homo sapiens
taaagaaaatgtggc

SEQ ID NO: 1756156 - DNA, 15 bp, Homo sapiens
aaagaaaatgtggca

SEQ ID NO: 1756157 - DNA, 15 bp, Homo sapiens
aagaaaatgtggcac

SEQ ID NO: 1756158 - DNA, 15 bp, Homo sapiens
agaaaatgtggcaca

SEQ ID NO: 1756159 - DNA, 15 bp, Homo sapiens
gaaaatgtggcacat

SEQ ID NO: 1756160 - DNA, 15 bp, Homo sapiens
aaaatgtggcacata

SEQ ID NO: 1756161 - DNA, 15 bp, Homo sapiens
aaatgtggcacatat

SEQ ID NO: 1756162 - DNA, 15 bp, Homo sapiens
aatgtggcacatata

SEQ ID NO: 1756163 - DNA, 15 bp, Homo sapiens
atgtggcacatatac

SEQ ID NO: 1756164 - DNA, 15 bp, Homo sapiens
tgtggcacatataca

SEQ ID NO: 1756165 - DNA, 15 bp, Homo sapiens
gtggcacatatacac

SEQ ID NO: 1756166 - DNA, 15 bp, Homo sapiens
tggcacatatacacc

SEQ ID NO: 1756167 - DNA, 15 bp, Homo sapiens
ggcacatatacacca

SEQ ID NO: 1756168 - DNA, 15 bp, Homo sapiens
gcacatatacaccat

SEQ ID NO: 1756169 - DNA, 15 bp, Homo sapiens
cacatatacaccatg

SEQ ID NO: 1756170 - DNA, 15 bp, Homo sapiens
acatatacaccatgg

SEQ ID NO: 1756171 - DNA, 15 bp, Homo sapiens
catatacaccatgga

SEQ ID NO: 1756172 - DNA, 15 bp, Homo sapiens
atatacaccatggaa

SEQ ID NO: 1756173 - DNA, 15 bp, Homo sapiens
tatacaccatggaac

SEQ ID NO: 1756174 - DNA, 15 bp, Homo sapiens
atacaccatggaaca

SEQ ID NO: 1756175 - DNA, 15 bp, Homo sapiens
tacaccatggaacac

SEQ ID NO: 1756176 - DNA, 15 bp, Homo sapiens
acaccatggaacact

SEQ ID NO: 1756177 - DNA, 15 bp, Homo sapiens
caccatggaacacta

SEQ ID NO: 1756178 - DNA, 15 bp, Homo sapiens
accatggaacactat

SEQ ID NO: 1756179 - DNA, 15 bp, Homo sapiens
ccatggaacactatg

SEQ ID NO: 1756180 - DNA, 15 bp, Homo sapiens
catggaacactatgc

SEQ ID NO: 1756181 - DNA, 15 bp, Homo sapiens
atggaacactatgca

SEQ ID NO: 1756182 - DNA, 15 bp, Homo sapiens
tggaacactatgcag

SEQ ID NO: 1756183 - DNA, 15 bp, Homo sapiens
ggaacactatgcagc

SEQ ID NO: 1756184 - DNA, 15 bp, Homo sapiens
gaacactatgcagcc

SEQ ID NO: 1756185 - DNA, 15 bp, Homo sapiens
aacactatgcagcca

SEQ ID NO: 1756186 - DNA, 15 bp, Homo sapiens
acactatgcagccat

SEQ ID NO: 1756187 - DNA, 15 bp, Homo sapiens
cactatgcagccata

SEQ ID NO: 1756188 - DNA, 15 bp, Homo sapiens
actatgcagccataa

SEQ ID NO: 1756189 - DNA, 15 bp, Homo sapiens
ctatgcagccataaa

SEQ ID NO: 1756190 - DNA, 15 bp, Homo sapiens
tatgcagccataaaa

SEQ ID NO: 1756191 - DNA, 15 bp, Homo sapiens
atgcagccataaaaa

SEQ ID NO: 1756192 - DNA, 15 bp, Homo sapiens
tgcagccataaaaaa

SEQ ID NO: 1756193 - DNA, 15 bp, Homo sapiens
gcagccataaaaaag

SEQ ID NO: 1756194 - DNA, 15 bp, Homo sapiens
cagccataaaaaagg

SEQ ID NO: 1756195 - DNA, 15 bp, Homo sapiens
agccataaaaaagga

SEQ ID NO: 1756196 - DNA, 15 bp, Homo sapiens
gccataaaaaaggat

SEQ ID NO: 1756197 - DNA, 15 bp, Homo sapiens
ccataaaaaaggatg

SEQ ID NO: 1756198 - DNA, 15 bp, Homo sapiens
cataaaaaaggatga

SEQ ID NO: 1756199 - DNA, 15 bp, Homo sapiens
ataaaaaaggatgag

SEQ ID NO: 1756200 - DNA, 15 bp, Homo sapiens
taaaaaaggatgagt

SEQ ID NO: 1756201 - DNA, 15 bp, Homo sapiens
aaaaaaggatgagtt

SEQ ID NO: 1756202 - DNA, 15 bp, Homo sapiens
aaaaaggatgagttc

SEQ ID NO: 1756203 - DNA, 15 bp, Homo sapiens
aaaaggatgagttcg

SEQ ID NO: 1756204 - DNA, 15 bp, Homo sapiens
aaaggatgagttcgt

SEQ ID NO: 1756205 - DNA, 15 bp, Homo sapiens
aaggatgagttcgtg

SEQ ID NO: 1756206 - DNA, 15 bp, Homo sapiens
aggatgagttcgtgt

SEQ ID NO: 1756207 - DNA, 15 bp, Homo sapiens
ggatgagttcgtgtc

SEQ ID NO: 1756208 - DNA, 15 bp, Homo sapiens
gatgagttcgtgtcc

SEQ ID NO: 1756209 - DNA, 15 bp, Homo sapiens
atgagttcgtgtcct

SEQ ID NO: 1756210 - DNA, 15 bp, Homo sapiens
tgagttcgtgtcctt

SEQ ID NO: 1756211 - DNA, 15 bp, Homo sapiens
gagttcgtgtccttt

SEQ ID NO: 1756212 - DNA, 15 bp, Homo sapiens
agttcgtgtcctttg

SEQ ID NO: 1756213 - DNA, 15 bp, Homo sapiens
gttcgtgtcctttgc

SEQ ID NO: 1756214 - DNA, 15 bp, Homo sapiens
ttcgtgtcctttgca

SEQ ID NO: 1756215 - DNA, 15 bp, Homo sapiens
tcgtgtcctttgcag

SEQ ID NO: 1756216 - DNA, 15 bp, Homo sapiens
cgtgtcctttgcagg

SEQ ID NO: 1756217 - DNA, 15 bp, Homo sapiens
gtgtcctttgcaggg

SEQ ID NO: 1756218 - DNA, 15 bp, Homo sapiens
tgtcctttgcaggga

SEQ ID NO: 1756219 - DNA, 15 bp, Homo sapiens
gtcctttgcagggac

SEQ ID NO: 1756220 - DNA, 15 bp, Homo sapiens
tcctttgcagggaca

SEQ ID NO: 1756221 - DNA, 15 bp, Homo sapiens
cctttgcagggacat

SEQ ID NO: 1756222 - DNA, 15 bp, Homo sapiens
ctttgcagggacatg

SEQ ID NO: 1756223 - DNA, 15 bp, Homo sapiens
tttgcagggacatgg

SEQ ID NO: 1756224 - DNA, 15 bp, Homo sapiens
ttgcagggacatgga

SEQ ID NO: 1756225 - DNA, 15 bp, Homo sapiens
tgcagggacatggat

SEQ ID NO: 1756226 - DNA, 15 bp, Homo sapiens
gcagggacatggatg

SEQ ID NO: 1756227 - DNA, 15 bp, Homo sapiens
cagggacatggatga

SEQ ID NO: 1756228 - DNA, 15 bp, Homo sapiens
agggacatggatgaa

SEQ ID NO: 1756229 - DNA, 15 bp, Homo sapiens
gggacatggatgaag

SEQ ID NO: 1756230 - DNA, 15 bp, Homo sapiens
ggacatggatgaagc

SEQ ID NO: 1756231 - DNA, 15 bp, Homo sapiens
gacatggatgaagct

SEQ ID NO: 1756232 - DNA, 15 bp, Homo sapiens
acatggatgaagctg

SEQ ID NO: 1756233 - DNA, 15 bp, Homo sapiens
catggatgaagctgg

SEQ ID NO: 1756234 - DNA, 15 bp, Homo sapiens
atggatgaagctgga

SEQ ID NO: 1756235 - DNA, 15 bp, Homo sapiens
tggatgaagctggaa

SEQ ID NO: 1756236 - DNA, 15 bp, Homo sapiens
ggatgaagctggaaa

SEQ ID NO: 1756237 - DNA, 15 bp, Homo sapiens
gatgaagctggaaac

SEQ ID NO: 1756238 - DNA, 15 bp, Homo sapiens
atgaagctggaaacc

SEQ ID NO: 1756239 - DNA, 15 bp, Homo sapiens
tggaaaccatcattc

SEQ ID NO: 1756240 - DNA, 15 bp, Homo sapiens
ggaaaccatcattct

SEQ ID NO: 1756241 - DNA, 15 bp, Homo sapiens
gaaaccatcattctc

SEQ ID NO: 1756242 - DNA, 15 bp, Homo sapiens
aaaccatcattctca

SEQ ID NO: 1756243 - DNA, 15 bp, Homo sapiens
aaccatcattctcag

SEQ ID NO: 1756244 - DNA, 15 bp, Homo sapiens
accatcattctcagc

SEQ ID NO: 1756245 - DNA, 15 bp, Homo sapiens
ccatcattctcagca

SEQ ID NO: 1756246 - DNA, 15 bp, Homo sapiens
catcattctcagcaa

SEQ ID NO: 1756247 - DNA, 15 bp, Homo sapiens
atcattctcagcaaa

SEQ ID NO: 1756248 - DNA, 15 bp, Homo sapiens
tcattctcagcaaac

SEQ ID NO: 1756249 - DNA, 15 bp, Homo sapiens
cattctcagcaaact

SEQ ID NO: 1756250 - DNA, 15 bp, Homo sapiens
attctcagcaaacta

SEQ ID NO: 1756251 - DNA, 15 bp, Homo sapiens
ttctcagcaaactaa

SEQ ID NO: 1756252 - DNA, 15 bp, Homo sapiens
tctcagcaaactaac

SEQ ID NO: 1756253 - DNA, 15 bp, Homo sapiens
ctcagcaaactaacc

SEQ ID NO: 1756254 - DNA, 15 bp, Homo sapiens
tcagcaaactaacca

SEQ ID NO: 1756255 - DNA, 15 bp, Homo sapiens
cagcaaactaaccag

SEQ ID NO: 1756256 - DNA, 15 bp, Homo sapiens
agcaaactaaccagg

SEQ ID NO: 1756257 - DNA, 15 bp, Homo sapiens
gcaaactaaccagga

SEQ ID NO: 1756258 - DNA, 15 bp, Homo sapiens
caaactaaccaggaa

SEQ ID NO: 1756259 - DNA, 15 bp, Homo sapiens
aaactaaccaggaag

SEQ ID NO: 1756260 - DNA, 15 bp, Homo sapiens
aactaaccaggaaga

SEQ ID NO: 1756261 - DNA, 15 bp, Homo sapiens
actaaccaggaagag

SEQ ID NO: 1756262 - DNA, 15 bp, Homo sapiens
ctaaccaggaagaga

SEQ ID NO: 1756263 - DNA, 15 bp, Homo sapiens
taaccaggaagagaa

SEQ ID NO: 1756264 - DNA, 15 bp, Homo sapiens
aaccaggaagagaaa

SEQ ID NO: 1756265 - DNA, 15 bp, Homo sapiens
accaggaagagaaaa

SEQ ID NO: 1756266 - DNA, 15 bp, Homo sapiens
ccaggaagagaaaac

SEQ ID NO: 1756267 - DNA, 15 bp, Homo sapiens
caggaagagaaaacc

SEQ ID NO: 1756268 - DNA, 15 bp, Homo sapiens
aggaagagaaaacca

SEQ ID NO: 1756269 - DNA, 15 bp, Homo sapiens
ggaagagaaaaccaa

SEQ ID NO: 1756270 - DNA, 15 bp, Homo sapiens
gaagagaaaaccaaa

SEQ ID NO: 1756271 - DNA, 15 bp, Homo sapiens
aagagaaaaccaaac

SEQ ID NO: 1756272 - DNA, 15 bp, Homo sapiens
agagaaaaccaaaca

SEQ ID NO: 1756273 - DNA, 15 bp, Homo sapiens
gagaaaaccaaacaa

SEQ ID NO: 1756274 - DNA, 15 bp, Homo sapiens
agaaaaccaaacaac

SEQ ID NO: 1756275 - DNA, 15 bp, Homo sapiens
gaaaaccaaacaaca

SEQ ID NO: 1756276 - DNA, 15 bp, Homo sapiens
aaaaccaaacaacac

SEQ ID NO: 1756277 - DNA, 15 bp, Homo sapiens
aaaccaaacaacaca

SEQ ID NO: 1756278 - DNA, 15 bp, Homo sapiens
aaccaaacaacacat

SEQ ID NO: 1756279 - DNA, 15 bp, Homo sapiens
accaaacaacacatg

SEQ ID NO: 1756280 - DNA, 15 bp, Homo sapiens
ccaaacaacacatgt

SEQ ID NO: 1756281 - DNA, 15 bp, Homo sapiens
caaacaacacatgtt

SEQ ID NO: 1756282 - DNA, 15 bp, Homo sapiens
aaacaacacatgttt

SEQ ID NO: 1756283 - DNA, 15 bp, Homo sapiens
aacaacacatgtttt

SEQ ID NO: 1756284 - DNA, 15 bp, Homo sapiens
acaacacatgttttc

SEQ ID NO: 1756285 - DNA, 15 bp, Homo sapiens
caacacatgttttca

SEQ ID NO: 1756286 - DNA, 15 bp, Homo sapiens
aacacatgttttcac

SEQ ID NO: 1756287 - DNA, 15 bp, Homo sapiens
acacatgttttcact

SEQ ID NO: 1756288 - DNA, 15 bp, Homo sapiens
cacatgttttcactt

SEQ ID NO: 1756289 - DNA, 15 bp, Homo sapiens
acatgttttcactta

SEQ ID NO: 1756290 - DNA, 15 bp, Homo sapiens
catgttttcacttat

SEQ ID NO: 1756291 - DNA, 15 bp, Homo sapiens
atgttttcacttata

SEQ ID NO: 1756292 - DNA, 15 bp, Homo sapiens
tgttttcacttataa

SEQ ID NO: 1756293 - DNA, 15 bp, Homo sapiens
gttttcacttataag

SEQ ID NO: 1756294 - DNA, 15 bp, Homo sapiens
ttttcacttataagt

SEQ ID NO: 1756295 - DNA, 15 bp, Homo sapiens
tttcacttataagtt

SEQ ID NO: 1756296 - DNA, 15 bp, Homo sapiens
ttcacttataagtta

SEQ ID NO: 1756297 - DNA, 15 bp, Homo sapiens
tcacttataagttaa

SEQ ID NO: 1756298 - DNA, 15 bp, Homo sapiens
cacttataagttaaa

SEQ ID NO: 1756299 - DNA, 15 bp, Homo sapiens
acttataagttaaaa

SEQ ID NO: 1756300 - DNA, 15 bp, Homo sapiens
cttataagttaaaac

SEQ ID NO: 1756301 - DNA, 15 bp, Homo sapiens
ttataagttaaaact

SEQ ID NO: 1756302 - DNA, 15 bp, Homo sapiens
tataagttaaaactg

SEQ ID NO: 1756303 - DNA, 15 bp, Homo sapiens
ataagttaaaactga

SEQ ID NO: 1756304 - DNA, 15 bp, Homo sapiens
taagttaaaactgaa

SEQ ID NO: 1756305 - DNA, 15 bp, Homo sapiens
aagttaaaactgaac

SEQ ID NO: 1756306 - DNA, 15 bp, Homo sapiens
agttaaaactgaaca

SEQ ID NO: 1756307 - DNA, 15 bp, Homo sapiens
gttaaaactgaacag

SEQ ID NO: 1756308 - DNA, 15 bp, Homo sapiens
ttaaaactgaacagt

SEQ ID NO: 1756309 - DNA, 15 bp, Homo sapiens
taaaactgaacagtg

SEQ ID NO: 1756310 - DNA, 15 bp, Homo sapiens
aaaactgaacagtga

SEQ ID NO: 1756311 - DNA, 15 bp, Homo sapiens
aaactgaacagtgag

SEQ ID NO: 1756312 - DNA, 15 bp, Homo sapiens
aactgaacagtgaga

SEQ ID NO: 1756313 - DNA, 15 bp, Homo sapiens
actgaacagtgagaa

SEQ ID NO: 1756314 - DNA, 15 bp, Homo sapiens
ctgaacagtgagaac

SEQ ID NO: 1756315 - DNA, 15 bp, Homo sapiens
tgaacagtgagaaca

SEQ ID NO: 1756316 - DNA, 15 bp, Homo sapiens
gaacagtgagaacac

SEQ ID NO: 1756317 - DNA, 15 bp, Homo sapiens
aacagtgagaacaca

SEQ ID NO: 1756318 - DNA, 15 bp, Homo sapiens
acagtgagaacacat

SEQ ID NO: 1756319 - DNA, 15 bp, Homo sapiens
cagtgagaacacatg

SEQ ID NO: 1756320 - DNA, 15 bp, Homo sapiens
agtgagaacacatgg

SEQ ID NO: 1756321 - DNA, 15 bp, Homo sapiens
gtgagaacacatgga

SEQ ID NO: 1756322 - DNA, 15 bp, Homo sapiens
aacacatggacacat

SEQ ID NO: 1756323 - DNA, 15 bp, Homo sapiens
acacatggacacatg

SEQ ID NO: 1756324 - DNA, 15 bp, Homo sapiens
cacatggacacatgg

SEQ ID NO: 1756325 - DNA, 15 bp, Homo sapiens
acatggacacatgga

SEQ ID NO: 1756326 - DNA, 15 bp, Homo sapiens
catggacacatggag

SEQ ID NO: 1756327 - DNA, 15 bp, Homo sapiens
atggacacatggagg

SEQ ID NO: 1756328 - DNA, 15 bp, Homo sapiens
tggacacatggaggg

SEQ ID NO: 1756329 - DNA, 15 bp, Homo sapiens
ggacacatggagggg

SEQ ID NO: 1756330 - DNA, 15 bp, Homo sapiens
gacacatggagggga

SEQ ID NO: 1756331 - DNA, 15 bp, Homo sapiens
acacatggaggggaa

SEQ ID NO: 1756332 - DNA, 15 bp, Homo sapiens
cacatggaggggaac

SEQ ID NO: 1756333 - DNA, 15 bp, Homo sapiens
acatggaggggaaca

SEQ ID NO: 1756334 - DNA, 15 bp, Homo sapiens
catggaggggaacat

SEQ ID NO: 1756335 - DNA, 15 bp, Homo sapiens
atggaggggaacatc

SEQ ID NO: 1756336 - DNA, 15 bp, Homo sapiens
tggaggggaacatca

SEQ ID NO: 1756337 - DNA, 15 bp, Homo sapiens
ggaggggaacatcac

SEQ ID NO: 1756338 - DNA, 15 bp, Homo sapiens
gaggggaacatcaca

SEQ ID NO: 1756339 - DNA, 15 bp, Homo sapiens
ggggaacatcacaca

SEQ ID NO: 1756340 - DNA, 15 bp, Homo sapiens
gggaacatcacacac

SEQ ID NO: 1756341 - DNA, 15 bp, Homo sapiens
ggaacatcacacacc

SEQ ID NO: 1756342 - DNA, 15 bp, Homo sapiens
gaacatcacacaccg

SEQ ID NO: 1756343 - DNA, 15 bp, Homo sapiens
aacatcacacaccgg

SEQ ID NO: 1756344 - DNA, 15 bp, Homo sapiens
acatcacacaccggg

SEQ ID NO: 1756345 - DNA, 15 bp, Homo sapiens
catcacacaccgggg

SEQ ID NO: 1756346 - DNA, 15 bp, Homo sapiens
atcacacaccggggc

SEQ ID NO: 1756347 - DNA, 15 bp, Homo sapiens
tcacacaccggggcc

SEQ ID NO: 1756348 - DNA, 15 bp, Homo sapiens
cacacaccggggcct

SEQ ID NO: 1756349 - DNA, 15 bp, Homo sapiens
acacaccggggcctg

SEQ ID NO: 1756350 - DNA, 15 bp, Homo sapiens
cacaccggggcctgt

SEQ ID NO: 1756351 - DNA, 15 bp, Homo sapiens
acaccggggcctgtc

SEQ ID NO: 1756352 - DNA, 15 bp, Homo sapiens
caccggggcctgtca

SEQ ID NO: 1756353 - DNA, 15 bp, Homo sapiens
accggggcctgtcag

SEQ ID NO: 1756354 - DNA, 15 bp, Homo sapiens
ccggggcctgtcagg

SEQ ID NO: 1756355 - DNA, 15 bp, Homo sapiens
cggggcctgtcaggg

SEQ ID NO: 1756356 - DNA, 15 bp, Homo sapiens
ggggcctgtcagggg

SEQ ID NO: 1756357 - DNA, 15 bp, Homo sapiens
gggcctgtcaggggg

SEQ ID NO: 1756358 - DNA, 15 bp, Homo sapiens
ggcctgtcagggggt

SEQ ID NO: 1756359 - DNA, 15 bp, Homo sapiens
gcctgtcagggggtg

SEQ ID NO: 1756360 - DNA, 15 bp, Homo sapiens
cctgtcagggggtgc

SEQ ID NO: 1756361 - DNA, 15 bp, Homo sapiens
ctgtcagggggtgcg

SEQ ID NO: 1756362 - DNA, 15 bp, Homo sapiens
tgtcagggggtgcgg

SEQ ID NO: 1756363 - DNA, 15 bp, Homo sapiens
gtcagggggtgcggg

SEQ ID NO: 1756364 - DNA, 15 bp, Homo sapiens
tcagggggtgcgggt

SEQ ID NO: 1756365 - DNA, 15 bp, Homo sapiens
cagggggtgcgggtc

SEQ ID NO: 1756366 - DNA, 15 bp, Homo sapiens
agggggtgcgggtct

SEQ ID NO: 1756367 - DNA, 15 bp, Homo sapiens
gggggtgcgggtcta

SEQ ID NO: 1756368 - DNA, 15 bp, Homo sapiens
ggggtgcgggtctaa

SEQ ID NO: 1756369 - DNA, 15 bp, Homo sapiens
gggtgcgggtctaag

SEQ ID NO: 1756370 - DNA, 15 bp, Homo sapiens
ggtgcgggtctaagg

SEQ ID NO: 1756371 - DNA, 15 bp, Homo sapiens
gtgcgggtctaaggg

SEQ ID NO: 1756372 - DNA, 15 bp, Homo sapiens
tgcgggtctaaggga

SEQ ID NO: 1756373 - DNA, 15 bp, Homo sapiens
gcgggtctaagggag

SEQ ID NO: 1756374 - DNA, 15 bp, Homo sapiens
cgggtctaagggagg

SEQ ID NO: 1756375 - DNA, 15 bp, Homo sapiens
gggtctaagggaggg

SEQ ID NO: 1756376 - DNA, 15 bp, Homo sapiens
ggtctaagggaggga

SEQ ID NO: 1756377 - DNA, 15 bp, Homo sapiens
gtctaagggagggat

SEQ ID NO: 1756378 - DNA, 15 bp, Homo sapiens
tctaagggagggata

SEQ ID NO: 1756379 - DNA, 15 bp, Homo sapiens
ctaagggagggatag

SEQ ID NO: 1756380 - DNA, 15 bp, Homo sapiens
taagggagggatagc

SEQ ID NO: 1756381 - DNA, 15 bp, Homo sapiens
aagggagggatagca

SEQ ID NO: 1756382 - DNA, 15 bp, Homo sapiens
agggagggatagcat

SEQ ID NO: 1756383 - DNA, 15 bp, Homo sapiens
gagggatagcattag

SEQ ID NO: 1756384 - DNA, 15 bp, Homo sapiens
agggatagcattagg

SEQ ID NO: 1756385 - DNA, 15 bp, Homo sapiens
gggatagcattagga

SEQ ID NO: 1756386 - DNA, 15 bp, Homo sapiens
ggatagcattaggaa

SEQ ID NO: 1756387 - DNA, 15 bp, Homo sapiens
gatagcattaggaaa

SEQ ID NO: 1756388 - DNA, 15 bp, Homo sapiens
atagcattaggaaaa

SEQ ID NO: 1756389 - DNA, 15 bp, Homo sapiens
tagcattaggaaaaa

SEQ ID NO: 1756390 - DNA, 15 bp, Homo sapiens
agcattaggaaaaat

SEQ ID NO: 1756391 - DNA, 15 bp, Homo sapiens
gcattaggaaaaata

SEQ ID NO: 1756392 - DNA, 15 bp, Homo sapiens
cattaggaaaaatac

SEQ ID NO: 1756393 - DNA, 15 bp, Homo sapiens
attaggaaaaatacc

SEQ ID NO: 1756394 - DNA, 15 bp, Homo sapiens
ttaggaaaaatacct

SEQ ID NO: 1756395 - DNA, 15 bp, Homo sapiens
taggaaaaataccta

SEQ ID NO: 1756396 - DNA, 15 bp, Homo sapiens
aggaaaaatacctaa

SEQ ID NO: 1756397 - DNA, 15 bp, Homo sapiens
ggaaaaatacctaat

SEQ ID NO: 1756398 - DNA, 15 bp, Homo sapiens
gaaaaatacctaatg

SEQ ID NO: 1756399 - DNA, 15 bp, Homo sapiens
aaaaatacctaatgt

SEQ ID NO: 1756400 - DNA, 15 bp, Homo sapiens
aaaatacctaatgta

SEQ ID NO: 1756401 - DNA, 15 bp, Homo sapiens
aaatacctaatgtag

SEQ ID NO: 1756402 - DNA, 15 bp, Homo sapiens
aatacctaatgtaga

SEQ ID NO: 1756403 - DNA, 15 bp, Homo sapiens
atacctaatgtagat

SEQ ID NO: 1756404 - DNA, 15 bp, Homo sapiens
tacctaatgtagatg

SEQ ID NO: 1756405 - DNA, 15 bp, Homo sapiens
acctaatgtagatga

SEQ ID NO: 1756406 - DNA, 15 bp, Homo sapiens
cctaatgtagatgat

SEQ ID NO: 1756407 - DNA, 15 bp, Homo sapiens
ctaatgtagatgatg

SEQ ID NO: 1756408 - DNA, 15 bp, Homo sapiens
taatgtagatgatgg

SEQ ID NO: 1756409 - DNA, 15 bp, Homo sapiens
aatgtagatgatggg

SEQ ID NO: 1756410 - DNA, 15 bp, Homo sapiens
atgtagatgatgggt

SEQ ID NO: 1756411 - DNA, 15 bp, Homo sapiens
tgtagatgatgggtt

SEQ ID NO: 1756412 - DNA, 15 bp, Homo sapiens
gtagatgatgggttg

SEQ ID NO: 1756413 - DNA, 15 bp, Homo sapiens
tagatgatgggttga

SEQ ID NO: 1756414 - DNA, 15 bp, Homo sapiens
agatgatgggttgat

SEQ ID NO: 1756415 - DNA, 15 bp, Homo sapiens
gatgatgggttgata

SEQ ID NO: 1756416 - DNA, 15 bp, Homo sapiens
atgatgggttgatag

SEQ ID NO: 1756417 - DNA, 15 bp, Homo sapiens
tgatgggttgatagg

SEQ ID NO: 1756418 - DNA, 15 bp, Homo sapiens
gatgggttgataggt

SEQ ID NO: 1756419 - DNA, 15 bp, Homo sapiens
atgggttgataggtg

SEQ ID NO: 1756420 - DNA, 15 bp, Homo sapiens
tgggttgataggtgc

SEQ ID NO: 1756421 - DNA, 15 bp, Homo sapiens
aggtgcagcaaacca

SEQ ID NO: 1756422 - DNA, 15 bp, Homo sapiens
caaaccaccatggca

SEQ ID NO: 1756423 - DNA, 15 bp, Homo sapiens
aaaccaccatggcac

SEQ ID NO: 1756424 - DNA, 15 bp, Homo sapiens
aaccaccatggcacg

SEQ ID NO: 1756425 - DNA, 15 bp, Homo sapiens
accaccatggcacgc

SEQ ID NO: 1756426 - DNA, 15 bp, Homo sapiens
ccaccatggcacgcg

SEQ ID NO: 1756427 - DNA, 15 bp, Homo sapiens
caccatggcacgcgt

SEQ ID NO: 1756428 - DNA, 15 bp, Homo sapiens
accatggcacgcgta

SEQ ID NO: 1756429 - DNA, 15 bp, Homo sapiens
ccatggcacgcgtat

SEQ ID NO: 1756430 - DNA, 15 bp, Homo sapiens
catggcacgcgtata

SEQ ID NO: 1756431 - DNA, 15 bp, Homo sapiens
atggcacgcgtatac

SEQ ID NO: 1756432 - DNA, 15 bp, Homo sapiens
tggcacgcgtatacc

SEQ ID NO: 1756433 - DNA, 15 bp, Homo sapiens
ggcacgcgtatacct

SEQ ID NO: 1756434 - DNA, 15 bp, Homo sapiens
gcacgcgtataccta

SEQ ID NO: 1756435 - DNA, 15 bp, Homo sapiens
cacgcgtatacctat

SEQ ID NO: 1756436 - DNA, 15 bp, Homo sapiens
acgcgtatacctatg

SEQ ID NO: 1756437 - DNA, 15 bp, Homo sapiens
cgcgtatacctatgt

SEQ ID NO: 1756438 - DNA, 15 bp, Homo sapiens
gcgtatacctatgta

SEQ ID NO: 1756439 - DNA, 15 bp, Homo sapiens
cgtatacctatgtaa

SEQ ID NO: 1756440 - DNA, 15 bp, Homo sapiens
taacaaacctgcaca

SEQ ID NO: 1756441 - DNA, 15 bp, Homo sapiens
aacaaacctgcacat

SEQ ID NO: 1756442 - DNA, 15 bp, Homo sapiens
acaaacctgcacatt

SEQ ID NO: 1756443 - DNA, 15 bp, Homo sapiens
caaacctgcacattc

SEQ ID NO: 1756444 - DNA, 15 bp, Homo sapiens
aaacctgcacattct

SEQ ID NO: 1756445 - DNA, 15 bp, Homo sapiens
aacctgcacattctg

SEQ ID NO: 1756446 - DNA, 15 bp, Homo sapiens
acctgcacattctgc

SEQ ID NO: 1756447 - DNA, 15 bp, Homo sapiens
cctgcacattctgca

SEQ ID NO: 1756448 - DNA, 15 bp, Homo sapiens
ctgcacattctgcac

SEQ ID NO: 1756449 - DNA, 15 bp, Homo sapiens
tgcacattctgcaca

SEQ ID NO: 1756450 - DNA, 15 bp, Homo sapiens
gcacattctgcacat

SEQ ID NO: 1756451 - DNA, 15 bp, Homo sapiens
cacattctgcacatg

SEQ ID NO: 1756452 - DNA, 15 bp, Homo sapiens
acattctgcacatgt

SEQ ID NO: 1756453 - DNA, 15 bp, Homo sapiens
cattctgcacatgta

SEQ ID NO: 1756454 - DNA, 15 bp, Homo sapiens
attctgcacatgtat

SEQ ID NO: 1756455 - DNA, 15 bp, Homo sapiens
ttctgcacatgtatc

SEQ ID NO: 1756456 - DNA, 15 bp, Homo sapiens
tctgcacatgtatcc

SEQ ID NO: 1756457 - DNA, 15 bp, Homo sapiens
ctgcacatgtatcct

SEQ ID NO: 1756458 - DNA, 15 bp, Homo sapiens
tgcacatgtatccta

SEQ ID NO: 1756459 - DNA, 15 bp, Homo sapiens
gcacatgtatcctag

SEQ ID NO: 1756460 - DNA, 15 bp, Homo sapiens
cacatgtatcctaga

SEQ ID NO: 1756461 - DNA, 15 bp, Homo sapiens
acatgtatcctagaa

SEQ ID NO: 1756462 - DNA, 15 bp, Homo sapiens
catgtatcctagaac

SEQ ID NO: 1756463 - DNA, 15 bp, Homo sapiens
atgtatcctagaact

SEQ ID NO: 1756464 - DNA, 15 bp, Homo sapiens
tgtatcctagaactt

SEQ ID NO: 1756465 - DNA, 15 bp, Homo sapiens
gtatcctagaactta

SEQ ID NO: 1756466 - DNA, 15 bp, Homo sapiens
tatcctagaacttaa

SEQ ID NO: 1756467 - DNA, 15 bp, Homo sapiens
atcctagaacttaaa

SEQ ID NO: 1756468 - DNA, 15 bp, Homo sapiens
tcctagaacttaaag

SEQ ID NO: 1756469 - DNA, 15 bp, Homo sapiens
cctagaacttaaagt

SEQ ID NO: 1756470 - DNA, 15 bp, Homo sapiens
ctagaacttaaagta

SEQ ID NO: 1756471 - DNA, 15 bp, Homo sapiens
tagaacttaaagtat

SEQ ID NO: 1756472 - DNA, 15 bp, Homo sapiens
aacttaaagtataat

SEQ ID NO: 1756473 - DNA, 15 bp, Homo sapiens
acttaaagtataata

SEQ ID NO: 1756474 - DNA, 15 bp, Homo sapiens
cttaaagtataataa

SEQ ID NO: 1756475 - DNA, 15 bp, Homo sapiens
ttaaagtataataaa

SEQ ID NO: 1756476 - DNA, 15 bp, Homo sapiens
taaagtataataaaa

SEQ ID NO: 1756477 - DNA, 15 bp, Homo sapiens
aaagtataataaaaa

SEQ ID NO: 1756478 - DNA, 15 bp, Homo sapiens
aagtataataaaaaa

SEQ ID NO: 1756479 - DNA, 15 bp, Homo sapiens
agtataataaaaaaa

SEQ ID NO: 1756480 - DNA, 15 bp, Homo sapiens
gtataataaaaaaac

SEQ ID NO: 1756481 - DNA, 15 bp, Homo sapiens
tataataaaaaaaca

SEQ ID NO: 1756482 - DNA, 15 bp, Homo sapiens
ataataaaaaaacag

SEQ ID NO: 1756483 - DNA, 15 bp, Homo sapiens
taataaaaaaacaga

SEQ ID NO: 1756484 - DNA, 15 bp, Homo sapiens
aataaaaaaacagaa

SEQ ID NO: 1756485 - DNA, 15 bp, Homo sapiens
ataaaaaaacagaaa

SEQ ID NO: 1756486 - DNA, 15 bp, Homo sapiens
taaaaaaacagaaaa

SEQ ID NO: 1756487 - DNA, 15 bp, Homo sapiens
aaaaaaacagaaaat

SEQ ID NO: 1756488 - DNA, 15 bp, Homo sapiens
aaaaaacagaaaata

SEQ ID NO: 1756489 - DNA, 15 bp, Homo sapiens
aaaaacagaaaatat

SEQ ID NO: 1756490 - DNA, 15 bp, Homo sapiens
aaaacagaaaatatt

SEQ ID NO: 1756491 - DNA, 15 bp, Homo sapiens
aaacagaaaatattt

SEQ ID NO: 1756492 - DNA, 15 bp, Homo sapiens
aacagaaaatattta

SEQ ID NO: 1756493 - DNA, 15 bp, Homo sapiens
acagaaaatatttaa

SEQ ID NO: 1756494 - DNA, 15 bp, Homo sapiens
cagaaaatatttaaa

SEQ ID NO: 1756495 - DNA, 15 bp, Homo sapiens
agaaaatatttaaaa

SEQ ID NO: 1756496 - DNA, 15 bp, Homo sapiens
gaaaatatttaaaat

SEQ ID NO: 1756497 - DNA, 15 bp, Homo sapiens
aaatatttaaaatat

SEQ ID NO: 1756498 - DNA, 15 bp, Homo sapiens
aatatttaaaatata

SEQ ID NO: 1756499 - DNA, 15 bp, Homo sapiens
atatttaaaatatat

SEQ ID NO: 1756500 - DNA, 15 bp, Homo sapiens
tatttaaaatatatc

SEQ ID NO: 1756501 - DNA, 15 bp, Homo sapiens
atttaaaatatatct

SEQ ID NO: 1756502 - DNA, 15 bp, Homo sapiens
tttaaaatatatctt

SEQ ID NO: 1756503 - DNA, 15 bp, Homo sapiens
ttaaaatatatcttt

SEQ ID NO: 1756504 - DNA, 15 bp, Homo sapiens
taaaatatatctttc

SEQ ID NO: 1756505 - DNA, 15 bp, Homo sapiens
aaaatatatctttca

SEQ ID NO: 1756506 - DNA, 15 bp, Homo sapiens
aaatatatctttcaa

SEQ ID NO: 1756507 - DNA, 15 bp, Homo sapiens
aatatatctttcaaa

SEQ ID NO: 1756508 - DNA, 15 bp, Homo sapiens
atatatctttcaaat

SEQ ID NO: 1756509 - DNA, 15 bp, Homo sapiens
tatatctttcaaatt

SEQ ID NO: 1756510 - DNA, 15 bp, Homo sapiens
atatctttcaaatta

SEQ ID NO: 1756511 - DNA, 15 bp, Homo sapiens
tatctttcaaattat

SEQ ID NO: 1756512 - DNA, 15 bp, Homo sapiens
atctttcaaattatc

SEQ ID NO: 1756513 - DNA, 15 bp, Homo sapiens
tctttcaaattatct

SEQ ID NO: 1756514 - DNA, 15 bp, Homo sapiens
ctttcaaattatctt

SEQ ID NO: 1756515 - DNA, 15 bp, Homo sapiens
tttcaaattatcttt

SEQ ID NO: 1756516 - DNA, 15 bp, Homo sapiens
ttcaaattatctttt

SEQ ID NO: 1756517 - DNA, 15 bp, Homo sapiens
tcaaattatcttttc

SEQ ID NO: 1756518 - DNA, 15 bp, Homo sapiens
caaattatcttttca

SEQ ID NO: 1756519 - DNA, 15 bp, Homo sapiens
aaattatcttttcaa

SEQ ID NO: 1756520 - DNA, 15 bp, Homo sapiens
aattatcttttcaaa

SEQ ID NO: 1756521 - DNA, 15 bp, Homo sapiens
attatcttttcaaat

SEQ ID NO: 1756522 - DNA, 15 bp, Homo sapiens
ttatcttttcaaatt

SEQ ID NO: 1756523 - DNA, 15 bp, Homo sapiens
tatcttttcaaattt

SEQ ID NO: 1756524 - DNA, 15 bp, Homo sapiens
atcttttcaaattta

SEQ ID NO: 1756525 - DNA, 15 bp, Homo sapiens
tcttttcaaatttaa

SEQ ID NO: 1756526 - DNA, 15 bp, Homo sapiens
cttttcaaatttaaa

SEQ ID NO: 1756527 - DNA, 15 bp, Homo sapiens
ttttcaaatttaaat

SEQ ID NO: 1756528 - DNA, 15 bp, Homo sapiens
tttcaaatttaaatc

SEQ ID NO: 1756529 - DNA, 15 bp, Homo sapiens
ttcaaatttaaatcg

SEQ ID NO: 1756530 - DNA, 15 bp, Homo sapiens
tcaaatttaaatcga

SEQ ID NO: 1756531 - DNA, 15 bp, Homo sapiens
caaatttaaatcgag

SEQ ID NO: 1756532 - DNA, 15 bp, Homo sapiens
aaatttaaatcgagg

SEQ ID NO: 1756533 - DNA, 15 bp, Homo sapiens
aatttaaatcgaggg

SEQ ID NO: 1756534 - DNA, 15 bp, Homo sapiens
atttaaatcgagggt

SEQ ID NO: 1756535 - DNA, 15 bp, Homo sapiens
tttaaatcgagggtc

SEQ ID NO: 1756536 - DNA, 15 bp, Homo sapiens
ttaaatcgagggtca

SEQ ID NO: 1756537 - DNA, 15 bp, Homo sapiens
taaatcgagggtcat

SEQ ID NO: 1756538 - DNA, 15 bp, Homo sapiens
aaatcgagggtcatt

SEQ ID NO: 1756539 - DNA, 15 bp, Homo sapiens
aatcgagggtcattt

SEQ ID NO: 1756540 - DNA, 15 bp, Homo sapiens
atcgagggtcatttt

SEQ ID NO: 1756541 - DNA, 15 bp, Homo sapiens
tcgagggtcatttta

SEQ ID NO: 1756542 - DNA, 15 bp, Homo sapiens
cgagggtcattttat

SEQ ID NO: 1756543 - DNA, 15 bp, Homo sapiens
gagggtcattttatg

SEQ ID NO: 1756544 - DNA, 15 bp, Homo sapiens
agggtcattttatgt

SEQ ID NO: 1756545 - DNA, 15 bp, Homo sapiens
gggtcattttatgta

SEQ ID NO: 1756546 - DNA, 15 bp, Homo sapiens
ggtcattttatgtat

SEQ ID NO: 1756547 - DNA, 15 bp, Homo sapiens
gtcattttatgtatg

SEQ ID NO: 1756548 - DNA, 15 bp, Homo sapiens
tcattttatgtatga

SEQ ID NO: 1756549 - DNA, 15 bp, Homo sapiens
cattttatgtatgag

SEQ ID NO: 1756550 - DNA, 15 bp, Homo sapiens
attttatgtatgagt

SEQ ID NO: 1756551 - DNA, 15 bp, Homo sapiens
ttttatgtatgagta

SEQ ID NO: 1756552 - DNA, 15 bp, Homo sapiens
tttatgtatgagtat

SEQ ID NO: 1756553 - DNA, 15 bp, Homo sapiens
ttatgtatgagtata

SEQ ID NO: 1756554 - DNA, 15 bp, Homo sapiens
tatgtatgagtataa

SEQ ID NO: 1756555 - DNA, 15 bp, Homo sapiens
atgtatgagtataat

SEQ ID NO: 1756556 - DNA, 15 bp, Homo sapiens
tgtatgagtataatt

SEQ ID NO: 1756557 - DNA, 15 bp, Homo sapiens
gtatgagtataattt

SEQ ID NO: 1756558 - DNA, 15 bp, Homo sapiens
tatgagtataatttg

SEQ ID NO: 1756559 - DNA, 15 bp, Homo sapiens
atgagtataatttgt

SEQ ID NO: 1756560 - DNA, 15 bp, Homo sapiens
tgagtataatttgta

SEQ ID NO: 1756561 - DNA, 15 bp, Homo sapiens
gagtataatttgtaa

SEQ ID NO: 1756562 - DNA, 15 bp, Homo sapiens
agtataatttgtaat

SEQ ID NO: 1756563 - DNA, 15 bp, Homo sapiens
gtataatttgtaatg

SEQ ID NO: 1756564 - DNA, 15 bp, Homo sapiens
tataatttgtaatga

SEQ ID NO: 1756565 - DNA, 15 bp, Homo sapiens
ataatttgtaatgaa

SEQ ID NO: 1756566 - DNA, 15 bp, Homo sapiens
taatttgtaatgaat

SEQ ID NO: 1756567 - DNA, 15 bp, Homo sapiens
aatttgtaatgaata

SEQ ID NO: 1756568 - DNA, 15 bp, Homo sapiens
atttgtaatgaatag

SEQ ID NO: 1756569 - DNA, 15 bp, Homo sapiens
tttgtaatgaatagc

SEQ ID NO: 1756570 - DNA, 15 bp, Homo sapiens
ttgtaatgaatagcc

SEQ ID NO: 1756571 - DNA, 15 bp, Homo sapiens
tgtaatgaatagccc

SEQ ID NO: 1756572 - DNA, 15 bp, Homo sapiens
gtaatgaatagccca

SEQ ID NO: 1756573 - DNA, 15 bp, Homo sapiens
taatgaatagcccat

SEQ ID NO: 1756574 - DNA, 15 bp, Homo sapiens
aatgaatagcccata

SEQ ID NO: 1756575 - DNA, 15 bp, Homo sapiens
atgaatagcccatag

SEQ ID NO: 1756576 - DNA, 15 bp, Homo sapiens
tgaatagcccatagt

SEQ ID NO: 1756577 - DNA, 15 bp, Homo sapiens
gaatagcccatagtt

SEQ ID NO: 1756578 - DNA, 15 bp, Homo sapiens
aatagcccatagttt

SEQ ID NO: 1756579 - DNA, 15 bp, Homo sapiens
atagcccatagtttt

SEQ ID NO: 1756580 - DNA, 15 bp, Homo sapiens
tagcccatagtttta

SEQ ID NO: 1756581 - DNA, 15 bp, Homo sapiens
agcccatagttttag

SEQ ID NO: 1756582 - DNA, 15 bp, Homo sapiens
gcccatagttttaga

SEQ ID NO: 1756583 - DNA, 15 bp, Homo sapiens
cccatagttttagag

SEQ ID NO: 1756584 - DNA, 15 bp, Homo sapiens
ccatagttttagagt

SEQ ID NO: 1756585 - DNA, 15 bp, Homo sapiens
catagttttagagtc

SEQ ID NO: 1756586 - DNA, 15 bp, Homo sapiens
atagttttagagtcc

SEQ ID NO: 1756587 - DNA, 15 bp, Homo sapiens
tagttttagagtcct

SEQ ID NO: 1756588 - DNA, 15 bp, Homo sapiens
agttttagagtcctg

SEQ ID NO: 1756589 - DNA, 15 bp, Homo sapiens
gttttagagtcctga

SEQ ID NO: 1756590 - DNA, 15 bp, Homo sapiens
ttttagagtcctgat

SEQ ID NO: 1756591 - DNA, 15 bp, Homo sapiens
tttagagtcctgatt

SEQ ID NO: 1756592 - DNA, 15 bp, Homo sapiens
ttagagtcctgattc

SEQ ID NO: 1756593 - DNA, 15 bp, Homo sapiens
tagagtcctgattca

SEQ ID NO: 1756594 - DNA, 15 bp, Homo sapiens
agagtcctgattcat

SEQ ID NO: 1756595 - DNA, 15 bp, Homo sapiens
gagtcctgattcatt

SEQ ID NO: 1756596 - DNA, 15 bp, Homo sapiens
agtcctgattcattg

SEQ ID NO: 1756597 - DNA, 15 bp, Homo sapiens
gtcctgattcattga

SEQ ID NO: 1756598 - DNA, 15 bp, Homo sapiens
tcctgattcattgac

SEQ ID NO: 1756599 - DNA, 15 bp, Homo sapiens
cctgattcattgaca

SEQ ID NO: 1756600 - DNA, 15 bp, Homo sapiens
ctgattcattgacaa

SEQ ID NO: 1756601 - DNA, 15 bp, Homo sapiens
tgattcattgacaaa

SEQ ID NO: 1756602 - DNA, 15 bp, Homo sapiens
gattcattgacaaac

SEQ ID NO: 1756603 - DNA, 15 bp, Homo sapiens
attcattgacaaact

SEQ ID NO: 1756604 - DNA, 15 bp, Homo sapiens
ttcattgacaaactt

SEQ ID NO: 1756605 - DNA, 15 bp, Homo sapiens
tcattgacaaactta

SEQ ID NO: 1756606 - DNA, 15 bp, Homo sapiens
cattgacaaacttat

SEQ ID NO: 1756607 - DNA, 15 bp, Homo sapiens
attgacaaacttata

SEQ ID NO: 1756608 - DNA, 15 bp, Homo sapiens
ttgacaaacttataa

SEQ ID NO: 1756609 - DNA, 15 bp, Homo sapiens
tgacaaacttataaa

SEQ ID NO: 1756610 - DNA, 15 bp, Homo sapiens
gacaaacttataaac

SEQ ID NO: 1756611 - DNA, 15 bp, Homo sapiens
acaaacttataaaca

SEQ ID NO: 1756612 - DNA, 15 bp, Homo sapiens
caaacttataaacaa

SEQ ID NO: 1756613 - DNA, 15 bp, Homo sapiens
aaacttataaacaaa

SEQ ID NO: 1756614 - DNA, 15 bp, Homo sapiens
aacttataaacaaaa

SEQ ID NO: 1756615 - DNA, 15 bp, Homo sapiens
acttataaacaaaat

SEQ ID NO: 1756616 - DNA, 15 bp, Homo sapiens
cttataaacaaaatt

SEQ ID NO: 1756617 - DNA, 15 bp, Homo sapiens
ttataaacaaaattt

SEQ ID NO: 1756618 - DNA, 15 bp, Homo sapiens
tataaacaaaatttt

SEQ ID NO: 1756619 - DNA, 15 bp, Homo sapiens
ataaacaaaatttta

SEQ ID NO: 1756620 - DNA, 15 bp, Homo sapiens
taaacaaaattttaa

SEQ ID NO: 1756621 - DNA, 15 bp, Homo sapiens
aaacaaaattttaag

SEQ ID NO: 1756622 - DNA, 15 bp, Homo sapiens
aacaaaattttaagc

SEQ ID NO: 1756623 - DNA, 15 bp, Homo sapiens
acaaaattttaagct

SEQ ID NO: 1756624 - DNA, 15 bp, Homo sapiens
caaaattttaagctt

SEQ ID NO: 1756625 - DNA, 15 bp, Homo sapiens
aaaattttaagcttt

SEQ ID NO: 1756626 - DNA, 15 bp, Homo sapiens
aaattttaagctttt

SEQ ID NO: 1756627 - DNA, 15 bp, Homo sapiens
aattttaagcttttt

SEQ ID NO: 1756628 - DNA, 15 bp, Homo sapiens
attttaagctttttt

SEQ ID NO: 1756629 - DNA, 15 bp, Homo sapiens
ttttaagcttttttg

SEQ ID NO: 1756630 - DNA, 15 bp, Homo sapiens
tttaagcttttttgg

SEQ ID NO: 1756631 - DNA, 15 bp, Homo sapiens
ttaagcttttttggt

SEQ ID NO: 1756632 - DNA, 15 bp, Homo sapiens
taagcttttttggta

SEQ ID NO: 1756633 - DNA, 15 bp, Homo sapiens
aagcttttttggtat

SEQ ID NO: 1756634 - DNA, 15 bp, Homo sapiens
agcttttttggtatt

SEQ ID NO: 1756635 - DNA, 15 bp, Homo sapiens
gcttttttggtattc

SEQ ID NO: 1756636 - DNA, 15 bp, Homo sapiens
cttttttggtattct

SEQ ID NO: 1756637 - DNA, 15 bp, Homo sapiens
ttttttggtattctt

SEQ ID NO: 1756638 - DNA, 15 bp, Homo sapiens
tttttggtattcttt

SEQ ID NO: 1756639 - DNA, 15 bp, Homo sapiens
ttttggtattctttt

SEQ ID NO: 1756640 - DNA, 15 bp, Homo sapiens
tttggtattcttttg

SEQ ID NO: 1756641 - DNA, 15 bp, Homo sapiens
ttggtattcttttga

SEQ ID NO: 1756642 - DNA, 15 bp, Homo sapiens
tggtattcttttgaa

SEQ ID NO: 1756643 - DNA, 15 bp, Homo sapiens
ggtattcttttgaaa

SEQ ID NO: 1756644 - DNA, 15 bp, Homo sapiens
gtattcttttgaaat

SEQ ID NO: 1756645 - DNA, 15 bp, Homo sapiens
tattcttttgaaatg

SEQ ID NO: 1756646 - DNA, 15 bp, Homo sapiens
attcttttgaaatgt

SEQ ID NO: 1756647 - DNA, 15 bp, Homo sapiens
ttcttttgaaatgtc

SEQ ID NO: 1756648 - DNA, 15 bp, Homo sapiens
tcttttgaaatgtca

SEQ ID NO: 1756649 - DNA, 15 bp, Homo sapiens
cttttgaaatgtcaa

SEQ ID NO: 1756650 - DNA, 15 bp, Homo sapiens
ttttgaaatgtcaaa

SEQ ID NO: 1756651 - DNA, 15 bp, Homo sapiens
tttgaaatgtcaaaa

SEQ ID NO: 1756652 - DNA, 15 bp, Homo sapiens
ttgaaatgtcaaaat

SEQ ID NO: 1756653 - DNA, 15 bp, Homo sapiens
tgaaatgtcaaaatt

SEQ ID NO: 1756654 - DNA, 15 bp, Homo sapiens
gaaatgtcaaaattg

SEQ ID NO: 1756655 - DNA, 15 bp, Homo sapiens
aaatgtcaaaattga

SEQ ID NO: 1756656 - DNA, 15 bp, Homo sapiens
aatgtcaaaattgat

SEQ ID NO: 1756657 - DNA, 15 bp, Homo sapiens
atgtcaaaattgatg

SEQ ID NO: 1756658 - DNA, 15 bp, Homo sapiens
tgtcaaaattgatgg

SEQ ID NO: 1756659 - DNA, 15 bp, Homo sapiens
gtcaaaattgatggg

SEQ ID NO: 1756660 - DNA, 15 bp, Homo sapiens
tcaaaattgatggga

SEQ ID NO: 1756661 - DNA, 15 bp, Homo sapiens
caaaattgatgggaa

SEQ ID NO: 1756662 - DNA, 15 bp, Homo sapiens
aaaattgatgggaag

SEQ ID NO: 1756663 - DNA, 15 bp, Homo sapiens
aaattgatgggaagc

SEQ ID NO: 1756664 - DNA, 15 bp, Homo sapiens
aattgatgggaagca

SEQ ID NO: 1756665 - DNA, 15 bp, Homo sapiens
attgatgggaagcaa

SEQ ID NO: 1756666 - DNA, 15 bp, Homo sapiens
ttgatgggaagcaaa

SEQ ID NO: 1756667 - DNA, 15 bp, Homo sapiens
tgatgggaagcaaac

SEQ ID NO: 1756668 - DNA, 15 bp, Homo sapiens
gatgggaagcaaaca

SEQ ID NO: 1756669 - DNA, 15 bp, Homo sapiens
atgggaagcaaacac

SEQ ID NO: 1756670 - DNA, 15 bp, Homo sapiens
tgggaagcaaacaca

SEQ ID NO: 1756671 - DNA, 15 bp, Homo sapiens
gggaagcaaacacaa

SEQ ID NO: 1756672 - DNA, 15 bp, Homo sapiens
ggaagcaaacacaaa

SEQ ID NO: 1756673 - DNA, 15 bp, Homo sapiens
gaagcaaacacaaaa

SEQ ID NO: 1756674 - DNA, 15 bp, Homo sapiens
aagcaaacacaaaag

SEQ ID NO: 1756675 - DNA, 15 bp, Homo sapiens
agcaaacacaaaagg

SEQ ID NO: 1756676 - DNA, 15 bp, Homo sapiens
gcaaacacaaaaggg

SEQ ID NO: 1756677 - DNA, 15 bp, Homo sapiens
caaacacaaaaggga

SEQ ID NO: 1756678 - DNA, 15 bp, Homo sapiens
aaacacaaaagggag

SEQ ID NO: 1756679 - DNA, 15 bp, Homo sapiens
aacacaaaagggaga

SEQ ID NO: 1756680 - DNA, 15 bp, Homo sapiens
acacaaaagggagaa

SEQ ID NO: 1756681 - DNA, 15 bp, Homo sapiens
cacaaaagggagaac

SEQ ID NO: 1756682 - DNA, 15 bp, Homo sapiens
acaaaagggagaaca

SEQ ID NO: 1756683 - DNA, 15 bp, Homo sapiens
caaaagggagaacag

SEQ ID NO: 1756684 - DNA, 15 bp, Homo sapiens
aaaagggagaacagt

SEQ ID NO: 1756685 - DNA, 15 bp, Homo sapiens
aaagggagaacagtc

SEQ ID NO: 1756686 - DNA, 15 bp, Homo sapiens
aagggagaacagtct

SEQ ID NO: 1756687 - DNA, 15 bp, Homo sapiens
agggagaacagtctg

SEQ ID NO: 1756688 - DNA, 15 bp, Homo sapiens
gggagaacagtctgt

SEQ ID NO: 1756689 - DNA, 15 bp, Homo sapiens
ggagaacagtctgtg

SEQ ID NO: 1756690 - DNA, 15 bp, Homo sapiens
gagaacagtctgtgg

SEQ ID NO: 1756691 - DNA, 15 bp, Homo sapiens
agaacagtctgtggc

SEQ ID NO: 1756692 - DNA, 15 bp, Homo sapiens
gaacagtctgtggct

SEQ ID NO: 1756693 - DNA, 15 bp, Homo sapiens
aacagtctgtggctc

SEQ ID NO: 1756694 - DNA, 15 bp, Homo sapiens
acagtctgtggctct

SEQ ID NO: 1756695 - DNA, 15 bp, Homo sapiens
cagtctgtggctctg

SEQ ID NO: 1756696 - DNA, 15 bp, Homo sapiens
agtctgtggctctga

SEQ ID NO: 1756697 - DNA, 15 bp, Homo sapiens
gtctgtggctctgaa

SEQ ID NO: 1756698 - DNA, 15 bp, Homo sapiens
tctgtggctctgaaa

SEQ ID NO: 1756699 - DNA, 15 bp, Homo sapiens
ctgtggctctgaaaa

SEQ ID NO: 1756700 - DNA, 15 bp, Homo sapiens
tgtggctctgaaaaa

SEQ ID NO: 1756701 - DNA, 15 bp, Homo sapiens
gtggctctgaaaaaa

SEQ ID NO: 1756702 - DNA, 15 bp, Homo sapiens
tggctctgaaaaaac

SEQ ID NO: 1756703 - DNA, 15 bp, Homo sapiens
ggctctgaaaaaacc

SEQ ID NO: 1756704 - DNA, 15 bp, Homo sapiens
gctctgaaaaaacca

SEQ ID NO: 1756705 - DNA, 15 bp, Homo sapiens
ctctgaaaaaaccaa

SEQ ID NO: 1756706 - DNA, 15 bp, Homo sapiens
tctgaaaaaaccaaa

SEQ ID NO: 1756707 - DNA, 15 bp, Homo sapiens
ctgaaaaaaccaaaa

SEQ ID NO: 1756708 - DNA, 15 bp, Homo sapiens
tgaaaaaaccaaaaa

SEQ ID NO: 1756709 - DNA, 15 bp, Homo sapiens
gaaaaaaccaaaaag

SEQ ID NO: 1756710 - DNA, 15 bp, Homo sapiens
aaaaaaccaaaaagg

SEQ ID NO: 1756711 - DNA, 15 bp, Homo sapiens
aaaaaccaaaaagga

SEQ ID NO: 1756712 - DNA, 15 bp, Homo sapiens
aaaaccaaaaaggat

SEQ ID NO: 1756713 - DNA, 15 bp, Homo sapiens
aaaccaaaaaggata

SEQ ID NO: 1756714 - DNA, 15 bp, Homo sapiens
aaccaaaaaggatat

SEQ ID NO: 1756715 - DNA, 15 bp, Homo sapiens
accaaaaaggatatc

SEQ ID NO: 1756716 - DNA, 15 bp, Homo sapiens
ccaaaaaggatatct

SEQ ID NO: 1756717 - DNA, 15 bp, Homo sapiens
caaaaaggatatctg

SEQ ID NO: 1756718 - DNA, 15 bp, Homo sapiens
aaaaaggatatctgt

SEQ ID NO: 1756719 - DNA, 15 bp, Homo sapiens
aaaaggatatctgtt

SEQ ID NO: 1756720 - DNA, 15 bp, Homo sapiens
aaaggatatctgttg

SEQ ID NO: 1756721 - DNA, 15 bp, Homo sapiens
aaggatatctgttgt

SEQ ID NO: 1756722 - DNA, 15 bp, Homo sapiens
aggatatctgttgta

SEQ ID NO: 1756723 - DNA, 15 bp, Homo sapiens
ggatatctgttgtat

SEQ ID NO: 1756724 - DNA, 15 bp, Homo sapiens
gatatctgttgtatg

SEQ ID NO: 1756725 - DNA, 15 bp, Homo sapiens
atatctgttgtatgt

SEQ ID NO: 1756726 - DNA, 15 bp, Homo sapiens
tatctgttgtatgtt

SEQ ID NO: 1756727 - DNA, 15 bp, Homo sapiens
atctgttgtatgttt

SEQ ID NO: 1756728 - DNA, 15 bp, Homo sapiens
tctgttgtatgtttg

SEQ ID NO: 1756729 - DNA, 15 bp, Homo sapiens
ctgttgtatgtttgt

SEQ ID NO: 1756730 - DNA, 15 bp, Homo sapiens
tgttgtatgtttgta

SEQ ID NO: 1756731 - DNA, 15 bp, Homo sapiens
gttgtatgtttgtat

SEQ ID NO: 1756732 - DNA, 15 bp, Homo sapiens
ttgtatgtttgtatg

SEQ ID NO: 1756733 - DNA, 15 bp, Homo sapiens
tgtatgtttgtatgg

SEQ ID NO: 1756734 - DNA, 15 bp, Homo sapiens
gtatgtttgtatggt

SEQ ID NO: 1756735 - DNA, 15 bp, Homo sapiens
tatgtttgtatggtg

SEQ ID NO: 1756736 - DNA, 15 bp, Homo sapiens
atgtttgtatggtgg

SEQ ID NO: 1756737 - DNA, 15 bp, Homo sapiens
tgtttgtatggtggg

SEQ ID NO: 1756738 - DNA, 15 bp, Homo sapiens
gtttgtatggtgggt

SEQ ID NO: 1756739 - DNA, 15 bp, Homo sapiens
tttgtatggtgggtc

SEQ ID NO: 1756740 - DNA, 15 bp, Homo sapiens
ttgtatggtgggtca

SEQ ID NO: 1756741 - DNA, 15 bp, Homo sapiens
tgtatggtgggtcat

SEQ ID NO: 1756742 - DNA, 15 bp, Homo sapiens
gtatggtgggtcatt

SEQ ID NO: 1756743 - DNA, 15 bp, Homo sapiens
tatggtgggtcatta

SEQ ID NO: 1756744 - DNA, 15 bp, Homo sapiens
atggtgggtcattaa

SEQ ID NO: 1756745 - DNA, 15 bp, Homo sapiens
tggtgggtcattaac

SEQ ID NO: 1756746 - DNA, 15 bp, Homo sapiens
ggtgggtcattaacc

SEQ ID NO: 1756747 - DNA, 15 bp, Homo sapiens
gtgggtcattaacct

SEQ ID NO: 1756748 - DNA, 15 bp, Homo sapiens
tgggtcattaacctt

SEQ ID NO: 1756749 - DNA, 15 bp, Homo sapiens
gggtcattaaccttt

SEQ ID NO: 1756750 - DNA, 15 bp, Homo sapiens
ggtcattaacctttg

SEQ ID NO: 1756751 - DNA, 15 bp, Homo sapiens
gtcattaacctttgg

SEQ ID NO: 1756752 - DNA, 15 bp, Homo sapiens
tcattaacctttggt

SEQ ID NO: 1756753 - DNA, 15 bp, Homo sapiens
cattaacctttggtg

SEQ ID NO: 1756754 - DNA, 15 bp, Homo sapiens
attaacctttggtgt

SEQ ID NO: 1756755 - DNA, 15 bp, Homo sapiens
ttaacctttggtgta

SEQ ID NO: 1756756 - DNA, 15 bp, Homo sapiens
taacctttggtgtac

SEQ ID NO: 1756757 - DNA, 15 bp, Homo sapiens
aacctttggtgtact

SEQ ID NO: 1756758 - DNA, 15 bp, Homo sapiens
acctttggtgtactt

SEQ ID NO: 1756759 - DNA, 15 bp, Homo sapiens
cctttggtgtacttt

SEQ ID NO: 1756760 - DNA, 15 bp, Homo sapiens
ctttggtgtactttg

SEQ ID NO: 1756761 - DNA, 15 bp, Homo sapiens
tttggtgtactttgc

SEQ ID NO: 1756762 - DNA, 15 bp, Homo sapiens
ttggtgtactttgca

SEQ ID NO: 1756763 - DNA, 15 bp, Homo sapiens
tggtgtactttgcag

SEQ ID NO: 1756764 - DNA, 15 bp, Homo sapiens
ggtgtactttgcaga

SEQ ID NO: 1756765 - DNA, 15 bp, Homo sapiens
gtgtactttgcagaa

SEQ ID NO: 1756766 - DNA, 15 bp, Homo sapiens
tgtactttgcagaag

SEQ ID NO: 1756767 - DNA, 15 bp, Homo sapiens
gtactttgcagaagt

SEQ ID NO: 1756768 - DNA, 15 bp, Homo sapiens
tactttgcagaagta

SEQ ID NO: 1756769 - DNA, 15 bp, Homo sapiens
actttgcagaagtat

SEQ ID NO: 1756770 - DNA, 15 bp, Homo sapiens
ctttgcagaagtatt

SEQ ID NO: 1756771 - DNA, 15 bp, Homo sapiens
tttgcagaagtattt

SEQ ID NO: 1756772 - DNA, 15 bp, Homo sapiens
ttgcagaagtatttt

SEQ ID NO: 1756773 - DNA, 15 bp, Homo sapiens
tgcagaagtatttta

SEQ ID NO: 1756774 - DNA, 15 bp, Homo sapiens
gcagaagtattttaa

SEQ ID NO: 1756775 - DNA, 15 bp, Homo sapiens
cagaagtattttaag

SEQ ID NO: 1756776 - DNA, 15 bp, Homo sapiens
agaagtattttaagt

SEQ ID NO: 1756777 - DNA, 15 bp, Homo sapiens
gaagtattttaagta

SEQ ID NO: 1756778 - DNA, 15 bp, Homo sapiens
aagtattttaagtat

SEQ ID NO: 1756779 - DNA, 15 bp, Homo sapiens
agtattttaagtatt

SEQ ID NO: 1756780 - DNA, 15 bp, Homo sapiens
gtattttaagtattt

SEQ ID NO: 1756781 - DNA, 15 bp, Homo sapiens
tattttaagtattta

SEQ ID NO: 1756782 - DNA, 15 bp, Homo sapiens
attttaagtatttac

SEQ ID NO: 1756783 - DNA, 15 bp, Homo sapiens
ttttaagtatttacc

SEQ ID NO: 1756784 - DNA, 15 bp, Homo sapiens
tttaagtatttacca

SEQ ID NO: 1756785 - DNA, 15 bp, Homo sapiens
ttaagtatttaccat

SEQ ID NO: 1756786 - DNA, 15 bp, Homo sapiens
taagtatttaccatt

SEQ ID NO: 1756787 - DNA, 15 bp, Homo sapiens
aagtatttaccattg

SEQ ID NO: 1756788 - DNA, 15 bp, Homo sapiens
agtatttaccattgg

SEQ ID NO: 1756789 - DNA, 15 bp, Homo sapiens
gtatttaccattgga

SEQ ID NO: 1756790 - DNA, 15 bp, Homo sapiens
tatttaccattggac

SEQ ID NO: 1756791 - DNA, 15 bp, Homo sapiens
atttaccattggaca

SEQ ID NO: 1756792 - DNA, 15 bp, Homo sapiens
tttaccattggacat

SEQ ID NO: 1756793 - DNA, 15 bp, Homo sapiens
ttaccattggacatt

SEQ ID NO: 1756794 - DNA, 15 bp, Homo sapiens
taccattggacatta

SEQ ID NO: 1756795 - DNA, 15 bp, Homo sapiens
accattggacattat

SEQ ID NO: 1756796 - DNA, 15 bp, Homo sapiens
ccattggacattatt

SEQ ID NO: 1756797 - DNA, 15 bp, Homo sapiens
cattggacattattt

SEQ ID NO: 1756798 - DNA, 15 bp, Homo sapiens
attggacattatttg

SEQ ID NO: 1756799 - DNA, 15 bp, Homo sapiens
ttggacattatttgt

SEQ ID NO: 1756800 - DNA, 15 bp, Homo sapiens
tggacattatttgtt

SEQ ID NO: 1756801 - DNA, 15 bp, Homo sapiens
ggacattatttgttt

SEQ ID NO: 1756802 - DNA, 15 bp, Homo sapiens
gacattatttgtttt

SEQ ID NO: 1756803 - DNA, 15 bp, Homo sapiens
acattatttgtttta

SEQ ID NO: 1756804 - DNA, 15 bp, Homo sapiens
cattatttgttttaa

SEQ ID NO: 1756805 - DNA, 15 bp, Homo sapiens
attatttgttttaag

SEQ ID NO: 1756806 - DNA, 15 bp, Homo sapiens
ttatttgttttaagt

SEQ ID NO: 1756807 - DNA, 15 bp, Homo sapiens
tatttgttttaagtt

SEQ ID NO: 1756808 - DNA, 15 bp, Homo sapiens
atttgttttaagtta

SEQ ID NO: 1756809 - DNA, 15 bp, Homo sapiens
tttgttttaagttat

SEQ ID NO: 1756810 - DNA, 15 bp, Homo sapiens
ttgttttaagttata

SEQ ID NO: 1756811 - DNA, 15 bp, Homo sapiens
tgttttaagttatat

SEQ ID NO: 1756812 - DNA, 15 bp, Homo sapiens
gttttaagttatatt

SEQ ID NO: 1756813 - DNA, 15 bp, Homo sapiens
ttttaagttatattt

SEQ ID NO: 1756814 - DNA, 15 bp, Homo sapiens
tttaagttatatttt

SEQ ID NO: 1756815 - DNA, 15 bp, Homo sapiens
ttaagttatattttg

SEQ ID NO: 1756816 - DNA, 15 bp, Homo sapiens
taagttatattttgc

SEQ ID NO: 1756817 - DNA, 15 bp, Homo sapiens
aagttatattttgct

SEQ ID NO: 1756818 - DNA, 15 bp, Homo sapiens
agttatattttgctg

SEQ ID NO: 1756819 - DNA, 15 bp, Homo sapiens
gttatattttgctga

SEQ ID NO: 1756820 - DNA, 15 bp, Homo sapiens
ttatattttgctgag

SEQ ID NO: 1756821 - DNA, 15 bp, Homo sapiens
tatattttgctgaga

SEQ ID NO: 1756822 - DNA, 15 bp, Homo sapiens
atattttgctgagag

SEQ ID NO: 1756823 - DNA, 15 bp, Homo sapiens
tattttgctgagagc

SEQ ID NO: 1756824 - DNA, 15 bp, Homo sapiens
attttgctgagagct

SEQ ID NO: 1756825 - DNA, 15 bp, Homo sapiens
ttttgctgagagcta

SEQ ID NO: 1756826 - DNA, 15 bp, Homo sapiens
tttgctgagagctac

SEQ ID NO: 1756827 - DNA, 15 bp, Homo sapiens
ttgctgagagctaca

SEQ ID NO: 1756828 - DNA, 15 bp, Homo sapiens
tgctgagagctacaa

SEQ ID NO: 1756829 - DNA, 15 bp, Homo sapiens
gctgagagctacaac

SEQ ID NO: 1756830 - DNA, 15 bp, Homo sapiens
ctgagagctacaact

SEQ ID NO: 1756831 - DNA, 15 bp, Homo sapiens
tgagagctacaactc

SEQ ID NO: 1756832 - DNA, 15 bp, Homo sapiens
gagagctacaactca

SEQ ID NO: 1756833 - DNA, 15 bp, Homo sapiens
agagctacaactcag

SEQ ID NO: 1756834 - DNA, 15 bp, Homo sapiens
gagctacaactcagg

SEQ ID NO: 1756835 - DNA, 15 bp, Homo sapiens
agctacaactcagga

SEQ ID NO: 1756836 - DNA, 15 bp, Homo sapiens
gctacaactcaggaa

SEQ ID NO: 1756837 - DNA, 15 bp, Homo sapiens
ctacaactcaggaag

SEQ ID NO: 1756838 - DNA, 15 bp, Homo sapiens
tacaactcaggaagg

SEQ ID NO: 1756839 - DNA, 15 bp, Homo sapiens
acaactcaggaaggc

SEQ ID NO: 1756840 - DNA, 15 bp, Homo sapiens
caactcaggaaggca

SEQ ID NO: 1756841 - DNA, 15 bp, Homo sapiens
aactcaggaaggcaa

SEQ ID NO: 1756842 - DNA, 15 bp, Homo sapiens
actcaggaaggcaag

SEQ ID NO: 1756843 - DNA, 15 bp, Homo sapiens
ctcaggaaggcaagt

SEQ ID NO: 1756844 - DNA, 15 bp, Homo sapiens
tcaggaaggcaagtg

SEQ ID NO: 1756845 - DNA, 15 bp, Homo sapiens
caggaaggcaagtga

SEQ ID NO: 1756846 - DNA, 15 bp, Homo sapiens
aggaaggcaagtgaa

SEQ ID NO: 1756847 - DNA, 15 bp, Homo sapiens
ggaaggcaagtgaat

SEQ ID NO: 1756848 - DNA, 15 bp, Homo sapiens
gaaggcaagtgaatt

SEQ ID NO: 1756849 - DNA, 15 bp, Homo sapiens
aaggcaagtgaattg

SEQ ID NO: 1756850 - DNA, 15 bp, Homo sapiens
aggcaagtgaattgt

SEQ ID NO: 1756851 - DNA, 15 bp, Homo sapiens
ggcaagtgaattgta

SEQ ID NO: 1756852 - DNA, 15 bp, Homo sapiens
gcaagtgaattgtaa

SEQ ID NO: 1756853 - DNA, 15 bp, Homo sapiens
caagtgaattgtaag

SEQ ID NO: 1756854 - DNA, 15 bp, Homo sapiens
aagtgaattgtaaga

SEQ ID NO: 1756855 - DNA, 15 bp, Homo sapiens
agtgaattgtaagat

SEQ ID NO: 1756856 - DNA, 15 bp, Homo sapiens
gtgaattgtaagata

SEQ ID NO: 1756857 - DNA, 15 bp, Homo sapiens
tgaattgtaagataa

SEQ ID NO: 1756858 - DNA, 15 bp, Homo sapiens
gaattgtaagataac

SEQ ID NO: 1756859 - DNA, 15 bp, Homo sapiens
aattgtaagataacg

SEQ ID NO: 1756860 - DNA, 15 bp, Homo sapiens
attgtaagataacga

SEQ ID NO: 1756861 - DNA, 15 bp, Homo sapiens
ttgtaagataacgat

SEQ ID NO: 1756862 - DNA, 15 bp, Homo sapiens
tgtaagataacgatt

SEQ ID NO: 1756863 - DNA, 15 bp, Homo sapiens
gtaagataacgatta

SEQ ID NO: 1756864 - DNA, 15 bp, Homo sapiens
taagataacgattaa

SEQ ID NO: 1756865 - DNA, 15 bp, Homo sapiens
aagataacgattaag

SEQ ID NO: 1756866 - DNA, 15 bp, Homo sapiens
agataacgattaagc

SEQ ID NO: 1756867 - DNA, 15 bp, Homo sapiens
gataacgattaagcc

SEQ ID NO: 1756868 - DNA, 15 bp, Homo sapiens
ataacgattaagcca

SEQ ID NO: 1756869 - DNA, 15 bp, Homo sapiens
taacgattaagccac

SEQ ID NO: 1756870 - DNA, 15 bp, Homo sapiens
aacgattaagccaca

SEQ ID NO: 1756871 - DNA, 15 bp, Homo sapiens
acgattaagccacat

SEQ ID NO: 1756872 - DNA, 15 bp, Homo sapiens
cgattaagccacatt

SEQ ID NO: 1756873 - DNA, 15 bp, Homo sapiens
gattaagccacattt

SEQ ID NO: 1756874 - DNA, 15 bp, Homo sapiens
attaagccacattta

SEQ ID NO: 1756875 - DNA, 15 bp, Homo sapiens
ttaagccacatttaa

SEQ ID NO: 1756876 - DNA, 15 bp, Homo sapiens
taagccacatttaac

SEQ ID NO: 1756877 - DNA, 15 bp, Homo sapiens
aagccacatttaaca

SEQ ID NO: 1756878 - DNA, 15 bp, Homo sapiens
agccacatttaacac

SEQ ID NO: 1756879 - DNA, 15 bp, Homo sapiens
gccacatttaacact

SEQ ID NO: 1756880 - DNA, 15 bp, Homo sapiens
ccacatttaacactt

SEQ ID NO: 1756881 - DNA, 15 bp, Homo sapiens
cacatttaacacttt

SEQ ID NO: 1756882 - DNA, 15 bp, Homo sapiens
acatttaacactttt

SEQ ID NO: 1756883 - DNA, 15 bp, Homo sapiens
catttaacacttttt

SEQ ID NO: 1756884 - DNA, 15 bp, Homo sapiens
atttaacacttttta

SEQ ID NO: 1756885 - DNA, 15 bp, Homo sapiens
tttaacactttttaa

SEQ ID NO: 1756886 - DNA, 15 bp, Homo sapiens
ttaacactttttaaa

SEQ ID NO: 1756887 - DNA, 15 bp, Homo sapiens
taacactttttaaaa

SEQ ID NO: 1756888 - DNA, 15 bp, Homo sapiens
aacactttttaaaag

SEQ ID NO: 1756889 - DNA, 15 bp, Homo sapiens
acactttttaaaagc

SEQ ID NO: 1756890 - DNA, 15 bp, Homo sapiens
cactttttaaaagca

SEQ ID NO: 1756891 - DNA, 15 bp, Homo sapiens
actttttaaaagcat

SEQ ID NO: 1756892 - DNA, 15 bp, Homo sapiens
ctttttaaaagcatg

SEQ ID NO: 1756893 - DNA, 15 bp, Homo sapiens
tttttaaaagcatgg

SEQ ID NO: 1756894 - DNA, 15 bp, Homo sapiens
ttttaaaagcatggg

SEQ ID NO: 1756895 - DNA, 15 bp, Homo sapiens
tttaaaagcatgggc

SEQ ID NO: 1756896 - DNA, 15 bp, Homo sapiens
ttaaaagcatgggcc

SEQ ID NO: 1756897 - DNA, 15 bp, Homo sapiens
taaaagcatgggcca

SEQ ID NO: 1756898 - DNA, 15 bp, Homo sapiens
aaaagcatgggccag

SEQ ID NO: 1756899 - DNA, 15 bp, Homo sapiens
aaagcatgggccagg

SEQ ID NO: 1756900 - DNA, 15 bp, Homo sapiens
aagcatgggccagga

SEQ ID NO: 1756901 - DNA, 15 bp, Homo sapiens
agcatgggccaggac

SEQ ID NO: 1756902 - DNA, 15 bp, Homo sapiens
gcatgggccaggaca

SEQ ID NO: 1756903 - DNA, 15 bp, Homo sapiens
catgggccaggacaa

SEQ ID NO: 1756904 - DNA, 15 bp, Homo sapiens
atgggccaggacaat

SEQ ID NO: 1756905 - DNA, 15 bp, Homo sapiens
tgggccaggacaatg

SEQ ID NO: 1756906 - DNA, 15 bp, Homo sapiens
gggccaggacaatga

SEQ ID NO: 1756907 - DNA, 15 bp, Homo sapiens
ggccaggacaatgaa

SEQ ID NO: 1756908 - DNA, 15 bp, Homo sapiens
gccaggacaatgaag

SEQ ID NO: 1756909 - DNA, 15 bp, Homo sapiens
ccaggacaatgaagc

SEQ ID NO: 1756910 - DNA, 15 bp, Homo sapiens
caggacaatgaagca

SEQ ID NO: 1756911 - DNA, 15 bp, Homo sapiens
aggacaatgaagcag

SEQ ID NO: 1756912 - DNA, 15 bp, Homo sapiens
ggacaatgaagcagt

SEQ ID NO: 1756913 - DNA, 15 bp, Homo sapiens
gacaatgaagcagta

SEQ ID NO: 1756914 - DNA, 15 bp, Homo sapiens
acaatgaagcagtat

SEQ ID NO: 1756915 - DNA, 15 bp, Homo sapiens
caatgaagcagtatg

SEQ ID NO: 1756916 - DNA, 15 bp, Homo sapiens
aatgaagcagtatga

SEQ ID NO: 1756917 - DNA, 15 bp, Homo sapiens
atgaagcagtatgat

SEQ ID NO: 1756918 - DNA, 15 bp, Homo sapiens
tgaagcagtatgatg

SEQ ID NO: 1756919 - DNA, 15 bp, Homo sapiens
gaagcagtatgatgc

SEQ ID NO: 1756920 - DNA, 15 bp, Homo sapiens
aagcagtatgatgcc

SEQ ID NO: 1756921 - DNA, 15 bp, Homo sapiens
agcagtatgatgcca

SEQ ID NO: 1756922 - DNA, 15 bp, Homo sapiens
gcagtatgatgccat

SEQ ID NO: 1756923 - DNA, 15 bp, Homo sapiens
cagtatgatgccata

SEQ ID NO: 1756924 - DNA, 15 bp, Homo sapiens
agtatgatgccatat

SEQ ID NO: 1756925 - DNA, 15 bp, Homo sapiens
gtatgatgccatata

SEQ ID NO: 1756926 - DNA, 15 bp, Homo sapiens
tatgatgccatatat

SEQ ID NO: 1756927 - DNA, 15 bp, Homo sapiens
atgatgccatatata

SEQ ID NO: 1756928 - DNA, 15 bp, Homo sapiens
tgatgccatatatac

SEQ ID NO: 1756929 - DNA, 15 bp, Homo sapiens
gatgccatatatact

SEQ ID NO: 1756930 - DNA, 15 bp, Homo sapiens
atgccatatatactt

SEQ ID NO: 1756931 - DNA, 15 bp, Homo sapiens
tgccatatatacttt

SEQ ID NO: 1756932 - DNA, 15 bp, Homo sapiens
gccatatatactttt

SEQ ID NO: 1756933 - DNA, 15 bp, Homo sapiens
ccatatatactttta

SEQ ID NO: 1756934 - DNA, 15 bp, Homo sapiens
catatatacttttac

SEQ ID NO: 1756935 - DNA, 15 bp, Homo sapiens
atatatacttttaca

SEQ ID NO: 1756936 - DNA, 15 bp, Homo sapiens
tatatacttttacac

SEQ ID NO: 1756937 - DNA, 15 bp, Homo sapiens
atatacttttacaca

SEQ ID NO: 1756938 - DNA, 15 bp, Homo sapiens
tatacttttacacaa

SEQ ID NO: 1756939 - DNA, 15 bp, Homo sapiens
atacttttacacaac

SEQ ID NO: 1756940 - DNA, 15 bp, Homo sapiens
tacttttacacaaca

SEQ ID NO: 1756941 - DNA, 15 bp, Homo sapiens
acttttacacaacag

SEQ ID NO: 1756942 - DNA, 15 bp, Homo sapiens
cttttacacaacagc

SEQ ID NO: 1756943 - DNA, 15 bp, Homo sapiens
ttttacacaacagcc

SEQ ID NO: 1756944 - DNA, 15 bp, Homo sapiens
tttacacaacagcca

SEQ ID NO: 1756945 - DNA, 15 bp, Homo sapiens
ttacacaacagccat

SEQ ID NO: 1756946 - DNA, 15 bp, Homo sapiens
tacacaacagccatg

SEQ ID NO: 1756947 - DNA, 15 bp, Homo sapiens
acacaacagccatgc

SEQ ID NO: 1756948 - DNA, 15 bp, Homo sapiens
cacaacagccatgct

SEQ ID NO: 1756949 - DNA, 15 bp, Homo sapiens
acaacagccatgcta

SEQ ID NO: 1756950 - DNA, 15 bp, Homo sapiens
caacagccatgctaa

SEQ ID NO: 1756951 - DNA, 15 bp, Homo sapiens
aacagccatgctaat

SEQ ID NO: 1756952 - DNA, 15 bp, Homo sapiens
acagccatgctaata

SEQ ID NO: 1756953 - DNA, 15 bp, Homo sapiens
cagccatgctaatat

SEQ ID NO: 1756954 - DNA, 15 bp, Homo sapiens
agccatgctaatata

SEQ ID NO: 1756955 - DNA, 15 bp, Homo sapiens
gccatgctaatataa

SEQ ID NO: 1756956 - DNA, 15 bp, Homo sapiens
ccatgctaatataat

SEQ ID NO: 1756957 - DNA, 15 bp, Homo sapiens
catgctaatataatg

SEQ ID NO: 1756958 - DNA, 15 bp, Homo sapiens
atgctaatataatga

SEQ ID NO: 1756959 - DNA, 15 bp, Homo sapiens
tgctaatataatgat

SEQ ID NO: 1756960 - DNA, 15 bp, Homo sapiens
gctaatataatgata

SEQ ID NO: 1756961 - DNA, 15 bp, Homo sapiens
ctaatataatgataa

SEQ ID NO: 1756962 - DNA, 15 bp, Homo sapiens
taatataatgataaa

SEQ ID NO: 1756963 - DNA, 15 bp, Homo sapiens
aatataatgataaag

SEQ ID NO: 1756964 - DNA, 15 bp, Homo sapiens
atataatgataaagc

SEQ ID NO: 1756965 - DNA, 15 bp, Homo sapiens
tataatgataaagca

SEQ ID NO: 1756966 - DNA, 15 bp, Homo sapiens
ataatgataaagcaa

SEQ ID NO: 1756967 - DNA, 15 bp, Homo sapiens
taatgataaagcaat

SEQ ID NO: 1756968 - DNA, 15 bp, Homo sapiens
aatgataaagcaatt

SEQ ID NO: 1756969 - DNA, 15 bp, Homo sapiens
atgataaagcaatta

SEQ ID NO: 1756970 - DNA, 15 bp, Homo sapiens
tgataaagcaattat

SEQ ID NO: 1756971 - DNA, 15 bp, Homo sapiens
gataaagcaattatg

SEQ ID NO: 1756972 - DNA, 15 bp, Homo sapiens
ataaagcaattatgc

SEQ ID NO: 1756973 - DNA, 15 bp, Homo sapiens
taaagcaattatgct

SEQ ID NO: 1756974 - DNA, 15 bp, Homo sapiens
aaagcaattatgcta

SEQ ID NO: 1756975 - DNA, 15 bp, Homo sapiens
aagcaattatgctat

SEQ ID NO: 1756976 - DNA, 15 bp, Homo sapiens
agcaattatgctata

SEQ ID NO: 1756977 - DNA, 15 bp, Homo sapiens
gcaattatgctatat

SEQ ID NO: 1756978 - DNA, 15 bp, Homo sapiens
caattatgctatatt

SEQ ID NO: 1756979 - DNA, 15 bp, Homo sapiens
aattatgctatattt

SEQ ID NO: 1756980 - DNA, 15 bp, Homo sapiens
attatgctatatttt

SEQ ID NO: 1756981 - DNA, 15 bp, Homo sapiens
atgctatatttttaa

SEQ ID NO: 1756982 - DNA, 15 bp, Homo sapiens
tgctatatttttaaa

SEQ ID NO: 1756983 - DNA, 15 bp, Homo sapiens
gctatatttttaaaa

SEQ ID NO: 1756984 - DNA, 15 bp, Homo sapiens
ctatatttttaaaag

SEQ ID NO: 1756985 - DNA, 15 bp, Homo sapiens
tatatttttaaaagc

SEQ ID NO: 1756986 - DNA, 15 bp, Homo sapiens
atatttttaaaagct

SEQ ID NO: 1756987 - DNA, 15 bp, Homo sapiens
tatttttaaaagctt

SEQ ID NO: 1756988 - DNA, 15 bp, Homo sapiens
atttttaaaagcttc

SEQ ID NO: 1756989 - DNA, 15 bp, Homo sapiens
tttttaaaagcttct

SEQ ID NO: 1756990 - DNA, 15 bp, Homo sapiens
ttttaaaagcttctc

SEQ ID NO: 1756991 - DNA, 15 bp, Homo sapiens
tttaaaagcttctca

SEQ ID NO: 1756992 - DNA, 15 bp, Homo sapiens
ttaaaagcttctcat

SEQ ID NO: 1756993 - DNA, 15 bp, Homo sapiens
taaaagcttctcatg

SEQ ID NO: 1756994 - DNA, 15 bp, Homo sapiens
aaaagcttctcatga

SEQ ID NO: 1756995 - DNA, 15 bp, Homo sapiens
aaagcttctcatgaa

SEQ ID NO: 1756996 - DNA, 15 bp, Homo sapiens
aagcttctcatgaat

SEQ ID NO: 1756997 - DNA, 15 bp, Homo sapiens
agcttctcatgaatt

SEQ ID NO: 1756998 - DNA, 15 bp, Homo sapiens
gcttctcatgaatta

SEQ ID NO: 1756999 - DNA, 15 bp, Homo sapiens
cttctcatgaattac

SEQ ID NO: 1757000 - DNA, 15 bp, Homo sapiens
ttctcatgaattacc

SEQ ID NO: 1757001 - DNA, 15 bp, Homo sapiens
tctcatgaattacct

SEQ ID NO: 1757002 - DNA, 15 bp, Homo sapiens
ctcatgaattaccta

SEQ ID NO: 1757003 - DNA, 15 bp, Homo sapiens
tcatgaattacctaa

SEQ ID NO: 1757004 - DNA, 15 bp, Homo sapiens
catgaattacctaaa

SEQ ID NO: 1757005 - DNA, 15 bp, Homo sapiens
atgaattacctaaaa

SEQ ID NO: 1757006 - DNA, 15 bp, Homo sapiens
tgaattacctaaaat

SEQ ID NO: 1757007 - DNA, 15 bp, Homo sapiens
gaattacctaaaata

SEQ ID NO: 1757008 - DNA, 15 bp, Homo sapiens
aattacctaaaataa

SEQ ID NO: 1757009 - DNA, 15 bp, Homo sapiens
attacctaaaataac

SEQ ID NO: 1757010 - DNA, 15 bp, Homo sapiens
tacctaaaataacca

SEQ ID NO: 1757011 - DNA, 15 bp, Homo sapiens
acctaaaataaccat

SEQ ID NO: 1757012 - DNA, 15 bp, Homo sapiens
cctaaaataaccatg

SEQ ID NO: 1757013 - DNA, 15 bp, Homo sapiens
ctaaaataaccatgt

SEQ ID NO: 1757014 - DNA, 15 bp, Homo sapiens
taaaataaccatgta

SEQ ID NO: 1757015 - DNA, 15 bp, Homo sapiens
aaaataaccatgtat

SEQ ID NO: 1757016 - DNA, 15 bp, Homo sapiens
aaataaccatgtatt

SEQ ID NO: 1757017 - DNA, 15 bp, Homo sapiens
aataaccatgtattt

SEQ ID NO: 1757018 - DNA, 15 bp, Homo sapiens
ataaccatgtattta

SEQ ID NO: 1757019 - DNA, 15 bp, Homo sapiens
taaccatgtatttac

SEQ ID NO: 1757020 - DNA, 15 bp, Homo sapiens
aaccatgtatttact

SEQ ID NO: 1757021 - DNA, 15 bp, Homo sapiens
accatgtatttactt

SEQ ID NO: 1757022 - DNA, 15 bp, Homo sapiens
ccatgtatttacttt

SEQ ID NO: 1757023 - DNA, 15 bp, Homo sapiens
catgtatttactttt

SEQ ID NO: 1757024 - DNA, 15 bp, Homo sapiens
atgtatttacttttc

SEQ ID NO: 1757025 - DNA, 15 bp, Homo sapiens
tgtatttacttttct

SEQ ID NO: 1757026 - DNA, 15 bp, Homo sapiens
gtatttacttttctt

SEQ ID NO: 1757027 - DNA, 15 bp, Homo sapiens
tatttacttttcttt

SEQ ID NO: 1757028 - DNA, 15 bp, Homo sapiens
atttacttttctttg

SEQ ID NO: 1757029 - DNA, 15 bp, Homo sapiens
tttacttttctttgc

SEQ ID NO: 1757030 - DNA, 15 bp, Homo sapiens
ttacttttctttgcc

SEQ ID NO: 1757031 - DNA, 15 bp, Homo sapiens
tacttttctttgcca

SEQ ID NO: 1757032 - DNA, 15 bp, Homo sapiens
acttttctttgccag

SEQ ID NO: 1757033 - DNA, 15 bp, Homo sapiens
cttttctttgccaga

SEQ ID NO: 1757034 - DNA, 15 bp, Homo sapiens
ttttctttgccagaa

SEQ ID NO: 1757035 - DNA, 15 bp, Homo sapiens
tttctttgccagaaa

SEQ ID NO: 1757036 - DNA, 15 bp, Homo sapiens
ttctttgccagaaag

SEQ ID NO: 1757037 - DNA, 15 bp, Homo sapiens
tctttgccagaaaga

SEQ ID NO: 1757038 - DNA, 15 bp, Homo sapiens
ctttgccagaaagag

SEQ ID NO: 1757039 - DNA, 15 bp, Homo sapiens
tttgccagaaagagg

SEQ ID NO: 1757040 - DNA, 15 bp, Homo sapiens
ttgccagaaagagga

SEQ ID NO: 1757041 - DNA, 15 bp, Homo sapiens
tgccagaaagaggaa

SEQ ID NO: 1757042 - DNA, 15 bp, Homo sapiens
gccagaaagaggaaa

SEQ ID NO: 1757043 - DNA, 15 bp, Homo sapiens
ccagaaagaggaaac

SEQ ID NO: 1757044 - DNA, 15 bp, Homo sapiens
cagaaagaggaaaca

SEQ ID NO: 1757045 - DNA, 15 bp, Homo sapiens
agaaagaggaaacat

SEQ ID NO: 1757046 - DNA, 15 bp, Homo sapiens
gaaagaggaaacatt

SEQ ID NO: 1757047 - DNA, 15 bp, Homo sapiens
aaagaggaaacattt

SEQ ID NO: 1757048 - DNA, 15 bp, Homo sapiens
aagaggaaacatttt

SEQ ID NO: 1757049 - DNA, 15 bp, Homo sapiens
agaggaaacatttta

SEQ ID NO: 1757050 - DNA, 15 bp, Homo sapiens
gaggaaacattttat

SEQ ID NO: 1757051 - DNA, 15 bp, Homo sapiens
aggaaacattttatt

SEQ ID NO: 1757052 - DNA, 15 bp, Homo sapiens
ggaaacattttattt

SEQ ID NO: 1757053 - DNA, 15 bp, Homo sapiens
gaaacattttatttt

SEQ ID NO: 1757054 - DNA, 15 bp, Homo sapiens
aaacattttatttta

SEQ ID NO: 1757055 - DNA, 15 bp, Homo sapiens
aacattttattttaa

SEQ ID NO: 1757056 - DNA, 15 bp, Homo sapiens
acattttattttaat

SEQ ID NO: 1757057 - DNA, 15 bp, Homo sapiens
cattttattttaatt

SEQ ID NO: 1757058 - DNA, 15 bp, Homo sapiens
attttattttaattt

SEQ ID NO: 1757059 - DNA, 15 bp, Homo sapiens
tttattttaatttta

SEQ ID NO: 1757060 - DNA, 15 bp, Homo sapiens
ttattttaattttaa

SEQ ID NO: 1757061 - DNA, 15 bp, Homo sapiens
tattttaattttaaa

SEQ ID NO: 1757062 - DNA, 15 bp, Homo sapiens
attttaattttaaaa

SEQ ID NO: 1757063 - DNA, 15 bp, Homo sapiens
ttttaattttaaaaa

SEQ ID NO: 1757064 - DNA, 15 bp, Homo sapiens
tttaattttaaaaaa

SEQ ID NO: 1757065 - DNA, 15 bp, Homo sapiens
ttaattttaaaaaat

SEQ ID NO: 1757066 - DNA, 15 bp, Homo sapiens
taattttaaaaaatt

SEQ ID NO: 1757067 - DNA, 15 bp, Homo sapiens
aattttaaaaaattc

SEQ ID NO: 1757068 - DNA, 15 bp, Homo sapiens
attttaaaaaattca

SEQ ID NO: 1757069 - DNA, 15 bp, Homo sapiens
ttttaaaaaattcaa

SEQ ID NO: 1757070 - DNA, 15 bp, Homo sapiens
tttaaaaaattcaat

SEQ ID NO: 1757071 - DNA, 15 bp, Homo sapiens
ttaaaaaattcaatt

SEQ ID NO: 1757072 - DNA, 15 bp, Homo sapiens
taaaaaattcaattc

SEQ ID NO: 1757073 - DNA, 15 bp, Homo sapiens
aaaaaattcaattct

SEQ ID NO: 1757074 - DNA, 15 bp, Homo sapiens
aaaaattcaattctg

SEQ ID NO: 1757075 - DNA, 15 bp, Homo sapiens
aaaattcaattctga

SEQ ID NO: 1757076 - DNA, 15 bp, Homo sapiens
aaattcaattctgaa

SEQ ID NO: 1757077 - DNA, 15 bp, Homo sapiens
aattcaattctgaaa

SEQ ID NO: 1757078 - DNA, 15 bp, Homo sapiens
attcaattctgaaaa

SEQ ID NO: 1757079 - DNA, 15 bp, Homo sapiens
ttcaattctgaaaac

SEQ ID NO: 1757080 - DNA, 15 bp, Homo sapiens
tcaattctgaaaaca

SEQ ID NO: 1757081 - DNA, 15 bp, Homo sapiens
caattctgaaaacat

SEQ ID NO: 1757082 - DNA, 15 bp, Homo sapiens
aattctgaaaacata

SEQ ID NO: 1757083 - DNA, 15 bp, Homo sapiens
attctgaaaacatag

SEQ ID NO: 1757084 - DNA, 15 bp, Homo sapiens
ttctgaaaacatagc

SEQ ID NO: 1757085 - DNA, 15 bp, Homo sapiens
tctgaaaacatagct

SEQ ID NO: 1757086 - DNA, 15 bp, Homo sapiens
ctgaaaacatagcta

SEQ ID NO: 1757087 - DNA, 15 bp, Homo sapiens
tgaaaacatagctaa

SEQ ID NO: 1757088 - DNA, 15 bp, Homo sapiens
gaaaacatagctaaa

SEQ ID NO: 1757089 - DNA, 15 bp, Homo sapiens
aaaacatagctaaag

SEQ ID NO: 1757090 - DNA, 15 bp, Homo sapiens
aaacatagctaaagc

SEQ ID NO: 1757091 - DNA, 15 bp, Homo sapiens
aacatagctaaagct

SEQ ID NO: 1757092 - DNA, 15 bp, Homo sapiens
acatagctaaagctt

SEQ ID NO: 1757093 - DNA, 15 bp, Homo sapiens
catagctaaagcttt

SEQ ID NO: 1757094 - DNA, 15 bp, Homo sapiens
atagctaaagcttta

SEQ ID NO: 1757095 - DNA, 15 bp, Homo sapiens
tagctaaagctttaa

SEQ ID NO: 1757096 - DNA, 15 bp, Homo sapiens
agctaaagctttaac

SEQ ID NO: 1757097 - DNA, 15 bp, Homo sapiens
gctaaagctttaacc

SEQ ID NO: 1757098 - DNA, 15 bp, Homo sapiens
ctaaagctttaacct

SEQ ID NO: 1757099 - DNA, 15 bp, Homo sapiens
taaagctttaacctt

SEQ ID NO: 1757100 - DNA, 15 bp, Homo sapiens
aaagctttaaccttt

SEQ ID NO: 1757101 - DNA, 15 bp, Homo sapiens
aagctttaacctttc

SEQ ID NO: 1757102 - DNA, 15 bp, Homo sapiens
agctttaacctttct

SEQ ID NO: 1757103 - DNA, 15 bp, Homo sapiens
gctttaacctttctc

SEQ ID NO: 1757104 - DNA, 15 bp, Homo sapiens
ctttaacctttctca

SEQ ID NO: 1757105 - DNA, 15 bp, Homo sapiens
tttaacctttctcac

SEQ ID NO: 1757106 - DNA, 15 bp, Homo sapiens
ttaacctttctcact

SEQ ID NO: 1757107 - DNA, 15 bp, Homo sapiens
taacctttctcactc

SEQ ID NO: 1757108 - DNA, 15 bp, Homo sapiens
aacctttctcactct

SEQ ID NO: 1757109 - DNA, 15 bp, Homo sapiens
acctttctcactctg

SEQ ID NO: 1757110 - DNA, 15 bp, Homo sapiens
cctttctcactctga

SEQ ID NO: 1757111 - DNA, 15 bp, Homo sapiens
ctttctcactctgac

SEQ ID NO: 1757112 - DNA, 15 bp, Homo sapiens
tttctcactctgacc

SEQ ID NO: 1757113 - DNA, 15 bp, Homo sapiens
ttctcactctgaccc

SEQ ID NO: 1757114 - DNA, 15 bp, Homo sapiens
tctcactctgaccca

SEQ ID NO: 1757115 - DNA, 15 bp, Homo sapiens
ctcactctgacccaa

SEQ ID NO: 1757116 - DNA, 15 bp, Homo sapiens
tcactctgacccaat

SEQ ID NO: 1757117 - DNA, 15 bp, Homo sapiens
cactctgacccaata

SEQ ID NO: 1757118 - DNA, 15 bp, Homo sapiens
actctgacccaatat

SEQ ID NO: 1757119 - DNA, 15 bp, Homo sapiens
ctctgacccaatata

SEQ ID NO: 1757120 - DNA, 15 bp, Homo sapiens
tctgacccaatatat

SEQ ID NO: 1757121 - DNA, 15 bp, Homo sapiens
ctgacccaatatatt

SEQ ID NO: 1757122 - DNA, 15 bp, Homo sapiens
tgacccaatatattc

SEQ ID NO: 1757123 - DNA, 15 bp, Homo sapiens
gacccaatatattcc

SEQ ID NO: 1757124 - DNA, 15 bp, Homo sapiens
acccaatatattcct

SEQ ID NO: 1757125 - DNA, 15 bp, Homo sapiens
cccaatatattccta

SEQ ID NO: 1757126 - DNA, 15 bp, Homo sapiens
ccaatatattcctaa

SEQ ID NO: 1757127 - DNA, 15 bp, Homo sapiens
caatatattcctaat

SEQ ID NO: 1757128 - DNA, 15 bp, Homo sapiens
aatatattcctaata

SEQ ID NO: 1757129 - DNA, 15 bp, Homo sapiens
atatattcctaatat

SEQ ID NO: 1757130 - DNA, 15 bp, Homo sapiens
tatattcctaatata

SEQ ID NO: 1757131 - DNA, 15 bp, Homo sapiens
atattcctaatatag

SEQ ID NO: 1757132 - DNA, 15 bp, Homo sapiens
tattcctaatatagc

SEQ ID NO: 1757133 - DNA, 15 bp, Homo sapiens
attcctaatatagct

SEQ ID NO: 1757134 - DNA, 15 bp, Homo sapiens
ttcctaatatagctt

SEQ ID NO: 1757135 - DNA, 15 bp, Homo sapiens
tcctaatatagcttt

SEQ ID NO: 1757136 - DNA, 15 bp, Homo sapiens
cctaatatagctttg

SEQ ID NO: 1757137 - DNA, 15 bp, Homo sapiens
ctaatatagctttgc

SEQ ID NO: 1757138 - DNA, 15 bp, Homo sapiens
taatatagctttgcc

SEQ ID NO: 1757139 - DNA, 15 bp, Homo sapiens
aatatagctttgccc

SEQ ID NO: 1757140 - DNA, 15 bp, Homo sapiens
atatagctttgccct

SEQ ID NO: 1757141 - DNA, 15 bp, Homo sapiens
tatagctttgccctt

SEQ ID NO: 1757142 - DNA, 15 bp, Homo sapiens
atagctttgcccttg

SEQ ID NO: 1757143 - DNA, 15 bp, Homo sapiens
tagctttgcccttga

SEQ ID NO: 1757144 - DNA, 15 bp, Homo sapiens
agctttgcccttgac

SEQ ID NO: 1757145 - DNA, 15 bp, Homo sapiens
gctttgcccttgact

SEQ ID NO: 1757146 - DNA, 15 bp, Homo sapiens
ctttgcccttgactt

SEQ ID NO: 1757147 - DNA, 15 bp, Homo sapiens
tttgcccttgacttc

SEQ ID NO: 1757148 - DNA, 15 bp, Homo sapiens
ttgcccttgacttcc

SEQ ID NO: 1757149 - DNA, 15 bp, Homo sapiens
tgcccttgacttcca

SEQ ID NO: 1757150 - DNA, 15 bp, Homo sapiens
gcccttgacttccac

SEQ ID NO: 1757151 - DNA, 15 bp, Homo sapiens
cccttgacttccaca

SEQ ID NO: 1757152 - DNA, 15 bp, Homo sapiens
ccttgacttccacag

SEQ ID NO: 1757153 - DNA, 15 bp, Homo sapiens
cttgacttccacagc

SEQ ID NO: 1757154 - DNA, 15 bp, Homo sapiens
ttgacttccacagct

SEQ ID NO: 1757155 - DNA, 15 bp, Homo sapiens
tgacttccacagcta

SEQ ID NO: 1757156 - DNA, 15 bp, Homo sapiens
gacttccacagctaa

SEQ ID NO: 1757157 - DNA, 15 bp, Homo sapiens
acttccacagctaaa

SEQ ID NO: 1757158 - DNA, 15 bp, Homo sapiens
cttccacagctaaat

SEQ ID NO: 1757159 - DNA, 15 bp, Homo sapiens
ttccacagctaaata

SEQ ID NO: 1757160 - DNA, 15 bp, Homo sapiens
tccacagctaaatac

SEQ ID NO: 1757161 - DNA, 15 bp, Homo sapiens
ccacagctaaatact

SEQ ID NO: 1757162 - DNA, 15 bp, Homo sapiens
cacagctaaatacta

SEQ ID NO: 1757163 - DNA, 15 bp, Homo sapiens
acagctaaatactag

SEQ ID NO: 1757164 - DNA, 15 bp, Homo sapiens
cagctaaatactagt

SEQ ID NO: 1757165 - DNA, 15 bp, Homo sapiens
agctaaatactagtt

SEQ ID NO: 1757166 - DNA, 15 bp, Homo sapiens
gctaaatactagttt

SEQ ID NO: 1757167 - DNA, 15 bp, Homo sapiens
ctaaatactagtttc

SEQ ID NO: 1757168 - DNA, 15 bp, Homo sapiens
taaatactagtttct

SEQ ID NO: 1757169 - DNA, 15 bp, Homo sapiens
aaatactagtttctc

SEQ ID NO: 1757170 - DNA, 15 bp, Homo sapiens
aatactagtttctca

SEQ ID NO: 1757171 - DNA, 15 bp, Homo sapiens
atactagtttctcaa

SEQ ID NO: 1757172 - DNA, 15 bp, Homo sapiens
tactagtttctcaag

SEQ ID NO: 1757173 - DNA, 15 bp, Homo sapiens
actagtttctcaagt

SEQ ID NO: 1757174 - DNA, 15 bp, Homo sapiens
ctagtttctcaagtg

SEQ ID NO: 1757175 - DNA, 15 bp, Homo sapiens
tagtttctcaagtga

SEQ ID NO: 1757176 - DNA, 15 bp, Homo sapiens
agtttctcaagtgat

SEQ ID NO: 1757177 - DNA, 15 bp, Homo sapiens
gtttctcaagtgatt

SEQ ID NO: 1757178 - DNA, 15 bp, Homo sapiens
tttctcaagtgattt

SEQ ID NO: 1757179 - DNA, 15 bp, Homo sapiens
ttctcaagtgattta

SEQ ID NO: 1757180 - DNA, 15 bp, Homo sapiens
tctcaagtgatttag

SEQ ID NO: 1757181 - DNA, 15 bp, Homo sapiens
ctcaagtgatttagg

SEQ ID NO: 1757182 - DNA, 15 bp, Homo sapiens
tcaagtgatttagga

SEQ ID NO: 1757183 - DNA, 15 bp, Homo sapiens
caagtgatttaggag

SEQ ID NO: 1757184 - DNA, 15 bp, Homo sapiens
aagtgatttaggaga

SEQ ID NO: 1757185 - DNA, 15 bp, Homo sapiens
agtgatttaggagac

SEQ ID NO: 1757186 - DNA, 15 bp, Homo sapiens
gtgatttaggagact

SEQ ID NO: 1757187 - DNA, 15 bp, Homo sapiens
tgatttaggagactt

SEQ ID NO: 1757188 - DNA, 15 bp, Homo sapiens
gatttaggagacttg

SEQ ID NO: 1757189 - DNA, 15 bp, Homo sapiens
atttaggagacttga

SEQ ID NO: 1757190 - DNA, 15 bp, Homo sapiens
tttaggagacttgac

SEQ ID NO: 1757191 - DNA, 15 bp, Homo sapiens
ttaggagacttgact

SEQ ID NO: 1757192 - DNA, 15 bp, Homo sapiens
taggagacttgactt

SEQ ID NO: 1757193 - DNA, 15 bp, Homo sapiens
aggagacttgacttc

SEQ ID NO: 1757194 - DNA, 15 bp, Homo sapiens
ggagacttgacttca

SEQ ID NO: 1757195 - DNA, 15 bp, Homo sapiens
gagacttgacttcat

SEQ ID NO: 1757196 - DNA, 15 bp, Homo sapiens
agacttgacttcatt

SEQ ID NO: 1757197 - DNA, 15 bp, Homo sapiens
gacttgacttcatta

SEQ ID NO: 1757198 - DNA, 15 bp, Homo sapiens
acttgacttcattat

SEQ ID NO: 1757199 - DNA, 15 bp, Homo sapiens
cttgacttcattatt

SEQ ID NO: 1757200 - DNA, 15 bp, Homo sapiens
ttgacttcattattc

SEQ ID NO: 1757201 - DNA, 15 bp, Homo sapiens
tgacttcattattca

SEQ ID NO: 1757202 - DNA, 15 bp, Homo sapiens
gacttcattattcaa

SEQ ID NO: 1757203 - DNA, 15 bp, Homo sapiens
acttcattattcaaa

SEQ ID NO: 1757204 - DNA, 15 bp, Homo sapiens
cttcattattcaaaa

SEQ ID NO: 1757205 - DNA, 15 bp, Homo sapiens
ttcattattcaaaac

SEQ ID NO: 1757206 - DNA, 15 bp, Homo sapiens
tcattattcaaaact

SEQ ID NO: 1757207 - DNA, 15 bp, Homo sapiens
cattattcaaaactg

SEQ ID NO: 1757208 - DNA, 15 bp, Homo sapiens
attattcaaaactga

SEQ ID NO: 1757209 - DNA, 15 bp, Homo sapiens
ttattcaaaactgaa

SEQ ID NO: 1757210 - DNA, 15 bp, Homo sapiens
tattcaaaactgaaa

SEQ ID NO: 1757211 - DNA, 15 bp, Homo sapiens
attcaaaactgaaat

SEQ ID NO: 1757212 - DNA, 15 bp, Homo sapiens
ttcaaaactgaaatt

SEQ ID NO: 1757213 - DNA, 15 bp, Homo sapiens
tcaaaactgaaatta

SEQ ID NO: 1757214 - DNA, 15 bp, Homo sapiens
caaaactgaaattat

SEQ ID NO: 1757215 - DNA, 15 bp, Homo sapiens
aaaactgaaattatt

SEQ ID NO: 1757216 - DNA, 15 bp, Homo sapiens
aaactgaaattattt

SEQ ID NO: 1757217 - DNA, 15 bp, Homo sapiens
aactgaaattattta

SEQ ID NO: 1757218 - DNA, 15 bp, Homo sapiens
actgaaattatttag

SEQ ID NO: 1757219 - DNA, 15 bp, Homo sapiens
ctgaaattatttagc

SEQ ID NO: 1757220 - DNA, 15 bp, Homo sapiens
tgaaattatttagct

SEQ ID NO: 1757221 - DNA, 15 bp, Homo sapiens
gaaattatttagctt

SEQ ID NO: 1757222 - DNA, 15 bp, Homo sapiens
aaattatttagcttg

SEQ ID NO: 1757223 - DNA, 15 bp, Homo sapiens
aattatttagcttgt

SEQ ID NO: 1757224 - DNA, 15 bp, Homo sapiens
attatttagcttgtt

SEQ ID NO: 1757225 - DNA, 15 bp, Homo sapiens
ttatttagcttgttc

SEQ ID NO: 1757226 - DNA, 15 bp, Homo sapiens
tatttagcttgttct

SEQ ID NO: 1757227 - DNA, 15 bp, Homo sapiens
atttagcttgttcta

SEQ ID NO: 1757228 - DNA, 15 bp, Homo sapiens
tttagcttgttctaa

SEQ ID NO: 1757229 - DNA, 15 bp, Homo sapiens
ttagcttgttctaaa

SEQ ID NO: 1757230 - DNA, 15 bp, Homo sapiens
tagcttgttctaaat

SEQ ID NO: 1757231 - DNA, 15 bp, Homo sapiens
agcttgttctaaatg

SEQ ID NO: 1757232 - DNA, 15 bp, Homo sapiens
gcttgttctaaatgc

SEQ ID NO: 1757233 - DNA, 15 bp, Homo sapiens
cttgttctaaatgca

SEQ ID NO: 1757234 - DNA, 15 bp, Homo sapiens
ttgttctaaatgcaa

SEQ ID NO: 1757235 - DNA, 15 bp, Homo sapiens
tgttctaaatgcaac

SEQ ID NO: 1757236 - DNA, 15 bp, Homo sapiens
gttctaaatgcaact

SEQ ID NO: 1757237 - DNA, 15 bp, Homo sapiens
ttctaaatgcaactt

SEQ ID NO: 1757238 - DNA, 15 bp, Homo sapiens
tctaaatgcaacttt

SEQ ID NO: 1757239 - DNA, 15 bp, Homo sapiens
ctaaatgcaactttg

SEQ ID NO: 1757240 - DNA, 15 bp, Homo sapiens
taaatgcaactttgc

SEQ ID NO: 1757241 - DNA, 15 bp, Homo sapiens
aaatgcaactttgct

SEQ ID NO: 1757242 - DNA, 15 bp, Homo sapiens
aatgcaactttgctt

SEQ ID NO: 1757243 - DNA, 15 bp, Homo sapiens
atgcaactttgcttc

SEQ ID NO: 1757244 - DNA, 15 bp, Homo sapiens
tgcaactttgcttcc

SEQ ID NO: 1757245 - DNA, 15 bp, Homo sapiens
gcaactttgcttccc

SEQ ID NO: 1757246 - DNA, 15 bp, Homo sapiens
caactttgcttccca

SEQ ID NO: 1757247 - DNA, 15 bp, Homo sapiens
aactttgcttcccac

SEQ ID NO: 1757248 - DNA, 15 bp, Homo sapiens
actttgcttcccact

SEQ ID NO: 1757249 - DNA, 15 bp, Homo sapiens
ctttgcttcccacta

SEQ ID NO: 1757250 - DNA, 15 bp, Homo sapiens
tttgcttcccactat

SEQ ID NO: 1757251 - DNA, 15 bp, Homo sapiens
ttgcttcccactatg

SEQ ID NO: 1757252 - DNA, 15 bp, Homo sapiens
tgcttcccactatgt

SEQ ID NO: 1757253 - DNA, 15 bp, Homo sapiens
gcttcccactatgtc

SEQ ID NO: 1757254 - DNA, 15 bp, Homo sapiens
cttcccactatgtct

SEQ ID NO: 1757255 - DNA, 15 bp, Homo sapiens
ttcccactatgtcta

SEQ ID NO: 1757256 - DNA, 15 bp, Homo sapiens
tcccactatgtctat

SEQ ID NO: 1757257 - DNA, 15 bp, Homo sapiens
cccactatgtctatt

SEQ ID NO: 1757258 - DNA, 15 bp, Homo sapiens
ccactatgtctattt

SEQ ID NO: 1757259 - DNA, 15 bp, Homo sapiens
cactatgtctatttt

SEQ ID NO: 1757260 - DNA, 15 bp, Homo sapiens
actatgtctattttt

SEQ ID NO: 1757261 - DNA, 15 bp, Homo sapiens
ctatgtctatttttc

SEQ ID NO: 1757262 - DNA, 15 bp, Homo sapiens
tatgtctatttttcc

SEQ ID NO: 1757263 - DNA, 15 bp, Homo sapiens
atgtctatttttcca

SEQ ID NO: 1757264 - DNA, 15 bp, Homo sapiens
tgtctatttttccat

SEQ ID NO: 1757265 - DNA, 15 bp, Homo sapiens
gtctatttttccatt

SEQ ID NO: 1757266 - DNA, 15 bp, Homo sapiens
tctatttttccatta

SEQ ID NO: 1757267 - DNA, 15 bp, Homo sapiens
ctatttttccattac

SEQ ID NO: 1757268 - DNA, 15 bp, Homo sapiens
tatttttccattact

SEQ ID NO: 1757269 - DNA, 15 bp, Homo sapiens
atttttccattactt

SEQ ID NO: 1757270 - DNA, 15 bp, Homo sapiens
tttttccattacttt

SEQ ID NO: 1757271 - DNA, 15 bp, Homo sapiens
ttttccattactttt

SEQ ID NO: 1757272 - DNA, 15 bp, Homo sapiens
tttccattacttttc

SEQ ID NO: 1757273 - DNA, 15 bp, Homo sapiens
ttccattacttttca

SEQ ID NO: 1757274 - DNA, 15 bp, Homo sapiens
tccattacttttcaa

SEQ ID NO: 1757275 - DNA, 15 bp, Homo sapiens
ccattacttttcaaa

SEQ ID NO: 1757276 - DNA, 15 bp, Homo sapiens
cattacttttcaaat

SEQ ID NO: 1757277 - DNA, 15 bp, Homo sapiens
attacttttcaaatc

SEQ ID NO: 1757278 - DNA, 15 bp, Homo sapiens
ttacttttcaaatca

SEQ ID NO: 1757279 - DNA, 15 bp, Homo sapiens
tacttttcaaatcat

SEQ ID NO: 1757280 - DNA, 15 bp, Homo sapiens
acttttcaaatcatc

SEQ ID NO: 1757281 - DNA, 15 bp, Homo sapiens
cttttcaaatcatct

SEQ ID NO: 1757282 - DNA, 15 bp, Homo sapiens
ttttcaaatcatctg

SEQ ID NO: 1757283 - DNA, 15 bp, Homo sapiens
tttcaaatcatctgg

SEQ ID NO: 1757284 - DNA, 15 bp, Homo sapiens
ttcaaatcatctggg

SEQ ID NO: 1757285 - DNA, 15 bp, Homo sapiens
tcaaatcatctgggc

SEQ ID NO: 1757286 - DNA, 15 bp, Homo sapiens
caaatcatctgggct

SEQ ID NO: 1757287 - DNA, 15 bp, Homo sapiens
aaatcatctgggctt

SEQ ID NO: 1757288 - DNA, 15 bp, Homo sapiens
aatcatctgggctta

SEQ ID NO: 1757289 - DNA, 15 bp, Homo sapiens
atcatctgggcttaa

SEQ ID NO: 1757290 - DNA, 15 bp, Homo sapiens
tcatctgggcttaaa

SEQ ID NO: 1757291 - DNA, 15 bp, Homo sapiens
catctgggcttaaat

SEQ ID NO: 1757292 - DNA, 15 bp, Homo sapiens
atctgggcttaaata

SEQ ID NO: 1757293 - DNA, 15 bp, Homo sapiens
tctgggcttaaatac

SEQ ID NO: 1757294 - DNA, 15 bp, Homo sapiens
ctgggcttaaatact

SEQ ID NO: 1757295 - DNA, 15 bp, Homo sapiens
tgggcttaaatactg

SEQ ID NO: 1757296 - DNA, 15 bp, Homo sapiens
gggcttaaatactga

SEQ ID NO: 1757297 - DNA, 15 bp, Homo sapiens
ggcttaaatactgag

SEQ ID NO: 1757298 - DNA, 15 bp, Homo sapiens
gcttaaatactgagc

SEQ ID NO: 1757299 - DNA, 15 bp, Homo sapiens
cttaaatactgagca

SEQ ID NO: 1757300 - DNA, 15 bp, Homo sapiens
ttaaatactgagcac

SEQ ID NO: 1757301 - DNA, 15 bp, Homo sapiens
taaatactgagcact

SEQ ID NO: 1757302 - DNA, 15 bp, Homo sapiens
aaatactgagcactt

SEQ ID NO: 1757303 - DNA, 15 bp, Homo sapiens
aatactgagcacttt

SEQ ID NO: 1757304 - DNA, 15 bp, Homo sapiens
atactgagcactttc

SEQ ID NO: 1757305 - DNA, 15 bp, Homo sapiens
tactgagcactttct

SEQ ID NO: 1757306 - DNA, 15 bp, Homo sapiens
actgagcactttctc

SEQ ID NO: 1757307 - DNA, 15 bp, Homo sapiens
ctgagcactttctcc

SEQ ID NO: 1757308 - DNA, 15 bp, Homo sapiens
tgagcactttctcct

SEQ ID NO: 1757309 - DNA, 15 bp, Homo sapiens
gagcactttctcctt

SEQ ID NO: 1757310 - DNA, 15 bp, Homo sapiens
agcactttctccttt

SEQ ID NO: 1757311 - DNA, 15 bp, Homo sapiens
gcactttctcctttt

SEQ ID NO: 1757312 - DNA, 15 bp, Homo sapiens
cactttctccttttc

SEQ ID NO: 1757313 - DNA, 15 bp, Homo sapiens
actttctccttttct

SEQ ID NO: 1757314 - DNA, 15 bp, Homo sapiens
ttctccttttctttc

SEQ ID NO: 1757315 - DNA, 15 bp, Homo sapiens
tctccttttctttct

SEQ ID NO: 1757316 - DNA, 15 bp, Homo sapiens
ctccttttctttctc

SEQ ID NO: 1757317 - DNA, 15 bp, Homo sapiens
tccttttctttctca

SEQ ID NO: 1757318 - DNA, 15 bp, Homo sapiens
ccttttctttctcaa

SEQ ID NO: 1757319 - DNA, 15 bp, Homo sapiens
cttttctttctcaat

SEQ ID NO: 1757320 - DNA, 15 bp, Homo sapiens
ttttctttctcaata

SEQ ID NO: 1757321 - DNA, 15 bp, Homo sapiens
tttctttctcaatag

SEQ ID NO: 1757322 - DNA, 15 bp, Homo sapiens
ttctttctcaatagt

SEQ ID NO: 1757323 - DNA, 15 bp, Homo sapiens
tctttctcaatagtt

SEQ ID NO: 1757324 - DNA, 15 bp, Homo sapiens
ctttctcaatagttt

SEQ ID NO: 1757325 - DNA, 15 bp, Homo sapiens
tttctcaatagtttg

SEQ ID NO: 1757326 - DNA, 15 bp, Homo sapiens
ttctcaatagtttga

SEQ ID NO: 1757327 - DNA, 15 bp, Homo sapiens
tctcaatagtttgat

SEQ ID NO: 1757328 - DNA, 15 bp, Homo sapiens
ctcaatagtttgata

SEQ ID NO: 1757329 - DNA, 15 bp, Homo sapiens
tcaatagtttgatag

SEQ ID NO: 1757330 - DNA, 15 bp, Homo sapiens
caatagtttgataga

SEQ ID NO: 1757331 - DNA, 15 bp, Homo sapiens
aatagtttgatagag

SEQ ID NO: 1757332 - DNA, 15 bp, Homo sapiens
atagtttgatagagt

SEQ ID NO: 1757333 - DNA, 15 bp, Homo sapiens
tagtttgatagagtc

SEQ ID NO: 1757334 - DNA, 15 bp, Homo sapiens
agtttgatagagtcc

SEQ ID NO: 1757335 - DNA, 15 bp, Homo sapiens
gtttgatagagtcct

SEQ ID NO: 1757336 - DNA, 15 bp, Homo sapiens
tttgatagagtcctg

SEQ ID NO: 1757337 - DNA, 15 bp, Homo sapiens
ttgatagagtcctgt

SEQ ID NO: 1757338 - DNA, 15 bp, Homo sapiens
tgatagagtcctgta

SEQ ID NO: 1757339 - DNA, 15 bp, Homo sapiens
gatagagtcctgtaa

SEQ ID NO: 1757340 - DNA, 15 bp, Homo sapiens
atagagtcctgtaat

SEQ ID NO: 1757341 - DNA, 15 bp, Homo sapiens
tagagtcctgtaatt

SEQ ID NO: 1757342 - DNA, 15 bp, Homo sapiens
agagtcctgtaattt

SEQ ID NO: 1757343 - DNA, 15 bp, Homo sapiens
gagtcctgtaatttt

SEQ ID NO: 1757344 - DNA, 15 bp, Homo sapiens
agtcctgtaattttt

SEQ ID NO: 1757345 - DNA, 15 bp, Homo sapiens
gtcctgtaatttttt

SEQ ID NO: 1757346 - DNA, 15 bp, Homo sapiens
tcctgtaattttttt

SEQ ID NO: 1757347 - DNA, 15 bp, Homo sapiens
cctgtaatttttttt

SEQ ID NO: 1757348 - DNA, 15 bp, Homo sapiens
tgtaattttttttta

SEQ ID NO: 1757349 - DNA, 15 bp, Homo sapiens
gtaatttttttttaa

SEQ ID NO: 1757350 - DNA, 15 bp, Homo sapiens
taatttttttttaaa

SEQ ID NO: 1757351 - DNA, 15 bp, Homo sapiens
aatttttttttaaag

SEQ ID NO: 1757352 - DNA, 15 bp, Homo sapiens
atttttttttaaagc

SEQ ID NO: 1757353 - DNA, 15 bp, Homo sapiens
tttttttttaaagct

SEQ ID NO: 1757354 - DNA, 15 bp, Homo sapiens
ttttttttaaagctg

SEQ ID NO: 1757355 - DNA, 15 bp, Homo sapiens
tttttttaaagctgt

SEQ ID NO: 1757356 - DNA, 15 bp, Homo sapiens
ttttttaaagctgtc

SEQ ID NO: 1757357 - DNA, 15 bp, Homo sapiens
tttttaaagctgtct

SEQ ID NO: 1757358 - DNA, 15 bp, Homo sapiens
ttttaaagctgtctc

SEQ ID NO: 1757359 - DNA, 15 bp, Homo sapiens
tttaaagctgtctct

SEQ ID NO: 1757360 - DNA, 15 bp, Homo sapiens
ttaaagctgtctctc

SEQ ID NO: 1757361 - DNA, 15 bp, Homo sapiens
taaagctgtctctca

SEQ ID NO: 1757362 - DNA, 15 bp, Homo sapiens
aaagctgtctctcat

SEQ ID NO: 1757363 - DNA, 15 bp, Homo sapiens
aagctgtctctcata

SEQ ID NO: 1757364 - DNA, 15 bp, Homo sapiens
agctgtctctcatat

SEQ ID NO: 1757365 - DNA, 15 bp, Homo sapiens
gctgtctctcatatt

SEQ ID NO: 1757366 - DNA, 15 bp, Homo sapiens
ctgtctctcatattt

SEQ ID NO: 1757367 - DNA, 15 bp, Homo sapiens
tgtctctcatattta

SEQ ID NO: 1757368 - DNA, 15 bp, Homo sapiens
gtctctcatatttat

SEQ ID NO: 1757369 - DNA, 15 bp, Homo sapiens
tctctcatatttatt

SEQ ID NO: 1757370 - DNA, 15 bp, Homo sapiens
ctctcatatttatta

SEQ ID NO: 1757371 - DNA, 15 bp, Homo sapiens
tctcatatttattat

SEQ ID NO: 1757372 - DNA, 15 bp, Homo sapiens
ctcatatttattata

SEQ ID NO: 1757373 - DNA, 15 bp, Homo sapiens
tcatatttattatat

SEQ ID NO: 1757374 - DNA, 15 bp, Homo sapiens
catatttattatatt

SEQ ID NO: 1757375 - DNA, 15 bp, Homo sapiens
atatttattatatta

SEQ ID NO: 1757376 - DNA, 15 bp, Homo sapiens
tatttattatattat

SEQ ID NO: 1757377 - DNA, 15 bp, Homo sapiens
atttattatattatt

SEQ ID NO: 1757378 - DNA, 15 bp, Homo sapiens
tttattatattatta

SEQ ID NO: 1757379 - DNA, 15 bp, Homo sapiens
tattatattattatt

SEQ ID NO: 1757380 - DNA, 15 bp, Homo sapiens
attatattattattt

SEQ ID NO: 1757381 - DNA, 15 bp, Homo sapiens
ttatattattatttt

SEQ ID NO: 1757382 - DNA, 15 bp, Homo sapiens
tatattattatttta

SEQ ID NO: 1757383 - DNA, 15 bp, Homo sapiens
atattattattttaa

SEQ ID NO: 1757384 - DNA, 15 bp, Homo sapiens
tattattattttaat

SEQ ID NO: 1757385 - DNA, 15 bp, Homo sapiens
attattattttaata

SEQ ID NO: 1757386 - DNA, 15 bp, Homo sapiens
ttattattttaatat

SEQ ID NO: 1757387 - DNA, 15 bp, Homo sapiens
tattattttaatata

SEQ ID NO: 1757388 - DNA, 15 bp, Homo sapiens
attattttaatatac

SEQ ID NO: 1757389 - DNA, 15 bp, Homo sapiens
ttattttaatatact

SEQ ID NO: 1757390 - DNA, 15 bp, Homo sapiens
tattttaatatactt

SEQ ID NO: 1757391 - DNA, 15 bp, Homo sapiens
attttaatatacttc

SEQ ID NO: 1757392 - DNA, 15 bp, Homo sapiens
ttttaatatacttca

SEQ ID NO: 1757393 - DNA, 15 bp, Homo sapiens
tttaatatacttcat

SEQ ID NO: 1757394 - DNA, 15 bp, Homo sapiens
ttaatatacttcatt

SEQ ID NO: 1757395 - DNA, 15 bp, Homo sapiens
taatatacttcatta

SEQ ID NO: 1757396 - DNA, 15 bp, Homo sapiens
aatatacttcattac

SEQ ID NO: 1757397 - DNA, 15 bp, Homo sapiens
atatacttcattaca

SEQ ID NO: 1757398 - DNA, 15 bp, Homo sapiens
tatacttcattacac

SEQ ID NO: 1757399 - DNA, 15 bp, Homo sapiens
atacttcattacact

SEQ ID NO: 1757400 - DNA, 15 bp, Homo sapiens
tacttcattacactt

SEQ ID NO: 1757401 - DNA, 15 bp, Homo sapiens
acttcattacacttc

SEQ ID NO: 1757402 - DNA, 15 bp, Homo sapiens
cttcattacacttcc

SEQ ID NO: 1757403 - DNA, 15 bp, Homo sapiens
ttcattacacttccc

SEQ ID NO: 1757404 - DNA, 15 bp, Homo sapiens
tcattacacttccct

SEQ ID NO: 1757405 - DNA, 15 bp, Homo sapiens
cattacacttcccta

SEQ ID NO: 1757406 - DNA, 15 bp, Homo sapiens
attacacttccctag

SEQ ID NO: 1757407 - DNA, 15 bp, Homo sapiens
ttacacttccctaga

SEQ ID NO: 1757408 - DNA, 15 bp, Homo sapiens
tacacttccctagaa

SEQ ID NO: 1757409 - DNA, 15 bp, Homo sapiens
acacttccctagaac

SEQ ID NO: 1757410 - DNA, 15 bp, Homo sapiens
cacttccctagaaca

SEQ ID NO: 1757411 - DNA, 15 bp, Homo sapiens
acttccctagaacag

SEQ ID NO: 1757412 - DNA, 15 bp, Homo sapiens
cttccctagaacaga

SEQ ID NO: 1757413 - DNA, 15 bp, Homo sapiens
ttccctagaacagat

SEQ ID NO: 1757414 - DNA, 15 bp, Homo sapiens
tccctagaacagatc

SEQ ID NO: 1757415 - DNA, 15 bp, Homo sapiens
ccctagaacagatca

SEQ ID NO: 1757416 - DNA, 15 bp, Homo sapiens
cctagaacagatcat

SEQ ID NO: 1757417 - DNA, 15 bp, Homo sapiens
ctagaacagatcatc

SEQ ID NO: 1757418 - DNA, 15 bp, Homo sapiens
tagaacagatcatca

SEQ ID NO: 1757419 - DNA, 15 bp, Homo sapiens
agaacagatcatcag

SEQ ID NO: 1757420 - DNA, 15 bp, Homo sapiens
gaacagatcatcagc

SEQ ID NO: 1757421 - DNA, 15 bp, Homo sapiens
aacagatcatcagct

SEQ ID NO: 1757422 - DNA, 15 bp, Homo sapiens
acagatcatcagctc

SEQ ID NO: 1757423 - DNA, 15 bp, Homo sapiens
cagatcatcagctct

SEQ ID NO: 1757424 - DNA, 15 bp, Homo sapiens
agatcatcagctctc

SEQ ID NO: 1757425 - DNA, 15 bp, Homo sapiens
gatcatcagctctct

SEQ ID NO: 1757426 - DNA, 15 bp, Homo sapiens
atcatcagctctctt

SEQ ID NO: 1757427 - DNA, 15 bp, Homo sapiens
tcatcagctctcttt

SEQ ID NO: 1757428 - DNA, 15 bp, Homo sapiens
catcagctctcttta

SEQ ID NO: 1757429 - DNA, 15 bp, Homo sapiens
atcagctctctttaa

SEQ ID NO: 1757430 - DNA, 15 bp, Homo sapiens
tcagctctctttaag

SEQ ID NO: 1757431 - DNA, 15 bp, Homo sapiens
cagctctctttaagt

SEQ ID NO: 1757432 - DNA, 15 bp, Homo sapiens
agctctctttaagta

SEQ ID NO: 1757433 - DNA, 15 bp, Homo sapiens
gctctctttaagtaa

SEQ ID NO: 1757434 - DNA, 15 bp, Homo sapiens
ctctctttaagtaat

SEQ ID NO: 1757435 - DNA, 15 bp, Homo sapiens
tctctttaagtaatt

SEQ ID NO: 1757436 - DNA, 15 bp, Homo sapiens
ctctttaagtaattt

SEQ ID NO: 1757437 - DNA, 15 bp, Homo sapiens
tctttaagtaatttg

SEQ ID NO: 1757438 - DNA, 15 bp, Homo sapiens
ctttaagtaatttgt

SEQ ID NO: 1757439 - DNA, 15 bp, Homo sapiens
tttaagtaatttgtc

SEQ ID NO: 1757440 - DNA, 15 bp, Homo sapiens
ttaagtaatttgtct

SEQ ID NO: 1757441 - DNA, 15 bp, Homo sapiens
taagtaatttgtctg

SEQ ID NO: 1757442 - DNA, 15 bp, Homo sapiens
aagtaatttgtctga

SEQ ID NO: 1757443 - DNA, 15 bp, Homo sapiens
agtaatttgtctgag

SEQ ID NO: 1757444 - DNA, 15 bp, Homo sapiens
gtaatttgtctgagg

SEQ ID NO: 1757445 - DNA, 15 bp, Homo sapiens
taatttgtctgaggt

SEQ ID NO: 1757446 - DNA, 15 bp, Homo sapiens
aatttgtctgaggtc

SEQ ID NO: 1757447 - DNA, 15 bp, Homo sapiens
atttgtctgaggtca

SEQ ID NO: 1757448 - DNA, 15 bp, Homo sapiens
tttgtctgaggtcac

SEQ ID NO: 1757449 - DNA, 15 bp, Homo sapiens
ttgtctgaggtcacc

SEQ ID NO: 1757450 - DNA, 15 bp, Homo sapiens
tgtctgaggtcaccc

SEQ ID NO: 1757451 - DNA, 15 bp, Homo sapiens
gtctgaggtcaccca

SEQ ID NO: 1757452 - DNA, 15 bp, Homo sapiens
tctgaggtcacccag

SEQ ID NO: 1757453 - DNA, 15 bp, Homo sapiens
ctgaggtcacccagt

SEQ ID NO: 1757454 - DNA, 15 bp, Homo sapiens
tgaggtcacccagtt

SEQ ID NO: 1757455 - DNA, 15 bp, Homo sapiens
gaggtcacccagttg

SEQ ID NO: 1757456 - DNA, 15 bp, Homo sapiens
aggtcacccagttgg

SEQ ID NO: 1757457 - DNA, 15 bp, Homo sapiens
ggtcacccagttggc

SEQ ID NO: 1757458 - DNA, 15 bp, Homo sapiens
gtcacccagttggca

SEQ ID NO: 1757459 - DNA, 15 bp, Homo sapiens
tcacccagttggcat

SEQ ID NO: 1757460 - DNA, 15 bp, Homo sapiens
cacccagttggcatt

SEQ ID NO: 1757461 - DNA, 15 bp, Homo sapiens
acccagttggcattt

SEQ ID NO: 1757462 - DNA, 15 bp, Homo sapiens
cccagttggcatttg

SEQ ID NO: 1757463 - DNA, 15 bp, Homo sapiens
ccagttggcatttga

SEQ ID NO: 1757464 - DNA, 15 bp, Homo sapiens
cagttggcatttgaa

SEQ ID NO: 1757465 - DNA, 15 bp, Homo sapiens
agttggcatttgaac

SEQ ID NO: 1757466 - DNA, 15 bp, Homo sapiens
gttggcatttgaact

SEQ ID NO: 1757467 - DNA, 15 bp, Homo sapiens
ttggcatttgaactc

SEQ ID NO: 1757468 - DNA, 15 bp, Homo sapiens
tggcatttgaactca

SEQ ID NO: 1757469 - DNA, 15 bp, Homo sapiens
ggcatttgaactcat

SEQ ID NO: 1757470 - DNA, 15 bp, Homo sapiens
gcatttgaactcata

SEQ ID NO: 1757471 - DNA, 15 bp, Homo sapiens
catttgaactcatat

SEQ ID NO: 1757472 - DNA, 15 bp, Homo sapiens
atttgaactcatatt

SEQ ID NO: 1757473 - DNA, 15 bp, Homo sapiens
tttgaactcatattg

SEQ ID NO: 1757474 - DNA, 15 bp, Homo sapiens
ttgaactcatattgg

SEQ ID NO: 1757475 - DNA, 15 bp, Homo sapiens
tgaactcatattggt

SEQ ID NO: 1757476 - DNA, 15 bp, Homo sapiens
gaactcatattggtt

SEQ ID NO: 1757477 - DNA, 15 bp, Homo sapiens
aactcatattggttt

SEQ ID NO: 1757478 - DNA, 15 bp, Homo sapiens
actcatattggtttg

SEQ ID NO: 1757479 - DNA, 15 bp, Homo sapiens
ctcatattggtttga

SEQ ID NO: 1757480 - DNA, 15 bp, Homo sapiens
tcatattggtttgat

SEQ ID NO: 1757481 - DNA, 15 bp, Homo sapiens
catattggtttgatt

SEQ ID NO: 1757482 - DNA, 15 bp, Homo sapiens
atattggtttgattc

SEQ ID NO: 1757483 - DNA, 15 bp, Homo sapiens
tattggtttgattcc

SEQ ID NO: 1757484 - DNA, 15 bp, Homo sapiens
attggtttgattcca

SEQ ID NO: 1757485 - DNA, 15 bp, Homo sapiens
ttggtttgattccaa

SEQ ID NO: 1757486 - DNA, 15 bp, Homo sapiens
tggtttgattccaaa

SEQ ID NO: 1757487 - DNA, 15 bp, Homo sapiens
ggtttgattccaaat

SEQ ID NO: 1757488 - DNA, 15 bp, Homo sapiens
gtttgattccaaatt

SEQ ID NO: 1757489 - DNA, 15 bp, Homo sapiens
tttgattccaaattc

SEQ ID NO: 1757490 - DNA, 15 bp, Homo sapiens
ttgattccaaattcc

SEQ ID NO: 1757491 - DNA, 15 bp, Homo sapiens
tgattccaaattcca

SEQ ID NO: 1757492 - DNA, 15 bp, Homo sapiens
gattccaaattccat

SEQ ID NO: 1757493 - DNA, 15 bp, Homo sapiens
attccaaattccata

SEQ ID NO: 1757494 - DNA, 15 bp, Homo sapiens
ttccaaattccatac

SEQ ID NO: 1757495 - DNA, 15 bp, Homo sapiens
tccaaattccatact

SEQ ID NO: 1757496 - DNA, 15 bp, Homo sapiens
ccaaattccatactg

SEQ ID NO: 1757497 - DNA, 15 bp, Homo sapiens
caaattccatactgg

SEQ ID NO: 1757498 - DNA, 15 bp, Homo sapiens
aaattccatactggt

SEQ ID NO: 1757499 - DNA, 15 bp, Homo sapiens
aattccatactggtt

SEQ ID NO: 1757500 - DNA, 15 bp, Homo sapiens
attccatactggttt

SEQ ID NO: 1757501 - DNA, 15 bp, Homo sapiens
ttccatactggtttc

SEQ ID NO: 1757502 - DNA, 15 bp, Homo sapiens
tccatactggtttct

SEQ ID NO: 1757503 - DNA, 15 bp, Homo sapiens
ccatactggtttcta

SEQ ID NO: 1757504 - DNA, 15 bp, Homo sapiens
catactggtttctag

SEQ ID NO: 1757505 - DNA, 15 bp, Homo sapiens
atactggtttctagt

SEQ ID NO: 1757506 - DNA, 15 bp, Homo sapiens
tactggtttctagta

SEQ ID NO: 1757507 - DNA, 15 bp, Homo sapiens
actggtttctagtaa

SEQ ID NO: 1757508 - DNA, 15 bp, Homo sapiens
ctggtttctagtaaa

SEQ ID NO: 1757509 - DNA, 15 bp, Homo sapiens
tggtttctagtaaag

SEQ ID NO: 1757510 - DNA, 15 bp, Homo sapiens
ggtttctagtaaagg

SEQ ID NO: 1757511 - DNA, 15 bp, Homo sapiens
gtttctagtaaaggt

SEQ ID NO: 1757512 - DNA, 15 bp, Homo sapiens
tttctagtaaaggtc

SEQ ID NO: 1757513 - DNA, 15 bp, Homo sapiens
ttctagtaaaggtct

SEQ ID NO: 1757514 - DNA, 15 bp, Homo sapiens
tctagtaaaggtctc

SEQ ID NO: 1757515 - DNA, 15 bp, Homo sapiens
ctagtaaaggtctct

SEQ ID NO: 1757516 - DNA, 15 bp, Homo sapiens
tagtaaaggtctctg

SEQ ID NO: 1757517 - DNA, 15 bp, Homo sapiens
agtaaaggtctctgt

SEQ ID NO: 1757518 - DNA, 15 bp, Homo sapiens
gtaaaggtctctgtc

SEQ ID NO: 1757519 - DNA, 15 bp, Homo sapiens
taaaggtctctgtca

SEQ ID NO: 1757520 - DNA, 15 bp, Homo sapiens
aaaggtctctgtcac

SEQ ID NO: 1757521 - DNA, 15 bp, Homo sapiens
aaggtctctgtcact

SEQ ID NO: 1757522 - DNA, 15 bp, Homo sapiens
aggtctctgtcactg

SEQ ID NO: 1757523 - DNA, 15 bp, Homo sapiens
ggtctctgtcactgt

SEQ ID NO: 1757524 - DNA, 15 bp, Homo sapiens
gtctctgtcactgta

SEQ ID NO: 1757525 - DNA, 15 bp, Homo sapiens
tctctgtcactgtac

SEQ ID NO: 1757526 - DNA, 15 bp, Homo sapiens
ctctgtcactgtact

SEQ ID NO: 1757527 - DNA, 15 bp, Homo sapiens
tctgtcactgtacta

SEQ ID NO: 1757528 - DNA, 15 bp, Homo sapiens
ctgtcactgtactac

SEQ ID NO: 1757529 - DNA, 15 bp, Homo sapiens
tgtcactgtactaca

SEQ ID NO: 1757530 - DNA, 15 bp, Homo sapiens
gtcactgtactacat

SEQ ID NO: 1757531 - DNA, 15 bp, Homo sapiens
tcactgtactacatt

SEQ ID NO: 1757532 - DNA, 15 bp, Homo sapiens
cactgtactacatta

SEQ ID NO: 1757533 - DNA, 15 bp, Homo sapiens
actgtactacattat

SEQ ID NO: 1757534 - DNA, 15 bp, Homo sapiens
ctgtactacattatt

SEQ ID NO: 1757535 - DNA, 15 bp, Homo sapiens
tgtactacattattt

SEQ ID NO: 1757536 - DNA, 15 bp, Homo sapiens
gtactacattatttc

SEQ ID NO: 1757537 - DNA, 15 bp, Homo sapiens
tactacattatttct

SEQ ID NO: 1757538 - DNA, 15 bp, Homo sapiens
actacattatttctg

SEQ ID NO: 1757539 - DNA, 15 bp, Homo sapiens
ctacattatttctgt

SEQ ID NO: 1757540 - DNA, 15 bp, Homo sapiens
tacattatttctgtg

SEQ ID NO: 1757541 - DNA, 15 bp, Homo sapiens
acattatttctgtga

SEQ ID NO: 1757542 - DNA, 15 bp, Homo sapiens
cattatttctgtgaa

SEQ ID NO: 1757543 - DNA, 15 bp, Homo sapiens
attatttctgtgaaa

SEQ ID NO: 1757544 - DNA, 15 bp, Homo sapiens
ttatttctgtgaaat

SEQ ID NO: 1757545 - DNA, 15 bp, Homo sapiens
tatttctgtgaaatc

SEQ ID NO: 1757546 - DNA, 15 bp, Homo sapiens
atttctgtgaaatca

SEQ ID NO: 1757547 - DNA, 15 bp, Homo sapiens
tttctgtgaaatcat

SEQ ID NO: 1757548 - DNA, 15 bp, Homo sapiens
ttctgtgaaatcatt

SEQ ID NO: 1757549 - DNA, 15 bp, Homo sapiens
tctgtgaaatcattc

SEQ ID NO: 1757550 - DNA, 15 bp, Homo sapiens
ctgtgaaatcattca

SEQ ID NO: 1757551 - DNA, 15 bp, Homo sapiens
tgtgaaatcattcat

SEQ ID NO: 1757552 - DNA, 15 bp, Homo sapiens
gtgaaatcattcatg

SEQ ID NO: 1757553 - DNA, 15 bp, Homo sapiens
tgaaatcattcatgc

SEQ ID NO: 1757554 - DNA, 15 bp, Homo sapiens
gaaatcattcatgct

SEQ ID NO: 1757555 - DNA, 15 bp, Homo sapiens
aaatcattcatgctg

SEQ ID NO: 1757556 - DNA, 15 bp, Homo sapiens
aatcattcatgctgt

SEQ ID NO: 1757557 - DNA, 15 bp, Homo sapiens
atcattcatgctgtt

SEQ ID NO: 1757558 - DNA, 15 bp, Homo sapiens
tcattcatgctgttt

SEQ ID NO: 1757559 - DNA, 15 bp, Homo sapiens
cattcatgctgtttt

SEQ ID NO: 1757560 - DNA, 15 bp, Homo sapiens
attcatgctgttttt

SEQ ID NO: 1757561 - DNA, 15 bp, Homo sapiens
ttcatgctgttttta

SEQ ID NO: 1757562 - DNA, 15 bp, Homo sapiens
tcatgctgtttttac

SEQ ID NO: 1757563 - DNA, 15 bp, Homo sapiens
catgctgtttttact

SEQ ID NO: 1757564 - DNA, 15 bp, Homo sapiens
atgctgtttttacta

SEQ ID NO: 1757565 - DNA, 15 bp, Homo sapiens
tgctgtttttactac

SEQ ID NO: 1757566 - DNA, 15 bp, Homo sapiens
gctgtttttactacc

SEQ ID NO: 1757567 - DNA, 15 bp, Homo sapiens
ctgtttttactacct

SEQ ID NO: 1757568 - DNA, 15 bp, Homo sapiens
tgtttttactacctc

SEQ ID NO: 1757569 - DNA, 15 bp, Homo sapiens
gtttttactacctct

SEQ ID NO: 1757570 - DNA, 15 bp, Homo sapiens
tttttactacctcta

SEQ ID NO: 1757571 - DNA, 15 bp, Homo sapiens
ttttactacctctat

SEQ ID NO: 1757572 - DNA, 15 bp, Homo sapiens
tttactacctctata

SEQ ID NO: 1757573 - DNA, 15 bp, Homo sapiens
ttactacctctataa

SEQ ID NO: 1757574 - DNA, 15 bp, Homo sapiens
tactacctctataat

SEQ ID NO: 1757575 - DNA, 15 bp, Homo sapiens
actacctctataata

SEQ ID NO: 1757576 - DNA, 15 bp, Homo sapiens
ctacctctataatat

SEQ ID NO: 1757577 - DNA, 15 bp, Homo sapiens
tacctctataatata

SEQ ID NO: 1757578 - DNA, 15 bp, Homo sapiens
acctctataatatat

SEQ ID NO: 1757579 - DNA, 15 bp, Homo sapiens
cctctataatatata

SEQ ID NO: 1757580 - DNA, 15 bp, Homo sapiens
ctctataatatatag

SEQ ID NO: 1757581 - DNA, 15 bp, Homo sapiens
tctataatatatagt

SEQ ID NO: 1757582 - DNA, 15 bp, Homo sapiens
ctataatatatagtc

SEQ ID NO: 1757583 - DNA, 15 bp, Homo sapiens
tataatatatagtca

SEQ ID NO: 1757584 - DNA, 15 bp, Homo sapiens
ataatatatagtcag

SEQ ID NO: 1757585 - DNA, 15 bp, Homo sapiens
taatatatagtcagg

SEQ ID NO: 1757586 - DNA, 15 bp, Homo sapiens
aatatatagtcaggc

SEQ ID NO: 1757587 - DNA, 15 bp, Homo sapiens
atatatagtcaggca

SEQ ID NO: 1757588 - DNA, 15 bp, Homo sapiens
tatatagtcaggcat

SEQ ID NO: 1757589 - DNA, 15 bp, Homo sapiens
atatagtcaggcata

SEQ ID NO: 1757590 - DNA, 15 bp, Homo sapiens
tatagtcaggcatat

SEQ ID NO: 1757591 - DNA, 15 bp, Homo sapiens
atagtcaggcatatg

SEQ ID NO: 1757592 - DNA, 15 bp, Homo sapiens
tagtcaggcatatgg

SEQ ID NO: 1757593 - DNA, 15 bp, Homo sapiens
agtcaggcatatggg

SEQ ID NO: 1757594 - DNA, 15 bp, Homo sapiens
gtcaggcatatggga

SEQ ID NO: 1757595 - DNA, 15 bp, Homo sapiens
tcaggcatatgggac

SEQ ID NO: 1757596 - DNA, 15 bp, Homo sapiens
caggcatatgggaca

SEQ ID NO: 1757597 - DNA, 15 bp, Homo sapiens
aggcatatgggacag

SEQ ID NO: 1757598 - DNA, 15 bp, Homo sapiens
ggcatatgggacagt

SEQ ID NO: 1757599 - DNA, 15 bp, Homo sapiens
gcatatgggacagta

SEQ ID NO: 1757600 - DNA, 15 bp, Homo sapiens
catatgggacagtat

SEQ ID NO: 1757601 - DNA, 15 bp, Homo sapiens
atatgggacagtata

SEQ ID NO: 1757602 - DNA, 15 bp, Homo sapiens
tatgggacagtataa

SEQ ID NO: 1757603 - DNA, 15 bp, Homo sapiens
atgggacagtataaa

SEQ ID NO: 1757604 - DNA, 15 bp, Homo sapiens
tgggacagtataaag

SEQ ID NO: 1757605 - DNA, 15 bp, Homo sapiens
gggacagtataaagg

SEQ ID NO: 1757606 - DNA, 15 bp, Homo sapiens
ggacagtataaaggg

SEQ ID NO: 1757607 - DNA, 15 bp, Homo sapiens
gacagtataaaggga

SEQ ID NO: 1757608 - DNA, 15 bp, Homo sapiens
acagtataaagggag

SEQ ID NO: 1757609 - DNA, 15 bp, Homo sapiens
cagtataaagggagc

SEQ ID NO: 1757610 - DNA, 15 bp, Homo sapiens
agtataaagggagca

SEQ ID NO: 1757611 - DNA, 15 bp, Homo sapiens
gtataaagggagcaa

SEQ ID NO: 1757612 - DNA, 15 bp, Homo sapiens
tataaagggagcaat

SEQ ID NO: 1757613 - DNA, 15 bp, Homo sapiens
ataaagggagcaata

SEQ ID NO: 1757614 - DNA, 15 bp, Homo sapiens
taaagggagcaatac

SEQ ID NO: 1757615 - DNA, 15 bp, Homo sapiens
aaagggagcaataca

SEQ ID NO: 1757616 - DNA, 15 bp, Homo sapiens
aagggagcaatacaa

SEQ ID NO: 1757617 - DNA, 15 bp, Homo sapiens
agggagcaatacaaa

SEQ ID NO: 1757618 - DNA, 15 bp, Homo sapiens
gggagcaatacaaat

SEQ ID NO: 1757619 - DNA, 15 bp, Homo sapiens
ggagcaatacaaata

SEQ ID NO: 1757620 - DNA, 15 bp, Homo sapiens
gagcaatacaaatag

SEQ ID NO: 1757621 - DNA, 15 bp, Homo sapiens
agcaatacaaatagt

SEQ ID NO: 1757622 - DNA, 15 bp, Homo sapiens
gcaatacaaatagta

SEQ ID NO: 1757623 - DNA, 15 bp, Homo sapiens
caatacaaatagtaa

SEQ ID NO: 1757624 - DNA, 15 bp, Homo sapiens
aatacaaatagtaag

SEQ ID NO: 1757625 - DNA, 15 bp, Homo sapiens
atacaaatagtaagt

SEQ ID NO: 1757626 - DNA, 15 bp, Homo sapiens
tacaaatagtaagtt

SEQ ID NO: 1757627 - DNA, 15 bp, Homo sapiens
acaaatagtaagtta

SEQ ID NO: 1757628 - DNA, 15 bp, Homo sapiens
caaatagtaagttaa

SEQ ID NO: 1757629 - DNA, 15 bp, Homo sapiens
aaatagtaagttaat

SEQ ID NO: 1757630 - DNA, 15 bp, Homo sapiens
aatagtaagttaatt

SEQ ID NO: 1757631 - DNA, 15 bp, Homo sapiens
atagtaagttaattt

SEQ ID NO: 1757632 - DNA, 15 bp, Homo sapiens
tagtaagttaatttt

SEQ ID NO: 1757633 - DNA, 15 bp, Homo sapiens
agtaagttaatttta

SEQ ID NO: 1757634 - DNA, 15 bp, Homo sapiens
gtaagttaattttat

SEQ ID NO: 1757635 - DNA, 15 bp, Homo sapiens
taagttaattttatt

SEQ ID NO: 1757636 - DNA, 15 bp, Homo sapiens
aagttaattttattc

SEQ ID NO: 1757637 - DNA, 15 bp, Homo sapiens
agttaattttattct

SEQ ID NO: 1757638 - DNA, 15 bp, Homo sapiens
gttaattttattcta

SEQ ID NO: 1757639 - DNA, 15 bp, Homo sapiens
ttaattttattctaa

SEQ ID NO: 1757640 - DNA, 15 bp, Homo sapiens
taattttattctaag

SEQ ID NO: 1757641 - DNA, 15 bp, Homo sapiens
aattttattctaagt

SEQ ID NO: 1757642 - DNA, 15 bp, Homo sapiens
attttattctaagtg

SEQ ID NO: 1757643 - DNA, 15 bp, Homo sapiens
ttttattctaagtga

SEQ ID NO: 1757644 - DNA, 15 bp, Homo sapiens
tttattctaagtgaa

SEQ ID NO: 1757645 - DNA, 15 bp, Homo sapiens
ttattctaagtgaaa

SEQ ID NO: 1757646 - DNA, 15 bp, Homo sapiens
tattctaagtgaaag

SEQ ID NO: 1757647 - DNA, 15 bp, Homo sapiens
attctaagtgaaagc

SEQ ID NO: 1757648 - DNA, 15 bp, Homo sapiens
ttctaagtgaaagca

SEQ ID NO: 1757649 - DNA, 15 bp, Homo sapiens
tctaagtgaaagcat

SEQ ID NO: 1757650 - DNA, 15 bp, Homo sapiens
ctaagtgaaagcata

SEQ ID NO: 1757651 - DNA, 15 bp, Homo sapiens
taagtgaaagcataa

SEQ ID NO: 1757652 - DNA, 15 bp, Homo sapiens
aagtgaaagcataat

SEQ ID NO: 1757653 - DNA, 15 bp, Homo sapiens
agtgaaagcataata

SEQ ID NO: 1757654 - DNA, 15 bp, Homo sapiens
gtgaaagcataatat

SEQ ID NO: 1757655 - DNA, 15 bp, Homo sapiens
tgaaagcataatatg

SEQ ID NO: 1757656 - DNA, 15 bp, Homo sapiens
gaaagcataatatgt

SEQ ID NO: 1757657 - DNA, 15 bp, Homo sapiens
aaagcataatatgta

SEQ ID NO: 1757658 - DNA, 15 bp, Homo sapiens
aagcataatatgtat

SEQ ID NO: 1757659 - DNA, 15 bp, Homo sapiens
agcataatatgtatg

SEQ ID NO: 1757660 - DNA, 15 bp, Homo sapiens
gcataatatgtatgt

SEQ ID NO: 1757661 - DNA, 15 bp, Homo sapiens
cataatatgtatgtg

SEQ ID NO: 1757662 - DNA, 15 bp, Homo sapiens
ataatatgtatgtgt

SEQ ID NO: 1757663 - DNA, 15 bp, Homo sapiens
taatatgtatgtgta

SEQ ID NO: 1757664 - DNA, 15 bp, Homo sapiens
aatatgtatgtgtat

SEQ ID NO: 1757665 - DNA, 15 bp, Homo sapiens
atatgtatgtgtatt

SEQ ID NO: 1757666 - DNA, 15 bp, Homo sapiens
tatgtatgtgtattt

SEQ ID NO: 1757667 - DNA, 15 bp, Homo sapiens
atgtatgtgtatttt

SEQ ID NO: 1757668 - DNA, 15 bp, Homo sapiens
tgtatgtgtattttt

SEQ ID NO: 1757669 - DNA, 15 bp, Homo sapiens
gtatgtgtatttttt

SEQ ID NO: 1757670 - DNA, 15 bp, Homo sapiens
tatgtgtatttttta

SEQ ID NO: 1757671 - DNA, 15 bp, Homo sapiens
atgtgtattttttat

SEQ ID NO: 1757672 - DNA, 15 bp, Homo sapiens
tgtgtattttttatc

SEQ ID NO: 1757673 - DNA, 15 bp, Homo sapiens
gtgtattttttatcc

SEQ ID NO: 1757674 - DNA, 15 bp, Homo sapiens
tgtattttttatcct

SEQ ID NO: 1757675 - DNA, 15 bp, Homo sapiens
tattttttatcctga

SEQ ID NO: 1757676 - DNA, 15 bp, Homo sapiens
attttttatcctgag

SEQ ID NO: 1757677 - DNA, 15 bp, Homo sapiens
ttttttatcctgagt

SEQ ID NO: 1757678 - DNA, 15 bp, Homo sapiens
tttttatcctgagta

SEQ ID NO: 1757679 - DNA, 15 bp, Homo sapiens
ttttatcctgagtaa

SEQ ID NO: 1757680 - DNA, 15 bp, Homo sapiens
tttatcctgagtaac

SEQ ID NO: 1757681 - DNA, 15 bp, Homo sapiens
ttatcctgagtaaca

SEQ ID NO: 1757682 - DNA, 15 bp, Homo sapiens
tatcctgagtaacaa

SEQ ID NO: 1757683 - DNA, 15 bp, Homo sapiens
atcctgagtaacaag

SEQ ID NO: 1757684 - DNA, 15 bp, Homo sapiens
tcctgagtaacaagg

SEQ ID NO: 1757685 - DNA, 15 bp, Homo sapiens
cctgagtaacaaggg

SEQ ID NO: 1757686 - DNA, 15 bp, Homo sapiens
ctgagtaacaaggga

SEQ ID NO: 1757687 - DNA, 15 bp, Homo sapiens
tgagtaacaagggaa

SEQ ID NO: 1757688 - DNA, 15 bp, Homo sapiens
gagtaacaagggaag

SEQ ID NO: 1757689 - DNA, 15 bp, Homo sapiens
agtaacaagggaagt

SEQ ID NO: 1757690 - DNA, 15 bp, Homo sapiens
gtaacaagggaagtg

SEQ ID NO: 1757691 - DNA, 15 bp, Homo sapiens
taacaagggaagtgt

SEQ ID NO: 1757692 - DNA, 15 bp, Homo sapiens
aacaagggaagtgtt

SEQ ID NO: 1757693 - DNA, 15 bp, Homo sapiens
acaagggaagtgttt

SEQ ID NO: 1757694 - DNA, 15 bp, Homo sapiens
caagggaagtgtttt

SEQ ID NO: 1757695 - DNA, 15 bp, Homo sapiens
aagggaagtgttttg

SEQ ID NO: 1757696 - DNA, 15 bp, Homo sapiens
agggaagtgttttgc

SEQ ID NO: 1757697 - DNA, 15 bp, Homo sapiens
gggaagtgttttgcc

SEQ ID NO: 1757698 - DNA, 15 bp, Homo sapiens
ggaagtgttttgcct

SEQ ID NO: 1757699 - DNA, 15 bp, Homo sapiens
gaagtgttttgccta

SEQ ID NO: 1757700 - DNA, 15 bp, Homo sapiens
aagtgttttgcctag

SEQ ID NO: 1757701 - DNA, 15 bp, Homo sapiens
agtgttttgcctagg

SEQ ID NO: 1757702 - DNA, 15 bp, Homo sapiens
gtgttttgcctagga

SEQ ID NO: 1757703 - DNA, 15 bp, Homo sapiens
tgttttgcctaggag

SEQ ID NO: 1757704 - DNA, 15 bp, Homo sapiens
gttttgcctaggagc

SEQ ID NO: 1757705 - DNA, 15 bp, Homo sapiens
ttttgcctaggagct

SEQ ID NO: 1757706 - DNA, 15 bp, Homo sapiens
tttgcctaggagcta

SEQ ID NO: 1757707 - DNA, 15 bp, Homo sapiens
ttgcctaggagctaa

SEQ ID NO: 1757708 - DNA, 15 bp, Homo sapiens
tgcctaggagctaat

SEQ ID NO: 1757709 - DNA, 15 bp, Homo sapiens
gcctaggagctaata

SEQ ID NO: 1757710 - DNA, 15 bp, Homo sapiens
cctaggagctaataa

SEQ ID NO: 1757711 - DNA, 15 bp, Homo sapiens
ctaggagctaataag

SEQ ID NO: 1757712 - DNA, 15 bp, Homo sapiens
taggagctaataagt

SEQ ID NO: 1757713 - DNA, 15 bp, Homo sapiens
aggagctaataagta

SEQ ID NO: 1757714 - DNA, 15 bp, Homo sapiens
ggagctaataagtaa

SEQ ID NO: 1757715 - DNA, 15 bp, Homo sapiens
gagctaataagtaac

SEQ ID NO: 1757716 - DNA, 15 bp, Homo sapiens
gctaataagtaacaa

SEQ ID NO: 1757717 - DNA, 15 bp, Homo sapiens
ctaataagtaacaag

SEQ ID NO: 1757718 - DNA, 15 bp, Homo sapiens
taataagtaacaaga

SEQ ID NO: 1757719 - DNA, 15 bp, Homo sapiens
aataagtaacaagaa

SEQ ID NO: 1757720 - DNA, 15 bp, Homo sapiens
ataagtaacaagaaa

SEQ ID NO: 1757721 - DNA, 15 bp, Homo sapiens
taagtaacaagaaag

SEQ ID NO: 1757722 - DNA, 15 bp, Homo sapiens
aagtaacaagaaagg

SEQ ID NO: 1757723 - DNA, 15 bp, Homo sapiens
agtaacaagaaaggg

SEQ ID NO: 1757724 - DNA, 15 bp, Homo sapiens
gtaacaagaaaggga

SEQ ID NO: 1757725 - DNA, 15 bp, Homo sapiens
taacaagaaagggaa

SEQ ID NO: 1757726 - DNA, 15 bp, Homo sapiens
aacaagaaagggaaa

SEQ ID NO: 1757727 - DNA, 15 bp, Homo sapiens
acaagaaagggaaaa

SEQ ID NO: 1757728 - DNA, 15 bp, Homo sapiens
caagaaagggaaaag

SEQ ID NO: 1757729 - DNA, 15 bp, Homo sapiens
aagaaagggaaaagt

SEQ ID NO: 1757730 - DNA, 15 bp, Homo sapiens
agaaagggaaaagta

SEQ ID NO: 1757731 - DNA, 15 bp, Homo sapiens
gaaagggaaaagtaa

SEQ ID NO: 1757732 - DNA, 15 bp, Homo sapiens
aaagggaaaagtaac

SEQ ID NO: 1757733 - DNA, 15 bp, Homo sapiens
aagggaaaagtaaca

SEQ ID NO: 1757734 - DNA, 15 bp, Homo sapiens
agggaaaagtaacat

SEQ ID NO: 1757735 - DNA, 15 bp, Homo sapiens
gggaaaagtaacatt

SEQ ID NO: 1757736 - DNA, 15 bp, Homo sapiens
ggaaaagtaacattt

SEQ ID NO: 1757737 - DNA, 15 bp, Homo sapiens
gaaaagtaacatttg

SEQ ID NO: 1757738 - DNA, 15 bp, Homo sapiens
aaaagtaacatttgt

SEQ ID NO: 1757739 - DNA, 15 bp, Homo sapiens
aaagtaacatttgtt

SEQ ID NO: 1757740 - DNA, 15 bp, Homo sapiens
aagtaacatttgttg

SEQ ID NO: 1757741 - DNA, 15 bp, Homo sapiens
agtaacatttgttga

SEQ ID NO: 1757742 - DNA, 15 bp, Homo sapiens
gtaacatttgttgac

SEQ ID NO: 1757743 - DNA, 15 bp, Homo sapiens
taacatttgttgact

SEQ ID NO: 1757744 - DNA, 15 bp, Homo sapiens
aacatttgttgacta

SEQ ID NO: 1757745 - DNA, 15 bp, Homo sapiens
acatttgttgactag

SEQ ID NO: 1757746 - DNA, 15 bp, Homo sapiens
catttgttgactagc

SEQ ID NO: 1757747 - DNA, 15 bp, Homo sapiens
atttgttgactagct

SEQ ID NO: 1757748 - DNA, 15 bp, Homo sapiens
tttgttgactagctc

SEQ ID NO: 1757749 - DNA, 15 bp, Homo sapiens
ttgttgactagctcc

SEQ ID NO: 1757750 - DNA, 15 bp, Homo sapiens
tgttgactagctcct

SEQ ID NO: 1757751 - DNA, 15 bp, Homo sapiens
gttgactagctcctt

SEQ ID NO: 1757752 - DNA, 15 bp, Homo sapiens
ttgactagctccttt

SEQ ID NO: 1757753 - DNA, 15 bp, Homo sapiens
tgactagctcctttg

SEQ ID NO: 1757754 - DNA, 15 bp, Homo sapiens
gactagctcctttgt

SEQ ID NO: 1757755 - DNA, 15 bp, Homo sapiens
actagctcctttgtg

SEQ ID NO: 1757756 - DNA, 15 bp, Homo sapiens
ctagctcctttgtgc

SEQ ID NO: 1757757 - DNA, 15 bp, Homo sapiens
tagctcctttgtgca

SEQ ID NO: 1757758 - DNA, 15 bp, Homo sapiens
agctcctttgtgcag

SEQ ID NO: 1757759 - DNA, 15 bp, Homo sapiens
gctcctttgtgcagt

SEQ ID NO: 1757760 - DNA, 15 bp, Homo sapiens
ctcctttgtgcagtg

SEQ ID NO: 1757761 - DNA, 15 bp, Homo sapiens
tcctttgtgcagtgc

SEQ ID NO: 1757762 - DNA, 15 bp, Homo sapiens
cctttgtgcagtgca

SEQ ID NO: 1757763 - DNA, 15 bp, Homo sapiens
ctttgtgcagtgcac

SEQ ID NO: 1757764 - DNA, 15 bp, Homo sapiens
tttgtgcagtgcact

SEQ ID NO: 1757765 - DNA, 15 bp, Homo sapiens
ttgtgcagtgcactg

SEQ ID NO: 1757766 - DNA, 15 bp, Homo sapiens
tgtgcagtgcactgt

SEQ ID NO: 1757767 - DNA, 15 bp, Homo sapiens
gtgcagtgcactgtg

SEQ ID NO: 1757768 - DNA, 15 bp, Homo sapiens
tgcagtgcactgtga

SEQ ID NO: 1757769 - DNA, 15 bp, Homo sapiens
gcagtgcactgtgac

SEQ ID NO: 1757770 - DNA, 15 bp, Homo sapiens
cagtgcactgtgact

SEQ ID NO: 1757771 - DNA, 15 bp, Homo sapiens
agtgcactgtgacta

SEQ ID NO: 1757772 - DNA, 15 bp, Homo sapiens
gtgcactgtgactat

SEQ ID NO: 1757773 - DNA, 15 bp, Homo sapiens
tgcactgtgactatt

SEQ ID NO: 1757774 - DNA, 15 bp, Homo sapiens
gcactgtgactattg

SEQ ID NO: 1757775 - DNA, 15 bp, Homo sapiens
cactgtgactattgg

SEQ ID NO: 1757776 - DNA, 15 bp, Homo sapiens
actgtgactattggt

SEQ ID NO: 1757777 - DNA, 15 bp, Homo sapiens
ctgtgactattggtc

SEQ ID NO: 1757778 - DNA, 15 bp, Homo sapiens
tgtgactattggtct

SEQ ID NO: 1757779 - DNA, 15 bp, Homo sapiens
gtgactattggtctg

SEQ ID NO: 1757780 - DNA, 15 bp, Homo sapiens
tgactattggtctgg

SEQ ID NO: 1757781 - DNA, 15 bp, Homo sapiens
gactattggtctggc

SEQ ID NO: 1757782 - DNA, 15 bp, Homo sapiens
actattggtctggct

SEQ ID NO: 1757783 - DNA, 15 bp, Homo sapiens
ctattggtctggctt

SEQ ID NO: 1757784 - DNA, 15 bp, Homo sapiens
tattggtctggctta

SEQ ID NO: 1757785 - DNA, 15 bp, Homo sapiens
attggtctggcttat

SEQ ID NO: 1757786 - DNA, 15 bp, Homo sapiens
ttggtctggcttatt

SEQ ID NO: 1757787 - DNA, 15 bp, Homo sapiens
tggtctggcttattc

SEQ ID NO: 1757788 - DNA, 15 bp, Homo sapiens
ggtctggcttattcc

SEQ ID NO: 1757789 - DNA, 15 bp, Homo sapiens
gtctggcttattcct

SEQ ID NO: 1757790 - DNA, 15 bp, Homo sapiens
tctggcttattcctc

SEQ ID NO: 1757791 - DNA, 15 bp, Homo sapiens
ctggcttattcctca

SEQ ID NO: 1757792 - DNA, 15 bp, Homo sapiens
tggcttattcctcag

SEQ ID NO: 1757793 - DNA, 15 bp, Homo sapiens
ggcttattcctcagg

SEQ ID NO: 1757794 - DNA, 15 bp, Homo sapiens
gcttattcctcagga

SEQ ID NO: 1757795 - DNA, 15 bp, Homo sapiens
cttattcctcaggaa

SEQ ID NO: 1757796 - DNA, 15 bp, Homo sapiens
ttattcctcaggaag

SEQ ID NO: 1757797 - DNA, 15 bp, Homo sapiens
tattcctcaggaaga

SEQ ID NO: 1757798 - DNA, 15 bp, Homo sapiens
attcctcaggaagaa

SEQ ID NO: 1757799 - DNA, 15 bp, Homo sapiens
ttcctcaggaagaag

SEQ ID NO: 1757800 - DNA, 15 bp, Homo sapiens
tcctcaggaagaagg

SEQ ID NO: 1757801 - DNA, 15 bp, Homo sapiens
cctcaggaagaagga

SEQ ID NO: 1757802 - DNA, 15 bp, Homo sapiens
ctcaggaagaaggat

SEQ ID NO: 1757803 - DNA, 15 bp, Homo sapiens
tcaggaagaaggatt

SEQ ID NO: 1757804 - DNA, 15 bp, Homo sapiens
caggaagaaggatta

SEQ ID NO: 1757805 - DNA, 15 bp, Homo sapiens
aggaagaaggattaa

SEQ ID NO: 1757806 - DNA, 15 bp, Homo sapiens
ggaagaaggattaaa

SEQ ID NO: 1757807 - DNA, 15 bp, Homo sapiens
gaagaaggattaaaa

SEQ ID NO: 1757808 - DNA, 15 bp, Homo sapiens
aagaaggattaaaag

SEQ ID NO: 1757809 - DNA, 15 bp, Homo sapiens
agaaggattaaaaga

SEQ ID NO: 1757810 - DNA, 15 bp, Homo sapiens
gaaggattaaaagaa

SEQ ID NO: 1757811 - DNA, 15 bp, Homo sapiens
aaggattaaaagaag

SEQ ID NO: 1757812 - DNA, 15 bp, Homo sapiens
aggattaaaagaaga

SEQ ID NO: 1757813 - DNA, 15 bp, Homo sapiens
ggattaaaagaagac

SEQ ID NO: 1757814 - DNA, 15 bp, Homo sapiens
gattaaaagaagact

SEQ ID NO: 1757815 - DNA, 15 bp, Homo sapiens
attaaaagaagactt

SEQ ID NO: 1757816 - DNA, 15 bp, Homo sapiens
ttaaaagaagacttt

SEQ ID NO: 1757817 - DNA, 15 bp, Homo sapiens
taaaagaagacttta

SEQ ID NO: 1757818 - DNA, 15 bp, Homo sapiens
aaaagaagactttac

SEQ ID NO: 1757819 - DNA, 15 bp, Homo sapiens
aaagaagactttaca

SEQ ID NO: 1757820 - DNA, 15 bp, Homo sapiens
aagaagactttacaa

SEQ ID NO: 1757821 - DNA, 15 bp, Homo sapiens
agaagactttacaaa

SEQ ID NO: 1757822 - DNA, 15 bp, Homo sapiens
gaagactttacaaaa

SEQ ID NO: 1757823 - DNA, 15 bp, Homo sapiens
aagactttacaaaaa

SEQ ID NO: 1757824 - DNA, 15 bp, Homo sapiens
agactttacaaaaat

SEQ ID NO: 1757825 - DNA, 15 bp, Homo sapiens
gactttacaaaaatg

SEQ ID NO: 1757826 - DNA, 15 bp, Homo sapiens
actttacaaaaatga

SEQ ID NO: 1757827 - DNA, 15 bp, Homo sapiens
ctttacaaaaatgag

SEQ ID NO: 1757828 - DNA, 15 bp, Homo sapiens
tttacaaaaatgagc

SEQ ID NO: 1757829 - DNA, 15 bp, Homo sapiens
ttacaaaaatgagca

SEQ ID NO: 1757830 - DNA, 15 bp, Homo sapiens
tacaaaaatgagcaa

SEQ ID NO: 1757831 - DNA, 15 bp, Homo sapiens
acaaaaatgagcaaa

SEQ ID NO: 1757832 - DNA, 15 bp, Homo sapiens
caaaaatgagcaaac

SEQ ID NO: 1757833 - DNA, 15 bp, Homo sapiens
aaaaatgagcaaact

SEQ ID NO: 1757834 - DNA, 15 bp, Homo sapiens
aaaatgagcaaacta

SEQ ID NO: 1757835 - DNA, 15 bp, Homo sapiens
aaatgagcaaactat

SEQ ID NO: 1757836 - DNA, 15 bp, Homo sapiens
aatgagcaaactata

SEQ ID NO: 1757837 - DNA, 15 bp, Homo sapiens
atgagcaaactatat

SEQ ID NO: 1757838 - DNA, 15 bp, Homo sapiens
tgagcaaactatatt

SEQ ID NO: 1757839 - DNA, 15 bp, Homo sapiens
gagcaaactatatta

SEQ ID NO: 1757840 - DNA, 15 bp, Homo sapiens
agcaaactatattat

SEQ ID NO: 1757841 - DNA, 15 bp, Homo sapiens
gcaaactatattata

SEQ ID NO: 1757842 - DNA, 15 bp, Homo sapiens
caaactatattataa

SEQ ID NO: 1757843 - DNA, 15 bp, Homo sapiens
aaactatattataaa

SEQ ID NO: 1757844 - DNA, 15 bp, Homo sapiens
aactatattataaaa

SEQ ID NO: 1757845 - DNA, 15 bp, Homo sapiens
actatattataaaag

SEQ ID NO: 1757846 - DNA, 15 bp, Homo sapiens
ctatattataaaagt

SEQ ID NO: 1757847 - DNA, 15 bp, Homo sapiens
tatattataaaagta

SEQ ID NO: 1757848 - DNA, 15 bp, Homo sapiens
atattataaaagtaa

SEQ ID NO: 1757849 - DNA, 15 bp, Homo sapiens
tattataaaagtaaa

SEQ ID NO: 1757850 - DNA, 15 bp, Homo sapiens
attataaaagtaaat

SEQ ID NO: 1757851 - DNA, 15 bp, Homo sapiens
ttataaaagtaaatg

SEQ ID NO: 1757852 - DNA, 15 bp, Homo sapiens
tataaaagtaaatgc

SEQ ID NO: 1757853 - DNA, 15 bp, Homo sapiens
ataaaagtaaatgct

SEQ ID NO: 1757854 - DNA, 15 bp, Homo sapiens
taaaagtaaatgcta

SEQ ID NO: 1757855 - DNA, 15 bp, Homo sapiens
aaaagtaaatgctag

SEQ ID NO: 1757856 - DNA, 15 bp, Homo sapiens
aaagtaaatgctagt

SEQ ID NO: 1757857 - DNA, 15 bp, Homo sapiens
aagtaaatgctagta

SEQ ID NO: 1757858 - DNA, 15 bp, Homo sapiens
agtaaatgctagtat

SEQ ID NO: 1757859 - DNA, 15 bp, Homo sapiens
gtaaatgctagtatg

SEQ ID NO: 1757860 - DNA, 15 bp, Homo sapiens
taaatgctagtatgc

SEQ ID NO: 1757861 - DNA, 15 bp, Homo sapiens
aaatgctagtatgca

SEQ ID NO: 1757862 - DNA, 15 bp, Homo sapiens
aatgctagtatgcat

SEQ ID NO: 1757863 - DNA, 15 bp, Homo sapiens
atgctagtatgcata

SEQ ID NO: 1757864 - DNA, 15 bp, Homo sapiens
tgctagtatgcatat

SEQ ID NO: 1757865 - DNA, 15 bp, Homo sapiens
gctagtatgcatata

SEQ ID NO: 1757866 - DNA, 15 bp, Homo sapiens
ctagtatgcatatat

SEQ ID NO: 1757867 - DNA, 15 bp, Homo sapiens
tagtatgcatatatg

SEQ ID NO: 1757868 - DNA, 15 bp, Homo sapiens
agtatgcatatatgt

SEQ ID NO: 1757869 - DNA, 15 bp, Homo sapiens
gtatgcatatatgtt

SEQ ID NO: 1757870 - DNA, 15 bp, Homo sapiens
tatgcatatatgttt

SEQ ID NO: 1757871 - DNA, 15 bp, Homo sapiens
atgcatatatgtttc

SEQ ID NO: 1757872 - DNA, 15 bp, Homo sapiens
tgcatatatgtttca

SEQ ID NO: 1757873 - DNA, 15 bp, Homo sapiens
gcatatatgtttcat

SEQ ID NO: 1757874 - DNA, 15 bp, Homo sapiens
catatatgtttcatt

SEQ ID NO: 1757875 - DNA, 15 bp, Homo sapiens
atatatgtttcattc

SEQ ID NO: 1757876 - DNA, 15 bp, Homo sapiens
tatatgtttcattca

SEQ ID NO: 1757877 - DNA, 15 bp, Homo sapiens
atatgtttcattcat

SEQ ID NO: 1757878 - DNA, 15 bp, Homo sapiens
tatgtttcattcatg

SEQ ID NO: 1757879 - DNA, 15 bp, Homo sapiens
atgtttcattcatgc

SEQ ID NO: 1757880 - DNA, 15 bp, Homo sapiens
tgtttcattcatgca

SEQ ID NO: 1757881 - DNA, 15 bp, Homo sapiens
gtttcattcatgcaa

SEQ ID NO: 1757882 - DNA, 15 bp, Homo sapiens
tttcattcatgcaac

SEQ ID NO: 1757883 - DNA, 15 bp, Homo sapiens
ttcattcatgcaact

SEQ ID NO: 1757884 - DNA, 15 bp, Homo sapiens
tcattcatgcaactc

SEQ ID NO: 1757885 - DNA, 15 bp, Homo sapiens
cattcatgcaactcc

SEQ ID NO: 1757886 - DNA, 15 bp, Homo sapiens
attcatgcaactcct

SEQ ID NO: 1757887 - DNA, 15 bp, Homo sapiens
ttcatgcaactccta

SEQ ID NO: 1757888 - DNA, 15 bp, Homo sapiens
tcatgcaactcctag

SEQ ID NO: 1757889 - DNA, 15 bp, Homo sapiens
catgcaactcctaga

SEQ ID NO: 1757890 - DNA, 15 bp, Homo sapiens
atgcaactcctagaa

SEQ ID NO: 1757891 - DNA, 15 bp, Homo sapiens
tgcaactcctagaaa

SEQ ID NO: 1757892 - DNA, 15 bp, Homo sapiens
gcaactcctagaaat

SEQ ID NO: 1757893 - DNA, 15 bp, Homo sapiens
caactcctagaaatg

SEQ ID NO: 1757894 - DNA, 15 bp, Homo sapiens
aactcctagaaatga

SEQ ID NO: 1757895 - DNA, 15 bp, Homo sapiens
actcctagaaatgag

SEQ ID NO: 1757896 - DNA, 15 bp, Homo sapiens
ctcctagaaatgaga

SEQ ID NO: 1757897 - DNA, 15 bp, Homo sapiens
tcctagaaatgagaa

SEQ ID NO: 1757898 - DNA, 15 bp, Homo sapiens
cctagaaatgagaat

SEQ ID NO: 1757899 - DNA, 15 bp, Homo sapiens
ctagaaatgagaatt

SEQ ID NO: 1757900 - DNA, 15 bp, Homo sapiens
tagaaatgagaattt

SEQ ID NO: 1757901 - DNA, 15 bp, Homo sapiens
agaaatgagaattta

SEQ ID NO: 1757902 - DNA, 15 bp, Homo sapiens
gaaatgagaatttac

SEQ ID NO: 1757903 - DNA, 15 bp, Homo sapiens
aaatgagaatttact

SEQ ID NO: 1757904 - DNA, 15 bp, Homo sapiens
aatgagaatttacta

SEQ ID NO: 1757905 - DNA, 15 bp, Homo sapiens
atgagaatttactat

SEQ ID NO: 1757906 - DNA, 15 bp, Homo sapiens
tgagaatttactata

SEQ ID NO: 1757907 - DNA, 15 bp, Homo sapiens
gagaatttactataa

SEQ ID NO: 1757908 - DNA, 15 bp, Homo sapiens
agaatttactataag

SEQ ID NO: 1757909 - DNA, 15 bp, Homo sapiens
gaatttactataagt

SEQ ID NO: 1757910 - DNA, 15 bp, Homo sapiens
aatttactataagtg

SEQ ID NO: 1757911 - DNA, 15 bp, Homo sapiens
atttactataagtgt

SEQ ID NO: 1757912 - DNA, 15 bp, Homo sapiens
tttactataagtgtt

SEQ ID NO: 1757913 - DNA, 15 bp, Homo sapiens
ttactataagtgttt

SEQ ID NO: 1757914 - DNA, 15 bp, Homo sapiens
tactataagtgtttt

SEQ ID NO: 1757915 - DNA, 15 bp, Homo sapiens
actataagtgttttc

SEQ ID NO: 1757916 - DNA, 15 bp, Homo sapiens
ctataagtgttttca

SEQ ID NO: 1757917 - DNA, 15 bp, Homo sapiens
tataagtgttttcag

SEQ ID NO: 1757918 - DNA, 15 bp, Homo sapiens
ataagtgttttcaga

SEQ ID NO: 1757919 - DNA, 15 bp, Homo sapiens
taagtgttttcagaa

SEQ ID NO: 1757920 - DNA, 15 bp, Homo sapiens
aagtgttttcagaat

SEQ ID NO: 1757921 - DNA, 15 bp, Homo sapiens
agtgttttcagaatc

SEQ ID NO: 1757922 - DNA, 15 bp, Homo sapiens
gtgttttcagaatcc

SEQ ID NO: 1757923 - DNA, 15 bp, Homo sapiens
tgttttcagaatcca

SEQ ID NO: 1757924 - DNA, 15 bp, Homo sapiens
gttttcagaatccac

SEQ ID NO: 1757925 - DNA, 15 bp, Homo sapiens
ttttcagaatccaca

SEQ ID NO: 1757926 - DNA, 15 bp, Homo sapiens
tttcagaatccacaa

SEQ ID NO: 1757927 - DNA, 15 bp, Homo sapiens
ttcagaatccacaat

SEQ ID NO: 1757928 - DNA, 15 bp, Homo sapiens
tcagaatccacaata

SEQ ID NO: 1757929 - DNA, 15 bp, Homo sapiens
cagaatccacaataa

SEQ ID NO: 1757930 - DNA, 15 bp, Homo sapiens
agaatccacaataat

SEQ ID NO: 1757931 - DNA, 15 bp, Homo sapiens
gaatccacaataatt

SEQ ID NO: 1757932 - DNA, 15 bp, Homo sapiens
aatccacaataattt

SEQ ID NO: 1757933 - DNA, 15 bp, Homo sapiens
atccacaataattta

SEQ ID NO: 1757934 - DNA, 15 bp, Homo sapiens
tccacaataatttag

SEQ ID NO: 1757935 - DNA, 15 bp, Homo sapiens
ccacaataatttagg

SEQ ID NO: 1757936 - DNA, 15 bp, Homo sapiens
cacaataatttaggt

SEQ ID NO: 1757937 - DNA, 15 bp, Homo sapiens
acaataatttaggtt

SEQ ID NO: 1757938 - DNA, 15 bp, Homo sapiens
caataatttaggttg

SEQ ID NO: 1757939 - DNA, 15 bp, Homo sapiens
aataatttaggttga

SEQ ID NO: 1757940 - DNA, 15 bp, Homo sapiens
ataatttaggttgaa

SEQ ID NO: 1757941 - DNA, 15 bp, Homo sapiens
taatttaggttgaaa

SEQ ID NO: 1757942 - DNA, 15 bp, Homo sapiens
aatttaggttgaaat

SEQ ID NO: 1757943 - DNA, 15 bp, Homo sapiens
atttaggttgaaatt

SEQ ID NO: 1757944 - DNA, 15 bp, Homo sapiens
tttaggttgaaatta

SEQ ID NO: 1757945 - DNA, 15 bp, Homo sapiens
ttaggttgaaattag

SEQ ID NO: 1757946 - DNA, 15 bp, Homo sapiens
taggttgaaattagg

SEQ ID NO: 1757947 - DNA, 15 bp, Homo sapiens
aggttgaaattaggt

SEQ ID NO: 1757948 - DNA, 15 bp, Homo sapiens
ggttgaaattaggta

SEQ ID NO: 1757949 - DNA, 15 bp, Homo sapiens
gttgaaattaggtat

SEQ ID NO: 1757950 - DNA, 15 bp, Homo sapiens
ttgaaattaggtatt

SEQ ID NO: 1757951 - DNA, 15 bp, Homo sapiens
tgaaattaggtattt

SEQ ID NO: 1757952 - DNA, 15 bp, Homo sapiens
gaaattaggtatttg

SEQ ID NO: 1757953 - DNA, 15 bp, Homo sapiens
aaattaggtatttgg

SEQ ID NO: 1757954 - DNA, 15 bp, Homo sapiens
aattaggtatttgga

SEQ ID NO: 1757955 - DNA, 15 bp, Homo sapiens
attaggtatttggat

SEQ ID NO: 1757956 - DNA, 15 bp, Homo sapiens
ttaggtatttggatc

SEQ ID NO: 1757957 - DNA, 15 bp, Homo sapiens
taggtatttggatca

SEQ ID NO: 1757958 - DNA, 15 bp, Homo sapiens
aggtatttggatcaa

SEQ ID NO: 1757959 - DNA, 15 bp, Homo sapiens
ggtatttggatcaac

SEQ ID NO: 1757960 - DNA, 15 bp, Homo sapiens
gtatttggatcaact

SEQ ID NO: 1757961 - DNA, 15 bp, Homo sapiens
tatttggatcaactt

SEQ ID NO: 1757962 - DNA, 15 bp, Homo sapiens
atttggatcaacttt

SEQ ID NO: 1757963 - DNA, 15 bp, Homo sapiens
tttggatcaactttc

SEQ ID NO: 1757964 - DNA, 15 bp, Homo sapiens
ttggatcaactttca

SEQ ID NO: 1757965 - DNA, 15 bp, Homo sapiens
tggatcaactttcaa

SEQ ID NO: 1757966 - DNA, 15 bp, Homo sapiens
ggatcaactttcaag

SEQ ID NO: 1757967 - DNA, 15 bp, Homo sapiens
gatcaactttcaagg

SEQ ID NO: 1757968 - DNA, 15 bp, Homo sapiens
atcaactttcaaggg

SEQ ID NO: 1757969 - DNA, 15 bp, Homo sapiens
tcaactttcaaggga

SEQ ID NO: 1757970 - DNA, 15 bp, Homo sapiens
caactttcaagggaa

SEQ ID NO: 1757971 - DNA, 15 bp, Homo sapiens
aactttcaagggaag

SEQ ID NO: 1757972 - DNA, 15 bp, Homo sapiens
actttcaagggaagg

SEQ ID NO: 1757973 - DNA, 15 bp, Homo sapiens
ctttcaagggaaggg

SEQ ID NO: 1757974 - DNA, 15 bp, Homo sapiens
tttcaagggaagggg

SEQ ID NO: 1757975 - DNA, 15 bp, Homo sapiens
ttcaagggaaggggt

SEQ ID NO: 1757976 - DNA, 15 bp, Homo sapiens
tcaagggaaggggtg

SEQ ID NO: 1757977 - DNA, 15 bp, Homo sapiens
caagggaaggggtga

SEQ ID NO: 1757978 - DNA, 15 bp, Homo sapiens
aagggaaggggtgac

SEQ ID NO: 1757979 - DNA, 15 bp, Homo sapiens
agggaaggggtgaca

SEQ ID NO: 1757980 - DNA, 15 bp, Homo sapiens
gggaaggggtgacaa

SEQ ID NO: 1757981 - DNA, 15 bp, Homo sapiens
ggaaggggtgacaat

SEQ ID NO: 1757982 - DNA, 15 bp, Homo sapiens
gaaggggtgacaatg

SEQ ID NO: 1757983 - DNA, 15 bp, Homo sapiens
aaggggtgacaatga

SEQ ID NO: 1757984 - DNA, 15 bp, Homo sapiens
aggggtgacaatgag

SEQ ID NO: 1757985 - DNA, 15 bp, Homo sapiens
ggggtgacaatgagg

SEQ ID NO: 1757986 - DNA, 15 bp, Homo sapiens
gggtgacaatgaggt

SEQ ID NO: 1757987 - DNA, 15 bp, Homo sapiens
ggtgacaatgaggtg

SEQ ID NO: 1757988 - DNA, 15 bp, Homo sapiens
gtgacaatgaggtga

SEQ ID NO: 1757989 - DNA, 15 bp, Homo sapiens
tgacaatgaggtgaa

SEQ ID NO: 1757990 - DNA, 15 bp, Homo sapiens
gacaatgaggtgaaa

SEQ ID NO: 1757991 - DNA, 15 bp, Homo sapiens
acaatgaggtgaaat

SEQ ID NO: 1757992 - DNA, 15 bp, Homo sapiens
caatgaggtgaaata

SEQ ID NO: 1757993 - DNA, 15 bp, Homo sapiens
aatgaggtgaaatag

SEQ ID NO: 1757994 - DNA, 15 bp, Homo sapiens
atgaggtgaaataga

SEQ ID NO: 1757995 - DNA, 15 bp, Homo sapiens
tgaggtgaaatagac

SEQ ID NO: 1757996 - DNA, 15 bp, Homo sapiens
gaggtgaaatagaca

SEQ ID NO: 1757997 - DNA, 15 bp, Homo sapiens
aggtgaaatagacat

SEQ ID NO: 1757998 - DNA, 15 bp, Homo sapiens
ggtgaaatagacatc

SEQ ID NO: 1757999 - DNA, 15 bp, Homo sapiens
gtgaaatagacatct

SEQ ID NO: 1758000 - DNA, 15 bp, Homo sapiens
tgaaatagacatcta

SEQ ID NO: 1758001 - DNA, 15 bp, Homo sapiens
gaaatagacatctag

SEQ ID NO: 1758002 - DNA, 15 bp, Homo sapiens
aaatagacatctaga

SEQ ID NO: 1758003 - DNA, 15 bp, Homo sapiens
aatagacatctagat

SEQ ID NO: 1758004 - DNA, 15 bp, Homo sapiens
atagacatctagatt

SEQ ID NO: 1758005 - DNA, 15 bp, Homo sapiens
tagacatctagattg

SEQ ID NO: 1758006 - DNA, 15 bp, Homo sapiens
agacatctagattgt

SEQ ID NO: 1758007 - DNA, 15 bp, Homo sapiens
gacatctagattgtt

SEQ ID NO: 1758008 - DNA, 15 bp, Homo sapiens
acatctagattgttt

SEQ ID NO: 1758009 - DNA, 15 bp, Homo sapiens
catctagattgtttt

SEQ ID NO: 1758010 - DNA, 15 bp, Homo sapiens
atctagattgttttc

SEQ ID NO: 1758011 - DNA, 15 bp, Homo sapiens
tctagattgttttcg

SEQ ID NO: 1758012 - DNA, 15 bp, Homo sapiens
ctagattgttttcgt

SEQ ID NO: 1758013 - DNA, 15 bp, Homo sapiens
tagattgttttcgta

SEQ ID NO: 1758014 - DNA, 15 bp, Homo sapiens
agattgttttcgtag

SEQ ID NO: 1758015 - DNA, 15 bp, Homo sapiens
gattgttttcgtaga

SEQ ID NO: 1758016 - DNA, 15 bp, Homo sapiens
attgttttcgtagac

SEQ ID NO: 1758017 - DNA, 15 bp, Homo sapiens
ttgttttcgtagact

SEQ ID NO: 1758018 - DNA, 15 bp, Homo sapiens
tgttttcgtagactg

SEQ ID NO: 1758019 - DNA, 15 bp, Homo sapiens
gttttcgtagactga

SEQ ID NO: 1758020 - DNA, 15 bp, Homo sapiens
ttttcgtagactgaa

SEQ ID NO: 1758021 - DNA, 15 bp, Homo sapiens
tttcgtagactgaaa

SEQ ID NO: 1758022 - DNA, 15 bp, Homo sapiens
ttcgtagactgaaac

SEQ ID NO: 1758023 - DNA, 15 bp, Homo sapiens
tcgtagactgaaaca

SEQ ID NO: 1758024 - DNA, 15 bp, Homo sapiens
cgtagactgaaacat

SEQ ID NO: 1758025 - DNA, 15 bp, Homo sapiens
gtagactgaaacatt

SEQ ID NO: 1758026 - DNA, 15 bp, Homo sapiens
tagactgaaacattg

SEQ ID NO: 1758027 - DNA, 15 bp, Homo sapiens
agactgaaacattgg

SEQ ID NO: 1758028 - DNA, 15 bp, Homo sapiens
gactgaaacattgga

SEQ ID NO: 1758029 - DNA, 15 bp, Homo sapiens
actgaaacattggac

SEQ ID NO: 1758030 - DNA, 15 bp, Homo sapiens
ctgaaacattggacc

SEQ ID NO: 1758031 - DNA, 15 bp, Homo sapiens
tgaaacattggacct

SEQ ID NO: 1758032 - DNA, 15 bp, Homo sapiens
gaaacattggacctg

SEQ ID NO: 1758033 - DNA, 15 bp, Homo sapiens
aaacattggacctga

SEQ ID NO: 1758034 - DNA, 15 bp, Homo sapiens
aacattggacctgag

SEQ ID NO: 1758035 - DNA, 15 bp, Homo sapiens
acattggacctgagg

SEQ ID NO: 1758036 - DNA, 15 bp, Homo sapiens
cattggacctgaggt

SEQ ID NO: 1758037 - DNA, 15 bp, Homo sapiens
attggacctgaggtt

SEQ ID NO: 1758038 - DNA, 15 bp, Homo sapiens
ttggacctgaggttt

SEQ ID NO: 1758039 - DNA, 15 bp, Homo sapiens
tggacctgaggtttt

SEQ ID NO: 1758040 - DNA, 15 bp, Homo sapiens
ggacctgaggttttt

SEQ ID NO: 1758041 - DNA, 15 bp, Homo sapiens
gacctgaggtttttg

SEQ ID NO: 1758042 - DNA, 15 bp, Homo sapiens
acctgaggtttttgt

SEQ ID NO: 1758043 - DNA, 15 bp, Homo sapiens
cctgaggtttttgtt

SEQ ID NO: 1758044 - DNA, 15 bp, Homo sapiens
ctgaggtttttgttg

SEQ ID NO: 1758045 - DNA, 15 bp, Homo sapiens
tgaggtttttgttgt

SEQ ID NO: 1758046 - DNA, 15 bp, Homo sapiens
gaggtttttgttgtt

SEQ ID NO: 1758047 - DNA, 15 bp, Homo sapiens
aggtttttgttgttg

SEQ ID NO: 1758048 - DNA, 15 bp, Homo sapiens
ggtttttgttgttgt

SEQ ID NO: 1758049 - DNA, 15 bp, Homo sapiens
tttttgttgttgttt

SEQ ID NO: 1758050 - DNA, 15 bp, Homo sapiens
ttttgttgttgtttt

SEQ ID NO: 1758051 - DNA, 15 bp, Homo sapiens
tttgttgttgtttta

SEQ ID NO: 1758052 - DNA, 15 bp, Homo sapiens
ttgttgttgttttac

SEQ ID NO: 1758053 - DNA, 15 bp, Homo sapiens
tgttgttgttttact

SEQ ID NO: 1758054 - DNA, 15 bp, Homo sapiens
gttgttgttttactc

SEQ ID NO: 1758055 - DNA, 15 bp, Homo sapiens
ttgttgttttactct

SEQ ID NO: 1758056 - DNA, 15 bp, Homo sapiens
tgttgttttactctt

SEQ ID NO: 1758057 - DNA, 15 bp, Homo sapiens
gttgttttactcttt

SEQ ID NO: 1758058 - DNA, 15 bp, Homo sapiens
ttgttttactctttc

SEQ ID NO: 1758059 - DNA, 15 bp, Homo sapiens
tgttttactctttct

SEQ ID NO: 1758060 - DNA, 15 bp, Homo sapiens
gttttactctttctc

SEQ ID NO: 1758061 - DNA, 15 bp, Homo sapiens
ttttactctttctct

SEQ ID NO: 1758062 - DNA, 15 bp, Homo sapiens
tttactctttctctg

SEQ ID NO: 1758063 - DNA, 15 bp, Homo sapiens
ttactctttctctgt

SEQ ID NO: 1758064 - DNA, 15 bp, Homo sapiens
tactctttctctgtt

SEQ ID NO: 1758065 - DNA, 15 bp, Homo sapiens
actctttctctgttt

SEQ ID NO: 1758066 - DNA, 15 bp, Homo sapiens
ctctttctctgtttt

SEQ ID NO: 1758067 - DNA, 15 bp, Homo sapiens
tctttctctgttttt

SEQ ID NO: 1758068 - DNA, 15 bp, Homo sapiens
ctttctctgttttta

SEQ ID NO: 1758069 - DNA, 15 bp, Homo sapiens
tttctctgtttttag

SEQ ID NO: 1758070 - DNA, 15 bp, Homo sapiens
ttctctgtttttagt

SEQ ID NO: 1758071 - DNA, 15 bp, Homo sapiens
tctctgtttttagta

SEQ ID NO: 1758072 - DNA, 15 bp, Homo sapiens
ctctgtttttagtaa

SEQ ID NO: 1758073 - DNA, 15 bp, Homo sapiens
tctgtttttagtaaa

SEQ ID NO: 1758074 - DNA, 15 bp, Homo sapiens
ctgtttttagtaaaa

SEQ ID NO: 1758075 - DNA, 15 bp, Homo sapiens
tgtttttagtaaaag

SEQ ID NO: 1758076 - DNA, 15 bp, Homo sapiens
gtttttagtaaaaga

SEQ ID NO: 1758077 - DNA, 15 bp, Homo sapiens
tttttagtaaaagat

SEQ ID NO: 1758078 - DNA, 15 bp, Homo sapiens
ttttagtaaaagatt

SEQ ID NO: 1758079 - DNA, 15 bp, Homo sapiens
tttagtaaaagattc

SEQ ID NO: 1758080 - DNA, 15 bp, Homo sapiens
ttagtaaaagattcc

SEQ ID NO: 1758081 - DNA, 15 bp, Homo sapiens
tagtaaaagattcca

SEQ ID NO: 1758082 - DNA, 15 bp, Homo sapiens
agtaaaagattccag

SEQ ID NO: 1758083 - DNA, 15 bp, Homo sapiens
gtaaaagattccagg

SEQ ID NO: 1758084 - DNA, 15 bp, Homo sapiens
taaaagattccaggt

SEQ ID NO: 1758085 - DNA, 15 bp, Homo sapiens
aaaagattccaggta

SEQ ID NO: 1758086 - DNA, 15 bp, Homo sapiens
aaagattccaggtat

SEQ ID NO: 1758087 - DNA, 15 bp, Homo sapiens
aagattccaggtatg

SEQ ID NO: 1758088 - DNA, 15 bp, Homo sapiens
agattccaggtatgc

SEQ ID NO: 1758089 - DNA, 15 bp, Homo sapiens
gattccaggtatgcc

SEQ ID NO: 1758090 - DNA, 15 bp, Homo sapiens
attccaggtatgcct

SEQ ID NO: 1758091 - DNA, 15 bp, Homo sapiens
ttccaggtatgccta

SEQ ID NO: 1758092 - DNA, 15 bp, Homo sapiens
tccaggtatgcctaa

SEQ ID NO: 1758093 - DNA, 15 bp, Homo sapiens
ccaggtatgcctaaa

SEQ ID NO: 1758094 - DNA, 15 bp, Homo sapiens
caggtatgcctaaag

SEQ ID NO: 1758095 - DNA, 15 bp, Homo sapiens
aggtatgcctaaagt

SEQ ID NO: 1758096 - DNA, 15 bp, Homo sapiens
ggtatgcctaaagtc

SEQ ID NO: 1758097 - DNA, 15 bp, Homo sapiens
gtatgcctaaagtca

SEQ ID NO: 1758098 - DNA, 15 bp, Homo sapiens
tatgcctaaagtcat

SEQ ID NO: 1758099 - DNA, 15 bp, Homo sapiens
atgcctaaagtcatc

SEQ ID NO: 1758100 - DNA, 15 bp, Homo sapiens
tgcctaaagtcatct

SEQ ID NO: 1758101 - DNA, 15 bp, Homo sapiens
gcctaaagtcatctt

SEQ ID NO: 1758102 - DNA, 15 bp, Homo sapiens
cctaaagtcatcttc

SEQ ID NO: 1758103 - DNA, 15 bp, Homo sapiens
ctaaagtcatcttct

SEQ ID NO: 1758104 - DNA, 15 bp, Homo sapiens
taaagtcatcttcta

SEQ ID NO: 1758105 - DNA, 15 bp, Homo sapiens
aaagtcatcttctat

SEQ ID NO: 1758106 - DNA, 15 bp, Homo sapiens
aagtcatcttctata

SEQ ID NO: 1758107 - DNA, 15 bp, Homo sapiens
agtcatcttctatac

SEQ ID NO: 1758108 - DNA, 15 bp, Homo sapiens
gtcatcttctatacg

SEQ ID NO: 1758109 - DNA, 15 bp, Homo sapiens
tcatcttctatacga

SEQ ID NO: 1758110 - DNA, 15 bp, Homo sapiens
catcttctatacgaa

SEQ ID NO: 1758111 - DNA, 15 bp, Homo sapiens
atcttctatacgaat

SEQ ID NO: 1758112 - DNA, 15 bp, Homo sapiens
tcttctatacgaatg

SEQ ID NO: 1758113 - DNA, 15 bp, Homo sapiens
cttctatacgaatgc

SEQ ID NO: 1758114 - DNA, 15 bp, Homo sapiens
ttctatacgaatgca

SEQ ID NO: 1758115 - DNA, 15 bp, Homo sapiens
tctatacgaatgcaa

SEQ ID NO: 1758116 - DNA, 15 bp, Homo sapiens
ctatacgaatgcaaa

SEQ ID NO: 1758117 - DNA, 15 bp, Homo sapiens
tatacgaatgcaaaa

SEQ ID NO: 1758118 - DNA, 15 bp, Homo sapiens
atacgaatgcaaaaa

SEQ ID NO: 1758119 - DNA, 15 bp, Homo sapiens
tacgaatgcaaaaat

SEQ ID NO: 1758120 - DNA, 15 bp, Homo sapiens
acgaatgcaaaaatg

SEQ ID NO: 1758121 - DNA, 15 bp, Homo sapiens
cgaatgcaaaaatgt

SEQ ID NO: 1758122 - DNA, 15 bp, Homo sapiens
gaatgcaaaaatgta

SEQ ID NO: 1758123 - DNA, 15 bp, Homo sapiens
aatgcaaaaatgtaa

SEQ ID NO: 1758124 - DNA, 15 bp, Homo sapiens
atgcaaaaatgtaac

SEQ ID NO: 1758125 - DNA, 15 bp, Homo sapiens
tgcaaaaatgtaacg

SEQ ID NO: 1758126 - DNA, 15 bp, Homo sapiens
gcaaaaatgtaacga

SEQ ID NO: 1758127 - DNA, 15 bp, Homo sapiens
caaaaatgtaacgac

SEQ ID NO: 1758128 - DNA, 15 bp, Homo sapiens
aaaaatgtaacgaca

SEQ ID NO: 1758129 - DNA, 15 bp, Homo sapiens
aaaatgtaacgacaa

SEQ ID NO: 1758130 - DNA, 15 bp, Homo sapiens
aaatgtaacgacaaa

SEQ ID NO: 1758131 - DNA, 15 bp, Homo sapiens
aatgtaacgacaaag

SEQ ID NO: 1758132 - DNA, 15 bp, Homo sapiens
atgtaacgacaaaga

SEQ ID NO: 1758133 - DNA, 15 bp, Homo sapiens
tgtaacgacaaagaa

SEQ ID NO: 1758134 - DNA, 15 bp, Homo sapiens
gtaacgacaaagaag

SEQ ID NO: 1758135 - DNA, 15 bp, Homo sapiens
taacgacaaagaagg

SEQ ID NO: 1758136 - DNA, 15 bp, Homo sapiens
aacgacaaagaaggg

SEQ ID NO: 1758137 - DNA, 15 bp, Homo sapiens
acgacaaagaaggga

SEQ ID NO: 1758138 - DNA, 15 bp, Homo sapiens
cgacaaagaagggaa

SEQ ID NO: 1758139 - DNA, 15 bp, Homo sapiens
gacaaagaagggaaa

SEQ ID NO: 1758140 - DNA, 15 bp, Homo sapiens
acaaagaagggaaaa

SEQ ID NO: 1758141 - DNA, 15 bp, Homo sapiens
caaagaagggaaaat

SEQ ID NO: 1758142 - DNA, 15 bp, Homo sapiens
aaagaagggaaaata

SEQ ID NO: 1758143 - DNA, 15 bp, Homo sapiens
aagaagggaaaataa

SEQ ID NO: 1758144 - DNA, 15 bp, Homo sapiens
agaagggaaaataaa

SEQ ID NO: 1758145 - DNA, 15 bp, Homo sapiens
gaagggaaaataaaa

SEQ ID NO: 1758146 - DNA, 15 bp, Homo sapiens
aagggaaaataaaag

SEQ ID NO: 1758147 - DNA, 15 bp, Homo sapiens
agggaaaataaaaga

SEQ ID NO: 1758148 - DNA, 15 bp, Homo sapiens
gggaaaataaaagaa

SEQ ID NO: 1758149 - DNA, 15 bp, Homo sapiens
ggaaaataaaagaag

SEQ ID NO: 1758150 - DNA, 15 bp, Homo sapiens
gaaaataaaagaagg

SEQ ID NO: 1758151 - DNA, 15 bp, Homo sapiens
aaaataaaagaaggc

SEQ ID NO: 1758152 - DNA, 15 bp, Homo sapiens
aaataaaagaaggca

SEQ ID NO: 1758153 - DNA, 15 bp, Homo sapiens
aataaaagaaggcaa

SEQ ID NO: 1758154 - DNA, 15 bp, Homo sapiens
ataaaagaaggcaat

SEQ ID NO: 1758155 - DNA, 15 bp, Homo sapiens
taaaagaaggcaata

SEQ ID NO: 1758156 - DNA, 15 bp, Homo sapiens
aaaagaaggcaatat

SEQ ID NO: 1758157 - DNA, 15 bp, Homo sapiens
aaagaaggcaatatc

SEQ ID NO: 1758158 - DNA, 15 bp, Homo sapiens
aagaaggcaatatct

SEQ ID NO: 1758159 - DNA, 15 bp, Homo sapiens
agaaggcaatatctt

SEQ ID NO: 1758160 - DNA, 15 bp, Homo sapiens
gaaggcaatatctta

SEQ ID NO: 1758161 - DNA, 15 bp, Homo sapiens
aaggcaatatcttag

SEQ ID NO: 1758162 - DNA, 15 bp, Homo sapiens
aggcaatatcttagg

SEQ ID NO: 1758163 - DNA, 15 bp, Homo sapiens
ggcaatatcttagga

SEQ ID NO: 1758164 - DNA, 15 bp, Homo sapiens
gcaatatcttaggaa

SEQ ID NO: 1758165 - DNA, 15 bp, Homo sapiens
caatatcttaggaat

SEQ ID NO: 1758166 - DNA, 15 bp, Homo sapiens
aatatcttaggaata

SEQ ID NO: 1758167 - DNA, 15 bp, Homo sapiens
atatcttaggaataa

SEQ ID NO: 1758168 - DNA, 15 bp, Homo sapiens
tatcttaggaataaa

SEQ ID NO: 1758169 - DNA, 15 bp, Homo sapiens
atcttaggaataaat

SEQ ID NO: 1758170 - DNA, 15 bp, Homo sapiens
tcttaggaataaata

SEQ ID NO: 1758171 - DNA, 15 bp, Homo sapiens
cttaggaataaatat

SEQ ID NO: 1758172 - DNA, 15 bp, Homo sapiens
ttaggaataaatatt

SEQ ID NO: 1758173 - DNA, 15 bp, Homo sapiens
gaataaatattttat

SEQ ID NO: 1758174 - DNA, 15 bp, Homo sapiens
aataaatattttata

SEQ ID NO: 1758175 - DNA, 15 bp, Homo sapiens
ataaatattttatag

SEQ ID NO: 1758176 - DNA, 15 bp, Homo sapiens
taaatattttatagt

SEQ ID NO: 1758177 - DNA, 15 bp, Homo sapiens
aaatattttatagtg

SEQ ID NO: 1758178 - DNA, 15 bp, Homo sapiens
aatattttatagtga

SEQ ID NO: 1758179 - DNA, 15 bp, Homo sapiens
atattttatagtgac

SEQ ID NO: 1758180 - DNA, 15 bp, Homo sapiens
tattttatagtgaca

SEQ ID NO: 1758181 - DNA, 15 bp, Homo sapiens
attttatagtgacat

SEQ ID NO: 1758182 - DNA, 15 bp, Homo sapiens
ttttatagtgacatt

SEQ ID NO: 1758183 - DNA, 15 bp, Homo sapiens
tttatagtgacatta

SEQ ID NO: 1758184 - DNA, 15 bp, Homo sapiens
ttatagtgacattat

SEQ ID NO: 1758185 - DNA, 15 bp, Homo sapiens
tatagtgacattatt

SEQ ID NO: 1758186 - DNA, 15 bp, Homo sapiens
atagtgacattattt

SEQ ID NO: 1758187 - DNA, 15 bp, Homo sapiens
tagtgacattatttt

SEQ ID NO: 1758188 - DNA, 15 bp, Homo sapiens
agtgacattattttt

SEQ ID NO: 1758189 - DNA, 15 bp, Homo sapiens
gtgacattatttttc

SEQ ID NO: 1758190 - DNA, 15 bp, Homo sapiens
tgacattatttttct

SEQ ID NO: 1758191 - DNA, 15 bp, Homo sapiens
gacattatttttctg

SEQ ID NO: 1758192 - DNA, 15 bp, Homo sapiens
acattatttttctgc

SEQ ID NO: 1758193 - DNA, 15 bp, Homo sapiens
cattatttttctgct

SEQ ID NO: 1758194 - DNA, 15 bp, Homo sapiens
attatttttctgcta

SEQ ID NO: 1758195 - DNA, 15 bp, Homo sapiens
ttatttttctgctag

SEQ ID NO: 1758196 - DNA, 15 bp, Homo sapiens
tatttttctgctagt

SEQ ID NO: 1758197 - DNA, 15 bp, Homo sapiens
atttttctgctagtg

SEQ ID NO: 1758198 - DNA, 15 bp, Homo sapiens
tttttctgctagtga

SEQ ID NO: 1758199 - DNA, 15 bp, Homo sapiens
ttttctgctagtgaa

SEQ ID NO: 1758200 - DNA, 15 bp, Homo sapiens
tttctgctagtgaac

SEQ ID NO: 1758201 - DNA, 15 bp, Homo sapiens
ttctgctagtgaact

SEQ ID NO: 1758202 - DNA, 15 bp, Homo sapiens
tctgctagtgaacta

SEQ ID NO: 1758203 - DNA, 15 bp, Homo sapiens
ctgctagtgaactaa

SEQ ID NO: 1758204 - DNA, 15 bp, Homo sapiens
tgctagtgaactaat

SEQ ID NO: 1758205 - DNA, 15 bp, Homo sapiens
gctagtgaactaata

SEQ ID NO: 1758206 - DNA, 15 bp, Homo sapiens
ctagtgaactaataa

SEQ ID NO: 1758207 - DNA, 15 bp, Homo sapiens
tagtgaactaataat

SEQ ID NO: 1758208 - DNA, 15 bp, Homo sapiens
agtgaactaataatc

SEQ ID NO: 1758209 - DNA, 15 bp, Homo sapiens
gtgaactaataatct

SEQ ID NO: 1758210 - DNA, 15 bp, Homo sapiens
tgaactaataatcta

SEQ ID NO: 1758211 - DNA, 15 bp, Homo sapiens
gaactaataatctac

SEQ ID NO: 1758212 - DNA, 15 bp, Homo sapiens
aactaataatctaca

SEQ ID NO: 1758213 - DNA, 15 bp, Homo sapiens
actaataatctacaa

SEQ ID NO: 1758214 - DNA, 15 bp, Homo sapiens
ctaataatctacaaa

SEQ ID NO: 1758215 - DNA, 15 bp, Homo sapiens
taataatctacaaaa

SEQ ID NO: 1758216 - DNA, 15 bp, Homo sapiens
aataatctacaaaaa

SEQ ID NO: 1758217 - DNA, 15 bp, Homo sapiens
ataatctacaaaaat

SEQ ID NO: 1758218 - DNA, 15 bp, Homo sapiens
taatctacaaaaatt

SEQ ID NO: 1758219 - DNA, 15 bp, Homo sapiens
aatctacaaaaattt

SEQ ID NO: 1758220 - DNA, 15 bp, Homo sapiens
atctacaaaaatttt

SEQ ID NO: 1758221 - DNA, 15 bp, Homo sapiens
tctacaaaaatttta

SEQ ID NO: 1758222 - DNA, 15 bp, Homo sapiens
ctacaaaaattttaa

SEQ ID NO: 1758223 - DNA, 15 bp, Homo sapiens
tacaaaaattttaag

SEQ ID NO: 1758224 - DNA, 15 bp, Homo sapiens
acaaaaattttaaga

SEQ ID NO: 1758225 - DNA, 15 bp, Homo sapiens
caaaaattttaagat

SEQ ID NO: 1758226 - DNA, 15 bp, Homo sapiens
aaaaattttaagata

SEQ ID NO: 1758227 - DNA, 15 bp, Homo sapiens
aaaattttaagatag

SEQ ID NO: 1758228 - DNA, 15 bp, Homo sapiens
aaattttaagataga

SEQ ID NO: 1758229 - DNA, 15 bp, Homo sapiens
aattttaagatagat

SEQ ID NO: 1758230 - DNA, 15 bp, Homo sapiens
attttaagatagata

SEQ ID NO: 1758231 - DNA, 15 bp, Homo sapiens
ttttaagatagataa

SEQ ID NO: 1758232 - DNA, 15 bp, Homo sapiens
tttaagatagataag

SEQ ID NO: 1758233 - DNA, 15 bp, Homo sapiens
ttaagatagataagc

SEQ ID NO: 1758234 - DNA, 15 bp, Homo sapiens
taagatagataagca

SEQ ID NO: 1758235 - DNA, 15 bp, Homo sapiens
aagatagataagcag

SEQ ID NO: 1758236 - DNA, 15 bp, Homo sapiens
agatagataagcaga

SEQ ID NO: 1758237 - DNA, 15 bp, Homo sapiens
gatagataagcagaa

SEQ ID NO: 1758238 - DNA, 15 bp, Homo sapiens
atagataagcagaaa

SEQ ID NO: 1758239 - DNA, 15 bp, Homo sapiens
tagataagcagaaag

SEQ ID NO: 1758240 - DNA, 15 bp, Homo sapiens
agataagcagaaaga

SEQ ID NO: 1758241 - DNA, 15 bp, Homo sapiens
gataagcagaaagaa

SEQ ID NO: 1758242 - DNA, 15 bp, Homo sapiens
ataagcagaaagaat

SEQ ID NO: 1758243 - DNA, 15 bp, Homo sapiens
taagcagaaagaata

SEQ ID NO: 1758244 - DNA, 15 bp, Homo sapiens
aagcagaaagaatac

SEQ ID NO: 1758245 - DNA, 15 bp, Homo sapiens
agcagaaagaataca

SEQ ID NO: 1758246 - DNA, 15 bp, Homo sapiens
gcagaaagaatacaa

SEQ ID NO: 1758247 - DNA, 15 bp, Homo sapiens
cagaaagaatacaaa

SEQ ID NO: 1758248 - DNA, 15 bp, Homo sapiens
agaaagaatacaaac

SEQ ID NO: 1758249 - DNA, 15 bp, Homo sapiens
gaaagaatacaaaca

SEQ ID NO: 1758250 - DNA, 15 bp, Homo sapiens
aaagaatacaaacaa

SEQ ID NO: 1758251 - DNA, 15 bp, Homo sapiens
aagaatacaaacaaa

SEQ ID NO: 1758252 - DNA, 15 bp, Homo sapiens
agaatacaaacaaaa

SEQ ID NO: 1758253 - DNA, 15 bp, Homo sapiens
gaatacaaacaaaaa

SEQ ID NO: 1758254 - DNA, 15 bp, Homo sapiens
aatacaaacaaaaaa

SEQ ID NO: 1758255 - DNA, 15 bp, Homo sapiens
atacaaacaaaaaaa

SEQ ID NO: 1758256 - DNA, 15 bp, Homo sapiens
tacaaacaaaaaaag

SEQ ID NO: 1758257 - DNA, 15 bp, Homo sapiens
acaaacaaaaaaaga

SEQ ID NO: 1758258 - DNA, 15 bp, Homo sapiens
caaacaaaaaaagat

SEQ ID NO: 1758259 - DNA, 15 bp, Homo sapiens
aaacaaaaaaagata

SEQ ID NO: 1758260 - DNA, 15 bp, Homo sapiens
aacaaaaaaagatag

SEQ ID NO: 1758261 - DNA, 15 bp, Homo sapiens
acaaaaaaagatagt

SEQ ID NO: 1758262 - DNA, 15 bp, Homo sapiens
caaaaaaagatagta

SEQ ID NO: 1758263 - DNA, 15 bp, Homo sapiens
aaaaaaagatagtaa

SEQ ID NO: 1758264 - DNA, 15 bp, Homo sapiens
aaaaaagatagtaat

SEQ ID NO: 1758265 - DNA, 15 bp, Homo sapiens
aaaaagatagtaatt

SEQ ID NO: 1758266 - DNA, 15 bp, Homo sapiens
aaaagatagtaattt

SEQ ID NO: 1758267 - DNA, 15 bp, Homo sapiens
aaagatagtaattta

SEQ ID NO: 1758268 - DNA, 15 bp, Homo sapiens
aagatagtaatttaa

SEQ ID NO: 1758269 - DNA, 15 bp, Homo sapiens
agatagtaatttaac

SEQ ID NO: 1758270 - DNA, 15 bp, Homo sapiens
gatagtaatttaact

SEQ ID NO: 1758271 - DNA, 15 bp, Homo sapiens
atagtaatttaactc

SEQ ID NO: 1758272 - DNA, 15 bp, Homo sapiens
tagtaatttaactca

SEQ ID NO: 1758273 - DNA, 15 bp, Homo sapiens
agtaatttaactcat

SEQ ID NO: 1758274 - DNA, 15 bp, Homo sapiens
gtaatttaactcata

SEQ ID NO: 1758275 - DNA, 15 bp, Homo sapiens
taatttaactcatat

SEQ ID NO: 1758276 - DNA, 15 bp, Homo sapiens
aatttaactcatatg

SEQ ID NO: 1758277 - DNA, 15 bp, Homo sapiens
atttaactcatatga

SEQ ID NO: 1758278 - DNA, 15 bp, Homo sapiens
tttaactcatatgaa

SEQ ID NO: 1758279 - DNA, 15 bp, Homo sapiens
ttaactcatatgaat

SEQ ID NO: 1758280 - DNA, 15 bp, Homo sapiens
taactcatatgaata

SEQ ID NO: 1758281 - DNA, 15 bp, Homo sapiens
aactcatatgaataa

SEQ ID NO: 1758282 - DNA, 15 bp, Homo sapiens
actcatatgaataat

SEQ ID NO: 1758283 - DNA, 15 bp, Homo sapiens
ctcatatgaataatc

SEQ ID NO: 1758284 - DNA, 15 bp, Homo sapiens
tcatatgaataatca

SEQ ID NO: 1758285 - DNA, 15 bp, Homo sapiens
catatgaataatcat

SEQ ID NO: 1758286 - DNA, 15 bp, Homo sapiens
atatgaataatcatc

SEQ ID NO: 1758287 - DNA, 15 bp, Homo sapiens
tatgaataatcatcc

SEQ ID NO: 1758288 - DNA, 15 bp, Homo sapiens
atgaataatcatcca

SEQ ID NO: 1758289 - DNA, 15 bp, Homo sapiens
tgaataatcatccac

SEQ ID NO: 1758290 - DNA, 15 bp, Homo sapiens
gaataatcatccact

SEQ ID NO: 1758291 - DNA, 15 bp, Homo sapiens
aataatcatccactg

SEQ ID NO: 1758292 - DNA, 15 bp, Homo sapiens
ataatcatccactga

SEQ ID NO: 1758293 - DNA, 15 bp, Homo sapiens
taatcatccactgaa

SEQ ID NO: 1758294 - DNA, 15 bp, Homo sapiens
aatcatccactgaaa

SEQ ID NO: 1758295 - DNA, 15 bp, Homo sapiens
atcatccactgaaat

SEQ ID NO: 1758296 - DNA, 15 bp, Homo sapiens
tcatccactgaaatg

SEQ ID NO: 1758297 - DNA, 15 bp, Homo sapiens
catccactgaaatgt

SEQ ID NO: 1758298 - DNA, 15 bp, Homo sapiens
atccactgaaatgta

SEQ ID NO: 1758299 - DNA, 15 bp, Homo sapiens
tccactgaaatgtag

SEQ ID NO: 1758300 - DNA, 15 bp, Homo sapiens
ccactgaaatgtagc

SEQ ID NO: 1758301 - DNA, 15 bp, Homo sapiens
cactgaaatgtagca

SEQ ID NO: 1758302 - DNA, 15 bp, Homo sapiens
actgaaatgtagcaa

SEQ ID NO: 1758303 - DNA, 15 bp, Homo sapiens
ctgaaatgtagcaag

SEQ ID NO: 1758304 - DNA, 15 bp, Homo sapiens
tgaaatgtagcaagg

SEQ ID NO: 1758305 - DNA, 15 bp, Homo sapiens
gaaatgtagcaagga

SEQ ID NO: 1758306 - DNA, 15 bp, Homo sapiens
aaatgtagcaaggat

SEQ ID NO: 1758307 - DNA, 15 bp, Homo sapiens
aatgtagcaaggata

SEQ ID NO: 1758308 - DNA, 15 bp, Homo sapiens
atgtagcaaggatat

SEQ ID NO: 1758309 - DNA, 15 bp, Homo sapiens
tgtagcaaggatatg

SEQ ID NO: 1758310 - DNA, 15 bp, Homo sapiens
gtagcaaggatatgc

SEQ ID NO: 1758311 - DNA, 15 bp, Homo sapiens
tagcaaggatatgct

SEQ ID NO: 1758312 - DNA, 15 bp, Homo sapiens
agcaaggatatgcta

SEQ ID NO: 1758313 - DNA, 15 bp, Homo sapiens
gcaaggatatgctac

SEQ ID NO: 1758314 - DNA, 15 bp, Homo sapiens
caaggatatgctaca

SEQ ID NO: 1758315 - DNA, 15 bp, Homo sapiens
aaggatatgctacat

SEQ ID NO: 1758316 - DNA, 15 bp, Homo sapiens
aggatatgctacata

SEQ ID NO: 1758317 - DNA, 15 bp, Homo sapiens
ggatatgctacatat

SEQ ID NO: 1758318 - DNA, 15 bp, Homo sapiens
gatatgctacatatg

SEQ ID NO: 1758319 - DNA, 15 bp, Homo sapiens
atatgctacatatga

SEQ ID NO: 1758320 - DNA, 15 bp, Homo sapiens
tatgctacatatgaa

SEQ ID NO: 1758321 - DNA, 15 bp, Homo sapiens
atgctacatatgaaa

SEQ ID NO: 1758322 - DNA, 15 bp, Homo sapiens
tgctacatatgaaat

SEQ ID NO: 1758323 - DNA, 15 bp, Homo sapiens
gctacatatgaaatg

SEQ ID NO: 1758324 - DNA, 15 bp, Homo sapiens
ctacatatgaaatgt

SEQ ID NO: 1758325 - DNA, 15 bp, Homo sapiens
tacatatgaaatgta

SEQ ID NO: 1758326 - DNA, 15 bp, Homo sapiens
acatatgaaatgtaa

SEQ ID NO: 1758327 - DNA, 15 bp, Homo sapiens
catatgaaatgtaat

SEQ ID NO: 1758328 - DNA, 15 bp, Homo sapiens
atatgaaatgtaatt

SEQ ID NO: 1758329 - DNA, 15 bp, Homo sapiens
tatgaaatgtaatta

SEQ ID NO: 1758330 - DNA, 15 bp, Homo sapiens
atgaaatgtaattag

SEQ ID NO: 1758331 - DNA, 15 bp, Homo sapiens
tgaaatgtaattaga

SEQ ID NO: 1758332 - DNA, 15 bp, Homo sapiens
gaaatgtaattagat

SEQ ID NO: 1758333 - DNA, 15 bp, Homo sapiens
aaatgtaattagatg

SEQ ID NO: 1758334 - DNA, 15 bp, Homo sapiens
aatgtaattagatga

SEQ ID NO: 1758335 - DNA, 15 bp, Homo sapiens
atgtaattagatgat

SEQ ID NO: 1758336 - DNA, 15 bp, Homo sapiens
tgtaattagatgatt

SEQ ID NO: 1758337 - DNA, 15 bp, Homo sapiens
gtaattagatgattg

SEQ ID NO: 1758338 - DNA, 15 bp, Homo sapiens
taattagatgattgc

SEQ ID NO: 1758339 - DNA, 15 bp, Homo sapiens
aattagatgattgct

SEQ ID NO: 1758340 - DNA, 15 bp, Homo sapiens
attagatgattgctt

SEQ ID NO: 1758341 - DNA, 15 bp, Homo sapiens
ttagatgattgctta

SEQ ID NO: 1758342 - DNA, 15 bp, Homo sapiens
tagatgattgcttaa

SEQ ID NO: 1758343 - DNA, 15 bp, Homo sapiens
agatgattgcttaaa

SEQ ID NO: 1758344 - DNA, 15 bp, Homo sapiens
gatgattgcttaaag

SEQ ID NO: 1758345 - DNA, 15 bp, Homo sapiens
atgattgcttaaaga

SEQ ID NO: 1758346 - DNA, 15 bp, Homo sapiens
tgattgcttaaagat

SEQ ID NO: 1758347 - DNA, 15 bp, Homo sapiens
gattgcttaaagatc

SEQ ID NO: 1758348 - DNA, 15 bp, Homo sapiens
attgcttaaagatct

SEQ ID NO: 1758349 - DNA, 15 bp, Homo sapiens
ttgcttaaagatcta

SEQ ID NO: 1758350 - DNA, 15 bp, Homo sapiens
tgcttaaagatctag

SEQ ID NO: 1758351 - DNA, 15 bp, Homo sapiens
gcttaaagatctagg

SEQ ID NO: 1758352 - DNA, 15 bp, Homo sapiens
cttaaagatctagga

SEQ ID NO: 1758353 - DNA, 15 bp, Homo sapiens
ttaaagatctaggaa

SEQ ID NO: 1758354 - DNA, 15 bp, Homo sapiens
taaagatctaggaat

SEQ ID NO: 1758355 - DNA, 15 bp, Homo sapiens
aaagatctaggaata

SEQ ID NO: 1758356 - DNA, 15 bp, Homo sapiens
aagatctaggaatat

SEQ ID NO: 1758357 - DNA, 15 bp, Homo sapiens
agatctaggaatata

SEQ ID NO: 1758358 - DNA, 15 bp, Homo sapiens
gatctaggaatataa

SEQ ID NO: 1758359 - DNA, 15 bp, Homo sapiens
atctaggaatataag

SEQ ID NO: 1758360 - DNA, 15 bp, Homo sapiens
tctaggaatataagc

SEQ ID NO: 1758361 - DNA, 15 bp, Homo sapiens
ctaggaatataagct

SEQ ID NO: 1758362 - DNA, 15 bp, Homo sapiens
taggaatataagctc

SEQ ID NO: 1758363 - DNA, 15 bp, Homo sapiens
aggaatataagctca

SEQ ID NO: 1758364 - DNA, 15 bp, Homo sapiens
ggaatataagctcaa

SEQ ID NO: 1758365 - DNA, 15 bp, Homo sapiens
gaatataagctcaat

SEQ ID NO: 1758366 - DNA, 15 bp, Homo sapiens
aatataagctcaatg

SEQ ID NO: 1758367 - DNA, 15 bp, Homo sapiens
atataagctcaatgt

SEQ ID NO: 1758368 - DNA, 15 bp, Homo sapiens
tataagctcaatgta

SEQ ID NO: 1758369 - DNA, 15 bp, Homo sapiens
ataagctcaatgtaa

SEQ ID NO: 1758370 - DNA, 15 bp, Homo sapiens
taagctcaatgtaat

SEQ ID NO: 1758371 - DNA, 15 bp, Homo sapiens
aagctcaatgtaata

SEQ ID NO: 1758372 - DNA, 15 bp, Homo sapiens
agctcaatgtaataa

SEQ ID NO: 1758373 - DNA, 15 bp, Homo sapiens
gctcaatgtaataaa

SEQ ID NO: 1758374 - DNA, 15 bp, Homo sapiens
ctcaatgtaataaaa

SEQ ID NO: 1758375 - DNA, 15 bp, Homo sapiens
tcaatgtaataaaat

SEQ ID NO: 1758376 - DNA, 15 bp, Homo sapiens
caatgtaataaaata

SEQ ID NO: 1758377 - DNA, 15 bp, Homo sapiens
aatgtaataaaataa

SEQ ID NO: 1758378 - DNA, 15 bp, Homo sapiens
atgtaataaaataac

SEQ ID NO: 1758379 - DNA, 15 bp, Homo sapiens
tgtaataaaataact

SEQ ID NO: 1758380 - DNA, 15 bp, Homo sapiens
gtaataaaataactt

SEQ ID NO: 1758381 - DNA, 15 bp, Homo sapiens
taataaaataacttt

SEQ ID NO: 1758382 - DNA, 15 bp, Homo sapiens
aataaaataactttc

SEQ ID NO: 1758383 - DNA, 15 bp, Homo sapiens
ataaaataactttct

SEQ ID NO: 1758384 - DNA, 15 bp, Homo sapiens
aaaataactttcttc

SEQ ID NO: 1758385 - DNA, 15 bp, Homo sapiens
aaataactttcttca

SEQ ID NO: 1758386 - DNA, 15 bp, Homo sapiens
aataactttcttcat

SEQ ID NO: 1758387 - DNA, 15 bp, Homo sapiens
ataactttcttcatc

SEQ ID NO: 1758388 - DNA, 15 bp, Homo sapiens
taactttcttcatca

SEQ ID NO: 1758389 - DNA, 15 bp, Homo sapiens
aactttcttcatcat

SEQ ID NO: 1758390 - DNA, 15 bp, Homo sapiens
actttcttcatcatt

SEQ ID NO: 1758391 - DNA, 15 bp, Homo sapiens
ctttcttcatcattg

SEQ ID NO: 1758392 - DNA, 15 bp, Homo sapiens
tttcttcatcattgt

SEQ ID NO: 1758393 - DNA, 15 bp, Homo sapiens
ttcttcatcattgtt

SEQ ID NO: 1758394 - DNA, 15 bp, Homo sapiens
tcttcatcattgtta

SEQ ID NO: 1758395 - DNA, 15 bp, Homo sapiens
cttcatcattgttaa

SEQ ID NO: 1758396 - DNA, 15 bp, Homo sapiens
ttcatcattgttaag

SEQ ID NO: 1758397 - DNA, 15 bp, Homo sapiens
tcatcattgttaagg

SEQ ID NO: 1758398 - DNA, 15 bp, Homo sapiens
catcattgttaagga

SEQ ID NO: 1758399 - DNA, 15 bp, Homo sapiens
atcattgttaaggat

SEQ ID NO: 1758400 - DNA, 15 bp, Homo sapiens
tcattgttaaggatt

SEQ ID NO: 1758401 - DNA, 15 bp, Homo sapiens
cattgttaaggatta

SEQ ID NO: 1758402 - DNA, 15 bp, Homo sapiens
attgttaaggattaa

SEQ ID NO: 1758403 - DNA, 15 bp, Homo sapiens
ttgttaaggattaat

SEQ ID NO: 1758404 - DNA, 15 bp, Homo sapiens
tgttaaggattaata

SEQ ID NO: 1758405 - DNA, 15 bp, Homo sapiens
gttaaggattaataa

SEQ ID NO: 1758406 - DNA, 15 bp, Homo sapiens
ttaaggattaataag

SEQ ID NO: 1758407 - DNA, 15 bp, Homo sapiens
taaggattaataagg

SEQ ID NO: 1758408 - DNA, 15 bp, Homo sapiens
aaggattaataaggc

SEQ ID NO: 1758409 - DNA, 15 bp, Homo sapiens
aggattaataaggca

SEQ ID NO: 1758410 - DNA, 15 bp, Homo sapiens
ggattaataaggcat

SEQ ID NO: 1758411 - DNA, 15 bp, Homo sapiens
gattaataaggcatt

SEQ ID NO: 1758412 - DNA, 15 bp, Homo sapiens
attaataaggcatta

SEQ ID NO: 1758413 - DNA, 15 bp, Homo sapiens
ttaataaggcattaa

SEQ ID NO: 1758414 - DNA, 15 bp, Homo sapiens
taataaggcattaaa

SEQ ID NO: 1758415 - DNA, 15 bp, Homo sapiens
aataaggcattaaat

SEQ ID NO: 1758416 - DNA, 15 bp, Homo sapiens
ataaggcattaaatg

SEQ ID NO: 1758417 - DNA, 15 bp, Homo sapiens
taaggcattaaatgg

SEQ ID NO: 1758418 - DNA, 15 bp, Homo sapiens
aaggcattaaatggg

SEQ ID NO: 1758419 - DNA, 15 bp, Homo sapiens
aggcattaaatgggt

SEQ ID NO: 1758420 - DNA, 15 bp, Homo sapiens
ggcattaaatgggtt

SEQ ID NO: 1758421 - DNA, 15 bp, Homo sapiens
gcattaaatgggttt

SEQ ID NO: 1758422 - DNA, 15 bp, Homo sapiens
cattaaatgggtttt

SEQ ID NO: 1758423 - DNA, 15 bp, Homo sapiens
attaaatgggttttc

SEQ ID NO: 1758424 - DNA, 15 bp, Homo sapiens
ttaaatgggttttca

SEQ ID NO: 1758425 - DNA, 15 bp, Homo sapiens
taaatgggttttcat

SEQ ID NO: 1758426 - DNA, 15 bp, Homo sapiens
aaatgggttttcatg

SEQ ID NO: 1758427 - DNA, 15 bp, Homo sapiens
aatgggttttcatgt

SEQ ID NO: 1758428 - DNA, 15 bp, Homo sapiens
atgggttttcatgtg

SEQ ID NO: 1758429 - DNA, 15 bp, Homo sapiens
tgggttttcatgtgg

SEQ ID NO: 1758430 - DNA, 15 bp, Homo sapiens
gggttttcatgtggg

SEQ ID NO: 1758431 - DNA, 15 bp, Homo sapiens
ggttttcatgtgggt

SEQ ID NO: 1758432 - DNA, 15 bp, Homo sapiens
gttttcatgtgggtc

SEQ ID NO: 1758433 - DNA, 15 bp, Homo sapiens
ttttcatgtgggtcc

SEQ ID NO: 1758434 - DNA, 15 bp, Homo sapiens
tttcatgtgggtcct

SEQ ID NO: 1758435 - DNA, 15 bp, Homo sapiens
ttcatgtgggtcctc

SEQ ID NO: 1758436 - DNA, 15 bp, Homo sapiens
tcatgtgggtcctca

SEQ ID NO: 1758437 - DNA, 15 bp, Homo sapiens
catgtgggtcctcat

SEQ ID NO: 1758438 - DNA, 15 bp, Homo sapiens
atgtgggtcctcata

SEQ ID NO: 1758439 - DNA, 15 bp, Homo sapiens
tgtgggtcctcatat

SEQ ID NO: 1758440 - DNA, 15 bp, Homo sapiens
gtgggtcctcatatg

SEQ ID NO: 1758441 - DNA, 15 bp, Homo sapiens
tgggtcctcatatgt

SEQ ID NO: 1758442 - DNA, 15 bp, Homo sapiens
gggtcctcatatgtt

SEQ ID NO: 1758443 - DNA, 15 bp, Homo sapiens
ggtcctcatatgtta

SEQ ID NO: 1758444 - DNA, 15 bp, Homo sapiens
gtcctcatatgttaa

SEQ ID NO: 1758445 - DNA, 15 bp, Homo sapiens
tcctcatatgttaaa

SEQ ID NO: 1758446 - DNA, 15 bp, Homo sapiens
cctcatatgttaaaa

SEQ ID NO: 1758447 - DNA, 15 bp, Homo sapiens
ctcatatgttaaaaa

SEQ ID NO: 1758448 - DNA, 15 bp, Homo sapiens
tcatatgttaaaaag

SEQ ID NO: 1758449 - DNA, 15 bp, Homo sapiens
catatgttaaaaagg

SEQ ID NO: 1758450 - DNA, 15 bp, Homo sapiens
atatgttaaaaagga

SEQ ID NO: 1758451 - DNA, 15 bp, Homo sapiens
tatgttaaaaaggac

SEQ ID NO: 1758452 - DNA, 15 bp, Homo sapiens
atgttaaaaaggaca

SEQ ID NO: 1758453 - DNA, 15 bp, Homo sapiens
tgttaaaaaggacaa

SEQ ID NO: 1758454 - DNA, 15 bp, Homo sapiens
gttaaaaaggacaac

SEQ ID NO: 1758455 - DNA, 15 bp, Homo sapiens
ttaaaaaggacaaca

SEQ ID NO: 1758456 - DNA, 15 bp, Homo sapiens
taaaaaggacaacaa

SEQ ID NO: 1758457 - DNA, 15 bp, Homo sapiens
aaaaaggacaacaat

SEQ ID NO: 1758458 - DNA, 15 bp, Homo sapiens
aaaaggacaacaata

SEQ ID NO: 1758459 - DNA, 15 bp, Homo sapiens
aaaggacaacaataa

SEQ ID NO: 1758460 - DNA, 15 bp, Homo sapiens
aaggacaacaataag

SEQ ID NO: 1758461 - DNA, 15 bp, Homo sapiens
aggacaacaataaga

SEQ ID NO: 1758462 - DNA, 15 bp, Homo sapiens
ggacaacaataagaa

SEQ ID NO: 1758463 - DNA, 15 bp, Homo sapiens
gacaacaataagaaa

SEQ ID NO: 1758464 - DNA, 15 bp, Homo sapiens
acaacaataagaaaa

SEQ ID NO: 1758465 - DNA, 15 bp, Homo sapiens
caacaataagaaaat

SEQ ID NO: 1758466 - DNA, 15 bp, Homo sapiens
aacaataagaaaatc

SEQ ID NO: 1758467 - DNA, 15 bp, Homo sapiens
acaataagaaaatct

SEQ ID NO: 1758468 - DNA, 15 bp, Homo sapiens
caataagaaaatcta

SEQ ID NO: 1758469 - DNA, 15 bp, Homo sapiens
aataagaaaatctaa

SEQ ID NO: 1758470 - DNA, 15 bp, Homo sapiens
ataagaaaatctaaa

SEQ ID NO: 1758471 - DNA, 15 bp, Homo sapiens
taagaaaatctaaag

SEQ ID NO: 1758472 - DNA, 15 bp, Homo sapiens
aagaaaatctaaaga

SEQ ID NO: 1758473 - DNA, 15 bp, Homo sapiens
agaaaatctaaagaa

SEQ ID NO: 1758474 - DNA, 15 bp, Homo sapiens
gaaaatctaaagaaa

SEQ ID NO: 1758475 - DNA, 15 bp, Homo sapiens
aaaatctaaagaaac

SEQ ID NO: 1758476 - DNA, 15 bp, Homo sapiens
aaatctaaagaaact

SEQ ID NO: 1758477 - DNA, 15 bp, Homo sapiens
aatctaaagaaactg

SEQ ID NO: 1758478 - DNA, 15 bp, Homo sapiens
atctaaagaaactga

SEQ ID NO: 1758479 - DNA, 15 bp, Homo sapiens
tctaaagaaactgag

SEQ ID NO: 1758480 - DNA, 15 bp, Homo sapiens
ctaaagaaactgaga

SEQ ID NO: 1758481 - DNA, 15 bp, Homo sapiens
taaagaaactgagat

SEQ ID NO: 1758482 - DNA, 15 bp, Homo sapiens
aaagaaactgagata

SEQ ID NO: 1758483 - DNA, 15 bp, Homo sapiens
aagaaactgagataa

SEQ ID NO: 1758484 - DNA, 15 bp, Homo sapiens
agaaactgagataac

SEQ ID NO: 1758485 - DNA, 15 bp, Homo sapiens
gaaactgagataact

SEQ ID NO: 1758486 - DNA, 15 bp, Homo sapiens
aaactgagataactt

SEQ ID NO: 1758487 - DNA, 15 bp, Homo sapiens
aactgagataactta

SEQ ID NO: 1758488 - DNA, 15 bp, Homo sapiens
actgagataacttat

SEQ ID NO: 1758489 - DNA, 15 bp, Homo sapiens
ctgagataacttata

SEQ ID NO: 1758490 - DNA, 15 bp, Homo sapiens
tgagataacttataa

SEQ ID NO: 1758491 - DNA, 15 bp, Homo sapiens
gagataacttataaa

SEQ ID NO: 1758492 - DNA, 15 bp, Homo sapiens
agataacttataaat

SEQ ID NO: 1758493 - DNA, 15 bp, Homo sapiens
gataacttataaatc

SEQ ID NO: 1758494 - DNA, 15 bp, Homo sapiens
ataacttataaatca

SEQ ID NO: 1758495 - DNA, 15 bp, Homo sapiens
taacttataaatcaa

SEQ ID NO: 1758496 - DNA, 15 bp, Homo sapiens
aacttataaatcaat

SEQ ID NO: 1758497 - DNA, 15 bp, Homo sapiens
acttataaatcaatg

SEQ ID NO: 1758498 - DNA, 15 bp, Homo sapiens
cttataaatcaatgc

SEQ ID NO: 1758499 - DNA, 15 bp, Homo sapiens
ttataaatcaatgca

SEQ ID NO: 1758500 - DNA, 15 bp, Homo sapiens
tataaatcaatgcag

SEQ ID NO: 1758501 - DNA, 15 bp, Homo sapiens
ataaatcaatgcagg

SEQ ID NO: 1758502 - DNA, 15 bp, Homo sapiens
taaatcaatgcaggt

SEQ ID NO: 1758503 - DNA, 15 bp, Homo sapiens
aaatcaatgcaggta

SEQ ID NO: 1758504 - DNA, 15 bp, Homo sapiens
aatcaatgcaggtat

SEQ ID NO: 1758505 - DNA, 15 bp, Homo sapiens
atcaatgcaggtatt

SEQ ID NO: 1758506 - DNA, 15 bp, Homo sapiens
tcaatgcaggtattc

SEQ ID NO: 1758507 - DNA, 15 bp, Homo sapiens
caatgcaggtattct

SEQ ID NO: 1758508 - DNA, 15 bp, Homo sapiens
aatgcaggtattctg

SEQ ID NO: 1758509 - DNA, 15 bp, Homo sapiens
atgcaggtattctgt

SEQ ID NO: 1758510 - DNA, 15 bp, Homo sapiens
tgcaggtattctgtg

SEQ ID NO: 1758511 - DNA, 15 bp, Homo sapiens
gcaggtattctgtgt

SEQ ID NO: 1758512 - DNA, 15 bp, Homo sapiens
caggtattctgtgtt

SEQ ID NO: 1758513 - DNA, 15 bp, Homo sapiens
aggtattctgtgtta

SEQ ID NO: 1758514 - DNA, 15 bp, Homo sapiens
ggtattctgtgttaa

SEQ ID NO: 1758515 - DNA, 15 bp, Homo sapiens
gtattctgtgttaaa

SEQ ID NO: 1758516 - DNA, 15 bp, Homo sapiens
tattctgtgttaaat

SEQ ID NO: 1758517 - DNA, 15 bp, Homo sapiens
attctgtgttaaatg

SEQ ID NO: 1758518 - DNA, 15 bp, Homo sapiens
ttctgtgttaaatgc

SEQ ID NO: 1758519 - DNA, 15 bp, Homo sapiens
tctgtgttaaatgct

SEQ ID NO: 1758520 - DNA, 15 bp, Homo sapiens
ctgtgttaaatgctt

SEQ ID NO: 1758521 - DNA, 15 bp, Homo sapiens
tgtgttaaatgctta

SEQ ID NO: 1758522 - DNA, 15 bp, Homo sapiens
gtgttaaatgcttat

SEQ ID NO: 1758523 - DNA, 15 bp, Homo sapiens
tgttaaatgcttatg

SEQ ID NO: 1758524 - DNA, 15 bp, Homo sapiens
gttaaatgcttatgt

SEQ ID NO: 1758525 - DNA, 15 bp, Homo sapiens
ttaaatgcttatgta

SEQ ID NO: 1758526 - DNA, 15 bp, Homo sapiens
taaatgcttatgtaa

SEQ ID NO: 1758527 - DNA, 15 bp, Homo sapiens
aaatgcttatgtaag

SEQ ID NO: 1758528 - DNA, 15 bp, Homo sapiens
aatgcttatgtaagc

SEQ ID NO: 1758529 - DNA, 15 bp, Homo sapiens
atgcttatgtaagcc

SEQ ID NO: 1758530 - DNA, 15 bp, Homo sapiens
tgcttatgtaagcct

SEQ ID NO: 1758531 - DNA, 15 bp, Homo sapiens
gcttatgtaagcctg

SEQ ID NO: 1758532 - DNA, 15 bp, Homo sapiens
cttatgtaagcctga

SEQ ID NO: 1758533 - DNA, 15 bp, Homo sapiens
ttatgtaagcctgag

SEQ ID NO: 1758534 - DNA, 15 bp, Homo sapiens
tatgtaagcctgagt

SEQ ID NO: 1758535 - DNA, 15 bp, Homo sapiens
atgtaagcctgagtt

SEQ ID NO: 1758536 - DNA, 15 bp, Homo sapiens
tgtaagcctgagttc

SEQ ID NO: 1758537 - DNA, 15 bp, Homo sapiens
gtaagcctgagttct

SEQ ID NO: 1758538 - DNA, 15 bp, Homo sapiens
taagcctgagttctt

SEQ ID NO: 1758539 - DNA, 15 bp, Homo sapiens
aagcctgagttcttc

SEQ ID NO: 1758540 - DNA, 15 bp, Homo sapiens
agcctgagttcttca

SEQ ID NO: 1758541 - DNA, 15 bp, Homo sapiens
gcctgagttcttcat

SEQ ID NO: 1758542 - DNA, 15 bp, Homo sapiens
cctgagttcttcatc

SEQ ID NO: 1758543 - DNA, 15 bp, Homo sapiens
ctgagttcttcatcc

SEQ ID NO: 1758544 - DNA, 15 bp, Homo sapiens
tgagttcttcatcca

SEQ ID NO: 1758545 - DNA, 15 bp, Homo sapiens
gagttcttcatccag

SEQ ID NO: 1758546 - DNA, 15 bp, Homo sapiens
agttcttcatccaga

SEQ ID NO: 1758547 - DNA, 15 bp, Homo sapiens
gttcttcatccagat

SEQ ID NO: 1758548 - DNA, 15 bp, Homo sapiens
ttcttcatccagatc

SEQ ID NO: 1758549 - DNA, 15 bp, Homo sapiens
tcttcatccagatct

SEQ ID NO: 1758550 - DNA, 15 bp, Homo sapiens
cttcatccagatctg

SEQ ID NO: 1758551 - DNA, 15 bp, Homo sapiens
ttcatccagatctgt

SEQ ID NO: 1758552 - DNA, 15 bp, Homo sapiens
tcatccagatctgtt

SEQ ID NO: 1758553 - DNA, 15 bp, Homo sapiens
catccagatctgttt

SEQ ID NO: 1758554 - DNA, 15 bp, Homo sapiens
atccagatctgttta

SEQ ID NO: 1758555 - DNA, 15 bp, Homo sapiens
tccagatctgtttat

SEQ ID NO: 1758556 - DNA, 15 bp, Homo sapiens
ccagatctgtttatg

SEQ ID NO: 1758557 - DNA, 15 bp, Homo sapiens
cagatctgtttatga

SEQ ID NO: 1758558 - DNA, 15 bp, Homo sapiens
agatctgtttatgat

SEQ ID NO: 1758559 - DNA, 15 bp, Homo sapiens
gatctgtttatgatt

SEQ ID NO: 1758560 - DNA, 15 bp, Homo sapiens
tgtttatgattttaa

SEQ ID NO: 1758561 - DNA, 15 bp, Homo sapiens
tttatgattttaaac

SEQ ID NO: 1758562 - DNA, 15 bp, Homo sapiens
ttatgattttaaaca

SEQ ID NO: 1758563 - DNA, 15 bp, Homo sapiens
tatgattttaaacat

SEQ ID NO: 1758564 - DNA, 15 bp, Homo sapiens
atgattttaaacata

SEQ ID NO: 1758565 - DNA, 15 bp, Homo sapiens
tgattttaaacataa

SEQ ID NO: 1758566 - DNA, 15 bp, Homo sapiens
gattttaaacataaa

SEQ ID NO: 1758567 - DNA, 15 bp, Homo sapiens
attttaaacataaaa

SEQ ID NO: 1758568 - DNA, 15 bp, Homo sapiens
ttttaaacataaaat

SEQ ID NO: 1758569 - DNA, 15 bp, Homo sapiens
tttaaacataaaatc

SEQ ID NO: 1758570 - DNA, 15 bp, Homo sapiens
ttaaacataaaatca

SEQ ID NO: 1758571 - DNA, 15 bp, Homo sapiens
taaacataaaatcat

SEQ ID NO: 1758572 - DNA, 15 bp, Homo sapiens
aaacataaaatcatt

SEQ ID NO: 1758573 - DNA, 15 bp, Homo sapiens
aacataaaatcattt

SEQ ID NO: 1758574 - DNA, 15 bp, Homo sapiens
acataaaatcatttt

SEQ ID NO: 1758575 - DNA, 15 bp, Homo sapiens
cataaaatcattttc

SEQ ID NO: 1758576 - DNA, 15 bp, Homo sapiens
ataaaatcattttca

SEQ ID NO: 1758577 - DNA, 15 bp, Homo sapiens
taaaatcattttcat

SEQ ID NO: 1758578 - DNA, 15 bp, Homo sapiens
aaaatcattttcatt

SEQ ID NO: 1758579 - DNA, 15 bp, Homo sapiens
aaatcattttcattt

SEQ ID NO: 1758580 - DNA, 15 bp, Homo sapiens
aatcattttcatttc

SEQ ID NO: 1758581 - DNA, 15 bp, Homo sapiens
atcattttcatttct

SEQ ID NO: 1758582 - DNA, 15 bp, Homo sapiens
tcattttcatttcta

SEQ ID NO: 1758583 - DNA, 15 bp, Homo sapiens
cattttcatttctaa

SEQ ID NO: 1758584 - DNA, 15 bp, Homo sapiens
attttcatttctaaa

SEQ ID NO: 1758585 - DNA, 15 bp, Homo sapiens
ttttcatttctaaac

SEQ ID NO: 1758586 - DNA, 15 bp, Homo sapiens
tttcatttctaaacc

SEQ ID NO: 1758587 - DNA, 15 bp, Homo sapiens
ttcatttctaaacct

SEQ ID NO: 1758588 - DNA, 15 bp, Homo sapiens
tcatttctaaacctt

SEQ ID NO: 1758589 - DNA, 15 bp, Homo sapiens
catttctaaaccttt

SEQ ID NO: 1758590 - DNA, 15 bp, Homo sapiens
atttctaaacctttg

SEQ ID NO: 1758591 - DNA, 15 bp, Homo sapiens
tttctaaacctttgc

SEQ ID NO: 1758592 - DNA, 15 bp, Homo sapiens
ttctaaacctttgct

SEQ ID NO: 1758593 - DNA, 15 bp, Homo sapiens
tctaaacctttgctc

SEQ ID NO: 1758594 - DNA, 15 bp, Homo sapiens
ctaaacctttgctca

SEQ ID NO: 1758595 - DNA, 15 bp, Homo sapiens
taaacctttgctcaa

SEQ ID NO: 1758596 - DNA, 15 bp, Homo sapiens
aaacctttgctcaag

SEQ ID NO: 1758597 - DNA, 15 bp, Homo sapiens
aacctttgctcaagt

SEQ ID NO: 1758598 - DNA, 15 bp, Homo sapiens
acctttgctcaagta

SEQ ID NO: 1758599 - DNA, 15 bp, Homo sapiens
cctttgctcaagtaa

SEQ ID NO: 1758600 - DNA, 15 bp, Homo sapiens
ctttgctcaagtaac

SEQ ID NO: 1758601 - DNA, 15 bp, Homo sapiens
tttgctcaagtaact

SEQ ID NO: 1758602 - DNA, 15 bp, Homo sapiens
ttgctcaagtaactt

SEQ ID NO: 1758603 - DNA, 15 bp, Homo sapiens
tgctcaagtaacttg

SEQ ID NO: 1758604 - DNA, 15 bp, Homo sapiens
gctcaagtaacttgt

SEQ ID NO: 1758605 - DNA, 15 bp, Homo sapiens
ctcaagtaacttgta

SEQ ID NO: 1758606 - DNA, 15 bp, Homo sapiens
tcaagtaacttgtag

SEQ ID NO: 1758607 - DNA, 15 bp, Homo sapiens
caagtaacttgtagt

SEQ ID NO: 1758608 - DNA, 15 bp, Homo sapiens
aagtaacttgtagta

SEQ ID NO: 1758609 - DNA, 15 bp, Homo sapiens
agtaacttgtagtac

SEQ ID NO: 1758610 - DNA, 15 bp, Homo sapiens
gtaacttgtagtacc

SEQ ID NO: 1758611 - DNA, 15 bp, Homo sapiens
taacttgtagtacct

SEQ ID NO: 1758612 - DNA, 15 bp, Homo sapiens
aacttgtagtacctg

SEQ ID NO: 1758613 - DNA, 15 bp, Homo sapiens
acttgtagtacctga

SEQ ID NO: 1758614 - DNA, 15 bp, Homo sapiens
cttgtagtacctgag

SEQ ID NO: 1758615 - DNA, 15 bp, Homo sapiens
ttgtagtacctgagt

SEQ ID NO: 1758616 - DNA, 15 bp, Homo sapiens
tgtagtacctgagtc

SEQ ID NO: 1758617 - DNA, 15 bp, Homo sapiens
gtagtacctgagtcc

SEQ ID NO: 1758618 - DNA, 15 bp, Homo sapiens
tagtacctgagtcct

SEQ ID NO: 1758619 - DNA, 15 bp, Homo sapiens
agtacctgagtccta

SEQ ID NO: 1758620 - DNA, 15 bp, Homo sapiens
gtacctgagtcctat

SEQ ID NO: 1758621 - DNA, 15 bp, Homo sapiens
tacctgagtcctatg

SEQ ID NO: 1758622 - DNA, 15 bp, Homo sapiens
acctgagtcctatgt

SEQ ID NO: 1758623 - DNA, 15 bp, Homo sapiens
cctgagtcctatgtc

SEQ ID NO: 1758624 - DNA, 15 bp, Homo sapiens
ctgagtcctatgtct

SEQ ID NO: 1758625 - DNA, 15 bp, Homo sapiens
tgagtcctatgtctg

SEQ ID NO: 1758626 - DNA, 15 bp, Homo sapiens
gagtcctatgtctga

SEQ ID NO: 1758627 - DNA, 15 bp, Homo sapiens
agtcctatgtctgat

SEQ ID NO: 1758628 - DNA, 15 bp, Homo sapiens
gtcctatgtctgatc

SEQ ID NO: 1758629 - DNA, 15 bp, Homo sapiens
tcctatgtctgatcc

SEQ ID NO: 1758630 - DNA, 15 bp, Homo sapiens
cctatgtctgatccc

SEQ ID NO: 1758631 - DNA, 15 bp, Homo sapiens
ctatgtctgatccct

SEQ ID NO: 1758632 - DNA, 15 bp, Homo sapiens
tatgtctgatcccta

SEQ ID NO: 1758633 - DNA, 15 bp, Homo sapiens
atgtctgatccctaa

SEQ ID NO: 1758634 - DNA, 15 bp, Homo sapiens
tgtctgatccctaag

SEQ ID NO: 1758635 - DNA, 15 bp, Homo sapiens
gtctgatccctaagt

SEQ ID NO: 1758636 - DNA, 15 bp, Homo sapiens
tctgatccctaagtc

SEQ ID NO: 1758637 - DNA, 15 bp, Homo sapiens
ctgatccctaagtct

SEQ ID NO: 1758638 - DNA, 15 bp, Homo sapiens
tgatccctaagtcta

SEQ ID NO: 1758639 - DNA, 15 bp, Homo sapiens
gatccctaagtctat

SEQ ID NO: 1758640 - DNA, 15 bp, Homo sapiens
atccctaagtctatt

SEQ ID NO: 1758641 - DNA, 15 bp, Homo sapiens
tccctaagtctattc

SEQ ID NO: 1758642 - DNA, 15 bp, Homo sapiens
ccctaagtctattct

SEQ ID NO: 1758643 - DNA, 15 bp, Homo sapiens
cctaagtctattctt

SEQ ID NO: 1758644 - DNA, 15 bp, Homo sapiens
ctaagtctattcttt

SEQ ID NO: 1758645 - DNA, 15 bp, Homo sapiens
taagtctattctttt

SEQ ID NO: 1758646 - DNA, 15 bp, Homo sapiens
aagtctattcttttc

SEQ ID NO: 1758647 - DNA, 15 bp, Homo sapiens
agtctattcttttct

SEQ ID NO: 1758648 - DNA, 15 bp, Homo sapiens
gtctattcttttctc

SEQ ID NO: 1758649 - DNA, 15 bp, Homo sapiens
tctattcttttctct

SEQ ID NO: 1758650 - DNA, 15 bp, Homo sapiens
ctattcttttctcta

SEQ ID NO: 1758651 - DNA, 15 bp, Homo sapiens
tattcttttctctat

SEQ ID NO: 1758652 - DNA, 15 bp, Homo sapiens
attcttttctctatg

SEQ ID NO: 1758653 - DNA, 15 bp, Homo sapiens
ttcttttctctatgt

SEQ ID NO: 1758654 - DNA, 15 bp, Homo sapiens
tcttttctctatgta

SEQ ID NO: 1758655 - DNA, 15 bp, Homo sapiens
cttttctctatgtat

SEQ ID NO: 1758656 - DNA, 15 bp, Homo sapiens
ttttctctatgtatc

SEQ ID NO: 1758657 - DNA, 15 bp, Homo sapiens
tttctctatgtatct

SEQ ID NO: 1758658 - DNA, 15 bp, Homo sapiens
ttctctatgtatcta

SEQ ID NO: 1758659 - DNA, 15 bp, Homo sapiens
tctctatgtatctat

SEQ ID NO: 1758660 - DNA, 15 bp, Homo sapiens
ctctatgtatctata

SEQ ID NO: 1758661 - DNA, 15 bp, Homo sapiens
tctatgtatctatac

SEQ ID NO: 1758662 - DNA, 15 bp, Homo sapiens
ctatgtatctatacc

SEQ ID NO: 1758663 - DNA, 15 bp, Homo sapiens
tatgtatctataccc

SEQ ID NO: 1758664 - DNA, 15 bp, Homo sapiens
atgtatctataccct

SEQ ID NO: 1758665 - DNA, 15 bp, Homo sapiens
tgtatctataccctt

SEQ ID NO: 1758666 - DNA, 15 bp, Homo sapiens
gtatctatacccttc

SEQ ID NO: 1758667 - DNA, 15 bp, Homo sapiens
tatctatacccttct

SEQ ID NO: 1758668 - DNA, 15 bp, Homo sapiens
atctatacccttctt

SEQ ID NO: 1758669 - DNA, 15 bp, Homo sapiens
tctatacccttcttt

SEQ ID NO: 1758670 - DNA, 15 bp, Homo sapiens
ctatacccttcttta

SEQ ID NO: 1758671 - DNA, 15 bp, Homo sapiens
tatacccttctttaa

SEQ ID NO: 1758672 - DNA, 15 bp, Homo sapiens
atacccttctttaat

SEQ ID NO: 1758673 - DNA, 15 bp, Homo sapiens
tacccttctttaatt

SEQ ID NO: 1758674 - DNA, 15 bp, Homo sapiens
acccttctttaattt

SEQ ID NO: 1758675 - DNA, 15 bp, Homo sapiens
cccttctttaatttt

SEQ ID NO: 1758676 - DNA, 15 bp, Homo sapiens
ccttctttaatttta

SEQ ID NO: 1758677 - DNA, 15 bp, Homo sapiens
cttctttaattttaa

SEQ ID NO: 1758678 - DNA, 15 bp, Homo sapiens
ttctttaattttaaa

SEQ ID NO: 1758679 - DNA, 15 bp, Homo sapiens
tctttaattttaaaa

SEQ ID NO: 1758680 - DNA, 15 bp, Homo sapiens
ctttaattttaaaac

SEQ ID NO: 1758681 - DNA, 15 bp, Homo sapiens
tttaattttaaaaca

SEQ ID NO: 1758682 - DNA, 15 bp, Homo sapiens
ttaattttaaaacac

SEQ ID NO: 1758683 - DNA, 15 bp, Homo sapiens
taattttaaaacact

SEQ ID NO: 1758684 - DNA, 15 bp, Homo sapiens
aattttaaaacactc

SEQ ID NO: 1758685 - DNA, 15 bp, Homo sapiens
ttttaaaacactctg

SEQ ID NO: 1758686 - DNA, 15 bp, Homo sapiens
tttaaaacactctga

SEQ ID NO: 1758687 - DNA, 15 bp, Homo sapiens
ttaaaacactctgac

SEQ ID NO: 1758688 - DNA, 15 bp, Homo sapiens
taaaacactctgaca

SEQ ID NO: 1758689 - DNA, 15 bp, Homo sapiens
aaaacactctgacat

SEQ ID NO: 1758690 - DNA, 15 bp, Homo sapiens
aaacactctgacata

SEQ ID NO: 1758691 - DNA, 15 bp, Homo sapiens
aacactctgacatat

SEQ ID NO: 1758692 - DNA, 15 bp, Homo sapiens
acactctgacatatg

SEQ ID NO: 1758693 - DNA, 15 bp, Homo sapiens
cactctgacatatga

SEQ ID NO: 1758694 - DNA, 15 bp, Homo sapiens
actctgacatatgaa

SEQ ID NO: 1758695 - DNA, 15 bp, Homo sapiens
ctctgacatatgaaa

SEQ ID NO: 1758696 - DNA, 15 bp, Homo sapiens
tctgacatatgaaaa

SEQ ID NO: 1758697 - DNA, 15 bp, Homo sapiens
ctgacatatgaaaaa

SEQ ID NO: 1758698 - DNA, 15 bp, Homo sapiens
tgacatatgaaaaaa

SEQ ID NO: 1758699 - DNA, 15 bp, Homo sapiens
gacatatgaaaaaat

SEQ ID NO: 1758700 - DNA, 15 bp, Homo sapiens
acatatgaaaaaatg

SEQ ID NO: 1758701 - DNA, 15 bp, Homo sapiens
catatgaaaaaatgc

SEQ ID NO: 1758702 - DNA, 15 bp, Homo sapiens
atatgaaaaaatgcc

SEQ ID NO: 1758703 - DNA, 15 bp, Homo sapiens
tatgaaaaaatgcca

SEQ ID NO: 1758704 - DNA, 15 bp, Homo sapiens
atgaaaaaatgccag

SEQ ID NO: 1758705 - DNA, 15 bp, Homo sapiens
tgaaaaaatgccaga

SEQ ID NO: 1758706 - DNA, 15 bp, Homo sapiens
gaaaaaatgccagag

SEQ ID NO: 1758707 - DNA, 15 bp, Homo sapiens
aaaaaatgccagagt

SEQ ID NO: 1758708 - DNA, 15 bp, Homo sapiens
aaaaatgccagagtt

SEQ ID NO: 1758709 - DNA, 15 bp, Homo sapiens
aaaatgccagagttt

SEQ ID NO: 1758710 - DNA, 15 bp, Homo sapiens
aaatgccagagttta

SEQ ID NO: 1758711 - DNA, 15 bp, Homo sapiens
aatgccagagtttac

SEQ ID NO: 1758712 - DNA, 15 bp, Homo sapiens
atgccagagtttact

SEQ ID NO: 1758713 - DNA, 15 bp, Homo sapiens
tgccagagtttactg

SEQ ID NO: 1758714 - DNA, 15 bp, Homo sapiens
gccagagtttactgt

SEQ ID NO: 1758715 - DNA, 15 bp, Homo sapiens
ccagagtttactgta

SEQ ID NO: 1758716 - DNA, 15 bp, Homo sapiens
cagagtttactgtag

SEQ ID NO: 1758717 - DNA, 15 bp, Homo sapiens
agagtttactgtaga

SEQ ID NO: 1758718 - DNA, 15 bp, Homo sapiens
gagtttactgtagag

SEQ ID NO: 1758719 - DNA, 15 bp, Homo sapiens
agtttactgtagaga

SEQ ID NO: 1758720 - DNA, 15 bp, Homo sapiens
gtttactgtagagaa

SEQ ID NO: 1758721 - DNA, 15 bp, Homo sapiens
tttactgtagagaaa

SEQ ID NO: 1758722 - DNA, 15 bp, Homo sapiens
ttactgtagagaaat

SEQ ID NO: 1758723 - DNA, 15 bp, Homo sapiens
tactgtagagaaata

SEQ ID NO: 1758724 - DNA, 15 bp, Homo sapiens
actgtagagaaatat

SEQ ID NO: 1758725 - DNA, 15 bp, Homo sapiens
ctgtagagaaatatt

SEQ ID NO: 1758726 - DNA, 15 bp, Homo sapiens
tgtagagaaatattc

SEQ ID NO: 1758727 - DNA, 15 bp, Homo sapiens
gtagagaaatattca

SEQ ID NO: 1758728 - DNA, 15 bp, Homo sapiens
tagagaaatattcat

SEQ ID NO: 1758729 - DNA, 15 bp, Homo sapiens
agagaaatattcata

SEQ ID NO: 1758730 - DNA, 15 bp, Homo sapiens
gagaaatattcataa

SEQ ID NO: 1758731 - DNA, 15 bp, Homo sapiens
agaaatattcataac

SEQ ID NO: 1758732 - DNA, 15 bp, Homo sapiens
gaaatattcataact

SEQ ID NO: 1758733 - DNA, 15 bp, Homo sapiens
aaatattcataactt

SEQ ID NO: 1758734 - DNA, 15 bp, Homo sapiens
aatattcataacttg

SEQ ID NO: 1758735 - DNA, 15 bp, Homo sapiens
atattcataacttgt

SEQ ID NO: 1758736 - DNA, 15 bp, Homo sapiens
tattcataacttgtc

SEQ ID NO: 1758737 - DNA, 15 bp, Homo sapiens
attcataacttgtct

SEQ ID NO: 1758738 - DNA, 15 bp, Homo sapiens
ttcataacttgtcta

SEQ ID NO: 1758739 - DNA, 15 bp, Homo sapiens
tcataacttgtctat

SEQ ID NO: 1758740 - DNA, 15 bp, Homo sapiens
cataacttgtctatt

SEQ ID NO: 1758741 - DNA, 15 bp, Homo sapiens
ataacttgtctattc

SEQ ID NO: 1758742 - DNA, 15 bp, Homo sapiens
taacttgtctattca

SEQ ID NO: 1758743 - DNA, 15 bp, Homo sapiens
aacttgtctattcat

SEQ ID NO: 1758744 - DNA, 15 bp, Homo sapiens
acttgtctattcatg

SEQ ID NO: 1758745 - DNA, 15 bp, Homo sapiens
cttgtctattcatgt

SEQ ID NO: 1758746 - DNA, 15 bp, Homo sapiens
ttgtctattcatgtc

SEQ ID NO: 1758747 - DNA, 15 bp, Homo sapiens
tgtctattcatgtca

SEQ ID NO: 1758748 - DNA, 15 bp, Homo sapiens
gtctattcatgtcac

SEQ ID NO: 1758749 - DNA, 15 bp, Homo sapiens
tctattcatgtcact

SEQ ID NO: 1758750 - DNA, 15 bp, Homo sapiens
ctattcatgtcactc

SEQ ID NO: 1758751 - DNA, 15 bp, Homo sapiens
tattcatgtcactcc

SEQ ID NO: 1758752 - DNA, 15 bp, Homo sapiens
attcatgtcactcct

SEQ ID NO: 1758753 - DNA, 15 bp, Homo sapiens
ttcatgtcactcctc

SEQ ID NO: 1758754 - DNA, 15 bp, Homo sapiens
tcatgtcactcctcc

SEQ ID NO: 1758755 - DNA, 15 bp, Homo sapiens
catgtcactcctccc

SEQ ID NO: 1758756 - DNA, 15 bp, Homo sapiens
atgtcactcctcccc

SEQ ID NO: 1758757 - DNA, 15 bp, Homo sapiens
tgtcactcctcccca

SEQ ID NO: 1758758 - DNA, 15 bp, Homo sapiens
gtcactcctccccac

SEQ ID NO: 1758759 - DNA, 15 bp, Homo sapiens
tcactcctccccacc

SEQ ID NO: 1758760 - DNA, 15 bp, Homo sapiens
cactcctccccacca

SEQ ID NO: 1758761 - DNA, 15 bp, Homo sapiens
actcctccccaccac

SEQ ID NO: 1758762 - DNA, 15 bp, Homo sapiens
ctcctccccaccaca

SEQ ID NO: 1758763 - DNA, 15 bp, Homo sapiens
tcctccccaccacac

SEQ ID NO: 1758764 - DNA, 15 bp, Homo sapiens
cctccccaccacacc

SEQ ID NO: 1758765 - DNA, 15 bp, Homo sapiens
ctccccaccacacca

SEQ ID NO: 1758766 - DNA, 15 bp, Homo sapiens
tccccaccacaccat

SEQ ID NO: 1758767 - DNA, 15 bp, Homo sapiens
ccccaccacaccatc

SEQ ID NO: 1758768 - DNA, 15 bp, Homo sapiens
cccaccacaccatcc

SEQ ID NO: 1758769 - DNA, 15 bp, Homo sapiens
ccaccacaccatcca

SEQ ID NO: 1758770 - DNA, 15 bp, Homo sapiens
caccacaccatccat

SEQ ID NO: 1758771 - DNA, 15 bp, Homo sapiens
accacaccatccata

SEQ ID NO: 1758772 - DNA, 15 bp, Homo sapiens
ccacaccatccatat

SEQ ID NO: 1758773 - DNA, 15 bp, Homo sapiens
cacaccatccatatt

SEQ ID NO: 1758774 - DNA, 15 bp, Homo sapiens
acaccatccatatta

SEQ ID NO: 1758775 - DNA, 15 bp, Homo sapiens
caccatccatattat

SEQ ID NO: 1758776 - DNA, 15 bp, Homo sapiens
accatccatattata

SEQ ID NO: 1758777 - DNA, 15 bp, Homo sapiens
ccatccatattatac

SEQ ID NO: 1758778 - DNA, 15 bp, Homo sapiens
catccatattataca

SEQ ID NO: 1758779 - DNA, 15 bp, Homo sapiens
atccatattatacac

SEQ ID NO: 1758780 - DNA, 15 bp, Homo sapiens
tccatattatacaca

SEQ ID NO: 1758781 - DNA, 15 bp, Homo sapiens
ccatattatacacat

SEQ ID NO: 1758782 - DNA, 15 bp, Homo sapiens
catattatacacatt

SEQ ID NO: 1758783 - DNA, 15 bp, Homo sapiens
atattatacacatta

SEQ ID NO: 1758784 - DNA, 15 bp, Homo sapiens
tattatacacattac

SEQ ID NO: 1758785 - DNA, 15 bp, Homo sapiens
attatacacattacc

SEQ ID NO: 1758786 - DNA, 15 bp, Homo sapiens
ttatacacattaccc

SEQ ID NO: 1758787 - DNA, 15 bp, Homo sapiens
tatacacattaccca

SEQ ID NO: 1758788 - DNA, 15 bp, Homo sapiens
atacacattacccat

SEQ ID NO: 1758789 - DNA, 15 bp, Homo sapiens
tacacattacccatt

SEQ ID NO: 1758790 - DNA, 15 bp, Homo sapiens
acacattacccattc

SEQ ID NO: 1758791 - DNA, 15 bp, Homo sapiens
cacattacccattct

SEQ ID NO: 1758792 - DNA, 15 bp, Homo sapiens
acattacccattctc

SEQ ID NO: 1758793 - DNA, 15 bp, Homo sapiens
cattacccattctct

SEQ ID NO: 1758794 - DNA, 15 bp, Homo sapiens
attacccattctctt

SEQ ID NO: 1758795 - DNA, 15 bp, Homo sapiens
ttacccattctcttt

SEQ ID NO: 1758796 - DNA, 15 bp, Homo sapiens
tacccattctctttg

SEQ ID NO: 1758797 - DNA, 15 bp, Homo sapiens
acccattctctttgt

SEQ ID NO: 1758798 - DNA, 15 bp, Homo sapiens
cccattctctttgtt

SEQ ID NO: 1758799 - DNA, 15 bp, Homo sapiens
ccattctctttgttc

SEQ ID NO: 1758800 - DNA, 15 bp, Homo sapiens
cattctctttgttca

SEQ ID NO: 1758801 - DNA, 15 bp, Homo sapiens
attctctttgttcat

SEQ ID NO: 1758802 - DNA, 15 bp, Homo sapiens
ttctctttgttcatt

SEQ ID NO: 1758803 - DNA, 15 bp, Homo sapiens
tctctttgttcatta

SEQ ID NO: 1758804 - DNA, 15 bp, Homo sapiens
ctctttgttcattaa

SEQ ID NO: 1758805 - DNA, 15 bp, Homo sapiens
tctttgttcattaat

SEQ ID NO: 1758806 - DNA, 15 bp, Homo sapiens
ctttgttcattaatt

SEQ ID NO: 1758807 - DNA, 15 bp, Homo sapiens
tttgttcattaattg

SEQ ID NO: 1758808 - DNA, 15 bp, Homo sapiens
ttgttcattaattgg

SEQ ID NO: 1758809 - DNA, 15 bp, Homo sapiens
tgttcattaattggc

SEQ ID NO: 1758810 - DNA, 15 bp, Homo sapiens
gttcattaattggca

SEQ ID NO: 1758811 - DNA, 15 bp, Homo sapiens
ttcattaattggcaa

SEQ ID NO: 1758812 - DNA, 15 bp, Homo sapiens
tcattaattggcaaa

SEQ ID NO: 1758813 - DNA, 15 bp, Homo sapiens
cattaattggcaaaa

SEQ ID NO: 1758814 - DNA, 15 bp, Homo sapiens
attaattggcaaaag

SEQ ID NO: 1758815 - DNA, 15 bp, Homo sapiens
ttaattggcaaaagg

SEQ ID NO: 1758816 - DNA, 15 bp, Homo sapiens
taattggcaaaaggg

SEQ ID NO: 1758817 - DNA, 15 bp, Homo sapiens
aattggcaaaaggga

SEQ ID NO: 1758818 - DNA, 15 bp, Homo sapiens
attggcaaaagggac

SEQ ID NO: 1758819 - DNA, 15 bp, Homo sapiens
ttggcaaaagggact

SEQ ID NO: 1758820 - DNA, 15 bp, Homo sapiens
tggcaaaagggacta

SEQ ID NO: 1758821 - DNA, 15 bp, Homo sapiens
ggcaaaagggactaa

SEQ ID NO: 1758822 - DNA, 15 bp, Homo sapiens
gcaaaagggactaag

SEQ ID NO: 1758823 - DNA, 15 bp, Homo sapiens
caaaagggactaaga

SEQ ID NO: 1758824 - DNA, 15 bp, Homo sapiens
aaaagggactaagaa

SEQ ID NO: 1758825 - DNA, 15 bp, Homo sapiens
aaagggactaagaaa

SEQ ID NO: 1758826 - DNA, 15 bp, Homo sapiens
aagggactaagaaat

SEQ ID NO: 1758827 - DNA, 15 bp, Homo sapiens
agggactaagaaatt

SEQ ID NO: 1758828 - DNA, 15 bp, Homo sapiens
gggactaagaaattc

SEQ ID NO: 1758829 - DNA, 15 bp, Homo sapiens
ggactaagaaattca

SEQ ID NO: 1758830 - DNA, 15 bp, Homo sapiens
gactaagaaattcaa

SEQ ID NO: 1758831 - DNA, 15 bp, Homo sapiens
actaagaaattcaag

SEQ ID NO: 1758832 - DNA, 15 bp, Homo sapiens
ctaagaaattcaagg

SEQ ID NO: 1758833 - DNA, 15 bp, Homo sapiens
taagaaattcaagga

SEQ ID NO: 1758834 - DNA, 15 bp, Homo sapiens
aagaaattcaaggat

SEQ ID NO: 1758835 - DNA, 15 bp, Homo sapiens
agaaattcaaggatg

SEQ ID NO: 1758836 - DNA, 15 bp, Homo sapiens
gaaattcaaggatgt

SEQ ID NO: 1758837 - DNA, 15 bp, Homo sapiens
aaattcaaggatgtc

SEQ ID NO: 1758838 - DNA, 15 bp, Homo sapiens
aattcaaggatgtcc

SEQ ID NO: 1758839 - DNA, 15 bp, Homo sapiens
attcaaggatgtcca

SEQ ID NO: 1758840 - DNA, 15 bp, Homo sapiens
ttcaaggatgtccaa

SEQ ID NO: 1758841 - DNA, 15 bp, Homo sapiens
tcaaggatgtccaaa

SEQ ID NO: 1758842 - DNA, 15 bp, Homo sapiens
caaggatgtccaaaa

SEQ ID NO: 1758843 - DNA, 15 bp, Homo sapiens
aaggatgtccaaaaa

SEQ ID NO: 1758844 - DNA, 15 bp, Homo sapiens
aggatgtccaaaaat

SEQ ID NO: 1758845 - DNA, 15 bp, Homo sapiens
ggatgtccaaaaata

SEQ ID NO: 1758846 - DNA, 15 bp, Homo sapiens
gatgtccaaaaataa

SEQ ID NO: 1758847 - DNA, 15 bp, Homo sapiens
atgtccaaaaataaa

SEQ ID NO: 1758848 - DNA, 15 bp, Homo sapiens
tgtccaaaaataaaa

SEQ ID NO: 1758849 - DNA, 15 bp, Homo sapiens
gtccaaaaataaaaa

SEQ ID NO: 1758850 - DNA, 15 bp, Homo sapiens
tccaaaaataaaaaa

SEQ ID NO: 1758851 - DNA, 15 bp, Homo sapiens
ccaaaaataaaaaac

SEQ ID NO: 1758852 - DNA, 15 bp, Homo sapiens
caaaaataaaaaaca

SEQ ID NO: 1758853 - DNA, 15 bp, Homo sapiens
aaaaataaaaaacaa

SEQ ID NO: 1758854 - DNA, 15 bp, Homo sapiens
aaataaaaaacaaac

SEQ ID NO: 1758855 - DNA, 15 bp, Homo sapiens
aataaaaaacaaaca

SEQ ID NO: 1758856 - DNA, 15 bp, Homo sapiens
ataaaaaacaaacaa

SEQ ID NO: 1758857 - DNA, 15 bp, Homo sapiens
aaacaaacaaaaatc

SEQ ID NO: 1758858 - DNA, 15 bp, Homo sapiens
aacaaacaaaaatct

SEQ ID NO: 1758859 - DNA, 15 bp, Homo sapiens
acaaacaaaaatcta

SEQ ID NO: 1758860 - DNA, 15 bp, Homo sapiens
caaacaaaaatctaa

SEQ ID NO: 1758861 - DNA, 15 bp, Homo sapiens
aaacaaaaatctaac

SEQ ID NO: 1758862 - DNA, 15 bp, Homo sapiens
aacaaaaatctaaca

SEQ ID NO: 1758863 - DNA, 15 bp, Homo sapiens
acaaaaatctaacaa

SEQ ID NO: 1758864 - DNA, 15 bp, Homo sapiens
caaaaatctaacaac

SEQ ID NO: 1758865 - DNA, 15 bp, Homo sapiens
aaaaatctaacaact

SEQ ID NO: 1758866 - DNA, 15 bp, Homo sapiens
aaaatctaacaactc

SEQ ID NO: 1758867 - DNA, 15 bp, Homo sapiens
aaatctaacaactca

SEQ ID NO: 1758868 - DNA, 15 bp, Homo sapiens
aatctaacaactcag

SEQ ID NO: 1758869 - DNA, 15 bp, Homo sapiens
atctaacaactcagg

SEQ ID NO: 1758870 - DNA, 15 bp, Homo sapiens
tctaacaactcagga

SEQ ID NO: 1758871 - DNA, 15 bp, Homo sapiens
ctaacaactcaggaa

SEQ ID NO: 1758872 - DNA, 15 bp, Homo sapiens
taacaactcaggaat

SEQ ID NO: 1758873 - DNA, 15 bp, Homo sapiens
aacaactcaggaatg

SEQ ID NO: 1758874 - DNA, 15 bp, Homo sapiens
acaactcaggaatgt

SEQ ID NO: 1758875 - DNA, 15 bp, Homo sapiens
caactcaggaatgtc

SEQ ID NO: 1758876 - DNA, 15 bp, Homo sapiens
aactcaggaatgtcc

SEQ ID NO: 1758877 - DNA, 15 bp, Homo sapiens
actcaggaatgtcct

SEQ ID NO: 1758878 - DNA, 15 bp, Homo sapiens
ctcaggaatgtcctg

SEQ ID NO: 1758879 - DNA, 15 bp, Homo sapiens
tcaggaatgtcctgt

SEQ ID NO: 1758880 - DNA, 15 bp, Homo sapiens
caggaatgtcctgta

SEQ ID NO: 1758881 - DNA, 15 bp, Homo sapiens
aggaatgtcctgtag

SEQ ID NO: 1758882 - DNA, 15 bp, Homo sapiens
ggaatgtcctgtagg

SEQ ID NO: 1758883 - DNA, 15 bp, Homo sapiens
gaatgtcctgtaggt

SEQ ID NO: 1758884 - DNA, 15 bp, Homo sapiens
aatgtcctgtaggta

SEQ ID NO: 1758885 - DNA, 15 bp, Homo sapiens
atgtcctgtaggtag

SEQ ID NO: 1758886 - DNA, 15 bp, Homo sapiens
tgtcctgtaggtagc

SEQ ID NO: 1758887 - DNA, 15 bp, Homo sapiens
gtcctgtaggtagct

SEQ ID NO: 1758888 - DNA, 15 bp, Homo sapiens
tcctgtaggtagctc

SEQ ID NO: 1758889 - DNA, 15 bp, Homo sapiens
cctgtaggtagctca

SEQ ID NO: 1758890 - DNA, 15 bp, Homo sapiens
ctgtaggtagctcat

SEQ ID NO: 1758891 - DNA, 15 bp, Homo sapiens
tgtaggtagctcata

SEQ ID NO: 1758892 - DNA, 15 bp, Homo sapiens
gtaggtagctcatag

SEQ ID NO: 1758893 - DNA, 15 bp, Homo sapiens
taggtagctcataga

SEQ ID NO: 1758894 - DNA, 15 bp, Homo sapiens
aggtagctcatagaa

SEQ ID NO: 1758895 - DNA, 15 bp, Homo sapiens
ggtagctcatagaaa

SEQ ID NO: 1758896 - DNA, 15 bp, Homo sapiens
gtagctcatagaaac

SEQ ID NO: 1758897 - DNA, 15 bp, Homo sapiens
tagctcatagaaact

SEQ ID NO: 1758898 - DNA, 15 bp, Homo sapiens
agctcatagaaactt

SEQ ID NO: 1758899 - DNA, 15 bp, Homo sapiens
gctcatagaaactta

SEQ ID NO: 1758900 - DNA, 15 bp, Homo sapiens
ctcatagaaacttag

SEQ ID NO: 1758901 - DNA, 15 bp, Homo sapiens
tcatagaaacttagt

SEQ ID NO: 1758902 - DNA, 15 bp, Homo sapiens
catagaaacttagtt

SEQ ID NO: 1758903 - DNA, 15 bp, Homo sapiens
atagaaacttagttt

SEQ ID NO: 1758904 - DNA, 15 bp, Homo sapiens
tagaaacttagttta

SEQ ID NO: 1758905 - DNA, 15 bp, Homo sapiens
agaaacttagtttag

SEQ ID NO: 1758906 - DNA, 15 bp, Homo sapiens
gaaacttagtttagg

SEQ ID NO: 1758907 - DNA, 15 bp, Homo sapiens
aaacttagtttagga

SEQ ID NO: 1758908 - DNA, 15 bp, Homo sapiens
aacttagtttaggaa

SEQ ID NO: 1758909 - DNA, 15 bp, Homo sapiens
agtttaggaagtagt

SEQ ID NO: 1758910 - DNA, 15 bp, Homo sapiens
gtttaggaagtagtg

SEQ ID NO: 1758911 - DNA, 15 bp, Homo sapiens
tttaggaagtagtgc

SEQ ID NO: 1758912 - DNA, 15 bp, Homo sapiens
ttaggaagtagtgct

SEQ ID NO: 1758913 - DNA, 15 bp, Homo sapiens
taggaagtagtgctc

SEQ ID NO: 1758914 - DNA, 15 bp, Homo sapiens
aggaagtagtgctca

SEQ ID NO: 1758915 - DNA, 15 bp, Homo sapiens
ggaagtagtgctcat

SEQ ID NO: 1758916 - DNA, 15 bp, Homo sapiens
gaagtagtgctcatc

SEQ ID NO: 1758917 - DNA, 15 bp, Homo sapiens
aagtagtgctcatca

SEQ ID NO: 1758918 - DNA, 15 bp, Homo sapiens
agtagtgctcatcac

SEQ ID NO: 1758919 - DNA, 15 bp, Homo sapiens
gtagtgctcatcact

SEQ ID NO: 1758920 - DNA, 15 bp, Homo sapiens
tagtgctcatcactt

SEQ ID NO: 1758921 - DNA, 15 bp, Homo sapiens
agtgctcatcacttg

SEQ ID NO: 1758922 - DNA, 15 bp, Homo sapiens
gtgctcatcacttgc

SEQ ID NO: 1758923 - DNA, 15 bp, Homo sapiens
tgctcatcacttgct

SEQ ID NO: 1758924 - DNA, 15 bp, Homo sapiens
gctcatcacttgctt

SEQ ID NO: 1758925 - DNA, 15 bp, Homo sapiens
ctcatcacttgctta

SEQ ID NO: 1758926 - DNA, 15 bp, Homo sapiens
tcatcacttgcttac

SEQ ID NO: 1758927 - DNA, 15 bp, Homo sapiens
catcacttgcttact

SEQ ID NO: 1758928 - DNA, 15 bp, Homo sapiens
atcacttgcttactt

SEQ ID NO: 1758929 - DNA, 15 bp, Homo sapiens
tcacttgcttacttc

SEQ ID NO: 1758930 - DNA, 15 bp, Homo sapiens
cacttgcttacttct

SEQ ID NO: 1758931 - DNA, 15 bp, Homo sapiens
acttgcttacttctt

SEQ ID NO: 1758932 - DNA, 15 bp, Homo sapiens
cttgcttacttcttt

SEQ ID NO: 1758933 - DNA, 15 bp, Homo sapiens
ttgcttacttctttg

SEQ ID NO: 1758934 - DNA, 15 bp, Homo sapiens
tgcttacttctttgg

SEQ ID NO: 1758935 - DNA, 15 bp, Homo sapiens
gcttacttctttgga

SEQ ID NO: 1758936 - DNA, 15 bp, Homo sapiens
cttacttctttggaa

SEQ ID NO: 1758937 - DNA, 15 bp, Homo sapiens
ttacttctttggaag

SEQ ID NO: 1758938 - DNA, 15 bp, Homo sapiens
tacttctttggaagt

SEQ ID NO: 1758939 - DNA, 15 bp, Homo sapiens
acttctttggaagtt

SEQ ID NO: 1758940 - DNA, 15 bp, Homo sapiens
cttctttggaagttt

SEQ ID NO: 1758941 - DNA, 15 bp, Homo sapiens
ttctttggaagtttg

SEQ ID NO: 1758942 - DNA, 15 bp, Homo sapiens
tctttggaagtttgt

SEQ ID NO: 1758943 - DNA, 15 bp, Homo sapiens
ctttggaagtttgtc

SEQ ID NO: 1758944 - DNA, 15 bp, Homo sapiens
tttggaagtttgtct

SEQ ID NO: 1758945 - DNA, 15 bp, Homo sapiens
ttggaagtttgtctg

SEQ ID NO: 1758946 - DNA, 15 bp, Homo sapiens
tggaagtttgtctga

SEQ ID NO: 1758947 - DNA, 15 bp, Homo sapiens
ggaagtttgtctgat

SEQ ID NO: 1758948 - DNA, 15 bp, Homo sapiens
gaagtttgtctgata

SEQ ID NO: 1758949 - DNA, 15 bp, Homo sapiens
aagtttgtctgataa

SEQ ID NO: 1758950 - DNA, 15 bp, Homo sapiens
agtttgtctgataat

SEQ ID NO: 1758951 - DNA, 15 bp, Homo sapiens
gtttgtctgataatt

SEQ ID NO: 1758952 - DNA, 15 bp, Homo sapiens
tttgtctgataatta

SEQ ID NO: 1758953 - DNA, 15 bp, Homo sapiens
ttgtctgataattat

SEQ ID NO: 1758954 - DNA, 15 bp, Homo sapiens
tgtctgataattata

SEQ ID NO: 1758955 - DNA, 15 bp, Homo sapiens
gtctgataattatac

SEQ ID NO: 1758956 - DNA, 15 bp, Homo sapiens
tctgataattataca

SEQ ID NO: 1758957 - DNA, 15 bp, Homo sapiens
ctgataattatacag

SEQ ID NO: 1758958 - DNA, 15 bp, Homo sapiens
tgataattatacaga

SEQ ID NO: 1758959 - DNA, 15 bp, Homo sapiens
gataattatacagac

SEQ ID NO: 1758960 - DNA, 15 bp, Homo sapiens
ataattatacagacc

SEQ ID NO: 1758961 - DNA, 15 bp, Homo sapiens
taattatacagacca

SEQ ID NO: 1758962 - DNA, 15 bp, Homo sapiens
aattatacagaccag

SEQ ID NO: 1758963 - DNA, 15 bp, Homo sapiens
attatacagaccagc

SEQ ID NO: 1758964 - DNA, 15 bp, Homo sapiens
ttatacagaccagca

SEQ ID NO: 1758965 - DNA, 15 bp, Homo sapiens
tatacagaccagcat

SEQ ID NO: 1758966 - DNA, 15 bp, Homo sapiens
atacagaccagcatc

SEQ ID NO: 1758967 - DNA, 15 bp, Homo sapiens
tacagaccagcatca

SEQ ID NO: 1758968 - DNA, 15 bp, Homo sapiens
acagaccagcatcaa

SEQ ID NO: 1758969 - DNA, 15 bp, Homo sapiens
cagaccagcatcaaa

SEQ ID NO: 1758970 - DNA, 15 bp, Homo sapiens
agaccagcatcaaaa

SEQ ID NO: 1758971 - DNA, 15 bp, Homo sapiens
gaccagcatcaaaat

SEQ ID NO: 1758972 - DNA, 15 bp, Homo sapiens
accagcatcaaaata

SEQ ID NO: 1758973 - DNA, 15 bp, Homo sapiens
ccagcatcaaaataa

SEQ ID NO: 1758974 - DNA, 15 bp, Homo sapiens
cagcatcaaaataac

SEQ ID NO: 1758975 - DNA, 15 bp, Homo sapiens
agcatcaaaataact

SEQ ID NO: 1758976 - DNA, 15 bp, Homo sapiens
gcatcaaaataactc

SEQ ID NO: 1758977 - DNA, 15 bp, Homo sapiens
catcaaaataactct

SEQ ID NO: 1758978 - DNA, 15 bp, Homo sapiens
atcaaaataactctc

SEQ ID NO: 1758979 - DNA, 15 bp, Homo sapiens
tcaaaataactctca

SEQ ID NO: 1758980 - DNA, 15 bp, Homo sapiens
caaaataactctcat

SEQ ID NO: 1758981 - DNA, 15 bp, Homo sapiens
aaaataactctcatt

SEQ ID NO: 1758982 - DNA, 15 bp, Homo sapiens
aaataactctcattt

SEQ ID NO: 1758983 - DNA, 15 bp, Homo sapiens
aataactctcattta

SEQ ID NO: 1758984 - DNA, 15 bp, Homo sapiens
ataactctcatttat

SEQ ID NO: 1758985 - DNA, 15 bp, Homo sapiens
taactctcatttatg

SEQ ID NO: 1758986 - DNA, 15 bp, Homo sapiens
aactctcatttatgt

SEQ ID NO: 1758987 - DNA, 15 bp, Homo sapiens
actctcatttatgtg

SEQ ID NO: 1758988 - DNA, 15 bp, Homo sapiens
ctctcatttatgtgt

SEQ ID NO: 1758989 - DNA, 15 bp, Homo sapiens
tctcatttatgtgtg

SEQ ID NO: 1758990 - DNA, 15 bp, Homo sapiens
ctcatttatgtgtgt

SEQ ID NO: 1758991 - DNA, 15 bp, Homo sapiens
tcatttatgtgtgtg

SEQ ID NO: 1758992 - DNA, 15 bp, Homo sapiens
catttatgtgtgtga

SEQ ID NO: 1758993 - DNA, 15 bp, Homo sapiens
atttatgtgtgtgac

SEQ ID NO: 1758994 - DNA, 15 bp, Homo sapiens
tttatgtgtgtgaca

SEQ ID NO: 1758995 - DNA, 15 bp, Homo sapiens
ttatgtgtgtgacat

SEQ ID NO: 1758996 - DNA, 15 bp, Homo sapiens
tatgtgtgtgacatt

SEQ ID NO: 1758997 - DNA, 15 bp, Homo sapiens
atgtgtgtgacattt

SEQ ID NO: 1758998 - DNA, 15 bp, Homo sapiens
tgtgtgtgacatttc

SEQ ID NO: 1758999 - DNA, 15 bp, Homo sapiens
gtgtgtgacatttca

SEQ ID NO: 1759000 - DNA, 15 bp, Homo sapiens
tgtgtgacatttcag

SEQ ID NO: 1759001 - DNA, 15 bp, Homo sapiens
gtgtgacatttcagt

SEQ ID NO: 1759002 - DNA, 15 bp, Homo sapiens
tgtgacatttcagtg

SEQ ID NO: 1759003 - DNA, 15 bp, Homo sapiens
gtgacatttcagtgt

SEQ ID NO: 1759004 - DNA, 15 bp, Homo sapiens
tgacatttcagtgta

SEQ ID NO: 1759005 - DNA, 15 bp, Homo sapiens
gacatttcagtgtag

SEQ ID NO: 1759006 - DNA, 15 bp, Homo sapiens
acatttcagtgtaga

SEQ ID NO: 1759007 - DNA, 15 bp, Homo sapiens
catttcagtgtagaa

SEQ ID NO: 1759008 - DNA, 15 bp, Homo sapiens
atttcagtgtagaag

SEQ ID NO: 1759009 - DNA, 15 bp, Homo sapiens
tttcagtgtagaagt

SEQ ID NO: 1759010 - DNA, 15 bp, Homo sapiens
ttcagtgtagaagta

SEQ ID NO: 1759011 - DNA, 15 bp, Homo sapiens
tcagtgtagaagtaa

SEQ ID NO: 1759012 - DNA, 15 bp, Homo sapiens
cagtgtagaagtaat

SEQ ID NO: 1759013 - DNA, 15 bp, Homo sapiens
agtgtagaagtaata

SEQ ID NO: 1759014 - DNA, 15 bp, Homo sapiens
gtgtagaagtaataa

SEQ ID NO: 1759015 - DNA, 15 bp, Homo sapiens
tgtagaagtaataat

SEQ ID NO: 1759016 - DNA, 15 bp, Homo sapiens
gtagaagtaataata

SEQ ID NO: 1759017 - DNA, 15 bp, Homo sapiens
tagaagtaataatag

SEQ ID NO: 1759018 - DNA, 15 bp, Homo sapiens
agaagtaataatagg

SEQ ID NO: 1759019 - DNA, 15 bp, Homo sapiens
gaagtaataataggt

SEQ ID NO: 1759020 - DNA, 15 bp, Homo sapiens
aagtaataataggta

SEQ ID NO: 1759021 - DNA, 15 bp, Homo sapiens
agtaataataggtaa

SEQ ID NO: 1759022 - DNA, 15 bp, Homo sapiens
gtaataataggtaat

SEQ ID NO: 1759023 - DNA, 15 bp, Homo sapiens
taataataggtaatg

SEQ ID NO: 1759024 - DNA, 15 bp, Homo sapiens
aataataggtaatgt

SEQ ID NO: 1759025 - DNA, 15 bp, Homo sapiens
ataataggtaatgtt

SEQ ID NO: 1759026 - DNA, 15 bp, Homo sapiens
taataggtaatgttt

SEQ ID NO: 1759027 - DNA, 15 bp, Homo sapiens
aataggtaatgtttt

SEQ ID NO: 1759028 - DNA, 15 bp, Homo sapiens
ataggtaatgttttt

SEQ ID NO: 1759029 - DNA, 15 bp, Homo sapiens
taggtaatgtttttg

SEQ ID NO: 1759030 - DNA, 15 bp, Homo sapiens
aggtaatgtttttgc

SEQ ID NO: 1759031 - DNA, 15 bp, Homo sapiens
ggtaatgtttttgca

SEQ ID NO: 1759032 - DNA, 15 bp, Homo sapiens
gtaatgtttttgcat

SEQ ID NO: 1759033 - DNA, 15 bp, Homo sapiens
taatgtttttgcata

SEQ ID NO: 1759034 - DNA, 15 bp, Homo sapiens
aatgtttttgcatat

SEQ ID NO: 1759035 - DNA, 15 bp, Homo sapiens
atgtttttgcatatg

SEQ ID NO: 1759036 - DNA, 15 bp, Homo sapiens
tgtttttgcatatgt

SEQ ID NO: 1759037 - DNA, 15 bp, Homo sapiens
gtttttgcatatgtc

SEQ ID NO: 1759038 - DNA, 15 bp, Homo sapiens
tttttgcatatgtcc

SEQ ID NO: 1759039 - DNA, 15 bp, Homo sapiens
ttttgcatatgtcct

SEQ ID NO: 1759040 - DNA, 15 bp, Homo sapiens
tttgcatatgtccta

SEQ ID NO: 1759041 - DNA, 15 bp, Homo sapiens
ttgcatatgtcctat

SEQ ID NO: 1759042 - DNA, 15 bp, Homo sapiens
tgcatatgtcctatt

SEQ ID NO: 1759043 - DNA, 15 bp, Homo sapiens
gcatatgtcctatta

SEQ ID NO: 1759044 - DNA, 15 bp, Homo sapiens
catatgtcctattat

SEQ ID NO: 1759045 - DNA, 15 bp, Homo sapiens
atatgtcctattata

SEQ ID NO: 1759046 - DNA, 15 bp, Homo sapiens
tatgtcctattatag

SEQ ID NO: 1759047 - DNA, 15 bp, Homo sapiens
atgtcctattatagg

SEQ ID NO: 1759048 - DNA, 15 bp, Homo sapiens
tgtcctattataggt

SEQ ID NO: 1759049 - DNA, 15 bp, Homo sapiens
gtcctattataggta

SEQ ID NO: 1759050 - DNA, 15 bp, Homo sapiens
tcctattataggtac

SEQ ID NO: 1759051 - DNA, 15 bp, Homo sapiens
cctattataggtact

SEQ ID NO: 1759052 - DNA, 15 bp, Homo sapiens
ctattataggtactg

SEQ ID NO: 1759053 - DNA, 15 bp, Homo sapiens
tattataggtactgt

SEQ ID NO: 1759054 - DNA, 15 bp, Homo sapiens
attataggtactgtt

SEQ ID NO: 1759055 - DNA, 15 bp, Homo sapiens
ttataggtactgtta

SEQ ID NO: 1759056 - DNA, 15 bp, Homo sapiens
tataggtactgttaa

SEQ ID NO: 1759057 - DNA, 15 bp, Homo sapiens
ataggtactgttaaa

SEQ ID NO: 1759058 - DNA, 15 bp, Homo sapiens
taggtactgttaaaa

SEQ ID NO: 1759059 - DNA, 15 bp, Homo sapiens
aggtactgttaaaag

SEQ ID NO: 1759060 - DNA, 15 bp, Homo sapiens
ggtactgttaaaagt

SEQ ID NO: 1759061 - DNA, 15 bp, Homo sapiens
gtactgttaaaagtg

SEQ ID NO: 1759062 - DNA, 15 bp, Homo sapiens
tactgttaaaagtgc

SEQ ID NO: 1759063 - DNA, 15 bp, Homo sapiens
actgttaaaagtgct

SEQ ID NO: 1759064 - DNA, 15 bp, Homo sapiens
ctgttaaaagtgctt

SEQ ID NO: 1759065 - DNA, 15 bp, Homo sapiens
taaaagtgcttcagt

SEQ ID NO: 1759066 - DNA, 15 bp, Homo sapiens
aaaagtgcttcagtg

SEQ ID NO: 1759067 - DNA, 15 bp, Homo sapiens
aaagtgcttcagtgt

SEQ ID NO: 1759068 - DNA, 15 bp, Homo sapiens
aagtgcttcagtgta

SEQ ID NO: 1759069 - DNA, 15 bp, Homo sapiens
agtgcttcagtgtat

SEQ ID NO: 1759070 - DNA, 15 bp, Homo sapiens
gtgcttcagtgtatt

SEQ ID NO: 1759071 - DNA, 15 bp, Homo sapiens
tgcttcagtgtatta

SEQ ID NO: 1759072 - DNA, 15 bp, Homo sapiens
gcttcagtgtattaa

SEQ ID NO: 1759073 - DNA, 15 bp, Homo sapiens
cttcagtgtattaac

SEQ ID NO: 1759074 - DNA, 15 bp, Homo sapiens
ttcagtgtattaact

SEQ ID NO: 1759075 - DNA, 15 bp, Homo sapiens
tcagtgtattaactc

SEQ ID NO: 1759076 - DNA, 15 bp, Homo sapiens
cagtgtattaactca

SEQ ID NO: 1759077 - DNA, 15 bp, Homo sapiens
agtgtattaactcat

SEQ ID NO: 1759078 - DNA, 15 bp, Homo sapiens
gtgtattaactcata

SEQ ID NO: 1759079 - DNA, 15 bp, Homo sapiens
tgtattaactcataa

SEQ ID NO: 1759080 - DNA, 15 bp, Homo sapiens
gtattaactcataac

SEQ ID NO: 1759081 - DNA, 15 bp, Homo sapiens
tattaactcataact

SEQ ID NO: 1759082 - DNA, 15 bp, Homo sapiens
attaactcataactt

SEQ ID NO: 1759083 - DNA, 15 bp, Homo sapiens
ttaactcataacttc

SEQ ID NO: 1759084 - DNA, 15 bp, Homo sapiens
taactcataacttct

SEQ ID NO: 1759085 - DNA, 15 bp, Homo sapiens
aactcataacttctc

SEQ ID NO: 1759086 - DNA, 15 bp, Homo sapiens
actcataacttctca

SEQ ID NO: 1759087 - DNA, 15 bp, Homo sapiens
ctcataacttctcac

SEQ ID NO: 1759088 - DNA, 15 bp, Homo sapiens
tcataacttctcaca

SEQ ID NO: 1759089 - DNA, 15 bp, Homo sapiens
cataacttctcacaa

SEQ ID NO: 1759090 - DNA, 15 bp, Homo sapiens
ataacttctcacaac

SEQ ID NO: 1759091 - DNA, 15 bp, Homo sapiens
taacttctcacaact

SEQ ID NO: 1759092 - DNA, 15 bp, Homo sapiens
aacttctcacaactc

SEQ ID NO: 1759093 - DNA, 15 bp, Homo sapiens
acttctcacaactct

SEQ ID NO: 1759094 - DNA, 15 bp, Homo sapiens
cttctcacaactcta

SEQ ID NO: 1759095 - DNA, 15 bp, Homo sapiens
ttctcacaactctat

SEQ ID NO: 1759096 - DNA, 15 bp, Homo sapiens
tctcacaactctatg

SEQ ID NO: 1759097 - DNA, 15 bp, Homo sapiens
ctcacaactctatga

SEQ ID NO: 1759098 - DNA, 15 bp, Homo sapiens
tcacaactctatgaa

SEQ ID NO: 1759099 - DNA, 15 bp, Homo sapiens
cacaactctatgaaa

SEQ ID NO: 1759100 - DNA, 15 bp, Homo sapiens
acaactctatgaaat

SEQ ID NO: 1759101 - DNA, 15 bp, Homo sapiens
caactctatgaaata

SEQ ID NO: 1759102 - DNA, 15 bp, Homo sapiens
aactctatgaaatag

SEQ ID NO: 1759103 - DNA, 15 bp, Homo sapiens
actctatgaaataga

SEQ ID NO: 1759104 - DNA, 15 bp, Homo sapiens
ctctatgaaatagat

SEQ ID NO: 1759105 - DNA, 15 bp, Homo sapiens
tctatgaaatagatt

SEQ ID NO: 1759106 - DNA, 15 bp, Homo sapiens
ctatgaaatagattc

SEQ ID NO: 1759107 - DNA, 15 bp, Homo sapiens
tatgaaatagattct

SEQ ID NO: 1759108 - DNA, 15 bp, Homo sapiens
atgaaatagattctg

SEQ ID NO: 1759109 - DNA, 15 bp, Homo sapiens
tgaaatagattctgt

SEQ ID NO: 1759110 - DNA, 15 bp, Homo sapiens
gaaatagattctgtc

SEQ ID NO: 1759111 - DNA, 15 bp, Homo sapiens
aaatagattctgtca

SEQ ID NO: 1759112 - DNA, 15 bp, Homo sapiens
aatagattctgtcat

SEQ ID NO: 1759113 - DNA, 15 bp, Homo sapiens
atagattctgtcatc

SEQ ID NO: 1759114 - DNA, 15 bp, Homo sapiens
tagattctgtcatca

SEQ ID NO: 1759115 - DNA, 15 bp, Homo sapiens
agattctgtcatcac

SEQ ID NO: 1759116 - DNA, 15 bp, Homo sapiens
gattctgtcatcact

SEQ ID NO: 1759117 - DNA, 15 bp, Homo sapiens
attctgtcatcactg

SEQ ID NO: 1759118 - DNA, 15 bp, Homo sapiens
ttctgtcatcactgt

SEQ ID NO: 1759119 - DNA, 15 bp, Homo sapiens
tctgtcatcactgtt

SEQ ID NO: 1759120 - DNA, 15 bp, Homo sapiens
ctgtcatcactgttt

SEQ ID NO: 1759121 - DNA, 15 bp, Homo sapiens
tgtcatcactgtttc

SEQ ID NO: 1759122 - DNA, 15 bp, Homo sapiens
gtcatcactgtttca

SEQ ID NO: 1759123 - DNA, 15 bp, Homo sapiens
tcatcactgtttcac

SEQ ID NO: 1759124 - DNA, 15 bp, Homo sapiens
catcactgtttcaca

SEQ ID NO: 1759125 - DNA, 15 bp, Homo sapiens
atcactgtttcacag

SEQ ID NO: 1759126 - DNA, 15 bp, Homo sapiens
tcactgtttcacaga

SEQ ID NO: 1759127 - DNA, 15 bp, Homo sapiens
cactgtttcacagat

SEQ ID NO: 1759128 - DNA, 15 bp, Homo sapiens
actgtttcacagatg

SEQ ID NO: 1759129 - DNA, 15 bp, Homo sapiens
ctgtttcacagatgg

SEQ ID NO: 1759130 - DNA, 15 bp, Homo sapiens
tgtttcacagatgga

SEQ ID NO: 1759131 - DNA, 15 bp, Homo sapiens
gtttcacagatggag

SEQ ID NO: 1759132 - DNA, 15 bp, Homo sapiens
tttcacagatggaga

SEQ ID NO: 1759133 - DNA, 15 bp, Homo sapiens
ttcacagatggagaa

SEQ ID NO: 1759134 - DNA, 15 bp, Homo sapiens
tcacagatggagaaa

SEQ ID NO: 1759135 - DNA, 15 bp, Homo sapiens
cacagatggagaaac

SEQ ID NO: 1759136 - DNA, 15 bp, Homo sapiens
acagatggagaaact

SEQ ID NO: 1759137 - DNA, 15 bp, Homo sapiens
cagatggagaaactt

SEQ ID NO: 1759138 - DNA, 15 bp, Homo sapiens
agatggagaaacttt

SEQ ID NO: 1759139 - DNA, 15 bp, Homo sapiens
gatggagaaactttc

SEQ ID NO: 1759140 - DNA, 15 bp, Homo sapiens
atggagaaactttcc

SEQ ID NO: 1759141 - DNA, 15 bp, Homo sapiens
tggagaaactttcct

SEQ ID NO: 1759142 - DNA, 15 bp, Homo sapiens
ggagaaactttcctg

SEQ ID NO: 1759143 - DNA, 15 bp, Homo sapiens
gagaaactttcctgt

SEQ ID NO: 1759144 - DNA, 15 bp, Homo sapiens
agaaactttcctgtg

SEQ ID NO: 1759145 - DNA, 15 bp, Homo sapiens
gaaactttcctgtgt

SEQ ID NO: 1759146 - DNA, 15 bp, Homo sapiens
aaactttcctgtgtc

SEQ ID NO: 1759147 - DNA, 15 bp, Homo sapiens
aactttcctgtgtcc

SEQ ID NO: 1759148 - DNA, 15 bp, Homo sapiens
actttcctgtgtcca

SEQ ID NO: 1759149 - DNA, 15 bp, Homo sapiens
ctttcctgtgtccac

SEQ ID NO: 1759150 - DNA, 15 bp, Homo sapiens
tttcctgtgtccaca

SEQ ID NO: 1759151 - DNA, 15 bp, Homo sapiens
ttcctgtgtccacaa

SEQ ID NO: 1759152 - DNA, 15 bp, Homo sapiens
tcctgtgtccacaaa

SEQ ID NO: 1759153 - DNA, 15 bp, Homo sapiens
cctgtgtccacaaaa

SEQ ID NO: 1759154 - DNA, 15 bp, Homo sapiens
ctgtgtccacaaaac

SEQ ID NO: 1759155 - DNA, 15 bp, Homo sapiens
tgtgtccacaaaact

SEQ ID NO: 1759156 - DNA, 15 bp, Homo sapiens
gtgtccacaaaactg

SEQ ID NO: 1759157 - DNA, 15 bp, Homo sapiens
tgtccacaaaactgg

SEQ ID NO: 1759158 - DNA, 15 bp, Homo sapiens
gtccacaaaactggt

SEQ ID NO: 1759159 - DNA, 15 bp, Homo sapiens
tccacaaaactggtt

SEQ ID NO: 1759160 - DNA, 15 bp, Homo sapiens
ccacaaaactggttg

SEQ ID NO: 1759161 - DNA, 15 bp, Homo sapiens
cacaaaactggttgg

SEQ ID NO: 1759162 - DNA, 15 bp, Homo sapiens
acaaaactggttggt

SEQ ID NO: 1759163 - DNA, 15 bp, Homo sapiens
caaaactggttggtg

SEQ ID NO: 1759164 - DNA, 15 bp, Homo sapiens
aaaactggttggtga

SEQ ID NO: 1759165 - DNA, 15 bp, Homo sapiens
aaactggttggtgac

SEQ ID NO: 1759166 - DNA, 15 bp, Homo sapiens
aactggttggtgaca

SEQ ID NO: 1759167 - DNA, 15 bp, Homo sapiens
actggttggtgacag

SEQ ID NO: 1759168 - DNA, 15 bp, Homo sapiens
ctggttggtgacaga

SEQ ID NO: 1759169 - DNA, 15 bp, Homo sapiens
tggttggtgacagag

SEQ ID NO: 1759170 - DNA, 15 bp, Homo sapiens
ggttggtgacagagc

SEQ ID NO: 1759171 - DNA, 15 bp, Homo sapiens
gttggtgacagagcc

SEQ ID NO: 1759172 - DNA, 15 bp, Homo sapiens
ttggtgacagagcca

SEQ ID NO: 1759173 - DNA, 15 bp, Homo sapiens
tggtgacagagccag

SEQ ID NO: 1759174 - DNA, 15 bp, Homo sapiens
gtgacagagccagaa

SEQ ID NO: 1759175 - DNA, 15 bp, Homo sapiens
tgacagagccagaat

SEQ ID NO: 1759176 - DNA, 15 bp, Homo sapiens
gacagagccagaatt

SEQ ID NO: 1759177 - DNA, 15 bp, Homo sapiens
acagagccagaattt

SEQ ID NO: 1759178 - DNA, 15 bp, Homo sapiens
cagagccagaatttt

SEQ ID NO: 1759179 - DNA, 15 bp, Homo sapiens
agagccagaatttta

SEQ ID NO: 1759180 - DNA, 15 bp, Homo sapiens
gagccagaattttaa

SEQ ID NO: 1759181 - DNA, 15 bp, Homo sapiens
agccagaattttaac

SEQ ID NO: 1759182 - DNA, 15 bp, Homo sapiens
gccagaattttaact

SEQ ID NO: 1759183 - DNA, 15 bp, Homo sapiens
ccagaattttaactc

SEQ ID NO: 1759184 - DNA, 15 bp, Homo sapiens
cagaattttaactca

SEQ ID NO: 1759185 - DNA, 15 bp, Homo sapiens
agaattttaactcag

SEQ ID NO: 1759186 - DNA, 15 bp, Homo sapiens
gaattttaactcagg

SEQ ID NO: 1759187 - DNA, 15 bp, Homo sapiens
aattttaactcaggc

SEQ ID NO: 1759188 - DNA, 15 bp, Homo sapiens
attttaactcaggct

SEQ ID NO: 1759189 - DNA, 15 bp, Homo sapiens
ttttaactcaggcta

SEQ ID NO: 1759190 - DNA, 15 bp, Homo sapiens
tttaactcaggctat

SEQ ID NO: 1759191 - DNA, 15 bp, Homo sapiens
ttaactcaggctatc

SEQ ID NO: 1759192 - DNA, 15 bp, Homo sapiens
taactcaggctatct

SEQ ID NO: 1759193 - DNA, 15 bp, Homo sapiens
aactcaggctatctg

SEQ ID NO: 1759194 - DNA, 15 bp, Homo sapiens
actcaggctatctgg

SEQ ID NO: 1759195 - DNA, 15 bp, Homo sapiens
ctcaggctatctggt

SEQ ID NO: 1759196 - DNA, 15 bp, Homo sapiens
tcaggctatctggtt

SEQ ID NO: 1759197 - DNA, 15 bp, Homo sapiens
caggctatctggttc

SEQ ID NO: 1759198 - DNA, 15 bp, Homo sapiens
aggctatctggttcc

SEQ ID NO: 1759199 - DNA, 15 bp, Homo sapiens
ggctatctggttcca

SEQ ID NO: 1759200 - DNA, 15 bp, Homo sapiens
gctatctggttccag

SEQ ID NO: 1759201 - DNA, 15 bp, Homo sapiens
ctatctggttccaga

SEQ ID NO: 1759202 - DNA, 15 bp, Homo sapiens
tatctggttccagag

SEQ ID NO: 1759203 - DNA, 15 bp, Homo sapiens
atctggttccagaga

SEQ ID NO: 1759204 - DNA, 15 bp, Homo sapiens
tctggttccagagac

SEQ ID NO: 1759205 - DNA, 15 bp, Homo sapiens
ctggttccagagact

SEQ ID NO: 1759206 - DNA, 15 bp, Homo sapiens
tggttccagagacta

SEQ ID NO: 1759207 - DNA, 15 bp, Homo sapiens
ggttccagagactat

SEQ ID NO: 1759208 - DNA, 15 bp, Homo sapiens
gttccagagactata

SEQ ID NO: 1759209 - DNA, 15 bp, Homo sapiens
ttccagagactatac

SEQ ID NO: 1759210 - DNA, 15 bp, Homo sapiens
tccagagactatact

SEQ ID NO: 1759211 - DNA, 15 bp, Homo sapiens
ccagagactatactt

SEQ ID NO: 1759212 - DNA, 15 bp, Homo sapiens
cagagactatacttt

SEQ ID NO: 1759213 - DNA, 15 bp, Homo sapiens
agagactatactttt

SEQ ID NO: 1759214 - DNA, 15 bp, Homo sapiens
gagactatactttta

SEQ ID NO: 1759215 - DNA, 15 bp, Homo sapiens
agactatacttttag

SEQ ID NO: 1759216 - DNA, 15 bp, Homo sapiens
gactatacttttagc

SEQ ID NO: 1759217 - DNA, 15 bp, Homo sapiens
actatacttttagcc

SEQ ID NO: 1759218 - DNA, 15 bp, Homo sapiens
ctatacttttagcct

SEQ ID NO: 1759219 - DNA, 15 bp, Homo sapiens
tatacttttagcctc

SEQ ID NO: 1759220 - DNA, 15 bp, Homo sapiens
atacttttagcctct

SEQ ID NO: 1759221 - DNA, 15 bp, Homo sapiens
tacttttagcctcta

SEQ ID NO: 1759222 - DNA, 15 bp, Homo sapiens
acttttagcctctat

SEQ ID NO: 1759223 - DNA, 15 bp, Homo sapiens
cttttagcctctatg

SEQ ID NO: 1759224 - DNA, 15 bp, Homo sapiens
ttttagcctctatgt

SEQ ID NO: 1759225 - DNA, 15 bp, Homo sapiens
tttagcctctatgtt

SEQ ID NO: 1759226 - DNA, 15 bp, Homo sapiens
ttagcctctatgttg

SEQ ID NO: 1759227 - DNA, 15 bp, Homo sapiens
tagcctctatgttgc

SEQ ID NO: 1759228 - DNA, 15 bp, Homo sapiens
agcctctatgttgcc

SEQ ID NO: 1759229 - DNA, 15 bp, Homo sapiens
gcctctatgttgcct

SEQ ID NO: 1759230 - DNA, 15 bp, Homo sapiens
cctctatgttgcctt

SEQ ID NO: 1759231 - DNA, 15 bp, Homo sapiens
ctctatgttgccttt

SEQ ID NO: 1759232 - DNA, 15 bp, Homo sapiens
tctatgttgcctttt

SEQ ID NO: 1759233 - DNA, 15 bp, Homo sapiens
ctatgttgcctttta

SEQ ID NO: 1759234 - DNA, 15 bp, Homo sapiens
tatgttgccttttag

SEQ ID NO: 1759235 - DNA, 15 bp, Homo sapiens
atgttgccttttagt

SEQ ID NO: 1759236 - DNA, 15 bp, Homo sapiens
tgttgccttttagtg

SEQ ID NO: 1759237 - DNA, 15 bp, Homo sapiens
gttgccttttagtgt

SEQ ID NO: 1759238 - DNA, 15 bp, Homo sapiens
ttgccttttagtgta

SEQ ID NO: 1759239 - DNA, 15 bp, Homo sapiens
tgccttttagtgtat

SEQ ID NO: 1759240 - DNA, 15 bp, Homo sapiens
gccttttagtgtata

SEQ ID NO: 1759241 - DNA, 15 bp, Homo sapiens
ccttttagtgtatat

SEQ ID NO: 1759242 - DNA, 15 bp, Homo sapiens
cttttagtgtatatt

SEQ ID NO: 1759243 - DNA, 15 bp, Homo sapiens
ttttagtgtatatta

SEQ ID NO: 1759244 - DNA, 15 bp, Homo sapiens
tttagtgtatattag

SEQ ID NO: 1759245 - DNA, 15 bp, Homo sapiens
ttagtgtatattagt

SEQ ID NO: 1759246 - DNA, 15 bp, Homo sapiens
tagtgtatattagtt

SEQ ID NO: 1759247 - DNA, 15 bp, Homo sapiens
agtgtatattagttt

SEQ ID NO: 1759248 - DNA, 15 bp, Homo sapiens
gtgtatattagttta

SEQ ID NO: 1759249 - DNA, 15 bp, Homo sapiens
tgtatattagtttac

SEQ ID NO: 1759250 - DNA, 15 bp, Homo sapiens
gtatattagtttact

SEQ ID NO: 1759251 - DNA, 15 bp, Homo sapiens
tatattagtttactg

SEQ ID NO: 1759252 - DNA, 15 bp, Homo sapiens
atattagtttactgt

SEQ ID NO: 1759253 - DNA, 15 bp, Homo sapiens
tattagtttactgtt

SEQ ID NO: 1759254 - DNA, 15 bp, Homo sapiens
attagtttactgttt

SEQ ID NO: 1759255 - DNA, 15 bp, Homo sapiens
ttagtttactgtttg

SEQ ID NO: 1759256 - DNA, 15 bp, Homo sapiens
tagtttactgtttgg

SEQ ID NO: 1759257 - DNA, 15 bp, Homo sapiens
agtttactgtttggt

SEQ ID NO: 1759258 - DNA, 15 bp, Homo sapiens
gtttactgtttggta

SEQ ID NO: 1759259 - DNA, 15 bp, Homo sapiens
tttactgtttggtat

SEQ ID NO: 1759260 - DNA, 15 bp, Homo sapiens
ttactgtttggtatg

SEQ ID NO: 1759261 - DNA, 15 bp, Homo sapiens
tactgtttggtatgt

SEQ ID NO: 1759262 - DNA, 15 bp, Homo sapiens
actgtttggtatgtg

SEQ ID NO: 1759263 - DNA, 15 bp, Homo sapiens
ctgtttggtatgtgc

SEQ ID NO: 1759264 - DNA, 15 bp, Homo sapiens
tgtttggtatgtgca

SEQ ID NO: 1759265 - DNA, 15 bp, Homo sapiens
gtttggtatgtgcat

SEQ ID NO: 1759266 - DNA, 15 bp, Homo sapiens
tttggtatgtgcatt

SEQ ID NO: 1759267 - DNA, 15 bp, Homo sapiens
ttggtatgtgcattg

SEQ ID NO: 1759268 - DNA, 15 bp, Homo sapiens
tggtatgtgcattgt

SEQ ID NO: 1759269 - DNA, 15 bp, Homo sapiens
ggtatgtgcattgtc

SEQ ID NO: 1759270 - DNA, 15 bp, Homo sapiens
gtatgtgcattgtca

SEQ ID NO: 1759271 - DNA, 15 bp, Homo sapiens
tatgtgcattgtcat

SEQ ID NO: 1759272 - DNA, 15 bp, Homo sapiens
atgtgcattgtcatg

SEQ ID NO: 1759273 - DNA, 15 bp, Homo sapiens
tgtgcattgtcatga

SEQ ID NO: 1759274 - DNA, 15 bp, Homo sapiens
gtgcattgtcatgat

SEQ ID NO: 1759275 - DNA, 15 bp, Homo sapiens
tgcattgtcatgatt

SEQ ID NO: 1759276 - DNA, 15 bp, Homo sapiens
gcattgtcatgattc

SEQ ID NO: 1759277 - DNA, 15 bp, Homo sapiens
cattgtcatgattcg

SEQ ID NO: 1759278 - DNA, 15 bp, Homo sapiens
attgtcatgattcgt

SEQ ID NO: 1759279 - DNA, 15 bp, Homo sapiens
ttgtcatgattcgtt

SEQ ID NO: 1759280 - DNA, 15 bp, Homo sapiens
tgtcatgattcgttt

SEQ ID NO: 1759281 - DNA, 15 bp, Homo sapiens
gtcatgattcgttta

SEQ ID NO: 1759282 - DNA, 15 bp, Homo sapiens
tcatgattcgtttat

SEQ ID NO: 1759283 - DNA, 15 bp, Homo sapiens
catgattcgtttatt

SEQ ID NO: 1759284 - DNA, 15 bp, Homo sapiens
atgattcgtttattt

SEQ ID NO: 1759285 - DNA, 15 bp, Homo sapiens
tgattcgtttatttg

SEQ ID NO: 1759286 - DNA, 15 bp, Homo sapiens
gattcgtttatttgc

SEQ ID NO: 1759287 - DNA, 15 bp, Homo sapiens
attcgtttatttgct

SEQ ID NO: 1759288 - DNA, 15 bp, Homo sapiens
ttcgtttatttgctc

SEQ ID NO: 1759289 - DNA, 15 bp, Homo sapiens
tcgtttatttgctca

SEQ ID NO: 1759290 - DNA, 15 bp, Homo sapiens
cgtttatttgctcat

SEQ ID NO: 1759291 - DNA, 15 bp, Homo sapiens
gtttatttgctcatg

SEQ ID NO: 1759292 - DNA, 15 bp, Homo sapiens
tttatttgctcatgt

SEQ ID NO: 1759293 - DNA, 15 bp, Homo sapiens
ttatttgctcatgtt

SEQ ID NO: 1759294 - DNA, 15 bp, Homo sapiens
tatttgctcatgttt

SEQ ID NO: 1759295 - DNA, 15 bp, Homo sapiens
atttgctcatgtttt

SEQ ID NO: 1759296 - DNA, 15 bp, Homo sapiens
tttgctcatgtttta

SEQ ID NO: 1759297 - DNA, 15 bp, Homo sapiens
ttgctcatgttttat

SEQ ID NO: 1759298 - DNA, 15 bp, Homo sapiens
tgctcatgttttatc

SEQ ID NO: 1759299 - DNA, 15 bp, Homo sapiens
gctcatgttttatct

SEQ ID NO: 1759300 - DNA, 15 bp, Homo sapiens
ctcatgttttatctg

SEQ ID NO: 1759301 - DNA, 15 bp, Homo sapiens
tcatgttttatctgt

SEQ ID NO: 1759302 - DNA, 15 bp, Homo sapiens
catgttttatctgtg

SEQ ID NO: 1759303 - DNA, 15 bp, Homo sapiens
atgttttatctgtgt

SEQ ID NO: 1759304 - DNA, 15 bp, Homo sapiens
tgttttatctgtgtt

SEQ ID NO: 1759305 - DNA, 15 bp, Homo sapiens
gttttatctgtgttt

SEQ ID NO: 1759306 - DNA, 15 bp, Homo sapiens
ttttatctgtgtttg

SEQ ID NO: 1759307 - DNA, 15 bp, Homo sapiens
tttatctgtgtttgt

SEQ ID NO: 1759308 - DNA, 15 bp, Homo sapiens
ttatctgtgtttgta

SEQ ID NO: 1759309 - DNA, 15 bp, Homo sapiens
tatctgtgtttgtat

SEQ ID NO: 1759310 - DNA, 15 bp, Homo sapiens
atctgtgtttgtatt

SEQ ID NO: 1759311 - DNA, 15 bp, Homo sapiens
tctgtgtttgtattt

SEQ ID NO: 1759312 - DNA, 15 bp, Homo sapiens
ctgtgtttgtatttt

SEQ ID NO: 1759313 - DNA, 15 bp, Homo sapiens
tgtgtttgtattttt

SEQ ID NO: 1759314 - DNA, 15 bp, Homo sapiens
gtgtttgtatttttg

SEQ ID NO: 1759315 - DNA, 15 bp, Homo sapiens
tgtttgtatttttgt

SEQ ID NO: 1759316 - DNA, 15 bp, Homo sapiens
gtttgtatttttgtg

SEQ ID NO: 1759317 - DNA, 15 bp, Homo sapiens
tttgtatttttgtgt

SEQ ID NO: 1759318 - DNA, 15 bp, Homo sapiens
ttgtatttttgtgtt

SEQ ID NO: 1759319 - DNA, 15 bp, Homo sapiens
tgtatttttgtgttt

SEQ ID NO: 1759320 - DNA, 15 bp, Homo sapiens
gtatttttgtgtttg

SEQ ID NO: 1759321 - DNA, 15 bp, Homo sapiens
tatttttgtgtttgt

SEQ ID NO: 1759322 - DNA, 15 bp, Homo sapiens
atttttgtgtttgtg

SEQ ID NO: 1759323 - DNA, 15 bp, Homo sapiens
tttttgtgtttgtga

SEQ ID NO: 1759324 - DNA, 15 bp, Homo sapiens
ttttgtgtttgtgag

SEQ ID NO: 1759325 - DNA, 15 bp, Homo sapiens
tttgtgtttgtgagt

SEQ ID NO: 1759326 - DNA, 15 bp, Homo sapiens
ttgtgtttgtgagtg

SEQ ID NO: 1759327 - DNA, 15 bp, Homo sapiens
tgtgtttgtgagtgt

SEQ ID NO: 1759328 - DNA, 15 bp, Homo sapiens
gtgtttgtgagtgtt

SEQ ID NO: 1759329 - DNA, 15 bp, Homo sapiens
tgtttgtgagtgtta

SEQ ID NO: 1759330 - DNA, 15 bp, Homo sapiens
gtttgtgagtgttac

SEQ ID NO: 1759331 - DNA, 15 bp, Homo sapiens
tttgtgagtgttact

SEQ ID NO: 1759332 - DNA, 15 bp, Homo sapiens
ttgtgagtgttacta

SEQ ID NO: 1759333 - DNA, 15 bp, Homo sapiens
tgtgagtgttactat

SEQ ID NO: 1759334 - DNA, 15 bp, Homo sapiens
gtgagtgttactatg

SEQ ID NO: 1759335 - DNA, 15 bp, Homo sapiens
tgagtgttactatgc

SEQ ID NO: 1759336 - DNA, 15 bp, Homo sapiens
gagtgttactatgct

SEQ ID NO: 1759337 - DNA, 15 bp, Homo sapiens
agtgttactatgcta

SEQ ID NO: 1759338 - DNA, 15 bp, Homo sapiens
gtgttactatgctat

SEQ ID NO: 1759339 - DNA, 15 bp, Homo sapiens
tgttactatgctatg

SEQ ID NO: 1759340 - DNA, 15 bp, Homo sapiens
gttactatgctatgg

SEQ ID NO: 1759341 - DNA, 15 bp, Homo sapiens
ttactatgctatggc

SEQ ID NO: 1759342 - DNA, 15 bp, Homo sapiens
tactatgctatggca

SEQ ID NO: 1759343 - DNA, 15 bp, Homo sapiens
actatgctatggcaa

SEQ ID NO: 1759344 - DNA, 15 bp, Homo sapiens
ctatgctatggcaaa

SEQ ID NO: 1759345 - DNA, 15 bp, Homo sapiens
tatgctatggcaaaa

SEQ ID NO: 1759346 - DNA, 15 bp, Homo sapiens
atgctatggcaaaaa

SEQ ID NO: 1759347 - DNA, 15 bp, Homo sapiens
tgctatggcaaaaag

SEQ ID NO: 1759348 - DNA, 15 bp, Homo sapiens
gctatggcaaaaagg

SEQ ID NO: 1759349 - DNA, 15 bp, Homo sapiens
ctatggcaaaaaggg

SEQ ID NO: 1759350 - DNA, 15 bp, Homo sapiens
tatggcaaaaagggc

SEQ ID NO: 1759351 - DNA, 15 bp, Homo sapiens
atggcaaaaagggcc

SEQ ID NO: 1759352 - DNA, 15 bp, Homo sapiens
tggcaaaaagggcct

SEQ ID NO: 1759353 - DNA, 15 bp, Homo sapiens
ggcaaaaagggccta

SEQ ID NO: 1759354 - DNA, 15 bp, Homo sapiens
gcaaaaagggcctag

SEQ ID NO: 1759355 - DNA, 15 bp, Homo sapiens
caaaaagggcctaga

SEQ ID NO: 1759356 - DNA, 15 bp, Homo sapiens
aaaaagggcctagac

SEQ ID NO: 1759357 - DNA, 15 bp, Homo sapiens
aaaagggcctagact

SEQ ID NO: 1759358 - DNA, 15 bp, Homo sapiens
aaagggcctagactt

SEQ ID NO: 1759359 - DNA, 15 bp, Homo sapiens
aagggcctagacttt

SEQ ID NO: 1759360 - DNA, 15 bp, Homo sapiens
agggcctagactttg

SEQ ID NO: 1759361 - DNA, 15 bp, Homo sapiens
gggcctagactttga

SEQ ID NO: 1759362 - DNA, 15 bp, Homo sapiens
ggcctagactttgaa

SEQ ID NO: 1759363 - DNA, 15 bp, Homo sapiens
gcctagactttgaat

SEQ ID NO: 1759364 - DNA, 15 bp, Homo sapiens
cctagactttgaatt

SEQ ID NO: 1759365 - DNA, 15 bp, Homo sapiens
ctagactttgaatta

SEQ ID NO: 1759366 - DNA, 15 bp, Homo sapiens
tagactttgaattag

SEQ ID NO: 1759367 - DNA, 15 bp, Homo sapiens
agactttgaattagc

SEQ ID NO: 1759368 - DNA, 15 bp, Homo sapiens
gactttgaattagcg

SEQ ID NO: 1759369 - DNA, 15 bp, Homo sapiens
actttgaattagcgg

SEQ ID NO: 1759370 - DNA, 15 bp, Homo sapiens
ctttgaattagcgga

SEQ ID NO: 1759371 - DNA, 15 bp, Homo sapiens
tttgaattagcggat

SEQ ID NO: 1759372 - DNA, 15 bp, Homo sapiens
ttgaattagcggatc

SEQ ID NO: 1759373 - DNA, 15 bp, Homo sapiens
tgaattagcggatct

SEQ ID NO: 1759374 - DNA, 15 bp, Homo sapiens
gaattagcggatctt

SEQ ID NO: 1759375 - DNA, 15 bp, Homo sapiens
aattagcggatctta

SEQ ID NO: 1759376 - DNA, 15 bp, Homo sapiens
attagcggatcttac

SEQ ID NO: 1759377 - DNA, 15 bp, Homo sapiens
ttagcggatcttact

SEQ ID NO: 1759378 - DNA, 15 bp, Homo sapiens
tagcggatcttactt

SEQ ID NO: 1759379 - DNA, 15 bp, Homo sapiens
agcggatcttactta

SEQ ID NO: 1759380 - DNA, 15 bp, Homo sapiens
gcggatcttacttaa

SEQ ID NO: 1759381 - DNA, 15 bp, Homo sapiens
cggatcttacttaat

SEQ ID NO: 1759382 - DNA, 15 bp, Homo sapiens
ggatcttacttaata

SEQ ID NO: 1759383 - DNA, 15 bp, Homo sapiens
gatcttacttaatat

SEQ ID NO: 1759384 - DNA, 15 bp, Homo sapiens
atcttacttaatatt

SEQ ID NO: 1759385 - DNA, 15 bp, Homo sapiens
tcttacttaatattc

SEQ ID NO: 1759386 - DNA, 15 bp, Homo sapiens
cttacttaatattca

SEQ ID NO: 1759387 - DNA, 15 bp, Homo sapiens
ttacttaatattcac

SEQ ID NO: 1759388 - DNA, 15 bp, Homo sapiens
tacttaatattcaca

SEQ ID NO: 1759389 - DNA, 15 bp, Homo sapiens
acttaatattcacag

SEQ ID NO: 1759390 - DNA, 15 bp, Homo sapiens
cttaatattcacaga

SEQ ID NO: 1759391 - DNA, 15 bp, Homo sapiens
ttaatattcacagaa

SEQ ID NO: 1759392 - DNA, 15 bp, Homo sapiens
taatattcacagaag

SEQ ID NO: 1759393 - DNA, 15 bp, Homo sapiens
aatattcacagaagc

SEQ ID NO: 1759394 - DNA, 15 bp, Homo sapiens
atattcacagaagcc

SEQ ID NO: 1759395 - DNA, 15 bp, Homo sapiens
tattcacagaagcct

SEQ ID NO: 1759396 - DNA, 15 bp, Homo sapiens
attcacagaagcctg

SEQ ID NO: 1759397 - DNA, 15 bp, Homo sapiens
ttcacagaagcctgg

SEQ ID NO: 1759398 - DNA, 15 bp, Homo sapiens
tcacagaagcctgga

SEQ ID NO: 1759399 - DNA, 15 bp, Homo sapiens
cacagaagcctggaa

SEQ ID NO: 1759400 - DNA, 15 bp, Homo sapiens
acagaagcctggaag

SEQ ID NO: 1759401 - DNA, 15 bp, Homo sapiens
cagaagcctggaagt

SEQ ID NO: 1759402 - DNA, 15 bp, Homo sapiens
agaagcctggaagtg

SEQ ID NO: 1759403 - DNA, 15 bp, Homo sapiens
gaagcctggaagtgt

SEQ ID NO: 1759404 - DNA, 15 bp, Homo sapiens
aagcctggaagtgta

SEQ ID NO: 1759405 - DNA, 15 bp, Homo sapiens
agcctggaagtgtaa

SEQ ID NO: 1759406 - DNA, 15 bp, Homo sapiens
gcctggaagtgtaaa

SEQ ID NO: 1759407 - DNA, 15 bp, Homo sapiens
cctggaagtgtaaac

SEQ ID NO: 1759408 - DNA, 15 bp, Homo sapiens
ctggaagtgtaaaca

SEQ ID NO: 1759409 - DNA, 15 bp, Homo sapiens
tggaagtgtaaacac

SEQ ID NO: 1759410 - DNA, 15 bp, Homo sapiens
ggaagtgtaaacact

SEQ ID NO: 1759411 - DNA, 15 bp, Homo sapiens
gaagtgtaaacactg

SEQ ID NO: 1759412 - DNA, 15 bp, Homo sapiens
aagtgtaaacactgc

SEQ ID NO: 1759413 - DNA, 15 bp, Homo sapiens
agtgtaaacactgct

SEQ ID NO: 1759414 - DNA, 15 bp, Homo sapiens
gtgtaaacactgcta

SEQ ID NO: 1759415 - DNA, 15 bp, Homo sapiens
tgtaaacactgctat

SEQ ID NO: 1759416 - DNA, 15 bp, Homo sapiens
gtaaacactgctatc

SEQ ID NO: 1759417 - DNA, 15 bp, Homo sapiens
taaacactgctatcc

SEQ ID NO: 1759418 - DNA, 15 bp, Homo sapiens
aaacactgctatccc

SEQ ID NO: 1759419 - DNA, 15 bp, Homo sapiens
aacactgctatccct

SEQ ID NO: 1759420 - DNA, 15 bp, Homo sapiens
acactgctatcccta

SEQ ID NO: 1759421 - DNA, 15 bp, Homo sapiens
cactgctatccctat

SEQ ID NO: 1759422 - DNA, 15 bp, Homo sapiens
actgctatccctatt

SEQ ID NO: 1759423 - DNA, 15 bp, Homo sapiens
ctgctatccctattt

SEQ ID NO: 1759424 - DNA, 15 bp, Homo sapiens
tgctatccctatttt

SEQ ID NO: 1759425 - DNA, 15 bp, Homo sapiens
gctatccctatttta

SEQ ID NO: 1759426 - DNA, 15 bp, Homo sapiens
ctatccctattttat

SEQ ID NO: 1759427 - DNA, 15 bp, Homo sapiens
tatccctattttata

SEQ ID NO: 1759428 - DNA, 15 bp, Homo sapiens
atccctattttatag

SEQ ID NO: 1759429 - DNA, 15 bp, Homo sapiens
tccctattttataga

SEQ ID NO: 1759430 - DNA, 15 bp, Homo sapiens
ccctattttatagat

SEQ ID NO: 1759431 - DNA, 15 bp, Homo sapiens
cctattttatagata

SEQ ID NO: 1759432 - DNA, 15 bp, Homo sapiens
ctattttatagataa

SEQ ID NO: 1759433 - DNA, 15 bp, Homo sapiens
tattttatagataaa

SEQ ID NO: 1759434 - DNA, 15 bp, Homo sapiens
attttatagataaag

SEQ ID NO: 1759435 - DNA, 15 bp, Homo sapiens
ttttatagataaaga

SEQ ID NO: 1759436 - DNA, 15 bp, Homo sapiens
tttatagataaagag

SEQ ID NO: 1759437 - DNA, 15 bp, Homo sapiens
ttatagataaagaga

SEQ ID NO: 1759438 - DNA, 15 bp, Homo sapiens
tatagataaagagac

SEQ ID NO: 1759439 - DNA, 15 bp, Homo sapiens
atagataaagagacc

SEQ ID NO: 1759440 - DNA, 15 bp, Homo sapiens
tagataaagagacct

SEQ ID NO: 1759441 - DNA, 15 bp, Homo sapiens
agataaagagacctg

SEQ ID NO: 1759442 - DNA, 15 bp, Homo sapiens
gataaagagacctga

SEQ ID NO: 1759443 - DNA, 15 bp, Homo sapiens
ataaagagacctgag

SEQ ID NO: 1759444 - DNA, 15 bp, Homo sapiens
taaagagacctgagg

SEQ ID NO: 1759445 - DNA, 15 bp, Homo sapiens
aaagagacctgaggt

SEQ ID NO: 1759446 - DNA, 15 bp, Homo sapiens
aagagacctgaggtc

SEQ ID NO: 1759447 - DNA, 15 bp, Homo sapiens
agagacctgaggtcc

SEQ ID NO: 1759448 - DNA, 15 bp, Homo sapiens
gagacctgaggtcca

SEQ ID NO: 1759449 - DNA, 15 bp, Homo sapiens
agacctgaggtccag

SEQ ID NO: 1759450 - DNA, 15 bp, Homo sapiens
gacctgaggtccaga

SEQ ID NO: 1759451 - DNA, 15 bp, Homo sapiens
acctgaggtccagag

SEQ ID NO: 1759452 - DNA, 15 bp, Homo sapiens
cctgaggtccagaga

SEQ ID NO: 1759453 - DNA, 15 bp, Homo sapiens
ctgaggtccagagat

SEQ ID NO: 1759454 - DNA, 15 bp, Homo sapiens
tgaggtccagagatg

SEQ ID NO: 1759455 - DNA, 15 bp, Homo sapiens
gaggtccagagatgt

SEQ ID NO: 1759456 - DNA, 15 bp, Homo sapiens
aggtccagagatgtc

SEQ ID NO: 1759457 - DNA, 15 bp, Homo sapiens
ggtccagagatgtca

SEQ ID NO: 1759458 - DNA, 15 bp, Homo sapiens
gtccagagatgtcat

SEQ ID NO: 1759459 - DNA, 15 bp, Homo sapiens
tccagagatgtcatg

SEQ ID NO: 1759460 - DNA, 15 bp, Homo sapiens
ccagagatgtcatgt

SEQ ID NO: 1759461 - DNA, 15 bp, Homo sapiens
cagagatgtcatgta

SEQ ID NO: 1759462 - DNA, 15 bp, Homo sapiens
agagatgtcatgtaa

SEQ ID NO: 1759463 - DNA, 15 bp, Homo sapiens
gagatgtcatgtaac

SEQ ID NO: 1759464 - DNA, 15 bp, Homo sapiens
agatgtcatgtaact

SEQ ID NO: 1759465 - DNA, 15 bp, Homo sapiens
gatgtcatgtaactt

SEQ ID NO: 1759466 - DNA, 15 bp, Homo sapiens
atgtcatgtaacttg

SEQ ID NO: 1759467 - DNA, 15 bp, Homo sapiens
tgtcatgtaacttgc

SEQ ID NO: 1759468 - DNA, 15 bp, Homo sapiens
gtcatgtaacttgct

SEQ ID NO: 1759469 - DNA, 15 bp, Homo sapiens
tcatgtaacttgctt

SEQ ID NO: 1759470 - DNA, 15 bp, Homo sapiens
catgtaacttgcttt

SEQ ID NO: 1759471 - DNA, 15 bp, Homo sapiens
atgtaacttgctttg

SEQ ID NO: 1759472 - DNA, 15 bp, Homo sapiens
tgtaacttgctttgg

SEQ ID NO: 1759473 - DNA, 15 bp, Homo sapiens
gtaacttgctttggt

SEQ ID NO: 1759474 - DNA, 15 bp, Homo sapiens
taacttgctttggtg

SEQ ID NO: 1759475 - DNA, 15 bp, Homo sapiens
aacttgctttggtgt

SEQ ID NO: 1759476 - DNA, 15 bp, Homo sapiens
acttgctttggtgtg

SEQ ID NO: 1759477 - DNA, 15 bp, Homo sapiens
cttgctttggtgtgg

SEQ ID NO: 1759478 - DNA, 15 bp, Homo sapiens
ttgctttggtgtggt

SEQ ID NO: 1759479 - DNA, 15 bp, Homo sapiens
tgctttggtgtggtt

SEQ ID NO: 1759480 - DNA, 15 bp, Homo sapiens
gctttggtgtggttc

SEQ ID NO: 1759481 - DNA, 15 bp, Homo sapiens
ctttggtgtggttct

SEQ ID NO: 1759482 - DNA, 15 bp, Homo sapiens
tttggtgtggttctg

SEQ ID NO: 1759483 - DNA, 15 bp, Homo sapiens
ttggtgtggttctga

SEQ ID NO: 1759484 - DNA, 15 bp, Homo sapiens
tggtgtggttctgaa

SEQ ID NO: 1759485 - DNA, 15 bp, Homo sapiens
ggtgtggttctgaac

SEQ ID NO: 1759486 - DNA, 15 bp, Homo sapiens
gtgtggttctgaaca

SEQ ID NO: 1759487 - DNA, 15 bp, Homo sapiens
tgtggttctgaacaa

SEQ ID NO: 1759488 - DNA, 15 bp, Homo sapiens
gtggttctgaacaaa

SEQ ID NO: 1759489 - DNA, 15 bp, Homo sapiens
tggttctgaacaaat

SEQ ID NO: 1759490 - DNA, 15 bp, Homo sapiens
ggttctgaacaaatt

SEQ ID NO: 1759491 - DNA, 15 bp, Homo sapiens
gttctgaacaaatta

SEQ ID NO: 1759492 - DNA, 15 bp, Homo sapiens
ttctgaacaaattat

SEQ ID NO: 1759493 - DNA, 15 bp, Homo sapiens
tctgaacaaattatg

SEQ ID NO: 1759494 - DNA, 15 bp, Homo sapiens
ctgaacaaattatgt

SEQ ID NO: 1759495 - DNA, 15 bp, Homo sapiens
tgaacaaattatgtc

SEQ ID NO: 1759496 - DNA, 15 bp, Homo sapiens
gaacaaattatgtct

SEQ ID NO: 1759497 - DNA, 15 bp, Homo sapiens
aacaaattatgtctc

SEQ ID NO: 1759498 - DNA, 15 bp, Homo sapiens
acaaattatgtctct

SEQ ID NO: 1759499 - DNA, 15 bp, Homo sapiens
caaattatgtctctg

SEQ ID NO: 1759500 - DNA, 15 bp, Homo sapiens
aaattatgtctctgt

SEQ ID NO: 1759501 - DNA, 15 bp, Homo sapiens
aattatgtctctgta

SEQ ID NO: 1759502 - DNA, 15 bp, Homo sapiens
attatgtctctgtat

SEQ ID NO: 1759503 - DNA, 15 bp, Homo sapiens
ttatgtctctgtatc

SEQ ID NO: 1759504 - DNA, 15 bp, Homo sapiens
tatgtctctgtatct

SEQ ID NO: 1759505 - DNA, 15 bp, Homo sapiens
atgtctctgtatctc

SEQ ID NO: 1759506 - DNA, 15 bp, Homo sapiens
tgtctctgtatctca

SEQ ID NO: 1759507 - DNA, 15 bp, Homo sapiens
gtctctgtatctcag

SEQ ID NO: 1759508 - DNA, 15 bp, Homo sapiens
tctctgtatctcagg

SEQ ID NO: 1759509 - DNA, 15 bp, Homo sapiens
ctctgtatctcaggt

SEQ ID NO: 1759510 - DNA, 15 bp, Homo sapiens
tctgtatctcaggtt

SEQ ID NO: 1759511 - DNA, 15 bp, Homo sapiens
ctgtatctcaggttt

SEQ ID NO: 1759512 - DNA, 15 bp, Homo sapiens
tgtatctcaggtttc

SEQ ID NO: 1759513 - DNA, 15 bp, Homo sapiens
gtatctcaggtttcc

SEQ ID NO: 1759514 - DNA, 15 bp, Homo sapiens
tatctcaggtttcct

SEQ ID NO: 1759515 - DNA, 15 bp, Homo sapiens
atctcaggtttcctt

SEQ ID NO: 1759516 - DNA, 15 bp, Homo sapiens
tctcaggtttccttg

SEQ ID NO: 1759517 - DNA, 15 bp, Homo sapiens
ctcaggtttccttgt

SEQ ID NO: 1759518 - DNA, 15 bp, Homo sapiens
tcaggtttccttgta

SEQ ID NO: 1759519 - DNA, 15 bp, Homo sapiens
caggtttccttgtat

SEQ ID NO: 1759520 - DNA, 15 bp, Homo sapiens
aggtttccttgtatg

SEQ ID NO: 1759521 - DNA, 15 bp, Homo sapiens
ggtttccttgtatgt

SEQ ID NO: 1759522 - DNA, 15 bp, Homo sapiens
gtttccttgtatgta

SEQ ID NO: 1759523 - DNA, 15 bp, Homo sapiens
tttccttgtatgtaa

SEQ ID NO: 1759524 - DNA, 15 bp, Homo sapiens
ttccttgtatgtaaa

SEQ ID NO: 1759525 - DNA, 15 bp, Homo sapiens
tccttgtatgtaaaa

SEQ ID NO: 1759526 - DNA, 15 bp, Homo sapiens
ccttgtatgtaaaat

SEQ ID NO: 1759527 - DNA, 15 bp, Homo sapiens
cttgtatgtaaaata

SEQ ID NO: 1759528 - DNA, 15 bp, Homo sapiens
ttgtatgtaaaatag

SEQ ID NO: 1759529 - DNA, 15 bp, Homo sapiens
tgtatgtaaaatagg

SEQ ID NO: 1759530 - DNA, 15 bp, Homo sapiens
gtatgtaaaataggg

SEQ ID NO: 1759531 - DNA, 15 bp, Homo sapiens
tatgtaaaataggga

SEQ ID NO: 1759532 - DNA, 15 bp, Homo sapiens
atgtaaaatagggat

SEQ ID NO: 1759533 - DNA, 15 bp, Homo sapiens
tgtaaaatagggata

SEQ ID NO: 1759534 - DNA, 15 bp, Homo sapiens
gtaaaatagggataa

SEQ ID NO: 1759535 - DNA, 15 bp, Homo sapiens
taaaatagggataac

SEQ ID NO: 1759536 - DNA, 15 bp, Homo sapiens
aaaatagggataact

SEQ ID NO: 1759537 - DNA, 15 bp, Homo sapiens
aaatagggataactt

SEQ ID NO: 1759538 - DNA, 15 bp, Homo sapiens
aatagggataacttt

SEQ ID NO: 1759539 - DNA, 15 bp, Homo sapiens
atagggataactttc

SEQ ID NO: 1759540 - DNA, 15 bp, Homo sapiens
tagggataactttca

SEQ ID NO: 1759541 - DNA, 15 bp, Homo sapiens
agggataactttcag

SEQ ID NO: 1759542 - DNA, 15 bp, Homo sapiens
gggataactttcagt

SEQ ID NO: 1759543 - DNA, 15 bp, Homo sapiens
ggataactttcagtt

SEQ ID NO: 1759544 - DNA, 15 bp, Homo sapiens
gataactttcagttg

SEQ ID NO: 1759545 - DNA, 15 bp, Homo sapiens
ataactttcagttgt

SEQ ID NO: 1759546 - DNA, 15 bp, Homo sapiens
taactttcagttgtt

SEQ ID NO: 1759547 - DNA, 15 bp, Homo sapiens
aactttcagttgttg

SEQ ID NO: 1759548 - DNA, 15 bp, Homo sapiens
actttcagttgttgt

SEQ ID NO: 1759549 - DNA, 15 bp, Homo sapiens
ctttcagttgttgtg

SEQ ID NO: 1759550 - DNA, 15 bp, Homo sapiens
tttcagttgttgtga

SEQ ID NO: 1759551 - DNA, 15 bp, Homo sapiens
ttcagttgttgtgag

SEQ ID NO: 1759552 - DNA, 15 bp, Homo sapiens
tcagttgttgtgagg

SEQ ID NO: 1759553 - DNA, 15 bp, Homo sapiens
cagttgttgtgagga

SEQ ID NO: 1759554 - DNA, 15 bp, Homo sapiens
agttgttgtgaggaa

SEQ ID NO: 1759555 - DNA, 15 bp, Homo sapiens
gttgttgtgaggaat

SEQ ID NO: 1759556 - DNA, 15 bp, Homo sapiens
ttgttgtgaggaata

SEQ ID NO: 1759557 - DNA, 15 bp, Homo sapiens
tgttgtgaggaataa

SEQ ID NO: 1759558 - DNA, 15 bp, Homo sapiens
gttgtgaggaataaa

SEQ ID NO: 1759559 - DNA, 15 bp, Homo sapiens
ttgtgaggaataaat

SEQ ID NO: 1759560 - DNA, 15 bp, Homo sapiens
tgtgaggaataaatg

SEQ ID NO: 1759561 - DNA, 15 bp, Homo sapiens
gtgaggaataaatga

SEQ ID NO: 1759562 - DNA, 15 bp, Homo sapiens
tgaggaataaatgag

SEQ ID NO: 1759563 - DNA, 15 bp, Homo sapiens
gaggaataaatgagc

SEQ ID NO: 1759564 - DNA, 15 bp, Homo sapiens
aggaataaatgagca

SEQ ID NO: 1759565 - DNA, 15 bp, Homo sapiens
ggaataaatgagcat

SEQ ID NO: 1759566 - DNA, 15 bp, Homo sapiens
gaataaatgagcatt

SEQ ID NO: 1759567 - DNA, 15 bp, Homo sapiens
aataaatgagcattt

SEQ ID NO: 1759568 - DNA, 15 bp, Homo sapiens
ataaatgagcattta

SEQ ID NO: 1759569 - DNA, 15 bp, Homo sapiens
taaatgagcatttat

SEQ ID NO: 1759570 - DNA, 15 bp, Homo sapiens
aaatgagcatttatg

SEQ ID NO: 1759571 - DNA, 15 bp, Homo sapiens
aatgagcatttatga

SEQ ID NO: 1759572 - DNA, 15 bp, Homo sapiens
atgagcatttatgag

SEQ ID NO: 1759573 - DNA, 15 bp, Homo sapiens
tgagcatttatgaga

SEQ ID NO: 1759574 - DNA, 15 bp, Homo sapiens
gagcatttatgagaa

SEQ ID NO: 1759575 - DNA, 15 bp, Homo sapiens
agcatttatgagaat

SEQ ID NO: 1759576 - DNA, 15 bp, Homo sapiens
gcatttatgagaata

SEQ ID NO: 1759577 - DNA, 15 bp, Homo sapiens
catttatgagaatag

SEQ ID NO: 1759578 - DNA, 15 bp, Homo sapiens
atttatgagaatagt

SEQ ID NO: 1759579 - DNA, 15 bp, Homo sapiens
tttatgagaatagta

SEQ ID NO: 1759580 - DNA, 15 bp, Homo sapiens
ttatgagaatagtaa

SEQ ID NO: 1759581 - DNA, 15 bp, Homo sapiens
tatgagaatagtaat

SEQ ID NO: 1759582 - DNA, 15 bp, Homo sapiens
atgagaatagtaatt

SEQ ID NO: 1759583 - DNA, 15 bp, Homo sapiens
tgagaatagtaatta

SEQ ID NO: 1759584 - DNA, 15 bp, Homo sapiens
gagaatagtaattag

SEQ ID NO: 1759585 - DNA, 15 bp, Homo sapiens
agaatagtaattaga

SEQ ID NO: 1759586 - DNA, 15 bp, Homo sapiens
gaatagtaattagaa

SEQ ID NO: 1759587 - DNA, 15 bp, Homo sapiens
aatagtaattagaaa

SEQ ID NO: 1759588 - DNA, 15 bp, Homo sapiens
atagtaattagaaac

SEQ ID NO: 1759589 - DNA, 15 bp, Homo sapiens
tagtaattagaaaca

SEQ ID NO: 1759590 - DNA, 15 bp, Homo sapiens
agtaattagaaacat

SEQ ID NO: 1759591 - DNA, 15 bp, Homo sapiens
gtaattagaaacata

SEQ ID NO: 1759592 - DNA, 15 bp, Homo sapiens
taattagaaacataa

SEQ ID NO: 1759593 - DNA, 15 bp, Homo sapiens
aattagaaacataac

SEQ ID NO: 1759594 - DNA, 15 bp, Homo sapiens
attagaaacataaca

SEQ ID NO: 1759595 - DNA, 15 bp, Homo sapiens
ttagaaacataacaa

SEQ ID NO: 1759596 - DNA, 15 bp, Homo sapiens
tagaaacataacaat

SEQ ID NO: 1759597 - DNA, 15 bp, Homo sapiens
agaaacataacaatt

SEQ ID NO: 1759598 - DNA, 15 bp, Homo sapiens
gaaacataacaatta

SEQ ID NO: 1759599 - DNA, 15 bp, Homo sapiens
aaacataacaattaa

SEQ ID NO: 1759600 - DNA, 15 bp, Homo sapiens
aacataacaattaat

SEQ ID NO: 1759601 - DNA, 15 bp, Homo sapiens
acataacaattaatt

SEQ ID NO: 1759602 - DNA, 15 bp, Homo sapiens
cataacaattaattg

SEQ ID NO: 1759603 - DNA, 15 bp, Homo sapiens
ataacaattaattgt

SEQ ID NO: 1759604 - DNA, 15 bp, Homo sapiens
acaattaattgttag

SEQ ID NO: 1759605 - DNA, 15 bp, Homo sapiens
caattaattgttagt

SEQ ID NO: 1759606 - DNA, 15 bp, Homo sapiens
aattaattgttagta

SEQ ID NO: 1759607 - DNA, 15 bp, Homo sapiens
attaattgttagtac

SEQ ID NO: 1759608 - DNA, 15 bp, Homo sapiens
ttaattgttagtacc

SEQ ID NO: 1759609 - DNA, 15 bp, Homo sapiens
taattgttagtaccc

SEQ ID NO: 1759610 - DNA, 15 bp, Homo sapiens
aattgttagtaccct

SEQ ID NO: 1759611 - DNA, 15 bp, Homo sapiens
attgttagtaccctt

SEQ ID NO: 1759612 - DNA, 15 bp, Homo sapiens
ttgttagtacccttc

SEQ ID NO: 1759613 - DNA, 15 bp, Homo sapiens
tgttagtacccttca

SEQ ID NO: 1759614 - DNA, 15 bp, Homo sapiens
gttagtacccttcat

SEQ ID NO: 1759615 - DNA, 15 bp, Homo sapiens
ttagtacccttcatt

SEQ ID NO: 1759616 - DNA, 15 bp, Homo sapiens
tagtacccttcattc

SEQ ID NO: 1759617 - DNA, 15 bp, Homo sapiens
agtacccttcattcc

SEQ ID NO: 1759618 - DNA, 15 bp, Homo sapiens
gtacccttcattcct

SEQ ID NO: 1759619 - DNA, 15 bp, Homo sapiens
tacccttcattcctt

SEQ ID NO: 1759620 - DNA, 15 bp, Homo sapiens
acccttcattccttt

SEQ ID NO: 1759621 - DNA, 15 bp, Homo sapiens
cccttcattcctttt

SEQ ID NO: 1759622 - DNA, 15 bp, Homo sapiens
ccttcattccttttc

SEQ ID NO: 1759623 - DNA, 15 bp, Homo sapiens
cttcattccttttcc

SEQ ID NO: 1759624 - DNA, 15 bp, Homo sapiens
ttcattccttttcct

SEQ ID NO: 1759625 - DNA, 15 bp, Homo sapiens
tcattccttttcctc

SEQ ID NO: 1759626 - DNA, 15 bp, Homo sapiens
cattccttttcctct

SEQ ID NO: 1759627 - DNA, 15 bp, Homo sapiens
attccttttcctctg

SEQ ID NO: 1759628 - DNA, 15 bp, Homo sapiens
ttccttttcctctgc

SEQ ID NO: 1759629 - DNA, 15 bp, Homo sapiens
tccttttcctctgct

SEQ ID NO: 1759630 - DNA, 15 bp, Homo sapiens
ccttttcctctgcta

SEQ ID NO: 1759631 - DNA, 15 bp, Homo sapiens
cttttcctctgctat

SEQ ID NO: 1759632 - DNA, 15 bp, Homo sapiens
ttttcctctgctata

SEQ ID NO: 1759633 - DNA, 15 bp, Homo sapiens
tttcctctgctatac

SEQ ID NO: 1759634 - DNA, 15 bp, Homo sapiens
ttcctctgctataca

SEQ ID NO: 1759635 - DNA, 15 bp, Homo sapiens
tcctctgctatacag

SEQ ID NO: 1759636 - DNA, 15 bp, Homo sapiens
cctctgctatacagt

SEQ ID NO: 1759637 - DNA, 15 bp, Homo sapiens
ctctgctatacagtg

SEQ ID NO: 1759638 - DNA, 15 bp, Homo sapiens
tctgctatacagtga

SEQ ID NO: 1759639 - DNA, 15 bp, Homo sapiens
ctgctatacagtgat

SEQ ID NO: 1759640 - DNA, 15 bp, Homo sapiens
tgctatacagtgatt

SEQ ID NO: 1759641 - DNA, 15 bp, Homo sapiens
gctatacagtgattt

SEQ ID NO: 1759642 - DNA, 15 bp, Homo sapiens
ctatacagtgatttc

SEQ ID NO: 1759643 - DNA, 15 bp, Homo sapiens
tatacagtgatttca

SEQ ID NO: 1759644 - DNA, 15 bp, Homo sapiens
atacagtgatttcat

SEQ ID NO: 1759645 - DNA, 15 bp, Homo sapiens
tacagtgatttcata

SEQ ID NO: 1759646 - DNA, 15 bp, Homo sapiens
acagtgatttcataa

SEQ ID NO: 1759647 - DNA, 15 bp, Homo sapiens
cagtgatttcataag

SEQ ID NO: 1759648 - DNA, 15 bp, Homo sapiens
agtgatttcataaga

SEQ ID NO: 1759649 - DNA, 15 bp, Homo sapiens
gtgatttcataagaa

SEQ ID NO: 1759650 - DNA, 15 bp, Homo sapiens
tgatttcataagaac

SEQ ID NO: 1759651 - DNA, 15 bp, Homo sapiens
gatttcataagaaca

SEQ ID NO: 1759652 - DNA, 15 bp, Homo sapiens
atttcataagaacag

SEQ ID NO: 1759653 - DNA, 15 bp, Homo sapiens
tttcataagaacaga

SEQ ID NO: 1759654 - DNA, 15 bp, Homo sapiens
ttcataagaacagag

SEQ ID NO: 1759655 - DNA, 15 bp, Homo sapiens
tcataagaacagaga

SEQ ID NO: 1759656 - DNA, 15 bp, Homo sapiens
cataagaacagagaa

SEQ ID NO: 1759657 - DNA, 15 bp, Homo sapiens
ataagaacagagaac

SEQ ID NO: 1759658 - DNA, 15 bp, Homo sapiens
taagaacagagaacc

SEQ ID NO: 1759659 - DNA, 15 bp, Homo sapiens
aagaacagagaaccg

SEQ ID NO: 1759660 - DNA, 15 bp, Homo sapiens
agaacagagaaccga

SEQ ID NO: 1759661 - DNA, 15 bp, Homo sapiens
gaacagagaaccgag

SEQ ID NO: 1759662 - DNA, 15 bp, Homo sapiens
aacagagaaccgagg

SEQ ID NO: 1759663 - DNA, 15 bp, Homo sapiens
acagagaaccgagga

SEQ ID NO: 1759664 - DNA, 15 bp, Homo sapiens
cagagaaccgaggat

SEQ ID NO: 1759665 - DNA, 15 bp, Homo sapiens
agagaaccgaggatt

SEQ ID NO: 1759666 - DNA, 15 bp, Homo sapiens
gagaaccgaggattc

SEQ ID NO: 1759667 - DNA, 15 bp, Homo sapiens
agaaccgaggattca

SEQ ID NO: 1759668 - DNA, 15 bp, Homo sapiens
gaaccgaggattcag

SEQ ID NO: 1759669 - DNA, 15 bp, Homo sapiens
aaccgaggattcagt

SEQ ID NO: 1759670 - DNA, 15 bp, Homo sapiens
accgaggattcagtt

SEQ ID NO: 1759671 - DNA, 15 bp, Homo sapiens
ccgaggattcagtta

SEQ ID NO: 1759672 - DNA, 15 bp, Homo sapiens
cgaggattcagttac

SEQ ID NO: 1759673 - DNA, 15 bp, Homo sapiens
gaggattcagttaca

SEQ ID NO: 1759674 - DNA, 15 bp, Homo sapiens
aggattcagttacac

SEQ ID NO: 1759675 - DNA, 15 bp, Homo sapiens
ggattcagttacaca

SEQ ID NO: 1759676 - DNA, 15 bp, Homo sapiens
gattcagttacacag

SEQ ID NO: 1759677 - DNA, 15 bp, Homo sapiens
attcagttacacagt

SEQ ID NO: 1759678 - DNA, 15 bp, Homo sapiens
ttcagttacacagta

SEQ ID NO: 1759679 - DNA, 15 bp, Homo sapiens
tcagttacacagtat

SEQ ID NO: 1759680 - DNA, 15 bp, Homo sapiens
cagttacacagtatt

SEQ ID NO: 1759681 - DNA, 15 bp, Homo sapiens
agttacacagtatta

SEQ ID NO: 1759682 - DNA, 15 bp, Homo sapiens
gttacacagtattaa

SEQ ID NO: 1759683 - DNA, 15 bp, Homo sapiens
ttacacagtattaac

SEQ ID NO: 1759684 - DNA, 15 bp, Homo sapiens
tacacagtattaacc

SEQ ID NO: 1759685 - DNA, 15 bp, Homo sapiens
acacagtattaacct

SEQ ID NO: 1759686 - DNA, 15 bp, Homo sapiens
cacagtattaacctg

SEQ ID NO: 1759687 - DNA, 15 bp, Homo sapiens
acagtattaacctgt

SEQ ID NO: 1759688 - DNA, 15 bp, Homo sapiens
cagtattaacctgtt

SEQ ID NO: 1759689 - DNA, 15 bp, Homo sapiens
agtattaacctgttt

SEQ ID NO: 1759690 - DNA, 15 bp, Homo sapiens
gtattaacctgttta

SEQ ID NO: 1759691 - DNA, 15 bp, Homo sapiens
tattaacctgtttat

SEQ ID NO: 1759692 - DNA, 15 bp, Homo sapiens
attaacctgtttatc

SEQ ID NO: 1759693 - DNA, 15 bp, Homo sapiens
ttaacctgtttatct

SEQ ID NO: 1759694 - DNA, 15 bp, Homo sapiens
taacctgtttatctt

SEQ ID NO: 1759695 - DNA, 15 bp, Homo sapiens
aacctgtttatcttg

SEQ ID NO: 1759696 - DNA, 15 bp, Homo sapiens
acctgtttatcttgg

SEQ ID NO: 1759697 - DNA, 15 bp, Homo sapiens
cctgtttatcttggc

SEQ ID NO: 1759698 - DNA, 15 bp, Homo sapiens
ctgtttatcttggct

SEQ ID NO: 1759699 - DNA, 15 bp, Homo sapiens
tgtttatcttggctt

SEQ ID NO: 1759700 - DNA, 15 bp, Homo sapiens
gtttatcttggctta

SEQ ID NO: 1759701 - DNA, 15 bp, Homo sapiens
tttatcttggcttac

SEQ ID NO: 1759702 - DNA, 15 bp, Homo sapiens
ttatcttggcttact

SEQ ID NO: 1759703 - DNA, 15 bp, Homo sapiens
tatcttggcttacta

SEQ ID NO: 1759704 - DNA, 15 bp, Homo sapiens
atcttggcttactat

SEQ ID NO: 1759705 - DNA, 15 bp, Homo sapiens
tcttggcttactata

SEQ ID NO: 1759706 - DNA, 15 bp, Homo sapiens
cttggcttactataa

SEQ ID NO: 1759707 - DNA, 15 bp, Homo sapiens
ttggcttactataag

SEQ ID NO: 1759708 - DNA, 15 bp, Homo sapiens
tggcttactataagt

SEQ ID NO: 1759709 - DNA, 15 bp, Homo sapiens
ggcttactataagta

SEQ ID NO: 1759710 - DNA, 15 bp, Homo sapiens
gcttactataagtac

SEQ ID NO: 1759711 - DNA, 15 bp, Homo sapiens
cttactataagtaca

SEQ ID NO: 1759712 - DNA, 15 bp, Homo sapiens
ttactataagtacag

SEQ ID NO: 1759713 - DNA, 15 bp, Homo sapiens
tactataagtacaga

SEQ ID NO: 1759714 - DNA, 15 bp, Homo sapiens
actataagtacagag

SEQ ID NO: 1759715 - DNA, 15 bp, Homo sapiens
ctataagtacagaga

SEQ ID NO: 1759716 - DNA, 15 bp, Homo sapiens
tataagtacagagaa

SEQ ID NO: 1759717 - DNA, 15 bp, Homo sapiens
ataagtacagagaat

SEQ ID NO: 1759718 - DNA, 15 bp, Homo sapiens
taagtacagagaatt

SEQ ID NO: 1759719 - DNA, 15 bp, Homo sapiens
aagtacagagaattt

SEQ ID NO: 1759720 - DNA, 15 bp, Homo sapiens
agtacagagaatttt

SEQ ID NO: 1759721 - DNA, 15 bp, Homo sapiens
gtacagagaattttt

SEQ ID NO: 1759722 - DNA, 15 bp, Homo sapiens
tacagagaatttttc

SEQ ID NO: 1759723 - DNA, 15 bp, Homo sapiens
acagagaatttttct

SEQ ID NO: 1759724 - DNA, 15 bp, Homo sapiens
cagagaatttttctc

SEQ ID NO: 1759725 - DNA, 15 bp, Homo sapiens
agagaatttttctct

SEQ ID NO: 1759726 - DNA, 15 bp, Homo sapiens
gagaatttttctctt

SEQ ID NO: 1759727 - DNA, 15 bp, Homo sapiens
agaatttttctcttc

SEQ ID NO: 1759728 - DNA, 15 bp, Homo sapiens
gaatttttctcttct

SEQ ID NO: 1759729 - DNA, 15 bp, Homo sapiens
aatttttctcttctc

SEQ ID NO: 1759730 - DNA, 15 bp, Homo sapiens
atttttctcttctct

SEQ ID NO: 1759731 - DNA, 15 bp, Homo sapiens
tttttctcttctctt

SEQ ID NO: 1759732 - DNA, 15 bp, Homo sapiens
ttttctcttctcttg

SEQ ID NO: 1759733 - DNA, 15 bp, Homo sapiens
tttctcttctcttga

SEQ ID NO: 1759734 - DNA, 15 bp, Homo sapiens
tctcttctcttgagg

SEQ ID NO: 1759735 - DNA, 15 bp, Homo sapiens
ctcttctcttgaggc

SEQ ID NO: 1759736 - DNA, 15 bp, Homo sapiens
tcttctcttgaggca

SEQ ID NO: 1759737 - DNA, 15 bp, Homo sapiens
cttctcttgaggcac

SEQ ID NO: 1759738 - DNA, 15 bp, Homo sapiens
ttctcttgaggcacc

SEQ ID NO: 1759739 - DNA, 15 bp, Homo sapiens
tctcttgaggcaccc

SEQ ID NO: 1759740 - DNA, 15 bp, Homo sapiens
ctcttgaggcacccc

SEQ ID NO: 1759741 - DNA, 15 bp, Homo sapiens
tcttgaggcacccct

SEQ ID NO: 1759742 - DNA, 15 bp, Homo sapiens
cttgaggcacccctc

SEQ ID NO: 1759743 - DNA, 15 bp, Homo sapiens
ttgaggcacccctcc

SEQ ID NO: 1759744 - DNA, 15 bp, Homo sapiens
tgaggcacccctcct

SEQ ID NO: 1759745 - DNA, 15 bp, Homo sapiens
gaggcacccctcctc

SEQ ID NO: 1759746 - DNA, 15 bp, Homo sapiens
aggcacccctcctcc

SEQ ID NO: 1759747 - DNA, 15 bp, Homo sapiens
ggcacccctcctccc

SEQ ID NO: 1759748 - DNA, 15 bp, Homo sapiens
gcacccctcctcccc

SEQ ID NO: 1759749 - DNA, 15 bp, Homo sapiens
cacccctcctccccc

SEQ ID NO: 1759750 - DNA, 15 bp, Homo sapiens
acccctcctccccca

SEQ ID NO: 1759751 - DNA, 15 bp, Homo sapiens
cccctcctcccccat

SEQ ID NO: 1759752 - DNA, 15 bp, Homo sapiens
ccctcctcccccatc

SEQ ID NO: 1759753 - DNA, 15 bp, Homo sapiens
cctcctcccccatca

SEQ ID NO: 1759754 - DNA, 15 bp, Homo sapiens
ctcctcccccatcac

SEQ ID NO: 1759755 - DNA, 15 bp, Homo sapiens
tcctcccccatcacc

SEQ ID NO: 1759756 - DNA, 15 bp, Homo sapiens
cctcccccatcacct

SEQ ID NO: 1759757 - DNA, 15 bp, Homo sapiens
ctcccccatcacctt

SEQ ID NO: 1759758 - DNA, 15 bp, Homo sapiens
tcccccatcaccttc

SEQ ID NO: 1759759 - DNA, 15 bp, Homo sapiens
cccccatcaccttct

SEQ ID NO: 1759760 - DNA, 15 bp, Homo sapiens
ccccatcaccttctc

SEQ ID NO: 1759761 - DNA, 15 bp, Homo sapiens
cccatcaccttctca

SEQ ID NO: 1759762 - DNA, 15 bp, Homo sapiens
ccatcaccttctcaa

SEQ ID NO: 1759763 - DNA, 15 bp, Homo sapiens
catcaccttctcaaa

SEQ ID NO: 1759764 - DNA, 15 bp, Homo sapiens
atcaccttctcaaaa

SEQ ID NO: 1759765 - DNA, 15 bp, Homo sapiens
tcaccttctcaaaat

SEQ ID NO: 1759766 - DNA, 15 bp, Homo sapiens
caccttctcaaaatg

SEQ ID NO: 1759767 - DNA, 15 bp, Homo sapiens
accttctcaaaatgg

SEQ ID NO: 1759768 - DNA, 15 bp, Homo sapiens
ccttctcaaaatgga

SEQ ID NO: 1759769 - DNA, 15 bp, Homo sapiens
cttctcaaaatggaa

SEQ ID NO: 1759770 - DNA, 15 bp, Homo sapiens
ttctcaaaatggaaa

SEQ ID NO: 1759771 - DNA, 15 bp, Homo sapiens
tctcaaaatggaaaa

SEQ ID NO: 1759772 - DNA, 15 bp, Homo sapiens
tcaaaatggaaaaag

SEQ ID NO: 1759773 - DNA, 15 bp, Homo sapiens
caaaatggaaaaagt

SEQ ID NO: 1759774 - DNA, 15 bp, Homo sapiens
aaaatggaaaaagtt

SEQ ID NO: 1759775 - DNA, 15 bp, Homo sapiens
aaatggaaaaagttc

SEQ ID NO: 1759776 - DNA, 15 bp, Homo sapiens
aatggaaaaagttca

SEQ ID NO: 1759777 - DNA, 15 bp, Homo sapiens
atggaaaaagttcag

SEQ ID NO: 1759778 - DNA, 15 bp, Homo sapiens
tggaaaaagttcagg

SEQ ID NO: 1759779 - DNA, 15 bp, Homo sapiens
ggaaaaagttcaggg

SEQ ID NO: 1759780 - DNA, 15 bp, Homo sapiens
gaaaaagttcagggg

SEQ ID NO: 1759781 - DNA, 15 bp, Homo sapiens
aaaaagttcaggggg

SEQ ID NO: 1759782 - DNA, 15 bp, Homo sapiens
aaaagttcaggggga

SEQ ID NO: 1759783 - DNA, 15 bp, Homo sapiens
aaagttcagggggaa

SEQ ID NO: 1759784 - DNA, 15 bp, Homo sapiens
aagttcagggggaaa

SEQ ID NO: 1759785 - DNA, 15 bp, Homo sapiens
agttcagggggaaaa

SEQ ID NO: 1759786 - DNA, 15 bp, Homo sapiens
gttcagggggaaaag

SEQ ID NO: 1759787 - DNA, 15 bp, Homo sapiens
ttcagggggaaaagg

SEQ ID NO: 1759788 - DNA, 15 bp, Homo sapiens
tcagggggaaaaggc

SEQ ID NO: 1759789 - DNA, 15 bp, Homo sapiens
cagggggaaaaggca

SEQ ID NO: 1759790 - DNA, 15 bp, Homo sapiens
agggggaaaaggcat

SEQ ID NO: 1759791 - DNA, 15 bp, Homo sapiens
gggggaaaaggcatc

SEQ ID NO: 1759792 - DNA, 15 bp, Homo sapiens
ggggaaaaggcatca

SEQ ID NO: 1759793 - DNA, 15 bp, Homo sapiens
gggaaaaggcatcat

SEQ ID NO: 1759794 - DNA, 15 bp, Homo sapiens
ggaaaaggcatcatg

SEQ ID NO: 1759795 - DNA, 15 bp, Homo sapiens
gaaaaggcatcatgg

SEQ ID NO: 1759796 - DNA, 15 bp, Homo sapiens
aaaaggcatcatggg

SEQ ID NO: 1759797 - DNA, 15 bp, Homo sapiens
aaaggcatcatggga

SEQ ID NO: 1759798 - DNA, 15 bp, Homo sapiens
aaggcatcatgggac

SEQ ID NO: 1759799 - DNA, 15 bp, Homo sapiens
aggcatcatgggact

SEQ ID NO: 1759800 - DNA, 15 bp, Homo sapiens
ggcatcatgggactc

SEQ ID NO: 1759801 - DNA, 15 bp, Homo sapiens
gcatcatgggactcc

SEQ ID NO: 1759802 - DNA, 15 bp, Homo sapiens
catcatgggactcca

SEQ ID NO: 1759803 - DNA, 15 bp, Homo sapiens
atcatgggactccag

SEQ ID NO: 1759804 - DNA, 15 bp, Homo sapiens
tcatgggactccagc

SEQ ID NO: 1759805 - DNA, 15 bp, Homo sapiens
catgggactccagca

SEQ ID NO: 1759806 - DNA, 15 bp, Homo sapiens
atgggactccagcat

SEQ ID NO: 1759807 - DNA, 15 bp, Homo sapiens
tgggactccagcatt

SEQ ID NO: 1759808 - DNA, 15 bp, Homo sapiens
gggactccagcattg

SEQ ID NO: 1759809 - DNA, 15 bp, Homo sapiens
ggactccagcattgt

SEQ ID NO: 1759810 - DNA, 15 bp, Homo sapiens
gactccagcattgtt

SEQ ID NO: 1759811 - DNA, 15 bp, Homo sapiens
actccagcattgtta

SEQ ID NO: 1759812 - DNA, 15 bp, Homo sapiens
ctccagcattgttaa

SEQ ID NO: 1759813 - DNA, 15 bp, Homo sapiens
tccagcattgttaag

SEQ ID NO: 1759814 - DNA, 15 bp, Homo sapiens
ccagcattgttaagt

SEQ ID NO: 1759815 - DNA, 15 bp, Homo sapiens
cagcattgttaagta

SEQ ID NO: 1759816 - DNA, 15 bp, Homo sapiens
agcattgttaagtat

SEQ ID NO: 1759817 - DNA, 15 bp, Homo sapiens
gcattgttaagtatg

SEQ ID NO: 1759818 - DNA, 15 bp, Homo sapiens
cattgttaagtatgg

SEQ ID NO: 1759819 - DNA, 15 bp, Homo sapiens
attgttaagtatggg

SEQ ID NO: 1759820 - DNA, 15 bp, Homo sapiens
ttgttaagtatgggc

SEQ ID NO: 1759821 - DNA, 15 bp, Homo sapiens
tgttaagtatgggca

SEQ ID NO: 1759822 - DNA, 15 bp, Homo sapiens
gttaagtatgggcag

SEQ ID NO: 1759823 - DNA, 15 bp, Homo sapiens
ttaagtatgggcagt

SEQ ID NO: 1759824 - DNA, 15 bp, Homo sapiens
taagtatgggcagtg

SEQ ID NO: 1759825 - DNA, 15 bp, Homo sapiens
aagtatgggcagtgt

SEQ ID NO: 1759826 - DNA, 15 bp, Homo sapiens
agtatgggcagtgtt

SEQ ID NO: 1759827 - DNA, 15 bp, Homo sapiens
gtatgggcagtgttc

SEQ ID NO: 1759828 - DNA, 15 bp, Homo sapiens
tatgggcagtgttca

SEQ ID NO: 1759829 - DNA, 15 bp, Homo sapiens
atgggcagtgttcac

SEQ ID NO: 1759830 - DNA, 15 bp, Homo sapiens
tgggcagtgttcact

SEQ ID NO: 1759831 - DNA, 15 bp, Homo sapiens
gggcagtgttcactg

SEQ ID NO: 1759832 - DNA, 15 bp, Homo sapiens
ggcagtgttcactgt

SEQ ID NO: 1759833 - DNA, 15 bp, Homo sapiens
gcagtgttcactgtt

SEQ ID NO: 1759834 - DNA, 15 bp, Homo sapiens
cagtgttcactgtta

SEQ ID NO: 1759835 - DNA, 15 bp, Homo sapiens
agtgttcactgttat

SEQ ID NO: 1759836 - DNA, 15 bp, Homo sapiens
gtgttcactgttata

SEQ ID NO: 1759837 - DNA, 15 bp, Homo sapiens
tgttcactgttatat

SEQ ID NO: 1759838 - DNA, 15 bp, Homo sapiens
gttcactgttatatt

SEQ ID NO: 1759839 - DNA, 15 bp, Homo sapiens
ttcactgttatatta

SEQ ID NO: 1759840 - DNA, 15 bp, Homo sapiens
tcactgttatattac

SEQ ID NO: 1759841 - DNA, 15 bp, Homo sapiens
cactgttatattaca

SEQ ID NO: 1759842 - DNA, 15 bp, Homo sapiens
actgttatattacag

SEQ ID NO: 1759843 - DNA, 15 bp, Homo sapiens
ctgttatattacagt

SEQ ID NO: 1759844 - DNA, 15 bp, Homo sapiens
tgttatattacagtt

SEQ ID NO: 1759845 - DNA, 15 bp, Homo sapiens
gttatattacagttg

SEQ ID NO: 1759846 - DNA, 15 bp, Homo sapiens
ttatattacagttgg

SEQ ID NO: 1759847 - DNA, 15 bp, Homo sapiens
tatattacagttgga

SEQ ID NO: 1759848 - DNA, 15 bp, Homo sapiens
atattacagttggaa

SEQ ID NO: 1759849 - DNA, 15 bp, Homo sapiens
tattacagttggaat

SEQ ID NO: 1759850 - DNA, 15 bp, Homo sapiens
attacagttggaatt

SEQ ID NO: 1759851 - DNA, 15 bp, Homo sapiens
ttacagttggaattt

SEQ ID NO: 1759852 - DNA, 15 bp, Homo sapiens
tacagttggaatttg

SEQ ID NO: 1759853 - DNA, 15 bp, Homo sapiens
acagttggaatttgt

SEQ ID NO: 1759854 - DNA, 15 bp, Homo sapiens
cagttggaatttgtt

SEQ ID NO: 1759855 - DNA, 15 bp, Homo sapiens
agttggaatttgtta

SEQ ID NO: 1759856 - DNA, 15 bp, Homo sapiens
gttggaatttgttat

SEQ ID NO: 1759857 - DNA, 15 bp, Homo sapiens
ttggaatttgttatg

SEQ ID NO: 1759858 - DNA, 15 bp, Homo sapiens
tggaatttgttatgt

SEQ ID NO: 1759859 - DNA, 15 bp, Homo sapiens
ggaatttgttatgtt

SEQ ID NO: 1759860 - DNA, 15 bp, Homo sapiens
gaatttgttatgttg

SEQ ID NO: 1759861 - DNA, 15 bp, Homo sapiens
aatttgttatgttgc

SEQ ID NO: 1759862 - DNA, 15 bp, Homo sapiens
atttgttatgttgct

SEQ ID NO: 1759863 - DNA, 15 bp, Homo sapiens
tttgttatgttgctt

SEQ ID NO: 1759864 - DNA, 15 bp, Homo sapiens
ttgttatgttgcttt

SEQ ID NO: 1759865 - DNA, 15 bp, Homo sapiens
tgttatgttgcttta

SEQ ID NO: 1759866 - DNA, 15 bp, Homo sapiens
gttatgttgctttag

SEQ ID NO: 1759867 - DNA, 15 bp, Homo sapiens
ttatgttgctttagt

SEQ ID NO: 1759868 - DNA, 15 bp, Homo sapiens
tatgttgctttagtt

SEQ ID NO: 1759869 - DNA, 15 bp, Homo sapiens
atgttgctttagtta

SEQ ID NO: 1759870 - DNA, 15 bp, Homo sapiens
tgttgctttagttat

SEQ ID NO: 1759871 - DNA, 15 bp, Homo sapiens
gttgctttagttatg

SEQ ID NO: 1759872 - DNA, 15 bp, Homo sapiens
ttgctttagttatga

SEQ ID NO: 1759873 - DNA, 15 bp, Homo sapiens
tgctttagttatgaa

SEQ ID NO: 1759874 - DNA, 15 bp, Homo sapiens
gctttagttatgaat

SEQ ID NO: 1759875 - DNA, 15 bp, Homo sapiens
ctttagttatgaatc

SEQ ID NO: 1759876 - DNA, 15 bp, Homo sapiens
tttagttatgaatca

SEQ ID NO: 1759877 - DNA, 15 bp, Homo sapiens
ttagttatgaatcat

SEQ ID NO: 1759878 - DNA, 15 bp, Homo sapiens
tagttatgaatcatg

SEQ ID NO: 1759879 - DNA, 15 bp, Homo sapiens
agttatgaatcatgt

SEQ ID NO: 1759880 - DNA, 15 bp, Homo sapiens
gttatgaatcatgtc

SEQ ID NO: 1759881 - DNA, 15 bp, Homo sapiens
ttatgaatcatgtca

SEQ ID NO: 1759882 - DNA, 15 bp, Homo sapiens
tatgaatcatgtcag

SEQ ID NO: 1759883 - DNA, 15 bp, Homo sapiens
atgaatcatgtcagt

SEQ ID NO: 1759884 - DNA, 15 bp, Homo sapiens
tgaatcatgtcagta

SEQ ID NO: 1759885 - DNA, 15 bp, Homo sapiens
gaatcatgtcagtaa

SEQ ID NO: 1759886 - DNA, 15 bp, Homo sapiens
aatcatgtcagtaat

SEQ ID NO: 1759887 - DNA, 15 bp, Homo sapiens
atcatgtcagtaatt

SEQ ID NO: 1759888 - DNA, 15 bp, Homo sapiens
tcatgtcagtaatta

SEQ ID NO: 1759889 - DNA, 15 bp, Homo sapiens
catgtcagtaattac

SEQ ID NO: 1759890 - DNA, 15 bp, Homo sapiens
atgtcagtaattacc

SEQ ID NO: 1759891 - DNA, 15 bp, Homo sapiens
tgtcagtaattaccc

SEQ ID NO: 1759892 - DNA, 15 bp, Homo sapiens
gtcagtaattaccct

SEQ ID NO: 1759893 - DNA, 15 bp, Homo sapiens
tcagtaattaccctg

SEQ ID NO: 1759894 - DNA, 15 bp, Homo sapiens
cagtaattaccctga

SEQ ID NO: 1759895 - DNA, 15 bp, Homo sapiens
agtaattaccctgag

SEQ ID NO: 1759896 - DNA, 15 bp, Homo sapiens
gtaattaccctgagg

SEQ ID NO: 1759897 - DNA, 15 bp, Homo sapiens
taattaccctgaggg

SEQ ID NO: 1759898 - DNA, 15 bp, Homo sapiens
aattaccctgagggt

SEQ ID NO: 1759899 - DNA, 15 bp, Homo sapiens
attaccctgagggtg

SEQ ID NO: 1759900 - DNA, 15 bp, Homo sapiens
ttaccctgagggtgg

SEQ ID NO: 1759901 - DNA, 15 bp, Homo sapiens
taccctgagggtggt

SEQ ID NO: 1759902 - DNA, 15 bp, Homo sapiens
accctgagggtggtg

SEQ ID NO: 1759903 - DNA, 15 bp, Homo sapiens
ccctgagggtggtgt

SEQ ID NO: 1759904 - DNA, 15 bp, Homo sapiens
cctgagggtggtgtt

SEQ ID NO: 1759905 - DNA, 15 bp, Homo sapiens
ctgagggtggtgtta

SEQ ID NO: 1759906 - DNA, 15 bp, Homo sapiens
tgagggtggtgttag

SEQ ID NO: 1759907 - DNA, 15 bp, Homo sapiens
gagggtggtgttagt

SEQ ID NO: 1759908 - DNA, 15 bp, Homo sapiens
agggtggtgttagtt

SEQ ID NO: 1759909 - DNA, 15 bp, Homo sapiens
gggtggtgttagttc

SEQ ID NO: 1759910 - DNA, 15 bp, Homo sapiens
ggtggtgttagttca

SEQ ID NO: 1759911 - DNA, 15 bp, Homo sapiens
gtggtgttagttcac

SEQ ID NO: 1759912 - DNA, 15 bp, Homo sapiens
tggtgttagttcact

SEQ ID NO: 1759913 - DNA, 15 bp, Homo sapiens
ggtgttagttcacta

SEQ ID NO: 1759914 - DNA, 15 bp, Homo sapiens
gtgttagttcactat

SEQ ID NO: 1759915 - DNA, 15 bp, Homo sapiens
tgttagttcactatt

SEQ ID NO: 1759916 - DNA, 15 bp, Homo sapiens
gttagttcactattc

SEQ ID NO: 1759917 - DNA, 15 bp, Homo sapiens
ttagttcactattca

SEQ ID NO: 1759918 - DNA, 15 bp, Homo sapiens
tagttcactattcaa

SEQ ID NO: 1759919 - DNA, 15 bp, Homo sapiens
agttcactattcaag

SEQ ID NO: 1759920 - DNA, 15 bp, Homo sapiens
gttcactattcaagt

SEQ ID NO: 1759921 - DNA, 15 bp, Homo sapiens
ttcactattcaagta

SEQ ID NO: 1759922 - DNA, 15 bp, Homo sapiens
tcactattcaagtac

SEQ ID NO: 1759923 - DNA, 15 bp, Homo sapiens
cactattcaagtaca

SEQ ID NO: 1759924 - DNA, 15 bp, Homo sapiens
actattcaagtacaa

SEQ ID NO: 1759925 - DNA, 15 bp, Homo sapiens
ctattcaagtacaaa

SEQ ID NO: 1759926 - DNA, 15 bp, Homo sapiens
tattcaagtacaaac

SEQ ID NO: 1759927 - DNA, 15 bp, Homo sapiens
attcaagtacaaaca

SEQ ID NO: 1759928 - DNA, 15 bp, Homo sapiens
ttcaagtacaaacaa

SEQ ID NO: 1759929 - DNA, 15 bp, Homo sapiens
tcaagtacaaacaag

SEQ ID NO: 1759930 - DNA, 15 bp, Homo sapiens
caagtacaaacaaga

SEQ ID NO: 1759931 - DNA, 15 bp, Homo sapiens
aagtacaaacaagaa

SEQ ID NO: 1759932 - DNA, 15 bp, Homo sapiens
agtacaaacaagaag

SEQ ID NO: 1759933 - DNA, 15 bp, Homo sapiens
gtacaaacaagaagg

SEQ ID NO: 1759934 - DNA, 15 bp, Homo sapiens
tacaaacaagaaggg

SEQ ID NO: 1759935 - DNA, 15 bp, Homo sapiens
acaaacaagaaggga

SEQ ID NO: 1759936 - DNA, 15 bp, Homo sapiens
caaacaagaagggaa

SEQ ID NO: 1759937 - DNA, 15 bp, Homo sapiens
aaacaagaagggaag

SEQ ID NO: 1759938 - DNA, 15 bp, Homo sapiens
aacaagaagggaagt

SEQ ID NO: 1759939 - DNA, 15 bp, Homo sapiens
acaagaagggaagta

SEQ ID NO: 1759940 - DNA, 15 bp, Homo sapiens
caagaagggaagtag

SEQ ID NO: 1759941 - DNA, 15 bp, Homo sapiens
aagaagggaagtagc

SEQ ID NO: 1759942 - DNA, 15 bp, Homo sapiens
agaagggaagtagca

SEQ ID NO: 1759943 - DNA, 15 bp, Homo sapiens
gaagggaagtagcaa

SEQ ID NO: 1759944 - DNA, 15 bp, Homo sapiens
aagggaagtagcaat

SEQ ID NO: 1759945 - DNA, 15 bp, Homo sapiens
agggaagtagcaatg

SEQ ID NO: 1759946 - DNA, 15 bp, Homo sapiens
gggaagtagcaatgg

SEQ ID NO: 1759947 - DNA, 15 bp, Homo sapiens
ggaagtagcaatggt

SEQ ID NO: 1759948 - DNA, 15 bp, Homo sapiens
gaagtagcaatggta

SEQ ID NO: 1759949 - DNA, 15 bp, Homo sapiens
aagtagcaatggtag

SEQ ID NO: 1759950 - DNA, 15 bp, Homo sapiens
agtagcaatggtaga

SEQ ID NO: 1759951 - DNA, 15 bp, Homo sapiens
gtagcaatggtagaa

SEQ ID NO: 1759952 - DNA, 15 bp, Homo sapiens
tagcaatggtagaag

SEQ ID NO: 1759953 - DNA, 15 bp, Homo sapiens
agcaatggtagaaga

SEQ ID NO: 1759954 - DNA, 15 bp, Homo sapiens
gcaatggtagaagaa

SEQ ID NO: 1759955 - DNA, 15 bp, Homo sapiens
caatggtagaagaat

SEQ ID NO: 1759956 - DNA, 15 bp, Homo sapiens
aatggtagaagaata

SEQ ID NO: 1759957 - DNA, 15 bp, Homo sapiens
atggtagaagaatag

SEQ ID NO: 1759958 - DNA, 15 bp, Homo sapiens
tggtagaagaatagc

SEQ ID NO: 1759959 - DNA, 15 bp, Homo sapiens
ggtagaagaatagct

SEQ ID NO: 1759960 - DNA, 15 bp, Homo sapiens
gtagaagaatagcta

SEQ ID NO: 1759961 - DNA, 15 bp, Homo sapiens
tagaagaatagctag

SEQ ID NO: 1759962 - DNA, 15 bp, Homo sapiens
agaagaatagctagg

SEQ ID NO: 1759963 - DNA, 15 bp, Homo sapiens
gaagaatagctagga

SEQ ID NO: 1759964 - DNA, 15 bp, Homo sapiens
aagaatagctaggac

SEQ ID NO: 1759965 - DNA, 15 bp, Homo sapiens
agaatagctaggaca

SEQ ID NO: 1759966 - DNA, 15 bp, Homo sapiens
gaatagctaggacat

SEQ ID NO: 1759967 - DNA, 15 bp, Homo sapiens
aatagctaggacata

SEQ ID NO: 1759968 - DNA, 15 bp, Homo sapiens
atagctaggacatac

SEQ ID NO: 1759969 - DNA, 15 bp, Homo sapiens
tagctaggacatact

SEQ ID NO: 1759970 - DNA, 15 bp, Homo sapiens
agctaggacatactc

SEQ ID NO: 1759971 - DNA, 15 bp, Homo sapiens
gctaggacatactct

SEQ ID NO: 1759972 - DNA, 15 bp, Homo sapiens
ctaggacatactctc

SEQ ID NO: 1759973 - DNA, 15 bp, Homo sapiens
taggacatactctct

SEQ ID NO: 1759974 - DNA, 15 bp, Homo sapiens
aggacatactctctg

SEQ ID NO: 1759975 - DNA, 15 bp, Homo sapiens
ggacatactctctgt

SEQ ID NO: 1759976 - DNA, 15 bp, Homo sapiens
gacatactctctgta

SEQ ID NO: 1759977 - DNA, 15 bp, Homo sapiens
acatactctctgtac

SEQ ID NO: 1759978 - DNA, 15 bp, Homo sapiens
catactctctgtacc

SEQ ID NO: 1759979 - DNA, 15 bp, Homo sapiens
atactctctgtacct

SEQ ID NO: 1759980 - DNA, 15 bp, Homo sapiens
tactctctgtaccta

SEQ ID NO: 1759981 - DNA, 15 bp, Homo sapiens
actctctgtacctaa

SEQ ID NO: 1759982 - DNA, 15 bp, Homo sapiens
ctctctgtacctaac

SEQ ID NO: 1759983 - DNA, 15 bp, Homo sapiens
tctctgtacctaacc

SEQ ID NO: 1759984 - DNA, 15 bp, Homo sapiens
ctctgtacctaacct

SEQ ID NO: 1759985 - DNA, 15 bp, Homo sapiens
tctgtacctaacctg

SEQ ID NO: 1759986 - DNA, 15 bp, Homo sapiens
ctgtacctaacctgt

SEQ ID NO: 1759987 - DNA, 15 bp, Homo sapiens
tgtacctaacctgtg

SEQ ID NO: 1759988 - DNA, 15 bp, Homo sapiens
gtacctaacctgtgg

SEQ ID NO: 1759989 - DNA, 15 bp, Homo sapiens
tacctaacctgtggg

SEQ ID NO: 1759990 - DNA, 15 bp, Homo sapiens
acctaacctgtggga

SEQ ID NO: 1759991 - DNA, 15 bp, Homo sapiens
cctaacctgtgggat

SEQ ID NO: 1759992 - DNA, 15 bp, Homo sapiens
ctaacctgtgggatg

SEQ ID NO: 1759993 - DNA, 15 bp, Homo sapiens
taacctgtgggatgg

SEQ ID NO: 1759994 - DNA, 15 bp, Homo sapiens
aacctgtgggatgga

SEQ ID NO: 1759995 - DNA, 15 bp, Homo sapiens
acctgtgggatggaa

SEQ ID NO: 1759996 - DNA, 15 bp, Homo sapiens
cctgtgggatggaag

SEQ ID NO: 1759997 - DNA, 15 bp, Homo sapiens
ctgtgggatggaagc

SEQ ID NO: 1759998 - DNA, 15 bp, Homo sapiens
tgtgggatggaagca

SEQ ID NO: 1759999 - DNA, 15 bp, Homo sapiens
gtgggatggaagcac

SEQ ID NO: 1760000 - DNA, 15 bp, Homo sapiens
tgggatggaagcaca

SEQ ID NO: 1760001 - DNA, 15 bp, Homo sapiens
gggatggaagcacat

SEQ ID NO: 1760002 - DNA, 15 bp, Homo sapiens
ggatggaagcacata

SEQ ID NO: 1760003 - DNA, 15 bp, Homo sapiens
gatggaagcacatat

SEQ ID NO: 1760004 - DNA, 15 bp, Homo sapiens
atggaagcacatata

SEQ ID NO: 1760005 - DNA, 15 bp, Homo sapiens
tggaagcacatatac

SEQ ID NO: 1760006 - DNA, 15 bp, Homo sapiens
ggaagcacatatact

SEQ ID NO: 1760007 - DNA, 15 bp, Homo sapiens
gaagcacatatactc

SEQ ID NO: 1760008 - DNA, 15 bp, Homo sapiens
aagcacatatactct

SEQ ID NO: 1760009 - DNA, 15 bp, Homo sapiens
agcacatatactctt

SEQ ID NO: 1760010 - DNA, 15 bp, Homo sapiens
gcacatatactctta

SEQ ID NO: 1760011 - DNA, 15 bp, Homo sapiens
cacatatactcttat

SEQ ID NO: 1760012 - DNA, 15 bp, Homo sapiens
acatatactcttatt

SEQ ID NO: 1760013 - DNA, 15 bp, Homo sapiens
catatactcttattc

SEQ ID NO: 1760014 - DNA, 15 bp, Homo sapiens
atatactcttattca

SEQ ID NO: 1760015 - DNA, 15 bp, Homo sapiens
tatactcttattcag

SEQ ID NO: 1760016 - DNA, 15 bp, Homo sapiens
atactcttattcaga

SEQ ID NO: 1760017 - DNA, 15 bp, Homo sapiens
tactcttattcagag

SEQ ID NO: 1760018 - DNA, 15 bp, Homo sapiens
actcttattcagaga

SEQ ID NO: 1760019 - DNA, 15 bp, Homo sapiens
ctcttattcagagaa

SEQ ID NO: 1760020 - DNA, 15 bp, Homo sapiens
tcttattcagagaat

SEQ ID NO: 1760021 - DNA, 15 bp, Homo sapiens
cttattcagagaatt

SEQ ID NO: 1760022 - DNA, 15 bp, Homo sapiens
ttattcagagaattt

SEQ ID NO: 1760023 - DNA, 15 bp, Homo sapiens
tattcagagaatttt

SEQ ID NO: 1760024 - DNA, 15 bp, Homo sapiens
attcagagaatttta

SEQ ID NO: 1760025 - DNA, 15 bp, Homo sapiens
ttcagagaattttat

SEQ ID NO: 1760026 - DNA, 15 bp, Homo sapiens
tcagagaattttata

SEQ ID NO: 1760027 - DNA, 15 bp, Homo sapiens
cagagaattttataa

SEQ ID NO: 1760028 - DNA, 15 bp, Homo sapiens
agagaattttataaa

SEQ ID NO: 1760029 - DNA, 15 bp, Homo sapiens
gagaattttataaag

SEQ ID NO: 1760030 - DNA, 15 bp, Homo sapiens
agaattttataaaga

SEQ ID NO: 1760031 - DNA, 15 bp, Homo sapiens
gaattttataaagag

SEQ ID NO: 1760032 - DNA, 15 bp, Homo sapiens
aattttataaagagt

SEQ ID NO: 1760033 - DNA, 15 bp, Homo sapiens
attttataaagagtc

SEQ ID NO: 1760034 - DNA, 15 bp, Homo sapiens
ttttataaagagtca

SEQ ID NO: 1760035 - DNA, 15 bp, Homo sapiens
tttataaagagtcat

SEQ ID NO: 1760036 - DNA, 15 bp, Homo sapiens
ttataaagagtcatg

SEQ ID NO: 1760037 - DNA, 15 bp, Homo sapiens
tataaagagtcatga

SEQ ID NO: 1760038 - DNA, 15 bp, Homo sapiens
ataaagagtcatgat

SEQ ID NO: 1760039 - DNA, 15 bp, Homo sapiens
taaagagtcatgatg

SEQ ID NO: 1760040 - DNA, 15 bp, Homo sapiens
aaagagtcatgatgt

SEQ ID NO: 1760041 - DNA, 15 bp, Homo sapiens
aagagtcatgatgtt

SEQ ID NO: 1760042 - DNA, 15 bp, Homo sapiens
agagtcatgatgtta

SEQ ID NO: 1760043 - DNA, 15 bp, Homo sapiens
gagtcatgatgttag

SEQ ID NO: 1760044 - DNA, 15 bp, Homo sapiens
agtcatgatgttaga

SEQ ID NO: 1760045 - DNA, 15 bp, Homo sapiens
gtcatgatgttagat

SEQ ID NO: 1760046 - DNA, 15 bp, Homo sapiens
tcatgatgttagata

SEQ ID NO: 1760047 - DNA, 15 bp, Homo sapiens
catgatgttagataa

SEQ ID NO: 1760048 - DNA, 15 bp, Homo sapiens
atgatgttagataat

SEQ ID NO: 1760049 - DNA, 15 bp, Homo sapiens
tgatgttagataatt

SEQ ID NO: 1760050 - DNA, 15 bp, Homo sapiens
gatgttagataatta

SEQ ID NO: 1760051 - DNA, 15 bp, Homo sapiens
atgttagataattac

SEQ ID NO: 1760052 - DNA, 15 bp, Homo sapiens
tgttagataattact

SEQ ID NO: 1760053 - DNA, 15 bp, Homo sapiens
gttagataattactt

SEQ ID NO: 1760054 - DNA, 15 bp, Homo sapiens
ttagataattacttg

SEQ ID NO: 1760055 - DNA, 15 bp, Homo sapiens
tagataattacttga

SEQ ID NO: 1760056 - DNA, 15 bp, Homo sapiens
agataattacttgaa

SEQ ID NO: 1760057 - DNA, 15 bp, Homo sapiens
gataattacttgaat

SEQ ID NO: 1760058 - DNA, 15 bp, Homo sapiens
ataattacttgaatt

SEQ ID NO: 1760059 - DNA, 15 bp, Homo sapiens
taattacttgaattt

SEQ ID NO: 1760060 - DNA, 15 bp, Homo sapiens
aattacttgaattta

SEQ ID NO: 1760061 - DNA, 15 bp, Homo sapiens
attacttgaatttag

SEQ ID NO: 1760062 - DNA, 15 bp, Homo sapiens
ttacttgaatttagt

SEQ ID NO: 1760063 - DNA, 15 bp, Homo sapiens
tacttgaatttagtt

SEQ ID NO: 1760064 - DNA, 15 bp, Homo sapiens
acttgaatttagttt

SEQ ID NO: 1760065 - DNA, 15 bp, Homo sapiens
cttgaatttagtttt

SEQ ID NO: 1760066 - DNA, 15 bp, Homo sapiens
ttgaatttagtttta

SEQ ID NO: 1760067 - DNA, 15 bp, Homo sapiens
tgaatttagttttag

SEQ ID NO: 1760068 - DNA, 15 bp, Homo sapiens
gaatttagttttaga

SEQ ID NO: 1760069 - DNA, 15 bp, Homo sapiens
aatttagttttagaa

SEQ ID NO: 1760070 - DNA, 15 bp, Homo sapiens
atttagttttagaat

SEQ ID NO: 1760071 - DNA, 15 bp, Homo sapiens
tttagttttagaatt

SEQ ID NO: 1760072 - DNA, 15 bp, Homo sapiens
ttagttttagaattt

SEQ ID NO: 1760073 - DNA, 15 bp, Homo sapiens
tagttttagaatttt

SEQ ID NO: 1760074 - DNA, 15 bp, Homo sapiens
agttttagaattttc

SEQ ID NO: 1760075 - DNA, 15 bp, Homo sapiens
gttttagaattttca

SEQ ID NO: 1760076 - DNA, 15 bp, Homo sapiens
tttagaattttcagt

SEQ ID NO: 1760077 - DNA, 15 bp, Homo sapiens
ttagaattttcagtt

SEQ ID NO: 1760078 - DNA, 15 bp, Homo sapiens
tagaattttcagttt

SEQ ID NO: 1760079 - DNA, 15 bp, Homo sapiens
agaattttcagtttg

SEQ ID NO: 1760080 - DNA, 15 bp, Homo sapiens
gaattttcagtttgt

SEQ ID NO: 1760081 - DNA, 15 bp, Homo sapiens
aattttcagtttgta

SEQ ID NO: 1760082 - DNA, 15 bp, Homo sapiens
attttcagtttgtaa

SEQ ID NO: 1760083 - DNA, 15 bp, Homo sapiens
ttttcagtttgtaaa

SEQ ID NO: 1760084 - DNA, 15 bp, Homo sapiens
tttcagtttgtaaac

SEQ ID NO: 1760085 - DNA, 15 bp, Homo sapiens
ttcagtttgtaaact

SEQ ID NO: 1760086 - DNA, 15 bp, Homo sapiens
tcagtttgtaaactt

SEQ ID NO: 1760087 - DNA, 15 bp, Homo sapiens
cagtttgtaaactta

SEQ ID NO: 1760088 - DNA, 15 bp, Homo sapiens
agtttgtaaacttac

SEQ ID NO: 1760089 - DNA, 15 bp, Homo sapiens
gtttgtaaacttaca

SEQ ID NO: 1760090 - DNA, 15 bp, Homo sapiens
tttgtaaacttacag

SEQ ID NO: 1760091 - DNA, 15 bp, Homo sapiens
ttgtaaacttacagt

SEQ ID NO: 1760092 - DNA, 15 bp, Homo sapiens
tgtaaacttacagtc

SEQ ID NO: 1760093 - DNA, 15 bp, Homo sapiens
gtaaacttacagtca

SEQ ID NO: 1760094 - DNA, 15 bp, Homo sapiens
taaacttacagtcaa

SEQ ID NO: 1760095 - DNA, 15 bp, Homo sapiens
aaacttacagtcaaa

SEQ ID NO: 1760096 - DNA, 15 bp, Homo sapiens
aacttacagtcaaat

SEQ ID NO: 1760097 - DNA, 15 bp, Homo sapiens
acttacagtcaaatc

SEQ ID NO: 1760098 - DNA, 15 bp, Homo sapiens
cttacagtcaaatct

SEQ ID NO: 1760099 - DNA, 15 bp, Homo sapiens
ttacagtcaaatctt

SEQ ID NO: 1760100 - DNA, 15 bp, Homo sapiens
tacagtcaaatctta

SEQ ID NO: 1760101 - DNA, 15 bp, Homo sapiens
acagtcaaatcttaa

SEQ ID NO: 1760102 - DNA, 15 bp, Homo sapiens
cagtcaaatcttaac

SEQ ID NO: 1760103 - DNA, 15 bp, Homo sapiens
agtcaaatcttaact

SEQ ID NO: 1760104 - DNA, 15 bp, Homo sapiens
gtcaaatcttaactg

SEQ ID NO: 1760105 - DNA, 15 bp, Homo sapiens
tcaaatcttaactgg

SEQ ID NO: 1760106 - DNA, 15 bp, Homo sapiens
caaatcttaactgga

SEQ ID NO: 1760107 - DNA, 15 bp, Homo sapiens
aaatcttaactggaa

SEQ ID NO: 1760108 - DNA, 15 bp, Homo sapiens
aatcttaactggaat

SEQ ID NO: 1760109 - DNA, 15 bp, Homo sapiens
atcttaactggaatt

SEQ ID NO: 1760110 - DNA, 15 bp, Homo sapiens
tcttaactggaattg

SEQ ID NO: 1760111 - DNA, 15 bp, Homo sapiens
cttaactggaattgt

SEQ ID NO: 1760112 - DNA, 15 bp, Homo sapiens
ttaactggaattgtg

SEQ ID NO: 1760113 - DNA, 15 bp, Homo sapiens
taactggaattgtga

SEQ ID NO: 1760114 - DNA, 15 bp, Homo sapiens
aactggaattgtgag

SEQ ID NO: 1760115 - DNA, 15 bp, Homo sapiens
actggaattgtgagg

SEQ ID NO: 1760116 - DNA, 15 bp, Homo sapiens
ctggaattgtgagga

SEQ ID NO: 1760117 - DNA, 15 bp, Homo sapiens
tggaattgtgaggaa

SEQ ID NO: 1760118 - DNA, 15 bp, Homo sapiens
ggaattgtgaggaag

SEQ ID NO: 1760119 - DNA, 15 bp, Homo sapiens
gaattgtgaggaagg

SEQ ID NO: 1760120 - DNA, 15 bp, Homo sapiens
aattgtgaggaaggg

SEQ ID NO: 1760121 - DNA, 15 bp, Homo sapiens
attgtgaggaagggc

SEQ ID NO: 1760122 - DNA, 15 bp, Homo sapiens
ttgtgaggaagggct

SEQ ID NO: 1760123 - DNA, 15 bp, Homo sapiens
tgtgaggaagggctc

SEQ ID NO: 1760124 - DNA, 15 bp, Homo sapiens
gtgaggaagggctct

SEQ ID NO: 1760125 - DNA, 15 bp, Homo sapiens
tgaggaagggctcta

SEQ ID NO: 1760126 - DNA, 15 bp, Homo sapiens
aggaagggctctaga

SEQ ID NO: 1760127 - DNA, 15 bp, Homo sapiens
ggaagggctctagaa

SEQ ID NO: 1760128 - DNA, 15 bp, Homo sapiens
gaagggctctagaat

SEQ ID NO: 1760129 - DNA, 15 bp, Homo sapiens
aagggctctagaatt

SEQ ID NO: 1760130 - DNA, 15 bp, Homo sapiens
agggctctagaattc

SEQ ID NO: 1760131 - DNA, 15 bp, Homo sapiens
gggctctagaattct

SEQ ID NO: 1760132 - DNA, 15 bp, Homo sapiens
ggctctagaattctg

SEQ ID NO: 1760133 - DNA, 15 bp, Homo sapiens
gctctagaattctgg

SEQ ID NO: 1760134 - DNA, 15 bp, Homo sapiens
ctctagaattctgga

SEQ ID NO: 1760135 - DNA, 15 bp, Homo sapiens
tctagaattctggat

SEQ ID NO: 1760136 - DNA, 15 bp, Homo sapiens
ctagaattctggata

SEQ ID NO: 1760137 - DNA, 15 bp, Homo sapiens
tagaattctggatat

SEQ ID NO: 1760138 - DNA, 15 bp, Homo sapiens
agaattctggatatg

SEQ ID NO: 1760139 - DNA, 15 bp, Homo sapiens
gaattctggatatgc

SEQ ID NO: 1760140 - DNA, 15 bp, Homo sapiens
aattctggatatgca

SEQ ID NO: 1760141 - DNA, 15 bp, Homo sapiens
attctggatatgcaa

SEQ ID NO: 1760142 - DNA, 15 bp, Homo sapiens
ttctggatatgcaag

SEQ ID NO: 1760143 - DNA, 15 bp, Homo sapiens
tctggatatgcaaga

SEQ ID NO: 1760144 - DNA, 15 bp, Homo sapiens
ctggatatgcaagaa

SEQ ID NO: 1760145 - DNA, 15 bp, Homo sapiens
tggatatgcaagaaa

SEQ ID NO: 1760146 - DNA, 15 bp, Homo sapiens
ggatatgcaagaaac

SEQ ID NO: 1760147 - DNA, 15 bp, Homo sapiens
gatatgcaagaaaca

SEQ ID NO: 1760148 - DNA, 15 bp, Homo sapiens
atatgcaagaaacaa

SEQ ID NO: 1760149 - DNA, 15 bp, Homo sapiens
tatgcaagaaacaaa

SEQ ID NO: 1760150 - DNA, 15 bp, Homo sapiens
atgcaagaaacaaag

SEQ ID NO: 1760151 - DNA, 15 bp, Homo sapiens
tgcaagaaacaaaga

SEQ ID NO: 1760152 - DNA, 15 bp, Homo sapiens
gcaagaaacaaagaa

SEQ ID NO: 1760153 - DNA, 15 bp, Homo sapiens
caagaaacaaagaag

SEQ ID NO: 1760154 - DNA, 15 bp, Homo sapiens
aagaaacaaagaaga

SEQ ID NO: 1760155 - DNA, 15 bp, Homo sapiens
agaaacaaagaagag

SEQ ID NO: 1760156 - DNA, 15 bp, Homo sapiens
gaaacaaagaagaga

SEQ ID NO: 1760157 - DNA, 15 bp, Homo sapiens
aaacaaagaagagaa

SEQ ID NO: 1760158 - DNA, 15 bp, Homo sapiens
aacaaagaagagaaa

SEQ ID NO: 1760159 - DNA, 15 bp, Homo sapiens
acaaagaagagaaat

SEQ ID NO: 1760160 - DNA, 15 bp, Homo sapiens
caaagaagagaaata

SEQ ID NO: 1760161 - DNA, 15 bp, Homo sapiens
aaagaagagaaatag

SEQ ID NO: 1760162 - DNA, 15 bp, Homo sapiens
aagaagagaaatagg

SEQ ID NO: 1760163 - DNA, 15 bp, Homo sapiens
agaagagaaatagga

SEQ ID NO: 1760164 - DNA, 15 bp, Homo sapiens
gaagagaaataggag

SEQ ID NO: 1760165 - DNA, 15 bp, Homo sapiens
aagagaaataggaga

SEQ ID NO: 1760166 - DNA, 15 bp, Homo sapiens
agagaaataggagaa

SEQ ID NO: 1760167 - DNA, 15 bp, Homo sapiens
gagaaataggagaaa

SEQ ID NO: 1760168 - DNA, 15 bp, Homo sapiens
agaaataggagaaat

SEQ ID NO: 1760169 - DNA, 15 bp, Homo sapiens
gaaataggagaaatc

SEQ ID NO: 1760170 - DNA, 15 bp, Homo sapiens
aaataggagaaatcg

SEQ ID NO: 1760171 - DNA, 15 bp, Homo sapiens
aataggagaaatcga

SEQ ID NO: 1760172 - DNA, 15 bp, Homo sapiens
ataggagaaatcgat

SEQ ID NO: 1760173 - DNA, 15 bp, Homo sapiens
taggagaaatcgatc

SEQ ID NO: 1760174 - DNA, 15 bp, Homo sapiens
aggagaaatcgatcc

SEQ ID NO: 1760175 - DNA, 15 bp, Homo sapiens
ggagaaatcgatcct

SEQ ID NO: 1760176 - DNA, 15 bp, Homo sapiens
gagaaatcgatccta

SEQ ID NO: 1760177 - DNA, 15 bp, Homo sapiens
agaaatcgatcctaa

SEQ ID NO: 1760178 - DNA, 15 bp, Homo sapiens
gaaatcgatcctaat

SEQ ID NO: 1760179 - DNA, 15 bp, Homo sapiens
aaatcgatcctaatt

SEQ ID NO: 1760180 - DNA, 15 bp, Homo sapiens
aatcgatcctaatta

SEQ ID NO: 1760181 - DNA, 15 bp, Homo sapiens
atcgatcctaattag

SEQ ID NO: 1760182 - DNA, 15 bp, Homo sapiens
tcgatcctaattagt

SEQ ID NO: 1760183 - DNA, 15 bp, Homo sapiens
cgatcctaattagtg

SEQ ID NO: 1760184 - DNA, 15 bp, Homo sapiens
gatcctaattagtgt

SEQ ID NO: 1760185 - DNA, 15 bp, Homo sapiens
atcctaattagtgtg

SEQ ID NO: 1760186 - DNA, 15 bp, Homo sapiens
tcctaattagtgtgg

SEQ ID NO: 1760187 - DNA, 15 bp, Homo sapiens
cctaattagtgtggc

SEQ ID NO: 1760188 - DNA, 15 bp, Homo sapiens
ctaattagtgtggct

SEQ ID NO: 1760189 - DNA, 15 bp, Homo sapiens
taattagtgtggctt

SEQ ID NO: 1760190 - DNA, 15 bp, Homo sapiens
aattagtgtggcttc

SEQ ID NO: 1760191 - DNA, 15 bp, Homo sapiens
attagtgtggcttct

SEQ ID NO: 1760192 - DNA, 15 bp, Homo sapiens
ttagtgtggcttctg

SEQ ID NO: 1760193 - DNA, 15 bp, Homo sapiens
tagtgtggcttctga

SEQ ID NO: 1760194 - DNA, 15 bp, Homo sapiens
agtgtggcttctgaa

SEQ ID NO: 1760195 - DNA, 15 bp, Homo sapiens
gtgtggcttctgaat

SEQ ID NO: 1760196 - DNA, 15 bp, Homo sapiens
tgtggcttctgaatt

SEQ ID NO: 1760197 - DNA, 15 bp, Homo sapiens
gtggcttctgaattt

SEQ ID NO: 1760198 - DNA, 15 bp, Homo sapiens
tggcttctgaatttc

SEQ ID NO: 1760199 - DNA, 15 bp, Homo sapiens
ggcttctgaatttct

SEQ ID NO: 1760200 - DNA, 15 bp, Homo sapiens
gcttctgaatttctg

SEQ ID NO: 1760201 - DNA, 15 bp, Homo sapiens
cttctgaatttctgc

SEQ ID NO: 1760202 - DNA, 15 bp, Homo sapiens
ttctgaatttctgca

SEQ ID NO: 1760203 - DNA, 15 bp, Homo sapiens
tctgaatttctgcag

SEQ ID NO: 1760204 - DNA, 15 bp, Homo sapiens
ctgaatttctgcagc

SEQ ID NO: 1760205 - DNA, 15 bp, Homo sapiens
tgaatttctgcagca

SEQ ID NO: 1760206 - DNA, 15 bp, Homo sapiens
gaatttctgcagcaa

SEQ ID NO: 1760207 - DNA, 15 bp, Homo sapiens
aatttctgcagcaaa

SEQ ID NO: 1760208 - DNA, 15 bp, Homo sapiens
atttctgcagcaaaa

SEQ ID NO: 1760209 - DNA, 15 bp, Homo sapiens
tttctgcagcaaaat

SEQ ID NO: 1760210 - DNA, 15 bp, Homo sapiens
ttctgcagcaaaata

SEQ ID NO: 1760211 - DNA, 15 bp, Homo sapiens
tctgcagcaaaataa

SEQ ID NO: 1760212 - DNA, 15 bp, Homo sapiens
ctgcagcaaaataaa

SEQ ID NO: 1760213 - DNA, 15 bp, Homo sapiens
tgcagcaaaataaaa

SEQ ID NO: 1760214 - DNA, 15 bp, Homo sapiens
gcagcaaaataaaag

SEQ ID NO: 1760215 - DNA, 15 bp, Homo sapiens
cagcaaaataaaagg

SEQ ID NO: 1760216 - DNA, 15 bp, Homo sapiens
agcaaaataaaaggc

SEQ ID NO: 1760217 - DNA, 15 bp, Homo sapiens
gcaaaataaaaggct

SEQ ID NO: 1760218 - DNA, 15 bp, Homo sapiens
caaaataaaaggctg

SEQ ID NO: 1760219 - DNA, 15 bp, Homo sapiens
aaaataaaaggctgt

SEQ ID NO: 1760220 - DNA, 15 bp, Homo sapiens
aaataaaaggctgtt

SEQ ID NO: 1760221 - DNA, 15 bp, Homo sapiens
aataaaaggctgtta

SEQ ID NO: 1760222 - DNA, 15 bp, Homo sapiens
ataaaaggctgttat

SEQ ID NO: 1760223 - DNA, 15 bp, Homo sapiens
taaaaggctgttatt

SEQ ID NO: 1760224 - DNA, 15 bp, Homo sapiens
aaaaggctgttatta

SEQ ID NO: 1760225 - DNA, 15 bp, Homo sapiens
aaaggctgttattaa

SEQ ID NO: 1760226 - DNA, 15 bp, Homo sapiens
aaggctgttattaat

SEQ ID NO: 1760227 - DNA, 15 bp, Homo sapiens
aggctgttattaatt

SEQ ID NO: 1760228 - DNA, 15 bp, Homo sapiens
ggctgttattaatta

SEQ ID NO: 1760229 - DNA, 15 bp, Homo sapiens
gctgttattaattat

SEQ ID NO: 1760230 - DNA, 15 bp, Homo sapiens
ctgttattaattatt

SEQ ID NO: 1760231 - DNA, 15 bp, Homo sapiens
tgttattaattattg

SEQ ID NO: 1760232 - DNA, 15 bp, Homo sapiens
gttattaattattga

SEQ ID NO: 1760233 - DNA, 15 bp, Homo sapiens
ttattaattattgag

SEQ ID NO: 1760234 - DNA, 15 bp, Homo sapiens
tattaattattgagt

SEQ ID NO: 1760235 - DNA, 15 bp, Homo sapiens
attaattattgagtt

SEQ ID NO: 1760236 - DNA, 15 bp, Homo sapiens
ttaattattgagttt

SEQ ID NO: 1760237 - DNA, 15 bp, Homo sapiens
taattattgagttta

SEQ ID NO: 1760238 - DNA, 15 bp, Homo sapiens
aattattgagtttac

SEQ ID NO: 1760239 - DNA, 15 bp, Homo sapiens
attattgagtttact

SEQ ID NO: 1760240 - DNA, 15 bp, Homo sapiens
ttattgagtttacta

SEQ ID NO: 1760241 - DNA, 15 bp, Homo sapiens
tattgagtttactaa

SEQ ID NO: 1760242 - DNA, 15 bp, Homo sapiens
attgagtttactaaa

SEQ ID NO: 1760243 - DNA, 15 bp, Homo sapiens
ttgagtttactaaaa

SEQ ID NO: 1760244 - DNA, 15 bp, Homo sapiens
tgagtttactaaaat

SEQ ID NO: 1760245 - DNA, 15 bp, Homo sapiens
gagtttactaaaatt

SEQ ID NO: 1760246 - DNA, 15 bp, Homo sapiens
agtttactaaaattt

SEQ ID NO: 1760247 - DNA, 15 bp, Homo sapiens
gtttactaaaatttt

SEQ ID NO: 1760248 - DNA, 15 bp, Homo sapiens
tttactaaaatttta

SEQ ID NO: 1760249 - DNA, 15 bp, Homo sapiens
ttactaaaattttag

SEQ ID NO: 1760250 - DNA, 15 bp, Homo sapiens
tactaaaattttaga

SEQ ID NO: 1760251 - DNA, 15 bp, Homo sapiens
actaaaattttagaa

SEQ ID NO: 1760252 - DNA, 15 bp, Homo sapiens
ctaaaattttagaac

SEQ ID NO: 1760253 - DNA, 15 bp, Homo sapiens
taaaattttagaact

SEQ ID NO: 1760254 - DNA, 15 bp, Homo sapiens
aaaattttagaacta

SEQ ID NO: 1760255 - DNA, 15 bp, Homo sapiens
aaattttagaactac

SEQ ID NO: 1760256 - DNA, 15 bp, Homo sapiens
aattttagaactact

SEQ ID NO: 1760257 - DNA, 15 bp, Homo sapiens
attttagaactactc

SEQ ID NO: 1760258 - DNA, 15 bp, Homo sapiens
ttttagaactactct

SEQ ID NO: 1760259 - DNA, 15 bp, Homo sapiens
tttagaactactcta

SEQ ID NO: 1760260 - DNA, 15 bp, Homo sapiens
ttagaactactctaa

SEQ ID NO: 1760261 - DNA, 15 bp, Homo sapiens
tagaactactctaag

SEQ ID NO: 1760262 - DNA, 15 bp, Homo sapiens
agaactactctaagg

SEQ ID NO: 1760263 - DNA, 15 bp, Homo sapiens
gaactactctaaggc

SEQ ID NO: 1760264 - DNA, 15 bp, Homo sapiens
aactactctaaggca

SEQ ID NO: 1760265 - DNA, 15 bp, Homo sapiens
actactctaaggcaa

SEQ ID NO: 1760266 - DNA, 15 bp, Homo sapiens
ctactctaaggcaat

SEQ ID NO: 1760267 - DNA, 15 bp, Homo sapiens
tactctaaggcaatt

SEQ ID NO: 1760268 - DNA, 15 bp, Homo sapiens
actctaaggcaatta

SEQ ID NO: 1760269 - DNA, 15 bp, Homo sapiens
ctctaaggcaattat

SEQ ID NO: 1760270 - DNA, 15 bp, Homo sapiens
tctaaggcaattatg

SEQ ID NO: 1760271 - DNA, 15 bp, Homo sapiens
ctaaggcaattatgc

SEQ ID NO: 1760272 - DNA, 15 bp, Homo sapiens
taaggcaattatgct

SEQ ID NO: 1760273 - DNA, 15 bp, Homo sapiens
aaggcaattatgctt

SEQ ID NO: 1760274 - DNA, 15 bp, Homo sapiens
aggcaattatgcttc

SEQ ID NO: 1760275 - DNA, 15 bp, Homo sapiens
ggcaattatgcttca

SEQ ID NO: 1760276 - DNA, 15 bp, Homo sapiens
gcaattatgcttcaa

SEQ ID NO: 1760277 - DNA, 15 bp, Homo sapiens
caattatgcttcaat

SEQ ID NO: 1760278 - DNA, 15 bp, Homo sapiens
aattatgcttcaatc

SEQ ID NO: 1760279 - DNA, 15 bp, Homo sapiens
attatgcttcaatca

SEQ ID NO: 1760280 - DNA, 15 bp, Homo sapiens
ttatgcttcaatcat

SEQ ID NO: 1760281 - DNA, 15 bp, Homo sapiens
tatgcttcaatcatc

SEQ ID NO: 1760282 - DNA, 15 bp, Homo sapiens
atgcttcaatcatct

SEQ ID NO: 1760283 - DNA, 15 bp, Homo sapiens
tgcttcaatcatcta

SEQ ID NO: 1760284 - DNA, 15 bp, Homo sapiens
gcttcaatcatctaa

SEQ ID NO: 1760285 - DNA, 15 bp, Homo sapiens
cttcaatcatctaag

SEQ ID NO: 1760286 - DNA, 15 bp, Homo sapiens
ttcaatcatctaagc

SEQ ID NO: 1760287 - DNA, 15 bp, Homo sapiens
tcaatcatctaagct

SEQ ID NO: 1760288 - DNA, 15 bp, Homo sapiens
caatcatctaagctt

SEQ ID NO: 1760289 - DNA, 15 bp, Homo sapiens
aatcatctaagctta

SEQ ID NO: 1760290 - DNA, 15 bp, Homo sapiens
atcatctaagcttac

SEQ ID NO: 1760291 - DNA, 15 bp, Homo sapiens
tcatctaagcttact

SEQ ID NO: 1760292 - DNA, 15 bp, Homo sapiens
catctaagcttactt

SEQ ID NO: 1760293 - DNA, 15 bp, Homo sapiens
atctaagcttactta

SEQ ID NO: 1760294 - DNA, 15 bp, Homo sapiens
tctaagcttacttac

SEQ ID NO: 1760295 - DNA, 15 bp, Homo sapiens
ctaagcttacttacc

SEQ ID NO: 1760296 - DNA, 15 bp, Homo sapiens
taagcttacttacct

SEQ ID NO: 1760297 - DNA, 15 bp, Homo sapiens
aagcttacttacctt

SEQ ID NO: 1760298 - DNA, 15 bp, Homo sapiens
agcttacttaccttt

SEQ ID NO: 1760299 - DNA, 15 bp, Homo sapiens
gcttacttaccttta

SEQ ID NO: 1760300 - DNA, 15 bp, Homo sapiens
cttacttacctttaa

SEQ ID NO: 1760301 - DNA, 15 bp, Homo sapiens
ttacttacctttaat

SEQ ID NO: 1760302 - DNA, 15 bp, Homo sapiens
tacttacctttaatt

SEQ ID NO: 1760303 - DNA, 15 bp, Homo sapiens
acttacctttaatta

SEQ ID NO: 1760304 - DNA, 15 bp, Homo sapiens
cttacctttaattat

SEQ ID NO: 1760305 - DNA, 15 bp, Homo sapiens
ttacctttaattata

SEQ ID NO: 1760306 - DNA, 15 bp, Homo sapiens
tacctttaattataa

SEQ ID NO: 1760307 - DNA, 15 bp, Homo sapiens
acctttaattataaa

SEQ ID NO: 1760308 - DNA, 15 bp, Homo sapiens
cctttaattataaaa

SEQ ID NO: 1760309 - DNA, 15 bp, Homo sapiens
ctttaattataaaat

SEQ ID NO: 1760310 - DNA, 15 bp, Homo sapiens
tttaattataaaata

SEQ ID NO: 1760311 - DNA, 15 bp, Homo sapiens
ttaattataaaatag

SEQ ID NO: 1760312 - DNA, 15 bp, Homo sapiens
taattataaaataga

SEQ ID NO: 1760313 - DNA, 15 bp, Homo sapiens
aattataaaatagaa

SEQ ID NO: 1760314 - DNA, 15 bp, Homo sapiens
attataaaatagaac

SEQ ID NO: 1760315 - DNA, 15 bp, Homo sapiens
ttataaaatagaaca

SEQ ID NO: 1760316 - DNA, 15 bp, Homo sapiens
tataaaatagaacaa

SEQ ID NO: 1760317 - DNA, 15 bp, Homo sapiens
ataaaatagaacaac

SEQ ID NO: 1760318 - DNA, 15 bp, Homo sapiens
taaaatagaacaact

SEQ ID NO: 1760319 - DNA, 15 bp, Homo sapiens
aaaatagaacaactt

SEQ ID NO: 1760320 - DNA, 15 bp, Homo sapiens
aaatagaacaacttt

SEQ ID NO: 1760321 - DNA, 15 bp, Homo sapiens
aatagaacaactttt

SEQ ID NO: 1760322 - DNA, 15 bp, Homo sapiens
atagaacaacttttt

SEQ ID NO: 1760323 - DNA, 15 bp, Homo sapiens
tagaacaactttttg

SEQ ID NO: 1760324 - DNA, 15 bp, Homo sapiens
agaacaactttttgg

SEQ ID NO: 1760325 - DNA, 15 bp, Homo sapiens
gaacaactttttggc

SEQ ID NO: 1760326 - DNA, 15 bp, Homo sapiens
aacaactttttggca

SEQ ID NO: 1760327 - DNA, 15 bp, Homo sapiens
acaactttttggcat

SEQ ID NO: 1760328 - DNA, 15 bp, Homo sapiens
caactttttggcatt

SEQ ID NO: 1760329 - DNA, 15 bp, Homo sapiens
aactttttggcattt

SEQ ID NO: 1760330 - DNA, 15 bp, Homo sapiens
actttttggcatttc

SEQ ID NO: 1760331 - DNA, 15 bp, Homo sapiens
ctttttggcatttca

SEQ ID NO: 1760332 - DNA, 15 bp, Homo sapiens
tttttggcatttcat

SEQ ID NO: 1760333 - DNA, 15 bp, Homo sapiens
ttttggcatttcatt

SEQ ID NO: 1760334 - DNA, 15 bp, Homo sapiens
tttggcatttcattt

SEQ ID NO: 1760335 - DNA, 15 bp, Homo sapiens
ttggcatttcatttt

SEQ ID NO: 1760336 - DNA, 15 bp, Homo sapiens
tggcatttcattttt

SEQ ID NO: 1760337 - DNA, 15 bp, Homo sapiens
ggcatttcatttttc

SEQ ID NO: 1760338 - DNA, 15 bp, Homo sapiens
gcatttcatttttcc

SEQ ID NO: 1760339 - DNA, 15 bp, Homo sapiens
catttcatttttcca

SEQ ID NO: 1760340 - DNA, 15 bp, Homo sapiens
atttcatttttccaa

SEQ ID NO: 1760341 - DNA, 15 bp, Homo sapiens
tttcatttttccaac

SEQ ID NO: 1760342 - DNA, 15 bp, Homo sapiens
ttcatttttccaact

SEQ ID NO: 1760343 - DNA, 15 bp, Homo sapiens
tcatttttccaacta

SEQ ID NO: 1760344 - DNA, 15 bp, Homo sapiens
catttttccaactat

SEQ ID NO: 1760345 - DNA, 15 bp, Homo sapiens
atttttccaactatt

SEQ ID NO: 1760346 - DNA, 15 bp, Homo sapiens
tttttccaactattt

SEQ ID NO: 1760347 - DNA, 15 bp, Homo sapiens
ttttccaactattta

SEQ ID NO: 1760348 - DNA, 15 bp, Homo sapiens
tttccaactatttat

SEQ ID NO: 1760349 - DNA, 15 bp, Homo sapiens
ttccaactatttata

SEQ ID NO: 1760350 - DNA, 15 bp, Homo sapiens
tccaactatttatag

SEQ ID NO: 1760351 - DNA, 15 bp, Homo sapiens
ccaactatttatagc

SEQ ID NO: 1760352 - DNA, 15 bp, Homo sapiens
caactatttatagca

SEQ ID NO: 1760353 - DNA, 15 bp, Homo sapiens
aactatttatagcat

SEQ ID NO: 1760354 - DNA, 15 bp, Homo sapiens
actatttatagcatg

SEQ ID NO: 1760355 - DNA, 15 bp, Homo sapiens
ctatttatagcatgt

SEQ ID NO: 1760356 - DNA, 15 bp, Homo sapiens
tatttatagcatgtt

SEQ ID NO: 1760357 - DNA, 15 bp, Homo sapiens
atttatagcatgttt

SEQ ID NO: 1760358 - DNA, 15 bp, Homo sapiens
tttatagcatgtttt

SEQ ID NO: 1760359 - DNA, 15 bp, Homo sapiens
ttatagcatgtttta

SEQ ID NO: 1760360 - DNA, 15 bp, Homo sapiens
tatagcatgttttaa

SEQ ID NO: 1760361 - DNA, 15 bp, Homo sapiens
atagcatgttttaaa

SEQ ID NO: 1760362 - DNA, 15 bp, Homo sapiens
tagcatgttttaaaa

SEQ ID NO: 1760363 - DNA, 15 bp, Homo sapiens
agcatgttttaaaaa

SEQ ID NO: 1760364 - DNA, 15 bp, Homo sapiens
gcatgttttaaaaac

SEQ ID NO: 1760365 - DNA, 15 bp, Homo sapiens
gttttaaaaactctg

SEQ ID NO: 1760366 - DNA, 15 bp, Homo sapiens
ttttaaaaactctga

SEQ ID NO: 1760367 - DNA, 15 bp, Homo sapiens
tttaaaaactctgaa

SEQ ID NO: 1760368 - DNA, 15 bp, Homo sapiens
ttaaaaactctgaac

SEQ ID NO: 1760369 - DNA, 15 bp, Homo sapiens
taaaaactctgaact

SEQ ID NO: 1760370 - DNA, 15 bp, Homo sapiens
aaaaactctgaactg

SEQ ID NO: 1760371 - DNA, 15 bp, Homo sapiens
aaaactctgaactgt

SEQ ID NO: 1760372 - DNA, 15 bp, Homo sapiens
aaactctgaactgtc

SEQ ID NO: 1760373 - DNA, 15 bp, Homo sapiens
aactctgaactgtca

SEQ ID NO: 1760374 - DNA, 15 bp, Homo sapiens
actctgaactgtcac

SEQ ID NO: 1760375 - DNA, 15 bp, Homo sapiens
ctctgaactgtcacg

SEQ ID NO: 1760376 - DNA, 15 bp, Homo sapiens
tctgaactgtcacga

SEQ ID NO: 1760377 - DNA, 15 bp, Homo sapiens
ctgaactgtcacgac

SEQ ID NO: 1760378 - DNA, 15 bp, Homo sapiens
tgaactgtcacgacc

SEQ ID NO: 1760379 - DNA, 15 bp, Homo sapiens
gaactgtcacgaccc

SEQ ID NO: 1760380 - DNA, 15 bp, Homo sapiens
aactgtcacgaccca

SEQ ID NO: 1760381 - DNA, 15 bp, Homo sapiens
actgtcacgacccag

SEQ ID NO: 1760382 - DNA, 15 bp, Homo sapiens
ctgtcacgacccagt

SEQ ID NO: 1760383 - DNA, 15 bp, Homo sapiens
tgtcacgacccagtc

SEQ ID NO: 1760384 - DNA, 15 bp, Homo sapiens
gtcacgacccagtct

SEQ ID NO: 1760385 - DNA, 15 bp, Homo sapiens
tcacgacccagtctg

SEQ ID NO: 1760386 - DNA, 15 bp, Homo sapiens
cacgacccagtctgt

SEQ ID NO: 1760387 - DNA, 15 bp, Homo sapiens
acgacccagtctgtt

SEQ ID NO: 1760388 - DNA, 15 bp, Homo sapiens
cgacccagtctgttt

SEQ ID NO: 1760389 - DNA, 15 bp, Homo sapiens
gacccagtctgtttc

SEQ ID NO: 1760390 - DNA, 15 bp, Homo sapiens
acccagtctgtttca

SEQ ID NO: 1760391 - DNA, 15 bp, Homo sapiens
cccagtctgtttcaa

SEQ ID NO: 1760392 - DNA, 15 bp, Homo sapiens
ccagtctgtttcaac

SEQ ID NO: 1760393 - DNA, 15 bp, Homo sapiens
cagtctgtttcaaca

SEQ ID NO: 1760394 - DNA, 15 bp, Homo sapiens
agtctgtttcaacat

SEQ ID NO: 1760395 - DNA, 15 bp, Homo sapiens
gtctgtttcaacata

SEQ ID NO: 1760396 - DNA, 15 bp, Homo sapiens
tctgtttcaacatac

SEQ ID NO: 1760397 - DNA, 15 bp, Homo sapiens
ctgtttcaacataca

SEQ ID NO: 1760398 - DNA, 15 bp, Homo sapiens
tgtttcaacatacac

SEQ ID NO: 1760399 - DNA, 15 bp, Homo sapiens
gtttcaacatacaca

SEQ ID NO: 1760400 - DNA, 15 bp, Homo sapiens
tttcaacatacacat

SEQ ID NO: 1760401 - DNA, 15 bp, Homo sapiens
ttcaacatacacatt

SEQ ID NO: 1760402 - DNA, 15 bp, Homo sapiens
tcaacatacacattt

SEQ ID NO: 1760403 - DNA, 15 bp, Homo sapiens
caacatacacatttg

SEQ ID NO: 1760404 - DNA, 15 bp, Homo sapiens
aacatacacatttgt

SEQ ID NO: 1760405 - DNA, 15 bp, Homo sapiens
acatacacatttgtg

SEQ ID NO: 1760406 - DNA, 15 bp, Homo sapiens
catacacatttgtgg

SEQ ID NO: 1760407 - DNA, 15 bp, Homo sapiens
atacacatttgtggt

SEQ ID NO: 1760408 - DNA, 15 bp, Homo sapiens
tacacatttgtggtc

SEQ ID NO: 1760409 - DNA, 15 bp, Homo sapiens
acacatttgtggtcc

SEQ ID NO: 1760410 - DNA, 15 bp, Homo sapiens
cacatttgtggtcct

SEQ ID NO: 1760411 - DNA, 15 bp, Homo sapiens
acatttgtggtcctt

SEQ ID NO: 1760412 - DNA, 15 bp, Homo sapiens
catttgtggtccttg

SEQ ID NO: 1760413 - DNA, 15 bp, Homo sapiens
atttgtggtccttgg

SEQ ID NO: 1760414 - DNA, 15 bp, Homo sapiens
tttgtggtccttggt

SEQ ID NO: 1760415 - DNA, 15 bp, Homo sapiens
ttgtggtccttggtg

SEQ ID NO: 1760416 - DNA, 15 bp, Homo sapiens
tgtggtccttggtgt

SEQ ID NO: 1760417 - DNA, 15 bp, Homo sapiens
gtggtccttggtgtt

SEQ ID NO: 1760418 - DNA, 15 bp, Homo sapiens
tggtccttggtgttg

SEQ ID NO: 1760419 - DNA, 15 bp, Homo sapiens
ggtccttggtgttgt

SEQ ID NO: 1760420 - DNA, 15 bp, Homo sapiens
gtccttggtgttgtt

SEQ ID NO: 1760421 - DNA, 15 bp, Homo sapiens
tccttggtgttgtta

SEQ ID NO: 1760422 - DNA, 15 bp, Homo sapiens
ccttggtgttgttac

SEQ ID NO: 1760423 - DNA, 15 bp, Homo sapiens
cttggtgttgttact

SEQ ID NO: 1760424 - DNA, 15 bp, Homo sapiens
ttggtgttgttacta

SEQ ID NO: 1760425 - DNA, 15 bp, Homo sapiens
tggtgttgttactaa

SEQ ID NO: 1760426 - DNA, 15 bp, Homo sapiens
ggtgttgttactaat

SEQ ID NO: 1760427 - DNA, 15 bp, Homo sapiens
gtgttgttactaatt

SEQ ID NO: 1760428 - DNA, 15 bp, Homo sapiens
tgttgttactaattt

SEQ ID NO: 1760429 - DNA, 15 bp, Homo sapiens
gttgttactaattta

SEQ ID NO: 1760430 - DNA, 15 bp, Homo sapiens
ttgttactaatttac

SEQ ID NO: 1760431 - DNA, 15 bp, Homo sapiens
tgttactaatttact

SEQ ID NO: 1760432 - DNA, 15 bp, Homo sapiens
gttactaatttactt

SEQ ID NO: 1760433 - DNA, 15 bp, Homo sapiens
ttactaatttactta

SEQ ID NO: 1760434 - DNA, 15 bp, Homo sapiens
tactaatttacttaa

SEQ ID NO: 1760435 - DNA, 15 bp, Homo sapiens
actaatttacttaat

SEQ ID NO: 1760436 - DNA, 15 bp, Homo sapiens
ctaatttacttaatt

SEQ ID NO: 1760437 - DNA, 15 bp, Homo sapiens
taatttacttaattg

SEQ ID NO: 1760438 - DNA, 15 bp, Homo sapiens
aatttacttaattgg

SEQ ID NO: 1760439 - DNA, 15 bp, Homo sapiens
atttacttaattggg

SEQ ID NO: 1760440 - DNA, 15 bp, Homo sapiens
tttacttaattgggt

SEQ ID NO: 1760441 - DNA, 15 bp, Homo sapiens
ttacttaattgggtc

SEQ ID NO: 1760442 - DNA, 15 bp, Homo sapiens
tacttaattgggtct

SEQ ID NO: 1760443 - DNA, 15 bp, Homo sapiens
acttaattgggtctt

SEQ ID NO: 1760444 - DNA, 15 bp, Homo sapiens
cttaattgggtcttc

SEQ ID NO: 1760445 - DNA, 15 bp, Homo sapiens
ttaattgggtcttca

SEQ ID NO: 1760446 - DNA, 15 bp, Homo sapiens
taattgggtcttcat

SEQ ID NO: 1760447 - DNA, 15 bp, Homo sapiens
aattgggtcttcata

SEQ ID NO: 1760448 - DNA, 15 bp, Homo sapiens
attgggtcttcatat

SEQ ID NO: 1760449 - DNA, 15 bp, Homo sapiens
ttgggtcttcatatt

SEQ ID NO: 1760450 - DNA, 15 bp, Homo sapiens
tgggtcttcatattt

SEQ ID NO: 1760451 - DNA, 15 bp, Homo sapiens
gggtcttcatatttt

SEQ ID NO: 1760452 - DNA, 15 bp, Homo sapiens
ggtcttcatattttc

SEQ ID NO: 1760453 - DNA, 15 bp, Homo sapiens
gtcttcatattttca

SEQ ID NO: 1760454 - DNA, 15 bp, Homo sapiens
tcttcatattttcag

SEQ ID NO: 1760455 - DNA, 15 bp, Homo sapiens
cttcatattttcagc

SEQ ID NO: 1760456 - DNA, 15 bp, Homo sapiens
ttcatattttcagct

SEQ ID NO: 1760457 - DNA, 15 bp, Homo sapiens
tcatattttcagctt

SEQ ID NO: 1760458 - DNA, 15 bp, Homo sapiens
catattttcagcttt

SEQ ID NO: 1760459 - DNA, 15 bp, Homo sapiens
atattttcagctttt

SEQ ID NO: 1760460 - DNA, 15 bp, Homo sapiens
tattttcagcttttc

SEQ ID NO: 1760461 - DNA, 15 bp, Homo sapiens
ttttcagcttttctc

SEQ ID NO: 1760462 - DNA, 15 bp, Homo sapiens
tttcagcttttctca

SEQ ID NO: 1760463 - DNA, 15 bp, Homo sapiens
ttcagcttttctcag

SEQ ID NO: 1760464 - DNA, 15 bp, Homo sapiens
tcagcttttctcaga

SEQ ID NO: 1760465 - DNA, 15 bp, Homo sapiens
cagcttttctcagaa

SEQ ID NO: 1760466 - DNA, 15 bp, Homo sapiens
agcttttctcagaaa

SEQ ID NO: 1760467 - DNA, 15 bp, Homo sapiens
gcttttctcagaaat

SEQ ID NO: 1760468 - DNA, 15 bp, Homo sapiens
cttttctcagaaatg

SEQ ID NO: 1760469 - DNA, 15 bp, Homo sapiens
ttttctcagaaatgg

SEQ ID NO: 1760470 - DNA, 15 bp, Homo sapiens
tttctcagaaatggc

SEQ ID NO: 1760471 - DNA, 15 bp, Homo sapiens
ttctcagaaatggcc

SEQ ID NO: 1760472 - DNA, 15 bp, Homo sapiens
tctcagaaatggcca

SEQ ID NO: 1760473 - DNA, 15 bp, Homo sapiens
ctcagaaatggccaa

SEQ ID NO: 1760474 - DNA, 15 bp, Homo sapiens
tcagaaatggccaaa

SEQ ID NO: 1760475 - DNA, 15 bp, Homo sapiens
cagaaatggccaaat

SEQ ID NO: 1760476 - DNA, 15 bp, Homo sapiens
agaaatggccaaata

SEQ ID NO: 1760477 - DNA, 15 bp, Homo sapiens
gaaatggccaaatat

SEQ ID NO: 1760478 - DNA, 15 bp, Homo sapiens
aaatggccaaatatc

SEQ ID NO: 1760479 - DNA, 15 bp, Homo sapiens
aatggccaaatatca

SEQ ID NO: 1760480 - DNA, 15 bp, Homo sapiens
atggccaaatatcaa

SEQ ID NO: 1760481 - DNA, 15 bp, Homo sapiens
tggccaaatatcaaa

SEQ ID NO: 1760482 - DNA, 15 bp, Homo sapiens
ggccaaatatcaaag

SEQ ID NO: 1760483 - DNA, 15 bp, Homo sapiens
gccaaatatcaaagg

SEQ ID NO: 1760484 - DNA, 15 bp, Homo sapiens
ccaaatatcaaaggt

SEQ ID NO: 1760485 - DNA, 15 bp, Homo sapiens
caaatatcaaaggta

SEQ ID NO: 1760486 - DNA, 15 bp, Homo sapiens
aaatatcaaaggtat

SEQ ID NO: 1760487 - DNA, 15 bp, Homo sapiens
aatatcaaaggtatt

SEQ ID NO: 1760488 - DNA, 15 bp, Homo sapiens
atatcaaaggtattt

SEQ ID NO: 1760489 - DNA, 15 bp, Homo sapiens
tatcaaaggtatttt

SEQ ID NO: 1760490 - DNA, 15 bp, Homo sapiens
atcaaaggtattttt

SEQ ID NO: 1760491 - DNA, 15 bp, Homo sapiens
tcaaaggtatttttg

SEQ ID NO: 1760492 - DNA, 15 bp, Homo sapiens
caaaggtatttttgg

SEQ ID NO: 1760493 - DNA, 15 bp, Homo sapiens
aaaggtatttttggt

SEQ ID NO: 1760494 - DNA, 15 bp, Homo sapiens
aaggtatttttggtg

SEQ ID NO: 1760495 - DNA, 15 bp, Homo sapiens
aggtatttttggtgt

SEQ ID NO: 1760496 - DNA, 15 bp, Homo sapiens
ggtatttttggtgtc

SEQ ID NO: 1760497 - DNA, 15 bp, Homo sapiens
gtatttttggtgtct

SEQ ID NO: 1760498 - DNA, 15 bp, Homo sapiens
tatttttggtgtctt

SEQ ID NO: 1760499 - DNA, 15 bp, Homo sapiens
atttttggtgtcttc

SEQ ID NO: 1760500 - DNA, 15 bp, Homo sapiens
tttttggtgtcttcc

SEQ ID NO: 1760501 - DNA, 15 bp, Homo sapiens
ttttggtgtcttcct

SEQ ID NO: 1760502 - DNA, 15 bp, Homo sapiens
tttggtgtcttcctg

SEQ ID NO: 1760503 - DNA, 15 bp, Homo sapiens
ttggtgtcttcctgt

SEQ ID NO: 1760504 - DNA, 15 bp, Homo sapiens
tggtgtcttcctgta

SEQ ID NO: 1760505 - DNA, 15 bp, Homo sapiens
ggtgtcttcctgtaa

SEQ ID NO: 1760506 - DNA, 15 bp, Homo sapiens
gtgtcttcctgtaag

SEQ ID NO: 1760507 - DNA, 15 bp, Homo sapiens
tgtcttcctgtaagt

SEQ ID NO: 1760508 - DNA, 15 bp, Homo sapiens
gtcttcctgtaagtg

SEQ ID NO: 1760509 - DNA, 15 bp, Homo sapiens
tcttcctgtaagtgc

SEQ ID NO: 1760510 - DNA, 15 bp, Homo sapiens
cttcctgtaagtgct

SEQ ID NO: 1760511 - DNA, 15 bp, Homo sapiens
ttcctgtaagtgcta

SEQ ID NO: 1760512 - DNA, 15 bp, Homo sapiens
tcctgtaagtgctag

SEQ ID NO: 1760513 - DNA, 15 bp, Homo sapiens
cctgtaagtgctaga

SEQ ID NO: 1760514 - DNA, 15 bp, Homo sapiens
ctgtaagtgctagat

SEQ ID NO: 1760515 - DNA, 15 bp, Homo sapiens
tgtaagtgctagatt

SEQ ID NO: 1760516 - DNA, 15 bp, Homo sapiens
gtaagtgctagattt

SEQ ID NO: 1760517 - DNA, 15 bp, Homo sapiens
taagtgctagattta

SEQ ID NO: 1760518 - DNA, 15 bp, Homo sapiens
aagtgctagatttag

SEQ ID NO: 1760519 - DNA, 15 bp, Homo sapiens
agtgctagatttaga

SEQ ID NO: 1760520 - DNA, 15 bp, Homo sapiens
gtgctagatttagaa

SEQ ID NO: 1760521 - DNA, 15 bp, Homo sapiens
tgctagatttagaac

SEQ ID NO: 1760522 - DNA, 15 bp, Homo sapiens
gctagatttagaaca

SEQ ID NO: 1760523 - DNA, 15 bp, Homo sapiens
ctagatttagaacat

SEQ ID NO: 1760524 - DNA, 15 bp, Homo sapiens
tagatttagaacatg

SEQ ID NO: 1760525 - DNA, 15 bp, Homo sapiens
agatttagaacatga

SEQ ID NO: 1760526 - DNA, 15 bp, Homo sapiens
gatttagaacatgat

SEQ ID NO: 1760527 - DNA, 15 bp, Homo sapiens
atttagaacatgata

SEQ ID NO: 1760528 - DNA, 15 bp, Homo sapiens
tttagaacatgataa

SEQ ID NO: 1760529 - DNA, 15 bp, Homo sapiens
ttagaacatgataag

SEQ ID NO: 1760530 - DNA, 15 bp, Homo sapiens
tagaacatgataagg

SEQ ID NO: 1760531 - DNA, 15 bp, Homo sapiens
agaacatgataagga

SEQ ID NO: 1760532 - DNA, 15 bp, Homo sapiens
gaacatgataaggaa

SEQ ID NO: 1760533 - DNA, 15 bp, Homo sapiens
aacatgataaggaaa

SEQ ID NO: 1760534 - DNA, 15 bp, Homo sapiens
acatgataaggaaac

SEQ ID NO: 1760535 - DNA, 15 bp, Homo sapiens
catgataaggaaacg

SEQ ID NO: 1760536 - DNA, 15 bp, Homo sapiens
atgataaggaaacgt

SEQ ID NO: 1760537 - DNA, 15 bp, Homo sapiens
tgataaggaaacgta

SEQ ID NO: 1760538 - DNA, 15 bp, Homo sapiens
gataaggaaacgtag

SEQ ID NO: 1760539 - DNA, 15 bp, Homo sapiens
ataaggaaacgtaga

SEQ ID NO: 1760540 - DNA, 15 bp, Homo sapiens
taaggaaacgtagaa

SEQ ID NO: 1760541 - DNA, 15 bp, Homo sapiens
aaggaaacgtagaat

SEQ ID NO: 1760542 - DNA, 15 bp, Homo sapiens
aggaaacgtagaata

SEQ ID NO: 1760543 - DNA, 15 bp, Homo sapiens
ggaaacgtagaatag

SEQ ID NO: 1760544 - DNA, 15 bp, Homo sapiens
gaaacgtagaatagg

SEQ ID NO: 1760545 - DNA, 15 bp, Homo sapiens
aaacgtagaatagga

SEQ ID NO: 1760546 - DNA, 15 bp, Homo sapiens
aacgtagaataggaa

SEQ ID NO: 1760547 - DNA, 15 bp, Homo sapiens
acgtagaataggaaa

SEQ ID NO: 1760548 - DNA, 15 bp, Homo sapiens
cgtagaataggaaac

SEQ ID NO: 1760549 - DNA, 15 bp, Homo sapiens
gtagaataggaaaca

SEQ ID NO: 1760550 - DNA, 15 bp, Homo sapiens
tagaataggaaacag

SEQ ID NO: 1760551 - DNA, 15 bp, Homo sapiens
agaataggaaacagc

SEQ ID NO: 1760552 - DNA, 15 bp, Homo sapiens
gaataggaaacagct

SEQ ID NO: 1760553 - DNA, 15 bp, Homo sapiens
aataggaaacagctg

SEQ ID NO: 1760554 - DNA, 15 bp, Homo sapiens
ataggaaacagctgg

SEQ ID NO: 1760555 - DNA, 15 bp, Homo sapiens
taggaaacagctgga

SEQ ID NO: 1760556 - DNA, 15 bp, Homo sapiens
aggaaacagctggat

SEQ ID NO: 1760557 - DNA, 15 bp, Homo sapiens
ggaaacagctggatt

SEQ ID NO: 1760558 - DNA, 15 bp, Homo sapiens
gaaacagctggattt

SEQ ID NO: 1760559 - DNA, 15 bp, Homo sapiens
aaacagctggatttg

SEQ ID NO: 1760560 - DNA, 15 bp, Homo sapiens
aacagctggatttgt

SEQ ID NO: 1760561 - DNA, 15 bp, Homo sapiens
acagctggatttgtt

SEQ ID NO: 1760562 - DNA, 15 bp, Homo sapiens
cagctggatttgttt

SEQ ID NO: 1760563 - DNA, 15 bp, Homo sapiens
agctggatttgtttc

SEQ ID NO: 1760564 - DNA, 15 bp, Homo sapiens
gctggatttgtttct

SEQ ID NO: 1760565 - DNA, 15 bp, Homo sapiens
ctggatttgtttctt

SEQ ID NO: 1760566 - DNA, 15 bp, Homo sapiens
tggatttgtttctta

SEQ ID NO: 1760567 - DNA, 15 bp, Homo sapiens
ggatttgtttcttag

SEQ ID NO: 1760568 - DNA, 15 bp, Homo sapiens
gatttgtttcttagc

SEQ ID NO: 1760569 - DNA, 15 bp, Homo sapiens
atttgtttcttagcc

SEQ ID NO: 1760570 - DNA, 15 bp, Homo sapiens
tttgtttcttagcct

SEQ ID NO: 1760571 - DNA, 15 bp, Homo sapiens
ttgtttcttagcctt

SEQ ID NO: 1760572 - DNA, 15 bp, Homo sapiens
tgtttcttagccttt

SEQ ID NO: 1760573 - DNA, 15 bp, Homo sapiens
gtttcttagcctttt

SEQ ID NO: 1760574 - DNA, 15 bp, Homo sapiens
tttcttagccttttc

SEQ ID NO: 1760575 - DNA, 15 bp, Homo sapiens
ttcttagccttttca

SEQ ID NO: 1760576 - DNA, 15 bp, Homo sapiens
tcttagccttttcaa

SEQ ID NO: 1760577 - DNA, 15 bp, Homo sapiens
cttagccttttcaaa

SEQ ID NO: 1760578 - DNA, 15 bp, Homo sapiens
ttagccttttcaaaa

SEQ ID NO: 1760579 - DNA, 15 bp, Homo sapiens
tagccttttcaaaaa

SEQ ID NO: 1760580 - DNA, 15 bp, Homo sapiens
agccttttcaaaaaa

SEQ ID NO: 1760581 - DNA, 15 bp, Homo sapiens
gccttttcaaaaaag

SEQ ID NO: 1760582 - DNA, 15 bp, Homo sapiens
ccttttcaaaaaagc

SEQ ID NO: 1760583 - DNA, 15 bp, Homo sapiens
cttttcaaaaaagcc

SEQ ID NO: 1760584 - DNA, 15 bp, Homo sapiens
ttttcaaaaaagcct

SEQ ID NO: 1760585 - DNA, 15 bp, Homo sapiens
tttcaaaaaagcctt

SEQ ID NO: 1760586 - DNA, 15 bp, Homo sapiens
ttcaaaaaagccttt

SEQ ID NO: 1760587 - DNA, 15 bp, Homo sapiens
tcaaaaaagcctttt

SEQ ID NO: 1760588 - DNA, 15 bp, Homo sapiens
caaaaaagccttttc

SEQ ID NO: 1760589 - DNA, 15 bp, Homo sapiens
aaaaaagccttttct

SEQ ID NO: 1760590 - DNA, 15 bp, Homo sapiens
aaaaagccttttctt

SEQ ID NO: 1760591 - DNA, 15 bp, Homo sapiens
aaaagccttttctta

SEQ ID NO: 1760592 - DNA, 15 bp, Homo sapiens
aaagccttttcttac

SEQ ID NO: 1760593 - DNA, 15 bp, Homo sapiens
aagccttttcttact

SEQ ID NO: 1760594 - DNA, 15 bp, Homo sapiens
agccttttcttactt

SEQ ID NO: 1760595 - DNA, 15 bp, Homo sapiens
gccttttcttacttt

SEQ ID NO: 1760596 - DNA, 15 bp, Homo sapiens
ccttttcttactttg

SEQ ID NO: 1760597 - DNA, 15 bp, Homo sapiens
cttttcttactttgc

SEQ ID NO: 1760598 - DNA, 15 bp, Homo sapiens
ttttcttactttgct

SEQ ID NO: 1760599 - DNA, 15 bp, Homo sapiens
tttcttactttgcta

SEQ ID NO: 1760600 - DNA, 15 bp, Homo sapiens
ttcttactttgctaa

SEQ ID NO: 1760601 - DNA, 15 bp, Homo sapiens
tcttactttgctaag

SEQ ID NO: 1760602 - DNA, 15 bp, Homo sapiens
cttactttgctaagt

SEQ ID NO: 1760603 - DNA, 15 bp, Homo sapiens
ttactttgctaagtt

SEQ ID NO: 1760604 - DNA, 15 bp, Homo sapiens
tactttgctaagttt

SEQ ID NO: 1760605 - DNA, 15 bp, Homo sapiens
actttgctaagtttc

SEQ ID NO: 1760606 - DNA, 15 bp, Homo sapiens
ctttgctaagtttca

SEQ ID NO: 1760607 - DNA, 15 bp, Homo sapiens
tttgctaagtttcag

SEQ ID NO: 1760608 - DNA, 15 bp, Homo sapiens
ttgctaagtttcagt

SEQ ID NO: 1760609 - DNA, 15 bp, Homo sapiens
tgctaagtttcagtg

SEQ ID NO: 1760610 - DNA, 15 bp, Homo sapiens
gctaagtttcagtgg

SEQ ID NO: 1760611 - DNA, 15 bp, Homo sapiens
ctaagtttcagtggt

SEQ ID NO: 1760612 - DNA, 15 bp, Homo sapiens
taagtttcagtggtt

SEQ ID NO: 1760613 - DNA, 15 bp, Homo sapiens
aagtttcagtggttc

SEQ ID NO: 1760614 - DNA, 15 bp, Homo sapiens
agtttcagtggttct

SEQ ID NO: 1760615 - DNA, 15 bp, Homo sapiens
gtttcagtggttctt

SEQ ID NO: 1760616 - DNA, 15 bp, Homo sapiens
tttcagtggttctta

SEQ ID NO: 1760617 - DNA, 15 bp, Homo sapiens
ttcagtggttcttat

SEQ ID NO: 1760618 - DNA, 15 bp, Homo sapiens
tcagtggttcttatc

SEQ ID NO: 1760619 - DNA, 15 bp, Homo sapiens
cagtggttcttatct

SEQ ID NO: 1760620 - DNA, 15 bp, Homo sapiens
agtggttcttatctc

SEQ ID NO: 1760621 - DNA, 15 bp, Homo sapiens
gtggttcttatctcc

SEQ ID NO: 1760622 - DNA, 15 bp, Homo sapiens
tggttcttatctcca

SEQ ID NO: 1760623 - DNA, 15 bp, Homo sapiens
ggttcttatctccac

SEQ ID NO: 1760624 - DNA, 15 bp, Homo sapiens
gttcttatctccact

SEQ ID NO: 1760625 - DNA, 15 bp, Homo sapiens
ttcttatctccacta

SEQ ID NO: 1760626 - DNA, 15 bp, Homo sapiens
tcttatctccactaa

SEQ ID NO: 1760627 - DNA, 15 bp, Homo sapiens
cttatctccactaaa

SEQ ID NO: 1760628 - DNA, 15 bp, Homo sapiens
ttatctccactaaat

SEQ ID NO: 1760629 - DNA, 15 bp, Homo sapiens
tatctccactaaata

SEQ ID NO: 1760630 - DNA, 15 bp, Homo sapiens
atctccactaaatat

SEQ ID NO: 1760631 - DNA, 15 bp, Homo sapiens
tctccactaaatata

SEQ ID NO: 1760632 - DNA, 15 bp, Homo sapiens
ctccactaaatataa

SEQ ID NO: 1760633 - DNA, 15 bp, Homo sapiens
tccactaaatataac

SEQ ID NO: 1760634 - DNA, 15 bp, Homo sapiens
ccactaaatataaca

SEQ ID NO: 1760635 - DNA, 15 bp, Homo sapiens
cactaaatataacaa

SEQ ID NO: 1760636 - DNA, 15 bp, Homo sapiens
actaaatataacaac

SEQ ID NO: 1760637 - DNA, 15 bp, Homo sapiens
ctaaatataacaaca

SEQ ID NO: 1760638 - DNA, 15 bp, Homo sapiens
taaatataacaacaa

SEQ ID NO: 1760639 - DNA, 15 bp, Homo sapiens
aaatataacaacaaa

SEQ ID NO: 1760640 - DNA, 15 bp, Homo sapiens
aatataacaacaaat

SEQ ID NO: 1760641 - DNA, 15 bp, Homo sapiens
atataacaacaaatt

SEQ ID NO: 1760642 - DNA, 15 bp, Homo sapiens
tataacaacaaattt

SEQ ID NO: 1760643 - DNA, 15 bp, Homo sapiens
ataacaacaaattta

SEQ ID NO: 1760644 - DNA, 15 bp, Homo sapiens
taacaacaaatttat

SEQ ID NO: 1760645 - DNA, 15 bp, Homo sapiens
aacaacaaatttatc

SEQ ID NO: 1760646 - DNA, 15 bp, Homo sapiens
acaacaaatttatct

SEQ ID NO: 1760647 - DNA, 15 bp, Homo sapiens
caacaaatttatctt

SEQ ID NO: 1760648 - DNA, 15 bp, Homo sapiens
aacaaatttatcttt

SEQ ID NO: 1760649 - DNA, 15 bp, Homo sapiens
acaaatttatcttta

SEQ ID NO: 1760650 - DNA, 15 bp, Homo sapiens
caaatttatctttaa

SEQ ID NO: 1760651 - DNA, 15 bp, Homo sapiens
aaatttatctttaag

SEQ ID NO: 1760652 - DNA, 15 bp, Homo sapiens
aatttatctttaaga

SEQ ID NO: 1760653 - DNA, 15 bp, Homo sapiens
atttatctttaagat

SEQ ID NO: 1760654 - DNA, 15 bp, Homo sapiens
tttatctttaagatt

SEQ ID NO: 1760655 - DNA, 15 bp, Homo sapiens
ttatctttaagattt

SEQ ID NO: 1760656 - DNA, 15 bp, Homo sapiens
tatctttaagatttt

SEQ ID NO: 1760657 - DNA, 15 bp, Homo sapiens
atctttaagattttg

SEQ ID NO: 1760658 - DNA, 15 bp, Homo sapiens
tctttaagattttga

SEQ ID NO: 1760659 - DNA, 15 bp, Homo sapiens
ctttaagattttgat

SEQ ID NO: 1760660 - DNA, 15 bp, Homo sapiens
tttaagattttgatt

SEQ ID NO: 1760661 - DNA, 15 bp, Homo sapiens
ttaagattttgatta

SEQ ID NO: 1760662 - DNA, 15 bp, Homo sapiens
taagattttgattat

SEQ ID NO: 1760663 - DNA, 15 bp, Homo sapiens
aagattttgattata

SEQ ID NO: 1760664 - DNA, 15 bp, Homo sapiens
agattttgattatat

SEQ ID NO: 1760665 - DNA, 15 bp, Homo sapiens
gattttgattatatt

SEQ ID NO: 1760666 - DNA, 15 bp, Homo sapiens
attttgattatattc

SEQ ID NO: 1760667 - DNA, 15 bp, Homo sapiens
ttttgattatattcc

SEQ ID NO: 1760668 - DNA, 15 bp, Homo sapiens
tttgattatattcct

SEQ ID NO: 1760669 - DNA, 15 bp, Homo sapiens
ttgattatattcctt

SEQ ID NO: 1760670 - DNA, 15 bp, Homo sapiens
tgattatattcctta

SEQ ID NO: 1760671 - DNA, 15 bp, Homo sapiens
gattatattccttaa

SEQ ID NO: 1760672 - DNA, 15 bp, Homo sapiens
attatattccttaag

SEQ ID NO: 1760673 - DNA, 15 bp, Homo sapiens
ttatattccttaaga

SEQ ID NO: 1760674 - DNA, 15 bp, Homo sapiens
tatattccttaagaa

SEQ ID NO: 1760675 - DNA, 15 bp, Homo sapiens
atattccttaagaat

SEQ ID NO: 1760676 - DNA, 15 bp, Homo sapiens
tattccttaagaatt

SEQ ID NO: 1760677 - DNA, 15 bp, Homo sapiens
attccttaagaattc

SEQ ID NO: 1760678 - DNA, 15 bp, Homo sapiens
ttccttaagaattct

SEQ ID NO: 1760679 - DNA, 15 bp, Homo sapiens
tccttaagaattctt

SEQ ID NO: 1760680 - DNA, 15 bp, Homo sapiens
ccttaagaattcttc

SEQ ID NO: 1760681 - DNA, 15 bp, Homo sapiens
cttaagaattcttca

SEQ ID NO: 1760682 - DNA, 15 bp, Homo sapiens
ttaagaattcttcaa

SEQ ID NO: 1760683 - DNA, 15 bp, Homo sapiens
taagaattcttcaaa

SEQ ID NO: 1760684 - DNA, 15 bp, Homo sapiens
aagaattcttcaaag

SEQ ID NO: 1760685 - DNA, 15 bp, Homo sapiens
agaattcttcaaaga

SEQ ID NO: 1760686 - DNA, 15 bp, Homo sapiens
gaattcttcaaagac

SEQ ID NO: 1760687 - DNA, 15 bp, Homo sapiens
aattcttcaaagact

SEQ ID NO: 1760688 - DNA, 15 bp, Homo sapiens
attcttcaaagacta

SEQ ID NO: 1760689 - DNA, 15 bp, Homo sapiens
ttcttcaaagactaa

SEQ ID NO: 1760690 - DNA, 15 bp, Homo sapiens
tcttcaaagactaac

SEQ ID NO: 1760691 - DNA, 15 bp, Homo sapiens
cttcaaagactaaca

SEQ ID NO: 1760692 - DNA, 15 bp, Homo sapiens
ttcaaagactaacat

SEQ ID NO: 1760693 - DNA, 15 bp, Homo sapiens
tcaaagactaacata

SEQ ID NO: 1760694 - DNA, 15 bp, Homo sapiens
caaagactaacataa

SEQ ID NO: 1760695 - DNA, 15 bp, Homo sapiens
aaagactaacataaa

SEQ ID NO: 1760696 - DNA, 15 bp, Homo sapiens
aagactaacataaat

SEQ ID NO: 1760697 - DNA, 15 bp, Homo sapiens
agactaacataaatc

SEQ ID NO: 1760698 - DNA, 15 bp, Homo sapiens
gactaacataaatct

SEQ ID NO: 1760699 - DNA, 15 bp, Homo sapiens
actaacataaatctg

SEQ ID NO: 1760700 - DNA, 15 bp, Homo sapiens
ctaacataaatctgt

SEQ ID NO: 1760701 - DNA, 15 bp, Homo sapiens
taacataaatctgtc

SEQ ID NO: 1760702 - DNA, 15 bp, Homo sapiens
aacataaatctgtct

SEQ ID NO: 1760703 - DNA, 15 bp, Homo sapiens
acataaatctgtctt

SEQ ID NO: 1760704 - DNA, 15 bp, Homo sapiens
cataaatctgtcttg

SEQ ID NO: 1760705 - DNA, 15 bp, Homo sapiens
ataaatctgtcttgc

SEQ ID NO: 1760706 - DNA, 15 bp, Homo sapiens
taaatctgtcttgct

SEQ ID NO: 1760707 - DNA, 15 bp, Homo sapiens
aaatctgtcttgcta

SEQ ID NO: 1760708 - DNA, 15 bp, Homo sapiens
aatctgtcttgctat

SEQ ID NO: 1760709 - DNA, 15 bp, Homo sapiens
atctgtcttgctatc

SEQ ID NO: 1760710 - DNA, 15 bp, Homo sapiens
tctgtcttgctatct

SEQ ID NO: 1760711 - DNA, 15 bp, Homo sapiens
ctgtcttgctatctt

SEQ ID NO: 1760712 - DNA, 15 bp, Homo sapiens
tgtcttgctatcttt

SEQ ID NO: 1760713 - DNA, 15 bp, Homo sapiens
gtcttgctatctttt

SEQ ID NO: 1760714 - DNA, 15 bp, Homo sapiens
tcttgctatctttta

SEQ ID NO: 1760715 - DNA, 15 bp, Homo sapiens
cttgctatcttttaa

SEQ ID NO: 1760716 - DNA, 15 bp, Homo sapiens
ttgctatcttttaag

SEQ ID NO: 1760717 - DNA, 15 bp, Homo sapiens
tgctatcttttaagt

SEQ ID NO: 1760718 - DNA, 15 bp, Homo sapiens
gctatcttttaagtc

SEQ ID NO: 1760719 - DNA, 15 bp, Homo sapiens
ctatcttttaagtct

SEQ ID NO: 1760720 - DNA, 15 bp, Homo sapiens
tatcttttaagtctg

SEQ ID NO: 1760721 - DNA, 15 bp, Homo sapiens
atcttttaagtctgg

SEQ ID NO: 1760722 - DNA, 15 bp, Homo sapiens
tcttttaagtctggt

SEQ ID NO: 1760723 - DNA, 15 bp, Homo sapiens
cttttaagtctggtc

SEQ ID NO: 1760724 - DNA, 15 bp, Homo sapiens
ttttaagtctggtca

SEQ ID NO: 1760725 - DNA, 15 bp, Homo sapiens
tttaagtctggtcat

SEQ ID NO: 1760726 - DNA, 15 bp, Homo sapiens
ttaagtctggtcatt

SEQ ID NO: 1760727 - DNA, 15 bp, Homo sapiens
taagtctggtcattt

SEQ ID NO: 1760728 - DNA, 15 bp, Homo sapiens
aagtctggtcatttt

SEQ ID NO: 1760729 - DNA, 15 bp, Homo sapiens
agtctggtcatttta

SEQ ID NO: 1760730 - DNA, 15 bp, Homo sapiens
gtctggtcattttat

SEQ ID NO: 1760731 - DNA, 15 bp, Homo sapiens
tctggtcattttatc

SEQ ID NO: 1760732 - DNA, 15 bp, Homo sapiens
ctggtcattttatca

SEQ ID NO: 1760733 - DNA, 15 bp, Homo sapiens
tggtcattttatcat

SEQ ID NO: 1760734 - DNA, 15 bp, Homo sapiens
ggtcattttatcatt

SEQ ID NO: 1760735 - DNA, 15 bp, Homo sapiens
gtcattttatcatta

SEQ ID NO: 1760736 - DNA, 15 bp, Homo sapiens
tcattttatcattat

SEQ ID NO: 1760737 - DNA, 15 bp, Homo sapiens
cattttatcattatg

SEQ ID NO: 1760738 - DNA, 15 bp, Homo sapiens
attttatcattatgc

SEQ ID NO: 1760739 - DNA, 15 bp, Homo sapiens
ttttatcattatgcc

SEQ ID NO: 1760740 - DNA, 15 bp, Homo sapiens
tttatcattatgccc

SEQ ID NO: 1760741 - DNA, 15 bp, Homo sapiens
ttatcattatgccct

SEQ ID NO: 1760742 - DNA, 15 bp, Homo sapiens
tatcattatgccctt

SEQ ID NO: 1760743 - DNA, 15 bp, Homo sapiens
atcattatgcccttt

SEQ ID NO: 1760744 - DNA, 15 bp, Homo sapiens
tcattatgccctttt

SEQ ID NO: 1760745 - DNA, 15 bp, Homo sapiens
cattatgcccttttc

SEQ ID NO: 1760746 - DNA, 15 bp, Homo sapiens
attatgcccttttct

SEQ ID NO: 1760747 - DNA, 15 bp, Homo sapiens
ttatgcccttttctt

SEQ ID NO: 1760748 - DNA, 15 bp, Homo sapiens
tatgcccttttctta

SEQ ID NO: 1760749 - DNA, 15 bp, Homo sapiens
atgcccttttcttat

SEQ ID NO: 1760750 - DNA, 15 bp, Homo sapiens
tgcccttttcttatt

SEQ ID NO: 1760751 - DNA, 15 bp, Homo sapiens
gcccttttcttattt

SEQ ID NO: 1760752 - DNA, 15 bp, Homo sapiens
cccttttcttatttt

SEQ ID NO: 1760753 - DNA, 15 bp, Homo sapiens
ccttttcttatttta

SEQ ID NO: 1760754 - DNA, 15 bp, Homo sapiens
cttttcttattttaa

SEQ ID NO: 1760755 - DNA, 15 bp, Homo sapiens
ttttcttattttaag

SEQ ID NO: 1760756 - DNA, 15 bp, Homo sapiens
tttcttattttaaga

SEQ ID NO: 1760757 - DNA, 15 bp, Homo sapiens
ttattttaagataat

SEQ ID NO: 1760758 - DNA, 15 bp, Homo sapiens
tattttaagataatt

SEQ ID NO: 1760759 - DNA, 15 bp, Homo sapiens
attttaagataattt

SEQ ID NO: 1760760 - DNA, 15 bp, Homo sapiens
ttttaagataattta

SEQ ID NO: 1760761 - DNA, 15 bp, Homo sapiens
tttaagataatttaa

SEQ ID NO: 1760762 - DNA, 15 bp, Homo sapiens
ttaagataatttaat

SEQ ID NO: 1760763 - DNA, 15 bp, Homo sapiens
taagataatttaatt

SEQ ID NO: 1760764 - DNA, 15 bp, Homo sapiens
aagataatttaattg

SEQ ID NO: 1760765 - DNA, 15 bp, Homo sapiens
gataatttaattgtc

SEQ ID NO: 1760766 - DNA, 15 bp, Homo sapiens
ataatttaattgtct

SEQ ID NO: 1760767 - DNA, 15 bp, Homo sapiens
taatttaattgtcta

SEQ ID NO: 1760768 - DNA, 15 bp, Homo sapiens
aatttaattgtctaa

SEQ ID NO: 1760769 - DNA, 15 bp, Homo sapiens
atttaattgtctaaa

SEQ ID NO: 1760770 - DNA, 15 bp, Homo sapiens
tttaattgtctaaaa

SEQ ID NO: 1760771 - DNA, 15 bp, Homo sapiens
ttaattgtctaaaag

SEQ ID NO: 1760772 - DNA, 15 bp, Homo sapiens
taattgtctaaaagt

SEQ ID NO: 1760773 - DNA, 15 bp, Homo sapiens
aattgtctaaaagtt

SEQ ID NO: 1760774 - DNA, 15 bp, Homo sapiens
attgtctaaaagttt

SEQ ID NO: 1760775 - DNA, 15 bp, Homo sapiens
ttgtctaaaagtttt

SEQ ID NO: 1760776 - DNA, 15 bp, Homo sapiens
tgtctaaaagttttt

SEQ ID NO: 1760777 - DNA, 15 bp, Homo sapiens
gtctaaaagttttta

SEQ ID NO: 1760778 - DNA, 15 bp, Homo sapiens
tctaaaagtttttaa

SEQ ID NO: 1760779 - DNA, 15 bp, Homo sapiens
ctaaaagtttttaaa

SEQ ID NO: 1760780 - DNA, 15 bp, Homo sapiens
taaaagtttttaaat

SEQ ID NO: 1760781 - DNA, 15 bp, Homo sapiens
aaaagtttttaaatt

SEQ ID NO: 1760782 - DNA, 15 bp, Homo sapiens
aaagtttttaaattt

SEQ ID NO: 1760783 - DNA, 15 bp, Homo sapiens
aagtttttaaattta

SEQ ID NO: 1760784 - DNA, 15 bp, Homo sapiens
agtttttaaatttac

SEQ ID NO: 1760785 - DNA, 15 bp, Homo sapiens
gtttttaaatttaca

SEQ ID NO: 1760786 - DNA, 15 bp, Homo sapiens
tttttaaatttacat

SEQ ID NO: 1760787 - DNA, 15 bp, Homo sapiens
ttttaaatttacata

SEQ ID NO: 1760788 - DNA, 15 bp, Homo sapiens
tttaaatttacatat

SEQ ID NO: 1760789 - DNA, 15 bp, Homo sapiens
ttaaatttacatatt

SEQ ID NO: 1760790 - DNA, 15 bp, Homo sapiens
taaatttacatatta

SEQ ID NO: 1760791 - DNA, 15 bp, Homo sapiens
aaatttacatattaa

SEQ ID NO: 1760792 - DNA, 15 bp, Homo sapiens
aatttacatattaag

SEQ ID NO: 1760793 - DNA, 15 bp, Homo sapiens
atttacatattaagt

SEQ ID NO: 1760794 - DNA, 15 bp, Homo sapiens
tttacatattaagta

SEQ ID NO: 1760795 - DNA, 15 bp, Homo sapiens
ttacatattaagtaa

SEQ ID NO: 1760796 - DNA, 15 bp, Homo sapiens
tacatattaagtaat

SEQ ID NO: 1760797 - DNA, 15 bp, Homo sapiens
acatattaagtaatg

SEQ ID NO: 1760798 - DNA, 15 bp, Homo sapiens
catattaagtaatga

SEQ ID NO: 1760799 - DNA, 15 bp, Homo sapiens
atattaagtaatgat

SEQ ID NO: 1760800 - DNA, 15 bp, Homo sapiens
tattaagtaatgata

SEQ ID NO: 1760801 - DNA, 15 bp, Homo sapiens
attaagtaatgatag

SEQ ID NO: 1760802 - DNA, 15 bp, Homo sapiens
ttaagtaatgatagt

SEQ ID NO: 1760803 - DNA, 15 bp, Homo sapiens
taagtaatgatagtt

SEQ ID NO: 1760804 - DNA, 15 bp, Homo sapiens
aagtaatgatagttt

SEQ ID NO: 1760805 - DNA, 15 bp, Homo sapiens
agtaatgatagtttt

SEQ ID NO: 1760806 - DNA, 15 bp, Homo sapiens
gtaatgatagttttt

SEQ ID NO: 1760807 - DNA, 15 bp, Homo sapiens
taatgatagttttta

SEQ ID NO: 1760808 - DNA, 15 bp, Homo sapiens
aatgatagtttttat

SEQ ID NO: 1760809 - DNA, 15 bp, Homo sapiens
atgatagtttttata

SEQ ID NO: 1760810 - DNA, 15 bp, Homo sapiens
tgatagtttttatat

SEQ ID NO: 1760811 - DNA, 15 bp, Homo sapiens
gatagtttttatatt

SEQ ID NO: 1760812 - DNA, 15 bp, Homo sapiens
atagtttttatatta

SEQ ID NO: 1760813 - DNA, 15 bp, Homo sapiens
tagtttttatattag

SEQ ID NO: 1760814 - DNA, 15 bp, Homo sapiens
agtttttatattagg

SEQ ID NO: 1760815 - DNA, 15 bp, Homo sapiens
gtttttatattaggt

SEQ ID NO: 1760816 - DNA, 15 bp, Homo sapiens
tttttatattaggtt

SEQ ID NO: 1760817 - DNA, 15 bp, Homo sapiens
ttttatattaggttt

SEQ ID NO: 1760818 - DNA, 15 bp, Homo sapiens
tttatattaggtttt

SEQ ID NO: 1760819 - DNA, 15 bp, Homo sapiens
ttatattaggtttta

SEQ ID NO: 1760820 - DNA, 15 bp, Homo sapiens
tatattaggttttat

SEQ ID NO: 1760821 - DNA, 15 bp, Homo sapiens
atattaggttttatc

SEQ ID NO: 1760822 - DNA, 15 bp, Homo sapiens
tattaggttttatca

SEQ ID NO: 1760823 - DNA, 15 bp, Homo sapiens
attaggttttatcat

SEQ ID NO: 1760824 - DNA, 15 bp, Homo sapiens
ttaggttttatcatt

SEQ ID NO: 1760825 - DNA, 15 bp, Homo sapiens
taggttttatcattt

SEQ ID NO: 1760826 - DNA, 15 bp, Homo sapiens
aggttttatcattta

SEQ ID NO: 1760827 - DNA, 15 bp, Homo sapiens
ggttttatcatttag

SEQ ID NO: 1760828 - DNA, 15 bp, Homo sapiens
gttttatcatttagt

SEQ ID NO: 1760829 - DNA, 15 bp, Homo sapiens
ttttatcatttagtt

SEQ ID NO: 1760830 - DNA, 15 bp, Homo sapiens
tttatcatttagttt

SEQ ID NO: 1760831 - DNA, 15 bp, Homo sapiens
ttatcatttagtttt

SEQ ID NO: 1760832 - DNA, 15 bp, Homo sapiens
tatcatttagttttt

SEQ ID NO: 1760833 - DNA, 15 bp, Homo sapiens
atcatttagtttttt

SEQ ID NO: 1760834 - DNA, 15 bp, Homo sapiens
atttagtttttttct

SEQ ID NO: 1760835 - DNA, 15 bp, Homo sapiens
tttagtttttttctt

SEQ ID NO: 1760836 - DNA, 15 bp, Homo sapiens
ttagtttttttcttt

SEQ ID NO: 1760837 - DNA, 15 bp, Homo sapiens
tagtttttttctttt

SEQ ID NO: 1760838 - DNA, 15 bp, Homo sapiens
agtttttttctttta

SEQ ID NO: 1760839 - DNA, 15 bp, Homo sapiens
gtttttttcttttaa

SEQ ID NO: 1760840 - DNA, 15 bp, Homo sapiens
tttttttcttttaaa

SEQ ID NO: 1760841 - DNA, 15 bp, Homo sapiens
ttttttcttttaaac

SEQ ID NO: 1760842 - DNA, 15 bp, Homo sapiens
tttttcttttaaaca

SEQ ID NO: 1760843 - DNA, 15 bp, Homo sapiens
ttttcttttaaacat

SEQ ID NO: 1760844 - DNA, 15 bp, Homo sapiens
tttcttttaaacatt

SEQ ID NO: 1760845 - DNA, 15 bp, Homo sapiens
ttcttttaaacatta

SEQ ID NO: 1760846 - DNA, 15 bp, Homo sapiens
tcttttaaacattaa

SEQ ID NO: 1760847 - DNA, 15 bp, Homo sapiens
cttttaaacattaag

SEQ ID NO: 1760848 - DNA, 15 bp, Homo sapiens
ttttaaacattaaga

SEQ ID NO: 1760849 - DNA, 15 bp, Homo sapiens
tttaaacattaagat

SEQ ID NO: 1760850 - DNA, 15 bp, Homo sapiens
ttaaacattaagatg

SEQ ID NO: 1760851 - DNA, 15 bp, Homo sapiens
taaacattaagatga

SEQ ID NO: 1760852 - DNA, 15 bp, Homo sapiens
aaacattaagatgaa

SEQ ID NO: 1760853 - DNA, 15 bp, Homo sapiens
aacattaagatgaaa

SEQ ID NO: 1760854 - DNA, 15 bp, Homo sapiens
acattaagatgaaaa

SEQ ID NO: 1760855 - DNA, 15 bp, Homo sapiens
cattaagatgaaaaa

SEQ ID NO: 1760856 - DNA, 15 bp, Homo sapiens
attaagatgaaaaag

SEQ ID NO: 1760857 - DNA, 15 bp, Homo sapiens
ttaagatgaaaaagg

SEQ ID NO: 1760858 - DNA, 15 bp, Homo sapiens
taagatgaaaaaggt

SEQ ID NO: 1760859 - DNA, 15 bp, Homo sapiens
aagatgaaaaaggtg

SEQ ID NO: 1760860 - DNA, 15 bp, Homo sapiens
agatgaaaaaggtgg

SEQ ID NO: 1760861 - DNA, 15 bp, Homo sapiens
gatgaaaaaggtgga

SEQ ID NO: 1760862 - DNA, 15 bp, Homo sapiens
atgaaaaaggtggag

SEQ ID NO: 1760863 - DNA, 15 bp, Homo sapiens
tgaaaaaggtggaga

SEQ ID NO: 1760864 - DNA, 15 bp, Homo sapiens
gaaaaaggtggagaa

SEQ ID NO: 1760865 - DNA, 15 bp, Homo sapiens
aaaaaggtggagaag

SEQ ID NO: 1760866 - DNA, 15 bp, Homo sapiens
aaaaggtggagaagt

SEQ ID NO: 1760867 - DNA, 15 bp, Homo sapiens
aaaggtggagaagtg

SEQ ID NO: 1760868 - DNA, 15 bp, Homo sapiens
aaggtggagaagtga

SEQ ID NO: 1760869 - DNA, 15 bp, Homo sapiens
aggtggagaagtgaa

SEQ ID NO: 1760870 - DNA, 15 bp, Homo sapiens
ggtggagaagtgaaa

SEQ ID NO: 1760871 - DNA, 15 bp, Homo sapiens
gtggagaagtgaaat

SEQ ID NO: 1760872 - DNA, 15 bp, Homo sapiens
tggagaagtgaaatt

SEQ ID NO: 1760873 - DNA, 15 bp, Homo sapiens
ggagaagtgaaatta

SEQ ID NO: 1760874 - DNA, 15 bp, Homo sapiens
gagaagtgaaattac

SEQ ID NO: 1760875 - DNA, 15 bp, Homo sapiens
agaagtgaaattact

SEQ ID NO: 1760876 - DNA, 15 bp, Homo sapiens
gaagtgaaattactt

SEQ ID NO: 1760877 - DNA, 15 bp, Homo sapiens
aagtgaaattacttg

SEQ ID NO: 1760878 - DNA, 15 bp, Homo sapiens
agtgaaattacttgt

SEQ ID NO: 1760879 - DNA, 15 bp, Homo sapiens
gtgaaattacttgtc

SEQ ID NO: 1760880 - DNA, 15 bp, Homo sapiens
tgaaattacttgtct

SEQ ID NO: 1760881 - DNA, 15 bp, Homo sapiens
gaaattacttgtctt

SEQ ID NO: 1760882 - DNA, 15 bp, Homo sapiens
aaattacttgtcttt

SEQ ID NO: 1760883 - DNA, 15 bp, Homo sapiens
aattacttgtctttt

SEQ ID NO: 1760884 - DNA, 15 bp, Homo sapiens
attacttgtctttta

SEQ ID NO: 1760885 - DNA, 15 bp, Homo sapiens
ttacttgtcttttac

SEQ ID NO: 1760886 - DNA, 15 bp, Homo sapiens
tacttgtcttttaca

SEQ ID NO: 1760887 - DNA, 15 bp, Homo sapiens
acttgtcttttacat

SEQ ID NO: 1760888 - DNA, 15 bp, Homo sapiens
cttgtcttttacatg

SEQ ID NO: 1760889 - DNA, 15 bp, Homo sapiens
ttgtcttttacatga

SEQ ID NO: 1760890 - DNA, 15 bp, Homo sapiens
tgtcttttacatgag

SEQ ID NO: 1760891 - DNA, 15 bp, Homo sapiens
gtcttttacatgagt

SEQ ID NO: 1760892 - DNA, 15 bp, Homo sapiens
tcttttacatgagtc

SEQ ID NO: 1760893 - DNA, 15 bp, Homo sapiens
cttttacatgagtca

SEQ ID NO: 1760894 - DNA, 15 bp, Homo sapiens
ttttacatgagtcat

SEQ ID NO: 1760895 - DNA, 15 bp, Homo sapiens
tttacatgagtcata

SEQ ID NO: 1760896 - DNA, 15 bp, Homo sapiens
ttacatgagtcataa

SEQ ID NO: 1760897 - DNA, 15 bp, Homo sapiens
tacatgagtcataaa

SEQ ID NO: 1760898 - DNA, 15 bp, Homo sapiens
acatgagtcataaac

SEQ ID NO: 1760899 - DNA, 15 bp, Homo sapiens
catgagtcataaaca

SEQ ID NO: 1760900 - DNA, 15 bp, Homo sapiens
atgagtcataaacaa

SEQ ID NO: 1760901 - DNA, 15 bp, Homo sapiens
tgagtcataaacaaa

SEQ ID NO: 1760902 - DNA, 15 bp, Homo sapiens
gagtcataaacaaaa

SEQ ID NO: 1760903 - DNA, 15 bp, Homo sapiens
agtcataaacaaaaa

SEQ ID NO: 1760904 - DNA, 15 bp, Homo sapiens
gtcataaacaaaaat

SEQ ID NO: 1760905 - DNA, 15 bp, Homo sapiens
tcataaacaaaaatg

SEQ ID NO: 1760906 - DNA, 15 bp, Homo sapiens
cataaacaaaaatga

SEQ ID NO: 1760907 - DNA, 15 bp, Homo sapiens
ataaacaaaaatgaa

SEQ ID NO: 1760908 - DNA, 15 bp, Homo sapiens
taaacaaaaatgaac

SEQ ID NO: 1760909 - DNA, 15 bp, Homo sapiens
aaacaaaaatgaaca

SEQ ID NO: 1760910 - DNA, 15 bp, Homo sapiens
aacaaaaatgaacat

SEQ ID NO: 1760911 - DNA, 15 bp, Homo sapiens
acaaaaatgaacata

SEQ ID NO: 1760912 - DNA, 15 bp, Homo sapiens
caaaaatgaacatag

SEQ ID NO: 1760913 - DNA, 15 bp, Homo sapiens
aaaaatgaacatagg

SEQ ID NO: 1760914 - DNA, 15 bp, Homo sapiens
aaaatgaacatagga

SEQ ID NO: 1760915 - DNA, 15 bp, Homo sapiens
aaatgaacataggat

SEQ ID NO: 1760916 - DNA, 15 bp, Homo sapiens
aatgaacataggata

SEQ ID NO: 1760917 - DNA, 15 bp, Homo sapiens
atgaacataggatac

SEQ ID NO: 1760918 - DNA, 15 bp, Homo sapiens
tgaacataggataca

SEQ ID NO: 1760919 - DNA, 15 bp, Homo sapiens
gaacataggatacac

SEQ ID NO: 1760920 - DNA, 15 bp, Homo sapiens
aacataggatacact

SEQ ID NO: 1760921 - DNA, 15 bp, Homo sapiens
acataggatacacta

SEQ ID NO: 1760922 - DNA, 15 bp, Homo sapiens
cataggatacactaa

SEQ ID NO: 1760923 - DNA, 15 bp, Homo sapiens
ataggatacactaat

SEQ ID NO: 1760924 - DNA, 15 bp, Homo sapiens
taggatacactaatc

SEQ ID NO: 1760925 - DNA, 15 bp, Homo sapiens
aggatacactaatcc

SEQ ID NO: 1760926 - DNA, 15 bp, Homo sapiens
ggatacactaatcca

SEQ ID NO: 1760927 - DNA, 15 bp, Homo sapiens
gatacactaatccaa

SEQ ID NO: 1760928 - DNA, 15 bp, Homo sapiens
atacactaatccaat

SEQ ID NO: 1760929 - DNA, 15 bp, Homo sapiens
tacactaatccaata

SEQ ID NO: 1760930 - DNA, 15 bp, Homo sapiens
acactaatccaatac

SEQ ID NO: 1760931 - DNA, 15 bp, Homo sapiens
cactaatccaatact

SEQ ID NO: 1760932 - DNA, 15 bp, Homo sapiens
actaatccaatactg

SEQ ID NO: 1760933 - DNA, 15 bp, Homo sapiens
ctaatccaatactga

SEQ ID NO: 1760934 - DNA, 15 bp, Homo sapiens
taatccaatactgaa

SEQ ID NO: 1760935 - DNA, 15 bp, Homo sapiens
aatccaatactgaac

SEQ ID NO: 1760936 - DNA, 15 bp, Homo sapiens
atccaatactgaact

SEQ ID NO: 1760937 - DNA, 15 bp, Homo sapiens
tccaatactgaactt

SEQ ID NO: 1760938 - DNA, 15 bp, Homo sapiens
ccaatactgaactta

SEQ ID NO: 1760939 - DNA, 15 bp, Homo sapiens
caatactgaacttac

SEQ ID NO: 1760940 - DNA, 15 bp, Homo sapiens
aatactgaacttact

SEQ ID NO: 1760941 - DNA, 15 bp, Homo sapiens
atactgaacttacta

SEQ ID NO: 1760942 - DNA, 15 bp, Homo sapiens
tactgaacttactat

SEQ ID NO: 1760943 - DNA, 15 bp, Homo sapiens
actgaacttactatc

SEQ ID NO: 1760944 - DNA, 15 bp, Homo sapiens
ctgaacttactatct

SEQ ID NO: 1760945 - DNA, 15 bp, Homo sapiens
tgaacttactatctg

SEQ ID NO: 1760946 - DNA, 15 bp, Homo sapiens
gaacttactatctgt

SEQ ID NO: 1760947 - DNA, 15 bp, Homo sapiens
aacttactatctgtt

SEQ ID NO: 1760948 - DNA, 15 bp, Homo sapiens
acttactatctgttc

SEQ ID NO: 1760949 - DNA, 15 bp, Homo sapiens
cttactatctgttct

SEQ ID NO: 1760950 - DNA, 15 bp, Homo sapiens
ttactatctgttctt

SEQ ID NO: 1760951 - DNA, 15 bp, Homo sapiens
tactatctgttcttg

SEQ ID NO: 1760952 - DNA, 15 bp, Homo sapiens
actatctgttcttga

SEQ ID NO: 1760953 - DNA, 15 bp, Homo sapiens
ctatctgttcttgaa

SEQ ID NO: 1760954 - DNA, 15 bp, Homo sapiens
tatctgttcttgaaa

SEQ ID NO: 1760955 - DNA, 15 bp, Homo sapiens
atctgttcttgaaaa

SEQ ID NO: 1760956 - DNA, 15 bp, Homo sapiens
tctgttcttgaaaat

SEQ ID NO: 1760957 - DNA, 15 bp, Homo sapiens
ctgttcttgaaaata

SEQ ID NO: 1760958 - DNA, 15 bp, Homo sapiens
tgttcttgaaaatat

SEQ ID NO: 1760959 - DNA, 15 bp, Homo sapiens
gttcttgaaaatata

SEQ ID NO: 1760960 - DNA, 15 bp, Homo sapiens
ttcttgaaaatataa

SEQ ID NO: 1760961 - DNA, 15 bp, Homo sapiens
tcttgaaaatataat

SEQ ID NO: 1760962 - DNA, 15 bp, Homo sapiens
cttgaaaatataatt

SEQ ID NO: 1760963 - DNA, 15 bp, Homo sapiens
ttgaaaatataattt

SEQ ID NO: 1760964 - DNA, 15 bp, Homo sapiens
tgaaaatataatttt

SEQ ID NO: 1760965 - DNA, 15 bp, Homo sapiens
gaaaatataattttt

SEQ ID NO: 1760966 - DNA, 15 bp, Homo sapiens
aaaatataatttttt

SEQ ID NO: 1760967 - DNA, 15 bp, Homo sapiens
aaatataattttttt

SEQ ID NO: 1760968 - DNA, 15 bp, Homo sapiens
aatataatttttttg

SEQ ID NO: 1760969 - DNA, 15 bp, Homo sapiens
atataatttttttgc

SEQ ID NO: 1760970 - DNA, 15 bp, Homo sapiens
ataatttttttgcat

SEQ ID NO: 1760971 - DNA, 15 bp, Homo sapiens
taatttttttgcatt

SEQ ID NO: 1760972 - DNA, 15 bp, Homo sapiens
aatttttttgcatta

SEQ ID NO: 1760973 - DNA, 15 bp, Homo sapiens
atttttttgcattat

SEQ ID NO: 1760974 - DNA, 15 bp, Homo sapiens
tttttttgcattatc

SEQ ID NO: 1760975 - DNA, 15 bp, Homo sapiens
ttttttgcattatct

SEQ ID NO: 1760976 - DNA, 15 bp, Homo sapiens
tttttgcattatctt

SEQ ID NO: 1760977 - DNA, 15 bp, Homo sapiens
ttttgcattatcttt

SEQ ID NO: 1760978 - DNA, 15 bp, Homo sapiens
tttgcattatctttt

SEQ ID NO: 1760979 - DNA, 15 bp, Homo sapiens
ttgcattatcttttt

SEQ ID NO: 1760980 - DNA, 15 bp, Homo sapiens
tgcattatctttttc

SEQ ID NO: 1760981 - DNA, 15 bp, Homo sapiens
gcattatctttttca

SEQ ID NO: 1760982 - DNA, 15 bp, Homo sapiens
cattatctttttcat

SEQ ID NO: 1760983 - DNA, 15 bp, Homo sapiens
attatctttttcata

SEQ ID NO: 1760984 - DNA, 15 bp, Homo sapiens
ttatctttttcatag

SEQ ID NO: 1760985 - DNA, 15 bp, Homo sapiens
tatctttttcatagg

SEQ ID NO: 1760986 - DNA, 15 bp, Homo sapiens
atctttttcatagga

SEQ ID NO: 1760987 - DNA, 15 bp, Homo sapiens
tctttttcataggaa

SEQ ID NO: 1760988 - DNA, 15 bp, Homo sapiens
ctttttcataggaat

SEQ ID NO: 1760989 - DNA, 15 bp, Homo sapiens
tttttcataggaata

SEQ ID NO: 1760990 - DNA, 15 bp, Homo sapiens
ttttcataggaatat

SEQ ID NO: 1760991 - DNA, 15 bp, Homo sapiens
tttcataggaatatc

SEQ ID NO: 1760992 - DNA, 15 bp, Homo sapiens
ttcataggaatatca

SEQ ID NO: 1760993 - DNA, 15 bp, Homo sapiens
tcataggaatatcag

SEQ ID NO: 1760994 - DNA, 15 bp, Homo sapiens
cataggaatatcaga

SEQ ID NO: 1760995 - DNA, 15 bp, Homo sapiens
ataggaatatcagac

SEQ ID NO: 1760996 - DNA, 15 bp, Homo sapiens
taggaatatcagaca

SEQ ID NO: 1760997 - DNA, 15 bp, Homo sapiens
aggaatatcagacac

SEQ ID NO: 1760998 - DNA, 15 bp, Homo sapiens
ggaatatcagacacc

SEQ ID NO: 1760999 - DNA, 15 bp, Homo sapiens
gaatatcagacacct

SEQ ID NO: 1761000 - DNA, 15 bp, Homo sapiens
aatatcagacacctt

SEQ ID NO: 1761001 - DNA, 15 bp, Homo sapiens
atatcagacaccttt

SEQ ID NO: 1761002 - DNA, 15 bp, Homo sapiens
tatcagacaccttta

SEQ ID NO: 1761003 - DNA, 15 bp, Homo sapiens
atcagacacctttaa

SEQ ID NO: 1761004 - DNA, 15 bp, Homo sapiens
tcagacacctttaat

SEQ ID NO: 1761005 - DNA, 15 bp, Homo sapiens
cagacacctttaata

SEQ ID NO: 1761006 - DNA, 15 bp, Homo sapiens
agacacctttaatag

SEQ ID NO: 1761007 - DNA, 15 bp, Homo sapiens
gacacctttaatagt

SEQ ID NO: 1761008 - DNA, 15 bp, Homo sapiens
acacctttaatagtg

SEQ ID NO: 1761009 - DNA, 15 bp, Homo sapiens
cacctttaatagtgt

SEQ ID NO: 1761010 - DNA, 15 bp, Homo sapiens
acctttaatagtgta

SEQ ID NO: 1761011 - DNA, 15 bp, Homo sapiens
cctttaatagtgtac

SEQ ID NO: 1761012 - DNA, 15 bp, Homo sapiens
ctttaatagtgtaca

SEQ ID NO: 1761013 - DNA, 15 bp, Homo sapiens
tttaatagtgtacac

SEQ ID NO: 1761014 - DNA, 15 bp, Homo sapiens
ttaatagtgtacact

SEQ ID NO: 1761015 - DNA, 15 bp, Homo sapiens
taatagtgtacactt

SEQ ID NO: 1761016 - DNA, 15 bp, Homo sapiens
aatagtgtacacttt

SEQ ID NO: 1761017 - DNA, 15 bp, Homo sapiens
atagtgtacactttt

SEQ ID NO: 1761018 - DNA, 15 bp, Homo sapiens
tagtgtacactttta

SEQ ID NO: 1761019 - DNA, 15 bp, Homo sapiens
agtgtacacttttag

SEQ ID NO: 1761020 - DNA, 15 bp, Homo sapiens
gtgtacacttttaga

SEQ ID NO: 1761021 - DNA, 15 bp, Homo sapiens
tgtacacttttagat

SEQ ID NO: 1761022 - DNA, 15 bp, Homo sapiens
gtacacttttagatt

SEQ ID NO: 1761023 - DNA, 15 bp, Homo sapiens
tacacttttagattg

SEQ ID NO: 1761024 - DNA, 15 bp, Homo sapiens
acacttttagattgg

SEQ ID NO: 1761025 - DNA, 15 bp, Homo sapiens
cacttttagattggc

SEQ ID NO: 1761026 - DNA, 15 bp, Homo sapiens
acttttagattggca

SEQ ID NO: 1761027 - DNA, 15 bp, Homo sapiens
cttttagattggcat

SEQ ID NO: 1761028 - DNA, 15 bp, Homo sapiens
ttttagattggcatc

SEQ ID NO: 1761029 - DNA, 15 bp, Homo sapiens
tttagattggcatct

SEQ ID NO: 1761030 - DNA, 15 bp, Homo sapiens
ttagattggcatctg

SEQ ID NO: 1761031 - DNA, 15 bp, Homo sapiens
tagattggcatctga

SEQ ID NO: 1761032 - DNA, 15 bp, Homo sapiens
agattggcatctgat

SEQ ID NO: 1761033 - DNA, 15 bp, Homo sapiens
gattggcatctgatt

SEQ ID NO: 1761034 - DNA, 15 bp, Homo sapiens
attggcatctgattt

SEQ ID NO: 1761035 - DNA, 15 bp, Homo sapiens
ttggcatctgattta

SEQ ID NO: 1761036 - DNA, 15 bp, Homo sapiens
tggcatctgatttag

SEQ ID NO: 1761037 - DNA, 15 bp, Homo sapiens
ggcatctgatttagt

SEQ ID NO: 1761038 - DNA, 15 bp, Homo sapiens
gcatctgatttagtt

SEQ ID NO: 1761039 - DNA, 15 bp, Homo sapiens
catctgatttagttg

SEQ ID NO: 1761040 - DNA, 15 bp, Homo sapiens
atctgatttagttga

SEQ ID NO: 1761041 - DNA, 15 bp, Homo sapiens
tctgatttagttgaa

SEQ ID NO: 1761042 - DNA, 15 bp, Homo sapiens
ctgatttagttgaac

SEQ ID NO: 1761043 - DNA, 15 bp, Homo sapiens
tgatttagttgaacc

SEQ ID NO: 1761044 - DNA, 15 bp, Homo sapiens
gatttagttgaaccc

SEQ ID NO: 1761045 - DNA, 15 bp, Homo sapiens
atttagttgaaccca

SEQ ID NO: 1761046 - DNA, 15 bp, Homo sapiens
tttagttgaacccac

SEQ ID NO: 1761047 - DNA, 15 bp, Homo sapiens
ttagttgaacccaca

SEQ ID NO: 1761048 - DNA, 15 bp, Homo sapiens
tagttgaacccacat

SEQ ID NO: 1761049 - DNA, 15 bp, Homo sapiens
agttgaacccacata

SEQ ID NO: 1761050 - DNA, 15 bp, Homo sapiens
gttgaacccacatat

SEQ ID NO: 1761051 - DNA, 15 bp, Homo sapiens
ttgaacccacatatt

SEQ ID NO: 1761052 - DNA, 15 bp, Homo sapiens
tgaacccacatattt

SEQ ID NO: 1761053 - DNA, 15 bp, Homo sapiens
gaacccacatatttt

SEQ ID NO: 1761054 - DNA, 15 bp, Homo sapiens
aacccacatatttta

SEQ ID NO: 1761055 - DNA, 15 bp, Homo sapiens
acccacatattttaa

SEQ ID NO: 1761056 - DNA, 15 bp, Homo sapiens
cccacatattttaac

SEQ ID NO: 1761057 - DNA, 15 bp, Homo sapiens
ccacatattttaacg

SEQ ID NO: 1761058 - DNA, 15 bp, Homo sapiens
cacatattttaacgg

SEQ ID NO: 1761059 - DNA, 15 bp, Homo sapiens
acatattttaacggg

SEQ ID NO: 1761060 - DNA, 15 bp, Homo sapiens
catattttaacgggg

SEQ ID NO: 1761061 - DNA, 15 bp, Homo sapiens
atattttaacggggt

SEQ ID NO: 1761062 - DNA, 15 bp, Homo sapiens
tattttaacggggtc

SEQ ID NO: 1761063 - DNA, 15 bp, Homo sapiens
attttaacggggtct

SEQ ID NO: 1761064 - DNA, 15 bp, Homo sapiens
ttttaacggggtctt

SEQ ID NO: 1761065 - DNA, 15 bp, Homo sapiens
tttaacggggtcttc

SEQ ID NO: 1761066 - DNA, 15 bp, Homo sapiens
ttaacggggtcttct

SEQ ID NO: 1761067 - DNA, 15 bp, Homo sapiens
taacggggtcttctg

SEQ ID NO: 1761068 - DNA, 15 bp, Homo sapiens
aacggggtcttctga

SEQ ID NO: 1761069 - DNA, 15 bp, Homo sapiens
acggggtcttctgaa

SEQ ID NO: 1761070 - DNA, 15 bp, Homo sapiens
cggggtcttctgaaa

SEQ ID NO: 1761071 - DNA, 15 bp, Homo sapiens
ggggtcttctgaaaa

SEQ ID NO: 1761072 - DNA, 15 bp, Homo sapiens
gggtcttctgaaaat

SEQ ID NO: 1761073 - DNA, 15 bp, Homo sapiens
ggtcttctgaaaata

SEQ ID NO: 1761074 - DNA, 15 bp, Homo sapiens
gtcttctgaaaataa

SEQ ID NO: 1761075 - DNA, 15 bp, Homo sapiens
tcttctgaaaataaa

SEQ ID NO: 1761076 - DNA, 15 bp, Homo sapiens
cttctgaaaataaac

SEQ ID NO: 1761077 - DNA, 15 bp, Homo sapiens
ttctgaaaataaacg

SEQ ID NO: 1761078 - DNA, 15 bp, Homo sapiens
tctgaaaataaacgt

SEQ ID NO: 1761079 - DNA, 15 bp, Homo sapiens
ctgaaaataaacgtt

SEQ ID NO: 1761080 - DNA, 15 bp, Homo sapiens
tgaaaataaacgttt

SEQ ID NO: 1761081 - DNA, 15 bp, Homo sapiens
gaaaataaacgtttg

SEQ ID NO: 1761082 - DNA, 15 bp, Homo sapiens
aaaataaacgtttgc

SEQ ID NO: 1761083 - DNA, 15 bp, Homo sapiens
aaataaacgtttgca

SEQ ID NO: 1761084 - DNA, 15 bp, Homo sapiens
aataaacgtttgcac

SEQ ID NO: 1761085 - DNA, 15 bp, Homo sapiens
ataaacgtttgcaca

SEQ ID NO: 1761086 - DNA, 15 bp, Homo sapiens
taaacgtttgcacat

SEQ ID NO: 1761087 - DNA, 15 bp, Homo sapiens
aaacgtttgcacatt

SEQ ID NO: 1761088 - DNA, 15 bp, Homo sapiens
aacgtttgcacattt

SEQ ID NO: 1761089 - DNA, 15 bp, Homo sapiens
acgtttgcacatttc

SEQ ID NO: 1761090 - DNA, 15 bp, Homo sapiens
cgtttgcacatttca

SEQ ID NO: 1761091 - DNA, 15 bp, Homo sapiens
gtttgcacatttcag

SEQ ID NO: 1761092 - DNA, 15 bp, Homo sapiens
tttgcacatttcagt

SEQ ID NO: 1761093 - DNA, 15 bp, Homo sapiens
ttgcacatttcagtt

SEQ ID NO: 1761094 - DNA, 15 bp, Homo sapiens
tgcacatttcagttc

SEQ ID NO: 1761095 - DNA, 15 bp, Homo sapiens
gcacatttcagttcc

SEQ ID NO: 1761096 - DNA, 15 bp, Homo sapiens
cacatttcagttcca

SEQ ID NO: 1761097 - DNA, 15 bp, Homo sapiens
acatttcagttccaa

SEQ ID NO: 1761098 - DNA, 15 bp, Homo sapiens
catttcagttccaat

SEQ ID NO: 1761099 - DNA, 15 bp, Homo sapiens
atttcagttccaatg

SEQ ID NO: 1761100 - DNA, 15 bp, Homo sapiens
tttcagttccaatga

SEQ ID NO: 1761101 - DNA, 15 bp, Homo sapiens
ttcagttccaatgaa

SEQ ID NO: 1761102 - DNA, 15 bp, Homo sapiens
tcagttccaatgaag

SEQ ID NO: 1761103 - DNA, 15 bp, Homo sapiens
cagttccaatgaaga

SEQ ID NO: 1761104 - DNA, 15 bp, Homo sapiens
agttccaatgaagaa

SEQ ID NO: 1761105 - DNA, 15 bp, Homo sapiens
gttccaatgaagaac

SEQ ID NO: 1761106 - DNA, 15 bp, Homo sapiens
ttccaatgaagaaca

SEQ ID NO: 1761107 - DNA, 15 bp, Homo sapiens
tccaatgaagaacaa

SEQ ID NO: 1761108 - DNA, 15 bp, Homo sapiens
ccaatgaagaacaaa

SEQ ID NO: 1761109 - DNA, 15 bp, Homo sapiens
caatgaagaacaaat

SEQ ID NO: 1761110 - DNA, 15 bp, Homo sapiens
aatgaagaacaaatg

SEQ ID NO: 1761111 - DNA, 15 bp, Homo sapiens
atgaagaacaaatgg

SEQ ID NO: 1761112 - DNA, 15 bp, Homo sapiens
tgaagaacaaatggc

SEQ ID NO: 1761113 - DNA, 15 bp, Homo sapiens
gaagaacaaatggcc

SEQ ID NO: 1761114 - DNA, 15 bp, Homo sapiens
aagaacaaatggcct

SEQ ID NO: 1761115 - DNA, 15 bp, Homo sapiens
agaacaaatggcctg

SEQ ID NO: 1761116 - DNA, 15 bp, Homo sapiens
gaacaaatggcctgg

SEQ ID NO: 1761117 - DNA, 15 bp, Homo sapiens
aacaaatggcctggg

SEQ ID NO: 1761118 - DNA, 15 bp, Homo sapiens
acaaatggcctgggg

SEQ ID NO: 1761119 - DNA, 15 bp, Homo sapiens
caaatggcctgggga

SEQ ID NO: 1761120 - DNA, 15 bp, Homo sapiens
aaatggcctggggaa

SEQ ID NO: 1761121 - DNA, 15 bp, Homo sapiens
aatggcctggggaag

SEQ ID NO: 1761122 - DNA, 15 bp, Homo sapiens
atggcctggggaagg

SEQ ID NO: 1761123 - DNA, 15 bp, Homo sapiens
tggcctggggaaggg

SEQ ID NO: 1761124 - DNA, 15 bp, Homo sapiens
ggcctggggaaggga

SEQ ID NO: 1761125 - DNA, 15 bp, Homo sapiens
gcctggggaagggat

SEQ ID NO: 1761126 - DNA, 15 bp, Homo sapiens
cctggggaagggatg

SEQ ID NO: 1761127 - DNA, 15 bp, Homo sapiens
ctggggaagggatgg

SEQ ID NO: 1761128 - DNA, 15 bp, Homo sapiens
tggggaagggatgga

SEQ ID NO: 1761129 - DNA, 15 bp, Homo sapiens
ggggaagggatggag

SEQ ID NO: 1761130 - DNA, 15 bp, Homo sapiens
gggaagggatggaga

SEQ ID NO: 1761131 - DNA, 15 bp, Homo sapiens
ggaagggatggagag

SEQ ID NO: 1761132 - DNA, 15 bp, Homo sapiens
gaagggatggagagt

SEQ ID NO: 1761133 - DNA, 15 bp, Homo sapiens
aagggatggagagtg

SEQ ID NO: 1761134 - DNA, 15 bp, Homo sapiens
agggatggagagtgg

SEQ ID NO: 1761135 - DNA, 15 bp, Homo sapiens
gggatggagagtggt

SEQ ID NO: 1761136 - DNA, 15 bp, Homo sapiens
ggatggagagtggta

SEQ ID NO: 1761137 - DNA, 15 bp, Homo sapiens
gatggagagtggtaa

SEQ ID NO: 1761138 - DNA, 15 bp, Homo sapiens
atggagagtggtaaa

SEQ ID NO: 1761139 - DNA, 15 bp, Homo sapiens
tggagagtggtaaag

SEQ ID NO: 1761140 - DNA, 15 bp, Homo sapiens
ggagagtggtaaaga

SEQ ID NO: 1761141 - DNA, 15 bp, Homo sapiens
gagagtggtaaagaa

SEQ ID NO: 1761142 - DNA, 15 bp, Homo sapiens
agagtggtaaagaaa

SEQ ID NO: 1761143 - DNA, 15 bp, Homo sapiens
gagtggtaaagaaat

SEQ ID NO: 1761144 - DNA, 15 bp, Homo sapiens
agtggtaaagaaatc

SEQ ID NO: 1761145 - DNA, 15 bp, Homo sapiens
gtggtaaagaaatcc

SEQ ID NO: 1761146 - DNA, 15 bp, Homo sapiens
tggtaaagaaatccc

SEQ ID NO: 1761147 - DNA, 15 bp, Homo sapiens
ggtaaagaaatccct

SEQ ID NO: 1761148 - DNA, 15 bp, Homo sapiens
gtaaagaaatccctt

SEQ ID NO: 1761149 - DNA, 15 bp, Homo sapiens
taaagaaatcccttg

SEQ ID NO: 1761150 - DNA, 15 bp, Homo sapiens
aaagaaatcccttgt

SEQ ID NO: 1761151 - DNA, 15 bp, Homo sapiens
aagaaatcccttgta

SEQ ID NO: 1761152 - DNA, 15 bp, Homo sapiens
agaaatcccttgtag

SEQ ID NO: 1761153 - DNA, 15 bp, Homo sapiens
gaaatcccttgtaga

SEQ ID NO: 1761154 - DNA, 15 bp, Homo sapiens
aaatcccttgtagaa

SEQ ID NO: 1761155 - DNA, 15 bp, Homo sapiens
aatcccttgtagaaa

SEQ ID NO: 1761156 - DNA, 15 bp, Homo sapiens
atcccttgtagaaaa

SEQ ID NO: 1761157 - DNA, 15 bp, Homo sapiens
tcccttgtagaaaac

SEQ ID NO: 1761158 - DNA, 15 bp, Homo sapiens
cccttgtagaaaacc

SEQ ID NO: 1761159 - DNA, 15 bp, Homo sapiens
ccttgtagaaaacct

SEQ ID NO: 1761160 - DNA, 15 bp, Homo sapiens
cttgtagaaaacctt

SEQ ID NO: 1761161 - DNA, 15 bp, Homo sapiens
ttgtagaaaaccttt

SEQ ID NO: 1761162 - DNA, 15 bp, Homo sapiens
tgtagaaaacctttt

SEQ ID NO: 1761163 - DNA, 15 bp, Homo sapiens
gtagaaaaccttttt

SEQ ID NO: 1761164 - DNA, 15 bp, Homo sapiens
tagaaaacctttttt

SEQ ID NO: 1761165 - DNA, 15 bp, Homo sapiens
agaaaaccttttttt

SEQ ID NO: 1761166 - DNA, 15 bp, Homo sapiens
gaaaacctttttttt

SEQ ID NO: 1761167 - DNA, 15 bp, Homo sapiens
aaaaccttttttttt

SEQ ID NO: 1761168 - DNA, 15 bp, Homo sapiens
aaccttttttttttt

SEQ ID NO: 1761169 - DNA, 15 bp, Homo sapiens
acctttttttttttt

SEQ ID NO: 1761170 - DNA, 15 bp, Homo sapiens
ttttttttttaaaca

SEQ ID NO: 1761171 - DNA, 15 bp, Homo sapiens
tttttttttaaacag

SEQ ID NO: 1761172 - DNA, 15 bp, Homo sapiens
ttttttttaaacaga

SEQ ID NO: 1761173 - DNA, 15 bp, Homo sapiens
tttttttaaacagat

SEQ ID NO: 1761174 - DNA, 15 bp, Homo sapiens
ttttttaaacagatg

SEQ ID NO: 1761175 - DNA, 15 bp, Homo sapiens
tttttaaacagatga

SEQ ID NO: 1761176 - DNA, 15 bp, Homo sapiens
ttttaaacagatgag

SEQ ID NO: 1761177 - DNA, 15 bp, Homo sapiens
tttaaacagatgagt

SEQ ID NO: 1761178 - DNA, 15 bp, Homo sapiens
ttaaacagatgagtc

SEQ ID NO: 1761179 - DNA, 15 bp, Homo sapiens
taaacagatgagtct

SEQ ID NO: 1761180 - DNA, 15 bp, Homo sapiens
aaacagatgagtctc

SEQ ID NO: 1761181 - DNA, 15 bp, Homo sapiens
aacagatgagtctca

SEQ ID NO: 1761182 - DNA, 15 bp, Homo sapiens
acagatgagtctcac

SEQ ID NO: 1761183 - DNA, 15 bp, Homo sapiens
cagatgagtctcact

SEQ ID NO: 1761184 - DNA, 15 bp, Homo sapiens
agatgagtctcactc

SEQ ID NO: 1761185 - DNA, 15 bp, Homo sapiens
gatgagtctcactct

SEQ ID NO: 1761186 - DNA, 15 bp, Homo sapiens
atgagtctcactctg

SEQ ID NO: 1761187 - DNA, 15 bp, Homo sapiens
tgagtctcactctgt

SEQ ID NO: 1761188 - DNA, 15 bp, Homo sapiens
agtctcactctgttt

SEQ ID NO: 1761189 - DNA, 15 bp, Homo sapiens
gtctcactctgtttt

SEQ ID NO: 1761190 - DNA, 15 bp, Homo sapiens
tctcactctgttttc

SEQ ID NO: 1761191 - DNA, 15 bp, Homo sapiens
ctcactctgttttcc

SEQ ID NO: 1761192 - DNA, 15 bp, Homo sapiens
tcactctgttttccc

SEQ ID NO: 1761193 - DNA, 15 bp, Homo sapiens
cactctgttttccca

SEQ ID NO: 1761194 - DNA, 15 bp, Homo sapiens
actctgttttcccag

SEQ ID NO: 1761195 - DNA, 15 bp, Homo sapiens
ctctgttttcccagg

SEQ ID NO: 1761196 - DNA, 15 bp, Homo sapiens
tctgttttcccaggc

SEQ ID NO: 1761197 - DNA, 15 bp, Homo sapiens
ctgttttcccaggct

SEQ ID NO: 1761198 - DNA, 15 bp, Homo sapiens
tgttttcccaggctg

SEQ ID NO: 1761199 - DNA, 15 bp, Homo sapiens
gttttcccaggctgg

SEQ ID NO: 1761200 - DNA, 15 bp, Homo sapiens
ttttcccaggctgga

SEQ ID NO: 1761201 - DNA, 15 bp, Homo sapiens
gctggagtgcaatga

SEQ ID NO: 1761202 - DNA, 15 bp, Homo sapiens
ctggagtgcaatgac

SEQ ID NO: 1761203 - DNA, 15 bp, Homo sapiens
tggagtgcaatgaca

SEQ ID NO: 1761204 - DNA, 15 bp, Homo sapiens
ggagtgcaatgacac

SEQ ID NO: 1761205 - DNA, 15 bp, Homo sapiens
gagtgcaatgacaca

SEQ ID NO: 1761206 - DNA, 15 bp, Homo sapiens
agtgcaatgacacaa

SEQ ID NO: 1761207 - DNA, 15 bp, Homo sapiens
gtgcaatgacacaat

SEQ ID NO: 1761208 - DNA, 15 bp, Homo sapiens
tgcaatgacacaatc

SEQ ID NO: 1761209 - DNA, 15 bp, Homo sapiens
gcaatgacacaatca

SEQ ID NO: 1761210 - DNA, 15 bp, Homo sapiens
caatgacacaatcat

SEQ ID NO: 1761211 - DNA, 15 bp, Homo sapiens
aatgacacaatcata

SEQ ID NO: 1761212 - DNA, 15 bp, Homo sapiens
atgacacaatcatag

SEQ ID NO: 1761213 - DNA, 15 bp, Homo sapiens
tgacacaatcatagc

SEQ ID NO: 1761214 - DNA, 15 bp, Homo sapiens
gacacaatcatagct

SEQ ID NO: 1761215 - DNA, 15 bp, Homo sapiens
atcatagctcactga

SEQ ID NO: 1761216 - DNA, 15 bp, Homo sapiens
tcatagctcactgaa

SEQ ID NO: 1761217 - DNA, 15 bp, Homo sapiens
catagctcactgaag

SEQ ID NO: 1761218 - DNA, 15 bp, Homo sapiens
atagctcactgaagc

SEQ ID NO: 1761219 - DNA, 15 bp, Homo sapiens
tagctcactgaagcc

SEQ ID NO: 1761220 - DNA, 15 bp, Homo sapiens
agctcactgaagcct

SEQ ID NO: 1761221 - DNA, 15 bp, Homo sapiens
gctcactgaagcctt

SEQ ID NO: 1761222 - DNA, 15 bp, Homo sapiens
ctcactgaagccttg

SEQ ID NO: 1761223 - DNA, 15 bp, Homo sapiens
tcactgaagccttga

SEQ ID NO: 1761224 - DNA, 15 bp, Homo sapiens
cactgaagccttgaa

SEQ ID NO: 1761225 - DNA, 15 bp, Homo sapiens
actgaagccttgaac

SEQ ID NO: 1761226 - DNA, 15 bp, Homo sapiens
ctgaagccttgaact

SEQ ID NO: 1761227 - DNA, 15 bp, Homo sapiens
tgaagccttgaactc

SEQ ID NO: 1761228 - DNA, 15 bp, Homo sapiens
gaagccttgaactct

SEQ ID NO: 1761229 - DNA, 15 bp, Homo sapiens
aagccttgaactctt

SEQ ID NO: 1761230 - DNA, 15 bp, Homo sapiens
agccttgaactcttg

SEQ ID NO: 1761231 - DNA, 15 bp, Homo sapiens
gccttgaactcttgg

SEQ ID NO: 1761232 - DNA, 15 bp, Homo sapiens
ccttgaactcttggg

SEQ ID NO: 1761233 - DNA, 15 bp, Homo sapiens
aactcttgggctcaa

SEQ ID NO: 1761234 - DNA, 15 bp, Homo sapiens
actcttgggctcaag

SEQ ID NO: 1761235 - DNA, 15 bp, Homo sapiens
ctcttgggctcaagt

SEQ ID NO: 1761236 - DNA, 15 bp, Homo sapiens
tcttgggctcaagtg

SEQ ID NO: 1761237 - DNA, 15 bp, Homo sapiens
cttgggctcaagtga

SEQ ID NO: 1761238 - DNA, 15 bp, Homo sapiens
ttgggctcaagtgat

SEQ ID NO: 1761239 - DNA, 15 bp, Homo sapiens
cacctcagcctcctt

SEQ ID NO: 1761240 - DNA, 15 bp, Homo sapiens
acctcagcctcctta

SEQ ID NO: 1761241 - DNA, 15 bp, Homo sapiens
cctcagcctccttag

SEQ ID NO: 1761242 - DNA, 15 bp, Homo sapiens
ctcagcctccttagt

SEQ ID NO: 1761243 - DNA, 15 bp, Homo sapiens
tcagcctccttagta

SEQ ID NO: 1761244 - DNA, 15 bp, Homo sapiens
cagcctccttagtag

SEQ ID NO: 1761245 - DNA, 15 bp, Homo sapiens
agcctccttagtaga

SEQ ID NO: 1761246 - DNA, 15 bp, Homo sapiens
gcctccttagtagat

SEQ ID NO: 1761247 - DNA, 15 bp, Homo sapiens
cctccttagtagatg

SEQ ID NO: 1761248 - DNA, 15 bp, Homo sapiens
ctccttagtagatgt

SEQ ID NO: 1761249 - DNA, 15 bp, Homo sapiens
tccttagtagatgtg

SEQ ID NO: 1761250 - DNA, 15 bp, Homo sapiens
ccttagtagatgtga

SEQ ID NO: 1761251 - DNA, 15 bp, Homo sapiens
cttagtagatgtgac

SEQ ID NO: 1761252 - DNA, 15 bp, Homo sapiens
ttagtagatgtgact

SEQ ID NO: 1761253 - DNA, 15 bp, Homo sapiens
tagtagatgtgacta

SEQ ID NO: 1761254 - DNA, 15 bp, Homo sapiens
agtagatgtgactac

SEQ ID NO: 1761255 - DNA, 15 bp, Homo sapiens
gtagatgtgactaca

SEQ ID NO: 1761256 - DNA, 15 bp, Homo sapiens
tagatgtgactacag

SEQ ID NO: 1761257 - DNA, 15 bp, Homo sapiens
agatgtgactacagg

SEQ ID NO: 1761258 - DNA, 15 bp, Homo sapiens
gatgtgactacaggt

SEQ ID NO: 1761259 - DNA, 15 bp, Homo sapiens
atgtgactacaggtg

SEQ ID NO: 1761260 - DNA, 15 bp, Homo sapiens
tgtgactacaggtgt

SEQ ID NO: 1761261 - DNA, 15 bp, Homo sapiens
gtgactacaggtgtg

SEQ ID NO: 1761262 - DNA, 15 bp, Homo sapiens
tgactacaggtgtga

SEQ ID NO: 1761263 - DNA, 15 bp, Homo sapiens
gactacaggtgtgag

SEQ ID NO: 1761264 - DNA, 15 bp, Homo sapiens
actacaggtgtgagc

SEQ ID NO: 1761265 - DNA, 15 bp, Homo sapiens
ctacaggtgtgagcc

SEQ ID NO: 1761266 - DNA, 15 bp, Homo sapiens
acaggtgtgagccaa

SEQ ID NO: 1761267 - DNA, 15 bp, Homo sapiens
caggtgtgagccaac

SEQ ID NO: 1761268 - DNA, 15 bp, Homo sapiens
aggtgtgagccaaca

SEQ ID NO: 1761269 - DNA, 15 bp, Homo sapiens
ggtgtgagccaacac

SEQ ID NO: 1761270 - DNA, 15 bp, Homo sapiens
gtgtgagccaacaca

SEQ ID NO: 1761271 - DNA, 15 bp, Homo sapiens
tgtgagccaacacac

SEQ ID NO: 1761272 - DNA, 15 bp, Homo sapiens
gtgagccaacacacc

SEQ ID NO: 1761273 - DNA, 15 bp, Homo sapiens
tgagccaacacaccc

SEQ ID NO: 1761274 - DNA, 15 bp, Homo sapiens
gagccaacacaccca

SEQ ID NO: 1761275 - DNA, 15 bp, Homo sapiens
ccaacacacccagct

SEQ ID NO: 1761276 - DNA, 15 bp, Homo sapiens
caacacacccagcta

SEQ ID NO: 1761277 - DNA, 15 bp, Homo sapiens
aacacacccagctaa

SEQ ID NO: 1761278 - DNA, 15 bp, Homo sapiens
acacacccagctaat

SEQ ID NO: 1761279 - DNA, 15 bp, Homo sapiens
agctaatttttttta

SEQ ID NO: 1761280 - DNA, 15 bp, Homo sapiens
taattttttttattc

SEQ ID NO: 1761281 - DNA, 15 bp, Homo sapiens
aattttttttattct

SEQ ID NO: 1761282 - DNA, 15 bp, Homo sapiens
attttttttattctt

SEQ ID NO: 1761283 - DNA, 15 bp, Homo sapiens
ttttttttattcttt

SEQ ID NO: 1761284 - DNA, 15 bp, Homo sapiens
tttttttattctttg

SEQ ID NO: 1761285 - DNA, 15 bp, Homo sapiens
ttttttattctttgt

SEQ ID NO: 1761286 - DNA, 15 bp, Homo sapiens
tttttattctttgta

SEQ ID NO: 1761287 - DNA, 15 bp, Homo sapiens
ttttattctttgtag

SEQ ID NO: 1761288 - DNA, 15 bp, Homo sapiens
tttattctttgtaga

SEQ ID NO: 1761289 - DNA, 15 bp, Homo sapiens
ttattctttgtagag

SEQ ID NO: 1761290 - DNA, 15 bp, Homo sapiens
tattctttgtagaga

SEQ ID NO: 1761291 - DNA, 15 bp, Homo sapiens
attctttgtagagac

SEQ ID NO: 1761292 - DNA, 15 bp, Homo sapiens
ttctttgtagagacg

SEQ ID NO: 1761293 - DNA, 15 bp, Homo sapiens
tctttgtagagacgg

SEQ ID NO: 1761294 - DNA, 15 bp, Homo sapiens
ctttgtagagacggg

SEQ ID NO: 1761295 - DNA, 15 bp, Homo sapiens
tagagacggggtctt

SEQ ID NO: 1761296 - DNA, 15 bp, Homo sapiens
agagacggggtcttg

SEQ ID NO: 1761297 - DNA, 15 bp, Homo sapiens
gagacggggtcttgc

SEQ ID NO: 1761298 - DNA, 15 bp, Homo sapiens
agacggggtcttgct

SEQ ID NO: 1761299 - DNA, 15 bp, Homo sapiens
gacggggtcttgctg

SEQ ID NO: 1761300 - DNA, 15 bp, Homo sapiens
acggggtcttgctgt

SEQ ID NO: 1761301 - DNA, 15 bp, Homo sapiens
cggggtcttgctgtt

SEQ ID NO: 1761302 - DNA, 15 bp, Homo sapiens
ggggtcttgctgttg

SEQ ID NO: 1761303 - DNA, 15 bp, Homo sapiens
gggtcttgctgttgc

SEQ ID NO: 1761304 - DNA, 15 bp, Homo sapiens
ggtcttgctgttgcc

SEQ ID NO: 1761305 - DNA, 15 bp, Homo sapiens
gtcttgctgttgccc

SEQ ID NO: 1761306 - DNA, 15 bp, Homo sapiens
tcttgctgttgccca

SEQ ID NO: 1761307 - DNA, 15 bp, Homo sapiens
cttgctgttgcccag

SEQ ID NO: 1761308 - DNA, 15 bp, Homo sapiens
ttgctgttgcccagg

SEQ ID NO: 1761309 - DNA, 15 bp, Homo sapiens
tgctgttgcccaggc

SEQ ID NO: 1761310 - DNA, 15 bp, Homo sapiens
gctgttgcccaggct

SEQ ID NO: 1761311 - DNA, 15 bp, Homo sapiens
ctcctagactcaagt

SEQ ID NO: 1761312 - DNA, 15 bp, Homo sapiens
tcctagactcaagtg

SEQ ID NO: 1761313 - DNA, 15 bp, Homo sapiens
cctagactcaagtga

SEQ ID NO: 1761314 - DNA, 15 bp, Homo sapiens
ctagactcaagtgat

SEQ ID NO: 1761315 - DNA, 15 bp, Homo sapiens
tagactcaagtgatc

SEQ ID NO: 1761316 - DNA, 15 bp, Homo sapiens
agactcaagtgatcc

SEQ ID NO: 1761317 - DNA, 15 bp, Homo sapiens
actcaagtgatccta

SEQ ID NO: 1761318 - DNA, 15 bp, Homo sapiens
ctcaagtgatcctat

SEQ ID NO: 1761319 - DNA, 15 bp, Homo sapiens
tcaagtgatcctatt

SEQ ID NO: 1761320 - DNA, 15 bp, Homo sapiens
caagtgatcctattg

SEQ ID NO: 1761321 - DNA, 15 bp, Homo sapiens
aagtgatcctattgc

SEQ ID NO: 1761322 - DNA, 15 bp, Homo sapiens
agtgatcctattgct

SEQ ID NO: 1761323 - DNA, 15 bp, Homo sapiens
gtgatcctattgctt

SEQ ID NO: 1761324 - DNA, 15 bp, Homo sapiens
tgatcctattgcttt

SEQ ID NO: 1761325 - DNA, 15 bp, Homo sapiens
gatcctattgctttg

SEQ ID NO: 1761326 - DNA, 15 bp, Homo sapiens
atcctattgctttgg

SEQ ID NO: 1761327 - DNA, 15 bp, Homo sapiens
tcctattgctttggc

SEQ ID NO: 1761328 - DNA, 15 bp, Homo sapiens
cctattgctttggct

SEQ ID NO: 1761329 - DNA, 15 bp, Homo sapiens
ctattgctttggctt

SEQ ID NO: 1761330 - DNA, 15 bp, Homo sapiens
tattgctttggcttc

SEQ ID NO: 1761331 - DNA, 15 bp, Homo sapiens
attgctttggcttcc

SEQ ID NO: 1761332 - DNA, 15 bp, Homo sapiens
ttgctttggcttccc

SEQ ID NO: 1761333 - DNA, 15 bp, Homo sapiens
agtgctgggattagt

SEQ ID NO: 1761334 - DNA, 15 bp, Homo sapiens
gtgctgggattagtc

SEQ ID NO: 1761335 - DNA, 15 bp, Homo sapiens
tgctgggattagtca

SEQ ID NO: 1761336 - DNA, 15 bp, Homo sapiens
gctgggattagtcat

SEQ ID NO: 1761337 - DNA, 15 bp, Homo sapiens
ctgggattagtcatg

SEQ ID NO: 1761338 - DNA, 15 bp, Homo sapiens
tgggattagtcatga

SEQ ID NO: 1761339 - DNA, 15 bp, Homo sapiens
gggattagtcatgag

SEQ ID NO: 1761340 - DNA, 15 bp, Homo sapiens
ggattagtcatgagc

SEQ ID NO: 1761341 - DNA, 15 bp, Homo sapiens
gattagtcatgagct

SEQ ID NO: 1761342 - DNA, 15 bp, Homo sapiens
attagtcatgagctg

SEQ ID NO: 1761343 - DNA, 15 bp, Homo sapiens
ttagtcatgagctgc

SEQ ID NO: 1761344 - DNA, 15 bp, Homo sapiens
tagtcatgagctgcc

SEQ ID NO: 1761345 - DNA, 15 bp, Homo sapiens
agtcatgagctgcca

SEQ ID NO: 1761346 - DNA, 15 bp, Homo sapiens
gtcatgagctgccac

SEQ ID NO: 1761347 - DNA, 15 bp, Homo sapiens
tcatgagctgccact

SEQ ID NO: 1761348 - DNA, 15 bp, Homo sapiens
catgagctgccactc

SEQ ID NO: 1761349 - DNA, 15 bp, Homo sapiens
atgagctgccactct

SEQ ID NO: 1761350 - DNA, 15 bp, Homo sapiens
tgagctgccactctt

SEQ ID NO: 1761351 - DNA, 15 bp, Homo sapiens
gagctgccactcttg

SEQ ID NO: 1761352 - DNA, 15 bp, Homo sapiens
agctgccactcttgg

SEQ ID NO: 1761353 - DNA, 15 bp, Homo sapiens
gctgccactcttggc

SEQ ID NO: 1761354 - DNA, 15 bp, Homo sapiens
ctgccactcttggcc

SEQ ID NO: 1761355 - DNA, 15 bp, Homo sapiens
tgccactcttggcct

SEQ ID NO: 1761356 - DNA, 15 bp, Homo sapiens
gccactcttggccta

SEQ ID NO: 1761357 - DNA, 15 bp, Homo sapiens
ccactcttggcctac

SEQ ID NO: 1761358 - DNA, 15 bp, Homo sapiens
cactcttggcctaca

SEQ ID NO: 1761359 - DNA, 15 bp, Homo sapiens
actcttggcctacag

SEQ ID NO: 1761360 - DNA, 15 bp, Homo sapiens
ctcttggcctacaga

SEQ ID NO: 1761361 - DNA, 15 bp, Homo sapiens
tcttggcctacagaa

SEQ ID NO: 1761362 - DNA, 15 bp, Homo sapiens
cttggcctacagaaa

SEQ ID NO: 1761363 - DNA, 15 bp, Homo sapiens
ttggcctacagaaac

SEQ ID NO: 1761364 - DNA, 15 bp, Homo sapiens
tggcctacagaaact

SEQ ID NO: 1761365 - DNA, 15 bp, Homo sapiens
ggcctacagaaacta

SEQ ID NO: 1761366 - DNA, 15 bp, Homo sapiens
gcctacagaaactat

SEQ ID NO: 1761367 - DNA, 15 bp, Homo sapiens
cctacagaaactatt

SEQ ID NO: 1761368 - DNA, 15 bp, Homo sapiens
ctacagaaactattt

SEQ ID NO: 1761369 - DNA, 15 bp, Homo sapiens
tacagaaactattta

SEQ ID NO: 1761370 - DNA, 15 bp, Homo sapiens
acagaaactatttat

SEQ ID NO: 1761371 - DNA, 15 bp, Homo sapiens
cagaaactatttata

SEQ ID NO: 1761372 - DNA, 15 bp, Homo sapiens
agaaactatttatat

SEQ ID NO: 1761373 - DNA, 15 bp, Homo sapiens
gaaactatttatatg

SEQ ID NO: 1761374 - DNA, 15 bp, Homo sapiens
aaactatttatatgt

SEQ ID NO: 1761375 - DNA, 15 bp, Homo sapiens
aactatttatatgtg

SEQ ID NO: 1761376 - DNA, 15 bp, Homo sapiens
actatttatatgtgt

SEQ ID NO: 1761377 - DNA, 15 bp, Homo sapiens
ctatttatatgtgtc

SEQ ID NO: 1761378 - DNA, 15 bp, Homo sapiens
tatttatatgtgtcc

SEQ ID NO: 1761379 - DNA, 15 bp, Homo sapiens
atttatatgtgtcct

SEQ ID NO: 1761380 - DNA, 15 bp, Homo sapiens
tttatatgtgtcctt

SEQ ID NO: 1761381 - DNA, 15 bp, Homo sapiens
ttatatgtgtccttt

SEQ ID NO: 1761382 - DNA, 15 bp, Homo sapiens
tatatgtgtcctttg

SEQ ID NO: 1761383 - DNA, 15 bp, Homo sapiens
atatgtgtcctttgc

SEQ ID NO: 1761384 - DNA, 15 bp, Homo sapiens
tatgtgtcctttgct

SEQ ID NO: 1761385 - DNA, 15 bp, Homo sapiens
atgtgtcctttgctt

SEQ ID NO: 1761386 - DNA, 15 bp, Homo sapiens
tgtgtcctttgcttt

SEQ ID NO: 1761387 - DNA, 15 bp, Homo sapiens
gtgtcctttgcttta

SEQ ID NO: 1761388 - DNA, 15 bp, Homo sapiens
tgtcctttgctttat

SEQ ID NO: 1761389 - DNA, 15 bp, Homo sapiens
gtcctttgctttatt

SEQ ID NO: 1761390 - DNA, 15 bp, Homo sapiens
tcctttgctttattt

SEQ ID NO: 1761391 - DNA, 15 bp, Homo sapiens
cctttgctttatttt

SEQ ID NO: 1761392 - DNA, 15 bp, Homo sapiens
ctttgctttattttt

SEQ ID NO: 1761393 - DNA, 15 bp, Homo sapiens
tttgctttatttttc

SEQ ID NO: 1761394 - DNA, 15 bp, Homo sapiens
ttgctttatttttct

SEQ ID NO: 1761395 - DNA, 15 bp, Homo sapiens
tgctttatttttctt

SEQ ID NO: 1761396 - DNA, 15 bp, Homo sapiens
gctttatttttcttt

SEQ ID NO: 1761397 - DNA, 15 bp, Homo sapiens
ctttatttttcttta

SEQ ID NO: 1761398 - DNA, 15 bp, Homo sapiens
tttatttttctttaa

SEQ ID NO: 1761399 - DNA, 15 bp, Homo sapiens
ttatttttctttaaa

SEQ ID NO: 1761400 - DNA, 15 bp, Homo sapiens
tatttttctttaaat

SEQ ID NO: 1761401 - DNA, 15 bp, Homo sapiens
atttttctttaaatg

SEQ ID NO: 1761402 - DNA, 15 bp, Homo sapiens
tttttctttaaatgc

SEQ ID NO: 1761403 - DNA, 15 bp, Homo sapiens
ttttctttaaatgca

SEQ ID NO: 1761404 - DNA, 15 bp, Homo sapiens
tttctttaaatgcag

SEQ ID NO: 1761405 - DNA, 15 bp, Homo sapiens
ttctttaaatgcagg

SEQ ID NO: 1761406 - DNA, 15 bp, Homo sapiens
tctttaaatgcaggt

SEQ ID NO: 1761407 - DNA, 15 bp, Homo sapiens
ctttaaatgcaggtc

SEQ ID NO: 1761408 - DNA, 15 bp, Homo sapiens
tttaaatgcaggtcc

SEQ ID NO: 1761409 - DNA, 15 bp, Homo sapiens
ttaaatgcaggtcca

SEQ ID NO: 1761410 - DNA, 15 bp, Homo sapiens
taaatgcaggtccat

SEQ ID NO: 1761411 - DNA, 15 bp, Homo sapiens
aaatgcaggtccatt

SEQ ID NO: 1761412 - DNA, 15 bp, Homo sapiens
aatgcaggtccattt

SEQ ID NO: 1761413 - DNA, 15 bp, Homo sapiens
atgcaggtccatttt

SEQ ID NO: 1761414 - DNA, 15 bp, Homo sapiens
tgcaggtccattttt

SEQ ID NO: 1761415 - DNA, 15 bp, Homo sapiens
gcaggtccatttttt

SEQ ID NO: 1761416 - DNA, 15 bp, Homo sapiens
caggtccattttttc

SEQ ID NO: 1761417 - DNA, 15 bp, Homo sapiens
aggtccattttttcc

SEQ ID NO: 1761418 - DNA, 15 bp, Homo sapiens
ggtccattttttccc

SEQ ID NO: 1761419 - DNA, 15 bp, Homo sapiens
gtccattttttcccc

SEQ ID NO: 1761420 - DNA, 15 bp, Homo sapiens
tccattttttcccct

SEQ ID NO: 1761421 - DNA, 15 bp, Homo sapiens
ccattttttcccctc

SEQ ID NO: 1761422 - DNA, 15 bp, Homo sapiens
cattttttcccctcg

SEQ ID NO: 1761423 - DNA, 15 bp, Homo sapiens
attttttcccctcgt

SEQ ID NO: 1761424 - DNA, 15 bp, Homo sapiens
ttttttcccctcgtt

SEQ ID NO: 1761425 - DNA, 15 bp, Homo sapiens
tttttcccctcgttt

SEQ ID NO: 1761426 - DNA, 15 bp, Homo sapiens
ttttcccctcgtttt

SEQ ID NO: 1761427 - DNA, 15 bp, Homo sapiens
tttcccctcgtttta

SEQ ID NO: 1761428 - DNA, 15 bp, Homo sapiens
ttcccctcgttttag

SEQ ID NO: 1761429 - DNA, 15 bp, Homo sapiens
tcccctcgttttagg

SEQ ID NO: 1761430 - DNA, 15 bp, Homo sapiens
cccctcgttttaggt

SEQ ID NO: 1761431 - DNA, 15 bp, Homo sapiens
ccctcgttttaggta

SEQ ID NO: 1761432 - DNA, 15 bp, Homo sapiens
cctcgttttaggtag

SEQ ID NO: 1761433 - DNA, 15 bp, Homo sapiens
ctcgttttaggtagc

SEQ ID NO: 1761434 - DNA, 15 bp, Homo sapiens
tcgttttaggtagct

SEQ ID NO: 1761435 - DNA, 15 bp, Homo sapiens
cgttttaggtagcta

SEQ ID NO: 1761436 - DNA, 15 bp, Homo sapiens
gttttaggtagctaa

SEQ ID NO: 1761437 - DNA, 15 bp, Homo sapiens
ttttaggtagctaag

SEQ ID NO: 1761438 - DNA, 15 bp, Homo sapiens
tttaggtagctaaga

SEQ ID NO: 1761439 - DNA, 15 bp, Homo sapiens
ttaggtagctaagat

SEQ ID NO: 1761440 - DNA, 15 bp, Homo sapiens
taggtagctaagatt

SEQ ID NO: 1761441 - DNA, 15 bp, Homo sapiens
aggtagctaagatta

SEQ ID NO: 1761442 - DNA, 15 bp, Homo sapiens
ggtagctaagattat

SEQ ID NO: 1761443 - DNA, 15 bp, Homo sapiens
gtagctaagattata

SEQ ID NO: 1761444 - DNA, 15 bp, Homo sapiens
tagctaagattatat

SEQ ID NO: 1761445 - DNA, 15 bp, Homo sapiens
agctaagattatatt

SEQ ID NO: 1761446 - DNA, 15 bp, Homo sapiens
gctaagattatattg

SEQ ID NO: 1761447 - DNA, 15 bp, Homo sapiens
ctaagattatattga

SEQ ID NO: 1761448 - DNA, 15 bp, Homo sapiens
taagattatattgaa

SEQ ID NO: 1761449 - DNA, 15 bp, Homo sapiens
aagattatattgaat

SEQ ID NO: 1761450 - DNA, 15 bp, Homo sapiens
agattatattgaatc

SEQ ID NO: 1761451 - DNA, 15 bp, Homo sapiens
gattatattgaatca

SEQ ID NO: 1761452 - DNA, 15 bp, Homo sapiens
attatattgaatcat

SEQ ID NO: 1761453 - DNA, 15 bp, Homo sapiens
ttatattgaatcatg

SEQ ID NO: 1761454 - DNA, 15 bp, Homo sapiens
tatattgaatcatgt

SEQ ID NO: 1761455 - DNA, 15 bp, Homo sapiens
atattgaatcatgtg

SEQ ID NO: 1761456 - DNA, 15 bp, Homo sapiens
tattgaatcatgtgt

SEQ ID NO: 1761457 - DNA, 15 bp, Homo sapiens
attgaatcatgtgtg

SEQ ID NO: 1761458 - DNA, 15 bp, Homo sapiens
ttgaatcatgtgtgt

SEQ ID NO: 1761459 - DNA, 15 bp, Homo sapiens
tgaatcatgtgtgtt

SEQ ID NO: 1761460 - DNA, 15 bp, Homo sapiens
gaatcatgtgtgttt

SEQ ID NO: 1761461 - DNA, 15 bp, Homo sapiens
aatcatgtgtgtttc

SEQ ID NO: 1761462 - DNA, 15 bp, Homo sapiens
atcatgtgtgtttca

SEQ ID NO: 1761463 - DNA, 15 bp, Homo sapiens
tcatgtgtgtttcag

SEQ ID NO: 1761464 - DNA, 15 bp, Homo sapiens
catgtgtgtttcagt

SEQ ID NO: 1761465 - DNA, 15 bp, Homo sapiens
atgtgtgtttcagtc

SEQ ID NO: 1761466 - DNA, 15 bp, Homo sapiens
tgtgtgtttcagtct

SEQ ID NO: 1761467 - DNA, 15 bp, Homo sapiens
gtgtgtttcagtctt

SEQ ID NO: 1761468 - DNA, 15 bp, Homo sapiens
tgtgtttcagtcttt

SEQ ID NO: 1761469 - DNA, 15 bp, Homo sapiens
gtgtttcagtctttg

SEQ ID NO: 1761470 - DNA, 15 bp, Homo sapiens
tgtttcagtctttgt

SEQ ID NO: 1761471 - DNA, 15 bp, Homo sapiens
gtttcagtctttgtc

SEQ ID NO: 1761472 - DNA, 15 bp, Homo sapiens
tttcagtctttgtca

SEQ ID NO: 1761473 - DNA, 15 bp, Homo sapiens
ttcagtctttgtcat

SEQ ID NO: 1761474 - DNA, 15 bp, Homo sapiens
tcagtctttgtcatc

SEQ ID NO: 1761475 - DNA, 15 bp, Homo sapiens
cagtctttgtcatct

SEQ ID NO: 1761476 - DNA, 15 bp, Homo sapiens
agtctttgtcatctc

SEQ ID NO: 1761477 - DNA, 15 bp, Homo sapiens
gtctttgtcatctca

SEQ ID NO: 1761478 - DNA, 15 bp, Homo sapiens
tctttgtcatctcag

SEQ ID NO: 1761479 - DNA, 15 bp, Homo sapiens
ctttgtcatctcagg

SEQ ID NO: 1761480 - DNA, 15 bp, Homo sapiens
tttgtcatctcagga

SEQ ID NO: 1761481 - DNA, 15 bp, Homo sapiens
ttgtcatctcaggaa

SEQ ID NO: 1761482 - DNA, 15 bp, Homo sapiens
tgtcatctcaggaag

SEQ ID NO: 1761483 - DNA, 15 bp, Homo sapiens
gtcatctcaggaagt

SEQ ID NO: 1761484 - DNA, 15 bp, Homo sapiens
tcatctcaggaagtc

SEQ ID NO: 1761485 - DNA, 15 bp, Homo sapiens
catctcaggaagtct

SEQ ID NO: 1761486 - DNA, 15 bp, Homo sapiens
atctcaggaagtctt

SEQ ID NO: 1761487 - DNA, 15 bp, Homo sapiens
tctcaggaagtctta

SEQ ID NO: 1761488 - DNA, 15 bp, Homo sapiens
ctcaggaagtcttat

SEQ ID NO: 1761489 - DNA, 15 bp, Homo sapiens
tcaggaagtcttatg

SEQ ID NO: 1761490 - DNA, 15 bp, Homo sapiens
caggaagtcttatga

SEQ ID NO: 1761491 - DNA, 15 bp, Homo sapiens
aggaagtcttatgag

SEQ ID NO: 1761492 - DNA, 15 bp, Homo sapiens
ggaagtcttatgaga

SEQ ID NO: 1761493 - DNA, 15 bp, Homo sapiens
gaagtcttatgagac

SEQ ID NO: 1761494 - DNA, 15 bp, Homo sapiens
aagtcttatgagacc

SEQ ID NO: 1761495 - DNA, 15 bp, Homo sapiens
agtcttatgagacca

SEQ ID NO: 1761496 - DNA, 15 bp, Homo sapiens
gtcttatgagaccac

SEQ ID NO: 1761497 - DNA, 15 bp, Homo sapiens
tcttatgagaccaca

SEQ ID NO: 1761498 - DNA, 15 bp, Homo sapiens
cttatgagaccacaa

SEQ ID NO: 1761499 - DNA, 15 bp, Homo sapiens
ttatgagaccacaac

SEQ ID NO: 1761500 - DNA, 15 bp, Homo sapiens
tatgagaccacaaca

SEQ ID NO: 1761501 - DNA, 15 bp, Homo sapiens
atgagaccacaacat

SEQ ID NO: 1761502 - DNA, 15 bp, Homo sapiens
tgagaccacaacata

SEQ ID NO: 1761503 - DNA, 15 bp, Homo sapiens
gagaccacaacataa

SEQ ID NO: 1761504 - DNA, 15 bp, Homo sapiens
agaccacaacataaa

SEQ ID NO: 1761505 - DNA, 15 bp, Homo sapiens
gaccacaacataaag

SEQ ID NO: 1761506 - DNA, 15 bp, Homo sapiens
accacaacataaagt

SEQ ID NO: 1761507 - DNA, 15 bp, Homo sapiens
ccacaacataaagta

SEQ ID NO: 1761508 - DNA, 15 bp, Homo sapiens
cacaacataaagtat

SEQ ID NO: 1761509 - DNA, 15 bp, Homo sapiens
acaacataaagtata

SEQ ID NO: 1761510 - DNA, 15 bp, Homo sapiens
caacataaagtatag

SEQ ID NO: 1761511 - DNA, 15 bp, Homo sapiens
aacataaagtatagt

SEQ ID NO: 1761512 - DNA, 15 bp, Homo sapiens
acataaagtatagta

SEQ ID NO: 1761513 - DNA, 15 bp, Homo sapiens
cataaagtatagtaa

SEQ ID NO: 1761514 - DNA, 15 bp, Homo sapiens
ataaagtatagtaat

SEQ ID NO: 1761515 - DNA, 15 bp, Homo sapiens
taaagtatagtaatt

SEQ ID NO: 1761516 - DNA, 15 bp, Homo sapiens
aaagtatagtaattt

SEQ ID NO: 1761517 - DNA, 15 bp, Homo sapiens
aagtatagtaatttt

SEQ ID NO: 1761518 - DNA, 15 bp, Homo sapiens
agtatagtaattttt

SEQ ID NO: 1761519 - DNA, 15 bp, Homo sapiens
gtatagtaatttttg

SEQ ID NO: 1761520 - DNA, 15 bp, Homo sapiens
tatagtaatttttgt

SEQ ID NO: 1761521 - DNA, 15 bp, Homo sapiens
atagtaatttttgtc

SEQ ID NO: 1761522 - DNA, 15 bp, Homo sapiens
tagtaatttttgtcc

SEQ ID NO: 1761523 - DNA, 15 bp, Homo sapiens
agtaatttttgtcca

SEQ ID NO: 1761524 - DNA, 15 bp, Homo sapiens
gtaatttttgtccaa

SEQ ID NO: 1761525 - DNA, 15 bp, Homo sapiens
taatttttgtccaat

SEQ ID NO: 1761526 - DNA, 15 bp, Homo sapiens
aatttttgtccaata

SEQ ID NO: 1761527 - DNA, 15 bp, Homo sapiens
atttttgtccaataa

SEQ ID NO: 1761528 - DNA, 15 bp, Homo sapiens
tttttgtccaataat

SEQ ID NO: 1761529 - DNA, 15 bp, Homo sapiens
ttttgtccaataatt

SEQ ID NO: 1761530 - DNA, 15 bp, Homo sapiens
tttgtccaataattt

SEQ ID NO: 1761531 - DNA, 15 bp, Homo sapiens
ttgtccaataatttt

SEQ ID NO: 1761532 - DNA, 15 bp, Homo sapiens
tgtccaataattttg

SEQ ID NO: 1761533 - DNA, 15 bp, Homo sapiens
gtccaataattttgg

SEQ ID NO: 1761534 - DNA, 15 bp, Homo sapiens
tccaataattttggc

SEQ ID NO: 1761535 - DNA, 15 bp, Homo sapiens
ccaataattttggcc

SEQ ID NO: 1761536 - DNA, 15 bp, Homo sapiens
caataattttggcca

SEQ ID NO: 1761537 - DNA, 15 bp, Homo sapiens
aataattttggccat

SEQ ID NO: 1761538 - DNA, 15 bp, Homo sapiens
ataattttggccatt

SEQ ID NO: 1761539 - DNA, 15 bp, Homo sapiens
taattttggccatta

SEQ ID NO: 1761540 - DNA, 15 bp, Homo sapiens
aattttggccattag

SEQ ID NO: 1761541 - DNA, 15 bp, Homo sapiens
attttggccattagc

SEQ ID NO: 1761542 - DNA, 15 bp, Homo sapiens
ttttggccattagca

SEQ ID NO: 1761543 - DNA, 15 bp, Homo sapiens
tttggccattagcaa

SEQ ID NO: 1761544 - DNA, 15 bp, Homo sapiens
ttggccattagcaaa

SEQ ID NO: 1761545 - DNA, 15 bp, Homo sapiens
tggccattagcaaaa

SEQ ID NO: 1761546 - DNA, 15 bp, Homo sapiens
ggccattagcaaaaa

SEQ ID NO: 1761547 - DNA, 15 bp, Homo sapiens
gccattagcaaaaat

SEQ ID NO: 1761548 - DNA, 15 bp, Homo sapiens
ccattagcaaaaatt

SEQ ID NO: 1761549 - DNA, 15 bp, Homo sapiens
cattagcaaaaatta

SEQ ID NO: 1761550 - DNA, 15 bp, Homo sapiens
attagcaaaaattac

SEQ ID NO: 1761551 - DNA, 15 bp, Homo sapiens
ttagcaaaaattacc

SEQ ID NO: 1761552 - DNA, 15 bp, Homo sapiens
tagcaaaaattacct

SEQ ID NO: 1761553 - DNA, 15 bp, Homo sapiens
agcaaaaattaccta

SEQ ID NO: 1761554 - DNA, 15 bp, Homo sapiens
gcaaaaattacctat

SEQ ID NO: 1761555 - DNA, 15 bp, Homo sapiens
caaaaattacctata

SEQ ID NO: 1761556 - DNA, 15 bp, Homo sapiens
aaaaattacctatat

SEQ ID NO: 1761557 - DNA, 15 bp, Homo sapiens
aaaattacctatatg

SEQ ID NO: 1761558 - DNA, 15 bp, Homo sapiens
aaattacctatatga

SEQ ID NO: 1761559 - DNA, 15 bp, Homo sapiens
aattacctatatgac

SEQ ID NO: 1761560 - DNA, 15 bp, Homo sapiens
attacctatatgaca

SEQ ID NO: 1761561 - DNA, 15 bp, Homo sapiens
ttacctatatgacat

SEQ ID NO: 1761562 - DNA, 15 bp, Homo sapiens
tacctatatgacata

SEQ ID NO: 1761563 - DNA, 15 bp, Homo sapiens
acctatatgacatat

SEQ ID NO: 1761564 - DNA, 15 bp, Homo sapiens
cctatatgacatata

SEQ ID NO: 1761565 - DNA, 15 bp, Homo sapiens
ctatatgacatataa

SEQ ID NO: 1761566 - DNA, 15 bp, Homo sapiens
tatatgacatataaa

SEQ ID NO: 1761567 - DNA, 15 bp, Homo sapiens
atatgacatataaat

SEQ ID NO: 1761568 - DNA, 15 bp, Homo sapiens
tatgacatataaatc

SEQ ID NO: 1761569 - DNA, 15 bp, Homo sapiens
atgacatataaatca

SEQ ID NO: 1761570 - DNA, 15 bp, Homo sapiens
tgacatataaatcaa

SEQ ID NO: 1761571 - DNA, 15 bp, Homo sapiens
gacatataaatcaaa

SEQ ID NO: 1761572 - DNA, 15 bp, Homo sapiens
acatataaatcaaat

SEQ ID NO: 1761573 - DNA, 15 bp, Homo sapiens
catataaatcaaatg

SEQ ID NO: 1761574 - DNA, 15 bp, Homo sapiens
atataaatcaaatgg

SEQ ID NO: 1761575 - DNA, 15 bp, Homo sapiens
tataaatcaaatggt

SEQ ID NO: 1761576 - DNA, 15 bp, Homo sapiens
ataaatcaaatggta

SEQ ID NO: 1761577 - DNA, 15 bp, Homo sapiens
taaatcaaatggtat

SEQ ID NO: 1761578 - DNA, 15 bp, Homo sapiens
aaatcaaatggtata

SEQ ID NO: 1761579 - DNA, 15 bp, Homo sapiens
aatcaaatggtataa

SEQ ID NO: 1761580 - DNA, 15 bp, Homo sapiens
atcaaatggtataat

SEQ ID NO: 1761581 - DNA, 15 bp, Homo sapiens
tcaaatggtataatt

SEQ ID NO: 1761582 - DNA, 15 bp, Homo sapiens
caaatggtataattt

SEQ ID NO: 1761583 - DNA, 15 bp, Homo sapiens
aaatggtataatttt

SEQ ID NO: 1761584 - DNA, 15 bp, Homo sapiens
aatggtataattttt

SEQ ID NO: 1761585 - DNA, 15 bp, Homo sapiens
atggtataatttttt

SEQ ID NO: 1761586 - DNA, 15 bp, Homo sapiens
tggtataatttttta

SEQ ID NO: 1761587 - DNA, 15 bp, Homo sapiens
ggtataattttttag

SEQ ID NO: 1761588 - DNA, 15 bp, Homo sapiens
gtataattttttagt

SEQ ID NO: 1761589 - DNA, 15 bp, Homo sapiens
tataattttttagtg

SEQ ID NO: 1761590 - DNA, 15 bp, Homo sapiens
ataattttttagtgc

SEQ ID NO: 1761591 - DNA, 15 bp, Homo sapiens
taattttttagtgct

SEQ ID NO: 1761592 - DNA, 15 bp, Homo sapiens
aattttttagtgcta

SEQ ID NO: 1761593 - DNA, 15 bp, Homo sapiens
attttttagtgctaa

SEQ ID NO: 1761594 - DNA, 15 bp, Homo sapiens
ttttttagtgctaag

SEQ ID NO: 1761595 - DNA, 15 bp, Homo sapiens
tttttagtgctaagt

SEQ ID NO: 1761596 - DNA, 15 bp, Homo sapiens
ttttagtgctaagtc

SEQ ID NO: 1761597 - DNA, 15 bp, Homo sapiens
tttagtgctaagtct

SEQ ID NO: 1761598 - DNA, 15 bp, Homo sapiens
ttagtgctaagtctt

SEQ ID NO: 1761599 - DNA, 15 bp, Homo sapiens
tagtgctaagtctta

SEQ ID NO: 1761600 - DNA, 15 bp, Homo sapiens
agtgctaagtcttaa

SEQ ID NO: 1761601 - DNA, 15 bp, Homo sapiens
gtgctaagtcttaag

SEQ ID NO: 1761602 - DNA, 15 bp, Homo sapiens
tgctaagtcttaagt

SEQ ID NO: 1761603 - DNA, 15 bp, Homo sapiens
gctaagtcttaagta

SEQ ID NO: 1761604 - DNA, 15 bp, Homo sapiens
ctaagtcttaagtag

SEQ ID NO: 1761605 - DNA, 15 bp, Homo sapiens
taagtcttaagtagt

SEQ ID NO: 1761606 - DNA, 15 bp, Homo sapiens
aagtcttaagtagta

SEQ ID NO: 1761607 - DNA, 15 bp, Homo sapiens
agtcttaagtagtat

SEQ ID NO: 1761608 - DNA, 15 bp, Homo sapiens
gtcttaagtagtatt

SEQ ID NO: 1761609 - DNA, 15 bp, Homo sapiens
tcttaagtagtattc

SEQ ID NO: 1761610 - DNA, 15 bp, Homo sapiens
cttaagtagtattca

SEQ ID NO: 1761611 - DNA, 15 bp, Homo sapiens
ttaagtagtattcat

SEQ ID NO: 1761612 - DNA, 15 bp, Homo sapiens
taagtagtattcatt

SEQ ID NO: 1761613 - DNA, 15 bp, Homo sapiens
aagtagtattcattt

SEQ ID NO: 1761614 - DNA, 15 bp, Homo sapiens
agtagtattcatttt

SEQ ID NO: 1761615 - DNA, 15 bp, Homo sapiens
gtagtattcattttt

SEQ ID NO: 1761616 - DNA, 15 bp, Homo sapiens
tagtattcattttta

SEQ ID NO: 1761617 - DNA, 15 bp, Homo sapiens
agtattcatttttat

SEQ ID NO: 1761618 - DNA, 15 bp, Homo sapiens
gtattcatttttatt

SEQ ID NO: 1761619 - DNA, 15 bp, Homo sapiens
tattcatttttattt

SEQ ID NO: 1761620 - DNA, 15 bp, Homo sapiens
attcatttttattta

SEQ ID NO: 1761621 - DNA, 15 bp, Homo sapiens
ttcatttttatttaa

SEQ ID NO: 1761622 - DNA, 15 bp, Homo sapiens
tcatttttatttaaa

SEQ ID NO: 1761623 - DNA, 15 bp, Homo sapiens
catttttatttaaat

SEQ ID NO: 1761624 - DNA, 15 bp, Homo sapiens
tttttatttaaataa

SEQ ID NO: 1761625 - DNA, 15 bp, Homo sapiens
ttttatttaaataaa

SEQ ID NO: 1761626 - DNA, 15 bp, Homo sapiens
tttatttaaataaat

SEQ ID NO: 1761627 - DNA, 15 bp, Homo sapiens
ttatttaaataaatt

SEQ ID NO: 1761628 - DNA, 15 bp, Homo sapiens
tatttaaataaattg

SEQ ID NO: 1761629 - DNA, 15 bp, Homo sapiens
atttaaataaattgc

SEQ ID NO: 1761630 - DNA, 15 bp, Homo sapiens
tttaaataaattgct

SEQ ID NO: 1761631 - DNA, 15 bp, Homo sapiens
ttaaataaattgctt

SEQ ID NO: 1761632 - DNA, 15 bp, Homo sapiens
taaataaattgcttc

SEQ ID NO: 1761633 - DNA, 15 bp, Homo sapiens
aaataaattgcttct

SEQ ID NO: 1761634 - DNA, 15 bp, Homo sapiens
aataaattgcttctg

SEQ ID NO: 1761635 - DNA, 15 bp, Homo sapiens
ataaattgcttctgt

SEQ ID NO: 1761636 - DNA, 15 bp, Homo sapiens
taaattgcttctgtt

SEQ ID NO: 1761637 - DNA, 15 bp, Homo sapiens
aaattgcttctgttc

SEQ ID NO: 1761638 - DNA, 15 bp, Homo sapiens
aattgcttctgttcg

SEQ ID NO: 1761639 - DNA, 15 bp, Homo sapiens
attgcttctgttcgt

SEQ ID NO: 1761640 - DNA, 15 bp, Homo sapiens
ttgcttctgttcgta

SEQ ID NO: 1761641 - DNA, 15 bp, Homo sapiens
tgcttctgttcgtaa

SEQ ID NO: 1761642 - DNA, 15 bp, Homo sapiens
gcttctgttcgtaaa

SEQ ID NO: 1761643 - DNA, 15 bp, Homo sapiens
cttctgttcgtaaag

SEQ ID NO: 1761644 - DNA, 15 bp, Homo sapiens
ttctgttcgtaaagt

SEQ ID NO: 1761645 - DNA, 15 bp, Homo sapiens
tctgttcgtaaagta

SEQ ID NO: 1761646 - DNA, 15 bp, Homo sapiens
ctgttcgtaaagtac

SEQ ID NO: 1761647 - DNA, 15 bp, Homo sapiens
tgttcgtaaagtact

SEQ ID NO: 1761648 - DNA, 15 bp, Homo sapiens
gttcgtaaagtacta

SEQ ID NO: 1761649 - DNA, 15 bp, Homo sapiens
ttcgtaaagtactat

SEQ ID NO: 1761650 - DNA, 15 bp, Homo sapiens
tcgtaaagtactata

SEQ ID NO: 1761651 - DNA, 15 bp, Homo sapiens
cgtaaagtactatat

SEQ ID NO: 1761652 - DNA, 15 bp, Homo sapiens
gtaaagtactatata

SEQ ID NO: 1761653 - DNA, 15 bp, Homo sapiens
taaagtactatatat

SEQ ID NO: 1761654 - DNA, 15 bp, Homo sapiens
aaagtactatatata

SEQ ID NO: 1761655 - DNA, 15 bp, Homo sapiens
aagtactatatataa

SEQ ID NO: 1761656 - DNA, 15 bp, Homo sapiens
agtactatatataaa

SEQ ID NO: 1761657 - DNA, 15 bp, Homo sapiens
gtactatatataaaa

SEQ ID NO: 1761658 - DNA, 15 bp, Homo sapiens
tactatatataaaac

SEQ ID NO: 1761659 - DNA, 15 bp, Homo sapiens
actatatataaaacc

SEQ ID NO: 1761660 - DNA, 15 bp, Homo sapiens
ctatatataaaacct

SEQ ID NO: 1761661 - DNA, 15 bp, Homo sapiens
tatatataaaacctt

SEQ ID NO: 1761662 - DNA, 15 bp, Homo sapiens
atatataaaaccttt

SEQ ID NO: 1761663 - DNA, 15 bp, Homo sapiens
tatataaaacctttt

SEQ ID NO: 1761664 - DNA, 15 bp, Homo sapiens
atataaaaccttttt

SEQ ID NO: 1761665 - DNA, 15 bp, Homo sapiens
tataaaaccttttta

SEQ ID NO: 1761666 - DNA, 15 bp, Homo sapiens
ataaaacctttttac

SEQ ID NO: 1761667 - DNA, 15 bp, Homo sapiens
taaaacctttttacc

SEQ ID NO: 1761668 - DNA, 15 bp, Homo sapiens
aaaacctttttacct

SEQ ID NO: 1761669 - DNA, 15 bp, Homo sapiens
aaacctttttacctt

SEQ ID NO: 1761670 - DNA, 15 bp, Homo sapiens
aacctttttaccttt

SEQ ID NO: 1761671 - DNA, 15 bp, Homo sapiens
acctttttacctttt

SEQ ID NO: 1761672 - DNA, 15 bp, Homo sapiens
cctttttaccttttt

SEQ ID NO: 1761673 - DNA, 15 bp, Homo sapiens
ctttttacctttttt

SEQ ID NO: 1761674 - DNA, 15 bp, Homo sapiens
tttttacctttttta

SEQ ID NO: 1761675 - DNA, 15 bp, Homo sapiens
ttttaccttttttat

SEQ ID NO: 1761676 - DNA, 15 bp, Homo sapiens
tttaccttttttata

SEQ ID NO: 1761677 - DNA, 15 bp, Homo sapiens
ttaccttttttatat

SEQ ID NO: 1761678 - DNA, 15 bp, Homo sapiens
taccttttttatata

SEQ ID NO: 1761679 - DNA, 15 bp, Homo sapiens
accttttttatatat

SEQ ID NO: 1761680 - DNA, 15 bp, Homo sapiens
ccttttttatatata

SEQ ID NO: 1761681 - DNA, 15 bp, Homo sapiens
cttttttatatataa

SEQ ID NO: 1761682 - DNA, 15 bp, Homo sapiens
ttttttatatataaa

SEQ ID NO: 1761683 - DNA, 15 bp, Homo sapiens
tttttatatataaaa

SEQ ID NO: 1761684 - DNA, 15 bp, Homo sapiens
ttttatatataaaac

SEQ ID NO: 1761685 - DNA, 15 bp, Homo sapiens
tttatatataaaacc

SEQ ID NO: 1761686 - DNA, 15 bp, Homo sapiens
ttatatataaaacct

SEQ ID NO: 1761687 - DNA, 15 bp, Homo sapiens
tatatataaaaccta

SEQ ID NO: 1761688 - DNA, 15 bp, Homo sapiens
atatataaaacctat

SEQ ID NO: 1761689 - DNA, 15 bp, Homo sapiens
tatataaaacctatg

SEQ ID NO: 1761690 - DNA, 15 bp, Homo sapiens
atataaaacctatga

SEQ ID NO: 1761691 - DNA, 15 bp, Homo sapiens
tataaaacctatgat

SEQ ID NO: 1761692 - DNA, 15 bp, Homo sapiens
ataaaacctatgatt

SEQ ID NO: 1761693 - DNA, 15 bp, Homo sapiens
taaaacctatgattc

SEQ ID NO: 1761694 - DNA, 15 bp, Homo sapiens
aaaacctatgattca

SEQ ID NO: 1761695 - DNA, 15 bp, Homo sapiens
aaacctatgattcat

SEQ ID NO: 1761696 - DNA, 15 bp, Homo sapiens
aacctatgattcata

SEQ ID NO: 1761697 - DNA, 15 bp, Homo sapiens
acctatgattcatag

SEQ ID NO: 1761698 - DNA, 15 bp, Homo sapiens
cctatgattcatagg

SEQ ID NO: 1761699 - DNA, 15 bp, Homo sapiens
ctatgattcataggt

SEQ ID NO: 1761700 - DNA, 15 bp, Homo sapiens
tatgattcataggtt

SEQ ID NO: 1761701 - DNA, 15 bp, Homo sapiens
atgattcataggttt

SEQ ID NO: 1761702 - DNA, 15 bp, Homo sapiens
tgattcataggtttt

SEQ ID NO: 1761703 - DNA, 15 bp, Homo sapiens
gattcataggtttta

SEQ ID NO: 1761704 - DNA, 15 bp, Homo sapiens
attcataggttttat

SEQ ID NO: 1761705 - DNA, 15 bp, Homo sapiens
ttcataggttttatg

SEQ ID NO: 1761706 - DNA, 15 bp, Homo sapiens
tcataggttttatgt

SEQ ID NO: 1761707 - DNA, 15 bp, Homo sapiens
cataggttttatgtc

SEQ ID NO: 1761708 - DNA, 15 bp, Homo sapiens
ataggttttatgtcc

SEQ ID NO: 1761709 - DNA, 15 bp, Homo sapiens
taggttttatgtcct

SEQ ID NO: 1761710 - DNA, 15 bp, Homo sapiens
aggttttatgtccta

SEQ ID NO: 1761711 - DNA, 15 bp, Homo sapiens
ggttttatgtcctat

SEQ ID NO: 1761712 - DNA, 15 bp, Homo sapiens
gttttatgtcctatt

SEQ ID NO: 1761713 - DNA, 15 bp, Homo sapiens
ttttatgtcctatta

SEQ ID NO: 1761714 - DNA, 15 bp, Homo sapiens
tttatgtcctattaa

SEQ ID NO: 1761715 - DNA, 15 bp, Homo sapiens
ttatgtcctattaaa

SEQ ID NO: 1761716 - DNA, 15 bp, Homo sapiens
tatgtcctattaaaa

SEQ ID NO: 1761717 - DNA, 15 bp, Homo sapiens
atgtcctattaaaat

SEQ ID NO: 1761718 - DNA, 15 bp, Homo sapiens
tgtcctattaaaata

SEQ ID NO: 1761719 - DNA, 15 bp, Homo sapiens
gtcctattaaaatat

SEQ ID NO: 1761720 - DNA, 15 bp, Homo sapiens
tcctattaaaatatg

SEQ ID NO: 1761721 - DNA, 15 bp, Homo sapiens
cctattaaaatatga

SEQ ID NO: 1761722 - DNA, 15 bp, Homo sapiens
ctattaaaatatgag

SEQ ID NO: 1761723 - DNA, 15 bp, Homo sapiens
tattaaaatatgagc

SEQ ID NO: 1761724 - DNA, 15 bp, Homo sapiens
attaaaatatgagct

SEQ ID NO: 1761725 - DNA, 15 bp, Homo sapiens
ttaaaatatgagcta

SEQ ID NO: 1761726 - DNA, 15 bp, Homo sapiens
taaaatatgagctaa

SEQ ID NO: 1761727 - DNA, 15 bp, Homo sapiens
aaaatatgagctaac

SEQ ID NO: 1761728 - DNA, 15 bp, Homo sapiens
aaatatgagctaaca

SEQ ID NO: 1761729 - DNA, 15 bp, Homo sapiens
aatatgagctaacaa

SEQ ID NO: 1761730 - DNA, 15 bp, Homo sapiens
atatgagctaacaat

SEQ ID NO: 1761731 - DNA, 15 bp, Homo sapiens
tatgagctaacaata

SEQ ID NO: 1761732 - DNA, 15 bp, Homo sapiens
atgagctaacaataa

SEQ ID NO: 1761733 - DNA, 15 bp, Homo sapiens
tgagctaacaataat

SEQ ID NO: 1761734 - DNA, 15 bp, Homo sapiens
gagctaacaataatt

SEQ ID NO: 1761735 - DNA, 15 bp, Homo sapiens
agctaacaataattg

SEQ ID NO: 1761736 - DNA, 15 bp, Homo sapiens
gctaacaataattgg

SEQ ID NO: 1761737 - DNA, 15 bp, Homo sapiens
ctaacaataattggt

SEQ ID NO: 1761738 - DNA, 15 bp, Homo sapiens
taacaataattggta

SEQ ID NO: 1761739 - DNA, 15 bp, Homo sapiens
aacaataattggtaa

SEQ ID NO: 1761740 - DNA, 15 bp, Homo sapiens
acaataattggtaaa

SEQ ID NO: 1761741 - DNA, 15 bp, Homo sapiens
caataattggtaaaa

SEQ ID NO: 1761742 - DNA, 15 bp, Homo sapiens
aataattggtaaaat

SEQ ID NO: 1761743 - DNA, 15 bp, Homo sapiens
ataattggtaaaatt

SEQ ID NO: 1761744 - DNA, 15 bp, Homo sapiens
taattggtaaaatta

SEQ ID NO: 1761745 - DNA, 15 bp, Homo sapiens
aattggtaaaattag

SEQ ID NO: 1761746 - DNA, 15 bp, Homo sapiens
attggtaaaattagt

SEQ ID NO: 1761747 - DNA, 15 bp, Homo sapiens
ttggtaaaattagtt

SEQ ID NO: 1761748 - DNA, 15 bp, Homo sapiens
tggtaaaattagttg

SEQ ID NO: 1761749 - DNA, 15 bp, Homo sapiens
ggtaaaattagttgg

SEQ ID NO: 1761750 - DNA, 15 bp, Homo sapiens
gtaaaattagttgga

SEQ ID NO: 1761751 - DNA, 15 bp, Homo sapiens
taaaattagttggaa

SEQ ID NO: 1761752 - DNA, 15 bp, Homo sapiens
aaaattagttggaaa

SEQ ID NO: 1761753 - DNA, 15 bp, Homo sapiens
aaattagttggaaaa

SEQ ID NO: 1761754 - DNA, 15 bp, Homo sapiens
aattagttggaaaat

SEQ ID NO: 1761755 - DNA, 15 bp, Homo sapiens
attagttggaaaatt

SEQ ID NO: 1761756 - DNA, 15 bp, Homo sapiens
ttagttggaaaatta

SEQ ID NO: 1761757 - DNA, 15 bp, Homo sapiens
tagttggaaaattat

SEQ ID NO: 1761758 - DNA, 15 bp, Homo sapiens
agttggaaaattatc

SEQ ID NO: 1761759 - DNA, 15 bp, Homo sapiens
gttggaaaattatca

SEQ ID NO: 1761760 - DNA, 15 bp, Homo sapiens
ttggaaaattatcag

SEQ ID NO: 1761761 - DNA, 15 bp, Homo sapiens
tggaaaattatcagt

SEQ ID NO: 1761762 - DNA, 15 bp, Homo sapiens
ggaaaattatcagtt

SEQ ID NO: 1761763 - DNA, 15 bp, Homo sapiens
gaaaattatcagttt

SEQ ID NO: 1761764 - DNA, 15 bp, Homo sapiens
aaaattatcagtttt

SEQ ID NO: 1761765 - DNA, 15 bp, Homo sapiens
aaattatcagtttta

SEQ ID NO: 1761766 - DNA, 15 bp, Homo sapiens
aattatcagttttaa

SEQ ID NO: 1761767 - DNA, 15 bp, Homo sapiens
attatcagttttaaa

SEQ ID NO: 1761768 - DNA, 15 bp, Homo sapiens
ttatcagttttaaaa

SEQ ID NO: 1761769 - DNA, 15 bp, Homo sapiens
tatcagttttaaaag

SEQ ID NO: 1761770 - DNA, 15 bp, Homo sapiens
atcagttttaaaaga

SEQ ID NO: 1761771 - DNA, 15 bp, Homo sapiens
tcagttttaaaagaa

SEQ ID NO: 1761772 - DNA, 15 bp, Homo sapiens
cagttttaaaagaaa

SEQ ID NO: 1761773 - DNA, 15 bp, Homo sapiens
agttttaaaagaaaa

SEQ ID NO: 1761774 - DNA, 15 bp, Homo sapiens
gttttaaaagaaaat

SEQ ID NO: 1761775 - DNA, 15 bp, Homo sapiens
ttttaaaagaaaatt

SEQ ID NO: 1761776 - DNA, 15 bp, Homo sapiens
tttaaaagaaaatta

SEQ ID NO: 1761777 - DNA, 15 bp, Homo sapiens
ttaaaagaaaattaa

SEQ ID NO: 1761778 - DNA, 15 bp, Homo sapiens
taaaagaaaattaaa

SEQ ID NO: 1761779 - DNA, 15 bp, Homo sapiens
aaaagaaaattaaat

SEQ ID NO: 1761780 - DNA, 15 bp, Homo sapiens
aaagaaaattaaatt

SEQ ID NO: 1761781 - DNA, 15 bp, Homo sapiens
aagaaaattaaattg

SEQ ID NO: 1761782 - DNA, 15 bp, Homo sapiens
agaaaattaaattga

SEQ ID NO: 1761783 - DNA, 15 bp, Homo sapiens
gaaaattaaattgaa

SEQ ID NO: 1761784 - DNA, 15 bp, Homo sapiens
aaaattaaattgaag

SEQ ID NO: 1761785 - DNA, 15 bp, Homo sapiens
aaattaaattgaagg

SEQ ID NO: 1761786 - DNA, 15 bp, Homo sapiens
aattaaattgaaggt

SEQ ID NO: 1761787 - DNA, 15 bp, Homo sapiens
attaaattgaaggtt

SEQ ID NO: 1761788 - DNA, 15 bp, Homo sapiens
ttaaattgaaggtta

SEQ ID NO: 1761789 - DNA, 15 bp, Homo sapiens
taaattgaaggttat

SEQ ID NO: 1761790 - DNA, 15 bp, Homo sapiens
aaattgaaggttatg

SEQ ID NO: 1761791 - DNA, 15 bp, Homo sapiens
aattgaaggttatgt

SEQ ID NO: 1761792 - DNA, 15 bp, Homo sapiens
attgaaggttatgtt

SEQ ID NO: 1761793 - DNA, 15 bp, Homo sapiens
ttgaaggttatgttg

SEQ ID NO: 1761794 - DNA, 15 bp, Homo sapiens
tgaaggttatgttgt

SEQ ID NO: 1761795 - DNA, 15 bp, Homo sapiens
gaaggttatgttgtt

SEQ ID NO: 1761796 - DNA, 15 bp, Homo sapiens
aaggttatgttgtta

SEQ ID NO: 1761797 - DNA, 15 bp, Homo sapiens
aggttatgttgttag

SEQ ID NO: 1761798 - DNA, 15 bp, Homo sapiens
ggttatgttgttagt

SEQ ID NO: 1761799 - DNA, 15 bp, Homo sapiens
gttatgttgttagta

SEQ ID NO: 1761800 - DNA, 15 bp, Homo sapiens
ttatgttgttagtaa

SEQ ID NO: 1761801 - DNA, 15 bp, Homo sapiens
tatgttgttagtaat

SEQ ID NO: 1761802 - DNA, 15 bp, Homo sapiens
atgttgttagtaatt

SEQ ID NO: 1761803 - DNA, 15 bp, Homo sapiens
tgttgttagtaattt

SEQ ID NO: 1761804 - DNA, 15 bp, Homo sapiens
gttgttagtaattta

SEQ ID NO: 1761805 - DNA, 15 bp, Homo sapiens
ttgttagtaatttaa

SEQ ID NO: 1761806 - DNA, 15 bp, Homo sapiens
tgttagtaatttaaa

SEQ ID NO: 1761807 - DNA, 15 bp, Homo sapiens
gttagtaatttaaag

SEQ ID NO: 1761808 - DNA, 15 bp, Homo sapiens
ttagtaatttaaaga

SEQ ID NO: 1761809 - DNA, 15 bp, Homo sapiens
tagtaatttaaagat

SEQ ID NO: 1761810 - DNA, 15 bp, Homo sapiens
agtaatttaaagatc

SEQ ID NO: 1761811 - DNA, 15 bp, Homo sapiens
gtaatttaaagatct

SEQ ID NO: 1761812 - DNA, 15 bp, Homo sapiens
taatttaaagatctc

SEQ ID NO: 1761813 - DNA, 15 bp, Homo sapiens
aatttaaagatctcc

SEQ ID NO: 1761814 - DNA, 15 bp, Homo sapiens
atttaaagatctcct

SEQ ID NO: 1761815 - DNA, 15 bp, Homo sapiens
tttaaagatctcctg

SEQ ID NO: 1761816 - DNA, 15 bp, Homo sapiens
ttaaagatctcctgt

SEQ ID NO: 1761817 - DNA, 15 bp, Homo sapiens
taaagatctcctgtg

SEQ ID NO: 1761818 - DNA, 15 bp, Homo sapiens
aaagatctcctgtgt

SEQ ID NO: 1761819 - DNA, 15 bp, Homo sapiens
aagatctcctgtgtt

SEQ ID NO: 1761820 - DNA, 15 bp, Homo sapiens
agatctcctgtgttt

SEQ ID NO: 1761821 - DNA, 15 bp, Homo sapiens
gatctcctgtgtttt

SEQ ID NO: 1761822 - DNA, 15 bp, Homo sapiens
atctcctgtgttttg

SEQ ID NO: 1761823 - DNA, 15 bp, Homo sapiens
tctcctgtgttttga

SEQ ID NO: 1761824 - DNA, 15 bp, Homo sapiens
ctcctgtgttttgat

SEQ ID NO: 1761825 - DNA, 15 bp, Homo sapiens
tcctgtgttttgatg

SEQ ID NO: 1761826 - DNA, 15 bp, Homo sapiens
cctgtgttttgatgt

SEQ ID NO: 1761827 - DNA, 15 bp, Homo sapiens
ctgtgttttgatgta

SEQ ID NO: 1761828 - DNA, 15 bp, Homo sapiens
tgtgttttgatgtaa

SEQ ID NO: 1761829 - DNA, 15 bp, Homo sapiens
gtgttttgatgtaaa

SEQ ID NO: 1761830 - DNA, 15 bp, Homo sapiens
tgttttgatgtaaaa

SEQ ID NO: 1761831 - DNA, 15 bp, Homo sapiens
gttttgatgtaaaaa

SEQ ID NO: 1761832 - DNA, 15 bp, Homo sapiens
ttttgatgtaaaaac

SEQ ID NO: 1761833 - DNA, 15 bp, Homo sapiens
tttgatgtaaaaaca

SEQ ID NO: 1761834 - DNA, 15 bp, Homo sapiens
ttgatgtaaaaacac

SEQ ID NO: 1761835 - DNA, 15 bp, Homo sapiens
tgatgtaaaaacact

SEQ ID NO: 1761836 - DNA, 15 bp, Homo sapiens
gatgtaaaaacacta

SEQ ID NO: 1761837 - DNA, 15 bp, Homo sapiens
atgtaaaaacactat

SEQ ID NO: 1761838 - DNA, 15 bp, Homo sapiens
tgtaaaaacactatt

SEQ ID NO: 1761839 - DNA, 15 bp, Homo sapiens
gtaaaaacactattt

SEQ ID NO: 1761840 - DNA, 15 bp, Homo sapiens
taaaaacactatttt

SEQ ID NO: 1761841 - DNA, 15 bp, Homo sapiens
aaaaacactattttt

SEQ ID NO: 1761842 - DNA, 15 bp, Homo sapiens
aaaacactatttttt

SEQ ID NO: 1761843 - DNA, 15 bp, Homo sapiens
aaacactatttttta

SEQ ID NO: 1761844 - DNA, 15 bp, Homo sapiens
aacactattttttag

SEQ ID NO: 1761845 - DNA, 15 bp, Homo sapiens
acactattttttagc

SEQ ID NO: 1761846 - DNA, 15 bp, Homo sapiens
cactattttttagca

SEQ ID NO: 1761847 - DNA, 15 bp, Homo sapiens
actattttttagcag

SEQ ID NO: 1761848 - DNA, 15 bp, Homo sapiens
ctattttttagcagc

SEQ ID NO: 1761849 - DNA, 15 bp, Homo sapiens
tattttttagcagca

SEQ ID NO: 1761850 - DNA, 15 bp, Homo sapiens
attttttagcagcag

SEQ ID NO: 1761851 - DNA, 15 bp, Homo sapiens
ttttttagcagcagt

SEQ ID NO: 1761852 - DNA, 15 bp, Homo sapiens
tttttagcagcagtc

SEQ ID NO: 1761853 - DNA, 15 bp, Homo sapiens
ttttagcagcagtca

SEQ ID NO: 1761854 - DNA, 15 bp, Homo sapiens
tttagcagcagtcaa

SEQ ID NO: 1761855 - DNA, 15 bp, Homo sapiens
ttagcagcagtcaaa

SEQ ID NO: 1761856 - DNA, 15 bp, Homo sapiens
tagcagcagtcaaag

SEQ ID NO: 1761857 - DNA, 15 bp, Homo sapiens
agcagcagtcaaagg

SEQ ID NO: 1761858 - DNA, 15 bp, Homo sapiens
gcagcagtcaaaggg

SEQ ID NO: 1761859 - DNA, 15 bp, Homo sapiens
cagcagtcaaagggc

SEQ ID NO: 1761860 - DNA, 15 bp, Homo sapiens
agcagtcaaagggct

SEQ ID NO: 1761861 - DNA, 15 bp, Homo sapiens
gcagtcaaagggctt

SEQ ID NO: 1761862 - DNA, 15 bp, Homo sapiens
cagtcaaagggctta

SEQ ID NO: 1761863 - DNA, 15 bp, Homo sapiens
agtcaaagggcttaa

SEQ ID NO: 1761864 - DNA, 15 bp, Homo sapiens
gtcaaagggcttaag

SEQ ID NO: 1761865 - DNA, 15 bp, Homo sapiens
tcaaagggcttaagt

SEQ ID NO: 1761866 - DNA, 15 bp, Homo sapiens
caaagggcttaagta

SEQ ID NO: 1761867 - DNA, 15 bp, Homo sapiens
aaagggcttaagtag

SEQ ID NO: 1761868 - DNA, 15 bp, Homo sapiens
aagggcttaagtagt

SEQ ID NO: 1761869 - DNA, 15 bp, Homo sapiens
agggcttaagtagta

SEQ ID NO: 1761870 - DNA, 15 bp, Homo sapiens
gggcttaagtagtat

SEQ ID NO: 1761871 - DNA, 15 bp, Homo sapiens
ggcttaagtagtatg

SEQ ID NO: 1761872 - DNA, 15 bp, Homo sapiens
gcttaagtagtatga

SEQ ID NO: 1761873 - DNA, 15 bp, Homo sapiens
cttaagtagtatgac

SEQ ID NO: 1761874 - DNA, 15 bp, Homo sapiens
ttaagtagtatgact

SEQ ID NO: 1761875 - DNA, 15 bp, Homo sapiens
taagtagtatgactt

SEQ ID NO: 1761876 - DNA, 15 bp, Homo sapiens
aagtagtatgacttt

SEQ ID NO: 1761877 - DNA, 15 bp, Homo sapiens
agtagtatgactttt

SEQ ID NO: 1761878 - DNA, 15 bp, Homo sapiens
gtagtatgacttttt

SEQ ID NO: 1761879 - DNA, 15 bp, Homo sapiens
tagtatgactttttg

SEQ ID NO: 1761880 - DNA, 15 bp, Homo sapiens
agtatgactttttgt

SEQ ID NO: 1761881 - DNA, 15 bp, Homo sapiens
gtatgactttttgtg

SEQ ID NO: 1761882 - DNA, 15 bp, Homo sapiens
tatgactttttgtgt

SEQ ID NO: 1761883 - DNA, 15 bp, Homo sapiens
atgactttttgtgta

SEQ ID NO: 1761884 - DNA, 15 bp, Homo sapiens
tgactttttgtgtaa

SEQ ID NO: 1761885 - DNA, 15 bp, Homo sapiens
gactttttgtgtaac

SEQ ID NO: 1761886 - DNA, 15 bp, Homo sapiens
actttttgtgtaact

SEQ ID NO: 1761887 - DNA, 15 bp, Homo sapiens
ctttttgtgtaactt

SEQ ID NO: 1761888 - DNA, 15 bp, Homo sapiens
tttttgtgtaacttg

SEQ ID NO: 1761889 - DNA, 15 bp, Homo sapiens
ttttgtgtaacttgg

SEQ ID NO: 1761890 - DNA, 15 bp, Homo sapiens
tttgtgtaacttgga

SEQ ID NO: 1761891 - DNA, 15 bp, Homo sapiens
ttgtgtaacttggat

SEQ ID NO: 1761892 - DNA, 15 bp, Homo sapiens
tgtgtaacttggatt

SEQ ID NO: 1761893 - DNA, 15 bp, Homo sapiens
gtgtaacttggattg

SEQ ID NO: 1761894 - DNA, 15 bp, Homo sapiens
tgtaacttggattgt

SEQ ID NO: 1761895 - DNA, 15 bp, Homo sapiens
gtaacttggattgtg

SEQ ID NO: 1761896 - DNA, 15 bp, Homo sapiens
taacttggattgtgc

SEQ ID NO: 1761897 - DNA, 15 bp, Homo sapiens
aacttggattgtgca

SEQ ID NO: 1761898 - DNA, 15 bp, Homo sapiens
acttggattgtgcaa

SEQ ID NO: 1761899 - DNA, 15 bp, Homo sapiens
cttggattgtgcaat

SEQ ID NO: 1761900 - DNA, 15 bp, Homo sapiens
ttggattgtgcaatt

SEQ ID NO: 1761901 - DNA, 15 bp, Homo sapiens
tggattgtgcaattg

SEQ ID NO: 1761902 - DNA, 15 bp, Homo sapiens
ggattgtgcaattgc

SEQ ID NO: 1761903 - DNA, 15 bp, Homo sapiens
gattgtgcaattgct

SEQ ID NO: 1761904 - DNA, 15 bp, Homo sapiens
attgtgcaattgctt

SEQ ID NO: 1761905 - DNA, 15 bp, Homo sapiens
ttgtgcaattgcttt

SEQ ID NO: 1761906 - DNA, 15 bp, Homo sapiens
tgtgcaattgctttt

SEQ ID NO: 1761907 - DNA, 15 bp, Homo sapiens
gtgcaattgctttta

SEQ ID NO: 1761908 - DNA, 15 bp, Homo sapiens
tgcaattgcttttaa

SEQ ID NO: 1761909 - DNA, 15 bp, Homo sapiens
gcaattgcttttaaa

SEQ ID NO: 1761910 - DNA, 15 bp, Homo sapiens
caattgcttttaaaa

SEQ ID NO: 1761911 - DNA, 15 bp, Homo sapiens
aattgcttttaaaaa

SEQ ID NO: 1761912 - DNA, 15 bp, Homo sapiens
attgcttttaaaaat

SEQ ID NO: 1761913 - DNA, 15 bp, Homo sapiens
ttgcttttaaaaatg

SEQ ID NO: 1761914 - DNA, 15 bp, Homo sapiens
cttttaaaaatgaaa

SEQ ID NO: 1761915 - DNA, 15 bp, Homo sapiens
ttttaaaaatgaaac

SEQ ID NO: 1761916 - DNA, 15 bp, Homo sapiens
tttaaaaatgaaact

SEQ ID NO: 1761917 - DNA, 15 bp, Homo sapiens
ttaaaaatgaaacta

SEQ ID NO: 1761918 - DNA, 15 bp, Homo sapiens
taaaaatgaaactat

SEQ ID NO: 1761919 - DNA, 15 bp, Homo sapiens
aaatgaaactatttc

SEQ ID NO: 1761920 - DNA, 15 bp, Homo sapiens
aatgaaactatttct

SEQ ID NO: 1761921 - DNA, 15 bp, Homo sapiens
atgaaactatttctc

SEQ ID NO: 1761922 - DNA, 15 bp, Homo sapiens
tgaaactatttctca

SEQ ID NO: 1761923 - DNA, 15 bp, Homo sapiens
gaaactatttctcat

SEQ ID NO: 1761924 - DNA, 15 bp, Homo sapiens
aaactatttctcatt

SEQ ID NO: 1761925 - DNA, 15 bp, Homo sapiens
aactatttctcattt

SEQ ID NO: 1761926 - DNA, 15 bp, Homo sapiens
actatttctcattta

SEQ ID NO: 1761927 - DNA, 15 bp, Homo sapiens
ctatttctcatttat

SEQ ID NO: 1761928 - DNA, 15 bp, Homo sapiens
tatttctcatttata

SEQ ID NO: 1761929 - DNA, 15 bp, Homo sapiens
atttctcatttataa

SEQ ID NO: 1761930 - DNA, 15 bp, Homo sapiens
tttctcatttataat

SEQ ID NO: 1761931 - DNA, 15 bp, Homo sapiens
ttctcatttataatg

SEQ ID NO: 1761932 - DNA, 15 bp, Homo sapiens
tctcatttataatga

SEQ ID NO: 1761933 - DNA, 15 bp, Homo sapiens
ctcatttataatgag

SEQ ID NO: 1761934 - DNA, 15 bp, Homo sapiens
tcatttataatgaga

SEQ ID NO: 1761935 - DNA, 15 bp, Homo sapiens
catttataatgagat

SEQ ID NO: 1761936 - DNA, 15 bp, Homo sapiens
atttataatgagata

SEQ ID NO: 1761937 - DNA, 15 bp, Homo sapiens
ttataatgagataat

SEQ ID NO: 1761938 - DNA, 15 bp, Homo sapiens
tataatgagataatg

SEQ ID NO: 1761939 - DNA, 15 bp, Homo sapiens
ataatgagataatgg

SEQ ID NO: 1761940 - DNA, 15 bp, Homo sapiens
taatgagataatgga

SEQ ID NO: 1761941 - DNA, 15 bp, Homo sapiens
aatgagataatggaa

SEQ ID NO: 1761942 - DNA, 15 bp, Homo sapiens
atgagataatggaac

SEQ ID NO: 1761943 - DNA, 15 bp, Homo sapiens
tgagataatggaact

SEQ ID NO: 1761944 - DNA, 15 bp, Homo sapiens
gagataatggaactc

SEQ ID NO: 1761945 - DNA, 15 bp, Homo sapiens
agataatggaactca

SEQ ID NO: 1761946 - DNA, 15 bp, Homo sapiens
gataatggaactcag

SEQ ID NO: 1761947 - DNA, 15 bp, Homo sapiens
ataatggaactcagt

SEQ ID NO: 1761948 - DNA, 15 bp, Homo sapiens
taatggaactcagtg

SEQ ID NO: 1761949 - DNA, 15 bp, Homo sapiens
aatggaactcagtgt

SEQ ID NO: 1761950 - DNA, 15 bp, Homo sapiens
atggaactcagtgta

SEQ ID NO: 1761951 - DNA, 15 bp, Homo sapiens
tggaactcagtgtat

SEQ ID NO: 1761952 - DNA, 15 bp, Homo sapiens
ggaactcagtgtatc

SEQ ID NO: 1761953 - DNA, 15 bp, Homo sapiens
gaactcagtgtatcg

SEQ ID NO: 1761954 - DNA, 15 bp, Homo sapiens
aactcagtgtatcgg

SEQ ID NO: 1761955 - DNA, 15 bp, Homo sapiens
actcagtgtatcgga

SEQ ID NO: 1761956 - DNA, 15 bp, Homo sapiens
ctcagtgtatcggaa

SEQ ID NO: 1761957 - DNA, 15 bp, Homo sapiens
tcagtgtatcggaag

SEQ ID NO: 1761958 - DNA, 15 bp, Homo sapiens
cagtgtatcggaaga

SEQ ID NO: 1761959 - DNA, 15 bp, Homo sapiens
agtgtatcggaagag

SEQ ID NO: 1761960 - DNA, 15 bp, Homo sapiens
gtgtatcggaagagc

SEQ ID NO: 1761961 - DNA, 15 bp, Homo sapiens
tgtatcggaagagca

SEQ ID NO: 1761962 - DNA, 15 bp, Homo sapiens
gtatcggaagagcag

SEQ ID NO: 1761963 - DNA, 15 bp, Homo sapiens
tatcggaagagcaga

SEQ ID NO: 1761964 - DNA, 15 bp, Homo sapiens
atcggaagagcagac

SEQ ID NO: 1761965 - DNA, 15 bp, Homo sapiens
tcggaagagcagact

SEQ ID NO: 1761966 - DNA, 15 bp, Homo sapiens
cggaagagcagactg

SEQ ID NO: 1761967 - DNA, 15 bp, Homo sapiens
ggaagagcagactga

SEQ ID NO: 1761968 - DNA, 15 bp, Homo sapiens
gaagagcagactgaa

SEQ ID NO: 1761969 - DNA, 15 bp, Homo sapiens
aagagcagactgaac

SEQ ID NO: 1761970 - DNA, 15 bp, Homo sapiens
agagcagactgaaca

SEQ ID NO: 1761971 - DNA, 15 bp, Homo sapiens
gagcagactgaacac

SEQ ID NO: 1761972 - DNA, 15 bp, Homo sapiens
agcagactgaacaca

SEQ ID NO: 1761973 - DNA, 15 bp, Homo sapiens
gcagactgaacacac

SEQ ID NO: 1761974 - DNA, 15 bp, Homo sapiens
cagactgaacacaca

SEQ ID NO: 1761975 - DNA, 15 bp, Homo sapiens
agactgaacacacac

SEQ ID NO: 1761976 - DNA, 15 bp, Homo sapiens
gactgaacacacact

SEQ ID NO: 1761977 - DNA, 15 bp, Homo sapiens
actgaacacacactt

SEQ ID NO: 1761978 - DNA, 15 bp, Homo sapiens
ctgaacacacacttc

SEQ ID NO: 1761979 - DNA, 15 bp, Homo sapiens
tgaacacacacttct

SEQ ID NO: 1761980 - DNA, 15 bp, Homo sapiens
gaacacacacttcta

SEQ ID NO: 1761981 - DNA, 15 bp, Homo sapiens
aacacacacttctac

SEQ ID NO: 1761982 - DNA, 15 bp, Homo sapiens
acacacacttctacc

SEQ ID NO: 1761983 - DNA, 15 bp, Homo sapiens
cacacacttctacct

SEQ ID NO: 1761984 - DNA, 15 bp, Homo sapiens
acacacttctacctc

SEQ ID NO: 1761985 - DNA, 15 bp, Homo sapiens
cacacttctacctcc

SEQ ID NO: 1761986 - DNA, 15 bp, Homo sapiens
acacttctacctcct

SEQ ID NO: 1761987 - DNA, 15 bp, Homo sapiens
cacttctacctcctt

SEQ ID NO: 1761988 - DNA, 15 bp, Homo sapiens
acttctacctccttt

SEQ ID NO: 1761989 - DNA, 15 bp, Homo sapiens
cttctacctcctttc

SEQ ID NO: 1761990 - DNA, 15 bp, Homo sapiens
ttctacctcctttct

SEQ ID NO: 1761991 - DNA, 15 bp, Homo sapiens
tctacctcctttctc

SEQ ID NO: 1761992 - DNA, 15 bp, Homo sapiens
ctacctcctttctcc

SEQ ID NO: 1761993 - DNA, 15 bp, Homo sapiens
tacctcctttctccc

SEQ ID NO: 1761994 - DNA, 15 bp, Homo sapiens
acctcctttctcccc

SEQ ID NO: 1761995 - DNA, 15 bp, Homo sapiens
cctcctttctccccg

SEQ ID NO: 1761996 - DNA, 15 bp, Homo sapiens
ctcctttctccccgc

SEQ ID NO: 1761997 - DNA, 15 bp, Homo sapiens
tcctttctccccgca

SEQ ID NO: 1761998 - DNA, 15 bp, Homo sapiens
cctttctccccgcaa

SEQ ID NO: 1761999 - DNA, 15 bp, Homo sapiens
ctttctccccgcaaa

SEQ ID NO: 1762000 - DNA, 15 bp, Homo sapiens
tttctccccgcaaac

SEQ ID NO: 1762001 - DNA, 15 bp, Homo sapiens
ttctccccgcaaacc

SEQ ID NO: 1762002 - DNA, 15 bp, Homo sapiens
tctccccgcaaaccc

SEQ ID NO: 1762003 - DNA, 15 bp, Homo sapiens
ctccccgcaaaccct

SEQ ID NO: 1762004 - DNA, 15 bp, Homo sapiens
tccccgcaaacccta

SEQ ID NO: 1762005 - DNA, 15 bp, Homo sapiens
ccccgcaaaccctac

SEQ ID NO: 1762006 - DNA, 15 bp, Homo sapiens
cccgcaaaccctaca

SEQ ID NO: 1762007 - DNA, 15 bp, Homo sapiens
ccgcaaaccctacag

SEQ ID NO: 1762008 - DNA, 15 bp, Homo sapiens
cgcaaaccctacaga

SEQ ID NO: 1762009 - DNA, 15 bp, Homo sapiens
gcaaaccctacagaa

SEQ ID NO: 1762010 - DNA, 15 bp, Homo sapiens
caaaccctacagaag

SEQ ID NO: 1762011 - DNA, 15 bp, Homo sapiens
aaaccctacagaagt

SEQ ID NO: 1762012 - DNA, 15 bp, Homo sapiens
aaccctacagaagtg

SEQ ID NO: 1762013 - DNA, 15 bp, Homo sapiens
accctacagaagtga

SEQ ID NO: 1762014 - DNA, 15 bp, Homo sapiens
ccctacagaagtgac

SEQ ID NO: 1762015 - DNA, 15 bp, Homo sapiens
cctacagaagtgaca

SEQ ID NO: 1762016 - DNA, 15 bp, Homo sapiens
ctacagaagtgacaa

SEQ ID NO: 1762017 - DNA, 15 bp, Homo sapiens
tacagaagtgacaaa

SEQ ID NO: 1762018 - DNA, 15 bp, Homo sapiens
acagaagtgacaaaa

SEQ ID NO: 1762019 - DNA, 15 bp, Homo sapiens
cagaagtgacaaaaa

SEQ ID NO: 1762020 - DNA, 15 bp, Homo sapiens
agaagtgacaaaaaa

SEQ ID NO: 1762021 - DNA, 15 bp, Homo sapiens
gaagtgacaaaaaag

SEQ ID NO: 1762022 - DNA, 15 bp, Homo sapiens
aagtgacaaaaaaga

SEQ ID NO: 1762023 - DNA, 15 bp, Homo sapiens
agtgacaaaaaagac

SEQ ID NO: 1762024 - DNA, 15 bp, Homo sapiens
gtgacaaaaaagaca

SEQ ID NO: 1762025 - DNA, 15 bp, Homo sapiens
tgacaaaaaagacac

SEQ ID NO: 1762026 - DNA, 15 bp, Homo sapiens
gacaaaaaagacaca

SEQ ID NO: 1762027 - DNA, 15 bp, Homo sapiens
acaaaaaagacacat

SEQ ID NO: 1762028 - DNA, 15 bp, Homo sapiens
caaaaaagacacata

SEQ ID NO: 1762029 - DNA, 15 bp, Homo sapiens
aaaaaagacacatat

SEQ ID NO: 1762030 - DNA, 15 bp, Homo sapiens
aaaaagacacatatc

SEQ ID NO: 1762031 - DNA, 15 bp, Homo sapiens
aaaagacacatatca

SEQ ID NO: 1762032 - DNA, 15 bp, Homo sapiens
aaagacacatatcac

SEQ ID NO: 1762033 - DNA, 15 bp, Homo sapiens
aagacacatatcaca

SEQ ID NO: 1762034 - DNA, 15 bp, Homo sapiens
agacacatatcacag

SEQ ID NO: 1762035 - DNA, 15 bp, Homo sapiens
gacacatatcacagg

SEQ ID NO: 1762036 - DNA, 15 bp, Homo sapiens
acacatatcacaggg

SEQ ID NO: 1762037 - DNA, 15 bp, Homo sapiens
cacatatcacagggg

SEQ ID NO: 1762038 - DNA, 15 bp, Homo sapiens
acatatcacagggga

SEQ ID NO: 1762039 - DNA, 15 bp, Homo sapiens
catatcacaggggag

SEQ ID NO: 1762040 - DNA, 15 bp, Homo sapiens
atatcacaggggagt

SEQ ID NO: 1762041 - DNA, 15 bp, Homo sapiens
tatcacaggggagtg

SEQ ID NO: 1762042 - DNA, 15 bp, Homo sapiens
atcacaggggagtga

SEQ ID NO: 1762043 - DNA, 15 bp, Homo sapiens
tcacaggggagtgaa

SEQ ID NO: 1762044 - DNA, 15 bp, Homo sapiens
cacaggggagtgaaa

SEQ ID NO: 1762045 - DNA, 15 bp, Homo sapiens
acaggggagtgaaac

SEQ ID NO: 1762046 - DNA, 15 bp, Homo sapiens
caggggagtgaaacc

SEQ ID NO: 1762047 - DNA, 15 bp, Homo sapiens
aggggagtgaaaccc

SEQ ID NO: 1762048 - DNA, 15 bp, Homo sapiens
ggggagtgaaaccca

SEQ ID NO: 1762049 - DNA, 15 bp, Homo sapiens
gggagtgaaacccag

SEQ ID NO: 1762050 - DNA, 15 bp, Homo sapiens
ggagtgaaacccagc

SEQ ID NO: 1762051 - DNA, 15 bp, Homo sapiens
gagtgaaacccagca

SEQ ID NO: 1762052 - DNA, 15 bp, Homo sapiens
agtgaaacccagcag

SEQ ID NO: 1762053 - DNA, 15 bp, Homo sapiens
gtgaaacccagcagt

SEQ ID NO: 1762054 - DNA, 15 bp, Homo sapiens
tgaaacccagcagta

SEQ ID NO: 1762055 - DNA, 15 bp, Homo sapiens
gaaacccagcagtac

SEQ ID NO: 1762056 - DNA, 15 bp, Homo sapiens
aaacccagcagtact

SEQ ID NO: 1762057 - DNA, 15 bp, Homo sapiens
aacccagcagtactc

SEQ ID NO: 1762058 - DNA, 15 bp, Homo sapiens
acccagcagtactca

SEQ ID NO: 1762059 - DNA, 15 bp, Homo sapiens
cccagcagtactcag

SEQ ID NO: 1762060 - DNA, 15 bp, Homo sapiens
ccagcagtactcaga

SEQ ID NO: 1762061 - DNA, 15 bp, Homo sapiens
cagcagtactcagac

SEQ ID NO: 1762062 - DNA, 15 bp, Homo sapiens
agcagtactcagact

SEQ ID NO: 1762063 - DNA, 15 bp, Homo sapiens
gcagtactcagactg

SEQ ID NO: 1762064 - DNA, 15 bp, Homo sapiens
cagtactcagactgt

SEQ ID NO: 1762065 - DNA, 15 bp, Homo sapiens
agtactcagactgtg

SEQ ID NO: 1762066 - DNA, 15 bp, Homo sapiens
gtactcagactgtga

SEQ ID NO: 1762067 - DNA, 15 bp, Homo sapiens
tactcagactgtgaa

SEQ ID NO: 1762068 - DNA, 15 bp, Homo sapiens
actcagactgtgaag

SEQ ID NO: 1762069 - DNA, 15 bp, Homo sapiens
ctcagactgtgaagc

SEQ ID NO: 1762070 - DNA, 15 bp, Homo sapiens
tcagactgtgaagca

SEQ ID NO: 1762071 - DNA, 15 bp, Homo sapiens
cagactgtgaagcag

SEQ ID NO: 1762072 - DNA, 15 bp, Homo sapiens
agactgtgaagcaga

SEQ ID NO: 1762073 - DNA, 15 bp, Homo sapiens
gactgtgaagcagaa

SEQ ID NO: 1762074 - DNA, 15 bp, Homo sapiens
actgtgaagcagaaa

SEQ ID NO: 1762075 - DNA, 15 bp, Homo sapiens
ctgtgaagcagaaaa

SEQ ID NO: 1762076 - DNA, 15 bp, Homo sapiens
tgtgaagcagaaaaa

SEQ ID NO: 1762077 - DNA, 15 bp, Homo sapiens
gtgaagcagaaaaac

SEQ ID NO: 1762078 - DNA, 15 bp, Homo sapiens
tgaagcagaaaaact

SEQ ID NO: 1762079 - DNA, 15 bp, Homo sapiens
gaagcagaaaaactg

SEQ ID NO: 1762080 - DNA, 15 bp, Homo sapiens
aagcagaaaaactgt

SEQ ID NO: 1762081 - DNA, 15 bp, Homo sapiens
agcagaaaaactgtg

SEQ ID NO: 1762082 - DNA, 15 bp, Homo sapiens
gcagaaaaactgtgg

SEQ ID NO: 1762083 - DNA, 15 bp, Homo sapiens
cagaaaaactgtgga

SEQ ID NO: 1762084 - DNA, 15 bp, Homo sapiens
agaaaaactgtggag

SEQ ID NO: 1762085 - DNA, 15 bp, Homo sapiens
gaaaaactgtggagg

SEQ ID NO: 1762086 - DNA, 15 bp, Homo sapiens
aaaaactgtggaggg

SEQ ID NO: 1762087 - DNA, 15 bp, Homo sapiens
aaaactgtggaggga

SEQ ID NO: 1762088 - DNA, 15 bp, Homo sapiens
aaactgtggagggaa

SEQ ID NO: 1762089 - DNA, 15 bp, Homo sapiens
aactgtggagggaag

SEQ ID NO: 1762090 - DNA, 15 bp, Homo sapiens
actgtggagggaagt

SEQ ID NO: 1762091 - DNA, 15 bp, Homo sapiens
ctgtggagggaagtg

SEQ ID NO: 1762092 - DNA, 15 bp, Homo sapiens
gtggagggaagtgga

SEQ ID NO: 1762093 - DNA, 15 bp, Homo sapiens
tggagggaagtggag

SEQ ID NO: 1762094 - DNA, 15 bp, Homo sapiens
ggagggaagtggagg

SEQ ID NO: 1762095 - DNA, 15 bp, Homo sapiens
gagggaagtggagga

SEQ ID NO: 1762096 - DNA, 15 bp, Homo sapiens
agggaagtggaggag

SEQ ID NO: 1762097 - DNA, 15 bp, Homo sapiens
gggaagtggaggagt

SEQ ID NO: 1762098 - DNA, 15 bp, Homo sapiens
ggaagtggaggagtt

SEQ ID NO: 1762099 - DNA, 15 bp, Homo sapiens
gaagtggaggagttg

SEQ ID NO: 1762100 - DNA, 15 bp, Homo sapiens
aagtggaggagttga

SEQ ID NO: 1762101 - DNA, 15 bp, Homo sapiens
agtggaggagttgat

SEQ ID NO: 1762102 - DNA, 15 bp, Homo sapiens
gtggaggagttgatt

SEQ ID NO: 1762103 - DNA, 15 bp, Homo sapiens
tggaggagttgattc

SEQ ID NO: 1762104 - DNA, 15 bp, Homo sapiens
ggaggagttgattca

SEQ ID NO: 1762105 - DNA, 15 bp, Homo sapiens
gaggagttgattcat

SEQ ID NO: 1762106 - DNA, 15 bp, Homo sapiens
aggagttgattcatt

SEQ ID NO: 1762107 - DNA, 15 bp, Homo sapiens
ggagttgattcattt

SEQ ID NO: 1762108 - DNA, 15 bp, Homo sapiens
gagttgattcatttt

SEQ ID NO: 1762109 - DNA, 15 bp, Homo sapiens
agttgattcattttt

SEQ ID NO: 1762110 - DNA, 15 bp, Homo sapiens
gttgattcatttttt

SEQ ID NO: 1762111 - DNA, 15 bp, Homo sapiens
ttgattcattttttt

SEQ ID NO: 1762112 - DNA, 15 bp, Homo sapiens
tgattcattttttta

SEQ ID NO: 1762113 - DNA, 15 bp, Homo sapiens
gattcatttttttag

SEQ ID NO: 1762114 - DNA, 15 bp, Homo sapiens
attcatttttttagt

SEQ ID NO: 1762115 - DNA, 15 bp, Homo sapiens
ttcatttttttagta

SEQ ID NO: 1762116 - DNA, 15 bp, Homo sapiens
tcatttttttagtat

SEQ ID NO: 1762117 - DNA, 15 bp, Homo sapiens
catttttttagtata

SEQ ID NO: 1762118 - DNA, 15 bp, Homo sapiens
atttttttagtataa

SEQ ID NO: 1762119 - DNA, 15 bp, Homo sapiens
tttttttagtataaa

SEQ ID NO: 1762120 - DNA, 15 bp, Homo sapiens
ttttttagtataaaa

SEQ ID NO: 1762121 - DNA, 15 bp, Homo sapiens
tttttagtataaaaa

SEQ ID NO: 1762122 - DNA, 15 bp, Homo sapiens
ttttagtataaaaaa

SEQ ID NO: 1762123 - DNA, 15 bp, Homo sapiens
tttagtataaaaaat

SEQ ID NO: 1762124 - DNA, 15 bp, Homo sapiens
ttagtataaaaaata

SEQ ID NO: 1762125 - DNA, 15 bp, Homo sapiens
tagtataaaaaataa

SEQ ID NO: 1762126 - DNA, 15 bp, Homo sapiens
agtataaaaaataaa

SEQ ID NO: 1762127 - DNA, 15 bp, Homo sapiens
gtataaaaaataaat

SEQ ID NO: 1762128 - DNA, 15 bp, Homo sapiens
tataaaaaataaatg

SEQ ID NO: 1762129 - DNA, 15 bp, Homo sapiens
ataaaaaataaatga

SEQ ID NO: 1762130 - DNA, 15 bp, Homo sapiens
taaaaaataaatgat

SEQ ID NO: 1762131 - DNA, 15 bp, Homo sapiens
aaaaaataaatgatg

SEQ ID NO: 1762132 - DNA, 15 bp, Homo sapiens
aaaaataaatgatga

SEQ ID NO: 1762133 - DNA, 15 bp, Homo sapiens
aaaataaatgatgag

SEQ ID NO: 1762134 - DNA, 15 bp, Homo sapiens
aaataaatgatgagt

SEQ ID NO: 1762135 - DNA, 15 bp, Homo sapiens
aataaatgatgagtg

SEQ ID NO: 1762136 - DNA, 15 bp, Homo sapiens
ataaatgatgagtgt

SEQ ID NO: 1762137 - DNA, 15 bp, Homo sapiens
taaatgatgagtgta

SEQ ID NO: 1762138 - DNA, 15 bp, Homo sapiens
aaatgatgagtgtat

SEQ ID NO: 1762139 - DNA, 15 bp, Homo sapiens
aatgatgagtgtatt

SEQ ID NO: 1762140 - DNA, 15 bp, Homo sapiens
atgatgagtgtattg

SEQ ID NO: 1762141 - DNA, 15 bp, Homo sapiens
tgatgagtgtattgt

SEQ ID NO: 1762142 - DNA, 15 bp, Homo sapiens
gatgagtgtattgtg

SEQ ID NO: 1762143 - DNA, 15 bp, Homo sapiens
atgagtgtattgtgg

SEQ ID NO: 1762144 - DNA, 15 bp, Homo sapiens
tgagtgtattgtgga

SEQ ID NO: 1762145 - DNA, 15 bp, Homo sapiens
gagtgtattgtggat

SEQ ID NO: 1762146 - DNA, 15 bp, Homo sapiens
agtgtattgtggata

SEQ ID NO: 1762147 - DNA, 15 bp, Homo sapiens
gtgtattgtggatac

SEQ ID NO: 1762148 - DNA, 15 bp, Homo sapiens
tgtattgtggataca

SEQ ID NO: 1762149 - DNA, 15 bp, Homo sapiens
gtattgtggatacaa

SEQ ID NO: 1762150 - DNA, 15 bp, Homo sapiens
tattgtggatacaat

SEQ ID NO: 1762151 - DNA, 15 bp, Homo sapiens
attgtggatacaata

SEQ ID NO: 1762152 - DNA, 15 bp, Homo sapiens
ttgtggatacaataa

SEQ ID NO: 1762153 - DNA, 15 bp, Homo sapiens
tgtggatacaataaa

SEQ ID NO: 1762154 - DNA, 15 bp, Homo sapiens
gtggatacaataaag

SEQ ID NO: 1762155 - DNA, 15 bp, Homo sapiens
tggatacaataaagt

SEQ ID NO: 1762156 - DNA, 15 bp, Homo sapiens
ggatacaataaagta

SEQ ID NO: 1762157 - DNA, 15 bp, Homo sapiens
gatacaataaagtag

SEQ ID NO: 1762158 - DNA, 15 bp, Homo sapiens
atacaataaagtaga

SEQ ID NO: 1762159 - DNA, 15 bp, Homo sapiens
tacaataaagtagag

SEQ ID NO: 1762160 - DNA, 15 bp, Homo sapiens
acaataaagtagaga

SEQ ID NO: 1762161 - DNA, 15 bp, Homo sapiens
caataaagtagagaa

SEQ ID NO: 1762162 - DNA, 15 bp, Homo sapiens
aataaagtagagaaa

SEQ ID NO: 1762163 - DNA, 15 bp, Homo sapiens
ataaagtagagaaaa

SEQ ID NO: 1762164 - DNA, 15 bp, Homo sapiens
taaagtagagaaaac

SEQ ID NO: 1762165 - DNA, 15 bp, Homo sapiens
aaagtagagaaaacc

SEQ ID NO: 1762166 - DNA, 15 bp, Homo sapiens
aagtagagaaaacca

SEQ ID NO: 1762167 - DNA, 15 bp, Homo sapiens
agtagagaaaaccac

SEQ ID NO: 1762168 - DNA, 15 bp, Homo sapiens
gtagagaaaaccaca

SEQ ID NO: 1762169 - DNA, 15 bp, Homo sapiens
tagagaaaaccacag

SEQ ID NO: 1762170 - DNA, 15 bp, Homo sapiens
agagaaaaccacagc

SEQ ID NO: 1762171 - DNA, 15 bp, Homo sapiens
gagaaaaccacagca

SEQ ID NO: 1762172 - DNA, 15 bp, Homo sapiens
agaaaaccacagcac

SEQ ID NO: 1762173 - DNA, 15 bp, Homo sapiens
gaaaaccacagcaca

SEQ ID NO: 1762174 - DNA, 15 bp, Homo sapiens
aaaaccacagcacac

SEQ ID NO: 1762175 - DNA, 15 bp, Homo sapiens
aaaccacagcacaca

SEQ ID NO: 1762176 - DNA, 15 bp, Homo sapiens
aaccacagcacacaa

SEQ ID NO: 1762177 - DNA, 15 bp, Homo sapiens
accacagcacacaac

SEQ ID NO: 1762178 - DNA, 15 bp, Homo sapiens
ccacagcacacaaca

SEQ ID NO: 1762179 - DNA, 15 bp, Homo sapiens
cacagcacacaacac

SEQ ID NO: 1762180 - DNA, 15 bp, Homo sapiens
acagcacacaacacc

SEQ ID NO: 1762181 - DNA, 15 bp, Homo sapiens
cagcacacaacaccc

SEQ ID NO: 1762182 - DNA, 15 bp, Homo sapiens
agcacacaacacccc

SEQ ID NO: 1762183 - DNA, 15 bp, Homo sapiens
gcacacaacaccccc

SEQ ID NO: 1762184 - DNA, 15 bp, Homo sapiens
cacacaacaccccca

SEQ ID NO: 1762185 - DNA, 15 bp, Homo sapiens
acacaacacccccag

SEQ ID NO: 1762186 - DNA, 15 bp, Homo sapiens
cacaacacccccagg

SEQ ID NO: 1762187 - DNA, 15 bp, Homo sapiens
acaacacccccagga

SEQ ID NO: 1762188 - DNA, 15 bp, Homo sapiens
caacacccccaggaa

SEQ ID NO: 1762189 - DNA, 15 bp, Homo sapiens
aacacccccaggaaa

SEQ ID NO: 1762190 - DNA, 15 bp, Homo sapiens
acacccccaggaaag

SEQ ID NO: 1762191 - DNA, 15 bp, Homo sapiens
cacccccaggaaagg

SEQ ID NO: 1762192 - DNA, 15 bp, Homo sapiens
acccccaggaaaggg

SEQ ID NO: 1762193 - DNA, 15 bp, Homo sapiens
cccccaggaaagggg

SEQ ID NO: 1762194 - DNA, 15 bp, Homo sapiens
ccccaggaaagggga

SEQ ID NO: 1762195 - DNA, 15 bp, Homo sapiens
cccaggaaaggggac

SEQ ID NO: 1762196 - DNA, 15 bp, Homo sapiens
ccaggaaaggggact

SEQ ID NO: 1762197 - DNA, 15 bp, Homo sapiens
caggaaaggggactg

SEQ ID NO: 1762198 - DNA, 15 bp, Homo sapiens
aggaaaggggactgg

SEQ ID NO: 1762199 - DNA, 15 bp, Homo sapiens
ggaaaggggactggt

SEQ ID NO: 1762200 - DNA, 15 bp, Homo sapiens
gaaaggggactggtg

SEQ ID NO: 1762201 - DNA, 15 bp, Homo sapiens
aaaggggactggtgg

SEQ ID NO: 1762202 - DNA, 15 bp, Homo sapiens
aaggggactggtgga

SEQ ID NO: 1762203 - DNA, 15 bp, Homo sapiens
aggggactggtggaa

SEQ ID NO: 1762204 - DNA, 15 bp, Homo sapiens
ggggactggtggaag

SEQ ID NO: 1762205 - DNA, 15 bp, Homo sapiens
gggactggtggaagt

SEQ ID NO: 1762206 - DNA, 15 bp, Homo sapiens
ggactggtggaagtg

SEQ ID NO: 1762207 - DNA, 15 bp, Homo sapiens
gactggtggaagtgg

SEQ ID NO: 1762208 - DNA, 15 bp, Homo sapiens
actggtggaagtggg

SEQ ID NO: 1762209 - DNA, 15 bp, Homo sapiens
tggtggaagtgggag

SEQ ID NO: 1762210 - DNA, 15 bp, Homo sapiens
ggtggaagtgggagt

SEQ ID NO: 1762211 - DNA, 15 bp, Homo sapiens
gtggaagtgggagtc

SEQ ID NO: 1762212 - DNA, 15 bp, Homo sapiens
tggaagtgggagtct

SEQ ID NO: 1762213 - DNA, 15 bp, Homo sapiens
ggaagtgggagtctt

SEQ ID NO: 1762214 - DNA, 15 bp, Homo sapiens
gaagtgggagtctta

SEQ ID NO: 1762215 - DNA, 15 bp, Homo sapiens
aagtgggagtcttag

SEQ ID NO: 1762216 - DNA, 15 bp, Homo sapiens
agtgggagtcttaga

SEQ ID NO: 1762217 - DNA, 15 bp, Homo sapiens
gtgggagtcttagag

SEQ ID NO: 1762218 - DNA, 15 bp, Homo sapiens
tgggagtcttagaga

SEQ ID NO: 1762219 - DNA, 15 bp, Homo sapiens
gggagtcttagagag

SEQ ID NO: 1762220 - DNA, 15 bp, Homo sapiens
ggagtcttagagagc

SEQ ID NO: 1762221 - DNA, 15 bp, Homo sapiens
gagtcttagagagcc

SEQ ID NO: 1762222 - DNA, 15 bp, Homo sapiens
agtcttagagagccc

SEQ ID NO: 1762223 - DNA, 15 bp, Homo sapiens
gtcttagagagcccc

SEQ ID NO: 1762224 - DNA, 15 bp, Homo sapiens
tcttagagagccccc

SEQ ID NO: 1762225 - DNA, 15 bp, Homo sapiens
cttagagagccccca

SEQ ID NO: 1762226 - DNA, 15 bp, Homo sapiens
ttagagagcccccaa

SEQ ID NO: 1762227 - DNA, 15 bp, Homo sapiens
tagagagcccccaag

SEQ ID NO: 1762228 - DNA, 15 bp, Homo sapiens
agagagcccccaagc

SEQ ID NO: 1762229 - DNA, 15 bp, Homo sapiens
gagagcccccaagct

SEQ ID NO: 1762230 - DNA, 15 bp, Homo sapiens
agagcccccaagctc

SEQ ID NO: 1762231 - DNA, 15 bp, Homo sapiens
gagcccccaagctca

SEQ ID NO: 1762232 - DNA, 15 bp, Homo sapiens
agcccccaagctcaa

SEQ ID NO: 1762233 - DNA, 15 bp, Homo sapiens
gcccccaagctcaaa

SEQ ID NO: 1762234 - DNA, 15 bp, Homo sapiens
cccccaagctcaaag

SEQ ID NO: 1762235 - DNA, 15 bp, Homo sapiens
ccccaagctcaaagt

SEQ ID NO: 1762236 - DNA, 15 bp, Homo sapiens
cccaagctcaaagta

SEQ ID NO: 1762237 - DNA, 15 bp, Homo sapiens
ccaagctcaaagtag

SEQ ID NO: 1762238 - DNA, 15 bp, Homo sapiens
caagctcaaagtagc

SEQ ID NO: 1762239 - DNA, 15 bp, Homo sapiens
aagctcaaagtagca

SEQ ID NO: 1762240 - DNA, 15 bp, Homo sapiens
agctcaaagtagcag

SEQ ID NO: 1762241 - DNA, 15 bp, Homo sapiens
gctcaaagtagcaga

SEQ ID NO: 1762242 - DNA, 15 bp, Homo sapiens
ctcaaagtagcagat

SEQ ID NO: 1762243 - DNA, 15 bp, Homo sapiens
tcaaagtagcagata

SEQ ID NO: 1762244 - DNA, 15 bp, Homo sapiens
caaagtagcagatac

SEQ ID NO: 1762245 - DNA, 15 bp, Homo sapiens
aaagtagcagataca

SEQ ID NO: 1762246 - DNA, 15 bp, Homo sapiens
aagtagcagatacag

SEQ ID NO: 1762247 - DNA, 15 bp, Homo sapiens
agtagcagatacaga

SEQ ID NO: 1762248 - DNA, 15 bp, Homo sapiens
gtagcagatacagag

SEQ ID NO: 1762249 - DNA, 15 bp, Homo sapiens
tagcagatacagaga

SEQ ID NO: 1762250 - DNA, 15 bp, Homo sapiens
agcagatacagagag

SEQ ID NO: 1762251 - DNA, 15 bp, Homo sapiens
gcagatacagagagt

SEQ ID NO: 1762252 - DNA, 15 bp, Homo sapiens
cagatacagagagtg

SEQ ID NO: 1762253 - DNA, 15 bp, Homo sapiens
agatacagagagtgg

SEQ ID NO: 1762254 - DNA, 15 bp, Homo sapiens
gatacagagagtggg

SEQ ID NO: 1762255 - DNA, 15 bp, Homo sapiens
atacagagagtgggg

SEQ ID NO: 1762256 - DNA, 15 bp, Homo sapiens
tacagagagtggggc

SEQ ID NO: 1762257 - DNA, 15 bp, Homo sapiens
acagagagtggggca

SEQ ID NO: 1762258 - DNA, 15 bp, Homo sapiens
cagagagtggggcaa

SEQ ID NO: 1762259 - DNA, 15 bp, Homo sapiens
agagagtggggcaat

SEQ ID NO: 1762260 - DNA, 15 bp, Homo sapiens
gagagtggggcaata

SEQ ID NO: 1762261 - DNA, 15 bp, Homo sapiens
agagtggggcaataa

SEQ ID NO: 1762262 - DNA, 15 bp, Homo sapiens
gagtggggcaataat

SEQ ID NO: 1762263 - DNA, 15 bp, Homo sapiens
agtggggcaataatc

SEQ ID NO: 1762264 - DNA, 15 bp, Homo sapiens
gtggggcaataatca

SEQ ID NO: 1762265 - DNA, 15 bp, Homo sapiens
tggggcaataatcag

SEQ ID NO: 1762266 - DNA, 15 bp, Homo sapiens
ggggcaataatcagg

SEQ ID NO: 1762267 - DNA, 15 bp, Homo sapiens
gggcaataatcagga

SEQ ID NO: 1762268 - DNA, 15 bp, Homo sapiens
ggcaataatcaggaa

SEQ ID NO: 1762269 - DNA, 15 bp, Homo sapiens
gcaataatcaggaag

SEQ ID NO: 1762270 - DNA, 15 bp, Homo sapiens
caataatcaggaagg

SEQ ID NO: 1762271 - DNA, 15 bp, Homo sapiens
aataatcaggaaggt

SEQ ID NO: 1762272 - DNA, 15 bp, Homo sapiens
ataatcaggaaggtt

SEQ ID NO: 1762273 - DNA, 15 bp, Homo sapiens
taatcaggaaggttt

SEQ ID NO: 1762274 - DNA, 15 bp, Homo sapiens
aatcaggaaggtttt

SEQ ID NO: 1762275 - DNA, 15 bp, Homo sapiens
atcaggaaggttttc

SEQ ID NO: 1762276 - DNA, 15 bp, Homo sapiens
tcaggaaggttttct

SEQ ID NO: 1762277 - DNA, 15 bp, Homo sapiens
caggaaggttttcta

SEQ ID NO: 1762278 - DNA, 15 bp, Homo sapiens
aggaaggttttctaa

SEQ ID NO: 1762279 - DNA, 15 bp, Homo sapiens
ggaaggttttctaaa

SEQ ID NO: 1762280 - DNA, 15 bp, Homo sapiens
gaaggttttctaaag

SEQ ID NO: 1762281 - DNA, 15 bp, Homo sapiens
aaggttttctaaagt

SEQ ID NO: 1762282 - DNA, 15 bp, Homo sapiens
aggttttctaaagtg

SEQ ID NO: 1762283 - DNA, 15 bp, Homo sapiens
ggttttctaaagtgc

SEQ ID NO: 1762284 - DNA, 15 bp, Homo sapiens
gttttctaaagtgct

SEQ ID NO: 1762285 - DNA, 15 bp, Homo sapiens
ttttctaaagtgctg

SEQ ID NO: 1762286 - DNA, 15 bp, Homo sapiens
tttctaaagtgctgt

SEQ ID NO: 1762287 - DNA, 15 bp, Homo sapiens
ttctaaagtgctgtt

SEQ ID NO: 1762288 - DNA, 15 bp, Homo sapiens
tctaaagtgctgttt

SEQ ID NO: 1762289 - DNA, 15 bp, Homo sapiens
ctaaagtgctgtttg

SEQ ID NO: 1762290 - DNA, 15 bp, Homo sapiens
taaagtgctgtttgg

SEQ ID NO: 1762291 - DNA, 15 bp, Homo sapiens
aaagtgctgtttggc

SEQ ID NO: 1762292 - DNA, 15 bp, Homo sapiens
aagtgctgtttggca

SEQ ID NO: 1762293 - DNA, 15 bp, Homo sapiens
agtgctgtttggcaa

SEQ ID NO: 1762294 - DNA, 15 bp, Homo sapiens
gtgctgtttggcaat

SEQ ID NO: 1762295 - DNA, 15 bp, Homo sapiens
tgctgtttggcaatg

SEQ ID NO: 1762296 - DNA, 15 bp, Homo sapiens
gctgtttggcaatgg

SEQ ID NO: 1762297 - DNA, 15 bp, Homo sapiens
ctgtttggcaatggt

SEQ ID NO: 1762298 - DNA, 15 bp, Homo sapiens
tgtttggcaatggtc

SEQ ID NO: 1762299 - DNA, 15 bp, Homo sapiens
gtttggcaatggtcc

SEQ ID NO: 1762300 - DNA, 15 bp, Homo sapiens
tttggcaatggtcct

SEQ ID NO: 1762301 - DNA, 15 bp, Homo sapiens
ttggcaatggtcctc

SEQ ID NO: 1762302 - DNA, 15 bp, Homo sapiens
tggcaatggtcctca

SEQ ID NO: 1762303 - DNA, 15 bp, Homo sapiens
ggcaatggtcctcaa

SEQ ID NO: 1762304 - DNA, 15 bp, Homo sapiens
gcaatggtcctcaaa

SEQ ID NO: 1762305 - DNA, 15 bp, Homo sapiens
caatggtcctcaaac

SEQ ID NO: 1762306 - DNA, 15 bp, Homo sapiens
aatggtcctcaaact

SEQ ID NO: 1762307 - DNA, 15 bp, Homo sapiens
atggtcctcaaactt

SEQ ID NO: 1762308 - DNA, 15 bp, Homo sapiens
tggtcctcaaacttg

SEQ ID NO: 1762309 - DNA, 15 bp, Homo sapiens
ggtcctcaaacttga

SEQ ID NO: 1762310 - DNA, 15 bp, Homo sapiens
gtcctcaaacttgag

SEQ ID NO: 1762311 - DNA, 15 bp, Homo sapiens
tcctcaaacttgagc

SEQ ID NO: 1762312 - DNA, 15 bp, Homo sapiens
cctcaaacttgagca

SEQ ID NO: 1762313 - DNA, 15 bp, Homo sapiens
ctcaaacttgagcat

SEQ ID NO: 1762314 - DNA, 15 bp, Homo sapiens
tcaaacttgagcatg

SEQ ID NO: 1762315 - DNA, 15 bp, Homo sapiens
caaacttgagcatgc

SEQ ID NO: 1762316 - DNA, 15 bp, Homo sapiens
aaacttgagcatgca

SEQ ID NO: 1762317 - DNA, 15 bp, Homo sapiens
aacttgagcatgcat

SEQ ID NO: 1762318 - DNA, 15 bp, Homo sapiens
acttgagcatgcatc

SEQ ID NO: 1762319 - DNA, 15 bp, Homo sapiens
cttgagcatgcatca

SEQ ID NO: 1762320 - DNA, 15 bp, Homo sapiens
ttgagcatgcatcaa

SEQ ID NO: 1762321 - DNA, 15 bp, Homo sapiens
tgagcatgcatcaaa

SEQ ID NO: 1762322 - DNA, 15 bp, Homo sapiens
gagcatgcatcaaaa

SEQ ID NO: 1762323 - DNA, 15 bp, Homo sapiens
agcatgcatcaaaat

SEQ ID NO: 1762324 - DNA, 15 bp, Homo sapiens
gcatgcatcaaaatt

SEQ ID NO: 1762325 - DNA, 15 bp, Homo sapiens
catgcatcaaaatta

SEQ ID NO: 1762326 - DNA, 15 bp, Homo sapiens
atgcatcaaaattac

SEQ ID NO: 1762327 - DNA, 15 bp, Homo sapiens
tgcatcaaaattacc

SEQ ID NO: 1762328 - DNA, 15 bp, Homo sapiens
gcatcaaaattacca

SEQ ID NO: 1762329 - DNA, 15 bp, Homo sapiens
catcaaaattaccag

SEQ ID NO: 1762330 - DNA, 15 bp, Homo sapiens
atcaaaattaccagg

SEQ ID NO: 1762331 - DNA, 15 bp, Homo sapiens
tcaaaattaccagga

SEQ ID NO: 1762332 - DNA, 15 bp, Homo sapiens
caaaattaccaggag

SEQ ID NO: 1762333 - DNA, 15 bp, Homo sapiens
aaaattaccaggagg

SEQ ID NO: 1762334 - DNA, 15 bp, Homo sapiens
aaattaccaggaggg

SEQ ID NO: 1762335 - DNA, 15 bp, Homo sapiens
aattaccaggagggc

SEQ ID NO: 1762336 - DNA, 15 bp, Homo sapiens
attaccaggagggct

SEQ ID NO: 1762337 - DNA, 15 bp, Homo sapiens
ttaccaggagggctt

SEQ ID NO: 1762338 - DNA, 15 bp, Homo sapiens
taccaggagggcttg

SEQ ID NO: 1762339 - DNA, 15 bp, Homo sapiens
accaggagggcttgt

SEQ ID NO: 1762340 - DNA, 15 bp, Homo sapiens
ccaggagggcttgtt

SEQ ID NO: 1762341 - DNA, 15 bp, Homo sapiens
caggagggcttgtta

SEQ ID NO: 1762342 - DNA, 15 bp, Homo sapiens
aggagggcttgttaa

SEQ ID NO: 1762343 - DNA, 15 bp, Homo sapiens
ggagggcttgttaaa

SEQ ID NO: 1762344 - DNA, 15 bp, Homo sapiens
gagggcttgttaaaa

SEQ ID NO: 1762345 - DNA, 15 bp, Homo sapiens
agggcttgttaaaac

SEQ ID NO: 1762346 - DNA, 15 bp, Homo sapiens
gggcttgttaaaaca

SEQ ID NO: 1762347 - DNA, 15 bp, Homo sapiens
ggcttgttaaaacac

SEQ ID NO: 1762348 - DNA, 15 bp, Homo sapiens
gcttgttaaaacaca

SEQ ID NO: 1762349 - DNA, 15 bp, Homo sapiens
cttgttaaaacacat

SEQ ID NO: 1762350 - DNA, 15 bp, Homo sapiens
ttgttaaaacacata

SEQ ID NO: 1762351 - DNA, 15 bp, Homo sapiens
tgttaaaacacatat

SEQ ID NO: 1762352 - DNA, 15 bp, Homo sapiens
gttaaaacacatatt

SEQ ID NO: 1762353 - DNA, 15 bp, Homo sapiens
ttaaaacacatatta

SEQ ID NO: 1762354 - DNA, 15 bp, Homo sapiens
taaaacacatattac

SEQ ID NO: 1762355 - DNA, 15 bp, Homo sapiens
aaaacacatattaca

SEQ ID NO: 1762356 - DNA, 15 bp, Homo sapiens
aaacacatattacag

SEQ ID NO: 1762357 - DNA, 15 bp, Homo sapiens
aacacatattacaga

SEQ ID NO: 1762358 - DNA, 15 bp, Homo sapiens
acacatattacagat

SEQ ID NO: 1762359 - DNA, 15 bp, Homo sapiens
cacatattacagatt

SEQ ID NO: 1762360 - DNA, 15 bp, Homo sapiens
acatattacagattg

SEQ ID NO: 1762361 - DNA, 15 bp, Homo sapiens
catattacagattgc

SEQ ID NO: 1762362 - DNA, 15 bp, Homo sapiens
atattacagattgct

SEQ ID NO: 1762363 - DNA, 15 bp, Homo sapiens
tattacagattgctg

SEQ ID NO: 1762364 - DNA, 15 bp, Homo sapiens
attacagattgctgg

SEQ ID NO: 1762365 - DNA, 15 bp, Homo sapiens
ttacagattgctggg

SEQ ID NO: 1762366 - DNA, 15 bp, Homo sapiens
tacagattgctgggc

SEQ ID NO: 1762367 - DNA, 15 bp, Homo sapiens
cagattgctgggccc

SEQ ID NO: 1762368 - DNA, 15 bp, Homo sapiens
agattgctgggccca

SEQ ID NO: 1762369 - DNA, 15 bp, Homo sapiens
gattgctgggcccag

SEQ ID NO: 1762370 - DNA, 15 bp, Homo sapiens
attgctgggcccagt

SEQ ID NO: 1762371 - DNA, 15 bp, Homo sapiens
ttgctgggcccagtc

SEQ ID NO: 1762372 - DNA, 15 bp, Homo sapiens
tgctgggcccagtca

SEQ ID NO: 1762373 - DNA, 15 bp, Homo sapiens
gctgggcccagtcac

SEQ ID NO: 1762374 - DNA, 15 bp, Homo sapiens
ctgggcccagtcaca

SEQ ID NO: 1762375 - DNA, 15 bp, Homo sapiens
tgggcccagtcacaa

SEQ ID NO: 1762376 - DNA, 15 bp, Homo sapiens
gggcccagtcacaaa

SEQ ID NO: 1762377 - DNA, 15 bp, Homo sapiens
ggcccagtcacaaag

SEQ ID NO: 1762378 - DNA, 15 bp, Homo sapiens
gcccagtcacaaagt

SEQ ID NO: 1762379 - DNA, 15 bp, Homo sapiens
cccagtcacaaagtt

SEQ ID NO: 1762380 - DNA, 15 bp, Homo sapiens
ccagtcacaaagttt

SEQ ID NO: 1762381 - DNA, 15 bp, Homo sapiens
cagtcacaaagtttc

SEQ ID NO: 1762382 - DNA, 15 bp, Homo sapiens
agtcacaaagtttcc

SEQ ID NO: 1762383 - DNA, 15 bp, Homo sapiens
gtcacaaagtttcca

SEQ ID NO: 1762384 - DNA, 15 bp, Homo sapiens
tcacaaagtttccag

SEQ ID NO: 1762385 - DNA, 15 bp, Homo sapiens
cacaaagtttccagt

SEQ ID NO: 1762386 - DNA, 15 bp, Homo sapiens
acaaagtttccagtg

SEQ ID NO: 1762387 - DNA, 15 bp, Homo sapiens
caaagtttccagtgt

SEQ ID NO: 1762388 - DNA, 15 bp, Homo sapiens
aaagtttccagtgta

SEQ ID NO: 1762389 - DNA, 15 bp, Homo sapiens
aagtttccagtgtag

SEQ ID NO: 1762390 - DNA, 15 bp, Homo sapiens
agtttccagtgtagg

SEQ ID NO: 1762391 - DNA, 15 bp, Homo sapiens
gtttccagtgtaggg

SEQ ID NO: 1762392 - DNA, 15 bp, Homo sapiens
tttccagtgtagggt

SEQ ID NO: 1762393 - DNA, 15 bp, Homo sapiens
ttccagtgtagggtc

SEQ ID NO: 1762394 - DNA, 15 bp, Homo sapiens
tccagtgtagggtcc

SEQ ID NO: 1762395 - DNA, 15 bp, Homo sapiens
ccagtgtagggtcca

SEQ ID NO: 1762396 - DNA, 15 bp, Homo sapiens
cagtgtagggtccaa

SEQ ID NO: 1762397 - DNA, 15 bp, Homo sapiens
agtgtagggtccaag

SEQ ID NO: 1762398 - DNA, 15 bp, Homo sapiens
gtgtagggtccaaga

SEQ ID NO: 1762399 - DNA, 15 bp, Homo sapiens
tgtagggtccaagaa

SEQ ID NO: 1762400 - DNA, 15 bp, Homo sapiens
gtagggtccaagaat

SEQ ID NO: 1762401 - DNA, 15 bp, Homo sapiens
tagggtccaagaatt

SEQ ID NO: 1762402 - DNA, 15 bp, Homo sapiens
agggtccaagaattt

SEQ ID NO: 1762403 - DNA, 15 bp, Homo sapiens
gggtccaagaatttg

SEQ ID NO: 1762404 - DNA, 15 bp, Homo sapiens
ggtccaagaatttgt

SEQ ID NO: 1762405 - DNA, 15 bp, Homo sapiens
gtccaagaatttgta

SEQ ID NO: 1762406 - DNA, 15 bp, Homo sapiens
tccaagaatttgtat

SEQ ID NO: 1762407 - DNA, 15 bp, Homo sapiens
ccaagaatttgtatt

SEQ ID NO: 1762408 - DNA, 15 bp, Homo sapiens
caagaatttgtattt

SEQ ID NO: 1762409 - DNA, 15 bp, Homo sapiens
aagaatttgtatttc

SEQ ID NO: 1762410 - DNA, 15 bp, Homo sapiens
agaatttgtatttct

SEQ ID NO: 1762411 - DNA, 15 bp, Homo sapiens
gaatttgtatttctg

SEQ ID NO: 1762412 - DNA, 15 bp, Homo sapiens
aatttgtatttctga

SEQ ID NO: 1762413 - DNA, 15 bp, Homo sapiens
atttgtatttctgat

SEQ ID NO: 1762414 - DNA, 15 bp, Homo sapiens
tttgtatttctgata

SEQ ID NO: 1762415 - DNA, 15 bp, Homo sapiens
ttgtatttctgatat

SEQ ID NO: 1762416 - DNA, 15 bp, Homo sapiens
tgtatttctgatatg

SEQ ID NO: 1762417 - DNA, 15 bp, Homo sapiens
gtatttctgatatgt

SEQ ID NO: 1762418 - DNA, 15 bp, Homo sapiens
tatttctgatatgtt

SEQ ID NO: 1762419 - DNA, 15 bp, Homo sapiens
atttctgatatgttt

SEQ ID NO: 1762420 - DNA, 15 bp, Homo sapiens
tttctgatatgtttc

SEQ ID NO: 1762421 - DNA, 15 bp, Homo sapiens
ttctgatatgtttcc

SEQ ID NO: 1762422 - DNA, 15 bp, Homo sapiens
tctgatatgtttcca

SEQ ID NO: 1762423 - DNA, 15 bp, Homo sapiens
ctgatatgtttccag

SEQ ID NO: 1762424 - DNA, 15 bp, Homo sapiens
tgatatgtttccagg

SEQ ID NO: 1762425 - DNA, 15 bp, Homo sapiens
gatatgtttccaggt

SEQ ID NO: 1762426 - DNA, 15 bp, Homo sapiens
atatgtttccaggtg

SEQ ID NO: 1762427 - DNA, 15 bp, Homo sapiens
tatgtttccaggtga

SEQ ID NO: 1762428 - DNA, 15 bp, Homo sapiens
atgtttccaggtgat

SEQ ID NO: 1762429 - DNA, 15 bp, Homo sapiens
tgtttccaggtgata

SEQ ID NO: 1762430 - DNA, 15 bp, Homo sapiens
gtttccaggtgatac

SEQ ID NO: 1762431 - DNA, 15 bp, Homo sapiens
tttccaggtgatact

SEQ ID NO: 1762432 - DNA, 15 bp, Homo sapiens
ttccaggtgatactg

SEQ ID NO: 1762433 - DNA, 15 bp, Homo sapiens
tccaggtgatactga

SEQ ID NO: 1762434 - DNA, 15 bp, Homo sapiens
ccaggtgatactgat

SEQ ID NO: 1762435 - DNA, 15 bp, Homo sapiens
caggtgatactgatg

SEQ ID NO: 1762436 - DNA, 15 bp, Homo sapiens
aggtgatactgatgc

SEQ ID NO: 1762437 - DNA, 15 bp, Homo sapiens
ggtgatactgatgct

SEQ ID NO: 1762438 - DNA, 15 bp, Homo sapiens
gtgatactgatgctg

SEQ ID NO: 1762439 - DNA, 15 bp, Homo sapiens
tgatactgatgctgc

SEQ ID NO: 1762440 - DNA, 15 bp, Homo sapiens
gatactgatgctgct

SEQ ID NO: 1762441 - DNA, 15 bp, Homo sapiens
atactgatgctgctg

SEQ ID NO: 1762442 - DNA, 15 bp, Homo sapiens
tactgatgctgctgg

SEQ ID NO: 1762443 - DNA, 15 bp, Homo sapiens
actgatgctgctggt

SEQ ID NO: 1762444 - DNA, 15 bp, Homo sapiens
ctgatgctgctggtc

SEQ ID NO: 1762445 - DNA, 15 bp, Homo sapiens
tgatgctgctggtct

SEQ ID NO: 1762446 - DNA, 15 bp, Homo sapiens
gatgctgctggtctg

SEQ ID NO: 1762447 - DNA, 15 bp, Homo sapiens
atgctgctggtctgg

SEQ ID NO: 1762448 - DNA, 15 bp, Homo sapiens
tgctgctggtctggg

SEQ ID NO: 1762449 - DNA, 15 bp, Homo sapiens
gctgctggtctgggt

SEQ ID NO: 1762450 - DNA, 15 bp, Homo sapiens
ctgctggtctgggta

SEQ ID NO: 1762451 - DNA, 15 bp, Homo sapiens
tgctggtctgggtac

SEQ ID NO: 1762452 - DNA, 15 bp, Homo sapiens
gctggtctgggtact

SEQ ID NO: 1762453 - DNA, 15 bp, Homo sapiens
ctggtctgggtacta

SEQ ID NO: 1762454 - DNA, 15 bp, Homo sapiens
tggtctgggtactac

SEQ ID NO: 1762455 - DNA, 15 bp, Homo sapiens
ggtctgggtactaca

SEQ ID NO: 1762456 - DNA, 15 bp, Homo sapiens
gtctgggtactacac

SEQ ID NO: 1762457 - DNA, 15 bp, Homo sapiens
tctgggtactacact

SEQ ID NO: 1762458 - DNA, 15 bp, Homo sapiens
ctgggtactacactt

SEQ ID NO: 1762459 - DNA, 15 bp, Homo sapiens
tgggtactacacttt

SEQ ID NO: 1762460 - DNA, 15 bp, Homo sapiens
gggtactacactttg

SEQ ID NO: 1762461 - DNA, 15 bp, Homo sapiens
ggtactacactttgt

SEQ ID NO: 1762462 - DNA, 15 bp, Homo sapiens
gtactacactttgtg

SEQ ID NO: 1762463 - DNA, 15 bp, Homo sapiens
tactacactttgtga

SEQ ID NO: 1762464 - DNA, 15 bp, Homo sapiens
actacactttgtgag

SEQ ID NO: 1762465 - DNA, 15 bp, Homo sapiens
ctacactttgtgagc

SEQ ID NO: 1762466 - DNA, 15 bp, Homo sapiens
tacactttgtgagca

SEQ ID NO: 1762467 - DNA, 15 bp, Homo sapiens
acactttgtgagcaa

SEQ ID NO: 1762468 - DNA, 15 bp, Homo sapiens
cactttgtgagcaac

SEQ ID NO: 1762469 - DNA, 15 bp, Homo sapiens
actttgtgagcaaca

SEQ ID NO: 1762470 - DNA, 15 bp, Homo sapiens
ctttgtgagcaacat

SEQ ID NO: 1762471 - DNA, 15 bp, Homo sapiens
tttgtgagcaacatt

SEQ ID NO: 1762472 - DNA, 15 bp, Homo sapiens
ttgtgagcaacattt

SEQ ID NO: 1762473 - DNA, 15 bp, Homo sapiens
tgtgagcaacatttt

SEQ ID NO: 1762474 - DNA, 15 bp, Homo sapiens
gtgagcaacatttta

SEQ ID NO: 1762475 - DNA, 15 bp, Homo sapiens
tgagcaacattttaa

SEQ ID NO: 1762476 - DNA, 15 bp, Homo sapiens
gagcaacattttaag

SEQ ID NO: 1762477 - DNA, 15 bp, Homo sapiens
agcaacattttaaga

SEQ ID NO: 1762478 - DNA, 15 bp, Homo sapiens
gcaacattttaagaa

SEQ ID NO: 1762479 - DNA, 15 bp, Homo sapiens
cattttaagaacatg

SEQ ID NO: 1762480 - DNA, 15 bp, Homo sapiens
attttaagaacatga

SEQ ID NO: 1762481 - DNA, 15 bp, Homo sapiens
ttttaagaacatgaa

SEQ ID NO: 1762482 - DNA, 15 bp, Homo sapiens
tttaagaacatgaaa

SEQ ID NO: 1762483 - DNA, 15 bp, Homo sapiens
ttaagaacatgaaac

SEQ ID NO: 1762484 - DNA, 15 bp, Homo sapiens
taagaacatgaaaca

SEQ ID NO: 1762485 - DNA, 15 bp, Homo sapiens
aagaacatgaaacac

SEQ ID NO: 1762486 - DNA, 15 bp, Homo sapiens
agaacatgaaacacc

SEQ ID NO: 1762487 - DNA, 15 bp, Homo sapiens
gaacatgaaacacct

SEQ ID NO: 1762488 - DNA, 15 bp, Homo sapiens
aacatgaaacacctg

SEQ ID NO: 1762489 - DNA, 15 bp, Homo sapiens
acatgaaacacctgg

SEQ ID NO: 1762490 - DNA, 15 bp, Homo sapiens
catgaaacacctgga

SEQ ID NO: 1762491 - DNA, 15 bp, Homo sapiens
atgaaacacctggac

SEQ ID NO: 1762492 - DNA, 15 bp, Homo sapiens
tgaaacacctggacc

SEQ ID NO: 1762493 - DNA, 15 bp, Homo sapiens
gaaacacctggacca

SEQ ID NO: 1762494 - DNA, 15 bp, Homo sapiens
aaacacctggaccag

SEQ ID NO: 1762495 - DNA, 15 bp, Homo sapiens
aacacctggaccagt

SEQ ID NO: 1762496 - DNA, 15 bp, Homo sapiens
acacctggaccagtc

SEQ ID NO: 1762497 - DNA, 15 bp, Homo sapiens
cacctggaccagtcc

SEQ ID NO: 1762498 - DNA, 15 bp, Homo sapiens
acctggaccagtccc

SEQ ID NO: 1762499 - DNA, 15 bp, Homo sapiens
cctggaccagtcccc

SEQ ID NO: 1762500 - DNA, 15 bp, Homo sapiens
ctggaccagtccccc

SEQ ID NO: 1762501 - DNA, 15 bp, Homo sapiens
tggaccagtccccca

SEQ ID NO: 1762502 - DNA, 15 bp, Homo sapiens
ggaccagtcccccat

SEQ ID NO: 1762503 - DNA, 15 bp, Homo sapiens
gaccagtcccccatc

SEQ ID NO: 1762504 - DNA, 15 bp, Homo sapiens
accagtcccccatct

SEQ ID NO: 1762505 - DNA, 15 bp, Homo sapiens
ccagtcccccatcta

SEQ ID NO: 1762506 - DNA, 15 bp, Homo sapiens
cagtcccccatctaa

SEQ ID NO: 1762507 - DNA, 15 bp, Homo sapiens
agtcccccatctaag

SEQ ID NO: 1762508 - DNA, 15 bp, Homo sapiens
gtcccccatctaagg

SEQ ID NO: 1762509 - DNA, 15 bp, Homo sapiens
tcccccatctaaggc

SEQ ID NO: 1762510 - DNA, 15 bp, Homo sapiens
cccccatctaaggcc

SEQ ID NO: 1762511 - DNA, 15 bp, Homo sapiens
ccccatctaaggcca

SEQ ID NO: 1762512 - DNA, 15 bp, Homo sapiens
cccatctaaggccat

SEQ ID NO: 1762513 - DNA, 15 bp, Homo sapiens
ccatctaaggccatg

SEQ ID NO: 1762514 - DNA, 15 bp, Homo sapiens
catctaaggccatgc

SEQ ID NO: 1762515 - DNA, 15 bp, Homo sapiens
atctaaggccatgcc

SEQ ID NO: 1762516 - DNA, 15 bp, Homo sapiens
tctaaggccatgcca

SEQ ID NO: 1762517 - DNA, 15 bp, Homo sapiens
ctaaggccatgccag

SEQ ID NO: 1762518 - DNA, 15 bp, Homo sapiens
taaggccatgccagc

SEQ ID NO: 1762519 - DNA, 15 bp, Homo sapiens
aaggccatgccagcc

SEQ ID NO: 1762520 - DNA, 15 bp, Homo sapiens
aggccatgccagcct

SEQ ID NO: 1762521 - DNA, 15 bp, Homo sapiens
ggccatgccagccta

SEQ ID NO: 1762522 - DNA, 15 bp, Homo sapiens
gccatgccagcctat

SEQ ID NO: 1762523 - DNA, 15 bp, Homo sapiens
ccatgccagcctatg

SEQ ID NO: 1762524 - DNA, 15 bp, Homo sapiens
catgccagcctatga

SEQ ID NO: 1762525 - DNA, 15 bp, Homo sapiens
atgccagcctatgag

SEQ ID NO: 1762526 - DNA, 15 bp, Homo sapiens
tgccagcctatgaga

SEQ ID NO: 1762527 - DNA, 15 bp, Homo sapiens
gccagcctatgagaa

SEQ ID NO: 1762528 - DNA, 15 bp, Homo sapiens
ccagcctatgagaat

SEQ ID NO: 1762529 - DNA, 15 bp, Homo sapiens
cagcctatgagaata

SEQ ID NO: 1762530 - DNA, 15 bp, Homo sapiens
agcctatgagaataa

SEQ ID NO: 1762531 - DNA, 15 bp, Homo sapiens
gcctatgagaataaa

SEQ ID NO: 1762532 - DNA, 15 bp, Homo sapiens
cctatgagaataaaa

SEQ ID NO: 1762533 - DNA, 15 bp, Homo sapiens
ctatgagaataaaaa

SEQ ID NO: 1762534 - DNA, 15 bp, Homo sapiens
tatgagaataaaaaa

SEQ ID NO: 1762535 - DNA, 15 bp, Homo sapiens
atgagaataaaaaaa

SEQ ID NO: 1762536 - DNA, 15 bp, Homo sapiens
tgagaataaaaaaaa

SEQ ID NO: 1762537 - DNA, 15 bp, Homo sapiens
gagaataaaaaaaat

SEQ ID NO: 1762538 - DNA, 15 bp, Homo sapiens
agaataaaaaaaatg

SEQ ID NO: 1762539 - DNA, 15 bp, Homo sapiens
gaataaaaaaaatgc

SEQ ID NO: 1762540 - DNA, 15 bp, Homo sapiens
aataaaaaaaatgca

SEQ ID NO: 1762541 - DNA, 15 bp, Homo sapiens
ataaaaaaaatgcac

SEQ ID NO: 1762542 - DNA, 15 bp, Homo sapiens
taaaaaaaatgcacc

SEQ ID NO: 1762543 - DNA, 15 bp, Homo sapiens
aaaaaaaatgcacct

SEQ ID NO: 1762544 - DNA, 15 bp, Homo sapiens
aaaaaaatgcacctc

SEQ ID NO: 1762545 - DNA, 15 bp, Homo sapiens
aaaaaatgcacctct

SEQ ID NO: 1762546 - DNA, 15 bp, Homo sapiens
aaaaatgcacctctg

SEQ ID NO: 1762547 - DNA, 15 bp, Homo sapiens
aaaatgcacctctgt

SEQ ID NO: 1762548 - DNA, 15 bp, Homo sapiens
aaatgcacctctgta

SEQ ID NO: 1762549 - DNA, 15 bp, Homo sapiens
aatgcacctctgtag

SEQ ID NO: 1762550 - DNA, 15 bp, Homo sapiens
atgcacctctgtagt

SEQ ID NO: 1762551 - DNA, 15 bp, Homo sapiens
tgcacctctgtagtc

SEQ ID NO: 1762552 - DNA, 15 bp, Homo sapiens
gcacctctgtagtcc

SEQ ID NO: 1762553 - DNA, 15 bp, Homo sapiens
cacctctgtagtccc

SEQ ID NO: 1762554 - DNA, 15 bp, Homo sapiens
acctctgtagtccca

SEQ ID NO: 1762555 - DNA, 15 bp, Homo sapiens
cctctgtagtcccag

SEQ ID NO: 1762556 - DNA, 15 bp, Homo sapiens
ctctgtagtcccagc

SEQ ID NO: 1762557 - DNA, 15 bp, Homo sapiens
tgaggagggaggatt

SEQ ID NO: 1762558 - DNA, 15 bp, Homo sapiens
gaggagggaggattg

SEQ ID NO: 1762559 - DNA, 15 bp, Homo sapiens
aggagggaggattgc

SEQ ID NO: 1762560 - DNA, 15 bp, Homo sapiens
ggagggaggattgct

SEQ ID NO: 1762561 - DNA, 15 bp, Homo sapiens
gagggaggattgctt

SEQ ID NO: 1762562 - DNA, 15 bp, Homo sapiens
agggaggattgcttg

SEQ ID NO: 1762563 - DNA, 15 bp, Homo sapiens
gcttgagcctgggaa

SEQ ID NO: 1762564 - DNA, 15 bp, Homo sapiens
cttgagcctgggaag

SEQ ID NO: 1762565 - DNA, 15 bp, Homo sapiens
ttgagcctgggaagt

SEQ ID NO: 1762566 - DNA, 15 bp, Homo sapiens
tgagcctgggaagtt

SEQ ID NO: 1762567 - DNA, 15 bp, Homo sapiens
gagcctgggaagttg

SEQ ID NO: 1762568 - DNA, 15 bp, Homo sapiens
agcctgggaagttga

SEQ ID NO: 1762569 - DNA, 15 bp, Homo sapiens
gcctgggaagttgag

SEQ ID NO: 1762570 - DNA, 15 bp, Homo sapiens
cctgggaagttgagg

SEQ ID NO: 1762571 - DNA, 15 bp, Homo sapiens
ctgggaagttgaggc

SEQ ID NO: 1762572 - DNA, 15 bp, Homo sapiens
tgggaagttgaggct

SEQ ID NO: 1762573 - DNA, 15 bp, Homo sapiens
gggaagttgaggctg

SEQ ID NO: 1762574 - DNA, 15 bp, Homo sapiens
ggaagttgaggctgc

SEQ ID NO: 1762575 - DNA, 15 bp, Homo sapiens
agttgaggctgcagg

SEQ ID NO: 1762576 - DNA, 15 bp, Homo sapiens
gttgaggctgcaggg

SEQ ID NO: 1762577 - DNA, 15 bp, Homo sapiens
ttgaggctgcaggga

SEQ ID NO: 1762578 - DNA, 15 bp, Homo sapiens
tgaggctgcagggag

SEQ ID NO: 1762579 - DNA, 15 bp, Homo sapiens
gaggctgcagggagc

SEQ ID NO: 1762580 - DNA, 15 bp, Homo sapiens
aggctgcagggagcc

SEQ ID NO: 1762581 - DNA, 15 bp, Homo sapiens
ggctgcagggagccg

SEQ ID NO: 1762582 - DNA, 15 bp, Homo sapiens
gctgcagggagccgt

SEQ ID NO: 1762583 - DNA, 15 bp, Homo sapiens
ctgcagggagccgtg

SEQ ID NO: 1762584 - DNA, 15 bp, Homo sapiens
tgcagggagccgtga

SEQ ID NO: 1762585 - DNA, 15 bp, Homo sapiens
gcagggagccgtgac

SEQ ID NO: 1762586 - DNA, 15 bp, Homo sapiens
cagggagccgtgact

SEQ ID NO: 1762587 - DNA, 15 bp, Homo sapiens
agggagccgtgactg

SEQ ID NO: 1762588 - DNA, 15 bp, Homo sapiens
gggagccgtgactgc

SEQ ID NO: 1762589 - DNA, 15 bp, Homo sapiens
ggagccgtgactgca

SEQ ID NO: 1762590 - DNA, 15 bp, Homo sapiens
gagccgtgactgcac

SEQ ID NO: 1762591 - DNA, 15 bp, Homo sapiens
agccgtgactgcact

SEQ ID NO: 1762592 - DNA, 15 bp, Homo sapiens
gccgtgactgcacta

SEQ ID NO: 1762593 - DNA, 15 bp, Homo sapiens
ccgtgactgcactac

SEQ ID NO: 1762594 - DNA, 15 bp, Homo sapiens
cgtgactgcactact

SEQ ID NO: 1762595 - DNA, 15 bp, Homo sapiens
gtgactgcactactg

SEQ ID NO: 1762596 - DNA, 15 bp, Homo sapiens
tgactgcactactgc

SEQ ID NO: 1762597 - DNA, 15 bp, Homo sapiens
gactgcactactgca

SEQ ID NO: 1762598 - DNA, 15 bp, Homo sapiens
actgcactactgcat

SEQ ID NO: 1762599 - DNA, 15 bp, Homo sapiens
ctgcactactgcatt

SEQ ID NO: 1762600 - DNA, 15 bp, Homo sapiens
tgcactactgcattc

SEQ ID NO: 1762601 - DNA, 15 bp, Homo sapiens
gcactactgcattcc

SEQ ID NO: 1762602 - DNA, 15 bp, Homo sapiens
cactactgcattcca

SEQ ID NO: 1762603 - DNA, 15 bp, Homo sapiens
actactgcattccag

SEQ ID NO: 1762604 - DNA, 15 bp, Homo sapiens
ctactgcattccagt

SEQ ID NO: 1762605 - DNA, 15 bp, Homo sapiens
tactgcattccagtc

SEQ ID NO: 1762606 - DNA, 15 bp, Homo sapiens
gcattccagtctggg

SEQ ID NO: 1762607 - DNA, 15 bp, Homo sapiens
cattccagtctgggt

SEQ ID NO: 1762608 - DNA, 15 bp, Homo sapiens
attccagtctgggtg

SEQ ID NO: 1762609 - DNA, 15 bp, Homo sapiens
ttccagtctgggtga

SEQ ID NO: 1762610 - DNA, 15 bp, Homo sapiens
gtctgggtgacagaa

SEQ ID NO: 1762611 - DNA, 15 bp, Homo sapiens
tctgggtgacagaat

SEQ ID NO: 1762612 - DNA, 15 bp, Homo sapiens
tgacagaatgagaca

SEQ ID NO: 1762613 - DNA, 15 bp, Homo sapiens
gacagaatgagacac

SEQ ID NO: 1762614 - DNA, 15 bp, Homo sapiens
acagaatgagacact

SEQ ID NO: 1762615 - DNA, 15 bp, Homo sapiens
cagaatgagacactg

SEQ ID NO: 1762616 - DNA, 15 bp, Homo sapiens
agaatgagacactgt

SEQ ID NO: 1762617 - DNA, 15 bp, Homo sapiens
gaatgagacactgtc

SEQ ID NO: 1762618 - DNA, 15 bp, Homo sapiens
aatgagacactgtct

SEQ ID NO: 1762619 - DNA, 15 bp, Homo sapiens
atgagacactgtctc

SEQ ID NO: 1762620 - DNA, 15 bp, Homo sapiens
tgagacactgtctca

SEQ ID NO: 1762621 - DNA, 15 bp, Homo sapiens
gagacactgtctcaa

SEQ ID NO: 1762622 - DNA, 15 bp, Homo sapiens
agacactgtctcaaa

SEQ ID NO: 1762623 - DNA, 15 bp, Homo sapiens
gacactgtctcaaag

SEQ ID NO: 1762624 - DNA, 15 bp, Homo sapiens
acactgtctcaaaga

SEQ ID NO: 1762625 - DNA, 15 bp, Homo sapiens
cactgtctcaaagaa

SEQ ID NO: 1762626 - DNA, 15 bp, Homo sapiens
actgtctcaaagaaa

SEQ ID NO: 1762627 - DNA, 15 bp, Homo sapiens
gtctcaaagaaaaac

SEQ ID NO: 1762628 - DNA, 15 bp, Homo sapiens
tctcaaagaaaaacg

SEQ ID NO: 1762629 - DNA, 15 bp, Homo sapiens
ctcaaagaaaaacga

SEQ ID NO: 1762630 - DNA, 15 bp, Homo sapiens
tcaaagaaaaacgaa

SEQ ID NO: 1762631 - DNA, 15 bp, Homo sapiens
caaagaaaaacgaaa

SEQ ID NO: 1762632 - DNA, 15 bp, Homo sapiens
aaagaaaaacgaaaa

SEQ ID NO: 1762633 - DNA, 15 bp, Homo sapiens
aagaaaaacgaaaaa

SEQ ID NO: 1762634 - DNA, 15 bp, Homo sapiens
agaaaaacgaaaaaa

SEQ ID NO: 1762635 - DNA, 15 bp, Homo sapiens
gaaaaacgaaaaaaa

SEQ ID NO: 1762636 - DNA, 15 bp, Homo sapiens
aaaacgaaaaaaaag

SEQ ID NO: 1762637 - DNA, 15 bp, Homo sapiens
aaacgaaaaaaaagc

SEQ ID NO: 1762638 - DNA, 15 bp, Homo sapiens
aacgaaaaaaaagca

SEQ ID NO: 1762639 - DNA, 15 bp, Homo sapiens
acgaaaaaaaagcac

SEQ ID NO: 1762640 - DNA, 15 bp, Homo sapiens
cgaaaaaaaagcacc

SEQ ID NO: 1762641 - DNA, 15 bp, Homo sapiens
gaaaaaaaagcacct

SEQ ID NO: 1762642 - DNA, 15 bp, Homo sapiens
aaaaaaaagcacctt

SEQ ID NO: 1762643 - DNA, 15 bp, Homo sapiens
aaaaaaagcaccttc

SEQ ID NO: 1762644 - DNA, 15 bp, Homo sapiens
aaaaaagcaccttcc

SEQ ID NO: 1762645 - DNA, 15 bp, Homo sapiens
aaaaagcaccttcct

SEQ ID NO: 1762646 - DNA, 15 bp, Homo sapiens
aaaagcaccttcctc

SEQ ID NO: 1762647 - DNA, 15 bp, Homo sapiens
aaagcaccttcctct

SEQ ID NO: 1762648 - DNA, 15 bp, Homo sapiens
aagcaccttcctctt

SEQ ID NO: 1762649 - DNA, 15 bp, Homo sapiens
agcaccttcctcttt

SEQ ID NO: 1762650 - DNA, 15 bp, Homo sapiens
gcaccttcctcttta

SEQ ID NO: 1762651 - DNA, 15 bp, Homo sapiens
caccttcctctttac

SEQ ID NO: 1762652 - DNA, 15 bp, Homo sapiens
accttcctctttact

SEQ ID NO: 1762653 - DNA, 15 bp, Homo sapiens
ccttcctctttacta

SEQ ID NO: 1762654 - DNA, 15 bp, Homo sapiens
cttcctctttactaa

SEQ ID NO: 1762655 - DNA, 15 bp, Homo sapiens
ttcctctttactaat

SEQ ID NO: 1762656 - DNA, 15 bp, Homo sapiens
tcctctttactaatg

SEQ ID NO: 1762657 - DNA, 15 bp, Homo sapiens
cctctttactaatgg

SEQ ID NO: 1762658 - DNA, 15 bp, Homo sapiens
ctctttactaatgga

SEQ ID NO: 1762659 - DNA, 15 bp, Homo sapiens
tctttactaatggat

SEQ ID NO: 1762660 - DNA, 15 bp, Homo sapiens
ctttactaatggatt

SEQ ID NO: 1762661 - DNA, 15 bp, Homo sapiens
tttactaatggatta

SEQ ID NO: 1762662 - DNA, 15 bp, Homo sapiens
ttactaatggattat

SEQ ID NO: 1762663 - DNA, 15 bp, Homo sapiens
tactaatggattata

SEQ ID NO: 1762664 - DNA, 15 bp, Homo sapiens
actaatggattataa

SEQ ID NO: 1762665 - DNA, 15 bp, Homo sapiens
ctaatggattataaa

SEQ ID NO: 1762666 - DNA, 15 bp, Homo sapiens
taatggattataaaa

SEQ ID NO: 1762667 - DNA, 15 bp, Homo sapiens
aatggattataaaaa

SEQ ID NO: 1762668 - DNA, 15 bp, Homo sapiens
atggattataaaaag

SEQ ID NO: 1762669 - DNA, 15 bp, Homo sapiens
tggattataaaaaga

SEQ ID NO: 1762670 - DNA, 15 bp, Homo sapiens
ggattataaaaagat

SEQ ID NO: 1762671 - DNA, 15 bp, Homo sapiens
gattataaaaagatg

SEQ ID NO: 1762672 - DNA, 15 bp, Homo sapiens
attataaaaagatgc

SEQ ID NO: 1762673 - DNA, 15 bp, Homo sapiens
ttataaaaagatgcc

SEQ ID NO: 1762674 - DNA, 15 bp, Homo sapiens
tataaaaagatgccg

SEQ ID NO: 1762675 - DNA, 15 bp, Homo sapiens
ataaaaagatgccgt

SEQ ID NO: 1762676 - DNA, 15 bp, Homo sapiens
taaaaagatgccgtc

SEQ ID NO: 1762677 - DNA, 15 bp, Homo sapiens
aaaaagatgccgtcc

SEQ ID NO: 1762678 - DNA, 15 bp, Homo sapiens
aaaagatgccgtccg

SEQ ID NO: 1762679 - DNA, 15 bp, Homo sapiens
aaagatgccgtccgg

SEQ ID NO: 1762680 - DNA, 15 bp, Homo sapiens
aagatgccgtccgga

SEQ ID NO: 1762681 - DNA, 15 bp, Homo sapiens
agatgccgtccggac

SEQ ID NO: 1762682 - DNA, 15 bp, Homo sapiens
gatgccgtccggaca

SEQ ID NO: 1762683 - DNA, 15 bp, Homo sapiens
atgccgtccggacac

SEQ ID NO: 1762684 - DNA, 15 bp, Homo sapiens
tgccgtccggacaca

SEQ ID NO: 1762685 - DNA, 15 bp, Homo sapiens
gccgtccggacacag

SEQ ID NO: 1762686 - DNA, 15 bp, Homo sapiens
ccgtccggacacagc

SEQ ID NO: 1762687 - DNA, 15 bp, Homo sapiens
cgtccggacacagca

SEQ ID NO: 1762688 - DNA, 15 bp, Homo sapiens
gtccggacacagcaa

SEQ ID NO: 1762689 - DNA, 15 bp, Homo sapiens
tccggacacagcaac

SEQ ID NO: 1762690 - DNA, 15 bp, Homo sapiens
ccggacacagcaacc

SEQ ID NO: 1762691 - DNA, 15 bp, Homo sapiens
cggacacagcaaccc

SEQ ID NO: 1762692 - DNA, 15 bp, Homo sapiens
ggacacagcaaccct

SEQ ID NO: 1762693 - DNA, 15 bp, Homo sapiens
gacacagcaacccta

SEQ ID NO: 1762694 - DNA, 15 bp, Homo sapiens
acacagcaaccctaa

SEQ ID NO: 1762695 - DNA, 15 bp, Homo sapiens
cacagcaaccctaag

SEQ ID NO: 1762696 - DNA, 15 bp, Homo sapiens
acagcaaccctaagc

SEQ ID NO: 1762697 - DNA, 15 bp, Homo sapiens
cagcaaccctaagct

SEQ ID NO: 1762698 - DNA, 15 bp, Homo sapiens
agcaaccctaagctt

SEQ ID NO: 1762699 - DNA, 15 bp, Homo sapiens
gcaaccctaagcttg

SEQ ID NO: 1762700 - DNA, 15 bp, Homo sapiens
caaccctaagcttgg

SEQ ID NO: 1762701 - DNA, 15 bp, Homo sapiens
aaccctaagcttggt

SEQ ID NO: 1762702 - DNA, 15 bp, Homo sapiens
accctaagcttggta

SEQ ID NO: 1762703 - DNA, 15 bp, Homo sapiens
ccctaagcttggtat

SEQ ID NO: 1762704 - DNA, 15 bp, Homo sapiens
cctaagcttggtatg

SEQ ID NO: 1762705 - DNA, 15 bp, Homo sapiens
ctaagcttggtatgc

SEQ ID NO: 1762706 - DNA, 15 bp, Homo sapiens
taagcttggtatgca

SEQ ID NO: 1762707 - DNA, 15 bp, Homo sapiens
aagcttggtatgcag

SEQ ID NO: 1762708 - DNA, 15 bp, Homo sapiens
agcttggtatgcaga

SEQ ID NO: 1762709 - DNA, 15 bp, Homo sapiens
gcttggtatgcagag

SEQ ID NO: 1762710 - DNA, 15 bp, Homo sapiens
cttggtatgcagagt

SEQ ID NO: 1762711 - DNA, 15 bp, Homo sapiens
ttggtatgcagagtt

SEQ ID NO: 1762712 - DNA, 15 bp, Homo sapiens
tggtatgcagagttt

SEQ ID NO: 1762713 - DNA, 15 bp, Homo sapiens
ggtatgcagagttta

SEQ ID NO: 1762714 - DNA, 15 bp, Homo sapiens
gtatgcagagtttag

SEQ ID NO: 1762715 - DNA, 15 bp, Homo sapiens
tatgcagagtttagg

SEQ ID NO: 1762716 - DNA, 15 bp, Homo sapiens
atgcagagtttaggc

SEQ ID NO: 1762717 - DNA, 15 bp, Homo sapiens
tgcagagtttaggct

SEQ ID NO: 1762718 - DNA, 15 bp, Homo sapiens
gcagagtttaggctg

SEQ ID NO: 1762719 - DNA, 15 bp, Homo sapiens
cagagtttaggctga

SEQ ID NO: 1762720 - DNA, 15 bp, Homo sapiens
agagtttaggctgaa

SEQ ID NO: 1762721 - DNA, 15 bp, Homo sapiens
gagtttaggctgaag

SEQ ID NO: 1762722 - DNA, 15 bp, Homo sapiens
agtttaggctgaagc

SEQ ID NO: 1762723 - DNA, 15 bp, Homo sapiens
gtttaggctgaagcc

SEQ ID NO: 1762724 - DNA, 15 bp, Homo sapiens
tttaggctgaagccc

SEQ ID NO: 1762725 - DNA, 15 bp, Homo sapiens
ttaggctgaagcccc

SEQ ID NO: 1762726 - DNA, 15 bp, Homo sapiens
taggctgaagcccca

SEQ ID NO: 1762727 - DNA, 15 bp, Homo sapiens
aggctgaagccccat

SEQ ID NO: 1762728 - DNA, 15 bp, Homo sapiens
ggctgaagccccatg

SEQ ID NO: 1762729 - DNA, 15 bp, Homo sapiens
gctgaagccccatgc

SEQ ID NO: 1762730 - DNA, 15 bp, Homo sapiens
ctgaagccccatgct

SEQ ID NO: 1762731 - DNA, 15 bp, Homo sapiens
tgaagccccatgctg

SEQ ID NO: 1762732 - DNA, 15 bp, Homo sapiens
gaagccccatgctgt

SEQ ID NO: 1762733 - DNA, 15 bp, Homo sapiens
aagccccatgctgtt

SEQ ID NO: 1762734 - DNA, 15 bp, Homo sapiens
agccccatgctgttg

SEQ ID NO: 1762735 - DNA, 15 bp, Homo sapiens
gccccatgctgttgt

SEQ ID NO: 1762736 - DNA, 15 bp, Homo sapiens
ccccatgctgttgtg

SEQ ID NO: 1762737 - DNA, 15 bp, Homo sapiens
cccatgctgttgtgc

SEQ ID NO: 1762738 - DNA, 15 bp, Homo sapiens
ccatgctgttgtgca

SEQ ID NO: 1762739 - DNA, 15 bp, Homo sapiens
catgctgttgtgcag

SEQ ID NO: 1762740 - DNA, 15 bp, Homo sapiens
atgctgttgtgcagt

SEQ ID NO: 1762741 - DNA, 15 bp, Homo sapiens
tgctgttgtgcagtg

SEQ ID NO: 1762742 - DNA, 15 bp, Homo sapiens
gctgttgtgcagtgc

SEQ ID NO: 1762743 - DNA, 15 bp, Homo sapiens
ctgttgtgcagtgca

SEQ ID NO: 1762744 - DNA, 15 bp, Homo sapiens
tgttgtgcagtgcat

SEQ ID NO: 1762745 - DNA, 15 bp, Homo sapiens
gttgtgcagtgcata

SEQ ID NO: 1762746 - DNA, 15 bp, Homo sapiens
ttgtgcagtgcataa

SEQ ID NO: 1762747 - DNA, 15 bp, Homo sapiens
tgtgcagtgcataaa

SEQ ID NO: 1762748 - DNA, 15 bp, Homo sapiens
gtgcagtgcataaac

SEQ ID NO: 1762749 - DNA, 15 bp, Homo sapiens
tgcagtgcataaact

SEQ ID NO: 1762750 - DNA, 15 bp, Homo sapiens
gcagtgcataaactg

SEQ ID NO: 1762751 - DNA, 15 bp, Homo sapiens
cagtgcataaactgt

SEQ ID NO: 1762752 - DNA, 15 bp, Homo sapiens
agtgcataaactgta

SEQ ID NO: 1762753 - DNA, 15 bp, Homo sapiens
gtgcataaactgtac

SEQ ID NO: 1762754 - DNA, 15 bp, Homo sapiens
tgcataaactgtaca

SEQ ID NO: 1762755 - DNA, 15 bp, Homo sapiens
gcataaactgtacag

SEQ ID NO: 1762756 - DNA, 15 bp, Homo sapiens
cataaactgtacaga

SEQ ID NO: 1762757 - DNA, 15 bp, Homo sapiens
ataaactgtacagat

SEQ ID NO: 1762758 - DNA, 15 bp, Homo sapiens
taaactgtacagata

SEQ ID NO: 1762759 - DNA, 15 bp, Homo sapiens
actgtacagatacaa

SEQ ID NO: 1762760 - DNA, 15 bp, Homo sapiens
ctgtacagatacaag

SEQ ID NO: 1762761 - DNA, 15 bp, Homo sapiens
tgtacagatacaagc

SEQ ID NO: 1762762 - DNA, 15 bp, Homo sapiens
gtacagatacaagcc

SEQ ID NO: 1762763 - DNA, 15 bp, Homo sapiens
tacagatacaagccc

SEQ ID NO: 1762764 - DNA, 15 bp, Homo sapiens
acagatacaagcccg

SEQ ID NO: 1762765 - DNA, 15 bp, Homo sapiens
cagatacaagcccgc

SEQ ID NO: 1762766 - DNA, 15 bp, Homo sapiens
agatacaagcccgcg

SEQ ID NO: 1762767 - DNA, 15 bp, Homo sapiens
gatacaagcccgcgc

SEQ ID NO: 1762768 - DNA, 15 bp, Homo sapiens
atacaagcccgcgcc

SEQ ID NO: 1762769 - DNA, 15 bp, Homo sapiens
tacaagcccgcgccc

SEQ ID NO: 1762770 - DNA, 15 bp, Homo sapiens
acaagcccgcgccca

SEQ ID NO: 1762771 - DNA, 15 bp, Homo sapiens
caagcccgcgcccac

SEQ ID NO: 1762772 - DNA, 15 bp, Homo sapiens
aagcccgcgcccacc

SEQ ID NO: 1762773 - DNA, 15 bp, Homo sapiens
agcccgcgcccacct

SEQ ID NO: 1762774 - DNA, 15 bp, Homo sapiens
gcccgcgcccacctt

SEQ ID NO: 1762775 - DNA, 15 bp, Homo sapiens
cccgcgcccaccttc

SEQ ID NO: 1762776 - DNA, 15 bp, Homo sapiens
ccgcgcccaccttca

SEQ ID NO: 1762777 - DNA, 15 bp, Homo sapiens
cgcgcccaccttcaa

SEQ ID NO: 1762778 - DNA, 15 bp, Homo sapiens
gcgcccaccttcaaa

SEQ ID NO: 1762779 - DNA, 15 bp, Homo sapiens
cgcccaccttcaaat

SEQ ID NO: 1762780 - DNA, 15 bp, Homo sapiens
gcccaccttcaaatt

SEQ ID NO: 1762781 - DNA, 15 bp, Homo sapiens
cccaccttcaaattt

SEQ ID NO: 1762782 - DNA, 15 bp, Homo sapiens
ccaccttcaaatttt

SEQ ID NO: 1762783 - DNA, 15 bp, Homo sapiens
caccttcaaattttg

SEQ ID NO: 1762784 - DNA, 15 bp, Homo sapiens
accttcaaattttgt

SEQ ID NO: 1762785 - DNA, 15 bp, Homo sapiens
ccttcaaattttgtg

SEQ ID NO: 1762786 - DNA, 15 bp, Homo sapiens
cttcaaattttgtgt

SEQ ID NO: 1762787 - DNA, 15 bp, Homo sapiens
ttcaaattttgtgta

SEQ ID NO: 1762788 - DNA, 15 bp, Homo sapiens
tcaaattttgtgtac

SEQ ID NO: 1762789 - DNA, 15 bp, Homo sapiens
caaattttgtgtaca

SEQ ID NO: 1762790 - DNA, 15 bp, Homo sapiens
aaattttgtgtacac

SEQ ID NO: 1762791 - DNA, 15 bp, Homo sapiens
aattttgtgtacact

SEQ ID NO: 1762792 - DNA, 15 bp, Homo sapiens
attttgtgtacactt

SEQ ID NO: 1762793 - DNA, 15 bp, Homo sapiens
ttttgtgtacactta

SEQ ID NO: 1762794 - DNA, 15 bp, Homo sapiens
tttgtgtacacttac

SEQ ID NO: 1762795 - DNA, 15 bp, Homo sapiens
ttgtgtacacttaca

SEQ ID NO: 1762796 - DNA, 15 bp, Homo sapiens
tgtgtacacttacag

SEQ ID NO: 1762797 - DNA, 15 bp, Homo sapiens
gtgtacacttacaga

SEQ ID NO: 1762798 - DNA, 15 bp, Homo sapiens
tgtacacttacagac

SEQ ID NO: 1762799 - DNA, 15 bp, Homo sapiens
gtacacttacagaca

SEQ ID NO: 1762800 - DNA, 15 bp, Homo sapiens
tacacttacagacac

SEQ ID NO: 1762801 - DNA, 15 bp, Homo sapiens
acacttacagacacg

SEQ ID NO: 1762802 - DNA, 15 bp, Homo sapiens
cacttacagacacgg

SEQ ID NO: 1762803 - DNA, 15 bp, Homo sapiens
acttacagacacggg

SEQ ID NO: 1762804 - DNA, 15 bp, Homo sapiens
cttacagacacgggg

SEQ ID NO: 1762805 - DNA, 15 bp, Homo sapiens
ttacagacacggggc

SEQ ID NO: 1762806 - DNA, 15 bp, Homo sapiens
tacagacacggggct

SEQ ID NO: 1762807 - DNA, 15 bp, Homo sapiens
acagacacggggcta

SEQ ID NO: 1762808 - DNA, 15 bp, Homo sapiens
cagacacggggctag

SEQ ID NO: 1762809 - DNA, 15 bp, Homo sapiens
agacacggggctagg

SEQ ID NO: 1762810 - DNA, 15 bp, Homo sapiens
gacacggggctaggg

SEQ ID NO: 1762811 - DNA, 15 bp, Homo sapiens
acacggggctagggt

SEQ ID NO: 1762812 - DNA, 15 bp, Homo sapiens
cacggggctagggtt

SEQ ID NO: 1762813 - DNA, 15 bp, Homo sapiens
acggggctagggttt

SEQ ID NO: 1762814 - DNA, 15 bp, Homo sapiens
cggggctagggtttc

SEQ ID NO: 1762815 - DNA, 15 bp, Homo sapiens
ggggctagggtttcc

SEQ ID NO: 1762816 - DNA, 15 bp, Homo sapiens
gggctagggtttcct

SEQ ID NO: 1762817 - DNA, 15 bp, Homo sapiens
ggctagggtttcctg

SEQ ID NO: 1762818 - DNA, 15 bp, Homo sapiens
gctagggtttcctga

SEQ ID NO: 1762819 - DNA, 15 bp, Homo sapiens
ctagggtttcctgat

SEQ ID NO: 1762820 - DNA, 15 bp, Homo sapiens
tagggtttcctgatg

SEQ ID NO: 1762821 - DNA, 15 bp, Homo sapiens
agggtttcctgatgg

SEQ ID NO: 1762822 - DNA, 15 bp, Homo sapiens
gggtttcctgatggt

SEQ ID NO: 1762823 - DNA, 15 bp, Homo sapiens
ggtttcctgatggtg

SEQ ID NO: 1762824 - DNA, 15 bp, Homo sapiens
gtttcctgatggtgc

SEQ ID NO: 1762825 - DNA, 15 bp, Homo sapiens
tttcctgatggtgcc

SEQ ID NO: 1762826 - DNA, 15 bp, Homo sapiens
ttcctgatggtgcca

SEQ ID NO: 1762827 - DNA, 15 bp, Homo sapiens
tcctgatggtgccaa

SEQ ID NO: 1762828 - DNA, 15 bp, Homo sapiens
cctgatggtgccaaa

SEQ ID NO: 1762829 - DNA, 15 bp, Homo sapiens
ctgatggtgccaaag

SEQ ID NO: 1762830 - DNA, 15 bp, Homo sapiens
tgatggtgccaaaga

SEQ ID NO: 1762831 - DNA, 15 bp, Homo sapiens
gatggtgccaaagag

SEQ ID NO: 1762832 - DNA, 15 bp, Homo sapiens
atggtgccaaagaga

SEQ ID NO: 1762833 - DNA, 15 bp, Homo sapiens
tggtgccaaagagag

SEQ ID NO: 1762834 - DNA, 15 bp, Homo sapiens
ggtgccaaagagaga

SEQ ID NO: 1762835 - DNA, 15 bp, Homo sapiens
gtgccaaagagagaa

SEQ ID NO: 1762836 - DNA, 15 bp, Homo sapiens
tgccaaagagagaag

SEQ ID NO: 1762837 - DNA, 15 bp, Homo sapiens
gccaaagagagaagc

SEQ ID NO: 1762838 - DNA, 15 bp, Homo sapiens
ccaaagagagaagca

SEQ ID NO: 1762839 - DNA, 15 bp, Homo sapiens
caaagagagaagcag

SEQ ID NO: 1762840 - DNA, 15 bp, Homo sapiens
aaagagagaagcaga

SEQ ID NO: 1762841 - DNA, 15 bp, Homo sapiens
aagagagaagcagaa

SEQ ID NO: 1762842 - DNA, 15 bp, Homo sapiens
agagagaagcagaac

SEQ ID NO: 1762843 - DNA, 15 bp, Homo sapiens
gagagaagcagaaca

SEQ ID NO: 1762844 - DNA, 15 bp, Homo sapiens
agagaagcagaacag

SEQ ID NO: 1762845 - DNA, 15 bp, Homo sapiens
gagaagcagaacaga

SEQ ID NO: 1762846 - DNA, 15 bp, Homo sapiens
agaagcagaacagaa

SEQ ID NO: 1762847 - DNA, 15 bp, Homo sapiens
gaagcagaacagaaa

SEQ ID NO: 1762848 - DNA, 15 bp, Homo sapiens
aagcagaacagaaat

SEQ ID NO: 1762849 - DNA, 15 bp, Homo sapiens
agcagaacagaaatt

SEQ ID NO: 1762850 - DNA, 15 bp, Homo sapiens
gcagaacagaaattg

SEQ ID NO: 1762851 - DNA, 15 bp, Homo sapiens
cagaacagaaattga

SEQ ID NO: 1762852 - DNA, 15 bp, Homo sapiens
agaacagaaattgaa

SEQ ID NO: 1762853 - DNA, 15 bp, Homo sapiens
gaacagaaattgaag

SEQ ID NO: 1762854 - DNA, 15 bp, Homo sapiens
aacagaaattgaagt

SEQ ID NO: 1762855 - DNA, 15 bp, Homo sapiens
acagaaattgaagta

SEQ ID NO: 1762856 - DNA, 15 bp, Homo sapiens
cagaaattgaagtaa

SEQ ID NO: 1762857 - DNA, 15 bp, Homo sapiens
agaaattgaagtaaa

SEQ ID NO: 1762858 - DNA, 15 bp, Homo sapiens
gaaattgaagtaaac

SEQ ID NO: 1762859 - DNA, 15 bp, Homo sapiens
aaattgaagtaaacc

SEQ ID NO: 1762860 - DNA, 15 bp, Homo sapiens
aattgaagtaaaccg

SEQ ID NO: 1762861 - DNA, 15 bp, Homo sapiens
attgaagtaaaccga

SEQ ID NO: 1762862 - DNA, 15 bp, Homo sapiens
ttgaagtaaaccgag

SEQ ID NO: 1762863 - DNA, 15 bp, Homo sapiens
tgaagtaaaccgaga

SEQ ID NO: 1762864 - DNA, 15 bp, Homo sapiens
gaagtaaaccgagac

SEQ ID NO: 1762865 - DNA, 15 bp, Homo sapiens
aagtaaaccgagact

SEQ ID NO: 1762866 - DNA, 15 bp, Homo sapiens
agtaaaccgagactt

SEQ ID NO: 1762867 - DNA, 15 bp, Homo sapiens
gtaaaccgagacttc

SEQ ID NO: 1762868 - DNA, 15 bp, Homo sapiens
taaaccgagacttct

SEQ ID NO: 1762869 - DNA, 15 bp, Homo sapiens
aaaccgagacttctg

SEQ ID NO: 1762870 - DNA, 15 bp, Homo sapiens
aaccgagacttctgt

SEQ ID NO: 1762871 - DNA, 15 bp, Homo sapiens
accgagacttctgta

SEQ ID NO: 1762872 - DNA, 15 bp, Homo sapiens
ccgagacttctgtaa

SEQ ID NO: 1762873 - DNA, 15 bp, Homo sapiens
cgagacttctgtaac

SEQ ID NO: 1762874 - DNA, 15 bp, Homo sapiens
gagacttctgtaaca

SEQ ID NO: 1762875 - DNA, 15 bp, Homo sapiens
agacttctgtaacag

SEQ ID NO: 1762876 - DNA, 15 bp, Homo sapiens
gacttctgtaacaga

SEQ ID NO: 1762877 - DNA, 15 bp, Homo sapiens
acttctgtaacagac

SEQ ID NO: 1762878 - DNA, 15 bp, Homo sapiens
cttctgtaacagacc

SEQ ID NO: 1762879 - DNA, 15 bp, Homo sapiens
ttctgtaacagacct

SEQ ID NO: 1762880 - DNA, 15 bp, Homo sapiens
tctgtaacagaccta

SEQ ID NO: 1762881 - DNA, 15 bp, Homo sapiens
ctgtaacagacctaa

SEQ ID NO: 1762882 - DNA, 15 bp, Homo sapiens
tgtaacagacctaaa

SEQ ID NO: 1762883 - DNA, 15 bp, Homo sapiens
gtaacagacctaaag

SEQ ID NO: 1762884 - DNA, 15 bp, Homo sapiens
taacagacctaaaga

SEQ ID NO: 1762885 - DNA, 15 bp, Homo sapiens
aacagacctaaagaa

SEQ ID NO: 1762886 - DNA, 15 bp, Homo sapiens
acagacctaaagaaa

SEQ ID NO: 1762887 - DNA, 15 bp, Homo sapiens
cagacctaaagaaaa

SEQ ID NO: 1762888 - DNA, 15 bp, Homo sapiens
agacctaaagaaaaa

SEQ ID NO: 1762889 - DNA, 15 bp, Homo sapiens
gacctaaagaaaaag

SEQ ID NO: 1762890 - DNA, 15 bp, Homo sapiens
acctaaagaaaaaga

SEQ ID NO: 1762891 - DNA, 15 bp, Homo sapiens
cctaaagaaaaagaa

SEQ ID NO: 1762892 - DNA, 15 bp, Homo sapiens
ctaaagaaaaagaaa

SEQ ID NO: 1762893 - DNA, 15 bp, Homo sapiens
taaagaaaaagaaat

SEQ ID NO: 1762894 - DNA, 15 bp, Homo sapiens
aaagaaaaagaaata

SEQ ID NO: 1762895 - DNA, 15 bp, Homo sapiens
aagaaaaagaaatag

SEQ ID NO: 1762896 - DNA, 15 bp, Homo sapiens
agaaaaagaaatagg

SEQ ID NO: 1762897 - DNA, 15 bp, Homo sapiens
gaaaaagaaatagga

SEQ ID NO: 1762898 - DNA, 15 bp, Homo sapiens
aaaaagaaataggaa

SEQ ID NO: 1762899 - DNA, 15 bp, Homo sapiens
aaaagaaataggaaa

SEQ ID NO: 1762900 - DNA, 15 bp, Homo sapiens
aaagaaataggaaag

SEQ ID NO: 1762901 - DNA, 15 bp, Homo sapiens
aagaaataggaaagg

SEQ ID NO: 1762902 - DNA, 15 bp, Homo sapiens
agaaataggaaaggc

SEQ ID NO: 1762903 - DNA, 15 bp, Homo sapiens
gaaataggaaaggca

SEQ ID NO: 1762904 - DNA, 15 bp, Homo sapiens
aaataggaaaggcag

SEQ ID NO: 1762905 - DNA, 15 bp, Homo sapiens
aataggaaaggcagt

SEQ ID NO: 1762906 - DNA, 15 bp, Homo sapiens
ataggaaaggcagtt

SEQ ID NO: 1762907 - DNA, 15 bp, Homo sapiens
taggaaaggcagttc

SEQ ID NO: 1762908 - DNA, 15 bp, Homo sapiens
aggaaaggcagttct

SEQ ID NO: 1762909 - DNA, 15 bp, Homo sapiens
ggaaaggcagttctt

SEQ ID NO: 1762910 - DNA, 15 bp, Homo sapiens
gaaaggcagttcttc

SEQ ID NO: 1762911 - DNA, 15 bp, Homo sapiens
aaggcagttcttcct

SEQ ID NO: 1762912 - DNA, 15 bp, Homo sapiens
aggcagttcttccta

SEQ ID NO: 1762913 - DNA, 15 bp, Homo sapiens
ggcagttcttcctag

SEQ ID NO: 1762914 - DNA, 15 bp, Homo sapiens
gcagttcttcctagg

SEQ ID NO: 1762915 - DNA, 15 bp, Homo sapiens
cagttcttcctagga

SEQ ID NO: 1762916 - DNA, 15 bp, Homo sapiens
agttcttcctaggag

SEQ ID NO: 1762917 - DNA, 15 bp, Homo sapiens
gttcttcctaggagg

SEQ ID NO: 1762918 - DNA, 15 bp, Homo sapiens
ttcttcctaggagga

SEQ ID NO: 1762919 - DNA, 15 bp, Homo sapiens
tcttcctaggaggaa

SEQ ID NO: 1762920 - DNA, 15 bp, Homo sapiens
cttcctaggaggaaa

SEQ ID NO: 1762921 - DNA, 15 bp, Homo sapiens
ttcctaggaggaaaa

SEQ ID NO: 1762922 - DNA, 15 bp, Homo sapiens
tcctaggaggaaaat

SEQ ID NO: 1762923 - DNA, 15 bp, Homo sapiens
cctaggaggaaaata

SEQ ID NO: 1762924 - DNA, 15 bp, Homo sapiens
ctaggaggaaaatac

SEQ ID NO: 1762925 - DNA, 15 bp, Homo sapiens
taggaggaaaataca

SEQ ID NO: 1762926 - DNA, 15 bp, Homo sapiens
aggaggaaaatacaa

SEQ ID NO: 1762927 - DNA, 15 bp, Homo sapiens
ggaggaaaatacaac

SEQ ID NO: 1762928 - DNA, 15 bp, Homo sapiens
gaggaaaatacaaca

SEQ ID NO: 1762929 - DNA, 15 bp, Homo sapiens
aggaaaatacaacaa

SEQ ID NO: 1762930 - DNA, 15 bp, Homo sapiens
ggaaaatacaacaaa

SEQ ID NO: 1762931 - DNA, 15 bp, Homo sapiens
gaaaatacaacaaag

SEQ ID NO: 1762932 - DNA, 15 bp, Homo sapiens
aaaatacaacaaagt

SEQ ID NO: 1762933 - DNA, 15 bp, Homo sapiens
aaatacaacaaagta

SEQ ID NO: 1762934 - DNA, 15 bp, Homo sapiens
aatacaacaaagtat

SEQ ID NO: 1762935 - DNA, 15 bp, Homo sapiens
atacaacaaagtatt

SEQ ID NO: 1762936 - DNA, 15 bp, Homo sapiens
tacaacaaagtattg

SEQ ID NO: 1762937 - DNA, 15 bp, Homo sapiens
acaacaaagtattgt

SEQ ID NO: 1762938 - DNA, 15 bp, Homo sapiens
caacaaagtattgta

SEQ ID NO: 1762939 - DNA, 15 bp, Homo sapiens
aacaaagtattgtac

SEQ ID NO: 1762940 - DNA, 15 bp, Homo sapiens
acaaagtattgtact

SEQ ID NO: 1762941 - DNA, 15 bp, Homo sapiens
caaagtattgtactg

SEQ ID NO: 1762942 - DNA, 15 bp, Homo sapiens
aaagtattgtactgg

SEQ ID NO: 1762943 - DNA, 15 bp, Homo sapiens
aagtattgtactggt

SEQ ID NO: 1762944 - DNA, 15 bp, Homo sapiens
agtattgtactggta

SEQ ID NO: 1762945 - DNA, 15 bp, Homo sapiens
gtattgtactggtag

SEQ ID NO: 1762946 - DNA, 15 bp, Homo sapiens
tattgtactggtagg

SEQ ID NO: 1762947 - DNA, 15 bp, Homo sapiens
attgtactggtaggt

SEQ ID NO: 1762948 - DNA, 15 bp, Homo sapiens
ttgtactggtaggtt

SEQ ID NO: 1762949 - DNA, 15 bp, Homo sapiens
tgtactggtaggtta

SEQ ID NO: 1762950 - DNA, 15 bp, Homo sapiens
gtactggtaggttat

SEQ ID NO: 1762951 - DNA, 15 bp, Homo sapiens
tactggtaggttatg

SEQ ID NO: 1762952 - DNA, 15 bp, Homo sapiens
actggtaggttatgt

SEQ ID NO: 1762953 - DNA, 15 bp, Homo sapiens
ctggtaggttatgta

SEQ ID NO: 1762954 - DNA, 15 bp, Homo sapiens
tggtaggttatgtag

SEQ ID NO: 1762955 - DNA, 15 bp, Homo sapiens
ggtaggttatgtagt

SEQ ID NO: 1762956 - DNA, 15 bp, Homo sapiens
gtaggttatgtagtt

SEQ ID NO: 1762957 - DNA, 15 bp, Homo sapiens
taggttatgtagttc

SEQ ID NO: 1762958 - DNA, 15 bp, Homo sapiens
aggttatgtagttcc

SEQ ID NO: 1762959 - DNA, 15 bp, Homo sapiens
ggttatgtagttcct

SEQ ID NO: 1762960 - DNA, 15 bp, Homo sapiens
gttatgtagttcctt

SEQ ID NO: 1762961 - DNA, 15 bp, Homo sapiens
ttatgtagttcctta

SEQ ID NO: 1762962 - DNA, 15 bp, Homo sapiens
tatgtagttccttac

SEQ ID NO: 1762963 - DNA, 15 bp, Homo sapiens
atgtagttccttact

SEQ ID NO: 1762964 - DNA, 15 bp, Homo sapiens
tgtagttccttactt

SEQ ID NO: 1762965 - DNA, 15 bp, Homo sapiens
gtagttccttacttt

SEQ ID NO: 1762966 - DNA, 15 bp, Homo sapiens
tagttccttactttg

SEQ ID NO: 1762967 - DNA, 15 bp, Homo sapiens
agttccttactttgg

SEQ ID NO: 1762968 - DNA, 15 bp, Homo sapiens
gttccttactttggt

SEQ ID NO: 1762969 - DNA, 15 bp, Homo sapiens
ttccttactttggta

SEQ ID NO: 1762970 - DNA, 15 bp, Homo sapiens
tccttactttggtat

SEQ ID NO: 1762971 - DNA, 15 bp, Homo sapiens
ccttactttggtatt

SEQ ID NO: 1762972 - DNA, 15 bp, Homo sapiens
cttactttggtattt

SEQ ID NO: 1762973 - DNA, 15 bp, Homo sapiens
ttactttggtatttt

SEQ ID NO: 1762974 - DNA, 15 bp, Homo sapiens
tactttggtattttc

SEQ ID NO: 1762975 - DNA, 15 bp, Homo sapiens
actttggtattttca

SEQ ID NO: 1762976 - DNA, 15 bp, Homo sapiens
ctttggtattttcag

SEQ ID NO: 1762977 - DNA, 15 bp, Homo sapiens
tttggtattttcagg

SEQ ID NO: 1762978 - DNA, 15 bp, Homo sapiens
ttggtattttcaggt

SEQ ID NO: 1762979 - DNA, 15 bp, Homo sapiens
tggtattttcaggta

SEQ ID NO: 1762980 - DNA, 15 bp, Homo sapiens
ggtattttcaggtac

SEQ ID NO: 1762981 - DNA, 15 bp, Homo sapiens
gtattttcaggtacc

SEQ ID NO: 1762982 - DNA, 15 bp, Homo sapiens
tattttcaggtacct

SEQ ID NO: 1762983 - DNA, 15 bp, Homo sapiens
attttcaggtacctc

SEQ ID NO: 1762984 - DNA, 15 bp, Homo sapiens
ttttcaggtacctca

SEQ ID NO: 1762985 - DNA, 15 bp, Homo sapiens
tttcaggtacctcag

SEQ ID NO: 1762986 - DNA, 15 bp, Homo sapiens
ttcaggtacctcagt

SEQ ID NO: 1762987 - DNA, 15 bp, Homo sapiens
tcaggtacctcagtt

SEQ ID NO: 1762988 - DNA, 15 bp, Homo sapiens
caggtacctcagttc

SEQ ID NO: 1762989 - DNA, 15 bp, Homo sapiens
aggtacctcagttca

SEQ ID NO: 1762990 - DNA, 15 bp, Homo sapiens
ggtacctcagttcaa

SEQ ID NO: 1762991 - DNA, 15 bp, Homo sapiens
gtacctcagttcaat

SEQ ID NO: 1762992 - DNA, 15 bp, Homo sapiens
tacctcagttcaata

SEQ ID NO: 1762993 - DNA, 15 bp, Homo sapiens
acctcagttcaatat

SEQ ID NO: 1762994 - DNA, 15 bp, Homo sapiens
cctcagttcaatatt

SEQ ID NO: 1762995 - DNA, 15 bp, Homo sapiens
ctcagttcaatattt

SEQ ID NO: 1762996 - DNA, 15 bp, Homo sapiens
tcagttcaatattta

SEQ ID NO: 1762997 - DNA, 15 bp, Homo sapiens
cagttcaatatttat

SEQ ID NO: 1762998 - DNA, 15 bp, Homo sapiens
agttcaatatttatt

SEQ ID NO: 1762999 - DNA, 15 bp, Homo sapiens
gttcaatatttattc

SEQ ID NO: 1763000 - DNA, 15 bp, Homo sapiens
ttcaatatttattca

SEQ ID NO: 1763001 - DNA, 15 bp, Homo sapiens
tcaatatttattcat

SEQ ID NO: 1763002 - DNA, 15 bp, Homo sapiens
caatatttattcatt

SEQ ID NO: 1763003 - DNA, 15 bp, Homo sapiens
aatatttattcatta

SEQ ID NO: 1763004 - DNA, 15 bp, Homo sapiens
atatttattcattac

SEQ ID NO: 1763005 - DNA, 15 bp, Homo sapiens
tatttattcattacc

SEQ ID NO: 1763006 - DNA, 15 bp, Homo sapiens
atttattcattacca

SEQ ID NO: 1763007 - DNA, 15 bp, Homo sapiens
tttattcattaccat

SEQ ID NO: 1763008 - DNA, 15 bp, Homo sapiens
ttattcattaccata

SEQ ID NO: 1763009 - DNA, 15 bp, Homo sapiens
tattcattaccataa

SEQ ID NO: 1763010 - DNA, 15 bp, Homo sapiens
attcattaccataag

SEQ ID NO: 1763011 - DNA, 15 bp, Homo sapiens
ttcattaccataaga

SEQ ID NO: 1763012 - DNA, 15 bp, Homo sapiens
tcattaccataagaa

SEQ ID NO: 1763013 - DNA, 15 bp, Homo sapiens
cattaccataagaaa

SEQ ID NO: 1763014 - DNA, 15 bp, Homo sapiens
attaccataagaaag

SEQ ID NO: 1763015 - DNA, 15 bp, Homo sapiens
ttaccataagaaaga

SEQ ID NO: 1763016 - DNA, 15 bp, Homo sapiens
taccataagaaagac

SEQ ID NO: 1763017 - DNA, 15 bp, Homo sapiens
accataagaaagacc

SEQ ID NO: 1763018 - DNA, 15 bp, Homo sapiens
ccataagaaagacca

SEQ ID NO: 1763019 - DNA, 15 bp, Homo sapiens
cataagaaagaccag

SEQ ID NO: 1763020 - DNA, 15 bp, Homo sapiens
ataagaaagaccaga

SEQ ID NO: 1763021 - DNA, 15 bp, Homo sapiens
taagaaagaccagag

SEQ ID NO: 1763022 - DNA, 15 bp, Homo sapiens
aagaaagaccagagg

SEQ ID NO: 1763023 - DNA, 15 bp, Homo sapiens
agaaagaccagagga

SEQ ID NO: 1763024 - DNA, 15 bp, Homo sapiens
gaaagaccagaggaa

SEQ ID NO: 1763025 - DNA, 15 bp, Homo sapiens
aaagaccagaggaaa

SEQ ID NO: 1763026 - DNA, 15 bp, Homo sapiens
agaccagaggaaatg

SEQ ID NO: 1763027 - DNA, 15 bp, Homo sapiens
gaccagaggaaatgg

SEQ ID NO: 1763028 - DNA, 15 bp, Homo sapiens
accagaggaaatgga

SEQ ID NO: 1763029 - DNA, 15 bp, Homo sapiens
ccagaggaaatggag

SEQ ID NO: 1763030 - DNA, 15 bp, Homo sapiens
cagaggaaatggagg

SEQ ID NO: 1763031 - DNA, 15 bp, Homo sapiens
agaggaaatggagga

SEQ ID NO: 1763032 - DNA, 15 bp, Homo sapiens
gaggaaatggaggag

SEQ ID NO: 1763033 - DNA, 15 bp, Homo sapiens
aggaaatggaggaga

SEQ ID NO: 1763034 - DNA, 15 bp, Homo sapiens
ggaaatggaggagag

SEQ ID NO: 1763035 - DNA, 15 bp, Homo sapiens
gaaatggaggagaga

SEQ ID NO: 1763036 - DNA, 15 bp, Homo sapiens
aaatggaggagagaa

SEQ ID NO: 1763037 - DNA, 15 bp, Homo sapiens
aatggaggagagaaa

SEQ ID NO: 1763038 - DNA, 15 bp, Homo sapiens
atggaggagagaaaa

SEQ ID NO: 1763039 - DNA, 15 bp, Homo sapiens
tggaggagagaaaat

SEQ ID NO: 1763040 - DNA, 15 bp, Homo sapiens
ggaggagagaaaata

SEQ ID NO: 1763041 - DNA, 15 bp, Homo sapiens
gaggagagaaaataa

SEQ ID NO: 1763042 - DNA, 15 bp, Homo sapiens
aggagagaaaataat

SEQ ID NO: 1763043 - DNA, 15 bp, Homo sapiens
ggagagaaaataata

SEQ ID NO: 1763044 - DNA, 15 bp, Homo sapiens
gagagaaaataataa

SEQ ID NO: 1763045 - DNA, 15 bp, Homo sapiens
agagaaaataataaa

SEQ ID NO: 1763046 - DNA, 15 bp, Homo sapiens
gagaaaataataaaa

SEQ ID NO: 1763047 - DNA, 15 bp, Homo sapiens
aaaataataaaaaag

SEQ ID NO: 1763048 - DNA, 15 bp, Homo sapiens
aaataataaaaaaga

SEQ ID NO: 1763049 - DNA, 15 bp, Homo sapiens
aataataaaaaagaa

SEQ ID NO: 1763050 - DNA, 15 bp, Homo sapiens
ataataaaaaagaac

SEQ ID NO: 1763051 - DNA, 15 bp, Homo sapiens
taataaaaaagaaca

SEQ ID NO: 1763052 - DNA, 15 bp, Homo sapiens
aataaaaaagaacag

SEQ ID NO: 1763053 - DNA, 15 bp, Homo sapiens
ataaaaaagaacaga

SEQ ID NO: 1763054 - DNA, 15 bp, Homo sapiens
taaaaaagaacagaa

SEQ ID NO: 1763055 - DNA, 15 bp, Homo sapiens
aaaaagaacagaaaa

SEQ ID NO: 1763056 - DNA, 15 bp, Homo sapiens
aaaagaacagaaaaa

SEQ ID NO: 1763057 - DNA, 15 bp, Homo sapiens
aaagaacagaaaaaa

SEQ ID NO: 1763058 - DNA, 15 bp, Homo sapiens
aagaacagaaaaaaa

SEQ ID NO: 1763059 - DNA, 15 bp, Homo sapiens
agaacagaaaaaaaa

SEQ ID NO: 1763060 - DNA, 15 bp, Homo sapiens
gaacagaaaaaaaaa

SEQ ID NO: 1763061 - DNA, 15 bp, Homo sapiens
aacagaaaaaaaaaa

SEQ ID NO: 1763062 - DNA, 15 bp, Homo sapiens
acagaaaaaaaaaat

SEQ ID NO: 1763063 - DNA, 15 bp, Homo sapiens
aaaaaaaaattccaa

SEQ ID NO: 1763064 - DNA, 15 bp, Homo sapiens
aaaaaaaattccaaa

SEQ ID NO: 1763065 - DNA, 15 bp, Homo sapiens
aaaaaaattccaaaa

SEQ ID NO: 1763066 - DNA, 15 bp, Homo sapiens
aaaaaattccaaaac

SEQ ID NO: 1763067 - DNA, 15 bp, Homo sapiens
aaaaattccaaaact

SEQ ID NO: 1763068 - DNA, 15 bp, Homo sapiens
aaaattccaaaacta

SEQ ID NO: 1763069 - DNA, 15 bp, Homo sapiens
aaattccaaaactaa

SEQ ID NO: 1763070 - DNA, 15 bp, Homo sapiens
aattccaaaactaat

SEQ ID NO: 1763071 - DNA, 15 bp, Homo sapiens
attccaaaactaatg

SEQ ID NO: 1763072 - DNA, 15 bp, Homo sapiens
ttccaaaactaatga

SEQ ID NO: 1763073 - DNA, 15 bp, Homo sapiens
tccaaaactaatgaa

SEQ ID NO: 1763074 - DNA, 15 bp, Homo sapiens
ccaaaactaatgaaa

SEQ ID NO: 1763075 - DNA, 15 bp, Homo sapiens
caaaactaatgaaaa

SEQ ID NO: 1763076 - DNA, 15 bp, Homo sapiens
aaaactaatgaaaac

SEQ ID NO: 1763077 - DNA, 15 bp, Homo sapiens
aaactaatgaaaacc

SEQ ID NO: 1763078 - DNA, 15 bp, Homo sapiens
aactaatgaaaacca

SEQ ID NO: 1763079 - DNA, 15 bp, Homo sapiens
actaatgaaaaccag

SEQ ID NO: 1763080 - DNA, 15 bp, Homo sapiens
ctaatgaaaaccagg

SEQ ID NO: 1763081 - DNA, 15 bp, Homo sapiens
taatgaaaaccaggg

SEQ ID NO: 1763082 - DNA, 15 bp, Homo sapiens
aatgaaaaccagggg

SEQ ID NO: 1763083 - DNA, 15 bp, Homo sapiens
atgaaaaccaggggg

SEQ ID NO: 1763084 - DNA, 15 bp, Homo sapiens
tgaaaaccagggggc

SEQ ID NO: 1763085 - DNA, 15 bp, Homo sapiens
gaaaaccagggggct

SEQ ID NO: 1763086 - DNA, 15 bp, Homo sapiens
aaaaccagggggctt

SEQ ID NO: 1763087 - DNA, 15 bp, Homo sapiens
aaaccagggggcttc

SEQ ID NO: 1763088 - DNA, 15 bp, Homo sapiens
aaccagggggcttca

SEQ ID NO: 1763089 - DNA, 15 bp, Homo sapiens
accagggggcttcag

SEQ ID NO: 1763090 - DNA, 15 bp, Homo sapiens
ccagggggcttcaga

SEQ ID NO: 1763091 - DNA, 15 bp, Homo sapiens
cagggggcttcagat

SEQ ID NO: 1763092 - DNA, 15 bp, Homo sapiens
agggggcttcagatg

SEQ ID NO: 1763093 - DNA, 15 bp, Homo sapiens
gggggcttcagatgg

SEQ ID NO: 1763094 - DNA, 15 bp, Homo sapiens
ggggcttcagatgga

SEQ ID NO: 1763095 - DNA, 15 bp, Homo sapiens
gggcttcagatggaa

SEQ ID NO: 1763096 - DNA, 15 bp, Homo sapiens
ggcttcagatggaaa

SEQ ID NO: 1763097 - DNA, 15 bp, Homo sapiens
gcttcagatggaaag

SEQ ID NO: 1763098 - DNA, 15 bp, Homo sapiens
cttcagatggaaagg

SEQ ID NO: 1763099 - DNA, 15 bp, Homo sapiens
ttcagatggaaaggg

SEQ ID NO: 1763100 - DNA, 15 bp, Homo sapiens
tcagatggaaagggc

SEQ ID NO: 1763101 - DNA, 15 bp, Homo sapiens
cagatggaaagggcc

SEQ ID NO: 1763102 - DNA, 15 bp, Homo sapiens
agatggaaagggccc

SEQ ID NO: 1763103 - DNA, 15 bp, Homo sapiens
gatggaaagggccca

SEQ ID NO: 1763104 - DNA, 15 bp, Homo sapiens
atggaaagggcccat

SEQ ID NO: 1763105 - DNA, 15 bp, Homo sapiens
ggaaagggcccatag

SEQ ID NO: 1763106 - DNA, 15 bp, Homo sapiens
gaaagggcccatagt

SEQ ID NO: 1763107 - DNA, 15 bp, Homo sapiens
aaagggcccatagtg

SEQ ID NO: 1763108 - DNA, 15 bp, Homo sapiens
aagggcccatagtgc

SEQ ID NO: 1763109 - DNA, 15 bp, Homo sapiens
agggcccatagtgcc

SEQ ID NO: 1763110 - DNA, 15 bp, Homo sapiens
gggcccatagtgcca

SEQ ID NO: 1763111 - DNA, 15 bp, Homo sapiens
ggcccatagtgccaa

SEQ ID NO: 1763112 - DNA, 15 bp, Homo sapiens
gcccatagtgccaag

SEQ ID NO: 1763113 - DNA, 15 bp, Homo sapiens
cccatagtgccaagc

SEQ ID NO: 1763114 - DNA, 15 bp, Homo sapiens
ccatagtgccaagca

SEQ ID NO: 1763115 - DNA, 15 bp, Homo sapiens
catagtgccaagcat

SEQ ID NO: 1763116 - DNA, 15 bp, Homo sapiens
atagtgccaagcatg

SEQ ID NO: 1763117 - DNA, 15 bp, Homo sapiens
tagtgccaagcatga

SEQ ID NO: 1763118 - DNA, 15 bp, Homo sapiens
agtgccaagcatgat

SEQ ID NO: 1763119 - DNA, 15 bp, Homo sapiens
gtgccaagcatgatg

SEQ ID NO: 1763120 - DNA, 15 bp, Homo sapiens
tgccaagcatgatga

SEQ ID NO: 1763121 - DNA, 15 bp, Homo sapiens
gccaagcatgatgaa

SEQ ID NO: 1763122 - DNA, 15 bp, Homo sapiens
ccaagcatgatgaat

SEQ ID NO: 1763123 - DNA, 15 bp, Homo sapiens
caagcatgatgaatg

SEQ ID NO: 1763124 - DNA, 15 bp, Homo sapiens
aagcatgatgaatga

SEQ ID NO: 1763125 - DNA, 15 bp, Homo sapiens
agcatgatgaatgaa

SEQ ID NO: 1763126 - DNA, 15 bp, Homo sapiens
gcatgatgaatgaat

SEQ ID NO: 1763127 - DNA, 15 bp, Homo sapiens
catgatgaatgaatg

SEQ ID NO: 1763128 - DNA, 15 bp, Homo sapiens
atgatgaatgaatgt

SEQ ID NO: 1763129 - DNA, 15 bp, Homo sapiens
tgatgaatgaatgtg

SEQ ID NO: 1763130 - DNA, 15 bp, Homo sapiens
gatgaatgaatgtgg

SEQ ID NO: 1763131 - DNA, 15 bp, Homo sapiens
atgaatgaatgtgga

SEQ ID NO: 1763132 - DNA, 15 bp, Homo sapiens
tgaatgaatgtggat

SEQ ID NO: 1763133 - DNA, 15 bp, Homo sapiens
gaatgaatgtggata

SEQ ID NO: 1763134 - DNA, 15 bp, Homo sapiens
aatgaatgtggatac

SEQ ID NO: 1763135 - DNA, 15 bp, Homo sapiens
atgaatgtggatact

SEQ ID NO: 1763136 - DNA, 15 bp, Homo sapiens
tgaatgtggatactt

SEQ ID NO: 1763137 - DNA, 15 bp, Homo sapiens
gaatgtggatacttt

SEQ ID NO: 1763138 - DNA, 15 bp, Homo sapiens
aatgtggatactttt

SEQ ID NO: 1763139 - DNA, 15 bp, Homo sapiens
atgtggatacttttt

SEQ ID NO: 1763140 - DNA, 15 bp, Homo sapiens
tgtggatactttttg

SEQ ID NO: 1763141 - DNA, 15 bp, Homo sapiens
gtggatactttttgt

SEQ ID NO: 1763142 - DNA, 15 bp, Homo sapiens
tggatactttttgtt

SEQ ID NO: 1763143 - DNA, 15 bp, Homo sapiens
ggatactttttgttt

SEQ ID NO: 1763144 - DNA, 15 bp, Homo sapiens
gatactttttgtttt

SEQ ID NO: 1763145 - DNA, 15 bp, Homo sapiens
atactttttgttttt

SEQ ID NO: 1763146 - DNA, 15 bp, Homo sapiens
tttgtttttttttaa

SEQ ID NO: 1763147 - DNA, 15 bp, Homo sapiens
ttgtttttttttaat

SEQ ID NO: 1763148 - DNA, 15 bp, Homo sapiens
tgtttttttttaatg

SEQ ID NO: 1763149 - DNA, 15 bp, Homo sapiens
gtttttttttaatga

SEQ ID NO: 1763150 - DNA, 15 bp, Homo sapiens
tttttttttaatgac

SEQ ID NO: 1763151 - DNA, 15 bp, Homo sapiens
ttttttttaatgaca

SEQ ID NO: 1763152 - DNA, 15 bp, Homo sapiens
tttttttaatgacag

SEQ ID NO: 1763153 - DNA, 15 bp, Homo sapiens
ttttttaatgacagt

SEQ ID NO: 1763154 - DNA, 15 bp, Homo sapiens
tttttaatgacagtc

SEQ ID NO: 1763155 - DNA, 15 bp, Homo sapiens
ttttaatgacagtct

SEQ ID NO: 1763156 - DNA, 15 bp, Homo sapiens
tttaatgacagtctc

SEQ ID NO: 1763157 - DNA, 15 bp, Homo sapiens
ttaatgacagtctcg

SEQ ID NO: 1763158 - DNA, 15 bp, Homo sapiens
taatgacagtctcgc

SEQ ID NO: 1763159 - DNA, 15 bp, Homo sapiens
aatgacagtctcgct

SEQ ID NO: 1763160 - DNA, 15 bp, Homo sapiens
atgacagtctcgctc

SEQ ID NO: 1763161 - DNA, 15 bp, Homo sapiens
tgacagtctcgctct

SEQ ID NO: 1763162 - DNA, 15 bp, Homo sapiens
aatggtgtgatctcc

SEQ ID NO: 1763163 - DNA, 15 bp, Homo sapiens
atggtgtgatctccg

SEQ ID NO: 1763164 - DNA, 15 bp, Homo sapiens
tggtgtgatctccgc

SEQ ID NO: 1763165 - DNA, 15 bp, Homo sapiens
ggtgtgatctccgct

SEQ ID NO: 1763166 - DNA, 15 bp, Homo sapiens
gtgtgatctccgctc

SEQ ID NO: 1763167 - DNA, 15 bp, Homo sapiens
tgtgatctccgctca

SEQ ID NO: 1763168 - DNA, 15 bp, Homo sapiens
gtgatctccgctcac

SEQ ID NO: 1763169 - DNA, 15 bp, Homo sapiens
tgatctccgctcact

SEQ ID NO: 1763170 - DNA, 15 bp, Homo sapiens
cgctcactgcaaccg

SEQ ID NO: 1763171 - DNA, 15 bp, Homo sapiens
gctcactgcaaccgc

SEQ ID NO: 1763172 - DNA, 15 bp, Homo sapiens
ctcactgcaaccgct

SEQ ID NO: 1763173 - DNA, 15 bp, Homo sapiens
tcactgcaaccgctg

SEQ ID NO: 1763174 - DNA, 15 bp, Homo sapiens
cactgcaaccgctgc

SEQ ID NO: 1763175 - DNA, 15 bp, Homo sapiens
actgcaaccgctgcc

SEQ ID NO: 1763176 - DNA, 15 bp, Homo sapiens
ctgcaaccgctgcct

SEQ ID NO: 1763177 - DNA, 15 bp, Homo sapiens
tgcaaccgctgcctc

SEQ ID NO: 1763178 - DNA, 15 bp, Homo sapiens
gcaaccgctgcctcc

SEQ ID NO: 1763179 - DNA, 15 bp, Homo sapiens
caaccgctgcctcct

SEQ ID NO: 1763180 - DNA, 15 bp, Homo sapiens
aaccgctgcctccta

SEQ ID NO: 1763181 - DNA, 15 bp, Homo sapiens
accgctgcctcctag

SEQ ID NO: 1763182 - DNA, 15 bp, Homo sapiens
ccgctgcctcctagg

SEQ ID NO: 1763183 - DNA, 15 bp, Homo sapiens
cgctgcctcctaggt

SEQ ID NO: 1763184 - DNA, 15 bp, Homo sapiens
gctgcctcctaggtt

SEQ ID NO: 1763185 - DNA, 15 bp, Homo sapiens
cctcctaggttcaaa

SEQ ID NO: 1763186 - DNA, 15 bp, Homo sapiens
ctcctaggttcaaac

SEQ ID NO: 1763187 - DNA, 15 bp, Homo sapiens
tcctaggttcaaacg

SEQ ID NO: 1763188 - DNA, 15 bp, Homo sapiens
cctaggttcaaacga

SEQ ID NO: 1763189 - DNA, 15 bp, Homo sapiens
ctaggttcaaacgat

SEQ ID NO: 1763190 - DNA, 15 bp, Homo sapiens
taggttcaaacgatt

SEQ ID NO: 1763191 - DNA, 15 bp, Homo sapiens
aggttcaaacgattc

SEQ ID NO: 1763192 - DNA, 15 bp, Homo sapiens
ggttcaaacgattct

SEQ ID NO: 1763193 - DNA, 15 bp, Homo sapiens
gttcaaacgattctc

SEQ ID NO: 1763194 - DNA, 15 bp, Homo sapiens
ttcaaacgattctcc

SEQ ID NO: 1763195 - DNA, 15 bp, Homo sapiens
tcaaacgattctcct

SEQ ID NO: 1763196 - DNA, 15 bp, Homo sapiens
caaacgattctcctg

SEQ ID NO: 1763197 - DNA, 15 bp, Homo sapiens
ctgccttagcctcct

SEQ ID NO: 1763198 - DNA, 15 bp, Homo sapiens
ggattacaggcacga

SEQ ID NO: 1763199 - DNA, 15 bp, Homo sapiens
gattacaggcacgag

SEQ ID NO: 1763200 - DNA, 15 bp, Homo sapiens
attacaggcacgaga

SEQ ID NO: 1763201 - DNA, 15 bp, Homo sapiens
ttacaggcacgagac

SEQ ID NO: 1763202 - DNA, 15 bp, Homo sapiens
tacaggcacgagaca

SEQ ID NO: 1763203 - DNA, 15 bp, Homo sapiens
acaggcacgagacaa

SEQ ID NO: 1763204 - DNA, 15 bp, Homo sapiens
caggcacgagacaac

SEQ ID NO: 1763205 - DNA, 15 bp, Homo sapiens
aggcacgagacaacg

SEQ ID NO: 1763206 - DNA, 15 bp, Homo sapiens
ggcacgagacaacgc

SEQ ID NO: 1763207 - DNA, 15 bp, Homo sapiens
gcacgagacaacgcg

SEQ ID NO: 1763208 - DNA, 15 bp, Homo sapiens
cacgagacaacgcgc

SEQ ID NO: 1763209 - DNA, 15 bp, Homo sapiens
acgagacaacgcgcc

SEQ ID NO: 1763210 - DNA, 15 bp, Homo sapiens
cgagacaacgcgccc

SEQ ID NO: 1763211 - DNA, 15 bp, Homo sapiens
gagacaacgcgccca

SEQ ID NO: 1763212 - DNA, 15 bp, Homo sapiens
agacaacgcgcccag

SEQ ID NO: 1763213 - DNA, 15 bp, Homo sapiens
gacaacgcgcccaga

SEQ ID NO: 1763214 - DNA, 15 bp, Homo sapiens
acaacgcgcccagat

SEQ ID NO: 1763215 - DNA, 15 bp, Homo sapiens
caacgcgcccagata

SEQ ID NO: 1763216 - DNA, 15 bp, Homo sapiens
aacgcgcccagataa

SEQ ID NO: 1763217 - DNA, 15 bp, Homo sapiens
acgcgcccagataat

SEQ ID NO: 1763218 - DNA, 15 bp, Homo sapiens
cgcgcccagataatt

SEQ ID NO: 1763219 - DNA, 15 bp, Homo sapiens
gcgcccagataattt

SEQ ID NO: 1763220 - DNA, 15 bp, Homo sapiens
cgcccagataatttt

SEQ ID NO: 1763221 - DNA, 15 bp, Homo sapiens
cccagataatttttg

SEQ ID NO: 1763222 - DNA, 15 bp, Homo sapiens
ccagataatttttgt

SEQ ID NO: 1763223 - DNA, 15 bp, Homo sapiens
cagataatttttgta

SEQ ID NO: 1763224 - DNA, 15 bp, Homo sapiens
agataatttttgtat

SEQ ID NO: 1763225 - DNA, 15 bp, Homo sapiens
gtagagacgggtttt

SEQ ID NO: 1763226 - DNA, 15 bp, Homo sapiens
tagagacgggttttc

SEQ ID NO: 1763227 - DNA, 15 bp, Homo sapiens
agagacgggttttca

SEQ ID NO: 1763228 - DNA, 15 bp, Homo sapiens
gagacgggttttcac

SEQ ID NO: 1763229 - DNA, 15 bp, Homo sapiens
agacgggttttcacc

SEQ ID NO: 1763230 - DNA, 15 bp, Homo sapiens
gacgggttttcacca

SEQ ID NO: 1763231 - DNA, 15 bp, Homo sapiens
acgggttttcaccat

SEQ ID NO: 1763232 - DNA, 15 bp, Homo sapiens
cgggttttcaccatg

SEQ ID NO: 1763233 - DNA, 15 bp, Homo sapiens
ttcaccatgttggtt

SEQ ID NO: 1763234 - DNA, 15 bp, Homo sapiens
tcaccatgttggtta

SEQ ID NO: 1763235 - DNA, 15 bp, Homo sapiens
caccatgttggttag

SEQ ID NO: 1763236 - DNA, 15 bp, Homo sapiens
accatgttggttagc

SEQ ID NO: 1763237 - DNA, 15 bp, Homo sapiens
ccatgttggttagcc

SEQ ID NO: 1763238 - DNA, 15 bp, Homo sapiens
catgttggttagcct

SEQ ID NO: 1763239 - DNA, 15 bp, Homo sapiens
atgttggttagcctg

SEQ ID NO: 1763240 - DNA, 15 bp, Homo sapiens
tgttggttagcctga

SEQ ID NO: 1763241 - DNA, 15 bp, Homo sapiens
gttggttagcctgat

SEQ ID NO: 1763242 - DNA, 15 bp, Homo sapiens
ttggttagcctgatc

SEQ ID NO: 1763243 - DNA, 15 bp, Homo sapiens
tggttagcctgatct

SEQ ID NO: 1763244 - DNA, 15 bp, Homo sapiens
ggttagcctgatctt

SEQ ID NO: 1763245 - DNA, 15 bp, Homo sapiens
gttagcctgatctta

SEQ ID NO: 1763246 - DNA, 15 bp, Homo sapiens
ttagcctgatcttaa

SEQ ID NO: 1763247 - DNA, 15 bp, Homo sapiens
tagcctgatcttaaa

SEQ ID NO: 1763248 - DNA, 15 bp, Homo sapiens
agcctgatcttaaac

SEQ ID NO: 1763249 - DNA, 15 bp, Homo sapiens
gcctgatcttaaact

SEQ ID NO: 1763250 - DNA, 15 bp, Homo sapiens
cctgatcttaaactc

SEQ ID NO: 1763251 - DNA, 15 bp, Homo sapiens
ctgatcttaaactcc

SEQ ID NO: 1763252 - DNA, 15 bp, Homo sapiens
tgatcttaaactcct

SEQ ID NO: 1763253 - DNA, 15 bp, Homo sapiens
gatcttaaactcctg

SEQ ID NO: 1763254 - DNA, 15 bp, Homo sapiens
atcttaaactcctga

SEQ ID NO: 1763255 - DNA, 15 bp, Homo sapiens
cttaaactcctgaca

SEQ ID NO: 1763256 - DNA, 15 bp, Homo sapiens
ttaaactcctgacat

SEQ ID NO: 1763257 - DNA, 15 bp, Homo sapiens
taaactcctgacatc

SEQ ID NO: 1763258 - DNA, 15 bp, Homo sapiens
aaactcctgacatcg

SEQ ID NO: 1763259 - DNA, 15 bp, Homo sapiens
aactcctgacatcgt

SEQ ID NO: 1763260 - DNA, 15 bp, Homo sapiens
actcctgacatcgtg

SEQ ID NO: 1763261 - DNA, 15 bp, Homo sapiens
ctcctgacatcgtga

SEQ ID NO: 1763262 - DNA, 15 bp, Homo sapiens
tcctgacatcgtgat

SEQ ID NO: 1763263 - DNA, 15 bp, Homo sapiens
cctgacatcgtgatc

SEQ ID NO: 1763264 - DNA, 15 bp, Homo sapiens
ctgacatcgtgatcc

SEQ ID NO: 1763265 - DNA, 15 bp, Homo sapiens
tgacatcgtgatccg

SEQ ID NO: 1763266 - DNA, 15 bp, Homo sapiens
gacatcgtgatccgc

SEQ ID NO: 1763267 - DNA, 15 bp, Homo sapiens
acatcgtgatccgcc

SEQ ID NO: 1763268 - DNA, 15 bp, Homo sapiens
catcgtgatccgcct

SEQ ID NO: 1763269 - DNA, 15 bp, Homo sapiens
atcgtgatccgcctg

SEQ ID NO: 1763270 - DNA, 15 bp, Homo sapiens
tggaattataggtgt

SEQ ID NO: 1763271 - DNA, 15 bp, Homo sapiens
ggaattataggtgtg

SEQ ID NO: 1763272 - DNA, 15 bp, Homo sapiens
gaattataggtgtga

SEQ ID NO: 1763273 - DNA, 15 bp, Homo sapiens
aattataggtgtgag

SEQ ID NO: 1763274 - DNA, 15 bp, Homo sapiens
taggtgtgagccacc

SEQ ID NO: 1763275 - DNA, 15 bp, Homo sapiens
aggtgtgagccaccc

SEQ ID NO: 1763276 - DNA, 15 bp, Homo sapiens
ggtgtgagccacccc

SEQ ID NO: 1763277 - DNA, 15 bp, Homo sapiens
gtgtgagccacccca

SEQ ID NO: 1763278 - DNA, 15 bp, Homo sapiens
tgtgagccaccccac

SEQ ID NO: 1763279 - DNA, 15 bp, Homo sapiens
gtgagccaccccacc

SEQ ID NO: 1763280 - DNA, 15 bp, Homo sapiens
tgagccaccccaccc

SEQ ID NO: 1763281 - DNA, 15 bp, Homo sapiens
gagccaccccaccca

SEQ ID NO: 1763282 - DNA, 15 bp, Homo sapiens
agccaccccacccag

SEQ ID NO: 1763283 - DNA, 15 bp, Homo sapiens
gccaccccacccagc

SEQ ID NO: 1763284 - DNA, 15 bp, Homo sapiens
ccaccccacccagca

SEQ ID NO: 1763285 - DNA, 15 bp, Homo sapiens
caccccacccagcaa

SEQ ID NO: 1763286 - DNA, 15 bp, Homo sapiens
accccacccagcaaa

SEQ ID NO: 1763287 - DNA, 15 bp, Homo sapiens
ccccacccagcaaaa

SEQ ID NO: 1763288 - DNA, 15 bp, Homo sapiens
cccacccagcaaaaa

SEQ ID NO: 1763289 - DNA, 15 bp, Homo sapiens
ccacccagcaaaaaa

SEQ ID NO: 1763290 - DNA, 15 bp, Homo sapiens
cacccagcaaaaaat

SEQ ID NO: 1763291 - DNA, 15 bp, Homo sapiens
acccagcaaaaaatt

SEQ ID NO: 1763292 - DNA, 15 bp, Homo sapiens
cccagcaaaaaattc

SEQ ID NO: 1763293 - DNA, 15 bp, Homo sapiens
ccagcaaaaaattca

SEQ ID NO: 1763294 - DNA, 15 bp, Homo sapiens
cagcaaaaaattcag

SEQ ID NO: 1763295 - DNA, 15 bp, Homo sapiens
agcaaaaaattcaga

SEQ ID NO: 1763296 - DNA, 15 bp, Homo sapiens
gcaaaaaattcagaa

SEQ ID NO: 1763297 - DNA, 15 bp, Homo sapiens
caaaaaattcagaat

SEQ ID NO: 1763298 - DNA, 15 bp, Homo sapiens
aaaaaattcagaatt

SEQ ID NO: 1763299 - DNA, 15 bp, Homo sapiens
aaaaattcagaattc

SEQ ID NO: 1763300 - DNA, 15 bp, Homo sapiens
aaaattcagaattct

SEQ ID NO: 1763301 - DNA, 15 bp, Homo sapiens
aaattcagaattcta

SEQ ID NO: 1763302 - DNA, 15 bp, Homo sapiens
aattcagaattctaa

SEQ ID NO: 1763303 - DNA, 15 bp, Homo sapiens
attcagaattctaaa

SEQ ID NO: 1763304 - DNA, 15 bp, Homo sapiens
ttcagaattctaaag

SEQ ID NO: 1763305 - DNA, 15 bp, Homo sapiens
tcagaattctaaaga

SEQ ID NO: 1763306 - DNA, 15 bp, Homo sapiens
agaattctaaagata

SEQ ID NO: 1763307 - DNA, 15 bp, Homo sapiens
gaattctaaagataa

SEQ ID NO: 1763308 - DNA, 15 bp, Homo sapiens
aattctaaagataat

SEQ ID NO: 1763309 - DNA, 15 bp, Homo sapiens
attctaaagataatg

SEQ ID NO: 1763310 - DNA, 15 bp, Homo sapiens
tctaaagataatgag

SEQ ID NO: 1763311 - DNA, 15 bp, Homo sapiens
ctaaagataatgaga

SEQ ID NO: 1763312 - DNA, 15 bp, Homo sapiens
taaagataatgagaa

SEQ ID NO: 1763313 - DNA, 15 bp, Homo sapiens
aaagataatgagaaa

SEQ ID NO: 1763314 - DNA, 15 bp, Homo sapiens
aagataatgagaaaa

SEQ ID NO: 1763315 - DNA, 15 bp, Homo sapiens
agataatgagaaaat

SEQ ID NO: 1763316 - DNA, 15 bp, Homo sapiens
gataatgagaaaatt

SEQ ID NO: 1763317 - DNA, 15 bp, Homo sapiens
ataatgagaaaatta

SEQ ID NO: 1763318 - DNA, 15 bp, Homo sapiens
taatgagaaaattat

SEQ ID NO: 1763319 - DNA, 15 bp, Homo sapiens
aatgagaaaattata

SEQ ID NO: 1763320 - DNA, 15 bp, Homo sapiens
atgagaaaattataa

SEQ ID NO: 1763321 - DNA, 15 bp, Homo sapiens
tgagaaaattataaa

SEQ ID NO: 1763322 - DNA, 15 bp, Homo sapiens
gagaaaattataaaa

SEQ ID NO: 1763323 - DNA, 15 bp, Homo sapiens
agaaaattataaaag

SEQ ID NO: 1763324 - DNA, 15 bp, Homo sapiens
gaaaattataaaagc

SEQ ID NO: 1763325 - DNA, 15 bp, Homo sapiens
aaaattataaaagct

SEQ ID NO: 1763326 - DNA, 15 bp, Homo sapiens
aaattataaaagctt

SEQ ID NO: 1763327 - DNA, 15 bp, Homo sapiens
aattataaaagcttc

SEQ ID NO: 1763328 - DNA, 15 bp, Homo sapiens
attataaaagcttcc

SEQ ID NO: 1763329 - DNA, 15 bp, Homo sapiens
ttataaaagcttcca

SEQ ID NO: 1763330 - DNA, 15 bp, Homo sapiens
tataaaagcttccag

SEQ ID NO: 1763331 - DNA, 15 bp, Homo sapiens
ataaaagcttccaga

SEQ ID NO: 1763332 - DNA, 15 bp, Homo sapiens
taaaagcttccagag

SEQ ID NO: 1763333 - DNA, 15 bp, Homo sapiens
aaaagcttccagaga

SEQ ID NO: 1763334 - DNA, 15 bp, Homo sapiens
aaagcttccagagag

SEQ ID NO: 1763335 - DNA, 15 bp, Homo sapiens
aagcttccagagaga

SEQ ID NO: 1763336 - DNA, 15 bp, Homo sapiens
agcttccagagagaa

SEQ ID NO: 1763337 - DNA, 15 bp, Homo sapiens
gcttccagagagaaa

SEQ ID NO: 1763338 - DNA, 15 bp, Homo sapiens
cttccagagagaaaa

SEQ ID NO: 1763339 - DNA, 15 bp, Homo sapiens
ttccagagagaaaaa

SEQ ID NO: 1763340 - DNA, 15 bp, Homo sapiens
tccagagagaaaaag

SEQ ID NO: 1763341 - DNA, 15 bp, Homo sapiens
ccagagagaaaaagt

SEQ ID NO: 1763342 - DNA, 15 bp, Homo sapiens
cagagagaaaaagta

SEQ ID NO: 1763343 - DNA, 15 bp, Homo sapiens
agagagaaaaagtaa

SEQ ID NO: 1763344 - DNA, 15 bp, Homo sapiens
gagagaaaaagtaag

SEQ ID NO: 1763345 - DNA, 15 bp, Homo sapiens
agagaaaaagtaagc

SEQ ID NO: 1763346 - DNA, 15 bp, Homo sapiens
gagaaaaagtaagct

SEQ ID NO: 1763347 - DNA, 15 bp, Homo sapiens
agaaaaagtaagcta

SEQ ID NO: 1763348 - DNA, 15 bp, Homo sapiens
gaaaaagtaagctat

SEQ ID NO: 1763349 - DNA, 15 bp, Homo sapiens
aaaaagtaagctatt

SEQ ID NO: 1763350 - DNA, 15 bp, Homo sapiens
aaaagtaagctattt

SEQ ID NO: 1763351 - DNA, 15 bp, Homo sapiens
aaagtaagctatttt

SEQ ID NO: 1763352 - DNA, 15 bp, Homo sapiens
aagtaagctatttta

SEQ ID NO: 1763353 - DNA, 15 bp, Homo sapiens
agtaagctattttag

SEQ ID NO: 1763354 - DNA, 15 bp, Homo sapiens
gtaagctattttagg

SEQ ID NO: 1763355 - DNA, 15 bp, Homo sapiens
taagctattttaggg

SEQ ID NO: 1763356 - DNA, 15 bp, Homo sapiens
aagctattttagggg

SEQ ID NO: 1763357 - DNA, 15 bp, Homo sapiens
agctattttagggga

SEQ ID NO: 1763358 - DNA, 15 bp, Homo sapiens
gctattttaggggaa

SEQ ID NO: 1763359 - DNA, 15 bp, Homo sapiens
ctattttaggggaat

SEQ ID NO: 1763360 - DNA, 15 bp, Homo sapiens
tattttaggggaatg

SEQ ID NO: 1763361 - DNA, 15 bp, Homo sapiens
attttaggggaatga

SEQ ID NO: 1763362 - DNA, 15 bp, Homo sapiens
ttttaggggaatgag

SEQ ID NO: 1763363 - DNA, 15 bp, Homo sapiens
tttaggggaatgaga

SEQ ID NO: 1763364 - DNA, 15 bp, Homo sapiens
ttaggggaatgagat

SEQ ID NO: 1763365 - DNA, 15 bp, Homo sapiens
taggggaatgagatc

SEQ ID NO: 1763366 - DNA, 15 bp, Homo sapiens
aggggaatgagatcc

SEQ ID NO: 1763367 - DNA, 15 bp, Homo sapiens
ggggaatgagatcca

SEQ ID NO: 1763368 - DNA, 15 bp, Homo sapiens
gggaatgagatccag

SEQ ID NO: 1763369 - DNA, 15 bp, Homo sapiens
ggaatgagatccaga

SEQ ID NO: 1763370 - DNA, 15 bp, Homo sapiens
gaatgagatccagat

SEQ ID NO: 1763371 - DNA, 15 bp, Homo sapiens
aatgagatccagatc

SEQ ID NO: 1763372 - DNA, 15 bp, Homo sapiens
atgagatccagatca

SEQ ID NO: 1763373 - DNA, 15 bp, Homo sapiens
tgagatccagatcag

SEQ ID NO: 1763374 - DNA, 15 bp, Homo sapiens
gagatccagatcagc

SEQ ID NO: 1763375 - DNA, 15 bp, Homo sapiens
agatccagatcagca

SEQ ID NO: 1763376 - DNA, 15 bp, Homo sapiens
gatccagatcagcac

SEQ ID NO: 1763377 - DNA, 15 bp, Homo sapiens
atccagatcagcaca

SEQ ID NO: 1763378 - DNA, 15 bp, Homo sapiens
tccagatcagcacag

SEQ ID NO: 1763379 - DNA, 15 bp, Homo sapiens
ccagatcagcacaga

SEQ ID NO: 1763380 - DNA, 15 bp, Homo sapiens
cagatcagcacagaa

SEQ ID NO: 1763381 - DNA, 15 bp, Homo sapiens
agatcagcacagaag

SEQ ID NO: 1763382 - DNA, 15 bp, Homo sapiens
gatcagcacagaagt

SEQ ID NO: 1763383 - DNA, 15 bp, Homo sapiens
atcagcacagaagtt

SEQ ID NO: 1763384 - DNA, 15 bp, Homo sapiens
tcagcacagaagttc

SEQ ID NO: 1763385 - DNA, 15 bp, Homo sapiens
cagcacagaagttct

SEQ ID NO: 1763386 - DNA, 15 bp, Homo sapiens
agcacagaagttctc

SEQ ID NO: 1763387 - DNA, 15 bp, Homo sapiens
gcacagaagttctca

SEQ ID NO: 1763388 - DNA, 15 bp, Homo sapiens
cacagaagttctcat

SEQ ID NO: 1763389 - DNA, 15 bp, Homo sapiens
acagaagttctcatt

SEQ ID NO: 1763390 - DNA, 15 bp, Homo sapiens
cagaagttctcatta

SEQ ID NO: 1763391 - DNA, 15 bp, Homo sapiens
agaagttctcattag

SEQ ID NO: 1763392 - DNA, 15 bp, Homo sapiens
gaagttctcattagg

SEQ ID NO: 1763393 - DNA, 15 bp, Homo sapiens
aagttctcattagga

SEQ ID NO: 1763394 - DNA, 15 bp, Homo sapiens
agttctcattaggaa

SEQ ID NO: 1763395 - DNA, 15 bp, Homo sapiens
gttctcattaggaat

SEQ ID NO: 1763396 - DNA, 15 bp, Homo sapiens
ttctcattaggaata

SEQ ID NO: 1763397 - DNA, 15 bp, Homo sapiens
tctcattaggaatac

SEQ ID NO: 1763398 - DNA, 15 bp, Homo sapiens
ctcattaggaatact

SEQ ID NO: 1763399 - DNA, 15 bp, Homo sapiens
tcattaggaatactg

SEQ ID NO: 1763400 - DNA, 15 bp, Homo sapiens
cattaggaatactgg

SEQ ID NO: 1763401 - DNA, 15 bp, Homo sapiens
attaggaatactgga

SEQ ID NO: 1763402 - DNA, 15 bp, Homo sapiens
ttaggaatactggat

SEQ ID NO: 1763403 - DNA, 15 bp, Homo sapiens
taggaatactggata

SEQ ID NO: 1763404 - DNA, 15 bp, Homo sapiens
aggaatactggatat

SEQ ID NO: 1763405 - DNA, 15 bp, Homo sapiens
ggaatactggatatt

SEQ ID NO: 1763406 - DNA, 15 bp, Homo sapiens
gaatactggatattt

SEQ ID NO: 1763407 - DNA, 15 bp, Homo sapiens
aatactggatatttt

SEQ ID NO: 1763408 - DNA, 15 bp, Homo sapiens
atactggatatttta

SEQ ID NO: 1763409 - DNA, 15 bp, Homo sapiens
tactggatattttat

SEQ ID NO: 1763410 - DNA, 15 bp, Homo sapiens
actggatattttata

SEQ ID NO: 1763411 - DNA, 15 bp, Homo sapiens
ctggatattttataa

SEQ ID NO: 1763412 - DNA, 15 bp, Homo sapiens
tggatattttataac

SEQ ID NO: 1763413 - DNA, 15 bp, Homo sapiens
ggatattttataacc

SEQ ID NO: 1763414 - DNA, 15 bp, Homo sapiens
gatattttataacct

SEQ ID NO: 1763415 - DNA, 15 bp, Homo sapiens
atattttataaccta

SEQ ID NO: 1763416 - DNA, 15 bp, Homo sapiens
tattttataacctaa

SEQ ID NO: 1763417 - DNA, 15 bp, Homo sapiens
attttataacctaaa

SEQ ID NO: 1763418 - DNA, 15 bp, Homo sapiens
ttttataacctaaaa

SEQ ID NO: 1763419 - DNA, 15 bp, Homo sapiens
tttataacctaaaat

SEQ ID NO: 1763420 - DNA, 15 bp, Homo sapiens
ttataacctaaaatt

SEQ ID NO: 1763421 - DNA, 15 bp, Homo sapiens
tataacctaaaattt

SEQ ID NO: 1763422 - DNA, 15 bp, Homo sapiens
ataacctaaaatttg

SEQ ID NO: 1763423 - DNA, 15 bp, Homo sapiens
taacctaaaatttgt

SEQ ID NO: 1763424 - DNA, 15 bp, Homo sapiens
aacctaaaatttgtc

SEQ ID NO: 1763425 - DNA, 15 bp, Homo sapiens
acctaaaatttgtca

SEQ ID NO: 1763426 - DNA, 15 bp, Homo sapiens
cctaaaatttgtcaa

SEQ ID NO: 1763427 - DNA, 15 bp, Homo sapiens
ctaaaatttgtcaaa

SEQ ID NO: 1763428 - DNA, 15 bp, Homo sapiens
taaaatttgtcaaat

SEQ ID NO: 1763429 - DNA, 15 bp, Homo sapiens
aaaatttgtcaaata

SEQ ID NO: 1763430 - DNA, 15 bp, Homo sapiens
aaatttgtcaaatat

SEQ ID NO: 1763431 - DNA, 15 bp, Homo sapiens
aatttgtcaaatatg

SEQ ID NO: 1763432 - DNA, 15 bp, Homo sapiens
atttgtcaaatatga

SEQ ID NO: 1763433 - DNA, 15 bp, Homo sapiens
tttgtcaaatatgac

SEQ ID NO: 1763434 - DNA, 15 bp, Homo sapiens
ttgtcaaatatgaca

SEQ ID NO: 1763435 - DNA, 15 bp, Homo sapiens
tgtcaaatatgacag

SEQ ID NO: 1763436 - DNA, 15 bp, Homo sapiens
gtcaaatatgacagc

SEQ ID NO: 1763437 - DNA, 15 bp, Homo sapiens
tcaaatatgacagca

SEQ ID NO: 1763438 - DNA, 15 bp, Homo sapiens
caaatatgacagcaa

SEQ ID NO: 1763439 - DNA, 15 bp, Homo sapiens
aaatatgacagcaaa

SEQ ID NO: 1763440 - DNA, 15 bp, Homo sapiens
aatatgacagcaaaa

SEQ ID NO: 1763441 - DNA, 15 bp, Homo sapiens
atatgacagcaaaat

SEQ ID NO: 1763442 - DNA, 15 bp, Homo sapiens
tatgacagcaaaatg

SEQ ID NO: 1763443 - DNA, 15 bp, Homo sapiens
atgacagcaaaatga

SEQ ID NO: 1763444 - DNA, 15 bp, Homo sapiens
tgacagcaaaatgaa

SEQ ID NO: 1763445 - DNA, 15 bp, Homo sapiens
gacagcaaaatgaaa

SEQ ID NO: 1763446 - DNA, 15 bp, Homo sapiens
acagcaaaatgaaat

SEQ ID NO: 1763447 - DNA, 15 bp, Homo sapiens
cagcaaaatgaaatt

SEQ ID NO: 1763448 - DNA, 15 bp, Homo sapiens
agcaaaatgaaattt

SEQ ID NO: 1763449 - DNA, 15 bp, Homo sapiens
gcaaaatgaaatttg

SEQ ID NO: 1763450 - DNA, 15 bp, Homo sapiens
caaaatgaaatttgg

SEQ ID NO: 1763451 - DNA, 15 bp, Homo sapiens
aaaatgaaatttgga

SEQ ID NO: 1763452 - DNA, 15 bp, Homo sapiens
aaatgaaatttggaa

SEQ ID NO: 1763453 - DNA, 15 bp, Homo sapiens
aatgaaatttggaaa

SEQ ID NO: 1763454 - DNA, 15 bp, Homo sapiens
atgaaatttggaaat

SEQ ID NO: 1763455 - DNA, 15 bp, Homo sapiens
tgaaatttggaaatg

SEQ ID NO: 1763456 - DNA, 15 bp, Homo sapiens
gaaatttggaaatgc

SEQ ID NO: 1763457 - DNA, 15 bp, Homo sapiens
aaatttggaaatgca

SEQ ID NO: 1763458 - DNA, 15 bp, Homo sapiens
aatttggaaatgcaa

SEQ ID NO: 1763459 - DNA, 15 bp, Homo sapiens
atttggaaatgcaag

SEQ ID NO: 1763460 - DNA, 15 bp, Homo sapiens
tttggaaatgcaagg

SEQ ID NO: 1763461 - DNA, 15 bp, Homo sapiens
ttggaaatgcaagga

SEQ ID NO: 1763462 - DNA, 15 bp, Homo sapiens
tggaaatgcaaggac

SEQ ID NO: 1763463 - DNA, 15 bp, Homo sapiens
ggaaatgcaaggact

SEQ ID NO: 1763464 - DNA, 15 bp, Homo sapiens
gaaatgcaaggactc

SEQ ID NO: 1763465 - DNA, 15 bp, Homo sapiens
aaatgcaaggactca

SEQ ID NO: 1763466 - DNA, 15 bp, Homo sapiens
aatgcaaggactcag

SEQ ID NO: 1763467 - DNA, 15 bp, Homo sapiens
atgcaaggactcaga

SEQ ID NO: 1763468 - DNA, 15 bp, Homo sapiens
tgcaaggactcagaa

SEQ ID NO: 1763469 - DNA, 15 bp, Homo sapiens
gcaaggactcagaat

SEQ ID NO: 1763470 - DNA, 15 bp, Homo sapiens
caaggactcagaatg

SEQ ID NO: 1763471 - DNA, 15 bp, Homo sapiens
aaggactcagaatgt

SEQ ID NO: 1763472 - DNA, 15 bp, Homo sapiens
aggactcagaatgtt

SEQ ID NO: 1763473 - DNA, 15 bp, Homo sapiens
ggactcagaatgttt

SEQ ID NO: 1763474 - DNA, 15 bp, Homo sapiens
gactcagaatgttta

SEQ ID NO: 1763475 - DNA, 15 bp, Homo sapiens
actcagaatgtttat

SEQ ID NO: 1763476 - DNA, 15 bp, Homo sapiens
ctcagaatgtttatc

SEQ ID NO: 1763477 - DNA, 15 bp, Homo sapiens
tcagaatgtttatct

SEQ ID NO: 1763478 - DNA, 15 bp, Homo sapiens
cagaatgtttatctt

SEQ ID NO: 1763479 - DNA, 15 bp, Homo sapiens
agaatgtttatcttt

SEQ ID NO: 1763480 - DNA, 15 bp, Homo sapiens
gaatgtttatctttt

SEQ ID NO: 1763481 - DNA, 15 bp, Homo sapiens
aatgtttatcttttg

SEQ ID NO: 1763482 - DNA, 15 bp, Homo sapiens
atgtttatcttttga

SEQ ID NO: 1763483 - DNA, 15 bp, Homo sapiens
tgtttatcttttgac

SEQ ID NO: 1763484 - DNA, 15 bp, Homo sapiens
gtttatcttttgact

SEQ ID NO: 1763485 - DNA, 15 bp, Homo sapiens
tttatcttttgactg

SEQ ID NO: 1763486 - DNA, 15 bp, Homo sapiens
ttatcttttgactgc

SEQ ID NO: 1763487 - DNA, 15 bp, Homo sapiens
tatcttttgactgcc

SEQ ID NO: 1763488 - DNA, 15 bp, Homo sapiens
atcttttgactgccc

SEQ ID NO: 1763489 - DNA, 15 bp, Homo sapiens
tcttttgactgccct

SEQ ID NO: 1763490 - DNA, 15 bp, Homo sapiens
cttttgactgccctt

SEQ ID NO: 1763491 - DNA, 15 bp, Homo sapiens
ttttgactgcccttt

SEQ ID NO: 1763492 - DNA, 15 bp, Homo sapiens
tttgactgccctttt

SEQ ID NO: 1763493 - DNA, 15 bp, Homo sapiens
ttgactgcccttttg

SEQ ID NO: 1763494 - DNA, 15 bp, Homo sapiens
tgactgcccttttga

SEQ ID NO: 1763495 - DNA, 15 bp, Homo sapiens
gactgcccttttgaa

SEQ ID NO: 1763496 - DNA, 15 bp, Homo sapiens
actgcccttttgaaa

SEQ ID NO: 1763497 - DNA, 15 bp, Homo sapiens
ctgcccttttgaaat

SEQ ID NO: 1763498 - DNA, 15 bp, Homo sapiens
tgcccttttgaaatg

SEQ ID NO: 1763499 - DNA, 15 bp, Homo sapiens
gcccttttgaaatga

SEQ ID NO: 1763500 - DNA, 15 bp, Homo sapiens
cccttttgaaatgaa

SEQ ID NO: 1763501 - DNA, 15 bp, Homo sapiens
ccttttgaaatgaaa

SEQ ID NO: 1763502 - DNA, 15 bp, Homo sapiens
cttttgaaatgaaat

SEQ ID NO: 1763503 - DNA, 15 bp, Homo sapiens
ttttgaaatgaaatt

SEQ ID NO: 1763504 - DNA, 15 bp, Homo sapiens
tttgaaatgaaatta

SEQ ID NO: 1763505 - DNA, 15 bp, Homo sapiens
ttgaaatgaaattac

SEQ ID NO: 1763506 - DNA, 15 bp, Homo sapiens
tgaaatgaaattact

SEQ ID NO: 1763507 - DNA, 15 bp, Homo sapiens
gaaatgaaattacta

SEQ ID NO: 1763508 - DNA, 15 bp, Homo sapiens
aaatgaaattactag

SEQ ID NO: 1763509 - DNA, 15 bp, Homo sapiens
aatgaaattactagg

SEQ ID NO: 1763510 - DNA, 15 bp, Homo sapiens
atgaaattactaggg

SEQ ID NO: 1763511 - DNA, 15 bp, Homo sapiens
tgaaattactaggga

SEQ ID NO: 1763512 - DNA, 15 bp, Homo sapiens
gaaattactagggaa

SEQ ID NO: 1763513 - DNA, 15 bp, Homo sapiens
aaattactagggaat

SEQ ID NO: 1763514 - DNA, 15 bp, Homo sapiens
aattactagggaata

SEQ ID NO: 1763515 - DNA, 15 bp, Homo sapiens
attactagggaatat

SEQ ID NO: 1763516 - DNA, 15 bp, Homo sapiens
ttactagggaatatg

SEQ ID NO: 1763517 - DNA, 15 bp, Homo sapiens
tactagggaatatgc

SEQ ID NO: 1763518 - DNA, 15 bp, Homo sapiens
actagggaatatgct

SEQ ID NO: 1763519 - DNA, 15 bp, Homo sapiens
ctagggaatatgctt

SEQ ID NO: 1763520 - DNA, 15 bp, Homo sapiens
tagggaatatgcttt

SEQ ID NO: 1763521 - DNA, 15 bp, Homo sapiens
agggaatatgcttta

SEQ ID NO: 1763522 - DNA, 15 bp, Homo sapiens
gggaatatgctttaa

SEQ ID NO: 1763523 - DNA, 15 bp, Homo sapiens
ggaatatgctttaaa

SEQ ID NO: 1763524 - DNA, 15 bp, Homo sapiens
gaatatgctttaaaa

SEQ ID NO: 1763525 - DNA, 15 bp, Homo sapiens
aatatgctttaaaaa

SEQ ID NO: 1763526 - DNA, 15 bp, Homo sapiens
atatgctttaaaaaa

SEQ ID NO: 1763527 - DNA, 15 bp, Homo sapiens
tatgctttaaaaaaa

SEQ ID NO: 1763528 - DNA, 15 bp, Homo sapiens
atgctttaaaaaaat

SEQ ID NO: 1763529 - DNA, 15 bp, Homo sapiens
tgctttaaaaaaatg

SEQ ID NO: 1763530 - DNA, 15 bp, Homo sapiens
gctttaaaaaaatga

SEQ ID NO: 1763531 - DNA, 15 bp, Homo sapiens
ctttaaaaaaatgaa

SEQ ID NO: 1763532 - DNA, 15 bp, Homo sapiens
tttaaaaaaatgaaa

SEQ ID NO: 1763533 - DNA, 15 bp, Homo sapiens
ttaaaaaaatgaaaa

SEQ ID NO: 1763534 - DNA, 15 bp, Homo sapiens
taaaaaaatgaaaaa

SEQ ID NO: 1763535 - DNA, 15 bp, Homo sapiens
aaaaaaatgaaaaaa

SEQ ID NO: 1763536 - DNA, 15 bp, Homo sapiens
aaaaaatgaaaaaag

SEQ ID NO: 1763537 - DNA, 15 bp, Homo sapiens
aaaaatgaaaaaaga

SEQ ID NO: 1763538 - DNA, 15 bp, Homo sapiens
aaaatgaaaaaagaa

SEQ ID NO: 1763539 - DNA, 15 bp, Homo sapiens
aaatgaaaaaagaat

SEQ ID NO: 1763540 - DNA, 15 bp, Homo sapiens
aatgaaaaaagaatc

SEQ ID NO: 1763541 - DNA, 15 bp, Homo sapiens
atgaaaaaagaatcc

SEQ ID NO: 1763542 - DNA, 15 bp, Homo sapiens
tgaaaaaagaatcca

SEQ ID NO: 1763543 - DNA, 15 bp, Homo sapiens
gaaaaaagaatccac

SEQ ID NO: 1763544 - DNA, 15 bp, Homo sapiens
aaaaaagaatccaca

SEQ ID NO: 1763545 - DNA, 15 bp, Homo sapiens
aaaaagaatccacaa

SEQ ID NO: 1763546 - DNA, 15 bp, Homo sapiens
aaaagaatccacaaa

SEQ ID NO: 1763547 - DNA, 15 bp, Homo sapiens
aaagaatccacaaaa

SEQ ID NO: 1763548 - DNA, 15 bp, Homo sapiens
aagaatccacaaaag

SEQ ID NO: 1763549 - DNA, 15 bp, Homo sapiens
agaatccacaaaagg

SEQ ID NO: 1763550 - DNA, 15 bp, Homo sapiens
gaatccacaaaaggg

SEQ ID NO: 1763551 - DNA, 15 bp, Homo sapiens
aatccacaaaaggga

SEQ ID NO: 1763552 - DNA, 15 bp, Homo sapiens
atccacaaaagggaa

SEQ ID NO: 1763553 - DNA, 15 bp, Homo sapiens
tccacaaaagggaaa

SEQ ID NO: 1763554 - DNA, 15 bp, Homo sapiens
ccacaaaagggaaat

SEQ ID NO: 1763555 - DNA, 15 bp, Homo sapiens
cacaaaagggaaatc

SEQ ID NO: 1763556 - DNA, 15 bp, Homo sapiens
acaaaagggaaatca

SEQ ID NO: 1763557 - DNA, 15 bp, Homo sapiens
caaaagggaaatcat

SEQ ID NO: 1763558 - DNA, 15 bp, Homo sapiens
aaaagggaaatcata

SEQ ID NO: 1763559 - DNA, 15 bp, Homo sapiens
aaagggaaatcataa

SEQ ID NO: 1763560 - DNA, 15 bp, Homo sapiens
aagggaaatcataag

SEQ ID NO: 1763561 - DNA, 15 bp, Homo sapiens
agggaaatcataaga

SEQ ID NO: 1763562 - DNA, 15 bp, Homo sapiens
gggaaatcataagac

SEQ ID NO: 1763563 - DNA, 15 bp, Homo sapiens
ggaaatcataagacc

SEQ ID NO: 1763564 - DNA, 15 bp, Homo sapiens
gaaatcataagacct

SEQ ID NO: 1763565 - DNA, 15 bp, Homo sapiens
aaatcataagaccta

SEQ ID NO: 1763566 - DNA, 15 bp, Homo sapiens
aatcataagacctaa

SEQ ID NO: 1763567 - DNA, 15 bp, Homo sapiens
atcataagacctaat

SEQ ID NO: 1763568 - DNA, 15 bp, Homo sapiens
tcataagacctaata

SEQ ID NO: 1763569 - DNA, 15 bp, Homo sapiens
cataagacctaataa

SEQ ID NO: 1763570 - DNA, 15 bp, Homo sapiens
ataagacctaataaa

SEQ ID NO: 1763571 - DNA, 15 bp, Homo sapiens
taagacctaataaaa

SEQ ID NO: 1763572 - DNA, 15 bp, Homo sapiens
aagacctaataaaaa

SEQ ID NO: 1763573 - DNA, 15 bp, Homo sapiens
agacctaataaaaaa

SEQ ID NO: 1763574 - DNA, 15 bp, Homo sapiens
gacctaataaaaaaa

SEQ ID NO: 1763575 - DNA, 15 bp, Homo sapiens
acctaataaaaaaac

SEQ ID NO: 1763576 - DNA, 15 bp, Homo sapiens
cctaataaaaaaact

SEQ ID NO: 1763577 - DNA, 15 bp, Homo sapiens
ctaataaaaaaactg

SEQ ID NO: 1763578 - DNA, 15 bp, Homo sapiens
taataaaaaaactgt

SEQ ID NO: 1763579 - DNA, 15 bp, Homo sapiens
aataaaaaaactgtc

SEQ ID NO: 1763580 - DNA, 15 bp, Homo sapiens
ataaaaaaactgtca

SEQ ID NO: 1763581 - DNA, 15 bp, Homo sapiens
aaaaaactgtcacac

SEQ ID NO: 1763582 - DNA, 15 bp, Homo sapiens
aaaaactgtcacacc

SEQ ID NO: 1763583 - DNA, 15 bp, Homo sapiens
aaaactgtcacacca

SEQ ID NO: 1763584 - DNA, 15 bp, Homo sapiens
aaactgtcacaccag

SEQ ID NO: 1763585 - DNA, 15 bp, Homo sapiens
aactgtcacaccaga

SEQ ID NO: 1763586 - DNA, 15 bp, Homo sapiens
actgtcacaccagag

SEQ ID NO: 1763587 - DNA, 15 bp, Homo sapiens
ctgtcacaccagagc

SEQ ID NO: 1763588 - DNA, 15 bp, Homo sapiens
tgtcacaccagagca

SEQ ID NO: 1763589 - DNA, 15 bp, Homo sapiens
gtcacaccagagcag

SEQ ID NO: 1763590 - DNA, 15 bp, Homo sapiens
tcacaccagagcaga

SEQ ID NO: 1763591 - DNA, 15 bp, Homo sapiens
cacaccagagcagag

SEQ ID NO: 1763592 - DNA, 15 bp, Homo sapiens
acaccagagcagaga

SEQ ID NO: 1763593 - DNA, 15 bp, Homo sapiens
caccagagcagagag

SEQ ID NO: 1763594 - DNA, 15 bp, Homo sapiens
accagagcagagaga

SEQ ID NO: 1763595 - DNA, 15 bp, Homo sapiens
ccagagcagagagaa

SEQ ID NO: 1763596 - DNA, 15 bp, Homo sapiens
cagagcagagagaaa

SEQ ID NO: 1763597 - DNA, 15 bp, Homo sapiens
agagcagagagaaaa

SEQ ID NO: 1763598 - DNA, 15 bp, Homo sapiens
gagcagagagaaaaa

SEQ ID NO: 1763599 - DNA, 15 bp, Homo sapiens
agcagagagaaaaat

SEQ ID NO: 1763600 - DNA, 15 bp, Homo sapiens
gcagagagaaaaatg

SEQ ID NO: 1763601 - DNA, 15 bp, Homo sapiens
cagagagaaaaatgc

SEQ ID NO: 1763602 - DNA, 15 bp, Homo sapiens
agagagaaaaatgca

SEQ ID NO: 1763603 - DNA, 15 bp, Homo sapiens
gagagaaaaatgcaa

SEQ ID NO: 1763604 - DNA, 15 bp, Homo sapiens
agagaaaaatgcaaa

SEQ ID NO: 1763605 - DNA, 15 bp, Homo sapiens
gagaaaaatgcaaaa

SEQ ID NO: 1763606 - DNA, 15 bp, Homo sapiens
agaaaaatgcaaaaa

SEQ ID NO: 1763607 - DNA, 15 bp, Homo sapiens
gaaaaatgcaaaaaa

SEQ ID NO: 1763608 - DNA, 15 bp, Homo sapiens
aaaatgcaaaaaatc

SEQ ID NO: 1763609 - DNA, 15 bp, Homo sapiens
aaatgcaaaaaatcc

SEQ ID NO: 1763610 - DNA, 15 bp, Homo sapiens
aatgcaaaaaatcct

SEQ ID NO: 1763611 - DNA, 15 bp, Homo sapiens
atgcaaaaaatccta

SEQ ID NO: 1763612 - DNA, 15 bp, Homo sapiens
tgcaaaaaatcctac

SEQ ID NO: 1763613 - DNA, 15 bp, Homo sapiens
gcaaaaaatcctacg

SEQ ID NO: 1763614 - DNA, 15 bp, Homo sapiens
caaaaaatcctacga

SEQ ID NO: 1763615 - DNA, 15 bp, Homo sapiens
aaaaaatcctacgat

SEQ ID NO: 1763616 - DNA, 15 bp, Homo sapiens
aaaaatcctacgatg

SEQ ID NO: 1763617 - DNA, 15 bp, Homo sapiens
aaaatcctacgatgc

SEQ ID NO: 1763618 - DNA, 15 bp, Homo sapiens
aaatcctacgatgca

SEQ ID NO: 1763619 - DNA, 15 bp, Homo sapiens
aatcctacgatgcaa

SEQ ID NO: 1763620 - DNA, 15 bp, Homo sapiens
atcctacgatgcaac

SEQ ID NO: 1763621 - DNA, 15 bp, Homo sapiens
tcctacgatgcaaca

SEQ ID NO: 1763622 - DNA, 15 bp, Homo sapiens
cctacgatgcaacaa

SEQ ID NO: 1763623 - DNA, 15 bp, Homo sapiens
ctacgatgcaacaag

SEQ ID NO: 1763624 - DNA, 15 bp, Homo sapiens
tacgatgcaacaagc

SEQ ID NO: 1763625 - DNA, 15 bp, Homo sapiens
acgatgcaacaagcc

SEQ ID NO: 1763626 - DNA, 15 bp, Homo sapiens
cgatgcaacaagccc

SEQ ID NO: 1763627 - DNA, 15 bp, Homo sapiens
gatgcaacaagccca

SEQ ID NO: 1763628 - DNA, 15 bp, Homo sapiens
atgcaacaagcccag

SEQ ID NO: 1763629 - DNA, 15 bp, Homo sapiens
tgcaacaagcccaga

SEQ ID NO: 1763630 - DNA, 15 bp, Homo sapiens
gcaacaagcccagaa

SEQ ID NO: 1763631 - DNA, 15 bp, Homo sapiens
caacaagcccagaaa

SEQ ID NO: 1763632 - DNA, 15 bp, Homo sapiens
aacaagcccagaaaa

SEQ ID NO: 1763633 - DNA, 15 bp, Homo sapiens
acaagcccagaaaat

SEQ ID NO: 1763634 - DNA, 15 bp, Homo sapiens
caagcccagaaaatg

SEQ ID NO: 1763635 - DNA, 15 bp, Homo sapiens
aagcccagaaaatgt

SEQ ID NO: 1763636 - DNA, 15 bp, Homo sapiens
agcccagaaaatgtt

SEQ ID NO: 1763637 - DNA, 15 bp, Homo sapiens
gcccagaaaatgttt

SEQ ID NO: 1763638 - DNA, 15 bp, Homo sapiens
cccagaaaatgtttg

SEQ ID NO: 1763639 - DNA, 15 bp, Homo sapiens
ccagaaaatgtttgt

SEQ ID NO: 1763640 - DNA, 15 bp, Homo sapiens
cagaaaatgtttgtt

SEQ ID NO: 1763641 - DNA, 15 bp, Homo sapiens
agaaaatgtttgttc

SEQ ID NO: 1763642 - DNA, 15 bp, Homo sapiens
gaaaatgtttgttcc

SEQ ID NO: 1763643 - DNA, 15 bp, Homo sapiens
aaaatgtttgttcca

SEQ ID NO: 1763644 - DNA, 15 bp, Homo sapiens
aaatgtttgttccac

SEQ ID NO: 1763645 - DNA, 15 bp, Homo sapiens
aatgtttgttccaca

SEQ ID NO: 1763646 - DNA, 15 bp, Homo sapiens
atgtttgttccacat

SEQ ID NO: 1763647 - DNA, 15 bp, Homo sapiens
tgtttgttccacatg

SEQ ID NO: 1763648 - DNA, 15 bp, Homo sapiens
gtttgttccacatga

SEQ ID NO: 1763649 - DNA, 15 bp, Homo sapiens
tttgttccacatgag

SEQ ID NO: 1763650 - DNA, 15 bp, Homo sapiens
ttgttccacatgaga

SEQ ID NO: 1763651 - DNA, 15 bp, Homo sapiens
tgttccacatgagaa

SEQ ID NO: 1763652 - DNA, 15 bp, Homo sapiens
gttccacatgagaaa

SEQ ID NO: 1763653 - DNA, 15 bp, Homo sapiens
ttccacatgagaaat

SEQ ID NO: 1763654 - DNA, 15 bp, Homo sapiens
tccacatgagaaatc

SEQ ID NO: 1763655 - DNA, 15 bp, Homo sapiens
ccacatgagaaatca

SEQ ID NO: 1763656 - DNA, 15 bp, Homo sapiens
cacatgagaaatcag

SEQ ID NO: 1763657 - DNA, 15 bp, Homo sapiens
acatgagaaatcaga

SEQ ID NO: 1763658 - DNA, 15 bp, Homo sapiens
catgagaaatcagat

SEQ ID NO: 1763659 - DNA, 15 bp, Homo sapiens
atgagaaatcagata

SEQ ID NO: 1763660 - DNA, 15 bp, Homo sapiens
tgagaaatcagatag

SEQ ID NO: 1763661 - DNA, 15 bp, Homo sapiens
gagaaatcagatagt

SEQ ID NO: 1763662 - DNA, 15 bp, Homo sapiens
agaaatcagatagtt

SEQ ID NO: 1763663 - DNA, 15 bp, Homo sapiens
gaaatcagatagttt

SEQ ID NO: 1763664 - DNA, 15 bp, Homo sapiens
aaatcagatagtttc

SEQ ID NO: 1763665 - DNA, 15 bp, Homo sapiens
aatcagatagtttca

SEQ ID NO: 1763666 - DNA, 15 bp, Homo sapiens
atcagatagtttcat

SEQ ID NO: 1763667 - DNA, 15 bp, Homo sapiens
tcagatagtttcata

SEQ ID NO: 1763668 - DNA, 15 bp, Homo sapiens
cagatagtttcataa

SEQ ID NO: 1763669 - DNA, 15 bp, Homo sapiens
agatagtttcataaa

SEQ ID NO: 1763670 - DNA, 15 bp, Homo sapiens
gatagtttcataaag

SEQ ID NO: 1763671 - DNA, 15 bp, Homo sapiens
atagtttcataaaga

SEQ ID NO: 1763672 - DNA, 15 bp, Homo sapiens
tagtttcataaagaa

SEQ ID NO: 1763673 - DNA, 15 bp, Homo sapiens
agtttcataaagaat

SEQ ID NO: 1763674 - DNA, 15 bp, Homo sapiens
gtttcataaagaatg

SEQ ID NO: 1763675 - DNA, 15 bp, Homo sapiens
tttcataaagaatgc

SEQ ID NO: 1763676 - DNA, 15 bp, Homo sapiens
ttcataaagaatgcc

SEQ ID NO: 1763677 - DNA, 15 bp, Homo sapiens
tcataaagaatgcct

SEQ ID NO: 1763678 - DNA, 15 bp, Homo sapiens
cataaagaatgcctt

SEQ ID NO: 1763679 - DNA, 15 bp, Homo sapiens
ataaagaatgccttc

SEQ ID NO: 1763680 - DNA, 15 bp, Homo sapiens
taaagaatgccttca

SEQ ID NO: 1763681 - DNA, 15 bp, Homo sapiens
aaagaatgccttcaa

SEQ ID NO: 1763682 - DNA, 15 bp, Homo sapiens
aagaatgccttcaac

SEQ ID NO: 1763683 - DNA, 15 bp, Homo sapiens
agaatgccttcaaca

SEQ ID NO: 1763684 - DNA, 15 bp, Homo sapiens
gaatgccttcaacaa

SEQ ID NO: 1763685 - DNA, 15 bp, Homo sapiens
aatgccttcaacaac

SEQ ID NO: 1763686 - DNA, 15 bp, Homo sapiens
gccttcaacaacaaa

SEQ ID NO: 1763687 - DNA, 15 bp, Homo sapiens
ccttcaacaacaaaa

SEQ ID NO: 1763688 - DNA, 15 bp, Homo sapiens
cttcaacaacaaaat

SEQ ID NO: 1763689 - DNA, 15 bp, Homo sapiens
ttcaacaacaaaatg

SEQ ID NO: 1763690 - DNA, 15 bp, Homo sapiens
tcaacaacaaaatgg

SEQ ID NO: 1763691 - DNA, 15 bp, Homo sapiens
caacaacaaaatggt

SEQ ID NO: 1763692 - DNA, 15 bp, Homo sapiens
aacaacaaaatggtt

SEQ ID NO: 1763693 - DNA, 15 bp, Homo sapiens
acaacaaaatggttt

SEQ ID NO: 1763694 - DNA, 15 bp, Homo sapiens
caacaaaatggtttc

SEQ ID NO: 1763695 - DNA, 15 bp, Homo sapiens
aacaaaatggtttct

SEQ ID NO: 1763696 - DNA, 15 bp, Homo sapiens
acaaaatggtttctt

SEQ ID NO: 1763697 - DNA, 15 bp, Homo sapiens
caaaatggtttcttt

SEQ ID NO: 1763698 - DNA, 15 bp, Homo sapiens
aaaatggtttctttt

SEQ ID NO: 1763699 - DNA, 15 bp, Homo sapiens
aaatggtttctttta

SEQ ID NO: 1763700 - DNA, 15 bp, Homo sapiens
aatggtttcttttaa

SEQ ID NO: 1763701 - DNA, 15 bp, Homo sapiens
atggtttcttttaac

SEQ ID NO: 1763702 - DNA, 15 bp, Homo sapiens
tggtttcttttaaca

SEQ ID NO: 1763703 - DNA, 15 bp, Homo sapiens
ggtttcttttaacaa

SEQ ID NO: 1763704 - DNA, 15 bp, Homo sapiens
gtttcttttaacaat

SEQ ID NO: 1763705 - DNA, 15 bp, Homo sapiens
tttcttttaacaatt

SEQ ID NO: 1763706 - DNA, 15 bp, Homo sapiens
ttcttttaacaattg

SEQ ID NO: 1763707 - DNA, 15 bp, Homo sapiens
tcttttaacaattgt

SEQ ID NO: 1763708 - DNA, 15 bp, Homo sapiens
cttttaacaattgta

SEQ ID NO: 1763709 - DNA, 15 bp, Homo sapiens
ttttaacaattgtat

SEQ ID NO: 1763710 - DNA, 15 bp, Homo sapiens
tttaacaattgtata

SEQ ID NO: 1763711 - DNA, 15 bp, Homo sapiens
ttaacaattgtataa

SEQ ID NO: 1763712 - DNA, 15 bp, Homo sapiens
taacaattgtataac

SEQ ID NO: 1763713 - DNA, 15 bp, Homo sapiens
aacaattgtataacc

SEQ ID NO: 1763714 - DNA, 15 bp, Homo sapiens
acaattgtataacct

SEQ ID NO: 1763715 - DNA, 15 bp, Homo sapiens
caattgtataacctc

SEQ ID NO: 1763716 - DNA, 15 bp, Homo sapiens
aattgtataacctca

SEQ ID NO: 1763717 - DNA, 15 bp, Homo sapiens
attgtataacctcat

SEQ ID NO: 1763718 - DNA, 15 bp, Homo sapiens
ttgtataacctcatc

SEQ ID NO: 1763719 - DNA, 15 bp, Homo sapiens
tgtataacctcatct

SEQ ID NO: 1763720 - DNA, 15 bp, Homo sapiens
gtataacctcatcta

SEQ ID NO: 1763721 - DNA, 15 bp, Homo sapiens
tataacctcatctaa

SEQ ID NO: 1763722 - DNA, 15 bp, Homo sapiens
ataacctcatctaaa

SEQ ID NO: 1763723 - DNA, 15 bp, Homo sapiens
taacctcatctaaat

SEQ ID NO: 1763724 - DNA, 15 bp, Homo sapiens
aacctcatctaaatg

SEQ ID NO: 1763725 - DNA, 15 bp, Homo sapiens
acctcatctaaatgg

SEQ ID NO: 1763726 - DNA, 15 bp, Homo sapiens
cctcatctaaatggt

SEQ ID NO: 1763727 - DNA, 15 bp, Homo sapiens
ctcatctaaatggtg

SEQ ID NO: 1763728 - DNA, 15 bp, Homo sapiens
tcatctaaatggtgg

SEQ ID NO: 1763729 - DNA, 15 bp, Homo sapiens
catctaaatggtggg

SEQ ID NO: 1763730 - DNA, 15 bp, Homo sapiens
atctaaatggtggga

SEQ ID NO: 1763731 - DNA, 15 bp, Homo sapiens
tctaaatggtgggaa

SEQ ID NO: 1763732 - DNA, 15 bp, Homo sapiens
ctaaatggtgggaat

SEQ ID NO: 1763733 - DNA, 15 bp, Homo sapiens
taaatggtgggaatt

SEQ ID NO: 1763734 - DNA, 15 bp, Homo sapiens
aaatggtgggaattt

SEQ ID NO: 1763735 - DNA, 15 bp, Homo sapiens
aatggtgggaattta

SEQ ID NO: 1763736 - DNA, 15 bp, Homo sapiens
atggtgggaatttaa

SEQ ID NO: 1763737 - DNA, 15 bp, Homo sapiens
tggtgggaatttaac

SEQ ID NO: 1763738 - DNA, 15 bp, Homo sapiens
ggtgggaatttaaca

SEQ ID NO: 1763739 - DNA, 15 bp, Homo sapiens
gtgggaatttaacaa

SEQ ID NO: 1763740 - DNA, 15 bp, Homo sapiens
tgggaatttaacaaa

SEQ ID NO: 1763741 - DNA, 15 bp, Homo sapiens
gggaatttaacaaat

SEQ ID NO: 1763742 - DNA, 15 bp, Homo sapiens
ggaatttaacaaata

SEQ ID NO: 1763743 - DNA, 15 bp, Homo sapiens
gaatttaacaaatac

SEQ ID NO: 1763744 - DNA, 15 bp, Homo sapiens
aatttaacaaataca

SEQ ID NO: 1763745 - DNA, 15 bp, Homo sapiens
atttaacaaatacag

SEQ ID NO: 1763746 - DNA, 15 bp, Homo sapiens
tttaacaaatacagt

SEQ ID NO: 1763747 - DNA, 15 bp, Homo sapiens
ttaacaaatacagtt

SEQ ID NO: 1763748 - DNA, 15 bp, Homo sapiens
taacaaatacagttt

SEQ ID NO: 1763749 - DNA, 15 bp, Homo sapiens
aacaaatacagttta

SEQ ID NO: 1763750 - DNA, 15 bp, Homo sapiens
acaaatacagtttaa

SEQ ID NO: 1763751 - DNA, 15 bp, Homo sapiens
caaatacagtttaaa

SEQ ID NO: 1763752 - DNA, 15 bp, Homo sapiens
aaatacagtttaaag

SEQ ID NO: 1763753 - DNA, 15 bp, Homo sapiens
aatacagtttaaagt

SEQ ID NO: 1763754 - DNA, 15 bp, Homo sapiens
atacagtttaaagtt

SEQ ID NO: 1763755 - DNA, 15 bp, Homo sapiens
tacagtttaaagttg

SEQ ID NO: 1763756 - DNA, 15 bp, Homo sapiens
acagtttaaagttga

SEQ ID NO: 1763757 - DNA, 15 bp, Homo sapiens
cagtttaaagttgat

SEQ ID NO: 1763758 - DNA, 15 bp, Homo sapiens
agtttaaagttgata

SEQ ID NO: 1763759 - DNA, 15 bp, Homo sapiens
gtttaaagttgataa

SEQ ID NO: 1763760 - DNA, 15 bp, Homo sapiens
tttaaagttgataaa

SEQ ID NO: 1763761 - DNA, 15 bp, Homo sapiens
ttaaagttgataaat

SEQ ID NO: 1763762 - DNA, 15 bp, Homo sapiens
taaagttgataaatc

SEQ ID NO: 1763763 - DNA, 15 bp, Homo sapiens
aaagttgataaatca

SEQ ID NO: 1763764 - DNA, 15 bp, Homo sapiens
aagttgataaatcaa

SEQ ID NO: 1763765 - DNA, 15 bp, Homo sapiens
agttgataaatcaag

SEQ ID NO: 1763766 - DNA, 15 bp, Homo sapiens
gttgataaatcaagt

SEQ ID NO: 1763767 - DNA, 15 bp, Homo sapiens
ttgataaatcaagta

SEQ ID NO: 1763768 - DNA, 15 bp, Homo sapiens
tgataaatcaagtaa

SEQ ID NO: 1763769 - DNA, 15 bp, Homo sapiens
gataaatcaagtaat

SEQ ID NO: 1763770 - DNA, 15 bp, Homo sapiens
ataaatcaagtaata

SEQ ID NO: 1763771 - DNA, 15 bp, Homo sapiens
taaatcaagtaataa

SEQ ID NO: 1763772 - DNA, 15 bp, Homo sapiens
aaatcaagtaataag

SEQ ID NO: 1763773 - DNA, 15 bp, Homo sapiens
aatcaagtaataaga

SEQ ID NO: 1763774 - DNA, 15 bp, Homo sapiens
atcaagtaataagag

SEQ ID NO: 1763775 - DNA, 15 bp, Homo sapiens
tcaagtaataagagt

SEQ ID NO: 1763776 - DNA, 15 bp, Homo sapiens
caagtaataagagta

SEQ ID NO: 1763777 - DNA, 15 bp, Homo sapiens
aagtaataagagtaa

SEQ ID NO: 1763778 - DNA, 15 bp, Homo sapiens
agtaataagagtaat

SEQ ID NO: 1763779 - DNA, 15 bp, Homo sapiens
gtaataagagtaata

SEQ ID NO: 1763780 - DNA, 15 bp, Homo sapiens
taataagagtaataa

SEQ ID NO: 1763781 - DNA, 15 bp, Homo sapiens
aataagagtaataat

SEQ ID NO: 1763782 - DNA, 15 bp, Homo sapiens
ataagagtaataatg

SEQ ID NO: 1763783 - DNA, 15 bp, Homo sapiens
taagagtaataatga

SEQ ID NO: 1763784 - DNA, 15 bp, Homo sapiens
aagagtaataatgaa

SEQ ID NO: 1763785 - DNA, 15 bp, Homo sapiens
agagtaataatgaat

SEQ ID NO: 1763786 - DNA, 15 bp, Homo sapiens
gagtaataatgaatt

SEQ ID NO: 1763787 - DNA, 15 bp, Homo sapiens
agtaataatgaattt

SEQ ID NO: 1763788 - DNA, 15 bp, Homo sapiens
gtaataatgaatttg

SEQ ID NO: 1763789 - DNA, 15 bp, Homo sapiens
taataatgaatttgt

SEQ ID NO: 1763790 - DNA, 15 bp, Homo sapiens
aataatgaatttgtg

SEQ ID NO: 1763791 - DNA, 15 bp, Homo sapiens
ataatgaatttgtgt

SEQ ID NO: 1763792 - DNA, 15 bp, Homo sapiens
taatgaatttgtgta

SEQ ID NO: 1763793 - DNA, 15 bp, Homo sapiens
aatgaatttgtgtat

SEQ ID NO: 1763794 - DNA, 15 bp, Homo sapiens
atgaatttgtgtatt

SEQ ID NO: 1763795 - DNA, 15 bp, Homo sapiens
tgaatttgtgtatta

SEQ ID NO: 1763796 - DNA, 15 bp, Homo sapiens
gaatttgtgtattaa

SEQ ID NO: 1763797 - DNA, 15 bp, Homo sapiens
aatttgtgtattaac

SEQ ID NO: 1763798 - DNA, 15 bp, Homo sapiens
atttgtgtattaaca

SEQ ID NO: 1763799 - DNA, 15 bp, Homo sapiens
tttgtgtattaacaa

SEQ ID NO: 1763800 - DNA, 15 bp, Homo sapiens
ttgtgtattaacaaa

SEQ ID NO: 1763801 - DNA, 15 bp, Homo sapiens
tgtgtattaacaaaa

SEQ ID NO: 1763802 - DNA, 15 bp, Homo sapiens
gtgtattaacaaaag

SEQ ID NO: 1763803 - DNA, 15 bp, Homo sapiens
tgtattaacaaaaga

SEQ ID NO: 1763804 - DNA, 15 bp, Homo sapiens
gtattaacaaaagaa

SEQ ID NO: 1763805 - DNA, 15 bp, Homo sapiens
tattaacaaaagaaa

SEQ ID NO: 1763806 - DNA, 15 bp, Homo sapiens
attaacaaaagaaaa

SEQ ID NO: 1763807 - DNA, 15 bp, Homo sapiens
ttaacaaaagaaaat

SEQ ID NO: 1763808 - DNA, 15 bp, Homo sapiens
taacaaaagaaaatt

SEQ ID NO: 1763809 - DNA, 15 bp, Homo sapiens
aacaaaagaaaattt

SEQ ID NO: 1763810 - DNA, 15 bp, Homo sapiens
acaaaagaaaatttg

SEQ ID NO: 1763811 - DNA, 15 bp, Homo sapiens
caaaagaaaatttgc

SEQ ID NO: 1763812 - DNA, 15 bp, Homo sapiens
aaaagaaaatttgcc

SEQ ID NO: 1763813 - DNA, 15 bp, Homo sapiens
aaagaaaatttgcct

SEQ ID NO: 1763814 - DNA, 15 bp, Homo sapiens
aagaaaatttgcctt

SEQ ID NO: 1763815 - DNA, 15 bp, Homo sapiens
agaaaatttgccttt

SEQ ID NO: 1763816 - DNA, 15 bp, Homo sapiens
gaaaatttgcctttt

SEQ ID NO: 1763817 - DNA, 15 bp, Homo sapiens
aaaatttgccttttt

SEQ ID NO: 1763818 - DNA, 15 bp, Homo sapiens
aaatttgcctttttt

SEQ ID NO: 1763819 - DNA, 15 bp, Homo sapiens
aatttgccttttttc

SEQ ID NO: 1763820 - DNA, 15 bp, Homo sapiens
atttgccttttttcc

SEQ ID NO: 1763821 - DNA, 15 bp, Homo sapiens
tttgccttttttcct

SEQ ID NO: 1763822 - DNA, 15 bp, Homo sapiens
ttgccttttttcctc

SEQ ID NO: 1763823 - DNA, 15 bp, Homo sapiens
tgccttttttcctcg

SEQ ID NO: 1763824 - DNA, 15 bp, Homo sapiens
gccttttttcctcgg

SEQ ID NO: 1763825 - DNA, 15 bp, Homo sapiens
ccttttttcctcggg

SEQ ID NO: 1763826 - DNA, 15 bp, Homo sapiens
cttttttcctcgggc

SEQ ID NO: 1763827 - DNA, 15 bp, Homo sapiens
ttttttcctcgggct

SEQ ID NO: 1763828 - DNA, 15 bp, Homo sapiens
tttttcctcgggctt

SEQ ID NO: 1763829 - DNA, 15 bp, Homo sapiens
ttttcctcgggcttt

SEQ ID NO: 1763830 - DNA, 15 bp, Homo sapiens
tttcctcgggctttt

SEQ ID NO: 1763831 - DNA, 15 bp, Homo sapiens
ttcctcgggcttttg

SEQ ID NO: 1763832 - DNA, 15 bp, Homo sapiens
tcctcgggcttttga

SEQ ID NO: 1763833 - DNA, 15 bp, Homo sapiens
cctcgggcttttgaa

SEQ ID NO: 1763834 - DNA, 15 bp, Homo sapiens
ctcgggcttttgaag

SEQ ID NO: 1763835 - DNA, 15 bp, Homo sapiens
tcgggcttttgaaga

SEQ ID NO: 1763836 - DNA, 15 bp, Homo sapiens
cgggcttttgaagaa

SEQ ID NO: 1763837 - DNA, 15 bp, Homo sapiens
gggcttttgaagaat

SEQ ID NO: 1763838 - DNA, 15 bp, Homo sapiens
ggcttttgaagaatt

SEQ ID NO: 1763839 - DNA, 15 bp, Homo sapiens
gcttttgaagaattt

SEQ ID NO: 1763840 - DNA, 15 bp, Homo sapiens
cttttgaagaatttt

SEQ ID NO: 1763841 - DNA, 15 bp, Homo sapiens
ttttgaagaatttta

SEQ ID NO: 1763842 - DNA, 15 bp, Homo sapiens
tttgaagaattttaa

SEQ ID NO: 1763843 - DNA, 15 bp, Homo sapiens
ttgaagaattttaag

SEQ ID NO: 1763844 - DNA, 15 bp, Homo sapiens
tgaagaattttaaga

SEQ ID NO: 1763845 - DNA, 15 bp, Homo sapiens
gaagaattttaagat

SEQ ID NO: 1763846 - DNA, 15 bp, Homo sapiens
aagaattttaagatt

SEQ ID NO: 1763847 - DNA, 15 bp, Homo sapiens
agaattttaagattc

SEQ ID NO: 1763848 - DNA, 15 bp, Homo sapiens
gaattttaagattca

SEQ ID NO: 1763849 - DNA, 15 bp, Homo sapiens
aattttaagattcat

SEQ ID NO: 1763850 - DNA, 15 bp, Homo sapiens
attttaagattcatt

SEQ ID NO: 1763851 - DNA, 15 bp, Homo sapiens
ttttaagattcattc

SEQ ID NO: 1763852 - DNA, 15 bp, Homo sapiens
tttaagattcattct

SEQ ID NO: 1763853 - DNA, 15 bp, Homo sapiens
ttaagattcattcta

SEQ ID NO: 1763854 - DNA, 15 bp, Homo sapiens
taagattcattctaa

SEQ ID NO: 1763855 - DNA, 15 bp, Homo sapiens
aagattcattctaat

SEQ ID NO: 1763856 - DNA, 15 bp, Homo sapiens
agattcattctaatt

SEQ ID NO: 1763857 - DNA, 15 bp, Homo sapiens
gattcattctaatta

SEQ ID NO: 1763858 - DNA, 15 bp, Homo sapiens
attcattctaattat

SEQ ID NO: 1763859 - DNA, 15 bp, Homo sapiens
ttcattctaattatt

SEQ ID NO: 1763860 - DNA, 15 bp, Homo sapiens
tcattctaattattg

SEQ ID NO: 1763861 - DNA, 15 bp, Homo sapiens
cattctaattattga

SEQ ID NO: 1763862 - DNA, 15 bp, Homo sapiens
attctaattattgag

SEQ ID NO: 1763863 - DNA, 15 bp, Homo sapiens
ttctaattattgaga

SEQ ID NO: 1763864 - DNA, 15 bp, Homo sapiens
tctaattattgagac

SEQ ID NO: 1763865 - DNA, 15 bp, Homo sapiens
ctaattattgagacc

SEQ ID NO: 1763866 - DNA, 15 bp, Homo sapiens
taattattgagacca

SEQ ID NO: 1763867 - DNA, 15 bp, Homo sapiens
aattattgagaccaa

SEQ ID NO: 1763868 - DNA, 15 bp, Homo sapiens
attattgagaccaat

SEQ ID NO: 1763869 - DNA, 15 bp, Homo sapiens
ttattgagaccaatt

SEQ ID NO: 1763870 - DNA, 15 bp, Homo sapiens
tattgagaccaatta

SEQ ID NO: 1763871 - DNA, 15 bp, Homo sapiens
attgagaccaattat

SEQ ID NO: 1763872 - DNA, 15 bp, Homo sapiens
ttgagaccaattatg

SEQ ID NO: 1763873 - DNA, 15 bp, Homo sapiens
tgagaccaattatgt

SEQ ID NO: 1763874 - DNA, 15 bp, Homo sapiens
gagaccaattatgtg

SEQ ID NO: 1763875 - DNA, 15 bp, Homo sapiens
agaccaattatgtgc

SEQ ID NO: 1763876 - DNA, 15 bp, Homo sapiens
gaccaattatgtgcc

SEQ ID NO: 1763877 - DNA, 15 bp, Homo sapiens
accaattatgtgcca

SEQ ID NO: 1763878 - DNA, 15 bp, Homo sapiens
ccaattatgtgccag

SEQ ID NO: 1763879 - DNA, 15 bp, Homo sapiens
caattatgtgccaga

SEQ ID NO: 1763880 - DNA, 15 bp, Homo sapiens
aattatgtgccagac

SEQ ID NO: 1763881 - DNA, 15 bp, Homo sapiens
attatgtgccagaca

SEQ ID NO: 1763882 - DNA, 15 bp, Homo sapiens
ttatgtgccagacac

SEQ ID NO: 1763883 - DNA, 15 bp, Homo sapiens
tatgtgccagacact

SEQ ID NO: 1763884 - DNA, 15 bp, Homo sapiens
atgtgccagacacta

SEQ ID NO: 1763885 - DNA, 15 bp, Homo sapiens
tgtgccagacactaa

SEQ ID NO: 1763886 - DNA, 15 bp, Homo sapiens
gtgccagacactaaa

SEQ ID NO: 1763887 - DNA, 15 bp, Homo sapiens
tgccagacactaaaa

SEQ ID NO: 1763888 - DNA, 15 bp, Homo sapiens
gccagacactaaaat

SEQ ID NO: 1763889 - DNA, 15 bp, Homo sapiens
ccagacactaaaata

SEQ ID NO: 1763890 - DNA, 15 bp, Homo sapiens
cagacactaaaataa

SEQ ID NO: 1763891 - DNA, 15 bp, Homo sapiens
agacactaaaataaa

SEQ ID NO: 1763892 - DNA, 15 bp, Homo sapiens
gacactaaaataaat

SEQ ID NO: 1763893 - DNA, 15 bp, Homo sapiens
acactaaaataaatg

SEQ ID NO: 1763894 - DNA, 15 bp, Homo sapiens
cactaaaataaatga

SEQ ID NO: 1763895 - DNA, 15 bp, Homo sapiens
actaaaataaatgaa

SEQ ID NO: 1763896 - DNA, 15 bp, Homo sapiens
ctaaaataaatgaag

SEQ ID NO: 1763897 - DNA, 15 bp, Homo sapiens
taaaataaatgaagt

SEQ ID NO: 1763898 - DNA, 15 bp, Homo sapiens
aaaataaatgaagtt

SEQ ID NO: 1763899 - DNA, 15 bp, Homo sapiens
aaataaatgaagttc

SEQ ID NO: 1763900 - DNA, 15 bp, Homo sapiens
aataaatgaagttct

SEQ ID NO: 1763901 - DNA, 15 bp, Homo sapiens
ataaatgaagttcta

SEQ ID NO: 1763902 - DNA, 15 bp, Homo sapiens
taaatgaagttctag

SEQ ID NO: 1763903 - DNA, 15 bp, Homo sapiens
aaatgaagttctagg

SEQ ID NO: 1763904 - DNA, 15 bp, Homo sapiens
aatgaagttctaggg

SEQ ID NO: 1763905 - DNA, 15 bp, Homo sapiens
atgaagttctagggt

SEQ ID NO: 1763906 - DNA, 15 bp, Homo sapiens
tgaagttctagggtg

SEQ ID NO: 1763907 - DNA, 15 bp, Homo sapiens
gaagttctagggtgt

SEQ ID NO: 1763908 - DNA, 15 bp, Homo sapiens
aagttctagggtgtt

SEQ ID NO: 1763909 - DNA, 15 bp, Homo sapiens
agttctagggtgttt

SEQ ID NO: 1763910 - DNA, 15 bp, Homo sapiens
gttctagggtgtttt

SEQ ID NO: 1763911 - DNA, 15 bp, Homo sapiens
ttctagggtgttttt

SEQ ID NO: 1763912 - DNA, 15 bp, Homo sapiens
tctagggtgtttttc

SEQ ID NO: 1763913 - DNA, 15 bp, Homo sapiens
ctagggtgtttttct

SEQ ID NO: 1763914 - DNA, 15 bp, Homo sapiens
tagggtgtttttctc

SEQ ID NO: 1763915 - DNA, 15 bp, Homo sapiens
agggtgtttttctcc

SEQ ID NO: 1763916 - DNA, 15 bp, Homo sapiens
gggtgtttttctccc

SEQ ID NO: 1763917 - DNA, 15 bp, Homo sapiens
ggtgtttttctccca

SEQ ID NO: 1763918 - DNA, 15 bp, Homo sapiens
gtgtttttctcccat

SEQ ID NO: 1763919 - DNA, 15 bp, Homo sapiens
tgtttttctcccatc

SEQ ID NO: 1763920 - DNA, 15 bp, Homo sapiens
gtttttctcccatcc

SEQ ID NO: 1763921 - DNA, 15 bp, Homo sapiens
tttttctcccatcct

SEQ ID NO: 1763922 - DNA, 15 bp, Homo sapiens
ttttctcccatcctt

SEQ ID NO: 1763923 - DNA, 15 bp, Homo sapiens
tttctcccatccttg

SEQ ID NO: 1763924 - DNA, 15 bp, Homo sapiens
ttctcccatccttgt

SEQ ID NO: 1763925 - DNA, 15 bp, Homo sapiens
tctcccatccttgtt

SEQ ID NO: 1763926 - DNA, 15 bp, Homo sapiens
ctcccatccttgttg

SEQ ID NO: 1763927 - DNA, 15 bp, Homo sapiens
tcccatccttgttgg

SEQ ID NO: 1763928 - DNA, 15 bp, Homo sapiens
cccatccttgttggc

SEQ ID NO: 1763929 - DNA, 15 bp, Homo sapiens
ccatccttgttggcc

SEQ ID NO: 1763930 - DNA, 15 bp, Homo sapiens
catccttgttggccc

SEQ ID NO: 1763931 - DNA, 15 bp, Homo sapiens
atccttgttggccca

SEQ ID NO: 1763932 - DNA, 15 bp, Homo sapiens
tccttgttggcccat

SEQ ID NO: 1763933 - DNA, 15 bp, Homo sapiens
ccttgttggcccata

SEQ ID NO: 1763934 - DNA, 15 bp, Homo sapiens
cttgttggcccatag

SEQ ID NO: 1763935 - DNA, 15 bp, Homo sapiens
ttgttggcccatagt

SEQ ID NO: 1763936 - DNA, 15 bp, Homo sapiens
tgttggcccatagtt

SEQ ID NO: 1763937 - DNA, 15 bp, Homo sapiens
gttggcccatagttt

SEQ ID NO: 1763938 - DNA, 15 bp, Homo sapiens
ttggcccatagtttt

SEQ ID NO: 1763939 - DNA, 15 bp, Homo sapiens
tggcccatagttttg

SEQ ID NO: 1763940 - DNA, 15 bp, Homo sapiens
ggcccatagttttga

SEQ ID NO: 1763941 - DNA, 15 bp, Homo sapiens
gcccatagttttgac

SEQ ID NO: 1763942 - DNA, 15 bp, Homo sapiens
cccatagttttgact

SEQ ID NO: 1763943 - DNA, 15 bp, Homo sapiens
ccatagttttgactg

SEQ ID NO: 1763944 - DNA, 15 bp, Homo sapiens
catagttttgactgc

SEQ ID NO: 1763945 - DNA, 15 bp, Homo sapiens
atagttttgactgca

SEQ ID NO: 1763946 - DNA, 15 bp, Homo sapiens
tagttttgactgcat

SEQ ID NO: 1763947 - DNA, 15 bp, Homo sapiens
agttttgactgcata

SEQ ID NO: 1763948 - DNA, 15 bp, Homo sapiens
gttttgactgcatat

SEQ ID NO: 1763949 - DNA, 15 bp, Homo sapiens
ttttgactgcatata

SEQ ID NO: 1763950 - DNA, 15 bp, Homo sapiens
tttgactgcatataa

SEQ ID NO: 1763951 - DNA, 15 bp, Homo sapiens
ttgactgcatataac

SEQ ID NO: 1763952 - DNA, 15 bp, Homo sapiens
tgactgcatataaca

SEQ ID NO: 1763953 - DNA, 15 bp, Homo sapiens
gactgcatataacag

SEQ ID NO: 1763954 - DNA, 15 bp, Homo sapiens
actgcatataacagg

SEQ ID NO: 1763955 - DNA, 15 bp, Homo sapiens
ctgcatataacagga

SEQ ID NO: 1763956 - DNA, 15 bp, Homo sapiens
tgcatataacaggag

SEQ ID NO: 1763957 - DNA, 15 bp, Homo sapiens
gcatataacaggaga

SEQ ID NO: 1763958 - DNA, 15 bp, Homo sapiens
catataacaggagat

SEQ ID NO: 1763959 - DNA, 15 bp, Homo sapiens
atataacaggagatg

SEQ ID NO: 1763960 - DNA, 15 bp, Homo sapiens
tataacaggagatgg

SEQ ID NO: 1763961 - DNA, 15 bp, Homo sapiens
ataacaggagatggc

SEQ ID NO: 1763962 - DNA, 15 bp, Homo sapiens
taacaggagatggca

SEQ ID NO: 1763963 - DNA, 15 bp, Homo sapiens
aacaggagatggcat

SEQ ID NO: 1763964 - DNA, 15 bp, Homo sapiens
acaggagatggcatg

SEQ ID NO: 1763965 - DNA, 15 bp, Homo sapiens
caggagatggcatgc

SEQ ID NO: 1763966 - DNA, 15 bp, Homo sapiens
aggagatggcatgca

SEQ ID NO: 1763967 - DNA, 15 bp, Homo sapiens
ggagatggcatgcac

SEQ ID NO: 1763968 - DNA, 15 bp, Homo sapiens
gagatggcatgcaca

SEQ ID NO: 1763969 - DNA, 15 bp, Homo sapiens
agatggcatgcacag

SEQ ID NO: 1763970 - DNA, 15 bp, Homo sapiens
gatggcatgcacagc

SEQ ID NO: 1763971 - DNA, 15 bp, Homo sapiens
atggcatgcacagcc

SEQ ID NO: 1763972 - DNA, 15 bp, Homo sapiens
tggcatgcacagccc

SEQ ID NO: 1763973 - DNA, 15 bp, Homo sapiens
ggcatgcacagccca

SEQ ID NO: 1763974 - DNA, 15 bp, Homo sapiens
gcatgcacagcccac

SEQ ID NO: 1763975 - DNA, 15 bp, Homo sapiens
catgcacagcccaca

SEQ ID NO: 1763976 - DNA, 15 bp, Homo sapiens
atgcacagcccacag

SEQ ID NO: 1763977 - DNA, 15 bp, Homo sapiens
tgcacagcccacaga

SEQ ID NO: 1763978 - DNA, 15 bp, Homo sapiens
gcacagcccacagac

SEQ ID NO: 1763979 - DNA, 15 bp, Homo sapiens
cacagcccacagacc

SEQ ID NO: 1763980 - DNA, 15 bp, Homo sapiens
acagcccacagacca

SEQ ID NO: 1763981 - DNA, 15 bp, Homo sapiens
cagcccacagaccat

SEQ ID NO: 1763982 - DNA, 15 bp, Homo sapiens
agcccacagaccata

SEQ ID NO: 1763983 - DNA, 15 bp, Homo sapiens
gcccacagaccataa

SEQ ID NO: 1763984 - DNA, 15 bp, Homo sapiens
cccacagaccataaa

SEQ ID NO: 1763985 - DNA, 15 bp, Homo sapiens
ccacagaccataaat

SEQ ID NO: 1763986 - DNA, 15 bp, Homo sapiens
cacagaccataaatt

SEQ ID NO: 1763987 - DNA, 15 bp, Homo sapiens
acagaccataaattt

SEQ ID NO: 1763988 - DNA, 15 bp, Homo sapiens
cagaccataaatttt

SEQ ID NO: 1763989 - DNA, 15 bp, Homo sapiens
agaccataaattttg

SEQ ID NO: 1763990 - DNA, 15 bp, Homo sapiens
gaccataaattttgt

SEQ ID NO: 1763991 - DNA, 15 bp, Homo sapiens
accataaattttgtt

SEQ ID NO: 1763992 - DNA, 15 bp, Homo sapiens
ccataaattttgttt

SEQ ID NO: 1763993 - DNA, 15 bp, Homo sapiens
cataaattttgtttt

SEQ ID NO: 1763994 - DNA, 15 bp, Homo sapiens
ataaattttgtttta

SEQ ID NO: 1763995 - DNA, 15 bp, Homo sapiens
taaattttgttttaa

SEQ ID NO: 1763996 - DNA, 15 bp, Homo sapiens
aaattttgttttaac

SEQ ID NO: 1763997 - DNA, 15 bp, Homo sapiens
aattttgttttaaca

SEQ ID NO: 1763998 - DNA, 15 bp, Homo sapiens
attttgttttaacac

SEQ ID NO: 1763999 - DNA, 15 bp, Homo sapiens
ttttgttttaacaca

SEQ ID NO: 1764000 - DNA, 15 bp, Homo sapiens
tttgttttaacacag

SEQ ID NO: 1764001 - DNA, 15 bp, Homo sapiens
ttgttttaacacagc

SEQ ID NO: 1764002 - DNA, 15 bp, Homo sapiens
tgttttaacacagcc

SEQ ID NO: 1764003 - DNA, 15 bp, Homo sapiens
gttttaacacagccg

SEQ ID NO: 1764004 - DNA, 15 bp, Homo sapiens
ttttaacacagccgc

SEQ ID NO: 1764005 - DNA, 15 bp, Homo sapiens
tttaacacagccgct

SEQ ID NO: 1764006 - DNA, 15 bp, Homo sapiens
ttaacacagccgctt

SEQ ID NO: 1764007 - DNA, 15 bp, Homo sapiens
taacacagccgcttt

SEQ ID NO: 1764008 - DNA, 15 bp, Homo sapiens
aacacagccgcttta

SEQ ID NO: 1764009 - DNA, 15 bp, Homo sapiens
acacagccgctttat

SEQ ID NO: 1764010 - DNA, 15 bp, Homo sapiens
cacagccgctttatt

SEQ ID NO: 1764011 - DNA, 15 bp, Homo sapiens
acagccgctttattc

SEQ ID NO: 1764012 - DNA, 15 bp, Homo sapiens
cagccgctttattca

SEQ ID NO: 1764013 - DNA, 15 bp, Homo sapiens
agccgctttattcat

SEQ ID NO: 1764014 - DNA, 15 bp, Homo sapiens
gccgctttattcatt

SEQ ID NO: 1764015 - DNA, 15 bp, Homo sapiens
ccgctttattcattt

SEQ ID NO: 1764016 - DNA, 15 bp, Homo sapiens
cgctttattcattta

SEQ ID NO: 1764017 - DNA, 15 bp, Homo sapiens
gctttattcatttat

SEQ ID NO: 1764018 - DNA, 15 bp, Homo sapiens
ctttattcatttata

SEQ ID NO: 1764019 - DNA, 15 bp, Homo sapiens
tttattcatttatat

SEQ ID NO: 1764020 - DNA, 15 bp, Homo sapiens
ttattcatttatata

SEQ ID NO: 1764021 - DNA, 15 bp, Homo sapiens
tattcatttatatat

SEQ ID NO: 1764022 - DNA, 15 bp, Homo sapiens
attcatttatatatt

SEQ ID NO: 1764023 - DNA, 15 bp, Homo sapiens
ttcatttatatattg

SEQ ID NO: 1764024 - DNA, 15 bp, Homo sapiens
tcatttatatattgt

SEQ ID NO: 1764025 - DNA, 15 bp, Homo sapiens
catttatatattgtc

SEQ ID NO: 1764026 - DNA, 15 bp, Homo sapiens
atttatatattgtct

SEQ ID NO: 1764027 - DNA, 15 bp, Homo sapiens
tttatatattgtctg

SEQ ID NO: 1764028 - DNA, 15 bp, Homo sapiens
ttatatattgtctgt

SEQ ID NO: 1764029 - DNA, 15 bp, Homo sapiens
tatatattgtctgtg

SEQ ID NO: 1764030 - DNA, 15 bp, Homo sapiens
atatattgtctgtgg

SEQ ID NO: 1764031 - DNA, 15 bp, Homo sapiens
tatattgtctgtggc

SEQ ID NO: 1764032 - DNA, 15 bp, Homo sapiens
atattgtctgtggct

SEQ ID NO: 1764033 - DNA, 15 bp, Homo sapiens
tattgtctgtggctg

SEQ ID NO: 1764034 - DNA, 15 bp, Homo sapiens
attgtctgtggctgc

SEQ ID NO: 1764035 - DNA, 15 bp, Homo sapiens
ttgtctgtggctgct

SEQ ID NO: 1764036 - DNA, 15 bp, Homo sapiens
tgtctgtggctgctt

SEQ ID NO: 1764037 - DNA, 15 bp, Homo sapiens
gtctgtggctgcttt

SEQ ID NO: 1764038 - DNA, 15 bp, Homo sapiens
tctgtggctgctttt

SEQ ID NO: 1764039 - DNA, 15 bp, Homo sapiens
ctgtggctgcttttg

SEQ ID NO: 1764040 - DNA, 15 bp, Homo sapiens
tgtggctgcttttgc

SEQ ID NO: 1764041 - DNA, 15 bp, Homo sapiens
gtggctgcttttgca

SEQ ID NO: 1764042 - DNA, 15 bp, Homo sapiens
tggctgcttttgcac

SEQ ID NO: 1764043 - DNA, 15 bp, Homo sapiens
ggctgcttttgcact

SEQ ID NO: 1764044 - DNA, 15 bp, Homo sapiens
gctgcttttgcactg

SEQ ID NO: 1764045 - DNA, 15 bp, Homo sapiens
ctgcttttgcactgc

SEQ ID NO: 1764046 - DNA, 15 bp, Homo sapiens
tgcttttgcactgca

SEQ ID NO: 1764047 - DNA, 15 bp, Homo sapiens
gcttttgcactgcag

SEQ ID NO: 1764048 - DNA, 15 bp, Homo sapiens
cttttgcactgcagt

SEQ ID NO: 1764049 - DNA, 15 bp, Homo sapiens
ttttgcactgcagta

SEQ ID NO: 1764050 - DNA, 15 bp, Homo sapiens
tttgcactgcagtac

SEQ ID NO: 1764051 - DNA, 15 bp, Homo sapiens
ttgcactgcagtaca

SEQ ID NO: 1764052 - DNA, 15 bp, Homo sapiens
tgcactgcagtacag

SEQ ID NO: 1764053 - DNA, 15 bp, Homo sapiens
gcactgcagtacaga

SEQ ID NO: 1764054 - DNA, 15 bp, Homo sapiens
cactgcagtacagag

SEQ ID NO: 1764055 - DNA, 15 bp, Homo sapiens
actgcagtacagagc

SEQ ID NO: 1764056 - DNA, 15 bp, Homo sapiens
ctgcagtacagagct

SEQ ID NO: 1764057 - DNA, 15 bp, Homo sapiens
tgcagtacagagctg

SEQ ID NO: 1764058 - DNA, 15 bp, Homo sapiens
gcagtacagagctga

SEQ ID NO: 1764059 - DNA, 15 bp, Homo sapiens
cagtacagagctgag

SEQ ID NO: 1764060 - DNA, 15 bp, Homo sapiens
agtacagagctgaga

SEQ ID NO: 1764061 - DNA, 15 bp, Homo sapiens
gtacagagctgagaa

SEQ ID NO: 1764062 - DNA, 15 bp, Homo sapiens
tacagagctgagaag

SEQ ID NO: 1764063 - DNA, 15 bp, Homo sapiens
acagagctgagaagt

SEQ ID NO: 1764064 - DNA, 15 bp, Homo sapiens
cagagctgagaagtt

SEQ ID NO: 1764065 - DNA, 15 bp, Homo sapiens
agagctgagaagttg

SEQ ID NO: 1764066 - DNA, 15 bp, Homo sapiens
gagctgagaagttgc

SEQ ID NO: 1764067 - DNA, 15 bp, Homo sapiens
agctgagaagttgca

SEQ ID NO: 1764068 - DNA, 15 bp, Homo sapiens
gctgagaagttgcag

SEQ ID NO: 1764069 - DNA, 15 bp, Homo sapiens
ctgagaagttgcagc

SEQ ID NO: 1764070 - DNA, 15 bp, Homo sapiens
tgagaagttgcagcc

SEQ ID NO: 1764071 - DNA, 15 bp, Homo sapiens
gagaagttgcagcca

SEQ ID NO: 1764072 - DNA, 15 bp, Homo sapiens
agaagttgcagccag

SEQ ID NO: 1764073 - DNA, 15 bp, Homo sapiens
gaagttgcagccaga

SEQ ID NO: 1764074 - DNA, 15 bp, Homo sapiens
aagttgcagccagaa

SEQ ID NO: 1764075 - DNA, 15 bp, Homo sapiens
agttgcagccagaaa

SEQ ID NO: 1764076 - DNA, 15 bp, Homo sapiens
gttgcagccagaaag

SEQ ID NO: 1764077 - DNA, 15 bp, Homo sapiens
ttgcagccagaaagt

SEQ ID NO: 1764078 - DNA, 15 bp, Homo sapiens
tgcagccagaaagta

SEQ ID NO: 1764079 - DNA, 15 bp, Homo sapiens
gcagccagaaagtag

SEQ ID NO: 1764080 - DNA, 15 bp, Homo sapiens
cagccagaaagtaga

SEQ ID NO: 1764081 - DNA, 15 bp, Homo sapiens
agccagaaagtagag

SEQ ID NO: 1764082 - DNA, 15 bp, Homo sapiens
gccagaaagtagagc

SEQ ID NO: 1764083 - DNA, 15 bp, Homo sapiens
ccagaaagtagagcc

SEQ ID NO: 1764084 - DNA, 15 bp, Homo sapiens
cagaaagtagagcct

SEQ ID NO: 1764085 - DNA, 15 bp, Homo sapiens
agaaagtagagcctg

SEQ ID NO: 1764086 - DNA, 15 bp, Homo sapiens
gaaagtagagcctgc

SEQ ID NO: 1764087 - DNA, 15 bp, Homo sapiens
aaagtagagcctgca

SEQ ID NO: 1764088 - DNA, 15 bp, Homo sapiens
aagtagagcctgcaa

SEQ ID NO: 1764089 - DNA, 15 bp, Homo sapiens
agtagagcctgcaaa

SEQ ID NO: 1764090 - DNA, 15 bp, Homo sapiens
gtagagcctgcaaac

SEQ ID NO: 1764091 - DNA, 15 bp, Homo sapiens
tagagcctgcaaacc

SEQ ID NO: 1764092 - DNA, 15 bp, Homo sapiens
agagcctgcaaaccg

SEQ ID NO: 1764093 - DNA, 15 bp, Homo sapiens
gagcctgcaaaccga

SEQ ID NO: 1764094 - DNA, 15 bp, Homo sapiens
agcctgcaaaccgaa

SEQ ID NO: 1764095 - DNA, 15 bp, Homo sapiens
gcctgcaaaccgaaa

SEQ ID NO: 1764096 - DNA, 15 bp, Homo sapiens
cctgcaaaccgaaaa

SEQ ID NO: 1764097 - DNA, 15 bp, Homo sapiens
ctgcaaaccgaaaat

SEQ ID NO: 1764098 - DNA, 15 bp, Homo sapiens
tgcaaaccgaaaata

SEQ ID NO: 1764099 - DNA, 15 bp, Homo sapiens
gcaaaccgaaaatat

SEQ ID NO: 1764100 - DNA, 15 bp, Homo sapiens
caaaccgaaaatatt

SEQ ID NO: 1764101 - DNA, 15 bp, Homo sapiens
aaaccgaaaatattt

SEQ ID NO: 1764102 - DNA, 15 bp, Homo sapiens
aaccgaaaatattta

SEQ ID NO: 1764103 - DNA, 15 bp, Homo sapiens
accgaaaatatttac

SEQ ID NO: 1764104 - DNA, 15 bp, Homo sapiens
ccgaaaatatttact

SEQ ID NO: 1764105 - DNA, 15 bp, Homo sapiens
cgaaaatatttacta

SEQ ID NO: 1764106 - DNA, 15 bp, Homo sapiens
gaaaatatttactat

SEQ ID NO: 1764107 - DNA, 15 bp, Homo sapiens
aaaatatttactatc

SEQ ID NO: 1764108 - DNA, 15 bp, Homo sapiens
aaatatttactatct

SEQ ID NO: 1764109 - DNA, 15 bp, Homo sapiens
aatatttactatcta

SEQ ID NO: 1764110 - DNA, 15 bp, Homo sapiens
atatttactatctac

SEQ ID NO: 1764111 - DNA, 15 bp, Homo sapiens
tatttactatctact

SEQ ID NO: 1764112 - DNA, 15 bp, Homo sapiens
atttactatctactc

SEQ ID NO: 1764113 - DNA, 15 bp, Homo sapiens
tttactatctactcc

SEQ ID NO: 1764114 - DNA, 15 bp, Homo sapiens
ttactatctactcct

SEQ ID NO: 1764115 - DNA, 15 bp, Homo sapiens
tactatctactcctt

SEQ ID NO: 1764116 - DNA, 15 bp, Homo sapiens
actatctactccttg

SEQ ID NO: 1764117 - DNA, 15 bp, Homo sapiens
ctatctactccttga

SEQ ID NO: 1764118 - DNA, 15 bp, Homo sapiens
tatctactccttgag

SEQ ID NO: 1764119 - DNA, 15 bp, Homo sapiens
atctactccttgaga

SEQ ID NO: 1764120 - DNA, 15 bp, Homo sapiens
tctactccttgagaa

SEQ ID NO: 1764121 - DNA, 15 bp, Homo sapiens
ctactccttgagaag

SEQ ID NO: 1764122 - DNA, 15 bp, Homo sapiens
tactccttgagaaga

SEQ ID NO: 1764123 - DNA, 15 bp, Homo sapiens
actccttgagaagaa

SEQ ID NO: 1764124 - DNA, 15 bp, Homo sapiens
ctccttgagaagaaa

SEQ ID NO: 1764125 - DNA, 15 bp, Homo sapiens
tccttgagaagaaag

SEQ ID NO: 1764126 - DNA, 15 bp, Homo sapiens
ccttgagaagaaagt

SEQ ID NO: 1764127 - DNA, 15 bp, Homo sapiens
cttgagaagaaagtt

SEQ ID NO: 1764128 - DNA, 15 bp, Homo sapiens
ttgagaagaaagttt

SEQ ID NO: 1764129 - DNA, 15 bp, Homo sapiens
tgagaagaaagtttg

SEQ ID NO: 1764130 - DNA, 15 bp, Homo sapiens
gagaagaaagtttgt

SEQ ID NO: 1764131 - DNA, 15 bp, Homo sapiens
agaagaaagtttgtc

SEQ ID NO: 1764132 - DNA, 15 bp, Homo sapiens
gaagaaagtttgtca

SEQ ID NO: 1764133 - DNA, 15 bp, Homo sapiens
aagaaagtttgtcaa

SEQ ID NO: 1764134 - DNA, 15 bp, Homo sapiens
agaaagtttgtcaat

SEQ ID NO: 1764135 - DNA, 15 bp, Homo sapiens
gaaagtttgtcaata

SEQ ID NO: 1764136 - DNA, 15 bp, Homo sapiens
aaagtttgtcaatac

SEQ ID NO: 1764137 - DNA, 15 bp, Homo sapiens
aagtttgtcaatacc

SEQ ID NO: 1764138 - DNA, 15 bp, Homo sapiens
agtttgtcaataccc

SEQ ID NO: 1764139 - DNA, 15 bp, Homo sapiens
gtttgtcaataccca

SEQ ID NO: 1764140 - DNA, 15 bp, Homo sapiens
tttgtcaatacccaa

SEQ ID NO: 1764141 - DNA, 15 bp, Homo sapiens
ttgtcaatacccaat

SEQ ID NO: 1764142 - DNA, 15 bp, Homo sapiens
tgtcaatacccaata

SEQ ID NO: 1764143 - DNA, 15 bp, Homo sapiens
gtcaatacccaatat

SEQ ID NO: 1764144 - DNA, 15 bp, Homo sapiens
tcaatacccaatata

SEQ ID NO: 1764145 - DNA, 15 bp, Homo sapiens
caatacccaatataa

SEQ ID NO: 1764146 - DNA, 15 bp, Homo sapiens
aatacccaatataaa

SEQ ID NO: 1764147 - DNA, 15 bp, Homo sapiens
atacccaatataaag

SEQ ID NO: 1764148 - DNA, 15 bp, Homo sapiens
tacccaatataaagc

SEQ ID NO: 1764149 - DNA, 15 bp, Homo sapiens
acccaatataaagca

SEQ ID NO: 1764150 - DNA, 15 bp, Homo sapiens
cccaatataaagcat

SEQ ID NO: 1764151 - DNA, 15 bp, Homo sapiens
ccaatataaagcatt

SEQ ID NO: 1764152 - DNA, 15 bp, Homo sapiens
caatataaagcatta

SEQ ID NO: 1764153 - DNA, 15 bp, Homo sapiens
aatataaagcattaa

SEQ ID NO: 1764154 - DNA, 15 bp, Homo sapiens
atataaagcattaac

SEQ ID NO: 1764155 - DNA, 15 bp, Homo sapiens
tataaagcattaaca

SEQ ID NO: 1764156 - DNA, 15 bp, Homo sapiens
ataaagcattaacat

SEQ ID NO: 1764157 - DNA, 15 bp, Homo sapiens
taaagcattaacatg

SEQ ID NO: 1764158 - DNA, 15 bp, Homo sapiens
aaagcattaacatgt

SEQ ID NO: 1764159 - DNA, 15 bp, Homo sapiens
aagcattaacatgtt

SEQ ID NO: 1764160 - DNA, 15 bp, Homo sapiens
agcattaacatgttt

SEQ ID NO: 1764161 - DNA, 15 bp, Homo sapiens
gcattaacatgtttc

SEQ ID NO: 1764162 - DNA, 15 bp, Homo sapiens
cattaacatgtttcc

SEQ ID NO: 1764163 - DNA, 15 bp, Homo sapiens
attaacatgtttccc

SEQ ID NO: 1764164 - DNA, 15 bp, Homo sapiens
ttaacatgtttccca

SEQ ID NO: 1764165 - DNA, 15 bp, Homo sapiens
taacatgtttcccaa

SEQ ID NO: 1764166 - DNA, 15 bp, Homo sapiens
aacatgtttcccaaa

SEQ ID NO: 1764167 - DNA, 15 bp, Homo sapiens
acatgtttcccaaag

SEQ ID NO: 1764168 - DNA, 15 bp, Homo sapiens
catgtttcccaaagt

SEQ ID NO: 1764169 - DNA, 15 bp, Homo sapiens
atgtttcccaaagtc

SEQ ID NO: 1764170 - DNA, 15 bp, Homo sapiens
tgtttcccaaagtcg

SEQ ID NO: 1764171 - DNA, 15 bp, Homo sapiens
gtttcccaaagtcgt

SEQ ID NO: 1764172 - DNA, 15 bp, Homo sapiens
tttcccaaagtcgta

SEQ ID NO: 1764173 - DNA, 15 bp, Homo sapiens
ttcccaaagtcgtaa

SEQ ID NO: 1764174 - DNA, 15 bp, Homo sapiens
tcccaaagtcgtaac

SEQ ID NO: 1764175 - DNA, 15 bp, Homo sapiens
cccaaagtcgtaact

SEQ ID NO: 1764176 - DNA, 15 bp, Homo sapiens
ccaaagtcgtaacta

SEQ ID NO: 1764177 - DNA, 15 bp, Homo sapiens
caaagtcgtaactat

SEQ ID NO: 1764178 - DNA, 15 bp, Homo sapiens
aaagtcgtaactata

SEQ ID NO: 1764179 - DNA, 15 bp, Homo sapiens
aagtcgtaactatac

SEQ ID NO: 1764180 - DNA, 15 bp, Homo sapiens
agtcgtaactataca

SEQ ID NO: 1764181 - DNA, 15 bp, Homo sapiens
gtcgtaactatacaa

SEQ ID NO: 1764182 - DNA, 15 bp, Homo sapiens
tcgtaactatacaaa

SEQ ID NO: 1764183 - DNA, 15 bp, Homo sapiens
cgtaactatacaaaa

SEQ ID NO: 1764184 - DNA, 15 bp, Homo sapiens
gtaactatacaaaaa

SEQ ID NO: 1764185 - DNA, 15 bp, Homo sapiens
taactatacaaaaag

SEQ ID NO: 1764186 - DNA, 15 bp, Homo sapiens
aactatacaaaaagg

SEQ ID NO: 1764187 - DNA, 15 bp, Homo sapiens
actatacaaaaaggt

SEQ ID NO: 1764188 - DNA, 15 bp, Homo sapiens
ctatacaaaaaggta

SEQ ID NO: 1764189 - DNA, 15 bp, Homo sapiens
tatacaaaaaggtat

SEQ ID NO: 1764190 - DNA, 15 bp, Homo sapiens
atacaaaaaggtata

SEQ ID NO: 1764191 - DNA, 15 bp, Homo sapiens
tacaaaaaggtataa

SEQ ID NO: 1764192 - DNA, 15 bp, Homo sapiens
acaaaaaggtataat

SEQ ID NO: 1764193 - DNA, 15 bp, Homo sapiens
caaaaaggtataatc

SEQ ID NO: 1764194 - DNA, 15 bp, Homo sapiens
aaaaaggtataatct

SEQ ID NO: 1764195 - DNA, 15 bp, Homo sapiens
aaaaggtataatctg

SEQ ID NO: 1764196 - DNA, 15 bp, Homo sapiens
aaaggtataatctga

SEQ ID NO: 1764197 - DNA, 15 bp, Homo sapiens
aaggtataatctgaa

SEQ ID NO: 1764198 - DNA, 15 bp, Homo sapiens
aggtataatctgaaa

SEQ ID NO: 1764199 - DNA, 15 bp, Homo sapiens
ggtataatctgaaaa

SEQ ID NO: 1764200 - DNA, 15 bp, Homo sapiens
gtataatctgaaaaa

SEQ ID NO: 1764201 - DNA, 15 bp, Homo sapiens
tataatctgaaaaat

SEQ ID NO: 1764202 - DNA, 15 bp, Homo sapiens
ataatctgaaaaatg

SEQ ID NO: 1764203 - DNA, 15 bp, Homo sapiens
taatctgaaaaatgt

SEQ ID NO: 1764204 - DNA, 15 bp, Homo sapiens
aatctgaaaaatgtc

SEQ ID NO: 1764205 - DNA, 15 bp, Homo sapiens
atctgaaaaatgtca

SEQ ID NO: 1764206 - DNA, 15 bp, Homo sapiens
tctgaaaaatgtcat

SEQ ID NO: 1764207 - DNA, 15 bp, Homo sapiens
ctgaaaaatgtcata

SEQ ID NO: 1764208 - DNA, 15 bp, Homo sapiens
tgaaaaatgtcatat

SEQ ID NO: 1764209 - DNA, 15 bp, Homo sapiens
gaaaaatgtcatatt

SEQ ID NO: 1764210 - DNA, 15 bp, Homo sapiens
aaaaatgtcatattc

SEQ ID NO: 1764211 - DNA, 15 bp, Homo sapiens
aaaatgtcatattct

SEQ ID NO: 1764212 - DNA, 15 bp, Homo sapiens
aaatgtcatattctt

SEQ ID NO: 1764213 - DNA, 15 bp, Homo sapiens
aatgtcatattcttt

SEQ ID NO: 1764214 - DNA, 15 bp, Homo sapiens
atgtcatattctttg

SEQ ID NO: 1764215 - DNA, 15 bp, Homo sapiens
tgtcatattctttga

SEQ ID NO: 1764216 - DNA, 15 bp, Homo sapiens
gtcatattctttgat

SEQ ID NO: 1764217 - DNA, 15 bp, Homo sapiens
tcatattctttgata

SEQ ID NO: 1764218 - DNA, 15 bp, Homo sapiens
catattctttgatat

SEQ ID NO: 1764219 - DNA, 15 bp, Homo sapiens
atattctttgatatt

SEQ ID NO: 1764220 - DNA, 15 bp, Homo sapiens
tattctttgatattc

SEQ ID NO: 1764221 - DNA, 15 bp, Homo sapiens
attctttgatattcc

SEQ ID NO: 1764222 - DNA, 15 bp, Homo sapiens
ttctttgatattcct

SEQ ID NO: 1764223 - DNA, 15 bp, Homo sapiens
tctttgatattcctt

SEQ ID NO: 1764224 - DNA, 15 bp, Homo sapiens
ctttgatattccttc

SEQ ID NO: 1764225 - DNA, 15 bp, Homo sapiens
tttgatattccttct

SEQ ID NO: 1764226 - DNA, 15 bp, Homo sapiens
ttgatattccttcta

SEQ ID NO: 1764227 - DNA, 15 bp, Homo sapiens
tgatattccttctat

SEQ ID NO: 1764228 - DNA, 15 bp, Homo sapiens
gatattccttctatc

SEQ ID NO: 1764229 - DNA, 15 bp, Homo sapiens
atattccttctatcc

SEQ ID NO: 1764230 - DNA, 15 bp, Homo sapiens
tattccttctatccc

SEQ ID NO: 1764231 - DNA, 15 bp, Homo sapiens
attccttctatccca

SEQ ID NO: 1764232 - DNA, 15 bp, Homo sapiens
ttccttctatcccat

SEQ ID NO: 1764233 - DNA, 15 bp, Homo sapiens
tccttctatcccatt

SEQ ID NO: 1764234 - DNA, 15 bp, Homo sapiens
ccttctatcccattt

SEQ ID NO: 1764235 - DNA, 15 bp, Homo sapiens
cttctatcccatttc

SEQ ID NO: 1764236 - DNA, 15 bp, Homo sapiens
ttctatcccatttcc

SEQ ID NO: 1764237 - DNA, 15 bp, Homo sapiens
tctatcccatttcca

SEQ ID NO: 1764238 - DNA, 15 bp, Homo sapiens
ctatcccatttccaa

SEQ ID NO: 1764239 - DNA, 15 bp, Homo sapiens
tatcccatttccaac

SEQ ID NO: 1764240 - DNA, 15 bp, Homo sapiens
atcccatttccaacc

SEQ ID NO: 1764241 - DNA, 15 bp, Homo sapiens
tcccatttccaaccc

SEQ ID NO: 1764242 - DNA, 15 bp, Homo sapiens
cccatttccaacccc

SEQ ID NO: 1764243 - DNA, 15 bp, Homo sapiens
ccatttccaacccca

SEQ ID NO: 1764244 - DNA, 15 bp, Homo sapiens
catttccaaccccac

SEQ ID NO: 1764245 - DNA, 15 bp, Homo sapiens
atttccaaccccacc

SEQ ID NO: 1764246 - DNA, 15 bp, Homo sapiens
tttccaaccccaccc

SEQ ID NO: 1764247 - DNA, 15 bp, Homo sapiens
ttccaaccccaccct

SEQ ID NO: 1764248 - DNA, 15 bp, Homo sapiens
tccaaccccaccctt

SEQ ID NO: 1764249 - DNA, 15 bp, Homo sapiens
ccaaccccacccttg

SEQ ID NO: 1764250 - DNA, 15 bp, Homo sapiens
caaccccacccttgt

SEQ ID NO: 1764251 - DNA, 15 bp, Homo sapiens
aaccccacccttgtt

SEQ ID NO: 1764252 - DNA, 15 bp, Homo sapiens
accccacccttgttt

SEQ ID NO: 1764253 - DNA, 15 bp, Homo sapiens
ccccacccttgtttt

SEQ ID NO: 1764254 - DNA, 15 bp, Homo sapiens
cccacccttgttttt

SEQ ID NO: 1764255 - DNA, 15 bp, Homo sapiens
ccacccttgtttttt

SEQ ID NO: 1764256 - DNA, 15 bp, Homo sapiens
cacccttgttttttg

SEQ ID NO: 1764257 - DNA, 15 bp, Homo sapiens
acccttgttttttgg

SEQ ID NO: 1764258 - DNA, 15 bp, Homo sapiens
cccttgttttttggt

SEQ ID NO: 1764259 - DNA, 15 bp, Homo sapiens
ccttgttttttggtt

SEQ ID NO: 1764260 - DNA, 15 bp, Homo sapiens
cttgttttttggttt

SEQ ID NO: 1764261 - DNA, 15 bp, Homo sapiens
ttgttttttggttta

SEQ ID NO: 1764262 - DNA, 15 bp, Homo sapiens
tgttttttggtttat

SEQ ID NO: 1764263 - DNA, 15 bp, Homo sapiens
gttttttggtttatc

SEQ ID NO: 1764264 - DNA, 15 bp, Homo sapiens
ttttttggtttatct

SEQ ID NO: 1764265 - DNA, 15 bp, Homo sapiens
tttttggtttatctt

SEQ ID NO: 1764266 - DNA, 15 bp, Homo sapiens
ttttggtttatcttt

SEQ ID NO: 1764267 - DNA, 15 bp, Homo sapiens
tttggtttatctttc

SEQ ID NO: 1764268 - DNA, 15 bp, Homo sapiens
ttggtttatctttcc

SEQ ID NO: 1764269 - DNA, 15 bp, Homo sapiens
tggtttatctttcct

SEQ ID NO: 1764270 - DNA, 15 bp, Homo sapiens
ggtttatctttcctg

SEQ ID NO: 1764271 - DNA, 15 bp, Homo sapiens
gtttatctttcctgt

SEQ ID NO: 1764272 - DNA, 15 bp, Homo sapiens
tttatctttcctgtg

SEQ ID NO: 1764273 - DNA, 15 bp, Homo sapiens
ttatctttcctgtgt

SEQ ID NO: 1764274 - DNA, 15 bp, Homo sapiens
tatctttcctgtgtt

SEQ ID NO: 1764275 - DNA, 15 bp, Homo sapiens
atctttcctgtgttt

SEQ ID NO: 1764276 - DNA, 15 bp, Homo sapiens
tctttcctgtgtttc

SEQ ID NO: 1764277 - DNA, 15 bp, Homo sapiens
ctttcctgtgtttct

SEQ ID NO: 1764278 - DNA, 15 bp, Homo sapiens
tttcctgtgtttctt

SEQ ID NO: 1764279 - DNA, 15 bp, Homo sapiens
ttcctgtgtttcttt

SEQ ID NO: 1764280 - DNA, 15 bp, Homo sapiens
tcctgtgtttctttt

SEQ ID NO: 1764281 - DNA, 15 bp, Homo sapiens
cctgtgtttcttttt

SEQ ID NO: 1764282 - DNA, 15 bp, Homo sapiens
ctgtgtttcttttta

SEQ ID NO: 1764283 - DNA, 15 bp, Homo sapiens
tgtgtttctttttat

SEQ ID NO: 1764284 - DNA, 15 bp, Homo sapiens
gtgtttctttttata

SEQ ID NO: 1764285 - DNA, 15 bp, Homo sapiens
tgtttctttttataa

SEQ ID NO: 1764286 - DNA, 15 bp, Homo sapiens
gtttctttttataaa

SEQ ID NO: 1764287 - DNA, 15 bp, Homo sapiens
tttctttttataaaa

SEQ ID NO: 1764288 - DNA, 15 bp, Homo sapiens
ttctttttataaaaa

SEQ ID NO: 1764289 - DNA, 15 bp, Homo sapiens
tctttttataaaaat

SEQ ID NO: 1764290 - DNA, 15 bp, Homo sapiens
ctttttataaaaata

SEQ ID NO: 1764291 - DNA, 15 bp, Homo sapiens
tttttataaaaataa

SEQ ID NO: 1764292 - DNA, 15 bp, Homo sapiens
ttttataaaaataag

SEQ ID NO: 1764293 - DNA, 15 bp, Homo sapiens
tttataaaaataagc

SEQ ID NO: 1764294 - DNA, 15 bp, Homo sapiens
ttataaaaataagca

SEQ ID NO: 1764295 - DNA, 15 bp, Homo sapiens
tataaaaataagcag

SEQ ID NO: 1764296 - DNA, 15 bp, Homo sapiens
ataaaaataagcagg

SEQ ID NO: 1764297 - DNA, 15 bp, Homo sapiens
taaaaataagcaggt

SEQ ID NO: 1764298 - DNA, 15 bp, Homo sapiens
aaaaataagcaggta

SEQ ID NO: 1764299 - DNA, 15 bp, Homo sapiens
aaaataagcaggtat

SEQ ID NO: 1764300 - DNA, 15 bp, Homo sapiens
aaataagcaggtatg

SEQ ID NO: 1764301 - DNA, 15 bp, Homo sapiens
aataagcaggtatgc

SEQ ID NO: 1764302 - DNA, 15 bp, Homo sapiens
ataagcaggtatgca

SEQ ID NO: 1764303 - DNA, 15 bp, Homo sapiens
taagcaggtatgcac

SEQ ID NO: 1764304 - DNA, 15 bp, Homo sapiens
aagcaggtatgcacg

SEQ ID NO: 1764305 - DNA, 15 bp, Homo sapiens
agcaggtatgcacgt

SEQ ID NO: 1764306 - DNA, 15 bp, Homo sapiens
gcaggtatgcacgtt

SEQ ID NO: 1764307 - DNA, 15 bp, Homo sapiens
caggtatgcacgttt

SEQ ID NO: 1764308 - DNA, 15 bp, Homo sapiens
aggtatgcacgtttt

SEQ ID NO: 1764309 - DNA, 15 bp, Homo sapiens
ggtatgcacgtttta

SEQ ID NO: 1764310 - DNA, 15 bp, Homo sapiens
gtatgcacgttttat

SEQ ID NO: 1764311 - DNA, 15 bp, Homo sapiens
tatgcacgttttatt

SEQ ID NO: 1764312 - DNA, 15 bp, Homo sapiens
atgcacgttttattt

SEQ ID NO: 1764313 - DNA, 15 bp, Homo sapiens
tgcacgttttatttt

SEQ ID NO: 1764314 - DNA, 15 bp, Homo sapiens
gcacgttttattttg

SEQ ID NO: 1764315 - DNA, 15 bp, Homo sapiens
cacgttttattttgc

SEQ ID NO: 1764316 - DNA, 15 bp, Homo sapiens
acgttttattttgcc

SEQ ID NO: 1764317 - DNA, 15 bp, Homo sapiens
cgttttattttgcct

SEQ ID NO: 1764318 - DNA, 15 bp, Homo sapiens
gttttattttgcctt

SEQ ID NO: 1764319 - DNA, 15 bp, Homo sapiens
ttttattttgccttt

SEQ ID NO: 1764320 - DNA, 15 bp, Homo sapiens
tttattttgcctttt

SEQ ID NO: 1764321 - DNA, 15 bp, Homo sapiens
ttattttgccttttt

SEQ ID NO: 1764322 - DNA, 15 bp, Homo sapiens
tattttgcctttttc

SEQ ID NO: 1764323 - DNA, 15 bp, Homo sapiens
attttgcctttttct

SEQ ID NO: 1764324 - DNA, 15 bp, Homo sapiens
ttttgcctttttctt

SEQ ID NO: 1764325 - DNA, 15 bp, Homo sapiens
tttgcctttttctta

SEQ ID NO: 1764326 - DNA, 15 bp, Homo sapiens
ttgcctttttcttat

SEQ ID NO: 1764327 - DNA, 15 bp, Homo sapiens
tgcctttttcttata

SEQ ID NO: 1764328 - DNA, 15 bp, Homo sapiens
gcctttttcttatac

SEQ ID NO: 1764329 - DNA, 15 bp, Homo sapiens
cctttttcttataca

SEQ ID NO: 1764330 - DNA, 15 bp, Homo sapiens
ctttttcttatacaa

SEQ ID NO: 1764331 - DNA, 15 bp, Homo sapiens
tttttcttatacaaa

SEQ ID NO: 1764332 - DNA, 15 bp, Homo sapiens
ttttcttatacaaaa

SEQ ID NO: 1764333 - DNA, 15 bp, Homo sapiens
tttcttatacaaaag

SEQ ID NO: 1764334 - DNA, 15 bp, Homo sapiens
ttcttatacaaaagg

SEQ ID NO: 1764335 - DNA, 15 bp, Homo sapiens
tcttatacaaaaggt

SEQ ID NO: 1764336 - DNA, 15 bp, Homo sapiens
cttatacaaaaggtg

SEQ ID NO: 1764337 - DNA, 15 bp, Homo sapiens
ttatacaaaaggtgg

SEQ ID NO: 1764338 - DNA, 15 bp, Homo sapiens
tatacaaaaggtggc

SEQ ID NO: 1764339 - DNA, 15 bp, Homo sapiens
atacaaaaggtggca

SEQ ID NO: 1764340 - DNA, 15 bp, Homo sapiens
tacaaaaggtggcat

SEQ ID NO: 1764341 - DNA, 15 bp, Homo sapiens
acaaaaggtggcata

SEQ ID NO: 1764342 - DNA, 15 bp, Homo sapiens
caaaaggtggcatac

SEQ ID NO: 1764343 - DNA, 15 bp, Homo sapiens
aaaaggtggcatact

SEQ ID NO: 1764344 - DNA, 15 bp, Homo sapiens
aaaggtggcatacta

SEQ ID NO: 1764345 - DNA, 15 bp, Homo sapiens
aaggtggcatactat

SEQ ID NO: 1764346 - DNA, 15 bp, Homo sapiens
aggtggcatactatg

SEQ ID NO: 1764347 - DNA, 15 bp, Homo sapiens
ggtggcatactatgt

SEQ ID NO: 1764348 - DNA, 15 bp, Homo sapiens
gtggcatactatgtg

SEQ ID NO: 1764349 - DNA, 15 bp, Homo sapiens
tggcatactatgtgt

SEQ ID NO: 1764350 - DNA, 15 bp, Homo sapiens
ggcatactatgtgtg

SEQ ID NO: 1764351 - DNA, 15 bp, Homo sapiens
gcatactatgtgtgc

SEQ ID NO: 1764352 - DNA, 15 bp, Homo sapiens
catactatgtgtgct

SEQ ID NO: 1764353 - DNA, 15 bp, Homo sapiens
atactatgtgtgctc

SEQ ID NO: 1764354 - DNA, 15 bp, Homo sapiens
tactatgtgtgctct

SEQ ID NO: 1764355 - DNA, 15 bp, Homo sapiens
actatgtgtgctctt

SEQ ID NO: 1764356 - DNA, 15 bp, Homo sapiens
ctatgtgtgctcttt

SEQ ID NO: 1764357 - DNA, 15 bp, Homo sapiens
tatgtgtgctctttt

SEQ ID NO: 1764358 - DNA, 15 bp, Homo sapiens
atgtgtgctctttta

SEQ ID NO: 1764359 - DNA, 15 bp, Homo sapiens
tgtgtgctcttttat

SEQ ID NO: 1764360 - DNA, 15 bp, Homo sapiens
gtgtgctcttttatg

SEQ ID NO: 1764361 - DNA, 15 bp, Homo sapiens
tgtgctcttttatgc

SEQ ID NO: 1764362 - DNA, 15 bp, Homo sapiens
gtgctcttttatgct

SEQ ID NO: 1764363 - DNA, 15 bp, Homo sapiens
tgctcttttatgctt

SEQ ID NO: 1764364 - DNA, 15 bp, Homo sapiens
gctcttttatgcttt

SEQ ID NO: 1764365 - DNA, 15 bp, Homo sapiens
ctcttttatgctttt

SEQ ID NO: 1764366 - DNA, 15 bp, Homo sapiens
tcttttatgcttttt

SEQ ID NO: 1764367 - DNA, 15 bp, Homo sapiens
cttttatgctttttt

SEQ ID NO: 1764368 - DNA, 15 bp, Homo sapiens
ttttatgcttttttt

SEQ ID NO: 1764369 - DNA, 15 bp, Homo sapiens
tttatgctttttttc

SEQ ID NO: 1764370 - DNA, 15 bp, Homo sapiens
ttatgctttttttca

SEQ ID NO: 1764371 - DNA, 15 bp, Homo sapiens
tatgctttttttcat

SEQ ID NO: 1764372 - DNA, 15 bp, Homo sapiens
atgctttttttcatt

SEQ ID NO: 1764373 - DNA, 15 bp, Homo sapiens
tgctttttttcattt

SEQ ID NO: 1764374 - DNA, 15 bp, Homo sapiens
gctttttttcattta

SEQ ID NO: 1764375 - DNA, 15 bp, Homo sapiens
ctttttttcatttaa

SEQ ID NO: 1764376 - DNA, 15 bp, Homo sapiens
tttttttcatttaac

SEQ ID NO: 1764377 - DNA, 15 bp, Homo sapiens
ttttttcatttaaca

SEQ ID NO: 1764378 - DNA, 15 bp, Homo sapiens
tttttcatttaacac

SEQ ID NO: 1764379 - DNA, 15 bp, Homo sapiens
ttttcatttaacact

SEQ ID NO: 1764380 - DNA, 15 bp, Homo sapiens
tttcatttaacacta

SEQ ID NO: 1764381 - DNA, 15 bp, Homo sapiens
ttcatttaacactac

SEQ ID NO: 1764382 - DNA, 15 bp, Homo sapiens
tcatttaacactacc

SEQ ID NO: 1764383 - DNA, 15 bp, Homo sapiens
catttaacactacct

SEQ ID NO: 1764384 - DNA, 15 bp, Homo sapiens
atttaacactacctt

SEQ ID NO: 1764385 - DNA, 15 bp, Homo sapiens
tttaacactaccttc

SEQ ID NO: 1764386 - DNA, 15 bp, Homo sapiens
ttaacactaccttct

SEQ ID NO: 1764387 - DNA, 15 bp, Homo sapiens
taacactaccttctt

SEQ ID NO: 1764388 - DNA, 15 bp, Homo sapiens
aacactaccttcttg

SEQ ID NO: 1764389 - DNA, 15 bp, Homo sapiens
acactaccttcttga

SEQ ID NO: 1764390 - DNA, 15 bp, Homo sapiens
cactaccttcttgaa

SEQ ID NO: 1764391 - DNA, 15 bp, Homo sapiens
actaccttcttgaag

SEQ ID NO: 1764392 - DNA, 15 bp, Homo sapiens
ctaccttcttgaagt

SEQ ID NO: 1764393 - DNA, 15 bp, Homo sapiens
taccttcttgaagtc

SEQ ID NO: 1764394 - DNA, 15 bp, Homo sapiens
accttcttgaagtca

SEQ ID NO: 1764395 - DNA, 15 bp, Homo sapiens
ccttcttgaagtcat

SEQ ID NO: 1764396 - DNA, 15 bp, Homo sapiens
cttcttgaagtcatt

SEQ ID NO: 1764397 - DNA, 15 bp, Homo sapiens
ttcttgaagtcattc

SEQ ID NO: 1764398 - DNA, 15 bp, Homo sapiens
tcttgaagtcattcc

SEQ ID NO: 1764399 - DNA, 15 bp, Homo sapiens
cttgaagtcattcca

SEQ ID NO: 1764400 - DNA, 15 bp, Homo sapiens
ttgaagtcattccat

SEQ ID NO: 1764401 - DNA, 15 bp, Homo sapiens
tgaagtcattccata

SEQ ID NO: 1764402 - DNA, 15 bp, Homo sapiens
gaagtcattccatat

SEQ ID NO: 1764403 - DNA, 15 bp, Homo sapiens
aagtcattccatatc

SEQ ID NO: 1764404 - DNA, 15 bp, Homo sapiens
agtcattccatatca

SEQ ID NO: 1764405 - DNA, 15 bp, Homo sapiens
gtcattccatatcaa

SEQ ID NO: 1764406 - DNA, 15 bp, Homo sapiens
tcattccatatcaat

SEQ ID NO: 1764407 - DNA, 15 bp, Homo sapiens
cattccatatcaatt

SEQ ID NO: 1764408 - DNA, 15 bp, Homo sapiens
attccatatcaattt

SEQ ID NO: 1764409 - DNA, 15 bp, Homo sapiens
ttccatatcaattta

SEQ ID NO: 1764410 - DNA, 15 bp, Homo sapiens
tccatatcaatttat

SEQ ID NO: 1764411 - DNA, 15 bp, Homo sapiens
ccatatcaatttata

SEQ ID NO: 1764412 - DNA, 15 bp, Homo sapiens
catatcaatttatag

SEQ ID NO: 1764413 - DNA, 15 bp, Homo sapiens
atatcaatttataga

SEQ ID NO: 1764414 - DNA, 15 bp, Homo sapiens
tatcaatttatagag

SEQ ID NO: 1764415 - DNA, 15 bp, Homo sapiens
atcaatttatagaga

SEQ ID NO: 1764416 - DNA, 15 bp, Homo sapiens
tcaatttatagagat

SEQ ID NO: 1764417 - DNA, 15 bp, Homo sapiens
caatttatagagata

SEQ ID NO: 1764418 - DNA, 15 bp, Homo sapiens
aatttatagagatat

SEQ ID NO: 1764419 - DNA, 15 bp, Homo sapiens
atttatagagatatt

SEQ ID NO: 1764420 - DNA, 15 bp, Homo sapiens
tttatagagatattt

SEQ ID NO: 1764421 - DNA, 15 bp, Homo sapiens
ttatagagatatttc

SEQ ID NO: 1764422 - DNA, 15 bp, Homo sapiens
tatagagatatttct

SEQ ID NO: 1764423 - DNA, 15 bp, Homo sapiens
atagagatatttctc

SEQ ID NO: 1764424 - DNA, 15 bp, Homo sapiens
tagagatatttctca

SEQ ID NO: 1764425 - DNA, 15 bp, Homo sapiens
agagatatttctcat

SEQ ID NO: 1764426 - DNA, 15 bp, Homo sapiens
gagatatttctcatt

SEQ ID NO: 1764427 - DNA, 15 bp, Homo sapiens
agatatttctcatta

SEQ ID NO: 1764428 - DNA, 15 bp, Homo sapiens
gatatttctcattat

SEQ ID NO: 1764429 - DNA, 15 bp, Homo sapiens
atatttctcattatt

SEQ ID NO: 1764430 - DNA, 15 bp, Homo sapiens
tatttctcattatta

SEQ ID NO: 1764431 - DNA, 15 bp, Homo sapiens
atttctcattattac

SEQ ID NO: 1764432 - DNA, 15 bp, Homo sapiens
tttctcattattaca

SEQ ID NO: 1764433 - DNA, 15 bp, Homo sapiens
ttctcattattacag

SEQ ID NO: 1764434 - DNA, 15 bp, Homo sapiens
tctcattattacagc

SEQ ID NO: 1764435 - DNA, 15 bp, Homo sapiens
ctcattattacagct

SEQ ID NO: 1764436 - DNA, 15 bp, Homo sapiens
tcattattacagctg

SEQ ID NO: 1764437 - DNA, 15 bp, Homo sapiens
cattattacagctgc

SEQ ID NO: 1764438 - DNA, 15 bp, Homo sapiens
attattacagctgca

SEQ ID NO: 1764439 - DNA, 15 bp, Homo sapiens
ttattacagctgcat

SEQ ID NO: 1764440 - DNA, 15 bp, Homo sapiens
tattacagctgcata

SEQ ID NO: 1764441 - DNA, 15 bp, Homo sapiens
attacagctgcatag

SEQ ID NO: 1764442 - DNA, 15 bp, Homo sapiens
ttacagctgcatagt

SEQ ID NO: 1764443 - DNA, 15 bp, Homo sapiens
tacagctgcatagta

SEQ ID NO: 1764444 - DNA, 15 bp, Homo sapiens
acagctgcatagtac

SEQ ID NO: 1764445 - DNA, 15 bp, Homo sapiens
cagctgcatagtact

SEQ ID NO: 1764446 - DNA, 15 bp, Homo sapiens
agctgcatagtactg

SEQ ID NO: 1764447 - DNA, 15 bp, Homo sapiens
gctgcatagtactgt

SEQ ID NO: 1764448 - DNA, 15 bp, Homo sapiens
ctgcatagtactgta

SEQ ID NO: 1764449 - DNA, 15 bp, Homo sapiens
tgcatagtactgtat

SEQ ID NO: 1764450 - DNA, 15 bp, Homo sapiens
gcatagtactgtatt

SEQ ID NO: 1764451 - DNA, 15 bp, Homo sapiens
catagtactgtattt

SEQ ID NO: 1764452 - DNA, 15 bp, Homo sapiens
atagtactgtatttt

SEQ ID NO: 1764453 - DNA, 15 bp, Homo sapiens
tagtactgtattttg

SEQ ID NO: 1764454 - DNA, 15 bp, Homo sapiens
agtactgtattttgt

SEQ ID NO: 1764455 - DNA, 15 bp, Homo sapiens
gtactgtattttgta

SEQ ID NO: 1764456 - DNA, 15 bp, Homo sapiens
tactgtattttgtat

SEQ ID NO: 1764457 - DNA, 15 bp, Homo sapiens
actgtattttgtata

SEQ ID NO: 1764458 - DNA, 15 bp, Homo sapiens
ctgtattttgtatat

SEQ ID NO: 1764459 - DNA, 15 bp, Homo sapiens
tgtattttgtatata

SEQ ID NO: 1764460 - DNA, 15 bp, Homo sapiens
gtattttgtatatat

SEQ ID NO: 1764461 - DNA, 15 bp, Homo sapiens
tattttgtatatata

SEQ ID NO: 1764462 - DNA, 15 bp, Homo sapiens
attttgtatatatac

SEQ ID NO: 1764463 - DNA, 15 bp, Homo sapiens
ttttgtatatatact

SEQ ID NO: 1764464 - DNA, 15 bp, Homo sapiens
tttgtatatatacta

SEQ ID NO: 1764465 - DNA, 15 bp, Homo sapiens
ttgtatatatactac

SEQ ID NO: 1764466 - DNA, 15 bp, Homo sapiens
tgtatatatactaca

SEQ ID NO: 1764467 - DNA, 15 bp, Homo sapiens
gtatatatactacag

SEQ ID NO: 1764468 - DNA, 15 bp, Homo sapiens
tatatatactacagt

SEQ ID NO: 1764469 - DNA, 15 bp, Homo sapiens
atatatactacagtc

SEQ ID NO: 1764470 - DNA, 15 bp, Homo sapiens
tatatactacagtct

SEQ ID NO: 1764471 - DNA, 15 bp, Homo sapiens
atatactacagtctg

SEQ ID NO: 1764472 - DNA, 15 bp, Homo sapiens
tatactacagtctgt

SEQ ID NO: 1764473 - DNA, 15 bp, Homo sapiens
atactacagtctgtt

SEQ ID NO: 1764474 - DNA, 15 bp, Homo sapiens
tactacagtctgttc

SEQ ID NO: 1764475 - DNA, 15 bp, Homo sapiens
actacagtctgttca

SEQ ID NO: 1764476 - DNA, 15 bp, Homo sapiens
ctacagtctgttcaa

SEQ ID NO: 1764477 - DNA, 15 bp, Homo sapiens
tacagtctgttcaac

SEQ ID NO: 1764478 - DNA, 15 bp, Homo sapiens
acagtctgttcaact

SEQ ID NO: 1764479 - DNA, 15 bp, Homo sapiens
cagtctgttcaacta

SEQ ID NO: 1764480 - DNA, 15 bp, Homo sapiens
agtctgttcaactag

SEQ ID NO: 1764481 - DNA, 15 bp, Homo sapiens
gtctgttcaactagt

SEQ ID NO: 1764482 - DNA, 15 bp, Homo sapiens
tctgttcaactagtt

SEQ ID NO: 1764483 - DNA, 15 bp, Homo sapiens
ctgttcaactagttt

SEQ ID NO: 1764484 - DNA, 15 bp, Homo sapiens
tgttcaactagtttt

SEQ ID NO: 1764485 - DNA, 15 bp, Homo sapiens
gttcaactagttttc

SEQ ID NO: 1764486 - DNA, 15 bp, Homo sapiens
ttcaactagttttct

SEQ ID NO: 1764487 - DNA, 15 bp, Homo sapiens
tcaactagttttcta

SEQ ID NO: 1764488 - DNA, 15 bp, Homo sapiens
caactagttttctat

SEQ ID NO: 1764489 - DNA, 15 bp, Homo sapiens
aactagttttctatg

SEQ ID NO: 1764490 - DNA, 15 bp, Homo sapiens
actagttttctatga

SEQ ID NO: 1764491 - DNA, 15 bp, Homo sapiens
ctagttttctatgat

SEQ ID NO: 1764492 - DNA, 15 bp, Homo sapiens
tagttttctatgatt

SEQ ID NO: 1764493 - DNA, 15 bp, Homo sapiens
agttttctatgattg

SEQ ID NO: 1764494 - DNA, 15 bp, Homo sapiens
gttttctatgattgg

SEQ ID NO: 1764495 - DNA, 15 bp, Homo sapiens
ttttctatgattgga

SEQ ID NO: 1764496 - DNA, 15 bp, Homo sapiens
tttctatgattggac

SEQ ID NO: 1764497 - DNA, 15 bp, Homo sapiens
ttctatgattggaca

SEQ ID NO: 1764498 - DNA, 15 bp, Homo sapiens
ctatgattggacatc

SEQ ID NO: 1764499 - DNA, 15 bp, Homo sapiens
tatgattggacatct

SEQ ID NO: 1764500 - DNA, 15 bp, Homo sapiens
atgattggacatcta

SEQ ID NO: 1764501 - DNA, 15 bp, Homo sapiens
tgattggacatctag

SEQ ID NO: 1764502 - DNA, 15 bp, Homo sapiens
gattggacatctagg

SEQ ID NO: 1764503 - DNA, 15 bp, Homo sapiens
attggacatctaggt

SEQ ID NO: 1764504 - DNA, 15 bp, Homo sapiens
ttggacatctaggtg

SEQ ID NO: 1764505 - DNA, 15 bp, Homo sapiens
tggacatctaggtgg

SEQ ID NO: 1764506 - DNA, 15 bp, Homo sapiens
ggacatctaggtggt

SEQ ID NO: 1764507 - DNA, 15 bp, Homo sapiens
gacatctaggtggtt

SEQ ID NO: 1764508 - DNA, 15 bp, Homo sapiens
acatctaggtggttt

SEQ ID NO: 1764509 - DNA, 15 bp, Homo sapiens
catctaggtggtttc

SEQ ID NO: 1764510 - DNA, 15 bp, Homo sapiens
atctaggtggtttcc

SEQ ID NO: 1764511 - DNA, 15 bp, Homo sapiens
tctaggtggtttcca

SEQ ID NO: 1764512 - DNA, 15 bp, Homo sapiens
ctaggtggtttccag

SEQ ID NO: 1764513 - DNA, 15 bp, Homo sapiens
taggtggtttccagt

SEQ ID NO: 1764514 - DNA, 15 bp, Homo sapiens
aggtggtttccagta

SEQ ID NO: 1764515 - DNA, 15 bp, Homo sapiens
ggtggtttccagtat

SEQ ID NO: 1764516 - DNA, 15 bp, Homo sapiens
gtggtttccagtatt

SEQ ID NO: 1764517 - DNA, 15 bp, Homo sapiens
tggtttccagtattt

SEQ ID NO: 1764518 - DNA, 15 bp, Homo sapiens
ggtttccagtatttt

SEQ ID NO: 1764519 - DNA, 15 bp, Homo sapiens
gtttccagtattttg

SEQ ID NO: 1764520 - DNA, 15 bp, Homo sapiens
tttccagtattttgc

SEQ ID NO: 1764521 - DNA, 15 bp, Homo sapiens
ttccagtattttgca

SEQ ID NO: 1764522 - DNA, 15 bp, Homo sapiens
tccagtattttgcaa

SEQ ID NO: 1764523 - DNA, 15 bp, Homo sapiens
ccagtattttgcaat

SEQ ID NO: 1764524 - DNA, 15 bp, Homo sapiens
cagtattttgcaatt

SEQ ID NO: 1764525 - DNA, 15 bp, Homo sapiens
agtattttgcaattt

SEQ ID NO: 1764526 - DNA, 15 bp, Homo sapiens
gtattttgcaatttc

SEQ ID NO: 1764527 - DNA, 15 bp, Homo sapiens
tattttgcaatttca

SEQ ID NO: 1764528 - DNA, 15 bp, Homo sapiens
attttgcaatttcaa

SEQ ID NO: 1764529 - DNA, 15 bp, Homo sapiens
ttttgcaatttcaac

SEQ ID NO: 1764530 - DNA, 15 bp, Homo sapiens
tttgcaatttcaact

SEQ ID NO: 1764531 - DNA, 15 bp, Homo sapiens
ttgcaatttcaacta

SEQ ID NO: 1764532 - DNA, 15 bp, Homo sapiens
tgcaatttcaactat

SEQ ID NO: 1764533 - DNA, 15 bp, Homo sapiens
gcaatttcaactatt

SEQ ID NO: 1764534 - DNA, 15 bp, Homo sapiens
caatttcaactatta

SEQ ID NO: 1764535 - DNA, 15 bp, Homo sapiens
aatttcaactattac

SEQ ID NO: 1764536 - DNA, 15 bp, Homo sapiens
atttcaactattacc

SEQ ID NO: 1764537 - DNA, 15 bp, Homo sapiens
tttcaactattacca

SEQ ID NO: 1764538 - DNA, 15 bp, Homo sapiens
ttcaactattaccac

SEQ ID NO: 1764539 - DNA, 15 bp, Homo sapiens
tcaactattaccaca

SEQ ID NO: 1764540 - DNA, 15 bp, Homo sapiens
caactattaccacaa

SEQ ID NO: 1764541 - DNA, 15 bp, Homo sapiens
aactattaccacaat

SEQ ID NO: 1764542 - DNA, 15 bp, Homo sapiens
actattaccacaata

SEQ ID NO: 1764543 - DNA, 15 bp, Homo sapiens
ctattaccacaataa

SEQ ID NO: 1764544 - DNA, 15 bp, Homo sapiens
tattaccacaataaa

SEQ ID NO: 1764545 - DNA, 15 bp, Homo sapiens
attaccacaataaat

SEQ ID NO: 1764546 - DNA, 15 bp, Homo sapiens
ttaccacaataaata

SEQ ID NO: 1764547 - DNA, 15 bp, Homo sapiens
taccacaataaataa

SEQ ID NO: 1764548 - DNA, 15 bp, Homo sapiens
accacaataaataac

SEQ ID NO: 1764549 - DNA, 15 bp, Homo sapiens
ccacaataaataact

SEQ ID NO: 1764550 - DNA, 15 bp, Homo sapiens
cacaataaataactc

SEQ ID NO: 1764551 - DNA, 15 bp, Homo sapiens
acaataaataactct

SEQ ID NO: 1764552 - DNA, 15 bp, Homo sapiens
caataaataactctg

SEQ ID NO: 1764553 - DNA, 15 bp, Homo sapiens
aataaataactctgt

SEQ ID NO: 1764554 - DNA, 15 bp, Homo sapiens
ataaataactctgtg

SEQ ID NO: 1764555 - DNA, 15 bp, Homo sapiens
taaataactctgtgt

SEQ ID NO: 1764556 - DNA, 15 bp, Homo sapiens
aaataactctgtgtg

SEQ ID NO: 1764557 - DNA, 15 bp, Homo sapiens
aataactctgtgtgt

SEQ ID NO: 1764558 - DNA, 15 bp, Homo sapiens
ataactctgtgtgtg

SEQ ID NO: 1764559 - DNA, 15 bp, Homo sapiens
taactctgtgtgtgt

SEQ ID NO: 1764560 - DNA, 15 bp, Homo sapiens
aactctgtgtgtgtg

SEQ ID NO: 1764561 - DNA, 15 bp, Homo sapiens
actctgtgtgtgtgt

SEQ ID NO: 1764562 - DNA, 15 bp, Homo sapiens
ctctgtgtgtgtgtg

SEQ ID NO: 1764563 - DNA, 15 bp, Homo sapiens
gtgtgtatgtatgta

SEQ ID NO: 1764564 - DNA, 15 bp, Homo sapiens
tgtgtatgtatgtat

SEQ ID NO: 1764565 - DNA, 15 bp, Homo sapiens
gtgtatgtatgtatg

SEQ ID NO: 1764566 - DNA, 15 bp, Homo sapiens
tgtatgtatgtatgt

SEQ ID NO: 1764567 - DNA, 15 bp, Homo sapiens
gtatgtatgtatgta

SEQ ID NO: 1764568 - DNA, 15 bp, Homo sapiens
tatgtatgtatgtat

SEQ ID NO: 1764569 - DNA, 15 bp, Homo sapiens
atgtatgtatgtatg

SEQ ID NO: 1764570 - DNA, 15 bp, Homo sapiens
gtatgtatgtatgtg

SEQ ID NO: 1764571 - DNA, 15 bp, Homo sapiens
tatgtatgtatgtgt

SEQ ID NO: 1764572 - DNA, 15 bp, Homo sapiens
atgtatgtatgtgtg

SEQ ID NO: 1764573 - DNA, 15 bp, Homo sapiens
gtatgtatgtgtgtg

SEQ ID NO: 1764574 - DNA, 15 bp, Homo sapiens
tatgtatgtgtgtgt

SEQ ID NO: 1764575 - DNA, 15 bp, Homo sapiens
atgtatgtgtgtgtt

SEQ ID NO: 1764576 - DNA, 15 bp, Homo sapiens
tgtatgtgtgtgtta

SEQ ID NO: 1764577 - DNA, 15 bp, Homo sapiens
gtatgtgtgtgttat

SEQ ID NO: 1764578 - DNA, 15 bp, Homo sapiens
tatgtgtgtgttatg

SEQ ID NO: 1764579 - DNA, 15 bp, Homo sapiens
atgtgtgtgttatgt

SEQ ID NO: 1764580 - DNA, 15 bp, Homo sapiens
tgtgtgtgttatgta

SEQ ID NO: 1764581 - DNA, 15 bp, Homo sapiens
gtgtgtgttatgtaa

SEQ ID NO: 1764582 - DNA, 15 bp, Homo sapiens
tgtgtgttatgtaat

SEQ ID NO: 1764583 - DNA, 15 bp, Homo sapiens
gtgtgttatgtaatt

SEQ ID NO: 1764584 - DNA, 15 bp, Homo sapiens
tgtgttatgtaattg

SEQ ID NO: 1764585 - DNA, 15 bp, Homo sapiens
gtgttatgtaattga

SEQ ID NO: 1764586 - DNA, 15 bp, Homo sapiens
tgttatgtaattgaa

SEQ ID NO: 1764587 - DNA, 15 bp, Homo sapiens
gttatgtaattgaaa

SEQ ID NO: 1764588 - DNA, 15 bp, Homo sapiens
ttatgtaattgaaat

SEQ ID NO: 1764589 - DNA, 15 bp, Homo sapiens
tatgtaattgaaatt

SEQ ID NO: 1764590 - DNA, 15 bp, Homo sapiens
atgtaattgaaattg

SEQ ID NO: 1764591 - DNA, 15 bp, Homo sapiens
tgtaattgaaattgt

SEQ ID NO: 1764592 - DNA, 15 bp, Homo sapiens
gtaattgaaattgtg

SEQ ID NO: 1764593 - DNA, 15 bp, Homo sapiens
taattgaaattgtgt

SEQ ID NO: 1764594 - DNA, 15 bp, Homo sapiens
aattgaaattgtgtc

SEQ ID NO: 1764595 - DNA, 15 bp, Homo sapiens
attgaaattgtgtct

SEQ ID NO: 1764596 - DNA, 15 bp, Homo sapiens
ttgaaattgtgtctt

SEQ ID NO: 1764597 - DNA, 15 bp, Homo sapiens
tgaaattgtgtcttg

SEQ ID NO: 1764598 - DNA, 15 bp, Homo sapiens
gaaattgtgtcttga

SEQ ID NO: 1764599 - DNA, 15 bp, Homo sapiens
aaattgtgtcttgag

SEQ ID NO: 1764600 - DNA, 15 bp, Homo sapiens
aattgtgtcttgagg

SEQ ID NO: 1764601 - DNA, 15 bp, Homo sapiens
attgtgtcttgagga

SEQ ID NO: 1764602 - DNA, 15 bp, Homo sapiens
ttgtgtcttgaggat

SEQ ID NO: 1764603 - DNA, 15 bp, Homo sapiens
tgtgtcttgaggatc

SEQ ID NO: 1764604 - DNA, 15 bp, Homo sapiens
gtgtcttgaggatca

SEQ ID NO: 1764605 - DNA, 15 bp, Homo sapiens
tgtcttgaggatcaa

SEQ ID NO: 1764606 - DNA, 15 bp, Homo sapiens
gtcttgaggatcaat

SEQ ID NO: 1764607 - DNA, 15 bp, Homo sapiens
tcttgaggatcaata

SEQ ID NO: 1764608 - DNA, 15 bp, Homo sapiens
cttgaggatcaatac

SEQ ID NO: 1764609 - DNA, 15 bp, Homo sapiens
ttgaggatcaatacc

SEQ ID NO: 1764610 - DNA, 15 bp, Homo sapiens
tgaggatcaatacct

SEQ ID NO: 1764611 - DNA, 15 bp, Homo sapiens
gaggatcaataccta

SEQ ID NO: 1764612 - DNA, 15 bp, Homo sapiens
aggatcaatacctag

SEQ ID NO: 1764613 - DNA, 15 bp, Homo sapiens
ggatcaatacctaga

SEQ ID NO: 1764614 - DNA, 15 bp, Homo sapiens
gatcaatacctagaa

SEQ ID NO: 1764615 - DNA, 15 bp, Homo sapiens
atcaatacctagaag

SEQ ID NO: 1764616 - DNA, 15 bp, Homo sapiens
tcaatacctagaagt

SEQ ID NO: 1764617 - DNA, 15 bp, Homo sapiens
caatacctagaagta

SEQ ID NO: 1764618 - DNA, 15 bp, Homo sapiens
aatacctagaagtaa

SEQ ID NO: 1764619 - DNA, 15 bp, Homo sapiens
atacctagaagtaag

SEQ ID NO: 1764620 - DNA, 15 bp, Homo sapiens
tacctagaagtaaga

SEQ ID NO: 1764621 - DNA, 15 bp, Homo sapiens
acctagaagtaagaa

SEQ ID NO: 1764622 - DNA, 15 bp, Homo sapiens
cctagaagtaagaat

SEQ ID NO: 1764623 - DNA, 15 bp, Homo sapiens
ctagaagtaagaatg

SEQ ID NO: 1764624 - DNA, 15 bp, Homo sapiens
tagaagtaagaatgc

SEQ ID NO: 1764625 - DNA, 15 bp, Homo sapiens
agaagtaagaatgct

SEQ ID NO: 1764626 - DNA, 15 bp, Homo sapiens
gaagtaagaatgctg

SEQ ID NO: 1764627 - DNA, 15 bp, Homo sapiens
aagtaagaatgctgg

SEQ ID NO: 1764628 - DNA, 15 bp, Homo sapiens
agtaagaatgctggg

SEQ ID NO: 1764629 - DNA, 15 bp, Homo sapiens
gtaagaatgctgggt

SEQ ID NO: 1764630 - DNA, 15 bp, Homo sapiens
taagaatgctgggtc

SEQ ID NO: 1764631 - DNA, 15 bp, Homo sapiens
aagaatgctgggtca

SEQ ID NO: 1764632 - DNA, 15 bp, Homo sapiens
agaatgctgggtcaa

SEQ ID NO: 1764633 - DNA, 15 bp, Homo sapiens
gaatgctgggtcaaa

SEQ ID NO: 1764634 - DNA, 15 bp, Homo sapiens
aatgctgggtcaaag

SEQ ID NO: 1764635 - DNA, 15 bp, Homo sapiens
atgctgggtcaaagg

SEQ ID NO: 1764636 - DNA, 15 bp, Homo sapiens
tgctgggtcaaaggg

SEQ ID NO: 1764637 - DNA, 15 bp, Homo sapiens
gctgggtcaaagggt

SEQ ID NO: 1764638 - DNA, 15 bp, Homo sapiens
ctgggtcaaagggtt

SEQ ID NO: 1764639 - DNA, 15 bp, Homo sapiens
tgggtcaaagggtta

SEQ ID NO: 1764640 - DNA, 15 bp, Homo sapiens
gggtcaaagggttaa

SEQ ID NO: 1764641 - DNA, 15 bp, Homo sapiens
ggtcaaagggttaat

SEQ ID NO: 1764642 - DNA, 15 bp, Homo sapiens
gtcaaagggttaatg

SEQ ID NO: 1764643 - DNA, 15 bp, Homo sapiens
tcaaagggttaatgt

SEQ ID NO: 1764644 - DNA, 15 bp, Homo sapiens
caaagggttaatgtg

SEQ ID NO: 1764645 - DNA, 15 bp, Homo sapiens
aaagggttaatgtgt

SEQ ID NO: 1764646 - DNA, 15 bp, Homo sapiens
aagggttaatgtgtg

SEQ ID NO: 1764647 - DNA, 15 bp, Homo sapiens
agggttaatgtgtgt

SEQ ID NO: 1764648 - DNA, 15 bp, Homo sapiens
gggttaatgtgtgtg

SEQ ID NO: 1764649 - DNA, 15 bp, Homo sapiens
ggttaatgtgtgtgt

SEQ ID NO: 1764650 - DNA, 15 bp, Homo sapiens
gttaatgtgtgtgtg

SEQ ID NO: 1764651 - DNA, 15 bp, Homo sapiens
ttaatgtgtgtgtgt

SEQ ID NO: 1764652 - DNA, 15 bp, Homo sapiens
atgtgtgtgtgtatg

SEQ ID NO: 1764653 - DNA, 15 bp, Homo sapiens
gtgtatgtgtgtgtt

SEQ ID NO: 1764654 - DNA, 15 bp, Homo sapiens
gtatgtgtgtgttag

SEQ ID NO: 1764655 - DNA, 15 bp, Homo sapiens
tatgtgtgtgttaga

SEQ ID NO: 1764656 - DNA, 15 bp, Homo sapiens
atgtgtgtgttagat

SEQ ID NO: 1764657 - DNA, 15 bp, Homo sapiens
tgtgtgtgttagata

SEQ ID NO: 1764658 - DNA, 15 bp, Homo sapiens
gtgtgtgttagatat

SEQ ID NO: 1764659 - DNA, 15 bp, Homo sapiens
tgtgtgttagatatt

SEQ ID NO: 1764660 - DNA, 15 bp, Homo sapiens
gtgtgttagatattg

SEQ ID NO: 1764661 - DNA, 15 bp, Homo sapiens
tgtgttagatattgc

SEQ ID NO: 1764662 - DNA, 15 bp, Homo sapiens
gtgttagatattgcc

SEQ ID NO: 1764663 - DNA, 15 bp, Homo sapiens
tgttagatattgcca

SEQ ID NO: 1764664 - DNA, 15 bp, Homo sapiens
gttagatattgccaa

SEQ ID NO: 1764665 - DNA, 15 bp, Homo sapiens
ttagatattgccaaa

SEQ ID NO: 1764666 - DNA, 15 bp, Homo sapiens
tagatattgccaaat

SEQ ID NO: 1764667 - DNA, 15 bp, Homo sapiens
agatattgccaaatc

SEQ ID NO: 1764668 - DNA, 15 bp, Homo sapiens
gatattgccaaatcc

SEQ ID NO: 1764669 - DNA, 15 bp, Homo sapiens
atattgccaaatccc

SEQ ID NO: 1764670 - DNA, 15 bp, Homo sapiens
tattgccaaatccca

SEQ ID NO: 1764671 - DNA, 15 bp, Homo sapiens
attgccaaatcccat

SEQ ID NO: 1764672 - DNA, 15 bp, Homo sapiens
ttgccaaatcccatc

SEQ ID NO: 1764673 - DNA, 15 bp, Homo sapiens
tgccaaatcccatcc

SEQ ID NO: 1764674 - DNA, 15 bp, Homo sapiens
gccaaatcccatcca

SEQ ID NO: 1764675 - DNA, 15 bp, Homo sapiens
ccaaatcccatccat

SEQ ID NO: 1764676 - DNA, 15 bp, Homo sapiens
caaatcccatccata

SEQ ID NO: 1764677 - DNA, 15 bp, Homo sapiens
aaatcccatccataa

SEQ ID NO: 1764678 - DNA, 15 bp, Homo sapiens
aatcccatccataag

SEQ ID NO: 1764679 - DNA, 15 bp, Homo sapiens
atcccatccataagg

SEQ ID NO: 1764680 - DNA, 15 bp, Homo sapiens
tcccatccataaggt

SEQ ID NO: 1764681 - DNA, 15 bp, Homo sapiens
cccatccataaggtt

SEQ ID NO: 1764682 - DNA, 15 bp, Homo sapiens
ccatccataaggttt

SEQ ID NO: 1764683 - DNA, 15 bp, Homo sapiens
catccataaggtttg

SEQ ID NO: 1764684 - DNA, 15 bp, Homo sapiens
atccataaggtttgt

SEQ ID NO: 1764685 - DNA, 15 bp, Homo sapiens
tccataaggtttgta

SEQ ID NO: 1764686 - DNA, 15 bp, Homo sapiens
ccataaggtttgtac

SEQ ID NO: 1764687 - DNA, 15 bp, Homo sapiens
cataaggtttgtact

SEQ ID NO: 1764688 - DNA, 15 bp, Homo sapiens
ataaggtttgtacta

SEQ ID NO: 1764689 - DNA, 15 bp, Homo sapiens
taaggtttgtactat

SEQ ID NO: 1764690 - DNA, 15 bp, Homo sapiens
aaggtttgtactatt

SEQ ID NO: 1764691 - DNA, 15 bp, Homo sapiens
aggtttgtactattt

SEQ ID NO: 1764692 - DNA, 15 bp, Homo sapiens
ggtttgtactatttt

SEQ ID NO: 1764693 - DNA, 15 bp, Homo sapiens
gtttgtactattttt

SEQ ID NO: 1764694 - DNA, 15 bp, Homo sapiens
tttgtactatttttc

SEQ ID NO: 1764695 - DNA, 15 bp, Homo sapiens
ttgtactatttttca

SEQ ID NO: 1764696 - DNA, 15 bp, Homo sapiens
tgtactatttttcat

SEQ ID NO: 1764697 - DNA, 15 bp, Homo sapiens
gtactatttttcatt

SEQ ID NO: 1764698 - DNA, 15 bp, Homo sapiens
tactatttttcattc

SEQ ID NO: 1764699 - DNA, 15 bp, Homo sapiens
actatttttcattcc

SEQ ID NO: 1764700 - DNA, 15 bp, Homo sapiens
ctatttttcattccc

SEQ ID NO: 1764701 - DNA, 15 bp, Homo sapiens
tatttttcattccca

SEQ ID NO: 1764702 - DNA, 15 bp, Homo sapiens
atttttcattcccac

SEQ ID NO: 1764703 - DNA, 15 bp, Homo sapiens
tttttcattcccacc

SEQ ID NO: 1764704 - DNA, 15 bp, Homo sapiens
ttttcattcccacca

SEQ ID NO: 1764705 - DNA, 15 bp, Homo sapiens
tttcattcccaccag

SEQ ID NO: 1764706 - DNA, 15 bp, Homo sapiens
ttcattcccaccaga

SEQ ID NO: 1764707 - DNA, 15 bp, Homo sapiens
tcattcccaccagaa

SEQ ID NO: 1764708 - DNA, 15 bp, Homo sapiens
cattcccaccagaaa

SEQ ID NO: 1764709 - DNA, 15 bp, Homo sapiens
attcccaccagaaat

SEQ ID NO: 1764710 - DNA, 15 bp, Homo sapiens
ttcccaccagaaatg

SEQ ID NO: 1764711 - DNA, 15 bp, Homo sapiens
tcccaccagaaatgt

SEQ ID NO: 1764712 - DNA, 15 bp, Homo sapiens
cccaccagaaatgta

SEQ ID NO: 1764713 - DNA, 15 bp, Homo sapiens
ccaccagaaatgtat

SEQ ID NO: 1764714 - DNA, 15 bp, Homo sapiens
caccagaaatgtatg

SEQ ID NO: 1764715 - DNA, 15 bp, Homo sapiens
accagaaatgtatga

SEQ ID NO: 1764716 - DNA, 15 bp, Homo sapiens
ccagaaatgtatgaa

SEQ ID NO: 1764717 - DNA, 15 bp, Homo sapiens
cagaaatgtatgaag

SEQ ID NO: 1764718 - DNA, 15 bp, Homo sapiens
agaaatgtatgaagg

SEQ ID NO: 1764719 - DNA, 15 bp, Homo sapiens
gaaatgtatgaaggt

SEQ ID NO: 1764720 - DNA, 15 bp, Homo sapiens
aaatgtatgaaggta

SEQ ID NO: 1764721 - DNA, 15 bp, Homo sapiens
aatgtatgaaggtag

SEQ ID NO: 1764722 - DNA, 15 bp, Homo sapiens
atgtatgaaggtagc

SEQ ID NO: 1764723 - DNA, 15 bp, Homo sapiens
tgtatgaaggtagca

SEQ ID NO: 1764724 - DNA, 15 bp, Homo sapiens
gtatgaaggtagcaa

SEQ ID NO: 1764725 - DNA, 15 bp, Homo sapiens
tatgaaggtagcaat

SEQ ID NO: 1764726 - DNA, 15 bp, Homo sapiens
atgaaggtagcaatt

SEQ ID NO: 1764727 - DNA, 15 bp, Homo sapiens
tgaaggtagcaattt

SEQ ID NO: 1764728 - DNA, 15 bp, Homo sapiens
gaaggtagcaatttc

SEQ ID NO: 1764729 - DNA, 15 bp, Homo sapiens
aaggtagcaatttct

SEQ ID NO: 1764730 - DNA, 15 bp, Homo sapiens
aggtagcaatttctc

SEQ ID NO: 1764731 - DNA, 15 bp, Homo sapiens
ggtagcaatttctcc

SEQ ID NO: 1764732 - DNA, 15 bp, Homo sapiens
gtagcaatttctcca

SEQ ID NO: 1764733 - DNA, 15 bp, Homo sapiens
tagcaatttctccat

SEQ ID NO: 1764734 - DNA, 15 bp, Homo sapiens
agcaatttctccatg

SEQ ID NO: 1764735 - DNA, 15 bp, Homo sapiens
gcaatttctccatga

SEQ ID NO: 1764736 - DNA, 15 bp, Homo sapiens
caatttctccatgac

SEQ ID NO: 1764737 - DNA, 15 bp, Homo sapiens
aatttctccatgacg

SEQ ID NO: 1764738 - DNA, 15 bp, Homo sapiens
atttctccatgacgg

SEQ ID NO: 1764739 - DNA, 15 bp, Homo sapiens
tttctccatgacggc

SEQ ID NO: 1764740 - DNA, 15 bp, Homo sapiens
ttctccatgacggcc

SEQ ID NO: 1764741 - DNA, 15 bp, Homo sapiens
tctccatgacggcca

SEQ ID NO: 1764742 - DNA, 15 bp, Homo sapiens
ctccatgacggccac

SEQ ID NO: 1764743 - DNA, 15 bp, Homo sapiens
tccatgacggccact

SEQ ID NO: 1764744 - DNA, 15 bp, Homo sapiens
ccatgacggccactg

SEQ ID NO: 1764745 - DNA, 15 bp, Homo sapiens
catgacggccactgt

SEQ ID NO: 1764746 - DNA, 15 bp, Homo sapiens
atgacggccactgtc

SEQ ID NO: 1764747 - DNA, 15 bp, Homo sapiens
tgacggccactgtcc

SEQ ID NO: 1764748 - DNA, 15 bp, Homo sapiens
gacggccactgtcca

SEQ ID NO: 1764749 - DNA, 15 bp, Homo sapiens
acggccactgtccaa

SEQ ID NO: 1764750 - DNA, 15 bp, Homo sapiens
cggccactgtccaaa

SEQ ID NO: 1764751 - DNA, 15 bp, Homo sapiens
ggccactgtccaaat

SEQ ID NO: 1764752 - DNA, 15 bp, Homo sapiens
gccactgtccaaatt

SEQ ID NO: 1764753 - DNA, 15 bp, Homo sapiens
ccactgtccaaattt

SEQ ID NO: 1764754 - DNA, 15 bp, Homo sapiens
cactgtccaaatttt

SEQ ID NO: 1764755 - DNA, 15 bp, Homo sapiens
actgtccaaattttg

SEQ ID NO: 1764756 - DNA, 15 bp, Homo sapiens
ctgtccaaattttgc

SEQ ID NO: 1764757 - DNA, 15 bp, Homo sapiens
tgtccaaattttgcc

SEQ ID NO: 1764758 - DNA, 15 bp, Homo sapiens
gtccaaattttgcca

SEQ ID NO: 1764759 - DNA, 15 bp, Homo sapiens
tccaaattttgccaa

SEQ ID NO: 1764760 - DNA, 15 bp, Homo sapiens
ccaaattttgccaag

SEQ ID NO: 1764761 - DNA, 15 bp, Homo sapiens
caaattttgccaagt

SEQ ID NO: 1764762 - DNA, 15 bp, Homo sapiens
aaattttgccaagta

SEQ ID NO: 1764763 - DNA, 15 bp, Homo sapiens
aattttgccaagtaa

SEQ ID NO: 1764764 - DNA, 15 bp, Homo sapiens
attttgccaagtaat

SEQ ID NO: 1764765 - DNA, 15 bp, Homo sapiens
ttttgccaagtaatg

SEQ ID NO: 1764766 - DNA, 15 bp, Homo sapiens
tttgccaagtaatga

SEQ ID NO: 1764767 - DNA, 15 bp, Homo sapiens
ttgccaagtaatgac

SEQ ID NO: 1764768 - DNA, 15 bp, Homo sapiens
tgccaagtaatgaca

SEQ ID NO: 1764769 - DNA, 15 bp, Homo sapiens
gccaagtaatgacat

SEQ ID NO: 1764770 - DNA, 15 bp, Homo sapiens
ccaagtaatgacatt

SEQ ID NO: 1764771 - DNA, 15 bp, Homo sapiens
caagtaatgacatta

SEQ ID NO: 1764772 - DNA, 15 bp, Homo sapiens
aagtaatgacattaa

SEQ ID NO: 1764773 - DNA, 15 bp, Homo sapiens
agtaatgacattaaa

SEQ ID NO: 1764774 - DNA, 15 bp, Homo sapiens
gtaatgacattaaaa

SEQ ID NO: 1764775 - DNA, 15 bp, Homo sapiens
taatgacattaaaat

SEQ ID NO: 1764776 - DNA, 15 bp, Homo sapiens
aatgacattaaaata

SEQ ID NO: 1764777 - DNA, 15 bp, Homo sapiens
atgacattaaaatat

SEQ ID NO: 1764778 - DNA, 15 bp, Homo sapiens
tgacattaaaatatt

SEQ ID NO: 1764779 - DNA, 15 bp, Homo sapiens
gacattaaaatattc

SEQ ID NO: 1764780 - DNA, 15 bp, Homo sapiens
acattaaaatattct

SEQ ID NO: 1764781 - DNA, 15 bp, Homo sapiens
cattaaaatattctt

SEQ ID NO: 1764782 - DNA, 15 bp, Homo sapiens
ttaaaatattcttct

SEQ ID NO: 1764783 - DNA, 15 bp, Homo sapiens
taaaatattcttctc

SEQ ID NO: 1764784 - DNA, 15 bp, Homo sapiens
aaaatattcttctca

SEQ ID NO: 1764785 - DNA, 15 bp, Homo sapiens
aaatattcttctcat

SEQ ID NO: 1764786 - DNA, 15 bp, Homo sapiens
aatattcttctcatc

SEQ ID NO: 1764787 - DNA, 15 bp, Homo sapiens
atattcttctcatct

SEQ ID NO: 1764788 - DNA, 15 bp, Homo sapiens
tattcttctcatcta

SEQ ID NO: 1764789 - DNA, 15 bp, Homo sapiens
attcttctcatctat

SEQ ID NO: 1764790 - DNA, 15 bp, Homo sapiens
ttcttctcatctatt

SEQ ID NO: 1764791 - DNA, 15 bp, Homo sapiens
tcttctcatctatta

SEQ ID NO: 1764792 - DNA, 15 bp, Homo sapiens
cttctcatctattat

SEQ ID NO: 1764793 - DNA, 15 bp, Homo sapiens
ttctcatctattatc

SEQ ID NO: 1764794 - DNA, 15 bp, Homo sapiens
tctcatctattatca

SEQ ID NO: 1764795 - DNA, 15 bp, Homo sapiens
ctcatctattatcac

SEQ ID NO: 1764796 - DNA, 15 bp, Homo sapiens
tcatctattatcacc

SEQ ID NO: 1764797 - DNA, 15 bp, Homo sapiens
catctattatcacca

SEQ ID NO: 1764798 - DNA, 15 bp, Homo sapiens
atctattatcaccat

SEQ ID NO: 1764799 - DNA, 15 bp, Homo sapiens
tctattatcaccatc

SEQ ID NO: 1764800 - DNA, 15 bp, Homo sapiens
ctattatcaccatca

SEQ ID NO: 1764801 - DNA, 15 bp, Homo sapiens
tattatcaccatcat

SEQ ID NO: 1764802 - DNA, 15 bp, Homo sapiens
attatcaccatcatt

SEQ ID NO: 1764803 - DNA, 15 bp, Homo sapiens
ttatcaccatcattt

SEQ ID NO: 1764804 - DNA, 15 bp, Homo sapiens
tatcaccatcattta

SEQ ID NO: 1764805 - DNA, 15 bp, Homo sapiens
atcaccatcatttaa

SEQ ID NO: 1764806 - DNA, 15 bp, Homo sapiens
tcaccatcatttaaa

SEQ ID NO: 1764807 - DNA, 15 bp, Homo sapiens
caccatcatttaaaa

SEQ ID NO: 1764808 - DNA, 15 bp, Homo sapiens
accatcatttaaaaa

SEQ ID NO: 1764809 - DNA, 15 bp, Homo sapiens
ccatcatttaaaaaa

SEQ ID NO: 1764810 - DNA, 15 bp, Homo sapiens
catcatttaaaaaag

SEQ ID NO: 1764811 - DNA, 15 bp, Homo sapiens
atcatttaaaaaaga

SEQ ID NO: 1764812 - DNA, 15 bp, Homo sapiens
tcatttaaaaaagaa

SEQ ID NO: 1764813 - DNA, 15 bp, Homo sapiens
catttaaaaaagaat

SEQ ID NO: 1764814 - DNA, 15 bp, Homo sapiens
atttaaaaaagaatt

SEQ ID NO: 1764815 - DNA, 15 bp, Homo sapiens
tttaaaaaagaattt

SEQ ID NO: 1764816 - DNA, 15 bp, Homo sapiens
ttaaaaaagaatttc

SEQ ID NO: 1764817 - DNA, 15 bp, Homo sapiens
taaaaaagaatttct

SEQ ID NO: 1764818 - DNA, 15 bp, Homo sapiens
aaaaaagaatttctc

SEQ ID NO: 1764819 - DNA, 15 bp, Homo sapiens
aaaaagaatttctcc

SEQ ID NO: 1764820 - DNA, 15 bp, Homo sapiens
aaaagaatttctccc

SEQ ID NO: 1764821 - DNA, 15 bp, Homo sapiens
aaagaatttctccca

SEQ ID NO: 1764822 - DNA, 15 bp, Homo sapiens
aagaatttctcccat

SEQ ID NO: 1764823 - DNA, 15 bp, Homo sapiens
agaatttctcccatt

SEQ ID NO: 1764824 - DNA, 15 bp, Homo sapiens
gaatttctcccattt

SEQ ID NO: 1764825 - DNA, 15 bp, Homo sapiens
aatttctcccatttt

SEQ ID NO: 1764826 - DNA, 15 bp, Homo sapiens
atttctcccatttta

SEQ ID NO: 1764827 - DNA, 15 bp, Homo sapiens
tttctcccattttaa

SEQ ID NO: 1764828 - DNA, 15 bp, Homo sapiens
ttctcccattttaat

SEQ ID NO: 1764829 - DNA, 15 bp, Homo sapiens
tctcccattttaata

SEQ ID NO: 1764830 - DNA, 15 bp, Homo sapiens
ctcccattttaataa

SEQ ID NO: 1764831 - DNA, 15 bp, Homo sapiens
tcccattttaataaa

SEQ ID NO: 1764832 - DNA, 15 bp, Homo sapiens
cccattttaataaag

SEQ ID NO: 1764833 - DNA, 15 bp, Homo sapiens
ccattttaataaagg

SEQ ID NO: 1764834 - DNA, 15 bp, Homo sapiens
cattttaataaagga

SEQ ID NO: 1764835 - DNA, 15 bp, Homo sapiens
attttaataaaggaa

SEQ ID NO: 1764836 - DNA, 15 bp, Homo sapiens
ttttaataaaggaaa

SEQ ID NO: 1764837 - DNA, 15 bp, Homo sapiens
tttaataaaggaaaa

SEQ ID NO: 1764838 - DNA, 15 bp, Homo sapiens
ttaataaaggaaaaa

SEQ ID NO: 1764839 - DNA, 15 bp, Homo sapiens
taataaaggaaaaag

SEQ ID NO: 1764840 - DNA, 15 bp, Homo sapiens
aataaaggaaaaagg

SEQ ID NO: 1764841 - DNA, 15 bp, Homo sapiens
ataaaggaaaaagga

SEQ ID NO: 1764842 - DNA, 15 bp, Homo sapiens
taaaggaaaaaggac

SEQ ID NO: 1764843 - DNA, 15 bp, Homo sapiens
aaaggaaaaaggaca

SEQ ID NO: 1764844 - DNA, 15 bp, Homo sapiens
aaggaaaaaggacaa

SEQ ID NO: 1764845 - DNA, 15 bp, Homo sapiens
aggaaaaaggacaaa

SEQ ID NO: 1764846 - DNA, 15 bp, Homo sapiens
ggaaaaaggacaaat

SEQ ID NO: 1764847 - DNA, 15 bp, Homo sapiens
gaaaaaggacaaatc

SEQ ID NO: 1764848 - DNA, 15 bp, Homo sapiens
aaaaaggacaaatca

SEQ ID NO: 1764849 - DNA, 15 bp, Homo sapiens
aaaaggacaaatcag

SEQ ID NO: 1764850 - DNA, 15 bp, Homo sapiens
aaaggacaaatcaga

SEQ ID NO: 1764851 - DNA, 15 bp, Homo sapiens
aaggacaaatcagaa

SEQ ID NO: 1764852 - DNA, 15 bp, Homo sapiens
aggacaaatcagaaa

SEQ ID NO: 1764853 - DNA, 15 bp, Homo sapiens
ggacaaatcagaaaa

SEQ ID NO: 1764854 - DNA, 15 bp, Homo sapiens
gacaaatcagaaaaa

SEQ ID NO: 1764855 - DNA, 15 bp, Homo sapiens
acaaatcagaaaaaa

SEQ ID NO: 1764856 - DNA, 15 bp, Homo sapiens
caaatcagaaaaaaa

SEQ ID NO: 1764857 - DNA, 15 bp, Homo sapiens
aaatcagaaaaaaag

SEQ ID NO: 1764858 - DNA, 15 bp, Homo sapiens
aatcagaaaaaaagg

SEQ ID NO: 1764859 - DNA, 15 bp, Homo sapiens
atcagaaaaaaagga

SEQ ID NO: 1764860 - DNA, 15 bp, Homo sapiens
tcagaaaaaaaggat

SEQ ID NO: 1764861 - DNA, 15 bp, Homo sapiens
agaaaaaaaggataa

SEQ ID NO: 1764862 - DNA, 15 bp, Homo sapiens
gaaaaaaaggataag

SEQ ID NO: 1764863 - DNA, 15 bp, Homo sapiens
aaaaaaaggataaga

SEQ ID NO: 1764864 - DNA, 15 bp, Homo sapiens
aaaaaaggataagaa

SEQ ID NO: 1764865 - DNA, 15 bp, Homo sapiens
aaaaaggataagaag

SEQ ID NO: 1764866 - DNA, 15 bp, Homo sapiens
aaaaggataagaaga

SEQ ID NO: 1764867 - DNA, 15 bp, Homo sapiens
aaaggataagaagag

SEQ ID NO: 1764868 - DNA, 15 bp, Homo sapiens
aaggataagaagagc

SEQ ID NO: 1764869 - DNA, 15 bp, Homo sapiens
aggataagaagagcc

SEQ ID NO: 1764870 - DNA, 15 bp, Homo sapiens
ggataagaagagccc

SEQ ID NO: 1764871 - DNA, 15 bp, Homo sapiens
gataagaagagccct

SEQ ID NO: 1764872 - DNA, 15 bp, Homo sapiens
ataagaagagccctt

SEQ ID NO: 1764873 - DNA, 15 bp, Homo sapiens
taagaagagcccttt

SEQ ID NO: 1764874 - DNA, 15 bp, Homo sapiens
aagaagagcccttta

SEQ ID NO: 1764875 - DNA, 15 bp, Homo sapiens
agaagagccctttaa

SEQ ID NO: 1764876 - DNA, 15 bp, Homo sapiens
gaagagccctttaaa

SEQ ID NO: 1764877 - DNA, 15 bp, Homo sapiens
aagagccctttaaat

SEQ ID NO: 1764878 - DNA, 15 bp, Homo sapiens
agagccctttaaatt

SEQ ID NO: 1764879 - DNA, 15 bp, Homo sapiens
gagccctttaaattg

SEQ ID NO: 1764880 - DNA, 15 bp, Homo sapiens
agccctttaaattgt

SEQ ID NO: 1764881 - DNA, 15 bp, Homo sapiens
gccctttaaattgta

SEQ ID NO: 1764882 - DNA, 15 bp, Homo sapiens
ccctttaaattgtat

SEQ ID NO: 1764883 - DNA, 15 bp, Homo sapiens
cctttaaattgtata

SEQ ID NO: 1764884 - DNA, 15 bp, Homo sapiens
ctttaaattgtataa

SEQ ID NO: 1764885 - DNA, 15 bp, Homo sapiens
tttaaattgtataaa

SEQ ID NO: 1764886 - DNA, 15 bp, Homo sapiens
ttaaattgtataaat

SEQ ID NO: 1764887 - DNA, 15 bp, Homo sapiens
taaattgtataaata

SEQ ID NO: 1764888 - DNA, 15 bp, Homo sapiens
aaattgtataaatat

SEQ ID NO: 1764889 - DNA, 15 bp, Homo sapiens
aattgtataaatata

SEQ ID NO: 1764890 - DNA, 15 bp, Homo sapiens
attgtataaatatag

SEQ ID NO: 1764891 - DNA, 15 bp, Homo sapiens
ttgtataaatatagt

SEQ ID NO: 1764892 - DNA, 15 bp, Homo sapiens
tgtataaatatagtt

SEQ ID NO: 1764893 - DNA, 15 bp, Homo sapiens
gtataaatatagttc

SEQ ID NO: 1764894 - DNA, 15 bp, Homo sapiens
tataaatatagttct

SEQ ID NO: 1764895 - DNA, 15 bp, Homo sapiens
ataaatatagttctt

SEQ ID NO: 1764896 - DNA, 15 bp, Homo sapiens
taaatatagttcttg

SEQ ID NO: 1764897 - DNA, 15 bp, Homo sapiens
aaatatagttcttgt

SEQ ID NO: 1764898 - DNA, 15 bp, Homo sapiens
aatatagttcttgtt

SEQ ID NO: 1764899 - DNA, 15 bp, Homo sapiens
atatagttcttgttg

SEQ ID NO: 1764900 - DNA, 15 bp, Homo sapiens
tatagttcttgttgt

SEQ ID NO: 1764901 - DNA, 15 bp, Homo sapiens
atagttcttgttgtg

SEQ ID NO: 1764902 - DNA, 15 bp, Homo sapiens
tagttcttgttgtga

SEQ ID NO: 1764903 - DNA, 15 bp, Homo sapiens
agttcttgttgtgat

SEQ ID NO: 1764904 - DNA, 15 bp, Homo sapiens
gttcttgttgtgatt

SEQ ID NO: 1764905 - DNA, 15 bp, Homo sapiens
ttcttgttgtgatta

SEQ ID NO: 1764906 - DNA, 15 bp, Homo sapiens
tcttgttgtgattat

SEQ ID NO: 1764907 - DNA, 15 bp, Homo sapiens
cttgttgtgattatt

SEQ ID NO: 1764908 - DNA, 15 bp, Homo sapiens
ttgttgtgattattt

SEQ ID NO: 1764909 - DNA, 15 bp, Homo sapiens
tgttgtgattatttt

SEQ ID NO: 1764910 - DNA, 15 bp, Homo sapiens
gttgtgattattttt

SEQ ID NO: 1764911 - DNA, 15 bp, Homo sapiens
ttgtgattatttttc

SEQ ID NO: 1764912 - DNA, 15 bp, Homo sapiens
tgtgattatttttct

SEQ ID NO: 1764913 - DNA, 15 bp, Homo sapiens
gtgattatttttctt

SEQ ID NO: 1764914 - DNA, 15 bp, Homo sapiens
attatttttcttttc

SEQ ID NO: 1764915 - DNA, 15 bp, Homo sapiens
ttatttttcttttct

SEQ ID NO: 1764916 - DNA, 15 bp, Homo sapiens
tatttttcttttctt

SEQ ID NO: 1764917 - DNA, 15 bp, Homo sapiens
atttttcttttcttg

SEQ ID NO: 1764918 - DNA, 15 bp, Homo sapiens
tttttcttttcttgc

SEQ ID NO: 1764919 - DNA, 15 bp, Homo sapiens
ttttcttttcttgct

SEQ ID NO: 1764920 - DNA, 15 bp, Homo sapiens
tttcttttcttgctg

SEQ ID NO: 1764921 - DNA, 15 bp, Homo sapiens
ttcttttcttgctga

SEQ ID NO: 1764922 - DNA, 15 bp, Homo sapiens
tcttttcttgctgaa

SEQ ID NO: 1764923 - DNA, 15 bp, Homo sapiens
cttttcttgctgaag

SEQ ID NO: 1764924 - DNA, 15 bp, Homo sapiens
ttttcttgctgaaga

SEQ ID NO: 1764925 - DNA, 15 bp, Homo sapiens
tttcttgctgaagac

SEQ ID NO: 1764926 - DNA, 15 bp, Homo sapiens
ttcttgctgaagaca

SEQ ID NO: 1764927 - DNA, 15 bp, Homo sapiens
tcttgctgaagacaa

SEQ ID NO: 1764928 - DNA, 15 bp, Homo sapiens
cttgctgaagacaaa

SEQ ID NO: 1764929 - DNA, 15 bp, Homo sapiens
ttgctgaagacaaat

SEQ ID NO: 1764930 - DNA, 15 bp, Homo sapiens
tgctgaagacaaatg

SEQ ID NO: 1764931 - DNA, 15 bp, Homo sapiens
gctgaagacaaatgc

SEQ ID NO: 1764932 - DNA, 15 bp, Homo sapiens
ctgaagacaaatgca

SEQ ID NO: 1764933 - DNA, 15 bp, Homo sapiens
tgaagacaaatgcat

SEQ ID NO: 1764934 - DNA, 15 bp, Homo sapiens
gaagacaaatgcatc

SEQ ID NO: 1764935 - DNA, 15 bp, Homo sapiens
aagacaaatgcatct

SEQ ID NO: 1764936 - DNA, 15 bp, Homo sapiens
agacaaatgcatctc

SEQ ID NO: 1764937 - DNA, 15 bp, Homo sapiens
gacaaatgcatctct

SEQ ID NO: 1764938 - DNA, 15 bp, Homo sapiens
acaaatgcatctcta

SEQ ID NO: 1764939 - DNA, 15 bp, Homo sapiens
caaatgcatctctac

SEQ ID NO: 1764940 - DNA, 15 bp, Homo sapiens
aaatgcatctctacc

SEQ ID NO: 1764941 - DNA, 15 bp, Homo sapiens
aatgcatctctaccc

SEQ ID NO: 1764942 - DNA, 15 bp, Homo sapiens
atgcatctctaccct

SEQ ID NO: 1764943 - DNA, 15 bp, Homo sapiens
tgcatctctaccctg

SEQ ID NO: 1764944 - DNA, 15 bp, Homo sapiens
gcatctctaccctgt

SEQ ID NO: 1764945 - DNA, 15 bp, Homo sapiens
catctctaccctgta

SEQ ID NO: 1764946 - DNA, 15 bp, Homo sapiens
atctctaccctgtat

SEQ ID NO: 1764947 - DNA, 15 bp, Homo sapiens
tctctaccctgtatc

SEQ ID NO: 1764948 - DNA, 15 bp, Homo sapiens
ctctaccctgtatca

SEQ ID NO: 1764949 - DNA, 15 bp, Homo sapiens
tctaccctgtatcag

SEQ ID NO: 1764950 - DNA, 15 bp, Homo sapiens
ctaccctgtatcaga

SEQ ID NO: 1764951 - DNA, 15 bp, Homo sapiens
taccctgtatcagac

SEQ ID NO: 1764952 - DNA, 15 bp, Homo sapiens
accctgtatcagacg

SEQ ID NO: 1764953 - DNA, 15 bp, Homo sapiens
ccctgtatcagacga

SEQ ID NO: 1764954 - DNA, 15 bp, Homo sapiens
cctgtatcagacgaa

SEQ ID NO: 1764955 - DNA, 15 bp, Homo sapiens
ctgtatcagacgaat

SEQ ID NO: 1764956 - DNA, 15 bp, Homo sapiens
tgtatcagacgaatc

SEQ ID NO: 1764957 - DNA, 15 bp, Homo sapiens
gtatcagacgaatct

SEQ ID NO: 1764958 - DNA, 15 bp, Homo sapiens
tatcagacgaatctt

SEQ ID NO: 1764959 - DNA, 15 bp, Homo sapiens
atcagacgaatcttt

SEQ ID NO: 1764960 - DNA, 15 bp, Homo sapiens
tcagacgaatcttta

SEQ ID NO: 1764961 - DNA, 15 bp, Homo sapiens
cagacgaatctttat

SEQ ID NO: 1764962 - DNA, 15 bp, Homo sapiens
agacgaatctttatt

SEQ ID NO: 1764963 - DNA, 15 bp, Homo sapiens
gacgaatctttattt

SEQ ID NO: 1764964 - DNA, 15 bp, Homo sapiens
acgaatctttatttg

SEQ ID NO: 1764965 - DNA, 15 bp, Homo sapiens
cgaatctttatttga

SEQ ID NO: 1764966 - DNA, 15 bp, Homo sapiens
gaatctttatttgat

SEQ ID NO: 1764967 - DNA, 15 bp, Homo sapiens
aatctttatttgatc

SEQ ID NO: 1764968 - DNA, 15 bp, Homo sapiens
atctttatttgatca

SEQ ID NO: 1764969 - DNA, 15 bp, Homo sapiens
tctttatttgatcat

SEQ ID NO: 1764970 - DNA, 15 bp, Homo sapiens
ctttatttgatcatg

SEQ ID NO: 1764971 - DNA, 15 bp, Homo sapiens
tttatttgatcatgt

SEQ ID NO: 1764972 - DNA, 15 bp, Homo sapiens
ttatttgatcatgtc

SEQ ID NO: 1764973 - DNA, 15 bp, Homo sapiens
tatttgatcatgtct

SEQ ID NO: 1764974 - DNA, 15 bp, Homo sapiens
atttgatcatgtctc

SEQ ID NO: 1764975 - DNA, 15 bp, Homo sapiens
tttgatcatgtctcc

SEQ ID NO: 1764976 - DNA, 15 bp, Homo sapiens
ttgatcatgtctccc

SEQ ID NO: 1764977 - DNA, 15 bp, Homo sapiens
tgatcatgtctcccc

SEQ ID NO: 1764978 - DNA, 15 bp, Homo sapiens
gatcatgtctcccct

SEQ ID NO: 1764979 - DNA, 15 bp, Homo sapiens
atcatgtctccccta

SEQ ID NO: 1764980 - DNA, 15 bp, Homo sapiens
tcatgtctcccctac

SEQ ID NO: 1764981 - DNA, 15 bp, Homo sapiens
catgtctcccctacc

SEQ ID NO: 1764982 - DNA, 15 bp, Homo sapiens
atgtctcccctacct

SEQ ID NO: 1764983 - DNA, 15 bp, Homo sapiens
tgtctcccctacctt

SEQ ID NO: 1764984 - DNA, 15 bp, Homo sapiens
gtctcccctaccttg

SEQ ID NO: 1764985 - DNA, 15 bp, Homo sapiens
tctcccctaccttga

SEQ ID NO: 1764986 - DNA, 15 bp, Homo sapiens
ctcccctaccttgaa

SEQ ID NO: 1764987 - DNA, 15 bp, Homo sapiens
tcccctaccttgaaa

SEQ ID NO: 1764988 - DNA, 15 bp, Homo sapiens
cccctaccttgaaat

SEQ ID NO: 1764989 - DNA, 15 bp, Homo sapiens
ccctaccttgaaatt

SEQ ID NO: 1764990 - DNA, 15 bp, Homo sapiens
cctaccttgaaattc

SEQ ID NO: 1764991 - DNA, 15 bp, Homo sapiens
ctaccttgaaattct

SEQ ID NO: 1764992 - DNA, 15 bp, Homo sapiens
taccttgaaattctt

SEQ ID NO: 1764993 - DNA, 15 bp, Homo sapiens
accttgaaattcttg

SEQ ID NO: 1764994 - DNA, 15 bp, Homo sapiens
ccttgaaattcttga

SEQ ID NO: 1764995 - DNA, 15 bp, Homo sapiens
cttgaaattcttgag

SEQ ID NO: 1764996 - DNA, 15 bp, Homo sapiens
ttgaaattcttgagg

SEQ ID NO: 1764997 - DNA, 15 bp, Homo sapiens
tgaaattcttgagga

SEQ ID NO: 1764998 - DNA, 15 bp, Homo sapiens
gaaattcttgaggac

SEQ ID NO: 1764999 - DNA, 15 bp, Homo sapiens
aaattcttgaggact

SEQ ID NO: 1765000 - DNA, 15 bp, Homo sapiens
aattcttgaggactt

SEQ ID NO: 1765001 - DNA, 15 bp, Homo sapiens
attcttgaggacttt

SEQ ID NO: 1765002 - DNA, 15 bp, Homo sapiens
ttcttgaggactttc

SEQ ID NO: 1765003 - DNA, 15 bp, Homo sapiens
tcttgaggactttcc

SEQ ID NO: 1765004 - DNA, 15 bp, Homo sapiens
cttgaggactttcca

SEQ ID NO: 1765005 - DNA, 15 bp, Homo sapiens
ttgaggactttccac

SEQ ID NO: 1765006 - DNA, 15 bp, Homo sapiens
tgaggactttccaca

SEQ ID NO: 1765007 - DNA, 15 bp, Homo sapiens
gaggactttccacag

SEQ ID NO: 1765008 - DNA, 15 bp, Homo sapiens
aggactttccacagc

SEQ ID NO: 1765009 - DNA, 15 bp, Homo sapiens
ggactttccacagct

SEQ ID NO: 1765010 - DNA, 15 bp, Homo sapiens
gactttccacagctt

SEQ ID NO: 1765011 - DNA, 15 bp, Homo sapiens
actttccacagcttc

SEQ ID NO: 1765012 - DNA, 15 bp, Homo sapiens
ctttccacagcttct

SEQ ID NO: 1765013 - DNA, 15 bp, Homo sapiens
tttccacagcttctc

SEQ ID NO: 1765014 - DNA, 15 bp, Homo sapiens
ttccacagcttctca

SEQ ID NO: 1765015 - DNA, 15 bp, Homo sapiens
tccacagcttctcag

SEQ ID NO: 1765016 - DNA, 15 bp, Homo sapiens
ccacagcttctcagc

SEQ ID NO: 1765017 - DNA, 15 bp, Homo sapiens
cacagcttctcagca

SEQ ID NO: 1765018 - DNA, 15 bp, Homo sapiens
acagcttctcagcac

SEQ ID NO: 1765019 - DNA, 15 bp, Homo sapiens
cagcttctcagcact

SEQ ID NO: 1765020 - DNA, 15 bp, Homo sapiens
agcttctcagcactt

SEQ ID NO: 1765021 - DNA, 15 bp, Homo sapiens
gcttctcagcactta

SEQ ID NO: 1765022 - DNA, 15 bp, Homo sapiens
cttctcagcacttaa

SEQ ID NO: 1765023 - DNA, 15 bp, Homo sapiens
ttctcagcacttaac

SEQ ID NO: 1765024 - DNA, 15 bp, Homo sapiens
tctcagcacttaacg

SEQ ID NO: 1765025 - DNA, 15 bp, Homo sapiens
ctcagcacttaacgt

SEQ ID NO: 1765026 - DNA, 15 bp, Homo sapiens
tcagcacttaacgtg

SEQ ID NO: 1765027 - DNA, 15 bp, Homo sapiens
cagcacttaacgtgg

SEQ ID NO: 1765028 - DNA, 15 bp, Homo sapiens
agcacttaacgtggt

SEQ ID NO: 1765029 - DNA, 15 bp, Homo sapiens
gcacttaacgtggtc

SEQ ID NO: 1765030 - DNA, 15 bp, Homo sapiens
cacttaacgtggtct

SEQ ID NO: 1765031 - DNA, 15 bp, Homo sapiens
acttaacgtggtctt

SEQ ID NO: 1765032 - DNA, 15 bp, Homo sapiens
cttaacgtggtctta

SEQ ID NO: 1765033 - DNA, 15 bp, Homo sapiens
ttaacgtggtcttaa

SEQ ID NO: 1765034 - DNA, 15 bp, Homo sapiens
taacgtggtcttaac

SEQ ID NO: 1765035 - DNA, 15 bp, Homo sapiens
aacgtggtcttaaca

SEQ ID NO: 1765036 - DNA, 15 bp, Homo sapiens
acgtggtcttaacat

SEQ ID NO: 1765037 - DNA, 15 bp, Homo sapiens
cgtggtcttaacatg

SEQ ID NO: 1765038 - DNA, 15 bp, Homo sapiens
gtggtcttaacatgg

SEQ ID NO: 1765039 - DNA, 15 bp, Homo sapiens
tggtcttaacatggc

SEQ ID NO: 1765040 - DNA, 15 bp, Homo sapiens
ggtcttaacatggca

SEQ ID NO: 1765041 - DNA, 15 bp, Homo sapiens
gtcttaacatggcat

SEQ ID NO: 1765042 - DNA, 15 bp, Homo sapiens
tcttaacatggcata

SEQ ID NO: 1765043 - DNA, 15 bp, Homo sapiens
cttaacatggcatat

SEQ ID NO: 1765044 - DNA, 15 bp, Homo sapiens
ttaacatggcatata

SEQ ID NO: 1765045 - DNA, 15 bp, Homo sapiens
taacatggcatataa

SEQ ID NO: 1765046 - DNA, 15 bp, Homo sapiens
aacatggcatataag

SEQ ID NO: 1765047 - DNA, 15 bp, Homo sapiens
acatggcatataagt

SEQ ID NO: 1765048 - DNA, 15 bp, Homo sapiens
catggcatataagta

SEQ ID NO: 1765049 - DNA, 15 bp, Homo sapiens
atggcatataagtac

SEQ ID NO: 1765050 - DNA, 15 bp, Homo sapiens
tggcatataagtacg

SEQ ID NO: 1765051 - DNA, 15 bp, Homo sapiens
ggcatataagtacgt

SEQ ID NO: 1765052 - DNA, 15 bp, Homo sapiens
gcatataagtacgtg

SEQ ID NO: 1765053 - DNA, 15 bp, Homo sapiens
catataagtacgtgt

SEQ ID NO: 1765054 - DNA, 15 bp, Homo sapiens
atataagtacgtgta

SEQ ID NO: 1765055 - DNA, 15 bp, Homo sapiens
tataagtacgtgtaa

SEQ ID NO: 1765056 - DNA, 15 bp, Homo sapiens
ataagtacgtgtaag

SEQ ID NO: 1765057 - DNA, 15 bp, Homo sapiens
taagtacgtgtaaga

SEQ ID NO: 1765058 - DNA, 15 bp, Homo sapiens
aagtacgtgtaagat

SEQ ID NO: 1765059 - DNA, 15 bp, Homo sapiens
agtacgtgtaagatg

SEQ ID NO: 1765060 - DNA, 15 bp, Homo sapiens
gtacgtgtaagatgt

SEQ ID NO: 1765061 - DNA, 15 bp, Homo sapiens
tacgtgtaagatgtt

SEQ ID NO: 1765062 - DNA, 15 bp, Homo sapiens
acgtgtaagatgtta

SEQ ID NO: 1765063 - DNA, 15 bp, Homo sapiens
cgtgtaagatgttag

SEQ ID NO: 1765064 - DNA, 15 bp, Homo sapiens
gtgtaagatgttagc

SEQ ID NO: 1765065 - DNA, 15 bp, Homo sapiens
tgtaagatgttagcc

SEQ ID NO: 1765066 - DNA, 15 bp, Homo sapiens
gtaagatgttagccc

SEQ ID NO: 1765067 - DNA, 15 bp, Homo sapiens
taagatgttagccct

SEQ ID NO: 1765068 - DNA, 15 bp, Homo sapiens
aagatgttagcccta

SEQ ID NO: 1765069 - DNA, 15 bp, Homo sapiens
agatgttagccctat

SEQ ID NO: 1765070 - DNA, 15 bp, Homo sapiens
gatgttagccctatt

SEQ ID NO: 1765071 - DNA, 15 bp, Homo sapiens
atgttagccctattt

SEQ ID NO: 1765072 - DNA, 15 bp, Homo sapiens
tgttagccctatttc

SEQ ID NO: 1765073 - DNA, 15 bp, Homo sapiens
gttagccctatttct

SEQ ID NO: 1765074 - DNA, 15 bp, Homo sapiens
ttagccctatttctc

SEQ ID NO: 1765075 - DNA, 15 bp, Homo sapiens
tagccctatttctcc

SEQ ID NO: 1765076 - DNA, 15 bp, Homo sapiens
agccctatttctcca

SEQ ID NO: 1765077 - DNA, 15 bp, Homo sapiens
gccctatttctccag

SEQ ID NO: 1765078 - DNA, 15 bp, Homo sapiens
ccctatttctccagc

SEQ ID NO: 1765079 - DNA, 15 bp, Homo sapiens
cctatttctccagcc

SEQ ID NO: 1765080 - DNA, 15 bp, Homo sapiens
ctatttctccagcca

SEQ ID NO: 1765081 - DNA, 15 bp, Homo sapiens
tatttctccagccac

SEQ ID NO: 1765082 - DNA, 15 bp, Homo sapiens
atttctccagccact

SEQ ID NO: 1765083 - DNA, 15 bp, Homo sapiens
tttctccagccactt

SEQ ID NO: 1765084 - DNA, 15 bp, Homo sapiens
ttctccagccacttt

SEQ ID NO: 1765085 - DNA, 15 bp, Homo sapiens
tctccagccactttg

SEQ ID NO: 1765086 - DNA, 15 bp, Homo sapiens
ctccagccactttga

SEQ ID NO: 1765087 - DNA, 15 bp, Homo sapiens
tccagccactttgaa

SEQ ID NO: 1765088 - DNA, 15 bp, Homo sapiens
ccagccactttgaat

SEQ ID NO: 1765089 - DNA, 15 bp, Homo sapiens
cagccactttgaatg

SEQ ID NO: 1765090 - DNA, 15 bp, Homo sapiens
agccactttgaatgt

SEQ ID NO: 1765091 - DNA, 15 bp, Homo sapiens
gccactttgaatgtt

SEQ ID NO: 1765092 - DNA, 15 bp, Homo sapiens
ccactttgaatgttt

SEQ ID NO: 1765093 - DNA, 15 bp, Homo sapiens
cactttgaatgtttt

SEQ ID NO: 1765094 - DNA, 15 bp, Homo sapiens
actttgaatgtttta

SEQ ID NO: 1765095 - DNA, 15 bp, Homo sapiens
ctttgaatgttttaa

SEQ ID NO: 1765096 - DNA, 15 bp, Homo sapiens
tttgaatgttttaat

SEQ ID NO: 1765097 - DNA, 15 bp, Homo sapiens
ttgaatgttttaatt

SEQ ID NO: 1765098 - DNA, 15 bp, Homo sapiens
tgaatgttttaattc

SEQ ID NO: 1765099 - DNA, 15 bp, Homo sapiens
gaatgttttaattct

SEQ ID NO: 1765100 - DNA, 15 bp, Homo sapiens
aatgttttaattctt

SEQ ID NO: 1765101 - DNA, 15 bp, Homo sapiens
atgttttaattcttt

SEQ ID NO: 1765102 - DNA, 15 bp, Homo sapiens
tgttttaattctttc

SEQ ID NO: 1765103 - DNA, 15 bp, Homo sapiens
gttttaattctttca

SEQ ID NO: 1765104 - DNA, 15 bp, Homo sapiens
ttttaattctttcag

SEQ ID NO: 1765105 - DNA, 15 bp, Homo sapiens
tttaattctttcagt

SEQ ID NO: 1765106 - DNA, 15 bp, Homo sapiens
ttaattctttcagta

SEQ ID NO: 1765107 - DNA, 15 bp, Homo sapiens
taattctttcagtat

SEQ ID NO: 1765108 - DNA, 15 bp, Homo sapiens
aattctttcagtatc

SEQ ID NO: 1765109 - DNA, 15 bp, Homo sapiens
attctttcagtatcc

SEQ ID NO: 1765110 - DNA, 15 bp, Homo sapiens
ttctttcagtatcca

SEQ ID NO: 1765111 - DNA, 15 bp, Homo sapiens
tctttcagtatccaa

SEQ ID NO: 1765112 - DNA, 15 bp, Homo sapiens
ctttcagtatccaaa

SEQ ID NO: 1765113 - DNA, 15 bp, Homo sapiens
tttcagtatccaaat

SEQ ID NO: 1765114 - DNA, 15 bp, Homo sapiens
ttcagtatccaaatt

SEQ ID NO: 1765115 - DNA, 15 bp, Homo sapiens
tcagtatccaaattc

SEQ ID NO: 1765116 - DNA, 15 bp, Homo sapiens
cagtatccaaattct

SEQ ID NO: 1765117 - DNA, 15 bp, Homo sapiens
agtatccaaattctc

SEQ ID NO: 1765118 - DNA, 15 bp, Homo sapiens
gtatccaaattctct

SEQ ID NO: 1765119 - DNA, 15 bp, Homo sapiens
tatccaaattctctc

SEQ ID NO: 1765120 - DNA, 15 bp, Homo sapiens
atccaaattctctcc

SEQ ID NO: 1765121 - DNA, 15 bp, Homo sapiens
tccaaattctctccc

SEQ ID NO: 1765122 - DNA, 15 bp, Homo sapiens
ccaaattctctccca

SEQ ID NO: 1765123 - DNA, 15 bp, Homo sapiens
caaattctctcccac

SEQ ID NO: 1765124 - DNA, 15 bp, Homo sapiens
aaattctctcccaca

SEQ ID NO: 1765125 - DNA, 15 bp, Homo sapiens
aattctctcccacag

SEQ ID NO: 1765126 - DNA, 15 bp, Homo sapiens
attctctcccacagg

SEQ ID NO: 1765127 - DNA, 15 bp, Homo sapiens
ttctctcccacaggg

SEQ ID NO: 1765128 - DNA, 15 bp, Homo sapiens
tctctcccacagggc

SEQ ID NO: 1765129 - DNA, 15 bp, Homo sapiens
ctctcccacagggcc

SEQ ID NO: 1765130 - DNA, 15 bp, Homo sapiens
tctcccacagggcct

SEQ ID NO: 1765131 - DNA, 15 bp, Homo sapiens
ctcccacagggcctt

SEQ ID NO: 1765132 - DNA, 15 bp, Homo sapiens
tcccacagggccttt

SEQ ID NO: 1765133 - DNA, 15 bp, Homo sapiens
cccacagggcctttg

SEQ ID NO: 1765134 - DNA, 15 bp, Homo sapiens
ccacagggcctttgc

SEQ ID NO: 1765135 - DNA, 15 bp, Homo sapiens
cacagggcctttgcc

SEQ ID NO: 1765136 - DNA, 15 bp, Homo sapiens
acagggcctttgcct

SEQ ID NO: 1765137 - DNA, 15 bp, Homo sapiens
cagggcctttgcctg

SEQ ID NO: 1765138 - DNA, 15 bp, Homo sapiens
agggcctttgcctgt

SEQ ID NO: 1765139 - DNA, 15 bp, Homo sapiens
gggcctttgcctgtg

SEQ ID NO: 1765140 - DNA, 15 bp, Homo sapiens
ggcctttgcctgtgg

SEQ ID NO: 1765141 - DNA, 15 bp, Homo sapiens
gcctttgcctgtggt

SEQ ID NO: 1765142 - DNA, 15 bp, Homo sapiens
cctttgcctgtggtg

SEQ ID NO: 1765143 - DNA, 15 bp, Homo sapiens
ctttgcctgtggtgc

SEQ ID NO: 1765144 - DNA, 15 bp, Homo sapiens
tttgcctgtggtgct

SEQ ID NO: 1765145 - DNA, 15 bp, Homo sapiens
ttgcctgtggtgctt

SEQ ID NO: 1765146 - DNA, 15 bp, Homo sapiens
tgcctgtggtgcttg

SEQ ID NO: 1765147 - DNA, 15 bp, Homo sapiens
gcctgtggtgcttgc

SEQ ID NO: 1765148 - DNA, 15 bp, Homo sapiens
cctgtggtgcttgcc

SEQ ID NO: 1765149 - DNA, 15 bp, Homo sapiens
ctgtggtgcttgcct

SEQ ID NO: 1765150 - DNA, 15 bp, Homo sapiens
tgtggtgcttgcctt

SEQ ID NO: 1765151 - DNA, 15 bp, Homo sapiens
gtggtgcttgccttg

SEQ ID NO: 1765152 - DNA, 15 bp, Homo sapiens
tggtgcttgccttgc

SEQ ID NO: 1765153 - DNA, 15 bp, Homo sapiens
ggtgcttgccttgcc

SEQ ID NO: 1765154 - DNA, 15 bp, Homo sapiens
gtgcttgccttgcca

SEQ ID NO: 1765155 - DNA, 15 bp, Homo sapiens
tgcttgccttgccac

SEQ ID NO: 1765156 - DNA, 15 bp, Homo sapiens
gcttgccttgccacc

SEQ ID NO: 1765157 - DNA, 15 bp, Homo sapiens
cttgccttgccacca

SEQ ID NO: 1765158 - DNA, 15 bp, Homo sapiens
ttgccttgccaccat

SEQ ID NO: 1765159 - DNA, 15 bp, Homo sapiens
tgccttgccaccatt

SEQ ID NO: 1765160 - DNA, 15 bp, Homo sapiens
gccttgccaccatta

SEQ ID NO: 1765161 - DNA, 15 bp, Homo sapiens
ccttgccaccattaa

SEQ ID NO: 1765162 - DNA, 15 bp, Homo sapiens
cttgccaccattaag

SEQ ID NO: 1765163 - DNA, 15 bp, Homo sapiens
ttgccaccattaagt

SEQ ID NO: 1765164 - DNA, 15 bp, Homo sapiens
tgccaccattaagta

SEQ ID NO: 1765165 - DNA, 15 bp, Homo sapiens
gccaccattaagtaa

SEQ ID NO: 1765166 - DNA, 15 bp, Homo sapiens
ccaccattaagtaac

SEQ ID NO: 1765167 - DNA, 15 bp, Homo sapiens
caccattaagtaact

SEQ ID NO: 1765168 - DNA, 15 bp, Homo sapiens
accattaagtaacta

SEQ ID NO: 1765169 - DNA, 15 bp, Homo sapiens
ccattaagtaactag

SEQ ID NO: 1765170 - DNA, 15 bp, Homo sapiens
cattaagtaactaga

SEQ ID NO: 1765171 - DNA, 15 bp, Homo sapiens
attaagtaactagac

SEQ ID NO: 1765172 - DNA, 15 bp, Homo sapiens
ttaagtaactagaca

SEQ ID NO: 1765173 - DNA, 15 bp, Homo sapiens
taagtaactagacaa

SEQ ID NO: 1765174 - DNA, 15 bp, Homo sapiens
aagtaactagacaag

SEQ ID NO: 1765175 - DNA, 15 bp, Homo sapiens
agtaactagacaagt

SEQ ID NO: 1765176 - DNA, 15 bp, Homo sapiens
gtaactagacaagta

SEQ ID NO: 1765177 - DNA, 15 bp, Homo sapiens
aactagacaagtaaa

SEQ ID NO: 1765178 - DNA, 15 bp, Homo sapiens
actagacaagtaaaa

SEQ ID NO: 1765179 - DNA, 15 bp, Homo sapiens
ctagacaagtaaaaa

SEQ ID NO: 1765180 - DNA, 15 bp, Homo sapiens
tagacaagtaaaaac

SEQ ID NO: 1765181 - DNA, 15 bp, Homo sapiens
agacaagtaaaaaca

SEQ ID NO: 1765182 - DNA, 15 bp, Homo sapiens
gacaagtaaaaacaa

SEQ ID NO: 1765183 - DNA, 15 bp, Homo sapiens
acaagtaaaaacaaa

SEQ ID NO: 1765184 - DNA, 15 bp, Homo sapiens
caagtaaaaacaaag

SEQ ID NO: 1765185 - DNA, 15 bp, Homo sapiens
aagtaaaaacaaaga

SEQ ID NO: 1765186 - DNA, 15 bp, Homo sapiens
agtaaaaacaaagaa

SEQ ID NO: 1765187 - DNA, 15 bp, Homo sapiens
gtaaaaacaaagaat

SEQ ID NO: 1765188 - DNA, 15 bp, Homo sapiens
taaaaacaaagaatc

SEQ ID NO: 1765189 - DNA, 15 bp, Homo sapiens
aaaaacaaagaatct

SEQ ID NO: 1765190 - DNA, 15 bp, Homo sapiens
aaaacaaagaatctg

SEQ ID NO: 1765191 - DNA, 15 bp, Homo sapiens
aaacaaagaatctgg

SEQ ID NO: 1765192 - DNA, 15 bp, Homo sapiens
aacaaagaatctggg

SEQ ID NO: 1765193 - DNA, 15 bp, Homo sapiens
acaaagaatctgggt

SEQ ID NO: 1765194 - DNA, 15 bp, Homo sapiens
caaagaatctgggtt

SEQ ID NO: 1765195 - DNA, 15 bp, Homo sapiens
aaagaatctgggttc

SEQ ID NO: 1765196 - DNA, 15 bp, Homo sapiens
aagaatctgggttca

SEQ ID NO: 1765197 - DNA, 15 bp, Homo sapiens
agaatctgggttcag

SEQ ID NO: 1765198 - DNA, 15 bp, Homo sapiens
gaatctgggttcagc

SEQ ID NO: 1765199 - DNA, 15 bp, Homo sapiens
aatctgggttcagcc

SEQ ID NO: 1765200 - DNA, 15 bp, Homo sapiens
atctgggttcagcca

SEQ ID NO: 1765201 - DNA, 15 bp, Homo sapiens
tctgggttcagccag

SEQ ID NO: 1765202 - DNA, 15 bp, Homo sapiens
ctgggttcagccagg

SEQ ID NO: 1765203 - DNA, 15 bp, Homo sapiens
tgggttcagccaggt

SEQ ID NO: 1765204 - DNA, 15 bp, Homo sapiens
gggttcagccaggtg

SEQ ID NO: 1765205 - DNA, 15 bp, Homo sapiens
ggttcagccaggtgc

SEQ ID NO: 1765206 - DNA, 15 bp, Homo sapiens
gttcagccaggtgca

SEQ ID NO: 1765207 - DNA, 15 bp, Homo sapiens
ttcagccaggtgcag

SEQ ID NO: 1765208 - DNA, 15 bp, Homo sapiens
tcagccaggtgcagt

SEQ ID NO: 1765209 - DNA, 15 bp, Homo sapiens
cagccaggtgcagtg

SEQ ID NO: 1765210 - DNA, 15 bp, Homo sapiens
agccaggtgcagtgg

SEQ ID NO: 1765211 - DNA, 15 bp, Homo sapiens
ccaggtgcagtggcc

SEQ ID NO: 1765212 - DNA, 15 bp, Homo sapiens
caggtgcagtggcct

SEQ ID NO: 1765213 - DNA, 15 bp, Homo sapiens
aggtgcagtggcctg

SEQ ID NO: 1765214 - DNA, 15 bp, Homo sapiens
ggtgcagtggcctgc

SEQ ID NO: 1765215 - DNA, 15 bp, Homo sapiens
gtgcagtggcctgca

SEQ ID NO: 1765216 - DNA, 15 bp, Homo sapiens
tgcagtggcctgcac

SEQ ID NO: 1765217 - DNA, 15 bp, Homo sapiens
gcagtggcctgcacc

SEQ ID NO: 1765218 - DNA, 15 bp, Homo sapiens
cagtggcctgcacct

SEQ ID NO: 1765219 - DNA, 15 bp, Homo sapiens
agtggcctgcacctg

SEQ ID NO: 1765220 - DNA, 15 bp, Homo sapiens
tagtcccagctgctt

SEQ ID NO: 1765221 - DNA, 15 bp, Homo sapiens
agtcccagctgcttg

SEQ ID NO: 1765222 - DNA, 15 bp, Homo sapiens
gtcccagctgcttga

SEQ ID NO: 1765223 - DNA, 15 bp, Homo sapiens
tcccagctgcttgag

SEQ ID NO: 1765224 - DNA, 15 bp, Homo sapiens
cccagctgcttgaga

SEQ ID NO: 1765225 - DNA, 15 bp, Homo sapiens
ccagctgcttgagag

SEQ ID NO: 1765226 - DNA, 15 bp, Homo sapiens
cagctgcttgagagg

SEQ ID NO: 1765227 - DNA, 15 bp, Homo sapiens
agctgcttgagaggc

SEQ ID NO: 1765228 - DNA, 15 bp, Homo sapiens
gctgcttgagaggct

SEQ ID NO: 1765229 - DNA, 15 bp, Homo sapiens
gcttgagaggctgag

SEQ ID NO: 1765230 - DNA, 15 bp, Homo sapiens
cttgagaggctgagg

SEQ ID NO: 1765231 - DNA, 15 bp, Homo sapiens
ttgagaggctgaggt

SEQ ID NO: 1765232 - DNA, 15 bp, Homo sapiens
tgagaggctgaggtg

SEQ ID NO: 1765233 - DNA, 15 bp, Homo sapiens
tgcttgagcccaggt

SEQ ID NO: 1765234 - DNA, 15 bp, Homo sapiens
gcttgagcccaggta

SEQ ID NO: 1765235 - DNA, 15 bp, Homo sapiens
cttgagcccaggtat

SEQ ID NO: 1765236 - DNA, 15 bp, Homo sapiens
ttgagcccaggtatt

SEQ ID NO: 1765237 - DNA, 15 bp, Homo sapiens
tgagcccaggtattc

SEQ ID NO: 1765238 - DNA, 15 bp, Homo sapiens
gagcccaggtattca

SEQ ID NO: 1765239 - DNA, 15 bp, Homo sapiens
agcccaggtattcaa

SEQ ID NO: 1765240 - DNA, 15 bp, Homo sapiens
gcccaggtattcaag

SEQ ID NO: 1765241 - DNA, 15 bp, Homo sapiens
cccaggtattcaagt

SEQ ID NO: 1765242 - DNA, 15 bp, Homo sapiens
ccaggtattcaagtc

SEQ ID NO: 1765243 - DNA, 15 bp, Homo sapiens
caggtattcaagtcc

SEQ ID NO: 1765244 - DNA, 15 bp, Homo sapiens
aggtattcaagtcca

SEQ ID NO: 1765245 - DNA, 15 bp, Homo sapiens
ggtattcaagtccag

SEQ ID NO: 1765246 - DNA, 15 bp, Homo sapiens
gtattcaagtccagc

SEQ ID NO: 1765247 - DNA, 15 bp, Homo sapiens
tattcaagtccagcc

SEQ ID NO: 1765248 - DNA, 15 bp, Homo sapiens
attcaagtccagcct

SEQ ID NO: 1765249 - DNA, 15 bp, Homo sapiens
ttcaagtccagcctg

SEQ ID NO: 1765250 - DNA, 15 bp, Homo sapiens
tcaagtccagcctgg

SEQ ID NO: 1765251 - DNA, 15 bp, Homo sapiens
caagtccagcctggg

SEQ ID NO: 1765252 - DNA, 15 bp, Homo sapiens
aagtccagcctgggc

SEQ ID NO: 1765253 - DNA, 15 bp, Homo sapiens
agtccagcctgggca

SEQ ID NO: 1765254 - DNA, 15 bp, Homo sapiens
gtccagcctgggcaa

SEQ ID NO: 1765255 - DNA, 15 bp, Homo sapiens
agcctgggcaatata

SEQ ID NO: 1765256 - DNA, 15 bp, Homo sapiens
gcctgggcaatatag

SEQ ID NO: 1765257 - DNA, 15 bp, Homo sapiens
cctgggcaatatagc

SEQ ID NO: 1765258 - DNA, 15 bp, Homo sapiens
ctgggcaatatagca

SEQ ID NO: 1765259 - DNA, 15 bp, Homo sapiens
tgggcaatatagcaa

SEQ ID NO: 1765260 - DNA, 15 bp, Homo sapiens
gggcaatatagcaag

SEQ ID NO: 1765261 - DNA, 15 bp, Homo sapiens
ggcaatatagcaaga

SEQ ID NO: 1765262 - DNA, 15 bp, Homo sapiens
gcaatatagcaagac

SEQ ID NO: 1765263 - DNA, 15 bp, Homo sapiens
caatatagcaagacc

SEQ ID NO: 1765264 - DNA, 15 bp, Homo sapiens
aatatagcaagacct

SEQ ID NO: 1765265 - DNA, 15 bp, Homo sapiens
atatagcaagacctc

SEQ ID NO: 1765266 - DNA, 15 bp, Homo sapiens
tatagcaagacctca

SEQ ID NO: 1765267 - DNA, 15 bp, Homo sapiens
gcaagacctcatctt

SEQ ID NO: 1765268 - DNA, 15 bp, Homo sapiens
caagacctcatcttt

SEQ ID NO: 1765269 - DNA, 15 bp, Homo sapiens
aagacctcatctttc

SEQ ID NO: 1765270 - DNA, 15 bp, Homo sapiens
agacctcatctttct

SEQ ID NO: 1765271 - DNA, 15 bp, Homo sapiens
gacctcatctttcta

SEQ ID NO: 1765272 - DNA, 15 bp, Homo sapiens
acctcatctttctat

SEQ ID NO: 1765273 - DNA, 15 bp, Homo sapiens
cctcatctttctatt

SEQ ID NO: 1765274 - DNA, 15 bp, Homo sapiens
ctcatctttctatta

SEQ ID NO: 1765275 - DNA, 15 bp, Homo sapiens
tcatctttctattaa

SEQ ID NO: 1765276 - DNA, 15 bp, Homo sapiens
catctttctattaaa

SEQ ID NO: 1765277 - DNA, 15 bp, Homo sapiens
atctttctattaaaa

SEQ ID NO: 1765278 - DNA, 15 bp, Homo sapiens
tctttctattaaaac

SEQ ID NO: 1765279 - DNA, 15 bp, Homo sapiens
ctttctattaaaaca

SEQ ID NO: 1765280 - DNA, 15 bp, Homo sapiens
tttctattaaaacaa

SEQ ID NO: 1765281 - DNA, 15 bp, Homo sapiens
ttctattaaaacaaa

SEQ ID NO: 1765282 - DNA, 15 bp, Homo sapiens
tctattaaaacaaac

SEQ ID NO: 1765283 - DNA, 15 bp, Homo sapiens
ctattaaaacaaaca

SEQ ID NO: 1765284 - DNA, 15 bp, Homo sapiens
tattaaaacaaacaa

SEQ ID NO: 1765285 - DNA, 15 bp, Homo sapiens
aacaaacaaacaggg

SEQ ID NO: 1765286 - DNA, 15 bp, Homo sapiens
acaaacaaacagggt

SEQ ID NO: 1765287 - DNA, 15 bp, Homo sapiens
caaacaaacagggtt

SEQ ID NO: 1765288 - DNA, 15 bp, Homo sapiens
aaacaaacagggttc

SEQ ID NO: 1765289 - DNA, 15 bp, Homo sapiens
aacaaacagggttct

SEQ ID NO: 1765290 - DNA, 15 bp, Homo sapiens
acaaacagggttctt

SEQ ID NO: 1765291 - DNA, 15 bp, Homo sapiens
caaacagggttctta

SEQ ID NO: 1765292 - DNA, 15 bp, Homo sapiens
aaacagggttcttac

SEQ ID NO: 1765293 - DNA, 15 bp, Homo sapiens
aacagggttcttacc

SEQ ID NO: 1765294 - DNA, 15 bp, Homo sapiens
acagggttcttaccc

SEQ ID NO: 1765295 - DNA, 15 bp, Homo sapiens
cagggttcttaccct

SEQ ID NO: 1765296 - DNA, 15 bp, Homo sapiens
agggttcttaccctg

SEQ ID NO: 1765297 - DNA, 15 bp, Homo sapiens
gggttcttaccctgg

SEQ ID NO: 1765298 - DNA, 15 bp, Homo sapiens
ggttcttaccctggc

SEQ ID NO: 1765299 - DNA, 15 bp, Homo sapiens
gttcttaccctggcg

SEQ ID NO: 1765300 - DNA, 15 bp, Homo sapiens
ttcttaccctggcgc

SEQ ID NO: 1765301 - DNA, 15 bp, Homo sapiens
tcttaccctggcgct

SEQ ID NO: 1765302 - DNA, 15 bp, Homo sapiens
cttaccctggcgcta

SEQ ID NO: 1765303 - DNA, 15 bp, Homo sapiens
ttaccctggcgctac

SEQ ID NO: 1765304 - DNA, 15 bp, Homo sapiens
taccctggcgctaca

SEQ ID NO: 1765305 - DNA, 15 bp, Homo sapiens
accctggcgctacat

SEQ ID NO: 1765306 - DNA, 15 bp, Homo sapiens
ccctggcgctacatt

SEQ ID NO: 1765307 - DNA, 15 bp, Homo sapiens
cctggcgctacatta

SEQ ID NO: 1765308 - DNA, 15 bp, Homo sapiens
ctggcgctacattaa

SEQ ID NO: 1765309 - DNA, 15 bp, Homo sapiens
tggcgctacattaat

SEQ ID NO: 1765310 - DNA, 15 bp, Homo sapiens
ggcgctacattaatt

SEQ ID NO: 1765311 - DNA, 15 bp, Homo sapiens
gcgctacattaattt

SEQ ID NO: 1765312 - DNA, 15 bp, Homo sapiens
cgctacattaatttg

SEQ ID NO: 1765313 - DNA, 15 bp, Homo sapiens
gctacattaatttgt

SEQ ID NO: 1765314 - DNA, 15 bp, Homo sapiens
ctacattaatttgtt

SEQ ID NO: 1765315 - DNA, 15 bp, Homo sapiens
tacattaatttgtta

SEQ ID NO: 1765316 - DNA, 15 bp, Homo sapiens
acattaatttgttat

SEQ ID NO: 1765317 - DNA, 15 bp, Homo sapiens
cattaatttgttatg

SEQ ID NO: 1765318 - DNA, 15 bp, Homo sapiens
attaatttgttatgt

SEQ ID NO: 1765319 - DNA, 15 bp, Homo sapiens
ttaatttgttatgtg

SEQ ID NO: 1765320 - DNA, 15 bp, Homo sapiens
taatttgttatgtga

SEQ ID NO: 1765321 - DNA, 15 bp, Homo sapiens
aatttgttatgtgac

SEQ ID NO: 1765322 - DNA, 15 bp, Homo sapiens
atttgttatgtgaca

SEQ ID NO: 1765323 - DNA, 15 bp, Homo sapiens
tttgttatgtgacat

SEQ ID NO: 1765324 - DNA, 15 bp, Homo sapiens
ttgttatgtgacatt

SEQ ID NO: 1765325 - DNA, 15 bp, Homo sapiens
tgttatgtgacattg

SEQ ID NO: 1765326 - DNA, 15 bp, Homo sapiens
gttatgtgacattgt

SEQ ID NO: 1765327 - DNA, 15 bp, Homo sapiens
ttatgtgacattgtg

SEQ ID NO: 1765328 - DNA, 15 bp, Homo sapiens
tatgtgacattgtgt

SEQ ID NO: 1765329 - DNA, 15 bp, Homo sapiens
atgtgacattgtgtc

SEQ ID NO: 1765330 - DNA, 15 bp, Homo sapiens
tgtgacattgtgtct

SEQ ID NO: 1765331 - DNA, 15 bp, Homo sapiens
gtgacattgtgtctg

SEQ ID NO: 1765332 - DNA, 15 bp, Homo sapiens
tgacattgtgtctgt

SEQ ID NO: 1765333 - DNA, 15 bp, Homo sapiens
gacattgtgtctgtt

SEQ ID NO: 1765334 - DNA, 15 bp, Homo sapiens
acattgtgtctgttg

SEQ ID NO: 1765335 - DNA, 15 bp, Homo sapiens
cattgtgtctgttgt

SEQ ID NO: 1765336 - DNA, 15 bp, Homo sapiens
attgtgtctgttgtt

SEQ ID NO: 1765337 - DNA, 15 bp, Homo sapiens
ttgtgtctgttgttt

SEQ ID NO: 1765338 - DNA, 15 bp, Homo sapiens
tgtgtctgttgttta

SEQ ID NO: 1765339 - DNA, 15 bp, Homo sapiens
gtgtctgttgtttag

SEQ ID NO: 1765340 - DNA, 15 bp, Homo sapiens
tgtctgttgtttagt

SEQ ID NO: 1765341 - DNA, 15 bp, Homo sapiens
gtctgttgtttagtc

SEQ ID NO: 1765342 - DNA, 15 bp, Homo sapiens
tctgttgtttagtct

SEQ ID NO: 1765343 - DNA, 15 bp, Homo sapiens
ctgttgtttagtctt

SEQ ID NO: 1765344 - DNA, 15 bp, Homo sapiens
tgttgtttagtctta

SEQ ID NO: 1765345 - DNA, 15 bp, Homo sapiens
gttgtttagtcttac

SEQ ID NO: 1765346 - DNA, 15 bp, Homo sapiens
ttgtttagtcttaca

SEQ ID NO: 1765347 - DNA, 15 bp, Homo sapiens
tgtttagtcttacag

SEQ ID NO: 1765348 - DNA, 15 bp, Homo sapiens
gtttagtcttacagt

SEQ ID NO: 1765349 - DNA, 15 bp, Homo sapiens
tttagtcttacagtt

SEQ ID NO: 1765350 - DNA, 15 bp, Homo sapiens
ttagtcttacagttc

SEQ ID NO: 1765351 - DNA, 15 bp, Homo sapiens
tagtcttacagttcc

SEQ ID NO: 1765352 - DNA, 15 bp, Homo sapiens
agtcttacagttcct

SEQ ID NO: 1765353 - DNA, 15 bp, Homo sapiens
gtcttacagttcctc

SEQ ID NO: 1765354 - DNA, 15 bp, Homo sapiens
tcttacagttcctca

SEQ ID NO: 1765355 - DNA, 15 bp, Homo sapiens
cttacagttcctcag

SEQ ID NO: 1765356 - DNA, 15 bp, Homo sapiens
ttacagttcctcagt

SEQ ID NO: 1765357 - DNA, 15 bp, Homo sapiens
tacagttcctcagtt

SEQ ID NO: 1765358 - DNA, 15 bp, Homo sapiens
acagttcctcagttt

SEQ ID NO: 1765359 - DNA, 15 bp, Homo sapiens
cagttcctcagtttc

SEQ ID NO: 1765360 - DNA, 15 bp, Homo sapiens
agttcctcagtttcc

SEQ ID NO: 1765361 - DNA, 15 bp, Homo sapiens
gttcctcagtttccc

SEQ ID NO: 1765362 - DNA, 15 bp, Homo sapiens
ttcctcagtttcccc

SEQ ID NO: 1765363 - DNA, 15 bp, Homo sapiens
tcctcagtttcccca

SEQ ID NO: 1765364 - DNA, 15 bp, Homo sapiens
cctcagtttccccag

SEQ ID NO: 1765365 - DNA, 15 bp, Homo sapiens
ctcagtttccccagc

SEQ ID NO: 1765366 - DNA, 15 bp, Homo sapiens
tcagtttccccagcc

SEQ ID NO: 1765367 - DNA, 15 bp, Homo sapiens
cagtttccccagcct

SEQ ID NO: 1765368 - DNA, 15 bp, Homo sapiens
agtttccccagccta

SEQ ID NO: 1765369 - DNA, 15 bp, Homo sapiens
gtttccccagcctaa

SEQ ID NO: 1765370 - DNA, 15 bp, Homo sapiens
tttccccagcctaag

SEQ ID NO: 1765371 - DNA, 15 bp, Homo sapiens
ttccccagcctaagg

SEQ ID NO: 1765372 - DNA, 15 bp, Homo sapiens
tccccagcctaaggt

SEQ ID NO: 1765373 - DNA, 15 bp, Homo sapiens
ccccagcctaaggtg

SEQ ID NO: 1765374 - DNA, 15 bp, Homo sapiens
cccagcctaaggtgt

SEQ ID NO: 1765375 - DNA, 15 bp, Homo sapiens
ccagcctaaggtgta

SEQ ID NO: 1765376 - DNA, 15 bp, Homo sapiens
cagcctaaggtgtag

SEQ ID NO: 1765377 - DNA, 15 bp, Homo sapiens
agcctaaggtgtagt

SEQ ID NO: 1765378 - DNA, 15 bp, Homo sapiens
gcctaaggtgtagtt

SEQ ID NO: 1765379 - DNA, 15 bp, Homo sapiens
cctaaggtgtagtta

SEQ ID NO: 1765380 - DNA, 15 bp, Homo sapiens
ctaaggtgtagttac

SEQ ID NO: 1765381 - DNA, 15 bp, Homo sapiens
taaggtgtagttaca

SEQ ID NO: 1765382 - DNA, 15 bp, Homo sapiens
aaggtgtagttacat

SEQ ID NO: 1765383 - DNA, 15 bp, Homo sapiens
aggtgtagttacatc

SEQ ID NO: 1765384 - DNA, 15 bp, Homo sapiens
ggtgtagttacatca

SEQ ID NO: 1765385 - DNA, 15 bp, Homo sapiens
gtgtagttacatcag

SEQ ID NO: 1765386 - DNA, 15 bp, Homo sapiens
tgtagttacatcaga

SEQ ID NO: 1765387 - DNA, 15 bp, Homo sapiens
gtagttacatcagat

SEQ ID NO: 1765388 - DNA, 15 bp, Homo sapiens
tagttacatcagatg

SEQ ID NO: 1765389 - DNA, 15 bp, Homo sapiens
agttacatcagatga

SEQ ID NO: 1765390 - DNA, 15 bp, Homo sapiens
gttacatcagatgac

SEQ ID NO: 1765391 - DNA, 15 bp, Homo sapiens
ttacatcagatgacc

SEQ ID NO: 1765392 - DNA, 15 bp, Homo sapiens
tacatcagatgacca

SEQ ID NO: 1765393 - DNA, 15 bp, Homo sapiens
acatcagatgaccat

SEQ ID NO: 1765394 - DNA, 15 bp, Homo sapiens
catcagatgaccatc

SEQ ID NO: 1765395 - DNA, 15 bp, Homo sapiens
atcagatgaccatca

SEQ ID NO: 1765396 - DNA, 15 bp, Homo sapiens
tcagatgaccatcag

SEQ ID NO: 1765397 - DNA, 15 bp, Homo sapiens
cagatgaccatcagg

SEQ ID NO: 1765398 - DNA, 15 bp, Homo sapiens
agatgaccatcaggc

SEQ ID NO: 1765399 - DNA, 15 bp, Homo sapiens
gatgaccatcaggcc

SEQ ID NO: 1765400 - DNA, 15 bp, Homo sapiens
atgaccatcaggccc

SEQ ID NO: 1765401 - DNA, 15 bp, Homo sapiens
tgaccatcaggccct

SEQ ID NO: 1765402 - DNA, 15 bp, Homo sapiens
gaccatcaggccctt

SEQ ID NO: 1765403 - DNA, 15 bp, Homo sapiens
accatcaggcccttt

SEQ ID NO: 1765404 - DNA, 15 bp, Homo sapiens
ccatcaggccctttc

SEQ ID NO: 1765405 - DNA, 15 bp, Homo sapiens
catcaggccctttct

SEQ ID NO: 1765406 - DNA, 15 bp, Homo sapiens
atcaggccctttctg

SEQ ID NO: 1765407 - DNA, 15 bp, Homo sapiens
tcaggccctttctgt

SEQ ID NO: 1765408 - DNA, 15 bp, Homo sapiens
caggccctttctgtt

SEQ ID NO: 1765409 - DNA, 15 bp, Homo sapiens
aggccctttctgttc

SEQ ID NO: 1765410 - DNA, 15 bp, Homo sapiens
ggccctttctgttct

SEQ ID NO: 1765411 - DNA, 15 bp, Homo sapiens
gccctttctgttcta

SEQ ID NO: 1765412 - DNA, 15 bp, Homo sapiens
ccctttctgttctaa

SEQ ID NO: 1765413 - DNA, 15 bp, Homo sapiens
cctttctgttctaag

SEQ ID NO: 1765414 - DNA, 15 bp, Homo sapiens
ctttctgttctaagt

SEQ ID NO: 1765415 - DNA, 15 bp, Homo sapiens
tttctgttctaagtt

SEQ ID NO: 1765416 - DNA, 15 bp, Homo sapiens
ttctgttctaagttg

SEQ ID NO: 1765417 - DNA, 15 bp, Homo sapiens
tctgttctaagttgt

SEQ ID NO: 1765418 - DNA, 15 bp, Homo sapiens
ctgttctaagttgtg

SEQ ID NO: 1765419 - DNA, 15 bp, Homo sapiens
tgttctaagttgtga

SEQ ID NO: 1765420 - DNA, 15 bp, Homo sapiens
gttctaagttgtgaa

SEQ ID NO: 1765421 - DNA, 15 bp, Homo sapiens
ttctaagttgtgaat

SEQ ID NO: 1765422 - DNA, 15 bp, Homo sapiens
tctaagttgtgaatg

SEQ ID NO: 1765423 - DNA, 15 bp, Homo sapiens
ctaagttgtgaatgt

SEQ ID NO: 1765424 - DNA, 15 bp, Homo sapiens
taagttgtgaatgtt

SEQ ID NO: 1765425 - DNA, 15 bp, Homo sapiens
aagttgtgaatgttc

SEQ ID NO: 1765426 - DNA, 15 bp, Homo sapiens
agttgtgaatgttcc

SEQ ID NO: 1765427 - DNA, 15 bp, Homo sapiens
gttgtgaatgttcca

SEQ ID NO: 1765428 - DNA, 15 bp, Homo sapiens
ttgtgaatgttccag

SEQ ID NO: 1765429 - DNA, 15 bp, Homo sapiens
tgtgaatgttccaga

SEQ ID NO: 1765430 - DNA, 15 bp, Homo sapiens
gtgaatgttccagaa

SEQ ID NO: 1765431 - DNA, 15 bp, Homo sapiens
tgaatgttccagaag

SEQ ID NO: 1765432 - DNA, 15 bp, Homo sapiens
gaatgttccagaagc

SEQ ID NO: 1765433 - DNA, 15 bp, Homo sapiens
aatgttccagaagcc

SEQ ID NO: 1765434 - DNA, 15 bp, Homo sapiens
atgttccagaagcca

SEQ ID NO: 1765435 - DNA, 15 bp, Homo sapiens
tgttccagaagccat

SEQ ID NO: 1765436 - DNA, 15 bp, Homo sapiens
gttccagaagccatt

SEQ ID NO: 1765437 - DNA, 15 bp, Homo sapiens
ttccagaagccattt

SEQ ID NO: 1765438 - DNA, 15 bp, Homo sapiens
tccagaagccatttt

SEQ ID NO: 1765439 - DNA, 15 bp, Homo sapiens
ccagaagccattttg

SEQ ID NO: 1765440 - DNA, 15 bp, Homo sapiens
cagaagccattttga

SEQ ID NO: 1765441 - DNA, 15 bp, Homo sapiens
agaagccattttgat

SEQ ID NO: 1765442 - DNA, 15 bp, Homo sapiens
gaagccattttgata

SEQ ID NO: 1765443 - DNA, 15 bp, Homo sapiens
aagccattttgatag

SEQ ID NO: 1765444 - DNA, 15 bp, Homo sapiens
agccattttgatagg

SEQ ID NO: 1765445 - DNA, 15 bp, Homo sapiens
gccattttgatagga

SEQ ID NO: 1765446 - DNA, 15 bp, Homo sapiens
ccattttgataggac

SEQ ID NO: 1765447 - DNA, 15 bp, Homo sapiens
cattttgataggacg

SEQ ID NO: 1765448 - DNA, 15 bp, Homo sapiens
attttgataggacga

SEQ ID NO: 1765449 - DNA, 15 bp, Homo sapiens
ttttgataggacgat

SEQ ID NO: 1765450 - DNA, 15 bp, Homo sapiens
tttgataggacgata

SEQ ID NO: 1765451 - DNA, 15 bp, Homo sapiens
ttgataggacgataa

SEQ ID NO: 1765452 - DNA, 15 bp, Homo sapiens
tgataggacgataat

SEQ ID NO: 1765453 - DNA, 15 bp, Homo sapiens
gataggacgataatg

SEQ ID NO: 1765454 - DNA, 15 bp, Homo sapiens
ataggacgataatgg

SEQ ID NO: 1765455 - DNA, 15 bp, Homo sapiens
taggacgataatgga

SEQ ID NO: 1765456 - DNA, 15 bp, Homo sapiens
aggacgataatggaa

SEQ ID NO: 1765457 - DNA, 15 bp, Homo sapiens
ggacgataatggaac

SEQ ID NO: 1765458 - DNA, 15 bp, Homo sapiens
gacgataatggaacc

SEQ ID NO: 1765459 - DNA, 15 bp, Homo sapiens
acgataatggaacct

SEQ ID NO: 1765460 - DNA, 15 bp, Homo sapiens
cgataatggaaccta

SEQ ID NO: 1765461 - DNA, 15 bp, Homo sapiens
gataatggaacctag

SEQ ID NO: 1765462 - DNA, 15 bp, Homo sapiens
ataatggaacctagc

SEQ ID NO: 1765463 - DNA, 15 bp, Homo sapiens
taatggaacctagca

SEQ ID NO: 1765464 - DNA, 15 bp, Homo sapiens
aatggaacctagcac

SEQ ID NO: 1765465 - DNA, 15 bp, Homo sapiens
atggaacctagcaca

SEQ ID NO: 1765466 - DNA, 15 bp, Homo sapiens
tggaacctagcacat

SEQ ID NO: 1765467 - DNA, 15 bp, Homo sapiens
ggaacctagcacatt

SEQ ID NO: 1765468 - DNA, 15 bp, Homo sapiens
gaacctagcacattt

SEQ ID NO: 1765469 - DNA, 15 bp, Homo sapiens
aacctagcacattta

SEQ ID NO: 1765470 - DNA, 15 bp, Homo sapiens
acctagcacatttac

SEQ ID NO: 1765471 - DNA, 15 bp, Homo sapiens
cctagcacatttacc

SEQ ID NO: 1765472 - DNA, 15 bp, Homo sapiens
ctagcacatttaccc

SEQ ID NO: 1765473 - DNA, 15 bp, Homo sapiens
tagcacatttacccc

SEQ ID NO: 1765474 - DNA, 15 bp, Homo sapiens
agcacatttacccca

SEQ ID NO: 1765475 - DNA, 15 bp, Homo sapiens
gcacatttaccccat

SEQ ID NO: 1765476 - DNA, 15 bp, Homo sapiens
cacatttaccccatg

SEQ ID NO: 1765477 - DNA, 15 bp, Homo sapiens
acatttaccccatgg

SEQ ID NO: 1765478 - DNA, 15 bp, Homo sapiens
catttaccccatggc

SEQ ID NO: 1765479 - DNA, 15 bp, Homo sapiens
atttaccccatggct

SEQ ID NO: 1765480 - DNA, 15 bp, Homo sapiens
tttaccccatggcta

SEQ ID NO: 1765481 - DNA, 15 bp, Homo sapiens
ttaccccatggctat

SEQ ID NO: 1765482 - DNA, 15 bp, Homo sapiens
taccccatggctatt

SEQ ID NO: 1765483 - DNA, 15 bp, Homo sapiens
accccatggctatta

SEQ ID NO: 1765484 - DNA, 15 bp, Homo sapiens
ccccatggctattaa

SEQ ID NO: 1765485 - DNA, 15 bp, Homo sapiens
cccatggctattaac

SEQ ID NO: 1765486 - DNA, 15 bp, Homo sapiens
ccatggctattaact

SEQ ID NO: 1765487 - DNA, 15 bp, Homo sapiens
catggctattaactg

SEQ ID NO: 1765488 - DNA, 15 bp, Homo sapiens
atggctattaactgt

SEQ ID NO: 1765489 - DNA, 15 bp, Homo sapiens
tggctattaactgta

SEQ ID NO: 1765490 - DNA, 15 bp, Homo sapiens
ggctattaactgtaa

SEQ ID NO: 1765491 - DNA, 15 bp, Homo sapiens
gctattaactgtaac

SEQ ID NO: 1765492 - DNA, 15 bp, Homo sapiens
ctattaactgtaacg

SEQ ID NO: 1765493 - DNA, 15 bp, Homo sapiens
tattaactgtaacgc

SEQ ID NO: 1765494 - DNA, 15 bp, Homo sapiens
attaactgtaacgct

SEQ ID NO: 1765495 - DNA, 15 bp, Homo sapiens
ttaactgtaacgctg

SEQ ID NO: 1765496 - DNA, 15 bp, Homo sapiens
taactgtaacgctgc

SEQ ID NO: 1765497 - DNA, 15 bp, Homo sapiens
aactgtaacgctgct

SEQ ID NO: 1765498 - DNA, 15 bp, Homo sapiens
actgtaacgctgctg

SEQ ID NO: 1765499 - DNA, 15 bp, Homo sapiens
ctgtaacgctgctgt

SEQ ID NO: 1765500 - DNA, 15 bp, Homo sapiens
tgtaacgctgctgta

SEQ ID NO: 1765501 - DNA, 15 bp, Homo sapiens
gtaacgctgctgtaa

SEQ ID NO: 1765502 - DNA, 15 bp, Homo sapiens
taacgctgctgtaag

SEQ ID NO: 1765503 - DNA, 15 bp, Homo sapiens
aacgctgctgtaagt

SEQ ID NO: 1765504 - DNA, 15 bp, Homo sapiens
acgctgctgtaagta

SEQ ID NO: 1765505 - DNA, 15 bp, Homo sapiens
cgctgctgtaagtat

SEQ ID NO: 1765506 - DNA, 15 bp, Homo sapiens
gctgctgtaagtata

SEQ ID NO: 1765507 - DNA, 15 bp, Homo sapiens
ctgctgtaagtatac

SEQ ID NO: 1765508 - DNA, 15 bp, Homo sapiens
tgctgtaagtataca

SEQ ID NO: 1765509 - DNA, 15 bp, Homo sapiens
gctgtaagtatacaa

SEQ ID NO: 1765510 - DNA, 15 bp, Homo sapiens
ctgtaagtatacaac

SEQ ID NO: 1765511 - DNA, 15 bp, Homo sapiens
tgtaagtatacaaca

SEQ ID NO: 1765512 - DNA, 15 bp, Homo sapiens
gtaagtatacaacac

SEQ ID NO: 1765513 - DNA, 15 bp, Homo sapiens
taagtatacaacaca

SEQ ID NO: 1765514 - DNA, 15 bp, Homo sapiens
aagtatacaacacat

SEQ ID NO: 1765515 - DNA, 15 bp, Homo sapiens
agtatacaacacata

SEQ ID NO: 1765516 - DNA, 15 bp, Homo sapiens
gtatacaacacataa

SEQ ID NO: 1765517 - DNA, 15 bp, Homo sapiens
tatacaacacataat

SEQ ID NO: 1765518 - DNA, 15 bp, Homo sapiens
atacaacacataatt

SEQ ID NO: 1765519 - DNA, 15 bp, Homo sapiens
tacaacacataattg

SEQ ID NO: 1765520 - DNA, 15 bp, Homo sapiens
acaacacataattgt

SEQ ID NO: 1765521 - DNA, 15 bp, Homo sapiens
caacacataattgtt

SEQ ID NO: 1765522 - DNA, 15 bp, Homo sapiens
aacacataattgttt

SEQ ID NO: 1765523 - DNA, 15 bp, Homo sapiens
acacataattgtttc

SEQ ID NO: 1765524 - DNA, 15 bp, Homo sapiens
cacataattgtttct

SEQ ID NO: 1765525 - DNA, 15 bp, Homo sapiens
acataattgtttctt

SEQ ID NO: 1765526 - DNA, 15 bp, Homo sapiens
cataattgtttctta

SEQ ID NO: 1765527 - DNA, 15 bp, Homo sapiens
ataattgtttcttac

SEQ ID NO: 1765528 - DNA, 15 bp, Homo sapiens
taattgtttcttaca

SEQ ID NO: 1765529 - DNA, 15 bp, Homo sapiens
aattgtttcttacaa

SEQ ID NO: 1765530 - DNA, 15 bp, Homo sapiens
attgtttcttacaat

SEQ ID NO: 1765531 - DNA, 15 bp, Homo sapiens
ttgtttcttacaatt

SEQ ID NO: 1765532 - DNA, 15 bp, Homo sapiens
tgtttcttacaatta

SEQ ID NO: 1765533 - DNA, 15 bp, Homo sapiens
gtttcttacaattat

SEQ ID NO: 1765534 - DNA, 15 bp, Homo sapiens
tttcttacaattatt

SEQ ID NO: 1765535 - DNA, 15 bp, Homo sapiens
ttcttacaattattt

SEQ ID NO: 1765536 - DNA, 15 bp, Homo sapiens
tcttacaattattta

SEQ ID NO: 1765537 - DNA, 15 bp, Homo sapiens
cttacaattatttat

SEQ ID NO: 1765538 - DNA, 15 bp, Homo sapiens
ttacaattatttatt

SEQ ID NO: 1765539 - DNA, 15 bp, Homo sapiens
tacaattatttattt

SEQ ID NO: 1765540 - DNA, 15 bp, Homo sapiens
acaattatttatttt

SEQ ID NO: 1765541 - DNA, 15 bp, Homo sapiens
ttatttatttttaaa

SEQ ID NO: 1765542 - DNA, 15 bp, Homo sapiens
tatttatttttaaaa

SEQ ID NO: 1765543 - DNA, 15 bp, Homo sapiens
atttatttttaaaaa

SEQ ID NO: 1765544 - DNA, 15 bp, Homo sapiens
tttatttttaaaaat

SEQ ID NO: 1765545 - DNA, 15 bp, Homo sapiens
ttatttttaaaaatc

SEQ ID NO: 1765546 - DNA, 15 bp, Homo sapiens
tatttttaaaaatca

SEQ ID NO: 1765547 - DNA, 15 bp, Homo sapiens
atttttaaaaatcac

SEQ ID NO: 1765548 - DNA, 15 bp, Homo sapiens
tttttaaaaatcact

SEQ ID NO: 1765549 - DNA, 15 bp, Homo sapiens
ttttaaaaatcactt

SEQ ID NO: 1765550 - DNA, 15 bp, Homo sapiens
tttaaaaatcacttg

SEQ ID NO: 1765551 - DNA, 15 bp, Homo sapiens
ttaaaaatcacttga

SEQ ID NO: 1765552 - DNA, 15 bp, Homo sapiens
taaaaatcacttgaa

SEQ ID NO: 1765553 - DNA, 15 bp, Homo sapiens
aaaaatcacttgaaa

SEQ ID NO: 1765554 - DNA, 15 bp, Homo sapiens
aaaatcacttgaaat

SEQ ID NO: 1765555 - DNA, 15 bp, Homo sapiens
aaatcacttgaaatc

SEQ ID NO: 1765556 - DNA, 15 bp, Homo sapiens
aatcacttgaaatct

SEQ ID NO: 1765557 - DNA, 15 bp, Homo sapiens
atcacttgaaatcta

SEQ ID NO: 1765558 - DNA, 15 bp, Homo sapiens
tcacttgaaatctat

SEQ ID NO: 1765559 - DNA, 15 bp, Homo sapiens
cacttgaaatctatt

SEQ ID NO: 1765560 - DNA, 15 bp, Homo sapiens
acttgaaatctatta

SEQ ID NO: 1765561 - DNA, 15 bp, Homo sapiens
cttgaaatctattat

SEQ ID NO: 1765562 - DNA, 15 bp, Homo sapiens
ttgaaatctattatg

SEQ ID NO: 1765563 - DNA, 15 bp, Homo sapiens
tgaaatctattatga

SEQ ID NO: 1765564 - DNA, 15 bp, Homo sapiens
gaaatctattatgag

SEQ ID NO: 1765565 - DNA, 15 bp, Homo sapiens
aaatctattatgagt

SEQ ID NO: 1765566 - DNA, 15 bp, Homo sapiens
aatctattatgagta

SEQ ID NO: 1765567 - DNA, 15 bp, Homo sapiens
atctattatgagtaa

SEQ ID NO: 1765568 - DNA, 15 bp, Homo sapiens
tctattatgagtaaa

SEQ ID NO: 1765569 - DNA, 15 bp, Homo sapiens
ctattatgagtaaac

SEQ ID NO: 1765570 - DNA, 15 bp, Homo sapiens
tattatgagtaaacc

SEQ ID NO: 1765571 - DNA, 15 bp, Homo sapiens
attatgagtaaacca

SEQ ID NO: 1765572 - DNA, 15 bp, Homo sapiens
ttatgagtaaaccaa

SEQ ID NO: 1765573 - DNA, 15 bp, Homo sapiens
tatgagtaaaccaag

SEQ ID NO: 1765574 - DNA, 15 bp, Homo sapiens
atgagtaaaccaagt

SEQ ID NO: 1765575 - DNA, 15 bp, Homo sapiens
tgagtaaaccaagtt

SEQ ID NO: 1765576 - DNA, 15 bp, Homo sapiens
gagtaaaccaagttt

SEQ ID NO: 1765577 - DNA, 15 bp, Homo sapiens
agtaaaccaagtttt

SEQ ID NO: 1765578 - DNA, 15 bp, Homo sapiens
gtaaaccaagttttg

SEQ ID NO: 1765579 - DNA, 15 bp, Homo sapiens
taaaccaagttttga

SEQ ID NO: 1765580 - DNA, 15 bp, Homo sapiens
aaaccaagttttgag

SEQ ID NO: 1765581 - DNA, 15 bp, Homo sapiens
aaccaagttttgaga

SEQ ID NO: 1765582 - DNA, 15 bp, Homo sapiens
accaagttttgagaa

SEQ ID NO: 1765583 - DNA, 15 bp, Homo sapiens
ccaagttttgagaaa

SEQ ID NO: 1765584 - DNA, 15 bp, Homo sapiens
caagttttgagaaaa

SEQ ID NO: 1765585 - DNA, 15 bp, Homo sapiens
aagttttgagaaaac

SEQ ID NO: 1765586 - DNA, 15 bp, Homo sapiens
agttttgagaaaact

SEQ ID NO: 1765587 - DNA, 15 bp, Homo sapiens
gttttgagaaaactg

SEQ ID NO: 1765588 - DNA, 15 bp, Homo sapiens
ttttgagaaaactga

SEQ ID NO: 1765589 - DNA, 15 bp, Homo sapiens
tttgagaaaactgat

SEQ ID NO: 1765590 - DNA, 15 bp, Homo sapiens
ttgagaaaactgatt

SEQ ID NO: 1765591 - DNA, 15 bp, Homo sapiens
tgagaaaactgatta

SEQ ID NO: 1765592 - DNA, 15 bp, Homo sapiens
gagaaaactgattat

SEQ ID NO: 1765593 - DNA, 15 bp, Homo sapiens
agaaaactgattatt

SEQ ID NO: 1765594 - DNA, 15 bp, Homo sapiens
gaaaactgattatta

SEQ ID NO: 1765595 - DNA, 15 bp, Homo sapiens
aaaactgattattaa

SEQ ID NO: 1765596 - DNA, 15 bp, Homo sapiens
aaactgattattaaa

SEQ ID NO: 1765597 - DNA, 15 bp, Homo sapiens
aactgattattaaat

SEQ ID NO: 1765598 - DNA, 15 bp, Homo sapiens
actgattattaaatt

SEQ ID NO: 1765599 - DNA, 15 bp, Homo sapiens
ctgattattaaattt

SEQ ID NO: 1765600 - DNA, 15 bp, Homo sapiens
tgattattaaatttt

SEQ ID NO: 1765601 - DNA, 15 bp, Homo sapiens
gattattaaattttt

SEQ ID NO: 1765602 - DNA, 15 bp, Homo sapiens
attattaaatttttg

SEQ ID NO: 1765603 - DNA, 15 bp, Homo sapiens
ttattaaatttttga

SEQ ID NO: 1765604 - DNA, 15 bp, Homo sapiens
tattaaatttttgaa

SEQ ID NO: 1765605 - DNA, 15 bp, Homo sapiens
attaaatttttgaat

SEQ ID NO: 1765606 - DNA, 15 bp, Homo sapiens
ttaaatttttgaatt

SEQ ID NO: 1765607 - DNA, 15 bp, Homo sapiens
taaatttttgaatta

SEQ ID NO: 1765608 - DNA, 15 bp, Homo sapiens
aaatttttgaattat

SEQ ID NO: 1765609 - DNA, 15 bp, Homo sapiens
aatttttgaattata

SEQ ID NO: 1765610 - DNA, 15 bp, Homo sapiens
atttttgaattatac

SEQ ID NO: 1765611 - DNA, 15 bp, Homo sapiens
tttttgaattatacc

SEQ ID NO: 1765612 - DNA, 15 bp, Homo sapiens
ttttgaattataccc

SEQ ID NO: 1765613 - DNA, 15 bp, Homo sapiens
tttgaattatacccc

SEQ ID NO: 1765614 - DNA, 15 bp, Homo sapiens
ttgaattatacccct

SEQ ID NO: 1765615 - DNA, 15 bp, Homo sapiens
tgaattatacccctt

SEQ ID NO: 1765616 - DNA, 15 bp, Homo sapiens
gaattataccccttc

SEQ ID NO: 1765617 - DNA, 15 bp, Homo sapiens
aattataccccttct

SEQ ID NO: 1765618 - DNA, 15 bp, Homo sapiens
attataccccttctg

SEQ ID NO: 1765619 - DNA, 15 bp, Homo sapiens
ttataccccttctgg

SEQ ID NO: 1765620 - DNA, 15 bp, Homo sapiens
tataccccttctggg

SEQ ID NO: 1765621 - DNA, 15 bp, Homo sapiens
ataccccttctgggg

SEQ ID NO: 1765622 - DNA, 15 bp, Homo sapiens
taccccttctggggc

SEQ ID NO: 1765623 - DNA, 15 bp, Homo sapiens
accccttctggggct

SEQ ID NO: 1765624 - DNA, 15 bp, Homo sapiens
ccccttctggggctc

SEQ ID NO: 1765625 - DNA, 15 bp, Homo sapiens
cccttctggggctct

SEQ ID NO: 1765626 - DNA, 15 bp, Homo sapiens
ccttctggggctcta

SEQ ID NO: 1765627 - DNA, 15 bp, Homo sapiens
cttctggggctctat

SEQ ID NO: 1765628 - DNA, 15 bp, Homo sapiens
ttctggggctctatc

SEQ ID NO: 1765629 - DNA, 15 bp, Homo sapiens
tctggggctctatct

SEQ ID NO: 1765630 - DNA, 15 bp, Homo sapiens
ctggggctctatctt

SEQ ID NO: 1765631 - DNA, 15 bp, Homo sapiens
tggggctctatcttt

SEQ ID NO: 1765632 - DNA, 15 bp, Homo sapiens
ggggctctatctttt

SEQ ID NO: 1765633 - DNA, 15 bp, Homo sapiens
gggctctatcttttg

SEQ ID NO: 1765634 - DNA, 15 bp, Homo sapiens
ggctctatcttttga

SEQ ID NO: 1765635 - DNA, 15 bp, Homo sapiens
gctctatcttttgaa

SEQ ID NO: 1765636 - DNA, 15 bp, Homo sapiens
ctctatcttttgaat

SEQ ID NO: 1765637 - DNA, 15 bp, Homo sapiens
tctatcttttgaatt

SEQ ID NO: 1765638 - DNA, 15 bp, Homo sapiens
ctatcttttgaattc

SEQ ID NO: 1765639 - DNA, 15 bp, Homo sapiens
tatcttttgaattct

SEQ ID NO: 1765640 - DNA, 15 bp, Homo sapiens
atcttttgaattctg

SEQ ID NO: 1765641 - DNA, 15 bp, Homo sapiens
tcttttgaattctgt

SEQ ID NO: 1765642 - DNA, 15 bp, Homo sapiens
cttttgaattctgtt

SEQ ID NO: 1765643 - DNA, 15 bp, Homo sapiens
ttttgaattctgttt

SEQ ID NO: 1765644 - DNA, 15 bp, Homo sapiens
tttgaattctgtttt

SEQ ID NO: 1765645 - DNA, 15 bp, Homo sapiens
ttgaattctgttttt

SEQ ID NO: 1765646 - DNA, 15 bp, Homo sapiens
tgaattctgttttta

SEQ ID NO: 1765647 - DNA, 15 bp, Homo sapiens
gaattctgtttttaa

SEQ ID NO: 1765648 - DNA, 15 bp, Homo sapiens
aattctgtttttaac

SEQ ID NO: 1765649 - DNA, 15 bp, Homo sapiens
attctgtttttaaca

SEQ ID NO: 1765650 - DNA, 15 bp, Homo sapiens
ttctgtttttaacac

SEQ ID NO: 1765651 - DNA, 15 bp, Homo sapiens
tctgtttttaacact

SEQ ID NO: 1765652 - DNA, 15 bp, Homo sapiens
ctgtttttaacactg

SEQ ID NO: 1765653 - DNA, 15 bp, Homo sapiens
tgtttttaacactgc

SEQ ID NO: 1765654 - DNA, 15 bp, Homo sapiens
gtttttaacactgct

SEQ ID NO: 1765655 - DNA, 15 bp, Homo sapiens
tttttaacactgctt

SEQ ID NO: 1765656 - DNA, 15 bp, Homo sapiens
ttttaacactgcttt

SEQ ID NO: 1765657 - DNA, 15 bp, Homo sapiens
tttaacactgctttt

SEQ ID NO: 1765658 - DNA, 15 bp, Homo sapiens
ttaacactgcttttc

SEQ ID NO: 1765659 - DNA, 15 bp, Homo sapiens
taacactgcttttcc

SEQ ID NO: 1765660 - DNA, 15 bp, Homo sapiens
aacactgcttttcca

SEQ ID NO: 1765661 - DNA, 15 bp, Homo sapiens
acactgcttttccaa

SEQ ID NO: 1765662 - DNA, 15 bp, Homo sapiens
cactgcttttccaat

SEQ ID NO: 1765663 - DNA, 15 bp, Homo sapiens
actgcttttccaatg

SEQ ID NO: 1765664 - DNA, 15 bp, Homo sapiens
ctgcttttccaatga

SEQ ID NO: 1765665 - DNA, 15 bp, Homo sapiens
tgcttttccaatgaa

SEQ ID NO: 1765666 - DNA, 15 bp, Homo sapiens
gcttttccaatgaaa

SEQ ID NO: 1765667 - DNA, 15 bp, Homo sapiens
cttttccaatgaaag

SEQ ID NO: 1765668 - DNA, 15 bp, Homo sapiens
ttttccaatgaaaga

SEQ ID NO: 1765669 - DNA, 15 bp, Homo sapiens
tttccaatgaaagag

SEQ ID NO: 1765670 - DNA, 15 bp, Homo sapiens
ttccaatgaaagagg

SEQ ID NO: 1765671 - DNA, 15 bp, Homo sapiens
tccaatgaaagaggt

SEQ ID NO: 1765672 - DNA, 15 bp, Homo sapiens
ccaatgaaagaggta

SEQ ID NO: 1765673 - DNA, 15 bp, Homo sapiens
caatgaaagaggtaa

SEQ ID NO: 1765674 - DNA, 15 bp, Homo sapiens
aatgaaagaggtaat

SEQ ID NO: 1765675 - DNA, 15 bp, Homo sapiens
atgaaagaggtaatt

SEQ ID NO: 1765676 - DNA, 15 bp, Homo sapiens
tgaaagaggtaattt

SEQ ID NO: 1765677 - DNA, 15 bp, Homo sapiens
gaaagaggtaatttt

SEQ ID NO: 1765678 - DNA, 15 bp, Homo sapiens
aaagaggtaattttc

SEQ ID NO: 1765679 - DNA, 15 bp, Homo sapiens
aagaggtaattttct

SEQ ID NO: 1765680 - DNA, 15 bp, Homo sapiens
agaggtaattttcta

SEQ ID NO: 1765681 - DNA, 15 bp, Homo sapiens
gaggtaattttctac

SEQ ID NO: 1765682 - DNA, 15 bp, Homo sapiens
aggtaattttctacc

SEQ ID NO: 1765683 - DNA, 15 bp, Homo sapiens
ggtaattttctaccc

SEQ ID NO: 1765684 - DNA, 15 bp, Homo sapiens
gtaattttctaccct

SEQ ID NO: 1765685 - DNA, 15 bp, Homo sapiens
taattttctaccctt

SEQ ID NO: 1765686 - DNA, 15 bp, Homo sapiens
aattttctacccttt

SEQ ID NO: 1765687 - DNA, 15 bp, Homo sapiens
attttctaccctttt

SEQ ID NO: 1765688 - DNA, 15 bp, Homo sapiens
ttttctaccctttta

SEQ ID NO: 1765689 - DNA, 15 bp, Homo sapiens
tttctacccttttaa

SEQ ID NO: 1765690 - DNA, 15 bp, Homo sapiens
ttctacccttttaag

SEQ ID NO: 1765691 - DNA, 15 bp, Homo sapiens
tctacccttttaaga

SEQ ID NO: 1765692 - DNA, 15 bp, Homo sapiens
ctacccttttaagag

SEQ ID NO: 1765693 - DNA, 15 bp, Homo sapiens
tacccttttaagagg

SEQ ID NO: 1765694 - DNA, 15 bp, Homo sapiens
acccttttaagaggt

SEQ ID NO: 1765695 - DNA, 15 bp, Homo sapiens
cccttttaagaggtt

SEQ ID NO: 1765696 - DNA, 15 bp, Homo sapiens
ccttttaagaggtta

SEQ ID NO: 1765697 - DNA, 15 bp, Homo sapiens
cttttaagaggttat

SEQ ID NO: 1765698 - DNA, 15 bp, Homo sapiens
ttttaagaggttatt

SEQ ID NO: 1765699 - DNA, 15 bp, Homo sapiens
tttaagaggttattg

SEQ ID NO: 1765700 - DNA, 15 bp, Homo sapiens
ttaagaggttattgt

SEQ ID NO: 1765701 - DNA, 15 bp, Homo sapiens
taagaggttattgta

SEQ ID NO: 1765702 - DNA, 15 bp, Homo sapiens
aagaggttattgtag

SEQ ID NO: 1765703 - DNA, 15 bp, Homo sapiens
agaggttattgtagt

SEQ ID NO: 1765704 - DNA, 15 bp, Homo sapiens
gaggttattgtagta

SEQ ID NO: 1765705 - DNA, 15 bp, Homo sapiens
aggttattgtagtaa

SEQ ID NO: 1765706 - DNA, 15 bp, Homo sapiens
ggttattgtagtaaa

SEQ ID NO: 1765707 - DNA, 15 bp, Homo sapiens
gttattgtagtaaat

SEQ ID NO: 1765708 - DNA, 15 bp, Homo sapiens
ttattgtagtaaatc

SEQ ID NO: 1765709 - DNA, 15 bp, Homo sapiens
tattgtagtaaatct

SEQ ID NO: 1765710 - DNA, 15 bp, Homo sapiens
attgtagtaaatctt

SEQ ID NO: 1765711 - DNA, 15 bp, Homo sapiens
ttgtagtaaatcttt

SEQ ID NO: 1765712 - DNA, 15 bp, Homo sapiens
tgtagtaaatctttt

SEQ ID NO: 1765713 - DNA, 15 bp, Homo sapiens
gtagtaaatcttttg

SEQ ID NO: 1765714 - DNA, 15 bp, Homo sapiens
tagtaaatcttttgg

SEQ ID NO: 1765715 - DNA, 15 bp, Homo sapiens
agtaaatcttttggg

SEQ ID NO: 1765716 - DNA, 15 bp, Homo sapiens
gtaaatcttttggga

SEQ ID NO: 1765717 - DNA, 15 bp, Homo sapiens
taaatcttttgggag

SEQ ID NO: 1765718 - DNA, 15 bp, Homo sapiens
aaatcttttgggagc

SEQ ID NO: 1765719 - DNA, 15 bp, Homo sapiens
aatcttttgggagca

SEQ ID NO: 1765720 - DNA, 15 bp, Homo sapiens
atcttttgggagcag

SEQ ID NO: 1765721 - DNA, 15 bp, Homo sapiens
tcttttgggagcagg

SEQ ID NO: 1765722 - DNA, 15 bp, Homo sapiens
cttttgggagcagga

SEQ ID NO: 1765723 - DNA, 15 bp, Homo sapiens
ttttgggagcaggaa

SEQ ID NO: 1765724 - DNA, 15 bp, Homo sapiens
tttgggagcaggaag

SEQ ID NO: 1765725 - DNA, 15 bp, Homo sapiens
ttgggagcaggaaga

SEQ ID NO: 1765726 - DNA, 15 bp, Homo sapiens
tgggagcaggaagac

SEQ ID NO: 1765727 - DNA, 15 bp, Homo sapiens
gggagcaggaagaca

SEQ ID NO: 1765728 - DNA, 15 bp, Homo sapiens
ggagcaggaagacag

SEQ ID NO: 1765729 - DNA, 15 bp, Homo sapiens
gagcaggaagacagg

SEQ ID NO: 1765730 - DNA, 15 bp, Homo sapiens
agcaggaagacagga

SEQ ID NO: 1765731 - DNA, 15 bp, Homo sapiens
gcaggaagacaggaa

SEQ ID NO: 1765732 - DNA, 15 bp, Homo sapiens
caggaagacaggaag

SEQ ID NO: 1765733 - DNA, 15 bp, Homo sapiens
aggaagacaggaagg

SEQ ID NO: 1765734 - DNA, 15 bp, Homo sapiens
ggaagacaggaaggt

SEQ ID NO: 1765735 - DNA, 15 bp, Homo sapiens
gaagacaggaaggta

SEQ ID NO: 1765736 - DNA, 15 bp, Homo sapiens
aagacaggaaggtag

SEQ ID NO: 1765737 - DNA, 15 bp, Homo sapiens
agacaggaaggtagg

SEQ ID NO: 1765738 - DNA, 15 bp, Homo sapiens
gacaggaaggtagga

SEQ ID NO: 1765739 - DNA, 15 bp, Homo sapiens
acaggaaggtaggag

SEQ ID NO: 1765740 - DNA, 15 bp, Homo sapiens
caggaaggtaggaga

SEQ ID NO: 1765741 - DNA, 15 bp, Homo sapiens
aggaaggtaggagag

SEQ ID NO: 1765742 - DNA, 15 bp, Homo sapiens
ggaaggtaggagagg

SEQ ID NO: 1765743 - DNA, 15 bp, Homo sapiens
gaaggtaggagaggc

SEQ ID NO: 1765744 - DNA, 15 bp, Homo sapiens
aaggtaggagaggct

SEQ ID NO: 1765745 - DNA, 15 bp, Homo sapiens
aggtaggagaggctt

SEQ ID NO: 1765746 - DNA, 15 bp, Homo sapiens
ggtaggagaggctta

SEQ ID NO: 1765747 - DNA, 15 bp, Homo sapiens
gtaggagaggcttaa

SEQ ID NO: 1765748 - DNA, 15 bp, Homo sapiens
taggagaggcttaac

SEQ ID NO: 1765749 - DNA, 15 bp, Homo sapiens
aggagaggcttaaca

SEQ ID NO: 1765750 - DNA, 15 bp, Homo sapiens
ggagaggcttaacac

SEQ ID NO: 1765751 - DNA, 15 bp, Homo sapiens
gagaggcttaacact

SEQ ID NO: 1765752 - DNA, 15 bp, Homo sapiens
agaggcttaacacta

SEQ ID NO: 1765753 - DNA, 15 bp, Homo sapiens
gaggcttaacactat

SEQ ID NO: 1765754 - DNA, 15 bp, Homo sapiens
aggcttaacactatc

SEQ ID NO: 1765755 - DNA, 15 bp, Homo sapiens
ggcttaacactatca

SEQ ID NO: 1765756 - DNA, 15 bp, Homo sapiens
gcttaacactatcat

SEQ ID NO: 1765757 - DNA, 15 bp, Homo sapiens
cttaacactatcatt

SEQ ID NO: 1765758 - DNA, 15 bp, Homo sapiens
ttaacactatcattt

SEQ ID NO: 1765759 - DNA, 15 bp, Homo sapiens
taacactatcatttt

SEQ ID NO: 1765760 - DNA, 15 bp, Homo sapiens
aacactatcatttta

SEQ ID NO: 1765761 - DNA, 15 bp, Homo sapiens
acactatcattttaa

SEQ ID NO: 1765762 - DNA, 15 bp, Homo sapiens
cactatcattttaag

SEQ ID NO: 1765763 - DNA, 15 bp, Homo sapiens
actatcattttaagg

SEQ ID NO: 1765764 - DNA, 15 bp, Homo sapiens
ctatcattttaaggt

SEQ ID NO: 1765765 - DNA, 15 bp, Homo sapiens
tatcattttaaggta

SEQ ID NO: 1765766 - DNA, 15 bp, Homo sapiens
atcattttaaggtaa

SEQ ID NO: 1765767 - DNA, 15 bp, Homo sapiens
tcattttaaggtaat

SEQ ID NO: 1765768 - DNA, 15 bp, Homo sapiens
cattttaaggtaata

SEQ ID NO: 1765769 - DNA, 15 bp, Homo sapiens
attttaaggtaataa

SEQ ID NO: 1765770 - DNA, 15 bp, Homo sapiens
ttttaaggtaataaa

SEQ ID NO: 1765771 - DNA, 15 bp, Homo sapiens
tttaaggtaataaaa

SEQ ID NO: 1765772 - DNA, 15 bp, Homo sapiens
ttaaggtaataaaaa

SEQ ID NO: 1765773 - DNA, 15 bp, Homo sapiens
taaggtaataaaaaa

SEQ ID NO: 1765774 - DNA, 15 bp, Homo sapiens
aaggtaataaaaaag

SEQ ID NO: 1765775 - DNA, 15 bp, Homo sapiens
aggtaataaaaaaga

SEQ ID NO: 1765776 - DNA, 15 bp, Homo sapiens
ggtaataaaaaagag

SEQ ID NO: 1765777 - DNA, 15 bp, Homo sapiens
gtaataaaaaagaga

SEQ ID NO: 1765778 - DNA, 15 bp, Homo sapiens
taataaaaaagagag

SEQ ID NO: 1765779 - DNA, 15 bp, Homo sapiens
aataaaaaagagaga

SEQ ID NO: 1765780 - DNA, 15 bp, Homo sapiens
ataaaaaagagagag

SEQ ID NO: 1765781 - DNA, 15 bp, Homo sapiens
taaaaaagagagaga

SEQ ID NO: 1765782 - DNA, 15 bp, Homo sapiens
aaaaaagagagagaa

SEQ ID NO: 1765783 - DNA, 15 bp, Homo sapiens
aaaaagagagagaag

SEQ ID NO: 1765784 - DNA, 15 bp, Homo sapiens
aaaagagagagaagt

SEQ ID NO: 1765785 - DNA, 15 bp, Homo sapiens
aaagagagagaagtt

SEQ ID NO: 1765786 - DNA, 15 bp, Homo sapiens
aagagagagaagttt

SEQ ID NO: 1765787 - DNA, 15 bp, Homo sapiens
agagagagaagtttg

SEQ ID NO: 1765788 - DNA, 15 bp, Homo sapiens
gagagagaagtttgc

SEQ ID NO: 1765789 - DNA, 15 bp, Homo sapiens
agagagaagtttgcc

SEQ ID NO: 1765790 - DNA, 15 bp, Homo sapiens
gagagaagtttgcct

SEQ ID NO: 1765791 - DNA, 15 bp, Homo sapiens
agagaagtttgcctg

SEQ ID NO: 1765792 - DNA, 15 bp, Homo sapiens
gagaagtttgcctgg

SEQ ID NO: 1765793 - DNA, 15 bp, Homo sapiens
agaagtttgcctggt

SEQ ID NO: 1765794 - DNA, 15 bp, Homo sapiens
gaagtttgcctggtg

SEQ ID NO: 1765795 - DNA, 15 bp, Homo sapiens
aagtttgcctggtgt

SEQ ID NO: 1765796 - DNA, 15 bp, Homo sapiens
agtttgcctggtgtt

SEQ ID NO: 1765797 - DNA, 15 bp, Homo sapiens
gtttgcctggtgtta

SEQ ID NO: 1765798 - DNA, 15 bp, Homo sapiens
tttgcctggtgttaa

SEQ ID NO: 1765799 - DNA, 15 bp, Homo sapiens
ttgcctggtgttaat

SEQ ID NO: 1765800 - DNA, 15 bp, Homo sapiens
tgcctggtgttaatc

SEQ ID NO: 1765801 - DNA, 15 bp, Homo sapiens
gcctggtgttaatct

SEQ ID NO: 1765802 - DNA, 15 bp, Homo sapiens
cctggtgttaatctc

SEQ ID NO: 1765803 - DNA, 15 bp, Homo sapiens
ctggtgttaatctcc

SEQ ID NO: 1765804 - DNA, 15 bp, Homo sapiens
tggtgttaatctcct

SEQ ID NO: 1765805 - DNA, 15 bp, Homo sapiens
ggtgttaatctcctg

SEQ ID NO: 1765806 - DNA, 15 bp, Homo sapiens
gtgttaatctcctgt

SEQ ID NO: 1765807 - DNA, 15 bp, Homo sapiens
tgttaatctcctgtt

SEQ ID NO: 1765808 - DNA, 15 bp, Homo sapiens
gttaatctcctgttc

SEQ ID NO: 1765809 - DNA, 15 bp, Homo sapiens
ttaatctcctgttca

SEQ ID NO: 1765810 - DNA, 15 bp, Homo sapiens
taatctcctgttcat

SEQ ID NO: 1765811 - DNA, 15 bp, Homo sapiens
aatctcctgttcatt

SEQ ID NO: 1765812 - DNA, 15 bp, Homo sapiens
atctcctgttcattt

SEQ ID NO: 1765813 - DNA, 15 bp, Homo sapiens
tctcctgttcattta

SEQ ID NO: 1765814 - DNA, 15 bp, Homo sapiens
ctcctgttcatttat

SEQ ID NO: 1765815 - DNA, 15 bp, Homo sapiens
tcctgttcatttatt

SEQ ID NO: 1765816 - DNA, 15 bp, Homo sapiens
cctgttcatttatta

SEQ ID NO: 1765817 - DNA, 15 bp, Homo sapiens
ctgttcatttattat

SEQ ID NO: 1765818 - DNA, 15 bp, Homo sapiens
tgttcatttattatc

SEQ ID NO: 1765819 - DNA, 15 bp, Homo sapiens
gttcatttattatct

SEQ ID NO: 1765820 - DNA, 15 bp, Homo sapiens
ttcatttattatctg

SEQ ID NO: 1765821 - DNA, 15 bp, Homo sapiens
tcatttattatctga

SEQ ID NO: 1765822 - DNA, 15 bp, Homo sapiens
catttattatctgat

SEQ ID NO: 1765823 - DNA, 15 bp, Homo sapiens
atttattatctgatc

SEQ ID NO: 1765824 - DNA, 15 bp, Homo sapiens
tttattatctgatct

SEQ ID NO: 1765825 - DNA, 15 bp, Homo sapiens
ttattatctgatctg

SEQ ID NO: 1765826 - DNA, 15 bp, Homo sapiens
tattatctgatctgt

SEQ ID NO: 1765827 - DNA, 15 bp, Homo sapiens
attatctgatctgtt

SEQ ID NO: 1765828 - DNA, 15 bp, Homo sapiens
ttatctgatctgttg

SEQ ID NO: 1765829 - DNA, 15 bp, Homo sapiens
tatctgatctgttgc

SEQ ID NO: 1765830 - DNA, 15 bp, Homo sapiens
atctgatctgttgcc

SEQ ID NO: 1765831 - DNA, 15 bp, Homo sapiens
tctgatctgttgcct

SEQ ID NO: 1765832 - DNA, 15 bp, Homo sapiens
ctgatctgttgcctt

SEQ ID NO: 1765833 - DNA, 15 bp, Homo sapiens
tgatctgttgccttg

SEQ ID NO: 1765834 - DNA, 15 bp, Homo sapiens
gatctgttgccttgt

SEQ ID NO: 1765835 - DNA, 15 bp, Homo sapiens
atctgttgccttgtt

SEQ ID NO: 1765836 - DNA, 15 bp, Homo sapiens
tctgttgccttgttt

SEQ ID NO: 1765837 - DNA, 15 bp, Homo sapiens
ctgttgccttgttta

SEQ ID NO: 1765838 - DNA, 15 bp, Homo sapiens
tgttgccttgtttaa

SEQ ID NO: 1765839 - DNA, 15 bp, Homo sapiens
gttgccttgtttaat

SEQ ID NO: 1765840 - DNA, 15 bp, Homo sapiens
ttgccttgtttaatt

SEQ ID NO: 1765841 - DNA, 15 bp, Homo sapiens
tgccttgtttaattg

SEQ ID NO: 1765842 - DNA, 15 bp, Homo sapiens
gccttgtttaattga

SEQ ID NO: 1765843 - DNA, 15 bp, Homo sapiens
ccttgtttaattgac

SEQ ID NO: 1765844 - DNA, 15 bp, Homo sapiens
cttgtttaattgaca

SEQ ID NO: 1765845 - DNA, 15 bp, Homo sapiens
ttgtttaattgacat

SEQ ID NO: 1765846 - DNA, 15 bp, Homo sapiens
tgtttaattgacatt

SEQ ID NO: 1765847 - DNA, 15 bp, Homo sapiens
gtttaattgacattc

SEQ ID NO: 1765848 - DNA, 15 bp, Homo sapiens
tttaattgacattct

SEQ ID NO: 1765849 - DNA, 15 bp, Homo sapiens
ttaattgacattctt

SEQ ID NO: 1765850 - DNA, 15 bp, Homo sapiens
taattgacattcttt

SEQ ID NO: 1765851 - DNA, 15 bp, Homo sapiens
aattgacattctttg

SEQ ID NO: 1765852 - DNA, 15 bp, Homo sapiens
attgacattctttgt

SEQ ID NO: 1765853 - DNA, 15 bp, Homo sapiens
ttgacattctttgta

SEQ ID NO: 1765854 - DNA, 15 bp, Homo sapiens
tgacattctttgtac

SEQ ID NO: 1765855 - DNA, 15 bp, Homo sapiens
gacattctttgtact

SEQ ID NO: 1765856 - DNA, 15 bp, Homo sapiens
acattctttgtactt

SEQ ID NO: 1765857 - DNA, 15 bp, Homo sapiens
cattctttgtacttt

SEQ ID NO: 1765858 - DNA, 15 bp, Homo sapiens
attctttgtactttt

SEQ ID NO: 1765859 - DNA, 15 bp, Homo sapiens
ttctttgtactttta

SEQ ID NO: 1765860 - DNA, 15 bp, Homo sapiens
tctttgtacttttat

SEQ ID NO: 1765861 - DNA, 15 bp, Homo sapiens
ctttgtacttttata

SEQ ID NO: 1765862 - DNA, 15 bp, Homo sapiens
tttgtacttttataa

SEQ ID NO: 1765863 - DNA, 15 bp, Homo sapiens
ttgtacttttataaa

SEQ ID NO: 1765864 - DNA, 15 bp, Homo sapiens
tgtacttttataaaa

SEQ ID NO: 1765865 - DNA, 15 bp, Homo sapiens
gtacttttataaaac

SEQ ID NO: 1765866 - DNA, 15 bp, Homo sapiens
tacttttataaaact

SEQ ID NO: 1765867 - DNA, 15 bp, Homo sapiens
acttttataaaactg

SEQ ID NO: 1765868 - DNA, 15 bp, Homo sapiens
cttttataaaactgt

SEQ ID NO: 1765869 - DNA, 15 bp, Homo sapiens
ttttataaaactgtc

SEQ ID NO: 1765870 - DNA, 15 bp, Homo sapiens
tttataaaactgtct

SEQ ID NO: 1765871 - DNA, 15 bp, Homo sapiens
ttataaaactgtctg

SEQ ID NO: 1765872 - DNA, 15 bp, Homo sapiens
tataaaactgtctga

SEQ ID NO: 1765873 - DNA, 15 bp, Homo sapiens
ataaaactgtctgac

SEQ ID NO: 1765874 - DNA, 15 bp, Homo sapiens
taaaactgtctgaca

SEQ ID NO: 1765875 - DNA, 15 bp, Homo sapiens
aaaactgtctgacat

SEQ ID NO: 1765876 - DNA, 15 bp, Homo sapiens
aaactgtctgacatc

SEQ ID NO: 1765877 - DNA, 15 bp, Homo sapiens
aactgtctgacatca

SEQ ID NO: 1765878 - DNA, 15 bp, Homo sapiens
actgtctgacatcaa

SEQ ID NO: 1765879 - DNA, 15 bp, Homo sapiens
ctgtctgacatcaag

SEQ ID NO: 1765880 - DNA, 15 bp, Homo sapiens
tgtctgacatcaagt

SEQ ID NO: 1765881 - DNA, 15 bp, Homo sapiens
gtctgacatcaagta

SEQ ID NO: 1765882 - DNA, 15 bp, Homo sapiens
tctgacatcaagtaa

SEQ ID NO: 1765883 - DNA, 15 bp, Homo sapiens
ctgacatcaagtaaa

SEQ ID NO: 1765884 - DNA, 15 bp, Homo sapiens
tgacatcaagtaaaa

SEQ ID NO: 1765885 - DNA, 15 bp, Homo sapiens
gacatcaagtaaaaa

SEQ ID NO: 1765886 - DNA, 15 bp, Homo sapiens
acatcaagtaaaaat

SEQ ID NO: 1765887 - DNA, 15 bp, Homo sapiens
catcaagtaaaaatg

SEQ ID NO: 1765888 - DNA, 15 bp, Homo sapiens
atcaagtaaaaatga

SEQ ID NO: 1765889 - DNA, 15 bp, Homo sapiens
tcaagtaaaaatgat

SEQ ID NO: 1765890 - DNA, 15 bp, Homo sapiens
caagtaaaaatgata

SEQ ID NO: 1765891 - DNA, 15 bp, Homo sapiens
aagtaaaaatgataa

SEQ ID NO: 1765892 - DNA, 15 bp, Homo sapiens
agtaaaaatgataaa

SEQ ID NO: 1765893 - DNA, 15 bp, Homo sapiens
gtaaaaatgataaag

SEQ ID NO: 1765894 - DNA, 15 bp, Homo sapiens
taaaaatgataaaga

SEQ ID NO: 1765895 - DNA, 15 bp, Homo sapiens
aaaaatgataaagag

SEQ ID NO: 1765896 - DNA, 15 bp, Homo sapiens
aaaatgataaagaga

SEQ ID NO: 1765897 - DNA, 15 bp, Homo sapiens
aaatgataaagagaa

SEQ ID NO: 1765898 - DNA, 15 bp, Homo sapiens
aatgataaagagaaa

SEQ ID NO: 1765899 - DNA, 15 bp, Homo sapiens
atgataaagagaaaa

SEQ ID NO: 1765900 - DNA, 15 bp, Homo sapiens
tgataaagagaaaat

SEQ ID NO: 1765901 - DNA, 15 bp, Homo sapiens
gataaagagaaaata

SEQ ID NO: 1765902 - DNA, 15 bp, Homo sapiens
ataaagagaaaatag

SEQ ID NO: 1765903 - DNA, 15 bp, Homo sapiens
taaagagaaaataga

SEQ ID NO: 1765904 - DNA, 15 bp, Homo sapiens
aaagagaaaatagaa

SEQ ID NO: 1765905 - DNA, 15 bp, Homo sapiens
aagagaaaatagaaa

SEQ ID NO: 1765906 - DNA, 15 bp, Homo sapiens
agagaaaatagaaat

SEQ ID NO: 1765907 - DNA, 15 bp, Homo sapiens
gagaaaatagaaatt

SEQ ID NO: 1765908 - DNA, 15 bp, Homo sapiens
agaaaatagaaattt

SEQ ID NO: 1765909 - DNA, 15 bp, Homo sapiens
gaaaatagaaatttg

SEQ ID NO: 1765910 - DNA, 15 bp, Homo sapiens
aaaatagaaatttga

SEQ ID NO: 1765911 - DNA, 15 bp, Homo sapiens
aaatagaaatttgag

SEQ ID NO: 1765912 - DNA, 15 bp, Homo sapiens
aatagaaatttgaga

SEQ ID NO: 1765913 - DNA, 15 bp, Homo sapiens
atagaaatttgagaa

SEQ ID NO: 1765914 - DNA, 15 bp, Homo sapiens
tagaaatttgagaat

SEQ ID NO: 1765915 - DNA, 15 bp, Homo sapiens
agaaatttgagaatt

SEQ ID NO: 1765916 - DNA, 15 bp, Homo sapiens
gaaatttgagaatta

SEQ ID NO: 1765917 - DNA, 15 bp, Homo sapiens
aaatttgagaattag

SEQ ID NO: 1765918 - DNA, 15 bp, Homo sapiens
aatttgagaattaga

SEQ ID NO: 1765919 - DNA, 15 bp, Homo sapiens
atttgagaattagag

SEQ ID NO: 1765920 - DNA, 15 bp, Homo sapiens
tttgagaattagaga

SEQ ID NO: 1765921 - DNA, 15 bp, Homo sapiens
ttgagaattagagat

SEQ ID NO: 1765922 - DNA, 15 bp, Homo sapiens
tgagaattagagatt

SEQ ID NO: 1765923 - DNA, 15 bp, Homo sapiens
gagaattagagattt

SEQ ID NO: 1765924 - DNA, 15 bp, Homo sapiens
agaattagagatttt

SEQ ID NO: 1765925 - DNA, 15 bp, Homo sapiens
gaattagagatttta

SEQ ID NO: 1765926 - DNA, 15 bp, Homo sapiens
aattagagattttag

SEQ ID NO: 1765927 - DNA, 15 bp, Homo sapiens
attagagattttagg

SEQ ID NO: 1765928 - DNA, 15 bp, Homo sapiens
ttagagattttagga

SEQ ID NO: 1765929 - DNA, 15 bp, Homo sapiens
tagagattttaggag

SEQ ID NO: 1765930 - DNA, 15 bp, Homo sapiens
agagattttaggagt

SEQ ID NO: 1765931 - DNA, 15 bp, Homo sapiens
gagattttaggagtt

SEQ ID NO: 1765932 - DNA, 15 bp, Homo sapiens
agattttaggagtta

SEQ ID NO: 1765933 - DNA, 15 bp, Homo sapiens
gattttaggagttat

SEQ ID NO: 1765934 - DNA, 15 bp, Homo sapiens
attttaggagttatg

SEQ ID NO: 1765935 - DNA, 15 bp, Homo sapiens
ttttaggagttatgt

SEQ ID NO: 1765936 - DNA, 15 bp, Homo sapiens
tttaggagttatgta

SEQ ID NO: 1765937 - DNA, 15 bp, Homo sapiens
ttaggagttatgtac

SEQ ID NO: 1765938 - DNA, 15 bp, Homo sapiens
taggagttatgtaca

SEQ ID NO: 1765939 - DNA, 15 bp, Homo sapiens
aggagttatgtacat

SEQ ID NO: 1765940 - DNA, 15 bp, Homo sapiens
ggagttatgtacatg

SEQ ID NO: 1765941 - DNA, 15 bp, Homo sapiens
gagttatgtacatgc

SEQ ID NO: 1765942 - DNA, 15 bp, Homo sapiens
agttatgtacatgct

SEQ ID NO: 1765943 - DNA, 15 bp, Homo sapiens
gttatgtacatgctg

SEQ ID NO: 1765944 - DNA, 15 bp, Homo sapiens
ttatgtacatgctga

SEQ ID NO: 1765945 - DNA, 15 bp, Homo sapiens
tatgtacatgctgat

SEQ ID NO: 1765946 - DNA, 15 bp, Homo sapiens
atgtacatgctgatc

SEQ ID NO: 1765947 - DNA, 15 bp, Homo sapiens
tgtacatgctgatct

SEQ ID NO: 1765948 - DNA, 15 bp, Homo sapiens
gtacatgctgatctc

SEQ ID NO: 1765949 - DNA, 15 bp, Homo sapiens
tacatgctgatctct

SEQ ID NO: 1765950 - DNA, 15 bp, Homo sapiens
acatgctgatctctg

SEQ ID NO: 1765951 - DNA, 15 bp, Homo sapiens
catgctgatctctgg

SEQ ID NO: 1765952 - DNA, 15 bp, Homo sapiens
atgctgatctctgga

SEQ ID NO: 1765953 - DNA, 15 bp, Homo sapiens
tgctgatctctggaa

SEQ ID NO: 1765954 - DNA, 15 bp, Homo sapiens
gctgatctctggaaa

SEQ ID NO: 1765955 - DNA, 15 bp, Homo sapiens
ctgatctctggaaaa

SEQ ID NO: 1765956 - DNA, 15 bp, Homo sapiens
tgatctctggaaaat

SEQ ID NO: 1765957 - DNA, 15 bp, Homo sapiens
gatctctggaaaata

SEQ ID NO: 1765958 - DNA, 15 bp, Homo sapiens
atctctggaaaatat

SEQ ID NO: 1765959 - DNA, 15 bp, Homo sapiens
tctctggaaaatatt

SEQ ID NO: 1765960 - DNA, 15 bp, Homo sapiens
ctctggaaaatattg

SEQ ID NO: 1765961 - DNA, 15 bp, Homo sapiens
tctggaaaatattgc

SEQ ID NO: 1765962 - DNA, 15 bp, Homo sapiens
ctggaaaatattgct

SEQ ID NO: 1765963 - DNA, 15 bp, Homo sapiens
tggaaaatattgcta

SEQ ID NO: 1765964 - DNA, 15 bp, Homo sapiens
ggaaaatattgctaa

SEQ ID NO: 1765965 - DNA, 15 bp, Homo sapiens
gaaaatattgctaaa

SEQ ID NO: 1765966 - DNA, 15 bp, Homo sapiens
aaaatattgctaaat

SEQ ID NO: 1765967 - DNA, 15 bp, Homo sapiens
aaatattgctaaata

SEQ ID NO: 1765968 - DNA, 15 bp, Homo sapiens
aatattgctaaataa

SEQ ID NO: 1765969 - DNA, 15 bp, Homo sapiens
atattgctaaataag

SEQ ID NO: 1765970 - DNA, 15 bp, Homo sapiens
tattgctaaataagt

SEQ ID NO: 1765971 - DNA, 15 bp, Homo sapiens
attgctaaataagta

SEQ ID NO: 1765972 - DNA, 15 bp, Homo sapiens
ttgctaaataagtaa

SEQ ID NO: 1765973 - DNA, 15 bp, Homo sapiens
tgctaaataagtaat

SEQ ID NO: 1765974 - DNA, 15 bp, Homo sapiens
gctaaataagtaatg

SEQ ID NO: 1765975 - DNA, 15 bp, Homo sapiens
ctaaataagtaatgc

SEQ ID NO: 1765976 - DNA, 15 bp, Homo sapiens
taaataagtaatgct

SEQ ID NO: 1765977 - DNA, 15 bp, Homo sapiens
aaataagtaatgctg

SEQ ID NO: 1765978 - DNA, 15 bp, Homo sapiens
aataagtaatgctgt

SEQ ID NO: 1765979 - DNA, 15 bp, Homo sapiens
ataagtaatgctgtt

SEQ ID NO: 1765980 - DNA, 15 bp, Homo sapiens
taagtaatgctgttg

SEQ ID NO: 1765981 - DNA, 15 bp, Homo sapiens
aagtaatgctgttga

SEQ ID NO: 1765982 - DNA, 15 bp, Homo sapiens
agtaatgctgttgat

SEQ ID NO: 1765983 - DNA, 15 bp, Homo sapiens
gtaatgctgttgatc

SEQ ID NO: 1765984 - DNA, 15 bp, Homo sapiens
taatgctgttgatca

SEQ ID NO: 1765985 - DNA, 15 bp, Homo sapiens
aatgctgttgatcat

SEQ ID NO: 1765986 - DNA, 15 bp, Homo sapiens
atgctgttgatcatt

SEQ ID NO: 1765987 - DNA, 15 bp, Homo sapiens
tgctgttgatcatta

SEQ ID NO: 1765988 - DNA, 15 bp, Homo sapiens
gctgttgatcattaa

SEQ ID NO: 1765989 - DNA, 15 bp, Homo sapiens
ctgttgatcattaag

SEQ ID NO: 1765990 - DNA, 15 bp, Homo sapiens
tgttgatcattaagt

SEQ ID NO: 1765991 - DNA, 15 bp, Homo sapiens
gttgatcattaagta

SEQ ID NO: 1765992 - DNA, 15 bp, Homo sapiens
ttgatcattaagtac

SEQ ID NO: 1765993 - DNA, 15 bp, Homo sapiens
tgatcattaagtact

SEQ ID NO: 1765994 - DNA, 15 bp, Homo sapiens
gatcattaagtactc

SEQ ID NO: 1765995 - DNA, 15 bp, Homo sapiens
atcattaagtactct

SEQ ID NO: 1765996 - DNA, 15 bp, Homo sapiens
tcattaagtactctg

SEQ ID NO: 1765997 - DNA, 15 bp, Homo sapiens
cattaagtactctgg

SEQ ID NO: 1765998 - DNA, 15 bp, Homo sapiens
attaagtactctggt

SEQ ID NO: 1765999 - DNA, 15 bp, Homo sapiens
ttaagtactctggtc

SEQ ID NO: 1766000 - DNA, 15 bp, Homo sapiens
taagtactctggtcg

SEQ ID NO: 1766001 - DNA, 15 bp, Homo sapiens
aagtactctggtcgg

SEQ ID NO: 1766002 - DNA, 15 bp, Homo sapiens
agtactctggtcggt

SEQ ID NO: 1766003 - DNA, 15 bp, Homo sapiens
gtactctggtcggtt

SEQ ID NO: 1766004 - DNA, 15 bp, Homo sapiens
tactctggtcggttt

SEQ ID NO: 1766005 - DNA, 15 bp, Homo sapiens
actctggtcggttta

SEQ ID NO: 1766006 - DNA, 15 bp, Homo sapiens
ctctggtcggtttag

SEQ ID NO: 1766007 - DNA, 15 bp, Homo sapiens
tctggtcggtttaga

SEQ ID NO: 1766008 - DNA, 15 bp, Homo sapiens
ctggtcggtttagat

SEQ ID NO: 1766009 - DNA, 15 bp, Homo sapiens
tggtcggtttagata

SEQ ID NO: 1766010 - DNA, 15 bp, Homo sapiens
ggtcggtttagatat

SEQ ID NO: 1766011 - DNA, 15 bp, Homo sapiens
gtcggtttagatatt

SEQ ID NO: 1766012 - DNA, 15 bp, Homo sapiens
tcggtttagatatta

SEQ ID NO: 1766013 - DNA, 15 bp, Homo sapiens
cggtttagatattaa

SEQ ID NO: 1766014 - DNA, 15 bp, Homo sapiens
ggtttagatattaat

SEQ ID NO: 1766015 - DNA, 15 bp, Homo sapiens
gtttagatattaatg

SEQ ID NO: 1766016 - DNA, 15 bp, Homo sapiens
tttagatattaatgt

SEQ ID NO: 1766017 - DNA, 15 bp, Homo sapiens
ttagatattaatgtg

SEQ ID NO: 1766018 - DNA, 15 bp, Homo sapiens
tagatattaatgtgt

SEQ ID NO: 1766019 - DNA, 15 bp, Homo sapiens
agatattaatgtgtg

SEQ ID NO: 1766020 - DNA, 15 bp, Homo sapiens
gatattaatgtgtgt

SEQ ID NO: 1766021 - DNA, 15 bp, Homo sapiens
atattaatgtgtgtt

SEQ ID NO: 1766022 - DNA, 15 bp, Homo sapiens
tattaatgtgtgttc

SEQ ID NO: 1766023 - DNA, 15 bp, Homo sapiens
attaatgtgtgttct

SEQ ID NO: 1766024 - DNA, 15 bp, Homo sapiens
ttaatgtgtgttcta

SEQ ID NO: 1766025 - DNA, 15 bp, Homo sapiens
taatgtgtgttctac

SEQ ID NO: 1766026 - DNA, 15 bp, Homo sapiens
aatgtgtgttctaca

SEQ ID NO: 1766027 - DNA, 15 bp, Homo sapiens
atgtgtgttctacat

SEQ ID NO: 1766028 - DNA, 15 bp, Homo sapiens
tgtgtgttctacatt

SEQ ID NO: 1766029 - DNA, 15 bp, Homo sapiens
gtgtgttctacattc

SEQ ID NO: 1766030 - DNA, 15 bp, Homo sapiens
tgtgttctacattct

SEQ ID NO: 1766031 - DNA, 15 bp, Homo sapiens
gtgttctacattctt

SEQ ID NO: 1766032 - DNA, 15 bp, Homo sapiens
tgttctacattctta

SEQ ID NO: 1766033 - DNA, 15 bp, Homo sapiens
gttctacattcttaa

SEQ ID NO: 1766034 - DNA, 15 bp, Homo sapiens
ttctacattcttaag

SEQ ID NO: 1766035 - DNA, 15 bp, Homo sapiens
tctacattcttaagt

SEQ ID NO: 1766036 - DNA, 15 bp, Homo sapiens
ctacattcttaagtt

SEQ ID NO: 1766037 - DNA, 15 bp, Homo sapiens
tacattcttaagttt

SEQ ID NO: 1766038 - DNA, 15 bp, Homo sapiens
acattcttaagtttg

SEQ ID NO: 1766039 - DNA, 15 bp, Homo sapiens
cattcttaagtttgt

SEQ ID NO: 1766040 - DNA, 15 bp, Homo sapiens
attcttaagtttgtt

SEQ ID NO: 1766041 - DNA, 15 bp, Homo sapiens
ttcttaagtttgttc

SEQ ID NO: 1766042 - DNA, 15 bp, Homo sapiens
tcttaagtttgttca

SEQ ID NO: 1766043 - DNA, 15 bp, Homo sapiens
cttaagtttgttcat

SEQ ID NO: 1766044 - DNA, 15 bp, Homo sapiens
ttaagtttgttcatt

SEQ ID NO: 1766045 - DNA, 15 bp, Homo sapiens
taagtttgttcatta

SEQ ID NO: 1766046 - DNA, 15 bp, Homo sapiens
aagtttgttcattag

SEQ ID NO: 1766047 - DNA, 15 bp, Homo sapiens
agtttgttcattagt

SEQ ID NO: 1766048 - DNA, 15 bp, Homo sapiens
gtttgttcattagtc

SEQ ID NO: 1766049 - DNA, 15 bp, Homo sapiens
tttgttcattagtcc

SEQ ID NO: 1766050 - DNA, 15 bp, Homo sapiens
ttgttcattagtcct

SEQ ID NO: 1766051 - DNA, 15 bp, Homo sapiens
tgttcattagtcctt

SEQ ID NO: 1766052 - DNA, 15 bp, Homo sapiens
gttcattagtccttt

SEQ ID NO: 1766053 - DNA, 15 bp, Homo sapiens
ttcattagtcctttt

SEQ ID NO: 1766054 - DNA, 15 bp, Homo sapiens
tcattagtccttttt

SEQ ID NO: 1766055 - DNA, 15 bp, Homo sapiens
cattagtccttttta

SEQ ID NO: 1766056 - DNA, 15 bp, Homo sapiens
attagtcctttttaa

SEQ ID NO: 1766057 - DNA, 15 bp, Homo sapiens
ttagtcctttttaat

SEQ ID NO: 1766058 - DNA, 15 bp, Homo sapiens
tagtcctttttaatt

SEQ ID NO: 1766059 - DNA, 15 bp, Homo sapiens
agtcctttttaattt

SEQ ID NO: 1766060 - DNA, 15 bp, Homo sapiens
gtcctttttaatttg

SEQ ID NO: 1766061 - DNA, 15 bp, Homo sapiens
tcctttttaatttgt

SEQ ID NO: 1766062 - DNA, 15 bp, Homo sapiens
cctttttaatttgta

SEQ ID NO: 1766063 - DNA, 15 bp, Homo sapiens
ctttttaatttgtaa

SEQ ID NO: 1766064 - DNA, 15 bp, Homo sapiens
tttttaatttgtaat

SEQ ID NO: 1766065 - DNA, 15 bp, Homo sapiens
ttttaatttgtaatt

SEQ ID NO: 1766066 - DNA, 15 bp, Homo sapiens
tttaatttgtaattt

SEQ ID NO: 1766067 - DNA, 15 bp, Homo sapiens
ttaatttgtaattta

SEQ ID NO: 1766068 - DNA, 15 bp, Homo sapiens
taatttgtaatttat

SEQ ID NO: 1766069 - DNA, 15 bp, Homo sapiens
aatttgtaatttatt

SEQ ID NO: 1766070 - DNA, 15 bp, Homo sapiens
atttgtaatttattt

SEQ ID NO: 1766071 - DNA, 15 bp, Homo sapiens
tttgtaatttatttc

SEQ ID NO: 1766072 - DNA, 15 bp, Homo sapiens
ttgtaatttatttct

SEQ ID NO: 1766073 - DNA, 15 bp, Homo sapiens
tgtaatttatttctt

SEQ ID NO: 1766074 - DNA, 15 bp, Homo sapiens
gtaatttatttctta

SEQ ID NO: 1766075 - DNA, 15 bp, Homo sapiens
aatttatttcttaga

SEQ ID NO: 1766076 - DNA, 15 bp, Homo sapiens
atttatttcttagaa

SEQ ID NO: 1766077 - DNA, 15 bp, Homo sapiens
tttatttcttagaag

SEQ ID NO: 1766078 - DNA, 15 bp, Homo sapiens
ttatttcttagaagc

SEQ ID NO: 1766079 - DNA, 15 bp, Homo sapiens
tatttcttagaagcc

SEQ ID NO: 1766080 - DNA, 15 bp, Homo sapiens
atttcttagaagcca

SEQ ID NO: 1766081 - DNA, 15 bp, Homo sapiens
tttcttagaagccat

SEQ ID NO: 1766082 - DNA, 15 bp, Homo sapiens
ttcttagaagccatg

SEQ ID NO: 1766083 - DNA, 15 bp, Homo sapiens
tcttagaagccatgt

SEQ ID NO: 1766084 - DNA, 15 bp, Homo sapiens
cttagaagccatgtt

SEQ ID NO: 1766085 - DNA, 15 bp, Homo sapiens
ttagaagccatgtta

SEQ ID NO: 1766086 - DNA, 15 bp, Homo sapiens
tagaagccatgttat

SEQ ID NO: 1766087 - DNA, 15 bp, Homo sapiens
agaagccatgttata

SEQ ID NO: 1766088 - DNA, 15 bp, Homo sapiens
gaagccatgttataa

SEQ ID NO: 1766089 - DNA, 15 bp, Homo sapiens
aagccatgttataaa

SEQ ID NO: 1766090 - DNA, 15 bp, Homo sapiens
agccatgttataaat

SEQ ID NO: 1766091 - DNA, 15 bp, Homo sapiens
gccatgttataaatg

SEQ ID NO: 1766092 - DNA, 15 bp, Homo sapiens
ccatgttataaatgg

SEQ ID NO: 1766093 - DNA, 15 bp, Homo sapiens
catgttataaatggg

SEQ ID NO: 1766094 - DNA, 15 bp, Homo sapiens
atgttataaatgggt

SEQ ID NO: 1766095 - DNA, 15 bp, Homo sapiens
tgttataaatgggta

SEQ ID NO: 1766096 - DNA, 15 bp, Homo sapiens
gttataaatgggtaa

SEQ ID NO: 1766097 - DNA, 15 bp, Homo sapiens
ttataaatgggtaat

SEQ ID NO: 1766098 - DNA, 15 bp, Homo sapiens
tataaatgggtaatt

SEQ ID NO: 1766099 - DNA, 15 bp, Homo sapiens
ataaatgggtaattc

SEQ ID NO: 1766100 - DNA, 15 bp, Homo sapiens
taaatgggtaattca

SEQ ID NO: 1766101 - DNA, 15 bp, Homo sapiens
aaatgggtaattcag

SEQ ID NO: 1766102 - DNA, 15 bp, Homo sapiens
aatgggtaattcagt

SEQ ID NO: 1766103 - DNA, 15 bp, Homo sapiens
atgggtaattcagtt

SEQ ID NO: 1766104 - DNA, 15 bp, Homo sapiens
tgggtaattcagttt

SEQ ID NO: 1766105 - DNA, 15 bp, Homo sapiens
gggtaattcagtttt

SEQ ID NO: 1766106 - DNA, 15 bp, Homo sapiens
ggtaattcagttttc

SEQ ID NO: 1766107 - DNA, 15 bp, Homo sapiens
gtaattcagttttca

SEQ ID NO: 1766108 - DNA, 15 bp, Homo sapiens
taattcagttttcag

SEQ ID NO: 1766109 - DNA, 15 bp, Homo sapiens
aattcagttttcagg

SEQ ID NO: 1766110 - DNA, 15 bp, Homo sapiens
attcagttttcagga

SEQ ID NO: 1766111 - DNA, 15 bp, Homo sapiens
ttcagttttcaggaa

SEQ ID NO: 1766112 - DNA, 15 bp, Homo sapiens
tcagttttcaggaaa

SEQ ID NO: 1766113 - DNA, 15 bp, Homo sapiens
cagttttcaggaaag

SEQ ID NO: 1766114 - DNA, 15 bp, Homo sapiens
agttttcaggaaagc

SEQ ID NO: 1766115 - DNA, 15 bp, Homo sapiens
gttttcaggaaagcc

SEQ ID NO: 1766116 - DNA, 15 bp, Homo sapiens
ttttcaggaaagccc

SEQ ID NO: 1766117 - DNA, 15 bp, Homo sapiens
tttcaggaaagcccc

SEQ ID NO: 1766118 - DNA, 15 bp, Homo sapiens
ttcaggaaagcccca

SEQ ID NO: 1766119 - DNA, 15 bp, Homo sapiens
tcaggaaagccccaa

SEQ ID NO: 1766120 - DNA, 15 bp, Homo sapiens
caggaaagccccaaa

SEQ ID NO: 1766121 - DNA, 15 bp, Homo sapiens
aggaaagccccaaaa

SEQ ID NO: 1766122 - DNA, 15 bp, Homo sapiens
ggaaagccccaaaaa

SEQ ID NO: 1766123 - DNA, 15 bp, Homo sapiens
gaaagccccaaaaag

SEQ ID NO: 1766124 - DNA, 15 bp, Homo sapiens
aaagccccaaaaagc

SEQ ID NO: 1766125 - DNA, 15 bp, Homo sapiens
aagccccaaaaagct

SEQ ID NO: 1766126 - DNA, 15 bp, Homo sapiens
agccccaaaaagctt

SEQ ID NO: 1766127 - DNA, 15 bp, Homo sapiens
gccccaaaaagcttt

SEQ ID NO: 1766128 - DNA, 15 bp, Homo sapiens
ccccaaaaagctttt

SEQ ID NO: 1766129 - DNA, 15 bp, Homo sapiens
cccaaaaagcttttt

SEQ ID NO: 1766130 - DNA, 15 bp, Homo sapiens
ccaaaaagcttttta

SEQ ID NO: 1766131 - DNA, 15 bp, Homo sapiens
caaaaagctttttaa

SEQ ID NO: 1766132 - DNA, 15 bp, Homo sapiens
aaaaagctttttaaa

SEQ ID NO: 1766133 - DNA, 15 bp, Homo sapiens
aaaagctttttaaaa

SEQ ID NO: 1766134 - DNA, 15 bp, Homo sapiens
aaagctttttaaaaa

SEQ ID NO: 1766135 - DNA, 15 bp, Homo sapiens
aagctttttaaaaag

SEQ ID NO: 1766136 - DNA, 15 bp, Homo sapiens
agctttttaaaaagt

SEQ ID NO: 1766137 - DNA, 15 bp, Homo sapiens
gctttttaaaaagtt

SEQ ID NO: 1766138 - DNA, 15 bp, Homo sapiens
ctttttaaaaagttt

SEQ ID NO: 1766139 - DNA, 15 bp, Homo sapiens
tttttaaaaagtttg

SEQ ID NO: 1766140 - DNA, 15 bp, Homo sapiens
ttttaaaaagtttgt

SEQ ID NO: 1766141 - DNA, 15 bp, Homo sapiens
tttaaaaagtttgtt

SEQ ID NO: 1766142 - DNA, 15 bp, Homo sapiens
ttaaaaagtttgttt

SEQ ID NO: 1766143 - DNA, 15 bp, Homo sapiens
taaaaagtttgtttt

SEQ ID NO: 1766144 - DNA, 15 bp, Homo sapiens
aaaaagtttgttttt

SEQ ID NO: 1766145 - DNA, 15 bp, Homo sapiens
aaaagtttgtttttg

SEQ ID NO: 1766146 - DNA, 15 bp, Homo sapiens
aaagtttgtttttgg

SEQ ID NO: 1766147 - DNA, 15 bp, Homo sapiens
aagtttgtttttgga

SEQ ID NO: 1766148 - DNA, 15 bp, Homo sapiens
agtttgtttttggag

SEQ ID NO: 1766149 - DNA, 15 bp, Homo sapiens
gtttgtttttggagt

SEQ ID NO: 1766150 - DNA, 15 bp, Homo sapiens
tttgtttttggagtc

SEQ ID NO: 1766151 - DNA, 15 bp, Homo sapiens
ttgtttttggagtct

SEQ ID NO: 1766152 - DNA, 15 bp, Homo sapiens
tgtttttggagtctt

SEQ ID NO: 1766153 - DNA, 15 bp, Homo sapiens
gtttttggagtcttt

SEQ ID NO: 1766154 - DNA, 15 bp, Homo sapiens
tttttggagtcttta

SEQ ID NO: 1766155 - DNA, 15 bp, Homo sapiens
ttttggagtctttaa

SEQ ID NO: 1766156 - DNA, 15 bp, Homo sapiens
tttggagtctttaag

SEQ ID NO: 1766157 - DNA, 15 bp, Homo sapiens
ttggagtctttaaga

SEQ ID NO: 1766158 - DNA, 15 bp, Homo sapiens
tggagtctttaagat

SEQ ID NO: 1766159 - DNA, 15 bp, Homo sapiens
ggagtctttaagatt

SEQ ID NO: 1766160 - DNA, 15 bp, Homo sapiens
gagtctttaagattt

SEQ ID NO: 1766161 - DNA, 15 bp, Homo sapiens
agtctttaagatttc

SEQ ID NO: 1766162 - DNA, 15 bp, Homo sapiens
gtctttaagatttca

SEQ ID NO: 1766163 - DNA, 15 bp, Homo sapiens
tctttaagatttcat

SEQ ID NO: 1766164 - DNA, 15 bp, Homo sapiens
ctttaagatttcatc

SEQ ID NO: 1766165 - DNA, 15 bp, Homo sapiens
tttaagatttcatcc

SEQ ID NO: 1766166 - DNA, 15 bp, Homo sapiens
ttaagatttcatccc

SEQ ID NO: 1766167 - DNA, 15 bp, Homo sapiens
taagatttcatccct

SEQ ID NO: 1766168 - DNA, 15 bp, Homo sapiens
aagatttcatccctg

SEQ ID NO: 1766169 - DNA, 15 bp, Homo sapiens
agatttcatccctgc

SEQ ID NO: 1766170 - DNA, 15 bp, Homo sapiens
gatttcatccctgcc

SEQ ID NO: 1766171 - DNA, 15 bp, Homo sapiens
atttcatccctgcct

SEQ ID NO: 1766172 - DNA, 15 bp, Homo sapiens
tttcatccctgccta

SEQ ID NO: 1766173 - DNA, 15 bp, Homo sapiens
ttcatccctgcctaa

SEQ ID NO: 1766174 - DNA, 15 bp, Homo sapiens
tcatccctgcctaag

SEQ ID NO: 1766175 - DNA, 15 bp, Homo sapiens
catccctgcctaagc

SEQ ID NO: 1766176 - DNA, 15 bp, Homo sapiens
atccctgcctaagca

SEQ ID NO: 1766177 - DNA, 15 bp, Homo sapiens
tccctgcctaagcac

SEQ ID NO: 1766178 - DNA, 15 bp, Homo sapiens
ccctgcctaagcact

SEQ ID NO: 1766179 - DNA, 15 bp, Homo sapiens
cctgcctaagcactg

SEQ ID NO: 1766180 - DNA, 15 bp, Homo sapiens
ctgcctaagcactgt

SEQ ID NO: 1766181 - DNA, 15 bp, Homo sapiens
tgcctaagcactgtt

SEQ ID NO: 1766182 - DNA, 15 bp, Homo sapiens
gcctaagcactgttt

SEQ ID NO: 1766183 - DNA, 15 bp, Homo sapiens
cctaagcactgttta

SEQ ID NO: 1766184 - DNA, 15 bp, Homo sapiens
ctaagcactgtttat

SEQ ID NO: 1766185 - DNA, 15 bp, Homo sapiens
taagcactgtttata

SEQ ID NO: 1766186 - DNA, 15 bp, Homo sapiens
aagcactgtttataa

SEQ ID NO: 1766187 - DNA, 15 bp, Homo sapiens
agcactgtttataaa

SEQ ID NO: 1766188 - DNA, 15 bp, Homo sapiens
gcactgtttataaaa

SEQ ID NO: 1766189 - DNA, 15 bp, Homo sapiens
cactgtttataaaat

SEQ ID NO: 1766190 - DNA, 15 bp, Homo sapiens
actgtttataaaatt

SEQ ID NO: 1766191 - DNA, 15 bp, Homo sapiens
ctgtttataaaattg

SEQ ID NO: 1766192 - DNA, 15 bp, Homo sapiens
tgtttataaaattgt

SEQ ID NO: 1766193 - DNA, 15 bp, Homo sapiens
gtttataaaattgtt

SEQ ID NO: 1766194 - DNA, 15 bp, Homo sapiens
tttataaaattgttt

SEQ ID NO: 1766195 - DNA, 15 bp, Homo sapiens
ttataaaattgtttc

SEQ ID NO: 1766196 - DNA, 15 bp, Homo sapiens
tataaaattgtttct

SEQ ID NO: 1766197 - DNA, 15 bp, Homo sapiens
ataaaattgtttcta

SEQ ID NO: 1766198 - DNA, 15 bp, Homo sapiens
taaaattgtttctac

SEQ ID NO: 1766199 - DNA, 15 bp, Homo sapiens
aaaattgtttctaca

SEQ ID NO: 1766200 - DNA, 15 bp, Homo sapiens
aaattgtttctacac

SEQ ID NO: 1766201 - DNA, 15 bp, Homo sapiens
aattgtttctacaca

SEQ ID NO: 1766202 - DNA, 15 bp, Homo sapiens
attgtttctacacaa

SEQ ID NO: 1766203 - DNA, 15 bp, Homo sapiens
ttgtttctacacaaa

SEQ ID NO: 1766204 - DNA, 15 bp, Homo sapiens
tgtttctacacaaaa

SEQ ID NO: 1766205 - DNA, 15 bp, Homo sapiens
gtttctacacaaaaa

SEQ ID NO: 1766206 - DNA, 15 bp, Homo sapiens
tttctacacaaaaat

SEQ ID NO: 1766207 - DNA, 15 bp, Homo sapiens
ttctacacaaaaatt

SEQ ID NO: 1766208 - DNA, 15 bp, Homo sapiens
tctacacaaaaattt

SEQ ID NO: 1766209 - DNA, 15 bp, Homo sapiens
ctacacaaaaattta

SEQ ID NO: 1766210 - DNA, 15 bp, Homo sapiens
tacacaaaaatttat

SEQ ID NO: 1766211 - DNA, 15 bp, Homo sapiens
acacaaaaatttatt

SEQ ID NO: 1766212 - DNA, 15 bp, Homo sapiens
cacaaaaatttattc

SEQ ID NO: 1766213 - DNA, 15 bp, Homo sapiens
acaaaaatttattca

SEQ ID NO: 1766214 - DNA, 15 bp, Homo sapiens
caaaaatttattcac

SEQ ID NO: 1766215 - DNA, 15 bp, Homo sapiens
aaatttattcacaac

SEQ ID NO: 1766216 - DNA, 15 bp, Homo sapiens
aatttattcacaact

SEQ ID NO: 1766217 - DNA, 15 bp, Homo sapiens
atttattcacaacta

SEQ ID NO: 1766218 - DNA, 15 bp, Homo sapiens
tttattcacaactaa

SEQ ID NO: 1766219 - DNA, 15 bp, Homo sapiens
ttattcacaactaag

SEQ ID NO: 1766220 - DNA, 15 bp, Homo sapiens
tattcacaactaaga

SEQ ID NO: 1766221 - DNA, 15 bp, Homo sapiens
attcacaactaagaa

SEQ ID NO: 1766222 - DNA, 15 bp, Homo sapiens
ttcacaactaagaac

SEQ ID NO: 1766223 - DNA, 15 bp, Homo sapiens
tcacaactaagaaca

SEQ ID NO: 1766224 - DNA, 15 bp, Homo sapiens
cacaactaagaacat

SEQ ID NO: 1766225 - DNA, 15 bp, Homo sapiens
acaactaagaacatt

SEQ ID NO: 1766226 - DNA, 15 bp, Homo sapiens
caactaagaacattt

SEQ ID NO: 1766227 - DNA, 15 bp, Homo sapiens
aactaagaacatttg

SEQ ID NO: 1766228 - DNA, 15 bp, Homo sapiens
actaagaacatttgt

SEQ ID NO: 1766229 - DNA, 15 bp, Homo sapiens
ctaagaacatttgtg

SEQ ID NO: 1766230 - DNA, 15 bp, Homo sapiens
taagaacatttgtga

SEQ ID NO: 1766231 - DNA, 15 bp, Homo sapiens
aagaacatttgtgac

SEQ ID NO: 1766232 - DNA, 15 bp, Homo sapiens
agaacatttgtgaca

SEQ ID NO: 1766233 - DNA, 15 bp, Homo sapiens
gaacatttgtgacat

SEQ ID NO: 1766234 - DNA, 15 bp, Homo sapiens
aacatttgtgacatc

SEQ ID NO: 1766235 - DNA, 15 bp, Homo sapiens
acatttgtgacatcc

SEQ ID NO: 1766236 - DNA, 15 bp, Homo sapiens
catttgtgacatcca

SEQ ID NO: 1766237 - DNA, 15 bp, Homo sapiens
atttgtgacatccag

SEQ ID NO: 1766238 - DNA, 15 bp, Homo sapiens
tttgtgacatccaga

SEQ ID NO: 1766239 - DNA, 15 bp, Homo sapiens
ttgtgacatccagag

SEQ ID NO: 1766240 - DNA, 15 bp, Homo sapiens
tgtgacatccagagt

SEQ ID NO: 1766241 - DNA, 15 bp, Homo sapiens
gtgacatccagagtt

SEQ ID NO: 1766242 - DNA, 15 bp, Homo sapiens
tgacatccagagttg

SEQ ID NO: 1766243 - DNA, 15 bp, Homo sapiens
gacatccagagttgg

SEQ ID NO: 1766244 - DNA, 15 bp, Homo sapiens
acatccagagttgga

SEQ ID NO: 1766245 - DNA, 15 bp, Homo sapiens
catccagagttggac

SEQ ID NO: 1766246 - DNA, 15 bp, Homo sapiens
atccagagttggact

SEQ ID NO: 1766247 - DNA, 15 bp, Homo sapiens
tccagagttggactg

SEQ ID NO: 1766248 - DNA, 15 bp, Homo sapiens
ccagagttggactgg

SEQ ID NO: 1766249 - DNA, 15 bp, Homo sapiens
cagagttggactggc

SEQ ID NO: 1766250 - DNA, 15 bp, Homo sapiens
agagttggactggca

SEQ ID NO: 1766251 - DNA, 15 bp, Homo sapiens
gagttggactggcat

SEQ ID NO: 1766252 - DNA, 15 bp, Homo sapiens
agttggactggcatt

SEQ ID NO: 1766253 - DNA, 15 bp, Homo sapiens
gttggactggcattt

SEQ ID NO: 1766254 - DNA, 15 bp, Homo sapiens
ttggactggcattta

SEQ ID NO: 1766255 - DNA, 15 bp, Homo sapiens
tggactggcatttag

SEQ ID NO: 1766256 - DNA, 15 bp, Homo sapiens
ggactggcatttagg

SEQ ID NO: 1766257 - DNA, 15 bp, Homo sapiens
gactggcatttaggc

SEQ ID NO: 1766258 - DNA, 15 bp, Homo sapiens
actggcatttaggca

SEQ ID NO: 1766259 - DNA, 15 bp, Homo sapiens
ctggcatttaggcac

SEQ ID NO: 1766260 - DNA, 15 bp, Homo sapiens
tggcatttaggcacg

SEQ ID NO: 1766261 - DNA, 15 bp, Homo sapiens
ggcatttaggcacga

SEQ ID NO: 1766262 - DNA, 15 bp, Homo sapiens
gcatttaggcacgaa

SEQ ID NO: 1766263 - DNA, 15 bp, Homo sapiens
catttaggcacgaaa

SEQ ID NO: 1766264 - DNA, 15 bp, Homo sapiens
atttaggcacgaaaa

SEQ ID NO: 1766265 - DNA, 15 bp, Homo sapiens
tttaggcacgaaaaa

SEQ ID NO: 1766266 - DNA, 15 bp, Homo sapiens
ttaggcacgaaaaaa

SEQ ID NO: 1766267 - DNA, 15 bp, Homo sapiens
taggcacgaaaaaag

SEQ ID NO: 1766268 - DNA, 15 bp, Homo sapiens
aggcacgaaaaaagt

SEQ ID NO: 1766269 - DNA, 15 bp, Homo sapiens
ggcacgaaaaaagtt

SEQ ID NO: 1766270 - DNA, 15 bp, Homo sapiens
gcacgaaaaaagttt

SEQ ID NO: 1766271 - DNA, 15 bp, Homo sapiens
cacgaaaaaagttta

SEQ ID NO: 1766272 - DNA, 15 bp, Homo sapiens
acgaaaaaagtttag

SEQ ID NO: 1766273 - DNA, 15 bp, Homo sapiens
cgaaaaaagtttagg

SEQ ID NO: 1766274 - DNA, 15 bp, Homo sapiens
gaaaaaagtttaggt

SEQ ID NO: 1766275 - DNA, 15 bp, Homo sapiens
aaaaaagtttaggtg

SEQ ID NO: 1766276 - DNA, 15 bp, Homo sapiens
aaaaagtttaggtgc

SEQ ID NO: 1766277 - DNA, 15 bp, Homo sapiens
aaaagtttaggtgct

SEQ ID NO: 1766278 - DNA, 15 bp, Homo sapiens
aaagtttaggtgctg

SEQ ID NO: 1766279 - DNA, 15 bp, Homo sapiens
aagtttaggtgctgg

SEQ ID NO: 1766280 - DNA, 15 bp, Homo sapiens
agtttaggtgctgga

SEQ ID NO: 1766281 - DNA, 15 bp, Homo sapiens
gtttaggtgctggaa

SEQ ID NO: 1766282 - DNA, 15 bp, Homo sapiens
tttaggtgctggaag

SEQ ID NO: 1766283 - DNA, 15 bp, Homo sapiens
ttaggtgctggaagg

SEQ ID NO: 1766284 - DNA, 15 bp, Homo sapiens
taggtgctggaaggt

SEQ ID NO: 1766285 - DNA, 15 bp, Homo sapiens
aggtgctggaaggta

SEQ ID NO: 1766286 - DNA, 15 bp, Homo sapiens
ggtgctggaaggtag

SEQ ID NO: 1766287 - DNA, 15 bp, Homo sapiens
gtgctggaaggtagt

SEQ ID NO: 1766288 - DNA, 15 bp, Homo sapiens
tgctggaaggtagtg

SEQ ID NO: 1766289 - DNA, 15 bp, Homo sapiens
gctggaaggtagtga

SEQ ID NO: 1766290 - DNA, 15 bp, Homo sapiens
ctggaaggtagtgat

SEQ ID NO: 1766291 - DNA, 15 bp, Homo sapiens
tggaaggtagtgatg

SEQ ID NO: 1766292 - DNA, 15 bp, Homo sapiens
ggaaggtagtgatgc

SEQ ID NO: 1766293 - DNA, 15 bp, Homo sapiens
gaaggtagtgatgct

SEQ ID NO: 1766294 - DNA, 15 bp, Homo sapiens
aaggtagtgatgctt

SEQ ID NO: 1766295 - DNA, 15 bp, Homo sapiens
aggtagtgatgcttc

SEQ ID NO: 1766296 - DNA, 15 bp, Homo sapiens
ggtagtgatgcttct

SEQ ID NO: 1766297 - DNA, 15 bp, Homo sapiens
gtagtgatgcttctt

SEQ ID NO: 1766298 - DNA, 15 bp, Homo sapiens
tagtgatgcttcttc

SEQ ID NO: 1766299 - DNA, 15 bp, Homo sapiens
agtgatgcttcttct

SEQ ID NO: 1766300 - DNA, 15 bp, Homo sapiens
gtgatgcttcttctt

SEQ ID NO: 1766301 - DNA, 15 bp, Homo sapiens
tgatgcttcttcttg

SEQ ID NO: 1766302 - DNA, 15 bp, Homo sapiens
gatgcttcttcttgg

SEQ ID NO: 1766303 - DNA, 15 bp, Homo sapiens
atgcttcttcttgga

SEQ ID NO: 1766304 - DNA, 15 bp, Homo sapiens
tgcttcttcttggaa

SEQ ID NO: 1766305 - DNA, 15 bp, Homo sapiens
gcttcttcttggaaa

SEQ ID NO: 1766306 - DNA, 15 bp, Homo sapiens
cttcttcttggaaat

SEQ ID NO: 1766307 - DNA, 15 bp, Homo sapiens
ttcttcttggaaata

SEQ ID NO: 1766308 - DNA, 15 bp, Homo sapiens
tcttcttggaaatag

SEQ ID NO: 1766309 - DNA, 15 bp, Homo sapiens
cttcttggaaatagt

SEQ ID NO: 1766310 - DNA, 15 bp, Homo sapiens
ttcttggaaatagta

SEQ ID NO: 1766311 - DNA, 15 bp, Homo sapiens
tcttggaaatagtaa

SEQ ID NO: 1766312 - DNA, 15 bp, Homo sapiens
cttggaaatagtaat

SEQ ID NO: 1766313 - DNA, 15 bp, Homo sapiens
ttggaaatagtaatt

SEQ ID NO: 1766314 - DNA, 15 bp, Homo sapiens
tggaaatagtaattt

SEQ ID NO: 1766315 - DNA, 15 bp, Homo sapiens
ggaaatagtaattta

SEQ ID NO: 1766316 - DNA, 15 bp, Homo sapiens
gaaatagtaatttaa

SEQ ID NO: 1766317 - DNA, 15 bp, Homo sapiens
aaatagtaatttaat

SEQ ID NO: 1766318 - DNA, 15 bp, Homo sapiens
aatagtaatttaata

SEQ ID NO: 1766319 - DNA, 15 bp, Homo sapiens
atagtaatttaatat

SEQ ID NO: 1766320 - DNA, 15 bp, Homo sapiens
tagtaatttaatata

SEQ ID NO: 1766321 - DNA, 15 bp, Homo sapiens
agtaatttaatatat

SEQ ID NO: 1766322 - DNA, 15 bp, Homo sapiens
gtaatttaatatatt

SEQ ID NO: 1766323 - DNA, 15 bp, Homo sapiens
taatttaatatattg

SEQ ID NO: 1766324 - DNA, 15 bp, Homo sapiens
aatttaatatattga

SEQ ID NO: 1766325 - DNA, 15 bp, Homo sapiens
atttaatatattgac

SEQ ID NO: 1766326 - DNA, 15 bp, Homo sapiens
tttaatatattgaca

SEQ ID NO: 1766327 - DNA, 15 bp, Homo sapiens
ttaatatattgacaa

SEQ ID NO: 1766328 - DNA, 15 bp, Homo sapiens
taatatattgacaaa

SEQ ID NO: 1766329 - DNA, 15 bp, Homo sapiens
aatatattgacaaag

SEQ ID NO: 1766330 - DNA, 15 bp, Homo sapiens
atatattgacaaagg

SEQ ID NO: 1766331 - DNA, 15 bp, Homo sapiens
tatattgacaaagga

SEQ ID NO: 1766332 - DNA, 15 bp, Homo sapiens
atattgacaaaggac

SEQ ID NO: 1766333 - DNA, 15 bp, Homo sapiens
tattgacaaaggaca

SEQ ID NO: 1766334 - DNA, 15 bp, Homo sapiens
attgacaaaggacaa

SEQ ID NO: 1766335 - DNA, 15 bp, Homo sapiens
ttgacaaaggacaaa

SEQ ID NO: 1766336 - DNA, 15 bp, Homo sapiens
tgacaaaggacaaaa

SEQ ID NO: 1766337 - DNA, 15 bp, Homo sapiens
gacaaaggacaaaat

SEQ ID NO: 1766338 - DNA, 15 bp, Homo sapiens
acaaaggacaaaata

SEQ ID NO: 1766339 - DNA, 15 bp, Homo sapiens
caaaggacaaaatac

SEQ ID NO: 1766340 - DNA, 15 bp, Homo sapiens
aaaggacaaaatact

SEQ ID NO: 1766341 - DNA, 15 bp, Homo sapiens
aaggacaaaatactt

SEQ ID NO: 1766342 - DNA, 15 bp, Homo sapiens
aggacaaaatacttg

SEQ ID NO: 1766343 - DNA, 15 bp, Homo sapiens
ggacaaaatacttgg

SEQ ID NO: 1766344 - DNA, 15 bp, Homo sapiens
gacaaaatacttggt

SEQ ID NO: 1766345 - DNA, 15 bp, Homo sapiens
acaaaatacttggtt

SEQ ID NO: 1766346 - DNA, 15 bp, Homo sapiens
caaaatacttggttc

SEQ ID NO: 1766347 - DNA, 15 bp, Homo sapiens
aaaatacttggttca

SEQ ID NO: 1766348 - DNA, 15 bp, Homo sapiens
aaatacttggttcat

SEQ ID NO: 1766349 - DNA, 15 bp, Homo sapiens
aatacttggttcatc

SEQ ID NO: 1766350 - DNA, 15 bp, Homo sapiens
atacttggttcatca

SEQ ID NO: 1766351 - DNA, 15 bp, Homo sapiens
tacttggttcatcag

SEQ ID NO: 1766352 - DNA, 15 bp, Homo sapiens
acttggttcatcagg

SEQ ID NO: 1766353 - DNA, 15 bp, Homo sapiens
cttggttcatcaggt

SEQ ID NO: 1766354 - DNA, 15 bp, Homo sapiens
ttggttcatcaggtg

SEQ ID NO: 1766355 - DNA, 15 bp, Homo sapiens
tggttcatcaggtgt

SEQ ID NO: 1766356 - DNA, 15 bp, Homo sapiens
ggttcatcaggtgtc

SEQ ID NO: 1766357 - DNA, 15 bp, Homo sapiens
gttcatcaggtgtcc

SEQ ID NO: 1766358 - DNA, 15 bp, Homo sapiens
ttcatcaggtgtcca

SEQ ID NO: 1766359 - DNA, 15 bp, Homo sapiens
tcatcaggtgtccaa

SEQ ID NO: 1766360 - DNA, 15 bp, Homo sapiens
catcaggtgtccaaa

SEQ ID NO: 1766361 - DNA, 15 bp, Homo sapiens
atcaggtgtccaaaa

SEQ ID NO: 1766362 - DNA, 15 bp, Homo sapiens
tcaggtgtccaaaat

SEQ ID NO: 1766363 - DNA, 15 bp, Homo sapiens
caggtgtccaaaatt

SEQ ID NO: 1766364 - DNA, 15 bp, Homo sapiens
aggtgtccaaaattg

SEQ ID NO: 1766365 - DNA, 15 bp, Homo sapiens
ggtgtccaaaattgt

SEQ ID NO: 1766366 - DNA, 15 bp, Homo sapiens
gtgtccaaaattgta

SEQ ID NO: 1766367 - DNA, 15 bp, Homo sapiens
tgtccaaaattgtag

SEQ ID NO: 1766368 - DNA, 15 bp, Homo sapiens
gtccaaaattgtagg

SEQ ID NO: 1766369 - DNA, 15 bp, Homo sapiens
tccaaaattgtagga

SEQ ID NO: 1766370 - DNA, 15 bp, Homo sapiens
ccaaaattgtaggac

SEQ ID NO: 1766371 - DNA, 15 bp, Homo sapiens
caaaattgtaggacc

SEQ ID NO: 1766372 - DNA, 15 bp, Homo sapiens
aaaattgtaggacca

SEQ ID NO: 1766373 - DNA, 15 bp, Homo sapiens
aaattgtaggaccaa

SEQ ID NO: 1766374 - DNA, 15 bp, Homo sapiens
aattgtaggaccaaa

SEQ ID NO: 1766375 - DNA, 15 bp, Homo sapiens
attgtaggaccaaaa

SEQ ID NO: 1766376 - DNA, 15 bp, Homo sapiens
ttgtaggaccaaaaa

SEQ ID NO: 1766377 - DNA, 15 bp, Homo sapiens
tgtaggaccaaaaag

SEQ ID NO: 1766378 - DNA, 15 bp, Homo sapiens
gtaggaccaaaaagc

SEQ ID NO: 1766379 - DNA, 15 bp, Homo sapiens
taggaccaaaaagca

SEQ ID NO: 1766380 - DNA, 15 bp, Homo sapiens
aggaccaaaaagcaa

SEQ ID NO: 1766381 - DNA, 15 bp, Homo sapiens
ggaccaaaaagcaat

SEQ ID NO: 1766382 - DNA, 15 bp, Homo sapiens
gaccaaaaagcaatt

SEQ ID NO: 1766383 - DNA, 15 bp, Homo sapiens
accaaaaagcaattg

SEQ ID NO: 1766384 - DNA, 15 bp, Homo sapiens
ccaaaaagcaattgc

SEQ ID NO: 1766385 - DNA, 15 bp, Homo sapiens
caaaaagcaattgct

SEQ ID NO: 1766386 - DNA, 15 bp, Homo sapiens
aaaaagcaattgctt

SEQ ID NO: 1766387 - DNA, 15 bp, Homo sapiens
aaaagcaattgcttc

SEQ ID NO: 1766388 - DNA, 15 bp, Homo sapiens
aaagcaattgcttca

SEQ ID NO: 1766389 - DNA, 15 bp, Homo sapiens
aagcaattgcttcag

SEQ ID NO: 1766390 - DNA, 15 bp, Homo sapiens
agcaattgcttcaga

SEQ ID NO: 1766391 - DNA, 15 bp, Homo sapiens
gcaattgcttcagat

SEQ ID NO: 1766392 - DNA, 15 bp, Homo sapiens
caattgcttcagatt

SEQ ID NO: 1766393 - DNA, 15 bp, Homo sapiens
aattgcttcagattc

SEQ ID NO: 1766394 - DNA, 15 bp, Homo sapiens
attgcttcagattct

SEQ ID NO: 1766395 - DNA, 15 bp, Homo sapiens
ttgcttcagattctt

SEQ ID NO: 1766396 - DNA, 15 bp, Homo sapiens
tgcttcagattcttg

SEQ ID NO: 1766397 - DNA, 15 bp, Homo sapiens
gcttcagattcttga

SEQ ID NO: 1766398 - DNA, 15 bp, Homo sapiens
cttcagattcttgat

SEQ ID NO: 1766399 - DNA, 15 bp, Homo sapiens
ttcagattcttgata

SEQ ID NO: 1766400 - DNA, 15 bp, Homo sapiens
tcagattcttgataa

SEQ ID NO: 1766401 - DNA, 15 bp, Homo sapiens
cagattcttgataac

SEQ ID NO: 1766402 - DNA, 15 bp, Homo sapiens
agattcttgataact

SEQ ID NO: 1766403 - DNA, 15 bp, Homo sapiens
gattcttgataacta

SEQ ID NO: 1766404 - DNA, 15 bp, Homo sapiens
attcttgataactat

SEQ ID NO: 1766405 - DNA, 15 bp, Homo sapiens
ttcttgataactatg

SEQ ID NO: 1766406 - DNA, 15 bp, Homo sapiens
tcttgataactatgt

SEQ ID NO: 1766407 - DNA, 15 bp, Homo sapiens
cttgataactatgta

SEQ ID NO: 1766408 - DNA, 15 bp, Homo sapiens
ttgataactatgtac

SEQ ID NO: 1766409 - DNA, 15 bp, Homo sapiens
tgataactatgtacc

SEQ ID NO: 1766410 - DNA, 15 bp, Homo sapiens
gataactatgtacca

SEQ ID NO: 1766411 - DNA, 15 bp, Homo sapiens
ataactatgtaccat

SEQ ID NO: 1766412 - DNA, 15 bp, Homo sapiens
taactatgtaccatt

SEQ ID NO: 1766413 - DNA, 15 bp, Homo sapiens
aactatgtaccattc

SEQ ID NO: 1766414 - DNA, 15 bp, Homo sapiens
actatgtaccattca

SEQ ID NO: 1766415 - DNA, 15 bp, Homo sapiens
ctatgtaccattcat

SEQ ID NO: 1766416 - DNA, 15 bp, Homo sapiens
tatgtaccattcatg

SEQ ID NO: 1766417 - DNA, 15 bp, Homo sapiens
atgtaccattcatga

SEQ ID NO: 1766418 - DNA, 15 bp, Homo sapiens
tgtaccattcatgaa

SEQ ID NO: 1766419 - DNA, 15 bp, Homo sapiens
gtaccattcatgaac

SEQ ID NO: 1766420 - DNA, 15 bp, Homo sapiens
taccattcatgaacc

SEQ ID NO: 1766421 - DNA, 15 bp, Homo sapiens
accattcatgaacca

SEQ ID NO: 1766422 - DNA, 15 bp, Homo sapiens
ccattcatgaaccaa

SEQ ID NO: 1766423 - DNA, 15 bp, Homo sapiens
cattcatgaaccaaa

SEQ ID NO: 1766424 - DNA, 15 bp, Homo sapiens
attcatgaaccaaat

SEQ ID NO: 1766425 - DNA, 15 bp, Homo sapiens
ttcatgaaccaaatg

SEQ ID NO: 1766426 - DNA, 15 bp, Homo sapiens
tcatgaaccaaatgt

SEQ ID NO: 1766427 - DNA, 15 bp, Homo sapiens
catgaaccaaatgtt

SEQ ID NO: 1766428 - DNA, 15 bp, Homo sapiens
atgaaccaaatgttt

SEQ ID NO: 1766429 - DNA, 15 bp, Homo sapiens
tgaaccaaatgtttc

SEQ ID NO: 1766430 - DNA, 15 bp, Homo sapiens
gaaccaaatgtttct

SEQ ID NO: 1766431 - DNA, 15 bp, Homo sapiens
aaccaaatgtttctc

SEQ ID NO: 1766432 - DNA, 15 bp, Homo sapiens
accaaatgtttctcg

SEQ ID NO: 1766433 - DNA, 15 bp, Homo sapiens
ccaaatgtttctcgg

SEQ ID NO: 1766434 - DNA, 15 bp, Homo sapiens
caaatgtttctcgga

SEQ ID NO: 1766435 - DNA, 15 bp, Homo sapiens
aaatgtttctcggat

SEQ ID NO: 1766436 - DNA, 15 bp, Homo sapiens
aatgtttctcggatg

SEQ ID NO: 1766437 - DNA, 15 bp, Homo sapiens
atgtttctcggatgg

SEQ ID NO: 1766438 - DNA, 15 bp, Homo sapiens
tgtttctcggatggg

SEQ ID NO: 1766439 - DNA, 15 bp, Homo sapiens
gtttctcggatggga

SEQ ID NO: 1766440 - DNA, 15 bp, Homo sapiens
tttctcggatgggaa

SEQ ID NO: 1766441 - DNA, 15 bp, Homo sapiens
ttctcggatgggaat

SEQ ID NO: 1766442 - DNA, 15 bp, Homo sapiens
tctcggatgggaata

SEQ ID NO: 1766443 - DNA, 15 bp, Homo sapiens
ctcggatgggaatat

SEQ ID NO: 1766444 - DNA, 15 bp, Homo sapiens
tcggatgggaatatg

SEQ ID NO: 1766445 - DNA, 15 bp, Homo sapiens
cggatgggaatatga

SEQ ID NO: 1766446 - DNA, 15 bp, Homo sapiens
ggatgggaatatgaa

SEQ ID NO: 1766447 - DNA, 15 bp, Homo sapiens
gatgggaatatgaag

SEQ ID NO: 1766448 - DNA, 15 bp, Homo sapiens
atgggaatatgaagt

SEQ ID NO: 1766449 - DNA, 15 bp, Homo sapiens
tgggaatatgaagtt

SEQ ID NO: 1766450 - DNA, 15 bp, Homo sapiens
gggaatatgaagttt

SEQ ID NO: 1766451 - DNA, 15 bp, Homo sapiens
ggaatatgaagtttg

SEQ ID NO: 1766452 - DNA, 15 bp, Homo sapiens
gaatatgaagtttgc

SEQ ID NO: 1766453 - DNA, 15 bp, Homo sapiens
aatatgaagtttgct

SEQ ID NO: 1766454 - DNA, 15 bp, Homo sapiens
atatgaagtttgctc

SEQ ID NO: 1766455 - DNA, 15 bp, Homo sapiens
tatgaagtttgctcc

SEQ ID NO: 1766456 - DNA, 15 bp, Homo sapiens
atgaagtttgctcca

SEQ ID NO: 1766457 - DNA, 15 bp, Homo sapiens
tgaagtttgctccat

SEQ ID NO: 1766458 - DNA, 15 bp, Homo sapiens
gaagtttgctccatt

SEQ ID NO: 1766459 - DNA, 15 bp, Homo sapiens
aagtttgctccattt

SEQ ID NO: 1766460 - DNA, 15 bp, Homo sapiens
agtttgctccatttt

SEQ ID NO: 1766461 - DNA, 15 bp, Homo sapiens
gtttgctccattttc

SEQ ID NO: 1766462 - DNA, 15 bp, Homo sapiens
tttgctccattttct

SEQ ID NO: 1766463 - DNA, 15 bp, Homo sapiens
ttgctccattttcta

SEQ ID NO: 1766464 - DNA, 15 bp, Homo sapiens
tgctccattttctat

SEQ ID NO: 1766465 - DNA, 15 bp, Homo sapiens
gctccattttctatt

SEQ ID NO: 1766466 - DNA, 15 bp, Homo sapiens
ctccattttctattt

SEQ ID NO: 1766467 - DNA, 15 bp, Homo sapiens
tccattttctatttt

SEQ ID NO: 1766468 - DNA, 15 bp, Homo sapiens
ccattttctatttta

SEQ ID NO: 1766469 - DNA, 15 bp, Homo sapiens
attttctattttata

SEQ ID NO: 1766470 - DNA, 15 bp, Homo sapiens
ttttctattttatat

SEQ ID NO: 1766471 - DNA, 15 bp, Homo sapiens
tttctattttatatt

SEQ ID NO: 1766472 - DNA, 15 bp, Homo sapiens
ttctattttatattt

SEQ ID NO: 1766473 - DNA, 15 bp, Homo sapiens
tctattttatatttc

SEQ ID NO: 1766474 - DNA, 15 bp, Homo sapiens
ctattttatatttct

SEQ ID NO: 1766475 - DNA, 15 bp, Homo sapiens
tattttatatttctc

SEQ ID NO: 1766476 - DNA, 15 bp, Homo sapiens
attttatatttctca

SEQ ID NO: 1766477 - DNA, 15 bp, Homo sapiens
ttttatatttctcaa

SEQ ID NO: 1766478 - DNA, 15 bp, Homo sapiens
tttatatttctcaat

SEQ ID NO: 1766479 - DNA, 15 bp, Homo sapiens
ttatatttctcaatt

SEQ ID NO: 1766480 - DNA, 15 bp, Homo sapiens
tatatttctcaattt

SEQ ID NO: 1766481 - DNA, 15 bp, Homo sapiens
atatttctcaattta

SEQ ID NO: 1766482 - DNA, 15 bp, Homo sapiens
tatttctcaatttag

SEQ ID NO: 1766483 - DNA, 15 bp, Homo sapiens
atttctcaatttagt

SEQ ID NO: 1766484 - DNA, 15 bp, Homo sapiens
tttctcaatttagtg

SEQ ID NO: 1766485 - DNA, 15 bp, Homo sapiens
ttctcaatttagtga

SEQ ID NO: 1766486 - DNA, 15 bp, Homo sapiens
tctcaatttagtgac

SEQ ID NO: 1766487 - DNA, 15 bp, Homo sapiens
ctcaatttagtgact

SEQ ID NO: 1766488 - DNA, 15 bp, Homo sapiens
tcaatttagtgacta

SEQ ID NO: 1766489 - DNA, 15 bp, Homo sapiens
caatttagtgactaa

SEQ ID NO: 1766490 - DNA, 15 bp, Homo sapiens
aatttagtgactaat

SEQ ID NO: 1766491 - DNA, 15 bp, Homo sapiens
atttagtgactaatt

SEQ ID NO: 1766492 - DNA, 15 bp, Homo sapiens
tttagtgactaattt

SEQ ID NO: 1766493 - DNA, 15 bp, Homo sapiens
ttagtgactaatttc

SEQ ID NO: 1766494 - DNA, 15 bp, Homo sapiens
tagtgactaatttct

SEQ ID NO: 1766495 - DNA, 15 bp, Homo sapiens
agtgactaatttctt

SEQ ID NO: 1766496 - DNA, 15 bp, Homo sapiens
gtgactaatttcttt

SEQ ID NO: 1766497 - DNA, 15 bp, Homo sapiens
tgactaatttcttta

SEQ ID NO: 1766498 - DNA, 15 bp, Homo sapiens
gactaatttctttaa

SEQ ID NO: 1766499 - DNA, 15 bp, Homo sapiens
actaatttctttaaa

SEQ ID NO: 1766500 - DNA, 15 bp, Homo sapiens
ctaatttctttaaat

SEQ ID NO: 1766501 - DNA, 15 bp, Homo sapiens
taatttctttaaata

SEQ ID NO: 1766502 - DNA, 15 bp, Homo sapiens
aatttctttaaatac

SEQ ID NO: 1766503 - DNA, 15 bp, Homo sapiens
atttctttaaatacc

SEQ ID NO: 1766504 - DNA, 15 bp, Homo sapiens
tttctttaaatacca

SEQ ID NO: 1766505 - DNA, 15 bp, Homo sapiens
ttctttaaataccaa

SEQ ID NO: 1766506 - DNA, 15 bp, Homo sapiens
tctttaaataccaat

SEQ ID NO: 1766507 - DNA, 15 bp, Homo sapiens
ctttaaataccaata

SEQ ID NO: 1766508 - DNA, 15 bp, Homo sapiens
tttaaataccaatat

SEQ ID NO: 1766509 - DNA, 15 bp, Homo sapiens
ttaaataccaatatc

SEQ ID NO: 1766510 - DNA, 15 bp, Homo sapiens
taaataccaatatct

SEQ ID NO: 1766511 - DNA, 15 bp, Homo sapiens
aaataccaatatcta

SEQ ID NO: 1766512 - DNA, 15 bp, Homo sapiens
aataccaatatctat

SEQ ID NO: 1766513 - DNA, 15 bp, Homo sapiens
ataccaatatctata

SEQ ID NO: 1766514 - DNA, 15 bp, Homo sapiens
taccaatatctataa

SEQ ID NO: 1766515 - DNA, 15 bp, Homo sapiens
accaatatctataat

SEQ ID NO: 1766516 - DNA, 15 bp, Homo sapiens
ccaatatctataatt

SEQ ID NO: 1766517 - DNA, 15 bp, Homo sapiens
caatatctataatta

SEQ ID NO: 1766518 - DNA, 15 bp, Homo sapiens
aatatctataattaa

SEQ ID NO: 1766519 - DNA, 15 bp, Homo sapiens
atatctataattaag

SEQ ID NO: 1766520 - DNA, 15 bp, Homo sapiens
tatctataattaaga

SEQ ID NO: 1766521 - DNA, 15 bp, Homo sapiens
atctataattaagat

SEQ ID NO: 1766522 - DNA, 15 bp, Homo sapiens
tctataattaagatt

SEQ ID NO: 1766523 - DNA, 15 bp, Homo sapiens
ctataattaagattt

SEQ ID NO: 1766524 - DNA, 15 bp, Homo sapiens
tataattaagatttc

SEQ ID NO: 1766525 - DNA, 15 bp, Homo sapiens
ataattaagatttct

SEQ ID NO: 1766526 - DNA, 15 bp, Homo sapiens
taattaagatttcta

SEQ ID NO: 1766527 - DNA, 15 bp, Homo sapiens
aattaagatttctat

SEQ ID NO: 1766528 - DNA, 15 bp, Homo sapiens
attaagatttctatt

SEQ ID NO: 1766529 - DNA, 15 bp, Homo sapiens
ttaagatttctattt

SEQ ID NO: 1766530 - DNA, 15 bp, Homo sapiens
taagatttctatttc

SEQ ID NO: 1766531 - DNA, 15 bp, Homo sapiens
aagatttctatttcc

SEQ ID NO: 1766532 - DNA, 15 bp, Homo sapiens
agatttctatttcca

SEQ ID NO: 1766533 - DNA, 15 bp, Homo sapiens
gatttctatttccaa

SEQ ID NO: 1766534 - DNA, 15 bp, Homo sapiens
atttctatttccaat

SEQ ID NO: 1766535 - DNA, 15 bp, Homo sapiens
tttctatttccaatt

SEQ ID NO: 1766536 - DNA, 15 bp, Homo sapiens
ttctatttccaattt

SEQ ID NO: 1766537 - DNA, 15 bp, Homo sapiens
tctatttccaattta

SEQ ID NO: 1766538 - DNA, 15 bp, Homo sapiens
ctatttccaatttac

SEQ ID NO: 1766539 - DNA, 15 bp, Homo sapiens
tatttccaatttact

SEQ ID NO: 1766540 - DNA, 15 bp, Homo sapiens
atttccaatttactt

SEQ ID NO: 1766541 - DNA, 15 bp, Homo sapiens
tttccaatttacttt

SEQ ID NO: 1766542 - DNA, 15 bp, Homo sapiens
ttccaatttactttt

SEQ ID NO: 1766543 - DNA, 15 bp, Homo sapiens
tccaatttacttttc

SEQ ID NO: 1766544 - DNA, 15 bp, Homo sapiens
ccaatttacttttca

SEQ ID NO: 1766545 - DNA, 15 bp, Homo sapiens
caatttacttttcag

SEQ ID NO: 1766546 - DNA, 15 bp, Homo sapiens
aatttacttttcagc

SEQ ID NO: 1766547 - DNA, 15 bp, Homo sapiens
atttacttttcagca

SEQ ID NO: 1766548 - DNA, 15 bp, Homo sapiens
tttacttttcagcat

SEQ ID NO: 1766549 - DNA, 15 bp, Homo sapiens
ttacttttcagcatt

SEQ ID NO: 1766550 - DNA, 15 bp, Homo sapiens
tacttttcagcattt

SEQ ID NO: 1766551 - DNA, 15 bp, Homo sapiens
acttttcagcatttt

SEQ ID NO: 1766552 - DNA, 15 bp, Homo sapiens
cttttcagcattttg

SEQ ID NO: 1766553 - DNA, 15 bp, Homo sapiens
ttttcagcattttga

SEQ ID NO: 1766554 - DNA, 15 bp, Homo sapiens
tttcagcattttgaa

SEQ ID NO: 1766555 - DNA, 15 bp, Homo sapiens
ttcagcattttgaat

SEQ ID NO: 1766556 - DNA, 15 bp, Homo sapiens
tcagcattttgaatg

SEQ ID NO: 1766557 - DNA, 15 bp, Homo sapiens
cagcattttgaatgt

SEQ ID NO: 1766558 - DNA, 15 bp, Homo sapiens
agcattttgaatgta

SEQ ID NO: 1766559 - DNA, 15 bp, Homo sapiens
gcattttgaatgtag

SEQ ID NO: 1766560 - DNA, 15 bp, Homo sapiens
cattttgaatgtaga

SEQ ID NO: 1766561 - DNA, 15 bp, Homo sapiens
attttgaatgtagaa

SEQ ID NO: 1766562 - DNA, 15 bp, Homo sapiens
ttttgaatgtagaat

SEQ ID NO: 1766563 - DNA, 15 bp, Homo sapiens
tttgaatgtagaata

SEQ ID NO: 1766564 - DNA, 15 bp, Homo sapiens
ttgaatgtagaatat

SEQ ID NO: 1766565 - DNA, 15 bp, Homo sapiens
tgaatgtagaatatt

SEQ ID NO: 1766566 - DNA, 15 bp, Homo sapiens
gaatgtagaatatta

SEQ ID NO: 1766567 - DNA, 15 bp, Homo sapiens
aatgtagaatattaa

SEQ ID NO: 1766568 - DNA, 15 bp, Homo sapiens
atgtagaatattaag

SEQ ID NO: 1766569 - DNA, 15 bp, Homo sapiens
tgtagaatattaagg

SEQ ID NO: 1766570 - DNA, 15 bp, Homo sapiens
gtagaatattaaggt

SEQ ID NO: 1766571 - DNA, 15 bp, Homo sapiens
tagaatattaaggtt

SEQ ID NO: 1766572 - DNA, 15 bp, Homo sapiens
agaatattaaggttc

SEQ ID NO: 1766573 - DNA, 15 bp, Homo sapiens
gaatattaaggttca

SEQ ID NO: 1766574 - DNA, 15 bp, Homo sapiens
aatattaaggttcat

SEQ ID NO: 1766575 - DNA, 15 bp, Homo sapiens
atattaaggttcatt

SEQ ID NO: 1766576 - DNA, 15 bp, Homo sapiens
tattaaggttcattg

SEQ ID NO: 1766577 - DNA, 15 bp, Homo sapiens
attaaggttcattga

SEQ ID NO: 1766578 - DNA, 15 bp, Homo sapiens
ttaaggttcattgat

SEQ ID NO: 1766579 - DNA, 15 bp, Homo sapiens
taaggttcattgata

SEQ ID NO: 1766580 - DNA, 15 bp, Homo sapiens
aaggttcattgatag

SEQ ID NO: 1766581 - DNA, 15 bp, Homo sapiens
aggttcattgatagc

SEQ ID NO: 1766582 - DNA, 15 bp, Homo sapiens
ggttcattgatagct

SEQ ID NO: 1766583 - DNA, 15 bp, Homo sapiens
gttcattgatagctc

SEQ ID NO: 1766584 - DNA, 15 bp, Homo sapiens
ttcattgatagctcc

SEQ ID NO: 1766585 - DNA, 15 bp, Homo sapiens
tcattgatagctcct

SEQ ID NO: 1766586 - DNA, 15 bp, Homo sapiens
cattgatagctcctt

SEQ ID NO: 1766587 - DNA, 15 bp, Homo sapiens
attgatagctcctta

SEQ ID NO: 1766588 - DNA, 15 bp, Homo sapiens
ttgatagctccttaa

SEQ ID NO: 1766589 - DNA, 15 bp, Homo sapiens
tgatagctccttaag

SEQ ID NO: 1766590 - DNA, 15 bp, Homo sapiens
gatagctccttaagt

SEQ ID NO: 1766591 - DNA, 15 bp, Homo sapiens
atagctccttaagta

SEQ ID NO: 1766592 - DNA, 15 bp, Homo sapiens
tagctccttaagtag

SEQ ID NO: 1766593 - DNA, 15 bp, Homo sapiens
agctccttaagtagt

SEQ ID NO: 1766594 - DNA, 15 bp, Homo sapiens
gctccttaagtagtg

SEQ ID NO: 1766595 - DNA, 15 bp, Homo sapiens
ctccttaagtagtgt

SEQ ID NO: 1766596 - DNA, 15 bp, Homo sapiens
tccttaagtagtgtc

SEQ ID NO: 1766597 - DNA, 15 bp, Homo sapiens
ccttaagtagtgtct

SEQ ID NO: 1766598 - DNA, 15 bp, Homo sapiens
cttaagtagtgtctt

SEQ ID NO: 1766599 - DNA, 15 bp, Homo sapiens
ttaagtagtgtcttc

SEQ ID NO: 1766600 - DNA, 15 bp, Homo sapiens
taagtagtgtcttca

SEQ ID NO: 1766601 - DNA, 15 bp, Homo sapiens
aagtagtgtcttcag

SEQ ID NO: 1766602 - DNA, 15 bp, Homo sapiens
agtagtgtcttcagt

SEQ ID NO: 1766603 - DNA, 15 bp, Homo sapiens
gtagtgtcttcagtt

SEQ ID NO: 1766604 - DNA, 15 bp, Homo sapiens
tagtgtcttcagttt

SEQ ID NO: 1766605 - DNA, 15 bp, Homo sapiens
agtgtcttcagttta

SEQ ID NO: 1766606 - DNA, 15 bp, Homo sapiens
gtgtcttcagtttaa

SEQ ID NO: 1766607 - DNA, 15 bp, Homo sapiens
tgtcttcagtttaat

SEQ ID NO: 1766608 - DNA, 15 bp, Homo sapiens
gtcttcagtttaatt

SEQ ID NO: 1766609 - DNA, 15 bp, Homo sapiens
tcttcagtttaattt

SEQ ID NO: 1766610 - DNA, 15 bp, Homo sapiens
cttcagtttaatttt

SEQ ID NO: 1766611 - DNA, 15 bp, Homo sapiens
ttcagtttaattttc

SEQ ID NO: 1766612 - DNA, 15 bp, Homo sapiens
tcagtttaattttct

SEQ ID NO: 1766613 - DNA, 15 bp, Homo sapiens
cagtttaattttctg

SEQ ID NO: 1766614 - DNA, 15 bp, Homo sapiens
agtttaattttctgt

SEQ ID NO: 1766615 - DNA, 15 bp, Homo sapiens
gtttaattttctgtg

SEQ ID NO: 1766616 - DNA, 15 bp, Homo sapiens
tttaattttctgtga

SEQ ID NO: 1766617 - DNA, 15 bp, Homo sapiens
ttaattttctgtgaa

SEQ ID NO: 1766618 - DNA, 15 bp, Homo sapiens
taattttctgtgaat

SEQ ID NO: 1766619 - DNA, 15 bp, Homo sapiens
aattttctgtgaata

SEQ ID NO: 1766620 - DNA, 15 bp, Homo sapiens
attttctgtgaatat

SEQ ID NO: 1766621 - DNA, 15 bp, Homo sapiens
ttttctgtgaatata

SEQ ID NO: 1766622 - DNA, 15 bp, Homo sapiens
tttctgtgaatataa

SEQ ID NO: 1766623 - DNA, 15 bp, Homo sapiens
ttctgtgaatataat

SEQ ID NO: 1766624 - DNA, 15 bp, Homo sapiens
tctgtgaatataata

SEQ ID NO: 1766625 - DNA, 15 bp, Homo sapiens
ctgtgaatataatat

SEQ ID NO: 1766626 - DNA, 15 bp, Homo sapiens
tgtgaatataatata

SEQ ID NO: 1766627 - DNA, 15 bp, Homo sapiens
gtgaatataatatat

SEQ ID NO: 1766628 - DNA, 15 bp, Homo sapiens
tgaatataatatata

SEQ ID NO: 1766629 - DNA, 15 bp, Homo sapiens
gaatataatatatat

SEQ ID NO: 1766630 - DNA, 15 bp, Homo sapiens
aatataatatatata

SEQ ID NO: 1766631 - DNA, 15 bp, Homo sapiens
atataatatatataa

SEQ ID NO: 1766632 - DNA, 15 bp, Homo sapiens
tataatatatataat

SEQ ID NO: 1766633 - DNA, 15 bp, Homo sapiens
ataatatatataata

SEQ ID NO: 1766634 - DNA, 15 bp, Homo sapiens
taatatatataatac

SEQ ID NO: 1766635 - DNA, 15 bp, Homo sapiens
aatatatataataca

SEQ ID NO: 1766636 - DNA, 15 bp, Homo sapiens
atatatataatacat

SEQ ID NO: 1766637 - DNA, 15 bp, Homo sapiens
tatatataatacata

SEQ ID NO: 1766638 - DNA, 15 bp, Homo sapiens
atatataatacatat

SEQ ID NO: 1766639 - DNA, 15 bp, Homo sapiens
tatataatacatata

SEQ ID NO: 1766640 - DNA, 15 bp, Homo sapiens
atataatacatatat

SEQ ID NO: 1766641 - DNA, 15 bp, Homo sapiens
tataatacatatatt

SEQ ID NO: 1766642 - DNA, 15 bp, Homo sapiens
ataatacatatattt

SEQ ID NO: 1766643 - DNA, 15 bp, Homo sapiens
taatacatatatttt

SEQ ID NO: 1766644 - DNA, 15 bp, Homo sapiens
atacatatattttta

SEQ ID NO: 1766645 - DNA, 15 bp, Homo sapiens
tacatatatttttat

SEQ ID NO: 1766646 - DNA, 15 bp, Homo sapiens
acatatatttttatg

SEQ ID NO: 1766647 - DNA, 15 bp, Homo sapiens
catatatttttatgc

SEQ ID NO: 1766648 - DNA, 15 bp, Homo sapiens
atatatttttatgct

SEQ ID NO: 1766649 - DNA, 15 bp, Homo sapiens
tatatttttatgctt

SEQ ID NO: 1766650 - DNA, 15 bp, Homo sapiens
atatttttatgcttt

SEQ ID NO: 1766651 - DNA, 15 bp, Homo sapiens
tatttttatgctttt

SEQ ID NO: 1766652 - DNA, 15 bp, Homo sapiens
atttttatgcttttt

SEQ ID NO: 1766653 - DNA, 15 bp, Homo sapiens
tttttatgcttttta

SEQ ID NO: 1766654 - DNA, 15 bp, Homo sapiens
ttttatgctttttaa

SEQ ID NO: 1766655 - DNA, 15 bp, Homo sapiens
tttatgctttttaaa

SEQ ID NO: 1766656 - DNA, 15 bp, Homo sapiens
tatgctttttaaaat

SEQ ID NO: 1766657 - DNA, 15 bp, Homo sapiens
atgctttttaaaata

SEQ ID NO: 1766658 - DNA, 15 bp, Homo sapiens
tgctttttaaaataa

SEQ ID NO: 1766659 - DNA, 15 bp, Homo sapiens
gctttttaaaataaa

SEQ ID NO: 1766660 - DNA, 15 bp, Homo sapiens
ctttttaaaataaac

SEQ ID NO: 1766661 - DNA, 15 bp, Homo sapiens
tttttaaaataaact

SEQ ID NO: 1766662 - DNA, 15 bp, Homo sapiens
ttttaaaataaacta

SEQ ID NO: 1766663 - DNA, 15 bp, Homo sapiens
tttaaaataaactag

SEQ ID NO: 1766664 - DNA, 15 bp, Homo sapiens
ttaaaataaactagg

SEQ ID NO: 1766665 - DNA, 15 bp, Homo sapiens
taaaataaactaggt

SEQ ID NO: 1766666 - DNA, 15 bp, Homo sapiens
aaaataaactaggta

SEQ ID NO: 1766667 - DNA, 15 bp, Homo sapiens
aaataaactaggtac

SEQ ID NO: 1766668 - DNA, 15 bp, Homo sapiens
aataaactaggtact

SEQ ID NO: 1766669 - DNA, 15 bp, Homo sapiens
ataaactaggtactt

SEQ ID NO: 1766670 - DNA, 15 bp, Homo sapiens
taaactaggtacttg

SEQ ID NO: 1766671 - DNA, 15 bp, Homo sapiens
aaactaggtacttga

SEQ ID NO: 1766672 - DNA, 15 bp, Homo sapiens
aactaggtacttgat

SEQ ID NO: 1766673 - DNA, 15 bp, Homo sapiens
actaggtacttgata

SEQ ID NO: 1766674 - DNA, 15 bp, Homo sapiens
ctaggtacttgatat

SEQ ID NO: 1766675 - DNA, 15 bp, Homo sapiens
taggtacttgatatt

SEQ ID NO: 1766676 - DNA, 15 bp, Homo sapiens
aggtacttgatattt

SEQ ID NO: 1766677 - DNA, 15 bp, Homo sapiens
ggtacttgatatttt

SEQ ID NO: 1766678 - DNA, 15 bp, Homo sapiens
gtacttgatattttc

SEQ ID NO: 1766679 - DNA, 15 bp, Homo sapiens
tacttgatattttct

SEQ ID NO: 1766680 - DNA, 15 bp, Homo sapiens
acttgatattttctc

SEQ ID NO: 1766681 - DNA, 15 bp, Homo sapiens
cttgatattttctca

SEQ ID NO: 1766682 - DNA, 15 bp, Homo sapiens
ttgatattttctcag

SEQ ID NO: 1766683 - DNA, 15 bp, Homo sapiens
tgatattttctcagt

SEQ ID NO: 1766684 - DNA, 15 bp, Homo sapiens
gatattttctcagta

SEQ ID NO: 1766685 - DNA, 15 bp, Homo sapiens
atattttctcagtaa

SEQ ID NO: 1766686 - DNA, 15 bp, Homo sapiens
tattttctcagtaaa

SEQ ID NO: 1766687 - DNA, 15 bp, Homo sapiens
attttctcagtaaag

SEQ ID NO: 1766688 - DNA, 15 bp, Homo sapiens
ttttctcagtaaaga

SEQ ID NO: 1766689 - DNA, 15 bp, Homo sapiens
tttctcagtaaagat

SEQ ID NO: 1766690 - DNA, 15 bp, Homo sapiens
ttctcagtaaagatg

SEQ ID NO: 1766691 - DNA, 15 bp, Homo sapiens
tctcagtaaagatga

SEQ ID NO: 1766692 - DNA, 15 bp, Homo sapiens
ctcagtaaagatgat

SEQ ID NO: 1766693 - DNA, 15 bp, Homo sapiens
tcagtaaagatgatt

SEQ ID NO: 1766694 - DNA, 15 bp, Homo sapiens
cagtaaagatgattt

SEQ ID NO: 1766695 - DNA, 15 bp, Homo sapiens
agtaaagatgatttc

SEQ ID NO: 1766696 - DNA, 15 bp, Homo sapiens
gtaaagatgatttct

SEQ ID NO: 1766697 - DNA, 15 bp, Homo sapiens
taaagatgatttcta

SEQ ID NO: 1766698 - DNA, 15 bp, Homo sapiens
aaagatgatttctaa

SEQ ID NO: 1766699 - DNA, 15 bp, Homo sapiens
aagatgatttctaag

SEQ ID NO: 1766700 - DNA, 15 bp, Homo sapiens
agatgatttctaagt

SEQ ID NO: 1766701 - DNA, 15 bp, Homo sapiens
gatgatttctaagtt

SEQ ID NO: 1766702 - DNA, 15 bp, Homo sapiens
atgatttctaagttc

SEQ ID NO: 1766703 - DNA, 15 bp, Homo sapiens
tgatttctaagttca

SEQ ID NO: 1766704 - DNA, 15 bp, Homo sapiens
gatttctaagttcag

SEQ ID NO: 1766705 - DNA, 15 bp, Homo sapiens
atttctaagttcaga

SEQ ID NO: 1766706 - DNA, 15 bp, Homo sapiens
tttctaagttcagaa

SEQ ID NO: 1766707 - DNA, 15 bp, Homo sapiens
ttctaagttcagaaa

SEQ ID NO: 1766708 - DNA, 15 bp, Homo sapiens
tctaagttcagaaat

SEQ ID NO: 1766709 - DNA, 15 bp, Homo sapiens
ctaagttcagaaatt

SEQ ID NO: 1766710 - DNA, 15 bp, Homo sapiens
taagttcagaaatta

SEQ ID NO: 1766711 - DNA, 15 bp, Homo sapiens
aagttcagaaattat

SEQ ID NO: 1766712 - DNA, 15 bp, Homo sapiens
agttcagaaattatt

SEQ ID NO: 1766713 - DNA, 15 bp, Homo sapiens
gttcagaaattatta

SEQ ID NO: 1766714 - DNA, 15 bp, Homo sapiens
ttcagaaattattag

SEQ ID NO: 1766715 - DNA, 15 bp, Homo sapiens
tcagaaattattagg

SEQ ID NO: 1766716 - DNA, 15 bp, Homo sapiens
cagaaattattagga

SEQ ID NO: 1766717 - DNA, 15 bp, Homo sapiens
agaaattattaggat

SEQ ID NO: 1766718 - DNA, 15 bp, Homo sapiens
gaaattattaggatg

SEQ ID NO: 1766719 - DNA, 15 bp, Homo sapiens
aaattattaggatgc

SEQ ID NO: 1766720 - DNA, 15 bp, Homo sapiens
aattattaggatgct

SEQ ID NO: 1766721 - DNA, 15 bp, Homo sapiens
attattaggatgctg

SEQ ID NO: 1766722 - DNA, 15 bp, Homo sapiens
ttattaggatgctgg

SEQ ID NO: 1766723 - DNA, 15 bp, Homo sapiens
tattaggatgctgga

SEQ ID NO: 1766724 - DNA, 15 bp, Homo sapiens
attaggatgctggaa

SEQ ID NO: 1766725 - DNA, 15 bp, Homo sapiens
ttaggatgctggaaa

SEQ ID NO: 1766726 - DNA, 15 bp, Homo sapiens
taggatgctggaaag

SEQ ID NO: 1766727 - DNA, 15 bp, Homo sapiens
aggatgctggaaagc

SEQ ID NO: 1766728 - DNA, 15 bp, Homo sapiens
ggatgctggaaagcc

SEQ ID NO: 1766729 - DNA, 15 bp, Homo sapiens
gatgctggaaagcca

SEQ ID NO: 1766730 - DNA, 15 bp, Homo sapiens
atgctggaaagccat

SEQ ID NO: 1766731 - DNA, 15 bp, Homo sapiens
tgctggaaagccatt

SEQ ID NO: 1766732 - DNA, 15 bp, Homo sapiens
gctggaaagccattt

SEQ ID NO: 1766733 - DNA, 15 bp, Homo sapiens
ctggaaagccatttt

SEQ ID NO: 1766734 - DNA, 15 bp, Homo sapiens
tggaaagccattttt

SEQ ID NO: 1766735 - DNA, 15 bp, Homo sapiens
ggaaagccatttttc

SEQ ID NO: 1766736 - DNA, 15 bp, Homo sapiens
gaaagccatttttcc

SEQ ID NO: 1766737 - DNA, 15 bp, Homo sapiens
aaagccatttttcca

SEQ ID NO: 1766738 - DNA, 15 bp, Homo sapiens
aagccatttttccac

SEQ ID NO: 1766739 - DNA, 15 bp, Homo sapiens
agccatttttccaca

SEQ ID NO: 1766740 - DNA, 15 bp, Homo sapiens
gccatttttccacac

SEQ ID NO: 1766741 - DNA, 15 bp, Homo sapiens
ccatttttccacacc

SEQ ID NO: 1766742 - DNA, 15 bp, Homo sapiens
catttttccacacct

SEQ ID NO: 1766743 - DNA, 15 bp, Homo sapiens
atttttccacacctg

SEQ ID NO: 1766744 - DNA, 15 bp, Homo sapiens
tttttccacacctga

SEQ ID NO: 1766745 - DNA, 15 bp, Homo sapiens
ttttccacacctgaa

SEQ ID NO: 1766746 - DNA, 15 bp, Homo sapiens
tttccacacctgaaa

SEQ ID NO: 1766747 - DNA, 15 bp, Homo sapiens
ttccacacctgaaaa

SEQ ID NO: 1766748 - DNA, 15 bp, Homo sapiens
tccacacctgaaaaa

SEQ ID NO: 1766749 - DNA, 15 bp, Homo sapiens
ccacacctgaaaaat

SEQ ID NO: 1766750 - DNA, 15 bp, Homo sapiens
cacctgaaaaatttt

SEQ ID NO: 1766751 - DNA, 15 bp, Homo sapiens
acctgaaaaattttc

SEQ ID NO: 1766752 - DNA, 15 bp, Homo sapiens
cctgaaaaattttct

SEQ ID NO: 1766753 - DNA, 15 bp, Homo sapiens
ctgaaaaattttctc

SEQ ID NO: 1766754 - DNA, 15 bp, Homo sapiens
tgaaaaattttctca

SEQ ID NO: 1766755 - DNA, 15 bp, Homo sapiens
gaaaaattttctcag

SEQ ID NO: 1766756 - DNA, 15 bp, Homo sapiens
aaaaattttctcagc

SEQ ID NO: 1766757 - DNA, 15 bp, Homo sapiens
aaaattttctcagct

SEQ ID NO: 1766758 - DNA, 15 bp, Homo sapiens
aaattttctcagctt

SEQ ID NO: 1766759 - DNA, 15 bp, Homo sapiens
aattttctcagctta

SEQ ID NO: 1766760 - DNA, 15 bp, Homo sapiens
attttctcagcttac

SEQ ID NO: 1766761 - DNA, 15 bp, Homo sapiens
ttttctcagcttact

SEQ ID NO: 1766762 - DNA, 15 bp, Homo sapiens
tttctcagcttactg

SEQ ID NO: 1766763 - DNA, 15 bp, Homo sapiens
ttctcagcttactgt

SEQ ID NO: 1766764 - DNA, 15 bp, Homo sapiens
tctcagcttactgtg

SEQ ID NO: 1766765 - DNA, 15 bp, Homo sapiens
ctcagcttactgtgt

SEQ ID NO: 1766766 - DNA, 15 bp, Homo sapiens
tcagcttactgtgtt

SEQ ID NO: 1766767 - DNA, 15 bp, Homo sapiens
cagcttactgtgttc

SEQ ID NO: 1766768 - DNA, 15 bp, Homo sapiens
agcttactgtgttcc

SEQ ID NO: 1766769 - DNA, 15 bp, Homo sapiens
gcttactgtgttcct

SEQ ID NO: 1766770 - DNA, 15 bp, Homo sapiens
cttactgtgttcctt

SEQ ID NO: 1766771 - DNA, 15 bp, Homo sapiens
ttactgtgttccttt

SEQ ID NO: 1766772 - DNA, 15 bp, Homo sapiens
tactgtgttcctttg

SEQ ID NO: 1766773 - DNA, 15 bp, Homo sapiens
actgtgttcctttga

SEQ ID NO: 1766774 - DNA, 15 bp, Homo sapiens
ctgtgttcctttgaa

SEQ ID NO: 1766775 - DNA, 15 bp, Homo sapiens
tgtgttcctttgaag

SEQ ID NO: 1766776 - DNA, 15 bp, Homo sapiens
gtgttcctttgaagg

SEQ ID NO: 1766777 - DNA, 15 bp, Homo sapiens
tgttcctttgaaggg

SEQ ID NO: 1766778 - DNA, 15 bp, Homo sapiens
gttcctttgaaggga

SEQ ID NO: 1766779 - DNA, 15 bp, Homo sapiens
ttcctttgaagggag

SEQ ID NO: 1766780 - DNA, 15 bp, Homo sapiens
tcctttgaagggagt

SEQ ID NO: 1766781 - DNA, 15 bp, Homo sapiens
cctttgaagggagtt

SEQ ID NO: 1766782 - DNA, 15 bp, Homo sapiens
ctttgaagggagtta

SEQ ID NO: 1766783 - DNA, 15 bp, Homo sapiens
tttgaagggagttaa

SEQ ID NO: 1766784 - DNA, 15 bp, Homo sapiens
ttgaagggagttaat

SEQ ID NO: 1766785 - DNA, 15 bp, Homo sapiens
tgaagggagttaatg

SEQ ID NO: 1766786 - DNA, 15 bp, Homo sapiens
gaagggagttaatgt

SEQ ID NO: 1766787 - DNA, 15 bp, Homo sapiens
aagggagttaatgtg

SEQ ID NO: 1766788 - DNA, 15 bp, Homo sapiens
agggagttaatgtgg

SEQ ID NO: 1766789 - DNA, 15 bp, Homo sapiens
gggagttaatgtggg

SEQ ID NO: 1766790 - DNA, 15 bp, Homo sapiens
ggagttaatgtggga

SEQ ID NO: 1766791 - DNA, 15 bp, Homo sapiens
gagttaatgtgggaa

SEQ ID NO: 1766792 - DNA, 15 bp, Homo sapiens
agttaatgtgggaag

SEQ ID NO: 1766793 - DNA, 15 bp, Homo sapiens
gttaatgtgggaagg

SEQ ID NO: 1766794 - DNA, 15 bp, Homo sapiens
ttaatgtgggaagga

SEQ ID NO: 1766795 - DNA, 15 bp, Homo sapiens
taatgtgggaaggaa

SEQ ID NO: 1766796 - DNA, 15 bp, Homo sapiens
aatgtgggaaggaag

SEQ ID NO: 1766797 - DNA, 15 bp, Homo sapiens
atgtgggaaggaaga

SEQ ID NO: 1766798 - DNA, 15 bp, Homo sapiens
tgtgggaaggaagat

SEQ ID NO: 1766799 - DNA, 15 bp, Homo sapiens
gtgggaaggaagatt

SEQ ID NO: 1766800 - DNA, 15 bp, Homo sapiens
tgggaaggaagatta

SEQ ID NO: 1766801 - DNA, 15 bp, Homo sapiens
gggaaggaagattag

SEQ ID NO: 1766802 - DNA, 15 bp, Homo sapiens
ggaaggaagattagt

SEQ ID NO: 1766803 - DNA, 15 bp, Homo sapiens
gaaggaagattagtc

SEQ ID NO: 1766804 - DNA, 15 bp, Homo sapiens
aaggaagattagtca

SEQ ID NO: 1766805 - DNA, 15 bp, Homo sapiens
aggaagattagtcaa

SEQ ID NO: 1766806 - DNA, 15 bp, Homo sapiens
ggaagattagtcaaa

SEQ ID NO: 1766807 - DNA, 15 bp, Homo sapiens
gaagattagtcaaat

SEQ ID NO: 1766808 - DNA, 15 bp, Homo sapiens
aagattagtcaaatc

SEQ ID NO: 1766809 - DNA, 15 bp, Homo sapiens
agattagtcaaatca

SEQ ID NO: 1766810 - DNA, 15 bp, Homo sapiens
gattagtcaaatcat

SEQ ID NO: 1766811 - DNA, 15 bp, Homo sapiens
attagtcaaatcatc

SEQ ID NO: 1766812 - DNA, 15 bp, Homo sapiens
ttagtcaaatcatct

SEQ ID NO: 1766813 - DNA, 15 bp, Homo sapiens
tagtcaaatcatcta

SEQ ID NO: 1766814 - DNA, 15 bp, Homo sapiens
agtcaaatcatctac

SEQ ID NO: 1766815 - DNA, 15 bp, Homo sapiens
gtcaaatcatctacc

SEQ ID NO: 1766816 - DNA, 15 bp, Homo sapiens
tcaaatcatctaccg

SEQ ID NO: 1766817 - DNA, 15 bp, Homo sapiens
caaatcatctaccgt

SEQ ID NO: 1766818 - DNA, 15 bp, Homo sapiens
aaatcatctaccgtt

SEQ ID NO: 1766819 - DNA, 15 bp, Homo sapiens
aatcatctaccgttt

SEQ ID NO: 1766820 - DNA, 15 bp, Homo sapiens
atcatctaccgtttt

SEQ ID NO: 1766821 - DNA, 15 bp, Homo sapiens
tcatctaccgtttta

SEQ ID NO: 1766822 - DNA, 15 bp, Homo sapiens
catctaccgttttat

SEQ ID NO: 1766823 - DNA, 15 bp, Homo sapiens
atctaccgttttatg

SEQ ID NO: 1766824 - DNA, 15 bp, Homo sapiens
tctaccgttttatga

SEQ ID NO: 1766825 - DNA, 15 bp, Homo sapiens
ctaccgttttatgaa

SEQ ID NO: 1766826 - DNA, 15 bp, Homo sapiens
taccgttttatgaaa

SEQ ID NO: 1766827 - DNA, 15 bp, Homo sapiens
accgttttatgaaaa

SEQ ID NO: 1766828 - DNA, 15 bp, Homo sapiens
ccgttttatgaaaat

SEQ ID NO: 1766829 - DNA, 15 bp, Homo sapiens
cgttttatgaaaatg

SEQ ID NO: 1766830 - DNA, 15 bp, Homo sapiens
gttttatgaaaatgt

SEQ ID NO: 1766831 - DNA, 15 bp, Homo sapiens
ttttatgaaaatgtt

SEQ ID NO: 1766832 - DNA, 15 bp, Homo sapiens
tttatgaaaatgtta

SEQ ID NO: 1766833 - DNA, 15 bp, Homo sapiens
ttatgaaaatgttaa

SEQ ID NO: 1766834 - DNA, 15 bp, Homo sapiens
tatgaaaatgttaat

SEQ ID NO: 1766835 - DNA, 15 bp, Homo sapiens
atgaaaatgttaata

SEQ ID NO: 1766836 - DNA, 15 bp, Homo sapiens
tgaaaatgttaataa

SEQ ID NO: 1766837 - DNA, 15 bp, Homo sapiens
gaaaatgttaataac

SEQ ID NO: 1766838 - DNA, 15 bp, Homo sapiens
aaaatgttaataaca

SEQ ID NO: 1766839 - DNA, 15 bp, Homo sapiens
aaatgttaataacag

SEQ ID NO: 1766840 - DNA, 15 bp, Homo sapiens
aatgttaataacagt

SEQ ID NO: 1766841 - DNA, 15 bp, Homo sapiens
atgttaataacagtg

SEQ ID NO: 1766842 - DNA, 15 bp, Homo sapiens
tgttaataacagtgg

SEQ ID NO: 1766843 - DNA, 15 bp, Homo sapiens
gttaataacagtggg

SEQ ID NO: 1766844 - DNA, 15 bp, Homo sapiens
ttaataacagtgggc

SEQ ID NO: 1766845 - DNA, 15 bp, Homo sapiens
taataacagtgggca

SEQ ID NO: 1766846 - DNA, 15 bp, Homo sapiens
aataacagtgggcac

SEQ ID NO: 1766847 - DNA, 15 bp, Homo sapiens
ataacagtgggcaca

SEQ ID NO: 1766848 - DNA, 15 bp, Homo sapiens
taacagtgggcacag

SEQ ID NO: 1766849 - DNA, 15 bp, Homo sapiens
aacagtgggcacagt

SEQ ID NO: 1766850 - DNA, 15 bp, Homo sapiens
acagtgggcacagtt

SEQ ID NO: 1766851 - DNA, 15 bp, Homo sapiens
cagtgggcacagttt

SEQ ID NO: 1766852 - DNA, 15 bp, Homo sapiens
agtgggcacagtttt

SEQ ID NO: 1766853 - DNA, 15 bp, Homo sapiens
gtgggcacagttttt

SEQ ID NO: 1766854 - DNA, 15 bp, Homo sapiens
tgggcacagttttta

SEQ ID NO: 1766855 - DNA, 15 bp, Homo sapiens
gggcacagtttttat

SEQ ID NO: 1766856 - DNA, 15 bp, Homo sapiens
ggcacagtttttata

SEQ ID NO: 1766857 - DNA, 15 bp, Homo sapiens
gcacagtttttatag

SEQ ID NO: 1766858 - DNA, 15 bp, Homo sapiens
cacagtttttatagg

SEQ ID NO: 1766859 - DNA, 15 bp, Homo sapiens
acagtttttataggg

SEQ ID NO: 1766860 - DNA, 15 bp, Homo sapiens
cagtttttatagggg

SEQ ID NO: 1766861 - DNA, 15 bp, Homo sapiens
agtttttataggggg

SEQ ID NO: 1766862 - DNA, 15 bp, Homo sapiens
gtttttatagggggg

SEQ ID NO: 1766863 - DNA, 15 bp, Homo sapiens
tttttataggggggc

SEQ ID NO: 1766864 - DNA, 15 bp, Homo sapiens
ttttataggggggct

SEQ ID NO: 1766865 - DNA, 15 bp, Homo sapiens
tttataggggggctt

SEQ ID NO: 1766866 - DNA, 15 bp, Homo sapiens
ttataggggggctta

SEQ ID NO: 1766867 - DNA, 15 bp, Homo sapiens
tataggggggcttag

SEQ ID NO: 1766868 - DNA, 15 bp, Homo sapiens
ataggggggcttagt

SEQ ID NO: 1766869 - DNA, 15 bp, Homo sapiens
taggggggcttagtg

SEQ ID NO: 1766870 - DNA, 15 bp, Homo sapiens
aggggggcttagtgc

SEQ ID NO: 1766871 - DNA, 15 bp, Homo sapiens
ggggggcttagtgct

SEQ ID NO: 1766872 - DNA, 15 bp, Homo sapiens
gggggcttagtgcta

SEQ ID NO: 1766873 - DNA, 15 bp, Homo sapiens
ggggcttagtgctat

SEQ ID NO: 1766874 - DNA, 15 bp, Homo sapiens
gggcttagtgctatc

SEQ ID NO: 1766875 - DNA, 15 bp, Homo sapiens
ggcttagtgctatca

SEQ ID NO: 1766876 - DNA, 15 bp, Homo sapiens
gcttagtgctatcat

SEQ ID NO: 1766877 - DNA, 15 bp, Homo sapiens
cttagtgctatcatt

SEQ ID NO: 1766878 - DNA, 15 bp, Homo sapiens
ttagtgctatcattt

SEQ ID NO: 1766879 - DNA, 15 bp, Homo sapiens
tagtgctatcatttt

SEQ ID NO: 1766880 - DNA, 15 bp, Homo sapiens
agtgctatcattttc

SEQ ID NO: 1766881 - DNA, 15 bp, Homo sapiens
gtgctatcattttca

SEQ ID NO: 1766882 - DNA, 15 bp, Homo sapiens
tgctatcattttcag

SEQ ID NO: 1766883 - DNA, 15 bp, Homo sapiens
gctatcattttcagg

SEQ ID NO: 1766884 - DNA, 15 bp, Homo sapiens
ctatcattttcaggt

SEQ ID NO: 1766885 - DNA, 15 bp, Homo sapiens
tatcattttcaggta

SEQ ID NO: 1766886 - DNA, 15 bp, Homo sapiens
atcattttcaggtaa

SEQ ID NO: 1766887 - DNA, 15 bp, Homo sapiens
tcattttcaggtaat

SEQ ID NO: 1766888 - DNA, 15 bp, Homo sapiens
cattttcaggtaatc

SEQ ID NO: 1766889 - DNA, 15 bp, Homo sapiens
attttcaggtaatca

SEQ ID NO: 1766890 - DNA, 15 bp, Homo sapiens
ttttcaggtaatcaa

SEQ ID NO: 1766891 - DNA, 15 bp, Homo sapiens
tttcaggtaatcaaa

SEQ ID NO: 1766892 - DNA, 15 bp, Homo sapiens
ttcaggtaatcaaaa

SEQ ID NO: 1766893 - DNA, 15 bp, Homo sapiens
tcaggtaatcaaaag

SEQ ID NO: 1766894 - DNA, 15 bp, Homo sapiens
caggtaatcaaaagt

SEQ ID NO: 1766895 - DNA, 15 bp, Homo sapiens
aggtaatcaaaagta

SEQ ID NO: 1766896 - DNA, 15 bp, Homo sapiens
ggtaatcaaaagtaa

SEQ ID NO: 1766897 - DNA, 15 bp, Homo sapiens
gtaatcaaaagtaaa

SEQ ID NO: 1766898 - DNA, 15 bp, Homo sapiens
taatcaaaagtaaaa

SEQ ID NO: 1766899 - DNA, 15 bp, Homo sapiens
aatcaaaagtaaaat

SEQ ID NO: 1766900 - DNA, 15 bp, Homo sapiens
atcaaaagtaaaatc

SEQ ID NO: 1766901 - DNA, 15 bp, Homo sapiens
tcaaaagtaaaatca

SEQ ID NO: 1766902 - DNA, 15 bp, Homo sapiens
caaaagtaaaatcat

SEQ ID NO: 1766903 - DNA, 15 bp, Homo sapiens
aaaagtaaaatcatc

SEQ ID NO: 1766904 - DNA, 15 bp, Homo sapiens
aaagtaaaatcatca

SEQ ID NO: 1766905 - DNA, 15 bp, Homo sapiens
aagtaaaatcatcag

SEQ ID NO: 1766906 - DNA, 15 bp, Homo sapiens
agtaaaatcatcaga

SEQ ID NO: 1766907 - DNA, 15 bp, Homo sapiens
gtaaaatcatcagag

SEQ ID NO: 1766908 - DNA, 15 bp, Homo sapiens
taaaatcatcagagt

SEQ ID NO: 1766909 - DNA, 15 bp, Homo sapiens
aaaatcatcagagtt

SEQ ID NO: 1766910 - DNA, 15 bp, Homo sapiens
aaatcatcagagttc

SEQ ID NO: 1766911 - DNA, 15 bp, Homo sapiens
aatcatcagagttct

SEQ ID NO: 1766912 - DNA, 15 bp, Homo sapiens
atcatcagagttcta

SEQ ID NO: 1766913 - DNA, 15 bp, Homo sapiens
tcatcagagttctaa

SEQ ID NO: 1766914 - DNA, 15 bp, Homo sapiens
catcagagttctaat

SEQ ID NO: 1766915 - DNA, 15 bp, Homo sapiens
atcagagttctaata

SEQ ID NO: 1766916 - DNA, 15 bp, Homo sapiens
tcagagttctaatat

SEQ ID NO: 1766917 - DNA, 15 bp, Homo sapiens
cagagttctaatatt

SEQ ID NO: 1766918 - DNA, 15 bp, Homo sapiens
agagttctaatatta

SEQ ID NO: 1766919 - DNA, 15 bp, Homo sapiens
gagttctaatattaa

SEQ ID NO: 1766920 - DNA, 15 bp, Homo sapiens
agttctaatattaat

SEQ ID NO: 1766921 - DNA, 15 bp, Homo sapiens
gttctaatattaata

SEQ ID NO: 1766922 - DNA, 15 bp, Homo sapiens
ttctaatattaatat

SEQ ID NO: 1766923 - DNA, 15 bp, Homo sapiens
tctaatattaatata

SEQ ID NO: 1766924 - DNA, 15 bp, Homo sapiens
ctaatattaatatag

SEQ ID NO: 1766925 - DNA, 15 bp, Homo sapiens
taatattaatatagg

SEQ ID NO: 1766926 - DNA, 15 bp, Homo sapiens
aatattaatataggt

SEQ ID NO: 1766927 - DNA, 15 bp, Homo sapiens
atattaatataggtt

SEQ ID NO: 1766928 - DNA, 15 bp, Homo sapiens
tattaatataggttt

SEQ ID NO: 1766929 - DNA, 15 bp, Homo sapiens
attaatataggtttt

SEQ ID NO: 1766930 - DNA, 15 bp, Homo sapiens
ttaatataggttttt

SEQ ID NO: 1766931 - DNA, 15 bp, Homo sapiens
taatataggtttttc

SEQ ID NO: 1766932 - DNA, 15 bp, Homo sapiens
aatataggtttttct

SEQ ID NO: 1766933 - DNA, 15 bp, Homo sapiens
atataggtttttctg

SEQ ID NO: 1766934 - DNA, 15 bp, Homo sapiens
tataggtttttctga

SEQ ID NO: 1766935 - DNA, 15 bp, Homo sapiens
ataggtttttctgaa

SEQ ID NO: 1766936 - DNA, 15 bp, Homo sapiens
taggtttttctgaat

SEQ ID NO: 1766937 - DNA, 15 bp, Homo sapiens
aggtttttctgaata

SEQ ID NO: 1766938 - DNA, 15 bp, Homo sapiens
ggtttttctgaataa

SEQ ID NO: 1766939 - DNA, 15 bp, Homo sapiens
gtttttctgaataaa

SEQ ID NO: 1766940 - DNA, 15 bp, Homo sapiens
tttttctgaataaag

SEQ ID NO: 1766941 - DNA, 15 bp, Homo sapiens
ttttctgaataaagg

SEQ ID NO: 1766942 - DNA, 15 bp, Homo sapiens
tttctgaataaaggg

SEQ ID NO: 1766943 - DNA, 15 bp, Homo sapiens
ttctgaataaagggg

SEQ ID NO: 1766944 - DNA, 15 bp, Homo sapiens
tctgaataaaggggg

SEQ ID NO: 1766945 - DNA, 15 bp, Homo sapiens
ctgaataaaggggga

SEQ ID NO: 1766946 - DNA, 15 bp, Homo sapiens
tgaataaagggggaa

SEQ ID NO: 1766947 - DNA, 15 bp, Homo sapiens
gaataaagggggaag

SEQ ID NO: 1766948 - DNA, 15 bp, Homo sapiens
aataaagggggaagg

SEQ ID NO: 1766949 - DNA, 15 bp, Homo sapiens
ataaagggggaaggg

SEQ ID NO: 1766950 - DNA, 15 bp, Homo sapiens
taaagggggaaggga

SEQ ID NO: 1766951 - DNA, 15 bp, Homo sapiens
aaagggggaagggaa

SEQ ID NO: 1766952 - DNA, 15 bp, Homo sapiens
aagggggaagggaag

SEQ ID NO: 1766953 - DNA, 15 bp, Homo sapiens
agggggaagggaaga

SEQ ID NO: 1766954 - DNA, 15 bp, Homo sapiens
gggggaagggaagag

SEQ ID NO: 1766955 - DNA, 15 bp, Homo sapiens
ggggaagggaagaga

SEQ ID NO: 1766956 - DNA, 15 bp, Homo sapiens
gggaagggaagagaa

SEQ ID NO: 1766957 - DNA, 15 bp, Homo sapiens
ggaagggaagagaaa

SEQ ID NO: 1766958 - DNA, 15 bp, Homo sapiens
gaagggaagagaaaa

SEQ ID NO: 1766959 - DNA, 15 bp, Homo sapiens
aagggaagagaaaac

SEQ ID NO: 1766960 - DNA, 15 bp, Homo sapiens
agggaagagaaaacc

SEQ ID NO: 1766961 - DNA, 15 bp, Homo sapiens
gggaagagaaaaccc

SEQ ID NO: 1766962 - DNA, 15 bp, Homo sapiens
ggaagagaaaaccct

SEQ ID NO: 1766963 - DNA, 15 bp, Homo sapiens
gaagagaaaaccctc

SEQ ID NO: 1766964 - DNA, 15 bp, Homo sapiens
aagagaaaaccctca

SEQ ID NO: 1766965 - DNA, 15 bp, Homo sapiens
agagaaaaccctcag

SEQ ID NO: 1766966 - DNA, 15 bp, Homo sapiens
gagaaaaccctcaga

SEQ ID NO: 1766967 - DNA, 15 bp, Homo sapiens
agaaaaccctcagaa

SEQ ID NO: 1766968 - DNA, 15 bp, Homo sapiens
gaaaaccctcagaat

SEQ ID NO: 1766969 - DNA, 15 bp, Homo sapiens
aaaaccctcagaata

SEQ ID NO: 1766970 - DNA, 15 bp, Homo sapiens
aaaccctcagaatat

SEQ ID NO: 1766971 - DNA, 15 bp, Homo sapiens
aaccctcagaatata

SEQ ID NO: 1766972 - DNA, 15 bp, Homo sapiens
accctcagaatatat

SEQ ID NO: 1766973 - DNA, 15 bp, Homo sapiens
ccctcagaatatatg

SEQ ID NO: 1766974 - DNA, 15 bp, Homo sapiens
cctcagaatatatga

SEQ ID NO: 1766975 - DNA, 15 bp, Homo sapiens
ctcagaatatatgac

SEQ ID NO: 1766976 - DNA, 15 bp, Homo sapiens
tcagaatatatgact

SEQ ID NO: 1766977 - DNA, 15 bp, Homo sapiens
cagaatatatgactt

SEQ ID NO: 1766978 - DNA, 15 bp, Homo sapiens
agaatatatgactta

SEQ ID NO: 1766979 - DNA, 15 bp, Homo sapiens
gaatatatgacttac

SEQ ID NO: 1766980 - DNA, 15 bp, Homo sapiens
aatatatgacttacc

SEQ ID NO: 1766981 - DNA, 15 bp, Homo sapiens
atatatgacttacca

SEQ ID NO: 1766982 - DNA, 15 bp, Homo sapiens
tatatgacttaccac

SEQ ID NO: 1766983 - DNA, 15 bp, Homo sapiens
atatgacttaccaca

SEQ ID NO: 1766984 - DNA, 15 bp, Homo sapiens
tatgacttaccacaa

SEQ ID NO: 1766985 - DNA, 15 bp, Homo sapiens
atgacttaccacaaa

SEQ ID NO: 1766986 - DNA, 15 bp, Homo sapiens
tgacttaccacaaag

SEQ ID NO: 1766987 - DNA, 15 bp, Homo sapiens
gacttaccacaaagt

SEQ ID NO: 1766988 - DNA, 15 bp, Homo sapiens
acttaccacaaagta

SEQ ID NO: 1766989 - DNA, 15 bp, Homo sapiens
cttaccacaaagtac

SEQ ID NO: 1766990 - DNA, 15 bp, Homo sapiens
ttaccacaaagtaca

SEQ ID NO: 1766991 - DNA, 15 bp, Homo sapiens
taccacaaagtacaa

SEQ ID NO: 1766992 - DNA, 15 bp, Homo sapiens
accacaaagtacaac

SEQ ID NO: 1766993 - DNA, 15 bp, Homo sapiens
ccacaaagtacaaca

SEQ ID NO: 1766994 - DNA, 15 bp, Homo sapiens
cacaaagtacaacac

SEQ ID NO: 1766995 - DNA, 15 bp, Homo sapiens
acaaagtacaacact

SEQ ID NO: 1766996 - DNA, 15 bp, Homo sapiens
caaagtacaacacta

SEQ ID NO: 1766997 - DNA, 15 bp, Homo sapiens
aaagtacaacactag

SEQ ID NO: 1766998 - DNA, 15 bp, Homo sapiens
aagtacaacactagc

SEQ ID NO: 1766999 - DNA, 15 bp, Homo sapiens
agtacaacactagca

SEQ ID NO: 1767000 - DNA, 15 bp, Homo sapiens
gtacaacactagcaa

SEQ ID NO: 1767001 - DNA, 15 bp, Homo sapiens
tacaacactagcaaa

SEQ ID NO: 1767002 - DNA, 15 bp, Homo sapiens
acaacactagcaaag

SEQ ID NO: 1767003 - DNA, 15 bp, Homo sapiens
caacactagcaaagg

SEQ ID NO: 1767004 - DNA, 15 bp, Homo sapiens
aacactagcaaagga

SEQ ID NO: 1767005 - DNA, 15 bp, Homo sapiens
acactagcaaaggaa

SEQ ID NO: 1767006 - DNA, 15 bp, Homo sapiens
cactagcaaaggaaa

SEQ ID NO: 1767007 - DNA, 15 bp, Homo sapiens
actagcaaaggaaaa

SEQ ID NO: 1767008 - DNA, 15 bp, Homo sapiens
ctagcaaaggaaaat

SEQ ID NO: 1767009 - DNA, 15 bp, Homo sapiens
tagcaaaggaaaata

SEQ ID NO: 1767010 - DNA, 15 bp, Homo sapiens
agcaaaggaaaataa

SEQ ID NO: 1767011 - DNA, 15 bp, Homo sapiens
gcaaaggaaaataaa

SEQ ID NO: 1767012 - DNA, 15 bp, Homo sapiens
caaaggaaaataaat

SEQ ID NO: 1767013 - DNA, 15 bp, Homo sapiens
aaaggaaaataaatt

SEQ ID NO: 1767014 - DNA, 15 bp, Homo sapiens
aaggaaaataaattt

SEQ ID NO: 1767015 - DNA, 15 bp, Homo sapiens
aggaaaataaatttt

SEQ ID NO: 1767016 - DNA, 15 bp, Homo sapiens
ggaaaataaattttg

SEQ ID NO: 1767017 - DNA, 15 bp, Homo sapiens
gaaaataaattttgt

SEQ ID NO: 1767018 - DNA, 15 bp, Homo sapiens
aaaataaattttgtt

SEQ ID NO: 1767019 - DNA, 15 bp, Homo sapiens
aaataaattttgttc

SEQ ID NO: 1767020 - DNA, 15 bp, Homo sapiens
aataaattttgttct

SEQ ID NO: 1767021 - DNA, 15 bp, Homo sapiens
ataaattttgttctg

SEQ ID NO: 1767022 - DNA, 15 bp, Homo sapiens
taaattttgttctgg

SEQ ID NO: 1767023 - DNA, 15 bp, Homo sapiens
aaattttgttctggt

SEQ ID NO: 1767024 - DNA, 15 bp, Homo sapiens
aattttgttctggta

SEQ ID NO: 1767025 - DNA, 15 bp, Homo sapiens
attttgttctggtac

SEQ ID NO: 1767026 - DNA, 15 bp, Homo sapiens
ttttgttctggtaca

SEQ ID NO: 1767027 - DNA, 15 bp, Homo sapiens
tttgttctggtacac

SEQ ID NO: 1767028 - DNA, 15 bp, Homo sapiens
ttgttctggtacact

SEQ ID NO: 1767029 - DNA, 15 bp, Homo sapiens
tgttctggtacactt

SEQ ID NO: 1767030 - DNA, 15 bp, Homo sapiens
gttctggtacacttt

SEQ ID NO: 1767031 - DNA, 15 bp, Homo sapiens
ttctggtacactttt

SEQ ID NO: 1767032 - DNA, 15 bp, Homo sapiens
tctggtacacttttt

SEQ ID NO: 1767033 - DNA, 15 bp, Homo sapiens
ctggtacactttttt

SEQ ID NO: 1767034 - DNA, 15 bp, Homo sapiens
tggtacacttttttt

SEQ ID NO: 1767035 - DNA, 15 bp, Homo sapiens
ggtacactttttttc

SEQ ID NO: 1767036 - DNA, 15 bp, Homo sapiens
gtacactttttttcc

SEQ ID NO: 1767037 - DNA, 15 bp, Homo sapiens
tacactttttttcca

SEQ ID NO: 1767038 - DNA, 15 bp, Homo sapiens
acactttttttccat

SEQ ID NO: 1767039 - DNA, 15 bp, Homo sapiens
cactttttttccata

SEQ ID NO: 1767040 - DNA, 15 bp, Homo sapiens
actttttttccatag

SEQ ID NO: 1767041 - DNA, 15 bp, Homo sapiens
ctttttttccatagt

SEQ ID NO: 1767042 - DNA, 15 bp, Homo sapiens
tttttttccatagtt

SEQ ID NO: 1767043 - DNA, 15 bp, Homo sapiens
ttttttccatagttc

SEQ ID NO: 1767044 - DNA, 15 bp, Homo sapiens
tttttccatagttct

SEQ ID NO: 1767045 - DNA, 15 bp, Homo sapiens
ttttccatagttcta

SEQ ID NO: 1767046 - DNA, 15 bp, Homo sapiens
tttccatagttctag

SEQ ID NO: 1767047 - DNA, 15 bp, Homo sapiens
ttccatagttctaga

SEQ ID NO: 1767048 - DNA, 15 bp, Homo sapiens
tccatagttctagat

SEQ ID NO: 1767049 - DNA, 15 bp, Homo sapiens
ccatagttctagatg

SEQ ID NO: 1767050 - DNA, 15 bp, Homo sapiens
catagttctagatga

SEQ ID NO: 1767051 - DNA, 15 bp, Homo sapiens
atagttctagatgag

SEQ ID NO: 1767052 - DNA, 15 bp, Homo sapiens
tagttctagatgaga

SEQ ID NO: 1767053 - DNA, 15 bp, Homo sapiens
agttctagatgagaa

SEQ ID NO: 1767054 - DNA, 15 bp, Homo sapiens
gttctagatgagaaa

SEQ ID NO: 1767055 - DNA, 15 bp, Homo sapiens
ttctagatgagaaaa

SEQ ID NO: 1767056 - DNA, 15 bp, Homo sapiens
tctagatgagaaaac

SEQ ID NO: 1767057 - DNA, 15 bp, Homo sapiens
ctagatgagaaaacc

SEQ ID NO: 1767058 - DNA, 15 bp, Homo sapiens
tagatgagaaaacca

SEQ ID NO: 1767059 - DNA, 15 bp, Homo sapiens
agatgagaaaaccat

SEQ ID NO: 1767060 - DNA, 15 bp, Homo sapiens
gatgagaaaaccatg

SEQ ID NO: 1767061 - DNA, 15 bp, Homo sapiens
atgagaaaaccatgt

SEQ ID NO: 1767062 - DNA, 15 bp, Homo sapiens
tgagaaaaccatgtt

SEQ ID NO: 1767063 - DNA, 15 bp, Homo sapiens
gagaaaaccatgttt

SEQ ID NO: 1767064 - DNA, 15 bp, Homo sapiens
agaaaaccatgtttg

SEQ ID NO: 1767065 - DNA, 15 bp, Homo sapiens
gaaaaccatgtttgt

SEQ ID NO: 1767066 - DNA, 15 bp, Homo sapiens
aaaaccatgtttgtt

SEQ ID NO: 1767067 - DNA, 15 bp, Homo sapiens
aaaccatgtttgtta

SEQ ID NO: 1767068 - DNA, 15 bp, Homo sapiens
aaccatgtttgttat

SEQ ID NO: 1767069 - DNA, 15 bp, Homo sapiens
accatgtttgttatc

SEQ ID NO: 1767070 - DNA, 15 bp, Homo sapiens
ccatgtttgttatct

SEQ ID NO: 1767071 - DNA, 15 bp, Homo sapiens
catgtttgttatctg

SEQ ID NO: 1767072 - DNA, 15 bp, Homo sapiens
atgtttgttatctgt

SEQ ID NO: 1767073 - DNA, 15 bp, Homo sapiens
tgtttgttatctgtt

SEQ ID NO: 1767074 - DNA, 15 bp, Homo sapiens
gtttgttatctgtta

SEQ ID NO: 1767075 - DNA, 15 bp, Homo sapiens
tttgttatctgttat

SEQ ID NO: 1767076 - DNA, 15 bp, Homo sapiens
ttgttatctgttatg

SEQ ID NO: 1767077 - DNA, 15 bp, Homo sapiens
tgttatctgttatgt

SEQ ID NO: 1767078 - DNA, 15 bp, Homo sapiens
gttatctgttatgta

SEQ ID NO: 1767079 - DNA, 15 bp, Homo sapiens
ttatctgttatgtat

SEQ ID NO: 1767080 - DNA, 15 bp, Homo sapiens
tatctgttatgtatt

SEQ ID NO: 1767081 - DNA, 15 bp, Homo sapiens
aagaatgtttatctt

SEQ ID NO: 1767082 - DNA, 15 bp, Homo sapiens
gaatgtttatctttg

SEQ ID NO: 1767083 - DNA, 15 bp, Homo sapiens
aatgtttatctttgg

SEQ ID NO: 1767084 - DNA, 15 bp, Homo sapiens
atgtttatctttggt

SEQ ID NO: 1767085 - DNA, 15 bp, Homo sapiens
tgtttatctttggtg

SEQ ID NO: 1767086 - DNA, 15 bp, Homo sapiens
gtttatctttggtgt

SEQ ID NO: 1767087 - DNA, 15 bp, Homo sapiens
tttatctttggtgtg

SEQ ID NO: 1767088 - DNA, 15 bp, Homo sapiens
ttatctttggtgtgg

SEQ ID NO: 1767089 - DNA, 15 bp, Homo sapiens
tatctttggtgtggt

SEQ ID NO: 1767090 - DNA, 15 bp, Homo sapiens
atctttggtgtggtg

SEQ ID NO: 1767091 - DNA, 15 bp, Homo sapiens
tctttggtgtggtgt

SEQ ID NO: 1767092 - DNA, 15 bp, Homo sapiens
ctttggtgtggtgtt

SEQ ID NO: 1767093 - DNA, 15 bp, Homo sapiens
tttggtgtggtgtta

SEQ ID NO: 1767094 - DNA, 15 bp, Homo sapiens
ttggtgtggtgttaa

SEQ ID NO: 1767095 - DNA, 15 bp, Homo sapiens
tggtgtggtgttaat

SEQ ID NO: 1767096 - DNA, 15 bp, Homo sapiens
ggtgtggtgttaatt

SEQ ID NO: 1767097 - DNA, 15 bp, Homo sapiens
gtgtggtgttaattt

SEQ ID NO: 1767098 - DNA, 15 bp, Homo sapiens
tgtggtgttaatttt

SEQ ID NO: 1767099 - DNA, 15 bp, Homo sapiens
gtggtgttaatttta

SEQ ID NO: 1767100 - DNA, 15 bp, Homo sapiens
tggtgttaattttac

SEQ ID NO: 1767101 - DNA, 15 bp, Homo sapiens
ggtgttaattttact

SEQ ID NO: 1767102 - DNA, 15 bp, Homo sapiens
gtgttaattttactt

SEQ ID NO: 1767103 - DNA, 15 bp, Homo sapiens
tgttaattttacttt

SEQ ID NO: 1767104 - DNA, 15 bp, Homo sapiens
gttaattttactttc

SEQ ID NO: 1767105 - DNA, 15 bp, Homo sapiens
ttaattttactttct

SEQ ID NO: 1767106 - DNA, 15 bp, Homo sapiens
taattttactttcta

SEQ ID NO: 1767107 - DNA, 15 bp, Homo sapiens
aattttactttctaa

SEQ ID NO: 1767108 - DNA, 15 bp, Homo sapiens
attttactttctaag

SEQ ID NO: 1767109 - DNA, 15 bp, Homo sapiens
ttttactttctaagc

SEQ ID NO: 1767110 - DNA, 15 bp, Homo sapiens
tttactttctaagca

SEQ ID NO: 1767111 - DNA, 15 bp, Homo sapiens
ttactttctaagcac

SEQ ID NO: 1767112 - DNA, 15 bp, Homo sapiens
tactttctaagcaca

SEQ ID NO: 1767113 - DNA, 15 bp, Homo sapiens
actttctaagcacaa

SEQ ID NO: 1767114 - DNA, 15 bp, Homo sapiens
ctttctaagcacaaa

SEQ ID NO: 1767115 - DNA, 15 bp, Homo sapiens
tttctaagcacaaaa

SEQ ID NO: 1767116 - DNA, 15 bp, Homo sapiens
ttctaagcacaaaat

SEQ ID NO: 1767117 - DNA, 15 bp, Homo sapiens
tctaagcacaaaatg

SEQ ID NO: 1767118 - DNA, 15 bp, Homo sapiens
ctaagcacaaaatga

SEQ ID NO: 1767119 - DNA, 15 bp, Homo sapiens
taagcacaaaatgaa

SEQ ID NO: 1767120 - DNA, 15 bp, Homo sapiens
aagcacaaaatgaaa

SEQ ID NO: 1767121 - DNA, 15 bp, Homo sapiens
agcacaaaatgaaat

SEQ ID NO: 1767122 - DNA, 15 bp, Homo sapiens
gcacaaaatgaaatt

SEQ ID NO: 1767123 - DNA, 15 bp, Homo sapiens
cacaaaatgaaattg

SEQ ID NO: 1767124 - DNA, 15 bp, Homo sapiens
acaaaatgaaattgc

SEQ ID NO: 1767125 - DNA, 15 bp, Homo sapiens
caaaatgaaattgca

SEQ ID NO: 1767126 - DNA, 15 bp, Homo sapiens
aaaatgaaattgcat

SEQ ID NO: 1767127 - DNA, 15 bp, Homo sapiens
aaatgaaattgcatc

SEQ ID NO: 1767128 - DNA, 15 bp, Homo sapiens
aatgaaattgcatct

SEQ ID NO: 1767129 - DNA, 15 bp, Homo sapiens
atgaaattgcatctt

SEQ ID NO: 1767130 - DNA, 15 bp, Homo sapiens
tgaaattgcatcttt

SEQ ID NO: 1767131 - DNA, 15 bp, Homo sapiens
gaaattgcatctttt

SEQ ID NO: 1767132 - DNA, 15 bp, Homo sapiens
aaattgcatcttttt

SEQ ID NO: 1767133 - DNA, 15 bp, Homo sapiens
aattgcatcttttta

SEQ ID NO: 1767134 - DNA, 15 bp, Homo sapiens
attgcatctttttaa

SEQ ID NO: 1767135 - DNA, 15 bp, Homo sapiens
ttgcatctttttaag

SEQ ID NO: 1767136 - DNA, 15 bp, Homo sapiens
tgcatctttttaagc

SEQ ID NO: 1767137 - DNA, 15 bp, Homo sapiens
gcatctttttaagca

SEQ ID NO: 1767138 - DNA, 15 bp, Homo sapiens
catctttttaagcaa

SEQ ID NO: 1767139 - DNA, 15 bp, Homo sapiens
atctttttaagcaaa

SEQ ID NO: 1767140 - DNA, 15 bp, Homo sapiens
tctttttaagcaaaa

SEQ ID NO: 1767141 - DNA, 15 bp, Homo sapiens
ctttttaagcaaaat

SEQ ID NO: 1767142 - DNA, 15 bp, Homo sapiens
tttttaagcaaaatt

SEQ ID NO: 1767143 - DNA, 15 bp, Homo sapiens
ttttaagcaaaattt

SEQ ID NO: 1767144 - DNA, 15 bp, Homo sapiens
tttaagcaaaatttt

SEQ ID NO: 1767145 - DNA, 15 bp, Homo sapiens
ttaagcaaaattttt

SEQ ID NO: 1767146 - DNA, 15 bp, Homo sapiens
taagcaaaatttttt

SEQ ID NO: 1767147 - DNA, 15 bp, Homo sapiens
aagcaaaattttttt

SEQ ID NO: 1767148 - DNA, 15 bp, Homo sapiens
agcaaaattttttta

SEQ ID NO: 1767149 - DNA, 15 bp, Homo sapiens
gcaaaatttttttaa

SEQ ID NO: 1767150 - DNA, 15 bp, Homo sapiens
caaaatttttttaac

SEQ ID NO: 1767151 - DNA, 15 bp, Homo sapiens
aaaatttttttaacc

SEQ ID NO: 1767152 - DNA, 15 bp, Homo sapiens
aaatttttttaacct

SEQ ID NO: 1767153 - DNA, 15 bp, Homo sapiens
aatttttttaacctt

SEQ ID NO: 1767154 - DNA, 15 bp, Homo sapiens
atttttttaacctta

SEQ ID NO: 1767155 - DNA, 15 bp, Homo sapiens
tttttttaaccttaa

SEQ ID NO: 1767156 - DNA, 15 bp, Homo sapiens
ttttttaaccttaaa

SEQ ID NO: 1767157 - DNA, 15 bp, Homo sapiens
tttttaaccttaaat

SEQ ID NO: 1767158 - DNA, 15 bp, Homo sapiens
ttttaaccttaaatt

SEQ ID NO: 1767159 - DNA, 15 bp, Homo sapiens
tttaaccttaaattg

SEQ ID NO: 1767160 - DNA, 15 bp, Homo sapiens
ttaaccttaaattga

SEQ ID NO: 1767161 - DNA, 15 bp, Homo sapiens
taaccttaaattgat

SEQ ID NO: 1767162 - DNA, 15 bp, Homo sapiens
aaccttaaattgatt

SEQ ID NO: 1767163 - DNA, 15 bp, Homo sapiens
accttaaattgattg

SEQ ID NO: 1767164 - DNA, 15 bp, Homo sapiens
ccttaaattgattga

SEQ ID NO: 1767165 - DNA, 15 bp, Homo sapiens
cttaaattgattgaa

SEQ ID NO: 1767166 - DNA, 15 bp, Homo sapiens
ttaaattgattgaaa

SEQ ID NO: 1767167 - DNA, 15 bp, Homo sapiens
taaattgattgaaat

SEQ ID NO: 1767168 - DNA, 15 bp, Homo sapiens
aaattgattgaaata

SEQ ID NO: 1767169 - DNA, 15 bp, Homo sapiens
aattgattgaaataa

SEQ ID NO: 1767170 - DNA, 15 bp, Homo sapiens
attgattgaaataag

SEQ ID NO: 1767171 - DNA, 15 bp, Homo sapiens
ttgattgaaataagg

SEQ ID NO: 1767172 - DNA, 15 bp, Homo sapiens
tgattgaaataaggt

SEQ ID NO: 1767173 - DNA, 15 bp, Homo sapiens
gattgaaataaggtt

SEQ ID NO: 1767174 - DNA, 15 bp, Homo sapiens
attgaaataaggttt

SEQ ID NO: 1767175 - DNA, 15 bp, Homo sapiens
ttgaaataaggttta

SEQ ID NO: 1767176 - DNA, 15 bp, Homo sapiens
tgaaataaggtttag

SEQ ID NO: 1767177 - DNA, 15 bp, Homo sapiens
gaaataaggtttaga

SEQ ID NO: 1767178 - DNA, 15 bp, Homo sapiens
aaataaggtttagag

SEQ ID NO: 1767179 - DNA, 15 bp, Homo sapiens
aataaggtttagaga

SEQ ID NO: 1767180 - DNA, 15 bp, Homo sapiens
ataaggtttagagaa

SEQ ID NO: 1767181 - DNA, 15 bp, Homo sapiens
taaggtttagagaat

SEQ ID NO: 1767182 - DNA, 15 bp, Homo sapiens
aaggtttagagaata

SEQ ID NO: 1767183 - DNA, 15 bp, Homo sapiens
aggtttagagaataa

SEQ ID NO: 1767184 - DNA, 15 bp, Homo sapiens
ggtttagagaataaa

SEQ ID NO: 1767185 - DNA, 15 bp, Homo sapiens
gtttagagaataaaa

SEQ ID NO: 1767186 - DNA, 15 bp, Homo sapiens
tttagagaataaaaa

SEQ ID NO: 1767187 - DNA, 15 bp, Homo sapiens
ttagagaataaaaat

SEQ ID NO: 1767188 - DNA, 15 bp, Homo sapiens
tagagaataaaaatc

SEQ ID NO: 1767189 - DNA, 15 bp, Homo sapiens
agagaataaaaatcc

SEQ ID NO: 1767190 - DNA, 15 bp, Homo sapiens
gagaataaaaatcct

SEQ ID NO: 1767191 - DNA, 15 bp, Homo sapiens
agaataaaaatccta

SEQ ID NO: 1767192 - DNA, 15 bp, Homo sapiens
gaataaaaatcctac

SEQ ID NO: 1767193 - DNA, 15 bp, Homo sapiens
aataaaaatcctact

SEQ ID NO: 1767194 - DNA, 15 bp, Homo sapiens
ataaaaatcctacta

SEQ ID NO: 1767195 - DNA, 15 bp, Homo sapiens
taaaaatcctactac

SEQ ID NO: 1767196 - DNA, 15 bp, Homo sapiens
aaaaatcctactact

SEQ ID NO: 1767197 - DNA, 15 bp, Homo sapiens
aaaatcctactactt

SEQ ID NO: 1767198 - DNA, 15 bp, Homo sapiens
aaatcctactacttg

SEQ ID NO: 1767199 - DNA, 15 bp, Homo sapiens
aatcctactacttgg

SEQ ID NO: 1767200 - DNA, 15 bp, Homo sapiens
atcctactacttggc

SEQ ID NO: 1767201 - DNA, 15 bp, Homo sapiens
tcctactacttggca

SEQ ID NO: 1767202 - DNA, 15 bp, Homo sapiens
cctactacttggcaa

SEQ ID NO: 1767203 - DNA, 15 bp, Homo sapiens
ctactacttggcaaa

SEQ ID NO: 1767204 - DNA, 15 bp, Homo sapiens
tactacttggcaaaa

SEQ ID NO: 1767205 - DNA, 15 bp, Homo sapiens
actacttggcaaaat

SEQ ID NO: 1767206 - DNA, 15 bp, Homo sapiens
ctacttggcaaaatt

SEQ ID NO: 1767207 - DNA, 15 bp, Homo sapiens
tacttggcaaaattt

SEQ ID NO: 1767208 - DNA, 15 bp, Homo sapiens
acttggcaaaatttt

SEQ ID NO: 1767209 - DNA, 15 bp, Homo sapiens
cttggcaaaatttta

SEQ ID NO: 1767210 - DNA, 15 bp, Homo sapiens
ttggcaaaattttag

SEQ ID NO: 1767211 - DNA, 15 bp, Homo sapiens
tggcaaaattttagg

SEQ ID NO: 1767212 - DNA, 15 bp, Homo sapiens
ggcaaaattttaggt

SEQ ID NO: 1767213 - DNA, 15 bp, Homo sapiens
gcaaaattttaggtt

SEQ ID NO: 1767214 - DNA, 15 bp, Homo sapiens
caaaattttaggttc

SEQ ID NO: 1767215 - DNA, 15 bp, Homo sapiens
aaaattttaggttca

SEQ ID NO: 1767216 - DNA, 15 bp, Homo sapiens
aaattttaggttcat

SEQ ID NO: 1767217 - DNA, 15 bp, Homo sapiens
aattttaggttcata

SEQ ID NO: 1767218 - DNA, 15 bp, Homo sapiens
attttaggttcatag

SEQ ID NO: 1767219 - DNA, 15 bp, Homo sapiens
ttttaggttcatagt

SEQ ID NO: 1767220 - DNA, 15 bp, Homo sapiens
tttaggttcatagtc

SEQ ID NO: 1767221 - DNA, 15 bp, Homo sapiens
ttaggttcatagtct

SEQ ID NO: 1767222 - DNA, 15 bp, Homo sapiens
taggttcatagtctt

SEQ ID NO: 1767223 - DNA, 15 bp, Homo sapiens
aggttcatagtctta

SEQ ID NO: 1767224 - DNA, 15 bp, Homo sapiens
ggttcatagtcttat

SEQ ID NO: 1767225 - DNA, 15 bp, Homo sapiens
gttcatagtcttatc

SEQ ID NO: 1767226 - DNA, 15 bp, Homo sapiens
ttcatagtcttatct

SEQ ID NO: 1767227 - DNA, 15 bp, Homo sapiens
tcatagtcttatctt

SEQ ID NO: 1767228 - DNA, 15 bp, Homo sapiens
catagtcttatcttc

SEQ ID NO: 1767229 - DNA, 15 bp, Homo sapiens
atagtcttatcttcc

SEQ ID NO: 1767230 - DNA, 15 bp, Homo sapiens
tagtcttatcttcct

SEQ ID NO: 1767231 - DNA, 15 bp, Homo sapiens
agtcttatcttcctt

SEQ ID NO: 1767232 - DNA, 15 bp, Homo sapiens
gtcttatcttccttc

SEQ ID NO: 1767233 - DNA, 15 bp, Homo sapiens
tcttatcttccttct

SEQ ID NO: 1767234 - DNA, 15 bp, Homo sapiens
cttatcttccttctt

SEQ ID NO: 1767235 - DNA, 15 bp, Homo sapiens
ttatcttccttcttc

SEQ ID NO: 1767236 - DNA, 15 bp, Homo sapiens
tatcttccttcttcc

SEQ ID NO: 1767237 - DNA, 15 bp, Homo sapiens
atcttccttcttcct

SEQ ID NO: 1767238 - DNA, 15 bp, Homo sapiens
tcttccttcttcctc

SEQ ID NO: 1767239 - DNA, 15 bp, Homo sapiens
cttccttcttcctcc

SEQ ID NO: 1767240 - DNA, 15 bp, Homo sapiens
ttccttcttcctccc

SEQ ID NO: 1767241 - DNA, 15 bp, Homo sapiens
tccttcttcctccca

SEQ ID NO: 1767242 - DNA, 15 bp, Homo sapiens
ccttcttcctcccag

SEQ ID NO: 1767243 - DNA, 15 bp, Homo sapiens
cttcttcctcccagc

SEQ ID NO: 1767244 - DNA, 15 bp, Homo sapiens
ttcttcctcccagct

SEQ ID NO: 1767245 - DNA, 15 bp, Homo sapiens
tcttcctcccagctc

SEQ ID NO: 1767246 - DNA, 15 bp, Homo sapiens
cttcctcccagctct

SEQ ID NO: 1767247 - DNA, 15 bp, Homo sapiens
ttcctcccagctctt

SEQ ID NO: 1767248 - DNA, 15 bp, Homo sapiens
tcctcccagctcttc

SEQ ID NO: 1767249 - DNA, 15 bp, Homo sapiens
cctcccagctcttcc

SEQ ID NO: 1767250 - DNA, 15 bp, Homo sapiens
ctcccagctcttccc

SEQ ID NO: 1767251 - DNA, 15 bp, Homo sapiens
tcccagctcttccct

SEQ ID NO: 1767252 - DNA, 15 bp, Homo sapiens
cccagctcttccctt

SEQ ID NO: 1767253 - DNA, 15 bp, Homo sapiens
ccagctcttccctta

SEQ ID NO: 1767254 - DNA, 15 bp, Homo sapiens
cagctcttcccttaa

SEQ ID NO: 1767255 - DNA, 15 bp, Homo sapiens
agctcttcccttaac

SEQ ID NO: 1767256 - DNA, 15 bp, Homo sapiens
gctcttcccttaacc

SEQ ID NO: 1767257 - DNA, 15 bp, Homo sapiens
ctcttcccttaaccc

SEQ ID NO: 1767258 - DNA, 15 bp, Homo sapiens
tcttcccttaacccc

SEQ ID NO: 1767259 - DNA, 15 bp, Homo sapiens
cttcccttaacccct

SEQ ID NO: 1767260 - DNA, 15 bp, Homo sapiens
ttcccttaacccctt

SEQ ID NO: 1767261 - DNA, 15 bp, Homo sapiens
tcccttaacccctta

SEQ ID NO: 1767262 - DNA, 15 bp, Homo sapiens
cccttaaccccttaa

SEQ ID NO: 1767263 - DNA, 15 bp, Homo sapiens
ccttaaccccttaat

SEQ ID NO: 1767264 - DNA, 15 bp, Homo sapiens
cttaaccccttaata

SEQ ID NO: 1767265 - DNA, 15 bp, Homo sapiens
ttaaccccttaatat

SEQ ID NO: 1767266 - DNA, 15 bp, Homo sapiens
taaccccttaatatg

SEQ ID NO: 1767267 - DNA, 15 bp, Homo sapiens
aaccccttaatatga

SEQ ID NO: 1767268 - DNA, 15 bp, Homo sapiens
accccttaatatgac

SEQ ID NO: 1767269 - DNA, 15 bp, Homo sapiens
ccccttaatatgaca

SEQ ID NO: 1767270 - DNA, 15 bp, Homo sapiens
cccttaatatgacat

SEQ ID NO: 1767271 - DNA, 15 bp, Homo sapiens
ccttaatatgacatt

SEQ ID NO: 1767272 - DNA, 15 bp, Homo sapiens
cttaatatgacatta

SEQ ID NO: 1767273 - DNA, 15 bp, Homo sapiens
ttaatatgacattaa

SEQ ID NO: 1767274 - DNA, 15 bp, Homo sapiens
taatatgacattaac

SEQ ID NO: 1767275 - DNA, 15 bp, Homo sapiens
aatatgacattaact

SEQ ID NO: 1767276 - DNA, 15 bp, Homo sapiens
atatgacattaacta

SEQ ID NO: 1767277 - DNA, 15 bp, Homo sapiens
tatgacattaactat

SEQ ID NO: 1767278 - DNA, 15 bp, Homo sapiens
atgacattaactata

SEQ ID NO: 1767279 - DNA, 15 bp, Homo sapiens
tgacattaactatat

SEQ ID NO: 1767280 - DNA, 15 bp, Homo sapiens
gacattaactatata

SEQ ID NO: 1767281 - DNA, 15 bp, Homo sapiens
acattaactatatat

SEQ ID NO: 1767282 - DNA, 15 bp, Homo sapiens
cattaactatatatt

SEQ ID NO: 1767283 - DNA, 15 bp, Homo sapiens
attaactatatattg

SEQ ID NO: 1767284 - DNA, 15 bp, Homo sapiens
ttaactatatattga

SEQ ID NO: 1767285 - DNA, 15 bp, Homo sapiens
taactatatattgaa

SEQ ID NO: 1767286 - DNA, 15 bp, Homo sapiens
aactatatattgaaa

SEQ ID NO: 1767287 - DNA, 15 bp, Homo sapiens
actatatattgaaat

SEQ ID NO: 1767288 - DNA, 15 bp, Homo sapiens
ctatatattgaaata

SEQ ID NO: 1767289 - DNA, 15 bp, Homo sapiens
tatatattgaaatat

SEQ ID NO: 1767290 - DNA, 15 bp, Homo sapiens
atatattgaaatata

SEQ ID NO: 1767291 - DNA, 15 bp, Homo sapiens
tatattgaaatatat

SEQ ID NO: 1767292 - DNA, 15 bp, Homo sapiens
atattgaaatatatt

SEQ ID NO: 1767293 - DNA, 15 bp, Homo sapiens
tattgaaatatattt

SEQ ID NO: 1767294 - DNA, 15 bp, Homo sapiens
attgaaatatatttc

SEQ ID NO: 1767295 - DNA, 15 bp, Homo sapiens
ttgaaatatatttca

SEQ ID NO: 1767296 - DNA, 15 bp, Homo sapiens
tgaaatatatttcag

SEQ ID NO: 1767297 - DNA, 15 bp, Homo sapiens
gaaatatatttcaga

SEQ ID NO: 1767298 - DNA, 15 bp, Homo sapiens
aaatatatttcagat

SEQ ID NO: 1767299 - DNA, 15 bp, Homo sapiens
aatatatttcagatt

SEQ ID NO: 1767300 - DNA, 15 bp, Homo sapiens
atatatttcagattt

SEQ ID NO: 1767301 - DNA, 15 bp, Homo sapiens
tatatttcagatttt

SEQ ID NO: 1767302 - DNA, 15 bp, Homo sapiens
atatttcagattttg

SEQ ID NO: 1767303 - DNA, 15 bp, Homo sapiens
tatttcagattttgt

SEQ ID NO: 1767304 - DNA, 15 bp, Homo sapiens
atttcagattttgtc

SEQ ID NO: 1767305 - DNA, 15 bp, Homo sapiens
tttcagattttgtct

SEQ ID NO: 1767306 - DNA, 15 bp, Homo sapiens
ttcagattttgtctc

SEQ ID NO: 1767307 - DNA, 15 bp, Homo sapiens
tcagattttgtctcc

SEQ ID NO: 1767308 - DNA, 15 bp, Homo sapiens
cagattttgtctcca

SEQ ID NO: 1767309 - DNA, 15 bp, Homo sapiens
agattttgtctccat

SEQ ID NO: 1767310 - DNA, 15 bp, Homo sapiens
gattttgtctccatc

SEQ ID NO: 1767311 - DNA, 15 bp, Homo sapiens
attttgtctccatct

SEQ ID NO: 1767312 - DNA, 15 bp, Homo sapiens
ttttgtctccatcta

SEQ ID NO: 1767313 - DNA, 15 bp, Homo sapiens
tttgtctccatctaa

SEQ ID NO: 1767314 - DNA, 15 bp, Homo sapiens
ttgtctccatctaaa

SEQ ID NO: 1767315 - DNA, 15 bp, Homo sapiens
tgtctccatctaaaa

SEQ ID NO: 1767316 - DNA, 15 bp, Homo sapiens
gtctccatctaaaag

SEQ ID NO: 1767317 - DNA, 15 bp, Homo sapiens
tctccatctaaaagt

SEQ ID NO: 1767318 - DNA, 15 bp, Homo sapiens
ctccatctaaaagtt

SEQ ID NO: 1767319 - DNA, 15 bp, Homo sapiens
tccatctaaaagttt

SEQ ID NO: 1767320 - DNA, 15 bp, Homo sapiens
ccatctaaaagtttc

SEQ ID NO: 1767321 - DNA, 15 bp, Homo sapiens
catctaaaagtttct

SEQ ID NO: 1767322 - DNA, 15 bp, Homo sapiens
atctaaaagtttcta

SEQ ID NO: 1767323 - DNA, 15 bp, Homo sapiens
tctaaaagtttctat

SEQ ID NO: 1767324 - DNA, 15 bp, Homo sapiens
ctaaaagtttctatg

SEQ ID NO: 1767325 - DNA, 15 bp, Homo sapiens
taaaagtttctatga

SEQ ID NO: 1767326 - DNA, 15 bp, Homo sapiens
aaaagtttctatgaa

SEQ ID NO: 1767327 - DNA, 15 bp, Homo sapiens
aaagtttctatgaat

SEQ ID NO: 1767328 - DNA, 15 bp, Homo sapiens
aagtttctatgaatg

SEQ ID NO: 1767329 - DNA, 15 bp, Homo sapiens
agtttctatgaatgg

SEQ ID NO: 1767330 - DNA, 15 bp, Homo sapiens
gtttctatgaatggt

SEQ ID NO: 1767331 - DNA, 15 bp, Homo sapiens
tttctatgaatggtt

SEQ ID NO: 1767332 - DNA, 15 bp, Homo sapiens
ttctatgaatggttt

SEQ ID NO: 1767333 - DNA, 15 bp, Homo sapiens
tctatgaatggttta

SEQ ID NO: 1767334 - DNA, 15 bp, Homo sapiens
ctatgaatggtttat

SEQ ID NO: 1767335 - DNA, 15 bp, Homo sapiens
tatgaatggtttata

SEQ ID NO: 1767336 - DNA, 15 bp, Homo sapiens
atgaatggtttatat

SEQ ID NO: 1767337 - DNA, 15 bp, Homo sapiens
tgaatggtttatatg

SEQ ID NO: 1767338 - DNA, 15 bp, Homo sapiens
gaatggtttatatgt

SEQ ID NO: 1767339 - DNA, 15 bp, Homo sapiens
aatggtttatatgtt

SEQ ID NO: 1767340 - DNA, 15 bp, Homo sapiens
atggtttatatgttt

SEQ ID NO: 1767341 - DNA, 15 bp, Homo sapiens
tggtttatatgttta

SEQ ID NO: 1767342 - DNA, 15 bp, Homo sapiens
ggtttatatgtttat

SEQ ID NO: 1767343 - DNA, 15 bp, Homo sapiens
gtttatatgtttata

SEQ ID NO: 1767344 - DNA, 15 bp, Homo sapiens
tttatatgtttatat

SEQ ID NO: 1767345 - DNA, 15 bp, Homo sapiens
ttatatgtttatatt

SEQ ID NO: 1767346 - DNA, 15 bp, Homo sapiens
tatatgtttatattt

SEQ ID NO: 1767347 - DNA, 15 bp, Homo sapiens
atatgtttatattta

SEQ ID NO: 1767348 - DNA, 15 bp, Homo sapiens
tatgtttatatttaa

SEQ ID NO: 1767349 - DNA, 15 bp, Homo sapiens
atgtttatatttaaa

SEQ ID NO: 1767350 - DNA, 15 bp, Homo sapiens
tgtttatatttaaag

SEQ ID NO: 1767351 - DNA, 15 bp, Homo sapiens
gtttatatttaaagt

SEQ ID NO: 1767352 - DNA, 15 bp, Homo sapiens
tttatatttaaagta

SEQ ID NO: 1767353 - DNA, 15 bp, Homo sapiens
ttatatttaaagtat

SEQ ID NO: 1767354 - DNA, 15 bp, Homo sapiens
tatatttaaagtata

SEQ ID NO: 1767355 - DNA, 15 bp, Homo sapiens
atatttaaagtatac

SEQ ID NO: 1767356 - DNA, 15 bp, Homo sapiens
tatttaaagtatact

SEQ ID NO: 1767357 - DNA, 15 bp, Homo sapiens
atttaaagtatactc

SEQ ID NO: 1767358 - DNA, 15 bp, Homo sapiens
tttaaagtatactca

SEQ ID NO: 1767359 - DNA, 15 bp, Homo sapiens
ttaaagtatactcat

SEQ ID NO: 1767360 - DNA, 15 bp, Homo sapiens
taaagtatactcata

SEQ ID NO: 1767361 - DNA, 15 bp, Homo sapiens
aaagtatactcatat

SEQ ID NO: 1767362 - DNA, 15 bp, Homo sapiens
aagtatactcatatt

SEQ ID NO: 1767363 - DNA, 15 bp, Homo sapiens
agtatactcatattt

SEQ ID NO: 1767364 - DNA, 15 bp, Homo sapiens
gtatactcatatttt

SEQ ID NO: 1767365 - DNA, 15 bp, Homo sapiens
tatactcatattttg

SEQ ID NO: 1767366 - DNA, 15 bp, Homo sapiens
atactcatattttgg

SEQ ID NO: 1767367 - DNA, 15 bp, Homo sapiens
tactcatattttggg

SEQ ID NO: 1767368 - DNA, 15 bp, Homo sapiens
actcatattttgggc

SEQ ID NO: 1767369 - DNA, 15 bp, Homo sapiens
ctcatattttgggcc

SEQ ID NO: 1767370 - DNA, 15 bp, Homo sapiens
tcatattttgggcca

SEQ ID NO: 1767371 - DNA, 15 bp, Homo sapiens
catattttgggccag

SEQ ID NO: 1767372 - DNA, 15 bp, Homo sapiens
atattttgggccagg

SEQ ID NO: 1767373 - DNA, 15 bp, Homo sapiens
tattttgggccaggt

SEQ ID NO: 1767374 - DNA, 15 bp, Homo sapiens
attttgggccaggtg

SEQ ID NO: 1767375 - DNA, 15 bp, Homo sapiens
ttttgggccaggtgc

SEQ ID NO: 1767376 - DNA, 15 bp, Homo sapiens
tttgggccaggtgca

SEQ ID NO: 1767377 - DNA, 15 bp, Homo sapiens
ttgggccaggtgcag

SEQ ID NO: 1767378 - DNA, 15 bp, Homo sapiens
tgggccaggtgcagt

SEQ ID NO: 1767379 - DNA, 15 bp, Homo sapiens
gggccaggtgcagtg

SEQ ID NO: 1767380 - DNA, 15 bp, Homo sapiens
ttggaaggccgaggc

SEQ ID NO: 1767381 - DNA, 15 bp, Homo sapiens
tggaaggccgaggca

SEQ ID NO: 1767382 - DNA, 15 bp, Homo sapiens
ggaaggccgaggcag

SEQ ID NO: 1767383 - DNA, 15 bp, Homo sapiens
gaaggccgaggcagg

SEQ ID NO: 1767384 - DNA, 15 bp, Homo sapiens
aaggccgaggcaggt

SEQ ID NO: 1767385 - DNA, 15 bp, Homo sapiens
tggatcacctgagat

SEQ ID NO: 1767386 - DNA, 15 bp, Homo sapiens
ggatcacctgagatc

SEQ ID NO: 1767387 - DNA, 15 bp, Homo sapiens
gatcacctgagatca

SEQ ID NO: 1767388 - DNA, 15 bp, Homo sapiens
atcacctgagatcag

SEQ ID NO: 1767389 - DNA, 15 bp, Homo sapiens
tgagatcaggagttt

SEQ ID NO: 1767390 - DNA, 15 bp, Homo sapiens
gagatcaggagtttg

SEQ ID NO: 1767391 - DNA, 15 bp, Homo sapiens
agatcaggagtttga

SEQ ID NO: 1767392 - DNA, 15 bp, Homo sapiens
gatcaggagtttgag

SEQ ID NO: 1767393 - DNA, 15 bp, Homo sapiens
atcaggagtttgaga

SEQ ID NO: 1767394 - DNA, 15 bp, Homo sapiens
tcaggagtttgagag

SEQ ID NO: 1767395 - DNA, 15 bp, Homo sapiens
caggagtttgagagc

SEQ ID NO: 1767396 - DNA, 15 bp, Homo sapiens
aggagtttgagagca

SEQ ID NO: 1767397 - DNA, 15 bp, Homo sapiens
tttgagagcagcctg

SEQ ID NO: 1767398 - DNA, 15 bp, Homo sapiens
ttgagagcagcctgg

SEQ ID NO: 1767399 - DNA, 15 bp, Homo sapiens
tgagagcagcctggc

SEQ ID NO: 1767400 - DNA, 15 bp, Homo sapiens
agagcagcctggcca

SEQ ID NO: 1767401 - DNA, 15 bp, Homo sapiens
gagcagcctggccaa

SEQ ID NO: 1767402 - DNA, 15 bp, Homo sapiens
agcagcctggccaaa

SEQ ID NO: 1767403 - DNA, 15 bp, Homo sapiens
gcagcctggccaaaa

SEQ ID NO: 1767404 - DNA, 15 bp, Homo sapiens
cctggccaaaatggc

SEQ ID NO: 1767405 - DNA, 15 bp, Homo sapiens
ctggccaaaatggcg

SEQ ID NO: 1767406 - DNA, 15 bp, Homo sapiens
tggccaaaatggcga

SEQ ID NO: 1767407 - DNA, 15 bp, Homo sapiens
ggccaaaatggcgaa

SEQ ID NO: 1767408 - DNA, 15 bp, Homo sapiens
gccaaaatggcgaaa

SEQ ID NO: 1767409 - DNA, 15 bp, Homo sapiens
ccaaaatggcgaaac

SEQ ID NO: 1767410 - DNA, 15 bp, Homo sapiens
caaaatggcgaaacc

SEQ ID NO: 1767411 - DNA, 15 bp, Homo sapiens
aaaatggcgaaaccc

SEQ ID NO: 1767412 - DNA, 15 bp, Homo sapiens
aaatggcgaaacccc

SEQ ID NO: 1767413 - DNA, 15 bp, Homo sapiens
aatggcgaaacccca

SEQ ID NO: 1767414 - DNA, 15 bp, Homo sapiens
ccaaaaatacaaaac

SEQ ID NO: 1767415 - DNA, 15 bp, Homo sapiens
caaaaatacaaaact

SEQ ID NO: 1767416 - DNA, 15 bp, Homo sapiens
aaaaatacaaaacta

SEQ ID NO: 1767417 - DNA, 15 bp, Homo sapiens
aaaatacaaaactag

SEQ ID NO: 1767418 - DNA, 15 bp, Homo sapiens
aaatacaaaactagc

SEQ ID NO: 1767419 - DNA, 15 bp, Homo sapiens
aatacaaaactagcc

SEQ ID NO: 1767420 - DNA, 15 bp, Homo sapiens
atacaaaactagcct

SEQ ID NO: 1767421 - DNA, 15 bp, Homo sapiens
tacaaaactagccta

SEQ ID NO: 1767422 - DNA, 15 bp, Homo sapiens
acaaaactagcctag

SEQ ID NO: 1767423 - DNA, 15 bp, Homo sapiens
caaaactagcctagg

SEQ ID NO: 1767424 - DNA, 15 bp, Homo sapiens
aaaactagcctaggg

SEQ ID NO: 1767425 - DNA, 15 bp, Homo sapiens
aaactagcctagggc

SEQ ID NO: 1767426 - DNA, 15 bp, Homo sapiens
aactagcctagggca

SEQ ID NO: 1767427 - DNA, 15 bp, Homo sapiens
actagcctagggcaa

SEQ ID NO: 1767428 - DNA, 15 bp, Homo sapiens
ctagcctagggcaat

SEQ ID NO: 1767429 - DNA, 15 bp, Homo sapiens
tagcctagggcaata

SEQ ID NO: 1767430 - DNA, 15 bp, Homo sapiens
agcctagggcaatag

SEQ ID NO: 1767431 - DNA, 15 bp, Homo sapiens
gcctagggcaatagt

SEQ ID NO: 1767432 - DNA, 15 bp, Homo sapiens
cctagggcaatagtg

SEQ ID NO: 1767433 - DNA, 15 bp, Homo sapiens
ctagggcaatagtgc

SEQ ID NO: 1767434 - DNA, 15 bp, Homo sapiens
tagggcaatagtgcg

SEQ ID NO: 1767435 - DNA, 15 bp, Homo sapiens
agggcaatagtgcgt

SEQ ID NO: 1767436 - DNA, 15 bp, Homo sapiens
gggcaatagtgcgtg

SEQ ID NO: 1767437 - DNA, 15 bp, Homo sapiens
ggcaatagtgcgtgc

SEQ ID NO: 1767438 - DNA, 15 bp, Homo sapiens
gcaatagtgcgtgcc

SEQ ID NO: 1767439 - DNA, 15 bp, Homo sapiens
caatagtgcgtgcct

SEQ ID NO: 1767440 - DNA, 15 bp, Homo sapiens
aatagtgcgtgcctg

SEQ ID NO: 1767441 - DNA, 15 bp, Homo sapiens
atagtgcgtgcctgt

SEQ ID NO: 1767442 - DNA, 15 bp, Homo sapiens
tagtgcgtgcctgta

SEQ ID NO: 1767443 - DNA, 15 bp, Homo sapiens
agtgcgtgcctgtag

SEQ ID NO: 1767444 - DNA, 15 bp, Homo sapiens
gtgcgtgcctgtagt

SEQ ID NO: 1767445 - DNA, 15 bp, Homo sapiens
tgcgtgcctgtagtc

SEQ ID NO: 1767446 - DNA, 15 bp, Homo sapiens
gcgtgcctgtagtcc

SEQ ID NO: 1767447 - DNA, 15 bp, Homo sapiens
cgtgcctgtagtccc

SEQ ID NO: 1767448 - DNA, 15 bp, Homo sapiens
tagtcccagctaccc

SEQ ID NO: 1767449 - DNA, 15 bp, Homo sapiens
agtcccagctaccca

SEQ ID NO: 1767450 - DNA, 15 bp, Homo sapiens
gtcccagctacccag

SEQ ID NO: 1767451 - DNA, 15 bp, Homo sapiens
cagctacccaggaga

SEQ ID NO: 1767452 - DNA, 15 bp, Homo sapiens
agctacccaggagac

SEQ ID NO: 1767453 - DNA, 15 bp, Homo sapiens
gctacccaggagact

SEQ ID NO: 1767454 - DNA, 15 bp, Homo sapiens
ctacccaggagactg

SEQ ID NO: 1767455 - DNA, 15 bp, Homo sapiens
tacccaggagactga

SEQ ID NO: 1767456 - DNA, 15 bp, Homo sapiens
acccaggagactgag

SEQ ID NO: 1767457 - DNA, 15 bp, Homo sapiens
cccaggagactgagg

SEQ ID NO: 1767458 - DNA, 15 bp, Homo sapiens
ccaggagactgaggc

SEQ ID NO: 1767459 - DNA, 15 bp, Homo sapiens
acctgggaggcagat

SEQ ID NO: 1767460 - DNA, 15 bp, Homo sapiens
cctgggaggcagatg

SEQ ID NO: 1767461 - DNA, 15 bp, Homo sapiens
ctgggaggcagatgt

SEQ ID NO: 1767462 - DNA, 15 bp, Homo sapiens
tgggaggcagatgtt

SEQ ID NO: 1767463 - DNA, 15 bp, Homo sapiens
gggaggcagatgttg

SEQ ID NO: 1767464 - DNA, 15 bp, Homo sapiens
ggaggcagatgttgc

SEQ ID NO: 1767465 - DNA, 15 bp, Homo sapiens
gaggcagatgttgca

SEQ ID NO: 1767466 - DNA, 15 bp, Homo sapiens
aggcagatgttgcag

SEQ ID NO: 1767467 - DNA, 15 bp, Homo sapiens
ggcagatgttgcagt

SEQ ID NO: 1767468 - DNA, 15 bp, Homo sapiens
gcagatgttgcagtg

SEQ ID NO: 1767469 - DNA, 15 bp, Homo sapiens
cagatgttgcagtga

SEQ ID NO: 1767470 - DNA, 15 bp, Homo sapiens
agatgttgcagtgaa

SEQ ID NO: 1767471 - DNA, 15 bp, Homo sapiens
gatgttgcagtgaac

SEQ ID NO: 1767472 - DNA, 15 bp, Homo sapiens
atgttgcagtgaacc

SEQ ID NO: 1767473 - DNA, 15 bp, Homo sapiens
tgttgcagtgaacca

SEQ ID NO: 1767474 - DNA, 15 bp, Homo sapiens
gttgcagtgaaccaa

SEQ ID NO: 1767475 - DNA, 15 bp, Homo sapiens
ttgcagtgaaccaag

SEQ ID NO: 1767476 - DNA, 15 bp, Homo sapiens
agtgaaccaagatca

SEQ ID NO: 1767477 - DNA, 15 bp, Homo sapiens
gtgaaccaagatcaa

SEQ ID NO: 1767478 - DNA, 15 bp, Homo sapiens
tgaaccaagatcaag

SEQ ID NO: 1767479 - DNA, 15 bp, Homo sapiens
gaaccaagatcaagc

SEQ ID NO: 1767480 - DNA, 15 bp, Homo sapiens
aaccaagatcaagcc

SEQ ID NO: 1767481 - DNA, 15 bp, Homo sapiens
accaagatcaagcca

SEQ ID NO: 1767482 - DNA, 15 bp, Homo sapiens
ccaagatcaagccac

SEQ ID NO: 1767483 - DNA, 15 bp, Homo sapiens
caagatcaagccact

SEQ ID NO: 1767484 - DNA, 15 bp, Homo sapiens
aagatcaagccactg

SEQ ID NO: 1767485 - DNA, 15 bp, Homo sapiens
agatcaagccactgc

SEQ ID NO: 1767486 - DNA, 15 bp, Homo sapiens
gatcaagccactgca

SEQ ID NO: 1767487 - DNA, 15 bp, Homo sapiens
atcaagccactgcac

SEQ ID NO: 1767488 - DNA, 15 bp, Homo sapiens
tcaagccactgcact

SEQ ID NO: 1767489 - DNA, 15 bp, Homo sapiens
caagccactgcactc

SEQ ID NO: 1767490 - DNA, 15 bp, Homo sapiens
aagccactgcactcc

SEQ ID NO: 1767491 - DNA, 15 bp, Homo sapiens
agccactgcactcca

SEQ ID NO: 1767492 - DNA, 15 bp, Homo sapiens
agcctgggcgacagc

SEQ ID NO: 1767493 - DNA, 15 bp, Homo sapiens
gcctgggcgacagcg

SEQ ID NO: 1767494 - DNA, 15 bp, Homo sapiens
cctgggcgacagcga

SEQ ID NO: 1767495 - DNA, 15 bp, Homo sapiens
ctgggcgacagcgag

SEQ ID NO: 1767496 - DNA, 15 bp, Homo sapiens
tgggcgacagcgaga

SEQ ID NO: 1767497 - DNA, 15 bp, Homo sapiens
gggcgacagcgagac

SEQ ID NO: 1767498 - DNA, 15 bp, Homo sapiens
ggcgacagcgagact

SEQ ID NO: 1767499 - DNA, 15 bp, Homo sapiens
gcgacagcgagacta

SEQ ID NO: 1767500 - DNA, 15 bp, Homo sapiens
cgacagcgagactat

SEQ ID NO: 1767501 - DNA, 15 bp, Homo sapiens
gacagcgagactatc

SEQ ID NO: 1767502 - DNA, 15 bp, Homo sapiens
acagcgagactatct

SEQ ID NO: 1767503 - DNA, 15 bp, Homo sapiens
cagcgagactatctc

SEQ ID NO: 1767504 - DNA, 15 bp, Homo sapiens
agcgagactatctca

SEQ ID NO: 1767505 - DNA, 15 bp, Homo sapiens
gcgagactatctcaa

SEQ ID NO: 1767506 - DNA, 15 bp, Homo sapiens
cgagactatctcaaa

SEQ ID NO: 1767507 - DNA, 15 bp, Homo sapiens
gagactatctcaaaa

SEQ ID NO: 1767508 - DNA, 15 bp, Homo sapiens
agactatctcaaaaa

SEQ ID NO: 1767509 - DNA, 15 bp, Homo sapiens
gactatctcaaaaaa

SEQ ID NO: 1767510 - DNA, 15 bp, Homo sapiens
actatctcaaaaaaa

SEQ ID NO: 1767511 - DNA, 15 bp, Homo sapiens
ctatctcaaaaaaaa

SEQ ID NO: 1767512 - DNA, 15 bp, Homo sapiens
tatctcaaaaaaaaa

SEQ ID NO: 1767513 - DNA, 15 bp, Homo sapiens
aaaaaaaaagtatac

SEQ ID NO: 1767514 - DNA, 15 bp, Homo sapiens
aaaaaaaagtatact

SEQ ID NO: 1767515 - DNA, 15 bp, Homo sapiens
aaaaaaagtatactt

SEQ ID NO: 1767516 - DNA, 15 bp, Homo sapiens
aaaaaagtatactta

SEQ ID NO: 1767517 - DNA, 15 bp, Homo sapiens
aaaaagtatacttat

SEQ ID NO: 1767518 - DNA, 15 bp, Homo sapiens
aaaagtatacttata

SEQ ID NO: 1767519 - DNA, 15 bp, Homo sapiens
aaagtatacttatat

SEQ ID NO: 1767520 - DNA, 15 bp, Homo sapiens
aagtatacttatatt

SEQ ID NO: 1767521 - DNA, 15 bp, Homo sapiens
agtatacttatattt

SEQ ID NO: 1767522 - DNA, 15 bp, Homo sapiens
gtatacttatatttt

SEQ ID NO: 1767523 - DNA, 15 bp, Homo sapiens
tatacttatatttta

SEQ ID NO: 1767524 - DNA, 15 bp, Homo sapiens
atacttatattttaa

SEQ ID NO: 1767525 - DNA, 15 bp, Homo sapiens
tacttatattttaaa

SEQ ID NO: 1767526 - DNA, 15 bp, Homo sapiens
acttatattttaaag

SEQ ID NO: 1767527 - DNA, 15 bp, Homo sapiens
cttatattttaaaga

SEQ ID NO: 1767528 - DNA, 15 bp, Homo sapiens
ttatattttaaagac

SEQ ID NO: 1767529 - DNA, 15 bp, Homo sapiens
tatattttaaagact

SEQ ID NO: 1767530 - DNA, 15 bp, Homo sapiens
atattttaaagactc

SEQ ID NO: 1767531 - DNA, 15 bp, Homo sapiens
tattttaaagactcc

SEQ ID NO: 1767532 - DNA, 15 bp, Homo sapiens
attttaaagactcca

SEQ ID NO: 1767533 - DNA, 15 bp, Homo sapiens
ttttaaagactccaa

SEQ ID NO: 1767534 - DNA, 15 bp, Homo sapiens
tttaaagactccaaa

SEQ ID NO: 1767535 - DNA, 15 bp, Homo sapiens
ttaaagactccaaaa

SEQ ID NO: 1767536 - DNA, 15 bp, Homo sapiens
taaagactccaaaat

SEQ ID NO: 1767537 - DNA, 15 bp, Homo sapiens
aaagactccaaaatc

SEQ ID NO: 1767538 - DNA, 15 bp, Homo sapiens
aagactccaaaatca

SEQ ID NO: 1767539 - DNA, 15 bp, Homo sapiens
agactccaaaatcag

SEQ ID NO: 1767540 - DNA, 15 bp, Homo sapiens
gactccaaaatcaga

SEQ ID NO: 1767541 - DNA, 15 bp, Homo sapiens
actccaaaatcagaa

SEQ ID NO: 1767542 - DNA, 15 bp, Homo sapiens
ctccaaaatcagaag

SEQ ID NO: 1767543 - DNA, 15 bp, Homo sapiens
tccaaaatcagaaga

SEQ ID NO: 1767544 - DNA, 15 bp, Homo sapiens
ccaaaatcagaagaa

SEQ ID NO: 1767545 - DNA, 15 bp, Homo sapiens
caaaatcagaagaag

SEQ ID NO: 1767546 - DNA, 15 bp, Homo sapiens
aaaatcagaagaaga

SEQ ID NO: 1767547 - DNA, 15 bp, Homo sapiens
aaatcagaagaagaa

SEQ ID NO: 1767548 - DNA, 15 bp, Homo sapiens
aatcagaagaagaaa

SEQ ID NO: 1767549 - DNA, 15 bp, Homo sapiens
atcagaagaagaaag

SEQ ID NO: 1767550 - DNA, 15 bp, Homo sapiens
tcagaagaagaaagt

SEQ ID NO: 1767551 - DNA, 15 bp, Homo sapiens
cagaagaagaaagtg

SEQ ID NO: 1767552 - DNA, 15 bp, Homo sapiens
agaagaagaaagtgt

SEQ ID NO: 1767553 - DNA, 15 bp, Homo sapiens
gaagaagaaagtgtg

SEQ ID NO: 1767554 - DNA, 15 bp, Homo sapiens
aagaagaaagtgtgt

SEQ ID NO: 1767555 - DNA, 15 bp, Homo sapiens
agaagaaagtgtgtg

SEQ ID NO: 1767556 - DNA, 15 bp, Homo sapiens
gaagaaagtgtgtgt

SEQ ID NO: 1767557 - DNA, 15 bp, Homo sapiens
aagaaagtgtgtgta

SEQ ID NO: 1767558 - DNA, 15 bp, Homo sapiens
agaaagtgtgtgtaa

SEQ ID NO: 1767559 - DNA, 15 bp, Homo sapiens
gaaagtgtgtgtaag

SEQ ID NO: 1767560 - DNA, 15 bp, Homo sapiens
aaagtgtgtgtaagg

SEQ ID NO: 1767561 - DNA, 15 bp, Homo sapiens
aagtgtgtgtaaggt

SEQ ID NO: 1767562 - DNA, 15 bp, Homo sapiens
agtgtgtgtaaggtg

SEQ ID NO: 1767563 - DNA, 15 bp, Homo sapiens
gtgtgtgtaaggtga

SEQ ID NO: 1767564 - DNA, 15 bp, Homo sapiens
tgtgtgtaaggtgag

SEQ ID NO: 1767565 - DNA, 15 bp, Homo sapiens
gtgtgtaaggtgagg

SEQ ID NO: 1767566 - DNA, 15 bp, Homo sapiens
tgtgtaaggtgaggg

SEQ ID NO: 1767567 - DNA, 15 bp, Homo sapiens
gtgtaaggtgagggt

SEQ ID NO: 1767568 - DNA, 15 bp, Homo sapiens
tgtaaggtgagggta

SEQ ID NO: 1767569 - DNA, 15 bp, Homo sapiens
gtaaggtgagggtac

SEQ ID NO: 1767570 - DNA, 15 bp, Homo sapiens
taaggtgagggtact

SEQ ID NO: 1767571 - DNA, 15 bp, Homo sapiens
aaggtgagggtactt

SEQ ID NO: 1767572 - DNA, 15 bp, Homo sapiens
aggtgagggtactta

SEQ ID NO: 1767573 - DNA, 15 bp, Homo sapiens
ggtgagggtacttaa

SEQ ID NO: 1767574 - DNA, 15 bp, Homo sapiens
gtgagggtacttaaa

SEQ ID NO: 1767575 - DNA, 15 bp, Homo sapiens
tgagggtacttaaat

SEQ ID NO: 1767576 - DNA, 15 bp, Homo sapiens
gagggtacttaaatg

SEQ ID NO: 1767577 - DNA, 15 bp, Homo sapiens
agggtacttaaatgt

SEQ ID NO: 1767578 - DNA, 15 bp, Homo sapiens
gggtacttaaatgta

SEQ ID NO: 1767579 - DNA, 15 bp, Homo sapiens
ggtacttaaatgtag

SEQ ID NO: 1767580 - DNA, 15 bp, Homo sapiens
gtacttaaatgtagg

SEQ ID NO: 1767581 - DNA, 15 bp, Homo sapiens
tacttaaatgtaggt

SEQ ID NO: 1767582 - DNA, 15 bp, Homo sapiens
acttaaatgtaggtg

SEQ ID NO: 1767583 - DNA, 15 bp, Homo sapiens
cttaaatgtaggtgt

SEQ ID NO: 1767584 - DNA, 15 bp, Homo sapiens
ttaaatgtaggtgtt

SEQ ID NO: 1767585 - DNA, 15 bp, Homo sapiens
taaatgtaggtgtta

SEQ ID NO: 1767586 - DNA, 15 bp, Homo sapiens
aaatgtaggtgttat

SEQ ID NO: 1767587 - DNA, 15 bp, Homo sapiens
aatgtaggtgttatt

SEQ ID NO: 1767588 - DNA, 15 bp, Homo sapiens
atgtaggtgttattt

SEQ ID NO: 1767589 - DNA, 15 bp, Homo sapiens
tgtaggtgttatttc

SEQ ID NO: 1767590 - DNA, 15 bp, Homo sapiens
gtaggtgttatttcc

SEQ ID NO: 1767591 - DNA, 15 bp, Homo sapiens
taggtgttatttcct

SEQ ID NO: 1767592 - DNA, 15 bp, Homo sapiens
aggtgttatttcctc

SEQ ID NO: 1767593 - DNA, 15 bp, Homo sapiens
ggtgttatttcctca

SEQ ID NO: 1767594 - DNA, 15 bp, Homo sapiens
gtgttatttcctcaa

SEQ ID NO: 1767595 - DNA, 15 bp, Homo sapiens
tgttatttcctcaaa

SEQ ID NO: 1767596 - DNA, 15 bp, Homo sapiens
gttatttcctcaaag

SEQ ID NO: 1767597 - DNA, 15 bp, Homo sapiens
ttatttcctcaaaga

SEQ ID NO: 1767598 - DNA, 15 bp, Homo sapiens
tatttcctcaaagat

SEQ ID NO: 1767599 - DNA, 15 bp, Homo sapiens
atttcctcaaagatt

SEQ ID NO: 1767600 - DNA, 15 bp, Homo sapiens
tttcctcaaagattg

SEQ ID NO: 1767601 - DNA, 15 bp, Homo sapiens
ttcctcaaagattga

SEQ ID NO: 1767602 - DNA, 15 bp, Homo sapiens
tcctcaaagattgag

SEQ ID NO: 1767603 - DNA, 15 bp, Homo sapiens
cctcaaagattgagg

SEQ ID NO: 1767604 - DNA, 15 bp, Homo sapiens
ctcaaagattgagga

SEQ ID NO: 1767605 - DNA, 15 bp, Homo sapiens
tcaaagattgaggat

SEQ ID NO: 1767606 - DNA, 15 bp, Homo sapiens
caaagattgaggata

SEQ ID NO: 1767607 - DNA, 15 bp, Homo sapiens
aaagattgaggatat

SEQ ID NO: 1767608 - DNA, 15 bp, Homo sapiens
aagattgaggatatc

SEQ ID NO: 1767609 - DNA, 15 bp, Homo sapiens
agattgaggatatca

SEQ ID NO: 1767610 - DNA, 15 bp, Homo sapiens
gattgaggatatcac

SEQ ID NO: 1767611 - DNA, 15 bp, Homo sapiens
attgaggatatcaca

SEQ ID NO: 1767612 - DNA, 15 bp, Homo sapiens
ttgaggatatcacaa

SEQ ID NO: 1767613 - DNA, 15 bp, Homo sapiens
tgaggatatcacaac

SEQ ID NO: 1767614 - DNA, 15 bp, Homo sapiens
gaggatatcacaacc

SEQ ID NO: 1767615 - DNA, 15 bp, Homo sapiens
aggatatcacaacct

SEQ ID NO: 1767616 - DNA, 15 bp, Homo sapiens
ggatatcacaacctc

SEQ ID NO: 1767617 - DNA, 15 bp, Homo sapiens
gatatcacaacctct

SEQ ID NO: 1767618 - DNA, 15 bp, Homo sapiens
atatcacaacctcta

SEQ ID NO: 1767619 - DNA, 15 bp, Homo sapiens
tatcacaacctctat

SEQ ID NO: 1767620 - DNA, 15 bp, Homo sapiens
atcacaacctctatg

SEQ ID NO: 1767621 - DNA, 15 bp, Homo sapiens
tcacaacctctatgg

SEQ ID NO: 1767622 - DNA, 15 bp, Homo sapiens
cacaacctctatggc

SEQ ID NO: 1767623 - DNA, 15 bp, Homo sapiens
acaacctctatggca

SEQ ID NO: 1767624 - DNA, 15 bp, Homo sapiens
caacctctatggcac

SEQ ID NO: 1767625 - DNA, 15 bp, Homo sapiens
aacctctatggcaca

SEQ ID NO: 1767626 - DNA, 15 bp, Homo sapiens
acctctatggcacat

SEQ ID NO: 1767627 - DNA, 15 bp, Homo sapiens
cctctatggcacatg

SEQ ID NO: 1767628 - DNA, 15 bp, Homo sapiens
ctctatggcacatgt

SEQ ID NO: 1767629 - DNA, 15 bp, Homo sapiens
tctatggcacatgtt

SEQ ID NO: 1767630 - DNA, 15 bp, Homo sapiens
ctatggcacatgttt

SEQ ID NO: 1767631 - DNA, 15 bp, Homo sapiens
tatggcacatgtttt

SEQ ID NO: 1767632 - DNA, 15 bp, Homo sapiens
atggcacatgttttt

SEQ ID NO: 1767633 - DNA, 15 bp, Homo sapiens
tggcacatgtttttc

SEQ ID NO: 1767634 - DNA, 15 bp, Homo sapiens
ggcacatgtttttct

SEQ ID NO: 1767635 - DNA, 15 bp, Homo sapiens
gcacatgtttttctt

SEQ ID NO: 1767636 - DNA, 15 bp, Homo sapiens
cacatgtttttcttg

SEQ ID NO: 1767637 - DNA, 15 bp, Homo sapiens
acatgtttttcttgt

SEQ ID NO: 1767638 - DNA, 15 bp, Homo sapiens
catgtttttcttgtt

SEQ ID NO: 1767639 - DNA, 15 bp, Homo sapiens
atgtttttcttgttt

SEQ ID NO: 1767640 - DNA, 15 bp, Homo sapiens
tgtttttcttgtttt

SEQ ID NO: 1767641 - DNA, 15 bp, Homo sapiens
gtttttcttgtttta

SEQ ID NO: 1767642 - DNA, 15 bp, Homo sapiens
tttttcttgttttaa

SEQ ID NO: 1767643 - DNA, 15 bp, Homo sapiens
ttttcttgttttaaa

SEQ ID NO: 1767644 - DNA, 15 bp, Homo sapiens
tttcttgttttaaat

SEQ ID NO: 1767645 - DNA, 15 bp, Homo sapiens
ttcttgttttaaata

SEQ ID NO: 1767646 - DNA, 15 bp, Homo sapiens
tcttgttttaaatat

SEQ ID NO: 1767647 - DNA, 15 bp, Homo sapiens
cttgttttaaatatc

SEQ ID NO: 1767648 - DNA, 15 bp, Homo sapiens
ttgttttaaatatca

SEQ ID NO: 1767649 - DNA, 15 bp, Homo sapiens
tgttttaaatatcat

SEQ ID NO: 1767650 - DNA, 15 bp, Homo sapiens
gttttaaatatcatt

SEQ ID NO: 1767651 - DNA, 15 bp, Homo sapiens
ttttaaatatcattt

SEQ ID NO: 1767652 - DNA, 15 bp, Homo sapiens
tttaaatatcatttt

SEQ ID NO: 1767653 - DNA, 15 bp, Homo sapiens
ttaaatatcattttc

SEQ ID NO: 1767654 - DNA, 15 bp, Homo sapiens
taaatatcattttct

SEQ ID NO: 1767655 - DNA, 15 bp, Homo sapiens
aaatatcattttctt

SEQ ID NO: 1767656 - DNA, 15 bp, Homo sapiens
aatatcattttcttc

SEQ ID NO: 1767657 - DNA, 15 bp, Homo sapiens
atatcattttcttca

SEQ ID NO: 1767658 - DNA, 15 bp, Homo sapiens
tatcattttcttcag

SEQ ID NO: 1767659 - DNA, 15 bp, Homo sapiens
atcattttcttcaga

SEQ ID NO: 1767660 - DNA, 15 bp, Homo sapiens
tcattttcttcagaa

SEQ ID NO: 1767661 - DNA, 15 bp, Homo sapiens
cattttcttcagaaa

SEQ ID NO: 1767662 - DNA, 15 bp, Homo sapiens
attttcttcagaaaa

SEQ ID NO: 1767663 - DNA, 15 bp, Homo sapiens
ttttcttcagaaaag

SEQ ID NO: 1767664 - DNA, 15 bp, Homo sapiens
tttcttcagaaaagg

SEQ ID NO: 1767665 - DNA, 15 bp, Homo sapiens
ttcttcagaaaaggc

SEQ ID NO: 1767666 - DNA, 15 bp, Homo sapiens
tcttcagaaaaggct

SEQ ID NO: 1767667 - DNA, 15 bp, Homo sapiens
cttcagaaaaggcta

SEQ ID NO: 1767668 - DNA, 15 bp, Homo sapiens
ttcagaaaaggctag

SEQ ID NO: 1767669 - DNA, 15 bp, Homo sapiens
tcagaaaaggctaga

SEQ ID NO: 1767670 - DNA, 15 bp, Homo sapiens
cagaaaaggctagat

SEQ ID NO: 1767671 - DNA, 15 bp, Homo sapiens
agaaaaggctagatc

SEQ ID NO: 1767672 - DNA, 15 bp, Homo sapiens
gaaaaggctagatct

SEQ ID NO: 1767673 - DNA, 15 bp, Homo sapiens
aaaaggctagatcta

SEQ ID NO: 1767674 - DNA, 15 bp, Homo sapiens
aaaggctagatctag

SEQ ID NO: 1767675 - DNA, 15 bp, Homo sapiens
aaggctagatctagt

SEQ ID NO: 1767676 - DNA, 15 bp, Homo sapiens
aggctagatctagtt

SEQ ID NO: 1767677 - DNA, 15 bp, Homo sapiens
ggctagatctagtta

SEQ ID NO: 1767678 - DNA, 15 bp, Homo sapiens
gctagatctagttat

SEQ ID NO: 1767679 - DNA, 15 bp, Homo sapiens
ctagatctagttatg

SEQ ID NO: 1767680 - DNA, 15 bp, Homo sapiens
tagatctagttatgc

SEQ ID NO: 1767681 - DNA, 15 bp, Homo sapiens
agatctagttatgcc

SEQ ID NO: 1767682 - DNA, 15 bp, Homo sapiens
gatctagttatgcct

SEQ ID NO: 1767683 - DNA, 15 bp, Homo sapiens
atctagttatgcctt

SEQ ID NO: 1767684 - DNA, 15 bp, Homo sapiens
tctagttatgcctta

SEQ ID NO: 1767685 - DNA, 15 bp, Homo sapiens
ctagttatgccttac

SEQ ID NO: 1767686 - DNA, 15 bp, Homo sapiens
tagttatgccttact

SEQ ID NO: 1767687 - DNA, 15 bp, Homo sapiens
agttatgccttactg

SEQ ID NO: 1767688 - DNA, 15 bp, Homo sapiens
gttatgccttactgt

SEQ ID NO: 1767689 - DNA, 15 bp, Homo sapiens
ttatgccttactgtt

SEQ ID NO: 1767690 - DNA, 15 bp, Homo sapiens
tatgccttactgtta

SEQ ID NO: 1767691 - DNA, 15 bp, Homo sapiens
atgccttactgttat

SEQ ID NO: 1767692 - DNA, 15 bp, Homo sapiens
tgccttactgttatt

SEQ ID NO: 1767693 - DNA, 15 bp, Homo sapiens
gccttactgttatta

SEQ ID NO: 1767694 - DNA, 15 bp, Homo sapiens
ccttactgttattat

SEQ ID NO: 1767695 - DNA, 15 bp, Homo sapiens
cttactgttattatt

SEQ ID NO: 1767696 - DNA, 15 bp, Homo sapiens
ttactgttattattt

SEQ ID NO: 1767697 - DNA, 15 bp, Homo sapiens
tactgttattatttt

SEQ ID NO: 1767698 - DNA, 15 bp, Homo sapiens
actgttattattttt

SEQ ID NO: 1767699 - DNA, 15 bp, Homo sapiens
ctgttattatttttt

SEQ ID NO: 1767700 - DNA, 15 bp, Homo sapiens
tgttattattttttt

SEQ ID NO: 1767701 - DNA, 15 bp, Homo sapiens
gttattattttttta

SEQ ID NO: 1767702 - DNA, 15 bp, Homo sapiens
ttattatttttttaa

SEQ ID NO: 1767703 - DNA, 15 bp, Homo sapiens
tattatttttttaat

SEQ ID NO: 1767704 - DNA, 15 bp, Homo sapiens
attatttttttaatt

SEQ ID NO: 1767705 - DNA, 15 bp, Homo sapiens
tatttttttaatttg

SEQ ID NO: 1767706 - DNA, 15 bp, Homo sapiens
atttttttaatttgg

SEQ ID NO: 1767707 - DNA, 15 bp, Homo sapiens
tttttttaatttggt

SEQ ID NO: 1767708 - DNA, 15 bp, Homo sapiens
ttttttaatttggtc

SEQ ID NO: 1767709 - DNA, 15 bp, Homo sapiens
tttttaatttggtct

SEQ ID NO: 1767710 - DNA, 15 bp, Homo sapiens
ttttaatttggtcta

SEQ ID NO: 1767711 - DNA, 15 bp, Homo sapiens
tttaatttggtctag

SEQ ID NO: 1767712 - DNA, 15 bp, Homo sapiens
ttaatttggtctagt

SEQ ID NO: 1767713 - DNA, 15 bp, Homo sapiens
taatttggtctagtt

SEQ ID NO: 1767714 - DNA, 15 bp, Homo sapiens
aatttggtctagttt

SEQ ID NO: 1767715 - DNA, 15 bp, Homo sapiens
atttggtctagttta

SEQ ID NO: 1767716 - DNA, 15 bp, Homo sapiens
tttggtctagtttaa

SEQ ID NO: 1767717 - DNA, 15 bp, Homo sapiens
ttggtctagtttaag

SEQ ID NO: 1767718 - DNA, 15 bp, Homo sapiens
tggtctagtttaagc

SEQ ID NO: 1767719 - DNA, 15 bp, Homo sapiens
ggtctagtttaagct

SEQ ID NO: 1767720 - DNA, 15 bp, Homo sapiens
gtctagtttaagctg

SEQ ID NO: 1767721 - DNA, 15 bp, Homo sapiens
tctagtttaagctga

SEQ ID NO: 1767722 - DNA, 15 bp, Homo sapiens
ctagtttaagctgaa

SEQ ID NO: 1767723 - DNA, 15 bp, Homo sapiens
tagtttaagctgaaa

SEQ ID NO: 1767724 - DNA, 15 bp, Homo sapiens
agtttaagctgaaac

SEQ ID NO: 1767725 - DNA, 15 bp, Homo sapiens
gtttaagctgaaact

SEQ ID NO: 1767726 - DNA, 15 bp, Homo sapiens
tttaagctgaaactc

SEQ ID NO: 1767727 - DNA, 15 bp, Homo sapiens
ttaagctgaaactct

SEQ ID NO: 1767728 - DNA, 15 bp, Homo sapiens
taagctgaaactctt

SEQ ID NO: 1767729 - DNA, 15 bp, Homo sapiens
aagctgaaactcttc

SEQ ID NO: 1767730 - DNA, 15 bp, Homo sapiens
agctgaaactcttcc

SEQ ID NO: 1767731 - DNA, 15 bp, Homo sapiens
gctgaaactcttcct

SEQ ID NO: 1767732 - DNA, 15 bp, Homo sapiens
ctgaaactcttcctc

SEQ ID NO: 1767733 - DNA, 15 bp, Homo sapiens
tgaaactcttcctct

SEQ ID NO: 1767734 - DNA, 15 bp, Homo sapiens
gaaactcttcctctt

SEQ ID NO: 1767735 - DNA, 15 bp, Homo sapiens
aaactcttcctcttg

SEQ ID NO: 1767736 - DNA, 15 bp, Homo sapiens
aactcttcctcttgg

SEQ ID NO: 1767737 - DNA, 15 bp, Homo sapiens
actcttcctcttggg

SEQ ID NO: 1767738 - DNA, 15 bp, Homo sapiens
ctcttcctcttgggt

SEQ ID NO: 1767739 - DNA, 15 bp, Homo sapiens
tcttcctcttgggta

SEQ ID NO: 1767740 - DNA, 15 bp, Homo sapiens
cttcctcttgggtat

SEQ ID NO: 1767741 - DNA, 15 bp, Homo sapiens
ttcctcttgggtatt

SEQ ID NO: 1767742 - DNA, 15 bp, Homo sapiens
tcctcttgggtatta

SEQ ID NO: 1767743 - DNA, 15 bp, Homo sapiens
cctcttgggtattaa

SEQ ID NO: 1767744 - DNA, 15 bp, Homo sapiens
ctcttgggtattaag

SEQ ID NO: 1767745 - DNA, 15 bp, Homo sapiens
tcttgggtattaagt

SEQ ID NO: 1767746 - DNA, 15 bp, Homo sapiens
cttgggtattaagta

SEQ ID NO: 1767747 - DNA, 15 bp, Homo sapiens
ttgggtattaagtaa

SEQ ID NO: 1767748 - DNA, 15 bp, Homo sapiens
tgggtattaagtaat

SEQ ID NO: 1767749 - DNA, 15 bp, Homo sapiens
gggtattaagtaatt

SEQ ID NO: 1767750 - DNA, 15 bp, Homo sapiens
ggtattaagtaattt

SEQ ID NO: 1767751 - DNA, 15 bp, Homo sapiens
gtattaagtaattta

SEQ ID NO: 1767752 - DNA, 15 bp, Homo sapiens
tattaagtaatttaa

SEQ ID NO: 1767753 - DNA, 15 bp, Homo sapiens
attaagtaatttaag

SEQ ID NO: 1767754 - DNA, 15 bp, Homo sapiens
ttaagtaatttaaga

SEQ ID NO: 1767755 - DNA, 15 bp, Homo sapiens
taagtaatttaagaa

SEQ ID NO: 1767756 - DNA, 15 bp, Homo sapiens
aagtaatttaagaac

SEQ ID NO: 1767757 - DNA, 15 bp, Homo sapiens
agtaatttaagaaca

SEQ ID NO: 1767758 - DNA, 15 bp, Homo sapiens
gtaatttaagaacaa

SEQ ID NO: 1767759 - DNA, 15 bp, Homo sapiens
taatttaagaacaat

SEQ ID NO: 1767760 - DNA, 15 bp, Homo sapiens
aatttaagaacaatt

SEQ ID NO: 1767761 - DNA, 15 bp, Homo sapiens
atttaagaacaattt

SEQ ID NO: 1767762 - DNA, 15 bp, Homo sapiens
tttaagaacaattta

SEQ ID NO: 1767763 - DNA, 15 bp, Homo sapiens
ttaagaacaatttat

SEQ ID NO: 1767764 - DNA, 15 bp, Homo sapiens
taagaacaatttatt

SEQ ID NO: 1767765 - DNA, 15 bp, Homo sapiens
aagaacaatttattt

SEQ ID NO: 1767766 - DNA, 15 bp, Homo sapiens
agaacaatttatttt

SEQ ID NO: 1767767 - DNA, 15 bp, Homo sapiens
gaacaatttattttt

SEQ ID NO: 1767768 - DNA, 15 bp, Homo sapiens
aacaatttatttttt

SEQ ID NO: 1767769 - DNA, 15 bp, Homo sapiens
acaatttattttttt

SEQ ID NO: 1767770 - DNA, 15 bp, Homo sapiens
caatttatttttttc

SEQ ID NO: 1767771 - DNA, 15 bp, Homo sapiens
aatttatttttttct

SEQ ID NO: 1767772 - DNA, 15 bp, Homo sapiens
atttatttttttctc

SEQ ID NO: 1767773 - DNA, 15 bp, Homo sapiens
tttatttttttctca

SEQ ID NO: 1767774 - DNA, 15 bp, Homo sapiens
ttatttttttctcat

SEQ ID NO: 1767775 - DNA, 15 bp, Homo sapiens
tatttttttctcata

SEQ ID NO: 1767776 - DNA, 15 bp, Homo sapiens
atttttttctcataa

SEQ ID NO: 1767777 - DNA, 15 bp, Homo sapiens
tttttttctcataaa

SEQ ID NO: 1767778 - DNA, 15 bp, Homo sapiens
ttttttctcataaat

SEQ ID NO: 1767779 - DNA, 15 bp, Homo sapiens
tttttctcataaatt

SEQ ID NO: 1767780 - DNA, 15 bp, Homo sapiens
ttttctcataaatta

SEQ ID NO: 1767781 - DNA, 15 bp, Homo sapiens
tttctcataaattac

SEQ ID NO: 1767782 - DNA, 15 bp, Homo sapiens
ttctcataaattact

SEQ ID NO: 1767783 - DNA, 15 bp, Homo sapiens
tctcataaattactt

SEQ ID NO: 1767784 - DNA, 15 bp, Homo sapiens
ctcataaattactta

SEQ ID NO: 1767785 - DNA, 15 bp, Homo sapiens
tcataaattacttag

SEQ ID NO: 1767786 - DNA, 15 bp, Homo sapiens
cataaattacttagc

SEQ ID NO: 1767787 - DNA, 15 bp, Homo sapiens
ataaattacttagct

SEQ ID NO: 1767788 - DNA, 15 bp, Homo sapiens
taaattacttagcta

SEQ ID NO: 1767789 - DNA, 15 bp, Homo sapiens
aaattacttagctag

SEQ ID NO: 1767790 - DNA, 15 bp, Homo sapiens
aattacttagctagc

SEQ ID NO: 1767791 - DNA, 15 bp, Homo sapiens
attacttagctagct

SEQ ID NO: 1767792 - DNA, 15 bp, Homo sapiens
ttacttagctagctt

SEQ ID NO: 1767793 - DNA, 15 bp, Homo sapiens
tacttagctagctta

SEQ ID NO: 1767794 - DNA, 15 bp, Homo sapiens
acttagctagcttaa

SEQ ID NO: 1767795 - DNA, 15 bp, Homo sapiens
cttagctagcttaaa

SEQ ID NO: 1767796 - DNA, 15 bp, Homo sapiens
ttagctagcttaaaa

SEQ ID NO: 1767797 - DNA, 15 bp, Homo sapiens
tagctagcttaaaaa

SEQ ID NO: 1767798 - DNA, 15 bp, Homo sapiens
agctagcttaaaaat

SEQ ID NO: 1767799 - DNA, 15 bp, Homo sapiens
gctagcttaaaaata

SEQ ID NO: 1767800 - DNA, 15 bp, Homo sapiens
ctagcttaaaaataa

SEQ ID NO: 1767801 - DNA, 15 bp, Homo sapiens
tagcttaaaaataac

SEQ ID NO: 1767802 - DNA, 15 bp, Homo sapiens
agcttaaaaataact

SEQ ID NO: 1767803 - DNA, 15 bp, Homo sapiens
gcttaaaaataactt

SEQ ID NO: 1767804 - DNA, 15 bp, Homo sapiens
cttaaaaataactta

SEQ ID NO: 1767805 - DNA, 15 bp, Homo sapiens
ttaaaaataacttat

SEQ ID NO: 1767806 - DNA, 15 bp, Homo sapiens
taaaaataacttatt

SEQ ID NO: 1767807 - DNA, 15 bp, Homo sapiens
aaaaataacttatta

SEQ ID NO: 1767808 - DNA, 15 bp, Homo sapiens
aaaataacttattac

SEQ ID NO: 1767809 - DNA, 15 bp, Homo sapiens
aaataacttattaca

SEQ ID NO: 1767810 - DNA, 15 bp, Homo sapiens
aataacttattacag

SEQ ID NO: 1767811 - DNA, 15 bp, Homo sapiens
ataacttattacagt

SEQ ID NO: 1767812 - DNA, 15 bp, Homo sapiens
taacttattacagta

SEQ ID NO: 1767813 - DNA, 15 bp, Homo sapiens
aacttattacagtaa

SEQ ID NO: 1767814 - DNA, 15 bp, Homo sapiens
acttattacagtaaa

SEQ ID NO: 1767815 - DNA, 15 bp, Homo sapiens
cttattacagtaaaa

SEQ ID NO: 1767816 - DNA, 15 bp, Homo sapiens
ttattacagtaaaat

SEQ ID NO: 1767817 - DNA, 15 bp, Homo sapiens
tattacagtaaaatg

SEQ ID NO: 1767818 - DNA, 15 bp, Homo sapiens
attacagtaaaatgt

SEQ ID NO: 1767819 - DNA, 15 bp, Homo sapiens
ttacagtaaaatgtt

SEQ ID NO: 1767820 - DNA, 15 bp, Homo sapiens
tacagtaaaatgttt

SEQ ID NO: 1767821 - DNA, 15 bp, Homo sapiens
cagtaaaatgttttg

SEQ ID NO: 1767822 - DNA, 15 bp, Homo sapiens
agtaaaatgttttgt

SEQ ID NO: 1767823 - DNA, 15 bp, Homo sapiens
gtaaaatgttttgtg

SEQ ID NO: 1767824 - DNA, 15 bp, Homo sapiens
taaaatgttttgtgt

SEQ ID NO: 1767825 - DNA, 15 bp, Homo sapiens
aaaatgttttgtgtt

SEQ ID NO: 1767826 - DNA, 15 bp, Homo sapiens
aaatgttttgtgttg

SEQ ID NO: 1767827 - DNA, 15 bp, Homo sapiens
aatgttttgtgttgt

SEQ ID NO: 1767828 - DNA, 15 bp, Homo sapiens
atgttttgtgttgtt

SEQ ID NO: 1767829 - DNA, 15 bp, Homo sapiens
tgttttgtgttgttt

SEQ ID NO: 1767830 - DNA, 15 bp, Homo sapiens
gttttgtgttgtttt

SEQ ID NO: 1767831 - DNA, 15 bp, Homo sapiens
ttttgtgttgttttg

SEQ ID NO: 1767832 - DNA, 15 bp, Homo sapiens
tttgtgttgttttgc

SEQ ID NO: 1767833 - DNA, 15 bp, Homo sapiens
ttgtgttgttttgca

SEQ ID NO: 1767834 - DNA, 15 bp, Homo sapiens
tgtgttgttttgcac

SEQ ID NO: 1767835 - DNA, 15 bp, Homo sapiens
gtgttgttttgcacc

SEQ ID NO: 1767836 - DNA, 15 bp, Homo sapiens
tgttgttttgcacca

SEQ ID NO: 1767837 - DNA, 15 bp, Homo sapiens
gttgttttgcaccat

SEQ ID NO: 1767838 - DNA, 15 bp, Homo sapiens
ttgttttgcaccatt

SEQ ID NO: 1767839 - DNA, 15 bp, Homo sapiens
tgttttgcaccattc

SEQ ID NO: 1767840 - DNA, 15 bp, Homo sapiens
gttttgcaccattct

SEQ ID NO: 1767841 - DNA, 15 bp, Homo sapiens
ttttgcaccattctt

SEQ ID NO: 1767842 - DNA, 15 bp, Homo sapiens
tttgcaccattcttt

SEQ ID NO: 1767843 - DNA, 15 bp, Homo sapiens
ttgcaccattctttc

SEQ ID NO: 1767844 - DNA, 15 bp, Homo sapiens
tgcaccattctttca

SEQ ID NO: 1767845 - DNA, 15 bp, Homo sapiens
gcaccattctttcac

SEQ ID NO: 1767846 - DNA, 15 bp, Homo sapiens
caccattctttcaca

SEQ ID NO: 1767847 - DNA, 15 bp, Homo sapiens
accattctttcacac

SEQ ID NO: 1767848 - DNA, 15 bp, Homo sapiens
ccattctttcacact

SEQ ID NO: 1767849 - DNA, 15 bp, Homo sapiens
cattctttcacactc

SEQ ID NO: 1767850 - DNA, 15 bp, Homo sapiens
attctttcacactca

SEQ ID NO: 1767851 - DNA, 15 bp, Homo sapiens
ttctttcacactcag

SEQ ID NO: 1767852 - DNA, 15 bp, Homo sapiens
tctttcacactcagc

SEQ ID NO: 1767853 - DNA, 15 bp, Homo sapiens
ctttcacactcagca

SEQ ID NO: 1767854 - DNA, 15 bp, Homo sapiens
tttcacactcagcaa

SEQ ID NO: 1767855 - DNA, 15 bp, Homo sapiens
ttcacactcagcaat

SEQ ID NO: 1767856 - DNA, 15 bp, Homo sapiens
tcacactcagcaatt

SEQ ID NO: 1767857 - DNA, 15 bp, Homo sapiens
cacactcagcaattt

SEQ ID NO: 1767858 - DNA, 15 bp, Homo sapiens
acactcagcaatttt

SEQ ID NO: 1767859 - DNA, 15 bp, Homo sapiens
cactcagcaattttt

SEQ ID NO: 1767860 - DNA, 15 bp, Homo sapiens
actcagcaatttttg

SEQ ID NO: 1767861 - DNA, 15 bp, Homo sapiens
ctcagcaatttttgt

SEQ ID NO: 1767862 - DNA, 15 bp, Homo sapiens
tcagcaatttttgtc

SEQ ID NO: 1767863 - DNA, 15 bp, Homo sapiens
cagcaatttttgtca

SEQ ID NO: 1767864 - DNA, 15 bp, Homo sapiens
agcaatttttgtcat

SEQ ID NO: 1767865 - DNA, 15 bp, Homo sapiens
gcaatttttgtcatt

SEQ ID NO: 1767866 - DNA, 15 bp, Homo sapiens
caatttttgtcattt

SEQ ID NO: 1767867 - DNA, 15 bp, Homo sapiens
aatttttgtcatttg

SEQ ID NO: 1767868 - DNA, 15 bp, Homo sapiens
atttttgtcatttgt

SEQ ID NO: 1767869 - DNA, 15 bp, Homo sapiens
tttttgtcatttgtt

SEQ ID NO: 1767870 - DNA, 15 bp, Homo sapiens
ttttgtcatttgttg

SEQ ID NO: 1767871 - DNA, 15 bp, Homo sapiens
tttgtcatttgttga

SEQ ID NO: 1767872 - DNA, 15 bp, Homo sapiens
ttgtcatttgttgat

SEQ ID NO: 1767873 - DNA, 15 bp, Homo sapiens
tgtcatttgttgatg

SEQ ID NO: 1767874 - DNA, 15 bp, Homo sapiens
gtcatttgttgatga

SEQ ID NO: 1767875 - DNA, 15 bp, Homo sapiens
tcatttgttgatgaa

SEQ ID NO: 1767876 - DNA, 15 bp, Homo sapiens
catttgttgatgaac

SEQ ID NO: 1767877 - DNA, 15 bp, Homo sapiens
atttgttgatgaact

SEQ ID NO: 1767878 - DNA, 15 bp, Homo sapiens
tttgttgatgaacta

SEQ ID NO: 1767879 - DNA, 15 bp, Homo sapiens
ttgttgatgaactat

SEQ ID NO: 1767880 - DNA, 15 bp, Homo sapiens
tgttgatgaactata

SEQ ID NO: 1767881 - DNA, 15 bp, Homo sapiens
gttgatgaactataa

SEQ ID NO: 1767882 - DNA, 15 bp, Homo sapiens
ttgatgaactataat

SEQ ID NO: 1767883 - DNA, 15 bp, Homo sapiens
tgatgaactataatc

SEQ ID NO: 1767884 - DNA, 15 bp, Homo sapiens
gatgaactataatct

SEQ ID NO: 1767885 - DNA, 15 bp, Homo sapiens
atgaactataatcta

SEQ ID NO: 1767886 - DNA, 15 bp, Homo sapiens
tgaactataatctat

SEQ ID NO: 1767887 - DNA, 15 bp, Homo sapiens
gaactataatctatt

SEQ ID NO: 1767888 - DNA, 15 bp, Homo sapiens
aactataatctattt

SEQ ID NO: 1767889 - DNA, 15 bp, Homo sapiens
actataatctatttc

SEQ ID NO: 1767890 - DNA, 15 bp, Homo sapiens
ctataatctatttct

SEQ ID NO: 1767891 - DNA, 15 bp, Homo sapiens
tataatctatttcta

SEQ ID NO: 1767892 - DNA, 15 bp, Homo sapiens
ataatctatttctac

SEQ ID NO: 1767893 - DNA, 15 bp, Homo sapiens
taatctatttctact

SEQ ID NO: 1767894 - DNA, 15 bp, Homo sapiens
aatctatttctactg

SEQ ID NO: 1767895 - DNA, 15 bp, Homo sapiens
atctatttctactgt

SEQ ID NO: 1767896 - DNA, 15 bp, Homo sapiens
tctatttctactgtc

SEQ ID NO: 1767897 - DNA, 15 bp, Homo sapiens
ctatttctactgtct

SEQ ID NO: 1767898 - DNA, 15 bp, Homo sapiens
tatttctactgtctg

SEQ ID NO: 1767899 - DNA, 15 bp, Homo sapiens
atttctactgtctgg

SEQ ID NO: 1767900 - DNA, 15 bp, Homo sapiens
tttctactgtctgga

SEQ ID NO: 1767901 - DNA, 15 bp, Homo sapiens
ttctactgtctggac

SEQ ID NO: 1767902 - DNA, 15 bp, Homo sapiens
tctactgtctggact

SEQ ID NO: 1767903 - DNA, 15 bp, Homo sapiens
ctactgtctggacta

SEQ ID NO: 1767904 - DNA, 15 bp, Homo sapiens
tactgtctggactag

SEQ ID NO: 1767905 - DNA, 15 bp, Homo sapiens
actgtctggactaga

SEQ ID NO: 1767906 - DNA, 15 bp, Homo sapiens
ctgtctggactagaa

SEQ ID NO: 1767907 - DNA, 15 bp, Homo sapiens
tgtctggactagaaa

SEQ ID NO: 1767908 - DNA, 15 bp, Homo sapiens
gtctggactagaaaa

SEQ ID NO: 1767909 - DNA, 15 bp, Homo sapiens
tctggactagaaaat

SEQ ID NO: 1767910 - DNA, 15 bp, Homo sapiens
ctggactagaaaatt

SEQ ID NO: 1767911 - DNA, 15 bp, Homo sapiens
tggactagaaaattc

SEQ ID NO: 1767912 - DNA, 15 bp, Homo sapiens
ggactagaaaattca

SEQ ID NO: 1767913 - DNA, 15 bp, Homo sapiens
gactagaaaattcat

SEQ ID NO: 1767914 - DNA, 15 bp, Homo sapiens
actagaaaattcatc

SEQ ID NO: 1767915 - DNA, 15 bp, Homo sapiens
ctagaaaattcatct

SEQ ID NO: 1767916 - DNA, 15 bp, Homo sapiens
tagaaaattcatcta

SEQ ID NO: 1767917 - DNA, 15 bp, Homo sapiens
agaaaattcatctat

SEQ ID NO: 1767918 - DNA, 15 bp, Homo sapiens
gaaaattcatctatt

SEQ ID NO: 1767919 - DNA, 15 bp, Homo sapiens
aaaattcatctatta

SEQ ID NO: 1767920 - DNA, 15 bp, Homo sapiens
aaattcatctattat

SEQ ID NO: 1767921 - DNA, 15 bp, Homo sapiens
aattcatctattatc

SEQ ID NO: 1767922 - DNA, 15 bp, Homo sapiens
attcatctattatca

SEQ ID NO: 1767923 - DNA, 15 bp, Homo sapiens
ttcatctattatcaa

SEQ ID NO: 1767924 - DNA, 15 bp, Homo sapiens
tcatctattatcaaa

SEQ ID NO: 1767925 - DNA, 15 bp, Homo sapiens
catctattatcaaat

SEQ ID NO: 1767926 - DNA, 15 bp, Homo sapiens
atctattatcaaatg

SEQ ID NO: 1767927 - DNA, 15 bp, Homo sapiens
tctattatcaaatga

SEQ ID NO: 1767928 - DNA, 15 bp, Homo sapiens
ctattatcaaatgac

SEQ ID NO: 1767929 - DNA, 15 bp, Homo sapiens
tattatcaaatgaca

SEQ ID NO: 1767930 - DNA, 15 bp, Homo sapiens
attatcaaatgacaa

SEQ ID NO: 1767931 - DNA, 15 bp, Homo sapiens
ttatcaaatgacaaa

SEQ ID NO: 1767932 - DNA, 15 bp, Homo sapiens
tatcaaatgacaaaa

SEQ ID NO: 1767933 - DNA, 15 bp, Homo sapiens
atcaaatgacaaaaa

SEQ ID NO: 1767934 - DNA, 15 bp, Homo sapiens
tcaaatgacaaaaaa

SEQ ID NO: 1767935 - DNA, 15 bp, Homo sapiens
caaatgacaaaaaaa

SEQ ID NO: 1767936 - DNA, 15 bp, Homo sapiens
aaatgacaaaaaaag

SEQ ID NO: 1767937 - DNA, 15 bp, Homo sapiens
aatgacaaaaaaaga

SEQ ID NO: 1767938 - DNA, 15 bp, Homo sapiens
atgacaaaaaaagat

SEQ ID NO: 1767939 - DNA, 15 bp, Homo sapiens
tgacaaaaaaagatg

SEQ ID NO: 1767940 - DNA, 15 bp, Homo sapiens
gacaaaaaaagatga

SEQ ID NO: 1767941 - DNA, 15 bp, Homo sapiens
acaaaaaaagatgag

SEQ ID NO: 1767942 - DNA, 15 bp, Homo sapiens
caaaaaaagatgagt

SEQ ID NO: 1767943 - DNA, 15 bp, Homo sapiens
aaaaaaagatgagta

SEQ ID NO: 1767944 - DNA, 15 bp, Homo sapiens
aaaaaagatgagtat

SEQ ID NO: 1767945 - DNA, 15 bp, Homo sapiens
aaaaagatgagtatt

SEQ ID NO: 1767946 - DNA, 15 bp, Homo sapiens
aaaagatgagtatta

SEQ ID NO: 1767947 - DNA, 15 bp, Homo sapiens
aaagatgagtattac

SEQ ID NO: 1767948 - DNA, 15 bp, Homo sapiens
aagatgagtattact

SEQ ID NO: 1767949 - DNA, 15 bp, Homo sapiens
agatgagtattactt

SEQ ID NO: 1767950 - DNA, 15 bp, Homo sapiens
gatgagtattactta

SEQ ID NO: 1767951 - DNA, 15 bp, Homo sapiens
atgagtattacttat

SEQ ID NO: 1767952 - DNA, 15 bp, Homo sapiens
tgagtattacttata

SEQ ID NO: 1767953 - DNA, 15 bp, Homo sapiens
gagtattacttataa

SEQ ID NO: 1767954 - DNA, 15 bp, Homo sapiens
agtattacttataac

SEQ ID NO: 1767955 - DNA, 15 bp, Homo sapiens
gtattacttataacc

SEQ ID NO: 1767956 - DNA, 15 bp, Homo sapiens
tattacttataacca

SEQ ID NO: 1767957 - DNA, 15 bp, Homo sapiens
attacttataaccaa

SEQ ID NO: 1767958 - DNA, 15 bp, Homo sapiens
ttacttataaccaat

SEQ ID NO: 1767959 - DNA, 15 bp, Homo sapiens
tacttataaccaata

SEQ ID NO: 1767960 - DNA, 15 bp, Homo sapiens
acttataaccaatac

SEQ ID NO: 1767961 - DNA, 15 bp, Homo sapiens
cttataaccaatact

SEQ ID NO: 1767962 - DNA, 15 bp, Homo sapiens
ttataaccaatactt

SEQ ID NO: 1767963 - DNA, 15 bp, Homo sapiens
tataaccaatactta

SEQ ID NO: 1767964 - DNA, 15 bp, Homo sapiens
ataaccaatacttaa

SEQ ID NO: 1767965 - DNA, 15 bp, Homo sapiens
taaccaatacttaaa

SEQ ID NO: 1767966 - DNA, 15 bp, Homo sapiens
aaccaatacttaaaa

SEQ ID NO: 1767967 - DNA, 15 bp, Homo sapiens
accaatacttaaaat

SEQ ID NO: 1767968 - DNA, 15 bp, Homo sapiens
ccaatacttaaaatt

SEQ ID NO: 1767969 - DNA, 15 bp, Homo sapiens
caatacttaaaattt

SEQ ID NO: 1767970 - DNA, 15 bp, Homo sapiens
aatacttaaaatttt

SEQ ID NO: 1767971 - DNA, 15 bp, Homo sapiens
atacttaaaattttg

SEQ ID NO: 1767972 - DNA, 15 bp, Homo sapiens
tacttaaaattttga

SEQ ID NO: 1767973 - DNA, 15 bp, Homo sapiens
acttaaaattttgaa

SEQ ID NO: 1767974 - DNA, 15 bp, Homo sapiens
cttaaaattttgaag

SEQ ID NO: 1767975 - DNA, 15 bp, Homo sapiens
ttaaaattttgaagg

SEQ ID NO: 1767976 - DNA, 15 bp, Homo sapiens
taaaattttgaaggg

SEQ ID NO: 1767977 - DNA, 15 bp, Homo sapiens
aaaattttgaagggt

SEQ ID NO: 1767978 - DNA, 15 bp, Homo sapiens
aaattttgaagggtt

SEQ ID NO: 1767979 - DNA, 15 bp, Homo sapiens
aattttgaagggttg

SEQ ID NO: 1767980 - DNA, 15 bp, Homo sapiens
attttgaagggttga

SEQ ID NO: 1767981 - DNA, 15 bp, Homo sapiens
ttttgaagggttgaa

SEQ ID NO: 1767982 - DNA, 15 bp, Homo sapiens
tttgaagggttgaat

SEQ ID NO: 1767983 - DNA, 15 bp, Homo sapiens
ttgaagggttgaata

SEQ ID NO: 1767984 - DNA, 15 bp, Homo sapiens
tgaagggttgaatat

SEQ ID NO: 1767985 - DNA, 15 bp, Homo sapiens
gaagggttgaatatc

SEQ ID NO: 1767986 - DNA, 15 bp, Homo sapiens
aagggttgaatatct

SEQ ID NO: 1767987 - DNA, 15 bp, Homo sapiens
agggttgaatatctt

SEQ ID NO: 1767988 - DNA, 15 bp, Homo sapiens
gggttgaatatcttt

SEQ ID NO: 1767989 - DNA, 15 bp, Homo sapiens
ggttgaatatctttt

SEQ ID NO: 1767990 - DNA, 15 bp, Homo sapiens
gttgaatatctttta

SEQ ID NO: 1767991 - DNA, 15 bp, Homo sapiens
ttgaatatcttttat

SEQ ID NO: 1767992 - DNA, 15 bp, Homo sapiens
tgaatatcttttata

SEQ ID NO: 1767993 - DNA, 15 bp, Homo sapiens
gaatatcttttatat

SEQ ID NO: 1767994 - DNA, 15 bp, Homo sapiens
aatatcttttatatc

SEQ ID NO: 1767995 - DNA, 15 bp, Homo sapiens
atatcttttatatca

SEQ ID NO: 1767996 - DNA, 15 bp, Homo sapiens
tatcttttatatcac

SEQ ID NO: 1767997 - DNA, 15 bp, Homo sapiens
atcttttatatcaca

SEQ ID NO: 1767998 - DNA, 15 bp, Homo sapiens
tcttttatatcacat

SEQ ID NO: 1767999 - DNA, 15 bp, Homo sapiens
cttttatatcacatt

SEQ ID NO: 1768000 - DNA, 15 bp, Homo sapiens
ttttatatcacattt

SEQ ID NO: 1768001 - DNA, 15 bp, Homo sapiens
tttatatcacatttg

SEQ ID NO: 1768002 - DNA, 15 bp, Homo sapiens
ttatatcacatttgg

SEQ ID NO: 1768003 - DNA, 15 bp, Homo sapiens
tatatcacatttggt

SEQ ID NO: 1768004 - DNA, 15 bp, Homo sapiens
atatcacatttggta

SEQ ID NO: 1768005 - DNA, 15 bp, Homo sapiens
tatcacatttggtat

SEQ ID NO: 1768006 - DNA, 15 bp, Homo sapiens
atcacatttggtata

SEQ ID NO: 1768007 - DNA, 15 bp, Homo sapiens
tcacatttggtatag

SEQ ID NO: 1768008 - DNA, 15 bp, Homo sapiens
cacatttggtataga

SEQ ID NO: 1768009 - DNA, 15 bp, Homo sapiens
acatttggtatagaa

SEQ ID NO: 1768010 - DNA, 15 bp, Homo sapiens
catttggtatagaaa

SEQ ID NO: 1768011 - DNA, 15 bp, Homo sapiens
atttggtatagaaaa

SEQ ID NO: 1768012 - DNA, 15 bp, Homo sapiens
tttggtatagaaaag

SEQ ID NO: 1768013 - DNA, 15 bp, Homo sapiens
ttggtatagaaaaga

SEQ ID NO: 1768014 - DNA, 15 bp, Homo sapiens
tggtatagaaaagat

SEQ ID NO: 1768015 - DNA, 15 bp, Homo sapiens
ggtatagaaaagatg

SEQ ID NO: 1768016 - DNA, 15 bp, Homo sapiens
gtatagaaaagatgt

SEQ ID NO: 1768017 - DNA, 15 bp, Homo sapiens
tatagaaaagatgta

SEQ ID NO: 1768018 - DNA, 15 bp, Homo sapiens
atagaaaagatgtat

SEQ ID NO: 1768019 - DNA, 15 bp, Homo sapiens
tagaaaagatgtatg

SEQ ID NO: 1768020 - DNA, 15 bp, Homo sapiens
agaaaagatgtatgt

SEQ ID NO: 1768021 - DNA, 15 bp, Homo sapiens
gaaaagatgtatgtg

SEQ ID NO: 1768022 - DNA, 15 bp, Homo sapiens
aaaagatgtatgtgt

SEQ ID NO: 1768023 - DNA, 15 bp, Homo sapiens
aaagatgtatgtgtg

SEQ ID NO: 1768024 - DNA, 15 bp, Homo sapiens
aagatgtatgtgtgt

SEQ ID NO: 1768025 - DNA, 15 bp, Homo sapiens
agatgtatgtgtgtg

SEQ ID NO: 1768026 - DNA, 15 bp, Homo sapiens
tgtatgtgtgtgttc

SEQ ID NO: 1768027 - DNA, 15 bp, Homo sapiens
gtatgtgtgtgttct

SEQ ID NO: 1768028 - DNA, 15 bp, Homo sapiens
tatgtgtgtgttctt

SEQ ID NO: 1768029 - DNA, 15 bp, Homo sapiens
atgtgtgtgttctta

SEQ ID NO: 1768030 - DNA, 15 bp, Homo sapiens
tgtgtgtgttcttat

SEQ ID NO: 1768031 - DNA, 15 bp, Homo sapiens
gtgtgtgttcttatt

SEQ ID NO: 1768032 - DNA, 15 bp, Homo sapiens
tgtgtgttcttatta

SEQ ID NO: 1768033 - DNA, 15 bp, Homo sapiens
gtgtgttcttattag

SEQ ID NO: 1768034 - DNA, 15 bp, Homo sapiens
tgtgttcttattaga

SEQ ID NO: 1768035 - DNA, 15 bp, Homo sapiens
gtgttcttattagaa

SEQ ID NO: 1768036 - DNA, 15 bp, Homo sapiens
tgttcttattagaag

SEQ ID NO: 1768037 - DNA, 15 bp, Homo sapiens
gttcttattagaagg

SEQ ID NO: 1768038 - DNA, 15 bp, Homo sapiens
ttcttattagaaggc

SEQ ID NO: 1768039 - DNA, 15 bp, Homo sapiens
tcttattagaaggct

SEQ ID NO: 1768040 - DNA, 15 bp, Homo sapiens
cttattagaaggctg

SEQ ID NO: 1768041 - DNA, 15 bp, Homo sapiens
ttattagaaggctgg

SEQ ID NO: 1768042 - DNA, 15 bp, Homo sapiens
tattagaaggctggt

SEQ ID NO: 1768043 - DNA, 15 bp, Homo sapiens
attagaaggctggta

SEQ ID NO: 1768044 - DNA, 15 bp, Homo sapiens
ttagaaggctggtag

SEQ ID NO: 1768045 - DNA, 15 bp, Homo sapiens
tagaaggctggtaga

SEQ ID NO: 1768046 - DNA, 15 bp, Homo sapiens
agaaggctggtagaa

SEQ ID NO: 1768047 - DNA, 15 bp, Homo sapiens
gaaggctggtagaag

SEQ ID NO: 1768048 - DNA, 15 bp, Homo sapiens
aaggctggtagaagc

SEQ ID NO: 1768049 - DNA, 15 bp, Homo sapiens
aggctggtagaagct

SEQ ID NO: 1768050 - DNA, 15 bp, Homo sapiens
ggctggtagaagctg

SEQ ID NO: 1768051 - DNA, 15 bp, Homo sapiens
gctggtagaagctga

SEQ ID NO: 1768052 - DNA, 15 bp, Homo sapiens
ctggtagaagctgag

SEQ ID NO: 1768053 - DNA, 15 bp, Homo sapiens
tggtagaagctgagt

SEQ ID NO: 1768054 - DNA, 15 bp, Homo sapiens
ggtagaagctgagtg

SEQ ID NO: 1768055 - DNA, 15 bp, Homo sapiens
gtagaagctgagtga

SEQ ID NO: 1768056 - DNA, 15 bp, Homo sapiens
tagaagctgagtgag

SEQ ID NO: 1768057 - DNA, 15 bp, Homo sapiens
agaagctgagtgagc

SEQ ID NO: 1768058 - DNA, 15 bp, Homo sapiens
gaagctgagtgagca

SEQ ID NO: 1768059 - DNA, 15 bp, Homo sapiens
aagctgagtgagcat

SEQ ID NO: 1768060 - DNA, 15 bp, Homo sapiens
agctgagtgagcatt

SEQ ID NO: 1768061 - DNA, 15 bp, Homo sapiens
gctgagtgagcatta

SEQ ID NO: 1768062 - DNA, 15 bp, Homo sapiens
ctgagtgagcattaa

SEQ ID NO: 1768063 - DNA, 15 bp, Homo sapiens
tgagtgagcattaat

SEQ ID NO: 1768064 - DNA, 15 bp, Homo sapiens
gagtgagcattaatg

SEQ ID NO: 1768065 - DNA, 15 bp, Homo sapiens
agtgagcattaatga

SEQ ID NO: 1768066 - DNA, 15 bp, Homo sapiens
gtgagcattaatgaa

SEQ ID NO: 1768067 - DNA, 15 bp, Homo sapiens
tgagcattaatgaaa

SEQ ID NO: 1768068 - DNA, 15 bp, Homo sapiens
gagcattaatgaaaa

SEQ ID NO: 1768069 - DNA, 15 bp, Homo sapiens
agcattaatgaaaaa

SEQ ID NO: 1768070 - DNA, 15 bp, Homo sapiens
gcattaatgaaaaaa

SEQ ID NO: 1768071 - DNA, 15 bp, Homo sapiens
cattaatgaaaaaag

SEQ ID NO: 1768072 - DNA, 15 bp, Homo sapiens
attaatgaaaaaagg

SEQ ID NO: 1768073 - DNA, 15 bp, Homo sapiens
ttaatgaaaaaagga

SEQ ID NO: 1768074 - DNA, 15 bp, Homo sapiens
taatgaaaaaaggag

SEQ ID NO: 1768075 - DNA, 15 bp, Homo sapiens
aatgaaaaaaggagt

SEQ ID NO: 1768076 - DNA, 15 bp, Homo sapiens
atgaaaaaaggagtg

SEQ ID NO: 1768077 - DNA, 15 bp, Homo sapiens
tgaaaaaaggagtgg

SEQ ID NO: 1768078 - DNA, 15 bp, Homo sapiens
gaaaaaaggagtggt

SEQ ID NO: 1768079 - DNA, 15 bp, Homo sapiens
aaaaaaggagtggtt

SEQ ID NO: 1768080 - DNA, 15 bp, Homo sapiens
aaaaaggagtggtta

SEQ ID NO: 1768081 - DNA, 15 bp, Homo sapiens
aaaaggagtggttaa

SEQ ID NO: 1768082 - DNA, 15 bp, Homo sapiens
aaaggagtggttaat

SEQ ID NO: 1768083 - DNA, 15 bp, Homo sapiens
aaggagtggttaata

SEQ ID NO: 1768084 - DNA, 15 bp, Homo sapiens
aggagtggttaataa

SEQ ID NO: 1768085 - DNA, 15 bp, Homo sapiens
ggagtggttaataag

SEQ ID NO: 1768086 - DNA, 15 bp, Homo sapiens
gagtggttaataagc

SEQ ID NO: 1768087 - DNA, 15 bp, Homo sapiens
agtggttaataagct

SEQ ID NO: 1768088 - DNA, 15 bp, Homo sapiens
gtggttaataagctt

SEQ ID NO: 1768089 - DNA, 15 bp, Homo sapiens
tggttaataagcttg

SEQ ID NO: 1768090 - DNA, 15 bp, Homo sapiens
ggttaataagcttgt

SEQ ID NO: 1768091 - DNA, 15 bp, Homo sapiens
gttaataagcttgta

SEQ ID NO: 1768092 - DNA, 15 bp, Homo sapiens
ttaataagcttgtat

SEQ ID NO: 1768093 - DNA, 15 bp, Homo sapiens
taataagcttgtatt

SEQ ID NO: 1768094 - DNA, 15 bp, Homo sapiens
aataagcttgtattc

SEQ ID NO: 1768095 - DNA, 15 bp, Homo sapiens
ataagcttgtattct

SEQ ID NO: 1768096 - DNA, 15 bp, Homo sapiens
taagcttgtattctc

SEQ ID NO: 1768097 - DNA, 15 bp, Homo sapiens
aagcttgtattctca

SEQ ID NO: 1768098 - DNA, 15 bp, Homo sapiens
agcttgtattctcat

SEQ ID NO: 1768099 - DNA, 15 bp, Homo sapiens
gcttgtattctcatt

SEQ ID NO: 1768100 - DNA, 15 bp, Homo sapiens
cttgtattctcattg

SEQ ID NO: 1768101 - DNA, 15 bp, Homo sapiens
ttgtattctcattgg

SEQ ID NO: 1768102 - DNA, 15 bp, Homo sapiens
tgtattctcattgga

SEQ ID NO: 1768103 - DNA, 15 bp, Homo sapiens
gtattctcattggaa

SEQ ID NO: 1768104 - DNA, 15 bp, Homo sapiens
tattctcattggaaa

SEQ ID NO: 1768105 - DNA, 15 bp, Homo sapiens
attctcattggaaaa

SEQ ID NO: 1768106 - DNA, 15 bp, Homo sapiens
ttctcattggaaaaa

SEQ ID NO: 1768107 - DNA, 15 bp, Homo sapiens
tctcattggaaaaaa

SEQ ID NO: 1768108 - DNA, 15 bp, Homo sapiens
ctcattggaaaaaat

SEQ ID NO: 1768109 - DNA, 15 bp, Homo sapiens
tcattggaaaaaatt

SEQ ID NO: 1768110 - DNA, 15 bp, Homo sapiens
cattggaaaaaattt

SEQ ID NO: 1768111 - DNA, 15 bp, Homo sapiens
attggaaaaaatttt

SEQ ID NO: 1768112 - DNA, 15 bp, Homo sapiens
ttggaaaaaattttc

SEQ ID NO: 1768113 - DNA, 15 bp, Homo sapiens
tggaaaaaattttct

SEQ ID NO: 1768114 - DNA, 15 bp, Homo sapiens
ggaaaaaattttctg

SEQ ID NO: 1768115 - DNA, 15 bp, Homo sapiens
gaaaaaattttctgt

SEQ ID NO: 1768116 - DNA, 15 bp, Homo sapiens
aaaaaattttctgtt

SEQ ID NO: 1768117 - DNA, 15 bp, Homo sapiens
aaaaattttctgtta

SEQ ID NO: 1768118 - DNA, 15 bp, Homo sapiens
aaaattttctgttag

SEQ ID NO: 1768119 - DNA, 15 bp, Homo sapiens
aaattttctgttagt

SEQ ID NO: 1768120 - DNA, 15 bp, Homo sapiens
aattttctgttagta

SEQ ID NO: 1768121 - DNA, 15 bp, Homo sapiens
attttctgttagtag

SEQ ID NO: 1768122 - DNA, 15 bp, Homo sapiens
ttttctgttagtagt

SEQ ID NO: 1768123 - DNA, 15 bp, Homo sapiens
tttctgttagtagtt

SEQ ID NO: 1768124 - DNA, 15 bp, Homo sapiens
ttctgttagtagtta

SEQ ID NO: 1768125 - DNA, 15 bp, Homo sapiens
tctgttagtagttat

SEQ ID NO: 1768126 - DNA, 15 bp, Homo sapiens
ctgttagtagttatg

SEQ ID NO: 1768127 - DNA, 15 bp, Homo sapiens
tgttagtagttatgt

SEQ ID NO: 1768128 - DNA, 15 bp, Homo sapiens
gttagtagttatgtc

SEQ ID NO: 1768129 - DNA, 15 bp, Homo sapiens
ttagtagttatgtct

SEQ ID NO: 1768130 - DNA, 15 bp, Homo sapiens
tagtagttatgtctt

SEQ ID NO: 1768131 - DNA, 15 bp, Homo sapiens
agtagttatgtctta

SEQ ID NO: 1768132 - DNA, 15 bp, Homo sapiens
gtagttatgtcttac

SEQ ID NO: 1768133 - DNA, 15 bp, Homo sapiens
tagttatgtcttact

SEQ ID NO: 1768134 - DNA, 15 bp, Homo sapiens
agttatgtcttactg

SEQ ID NO: 1768135 - DNA, 15 bp, Homo sapiens
gttatgtcttactgt

SEQ ID NO: 1768136 - DNA, 15 bp, Homo sapiens
ttatgtcttactgtt

SEQ ID NO: 1768137 - DNA, 15 bp, Homo sapiens
tatgtcttactgtta

SEQ ID NO: 1768138 - DNA, 15 bp, Homo sapiens
atgtcttactgttat

SEQ ID NO: 1768139 - DNA, 15 bp, Homo sapiens
tgtcttactgttatt

SEQ ID NO: 1768140 - DNA, 15 bp, Homo sapiens
gtcttactgttattt

SEQ ID NO: 1768141 - DNA, 15 bp, Homo sapiens
tcttactgttatttt

SEQ ID NO: 1768142 - DNA, 15 bp, Homo sapiens
cttactgttattttt

SEQ ID NO: 1768143 - DNA, 15 bp, Homo sapiens
ttactgttatttttt

SEQ ID NO: 1768144 - DNA, 15 bp, Homo sapiens
tactgttattttttt

SEQ ID NO: 1768145 - DNA, 15 bp, Homo sapiens
actgttatttttttt

SEQ ID NO: 1768146 - DNA, 15 bp, Homo sapiens
ctgttattttttttt

SEQ ID NO: 1768147 - DNA, 15 bp, Homo sapiens
tgttatttttttttt

SEQ ID NO: 1768148 - DNA, 15 bp, Homo sapiens
gttatttttttttta

SEQ ID NO: 1768149 - DNA, 15 bp, Homo sapiens
ttattttttttttat

SEQ ID NO: 1768150 - DNA, 15 bp, Homo sapiens
tattttttttttatt

SEQ ID NO: 1768151 - DNA, 15 bp, Homo sapiens
ttttttttttatttg

SEQ ID NO: 1768152 - DNA, 15 bp, Homo sapiens
tttttttttatttgg

SEQ ID NO: 1768153 - DNA, 15 bp, Homo sapiens
ttttttttatttggt

SEQ ID NO: 1768154 - DNA, 15 bp, Homo sapiens
tttttttatttggtt

SEQ ID NO: 1768155 - DNA, 15 bp, Homo sapiens
ttttttatttggttc

SEQ ID NO: 1768156 - DNA, 15 bp, Homo sapiens
tttttatttggttca

SEQ ID NO: 1768157 - DNA, 15 bp, Homo sapiens
ttttatttggttcag

SEQ ID NO: 1768158 - DNA, 15 bp, Homo sapiens
tttatttggttcagt

SEQ ID NO: 1768159 - DNA, 15 bp, Homo sapiens
ttatttggttcagta

SEQ ID NO: 1768160 - DNA, 15 bp, Homo sapiens
tatttggttcagtat

SEQ ID NO: 1768161 - DNA, 15 bp, Homo sapiens
atttggttcagtatg

SEQ ID NO: 1768162 - DNA, 15 bp, Homo sapiens
tttggttcagtatgt

SEQ ID NO: 1768163 - DNA, 15 bp, Homo sapiens
ttggttcagtatgtt

SEQ ID NO: 1768164 - DNA, 15 bp, Homo sapiens
tggttcagtatgttt

SEQ ID NO: 1768165 - DNA, 15 bp, Homo sapiens
ggttcagtatgtttt

SEQ ID NO: 1768166 - DNA, 15 bp, Homo sapiens
gttcagtatgtttta

SEQ ID NO: 1768167 - DNA, 15 bp, Homo sapiens
ttcagtatgttttaa

SEQ ID NO: 1768168 - DNA, 15 bp, Homo sapiens
tcagtatgttttaaa

SEQ ID NO: 1768169 - DNA, 15 bp, Homo sapiens
cagtatgttttaaaa

SEQ ID NO: 1768170 - DNA, 15 bp, Homo sapiens
agtatgttttaaaaa

SEQ ID NO: 1768171 - DNA, 15 bp, Homo sapiens
gtatgttttaaaaaa

SEQ ID NO: 1768172 - DNA, 15 bp, Homo sapiens
tatgttttaaaaaaa

SEQ ID NO: 1768173 - DNA, 15 bp, Homo sapiens
atgttttaaaaaaac

SEQ ID NO: 1768174 - DNA, 15 bp, Homo sapiens
tgttttaaaaaaaca

SEQ ID NO: 1768175 - DNA, 15 bp, Homo sapiens
gttttaaaaaaacaa

SEQ ID NO: 1768176 - DNA, 15 bp, Homo sapiens
ttttaaaaaaacaaa

SEQ ID NO: 1768177 - DNA, 15 bp, Homo sapiens
ttaaaaaaacaaaat

SEQ ID NO: 1768178 - DNA, 15 bp, Homo sapiens
taaaaaaacaaaatc

SEQ ID NO: 1768179 - DNA, 15 bp, Homo sapiens
aaaaaaacaaaatct

SEQ ID NO: 1768180 - DNA, 15 bp, Homo sapiens
aaaaaacaaaatctt

SEQ ID NO: 1768181 - DNA, 15 bp, Homo sapiens
aaaaacaaaatctta

SEQ ID NO: 1768182 - DNA, 15 bp, Homo sapiens
aaaacaaaatcttag

SEQ ID NO: 1768183 - DNA, 15 bp, Homo sapiens
aaacaaaatcttagt

SEQ ID NO: 1768184 - DNA, 15 bp, Homo sapiens
aacaaaatcttagta

SEQ ID NO: 1768185 - DNA, 15 bp, Homo sapiens
acaaaatcttagtaa

SEQ ID NO: 1768186 - DNA, 15 bp, Homo sapiens
caaaatcttagtaat

SEQ ID NO: 1768187 - DNA, 15 bp, Homo sapiens
aaaatcttagtaatc

SEQ ID NO: 1768188 - DNA, 15 bp, Homo sapiens
aaatcttagtaatct

SEQ ID NO: 1768189 - DNA, 15 bp, Homo sapiens
aatcttagtaatctt

SEQ ID NO: 1768190 - DNA, 15 bp, Homo sapiens
atcttagtaatcttc

SEQ ID NO: 1768191 - DNA, 15 bp, Homo sapiens
tcttagtaatcttct

SEQ ID NO: 1768192 - DNA, 15 bp, Homo sapiens
cttagtaatcttctt

SEQ ID NO: 1768193 - DNA, 15 bp, Homo sapiens
ttagtaatcttcttt

SEQ ID NO: 1768194 - DNA, 15 bp, Homo sapiens
tagtaatcttctttc

SEQ ID NO: 1768195 - DNA, 15 bp, Homo sapiens
agtaatcttctttca

SEQ ID NO: 1768196 - DNA, 15 bp, Homo sapiens
gtaatcttctttcaa

SEQ ID NO: 1768197 - DNA, 15 bp, Homo sapiens
taatcttctttcaaa

SEQ ID NO: 1768198 - DNA, 15 bp, Homo sapiens
aatcttctttcaaat

SEQ ID NO: 1768199 - DNA, 15 bp, Homo sapiens
atcttctttcaaatt

SEQ ID NO: 1768200 - DNA, 15 bp, Homo sapiens
tcttctttcaaattg

SEQ ID NO: 1768201 - DNA, 15 bp, Homo sapiens
cttctttcaaattga

SEQ ID NO: 1768202 - DNA, 15 bp, Homo sapiens
ttctttcaaattgat

SEQ ID NO: 1768203 - DNA, 15 bp, Homo sapiens
tctttcaaattgata

SEQ ID NO: 1768204 - DNA, 15 bp, Homo sapiens
ctttcaaattgatag

SEQ ID NO: 1768205 - DNA, 15 bp, Homo sapiens
tttcaaattgatagt

SEQ ID NO: 1768206 - DNA, 15 bp, Homo sapiens
ttcaaattgatagtc

SEQ ID NO: 1768207 - DNA, 15 bp, Homo sapiens
tcaaattgatagtct

SEQ ID NO: 1768208 - DNA, 15 bp, Homo sapiens
caaattgatagtctc

SEQ ID NO: 1768209 - DNA, 15 bp, Homo sapiens
aaattgatagtctcc

SEQ ID NO: 1768210 - DNA, 15 bp, Homo sapiens
aattgatagtctcct

SEQ ID NO: 1768211 - DNA, 15 bp, Homo sapiens
attgatagtctcctc

SEQ ID NO: 1768212 - DNA, 15 bp, Homo sapiens
ttgatagtctcctct

SEQ ID NO: 1768213 - DNA, 15 bp, Homo sapiens
tgatagtctcctctt

SEQ ID NO: 1768214 - DNA, 15 bp, Homo sapiens
gatagtctcctcttt

SEQ ID NO: 1768215 - DNA, 15 bp, Homo sapiens
atagtctcctcttta

SEQ ID NO: 1768216 - DNA, 15 bp, Homo sapiens
tagtctcctctttag

SEQ ID NO: 1768217 - DNA, 15 bp, Homo sapiens
agtctcctctttagt

SEQ ID NO: 1768218 - DNA, 15 bp, Homo sapiens
gtctcctctttagtc

SEQ ID NO: 1768219 - DNA, 15 bp, Homo sapiens
tctcctctttagtca

SEQ ID NO: 1768220 - DNA, 15 bp, Homo sapiens
ctcctctttagtcat

SEQ ID NO: 1768221 - DNA, 15 bp, Homo sapiens
tcctctttagtcatc

SEQ ID NO: 1768222 - DNA, 15 bp, Homo sapiens
cctctttagtcatct

SEQ ID NO: 1768223 - DNA, 15 bp, Homo sapiens
ctctttagtcatctt

SEQ ID NO: 1768224 - DNA, 15 bp, Homo sapiens
tctttagtcatcttt

SEQ ID NO: 1768225 - DNA, 15 bp, Homo sapiens
ctttagtcatcttta

SEQ ID NO: 1768226 - DNA, 15 bp, Homo sapiens
tttagtcatctttaa

SEQ ID NO: 1768227 - DNA, 15 bp, Homo sapiens
ttagtcatctttaat

SEQ ID NO: 1768228 - DNA, 15 bp, Homo sapiens
tagtcatctttaatt

SEQ ID NO: 1768229 - DNA, 15 bp, Homo sapiens
agtcatctttaatta

SEQ ID NO: 1768230 - DNA, 15 bp, Homo sapiens
gtcatctttaattaa

SEQ ID NO: 1768231 - DNA, 15 bp, Homo sapiens
tcatctttaattaat

SEQ ID NO: 1768232 - DNA, 15 bp, Homo sapiens
catctttaattaatg

SEQ ID NO: 1768233 - DNA, 15 bp, Homo sapiens
atctttaattaatga

SEQ ID NO: 1768234 - DNA, 15 bp, Homo sapiens
tctttaattaatgaa

SEQ ID NO: 1768235 - DNA, 15 bp, Homo sapiens
ctttaattaatgaaa

SEQ ID NO: 1768236 - DNA, 15 bp, Homo sapiens
tttaattaatgaaat

SEQ ID NO: 1768237 - DNA, 15 bp, Homo sapiens
ttaattaatgaaata

SEQ ID NO: 1768238 - DNA, 15 bp, Homo sapiens
taattaatgaaatat

SEQ ID NO: 1768239 - DNA, 15 bp, Homo sapiens
aattaatgaaatata

SEQ ID NO: 1768240 - DNA, 15 bp, Homo sapiens
attaatgaaatatat

SEQ ID NO: 1768241 - DNA, 15 bp, Homo sapiens
ttaatgaaatatatg

SEQ ID NO: 1768242 - DNA, 15 bp, Homo sapiens
taatgaaatatatgc

SEQ ID NO: 1768243 - DNA, 15 bp, Homo sapiens
aatgaaatatatgca

SEQ ID NO: 1768244 - DNA, 15 bp, Homo sapiens
atgaaatatatgcag

SEQ ID NO: 1768245 - DNA, 15 bp, Homo sapiens
tgaaatatatgcagt

SEQ ID NO: 1768246 - DNA, 15 bp, Homo sapiens
gaaatatatgcagtt

SEQ ID NO: 1768247 - DNA, 15 bp, Homo sapiens
aaatatatgcagttg

SEQ ID NO: 1768248 - DNA, 15 bp, Homo sapiens
aatatatgcagttgt

SEQ ID NO: 1768249 - DNA, 15 bp, Homo sapiens
atatatgcagttgta

SEQ ID NO: 1768250 - DNA, 15 bp, Homo sapiens
tatatgcagttgtat

SEQ ID NO: 1768251 - DNA, 15 bp, Homo sapiens
atatgcagttgtata

SEQ ID NO: 1768252 - DNA, 15 bp, Homo sapiens
tatgcagttgtatat

SEQ ID NO: 1768253 - DNA, 15 bp, Homo sapiens
atgcagttgtatatg

SEQ ID NO: 1768254 - DNA, 15 bp, Homo sapiens
tgcagttgtatatgc

SEQ ID NO: 1768255 - DNA, 15 bp, Homo sapiens
gcagttgtatatgct

SEQ ID NO: 1768256 - DNA, 15 bp, Homo sapiens
cagttgtatatgctg

SEQ ID NO: 1768257 - DNA, 15 bp, Homo sapiens
agttgtatatgctga

SEQ ID NO: 1768258 - DNA, 15 bp, Homo sapiens
gttgtatatgctgat

SEQ ID NO: 1768259 - DNA, 15 bp, Homo sapiens
ttgtatatgctgatc

SEQ ID NO: 1768260 - DNA, 15 bp, Homo sapiens
tgtatatgctgatct

SEQ ID NO: 1768261 - DNA, 15 bp, Homo sapiens
gtatatgctgatctc

SEQ ID NO: 1768262 - DNA, 15 bp, Homo sapiens
tatatgctgatctca

SEQ ID NO: 1768263 - DNA, 15 bp, Homo sapiens
atatgctgatctcat

SEQ ID NO: 1768264 - DNA, 15 bp, Homo sapiens
tatgctgatctcatc

SEQ ID NO: 1768265 - DNA, 15 bp, Homo sapiens
atgctgatctcatcc

SEQ ID NO: 1768266 - DNA, 15 bp, Homo sapiens
tgctgatctcatcct

SEQ ID NO: 1768267 - DNA, 15 bp, Homo sapiens
gctgatctcatccta

SEQ ID NO: 1768268 - DNA, 15 bp, Homo sapiens
ctgatctcatcctac

SEQ ID NO: 1768269 - DNA, 15 bp, Homo sapiens
tgatctcatcctact

SEQ ID NO: 1768270 - DNA, 15 bp, Homo sapiens
gatctcatcctactt

SEQ ID NO: 1768271 - DNA, 15 bp, Homo sapiens
atctcatcctacttt

SEQ ID NO: 1768272 - DNA, 15 bp, Homo sapiens
tctcatcctactttt

SEQ ID NO: 1768273 - DNA, 15 bp, Homo sapiens
ctcatcctactttta

SEQ ID NO: 1768274 - DNA, 15 bp, Homo sapiens
tcatcctacttttac

SEQ ID NO: 1768275 - DNA, 15 bp, Homo sapiens
catcctacttttact

SEQ ID NO: 1768276 - DNA, 15 bp, Homo sapiens
atcctacttttactt

SEQ ID NO: 1768277 - DNA, 15 bp, Homo sapiens
tcctacttttacttt

SEQ ID NO: 1768278 - DNA, 15 bp, Homo sapiens
cctacttttactttc

SEQ ID NO: 1768279 - DNA, 15 bp, Homo sapiens
ctacttttactttca

SEQ ID NO: 1768280 - DNA, 15 bp, Homo sapiens
tacttttactttcat

SEQ ID NO: 1768281 - DNA, 15 bp, Homo sapiens
acttttactttcatt

SEQ ID NO: 1768282 - DNA, 15 bp, Homo sapiens
cttttactttcattt

SEQ ID NO: 1768283 - DNA, 15 bp, Homo sapiens
ttttactttcatttt

SEQ ID NO: 1768284 - DNA, 15 bp, Homo sapiens
tttactttcattttg

SEQ ID NO: 1768285 - DNA, 15 bp, Homo sapiens
ttactttcattttga

SEQ ID NO: 1768286 - DNA, 15 bp, Homo sapiens
tactttcattttgaa

SEQ ID NO: 1768287 - DNA, 15 bp, Homo sapiens
actttcattttgaat

SEQ ID NO: 1768288 - DNA, 15 bp, Homo sapiens
ctttcattttgaata

SEQ ID NO: 1768289 - DNA, 15 bp, Homo sapiens
tttcattttgaatat

SEQ ID NO: 1768290 - DNA, 15 bp, Homo sapiens
ttcattttgaatatg

SEQ ID NO: 1768291 - DNA, 15 bp, Homo sapiens
tcattttgaatatgg

SEQ ID NO: 1768292 - DNA, 15 bp, Homo sapiens
cattttgaatatggc

SEQ ID NO: 1768293 - DNA, 15 bp, Homo sapiens
attttgaatatggcg

SEQ ID NO: 1768294 - DNA, 15 bp, Homo sapiens
ttttgaatatggcgg

SEQ ID NO: 1768295 - DNA, 15 bp, Homo sapiens
tttgaatatggcggc

SEQ ID NO: 1768296 - DNA, 15 bp, Homo sapiens
ttgaatatggcggca

SEQ ID NO: 1768297 - DNA, 15 bp, Homo sapiens
tgaatatggcggcat

SEQ ID NO: 1768298 - DNA, 15 bp, Homo sapiens
gaatatggcggcatt

SEQ ID NO: 1768299 - DNA, 15 bp, Homo sapiens
aatatggcggcattt

SEQ ID NO: 1768300 - DNA, 15 bp, Homo sapiens
atatggcggcatttt

SEQ ID NO: 1768301 - DNA, 15 bp, Homo sapiens
tatggcggcattttc

SEQ ID NO: 1768302 - DNA, 15 bp, Homo sapiens
atggcggcattttct

SEQ ID NO: 1768303 - DNA, 15 bp, Homo sapiens
tggcggcattttctc

SEQ ID NO: 1768304 - DNA, 15 bp, Homo sapiens
ggcggcattttctca

SEQ ID NO: 1768305 - DNA, 15 bp, Homo sapiens
gcggcattttctcat

SEQ ID NO: 1768306 - DNA, 15 bp, Homo sapiens
cggcattttctcatt

SEQ ID NO: 1768307 - DNA, 15 bp, Homo sapiens
ggcattttctcattc

SEQ ID NO: 1768308 - DNA, 15 bp, Homo sapiens
gcattttctcattca

SEQ ID NO: 1768309 - DNA, 15 bp, Homo sapiens
cattttctcattcaa

SEQ ID NO: 1768310 - DNA, 15 bp, Homo sapiens
attttctcattcaaa

SEQ ID NO: 1768311 - DNA, 15 bp, Homo sapiens
ttttctcattcaaat

SEQ ID NO: 1768312 - DNA, 15 bp, Homo sapiens
tttctcattcaaata

SEQ ID NO: 1768313 - DNA, 15 bp, Homo sapiens
ttctcattcaaataa

SEQ ID NO: 1768314 - DNA, 15 bp, Homo sapiens
tctcattcaaataat

SEQ ID NO: 1768315 - DNA, 15 bp, Homo sapiens
ctcattcaaataatt

SEQ ID NO: 1768316 - DNA, 15 bp, Homo sapiens
tcattcaaataatta

SEQ ID NO: 1768317 - DNA, 15 bp, Homo sapiens
cattcaaataattaa

SEQ ID NO: 1768318 - DNA, 15 bp, Homo sapiens
attcaaataattaaa

SEQ ID NO: 1768319 - DNA, 15 bp, Homo sapiens
ttcaaataattaaaa

SEQ ID NO: 1768320 - DNA, 15 bp, Homo sapiens
tcaaataattaaaat

SEQ ID NO: 1768321 - DNA, 15 bp, Homo sapiens
caaataattaaaatt

SEQ ID NO: 1768322 - DNA, 15 bp, Homo sapiens
aaataattaaaattt

SEQ ID NO: 1768323 - DNA, 15 bp, Homo sapiens
aataattaaaattta

SEQ ID NO: 1768324 - DNA, 15 bp, Homo sapiens
ataattaaaatttat

SEQ ID NO: 1768325 - DNA, 15 bp, Homo sapiens
taattaaaatttatt

SEQ ID NO: 1768326 - DNA, 15 bp, Homo sapiens
aattaaaatttatta

SEQ ID NO: 1768327 - DNA, 15 bp, Homo sapiens
attaaaatttattaa

SEQ ID NO: 1768328 - DNA, 15 bp, Homo sapiens
ttaaaatttattaat

SEQ ID NO: 1768329 - DNA, 15 bp, Homo sapiens
taaaatttattaatt

SEQ ID NO: 1768330 - DNA, 15 bp, Homo sapiens
aaaatttattaattc

SEQ ID NO: 1768331 - DNA, 15 bp, Homo sapiens
aaatttattaattct

SEQ ID NO: 1768332 - DNA, 15 bp, Homo sapiens
aatttattaattcta

SEQ ID NO: 1768333 - DNA, 15 bp, Homo sapiens
atttattaattctac

SEQ ID NO: 1768334 - DNA, 15 bp, Homo sapiens
tttattaattctact

SEQ ID NO: 1768335 - DNA, 15 bp, Homo sapiens
ttattaattctactt

SEQ ID NO: 1768336 - DNA, 15 bp, Homo sapiens
tattaattctacttg

SEQ ID NO: 1768337 - DNA, 15 bp, Homo sapiens
attaattctacttgg

SEQ ID NO: 1768338 - DNA, 15 bp, Homo sapiens
ttaattctacttgga

SEQ ID NO: 1768339 - DNA, 15 bp, Homo sapiens
taattctacttggaa

SEQ ID NO: 1768340 - DNA, 15 bp, Homo sapiens
aattctacttggaat

SEQ ID NO: 1768341 - DNA, 15 bp, Homo sapiens
attctacttggaata

SEQ ID NO: 1768342 - DNA, 15 bp, Homo sapiens
ttctacttggaatat

SEQ ID NO: 1768343 - DNA, 15 bp, Homo sapiens
tctacttggaatatt

SEQ ID NO: 1768344 - DNA, 15 bp, Homo sapiens
ctacttggaatattt

SEQ ID NO: 1768345 - DNA, 15 bp, Homo sapiens
tacttggaatatttt

SEQ ID NO: 1768346 - DNA, 15 bp, Homo sapiens
acttggaatattttt

SEQ ID NO: 1768347 - DNA, 15 bp, Homo sapiens
cttggaatatttttc

SEQ ID NO: 1768348 - DNA, 15 bp, Homo sapiens
ttggaatatttttct

SEQ ID NO: 1768349 - DNA, 15 bp, Homo sapiens
tggaatatttttcta

SEQ ID NO: 1768350 - DNA, 15 bp, Homo sapiens
ggaatatttttctac

SEQ ID NO: 1768351 - DNA, 15 bp, Homo sapiens
gaatatttttctaca

SEQ ID NO: 1768352 - DNA, 15 bp, Homo sapiens
aatatttttctacat

SEQ ID NO: 1768353 - DNA, 15 bp, Homo sapiens
atatttttctacata

SEQ ID NO: 1768354 - DNA, 15 bp, Homo sapiens
tatttttctacatat

SEQ ID NO: 1768355 - DNA, 15 bp, Homo sapiens
atttttctacatatt

SEQ ID NO: 1768356 - DNA, 15 bp, Homo sapiens
tttttctacatattg

SEQ ID NO: 1768357 - DNA, 15 bp, Homo sapiens
ttttctacatattgt

SEQ ID NO: 1768358 - DNA, 15 bp, Homo sapiens
tttctacatattgtc

SEQ ID NO: 1768359 - DNA, 15 bp, Homo sapiens
ttctacatattgtca

SEQ ID NO: 1768360 - DNA, 15 bp, Homo sapiens
tctacatattgtcat

SEQ ID NO: 1768361 - DNA, 15 bp, Homo sapiens
ctacatattgtcatt

SEQ ID NO: 1768362 - DNA, 15 bp, Homo sapiens
tacatattgtcatta

SEQ ID NO: 1768363 - DNA, 15 bp, Homo sapiens
acatattgtcattac

SEQ ID NO: 1768364 - DNA, 15 bp, Homo sapiens
catattgtcattact

SEQ ID NO: 1768365 - DNA, 15 bp, Homo sapiens
atattgtcattactc

SEQ ID NO: 1768366 - DNA, 15 bp, Homo sapiens
tattgtcattactca

SEQ ID NO: 1768367 - DNA, 15 bp, Homo sapiens
attgtcattactcac

SEQ ID NO: 1768368 - DNA, 15 bp, Homo sapiens
ttgtcattactcact

SEQ ID NO: 1768369 - DNA, 15 bp, Homo sapiens
tgtcattactcactt

SEQ ID NO: 1768370 - DNA, 15 bp, Homo sapiens
gtcattactcacttg

SEQ ID NO: 1768371 - DNA, 15 bp, Homo sapiens
tcattactcacttga

SEQ ID NO: 1768372 - DNA, 15 bp, Homo sapiens
cattactcacttgac

SEQ ID NO: 1768373 - DNA, 15 bp, Homo sapiens
attactcacttgact

SEQ ID NO: 1768374 - DNA, 15 bp, Homo sapiens
ttactcacttgactt

SEQ ID NO: 1768375 - DNA, 15 bp, Homo sapiens
tactcacttgacttg

SEQ ID NO: 1768376 - DNA, 15 bp, Homo sapiens
actcacttgacttgt

SEQ ID NO: 1768377 - DNA, 15 bp, Homo sapiens
ctcacttgacttgtt

SEQ ID NO: 1768378 - DNA, 15 bp, Homo sapiens
tcacttgacttgtta

SEQ ID NO: 1768379 - DNA, 15 bp, Homo sapiens
cacttgacttgttat

SEQ ID NO: 1768380 - DNA, 15 bp, Homo sapiens
acttgacttgttatt

SEQ ID NO: 1768381 - DNA, 15 bp, Homo sapiens
cttgacttgttattc

SEQ ID NO: 1768382 - DNA, 15 bp, Homo sapiens
ttgacttgttattca

SEQ ID NO: 1768383 - DNA, 15 bp, Homo sapiens
tgacttgttattcac

SEQ ID NO: 1768384 - DNA, 15 bp, Homo sapiens
gacttgttattcact

SEQ ID NO: 1768385 - DNA, 15 bp, Homo sapiens
acttgttattcactt

SEQ ID NO: 1768386 - DNA, 15 bp, Homo sapiens
cttgttattcactta

SEQ ID NO: 1768387 - DNA, 15 bp, Homo sapiens
ttgttattcacttaa

SEQ ID NO: 1768388 - DNA, 15 bp, Homo sapiens
tgttattcacttaag

SEQ ID NO: 1768389 - DNA, 15 bp, Homo sapiens
gttattcacttaagt

SEQ ID NO: 1768390 - DNA, 15 bp, Homo sapiens
ttattcacttaagtc

SEQ ID NO: 1768391 - DNA, 15 bp, Homo sapiens
tattcacttaagtca

SEQ ID NO: 1768392 - DNA, 15 bp, Homo sapiens
attcacttaagtcat

SEQ ID NO: 1768393 - DNA, 15 bp, Homo sapiens
ttcacttaagtcatt

SEQ ID NO: 1768394 - DNA, 15 bp, Homo sapiens
tcacttaagtcattc

SEQ ID NO: 1768395 - DNA, 15 bp, Homo sapiens
cacttaagtcattca

SEQ ID NO: 1768396 - DNA, 15 bp, Homo sapiens
acttaagtcattcat

SEQ ID NO: 1768397 - DNA, 15 bp, Homo sapiens
cttaagtcattcatc

SEQ ID NO: 1768398 - DNA, 15 bp, Homo sapiens
ttaagtcattcatct

SEQ ID NO: 1768399 - DNA, 15 bp, Homo sapiens
taagtcattcatcta

SEQ ID NO: 1768400 - DNA, 15 bp, Homo sapiens
aagtcattcatctat

SEQ ID NO: 1768401 - DNA, 15 bp, Homo sapiens
agtcattcatctata

SEQ ID NO: 1768402 - DNA, 15 bp, Homo sapiens
gtcattcatctatag

SEQ ID NO: 1768403 - DNA, 15 bp, Homo sapiens
tcattcatctatagt

SEQ ID NO: 1768404 - DNA, 15 bp, Homo sapiens
cattcatctatagtt

SEQ ID NO: 1768405 - DNA, 15 bp, Homo sapiens
attcatctatagttt

SEQ ID NO: 1768406 - DNA, 15 bp, Homo sapiens
ttcatctatagtttt

SEQ ID NO: 1768407 - DNA, 15 bp, Homo sapiens
tcatctatagttttt

SEQ ID NO: 1768408 - DNA, 15 bp, Homo sapiens
catctatagtttttt

SEQ ID NO: 1768409 - DNA, 15 bp, Homo sapiens
atctatagttttttc

SEQ ID NO: 1768410 - DNA, 15 bp, Homo sapiens
tctatagttttttct

SEQ ID NO: 1768411 - DNA, 15 bp, Homo sapiens
ctatagttttttctt

SEQ ID NO: 1768412 - DNA, 15 bp, Homo sapiens
tatagttttttcttt

SEQ ID NO: 1768413 - DNA, 15 bp, Homo sapiens
atagttttttctttt

SEQ ID NO: 1768414 - DNA, 15 bp, Homo sapiens
tagttttttcttttc

SEQ ID NO: 1768415 - DNA, 15 bp, Homo sapiens
agttttttcttttct

SEQ ID NO: 1768416 - DNA, 15 bp, Homo sapiens
gttttttcttttctt

SEQ ID NO: 1768417 - DNA, 15 bp, Homo sapiens
ctttttctttctttc

SEQ ID NO: 1768418 - DNA, 15 bp, Homo sapiens
tcttttttttttctc

SEQ ID NO: 1768419 - DNA, 15 bp, Homo sapiens
cttttttttttctca

SEQ ID NO: 1768420 - DNA, 15 bp, Homo sapiens
ttttttttttctcac

SEQ ID NO: 1768421 - DNA, 15 bp, Homo sapiens
tttttttttctcact

SEQ ID NO: 1768422 - DNA, 15 bp, Homo sapiens
ttttttttctcactc

SEQ ID NO: 1768423 - DNA, 15 bp, Homo sapiens
tttttttctcactct

SEQ ID NO: 1768424 - DNA, 15 bp, Homo sapiens
ttttttctcactctg

SEQ ID NO: 1768425 - DNA, 15 bp, Homo sapiens
tttttctcactctgc

SEQ ID NO: 1768426 - DNA, 15 bp, Homo sapiens
ttttctcactctgcc

SEQ ID NO: 1768427 - DNA, 15 bp, Homo sapiens
tttctcactctgccg

SEQ ID NO: 1768428 - DNA, 15 bp, Homo sapiens
ttctcactctgccgc

SEQ ID NO: 1768429 - DNA, 15 bp, Homo sapiens
tctcactctgccgcc

SEQ ID NO: 1768430 - DNA, 15 bp, Homo sapiens
ctcactctgccgccc

SEQ ID NO: 1768431 - DNA, 15 bp, Homo sapiens
tcactctgccgccca

SEQ ID NO: 1768432 - DNA, 15 bp, Homo sapiens
cactctgccgcccag

SEQ ID NO: 1768433 - DNA, 15 bp, Homo sapiens
actctgccgcccagg

SEQ ID NO: 1768434 - DNA, 15 bp, Homo sapiens
ctgccgcccaggctg

SEQ ID NO: 1768435 - DNA, 15 bp, Homo sapiens
tgccgcccaggctgg

SEQ ID NO: 1768436 - DNA, 15 bp, Homo sapiens
gccgcccaggctgga

SEQ ID NO: 1768437 - DNA, 15 bp, Homo sapiens
ccgcccaggctggag

SEQ ID NO: 1768438 - DNA, 15 bp, Homo sapiens
gtggtgcgatcttgt

SEQ ID NO: 1768439 - DNA, 15 bp, Homo sapiens
tggtgcgatcttgtc

SEQ ID NO: 1768440 - DNA, 15 bp, Homo sapiens
ggtgcgatcttgtct

SEQ ID NO: 1768441 - DNA, 15 bp, Homo sapiens
gtgcgatcttgtctt

SEQ ID NO: 1768442 - DNA, 15 bp, Homo sapiens
tgcgatcttgtctta

SEQ ID NO: 1768443 - DNA, 15 bp, Homo sapiens
gcgatcttgtcttac

SEQ ID NO: 1768444 - DNA, 15 bp, Homo sapiens
cgatcttgtcttact

SEQ ID NO: 1768445 - DNA, 15 bp, Homo sapiens
gatcttgtcttactg

SEQ ID NO: 1768446 - DNA, 15 bp, Homo sapiens
atcttgtcttactgc

SEQ ID NO: 1768447 - DNA, 15 bp, Homo sapiens
tcttgtcttactgca

SEQ ID NO: 1768448 - DNA, 15 bp, Homo sapiens
cttgtcttactgcaa

SEQ ID NO: 1768449 - DNA, 15 bp, Homo sapiens
ttgtcttactgcaac

SEQ ID NO: 1768450 - DNA, 15 bp, Homo sapiens
tgtcttactgcaacc

SEQ ID NO: 1768451 - DNA, 15 bp, Homo sapiens
gtcttactgcaacct

SEQ ID NO: 1768452 - DNA, 15 bp, Homo sapiens
tcttactgcaacctc

SEQ ID NO: 1768453 - DNA, 15 bp, Homo sapiens
cttactgcaacctct

SEQ ID NO: 1768454 - DNA, 15 bp, Homo sapiens
tgcctcccaggttcc

SEQ ID NO: 1768455 - DNA, 15 bp, Homo sapiens
gcctcccaggttcca

SEQ ID NO: 1768456 - DNA, 15 bp, Homo sapiens
cctcccaggttccag

SEQ ID NO: 1768457 - DNA, 15 bp, Homo sapiens
ctcccaggttccagc

SEQ ID NO: 1768458 - DNA, 15 bp, Homo sapiens
tcccaggttccagca

SEQ ID NO: 1768459 - DNA, 15 bp, Homo sapiens
cccaggttccagcaa

SEQ ID NO: 1768460 - DNA, 15 bp, Homo sapiens
ccaggttccagcaat

SEQ ID NO: 1768461 - DNA, 15 bp, Homo sapiens
caggttccagcaatt

SEQ ID NO: 1768462 - DNA, 15 bp, Homo sapiens
aggttccagcaattt

SEQ ID NO: 1768463 - DNA, 15 bp, Homo sapiens
ggttccagcaatttt

SEQ ID NO: 1768464 - DNA, 15 bp, Homo sapiens
gttccagcaattttc

SEQ ID NO: 1768465 - DNA, 15 bp, Homo sapiens
ttccagcaattttcc

SEQ ID NO: 1768466 - DNA, 15 bp, Homo sapiens
tccagcaattttccc

SEQ ID NO: 1768467 - DNA, 15 bp, Homo sapiens
ccagcaattttccca

SEQ ID NO: 1768468 - DNA, 15 bp, Homo sapiens
cagcaattttcccac

SEQ ID NO: 1768469 - DNA, 15 bp, Homo sapiens
agcaattttcccacc

SEQ ID NO: 1768470 - DNA, 15 bp, Homo sapiens
gcaattttcccacct

SEQ ID NO: 1768471 - DNA, 15 bp, Homo sapiens
caattttcccacctc

SEQ ID NO: 1768472 - DNA, 15 bp, Homo sapiens
aattttcccacctca

SEQ ID NO: 1768473 - DNA, 15 bp, Homo sapiens
attttcccacctcag

SEQ ID NO: 1768474 - DNA, 15 bp, Homo sapiens
ttttcccacctcagc

SEQ ID NO: 1768475 - DNA, 15 bp, Homo sapiens
tttcccacctcagcc

SEQ ID NO: 1768476 - DNA, 15 bp, Homo sapiens
ttcccacctcagcct

SEQ ID NO: 1768477 - DNA, 15 bp, Homo sapiens
gtagctgggattatg

SEQ ID NO: 1768478 - DNA, 15 bp, Homo sapiens
tagctgggattatgg

SEQ ID NO: 1768479 - DNA, 15 bp, Homo sapiens
agctgggattatggg

SEQ ID NO: 1768480 - DNA, 15 bp, Homo sapiens
gctgggattatgggc

SEQ ID NO: 1768481 - DNA, 15 bp, Homo sapiens
ctgggattatgggca

SEQ ID NO: 1768482 - DNA, 15 bp, Homo sapiens
tgggattatgggcac

SEQ ID NO: 1768483 - DNA, 15 bp, Homo sapiens
gggattatgggcacc

SEQ ID NO: 1768484 - DNA, 15 bp, Homo sapiens
ggattatgggcaccc

SEQ ID NO: 1768485 - DNA, 15 bp, Homo sapiens
gattatgggcacccg

SEQ ID NO: 1768486 - DNA, 15 bp, Homo sapiens
attatgggcacccgc

SEQ ID NO: 1768487 - DNA, 15 bp, Homo sapiens
ttatgggcacccgcc

SEQ ID NO: 1768488 - DNA, 15 bp, Homo sapiens
tatgggcacccgcca

SEQ ID NO: 1768489 - DNA, 15 bp, Homo sapiens
atgggcacccgccac

SEQ ID NO: 1768490 - DNA, 15 bp, Homo sapiens
tgggcacccgccacc

SEQ ID NO: 1768491 - DNA, 15 bp, Homo sapiens
gggcacccgccacca

SEQ ID NO: 1768492 - DNA, 15 bp, Homo sapiens
cacccgccaccacac

SEQ ID NO: 1768493 - DNA, 15 bp, Homo sapiens
acccgccaccacacc

SEQ ID NO: 1768494 - DNA, 15 bp, Homo sapiens
cccgccaccacaccc

SEQ ID NO: 1768495 - DNA, 15 bp, Homo sapiens
ccgccaccacaccca

SEQ ID NO: 1768496 - DNA, 15 bp, Homo sapiens
tttagtagagatagg

SEQ ID NO: 1768497 - DNA, 15 bp, Homo sapiens
ttagtagagataggg

SEQ ID NO: 1768498 - DNA, 15 bp, Homo sapiens
tagtagagatagggt

SEQ ID NO: 1768499 - DNA, 15 bp, Homo sapiens
agtagagatagggtt

SEQ ID NO: 1768500 - DNA, 15 bp, Homo sapiens
gtagagatagggttt

SEQ ID NO: 1768501 - DNA, 15 bp, Homo sapiens
tagagatagggtttt

SEQ ID NO: 1768502 - DNA, 15 bp, Homo sapiens
agagatagggtttta

SEQ ID NO: 1768503 - DNA, 15 bp, Homo sapiens
gagatagggttttac

SEQ ID NO: 1768504 - DNA, 15 bp, Homo sapiens
agatagggttttacc

SEQ ID NO: 1768505 - DNA, 15 bp, Homo sapiens
gatagggttttacca

SEQ ID NO: 1768506 - DNA, 15 bp, Homo sapiens
atagggttttaccat

SEQ ID NO: 1768507 - DNA, 15 bp, Homo sapiens
tagggttttaccatg

SEQ ID NO: 1768508 - DNA, 15 bp, Homo sapiens
agggttttaccatgt

SEQ ID NO: 1768509 - DNA, 15 bp, Homo sapiens
tttaccatgtggcca

SEQ ID NO: 1768510 - DNA, 15 bp, Homo sapiens
ttaccatgtggccag

SEQ ID NO: 1768511 - DNA, 15 bp, Homo sapiens
taccatgtggccagg

SEQ ID NO: 1768512 - DNA, 15 bp, Homo sapiens
accatgtggccaggc

SEQ ID NO: 1768513 - DNA, 15 bp, Homo sapiens
ccatgtggccaggct

SEQ ID NO: 1768514 - DNA, 15 bp, Homo sapiens
catgtggccaggctg

SEQ ID NO: 1768515 - DNA, 15 bp, Homo sapiens
atgtggccaggctgg

SEQ ID NO: 1768516 - DNA, 15 bp, Homo sapiens
tgtggccaggctggt

SEQ ID NO: 1768517 - DNA, 15 bp, Homo sapiens
tcctgacctcaagtc

SEQ ID NO: 1768518 - DNA, 15 bp, Homo sapiens
cctgacctcaagtca

SEQ ID NO: 1768519 - DNA, 15 bp, Homo sapiens
ctgacctcaagtcat

SEQ ID NO: 1768520 - DNA, 15 bp, Homo sapiens
tgacctcaagtcatc

SEQ ID NO: 1768521 - DNA, 15 bp, Homo sapiens
gacctcaagtcatcc

SEQ ID NO: 1768522 - DNA, 15 bp, Homo sapiens
acctcaagtcatcca

SEQ ID NO: 1768523 - DNA, 15 bp, Homo sapiens
cctcaagtcatccac

SEQ ID NO: 1768524 - DNA, 15 bp, Homo sapiens
ctcaagtcatccacc

SEQ ID NO: 1768525 - DNA, 15 bp, Homo sapiens
tcaagtcatccaccc

SEQ ID NO: 1768526 - DNA, 15 bp, Homo sapiens
caagtcatccaccca

SEQ ID NO: 1768527 - DNA, 15 bp, Homo sapiens
aagtcatccacccac

SEQ ID NO: 1768528 - DNA, 15 bp, Homo sapiens
agtcatccacccact

SEQ ID NO: 1768529 - DNA, 15 bp, Homo sapiens
gtcatccacccactt

SEQ ID NO: 1768530 - DNA, 15 bp, Homo sapiens
tcatccacccacttc

SEQ ID NO: 1768531 - DNA, 15 bp, Homo sapiens
catccacccacttca

SEQ ID NO: 1768532 - DNA, 15 bp, Homo sapiens
atccacccacttcag

SEQ ID NO: 1768533 - DNA, 15 bp, Homo sapiens
tccacccacttcagc

SEQ ID NO: 1768534 - DNA, 15 bp, Homo sapiens
ccacccacttcagcc

SEQ ID NO: 1768535 - DNA, 15 bp, Homo sapiens
cacccacttcagcct

SEQ ID NO: 1768536 - DNA, 15 bp, Homo sapiens
acccacttcagcctc

SEQ ID NO: 1768537 - DNA, 15 bp, Homo sapiens
cacttcagcctcccc

SEQ ID NO: 1768538 - DNA, 15 bp, Homo sapiens
acttcagcctcccca

SEQ ID NO: 1768539 - DNA, 15 bp, Homo sapiens
cttcagcctccccaa

SEQ ID NO: 1768540 - DNA, 15 bp, Homo sapiens
ttcagcctccccaag

SEQ ID NO: 1768541 - DNA, 15 bp, Homo sapiens
tcagcctccccaagt

SEQ ID NO: 1768542 - DNA, 15 bp, Homo sapiens
cagcctccccaagtg

SEQ ID NO: 1768543 - DNA, 15 bp, Homo sapiens
agcctccccaagtgc

SEQ ID NO: 1768544 - DNA, 15 bp, Homo sapiens
gcctccccaagtgct

SEQ ID NO: 1768545 - DNA, 15 bp, Homo sapiens
cctccccaagtgctg

SEQ ID NO: 1768546 - DNA, 15 bp, Homo sapiens
ctccccaagtgctgg

SEQ ID NO: 1768547 - DNA, 15 bp, Homo sapiens
tccccaagtgctggg

SEQ ID NO: 1768548 - DNA, 15 bp, Homo sapiens
ccccaagtgctggga

SEQ ID NO: 1768549 - DNA, 15 bp, Homo sapiens
caagtgctgggattc

SEQ ID NO: 1768550 - DNA, 15 bp, Homo sapiens
gtgctgggattccat

SEQ ID NO: 1768551 - DNA, 15 bp, Homo sapiens
tgctgggattccatg

SEQ ID NO: 1768552 - DNA, 15 bp, Homo sapiens
gctgggattccatgt

SEQ ID NO: 1768553 - DNA, 15 bp, Homo sapiens
ctgggattccatgtg

SEQ ID NO: 1768554 - DNA, 15 bp, Homo sapiens
tgggattccatgtgt

SEQ ID NO: 1768555 - DNA, 15 bp, Homo sapiens
gggattccatgtgtg

SEQ ID NO: 1768556 - DNA, 15 bp, Homo sapiens
ggattccatgtgtga

SEQ ID NO: 1768557 - DNA, 15 bp, Homo sapiens
gattccatgtgtgag

SEQ ID NO: 1768558 - DNA, 15 bp, Homo sapiens
attccatgtgtgagc

SEQ ID NO: 1768559 - DNA, 15 bp, Homo sapiens
ttccatgtgtgagcc

SEQ ID NO: 1768560 - DNA, 15 bp, Homo sapiens
tccatgtgtgagcca

SEQ ID NO: 1768561 - DNA, 15 bp, Homo sapiens
ccatgtgtgagccac

SEQ ID NO: 1768562 - DNA, 15 bp, Homo sapiens
catgtgtgagccacc

SEQ ID NO: 1768563 - DNA, 15 bp, Homo sapiens
atgtgtgagccaccg

SEQ ID NO: 1768564 - DNA, 15 bp, Homo sapiens
tgtgtgagccaccgt

SEQ ID NO: 1768565 - DNA, 15 bp, Homo sapiens
gtgagccaccgtgcc

SEQ ID NO: 1768566 - DNA, 15 bp, Homo sapiens
tgagccaccgtgccc

SEQ ID NO: 1768567 - DNA, 15 bp, Homo sapiens
gagccaccgtgcccg

SEQ ID NO: 1768568 - DNA, 15 bp, Homo sapiens
agccaccgtgcccgg

SEQ ID NO: 1768569 - DNA, 15 bp, Homo sapiens
gccaccgtgcccggc

SEQ ID NO: 1768570 - DNA, 15 bp, Homo sapiens
ccgtgcccggcctgt

SEQ ID NO: 1768571 - DNA, 15 bp, Homo sapiens
cgtgcccggcctgtt

SEQ ID NO: 1768572 - DNA, 15 bp, Homo sapiens
tgcccggcctgttca

SEQ ID NO: 1768573 - DNA, 15 bp, Homo sapiens
gcccggcctgttcat

SEQ ID NO: 1768574 - DNA, 15 bp, Homo sapiens
cccggcctgttcatt

SEQ ID NO: 1768575 - DNA, 15 bp, Homo sapiens
ccggcctgttcattt

SEQ ID NO: 1768576 - DNA, 15 bp, Homo sapiens
cggcctgttcattta

SEQ ID NO: 1768577 - DNA, 15 bp, Homo sapiens
ggcctgttcatttat

SEQ ID NO: 1768578 - DNA, 15 bp, Homo sapiens
gcctgttcatttata

SEQ ID NO: 1768579 - DNA, 15 bp, Homo sapiens
cctgttcatttatag

SEQ ID NO: 1768580 - DNA, 15 bp, Homo sapiens
ctgttcatttatagt

SEQ ID NO: 1768581 - DNA, 15 bp, Homo sapiens
tgttcatttatagtt

SEQ ID NO: 1768582 - DNA, 15 bp, Homo sapiens
gttcatttatagttt

SEQ ID NO: 1768583 - DNA, 15 bp, Homo sapiens
ttcatttatagtttt

SEQ ID NO: 1768584 - DNA, 15 bp, Homo sapiens
tcatttatagttttt

SEQ ID NO: 1768585 - DNA, 15 bp, Homo sapiens
catttatagtttttt

SEQ ID NO: 1768586 - DNA, 15 bp, Homo sapiens
atttatagtttttta

SEQ ID NO: 1768587 - DNA, 15 bp, Homo sapiens
tttatagttttttaa

SEQ ID NO: 1768588 - DNA, 15 bp, Homo sapiens
ttatagttttttaat

SEQ ID NO: 1768589 - DNA, 15 bp, Homo sapiens
tatagttttttaatg

SEQ ID NO: 1768590 - DNA, 15 bp, Homo sapiens
atagttttttaatgt

SEQ ID NO: 1768591 - DNA, 15 bp, Homo sapiens
tagttttttaatgtt

SEQ ID NO: 1768592 - DNA, 15 bp, Homo sapiens
agttttttaatgttt

SEQ ID NO: 1768593 - DNA, 15 bp, Homo sapiens
gttttttaatgtttg

SEQ ID NO: 1768594 - DNA, 15 bp, Homo sapiens
ttttttaatgtttga

SEQ ID NO: 1768595 - DNA, 15 bp, Homo sapiens
tttttaatgtttgag

SEQ ID NO: 1768596 - DNA, 15 bp, Homo sapiens
ttttaatgtttgagt

SEQ ID NO: 1768597 - DNA, 15 bp, Homo sapiens
tttaatgtttgagtt

SEQ ID NO: 1768598 - DNA, 15 bp, Homo sapiens
ttaatgtttgagtta

SEQ ID NO: 1768599 - DNA, 15 bp, Homo sapiens
taatgtttgagttac

SEQ ID NO: 1768600 - DNA, 15 bp, Homo sapiens
aatgtttgagttact

SEQ ID NO: 1768601 - DNA, 15 bp, Homo sapiens
atgtttgagttactg

SEQ ID NO: 1768602 - DNA, 15 bp, Homo sapiens
tgtttgagttactgg

SEQ ID NO: 1768603 - DNA, 15 bp, Homo sapiens
gtttgagttactggg

SEQ ID NO: 1768604 - DNA, 15 bp, Homo sapiens
tttgagttactgggg

SEQ ID NO: 1768605 - DNA, 15 bp, Homo sapiens
ttgagttactggggc

SEQ ID NO: 1768606 - DNA, 15 bp, Homo sapiens
tgagttactggggct

SEQ ID NO: 1768607 - DNA, 15 bp, Homo sapiens
gagttactggggctt

SEQ ID NO: 1768608 - DNA, 15 bp, Homo sapiens
agttactggggctta

SEQ ID NO: 1768609 - DNA, 15 bp, Homo sapiens
gttactggggcttaa

SEQ ID NO: 1768610 - DNA, 15 bp, Homo sapiens
ttactggggcttaaa

SEQ ID NO: 1768611 - DNA, 15 bp, Homo sapiens
tactggggcttaaaa

SEQ ID NO: 1768612 - DNA, 15 bp, Homo sapiens
actggggcttaaaaa

SEQ ID NO: 1768613 - DNA, 15 bp, Homo sapiens
ctggggcttaaaaat

SEQ ID NO: 1768614 - DNA, 15 bp, Homo sapiens
tggggcttaaaaatg

SEQ ID NO: 1768615 - DNA, 15 bp, Homo sapiens
ggggcttaaaaatgg

SEQ ID NO: 1768616 - DNA, 15 bp, Homo sapiens
gggcttaaaaatgga

SEQ ID NO: 1768617 - DNA, 15 bp, Homo sapiens
ggcttaaaaatggat

SEQ ID NO: 1768618 - DNA, 15 bp, Homo sapiens
gcttaaaaatggata

SEQ ID NO: 1768619 - DNA, 15 bp, Homo sapiens
cttaaaaatggatag

SEQ ID NO: 1768620 - DNA, 15 bp, Homo sapiens
ttaaaaatggataga

SEQ ID NO: 1768621 - DNA, 15 bp, Homo sapiens
taaaaatggatagat

SEQ ID NO: 1768622 - DNA, 15 bp, Homo sapiens
aaaaatggatagatc

SEQ ID NO: 1768623 - DNA, 15 bp, Homo sapiens
aaaatggatagatca

SEQ ID NO: 1768624 - DNA, 15 bp, Homo sapiens
aaatggatagatcac

SEQ ID NO: 1768625 - DNA, 15 bp, Homo sapiens
aatggatagatcact

SEQ ID NO: 1768626 - DNA, 15 bp, Homo sapiens
atggatagatcacta

SEQ ID NO: 1768627 - DNA, 15 bp, Homo sapiens
tggatagatcactat

SEQ ID NO: 1768628 - DNA, 15 bp, Homo sapiens
ggatagatcactatt

SEQ ID NO: 1768629 - DNA, 15 bp, Homo sapiens
gatagatcactattt

SEQ ID NO: 1768630 - DNA, 15 bp, Homo sapiens
atagatcactatttg

SEQ ID NO: 1768631 - DNA, 15 bp, Homo sapiens
tagatcactatttgt

SEQ ID NO: 1768632 - DNA, 15 bp, Homo sapiens
agatcactatttgtt

SEQ ID NO: 1768633 - DNA, 15 bp, Homo sapiens
gatcactatttgttg

SEQ ID NO: 1768634 - DNA, 15 bp, Homo sapiens
atcactatttgttga

SEQ ID NO: 1768635 - DNA, 15 bp, Homo sapiens
tcactatttgttgaa

SEQ ID NO: 1768636 - DNA, 15 bp, Homo sapiens
cactatttgttgaat

SEQ ID NO: 1768637 - DNA, 15 bp, Homo sapiens
actatttgttgaatt

SEQ ID NO: 1768638 - DNA, 15 bp, Homo sapiens
ctatttgttgaatta

SEQ ID NO: 1768639 - DNA, 15 bp, Homo sapiens
tatttgttgaattag

SEQ ID NO: 1768640 - DNA, 15 bp, Homo sapiens
atttgttgaattagg

SEQ ID NO: 1768641 - DNA, 15 bp, Homo sapiens
tttgttgaattaggc

SEQ ID NO: 1768642 - DNA, 15 bp, Homo sapiens
ttgttgaattaggct

SEQ ID NO: 1768643 - DNA, 15 bp, Homo sapiens
tgttgaattaggctt

SEQ ID NO: 1768644 - DNA, 15 bp, Homo sapiens
gttgaattaggcttt

SEQ ID NO: 1768645 - DNA, 15 bp, Homo sapiens
ttgaattaggctttt

SEQ ID NO: 1768646 - DNA, 15 bp, Homo sapiens
tgaattaggcttttc

SEQ ID NO: 1768647 - DNA, 15 bp, Homo sapiens
gaattaggcttttca

SEQ ID NO: 1768648 - DNA, 15 bp, Homo sapiens
aattaggcttttcat

SEQ ID NO: 1768649 - DNA, 15 bp, Homo sapiens
attaggcttttcatt

SEQ ID NO: 1768650 - DNA, 15 bp, Homo sapiens
ttaggcttttcatta

SEQ ID NO: 1768651 - DNA, 15 bp, Homo sapiens
taggcttttcattat

SEQ ID NO: 1768652 - DNA, 15 bp, Homo sapiens
aggcttttcattatt

SEQ ID NO: 1768653 - DNA, 15 bp, Homo sapiens
ggcttttcattatta

SEQ ID NO: 1768654 - DNA, 15 bp, Homo sapiens
gcttttcattattat

SEQ ID NO: 1768655 - DNA, 15 bp, Homo sapiens
cttttcattattatc

SEQ ID NO: 1768656 - DNA, 15 bp, Homo sapiens
ttttcattattatca

SEQ ID NO: 1768657 - DNA, 15 bp, Homo sapiens
tttcattattatcag

SEQ ID NO: 1768658 - DNA, 15 bp, Homo sapiens
ttcattattatcagt

SEQ ID NO: 1768659 - DNA, 15 bp, Homo sapiens
tcattattatcagta

SEQ ID NO: 1768660 - DNA, 15 bp, Homo sapiens
cattattatcagtat

SEQ ID NO: 1768661 - DNA, 15 bp, Homo sapiens
attattatcagtatc

SEQ ID NO: 1768662 - DNA, 15 bp, Homo sapiens
ttattatcagtatca

SEQ ID NO: 1768663 - DNA, 15 bp, Homo sapiens
tattatcagtatcat

SEQ ID NO: 1768664 - DNA, 15 bp, Homo sapiens
attatcagtatcata

SEQ ID NO: 1768665 - DNA, 15 bp, Homo sapiens
ttatcagtatcatag

SEQ ID NO: 1768666 - DNA, 15 bp, Homo sapiens
tatcagtatcatagt

SEQ ID NO: 1768667 - DNA, 15 bp, Homo sapiens
atcagtatcatagta

SEQ ID NO: 1768668 - DNA, 15 bp, Homo sapiens
tcagtatcatagtaa

SEQ ID NO: 1768669 - DNA, 15 bp, Homo sapiens
cagtatcatagtaaa

SEQ ID NO: 1768670 - DNA, 15 bp, Homo sapiens
agtatcatagtaaat

SEQ ID NO: 1768671 - DNA, 15 bp, Homo sapiens
gtatcatagtaaatg

SEQ ID NO: 1768672 - DNA, 15 bp, Homo sapiens
tatcatagtaaatgt

SEQ ID NO: 1768673 - DNA, 15 bp, Homo sapiens
atcatagtaaatgtt

SEQ ID NO: 1768674 - DNA, 15 bp, Homo sapiens
tcatagtaaatgttt

SEQ ID NO: 1768675 - DNA, 15 bp, Homo sapiens
catagtaaatgtttg

SEQ ID NO: 1768676 - DNA, 15 bp, Homo sapiens
atagtaaatgtttgt

SEQ ID NO: 1768677 - DNA, 15 bp, Homo sapiens
tagtaaatgtttgta

SEQ ID NO: 1768678 - DNA, 15 bp, Homo sapiens
agtaaatgtttgtat

SEQ ID NO: 1768679 - DNA, 15 bp, Homo sapiens
gtaaatgtttgtata

SEQ ID NO: 1768680 - DNA, 15 bp, Homo sapiens
taaatgtttgtataa

SEQ ID NO: 1768681 - DNA, 15 bp, Homo sapiens
aaatgtttgtataat

SEQ ID NO: 1768682 - DNA, 15 bp, Homo sapiens
aatgtttgtataatt

SEQ ID NO: 1768683 - DNA, 15 bp, Homo sapiens
atgtttgtataattc

SEQ ID NO: 1768684 - DNA, 15 bp, Homo sapiens
tgtttgtataattct

SEQ ID NO: 1768685 - DNA, 15 bp, Homo sapiens
gtttgtataattctt

SEQ ID NO: 1768686 - DNA, 15 bp, Homo sapiens
tttgtataattctta

SEQ ID NO: 1768687 - DNA, 15 bp, Homo sapiens
ttgtataattcttac

SEQ ID NO: 1768688 - DNA, 15 bp, Homo sapiens
tgtataattcttacc

SEQ ID NO: 1768689 - DNA, 15 bp, Homo sapiens
gtataattcttacca

SEQ ID NO: 1768690 - DNA, 15 bp, Homo sapiens
tataattcttaccac

SEQ ID NO: 1768691 - DNA, 15 bp, Homo sapiens
ataattcttaccaca

SEQ ID NO: 1768692 - DNA, 15 bp, Homo sapiens
taattcttaccacaa

SEQ ID NO: 1768693 - DNA, 15 bp, Homo sapiens
aattcttaccacaat

SEQ ID NO: 1768694 - DNA, 15 bp, Homo sapiens
attcttaccacaatt

SEQ ID NO: 1768695 - DNA, 15 bp, Homo sapiens
ttcttaccacaattc

SEQ ID NO: 1768696 - DNA, 15 bp, Homo sapiens
tcttaccacaattct

SEQ ID NO: 1768697 - DNA, 15 bp, Homo sapiens
cttaccacaattctt

SEQ ID NO: 1768698 - DNA, 15 bp, Homo sapiens
ttaccacaattcttg

SEQ ID NO: 1768699 - DNA, 15 bp, Homo sapiens
taccacaattcttgg

SEQ ID NO: 1768700 - DNA, 15 bp, Homo sapiens
accacaattcttggt

SEQ ID NO: 1768701 - DNA, 15 bp, Homo sapiens
ccacaattcttggtt

SEQ ID NO: 1768702 - DNA, 15 bp, Homo sapiens
cacaattcttggttc

SEQ ID NO: 1768703 - DNA, 15 bp, Homo sapiens
acaattcttggttct

SEQ ID NO: 1768704 - DNA, 15 bp, Homo sapiens
caattcttggttctt

SEQ ID NO: 1768705 - DNA, 15 bp, Homo sapiens
aattcttggttcttt

SEQ ID NO: 1768706 - DNA, 15 bp, Homo sapiens
attcttggttctttg

SEQ ID NO: 1768707 - DNA, 15 bp, Homo sapiens
ttcttggttctttgt

SEQ ID NO: 1768708 - DNA, 15 bp, Homo sapiens
tcttggttctttgta

SEQ ID NO: 1768709 - DNA, 15 bp, Homo sapiens
cttggttctttgtag

SEQ ID NO: 1768710 - DNA, 15 bp, Homo sapiens
ttggttctttgtaga

SEQ ID NO: 1768711 - DNA, 15 bp, Homo sapiens
tggttctttgtagat

SEQ ID NO: 1768712 - DNA, 15 bp, Homo sapiens
ggttctttgtagatg

SEQ ID NO: 1768713 - DNA, 15 bp, Homo sapiens
gttctttgtagatga

SEQ ID NO: 1768714 - DNA, 15 bp, Homo sapiens
ttctttgtagatgat

SEQ ID NO: 1768715 - DNA, 15 bp, Homo sapiens
tctttgtagatgatt

SEQ ID NO: 1768716 - DNA, 15 bp, Homo sapiens
ctttgtagatgattc

SEQ ID NO: 1768717 - DNA, 15 bp, Homo sapiens
tttgtagatgattct

SEQ ID NO: 1768718 - DNA, 15 bp, Homo sapiens
ttgtagatgattctc

SEQ ID NO: 1768719 - DNA, 15 bp, Homo sapiens
tgtagatgattctca

SEQ ID NO: 1768720 - DNA, 15 bp, Homo sapiens
gtagatgattctcac

SEQ ID NO: 1768721 - DNA, 15 bp, Homo sapiens
tagatgattctcaca

SEQ ID NO: 1768722 - DNA, 15 bp, Homo sapiens
agatgattctcacat

SEQ ID NO: 1768723 - DNA, 15 bp, Homo sapiens
gatgattctcacatg

SEQ ID NO: 1768724 - DNA, 15 bp, Homo sapiens
atgattctcacatgt

SEQ ID NO: 1768725 - DNA, 15 bp, Homo sapiens
tgattctcacatgtt

SEQ ID NO: 1768726 - DNA, 15 bp, Homo sapiens
gattctcacatgttt

SEQ ID NO: 1768727 - DNA, 15 bp, Homo sapiens
attctcacatgtttg

SEQ ID NO: 1768728 - DNA, 15 bp, Homo sapiens
ttctcacatgtttgc

SEQ ID NO: 1768729 - DNA, 15 bp, Homo sapiens
tctcacatgtttgct

SEQ ID NO: 1768730 - DNA, 15 bp, Homo sapiens
ctcacatgtttgctg

SEQ ID NO: 1768731 - DNA, 15 bp, Homo sapiens
tcacatgtttgctga

SEQ ID NO: 1768732 - DNA, 15 bp, Homo sapiens
cacatgtttgctgat

SEQ ID NO: 1768733 - DNA, 15 bp, Homo sapiens
acatgtttgctgatg

SEQ ID NO: 1768734 - DNA, 15 bp, Homo sapiens
catgtttgctgatga

SEQ ID NO: 1768735 - DNA, 15 bp, Homo sapiens
atgtttgctgatgaa

SEQ ID NO: 1768736 - DNA, 15 bp, Homo sapiens
tgtttgctgatgaat

SEQ ID NO: 1768737 - DNA, 15 bp, Homo sapiens
gtttgctgatgaatg

SEQ ID NO: 1768738 - DNA, 15 bp, Homo sapiens
tttgctgatgaatga

SEQ ID NO: 1768739 - DNA, 15 bp, Homo sapiens
ttgctgatgaatgaa

SEQ ID NO: 1768740 - DNA, 15 bp, Homo sapiens
tgctgatgaatgaat

SEQ ID NO: 1768741 - DNA, 15 bp, Homo sapiens
gctgatgaatgaatc

SEQ ID NO: 1768742 - DNA, 15 bp, Homo sapiens
ctgatgaatgaatca

SEQ ID NO: 1768743 - DNA, 15 bp, Homo sapiens
tgatgaatgaatcat

SEQ ID NO: 1768744 - DNA, 15 bp, Homo sapiens
gatgaatgaatcata

SEQ ID NO: 1768745 - DNA, 15 bp, Homo sapiens
atgaatgaatcataa

SEQ ID NO: 1768746 - DNA, 15 bp, Homo sapiens
tgaatgaatcataaa

SEQ ID NO: 1768747 - DNA, 15 bp, Homo sapiens
gaatgaatcataaac

SEQ ID NO: 1768748 - DNA, 15 bp, Homo sapiens
aatgaatcataaact

SEQ ID NO: 1768749 - DNA, 15 bp, Homo sapiens
atgaatcataaactt

SEQ ID NO: 1768750 - DNA, 15 bp, Homo sapiens
tgaatcataaacttg

SEQ ID NO: 1768751 - DNA, 15 bp, Homo sapiens
gaatcataaacttga

SEQ ID NO: 1768752 - DNA, 15 bp, Homo sapiens
aatcataaacttgaa

SEQ ID NO: 1768753 - DNA, 15 bp, Homo sapiens
atcataaacttgaat

SEQ ID NO: 1768754 - DNA, 15 bp, Homo sapiens
tcataaacttgaatt

SEQ ID NO: 1768755 - DNA, 15 bp, Homo sapiens
cataaacttgaattt

SEQ ID NO: 1768756 - DNA, 15 bp, Homo sapiens
ataaacttgaatttt

SEQ ID NO: 1768757 - DNA, 15 bp, Homo sapiens
taaacttgaattttg

SEQ ID NO: 1768758 - DNA, 15 bp, Homo sapiens
aaacttgaattttgt

SEQ ID NO: 1768759 - DNA, 15 bp, Homo sapiens
aacttgaattttgtt

SEQ ID NO: 1768760 - DNA, 15 bp, Homo sapiens
acttgaattttgttg

SEQ ID NO: 1768761 - DNA, 15 bp, Homo sapiens
cttgaattttgttgc

SEQ ID NO: 1768762 - DNA, 15 bp, Homo sapiens
ttgaattttgttgcc

SEQ ID NO: 1768763 - DNA, 15 bp, Homo sapiens
tgaattttgttgcca

SEQ ID NO: 1768764 - DNA, 15 bp, Homo sapiens
gaattttgttgccag

SEQ ID NO: 1768765 - DNA, 15 bp, Homo sapiens
aattttgttgccagt

SEQ ID NO: 1768766 - DNA, 15 bp, Homo sapiens
ttttgttgccagttg

SEQ ID NO: 1768767 - DNA, 15 bp, Homo sapiens
tttgttgccagttgt

SEQ ID NO: 1768768 - DNA, 15 bp, Homo sapiens
ttgttgccagttgtt

SEQ ID NO: 1768769 - DNA, 15 bp, Homo sapiens
tgttgccagttgttt

SEQ ID NO: 1768770 - DNA, 15 bp, Homo sapiens
gttgccagttgtttc

SEQ ID NO: 1768771 - DNA, 15 bp, Homo sapiens
ttgccagttgtttct

SEQ ID NO: 1768772 - DNA, 15 bp, Homo sapiens
tgccagttgtttcta

SEQ ID NO: 1768773 - DNA, 15 bp, Homo sapiens
gccagttgtttctac

SEQ ID NO: 1768774 - DNA, 15 bp, Homo sapiens
ccagttgtttctact

SEQ ID NO: 1768775 - DNA, 15 bp, Homo sapiens
cagttgtttctactg

SEQ ID NO: 1768776 - DNA, 15 bp, Homo sapiens
agttgtttctactga

SEQ ID NO: 1768777 - DNA, 15 bp, Homo sapiens
gttgtttctactgag

SEQ ID NO: 1768778 - DNA, 15 bp, Homo sapiens
ttgtttctactgagg

SEQ ID NO: 1768779 - DNA, 15 bp, Homo sapiens
tgtttctactgagga

SEQ ID NO: 1768780 - DNA, 15 bp, Homo sapiens
gtttctactgaggaa

SEQ ID NO: 1768781 - DNA, 15 bp, Homo sapiens
tttctactgaggaag

SEQ ID NO: 1768782 - DNA, 15 bp, Homo sapiens
ttctactgaggaaga

SEQ ID NO: 1768783 - DNA, 15 bp, Homo sapiens
tctactgaggaagag

SEQ ID NO: 1768784 - DNA, 15 bp, Homo sapiens
ctactgaggaagagc

SEQ ID NO: 1768785 - DNA, 15 bp, Homo sapiens
tactgaggaagagcc

SEQ ID NO: 1768786 - DNA, 15 bp, Homo sapiens
actgaggaagagcca

SEQ ID NO: 1768787 - DNA, 15 bp, Homo sapiens
ctgaggaagagccat

SEQ ID NO: 1768788 - DNA, 15 bp, Homo sapiens
tgaggaagagccata

SEQ ID NO: 1768789 - DNA, 15 bp, Homo sapiens
gaggaagagccatag

SEQ ID NO: 1768790 - DNA, 15 bp, Homo sapiens
aggaagagccatagc

SEQ ID NO: 1768791 - DNA, 15 bp, Homo sapiens
ggaagagccatagca

SEQ ID NO: 1768792 - DNA, 15 bp, Homo sapiens
gaagagccatagcag

SEQ ID NO: 1768793 - DNA, 15 bp, Homo sapiens
aagagccatagcaga

SEQ ID NO: 1768794 - DNA, 15 bp, Homo sapiens
agagccatagcagag

SEQ ID NO: 1768795 - DNA, 15 bp, Homo sapiens
gagccatagcagagg

SEQ ID NO: 1768796 - DNA, 15 bp, Homo sapiens
agccatagcagaggg

SEQ ID NO: 1768797 - DNA, 15 bp, Homo sapiens
gccatagcagaggga

SEQ ID NO: 1768798 - DNA, 15 bp, Homo sapiens
ccatagcagagggac

SEQ ID NO: 1768799 - DNA, 15 bp, Homo sapiens
catagcagagggact

SEQ ID NO: 1768800 - DNA, 15 bp, Homo sapiens
atagcagagggactg

SEQ ID NO: 1768801 - DNA, 15 bp, Homo sapiens
tagcagagggactgt

SEQ ID NO: 1768802 - DNA, 15 bp, Homo sapiens
agcagagggactgtt

SEQ ID NO: 1768803 - DNA, 15 bp, Homo sapiens
gcagagggactgttt

SEQ ID NO: 1768804 - DNA, 15 bp, Homo sapiens
cagagggactgtttg

SEQ ID NO: 1768805 - DNA, 15 bp, Homo sapiens
agagggactgtttga

SEQ ID NO: 1768806 - DNA, 15 bp, Homo sapiens
gagggactgtttgaa

SEQ ID NO: 1768807 - DNA, 15 bp, Homo sapiens
agggactgtttgaac

SEQ ID NO: 1768808 - DNA, 15 bp, Homo sapiens
gggactgtttgaaca

SEQ ID NO: 1768809 - DNA, 15 bp, Homo sapiens
ggactgtttgaacag

SEQ ID NO: 1768810 - DNA, 15 bp, Homo sapiens
gactgtttgaacagg

SEQ ID NO: 1768811 - DNA, 15 bp, Homo sapiens
actgtttgaacagga

SEQ ID NO: 1768812 - DNA, 15 bp, Homo sapiens
ctgtttgaacaggaa

SEQ ID NO: 1768813 - DNA, 15 bp, Homo sapiens
tgtttgaacaggaag

SEQ ID NO: 1768814 - DNA, 15 bp, Homo sapiens
gtttgaacaggaaga

SEQ ID NO: 1768815 - DNA, 15 bp, Homo sapiens
tttgaacaggaagaa

SEQ ID NO: 1768816 - DNA, 15 bp, Homo sapiens
ttgaacaggaagaag

SEQ ID NO: 1768817 - DNA, 15 bp, Homo sapiens
tgaacaggaagaaga

SEQ ID NO: 1768818 - DNA, 15 bp, Homo sapiens
gaacaggaagaagat

SEQ ID NO: 1768819 - DNA, 15 bp, Homo sapiens
aacaggaagaagata

SEQ ID NO: 1768820 - DNA, 15 bp, Homo sapiens
acaggaagaagataa

SEQ ID NO: 1768821 - DNA, 15 bp, Homo sapiens
caggaagaagataat

SEQ ID NO: 1768822 - DNA, 15 bp, Homo sapiens
aggaagaagataatt

SEQ ID NO: 1768823 - DNA, 15 bp, Homo sapiens
ggaagaagataattg

SEQ ID NO: 1768824 - DNA, 15 bp, Homo sapiens
gaagaagataattga

SEQ ID NO: 1768825 - DNA, 15 bp, Homo sapiens
aagaagataattgaa

SEQ ID NO: 1768826 - DNA, 15 bp, Homo sapiens
agaagataattgaat

SEQ ID NO: 1768827 - DNA, 15 bp, Homo sapiens
gaagataattgaata

SEQ ID NO: 1768828 - DNA, 15 bp, Homo sapiens
aagataattgaatac

SEQ ID NO: 1768829 - DNA, 15 bp, Homo sapiens
agataattgaatact

SEQ ID NO: 1768830 - DNA, 15 bp, Homo sapiens
gataattgaatactg

SEQ ID NO: 1768831 - DNA, 15 bp, Homo sapiens
ataattgaatactgc

SEQ ID NO: 1768832 - DNA, 15 bp, Homo sapiens
taattgaatactgca

SEQ ID NO: 1768833 - DNA, 15 bp, Homo sapiens
aattgaatactgcat

SEQ ID NO: 1768834 - DNA, 15 bp, Homo sapiens
attgaatactgcatt

SEQ ID NO: 1768835 - DNA, 15 bp, Homo sapiens
ttgaatactgcattt

SEQ ID NO: 1768836 - DNA, 15 bp, Homo sapiens
tgaatactgcatttt

SEQ ID NO: 1768837 - DNA, 15 bp, Homo sapiens
gaatactgcattttt

SEQ ID NO: 1768838 - DNA, 15 bp, Homo sapiens
aatactgcatttttt

SEQ ID NO: 1768839 - DNA, 15 bp, Homo sapiens
atactgcattttttc

SEQ ID NO: 1768840 - DNA, 15 bp, Homo sapiens
tactgcattttttcc

SEQ ID NO: 1768841 - DNA, 15 bp, Homo sapiens
actgcattttttcca

SEQ ID NO: 1768842 - DNA, 15 bp, Homo sapiens
ctgcattttttccag

SEQ ID NO: 1768843 - DNA, 15 bp, Homo sapiens
tgcattttttccaga

SEQ ID NO: 1768844 - DNA, 15 bp, Homo sapiens
gcattttttccagat

SEQ ID NO: 1768845 - DNA, 15 bp, Homo sapiens
cattttttccagata

SEQ ID NO: 1768846 - DNA, 15 bp, Homo sapiens
attttttccagatat

SEQ ID NO: 1768847 - DNA, 15 bp, Homo sapiens
ttttttccagatatt

SEQ ID NO: 1768848 - DNA, 15 bp, Homo sapiens
tttttccagatatta

SEQ ID NO: 1768849 - DNA, 15 bp, Homo sapiens
ttttccagatattaa

SEQ ID NO: 1768850 - DNA, 15 bp, Homo sapiens
tttccagatattaaa

SEQ ID NO: 1768851 - DNA, 15 bp, Homo sapiens
ttccagatattaaat

SEQ ID NO: 1768852 - DNA, 15 bp, Homo sapiens
tccagatattaaatt

SEQ ID NO: 1768853 - DNA, 15 bp, Homo sapiens
ccagatattaaattt

SEQ ID NO: 1768854 - DNA, 15 bp, Homo sapiens
cagatattaaatttg

SEQ ID NO: 1768855 - DNA, 15 bp, Homo sapiens
agatattaaatttgg

SEQ ID NO: 1768856 - DNA, 15 bp, Homo sapiens
gatattaaatttggc

SEQ ID NO: 1768857 - DNA, 15 bp, Homo sapiens
atattaaatttggcc

SEQ ID NO: 1768858 - DNA, 15 bp, Homo sapiens
tattaaatttggcct

SEQ ID NO: 1768859 - DNA, 15 bp, Homo sapiens
attaaatttggcctc

SEQ ID NO: 1768860 - DNA, 15 bp, Homo sapiens
ttaaatttggcctct

SEQ ID NO: 1768861 - DNA, 15 bp, Homo sapiens
taaatttggcctcta

SEQ ID NO: 1768862 - DNA, 15 bp, Homo sapiens
aaatttggcctctaa

SEQ ID NO: 1768863 - DNA, 15 bp, Homo sapiens
aatttggcctctaat

SEQ ID NO: 1768864 - DNA, 15 bp, Homo sapiens
atttggcctctaatt

SEQ ID NO: 1768865 - DNA, 15 bp, Homo sapiens
tttggcctctaatta

SEQ ID NO: 1768866 - DNA, 15 bp, Homo sapiens
ttggcctctaattaa

SEQ ID NO: 1768867 - DNA, 15 bp, Homo sapiens
tggcctctaattaag

SEQ ID NO: 1768868 - DNA, 15 bp, Homo sapiens
ggcctctaattaagg

SEQ ID NO: 1768869 - DNA, 15 bp, Homo sapiens
gcctctaattaagga

SEQ ID NO: 1768870 - DNA, 15 bp, Homo sapiens
cctctaattaaggaa

SEQ ID NO: 1768871 - DNA, 15 bp, Homo sapiens
ctctaattaaggaac

SEQ ID NO: 1768872 - DNA, 15 bp, Homo sapiens
tctaattaaggaacc

SEQ ID NO: 1768873 - DNA, 15 bp, Homo sapiens
ctaattaaggaacca

SEQ ID NO: 1768874 - DNA, 15 bp, Homo sapiens
taattaaggaaccaa

SEQ ID NO: 1768875 - DNA, 15 bp, Homo sapiens
aattaaggaaccaaa

SEQ ID NO: 1768876 - DNA, 15 bp, Homo sapiens
attaaggaaccaaag

SEQ ID NO: 1768877 - DNA, 15 bp, Homo sapiens
ttaaggaaccaaagg

SEQ ID NO: 1768878 - DNA, 15 bp, Homo sapiens
taaggaaccaaaggg

SEQ ID NO: 1768879 - DNA, 15 bp, Homo sapiens
aaggaaccaaagggg

SEQ ID NO: 1768880 - DNA, 15 bp, Homo sapiens
aggaaccaaagggga

SEQ ID NO: 1768881 - DNA, 15 bp, Homo sapiens
ggaaccaaaggggaa

SEQ ID NO: 1768882 - DNA, 15 bp, Homo sapiens
gaaccaaaggggaat

SEQ ID NO: 1768883 - DNA, 15 bp, Homo sapiens
aaccaaaggggaatt

SEQ ID NO: 1768884 - DNA, 15 bp, Homo sapiens
accaaaggggaattt

SEQ ID NO: 1768885 - DNA, 15 bp, Homo sapiens
ccaaaggggaattta

SEQ ID NO: 1768886 - DNA, 15 bp, Homo sapiens
caaaggggaatttag

SEQ ID NO: 1768887 - DNA, 15 bp, Homo sapiens
aaaggggaatttaga

SEQ ID NO: 1768888 - DNA, 15 bp, Homo sapiens
aaggggaatttagaa

SEQ ID NO: 1768889 - DNA, 15 bp, Homo sapiens
aggggaatttagaaa

SEQ ID NO: 1768890 - DNA, 15 bp, Homo sapiens
ggggaatttagaaac

SEQ ID NO: 1768891 - DNA, 15 bp, Homo sapiens
gggaatttagaaact

SEQ ID NO: 1768892 - DNA, 15 bp, Homo sapiens
ggaatttagaaactt

SEQ ID NO: 1768893 - DNA, 15 bp, Homo sapiens
gaatttagaaacttt

SEQ ID NO: 1768894 - DNA, 15 bp, Homo sapiens
aatttagaaactttg

SEQ ID NO: 1768895 - DNA, 15 bp, Homo sapiens
atttagaaactttga

SEQ ID NO: 1768896 - DNA, 15 bp, Homo sapiens
tttagaaactttgaa

SEQ ID NO: 1768897 - DNA, 15 bp, Homo sapiens
ttagaaactttgaaa

SEQ ID NO: 1768898 - DNA, 15 bp, Homo sapiens
tagaaactttgaaaa

SEQ ID NO: 1768899 - DNA, 15 bp, Homo sapiens
agaaactttgaaaaa

SEQ ID NO: 1768900 - DNA, 15 bp, Homo sapiens
gaaactttgaaaaat

SEQ ID NO: 1768901 - DNA, 15 bp, Homo sapiens
aaactttgaaaaatt

SEQ ID NO: 1768902 - DNA, 15 bp, Homo sapiens
aactttgaaaaattc

SEQ ID NO: 1768903 - DNA, 15 bp, Homo sapiens
actttgaaaaattct

SEQ ID NO: 1768904 - DNA, 15 bp, Homo sapiens
ctttgaaaaattctt

SEQ ID NO: 1768905 - DNA, 15 bp, Homo sapiens
tttgaaaaattctta

SEQ ID NO: 1768906 - DNA, 15 bp, Homo sapiens
ttgaaaaattcttag

SEQ ID NO: 1768907 - DNA, 15 bp, Homo sapiens
tgaaaaattcttagg

SEQ ID NO: 1768908 - DNA, 15 bp, Homo sapiens
gaaaaattcttaggt

SEQ ID NO: 1768909 - DNA, 15 bp, Homo sapiens
aaaaattcttaggtt

SEQ ID NO: 1768910 - DNA, 15 bp, Homo sapiens
aaaattcttaggtta

SEQ ID NO: 1768911 - DNA, 15 bp, Homo sapiens
aaattcttaggttag

SEQ ID NO: 1768912 - DNA, 15 bp, Homo sapiens
aattcttaggttaga

SEQ ID NO: 1768913 - DNA, 15 bp, Homo sapiens
attcttaggttagaa

SEQ ID NO: 1768914 - DNA, 15 bp, Homo sapiens
ttcttaggttagaat

SEQ ID NO: 1768915 - DNA, 15 bp, Homo sapiens
tcttaggttagaatt

SEQ ID NO: 1768916 - DNA, 15 bp, Homo sapiens
cttaggttagaattg

SEQ ID NO: 1768917 - DNA, 15 bp, Homo sapiens
ttaggttagaattgg

SEQ ID NO: 1768918 - DNA, 15 bp, Homo sapiens
taggttagaattgga

SEQ ID NO: 1768919 - DNA, 15 bp, Homo sapiens
aggttagaattggaa

SEQ ID NO: 1768920 - DNA, 15 bp, Homo sapiens
ggttagaattggaaa

SEQ ID NO: 1768921 - DNA, 15 bp, Homo sapiens
gttagaattggaaaa

SEQ ID NO: 1768922 - DNA, 15 bp, Homo sapiens
ttagaattggaaaaa

SEQ ID NO: 1768923 - DNA, 15 bp, Homo sapiens
tagaattggaaaaat

SEQ ID NO: 1768924 - DNA, 15 bp, Homo sapiens
agaattggaaaaata

SEQ ID NO: 1768925 - DNA, 15 bp, Homo sapiens
gaattggaaaaatac

SEQ ID NO: 1768926 - DNA, 15 bp, Homo sapiens
aattggaaaaataca

SEQ ID NO: 1768927 - DNA, 15 bp, Homo sapiens
attggaaaaatacag

SEQ ID NO: 1768928 - DNA, 15 bp, Homo sapiens
ttggaaaaatacaga

SEQ ID NO: 1768929 - DNA, 15 bp, Homo sapiens
tggaaaaatacagag

SEQ ID NO: 1768930 - DNA, 15 bp, Homo sapiens
ggaaaaatacagagt

SEQ ID NO: 1768931 - DNA, 15 bp, Homo sapiens
gaaaaatacagagta

SEQ ID NO: 1768932 - DNA, 15 bp, Homo sapiens
aaaaatacagagtaa

SEQ ID NO: 1768933 - DNA, 15 bp, Homo sapiens
aaaatacagagtaac

SEQ ID NO: 1768934 - DNA, 15 bp, Homo sapiens
aaatacagagtaact

SEQ ID NO: 1768935 - DNA, 15 bp, Homo sapiens
aatacagagtaacta

SEQ ID NO: 1768936 - DNA, 15 bp, Homo sapiens
atacagagtaactac

SEQ ID NO: 1768937 - DNA, 15 bp, Homo sapiens
tacagagtaactact

SEQ ID NO: 1768938 - DNA, 15 bp, Homo sapiens
acagagtaactactt

SEQ ID NO: 1768939 - DNA, 15 bp, Homo sapiens
cagagtaactacttg

SEQ ID NO: 1768940 - DNA, 15 bp, Homo sapiens
agagtaactacttgc

SEQ ID NO: 1768941 - DNA, 15 bp, Homo sapiens
gagtaactacttgca

SEQ ID NO: 1768942 - DNA, 15 bp, Homo sapiens
agtaactacttgcaa

SEQ ID NO: 1768943 - DNA, 15 bp, Homo sapiens
gtaactacttgcaaa

SEQ ID NO: 1768944 - DNA, 15 bp, Homo sapiens
taactacttgcaaag

SEQ ID NO: 1768945 - DNA, 15 bp, Homo sapiens
aactacttgcaaagg

SEQ ID NO: 1768946 - DNA, 15 bp, Homo sapiens
actacttgcaaaggg

SEQ ID NO: 1768947 - DNA, 15 bp, Homo sapiens
ctacttgcaaaggga

SEQ ID NO: 1768948 - DNA, 15 bp, Homo sapiens
tacttgcaaagggag

SEQ ID NO: 1768949 - DNA, 15 bp, Homo sapiens
acttgcaaagggagg

SEQ ID NO: 1768950 - DNA, 15 bp, Homo sapiens
cttgcaaagggaggt

SEQ ID NO: 1768951 - DNA, 15 bp, Homo sapiens
ttgcaaagggaggta

SEQ ID NO: 1768952 - DNA, 15 bp, Homo sapiens
tgcaaagggaggtaa

SEQ ID NO: 1768953 - DNA, 15 bp, Homo sapiens
gcaaagggaggtaat

SEQ ID NO: 1768954 - DNA, 15 bp, Homo sapiens
caaagggaggtaatg

SEQ ID NO: 1768955 - DNA, 15 bp, Homo sapiens
aaagggaggtaatga

SEQ ID NO: 1768956 - DNA, 15 bp, Homo sapiens
aagggaggtaatgaa

SEQ ID NO: 1768957 - DNA, 15 bp, Homo sapiens
agggaggtaatgaat

SEQ ID NO: 1768958 - DNA, 15 bp, Homo sapiens
gggaggtaatgaatc

SEQ ID NO: 1768959 - DNA, 15 bp, Homo sapiens
ggaggtaatgaatcc

SEQ ID NO: 1768960 - DNA, 15 bp, Homo sapiens
gaggtaatgaatcca

SEQ ID NO: 1768961 - DNA, 15 bp, Homo sapiens
aggtaatgaatccat

SEQ ID NO: 1768962 - DNA, 15 bp, Homo sapiens
ggtaatgaatccata

SEQ ID NO: 1768963 - DNA, 15 bp, Homo sapiens
gtaatgaatccatat

SEQ ID NO: 1768964 - DNA, 15 bp, Homo sapiens
taatgaatccatata

SEQ ID NO: 1768965 - DNA, 15 bp, Homo sapiens
aatgaatccatataa

SEQ ID NO: 1768966 - DNA, 15 bp, Homo sapiens
atgaatccatataat

SEQ ID NO: 1768967 - DNA, 15 bp, Homo sapiens
tgaatccatataatc

SEQ ID NO: 1768968 - DNA, 15 bp, Homo sapiens
gaatccatataatca

SEQ ID NO: 1768969 - DNA, 15 bp, Homo sapiens
aatccatataatcaa

SEQ ID NO: 1768970 - DNA, 15 bp, Homo sapiens
atccatataatcaat

SEQ ID NO: 1768971 - DNA, 15 bp, Homo sapiens
tccatataatcaatt

SEQ ID NO: 1768972 - DNA, 15 bp, Homo sapiens
ccatataatcaatta

SEQ ID NO: 1768973 - DNA, 15 bp, Homo sapiens
catataatcaattat

SEQ ID NO: 1768974 - DNA, 15 bp, Homo sapiens
atataatcaattata

SEQ ID NO: 1768975 - DNA, 15 bp, Homo sapiens
tataatcaattatat

SEQ ID NO: 1768976 - DNA, 15 bp, Homo sapiens
ataatcaattatatt

SEQ ID NO: 1768977 - DNA, 15 bp, Homo sapiens
taatcaattatattt

SEQ ID NO: 1768978 - DNA, 15 bp, Homo sapiens
aatcaattatattta

SEQ ID NO: 1768979 - DNA, 15 bp, Homo sapiens
atcaattatatttaa

SEQ ID NO: 1768980 - DNA, 15 bp, Homo sapiens
tcaattatatttaat

SEQ ID NO: 1768981 - DNA, 15 bp, Homo sapiens
caattatatttaata

SEQ ID NO: 1768982 - DNA, 15 bp, Homo sapiens
aattatatttaatag

SEQ ID NO: 1768983 - DNA, 15 bp, Homo sapiens
attatatttaataga

SEQ ID NO: 1768984 - DNA, 15 bp, Homo sapiens
ttatatttaatagat

SEQ ID NO: 1768985 - DNA, 15 bp, Homo sapiens
tatatttaatagata

SEQ ID NO: 1768986 - DNA, 15 bp, Homo sapiens
atatttaatagatac

SEQ ID NO: 1768987 - DNA, 15 bp, Homo sapiens
tatttaatagatact

SEQ ID NO: 1768988 - DNA, 15 bp, Homo sapiens
atttaatagatactt

SEQ ID NO: 1768989 - DNA, 15 bp, Homo sapiens
tttaatagatacttt

SEQ ID NO: 1768990 - DNA, 15 bp, Homo sapiens
ttaatagatactttt

SEQ ID NO: 1768991 - DNA, 15 bp, Homo sapiens
taatagatacttttg

SEQ ID NO: 1768992 - DNA, 15 bp, Homo sapiens
aatagatacttttgt

SEQ ID NO: 1768993 - DNA, 15 bp, Homo sapiens
atagatacttttgta

SEQ ID NO: 1768994 - DNA, 15 bp, Homo sapiens
tagatacttttgtat

SEQ ID NO: 1768995 - DNA, 15 bp, Homo sapiens
agatacttttgtatt

SEQ ID NO: 1768996 - DNA, 15 bp, Homo sapiens
gatacttttgtattt

SEQ ID NO: 1768997 - DNA, 15 bp, Homo sapiens
atacttttgtatttg

SEQ ID NO: 1768998 - DNA, 15 bp, Homo sapiens
tacttttgtatttga

SEQ ID NO: 1768999 - DNA, 15 bp, Homo sapiens
acttttgtatttgat

SEQ ID NO: 1769000 - DNA, 15 bp, Homo sapiens
cttttgtatttgata

SEQ ID NO: 1769001 - DNA, 15 bp, Homo sapiens
ttttgtatttgataa

SEQ ID NO: 1769002 - DNA, 15 bp, Homo sapiens
tttgtatttgataaa

SEQ ID NO: 1769003 - DNA, 15 bp, Homo sapiens
ttgtatttgataaac

SEQ ID NO: 1769004 - DNA, 15 bp, Homo sapiens
tgtatttgataaact

SEQ ID NO: 1769005 - DNA, 15 bp, Homo sapiens
gtatttgataaactc

SEQ ID NO: 1769006 - DNA, 15 bp, Homo sapiens
tatttgataaactca

SEQ ID NO: 1769007 - DNA, 15 bp, Homo sapiens
atttgataaactcag

SEQ ID NO: 1769008 - DNA, 15 bp, Homo sapiens
tttgataaactcagg

SEQ ID NO: 1769009 - DNA, 15 bp, Homo sapiens
ttgataaactcaggc

SEQ ID NO: 1769010 - DNA, 15 bp, Homo sapiens
tgataaactcaggca

SEQ ID NO: 1769011 - DNA, 15 bp, Homo sapiens
gataaactcaggcaa

SEQ ID NO: 1769012 - DNA, 15 bp, Homo sapiens
ataaactcaggcaaa

SEQ ID NO: 1769013 - DNA, 15 bp, Homo sapiens
taaactcaggcaaac

SEQ ID NO: 1769014 - DNA, 15 bp, Homo sapiens
aaactcaggcaaact

SEQ ID NO: 1769015 - DNA, 15 bp, Homo sapiens
aactcaggcaaactg

SEQ ID NO: 1769016 - DNA, 15 bp, Homo sapiens
actcaggcaaactgt

SEQ ID NO: 1769017 - DNA, 15 bp, Homo sapiens
ctcaggcaaactgtt

SEQ ID NO: 1769018 - DNA, 15 bp, Homo sapiens
tcaggcaaactgtta

SEQ ID NO: 1769019 - DNA, 15 bp, Homo sapiens
caggcaaactgttat

SEQ ID NO: 1769020 - DNA, 15 bp, Homo sapiens
aggcaaactgttatt

SEQ ID NO: 1769021 - DNA, 15 bp, Homo sapiens
ggcaaactgttattt

SEQ ID NO: 1769022 - DNA, 15 bp, Homo sapiens
gcaaactgttatttt

SEQ ID NO: 1769023 - DNA, 15 bp, Homo sapiens
caaactgttatttta

SEQ ID NO: 1769024 - DNA, 15 bp, Homo sapiens
aaactgttattttaa

SEQ ID NO: 1769025 - DNA, 15 bp, Homo sapiens
aactgttattttaat

SEQ ID NO: 1769026 - DNA, 15 bp, Homo sapiens
actgttattttaatg

SEQ ID NO: 1769027 - DNA, 15 bp, Homo sapiens
ctgttattttaatgt

SEQ ID NO: 1769028 - DNA, 15 bp, Homo sapiens
tgttattttaatgtg

SEQ ID NO: 1769029 - DNA, 15 bp, Homo sapiens
gttattttaatgtga

SEQ ID NO: 1769030 - DNA, 15 bp, Homo sapiens
ttattttaatgtgag

SEQ ID NO: 1769031 - DNA, 15 bp, Homo sapiens
tattttaatgtgaga

SEQ ID NO: 1769032 - DNA, 15 bp, Homo sapiens
attttaatgtgagat

SEQ ID NO: 1769033 - DNA, 15 bp, Homo sapiens
ttttaatgtgagatc

SEQ ID NO: 1769034 - DNA, 15 bp, Homo sapiens
tttaatgtgagatct

SEQ ID NO: 1769035 - DNA, 15 bp, Homo sapiens
ttaatgtgagatctc

SEQ ID NO: 1769036 - DNA, 15 bp, Homo sapiens
taatgtgagatctct

SEQ ID NO: 1769037 - DNA, 15 bp, Homo sapiens
aatgtgagatctcta

SEQ ID NO: 1769038 - DNA, 15 bp, Homo sapiens
atgtgagatctctac

SEQ ID NO: 1769039 - DNA, 15 bp, Homo sapiens
tgtgagatctctaca

SEQ ID NO: 1769040 - DNA, 15 bp, Homo sapiens
gtgagatctctacac

SEQ ID NO: 1769041 - DNA, 15 bp, Homo sapiens
tgagatctctacact

SEQ ID NO: 1769042 - DNA, 15 bp, Homo sapiens
gagatctctacactt

SEQ ID NO: 1769043 - DNA, 15 bp, Homo sapiens
agatctctacacttc

SEQ ID NO: 1769044 - DNA, 15 bp, Homo sapiens
gatctctacacttct

SEQ ID NO: 1769045 - DNA, 15 bp, Homo sapiens
atctctacacttctg

SEQ ID NO: 1769046 - DNA, 15 bp, Homo sapiens
tctctacacttctgg

SEQ ID NO: 1769047 - DNA, 15 bp, Homo sapiens
ctctacacttctgga

SEQ ID NO: 1769048 - DNA, 15 bp, Homo sapiens
tctacacttctggaa

SEQ ID NO: 1769049 - DNA, 15 bp, Homo sapiens
ctacacttctggaac

SEQ ID NO: 1769050 - DNA, 15 bp, Homo sapiens
tacacttctggaact

SEQ ID NO: 1769051 - DNA, 15 bp, Homo sapiens
acacttctggaactt

SEQ ID NO: 1769052 - DNA, 15 bp, Homo sapiens
cacttctggaactta

SEQ ID NO: 1769053 - DNA, 15 bp, Homo sapiens
acttctggaacttaa

SEQ ID NO: 1769054 - DNA, 15 bp, Homo sapiens
cttctggaacttaac

SEQ ID NO: 1769055 - DNA, 15 bp, Homo sapiens
ttctggaacttaact

SEQ ID NO: 1769056 - DNA, 15 bp, Homo sapiens
tctggaacttaactc

SEQ ID NO: 1769057 - DNA, 15 bp, Homo sapiens
ctggaacttaactct

SEQ ID NO: 1769058 - DNA, 15 bp, Homo sapiens
tggaacttaactctg

SEQ ID NO: 1769059 - DNA, 15 bp, Homo sapiens
ggaacttaactctga

SEQ ID NO: 1769060 - DNA, 15 bp, Homo sapiens
gaacttaactctgag

SEQ ID NO: 1769061 - DNA, 15 bp, Homo sapiens
aacttaactctgaga

SEQ ID NO: 1769062 - DNA, 15 bp, Homo sapiens
acttaactctgagaa

SEQ ID NO: 1769063 - DNA, 15 bp, Homo sapiens
cttaactctgagaat

SEQ ID NO: 1769064 - DNA, 15 bp, Homo sapiens
ttaactctgagaatc

SEQ ID NO: 1769065 - DNA, 15 bp, Homo sapiens
taactctgagaatca

SEQ ID NO: 1769066 - DNA, 15 bp, Homo sapiens
aactctgagaatcaa

SEQ ID NO: 1769067 - DNA, 15 bp, Homo sapiens
actctgagaatcaac

SEQ ID NO: 1769068 - DNA, 15 bp, Homo sapiens
ctctgagaatcaact

SEQ ID NO: 1769069 - DNA, 15 bp, Homo sapiens
tctgagaatcaactt

SEQ ID NO: 1769070 - DNA, 15 bp, Homo sapiens
ctgagaatcaactta

SEQ ID NO: 1769071 - DNA, 15 bp, Homo sapiens
tgagaatcaacttat

SEQ ID NO: 1769072 - DNA, 15 bp, Homo sapiens
gagaatcaacttatt

SEQ ID NO: 1769073 - DNA, 15 bp, Homo sapiens
agaatcaacttattt

SEQ ID NO: 1769074 - DNA, 15 bp, Homo sapiens
gaatcaacttatttc

SEQ ID NO: 1769075 - DNA, 15 bp, Homo sapiens
aatcaacttatttct

SEQ ID NO: 1769076 - DNA, 15 bp, Homo sapiens
atcaacttatttctt

SEQ ID NO: 1769077 - DNA, 15 bp, Homo sapiens
tcaacttatttctta

SEQ ID NO: 1769078 - DNA, 15 bp, Homo sapiens
caacttatttcttat

SEQ ID NO: 1769079 - DNA, 15 bp, Homo sapiens
aacttatttcttata

SEQ ID NO: 1769080 - DNA, 15 bp, Homo sapiens
acttatttcttatat

SEQ ID NO: 1769081 - DNA, 15 bp, Homo sapiens
cttatttcttatatg

SEQ ID NO: 1769082 - DNA, 15 bp, Homo sapiens
ttatttcttatatgg

SEQ ID NO: 1769083 - DNA, 15 bp, Homo sapiens
tatttcttatatgga

SEQ ID NO: 1769084 - DNA, 15 bp, Homo sapiens
atttcttatatggat

SEQ ID NO: 1769085 - DNA, 15 bp, Homo sapiens
tttcttatatggatt

SEQ ID NO: 1769086 - DNA, 15 bp, Homo sapiens
ttcttatatggattt

SEQ ID NO: 1769087 - DNA, 15 bp, Homo sapiens
tcttatatggatttt

SEQ ID NO: 1769088 - DNA, 15 bp, Homo sapiens
cttatatggattttt

SEQ ID NO: 1769089 - DNA, 15 bp, Homo sapiens
ttatatggatttttt

SEQ ID NO: 1769090 - DNA, 15 bp, Homo sapiens
tatatggattttttg

SEQ ID NO: 1769091 - DNA, 15 bp, Homo sapiens
atatggattttttgg

SEQ ID NO: 1769092 - DNA, 15 bp, Homo sapiens
tatggattttttggg

SEQ ID NO: 1769093 - DNA, 15 bp, Homo sapiens
atggattttttgggg

SEQ ID NO: 1769094 - DNA, 15 bp, Homo sapiens
tggattttttggggg

SEQ ID NO: 1769095 - DNA, 15 bp, Homo sapiens
ggattttttgggggg

SEQ ID NO: 1769096 - DNA, 15 bp, Homo sapiens
gattttttgggggga

SEQ ID NO: 1769097 - DNA, 15 bp, Homo sapiens
attttttggggggag

SEQ ID NO: 1769098 - DNA, 15 bp, Homo sapiens
ttttttggggggagc

SEQ ID NO: 1769099 - DNA, 15 bp, Homo sapiens
tttttggggggagcg

SEQ ID NO: 1769100 - DNA, 15 bp, Homo sapiens
ttttggggggagcga

SEQ ID NO: 1769101 - DNA, 15 bp, Homo sapiens
tttggggggagcgaa

SEQ ID NO: 1769102 - DNA, 15 bp, Homo sapiens
ttggggggagcgaaa

SEQ ID NO: 1769103 - DNA, 15 bp, Homo sapiens
tggggggagcgaaaa

SEQ ID NO: 1769104 - DNA, 15 bp, Homo sapiens
ggggggagcgaaaat

SEQ ID NO: 1769105 - DNA, 15 bp, Homo sapiens
gggggagcgaaaatt

SEQ ID NO: 1769106 - DNA, 15 bp, Homo sapiens
ggggagcgaaaatta

SEQ ID NO: 1769107 - DNA, 15 bp, Homo sapiens
gggagcgaaaattaa

SEQ ID NO: 1769108 - DNA, 15 bp, Homo sapiens
ggagcgaaaattaaa

SEQ ID NO: 1769109 - DNA, 15 bp, Homo sapiens
gagcgaaaattaaac

SEQ ID NO: 1769110 - DNA, 15 bp, Homo sapiens
agcgaaaattaaaca

SEQ ID NO: 1769111 - DNA, 15 bp, Homo sapiens
gcgaaaattaaacag

SEQ ID NO: 1769112 - DNA, 15 bp, Homo sapiens
cgaaaattaaacaga

SEQ ID NO: 1769113 - DNA, 15 bp, Homo sapiens
gaaaattaaacagag

SEQ ID NO: 1769114 - DNA, 15 bp, Homo sapiens
aaaattaaacagagc

SEQ ID NO: 1769115 - DNA, 15 bp, Homo sapiens
aaattaaacagagcc

SEQ ID NO: 1769116 - DNA, 15 bp, Homo sapiens
aattaaacagagcca

SEQ ID NO: 1769117 - DNA, 15 bp, Homo sapiens
attaaacagagccag

SEQ ID NO: 1769118 - DNA, 15 bp, Homo sapiens
ttaaacagagccaga

SEQ ID NO: 1769119 - DNA, 15 bp, Homo sapiens
taaacagagccagat

SEQ ID NO: 1769120 - DNA, 15 bp, Homo sapiens
aaacagagccagata

SEQ ID NO: 1769121 - DNA, 15 bp, Homo sapiens
aacagagccagatag

SEQ ID NO: 1769122 - DNA, 15 bp, Homo sapiens
acagagccagataga

SEQ ID NO: 1769123 - DNA, 15 bp, Homo sapiens
cagagccagatagat

SEQ ID NO: 1769124 - DNA, 15 bp, Homo sapiens
agagccagatagatg

SEQ ID NO: 1769125 - DNA, 15 bp, Homo sapiens
gagccagatagatgt

SEQ ID NO: 1769126 - DNA, 15 bp, Homo sapiens
agccagatagatgtt

SEQ ID NO: 1769127 - DNA, 15 bp, Homo sapiens
gccagatagatgtta

SEQ ID NO: 1769128 - DNA, 15 bp, Homo sapiens
ccagatagatgttaa

SEQ ID NO: 1769129 - DNA, 15 bp, Homo sapiens
cagatagatgttaaa

SEQ ID NO: 1769130 - DNA, 15 bp, Homo sapiens
agatagatgttaaaa

SEQ ID NO: 1769131 - DNA, 15 bp, Homo sapiens
gatagatgttaaaat

SEQ ID NO: 1769132 - DNA, 15 bp, Homo sapiens
atagatgttaaaatg

SEQ ID NO: 1769133 - DNA, 15 bp, Homo sapiens
tagatgttaaaatgg

SEQ ID NO: 1769134 - DNA, 15 bp, Homo sapiens
agatgttaaaatggt

SEQ ID NO: 1769135 - DNA, 15 bp, Homo sapiens
gatgttaaaatggtg

SEQ ID NO: 1769136 - DNA, 15 bp, Homo sapiens
atgttaaaatggtga

SEQ ID NO: 1769137 - DNA, 15 bp, Homo sapiens
tgttaaaatggtgaa

SEQ ID NO: 1769138 - DNA, 15 bp, Homo sapiens
gttaaaatggtgaac

SEQ ID NO: 1769139 - DNA, 15 bp, Homo sapiens
ttaaaatggtgaaca

SEQ ID NO: 1769140 - DNA, 15 bp, Homo sapiens
taaaatggtgaacac

SEQ ID NO: 1769141 - DNA, 15 bp, Homo sapiens
aaaatggtgaacaca

SEQ ID NO: 1769142 - DNA, 15 bp, Homo sapiens
aaatggtgaacacag

SEQ ID NO: 1769143 - DNA, 15 bp, Homo sapiens
aatggtgaacacagg

SEQ ID NO: 1769144 - DNA, 15 bp, Homo sapiens
atggtgaacacagga

SEQ ID NO: 1769145 - DNA, 15 bp, Homo sapiens
tggtgaacacaggaa

SEQ ID NO: 1769146 - DNA, 15 bp, Homo sapiens
ggtgaacacaggaac

SEQ ID NO: 1769147 - DNA, 15 bp, Homo sapiens
gtgaacacaggaaca

SEQ ID NO: 1769148 - DNA, 15 bp, Homo sapiens
tgaacacaggaacag

SEQ ID NO: 1769149 - DNA, 15 bp, Homo sapiens
gaacacaggaacagc

SEQ ID NO: 1769150 - DNA, 15 bp, Homo sapiens
aacacaggaacagct

SEQ ID NO: 1769151 - DNA, 15 bp, Homo sapiens
acacaggaacagctg

SEQ ID NO: 1769152 - DNA, 15 bp, Homo sapiens
cacaggaacagctgg

SEQ ID NO: 1769153 - DNA, 15 bp, Homo sapiens
acaggaacagctgga

SEQ ID NO: 1769154 - DNA, 15 bp, Homo sapiens
caggaacagctggag

SEQ ID NO: 1769155 - DNA, 15 bp, Homo sapiens
aggaacagctggagt

SEQ ID NO: 1769156 - DNA, 15 bp, Homo sapiens
ggaacagctggagtc

SEQ ID NO: 1769157 - DNA, 15 bp, Homo sapiens
gaacagctggagtct

SEQ ID NO: 1769158 - DNA, 15 bp, Homo sapiens
aacagctggagtctg

SEQ ID NO: 1769159 - DNA, 15 bp, Homo sapiens
acagctggagtctgc

SEQ ID NO: 1769160 - DNA, 15 bp, Homo sapiens
cagctggagtctgca

SEQ ID NO: 1769161 - DNA, 15 bp, Homo sapiens
agctggagtctgcag

SEQ ID NO: 1769162 - DNA, 15 bp, Homo sapiens
gctggagtctgcagc

SEQ ID NO: 1769163 - DNA, 15 bp, Homo sapiens
ctggagtctgcagct

SEQ ID NO: 1769164 - DNA, 15 bp, Homo sapiens
tggagtctgcagctc

SEQ ID NO: 1769165 - DNA, 15 bp, Homo sapiens
ggagtctgcagctcc

SEQ ID NO: 1769166 - DNA, 15 bp, Homo sapiens
gagtctgcagctccc

SEQ ID NO: 1769167 - DNA, 15 bp, Homo sapiens
agtctgcagctccca

SEQ ID NO: 1769168 - DNA, 15 bp, Homo sapiens
gtctgcagctcccag

SEQ ID NO: 1769169 - DNA, 15 bp, Homo sapiens
tctgcagctcccagc

SEQ ID NO: 1769170 - DNA, 15 bp, Homo sapiens
ctgcagctcccagcg

SEQ ID NO: 1769171 - DNA, 15 bp, Homo sapiens
tgcagctcccagcga

SEQ ID NO: 1769172 - DNA, 15 bp, Homo sapiens
gcagctcccagcgaa

SEQ ID NO: 1769173 - DNA, 15 bp, Homo sapiens
cagctcccagcgaaa

SEQ ID NO: 1769174 - DNA, 15 bp, Homo sapiens
agctcccagcgaaat

SEQ ID NO: 1769175 - DNA, 15 bp, Homo sapiens
gctcccagcgaaatc

SEQ ID NO: 1769176 - DNA, 15 bp, Homo sapiens
ctcccagcgaaatca

SEQ ID NO: 1769177 - DNA, 15 bp, Homo sapiens
tcccagcgaaatcaa

SEQ ID NO: 1769178 - DNA, 15 bp, Homo sapiens
cccagcgaaatcaac

SEQ ID NO: 1769179 - DNA, 15 bp, Homo sapiens
ccagcgaaatcaacg

SEQ ID NO: 1769180 - DNA, 15 bp, Homo sapiens
cagcgaaatcaacgc

SEQ ID NO: 1769181 - DNA, 15 bp, Homo sapiens
agcgaaatcaacgca

SEQ ID NO: 1769182 - DNA, 15 bp, Homo sapiens
gcgaaatcaacgcag

SEQ ID NO: 1769183 - DNA, 15 bp, Homo sapiens
cgaaatcaacgcaga

SEQ ID NO: 1769184 - DNA, 15 bp, Homo sapiens
gaaatcaacgcagaa

SEQ ID NO: 1769185 - DNA, 15 bp, Homo sapiens
aaatcaacgcagaag

SEQ ID NO: 1769186 - DNA, 15 bp, Homo sapiens
aatcaacgcagaagg

SEQ ID NO: 1769187 - DNA, 15 bp, Homo sapiens
atcaacgcagaaggt

SEQ ID NO: 1769188 - DNA, 15 bp, Homo sapiens
tcaacgcagaaggtg

SEQ ID NO: 1769189 - DNA, 15 bp, Homo sapiens
caacgcagaaggtgg

SEQ ID NO: 1769190 - DNA, 15 bp, Homo sapiens
aacgcagaaggtggg

SEQ ID NO: 1769191 - DNA, 15 bp, Homo sapiens
acgcagaaggtgggt

SEQ ID NO: 1769192 - DNA, 15 bp, Homo sapiens
cgcagaaggtgggtg

SEQ ID NO: 1769193 - DNA, 15 bp, Homo sapiens
gcagaaggtgggtga

SEQ ID NO: 1769194 - DNA, 15 bp, Homo sapiens
cagaaggtgggtgat

SEQ ID NO: 1769195 - DNA, 15 bp, Homo sapiens
agaaggtgggtgatt

SEQ ID NO: 1769196 - DNA, 15 bp, Homo sapiens
gaaggtgggtgattt

SEQ ID NO: 1769197 - DNA, 15 bp, Homo sapiens
aaggtgggtgatttc

SEQ ID NO: 1769198 - DNA, 15 bp, Homo sapiens
aggtgggtgatttct

SEQ ID NO: 1769199 - DNA, 15 bp, Homo sapiens
ggtgggtgatttctc

SEQ ID NO: 1769200 - DNA, 15 bp, Homo sapiens
gtgggtgatttctct

SEQ ID NO: 1769201 - DNA, 15 bp, Homo sapiens
tgggtgatttctcta

SEQ ID NO: 1769202 - DNA, 15 bp, Homo sapiens
gggtgatttctctat

SEQ ID NO: 1769203 - DNA, 15 bp, Homo sapiens
ggtgatttctctatt

SEQ ID NO: 1769204 - DNA, 15 bp, Homo sapiens
gtgatttctctattt

SEQ ID NO: 1769205 - DNA, 15 bp, Homo sapiens
tgatttctctatttc

SEQ ID NO: 1769206 - DNA, 15 bp, Homo sapiens
gatttctctatttcc

SEQ ID NO: 1769207 - DNA, 15 bp, Homo sapiens
atttctctatttcca

SEQ ID NO: 1769208 - DNA, 15 bp, Homo sapiens
tttctctatttccaa

SEQ ID NO: 1769209 - DNA, 15 bp, Homo sapiens
ttctctatttccaac

SEQ ID NO: 1769210 - DNA, 15 bp, Homo sapiens
tctctatttccaact

SEQ ID NO: 1769211 - DNA, 15 bp, Homo sapiens
ctctatttccaactg

SEQ ID NO: 1769212 - DNA, 15 bp, Homo sapiens
tctatttccaactga

SEQ ID NO: 1769213 - DNA, 15 bp, Homo sapiens
ctatttccaactgag

SEQ ID NO: 1769214 - DNA, 15 bp, Homo sapiens
tatttccaactgagg

SEQ ID NO: 1769215 - DNA, 15 bp, Homo sapiens
ccaactgaggtaccc

SEQ ID NO: 1769216 - DNA, 15 bp, Homo sapiens
caactgaggtaccca

SEQ ID NO: 1769217 - DNA, 15 bp, Homo sapiens
aactgaggtacccag

SEQ ID NO: 1769218 - DNA, 15 bp, Homo sapiens
actgaggtacccagc

SEQ ID NO: 1769219 - DNA, 15 bp, Homo sapiens
ctgaggtacccagct

SEQ ID NO: 1769220 - DNA, 15 bp, Homo sapiens
tgaggtacccagctc

SEQ ID NO: 1769221 - DNA, 15 bp, Homo sapiens
gaggtacccagctca

SEQ ID NO: 1769222 - DNA, 15 bp, Homo sapiens
aggtacccagctcat

SEQ ID NO: 1769223 - DNA, 15 bp, Homo sapiens
ggtacccagctcatc

SEQ ID NO: 1769224 - DNA, 15 bp, Homo sapiens
gtacccagctcatct

SEQ ID NO: 1769225 - DNA, 15 bp, Homo sapiens
tacccagctcatctc

SEQ ID NO: 1769226 - DNA, 15 bp, Homo sapiens
acccagctcatctca

SEQ ID NO: 1769227 - DNA, 15 bp, Homo sapiens
cccagctcatctcat

SEQ ID NO: 1769228 - DNA, 15 bp, Homo sapiens
ccagctcatctcatt

SEQ ID NO: 1769229 - DNA, 15 bp, Homo sapiens
cagctcatctcattg

SEQ ID NO: 1769230 - DNA, 15 bp, Homo sapiens
agctcatctcattga

SEQ ID NO: 1769231 - DNA, 15 bp, Homo sapiens
gctcatctcattgag

SEQ ID NO: 1769232 - DNA, 15 bp, Homo sapiens
ctcatctcattgaga

SEQ ID NO: 1769233 - DNA, 15 bp, Homo sapiens
tcatctcattgagac

SEQ ID NO: 1769234 - DNA, 15 bp, Homo sapiens
catctcattgagact

SEQ ID NO: 1769235 - DNA, 15 bp, Homo sapiens
atctcattgagactg

SEQ ID NO: 1769236 - DNA, 15 bp, Homo sapiens
tctcattgagactgg

SEQ ID NO: 1769237 - DNA, 15 bp, Homo sapiens
ctcattgagactggt

SEQ ID NO: 1769238 - DNA, 15 bp, Homo sapiens
tcattgagactggtc

SEQ ID NO: 1769239 - DNA, 15 bp, Homo sapiens
cattgagactggtca

SEQ ID NO: 1769240 - DNA, 15 bp, Homo sapiens
attgagactggtcag

SEQ ID NO: 1769241 - DNA, 15 bp, Homo sapiens
ttgagactggtcaga

SEQ ID NO: 1769242 - DNA, 15 bp, Homo sapiens
tgagactggtcagac

SEQ ID NO: 1769243 - DNA, 15 bp, Homo sapiens
gagactggtcagaca

SEQ ID NO: 1769244 - DNA, 15 bp, Homo sapiens
agactggtcagacag

SEQ ID NO: 1769245 - DNA, 15 bp, Homo sapiens
gactggtcagacagg

SEQ ID NO: 1769246 - DNA, 15 bp, Homo sapiens
actggtcagacaggg

SEQ ID NO: 1769247 - DNA, 15 bp, Homo sapiens
ctggtcagacagggg

SEQ ID NO: 1769248 - DNA, 15 bp, Homo sapiens
tggtcagacaggggg

SEQ ID NO: 1769249 - DNA, 15 bp, Homo sapiens
ggtcagacagggggt

SEQ ID NO: 1769250 - DNA, 15 bp, Homo sapiens
gtcagacagggggtg

SEQ ID NO: 1769251 - DNA, 15 bp, Homo sapiens
tcagacagggggtgc

SEQ ID NO: 1769252 - DNA, 15 bp, Homo sapiens
cagacagggggtgca

SEQ ID NO: 1769253 - DNA, 15 bp, Homo sapiens
agacagggggtgcag

SEQ ID NO: 1769254 - DNA, 15 bp, Homo sapiens
gacagggggtgcagc

SEQ ID NO: 1769255 - DNA, 15 bp, Homo sapiens
acagggggtgcagcc

SEQ ID NO: 1769256 - DNA, 15 bp, Homo sapiens
cagggggtgcagccc

SEQ ID NO: 1769257 - DNA, 15 bp, Homo sapiens
agggggtgcagccca

SEQ ID NO: 1769258 - DNA, 15 bp, Homo sapiens
gggggtgcagcccat

SEQ ID NO: 1769259 - DNA, 15 bp, Homo sapiens
ggggtgcagcccatg

SEQ ID NO: 1769260 - DNA, 15 bp, Homo sapiens
gggtgcagcccatgg

SEQ ID NO: 1769261 - DNA, 15 bp, Homo sapiens
ggtgcagcccatgga

SEQ ID NO: 1769262 - DNA, 15 bp, Homo sapiens
gtgcagcccatggaa

SEQ ID NO: 1769263 - DNA, 15 bp, Homo sapiens
tgcagcccatggaag

SEQ ID NO: 1769264 - DNA, 15 bp, Homo sapiens
gcagcccatggaagg

SEQ ID NO: 1769265 - DNA, 15 bp, Homo sapiens
cagcccatggaaggc

SEQ ID NO: 1769266 - DNA, 15 bp, Homo sapiens
agcccatggaaggcg

SEQ ID NO: 1769267 - DNA, 15 bp, Homo sapiens
gcccatggaaggcga

SEQ ID NO: 1769268 - DNA, 15 bp, Homo sapiens
cccatggaaggcgag

SEQ ID NO: 1769269 - DNA, 15 bp, Homo sapiens
ccatggaaggcgagc

SEQ ID NO: 1769270 - DNA, 15 bp, Homo sapiens
catggaaggcgagcc

SEQ ID NO: 1769271 - DNA, 15 bp, Homo sapiens
atggaaggcgagcca

SEQ ID NO: 1769272 - DNA, 15 bp, Homo sapiens
tggaaggcgagccaa

SEQ ID NO: 1769273 - DNA, 15 bp, Homo sapiens
ggaaggcgagccaaa

SEQ ID NO: 1769274 - DNA, 15 bp, Homo sapiens
gaaggcgagccaaag

SEQ ID NO: 1769275 - DNA, 15 bp, Homo sapiens
aaggcgagccaaagc

SEQ ID NO: 1769276 - DNA, 15 bp, Homo sapiens
aggcgagccaaagca

SEQ ID NO: 1769277 - DNA, 15 bp, Homo sapiens
ggcgagccaaagcag

SEQ ID NO: 1769278 - DNA, 15 bp, Homo sapiens
gcgagccaaagcagg

SEQ ID NO: 1769279 - DNA, 15 bp, Homo sapiens
cgagccaaagcaggg

SEQ ID NO: 1769280 - DNA, 15 bp, Homo sapiens
gagccaaagcagggt

SEQ ID NO: 1769281 - DNA, 15 bp, Homo sapiens
agccaaagcagggtg

SEQ ID NO: 1769282 - DNA, 15 bp, Homo sapiens
gccaaagcagggtgg

SEQ ID NO: 1769283 - DNA, 15 bp, Homo sapiens
ccaaagcagggtggg

SEQ ID NO: 1769284 - DNA, 15 bp, Homo sapiens
caaagcagggtgggg

SEQ ID NO: 1769285 - DNA, 15 bp, Homo sapiens
aaagcagggtggggc

SEQ ID NO: 1769286 - DNA, 15 bp, Homo sapiens
aagcagggtggggca

SEQ ID NO: 1769287 - DNA, 15 bp, Homo sapiens
agcagggtggggcat

SEQ ID NO: 1769288 - DNA, 15 bp, Homo sapiens
gcagggtggggcatc

SEQ ID NO: 1769289 - DNA, 15 bp, Homo sapiens
cagggtggggcatcg

SEQ ID NO: 1769290 - DNA, 15 bp, Homo sapiens
agggtggggcatcgc

SEQ ID NO: 1769291 - DNA, 15 bp, Homo sapiens
gggtggggcatcgcc

SEQ ID NO: 1769292 - DNA, 15 bp, Homo sapiens
ggtggggcatcgcct

SEQ ID NO: 1769293 - DNA, 15 bp, Homo sapiens
gtggggcatcgcctt

SEQ ID NO: 1769294 - DNA, 15 bp, Homo sapiens
tggggcatcgcctta

SEQ ID NO: 1769295 - DNA, 15 bp, Homo sapiens
ggggcatcgccttac

SEQ ID NO: 1769296 - DNA, 15 bp, Homo sapiens
gggcatcgccttaca

SEQ ID NO: 1769297 - DNA, 15 bp, Homo sapiens
ggcatcgccttacac

SEQ ID NO: 1769298 - DNA, 15 bp, Homo sapiens
gcatcgccttacacg

SEQ ID NO: 1769299 - DNA, 15 bp, Homo sapiens
catcgccttacacgg

SEQ ID NO: 1769300 - DNA, 15 bp, Homo sapiens
atcgccttacacggg

SEQ ID NO: 1769301 - DNA, 15 bp, Homo sapiens
tcgccttacacggga

SEQ ID NO: 1769302 - DNA, 15 bp, Homo sapiens
cgccttacacgggaa

SEQ ID NO: 1769303 - DNA, 15 bp, Homo sapiens
gccttacacgggaag

SEQ ID NO: 1769304 - DNA, 15 bp, Homo sapiens
ccttacacgggaagt

SEQ ID NO: 1769305 - DNA, 15 bp, Homo sapiens
cttacacgggaagtg

SEQ ID NO: 1769306 - DNA, 15 bp, Homo sapiens
ttacacgggaagtgc

SEQ ID NO: 1769307 - DNA, 15 bp, Homo sapiens
tacacgggaagtgca

SEQ ID NO: 1769308 - DNA, 15 bp, Homo sapiens
acacgggaagtgcaa

SEQ ID NO: 1769309 - DNA, 15 bp, Homo sapiens
cacgggaagtgcaag

SEQ ID NO: 1769310 - DNA, 15 bp, Homo sapiens
acgggaagtgcaagg

SEQ ID NO: 1769311 - DNA, 15 bp, Homo sapiens
cgggaagtgcaaggg

SEQ ID NO: 1769312 - DNA, 15 bp, Homo sapiens
gggaagtgcaagggg

SEQ ID NO: 1769313 - DNA, 15 bp, Homo sapiens
ggaagtgcaaggggc

SEQ ID NO: 1769314 - DNA, 15 bp, Homo sapiens
gaagtgcaaggggcc

SEQ ID NO: 1769315 - DNA, 15 bp, Homo sapiens
aagtgcaaggggcca

SEQ ID NO: 1769316 - DNA, 15 bp, Homo sapiens
agtgcaaggggccag

SEQ ID NO: 1769317 - DNA, 15 bp, Homo sapiens
gtgcaaggggccagg

SEQ ID NO: 1769318 - DNA, 15 bp, Homo sapiens
tgcaaggggccaggg

SEQ ID NO: 1769319 - DNA, 15 bp, Homo sapiens
gcaaggggccaggga

SEQ ID NO: 1769320 - DNA, 15 bp, Homo sapiens
caaggggccagggaa

SEQ ID NO: 1769321 - DNA, 15 bp, Homo sapiens
aaggggccagggaac

SEQ ID NO: 1769322 - DNA, 15 bp, Homo sapiens
aggggccagggaact

SEQ ID NO: 1769323 - DNA, 15 bp, Homo sapiens
ggggccagggaactt

SEQ ID NO: 1769324 - DNA, 15 bp, Homo sapiens
gggccagggaacttc

SEQ ID NO: 1769325 - DNA, 15 bp, Homo sapiens
ggccagggaacttcc

SEQ ID NO: 1769326 - DNA, 15 bp, Homo sapiens
gccagggaacttcct

SEQ ID NO: 1769327 - DNA, 15 bp, Homo sapiens
ccagggaacttcctc

SEQ ID NO: 1769328 - DNA, 15 bp, Homo sapiens
cagggaacttcctcc

SEQ ID NO: 1769329 - DNA, 15 bp, Homo sapiens
agggaacttcctccc

SEQ ID NO: 1769330 - DNA, 15 bp, Homo sapiens
gggaacttcctcccc

SEQ ID NO: 1769331 - DNA, 15 bp, Homo sapiens
ggaacttcctcccct

SEQ ID NO: 1769332 - DNA, 15 bp, Homo sapiens
gaacttcctccccta

SEQ ID NO: 1769333 - DNA, 15 bp, Homo sapiens
aacttcctcccctag

SEQ ID NO: 1769334 - DNA, 15 bp, Homo sapiens
acttcctcccctagc

SEQ ID NO: 1769335 - DNA, 15 bp, Homo sapiens
cttcctcccctagct

SEQ ID NO: 1769336 - DNA, 15 bp, Homo sapiens
ttcctcccctagcta

SEQ ID NO: 1769337 - DNA, 15 bp, Homo sapiens
tcctcccctagctaa

SEQ ID NO: 1769338 - DNA, 15 bp, Homo sapiens
cctcccctagctaag

SEQ ID NO: 1769339 - DNA, 15 bp, Homo sapiens
ctcccctagctaagg

SEQ ID NO: 1769340 - DNA, 15 bp, Homo sapiens
tcccctagctaaggg

SEQ ID NO: 1769341 - DNA, 15 bp, Homo sapiens
cccctagctaaggga

SEQ ID NO: 1769342 - DNA, 15 bp, Homo sapiens
ccctagctaagggaa

SEQ ID NO: 1769343 - DNA, 15 bp, Homo sapiens
cctagctaagggaag

SEQ ID NO: 1769344 - DNA, 15 bp, Homo sapiens
ctagctaagggaagc

SEQ ID NO: 1769345 - DNA, 15 bp, Homo sapiens
tagctaagggaagcc

SEQ ID NO: 1769346 - DNA, 15 bp, Homo sapiens
agctaagggaagcca

SEQ ID NO: 1769347 - DNA, 15 bp, Homo sapiens
gctaagggaagccat

SEQ ID NO: 1769348 - DNA, 15 bp, Homo sapiens
ctaagggaagccatg

SEQ ID NO: 1769349 - DNA, 15 bp, Homo sapiens
taagggaagccatga

SEQ ID NO: 1769350 - DNA, 15 bp, Homo sapiens
aagggaagccatgag

SEQ ID NO: 1769351 - DNA, 15 bp, Homo sapiens
agggaagccatgagg

SEQ ID NO: 1769352 - DNA, 15 bp, Homo sapiens
gggaagccatgaggg

SEQ ID NO: 1769353 - DNA, 15 bp, Homo sapiens
ggaagccatgaggga

SEQ ID NO: 1769354 - DNA, 15 bp, Homo sapiens
gaagccatgagggaa

SEQ ID NO: 1769355 - DNA, 15 bp, Homo sapiens
aagccatgagggaat

SEQ ID NO: 1769356 - DNA, 15 bp, Homo sapiens
agccatgagggaatg

SEQ ID NO: 1769357 - DNA, 15 bp, Homo sapiens
gccatgagggaatgt

SEQ ID NO: 1769358 - DNA, 15 bp, Homo sapiens
ccatgagggaatgtg

SEQ ID NO: 1769359 - DNA, 15 bp, Homo sapiens
catgagggaatgtgc

SEQ ID NO: 1769360 - DNA, 15 bp, Homo sapiens
atgagggaatgtgcc

SEQ ID NO: 1769361 - DNA, 15 bp, Homo sapiens
tgagggaatgtgcca

SEQ ID NO: 1769362 - DNA, 15 bp, Homo sapiens
gagggaatgtgccac

SEQ ID NO: 1769363 - DNA, 15 bp, Homo sapiens
agggaatgtgccacg

SEQ ID NO: 1769364 - DNA, 15 bp, Homo sapiens
gggaatgtgccacga

SEQ ID NO: 1769365 - DNA, 15 bp, Homo sapiens
ggaatgtgccacgag

SEQ ID NO: 1769366 - DNA, 15 bp, Homo sapiens
gaatgtgccacgagg

SEQ ID NO: 1769367 - DNA, 15 bp, Homo sapiens
aatgtgccacgagga

SEQ ID NO: 1769368 - DNA, 15 bp, Homo sapiens
atgtgccacgaggaa

SEQ ID NO: 1769369 - DNA, 15 bp, Homo sapiens
tgtgccacgaggaac

SEQ ID NO: 1769370 - DNA, 15 bp, Homo sapiens
gtgccacgaggaacg

SEQ ID NO: 1769371 - DNA, 15 bp, Homo sapiens
tgccacgaggaacga

SEQ ID NO: 1769372 - DNA, 15 bp, Homo sapiens
gccacgaggaacgat

SEQ ID NO: 1769373 - DNA, 15 bp, Homo sapiens
ccacgaggaacgatg

SEQ ID NO: 1769374 - DNA, 15 bp, Homo sapiens
cacgaggaacgatgc

SEQ ID NO: 1769375 - DNA, 15 bp, Homo sapiens
acgaggaacgatgca

SEQ ID NO: 1769376 - DNA, 15 bp, Homo sapiens
cgaggaacgatgcat

SEQ ID NO: 1769377 - DNA, 15 bp, Homo sapiens
gaggaacgatgcatt

SEQ ID NO: 1769378 - DNA, 15 bp, Homo sapiens
aggaacgatgcattc

SEQ ID NO: 1769379 - DNA, 15 bp, Homo sapiens
ggaacgatgcattcc

SEQ ID NO: 1769380 - DNA, 15 bp, Homo sapiens
gaacgatgcattccg

SEQ ID NO: 1769381 - DNA, 15 bp, Homo sapiens
aacgatgcattccgg

SEQ ID NO: 1769382 - DNA, 15 bp, Homo sapiens
acgatgcattccggc

SEQ ID NO: 1769383 - DNA, 15 bp, Homo sapiens
cgatgcattccggcc

SEQ ID NO: 1769384 - DNA, 15 bp, Homo sapiens
gatgcattccggccc

SEQ ID NO: 1769385 - DNA, 15 bp, Homo sapiens
atgcattccggccca

SEQ ID NO: 1769386 - DNA, 15 bp, Homo sapiens
tgcattccggcccag

SEQ ID NO: 1769387 - DNA, 15 bp, Homo sapiens
gcattccggcccaga

SEQ ID NO: 1769388 - DNA, 15 bp, Homo sapiens
cattccggcccagac

SEQ ID NO: 1769389 - DNA, 15 bp, Homo sapiens
attccggcccagact

SEQ ID NO: 1769390 - DNA, 15 bp, Homo sapiens
ttccggcccagactc

SEQ ID NO: 1769391 - DNA, 15 bp, Homo sapiens
tccggcccagactct

SEQ ID NO: 1769392 - DNA, 15 bp, Homo sapiens
ccggcccagactcta

SEQ ID NO: 1769393 - DNA, 15 bp, Homo sapiens
cggcccagactctat

SEQ ID NO: 1769394 - DNA, 15 bp, Homo sapiens
ggcccagactctatg

SEQ ID NO: 1769395 - DNA, 15 bp, Homo sapiens
gcccagactctatgc

SEQ ID NO: 1769396 - DNA, 15 bp, Homo sapiens
cccagactctatgcc

SEQ ID NO: 1769397 - DNA, 15 bp, Homo sapiens
ccagactctatgcct

SEQ ID NO: 1769398 - DNA, 15 bp, Homo sapiens
cagactctatgcctt

SEQ ID NO: 1769399 - DNA, 15 bp, Homo sapiens
agactctatgccttt

SEQ ID NO: 1769400 - DNA, 15 bp, Homo sapiens
gactctatgcctttt

SEQ ID NO: 1769401 - DNA, 15 bp, Homo sapiens
actctatgccttttc

SEQ ID NO: 1769402 - DNA, 15 bp, Homo sapiens
ctctatgccttttcc

SEQ ID NO: 1769403 - DNA, 15 bp, Homo sapiens
tctatgccttttccg

SEQ ID NO: 1769404 - DNA, 15 bp, Homo sapiens
ctatgccttttccgt

SEQ ID NO: 1769405 - DNA, 15 bp, Homo sapiens
tatgccttttccgtg

SEQ ID NO: 1769406 - DNA, 15 bp, Homo sapiens
atgccttttccgtga

SEQ ID NO: 1769407 - DNA, 15 bp, Homo sapiens
tgccttttccgtgat

SEQ ID NO: 1769408 - DNA, 15 bp, Homo sapiens
gccttttccgtgatc

SEQ ID NO: 1769409 - DNA, 15 bp, Homo sapiens
ccttttccgtgatct

SEQ ID NO: 1769410 - DNA, 15 bp, Homo sapiens
cttttccgtgatctt

SEQ ID NO: 1769411 - DNA, 15 bp, Homo sapiens
ttttccgtgatcttc

SEQ ID NO: 1769412 - DNA, 15 bp, Homo sapiens
tttccgtgatcttca

SEQ ID NO: 1769413 - DNA, 15 bp, Homo sapiens
ttccgtgatcttcac

SEQ ID NO: 1769414 - DNA, 15 bp, Homo sapiens
tccgtgatcttcaca

SEQ ID NO: 1769415 - DNA, 15 bp, Homo sapiens
ccgtgatcttcacaa

SEQ ID NO: 1769416 - DNA, 15 bp, Homo sapiens
cgtgatcttcacaac

SEQ ID NO: 1769417 - DNA, 15 bp, Homo sapiens
gtgatcttcacaacc

SEQ ID NO: 1769418 - DNA, 15 bp, Homo sapiens
tgatcttcacaaccc

SEQ ID NO: 1769419 - DNA, 15 bp, Homo sapiens
gatcttcacaaccct

SEQ ID NO: 1769420 - DNA, 15 bp, Homo sapiens
atcttcacaaccctt

SEQ ID NO: 1769421 - DNA, 15 bp, Homo sapiens
tcttcacaaccctta

SEQ ID NO: 1769422 - DNA, 15 bp, Homo sapiens
cttcacaacccttag

SEQ ID NO: 1769423 - DNA, 15 bp, Homo sapiens
ttcacaacccttaga

SEQ ID NO: 1769424 - DNA, 15 bp, Homo sapiens
tcacaacccttagac

SEQ ID NO: 1769425 - DNA, 15 bp, Homo sapiens
cacaacccttagacc

SEQ ID NO: 1769426 - DNA, 15 bp, Homo sapiens
acaacccttagacca

SEQ ID NO: 1769427 - DNA, 15 bp, Homo sapiens
caacccttagaccag

SEQ ID NO: 1769428 - DNA, 15 bp, Homo sapiens
aacccttagaccagg

SEQ ID NO: 1769429 - DNA, 15 bp, Homo sapiens
acccttagaccaggc

SEQ ID NO: 1769430 - DNA, 15 bp, Homo sapiens
cccttagaccaggca

SEQ ID NO: 1769431 - DNA, 15 bp, Homo sapiens
ccttagaccaggcaa

SEQ ID NO: 1769432 - DNA, 15 bp, Homo sapiens
cttagaccaggcaat

SEQ ID NO: 1769433 - DNA, 15 bp, Homo sapiens
ttagaccaggcaatt

SEQ ID NO: 1769434 - DNA, 15 bp, Homo sapiens
tagaccaggcaattc

SEQ ID NO: 1769435 - DNA, 15 bp, Homo sapiens
agaccaggcaattcc

SEQ ID NO: 1769436 - DNA, 15 bp, Homo sapiens
gaccaggcaattccc

SEQ ID NO: 1769437 - DNA, 15 bp, Homo sapiens
accaggcaattccct

SEQ ID NO: 1769438 - DNA, 15 bp, Homo sapiens
ccaggcaattccctc

SEQ ID NO: 1769439 - DNA, 15 bp, Homo sapiens
caggcaattccctcg

SEQ ID NO: 1769440 - DNA, 15 bp, Homo sapiens
aggcaattccctcgg

SEQ ID NO: 1769441 - DNA, 15 bp, Homo sapiens
ggcaattccctcggg

SEQ ID NO: 1769442 - DNA, 15 bp, Homo sapiens
gcaattccctcgggt

SEQ ID NO: 1769443 - DNA, 15 bp, Homo sapiens
caattccctcgggtg

SEQ ID NO: 1769444 - DNA, 15 bp, Homo sapiens
aattccctcgggtgc

SEQ ID NO: 1769445 - DNA, 15 bp, Homo sapiens
gtgcctacaccaccc

SEQ ID NO: 1769446 - DNA, 15 bp, Homo sapiens
tgcctacaccaccca

SEQ ID NO: 1769447 - DNA, 15 bp, Homo sapiens
gcctacaccacccag

SEQ ID NO: 1769448 - DNA, 15 bp, Homo sapiens
cctacaccacccagg

SEQ ID NO: 1769449 - DNA, 15 bp, Homo sapiens
ctacaccacccaggc

SEQ ID NO: 1769450 - DNA, 15 bp, Homo sapiens
tacaccacccaggcc

SEQ ID NO: 1769451 - DNA, 15 bp, Homo sapiens
acaccacccaggccc

SEQ ID NO: 1769452 - DNA, 15 bp, Homo sapiens
caccacccaggccct

SEQ ID NO: 1769453 - DNA, 15 bp, Homo sapiens
accacccaggccctg

SEQ ID NO: 1769454 - DNA, 15 bp, Homo sapiens
ccacccaggccctgg

SEQ ID NO: 1769455 - DNA, 15 bp, Homo sapiens
cacccaggccctggg

SEQ ID NO: 1769456 - DNA, 15 bp, Homo sapiens
acccaggccctgggt

SEQ ID NO: 1769457 - DNA, 15 bp, Homo sapiens
cccaggccctgggtt

SEQ ID NO: 1769458 - DNA, 15 bp, Homo sapiens
ccaggccctgggttt

SEQ ID NO: 1769459 - DNA, 15 bp, Homo sapiens
caggccctgggtttc

SEQ ID NO: 1769460 - DNA, 15 bp, Homo sapiens
aggccctgggtttca

SEQ ID NO: 1769461 - DNA, 15 bp, Homo sapiens
caaaactgggcagcc

SEQ ID NO: 1769462 - DNA, 15 bp, Homo sapiens
aaaactgggcagccg

SEQ ID NO: 1769463 - DNA, 15 bp, Homo sapiens
aaactgggcagccgt

SEQ ID NO: 1769464 - DNA, 15 bp, Homo sapiens
aactgggcagccgtt

SEQ ID NO: 1769465 - DNA, 15 bp, Homo sapiens
actgggcagccgttt

SEQ ID NO: 1769466 - DNA, 15 bp, Homo sapiens
ctgggcagccgtttg

SEQ ID NO: 1769467 - DNA, 15 bp, Homo sapiens
tgggcagccgtttgg

SEQ ID NO: 1769468 - DNA, 15 bp, Homo sapiens
gggcagccgtttggg

SEQ ID NO: 1769469 - DNA, 15 bp, Homo sapiens
ggcagccgtttgggc

SEQ ID NO: 1769470 - DNA, 15 bp, Homo sapiens
gcagccgtttgggca

SEQ ID NO: 1769471 - DNA, 15 bp, Homo sapiens
cagccgtttgggcag

SEQ ID NO: 1769472 - DNA, 15 bp, Homo sapiens
agccgtttgggcaga

SEQ ID NO: 1769473 - DNA, 15 bp, Homo sapiens
gccgtttgggcagac

SEQ ID NO: 1769474 - DNA, 15 bp, Homo sapiens
ccgtttgggcagaca

SEQ ID NO: 1769475 - DNA, 15 bp, Homo sapiens
cgtttgggcagacac

SEQ ID NO: 1769476 - DNA, 15 bp, Homo sapiens
gtttgggcagacacc

SEQ ID NO: 1769477 - DNA, 15 bp, Homo sapiens
tttgggcagacaccg

SEQ ID NO: 1769478 - DNA, 15 bp, Homo sapiens
ttgggcagacaccga

SEQ ID NO: 1769479 - DNA, 15 bp, Homo sapiens
tgggcagacaccgag

SEQ ID NO: 1769480 - DNA, 15 bp, Homo sapiens
gggcagacaccgagc

SEQ ID NO: 1769481 - DNA, 15 bp, Homo sapiens
ggcagacaccgagct

SEQ ID NO: 1769482 - DNA, 15 bp, Homo sapiens
gcagacaccgagcta

SEQ ID NO: 1769483 - DNA, 15 bp, Homo sapiens
cagacaccgagctag

SEQ ID NO: 1769484 - DNA, 15 bp, Homo sapiens
agacaccgagctagc

SEQ ID NO: 1769485 - DNA, 15 bp, Homo sapiens
gacaccgagctagct

SEQ ID NO: 1769486 - DNA, 15 bp, Homo sapiens
acaccgagctagctg

SEQ ID NO: 1769487 - DNA, 15 bp, Homo sapiens
caccgagctagctgc

SEQ ID NO: 1769488 - DNA, 15 bp, Homo sapiens
accgagctagctgca

SEQ ID NO: 1769489 - DNA, 15 bp, Homo sapiens
ccgagctagctgcag

SEQ ID NO: 1769490 - DNA, 15 bp, Homo sapiens
cgagctagctgcagg

SEQ ID NO: 1769491 - DNA, 15 bp, Homo sapiens
gagctagctgcagga

SEQ ID NO: 1769492 - DNA, 15 bp, Homo sapiens
agctagctgcaggat

SEQ ID NO: 1769493 - DNA, 15 bp, Homo sapiens
gctagctgcaggatt

SEQ ID NO: 1769494 - DNA, 15 bp, Homo sapiens
ctagctgcaggattt

SEQ ID NO: 1769495 - DNA, 15 bp, Homo sapiens
tagctgcaggatttt

SEQ ID NO: 1769496 - DNA, 15 bp, Homo sapiens
agctgcaggattttt

SEQ ID NO: 1769497 - DNA, 15 bp, Homo sapiens
gctgcaggatttttt

SEQ ID NO: 1769498 - DNA, 15 bp, Homo sapiens
ctgcaggattttttc

SEQ ID NO: 1769499 - DNA, 15 bp, Homo sapiens
tgcaggattttttct

SEQ ID NO: 1769500 - DNA, 15 bp, Homo sapiens
gcaggattttttctt

SEQ ID NO: 1769501 - DNA, 15 bp, Homo sapiens
caggattttttcttt

SEQ ID NO: 1769502 - DNA, 15 bp, Homo sapiens
aggattttttctttt

SEQ ID NO: 1769503 - DNA, 15 bp, Homo sapiens
ggattttttcttttt

SEQ ID NO: 1769504 - DNA, 15 bp, Homo sapiens
gattttttctttttc

SEQ ID NO: 1769505 - DNA, 15 bp, Homo sapiens
attttttctttttcg

SEQ ID NO: 1769506 - DNA, 15 bp, Homo sapiens
ttttttctttttcgt

SEQ ID NO: 1769507 - DNA, 15 bp, Homo sapiens
tttttctttttcgta

SEQ ID NO: 1769508 - DNA, 15 bp, Homo sapiens
ttttctttttcgtac

SEQ ID NO: 1769509 - DNA, 15 bp, Homo sapiens
tttctttttcgtact

SEQ ID NO: 1769510 - DNA, 15 bp, Homo sapiens
ttctttttcgtactc

SEQ ID NO: 1769511 - DNA, 15 bp, Homo sapiens
tctttttcgtactcc

SEQ ID NO: 1769512 - DNA, 15 bp, Homo sapiens
ctttttcgtactcca

SEQ ID NO: 1769513 - DNA, 15 bp, Homo sapiens
tttttcgtactccag

SEQ ID NO: 1769514 - DNA, 15 bp, Homo sapiens
ttttcgtactccagt

SEQ ID NO: 1769515 - DNA, 15 bp, Homo sapiens
tcgtactccagtggc

SEQ ID NO: 1769516 - DNA, 15 bp, Homo sapiens
cgtactccagtggca

SEQ ID NO: 1769517 - DNA, 15 bp, Homo sapiens
gtactccagtggcac

SEQ ID NO: 1769518 - DNA, 15 bp, Homo sapiens
tactccagtggcacc

SEQ ID NO: 1769519 - DNA, 15 bp, Homo sapiens
actccagtggcacct

SEQ ID NO: 1769520 - DNA, 15 bp, Homo sapiens
ctccagtggcacctg

SEQ ID NO: 1769521 - DNA, 15 bp, Homo sapiens
tccagtggcacctga

SEQ ID NO: 1769522 - DNA, 15 bp, Homo sapiens
ccagtggcacctgaa

SEQ ID NO: 1769523 - DNA, 15 bp, Homo sapiens
cagtggcacctgaaa

SEQ ID NO: 1769524 - DNA, 15 bp, Homo sapiens
agtggcacctgaaac

SEQ ID NO: 1769525 - DNA, 15 bp, Homo sapiens
gtggcacctgaaaca

SEQ ID NO: 1769526 - DNA, 15 bp, Homo sapiens
tggcacctgaaacac

SEQ ID NO: 1769527 - DNA, 15 bp, Homo sapiens
ggcacctgaaacacc

SEQ ID NO: 1769528 - DNA, 15 bp, Homo sapiens
gcacctgaaacacca

SEQ ID NO: 1769529 - DNA, 15 bp, Homo sapiens
cacctgaaacaccag

SEQ ID NO: 1769530 - DNA, 15 bp, Homo sapiens
acctgaaacaccagt

SEQ ID NO: 1769531 - DNA, 15 bp, Homo sapiens
cctgaaacaccagtg

SEQ ID NO: 1769532 - DNA, 15 bp, Homo sapiens
ctgaaacaccagtga

SEQ ID NO: 1769533 - DNA, 15 bp, Homo sapiens
tgaaacaccagtgag

SEQ ID NO: 1769534 - DNA, 15 bp, Homo sapiens
gaaacaccagtgaga

SEQ ID NO: 1769535 - DNA, 15 bp, Homo sapiens
aaacaccagtgagac

SEQ ID NO: 1769536 - DNA, 15 bp, Homo sapiens
aacaccagtgagaca

SEQ ID NO: 1769537 - DNA, 15 bp, Homo sapiens
acaccagtgagacag

SEQ ID NO: 1769538 - DNA, 15 bp, Homo sapiens
caccagtgagacaga

SEQ ID NO: 1769539 - DNA, 15 bp, Homo sapiens
accagtgagacagaa

SEQ ID NO: 1769540 - DNA, 15 bp, Homo sapiens
ccagtgagacagaac

SEQ ID NO: 1769541 - DNA, 15 bp, Homo sapiens
cagtgagacagaact

SEQ ID NO: 1769542 - DNA, 15 bp, Homo sapiens
agtgagacagaactg

SEQ ID NO: 1769543 - DNA, 15 bp, Homo sapiens
gtgagacagaactgt

SEQ ID NO: 1769544 - DNA, 15 bp, Homo sapiens
tgagacagaactgtt

SEQ ID NO: 1769545 - DNA, 15 bp, Homo sapiens
gagacagaactgtta

SEQ ID NO: 1769546 - DNA, 15 bp, Homo sapiens
agacagaactgttaa

SEQ ID NO: 1769547 - DNA, 15 bp, Homo sapiens
gacagaactgttaac

SEQ ID NO: 1769548 - DNA, 15 bp, Homo sapiens
acagaactgttaact

SEQ ID NO: 1769549 - DNA, 15 bp, Homo sapiens
cagaactgttaactc

SEQ ID NO: 1769550 - DNA, 15 bp, Homo sapiens
agaactgttaactcc

SEQ ID NO: 1769551 - DNA, 15 bp, Homo sapiens
gaactgttaactccc

SEQ ID NO: 1769552 - DNA, 15 bp, Homo sapiens
aactgttaactcccc

SEQ ID NO: 1769553 - DNA, 15 bp, Homo sapiens
actgttaactcccct

SEQ ID NO: 1769554 - DNA, 15 bp, Homo sapiens
ctgttaactcccctg

SEQ ID NO: 1769555 - DNA, 15 bp, Homo sapiens
tgttaactcccctgg

SEQ ID NO: 1769556 - DNA, 15 bp, Homo sapiens
gttaactcccctgga

SEQ ID NO: 1769557 - DNA, 15 bp, Homo sapiens
ttaactcccctggaa

SEQ ID NO: 1769558 - DNA, 15 bp, Homo sapiens
taactcccctggaac

SEQ ID NO: 1769559 - DNA, 15 bp, Homo sapiens
aactcccctggaaca

SEQ ID NO: 1769560 - DNA, 15 bp, Homo sapiens
actcccctggaacag

SEQ ID NO: 1769561 - DNA, 15 bp, Homo sapiens
ctcccctggaacagg

SEQ ID NO: 1769562 - DNA, 15 bp, Homo sapiens
tcccctggaacaggg

SEQ ID NO: 1769563 - DNA, 15 bp, Homo sapiens
cccctggaacagggg

SEQ ID NO: 1769564 - DNA, 15 bp, Homo sapiens
ccctggaacaggggc

SEQ ID NO: 1769565 - DNA, 15 bp, Homo sapiens
cctggaacaggggct

SEQ ID NO: 1769566 - DNA, 15 bp, Homo sapiens
ctggaacaggggctg

SEQ ID NO: 1769567 - DNA, 15 bp, Homo sapiens
tggaacaggggctga

SEQ ID NO: 1769568 - DNA, 15 bp, Homo sapiens
ggaacaggggctgaa

SEQ ID NO: 1769569 - DNA, 15 bp, Homo sapiens
gaacaggggctgaag

SEQ ID NO: 1769570 - DNA, 15 bp, Homo sapiens
aacaggggctgaagc

SEQ ID NO: 1769571 - DNA, 15 bp, Homo sapiens
acaggggctgaagcc

SEQ ID NO: 1769572 - DNA, 15 bp, Homo sapiens
caggggctgaagcca

SEQ ID NO: 1769573 - DNA, 15 bp, Homo sapiens
aggggctgaagccag

SEQ ID NO: 1769574 - DNA, 15 bp, Homo sapiens
agccaagtggtctag

SEQ ID NO: 1769575 - DNA, 15 bp, Homo sapiens
gccaagtggtctagc

SEQ ID NO: 1769576 - DNA, 15 bp, Homo sapiens
ccaagtggtctagct

SEQ ID NO: 1769577 - DNA, 15 bp, Homo sapiens
caagtggtctagctc

SEQ ID NO: 1769578 - DNA, 15 bp, Homo sapiens
aagtggtctagctca

SEQ ID NO: 1769579 - DNA, 15 bp, Homo sapiens
agtggtctagctcag

SEQ ID NO: 1769580 - DNA, 15 bp, Homo sapiens
gtggtctagctcagt

SEQ ID NO: 1769581 - DNA, 15 bp, Homo sapiens
tggtctagctcagtg

SEQ ID NO: 1769582 - DNA, 15 bp, Homo sapiens
ggtctagctcagtgg

SEQ ID NO: 1769583 - DNA, 15 bp, Homo sapiens
gtctagctcagtgga

SEQ ID NO: 1769584 - DNA, 15 bp, Homo sapiens
tctagctcagtggat

SEQ ID NO: 1769585 - DNA, 15 bp, Homo sapiens
ctagctcagtggatc

SEQ ID NO: 1769586 - DNA, 15 bp, Homo sapiens
tagctcagtggatcc

SEQ ID NO: 1769587 - DNA, 15 bp, Homo sapiens
agctcagtggatccc

SEQ ID NO: 1769588 - DNA, 15 bp, Homo sapiens
gctcagtggatccca

SEQ ID NO: 1769589 - DNA, 15 bp, Homo sapiens
ctcagtggatcccac

SEQ ID NO: 1769590 - DNA, 15 bp, Homo sapiens
tcagtggatcccacc

SEQ ID NO: 1769591 - DNA, 15 bp, Homo sapiens
cagtggatcccaccc

SEQ ID NO: 1769592 - DNA, 15 bp, Homo sapiens
agtggatcccacccc

SEQ ID NO: 1769593 - DNA, 15 bp, Homo sapiens
gtggatcccaccccc

SEQ ID NO: 1769594 - DNA, 15 bp, Homo sapiens
tggatcccaccccca

SEQ ID NO: 1769595 - DNA, 15 bp, Homo sapiens
ggatcccacccccac

SEQ ID NO: 1769596 - DNA, 15 bp, Homo sapiens
gatcccacccccaca

SEQ ID NO: 1769597 - DNA, 15 bp, Homo sapiens
atcccacccccacag

SEQ ID NO: 1769598 - DNA, 15 bp, Homo sapiens
tcccacccccacaga

SEQ ID NO: 1769599 - DNA, 15 bp, Homo sapiens
cccacccccacagag

SEQ ID NO: 1769600 - DNA, 15 bp, Homo sapiens
ccacccccacagagc

SEQ ID NO: 1769601 - DNA, 15 bp, Homo sapiens
cacccccacagagcc

SEQ ID NO: 1769602 - DNA, 15 bp, Homo sapiens
acccccacagagccc

SEQ ID NO: 1769603 - DNA, 15 bp, Homo sapiens
cccccacagagccca

SEQ ID NO: 1769604 - DNA, 15 bp, Homo sapiens
ccccacagagcccag

SEQ ID NO: 1769605 - DNA, 15 bp, Homo sapiens
cccacagagcccagc

SEQ ID NO: 1769606 - DNA, 15 bp, Homo sapiens
ccacagagcccagca

SEQ ID NO: 1769607 - DNA, 15 bp, Homo sapiens
cacagagcccagcaa

SEQ ID NO: 1769608 - DNA, 15 bp, Homo sapiens
acagagcccagcaag

SEQ ID NO: 1769609 - DNA, 15 bp, Homo sapiens
cagagcccagcaagc

SEQ ID NO: 1769610 - DNA, 15 bp, Homo sapiens
agagcccagcaagct

SEQ ID NO: 1769611 - DNA, 15 bp, Homo sapiens
gagcccagcaagcta

SEQ ID NO: 1769612 - DNA, 15 bp, Homo sapiens
agcccagcaagctaa

SEQ ID NO: 1769613 - DNA, 15 bp, Homo sapiens
gcccagcaagctaag

SEQ ID NO: 1769614 - DNA, 15 bp, Homo sapiens
cccagcaagctaaga

SEQ ID NO: 1769615 - DNA, 15 bp, Homo sapiens
ccagcaagctaagat

SEQ ID NO: 1769616 - DNA, 15 bp, Homo sapiens
cagcaagctaagatc

SEQ ID NO: 1769617 - DNA, 15 bp, Homo sapiens
ccactggcttgaaac

SEQ ID NO: 1769618 - DNA, 15 bp, Homo sapiens
cactggcttgaaact

SEQ ID NO: 1769619 - DNA, 15 bp, Homo sapiens
actggcttgaaactc

SEQ ID NO: 1769620 - DNA, 15 bp, Homo sapiens
ctggcttgaaactct

SEQ ID NO: 1769621 - DNA, 15 bp, Homo sapiens
tggcttgaaactctt

SEQ ID NO: 1769622 - DNA, 15 bp, Homo sapiens
ggcttgaaactctta

SEQ ID NO: 1769623 - DNA, 15 bp, Homo sapiens
gcttgaaactcttac

SEQ ID NO: 1769624 - DNA, 15 bp, Homo sapiens
cttgaaactcttact

SEQ ID NO: 1769625 - DNA, 15 bp, Homo sapiens
ttgaaactcttactg

SEQ ID NO: 1769626 - DNA, 15 bp, Homo sapiens
tgaaactcttactgc

SEQ ID NO: 1769627 - DNA, 15 bp, Homo sapiens
gaaactcttactgcc

SEQ ID NO: 1769628 - DNA, 15 bp, Homo sapiens
aaactcttactgcca

SEQ ID NO: 1769629 - DNA, 15 bp, Homo sapiens
aactcttactgccag

SEQ ID NO: 1769630 - DNA, 15 bp, Homo sapiens
actcttactgccagc

SEQ ID NO: 1769631 - DNA, 15 bp, Homo sapiens
ctcttactgccagca

SEQ ID NO: 1769632 - DNA, 15 bp, Homo sapiens
tcttactgccagcac

SEQ ID NO: 1769633 - DNA, 15 bp, Homo sapiens
cttactgccagcaca

SEQ ID NO: 1769634 - DNA, 15 bp, Homo sapiens
ttactgccagcacag

SEQ ID NO: 1769635 - DNA, 15 bp, Homo sapiens
tactgccagcacagg

SEQ ID NO: 1769636 - DNA, 15 bp, Homo sapiens
actgccagcacagga

SEQ ID NO: 1769637 - DNA, 15 bp, Homo sapiens
ctgccagcacaggag

SEQ ID NO: 1769638 - DNA, 15 bp, Homo sapiens
tgccagcacaggagt

SEQ ID NO: 1769639 - DNA, 15 bp, Homo sapiens
gccagcacaggagtc

SEQ ID NO: 1769640 - DNA, 15 bp, Homo sapiens
ccagcacaggagtct

SEQ ID NO: 1769641 - DNA, 15 bp, Homo sapiens
cagcacaggagtctg

SEQ ID NO: 1769642 - DNA, 15 bp, Homo sapiens
agcacaggagtctga

SEQ ID NO: 1769643 - DNA, 15 bp, Homo sapiens
gcacaggagtctgaa

SEQ ID NO: 1769644 - DNA, 15 bp, Homo sapiens
cacaggagtctgaag

SEQ ID NO: 1769645 - DNA, 15 bp, Homo sapiens
acaggagtctgaagt

SEQ ID NO: 1769646 - DNA, 15 bp, Homo sapiens
caggagtctgaagtc

SEQ ID NO: 1769647 - DNA, 15 bp, Homo sapiens
aggagtctgaagtcg

SEQ ID NO: 1769648 - DNA, 15 bp, Homo sapiens
ggagtctgaagtcga

SEQ ID NO: 1769649 - DNA, 15 bp, Homo sapiens
gagtctgaagtcgac

SEQ ID NO: 1769650 - DNA, 15 bp, Homo sapiens
agtctgaagtcgacc

SEQ ID NO: 1769651 - DNA, 15 bp, Homo sapiens
gtctgaagtcgacct

SEQ ID NO: 1769652 - DNA, 15 bp, Homo sapiens
tctgaagtcgacctg

SEQ ID NO: 1769653 - DNA, 15 bp, Homo sapiens
ctgaagtcgacctgg

SEQ ID NO: 1769654 - DNA, 15 bp, Homo sapiens
tgaagtcgacctggg

SEQ ID NO: 1769655 - DNA, 15 bp, Homo sapiens
gaagtcgacctggga

SEQ ID NO: 1769656 - DNA, 15 bp, Homo sapiens
aagtcgacctgggat

SEQ ID NO: 1769657 - DNA, 15 bp, Homo sapiens
agtcgacctgggatg

SEQ ID NO: 1769658 - DNA, 15 bp, Homo sapiens
gtcgacctgggatgc

SEQ ID NO: 1769659 - DNA, 15 bp, Homo sapiens
tcgacctgggatgct

SEQ ID NO: 1769660 - DNA, 15 bp, Homo sapiens
cgacctgggatgctg

SEQ ID NO: 1769661 - DNA, 15 bp, Homo sapiens
ctgggatgctggagc

SEQ ID NO: 1769662 - DNA, 15 bp, Homo sapiens
tgggatgctggagct

SEQ ID NO: 1769663 - DNA, 15 bp, Homo sapiens
gggatgctggagctt

SEQ ID NO: 1769664 - DNA, 15 bp, Homo sapiens
ggatgctggagcttg

SEQ ID NO: 1769665 - DNA, 15 bp, Homo sapiens
gatgctggagcttgg

SEQ ID NO: 1769666 - DNA, 15 bp, Homo sapiens
atgctggagcttggt

SEQ ID NO: 1769667 - DNA, 15 bp, Homo sapiens
tgctggagcttggtg

SEQ ID NO: 1769668 - DNA, 15 bp, Homo sapiens
gctggagcttggtgg

SEQ ID NO: 1769669 - DNA, 15 bp, Homo sapiens
ctggagcttggtggg

SEQ ID NO: 1769670 - DNA, 15 bp, Homo sapiens
tggagcttggtggga

SEQ ID NO: 1769671 - DNA, 15 bp, Homo sapiens
ggagcttggtgggag

SEQ ID NO: 1769672 - DNA, 15 bp, Homo sapiens
gagcttggtgggagg

SEQ ID NO: 1769673 - DNA, 15 bp, Homo sapiens
agcttggtgggagga

SEQ ID NO: 1769674 - DNA, 15 bp, Homo sapiens
gcttggtgggaggag

SEQ ID NO: 1769675 - DNA, 15 bp, Homo sapiens
cttggtgggaggagg

SEQ ID NO: 1769676 - DNA, 15 bp, Homo sapiens
ttggtgggaggaggg

SEQ ID NO: 1769677 - DNA, 15 bp, Homo sapiens
tggtgggaggagggg

SEQ ID NO: 1769678 - DNA, 15 bp, Homo sapiens
ggtgggaggaggggc

SEQ ID NO: 1769679 - DNA, 15 bp, Homo sapiens
gtgggaggaggggct

SEQ ID NO: 1769680 - DNA, 15 bp, Homo sapiens
tgggaggaggggctt

SEQ ID NO: 1769681 - DNA, 15 bp, Homo sapiens
gggaggaggggcttc

SEQ ID NO: 1769682 - DNA, 15 bp, Homo sapiens
ggaggaggggcttct

SEQ ID NO: 1769683 - DNA, 15 bp, Homo sapiens
gaggaggggcttctg

SEQ ID NO: 1769684 - DNA, 15 bp, Homo sapiens
aggaggggcttctgc

SEQ ID NO: 1769685 - DNA, 15 bp, Homo sapiens
ggaggggcttctgcc

SEQ ID NO: 1769686 - DNA, 15 bp, Homo sapiens
gaggggcttctgcca

SEQ ID NO: 1769687 - DNA, 15 bp, Homo sapiens
aggggcttctgccat

SEQ ID NO: 1769688 - DNA, 15 bp, Homo sapiens
ggggcttctgccatt

SEQ ID NO: 1769689 - DNA, 15 bp, Homo sapiens
gggcttctgccatta

SEQ ID NO: 1769690 - DNA, 15 bp, Homo sapiens
ggcttctgccattac

SEQ ID NO: 1769691 - DNA, 15 bp, Homo sapiens
gcttctgccattact

SEQ ID NO: 1769692 - DNA, 15 bp, Homo sapiens
cttctgccattactg

SEQ ID NO: 1769693 - DNA, 15 bp, Homo sapiens
ttctgccattactga

SEQ ID NO: 1769694 - DNA, 15 bp, Homo sapiens
tctgccattactgag

SEQ ID NO: 1769695 - DNA, 15 bp, Homo sapiens
ctgccattactgagg

SEQ ID NO: 1769696 - DNA, 15 bp, Homo sapiens
tgccattactgaggc

SEQ ID NO: 1769697 - DNA, 15 bp, Homo sapiens
gccattactgaggct

SEQ ID NO: 1769698 - DNA, 15 bp, Homo sapiens
actgaggcttgagta

SEQ ID NO: 1769699 - DNA, 15 bp, Homo sapiens
ctgaggcttgagtag

SEQ ID NO: 1769700 - DNA, 15 bp, Homo sapiens
tgaggcttgagtagg

SEQ ID NO: 1769701 - DNA, 15 bp, Homo sapiens
gaggcttgagtaggt

SEQ ID NO: 1769702 - DNA, 15 bp, Homo sapiens
aggcttgagtaggtg

SEQ ID NO: 1769703 - DNA, 15 bp, Homo sapiens
ggcttgagtaggtgg

SEQ ID NO: 1769704 - DNA, 15 bp, Homo sapiens
gcttgagtaggtggt

SEQ ID NO: 1769705 - DNA, 15 bp, Homo sapiens
cttgagtaggtggtt

SEQ ID NO: 1769706 - DNA, 15 bp, Homo sapiens
ttgagtaggtggttt

SEQ ID NO: 1769707 - DNA, 15 bp, Homo sapiens
tgagtaggtggtttt

SEQ ID NO: 1769708 - DNA, 15 bp, Homo sapiens
gagtaggtggttttc

SEQ ID NO: 1769709 - DNA, 15 bp, Homo sapiens
agtaggtggttttca

SEQ ID NO: 1769710 - DNA, 15 bp, Homo sapiens
gtaggtggttttcac

SEQ ID NO: 1769711 - DNA, 15 bp, Homo sapiens
taggtggttttcacc

SEQ ID NO: 1769712 - DNA, 15 bp, Homo sapiens
aggtggttttcacct

SEQ ID NO: 1769713 - DNA, 15 bp, Homo sapiens
ggtggttttcacctc

SEQ ID NO: 1769714 - DNA, 15 bp, Homo sapiens
gtggttttcacctca

SEQ ID NO: 1769715 - DNA, 15 bp, Homo sapiens
tggttttcacctcac

SEQ ID NO: 1769716 - DNA, 15 bp, Homo sapiens
ggttttcacctcaca

SEQ ID NO: 1769717 - DNA, 15 bp, Homo sapiens
gttttcacctcacag

SEQ ID NO: 1769718 - DNA, 15 bp, Homo sapiens
ttttcacctcacagt

SEQ ID NO: 1769719 - DNA, 15 bp, Homo sapiens
tttcacctcacagtg

SEQ ID NO: 1769720 - DNA, 15 bp, Homo sapiens
ttcacctcacagtgt

SEQ ID NO: 1769721 - DNA, 15 bp, Homo sapiens
tcacctcacagtgta

SEQ ID NO: 1769722 - DNA, 15 bp, Homo sapiens
cacctcacagtgtaa

SEQ ID NO: 1769723 - DNA, 15 bp, Homo sapiens
acctcacagtgtaag

SEQ ID NO: 1769724 - DNA, 15 bp, Homo sapiens
cctcacagtgtaagc

SEQ ID NO: 1769725 - DNA, 15 bp, Homo sapiens
ctcacagtgtaagca

SEQ ID NO: 1769726 - DNA, 15 bp, Homo sapiens
tcacagtgtaagcaa

SEQ ID NO: 1769727 - DNA, 15 bp, Homo sapiens
cacagtgtaagcaaa

SEQ ID NO: 1769728 - DNA, 15 bp, Homo sapiens
acagtgtaagcaaag

SEQ ID NO: 1769729 - DNA, 15 bp, Homo sapiens
cagtgtaagcaaagc

SEQ ID NO: 1769730 - DNA, 15 bp, Homo sapiens
agtgtaagcaaagcc

SEQ ID NO: 1769731 - DNA, 15 bp, Homo sapiens
gtgtaagcaaagcca

SEQ ID NO: 1769732 - DNA, 15 bp, Homo sapiens
tgtaagcaaagccac

SEQ ID NO: 1769733 - DNA, 15 bp, Homo sapiens
gtaagcaaagccacc

SEQ ID NO: 1769734 - DNA, 15 bp, Homo sapiens
taagcaaagccaccg

SEQ ID NO: 1769735 - DNA, 15 bp, Homo sapiens
aagcaaagccaccgg

SEQ ID NO: 1769736 - DNA, 15 bp, Homo sapiens
agcaaagccaccggg

SEQ ID NO: 1769737 - DNA, 15 bp, Homo sapiens
gcaaagccaccggga

SEQ ID NO: 1769738 - DNA, 15 bp, Homo sapiens
caaagccaccgggaa

SEQ ID NO: 1769739 - DNA, 15 bp, Homo sapiens
aaagccaccgggaag

SEQ ID NO: 1769740 - DNA, 15 bp, Homo sapiens
aagccaccgggaagt

SEQ ID NO: 1769741 - DNA, 15 bp, Homo sapiens
agccaccgggaagtt

SEQ ID NO: 1769742 - DNA, 15 bp, Homo sapiens
gccaccgggaagttt

SEQ ID NO: 1769743 - DNA, 15 bp, Homo sapiens
ccaccgggaagtttg

SEQ ID NO: 1769744 - DNA, 15 bp, Homo sapiens
caccgggaagtttga

SEQ ID NO: 1769745 - DNA, 15 bp, Homo sapiens
accgggaagtttgaa

SEQ ID NO: 1769746 - DNA, 15 bp, Homo sapiens
ccgggaagtttgaac

SEQ ID NO: 1769747 - DNA, 15 bp, Homo sapiens
cgggaagtttgaact

SEQ ID NO: 1769748 - DNA, 15 bp, Homo sapiens
gggaagtttgaactg

SEQ ID NO: 1769749 - DNA, 15 bp, Homo sapiens
ggaagtttgaactgg

SEQ ID NO: 1769750 - DNA, 15 bp, Homo sapiens
gaagtttgaactggg

SEQ ID NO: 1769751 - DNA, 15 bp, Homo sapiens
aagtttgaactgggt

SEQ ID NO: 1769752 - DNA, 15 bp, Homo sapiens
agtttgaactgggtg

SEQ ID NO: 1769753 - DNA, 15 bp, Homo sapiens
gtttgaactgggtgg

SEQ ID NO: 1769754 - DNA, 15 bp, Homo sapiens
tttgaactgggtgga

SEQ ID NO: 1769755 - DNA, 15 bp, Homo sapiens
tgggtggagcccact

SEQ ID NO: 1769756 - DNA, 15 bp, Homo sapiens
gggtggagcccactg

SEQ ID NO: 1769757 - DNA, 15 bp, Homo sapiens
ggtggagcccactgt

SEQ ID NO: 1769758 - DNA, 15 bp, Homo sapiens
gtggagcccactgta

SEQ ID NO: 1769759 - DNA, 15 bp, Homo sapiens
tggagcccactgtag

SEQ ID NO: 1769760 - DNA, 15 bp, Homo sapiens
ggagcccactgtagc

SEQ ID NO: 1769761 - DNA, 15 bp, Homo sapiens
gagcccactgtagcc

SEQ ID NO: 1769762 - DNA, 15 bp, Homo sapiens
agcccactgtagccc

SEQ ID NO: 1769763 - DNA, 15 bp, Homo sapiens
gcccactgtagccca

SEQ ID NO: 1769764 - DNA, 15 bp, Homo sapiens
cccactgtagcccaa

SEQ ID NO: 1769765 - DNA, 15 bp, Homo sapiens
ccactgtagcccaac

SEQ ID NO: 1769766 - DNA, 15 bp, Homo sapiens
cactgtagcccaact

SEQ ID NO: 1769767 - DNA, 15 bp, Homo sapiens
actgtagcccaactg

SEQ ID NO: 1769768 - DNA, 15 bp, Homo sapiens
ctgtagcccaactgc

SEQ ID NO: 1769769 - DNA, 15 bp, Homo sapiens
tgtagcccaactgct

SEQ ID NO: 1769770 - DNA, 15 bp, Homo sapiens
gtagcccaactgctt

SEQ ID NO: 1769771 - DNA, 15 bp, Homo sapiens
tagcccaactgcttc

SEQ ID NO: 1769772 - DNA, 15 bp, Homo sapiens
agcccaactgcttct

SEQ ID NO: 1769773 - DNA, 15 bp, Homo sapiens
gcccaactgcttctc

SEQ ID NO: 1769774 - DNA, 15 bp, Homo sapiens
cccaactgcttctct

SEQ ID NO: 1769775 - DNA, 15 bp, Homo sapiens
ccaactgcttctcta

SEQ ID NO: 1769776 - DNA, 15 bp, Homo sapiens
caactgcttctctag

SEQ ID NO: 1769777 - DNA, 15 bp, Homo sapiens
aactgcttctctaga

SEQ ID NO: 1769778 - DNA, 15 bp, Homo sapiens
actgcttctctagag

SEQ ID NO: 1769779 - DNA, 15 bp, Homo sapiens
ctgcttctctagagt

SEQ ID NO: 1769780 - DNA, 15 bp, Homo sapiens
tgcttctctagagtc

SEQ ID NO: 1769781 - DNA, 15 bp, Homo sapiens
gcttctctagagtcc

SEQ ID NO: 1769782 - DNA, 15 bp, Homo sapiens
cttctctagagtcct

SEQ ID NO: 1769783 - DNA, 15 bp, Homo sapiens
ttctctagagtcctc

SEQ ID NO: 1769784 - DNA, 15 bp, Homo sapiens
tctctagagtcctcc

SEQ ID NO: 1769785 - DNA, 15 bp, Homo sapiens
ctctagagtcctcct

SEQ ID NO: 1769786 - DNA, 15 bp, Homo sapiens
tctagagtcctcctc

SEQ ID NO: 1769787 - DNA, 15 bp, Homo sapiens
ctagagtcctcctct

SEQ ID NO: 1769788 - DNA, 15 bp, Homo sapiens
tagagtcctcctctc

SEQ ID NO: 1769789 - DNA, 15 bp, Homo sapiens
agagtcctcctctct

SEQ ID NO: 1769790 - DNA, 15 bp, Homo sapiens
gagtcctcctctctg

SEQ ID NO: 1769791 - DNA, 15 bp, Homo sapiens
agtcctcctctctgg

SEQ ID NO: 1769792 - DNA, 15 bp, Homo sapiens
gtcctcctctctggg

SEQ ID NO: 1769793 - DNA, 15 bp, Homo sapiens
gggcatctctgaaaa

SEQ ID NO: 1769794 - DNA, 15 bp, Homo sapiens
ggcatctctgaaaaa

SEQ ID NO: 1769795 - DNA, 15 bp, Homo sapiens
gcatctctgaaaaaa

SEQ ID NO: 1769796 - DNA, 15 bp, Homo sapiens
catctctgaaaaaaa

SEQ ID NO: 1769797 - DNA, 15 bp, Homo sapiens
atctctgaaaaaaag

SEQ ID NO: 1769798 - DNA, 15 bp, Homo sapiens
tctctgaaaaaaagg

SEQ ID NO: 1769799 - DNA, 15 bp, Homo sapiens
ctctgaaaaaaaggc

SEQ ID NO: 1769800 - DNA, 15 bp, Homo sapiens
tctgaaaaaaaggca

SEQ ID NO: 1769801 - DNA, 15 bp, Homo sapiens
ctgaaaaaaaggcag

SEQ ID NO: 1769802 - DNA, 15 bp, Homo sapiens
tgaaaaaaaggcagc

SEQ ID NO: 1769803 - DNA, 15 bp, Homo sapiens
gaaaaaaaggcagca

SEQ ID NO: 1769804 - DNA, 15 bp, Homo sapiens
aaaaaaaggcagcag

SEQ ID NO: 1769805 - DNA, 15 bp, Homo sapiens
aaaaaaggcagcagc

SEQ ID NO: 1769806 - DNA, 15 bp, Homo sapiens
aaaaaggcagcagcc

SEQ ID NO: 1769807 - DNA, 15 bp, Homo sapiens
aaaaggcagcagccc

SEQ ID NO: 1769808 - DNA, 15 bp, Homo sapiens
ccccagtcaggggct

SEQ ID NO: 1769809 - DNA, 15 bp, Homo sapiens
cccagtcaggggctt

SEQ ID NO: 1769810 - DNA, 15 bp, Homo sapiens
ccagtcaggggctta

SEQ ID NO: 1769811 - DNA, 15 bp, Homo sapiens
cagtcaggggcttat

SEQ ID NO: 1769812 - DNA, 15 bp, Homo sapiens
agtcaggggcttata

SEQ ID NO: 1769813 - DNA, 15 bp, Homo sapiens
gtcaggggcttatag

SEQ ID NO: 1769814 - DNA, 15 bp, Homo sapiens
tcaggggcttataga

SEQ ID NO: 1769815 - DNA, 15 bp, Homo sapiens
caggggcttatagat

SEQ ID NO: 1769816 - DNA, 15 bp, Homo sapiens
aggggcttatagata

SEQ ID NO: 1769817 - DNA, 15 bp, Homo sapiens
ggggcttatagataa

SEQ ID NO: 1769818 - DNA, 15 bp, Homo sapiens
gggcttatagataaa

SEQ ID NO: 1769819 - DNA, 15 bp, Homo sapiens
ggcttatagataaaa

SEQ ID NO: 1769820 - DNA, 15 bp, Homo sapiens
gcttatagataaaac

SEQ ID NO: 1769821 - DNA, 15 bp, Homo sapiens
cttatagataaaact

SEQ ID NO: 1769822 - DNA, 15 bp, Homo sapiens
ttatagataaaactg

SEQ ID NO: 1769823 - DNA, 15 bp, Homo sapiens
tatagataaaactgc

SEQ ID NO: 1769824 - DNA, 15 bp, Homo sapiens
atagataaaactgcc

SEQ ID NO: 1769825 - DNA, 15 bp, Homo sapiens
tagataaaactgcca

SEQ ID NO: 1769826 - DNA, 15 bp, Homo sapiens
agataaaactgccat

SEQ ID NO: 1769827 - DNA, 15 bp, Homo sapiens
gataaaactgccatc

SEQ ID NO: 1769828 - DNA, 15 bp, Homo sapiens
ataaaactgccatct

SEQ ID NO: 1769829 - DNA, 15 bp, Homo sapiens
taaaactgccatctc

SEQ ID NO: 1769830 - DNA, 15 bp, Homo sapiens
aaaactgccatctcc

SEQ ID NO: 1769831 - DNA, 15 bp, Homo sapiens
aaactgccatctccc

SEQ ID NO: 1769832 - DNA, 15 bp, Homo sapiens
aactgccatctccct

SEQ ID NO: 1769833 - DNA, 15 bp, Homo sapiens
actgccatctccctg

SEQ ID NO: 1769834 - DNA, 15 bp, Homo sapiens
ctgccatctccctgg

SEQ ID NO: 1769835 - DNA, 15 bp, Homo sapiens
tgccatctccctggg

SEQ ID NO: 1769836 - DNA, 15 bp, Homo sapiens
gccatctccctggga

SEQ ID NO: 1769837 - DNA, 15 bp, Homo sapiens
ccatctccctgggac

SEQ ID NO: 1769838 - DNA, 15 bp, Homo sapiens
catctccctgggaca

SEQ ID NO: 1769839 - DNA, 15 bp, Homo sapiens
atctccctgggacag

SEQ ID NO: 1769840 - DNA, 15 bp, Homo sapiens
tctccctgggacaga

SEQ ID NO: 1769841 - DNA, 15 bp, Homo sapiens
ctccctgggacagag

SEQ ID NO: 1769842 - DNA, 15 bp, Homo sapiens
tccctgggacagagc

SEQ ID NO: 1769843 - DNA, 15 bp, Homo sapiens
ccctgggacagagca

SEQ ID NO: 1769844 - DNA, 15 bp, Homo sapiens
ctgggacagagcacc

SEQ ID NO: 1769845 - DNA, 15 bp, Homo sapiens
tgggacagagcacct

SEQ ID NO: 1769846 - DNA, 15 bp, Homo sapiens
gggacagagcacctg

SEQ ID NO: 1769847 - DNA, 15 bp, Homo sapiens
ggacagagcacctgg

SEQ ID NO: 1769848 - DNA, 15 bp, Homo sapiens
gacagagcacctggg

SEQ ID NO: 1769849 - DNA, 15 bp, Homo sapiens
acagagcacctgggg

SEQ ID NO: 1769850 - DNA, 15 bp, Homo sapiens
cagagcacctggggg

SEQ ID NO: 1769851 - DNA, 15 bp, Homo sapiens
agagcacctggggga

SEQ ID NO: 1769852 - DNA, 15 bp, Homo sapiens
gagcacctgggggaa

SEQ ID NO: 1769853 - DNA, 15 bp, Homo sapiens
agcacctgggggaag

SEQ ID NO: 1769854 - DNA, 15 bp, Homo sapiens
gcacctgggggaagg

SEQ ID NO: 1769855 - DNA, 15 bp, Homo sapiens
cacctgggggaaggg

SEQ ID NO: 1769856 - DNA, 15 bp, Homo sapiens
acctgggggaagggt

SEQ ID NO: 1769857 - DNA, 15 bp, Homo sapiens
cctgggggaagggtg

SEQ ID NO: 1769858 - DNA, 15 bp, Homo sapiens
ctgggggaagggtgc

SEQ ID NO: 1769859 - DNA, 15 bp, Homo sapiens
tgggggaagggtgct

SEQ ID NO: 1769860 - DNA, 15 bp, Homo sapiens
gggggaagggtgcta

SEQ ID NO: 1769861 - DNA, 15 bp, Homo sapiens
ggggaagggtgctat

SEQ ID NO: 1769862 - DNA, 15 bp, Homo sapiens
gggaagggtgctatg

SEQ ID NO: 1769863 - DNA, 15 bp, Homo sapiens
ggaagggtgctatgg

SEQ ID NO: 1769864 - DNA, 15 bp, Homo sapiens
gaagggtgctatggg

SEQ ID NO: 1769865 - DNA, 15 bp, Homo sapiens
aagggtgctatgggt

SEQ ID NO: 1769866 - DNA, 15 bp, Homo sapiens
agggtgctatgggtg

SEQ ID NO: 1769867 - DNA, 15 bp, Homo sapiens
gggtgctatgggtgg

SEQ ID NO: 1769868 - DNA, 15 bp, Homo sapiens
ggtgctatgggtggc

SEQ ID NO: 1769869 - DNA, 15 bp, Homo sapiens
gtgctatgggtggct

SEQ ID NO: 1769870 - DNA, 15 bp, Homo sapiens
tgctatgggtggcta

SEQ ID NO: 1769871 - DNA, 15 bp, Homo sapiens
gctatgggtggctat

SEQ ID NO: 1769872 - DNA, 15 bp, Homo sapiens
ctatgggtggctatt

SEQ ID NO: 1769873 - DNA, 15 bp, Homo sapiens
tatgggtggctattg

SEQ ID NO: 1769874 - DNA, 15 bp, Homo sapiens
atgggtggctattgg

SEQ ID NO: 1769875 - DNA, 15 bp, Homo sapiens
tgggtggctattggt

SEQ ID NO: 1769876 - DNA, 15 bp, Homo sapiens
gggtggctattggtg

SEQ ID NO: 1769877 - DNA, 15 bp, Homo sapiens
ggtggctattggtgc

SEQ ID NO: 1769878 - DNA, 15 bp, Homo sapiens
gtggctattggtgca

SEQ ID NO: 1769879 - DNA, 15 bp, Homo sapiens
tggctattggtgcag

SEQ ID NO: 1769880 - DNA, 15 bp, Homo sapiens
ggctattggtgcagc

SEQ ID NO: 1769881 - DNA, 15 bp, Homo sapiens
gctattggtgcagct

SEQ ID NO: 1769882 - DNA, 15 bp, Homo sapiens
ctattggtgcagctt

SEQ ID NO: 1769883 - DNA, 15 bp, Homo sapiens
tattggtgcagcttc

SEQ ID NO: 1769884 - DNA, 15 bp, Homo sapiens
attggtgcagcttca

SEQ ID NO: 1769885 - DNA, 15 bp, Homo sapiens
ttggtgcagcttcag

SEQ ID NO: 1769886 - DNA, 15 bp, Homo sapiens
tggtgcagcttcagc

SEQ ID NO: 1769887 - DNA, 15 bp, Homo sapiens
ggtgcagcttcagca

SEQ ID NO: 1769888 - DNA, 15 bp, Homo sapiens
gtgcagcttcagcag

SEQ ID NO: 1769889 - DNA, 15 bp, Homo sapiens
tgcagcttcagcaga

SEQ ID NO: 1769890 - DNA, 15 bp, Homo sapiens
gcagcttcagcagac

SEQ ID NO: 1769891 - DNA, 15 bp, Homo sapiens
cagcttcagcagact

SEQ ID NO: 1769892 - DNA, 15 bp, Homo sapiens
agcttcagcagactt

SEQ ID NO: 1769893 - DNA, 15 bp, Homo sapiens
gcttcagcagactta

SEQ ID NO: 1769894 - DNA, 15 bp, Homo sapiens
cagcagacttaaacg

SEQ ID NO: 1769895 - DNA, 15 bp, Homo sapiens
agcagacttaaacgt

SEQ ID NO: 1769896 - DNA, 15 bp, Homo sapiens
gcagacttaaacgtt

SEQ ID NO: 1769897 - DNA, 15 bp, Homo sapiens
cagacttaaacgttc

SEQ ID NO: 1769898 - DNA, 15 bp, Homo sapiens
agacttaaacgttcc

SEQ ID NO: 1769899 - DNA, 15 bp, Homo sapiens
gacttaaacgttcct

SEQ ID NO: 1769900 - DNA, 15 bp, Homo sapiens
acttaaacgttcctg

SEQ ID NO: 1769901 - DNA, 15 bp, Homo sapiens
cttaaacgttcctgc

SEQ ID NO: 1769902 - DNA, 15 bp, Homo sapiens
ttaaacgttcctgcc

SEQ ID NO: 1769903 - DNA, 15 bp, Homo sapiens
taaacgttcctgcct

SEQ ID NO: 1769904 - DNA, 15 bp, Homo sapiens
aaacgttcctgcctg

SEQ ID NO: 1769905 - DNA, 15 bp, Homo sapiens
aacgttcctgcctgc

SEQ ID NO: 1769906 - DNA, 15 bp, Homo sapiens
acgttcctgcctgct

SEQ ID NO: 1769907 - DNA, 15 bp, Homo sapiens
cgttcctgcctgctg

SEQ ID NO: 1769908 - DNA, 15 bp, Homo sapiens
gttcctgcctgctgg

SEQ ID NO: 1769909 - DNA, 15 bp, Homo sapiens
agcagatctcccagg

SEQ ID NO: 1769910 - DNA, 15 bp, Homo sapiens
gcagatctcccagga

SEQ ID NO: 1769911 - DNA, 15 bp, Homo sapiens
cagatctcccaggac

SEQ ID NO: 1769912 - DNA, 15 bp, Homo sapiens
agatctcccaggaca

SEQ ID NO: 1769913 - DNA, 15 bp, Homo sapiens
gatctcccaggacat

SEQ ID NO: 1769914 - DNA, 15 bp, Homo sapiens
atctcccaggacatt

SEQ ID NO: 1769915 - DNA, 15 bp, Homo sapiens
tctcccaggacattg

SEQ ID NO: 1769916 - DNA, 15 bp, Homo sapiens
ctcccaggacattgc

SEQ ID NO: 1769917 - DNA, 15 bp, Homo sapiens
tcccaggacattgct

SEQ ID NO: 1769918 - DNA, 15 bp, Homo sapiens
cccaggacattgctc

SEQ ID NO: 1769919 - DNA, 15 bp, Homo sapiens
ccaggacattgctcg

SEQ ID NO: 1769920 - DNA, 15 bp, Homo sapiens
caggacattgctcga

SEQ ID NO: 1769921 - DNA, 15 bp, Homo sapiens
aggacattgctcgag

SEQ ID NO: 1769922 - DNA, 15 bp, Homo sapiens
ggacattgctcgagc

SEQ ID NO: 1769923 - DNA, 15 bp, Homo sapiens
gacattgctcgagct

SEQ ID NO: 1769924 - DNA, 15 bp, Homo sapiens
acattgctcgagctc

SEQ ID NO: 1769925 - DNA, 15 bp, Homo sapiens
cattgctcgagctct

SEQ ID NO: 1769926 - DNA, 15 bp, Homo sapiens
attgctcgagctctg

SEQ ID NO: 1769927 - DNA, 15 bp, Homo sapiens
ttgctcgagctctgc

SEQ ID NO: 1769928 - DNA, 15 bp, Homo sapiens
tgctcgagctctgct

SEQ ID NO: 1769929 - DNA, 15 bp, Homo sapiens
gctcgagctctgcta

SEQ ID NO: 1769930 - DNA, 15 bp, Homo sapiens
ctcgagctctgctaa

SEQ ID NO: 1769931 - DNA, 15 bp, Homo sapiens
tcgagctctgctaag

SEQ ID NO: 1769932 - DNA, 15 bp, Homo sapiens
cgagctctgctaagg

SEQ ID NO: 1769933 - DNA, 15 bp, Homo sapiens
gagctctgctaaggg

SEQ ID NO: 1769934 - DNA, 15 bp, Homo sapiens
taagggacagactgc

SEQ ID NO: 1769935 - DNA, 15 bp, Homo sapiens
aagggacagactgcc

SEQ ID NO: 1769936 - DNA, 15 bp, Homo sapiens
agggacagactgcct

SEQ ID NO: 1769937 - DNA, 15 bp, Homo sapiens
gggacagactgcctc

SEQ ID NO: 1769938 - DNA, 15 bp, Homo sapiens
tcctcaagtgggtct

SEQ ID NO: 1769939 - DNA, 15 bp, Homo sapiens
cctcaagtgggtctc

SEQ ID NO: 1769940 - DNA, 15 bp, Homo sapiens
ctcaagtgggtctct

SEQ ID NO: 1769941 - DNA, 15 bp, Homo sapiens
tcaagtgggtctctg

SEQ ID NO: 1769942 - DNA, 15 bp, Homo sapiens
caagtgggtctctga

SEQ ID NO: 1769943 - DNA, 15 bp, Homo sapiens
aagtgggtctctgac

SEQ ID NO: 1769944 - DNA, 15 bp, Homo sapiens
agtgggtctctgacc

SEQ ID NO: 1769945 - DNA, 15 bp, Homo sapiens
gtgggtctctgaccc

SEQ ID NO: 1769946 - DNA, 15 bp, Homo sapiens
tgggtctctgacccc

SEQ ID NO: 1769947 - DNA, 15 bp, Homo sapiens
gggtctctgaccccc

SEQ ID NO: 1769948 - DNA, 15 bp, Homo sapiens
ggtctctgaccccca

SEQ ID NO: 1769949 - DNA, 15 bp, Homo sapiens
gtctctgacccccat

SEQ ID NO: 1769950 - DNA, 15 bp, Homo sapiens
tctctgacccccatg

SEQ ID NO: 1769951 - DNA, 15 bp, Homo sapiens
ctctgacccccatgt

SEQ ID NO: 1769952 - DNA, 15 bp, Homo sapiens
tctgacccccatgtc

SEQ ID NO: 1769953 - DNA, 15 bp, Homo sapiens
ctgacccccatgtct

SEQ ID NO: 1769954 - DNA, 15 bp, Homo sapiens
tgacccccatgtctc

SEQ ID NO: 1769955 - DNA, 15 bp, Homo sapiens
gacccccatgtctcc

SEQ ID NO: 1769956 - DNA, 15 bp, Homo sapiens
acccccatgtctcct

SEQ ID NO: 1769957 - DNA, 15 bp, Homo sapiens
cccccatgtctcctg

SEQ ID NO: 1769958 - DNA, 15 bp, Homo sapiens
ccccatgtctcctga

SEQ ID NO: 1769959 - DNA, 15 bp, Homo sapiens
cccatgtctcctgac

SEQ ID NO: 1769960 - DNA, 15 bp, Homo sapiens
ccatgtctcctgact

SEQ ID NO: 1769961 - DNA, 15 bp, Homo sapiens
catgtctcctgactg

SEQ ID NO: 1769962 - DNA, 15 bp, Homo sapiens
atgtctcctgactgg

SEQ ID NO: 1769963 - DNA, 15 bp, Homo sapiens
tgtctcctgactggg

SEQ ID NO: 1769964 - DNA, 15 bp, Homo sapiens
gtctcctgactggga

SEQ ID NO: 1769965 - DNA, 15 bp, Homo sapiens
tctcctgactgggaa

SEQ ID NO: 1769966 - DNA, 15 bp, Homo sapiens
tgggaaacacctccc

SEQ ID NO: 1769967 - DNA, 15 bp, Homo sapiens
gggaaacacctccca

SEQ ID NO: 1769968 - DNA, 15 bp, Homo sapiens
ggaaacacctcccag

SEQ ID NO: 1769969 - DNA, 15 bp, Homo sapiens
gaaacacctcccagc

SEQ ID NO: 1769970 - DNA, 15 bp, Homo sapiens
aaacacctcccagca

SEQ ID NO: 1769971 - DNA, 15 bp, Homo sapiens
aacacctcccagcag

SEQ ID NO: 1769972 - DNA, 15 bp, Homo sapiens
acacctcccagcagg

SEQ ID NO: 1769973 - DNA, 15 bp, Homo sapiens
cacctcccagcagga

SEQ ID NO: 1769974 - DNA, 15 bp, Homo sapiens
acctcccagcaggaa

SEQ ID NO: 1769975 - DNA, 15 bp, Homo sapiens
cctcccagcaggaat

SEQ ID NO: 1769976 - DNA, 15 bp, Homo sapiens
ctcccagcaggaatc

SEQ ID NO: 1769977 - DNA, 15 bp, Homo sapiens
tcccagcaggaatcg

SEQ ID NO: 1769978 - DNA, 15 bp, Homo sapiens
cccagcaggaatcga

SEQ ID NO: 1769979 - DNA, 15 bp, Homo sapiens
ccagcaggaatcgac

SEQ ID NO: 1769980 - DNA, 15 bp, Homo sapiens
cagcaggaatcgaca

SEQ ID NO: 1769981 - DNA, 15 bp, Homo sapiens
agcaggaatcgacag

SEQ ID NO: 1769982 - DNA, 15 bp, Homo sapiens
gcaggaatcgacaga

SEQ ID NO: 1769983 - DNA, 15 bp, Homo sapiens
caggaatcgacagac

SEQ ID NO: 1769984 - DNA, 15 bp, Homo sapiens
aggaatcgacagaca

SEQ ID NO: 1769985 - DNA, 15 bp, Homo sapiens
ggaatcgacagacaa

SEQ ID NO: 1769986 - DNA, 15 bp, Homo sapiens
gaatcgacagacaac

SEQ ID NO: 1769987 - DNA, 15 bp, Homo sapiens
aatcgacagacaact

SEQ ID NO: 1769988 - DNA, 15 bp, Homo sapiens
atcgacagacaactc

SEQ ID NO: 1769989 - DNA, 15 bp, Homo sapiens
tcgacagacaactca

SEQ ID NO: 1769990 - DNA, 15 bp, Homo sapiens
cgacagacaactcac

SEQ ID NO: 1769991 - DNA, 15 bp, Homo sapiens
gacagacaactcaca

SEQ ID NO: 1769992 - DNA, 15 bp, Homo sapiens
acagacaactcacac

SEQ ID NO: 1769993 - DNA, 15 bp, Homo sapiens
cagacaactcacaca

SEQ ID NO: 1769994 - DNA, 15 bp, Homo sapiens
agacaactcacacag

SEQ ID NO: 1769995 - DNA, 15 bp, Homo sapiens
gacaactcacacagg

SEQ ID NO: 1769996 - DNA, 15 bp, Homo sapiens
acaactcacacagga

SEQ ID NO: 1769997 - DNA, 15 bp, Homo sapiens
caactcacacaggag

SEQ ID NO: 1769998 - DNA, 15 bp, Homo sapiens
aactcacacaggaga

SEQ ID NO: 1769999 - DNA, 15 bp, Homo sapiens
actcacacaggagag

SEQ ID NO: 1770000 - DNA, 15 bp, Homo sapiens
ctcacacaggagagc

SEQ ID NO: 1770001 - DNA, 15 bp, Homo sapiens
tcacacaggagagct

SEQ ID NO: 1770002 - DNA, 15 bp, Homo sapiens
cacacaggagagctc

SEQ ID NO: 1770003 - DNA, 15 bp, Homo sapiens
acacaggagagctcc

SEQ ID NO: 1770004 - DNA, 15 bp, Homo sapiens
cacaggagagctcca

SEQ ID NO: 1770005 - DNA, 15 bp, Homo sapiens
acaggagagctccag

SEQ ID NO: 1770006 - DNA, 15 bp, Homo sapiens
caggagagctccagc

SEQ ID NO: 1770007 - DNA, 15 bp, Homo sapiens
aggagagctccagct

SEQ ID NO: 1770008 - DNA, 15 bp, Homo sapiens
ggagagctccagctg

SEQ ID NO: 1770009 - DNA, 15 bp, Homo sapiens
gagagctccagctgc

SEQ ID NO: 1770010 - DNA, 15 bp, Homo sapiens
agagctccagctgcc

SEQ ID NO: 1770011 - DNA, 15 bp, Homo sapiens
gagctccagctgccg

SEQ ID NO: 1770012 - DNA, 15 bp, Homo sapiens
agctccagctgccgt

SEQ ID NO: 1770013 - DNA, 15 bp, Homo sapiens
gctccagctgccgtc

SEQ ID NO: 1770014 - DNA, 15 bp, Homo sapiens
ctccagctgccgtct

SEQ ID NO: 1770015 - DNA, 15 bp, Homo sapiens
tccagctgccgtctg

SEQ ID NO: 1770016 - DNA, 15 bp, Homo sapiens
ccagctgccgtctgg

SEQ ID NO: 1770017 - DNA, 15 bp, Homo sapiens
cagctgccgtctggt

SEQ ID NO: 1770018 - DNA, 15 bp, Homo sapiens
agctgccgtctggtg

SEQ ID NO: 1770019 - DNA, 15 bp, Homo sapiens
gctgccgtctggtgg

SEQ ID NO: 1770020 - DNA, 15 bp, Homo sapiens
ctgccgtctggtggg

SEQ ID NO: 1770021 - DNA, 15 bp, Homo sapiens
tgccgtctggtgggt

SEQ ID NO: 1770022 - DNA, 15 bp, Homo sapiens
gccgtctggtgggtg

SEQ ID NO: 1770023 - DNA, 15 bp, Homo sapiens
ccgtctggtgggtgc

SEQ ID NO: 1770024 - DNA, 15 bp, Homo sapiens
cgtctggtgggtgcc

SEQ ID NO: 1770025 - DNA, 15 bp, Homo sapiens
gtctggtgggtgccc

SEQ ID NO: 1770026 - DNA, 15 bp, Homo sapiens
tctggtgggtgcccc

SEQ ID NO: 1770027 - DNA, 15 bp, Homo sapiens
ctggtgggtgcccct

SEQ ID NO: 1770028 - DNA, 15 bp, Homo sapiens
tggtgggtgcccctc

SEQ ID NO: 1770029 - DNA, 15 bp, Homo sapiens
ggtgggtgcccctct

SEQ ID NO: 1770030 - DNA, 15 bp, Homo sapiens
gtgggtgcccctctg

SEQ ID NO: 1770031 - DNA, 15 bp, Homo sapiens
tgggtgcccctctgg

SEQ ID NO: 1770032 - DNA, 15 bp, Homo sapiens
gggtgcccctctggg

SEQ ID NO: 1770033 - DNA, 15 bp, Homo sapiens
ggtgcccctctggga

SEQ ID NO: 1770034 - DNA, 15 bp, Homo sapiens
gtgcccctctgggac

SEQ ID NO: 1770035 - DNA, 15 bp, Homo sapiens
tgcccctctgggaca

SEQ ID NO: 1770036 - DNA, 15 bp, Homo sapiens
gcccctctgggacaa

SEQ ID NO: 1770037 - DNA, 15 bp, Homo sapiens
cccctctgggacaaa

SEQ ID NO: 1770038 - DNA, 15 bp, Homo sapiens
ccctctgggacaaag

SEQ ID NO: 1770039 - DNA, 15 bp, Homo sapiens
cctctgggacaaagc

SEQ ID NO: 1770040 - DNA, 15 bp, Homo sapiens
ctctgggacaaagct

SEQ ID NO: 1770041 - DNA, 15 bp, Homo sapiens
tctgggacaaagctt

SEQ ID NO: 1770042 - DNA, 15 bp, Homo sapiens
ctgggacaaagcttc

SEQ ID NO: 1770043 - DNA, 15 bp, Homo sapiens
tgggacaaagcttcc

SEQ ID NO: 1770044 - DNA, 15 bp, Homo sapiens
gggacaaagcttcca

SEQ ID NO: 1770045 - DNA, 15 bp, Homo sapiens
ggacaaagcttccag

SEQ ID NO: 1770046 - DNA, 15 bp, Homo sapiens
gacaaagcttccaga

SEQ ID NO: 1770047 - DNA, 15 bp, Homo sapiens
acaaagcttccagag

SEQ ID NO: 1770048 - DNA, 15 bp, Homo sapiens
caaagcttccagagg

SEQ ID NO: 1770049 - DNA, 15 bp, Homo sapiens
aaagcttccagagga

SEQ ID NO: 1770050 - DNA, 15 bp, Homo sapiens
ggcagcaatctttgt

SEQ ID NO: 1770051 - DNA, 15 bp, Homo sapiens
gcagcaatctttgtt

SEQ ID NO: 1770052 - DNA, 15 bp, Homo sapiens
cagcaatctttgttg

SEQ ID NO: 1770053 - DNA, 15 bp, Homo sapiens
agcaatctttgttgt

SEQ ID NO: 1770054 - DNA, 15 bp, Homo sapiens
gcaatctttgttgtt

SEQ ID NO: 1770055 - DNA, 15 bp, Homo sapiens
caatctttgttgttc

SEQ ID NO: 1770056 - DNA, 15 bp, Homo sapiens
aatctttgttgttct

SEQ ID NO: 1770057 - DNA, 15 bp, Homo sapiens
atctttgttgttctg

SEQ ID NO: 1770058 - DNA, 15 bp, Homo sapiens
tctttgttgttctgc

SEQ ID NO: 1770059 - DNA, 15 bp, Homo sapiens
ctttgttgttctgca

SEQ ID NO: 1770060 - DNA, 15 bp, Homo sapiens
tttgttgttctgcaa

SEQ ID NO: 1770061 - DNA, 15 bp, Homo sapiens
ttgttgttctgcaac

SEQ ID NO: 1770062 - DNA, 15 bp, Homo sapiens
tgttgttctgcaacc

SEQ ID NO: 1770063 - DNA, 15 bp, Homo sapiens
gttgttctgcaacct

SEQ ID NO: 1770064 - DNA, 15 bp, Homo sapiens
ttgttctgcaacctc

SEQ ID NO: 1770065 - DNA, 15 bp, Homo sapiens
tgttctgcaacctct

SEQ ID NO: 1770066 - DNA, 15 bp, Homo sapiens
gttctgcaacctctg

SEQ ID NO: 1770067 - DNA, 15 bp, Homo sapiens
ttctgcaacctctgc

SEQ ID NO: 1770068 - DNA, 15 bp, Homo sapiens
tctgcaacctctgct

SEQ ID NO: 1770069 - DNA, 15 bp, Homo sapiens
tgcaacctctgctgg

SEQ ID NO: 1770070 - DNA, 15 bp, Homo sapiens
gcaacctctgctggt

SEQ ID NO: 1770071 - DNA, 15 bp, Homo sapiens
caacctctgctggtg

SEQ ID NO: 1770072 - DNA, 15 bp, Homo sapiens
aacctctgctggtga

SEQ ID NO: 1770073 - DNA, 15 bp, Homo sapiens
acctctgctggtgat

SEQ ID NO: 1770074 - DNA, 15 bp, Homo sapiens
cctctgctggtgata

SEQ ID NO: 1770075 - DNA, 15 bp, Homo sapiens
ctctgctggtgatat

SEQ ID NO: 1770076 - DNA, 15 bp, Homo sapiens
tctgctggtgatatc

SEQ ID NO: 1770077 - DNA, 15 bp, Homo sapiens
ctgctggtgatatcc

SEQ ID NO: 1770078 - DNA, 15 bp, Homo sapiens
tgctggtgatatcca

SEQ ID NO: 1770079 - DNA, 15 bp, Homo sapiens
gctggtgatatccag

SEQ ID NO: 1770080 - DNA, 15 bp, Homo sapiens
ctggtgatatccaga

SEQ ID NO: 1770081 - DNA, 15 bp, Homo sapiens
tggtgatatccagac

SEQ ID NO: 1770082 - DNA, 15 bp, Homo sapiens
ggtgatatccagaca

SEQ ID NO: 1770083 - DNA, 15 bp, Homo sapiens
gtgatatccagacaa

SEQ ID NO: 1770084 - DNA, 15 bp, Homo sapiens
tgatatccagacaaa

SEQ ID NO: 1770085 - DNA, 15 bp, Homo sapiens
gatatccagacaaac

SEQ ID NO: 1770086 - DNA, 15 bp, Homo sapiens
atatccagacaaaca

SEQ ID NO: 1770087 - DNA, 15 bp, Homo sapiens
tatccagacaaacag

SEQ ID NO: 1770088 - DNA, 15 bp, Homo sapiens
atccagacaaacagg

SEQ ID NO: 1770089 - DNA, 15 bp, Homo sapiens
tccagacaaacaggg

SEQ ID NO: 1770090 - DNA, 15 bp, Homo sapiens
ccagacaaacagggt

SEQ ID NO: 1770091 - DNA, 15 bp, Homo sapiens
cagacaaacagggtc

SEQ ID NO: 1770092 - DNA, 15 bp, Homo sapiens
agacaaacagggtct

SEQ ID NO: 1770093 - DNA, 15 bp, Homo sapiens
gacaaacagggtctg

SEQ ID NO: 1770094 - DNA, 15 bp, Homo sapiens
acaaacagggtctgg

SEQ ID NO: 1770095 - DNA, 15 bp, Homo sapiens
ggacctccagcaaat

SEQ ID NO: 1770096 - DNA, 15 bp, Homo sapiens
gacctccagcaaatt

SEQ ID NO: 1770097 - DNA, 15 bp, Homo sapiens
acctccagcaaattc

SEQ ID NO: 1770098 - DNA, 15 bp, Homo sapiens
cctccagcaaattcc

SEQ ID NO: 1770099 - DNA, 15 bp, Homo sapiens
ctccagcaaattcca

SEQ ID NO: 1770100 - DNA, 15 bp, Homo sapiens
tccagcaaattccag

SEQ ID NO: 1770101 - DNA, 15 bp, Homo sapiens
ccagcaaattccagc

SEQ ID NO: 1770102 - DNA, 15 bp, Homo sapiens
cagcaaattccagca

SEQ ID NO: 1770103 - DNA, 15 bp, Homo sapiens
agcaaattccagcag

SEQ ID NO: 1770104 - DNA, 15 bp, Homo sapiens
gcaaattccagcaga

SEQ ID NO: 1770105 - DNA, 15 bp, Homo sapiens
caaattccagcagac

SEQ ID NO: 1770106 - DNA, 15 bp, Homo sapiens
aaattccagcagacc

SEQ ID NO: 1770107 - DNA, 15 bp, Homo sapiens
aattccagcagacct

SEQ ID NO: 1770108 - DNA, 15 bp, Homo sapiens
attccagcagacctg

SEQ ID NO: 1770109 - DNA, 15 bp, Homo sapiens
ttccagcagacctgc

SEQ ID NO: 1770110 - DNA, 15 bp, Homo sapiens
tccagcagacctgca

SEQ ID NO: 1770111 - DNA, 15 bp, Homo sapiens
ccagcagacctgcag

SEQ ID NO: 1770112 - DNA, 15 bp, Homo sapiens
cagcagacctgcagc

SEQ ID NO: 1770113 - DNA, 15 bp, Homo sapiens
agcagacctgcagca

SEQ ID NO: 1770114 - DNA, 15 bp, Homo sapiens
gcagacctgcagcag

SEQ ID NO: 1770115 - DNA, 15 bp, Homo sapiens
cagacctgcagcaga

SEQ ID NO: 1770116 - DNA, 15 bp, Homo sapiens
agacctgcagcagag

SEQ ID NO: 1770117 - DNA, 15 bp, Homo sapiens
gacctgcagcagagg

SEQ ID NO: 1770118 - DNA, 15 bp, Homo sapiens
atgaatagcatcaat

SEQ ID NO: 1770119 - DNA, 15 bp, Homo sapiens
tgaatagcatcaata

SEQ ID NO: 1770120 - DNA, 15 bp, Homo sapiens
gaatagcatcaatat

SEQ ID NO: 1770121 - DNA, 15 bp, Homo sapiens
aatagcatcaatatc

SEQ ID NO: 1770122 - DNA, 15 bp, Homo sapiens
atagcatcaatatca

SEQ ID NO: 1770123 - DNA, 15 bp, Homo sapiens
tagcatcaatatcaa

SEQ ID NO: 1770124 - DNA, 15 bp, Homo sapiens
agcatcaatatcaac

SEQ ID NO: 1770125 - DNA, 15 bp, Homo sapiens
gcatcaatatcaaca

SEQ ID NO: 1770126 - DNA, 15 bp, Homo sapiens
catcaatatcaacaa

SEQ ID NO: 1770127 - DNA, 15 bp, Homo sapiens
atcaatatcaacaaa

SEQ ID NO: 1770128 - DNA, 15 bp, Homo sapiens
tcaatatcaacaaaa

SEQ ID NO: 1770129 - DNA, 15 bp, Homo sapiens
caatatcaacaaaaa

SEQ ID NO: 1770130 - DNA, 15 bp, Homo sapiens
aatatcaacaaaaag

SEQ ID NO: 1770131 - DNA, 15 bp, Homo sapiens
atatcaacaaaaagg

SEQ ID NO: 1770132 - DNA, 15 bp, Homo sapiens
tatcaacaaaaagga

SEQ ID NO: 1770133 - DNA, 15 bp, Homo sapiens
tcaacaaaaaggact

SEQ ID NO: 1770134 - DNA, 15 bp, Homo sapiens
caacaaaaaggactt

SEQ ID NO: 1770135 - DNA, 15 bp, Homo sapiens
aacaaaaaggacttc

SEQ ID NO: 1770136 - DNA, 15 bp, Homo sapiens
acaaaaaggacttcc

SEQ ID NO: 1770137 - DNA, 15 bp, Homo sapiens
caaaaaggacttcca

SEQ ID NO: 1770138 - DNA, 15 bp, Homo sapiens
aaaaaggacttccac

SEQ ID NO: 1770139 - DNA, 15 bp, Homo sapiens
aaaaggacttccaca

SEQ ID NO: 1770140 - DNA, 15 bp, Homo sapiens
aaaggacttccacac

SEQ ID NO: 1770141 - DNA, 15 bp, Homo sapiens
aaggacttccacaca

SEQ ID NO: 1770142 - DNA, 15 bp, Homo sapiens
aggacttccacacag

SEQ ID NO: 1770143 - DNA, 15 bp, Homo sapiens
ggacttccacacaga

SEQ ID NO: 1770144 - DNA, 15 bp, Homo sapiens
gacttccacacagaa

SEQ ID NO: 1770145 - DNA, 15 bp, Homo sapiens
acttccacacagaaa

SEQ ID NO: 1770146 - DNA, 15 bp, Homo sapiens
cttccacacagaaac

SEQ ID NO: 1770147 - DNA, 15 bp, Homo sapiens
ttccacacagaaacc

SEQ ID NO: 1770148 - DNA, 15 bp, Homo sapiens
ccatttgaaggtcac

SEQ ID NO: 1770149 - DNA, 15 bp, Homo sapiens
catttgaaggtcacc

SEQ ID NO: 1770150 - DNA, 15 bp, Homo sapiens
atttgaaggtcacca

SEQ ID NO: 1770151 - DNA, 15 bp, Homo sapiens
tttgaaggtcaccaa

SEQ ID NO: 1770152 - DNA, 15 bp, Homo sapiens
ttgaaggtcaccaac

SEQ ID NO: 1770153 - DNA, 15 bp, Homo sapiens
tgaaggtcaccaaca

SEQ ID NO: 1770154 - DNA, 15 bp, Homo sapiens
gaaggtcaccaacat

SEQ ID NO: 1770155 - DNA, 15 bp, Homo sapiens
aaggtcaccaacatc

SEQ ID NO: 1770156 - DNA, 15 bp, Homo sapiens
aggtcaccaacatcg

SEQ ID NO: 1770157 - DNA, 15 bp, Homo sapiens
ggtcaccaacatcga

SEQ ID NO: 1770158 - DNA, 15 bp, Homo sapiens
gtcaccaacatcgaa

SEQ ID NO: 1770159 - DNA, 15 bp, Homo sapiens
tcaccaacatcgaag

SEQ ID NO: 1770160 - DNA, 15 bp, Homo sapiens
caccaacatcgaaga

SEQ ID NO: 1770161 - DNA, 15 bp, Homo sapiens
accaacatcgaagac

SEQ ID NO: 1770162 - DNA, 15 bp, Homo sapiens
ccaacatcgaagacc

SEQ ID NO: 1770163 - DNA, 15 bp, Homo sapiens
caacatcgaagacca

SEQ ID NO: 1770164 - DNA, 15 bp, Homo sapiens
aacatcgaagaccaa

SEQ ID NO: 1770165 - DNA, 15 bp, Homo sapiens
acatcgaagaccaaa

SEQ ID NO: 1770166 - DNA, 15 bp, Homo sapiens
catcgaagaccaaag

SEQ ID NO: 1770167 - DNA, 15 bp, Homo sapiens
atcgaagaccaaagg

SEQ ID NO: 1770168 - DNA, 15 bp, Homo sapiens
tcgaagaccaaaggt

SEQ ID NO: 1770169 - DNA, 15 bp, Homo sapiens
cgaagaccaaaggta

SEQ ID NO: 1770170 - DNA, 15 bp, Homo sapiens
gaagaccaaaggtag

SEQ ID NO: 1770171 - DNA, 15 bp, Homo sapiens
gaggaaaaaccagcg

SEQ ID NO: 1770172 - DNA, 15 bp, Homo sapiens
aggaaaaaccagcgc

SEQ ID NO: 1770173 - DNA, 15 bp, Homo sapiens
ggaaaaaccagcgca

SEQ ID NO: 1770174 - DNA, 15 bp, Homo sapiens
gaaaaaccagcgcaa

SEQ ID NO: 1770175 - DNA, 15 bp, Homo sapiens
aaaaaccagcgcaaa

SEQ ID NO: 1770176 - DNA, 15 bp, Homo sapiens
aaaaccagcgcaaaa

SEQ ID NO: 1770177 - DNA, 15 bp, Homo sapiens
aaaccagcgcaaaaa

SEQ ID NO: 1770178 - DNA, 15 bp, Homo sapiens
aaccagcgcaaaaag

SEQ ID NO: 1770179 - DNA, 15 bp, Homo sapiens
accagcgcaaaaagg

SEQ ID NO: 1770180 - DNA, 15 bp, Homo sapiens
ccagcgcaaaaaggc

SEQ ID NO: 1770181 - DNA, 15 bp, Homo sapiens
cagcgcaaaaaggct

SEQ ID NO: 1770182 - DNA, 15 bp, Homo sapiens
agcgcaaaaaggctg

SEQ ID NO: 1770183 - DNA, 15 bp, Homo sapiens
gcgcaaaaaggctga

SEQ ID NO: 1770184 - DNA, 15 bp, Homo sapiens
cgcaaaaaggctgac

SEQ ID NO: 1770185 - DNA, 15 bp, Homo sapiens
gcaaaaaggctgaca

SEQ ID NO: 1770186 - DNA, 15 bp, Homo sapiens
caaaaaggctgacaa

SEQ ID NO: 1770187 - DNA, 15 bp, Homo sapiens
aaaaaggctgacaat

SEQ ID NO: 1770188 - DNA, 15 bp, Homo sapiens
aaaaggctgacaatt

SEQ ID NO: 1770189 - DNA, 15 bp, Homo sapiens
aaaggctgacaattc

SEQ ID NO: 1770190 - DNA, 15 bp, Homo sapiens
aaggctgacaattcc

SEQ ID NO: 1770191 - DNA, 15 bp, Homo sapiens
aggctgacaattcca

SEQ ID NO: 1770192 - DNA, 15 bp, Homo sapiens
ggctgacaattccaa

SEQ ID NO: 1770193 - DNA, 15 bp, Homo sapiens
gctgacaattccaaa

SEQ ID NO: 1770194 - DNA, 15 bp, Homo sapiens
ctgacaattccaaaa

SEQ ID NO: 1770195 - DNA, 15 bp, Homo sapiens
tgacaattccaaaaa

SEQ ID NO: 1770196 - DNA, 15 bp, Homo sapiens
gacaattccaaaaac

SEQ ID NO: 1770197 - DNA, 15 bp, Homo sapiens
acaattccaaaaacc

SEQ ID NO: 1770198 - DNA, 15 bp, Homo sapiens
caattccaaaaacca

SEQ ID NO: 1770199 - DNA, 15 bp, Homo sapiens
ttccaaaaaccagaa

SEQ ID NO: 1770200 - DNA, 15 bp, Homo sapiens
tccaaaaaccagaat

SEQ ID NO: 1770201 - DNA, 15 bp, Homo sapiens
ccaaaaaccagaatg

SEQ ID NO: 1770202 - DNA, 15 bp, Homo sapiens
caaaaaccagaatgc

SEQ ID NO: 1770203 - DNA, 15 bp, Homo sapiens
aaaaaccagaatgcc

SEQ ID NO: 1770204 - DNA, 15 bp, Homo sapiens
aaaaccagaatgcct

SEQ ID NO: 1770205 - DNA, 15 bp, Homo sapiens
aaaccagaatgcctt

SEQ ID NO: 1770206 - DNA, 15 bp, Homo sapiens
aaccagaatgccttt

SEQ ID NO: 1770207 - DNA, 15 bp, Homo sapiens
accagaatgcctttt

SEQ ID NO: 1770208 - DNA, 15 bp, Homo sapiens
ccagaatgccttttc

SEQ ID NO: 1770209 - DNA, 15 bp, Homo sapiens
cagaatgccttttct

SEQ ID NO: 1770210 - DNA, 15 bp, Homo sapiens
agaatgccttttctc

SEQ ID NO: 1770211 - DNA, 15 bp, Homo sapiens
gaatgccttttctct

SEQ ID NO: 1770212 - DNA, 15 bp, Homo sapiens
aatgccttttctctt

SEQ ID NO: 1770213 - DNA, 15 bp, Homo sapiens
atgccttttctcttc

SEQ ID NO: 1770214 - DNA, 15 bp, Homo sapiens
tgccttttctcttcc

SEQ ID NO: 1770215 - DNA, 15 bp, Homo sapiens
ctcttccaaagaatc

SEQ ID NO: 1770216 - DNA, 15 bp, Homo sapiens
tcttccaaagaatca

SEQ ID NO: 1770217 - DNA, 15 bp, Homo sapiens
cttccaaagaatcac

SEQ ID NO: 1770218 - DNA, 15 bp, Homo sapiens
ttccaaagaatcaca

SEQ ID NO: 1770219 - DNA, 15 bp, Homo sapiens
tccaaagaatcacaa

SEQ ID NO: 1770220 - DNA, 15 bp, Homo sapiens
ccaaagaatcacaac

SEQ ID NO: 1770221 - DNA, 15 bp, Homo sapiens
caaagaatcacaact

SEQ ID NO: 1770222 - DNA, 15 bp, Homo sapiens
aaagaatcacaactc

SEQ ID NO: 1770223 - DNA, 15 bp, Homo sapiens
aagaatcacaactcc

SEQ ID NO: 1770224 - DNA, 15 bp, Homo sapiens
agaatcacaactcct

SEQ ID NO: 1770225 - DNA, 15 bp, Homo sapiens
gaatcacaactcctc

SEQ ID NO: 1770226 - DNA, 15 bp, Homo sapiens
aatcacaactcctcg

SEQ ID NO: 1770227 - DNA, 15 bp, Homo sapiens
atcacaactcctcgc

SEQ ID NO: 1770228 - DNA, 15 bp, Homo sapiens
tcacaactcctcgcc

SEQ ID NO: 1770229 - DNA, 15 bp, Homo sapiens
cacaactcctcgcca

SEQ ID NO: 1770230 - DNA, 15 bp, Homo sapiens
acaactcctcgccag

SEQ ID NO: 1770231 - DNA, 15 bp, Homo sapiens
caactcctcgccagc

SEQ ID NO: 1770232 - DNA, 15 bp, Homo sapiens
aactcctcgccagca

SEQ ID NO: 1770233 - DNA, 15 bp, Homo sapiens
actcctcgccagcaa

SEQ ID NO: 1770234 - DNA, 15 bp, Homo sapiens
ctcctcgccagcaag

SEQ ID NO: 1770235 - DNA, 15 bp, Homo sapiens
tcctcgccagcaagg

SEQ ID NO: 1770236 - DNA, 15 bp, Homo sapiens
cctcgccagcaaggg

SEQ ID NO: 1770237 - DNA, 15 bp, Homo sapiens
ctcgccagcaaggga

SEQ ID NO: 1770238 - DNA, 15 bp, Homo sapiens
tcgccagcaagggaa

SEQ ID NO: 1770239 - DNA, 15 bp, Homo sapiens
cgccagcaagggaac

SEQ ID NO: 1770240 - DNA, 15 bp, Homo sapiens
gccagcaagggaaca

SEQ ID NO: 1770241 - DNA, 15 bp, Homo sapiens
ccagcaagggaacaa

SEQ ID NO: 1770242 - DNA, 15 bp, Homo sapiens
cagcaagggaacaaa

SEQ ID NO: 1770243 - DNA, 15 bp, Homo sapiens
agcaagggaacaaaa

SEQ ID NO: 1770244 - DNA, 15 bp, Homo sapiens
gcaagggaacaaaac

SEQ ID NO: 1770245 - DNA, 15 bp, Homo sapiens
caagggaacaaaact

SEQ ID NO: 1770246 - DNA, 15 bp, Homo sapiens
aagggaacaaaactg

SEQ ID NO: 1770247 - DNA, 15 bp, Homo sapiens
agggaacaaaactgg

SEQ ID NO: 1770248 - DNA, 15 bp, Homo sapiens
gggaacaaaactgga

SEQ ID NO: 1770249 - DNA, 15 bp, Homo sapiens
ggaacaaaactggac

SEQ ID NO: 1770250 - DNA, 15 bp, Homo sapiens
gaacaaaactggaca

SEQ ID NO: 1770251 - DNA, 15 bp, Homo sapiens
aacaaaactggacag

SEQ ID NO: 1770252 - DNA, 15 bp, Homo sapiens
acaaaactggacaga

SEQ ID NO: 1770253 - DNA, 15 bp, Homo sapiens
caaaactggacagag

SEQ ID NO: 1770254 - DNA, 15 bp, Homo sapiens
aaaactggacagaga

SEQ ID NO: 1770255 - DNA, 15 bp, Homo sapiens
aaactggacagagaa

SEQ ID NO: 1770256 - DNA, 15 bp, Homo sapiens
aactggacagagaat

SEQ ID NO: 1770257 - DNA, 15 bp, Homo sapiens
actggacagagaata

SEQ ID NO: 1770258 - DNA, 15 bp, Homo sapiens
ctggacagagaataa

SEQ ID NO: 1770259 - DNA, 15 bp, Homo sapiens
tggacagagaataat

SEQ ID NO: 1770260 - DNA, 15 bp, Homo sapiens
ggacagagaataata

SEQ ID NO: 1770261 - DNA, 15 bp, Homo sapiens
gacagagaataataa

SEQ ID NO: 1770262 - DNA, 15 bp, Homo sapiens
acagagaataataaa

SEQ ID NO: 1770263 - DNA, 15 bp, Homo sapiens
cagagaataataaac

SEQ ID NO: 1770264 - DNA, 15 bp, Homo sapiens
agagaataataaact

SEQ ID NO: 1770265 - DNA, 15 bp, Homo sapiens
gagaataataaactc

SEQ ID NO: 1770266 - DNA, 15 bp, Homo sapiens
agaataataaactcc

SEQ ID NO: 1770267 - DNA, 15 bp, Homo sapiens
gaataataaactcct

SEQ ID NO: 1770268 - DNA, 15 bp, Homo sapiens
aataataaactcctc

SEQ ID NO: 1770269 - DNA, 15 bp, Homo sapiens
ataataaactcctcc

SEQ ID NO: 1770270 - DNA, 15 bp, Homo sapiens
taataaactcctcca

SEQ ID NO: 1770271 - DNA, 15 bp, Homo sapiens
aataaactcctccaa

SEQ ID NO: 1770272 - DNA, 15 bp, Homo sapiens
ataaactcctccaag

SEQ ID NO: 1770273 - DNA, 15 bp, Homo sapiens
taaactcctccaagc

SEQ ID NO: 1770274 - DNA, 15 bp, Homo sapiens
aaactcctccaagcc

SEQ ID NO: 1770275 - DNA, 15 bp, Homo sapiens
aactcctccaagcca

SEQ ID NO: 1770276 - DNA, 15 bp, Homo sapiens
actcctccaagccaa

SEQ ID NO: 1770277 - DNA, 15 bp, Homo sapiens
ctcctccaagccaaa

SEQ ID NO: 1770278 - DNA, 15 bp, Homo sapiens
tcctccaagccaaag

SEQ ID NO: 1770279 - DNA, 15 bp, Homo sapiens
cctccaagccaaagg

SEQ ID NO: 1770280 - DNA, 15 bp, Homo sapiens
ctccaagccaaagga

SEQ ID NO: 1770281 - DNA, 15 bp, Homo sapiens
tccaagccaaaggac

SEQ ID NO: 1770282 - DNA, 15 bp, Homo sapiens
ccaagccaaaggacc

SEQ ID NO: 1770283 - DNA, 15 bp, Homo sapiens
caagccaaaggacca

SEQ ID NO: 1770284 - DNA, 15 bp, Homo sapiens
aagccaaaggaccat

SEQ ID NO: 1770285 - DNA, 15 bp, Homo sapiens
agccaaaggaccatg

SEQ ID NO: 1770286 - DNA, 15 bp, Homo sapiens
gccaaaggaccatgt

SEQ ID NO: 1770287 - DNA, 15 bp, Homo sapiens
ccaaaggaccatgtt

SEQ ID NO: 1770288 - DNA, 15 bp, Homo sapiens
caaaggaccatgttc

SEQ ID NO: 1770289 - DNA, 15 bp, Homo sapiens
tgcaaggaagctaaa

SEQ ID NO: 1770290 - DNA, 15 bp, Homo sapiens
gcaaggaagctaaaa

SEQ ID NO: 1770291 - DNA, 15 bp, Homo sapiens
caaggaagctaaaaa

SEQ ID NO: 1770292 - DNA, 15 bp, Homo sapiens
aaggaagctaaaaac

SEQ ID NO: 1770293 - DNA, 15 bp, Homo sapiens
aggaagctaaaaacc

SEQ ID NO: 1770294 - DNA, 15 bp, Homo sapiens
ggaagctaaaaacct

SEQ ID NO: 1770295 - DNA, 15 bp, Homo sapiens
gaagctaaaaacctt

SEQ ID NO: 1770296 - DNA, 15 bp, Homo sapiens
aagctaaaaaccttg

SEQ ID NO: 1770297 - DNA, 15 bp, Homo sapiens
agctaaaaaccttga

SEQ ID NO: 1770298 - DNA, 15 bp, Homo sapiens
gctaaaaaccttgaa

SEQ ID NO: 1770299 - DNA, 15 bp, Homo sapiens
ctaaaaaccttgaaa

SEQ ID NO: 1770300 - DNA, 15 bp, Homo sapiens
taaaaaccttgaaaa

SEQ ID NO: 1770301 - DNA, 15 bp, Homo sapiens
aaaaaccttgaaaaa

SEQ ID NO: 1770302 - DNA, 15 bp, Homo sapiens
aaaaccttgaaaaaa

SEQ ID NO: 1770303 - DNA, 15 bp, Homo sapiens
aaaccttgaaaaaag

SEQ ID NO: 1770304 - DNA, 15 bp, Homo sapiens
aaccttgaaaaaagg

SEQ ID NO: 1770305 - DNA, 15 bp, Homo sapiens
accttgaaaaaaggt

SEQ ID NO: 1770306 - DNA, 15 bp, Homo sapiens
ccttgaaaaaaggtt

SEQ ID NO: 1770307 - DNA, 15 bp, Homo sapiens
cttgaaaaaaggtta

SEQ ID NO: 1770308 - DNA, 15 bp, Homo sapiens
tagaggaattgctac

SEQ ID NO: 1770309 - DNA, 15 bp, Homo sapiens
agaggaattgctacc

SEQ ID NO: 1770310 - DNA, 15 bp, Homo sapiens
gaggaattgctacct

SEQ ID NO: 1770311 - DNA, 15 bp, Homo sapiens
aggaattgctaccta

SEQ ID NO: 1770312 - DNA, 15 bp, Homo sapiens
ggaattgctacctaa

SEQ ID NO: 1770313 - DNA, 15 bp, Homo sapiens
gaattgctacctaaa

SEQ ID NO: 1770314 - DNA, 15 bp, Homo sapiens
aattgctacctaaaa

SEQ ID NO: 1770315 - DNA, 15 bp, Homo sapiens
attgctacctaaaat

SEQ ID NO: 1770316 - DNA, 15 bp, Homo sapiens
ttgctacctaaaata

SEQ ID NO: 1770317 - DNA, 15 bp, Homo sapiens
tgctacctaaaataa

SEQ ID NO: 1770318 - DNA, 15 bp, Homo sapiens
gctacctaaaataag

SEQ ID NO: 1770319 - DNA, 15 bp, Homo sapiens
ctacctaaaataagc

SEQ ID NO: 1770320 - DNA, 15 bp, Homo sapiens
tacctaaaataagca

SEQ ID NO: 1770321 - DNA, 15 bp, Homo sapiens
acctaaaataagcag

SEQ ID NO: 1770322 - DNA, 15 bp, Homo sapiens
cctaaaataagcagt

SEQ ID NO: 1770323 - DNA, 15 bp, Homo sapiens
ctaaaataagcagtt

SEQ ID NO: 1770324 - DNA, 15 bp, Homo sapiens
taaaataagcagttt

SEQ ID NO: 1770325 - DNA, 15 bp, Homo sapiens
aaaataagcagttta

SEQ ID NO: 1770326 - DNA, 15 bp, Homo sapiens
aaataagcagtttag

SEQ ID NO: 1770327 - DNA, 15 bp, Homo sapiens
aataagcagtttaga

SEQ ID NO: 1770328 - DNA, 15 bp, Homo sapiens
ataagcagtttagag

SEQ ID NO: 1770329 - DNA, 15 bp, Homo sapiens
taagcagtttagaga

SEQ ID NO: 1770330 - DNA, 15 bp, Homo sapiens
aagcagtttagagaa

SEQ ID NO: 1770331 - DNA, 15 bp, Homo sapiens
agcagtttagagaag

SEQ ID NO: 1770332 - DNA, 15 bp, Homo sapiens
gcagtttagagaaga

SEQ ID NO: 1770333 - DNA, 15 bp, Homo sapiens
cataaatgacctgat

SEQ ID NO: 1770334 - DNA, 15 bp, Homo sapiens
ataaatgacctgatg

SEQ ID NO: 1770335 - DNA, 15 bp, Homo sapiens
taaatgacctgatgg

SEQ ID NO: 1770336 - DNA, 15 bp, Homo sapiens
aaatgacctgatgga

SEQ ID NO: 1770337 - DNA, 15 bp, Homo sapiens
aatgacctgatggag

SEQ ID NO: 1770338 - DNA, 15 bp, Homo sapiens
atgacctgatggagc

SEQ ID NO: 1770339 - DNA, 15 bp, Homo sapiens
tgacctgatggagct

SEQ ID NO: 1770340 - DNA, 15 bp, Homo sapiens
gacctgatggagctg

SEQ ID NO: 1770341 - DNA, 15 bp, Homo sapiens
acctgatggagctga

SEQ ID NO: 1770342 - DNA, 15 bp, Homo sapiens
cctgatggagctgaa

SEQ ID NO: 1770343 - DNA, 15 bp, Homo sapiens
ctgatggagctgaaa

SEQ ID NO: 1770344 - DNA, 15 bp, Homo sapiens
tgatggagctgaaaa

SEQ ID NO: 1770345 - DNA, 15 bp, Homo sapiens
gatggagctgaaaaa

SEQ ID NO: 1770346 - DNA, 15 bp, Homo sapiens
atggagctgaaaaac

SEQ ID NO: 1770347 - DNA, 15 bp, Homo sapiens
tggagctgaaaaaca

SEQ ID NO: 1770348 - DNA, 15 bp, Homo sapiens
ggagctgaaaaacac

SEQ ID NO: 1770349 - DNA, 15 bp, Homo sapiens
gagctgaaaaacaca

SEQ ID NO: 1770350 - DNA, 15 bp, Homo sapiens
agctgaaaaacacag

SEQ ID NO: 1770351 - DNA, 15 bp, Homo sapiens
gctgaaaaacacagc

SEQ ID NO: 1770352 - DNA, 15 bp, Homo sapiens
ctgaaaaacacagca

SEQ ID NO: 1770353 - DNA, 15 bp, Homo sapiens
tgaaaaacacagcac

SEQ ID NO: 1770354 - DNA, 15 bp, Homo sapiens
gaaaaacacagcaca

SEQ ID NO: 1770355 - DNA, 15 bp, Homo sapiens
aaaaacacagcacaa

SEQ ID NO: 1770356 - DNA, 15 bp, Homo sapiens
aaaacacagcacaag

SEQ ID NO: 1770357 - DNA, 15 bp, Homo sapiens
aaacacagcacaaga

SEQ ID NO: 1770358 - DNA, 15 bp, Homo sapiens
aacacagcacaagaa

SEQ ID NO: 1770359 - DNA, 15 bp, Homo sapiens
acacagcacaagaac

SEQ ID NO: 1770360 - DNA, 15 bp, Homo sapiens
cacagcacaagaact

SEQ ID NO: 1770361 - DNA, 15 bp, Homo sapiens
acagcacaagaactt

SEQ ID NO: 1770362 - DNA, 15 bp, Homo sapiens
cagcacaagaacttc

SEQ ID NO: 1770363 - DNA, 15 bp, Homo sapiens
agcacaagaacttcg

SEQ ID NO: 1770364 - DNA, 15 bp, Homo sapiens
gcacaagaacttcgt

SEQ ID NO: 1770365 - DNA, 15 bp, Homo sapiens
cacaagaacttcgtg

SEQ ID NO: 1770366 - DNA, 15 bp, Homo sapiens
acaagaacttcgtga

SEQ ID NO: 1770367 - DNA, 15 bp, Homo sapiens
caagaacttcgtgaa

SEQ ID NO: 1770368 - DNA, 15 bp, Homo sapiens
aagaacttcgtgaag

SEQ ID NO: 1770369 - DNA, 15 bp, Homo sapiens
agaacttcgtgaagc

SEQ ID NO: 1770370 - DNA, 15 bp, Homo sapiens
gaacttcgtgaagca

SEQ ID NO: 1770371 - DNA, 15 bp, Homo sapiens
aacttcgtgaagcat

SEQ ID NO: 1770372 - DNA, 15 bp, Homo sapiens
acttcgtgaagcata

SEQ ID NO: 1770373 - DNA, 15 bp, Homo sapiens
cttcgtgaagcatac

SEQ ID NO: 1770374 - DNA, 15 bp, Homo sapiens
ttcgtgaagcataca

SEQ ID NO: 1770375 - DNA, 15 bp, Homo sapiens
tcgtgaagcatacac

SEQ ID NO: 1770376 - DNA, 15 bp, Homo sapiens
cgtgaagcatacaca

SEQ ID NO: 1770377 - DNA, 15 bp, Homo sapiens
agcatacacaagtat

SEQ ID NO: 1770378 - DNA, 15 bp, Homo sapiens
gcatacacaagtatc

SEQ ID NO: 1770379 - DNA, 15 bp, Homo sapiens
catacacaagtatca

SEQ ID NO: 1770380 - DNA, 15 bp, Homo sapiens
atacacaagtatcaa

SEQ ID NO: 1770381 - DNA, 15 bp, Homo sapiens
tacacaagtatcaac

SEQ ID NO: 1770382 - DNA, 15 bp, Homo sapiens
acacaagtatcaaca

SEQ ID NO: 1770383 - DNA, 15 bp, Homo sapiens
cacaagtatcaacag

SEQ ID NO: 1770384 - DNA, 15 bp, Homo sapiens
acaagtatcaacagc

SEQ ID NO: 1770385 - DNA, 15 bp, Homo sapiens
caagtatcaacagcc

SEQ ID NO: 1770386 - DNA, 15 bp, Homo sapiens
aagtatcaacagcca

SEQ ID NO: 1770387 - DNA, 15 bp, Homo sapiens
agtatcaacagccaa

SEQ ID NO: 1770388 - DNA, 15 bp, Homo sapiens
gtatcaacagccaaa

SEQ ID NO: 1770389 - DNA, 15 bp, Homo sapiens
tatcaacagccaaag

SEQ ID NO: 1770390 - DNA, 15 bp, Homo sapiens
atcaacagccaaagc

SEQ ID NO: 1770391 - DNA, 15 bp, Homo sapiens
tcaacagccaaagca

SEQ ID NO: 1770392 - DNA, 15 bp, Homo sapiens
caacagccaaagcag

SEQ ID NO: 1770393 - DNA, 15 bp, Homo sapiens
aacagccaaagcaga

SEQ ID NO: 1770394 - DNA, 15 bp, Homo sapiens
acagccaaagcagaa

SEQ ID NO: 1770395 - DNA, 15 bp, Homo sapiens
cagccaaagcagaag

SEQ ID NO: 1770396 - DNA, 15 bp, Homo sapiens
agccaaagcagaaga

SEQ ID NO: 1770397 - DNA, 15 bp, Homo sapiens
gccaaagcagaagaa

SEQ ID NO: 1770398 - DNA, 15 bp, Homo sapiens
ccaaagcagaagaaa

SEQ ID NO: 1770399 - DNA, 15 bp, Homo sapiens
caaagcagaagaaag

SEQ ID NO: 1770400 - DNA, 15 bp, Homo sapiens
aaagcagaagaaagg

SEQ ID NO: 1770401 - DNA, 15 bp, Homo sapiens
aagcagaagaaagga

SEQ ID NO: 1770402 - DNA, 15 bp, Homo sapiens
agcagaagaaaggat

SEQ ID NO: 1770403 - DNA, 15 bp, Homo sapiens
gcagaagaaaggata

SEQ ID NO: 1770404 - DNA, 15 bp, Homo sapiens
cagaagaaaggatat

SEQ ID NO: 1770405 - DNA, 15 bp, Homo sapiens
agaagaaaggatatc

SEQ ID NO: 1770406 - DNA, 15 bp, Homo sapiens
gaagaaaggatatca

SEQ ID NO: 1770407 - DNA, 15 bp, Homo sapiens
aagaaaggatatcag

SEQ ID NO: 1770408 - DNA, 15 bp, Homo sapiens
agaaaggatatcaga

SEQ ID NO: 1770409 - DNA, 15 bp, Homo sapiens
gaaaggatatcagag

SEQ ID NO: 1770410 - DNA, 15 bp, Homo sapiens
gagattgaagatcac

SEQ ID NO: 1770411 - DNA, 15 bp, Homo sapiens
agattgaagatcacc

SEQ ID NO: 1770412 - DNA, 15 bp, Homo sapiens
gattgaagatcacct

SEQ ID NO: 1770413 - DNA, 15 bp, Homo sapiens
attgaagatcacctt

SEQ ID NO: 1770414 - DNA, 15 bp, Homo sapiens
ttgaagatcaccttt

SEQ ID NO: 1770415 - DNA, 15 bp, Homo sapiens
tgaagatcaccttta

SEQ ID NO: 1770416 - DNA, 15 bp, Homo sapiens
gaagatcacctttat

SEQ ID NO: 1770417 - DNA, 15 bp, Homo sapiens
aagatcacctttatg

SEQ ID NO: 1770418 - DNA, 15 bp, Homo sapiens
agatcacctttatga

SEQ ID NO: 1770419 - DNA, 15 bp, Homo sapiens
gatcacctttatgaa

SEQ ID NO: 1770420 - DNA, 15 bp, Homo sapiens
atcacctttatgaaa

SEQ ID NO: 1770421 - DNA, 15 bp, Homo sapiens
tcacctttatgaaat

SEQ ID NO: 1770422 - DNA, 15 bp, Homo sapiens
cacctttatgaaata

SEQ ID NO: 1770423 - DNA, 15 bp, Homo sapiens
acctttatgaaataa

SEQ ID NO: 1770424 - DNA, 15 bp, Homo sapiens
cctttatgaaataaa

SEQ ID NO: 1770425 - DNA, 15 bp, Homo sapiens
ctttatgaaataaag

SEQ ID NO: 1770426 - DNA, 15 bp, Homo sapiens
tttatgaaataaagt

SEQ ID NO: 1770427 - DNA, 15 bp, Homo sapiens
ttatgaaataaagtg

SEQ ID NO: 1770428 - DNA, 15 bp, Homo sapiens
tatgaaataaagtgt

SEQ ID NO: 1770429 - DNA, 15 bp, Homo sapiens
atgaaataaagtgtg

SEQ ID NO: 1770430 - DNA, 15 bp, Homo sapiens
tgaaataaagtgtga

SEQ ID NO: 1770431 - DNA, 15 bp, Homo sapiens
gaaataaagtgtgaa

SEQ ID NO: 1770432 - DNA, 15 bp, Homo sapiens
aaataaagtgtgaag

SEQ ID NO: 1770433 - DNA, 15 bp, Homo sapiens
aataaagtgtgaaga

SEQ ID NO: 1770434 - DNA, 15 bp, Homo sapiens
ataaagtgtgaagac

SEQ ID NO: 1770435 - DNA, 15 bp, Homo sapiens
taaagtgtgaagaca

SEQ ID NO: 1770436 - DNA, 15 bp, Homo sapiens
aaagtgtgaagacaa

SEQ ID NO: 1770437 - DNA, 15 bp, Homo sapiens
aagtgtgaagacaag

SEQ ID NO: 1770438 - DNA, 15 bp, Homo sapiens
agtgtgaagacaaga

SEQ ID NO: 1770439 - DNA, 15 bp, Homo sapiens
gtgtgaagacaagat

SEQ ID NO: 1770440 - DNA, 15 bp, Homo sapiens
tgtgaagacaagatt

SEQ ID NO: 1770441 - DNA, 15 bp, Homo sapiens
gtgaagacaagatta

SEQ ID NO: 1770442 - DNA, 15 bp, Homo sapiens
tgaagacaagattag

SEQ ID NO: 1770443 - DNA, 15 bp, Homo sapiens
gaagacaagattaga

SEQ ID NO: 1770444 - DNA, 15 bp, Homo sapiens
aagacaagattagag

SEQ ID NO: 1770445 - DNA, 15 bp, Homo sapiens
agacaagattagagg

SEQ ID NO: 1770446 - DNA, 15 bp, Homo sapiens
gacaagattagagga

SEQ ID NO: 1770447 - DNA, 15 bp, Homo sapiens
acaagattagaggaa

SEQ ID NO: 1770448 - DNA, 15 bp, Homo sapiens
caagattagaggaaa

SEQ ID NO: 1770449 - DNA, 15 bp, Homo sapiens
aagattagaggaaaa

SEQ ID NO: 1770450 - DNA, 15 bp, Homo sapiens
agattagaggaaaaa

SEQ ID NO: 1770451 - DNA, 15 bp, Homo sapiens
gattagaggaaaaag

SEQ ID NO: 1770452 - DNA, 15 bp, Homo sapiens
attagaggaaaaaga

SEQ ID NO: 1770453 - DNA, 15 bp, Homo sapiens
ttagaggaaaaagaa

SEQ ID NO: 1770454 - DNA, 15 bp, Homo sapiens
tagaggaaaaagaat

SEQ ID NO: 1770455 - DNA, 15 bp, Homo sapiens
agaggaaaaagaatg

SEQ ID NO: 1770456 - DNA, 15 bp, Homo sapiens
gaggaaaaagaatga

SEQ ID NO: 1770457 - DNA, 15 bp, Homo sapiens
aggaaaaagaatgaa

SEQ ID NO: 1770458 - DNA, 15 bp, Homo sapiens
ggaaaaagaatgaaa

SEQ ID NO: 1770459 - DNA, 15 bp, Homo sapiens
gaaaaagaatgaaaa

SEQ ID NO: 1770460 - DNA, 15 bp, Homo sapiens
aaaagaatgaaaaga

SEQ ID NO: 1770461 - DNA, 15 bp, Homo sapiens
aaagaatgaaaagaa

SEQ ID NO: 1770462 - DNA, 15 bp, Homo sapiens
aagaatgaaaagaaa

SEQ ID NO: 1770463 - DNA, 15 bp, Homo sapiens
agaatgaaaagaaac

SEQ ID NO: 1770464 - DNA, 15 bp, Homo sapiens
gaatgaaaagaaacg

SEQ ID NO: 1770465 - DNA, 15 bp, Homo sapiens
aatgaaaagaaacga

SEQ ID NO: 1770466 - DNA, 15 bp, Homo sapiens
atgaaaagaaacgaa

SEQ ID NO: 1770467 - DNA, 15 bp, Homo sapiens
tgaaaagaaacgaac

SEQ ID NO: 1770468 - DNA, 15 bp, Homo sapiens
gaaaagaaacgaaca

SEQ ID NO: 1770469 - DNA, 15 bp, Homo sapiens
aaaagaaacgaacaa

SEQ ID NO: 1770470 - DNA, 15 bp, Homo sapiens
aaagaaacgaacaaa

SEQ ID NO: 1770471 - DNA, 15 bp, Homo sapiens
aagaaacgaacaaag

SEQ ID NO: 1770472 - DNA, 15 bp, Homo sapiens
agaaacgaacaaagc

SEQ ID NO: 1770473 - DNA, 15 bp, Homo sapiens
gaaacgaacaaagcc

SEQ ID NO: 1770474 - DNA, 15 bp, Homo sapiens
aaacgaacaaagcct

SEQ ID NO: 1770475 - DNA, 15 bp, Homo sapiens
aacgaacaaagcctc

SEQ ID NO: 1770476 - DNA, 15 bp, Homo sapiens
acgaacaaagcctcc

SEQ ID NO: 1770477 - DNA, 15 bp, Homo sapiens
cgaacaaagcctcca

SEQ ID NO: 1770478 - DNA, 15 bp, Homo sapiens
cctatgtttgattgt

SEQ ID NO: 1770479 - DNA, 15 bp, Homo sapiens
ctatgtttgattgtc

SEQ ID NO: 1770480 - DNA, 15 bp, Homo sapiens
tatgtttgattgtcc

SEQ ID NO: 1770481 - DNA, 15 bp, Homo sapiens
atgtttgattgtccc

SEQ ID NO: 1770482 - DNA, 15 bp, Homo sapiens
tgtttgattgtccct

SEQ ID NO: 1770483 - DNA, 15 bp, Homo sapiens
gtttgattgtccctg

SEQ ID NO: 1770484 - DNA, 15 bp, Homo sapiens
tttgattgtccctgt

SEQ ID NO: 1770485 - DNA, 15 bp, Homo sapiens
ttgattgtccctgta

SEQ ID NO: 1770486 - DNA, 15 bp, Homo sapiens
tgattgtccctgtac

SEQ ID NO: 1770487 - DNA, 15 bp, Homo sapiens
gattgtccctgtacc

SEQ ID NO: 1770488 - DNA, 15 bp, Homo sapiens
attgtccctgtacct

SEQ ID NO: 1770489 - DNA, 15 bp, Homo sapiens
ttgtccctgtacctg

SEQ ID NO: 1770490 - DNA, 15 bp, Homo sapiens
tgtccctgtacctga

SEQ ID NO: 1770491 - DNA, 15 bp, Homo sapiens
gtccctgtacctgaa

SEQ ID NO: 1770492 - DNA, 15 bp, Homo sapiens
tccctgtacctgaaa

SEQ ID NO: 1770493 - DNA, 15 bp, Homo sapiens
ccctgtacctgaaag

SEQ ID NO: 1770494 - DNA, 15 bp, Homo sapiens
cctgtacctgaaagt

SEQ ID NO: 1770495 - DNA, 15 bp, Homo sapiens
ctgtacctgaaagtg

SEQ ID NO: 1770496 - DNA, 15 bp, Homo sapiens
aagtgacagggagaa

SEQ ID NO: 1770497 - DNA, 15 bp, Homo sapiens
agtgacagggagaat

SEQ ID NO: 1770498 - DNA, 15 bp, Homo sapiens
gtgacagggagaatt

SEQ ID NO: 1770499 - DNA, 15 bp, Homo sapiens
tgacagggagaattg

SEQ ID NO: 1770500 - DNA, 15 bp, Homo sapiens
gacagggagaattga

SEQ ID NO: 1770501 - DNA, 15 bp, Homo sapiens
acagggagaattgaa

SEQ ID NO: 1770502 - DNA, 15 bp, Homo sapiens
cagggagaattgaac

SEQ ID NO: 1770503 - DNA, 15 bp, Homo sapiens
agggagaattgaacc

SEQ ID NO: 1770504 - DNA, 15 bp, Homo sapiens
gggagaattgaacca

SEQ ID NO: 1770505 - DNA, 15 bp, Homo sapiens
ggagaattgaaccaa

SEQ ID NO: 1770506 - DNA, 15 bp, Homo sapiens
gagaattgaaccaag

SEQ ID NO: 1770507 - DNA, 15 bp, Homo sapiens
agaattgaaccaagt

SEQ ID NO: 1770508 - DNA, 15 bp, Homo sapiens
gaattgaaccaagtt

SEQ ID NO: 1770509 - DNA, 15 bp, Homo sapiens
aattgaaccaagttg

SEQ ID NO: 1770510 - DNA, 15 bp, Homo sapiens
attgaaccaagttgg

SEQ ID NO: 1770511 - DNA, 15 bp, Homo sapiens
ttgaaccaagttgga

SEQ ID NO: 1770512 - DNA, 15 bp, Homo sapiens
tgaaccaagttggaa

SEQ ID NO: 1770513 - DNA, 15 bp, Homo sapiens
gaaccaagttggaaa

SEQ ID NO: 1770514 - DNA, 15 bp, Homo sapiens
aaccaagttggaaaa

SEQ ID NO: 1770515 - DNA, 15 bp, Homo sapiens
accaagttggaaaac

SEQ ID NO: 1770516 - DNA, 15 bp, Homo sapiens
ccaagttggaaaaca

SEQ ID NO: 1770517 - DNA, 15 bp, Homo sapiens
caagttggaaaacac

SEQ ID NO: 1770518 - DNA, 15 bp, Homo sapiens
aagttggaaaacact

SEQ ID NO: 1770519 - DNA, 15 bp, Homo sapiens
agttggaaaacactc

SEQ ID NO: 1770520 - DNA, 15 bp, Homo sapiens
gttggaaaacactct

SEQ ID NO: 1770521 - DNA, 15 bp, Homo sapiens
ttggaaaacactctt

SEQ ID NO: 1770522 - DNA, 15 bp, Homo sapiens
tggaaaacactcttc

SEQ ID NO: 1770523 - DNA, 15 bp, Homo sapiens
ggaaaacactcttca

SEQ ID NO: 1770524 - DNA, 15 bp, Homo sapiens
gaaaacactcttcag

SEQ ID NO: 1770525 - DNA, 15 bp, Homo sapiens
aaaacactcttcagg

SEQ ID NO: 1770526 - DNA, 15 bp, Homo sapiens
aaacactcttcagga

SEQ ID NO: 1770527 - DNA, 15 bp, Homo sapiens
aacactcttcaggat

SEQ ID NO: 1770528 - DNA, 15 bp, Homo sapiens
acactcttcaggata

SEQ ID NO: 1770529 - DNA, 15 bp, Homo sapiens
cactcttcaggatat

SEQ ID NO: 1770530 - DNA, 15 bp, Homo sapiens
actcttcaggatatt

SEQ ID NO: 1770531 - DNA, 15 bp, Homo sapiens
ctcttcaggatatta

SEQ ID NO: 1770532 - DNA, 15 bp, Homo sapiens
tcttcaggatattat

SEQ ID NO: 1770533 - DNA, 15 bp, Homo sapiens
cttcaggatattatc

SEQ ID NO: 1770534 - DNA, 15 bp, Homo sapiens
ttcaggatattatcc

SEQ ID NO: 1770535 - DNA, 15 bp, Homo sapiens
tcaggatattatcca

SEQ ID NO: 1770536 - DNA, 15 bp, Homo sapiens
caggatattatccag

SEQ ID NO: 1770537 - DNA, 15 bp, Homo sapiens
aggatattatccagg

SEQ ID NO: 1770538 - DNA, 15 bp, Homo sapiens
ggatattatccagga

SEQ ID NO: 1770539 - DNA, 15 bp, Homo sapiens
gatattatccaggag

SEQ ID NO: 1770540 - DNA, 15 bp, Homo sapiens
atattatccaggaga

SEQ ID NO: 1770541 - DNA, 15 bp, Homo sapiens
tattatccaggagaa

SEQ ID NO: 1770542 - DNA, 15 bp, Homo sapiens
attatccaggagaat

SEQ ID NO: 1770543 - DNA, 15 bp, Homo sapiens
ttatccaggagaatt

SEQ ID NO: 1770544 - DNA, 15 bp, Homo sapiens
tatccaggagaattt

SEQ ID NO: 1770545 - DNA, 15 bp, Homo sapiens
atccaggagaatttc

SEQ ID NO: 1770546 - DNA, 15 bp, Homo sapiens
tccaggagaatttcc

SEQ ID NO: 1770547 - DNA, 15 bp, Homo sapiens
ccaggagaatttccc

SEQ ID NO: 1770548 - DNA, 15 bp, Homo sapiens
caggagaatttcccc

SEQ ID NO: 1770549 - DNA, 15 bp, Homo sapiens
aggagaatttcccca

SEQ ID NO: 1770550 - DNA, 15 bp, Homo sapiens
ggagaatttccccaa

SEQ ID NO: 1770551 - DNA, 15 bp, Homo sapiens
gagaatttccccaac

SEQ ID NO: 1770552 - DNA, 15 bp, Homo sapiens
agaatttccccaacc

SEQ ID NO: 1770553 - DNA, 15 bp, Homo sapiens
gaatttccccaacct

SEQ ID NO: 1770554 - DNA, 15 bp, Homo sapiens
aatttccccaaccta

SEQ ID NO: 1770555 - DNA, 15 bp, Homo sapiens
atttccccaacctag

SEQ ID NO: 1770556 - DNA, 15 bp, Homo sapiens
tttccccaacctagc

SEQ ID NO: 1770557 - DNA, 15 bp, Homo sapiens
ttccccaacctagca

SEQ ID NO: 1770558 - DNA, 15 bp, Homo sapiens
tccccaacctagcac

SEQ ID NO: 1770559 - DNA, 15 bp, Homo sapiens
ccccaacctagcacg

SEQ ID NO: 1770560 - DNA, 15 bp, Homo sapiens
cccaacctagcacga

SEQ ID NO: 1770561 - DNA, 15 bp, Homo sapiens
ccaacctagcacgac

SEQ ID NO: 1770562 - DNA, 15 bp, Homo sapiens
caacctagcacgaca

SEQ ID NO: 1770563 - DNA, 15 bp, Homo sapiens
aacctagcacgacag

SEQ ID NO: 1770564 - DNA, 15 bp, Homo sapiens
acctagcacgacagg

SEQ ID NO: 1770565 - DNA, 15 bp, Homo sapiens
cctagcacgacaggc

SEQ ID NO: 1770566 - DNA, 15 bp, Homo sapiens
ctagcacgacaggcc

SEQ ID NO: 1770567 - DNA, 15 bp, Homo sapiens
tagcacgacaggcca

SEQ ID NO: 1770568 - DNA, 15 bp, Homo sapiens
agcacgacaggccaa

SEQ ID NO: 1770569 - DNA, 15 bp, Homo sapiens
gcacgacaggccaac

SEQ ID NO: 1770570 - DNA, 15 bp, Homo sapiens
cacgacaggccaaca

SEQ ID NO: 1770571 - DNA, 15 bp, Homo sapiens
acgacaggccaacat

SEQ ID NO: 1770572 - DNA, 15 bp, Homo sapiens
cgacaggccaacatt

SEQ ID NO: 1770573 - DNA, 15 bp, Homo sapiens
gacaggccaacattc

SEQ ID NO: 1770574 - DNA, 15 bp, Homo sapiens
acaggccaacattcc

SEQ ID NO: 1770575 - DNA, 15 bp, Homo sapiens
caggccaacattcca

SEQ ID NO: 1770576 - DNA, 15 bp, Homo sapiens
aggccaacattccaa

SEQ ID NO: 1770577 - DNA, 15 bp, Homo sapiens
ggccaacattccaat

SEQ ID NO: 1770578 - DNA, 15 bp, Homo sapiens
gccaacattccaatt

SEQ ID NO: 1770579 - DNA, 15 bp, Homo sapiens
ccaacattccaattc

SEQ ID NO: 1770580 - DNA, 15 bp, Homo sapiens
caacattccaattca

SEQ ID NO: 1770581 - DNA, 15 bp, Homo sapiens
aacattccaattcag

SEQ ID NO: 1770582 - DNA, 15 bp, Homo sapiens
acattccaattcagg

SEQ ID NO: 1770583 - DNA, 15 bp, Homo sapiens
cattccaattcagga

SEQ ID NO: 1770584 - DNA, 15 bp, Homo sapiens
attccaattcaggaa

SEQ ID NO: 1770585 - DNA, 15 bp, Homo sapiens
ttccaattcaggaaa

SEQ ID NO: 1770586 - DNA, 15 bp, Homo sapiens
tccaattcaggaaat

SEQ ID NO: 1770587 - DNA, 15 bp, Homo sapiens
ccaattcaggaaata

SEQ ID NO: 1770588 - DNA, 15 bp, Homo sapiens
caattcaggaaatac

SEQ ID NO: 1770589 - DNA, 15 bp, Homo sapiens
ttcaggaaatacaga

SEQ ID NO: 1770590 - DNA, 15 bp, Homo sapiens
tcaggaaatacagag

SEQ ID NO: 1770591 - DNA, 15 bp, Homo sapiens
caggaaatacagaga

SEQ ID NO: 1770592 - DNA, 15 bp, Homo sapiens
aggaaatacagagaa

SEQ ID NO: 1770593 - DNA, 15 bp, Homo sapiens
ggaaatacagagaac

SEQ ID NO: 1770594 - DNA, 15 bp, Homo sapiens
gaaatacagagaaca

SEQ ID NO: 1770595 - DNA, 15 bp, Homo sapiens
aaatacagagaacac

SEQ ID NO: 1770596 - DNA, 15 bp, Homo sapiens
aatacagagaacacc

SEQ ID NO: 1770597 - DNA, 15 bp, Homo sapiens
atacagagaacacca

SEQ ID NO: 1770598 - DNA, 15 bp, Homo sapiens
tacagagaacaccac

SEQ ID NO: 1770599 - DNA, 15 bp, Homo sapiens
acagagaacaccaca

SEQ ID NO: 1770600 - DNA, 15 bp, Homo sapiens
cagagaacaccacaa

SEQ ID NO: 1770601 - DNA, 15 bp, Homo sapiens
agagaacaccacaaa

SEQ ID NO: 1770602 - DNA, 15 bp, Homo sapiens
gagaacaccacaaag

SEQ ID NO: 1770603 - DNA, 15 bp, Homo sapiens
agaacaccacaaaga

SEQ ID NO: 1770604 - DNA, 15 bp, Homo sapiens
ctcctcaagaagagc

SEQ ID NO: 1770605 - DNA, 15 bp, Homo sapiens
tcctcaagaagagca

SEQ ID NO: 1770606 - DNA, 15 bp, Homo sapiens
cctcaagaagagcaa

SEQ ID NO: 1770607 - DNA, 15 bp, Homo sapiens
ctcaagaagagcaac

SEQ ID NO: 1770608 - DNA, 15 bp, Homo sapiens
tcaagaagagcaacc

SEQ ID NO: 1770609 - DNA, 15 bp, Homo sapiens
caagaagagcaaccc

SEQ ID NO: 1770610 - DNA, 15 bp, Homo sapiens
aagaagagcaacccc

SEQ ID NO: 1770611 - DNA, 15 bp, Homo sapiens
agaagagcaacccca

SEQ ID NO: 1770612 - DNA, 15 bp, Homo sapiens
gaagagcaaccccaa

SEQ ID NO: 1770613 - DNA, 15 bp, Homo sapiens
aagagcaaccccaag

SEQ ID NO: 1770614 - DNA, 15 bp, Homo sapiens
agagcaaccccaaga

SEQ ID NO: 1770615 - DNA, 15 bp, Homo sapiens
gagcaaccccaagac

SEQ ID NO: 1770616 - DNA, 15 bp, Homo sapiens
agcaaccccaagaca

SEQ ID NO: 1770617 - DNA, 15 bp, Homo sapiens
gcaaccccaagacac

SEQ ID NO: 1770618 - DNA, 15 bp, Homo sapiens
caaccccaagacaca

SEQ ID NO: 1770619 - DNA, 15 bp, Homo sapiens
aaccccaagacacat

SEQ ID NO: 1770620 - DNA, 15 bp, Homo sapiens
accccaagacacata

SEQ ID NO: 1770621 - DNA, 15 bp, Homo sapiens
ccccaagacacataa

SEQ ID NO: 1770622 - DNA, 15 bp, Homo sapiens
cccaagacacataat

SEQ ID NO: 1770623 - DNA, 15 bp, Homo sapiens
ccaagacacataatc

SEQ ID NO: 1770624 - DNA, 15 bp, Homo sapiens
caagacacataatcg

SEQ ID NO: 1770625 - DNA, 15 bp, Homo sapiens
aagacacataatcgt

SEQ ID NO: 1770626 - DNA, 15 bp, Homo sapiens
agacacataatcgtc

SEQ ID NO: 1770627 - DNA, 15 bp, Homo sapiens
gacacataatcgtca

SEQ ID NO: 1770628 - DNA, 15 bp, Homo sapiens
acacataatcgtcag

SEQ ID NO: 1770629 - DNA, 15 bp, Homo sapiens
cacataatcgtcaga

SEQ ID NO: 1770630 - DNA, 15 bp, Homo sapiens
acataatcgtcagat

SEQ ID NO: 1770631 - DNA, 15 bp, Homo sapiens
cataatcgtcagatt

SEQ ID NO: 1770632 - DNA, 15 bp, Homo sapiens
atgaaggaaaaaatg

SEQ ID NO: 1770633 - DNA, 15 bp, Homo sapiens
tgaaggaaaaaatgt

SEQ ID NO: 1770634 - DNA, 15 bp, Homo sapiens
gaaggaaaaaatgtt

SEQ ID NO: 1770635 - DNA, 15 bp, Homo sapiens
aaggaaaaaatgtta

SEQ ID NO: 1770636 - DNA, 15 bp, Homo sapiens
aggaaaaaatgttaa

SEQ ID NO: 1770637 - DNA, 15 bp, Homo sapiens
ggaaaaaatgttaaa

SEQ ID NO: 1770638 - DNA, 15 bp, Homo sapiens
aaaaaatgttaaaag

SEQ ID NO: 1770639 - DNA, 15 bp, Homo sapiens
aaaaatgttaaaagc

SEQ ID NO: 1770640 - DNA, 15 bp, Homo sapiens
aaaatgttaaaagca

SEQ ID NO: 1770641 - DNA, 15 bp, Homo sapiens
aaatgttaaaagcag

SEQ ID NO: 1770642 - DNA, 15 bp, Homo sapiens
aatgttaaaagcagc

SEQ ID NO: 1770643 - DNA, 15 bp, Homo sapiens
atgttaaaagcagcc

SEQ ID NO: 1770644 - DNA, 15 bp, Homo sapiens
tgttaaaagcagcca

SEQ ID NO: 1770645 - DNA, 15 bp, Homo sapiens
gttaaaagcagccag

SEQ ID NO: 1770646 - DNA, 15 bp, Homo sapiens
ttaaaagcagccaga

SEQ ID NO: 1770647 - DNA, 15 bp, Homo sapiens
taaaagcagccagag

SEQ ID NO: 1770648 - DNA, 15 bp, Homo sapiens
aaaagcagccagaga

SEQ ID NO: 1770649 - DNA, 15 bp, Homo sapiens
aaagcagccagagag

SEQ ID NO: 1770650 - DNA, 15 bp, Homo sapiens
aagcagccagagaga

SEQ ID NO: 1770651 - DNA, 15 bp, Homo sapiens
agcagccagagagaa

SEQ ID NO: 1770652 - DNA, 15 bp, Homo sapiens
gcagccagagagaaa

SEQ ID NO: 1770653 - DNA, 15 bp, Homo sapiens
cagccagagagaaag

SEQ ID NO: 1770654 - DNA, 15 bp, Homo sapiens
agccagagagaaagg

SEQ ID NO: 1770655 - DNA, 15 bp, Homo sapiens
gccagagagaaaggt

SEQ ID NO: 1770656 - DNA, 15 bp, Homo sapiens
ccagagagaaaggtc

SEQ ID NO: 1770657 - DNA, 15 bp, Homo sapiens
cagagagaaaggtcg

SEQ ID NO: 1770658 - DNA, 15 bp, Homo sapiens
agagagaaaggtcgg

SEQ ID NO: 1770659 - DNA, 15 bp, Homo sapiens
gagagaaaggtcggg

SEQ ID NO: 1770660 - DNA, 15 bp, Homo sapiens
agagaaaggtcgggt

SEQ ID NO: 1770661 - DNA, 15 bp, Homo sapiens
gagaaaggtcgggtt

SEQ ID NO: 1770662 - DNA, 15 bp, Homo sapiens
agaaaggtcgggtta

SEQ ID NO: 1770663 - DNA, 15 bp, Homo sapiens
gaaaggtcgggttac

SEQ ID NO: 1770664 - DNA, 15 bp, Homo sapiens
aaaggtcgggttacc

SEQ ID NO: 1770665 - DNA, 15 bp, Homo sapiens
aaggtcgggttacct

SEQ ID NO: 1770666 - DNA, 15 bp, Homo sapiens
aggtcgggttaccta

SEQ ID NO: 1770667 - DNA, 15 bp, Homo sapiens
ggtcgggttacctac

SEQ ID NO: 1770668 - DNA, 15 bp, Homo sapiens
gtcgggttacctaca

SEQ ID NO: 1770669 - DNA, 15 bp, Homo sapiens
tcgggttacctacaa

SEQ ID NO: 1770670 - DNA, 15 bp, Homo sapiens
cgggttacctacaaa

SEQ ID NO: 1770671 - DNA, 15 bp, Homo sapiens
gggttacctacaaag

SEQ ID NO: 1770672 - DNA, 15 bp, Homo sapiens
ggttacctacaaagg

SEQ ID NO: 1770673 - DNA, 15 bp, Homo sapiens
gttacctacaaaggg

SEQ ID NO: 1770674 - DNA, 15 bp, Homo sapiens
ttacctacaaaggga

SEQ ID NO: 1770675 - DNA, 15 bp, Homo sapiens
tacctacaaagggaa

SEQ ID NO: 1770676 - DNA, 15 bp, Homo sapiens
acctacaaagggaag

SEQ ID NO: 1770677 - DNA, 15 bp, Homo sapiens
cctacaaagggaagc

SEQ ID NO: 1770678 - DNA, 15 bp, Homo sapiens
ctacaaagggaagcc

SEQ ID NO: 1770679 - DNA, 15 bp, Homo sapiens
tacaaagggaagccc

SEQ ID NO: 1770680 - DNA, 15 bp, Homo sapiens
acaaagggaagccca

SEQ ID NO: 1770681 - DNA, 15 bp, Homo sapiens
caaagggaagcccat

SEQ ID NO: 1770682 - DNA, 15 bp, Homo sapiens
aaagggaagcccatc

SEQ ID NO: 1770683 - DNA, 15 bp, Homo sapiens
aagggaagcccatca

SEQ ID NO: 1770684 - DNA, 15 bp, Homo sapiens
agggaagcccatcag

SEQ ID NO: 1770685 - DNA, 15 bp, Homo sapiens
gggaagcccatcaga

SEQ ID NO: 1770686 - DNA, 15 bp, Homo sapiens
ggaagcccatcagac

SEQ ID NO: 1770687 - DNA, 15 bp, Homo sapiens
gaagcccatcagact

SEQ ID NO: 1770688 - DNA, 15 bp, Homo sapiens
aagcccatcagacta

SEQ ID NO: 1770689 - DNA, 15 bp, Homo sapiens
agcccatcagactaa

SEQ ID NO: 1770690 - DNA, 15 bp, Homo sapiens
gcccatcagactaat

SEQ ID NO: 1770691 - DNA, 15 bp, Homo sapiens
cccatcagactaata

SEQ ID NO: 1770692 - DNA, 15 bp, Homo sapiens
ccatcagactaatag

SEQ ID NO: 1770693 - DNA, 15 bp, Homo sapiens
catcagactaatagt

SEQ ID NO: 1770694 - DNA, 15 bp, Homo sapiens
atcagactaatagtg

SEQ ID NO: 1770695 - DNA, 15 bp, Homo sapiens
tcagactaatagtgg

SEQ ID NO: 1770696 - DNA, 15 bp, Homo sapiens
cagactaatagtgga

SEQ ID NO: 1770697 - DNA, 15 bp, Homo sapiens
agactaatagtggat

SEQ ID NO: 1770698 - DNA, 15 bp, Homo sapiens
gactaatagtggatc

SEQ ID NO: 1770699 - DNA, 15 bp, Homo sapiens
actaatagtggatct

SEQ ID NO: 1770700 - DNA, 15 bp, Homo sapiens
ctaatagtggatctc

SEQ ID NO: 1770701 - DNA, 15 bp, Homo sapiens
taatagtggatctct

SEQ ID NO: 1770702 - DNA, 15 bp, Homo sapiens
aatagtggatctctc

SEQ ID NO: 1770703 - DNA, 15 bp, Homo sapiens
atagtggatctctct

SEQ ID NO: 1770704 - DNA, 15 bp, Homo sapiens
tagtggatctctctg

SEQ ID NO: 1770705 - DNA, 15 bp, Homo sapiens
agtggatctctctgc

SEQ ID NO: 1770706 - DNA, 15 bp, Homo sapiens
gtggatctctctgca

SEQ ID NO: 1770707 - DNA, 15 bp, Homo sapiens
tggatctctctgcag

SEQ ID NO: 1770708 - DNA, 15 bp, Homo sapiens
ggatctctctgcaga

SEQ ID NO: 1770709 - DNA, 15 bp, Homo sapiens
gatctctctgcagaa

SEQ ID NO: 1770710 - DNA, 15 bp, Homo sapiens
atctctctgcagaaa

SEQ ID NO: 1770711 - DNA, 15 bp, Homo sapiens
tctctctgcagaaac

SEQ ID NO: 1770712 - DNA, 15 bp, Homo sapiens
ctctctgcagaaacc

SEQ ID NO: 1770713 - DNA, 15 bp, Homo sapiens
tctctgcagaaaccc

SEQ ID NO: 1770714 - DNA, 15 bp, Homo sapiens
ctctgcagaaaccct

SEQ ID NO: 1770715 - DNA, 15 bp, Homo sapiens
tctgcagaaacccta

SEQ ID NO: 1770716 - DNA, 15 bp, Homo sapiens
ctgcagaaaccctac

SEQ ID NO: 1770717 - DNA, 15 bp, Homo sapiens
tgcagaaaccctaca

SEQ ID NO: 1770718 - DNA, 15 bp, Homo sapiens
gcagaaaccctacag

SEQ ID NO: 1770719 - DNA, 15 bp, Homo sapiens
cagaaaccctacagg

SEQ ID NO: 1770720 - DNA, 15 bp, Homo sapiens
agaaaccctacaggc

SEQ ID NO: 1770721 - DNA, 15 bp, Homo sapiens
gaaaccctacaggcc

SEQ ID NO: 1770722 - DNA, 15 bp, Homo sapiens
aaaccctacaggcca

SEQ ID NO: 1770723 - DNA, 15 bp, Homo sapiens
aaccctacaggccag

SEQ ID NO: 1770724 - DNA, 15 bp, Homo sapiens
accctacaggccaga

SEQ ID NO: 1770725 - DNA, 15 bp, Homo sapiens
ccctacaggccagaa

SEQ ID NO: 1770726 - DNA, 15 bp, Homo sapiens
cctacaggccagaaa

SEQ ID NO: 1770727 - DNA, 15 bp, Homo sapiens
ctacaggccagaaaa

SEQ ID NO: 1770728 - DNA, 15 bp, Homo sapiens
tacaggccagaaaag

SEQ ID NO: 1770729 - DNA, 15 bp, Homo sapiens
acaggccagaaaaga

SEQ ID NO: 1770730 - DNA, 15 bp, Homo sapiens
caggccagaaaagag

SEQ ID NO: 1770731 - DNA, 15 bp, Homo sapiens
aggccagaaaagagt

SEQ ID NO: 1770732 - DNA, 15 bp, Homo sapiens
ggccagaaaagagtg

SEQ ID NO: 1770733 - DNA, 15 bp, Homo sapiens
gccagaaaagagtgg

SEQ ID NO: 1770734 - DNA, 15 bp, Homo sapiens
ccagaaaagagtggg

SEQ ID NO: 1770735 - DNA, 15 bp, Homo sapiens
cagaaaagagtgggg

SEQ ID NO: 1770736 - DNA, 15 bp, Homo sapiens
agaaaagagtggggg

SEQ ID NO: 1770737 - DNA, 15 bp, Homo sapiens
gaaaagagtgggggc

SEQ ID NO: 1770738 - DNA, 15 bp, Homo sapiens
aaaagagtgggggcc

SEQ ID NO: 1770739 - DNA, 15 bp, Homo sapiens
aaagagtgggggcca

SEQ ID NO: 1770740 - DNA, 15 bp, Homo sapiens
aagagtgggggccaa

SEQ ID NO: 1770741 - DNA, 15 bp, Homo sapiens
agagtgggggccaat

SEQ ID NO: 1770742 - DNA, 15 bp, Homo sapiens
gagtgggggccaata

SEQ ID NO: 1770743 - DNA, 15 bp, Homo sapiens
agtgggggccaatat

SEQ ID NO: 1770744 - DNA, 15 bp, Homo sapiens
gtgggggccaatatt

SEQ ID NO: 1770745 - DNA, 15 bp, Homo sapiens
tgggggccaatattc

SEQ ID NO: 1770746 - DNA, 15 bp, Homo sapiens
gggggccaatattca

SEQ ID NO: 1770747 - DNA, 15 bp, Homo sapiens
ggggccaatattcaa

SEQ ID NO: 1770748 - DNA, 15 bp, Homo sapiens
gggccaatattcaac

SEQ ID NO: 1770749 - DNA, 15 bp, Homo sapiens
ggccaatattcaaca

SEQ ID NO: 1770750 - DNA, 15 bp, Homo sapiens
gccaatattcaacat

SEQ ID NO: 1770751 - DNA, 15 bp, Homo sapiens
ccaatattcaacatt

SEQ ID NO: 1770752 - DNA, 15 bp, Homo sapiens
caatattcaacattc

SEQ ID NO: 1770753 - DNA, 15 bp, Homo sapiens
aatattcaacattct

SEQ ID NO: 1770754 - DNA, 15 bp, Homo sapiens
atattcaacattctt

SEQ ID NO: 1770755 - DNA, 15 bp, Homo sapiens
tattcaacattctta

SEQ ID NO: 1770756 - DNA, 15 bp, Homo sapiens
attcaacattcttaa

SEQ ID NO: 1770757 - DNA, 15 bp, Homo sapiens
ttcaacattcttaaa

SEQ ID NO: 1770758 - DNA, 15 bp, Homo sapiens
tcaacattcttaaag

SEQ ID NO: 1770759 - DNA, 15 bp, Homo sapiens
caacattcttaaaga

SEQ ID NO: 1770760 - DNA, 15 bp, Homo sapiens
aacattcttaaagaa

SEQ ID NO: 1770761 - DNA, 15 bp, Homo sapiens
acattcttaaagaaa

SEQ ID NO: 1770762 - DNA, 15 bp, Homo sapiens
cattcttaaagaaag

SEQ ID NO: 1770763 - DNA, 15 bp, Homo sapiens
attcttaaagaaagg

SEQ ID NO: 1770764 - DNA, 15 bp, Homo sapiens
ttcttaaagaaagga

SEQ ID NO: 1770765 - DNA, 15 bp, Homo sapiens
tcttaaagaaaggaa

SEQ ID NO: 1770766 - DNA, 15 bp, Homo sapiens
cttaaagaaaggaat

SEQ ID NO: 1770767 - DNA, 15 bp, Homo sapiens
taaagaaaggaattt

SEQ ID NO: 1770768 - DNA, 15 bp, Homo sapiens
aaagaaaggaatttt

SEQ ID NO: 1770769 - DNA, 15 bp, Homo sapiens
aagaaaggaattttc

SEQ ID NO: 1770770 - DNA, 15 bp, Homo sapiens
agaaaggaattttca

SEQ ID NO: 1770771 - DNA, 15 bp, Homo sapiens
gaaaggaattttcaa

SEQ ID NO: 1770772 - DNA, 15 bp, Homo sapiens
aaaggaattttcaac

SEQ ID NO: 1770773 - DNA, 15 bp, Homo sapiens
aaggaattttcaacc

SEQ ID NO: 1770774 - DNA, 15 bp, Homo sapiens
aggaattttcaaccc

SEQ ID NO: 1770775 - DNA, 15 bp, Homo sapiens
ggaattttcaaccca

SEQ ID NO: 1770776 - DNA, 15 bp, Homo sapiens
gaattttcaacccag

SEQ ID NO: 1770777 - DNA, 15 bp, Homo sapiens
aattttcaacccaga

SEQ ID NO: 1770778 - DNA, 15 bp, Homo sapiens
attttcaacccagaa

SEQ ID NO: 1770779 - DNA, 15 bp, Homo sapiens
ttttcaacccagaat

SEQ ID NO: 1770780 - DNA, 15 bp, Homo sapiens
tttcaacccagaatt

SEQ ID NO: 1770781 - DNA, 15 bp, Homo sapiens
ttcaacccagaattt

SEQ ID NO: 1770782 - DNA, 15 bp, Homo sapiens
tcaacccagaatttt

SEQ ID NO: 1770783 - DNA, 15 bp, Homo sapiens
caacccagaattttg

SEQ ID NO: 1770784 - DNA, 15 bp, Homo sapiens
aacccagaattttgt

SEQ ID NO: 1770785 - DNA, 15 bp, Homo sapiens
cccagaattttgtat

SEQ ID NO: 1770786 - DNA, 15 bp, Homo sapiens
ccagaattttgtatc

SEQ ID NO: 1770787 - DNA, 15 bp, Homo sapiens
cagaattttgtatcc

SEQ ID NO: 1770788 - DNA, 15 bp, Homo sapiens
agaattttgtatcca

SEQ ID NO: 1770789 - DNA, 15 bp, Homo sapiens
gaattttgtatccag

SEQ ID NO: 1770790 - DNA, 15 bp, Homo sapiens
aattttgtatccagc

SEQ ID NO: 1770791 - DNA, 15 bp, Homo sapiens
attttgtatccagcc

SEQ ID NO: 1770792 - DNA, 15 bp, Homo sapiens
ttttgtatccagcca

SEQ ID NO: 1770793 - DNA, 15 bp, Homo sapiens
tttgtatccagccaa

SEQ ID NO: 1770794 - DNA, 15 bp, Homo sapiens
ttgtatccagccaaa

SEQ ID NO: 1770795 - DNA, 15 bp, Homo sapiens
tgtatccagccaaac

SEQ ID NO: 1770796 - DNA, 15 bp, Homo sapiens
gtatccagccaaact

SEQ ID NO: 1770797 - DNA, 15 bp, Homo sapiens
tatccagccaaacta

SEQ ID NO: 1770798 - DNA, 15 bp, Homo sapiens
atccagccaaactaa

SEQ ID NO: 1770799 - DNA, 15 bp, Homo sapiens
tccagccaaactaag

SEQ ID NO: 1770800 - DNA, 15 bp, Homo sapiens
ccagccaaactaagc

SEQ ID NO: 1770801 - DNA, 15 bp, Homo sapiens
cagccaaactaagct

SEQ ID NO: 1770802 - DNA, 15 bp, Homo sapiens
agccaaactaagctt

SEQ ID NO: 1770803 - DNA, 15 bp, Homo sapiens
gccaaactaagcttc

SEQ ID NO: 1770804 - DNA, 15 bp, Homo sapiens
ccaaactaagcttca

SEQ ID NO: 1770805 - DNA, 15 bp, Homo sapiens
caaactaagcttcat

SEQ ID NO: 1770806 - DNA, 15 bp, Homo sapiens
aaactaagcttcata

SEQ ID NO: 1770807 - DNA, 15 bp, Homo sapiens
aactaagcttcataa

SEQ ID NO: 1770808 - DNA, 15 bp, Homo sapiens
actaagcttcataag

SEQ ID NO: 1770809 - DNA, 15 bp, Homo sapiens
ctaagcttcataagt

SEQ ID NO: 1770810 - DNA, 15 bp, Homo sapiens
taagcttcataagtg

SEQ ID NO: 1770811 - DNA, 15 bp, Homo sapiens
aagcttcataagtga

SEQ ID NO: 1770812 - DNA, 15 bp, Homo sapiens
agcttcataagtgaa

SEQ ID NO: 1770813 - DNA, 15 bp, Homo sapiens
gcttcataagtgaat

SEQ ID NO: 1770814 - DNA, 15 bp, Homo sapiens
cttcataagtgaatg

SEQ ID NO: 1770815 - DNA, 15 bp, Homo sapiens
ttcataagtgaatga

SEQ ID NO: 1770816 - DNA, 15 bp, Homo sapiens
tcataagtgaatgag

SEQ ID NO: 1770817 - DNA, 15 bp, Homo sapiens
cataagtgaatgaga

SEQ ID NO: 1770818 - DNA, 15 bp, Homo sapiens
ataagtgaatgagaa

SEQ ID NO: 1770819 - DNA, 15 bp, Homo sapiens
taagtgaatgagaaa

SEQ ID NO: 1770820 - DNA, 15 bp, Homo sapiens
aagtgaatgagaaat

SEQ ID NO: 1770821 - DNA, 15 bp, Homo sapiens
agtgaatgagaaata

SEQ ID NO: 1770822 - DNA, 15 bp, Homo sapiens
gtgaatgagaaataa

SEQ ID NO: 1770823 - DNA, 15 bp, Homo sapiens
tgaatgagaaataaa

SEQ ID NO: 1770824 - DNA, 15 bp, Homo sapiens
gaatgagaaataaaa

SEQ ID NO: 1770825 - DNA, 15 bp, Homo sapiens
aatgagaaataaaat

SEQ ID NO: 1770826 - DNA, 15 bp, Homo sapiens
atgagaaataaaatc

SEQ ID NO: 1770827 - DNA, 15 bp, Homo sapiens
tgagaaataaaatcc

SEQ ID NO: 1770828 - DNA, 15 bp, Homo sapiens
gagaaataaaatcct

SEQ ID NO: 1770829 - DNA, 15 bp, Homo sapiens
agaaataaaatcctt

SEQ ID NO: 1770830 - DNA, 15 bp, Homo sapiens
gaaataaaatccttc

SEQ ID NO: 1770831 - DNA, 15 bp, Homo sapiens
aaataaaatccttca

SEQ ID NO: 1770832 - DNA, 15 bp, Homo sapiens
aataaaatccttcac

SEQ ID NO: 1770833 - DNA, 15 bp, Homo sapiens
ataaaatccttcaca

SEQ ID NO: 1770834 - DNA, 15 bp, Homo sapiens
taaaatccttcacag

SEQ ID NO: 1770835 - DNA, 15 bp, Homo sapiens
aaaatccttcacaga

SEQ ID NO: 1770836 - DNA, 15 bp, Homo sapiens
aaatccttcacagat

SEQ ID NO: 1770837 - DNA, 15 bp, Homo sapiens
aatccttcacagata

SEQ ID NO: 1770838 - DNA, 15 bp, Homo sapiens
atccttcacagataa

SEQ ID NO: 1770839 - DNA, 15 bp, Homo sapiens
tccttcacagataag

SEQ ID NO: 1770840 - DNA, 15 bp, Homo sapiens
ccttcacagataagc

SEQ ID NO: 1770841 - DNA, 15 bp, Homo sapiens
cttcacagataagca

SEQ ID NO: 1770842 - DNA, 15 bp, Homo sapiens
ttcacagataagcaa

SEQ ID NO: 1770843 - DNA, 15 bp, Homo sapiens
tcacagataagcaaa

SEQ ID NO: 1770844 - DNA, 15 bp, Homo sapiens
cacagataagcaaat

SEQ ID NO: 1770845 - DNA, 15 bp, Homo sapiens
acagataagcaaatg

SEQ ID NO: 1770846 - DNA, 15 bp, Homo sapiens
cagataagcaaatgt

SEQ ID NO: 1770847 - DNA, 15 bp, Homo sapiens
agataagcaaatgtt

SEQ ID NO: 1770848 - DNA, 15 bp, Homo sapiens
gataagcaaatgttg

SEQ ID NO: 1770849 - DNA, 15 bp, Homo sapiens
ataagcaaatgttga

SEQ ID NO: 1770850 - DNA, 15 bp, Homo sapiens
taagcaaatgttgag

SEQ ID NO: 1770851 - DNA, 15 bp, Homo sapiens
aagcaaatgttgaga

SEQ ID NO: 1770852 - DNA, 15 bp, Homo sapiens
agcaaatgttgagag

SEQ ID NO: 1770853 - DNA, 15 bp, Homo sapiens
gcaaatgttgagaga

SEQ ID NO: 1770854 - DNA, 15 bp, Homo sapiens
caaatgttgagagat

SEQ ID NO: 1770855 - DNA, 15 bp, Homo sapiens
aaatgttgagagatt

SEQ ID NO: 1770856 - DNA, 15 bp, Homo sapiens
aatgttgagagattt

SEQ ID NO: 1770857 - DNA, 15 bp, Homo sapiens
atgttgagagatttt

SEQ ID NO: 1770858 - DNA, 15 bp, Homo sapiens
tgttgagagattttg

SEQ ID NO: 1770859 - DNA, 15 bp, Homo sapiens
gttgagagattttgt

SEQ ID NO: 1770860 - DNA, 15 bp, Homo sapiens
ttgagagattttgtc

SEQ ID NO: 1770861 - DNA, 15 bp, Homo sapiens
tgagagattttgtca

SEQ ID NO: 1770862 - DNA, 15 bp, Homo sapiens
gagagattttgtcac

SEQ ID NO: 1770863 - DNA, 15 bp, Homo sapiens
agagattttgtcacc

SEQ ID NO: 1770864 - DNA, 15 bp, Homo sapiens
gagattttgtcacca

SEQ ID NO: 1770865 - DNA, 15 bp, Homo sapiens
agattttgtcaccac

SEQ ID NO: 1770866 - DNA, 15 bp, Homo sapiens
gattttgtcaccacc

SEQ ID NO: 1770867 - DNA, 15 bp, Homo sapiens
attttgtcaccacca

SEQ ID NO: 1770868 - DNA, 15 bp, Homo sapiens
ttttgtcaccaccag

SEQ ID NO: 1770869 - DNA, 15 bp, Homo sapiens
tttgtcaccaccagg

SEQ ID NO: 1770870 - DNA, 15 bp, Homo sapiens
ttgtcaccaccaggc

SEQ ID NO: 1770871 - DNA, 15 bp, Homo sapiens
tgtcaccaccaggcc

SEQ ID NO: 1770872 - DNA, 15 bp, Homo sapiens
gtcaccaccaggcct

SEQ ID NO: 1770873 - DNA, 15 bp, Homo sapiens
tcaccaccaggcctg

SEQ ID NO: 1770874 - DNA, 15 bp, Homo sapiens
caccaccaggcctgc

SEQ ID NO: 1770875 - DNA, 15 bp, Homo sapiens
accaccaggcctgca

SEQ ID NO: 1770876 - DNA, 15 bp, Homo sapiens
ccaccaggcctgcat

SEQ ID NO: 1770877 - DNA, 15 bp, Homo sapiens
caccaggcctgcatt

SEQ ID NO: 1770878 - DNA, 15 bp, Homo sapiens
accaggcctgcatta

SEQ ID NO: 1770879 - DNA, 15 bp, Homo sapiens
ccaggcctgcattac

SEQ ID NO: 1770880 - DNA, 15 bp, Homo sapiens
caggcctgcattaca

SEQ ID NO: 1770881 - DNA, 15 bp, Homo sapiens
aggcctgcattacaa

SEQ ID NO: 1770882 - DNA, 15 bp, Homo sapiens
ggcctgcattacaag

SEQ ID NO: 1770883 - DNA, 15 bp, Homo sapiens
gcctgcattacaaga

SEQ ID NO: 1770884 - DNA, 15 bp, Homo sapiens
cctgcattacaagag

SEQ ID NO: 1770885 - DNA, 15 bp, Homo sapiens
ctgcattacaagagc

SEQ ID NO: 1770886 - DNA, 15 bp, Homo sapiens
tgcattacaagagct

SEQ ID NO: 1770887 - DNA, 15 bp, Homo sapiens
gcattacaagagctc

SEQ ID NO: 1770888 - DNA, 15 bp, Homo sapiens
cattacaagagctcc

SEQ ID NO: 1770889 - DNA, 15 bp, Homo sapiens
attacaagagctcct

SEQ ID NO: 1770890 - DNA, 15 bp, Homo sapiens
ttacaagagctcctg

SEQ ID NO: 1770891 - DNA, 15 bp, Homo sapiens
tacaagagctcctga

SEQ ID NO: 1770892 - DNA, 15 bp, Homo sapiens
acaagagctcctgaa

SEQ ID NO: 1770893 - DNA, 15 bp, Homo sapiens
caagagctcctgaag

SEQ ID NO: 1770894 - DNA, 15 bp, Homo sapiens
aagagctcctgaagg

SEQ ID NO: 1770895 - DNA, 15 bp, Homo sapiens
agagctcctgaagga

SEQ ID NO: 1770896 - DNA, 15 bp, Homo sapiens
gagctcctgaaggaa

SEQ ID NO: 1770897 - DNA, 15 bp, Homo sapiens
agctcctgaaggaag

SEQ ID NO: 1770898 - DNA, 15 bp, Homo sapiens
gctcctgaaggaagc

SEQ ID NO: 1770899 - DNA, 15 bp, Homo sapiens
ctcctgaaggaagca

SEQ ID NO: 1770900 - DNA, 15 bp, Homo sapiens
tcctgaaggaagcac

SEQ ID NO: 1770901 - DNA, 15 bp, Homo sapiens
cctgaaggaagcact

SEQ ID NO: 1770902 - DNA, 15 bp, Homo sapiens
ctgaaggaagcacta

SEQ ID NO: 1770903 - DNA, 15 bp, Homo sapiens
tgaaggaagcactaa

SEQ ID NO: 1770904 - DNA, 15 bp, Homo sapiens
gaaggaagcactaaa

SEQ ID NO: 1770905 - DNA, 15 bp, Homo sapiens
aaggaagcactaaat

SEQ ID NO: 1770906 - DNA, 15 bp, Homo sapiens
aggaagcactaaata

SEQ ID NO: 1770907 - DNA, 15 bp, Homo sapiens
ggaagcactaaatat

SEQ ID NO: 1770908 - DNA, 15 bp, Homo sapiens
gaagcactaaatatg

SEQ ID NO: 1770909 - DNA, 15 bp, Homo sapiens
aagcactaaatatgg

SEQ ID NO: 1770910 - DNA, 15 bp, Homo sapiens
agcactaaatatgga

SEQ ID NO: 1770911 - DNA, 15 bp, Homo sapiens
gcactaaatatggaa

SEQ ID NO: 1770912 - DNA, 15 bp, Homo sapiens
cactaaatatggaaa

SEQ ID NO: 1770913 - DNA, 15 bp, Homo sapiens
actaaatatggaaag

SEQ ID NO: 1770914 - DNA, 15 bp, Homo sapiens
ctaaatatggaaagg

SEQ ID NO: 1770915 - DNA, 15 bp, Homo sapiens
taaatatggaaagga

SEQ ID NO: 1770916 - DNA, 15 bp, Homo sapiens
aaatatggaaaggaa

SEQ ID NO: 1770917 - DNA, 15 bp, Homo sapiens
aatatggaaaggaaa

SEQ ID NO: 1770918 - DNA, 15 bp, Homo sapiens
atatggaaaggaaaa

SEQ ID NO: 1770919 - DNA, 15 bp, Homo sapiens
tatggaaaggaaaaa

SEQ ID NO: 1770920 - DNA, 15 bp, Homo sapiens
atggaaaggaaaaat

SEQ ID NO: 1770921 - DNA, 15 bp, Homo sapiens
tggaaaggaaaaatt

SEQ ID NO: 1770922 - DNA, 15 bp, Homo sapiens
ggaaaggaaaaattg

SEQ ID NO: 1770923 - DNA, 15 bp, Homo sapiens
gaaaggaaaaattgg

SEQ ID NO: 1770924 - DNA, 15 bp, Homo sapiens
aaaggaaaaattggt

SEQ ID NO: 1770925 - DNA, 15 bp, Homo sapiens
aaggaaaaattggtc

SEQ ID NO: 1770926 - DNA, 15 bp, Homo sapiens
aggaaaaattggtcc

SEQ ID NO: 1770927 - DNA, 15 bp, Homo sapiens
ggaaaaattggtccc

SEQ ID NO: 1770928 - DNA, 15 bp, Homo sapiens
gaaaaattggtccca

SEQ ID NO: 1770929 - DNA, 15 bp, Homo sapiens
aaaaattggtcccag

SEQ ID NO: 1770930 - DNA, 15 bp, Homo sapiens
aaaattggtcccagc

SEQ ID NO: 1770931 - DNA, 15 bp, Homo sapiens
aaattggtcccagcc

SEQ ID NO: 1770932 - DNA, 15 bp, Homo sapiens
aattggtcccagcca

SEQ ID NO: 1770933 - DNA, 15 bp, Homo sapiens
attggtcccagccac

SEQ ID NO: 1770934 - DNA, 15 bp, Homo sapiens
ttggtcccagccact

SEQ ID NO: 1770935 - DNA, 15 bp, Homo sapiens
tggtcccagccactg

SEQ ID NO: 1770936 - DNA, 15 bp, Homo sapiens
ggtcccagccactgc

SEQ ID NO: 1770937 - DNA, 15 bp, Homo sapiens
gtcccagccactgca

SEQ ID NO: 1770938 - DNA, 15 bp, Homo sapiens
tcccagccactgcaa

SEQ ID NO: 1770939 - DNA, 15 bp, Homo sapiens
cccagccactgcaaa

SEQ ID NO: 1770940 - DNA, 15 bp, Homo sapiens
ccagccactgcaaaa

SEQ ID NO: 1770941 - DNA, 15 bp, Homo sapiens
cagccactgcaaaaa

SEQ ID NO: 1770942 - DNA, 15 bp, Homo sapiens
agccactgcaaaaac

SEQ ID NO: 1770943 - DNA, 15 bp, Homo sapiens
gccactgcaaaaaca

SEQ ID NO: 1770944 - DNA, 15 bp, Homo sapiens
ccactgcaaaaacat

SEQ ID NO: 1770945 - DNA, 15 bp, Homo sapiens
cactgcaaaaacata

SEQ ID NO: 1770946 - DNA, 15 bp, Homo sapiens
actgcaaaaacatac

SEQ ID NO: 1770947 - DNA, 15 bp, Homo sapiens
ctgcaaaaacatacc

SEQ ID NO: 1770948 - DNA, 15 bp, Homo sapiens
tgcaaaaacatacca

SEQ ID NO: 1770949 - DNA, 15 bp, Homo sapiens
gcaaaaacataccaa

SEQ ID NO: 1770950 - DNA, 15 bp, Homo sapiens
caaaaacataccaaa

SEQ ID NO: 1770951 - DNA, 15 bp, Homo sapiens
aaaaacataccaaat

SEQ ID NO: 1770952 - DNA, 15 bp, Homo sapiens
aaaacataccaaatt

SEQ ID NO: 1770953 - DNA, 15 bp, Homo sapiens
aaacataccaaattg

SEQ ID NO: 1770954 - DNA, 15 bp, Homo sapiens
aacataccaaattgt

SEQ ID NO: 1770955 - DNA, 15 bp, Homo sapiens
acataccaaattgta

SEQ ID NO: 1770956 - DNA, 15 bp, Homo sapiens
cataccaaattgtaa

SEQ ID NO: 1770957 - DNA, 15 bp, Homo sapiens
ataccaaattgtaaa

SEQ ID NO: 1770958 - DNA, 15 bp, Homo sapiens
taccaaattgtaaag

SEQ ID NO: 1770959 - DNA, 15 bp, Homo sapiens
accaaattgtaaaga

SEQ ID NO: 1770960 - DNA, 15 bp, Homo sapiens
ccaaattgtaaagac

SEQ ID NO: 1770961 - DNA, 15 bp, Homo sapiens
caaattgtaaagacc

SEQ ID NO: 1770962 - DNA, 15 bp, Homo sapiens
aaattgtaaagacca

SEQ ID NO: 1770963 - DNA, 15 bp, Homo sapiens
aattgtaaagaccat

SEQ ID NO: 1770964 - DNA, 15 bp, Homo sapiens
attgtaaagaccatt

SEQ ID NO: 1770965 - DNA, 15 bp, Homo sapiens
ttgtaaagaccattg

SEQ ID NO: 1770966 - DNA, 15 bp, Homo sapiens
tgtaaagaccattga

SEQ ID NO: 1770967 - DNA, 15 bp, Homo sapiens
gtaaagaccattgac

SEQ ID NO: 1770968 - DNA, 15 bp, Homo sapiens
taaagaccattgaca

SEQ ID NO: 1770969 - DNA, 15 bp, Homo sapiens
aaagaccattgacac

SEQ ID NO: 1770970 - DNA, 15 bp, Homo sapiens
aagaccattgacact

SEQ ID NO: 1770971 - DNA, 15 bp, Homo sapiens
agaccattgacacta

SEQ ID NO: 1770972 - DNA, 15 bp, Homo sapiens
gaccattgacactat

SEQ ID NO: 1770973 - DNA, 15 bp, Homo sapiens
accattgacactatg

SEQ ID NO: 1770974 - DNA, 15 bp, Homo sapiens
ccattgacactatga

SEQ ID NO: 1770975 - DNA, 15 bp, Homo sapiens
cattgacactatgaa

SEQ ID NO: 1770976 - DNA, 15 bp, Homo sapiens
attgacactatgaag

SEQ ID NO: 1770977 - DNA, 15 bp, Homo sapiens
ttgacactatgaaga

SEQ ID NO: 1770978 - DNA, 15 bp, Homo sapiens
tgacactatgaagaa

SEQ ID NO: 1770979 - DNA, 15 bp, Homo sapiens
gacactatgaagaaa

SEQ ID NO: 1770980 - DNA, 15 bp, Homo sapiens
acactatgaagaaac

SEQ ID NO: 1770981 - DNA, 15 bp, Homo sapiens
cactatgaagaaact

SEQ ID NO: 1770982 - DNA, 15 bp, Homo sapiens
actatgaagaaacta

SEQ ID NO: 1770983 - DNA, 15 bp, Homo sapiens
ctatgaagaaactaa

SEQ ID NO: 1770984 - DNA, 15 bp, Homo sapiens
tatgaagaaactaat

SEQ ID NO: 1770985 - DNA, 15 bp, Homo sapiens
atgaagaaactaatg

SEQ ID NO: 1770986 - DNA, 15 bp, Homo sapiens
tgaagaaactaatgg

SEQ ID NO: 1770987 - DNA, 15 bp, Homo sapiens
gaagaaactaatggg

SEQ ID NO: 1770988 - DNA, 15 bp, Homo sapiens
aagaaactaatgggc

SEQ ID NO: 1770989 - DNA, 15 bp, Homo sapiens
agaaactaatgggca

SEQ ID NO: 1770990 - DNA, 15 bp, Homo sapiens
gaaactaatgggcat

SEQ ID NO: 1770991 - DNA, 15 bp, Homo sapiens
aaactaatgggcatc

SEQ ID NO: 1770992 - DNA, 15 bp, Homo sapiens
aactaatgggcatca

SEQ ID NO: 1770993 - DNA, 15 bp, Homo sapiens
actaatgggcatcaa

SEQ ID NO: 1770994 - DNA, 15 bp, Homo sapiens
ctaatgggcatcaac

SEQ ID NO: 1770995 - DNA, 15 bp, Homo sapiens
taatgggcatcaact

SEQ ID NO: 1770996 - DNA, 15 bp, Homo sapiens
aatgggcatcaacta

SEQ ID NO: 1770997 - DNA, 15 bp, Homo sapiens
atgggcatcaactaa

SEQ ID NO: 1770998 - DNA, 15 bp, Homo sapiens
tgggcatcaactaat

SEQ ID NO: 1770999 - DNA, 15 bp, Homo sapiens
gggcatcaactaatg

SEQ ID NO: 1771000 - DNA, 15 bp, Homo sapiens
ggcatcaactaatgg

SEQ ID NO: 1771001 - DNA, 15 bp, Homo sapiens
gcatcaactaatggg

SEQ ID NO: 1771002 - DNA, 15 bp, Homo sapiens
catcaactaatgggc

SEQ ID NO: 1771003 - DNA, 15 bp, Homo sapiens
atcaactaatgggca

SEQ ID NO: 1771004 - DNA, 15 bp, Homo sapiens
tcaactaatgggcaa

SEQ ID NO: 1771005 - DNA, 15 bp, Homo sapiens
caactaatgggcaaa

SEQ ID NO: 1771006 - DNA, 15 bp, Homo sapiens
aactaatgggcaaac

SEQ ID NO: 1771007 - DNA, 15 bp, Homo sapiens
actaatgggcaaact

SEQ ID NO: 1771008 - DNA, 15 bp, Homo sapiens
ctaatgggcaaacta

SEQ ID NO: 1771009 - DNA, 15 bp, Homo sapiens
taatgggcaaactaa

SEQ ID NO: 1771010 - DNA, 15 bp, Homo sapiens
aatgggcaaactaac

SEQ ID NO: 1771011 - DNA, 15 bp, Homo sapiens
atgggcaaactaact

SEQ ID NO: 1771012 - DNA, 15 bp, Homo sapiens
tgggcaaactaactg

SEQ ID NO: 1771013 - DNA, 15 bp, Homo sapiens
gggcaaactaactgg

SEQ ID NO: 1771014 - DNA, 15 bp, Homo sapiens
ggcaaactaactggc

SEQ ID NO: 1771015 - DNA, 15 bp, Homo sapiens
gcaaactaactggct

SEQ ID NO: 1771016 - DNA, 15 bp, Homo sapiens
caaactaactggcta

SEQ ID NO: 1771017 - DNA, 15 bp, Homo sapiens
aaactaactggctag

SEQ ID NO: 1771018 - DNA, 15 bp, Homo sapiens
aactaactggctagc

SEQ ID NO: 1771019 - DNA, 15 bp, Homo sapiens
actaactggctagca

SEQ ID NO: 1771020 - DNA, 15 bp, Homo sapiens
ctaactggctagcat

SEQ ID NO: 1771021 - DNA, 15 bp, Homo sapiens
taactggctagcatc

SEQ ID NO: 1771022 - DNA, 15 bp, Homo sapiens
aactggctagcatca

SEQ ID NO: 1771023 - DNA, 15 bp, Homo sapiens
actggctagcatcat

SEQ ID NO: 1771024 - DNA, 15 bp, Homo sapiens
ctggctagcatcata

SEQ ID NO: 1771025 - DNA, 15 bp, Homo sapiens
tggctagcatcataa

SEQ ID NO: 1771026 - DNA, 15 bp, Homo sapiens
ggctagcatcataat

SEQ ID NO: 1771027 - DNA, 15 bp, Homo sapiens
gctagcatcataatg

SEQ ID NO: 1771028 - DNA, 15 bp, Homo sapiens
ctagcatcataatga

SEQ ID NO: 1771029 - DNA, 15 bp, Homo sapiens
tagcatcataatgac

SEQ ID NO: 1771030 - DNA, 15 bp, Homo sapiens
agcatcataatgaca

SEQ ID NO: 1771031 - DNA, 15 bp, Homo sapiens
gcatcataatgacag

SEQ ID NO: 1771032 - DNA, 15 bp, Homo sapiens
catcataatgacagg

SEQ ID NO: 1771033 - DNA, 15 bp, Homo sapiens
atcataatgacagga

SEQ ID NO: 1771034 - DNA, 15 bp, Homo sapiens
tcataatgacaggat

SEQ ID NO: 1771035 - DNA, 15 bp, Homo sapiens
cataatgacaggatc

SEQ ID NO: 1771036 - DNA, 15 bp, Homo sapiens
ataatgacaggatca

SEQ ID NO: 1771037 - DNA, 15 bp, Homo sapiens
taatgacaggatcag

SEQ ID NO: 1771038 - DNA, 15 bp, Homo sapiens
aatgacaggatcaga

SEQ ID NO: 1771039 - DNA, 15 bp, Homo sapiens
atgacaggatcagat

SEQ ID NO: 1771040 - DNA, 15 bp, Homo sapiens
tgacaggatcagatt

SEQ ID NO: 1771041 - DNA, 15 bp, Homo sapiens
gacaggatcagattc

SEQ ID NO: 1771042 - DNA, 15 bp, Homo sapiens
acaggatcagattca

SEQ ID NO: 1771043 - DNA, 15 bp, Homo sapiens
caggatcagattcac

SEQ ID NO: 1771044 - DNA, 15 bp, Homo sapiens
aggatcagattcaca

SEQ ID NO: 1771045 - DNA, 15 bp, Homo sapiens
ggatcagattcacat

SEQ ID NO: 1771046 - DNA, 15 bp, Homo sapiens
gatcagattcacata

SEQ ID NO: 1771047 - DNA, 15 bp, Homo sapiens
atcagattcacatat

SEQ ID NO: 1771048 - DNA, 15 bp, Homo sapiens
tcagattcacatata

SEQ ID NO: 1771049 - DNA, 15 bp, Homo sapiens
cagattcacatataa

SEQ ID NO: 1771050 - DNA, 15 bp, Homo sapiens
agattcacatataac

SEQ ID NO: 1771051 - DNA, 15 bp, Homo sapiens
gattcacatataaca

SEQ ID NO: 1771052 - DNA, 15 bp, Homo sapiens
attcacatataacaa

SEQ ID NO: 1771053 - DNA, 15 bp, Homo sapiens
ttcacatataacaat

SEQ ID NO: 1771054 - DNA, 15 bp, Homo sapiens
tcacatataacaata

SEQ ID NO: 1771055 - DNA, 15 bp, Homo sapiens
cacatataacaatat

SEQ ID NO: 1771056 - DNA, 15 bp, Homo sapiens
acatataacaatatt

SEQ ID NO: 1771057 - DNA, 15 bp, Homo sapiens
catataacaatatta

SEQ ID NO: 1771058 - DNA, 15 bp, Homo sapiens
atataacaatattaa

SEQ ID NO: 1771059 - DNA, 15 bp, Homo sapiens
tataacaatattaac

SEQ ID NO: 1771060 - DNA, 15 bp, Homo sapiens
ataacaatattaacc

SEQ ID NO: 1771061 - DNA, 15 bp, Homo sapiens
taacaatattaacct

SEQ ID NO: 1771062 - DNA, 15 bp, Homo sapiens
aacaatattaacctt

SEQ ID NO: 1771063 - DNA, 15 bp, Homo sapiens
acaatattaacctta

SEQ ID NO: 1771064 - DNA, 15 bp, Homo sapiens
caatattaaccttaa

SEQ ID NO: 1771065 - DNA, 15 bp, Homo sapiens
aatattaaccttaaa

SEQ ID NO: 1771066 - DNA, 15 bp, Homo sapiens
atattaaccttaaaa

SEQ ID NO: 1771067 - DNA, 15 bp, Homo sapiens
tattaaccttaaaag

SEQ ID NO: 1771068 - DNA, 15 bp, Homo sapiens
attaaccttaaaagt

SEQ ID NO: 1771069 - DNA, 15 bp, Homo sapiens
ttaaccttaaaagta

SEQ ID NO: 1771070 - DNA, 15 bp, Homo sapiens
taaccttaaaagtaa

SEQ ID NO: 1771071 - DNA, 15 bp, Homo sapiens
aaccttaaaagtaaa

SEQ ID NO: 1771072 - DNA, 15 bp, Homo sapiens
accttaaaagtaaac

SEQ ID NO: 1771073 - DNA, 15 bp, Homo sapiens
ccttaaaagtaaacg

SEQ ID NO: 1771074 - DNA, 15 bp, Homo sapiens
cttaaaagtaaacgg

SEQ ID NO: 1771075 - DNA, 15 bp, Homo sapiens
ttaaaagtaaacggg

SEQ ID NO: 1771076 - DNA, 15 bp, Homo sapiens
taaaagtaaacgggc

SEQ ID NO: 1771077 - DNA, 15 bp, Homo sapiens
aaaagtaaacgggct

SEQ ID NO: 1771078 - DNA, 15 bp, Homo sapiens
aaagtaaacgggcta

SEQ ID NO: 1771079 - DNA, 15 bp, Homo sapiens
aagtaaacgggctaa

SEQ ID NO: 1771080 - DNA, 15 bp, Homo sapiens
agtaaacgggctaag

SEQ ID NO: 1771081 - DNA, 15 bp, Homo sapiens
gtaaacgggctaagt

SEQ ID NO: 1771082 - DNA, 15 bp, Homo sapiens
taaacgggctaagtg

SEQ ID NO: 1771083 - DNA, 15 bp, Homo sapiens
aaacgggctaagtgc

SEQ ID NO: 1771084 - DNA, 15 bp, Homo sapiens
aacgggctaagtgcc

SEQ ID NO: 1771085 - DNA, 15 bp, Homo sapiens
acgggctaagtgcca

SEQ ID NO: 1771086 - DNA, 15 bp, Homo sapiens
cgggctaagtgccac

SEQ ID NO: 1771087 - DNA, 15 bp, Homo sapiens
gggctaagtgccaca

SEQ ID NO: 1771088 - DNA, 15 bp, Homo sapiens
ggctaagtgccacaa

SEQ ID NO: 1771089 - DNA, 15 bp, Homo sapiens
gctaagtgccacaat

SEQ ID NO: 1771090 - DNA, 15 bp, Homo sapiens
ctaagtgccacaatt

SEQ ID NO: 1771091 - DNA, 15 bp, Homo sapiens
taagtgccacaatta

SEQ ID NO: 1771092 - DNA, 15 bp, Homo sapiens
aagtgccacaattaa

SEQ ID NO: 1771093 - DNA, 15 bp, Homo sapiens
agtgccacaattaaa

SEQ ID NO: 1771094 - DNA, 15 bp, Homo sapiens
gtgccacaattaaaa

SEQ ID NO: 1771095 - DNA, 15 bp, Homo sapiens
tgccacaattaaaag

SEQ ID NO: 1771096 - DNA, 15 bp, Homo sapiens
gccacaattaaaaga

SEQ ID NO: 1771097 - DNA, 15 bp, Homo sapiens
ccacaattaaaagac

SEQ ID NO: 1771098 - DNA, 15 bp, Homo sapiens
cacaattaaaagaca

SEQ ID NO: 1771099 - DNA, 15 bp, Homo sapiens
acaattaaaagacac

SEQ ID NO: 1771100 - DNA, 15 bp, Homo sapiens
caattaaaagacaca

SEQ ID NO: 1771101 - DNA, 15 bp, Homo sapiens
gacacagactggcaa

SEQ ID NO: 1771102 - DNA, 15 bp, Homo sapiens
acacagactggcaag

SEQ ID NO: 1771103 - DNA, 15 bp, Homo sapiens
cacagactggcaagt

SEQ ID NO: 1771104 - DNA, 15 bp, Homo sapiens
acagactggcaagtt

SEQ ID NO: 1771105 - DNA, 15 bp, Homo sapiens
cagactggcaagttg

SEQ ID NO: 1771106 - DNA, 15 bp, Homo sapiens
agactggcaagttgg

SEQ ID NO: 1771107 - DNA, 15 bp, Homo sapiens
gactggcaagttgga

SEQ ID NO: 1771108 - DNA, 15 bp, Homo sapiens
actggcaagttggat

SEQ ID NO: 1771109 - DNA, 15 bp, Homo sapiens
ctggcaagttggata

SEQ ID NO: 1771110 - DNA, 15 bp, Homo sapiens
tggcaagttggataa

SEQ ID NO: 1771111 - DNA, 15 bp, Homo sapiens
ggcaagttggataaa

SEQ ID NO: 1771112 - DNA, 15 bp, Homo sapiens
gcaagttggataaag

SEQ ID NO: 1771113 - DNA, 15 bp, Homo sapiens
caagttggataaaga

SEQ ID NO: 1771114 - DNA, 15 bp, Homo sapiens
aagttggataaagag

SEQ ID NO: 1771115 - DNA, 15 bp, Homo sapiens
agttggataaagagt

SEQ ID NO: 1771116 - DNA, 15 bp, Homo sapiens
gttggataaagagtc

SEQ ID NO: 1771117 - DNA, 15 bp, Homo sapiens
ttggataaagagtca

SEQ ID NO: 1771118 - DNA, 15 bp, Homo sapiens
tggataaagagtcaa

SEQ ID NO: 1771119 - DNA, 15 bp, Homo sapiens
ggataaagagtcaag

SEQ ID NO: 1771120 - DNA, 15 bp, Homo sapiens
gataaagagtcaaga

SEQ ID NO: 1771121 - DNA, 15 bp, Homo sapiens
ataaagagtcaagac

SEQ ID NO: 1771122 - DNA, 15 bp, Homo sapiens
taaagagtcaagacc

SEQ ID NO: 1771123 - DNA, 15 bp, Homo sapiens
aaagagtcaagaccc

SEQ ID NO: 1771124 - DNA, 15 bp, Homo sapiens
aagagtcaagaccca

SEQ ID NO: 1771125 - DNA, 15 bp, Homo sapiens
agagtcaagacccat

SEQ ID NO: 1771126 - DNA, 15 bp, Homo sapiens
gagtcaagacccatc

SEQ ID NO: 1771127 - DNA, 15 bp, Homo sapiens
agtcaagacccatca

SEQ ID NO: 1771128 - DNA, 15 bp, Homo sapiens
gtcaagacccatcag

SEQ ID NO: 1771129 - DNA, 15 bp, Homo sapiens
tcaagacccatcagt

SEQ ID NO: 1771130 - DNA, 15 bp, Homo sapiens
caagacccatcagtg

SEQ ID NO: 1771131 - DNA, 15 bp, Homo sapiens
aagacccatcagtgt

SEQ ID NO: 1771132 - DNA, 15 bp, Homo sapiens
agacccatcagtgtg

SEQ ID NO: 1771133 - DNA, 15 bp, Homo sapiens
gacccatcagtgtgc

SEQ ID NO: 1771134 - DNA, 15 bp, Homo sapiens
acccatcagtgtgct

SEQ ID NO: 1771135 - DNA, 15 bp, Homo sapiens
cccatcagtgtgctg

SEQ ID NO: 1771136 - DNA, 15 bp, Homo sapiens
ccatcagtgtgctgt

SEQ ID NO: 1771137 - DNA, 15 bp, Homo sapiens
catcagtgtgctgta

SEQ ID NO: 1771138 - DNA, 15 bp, Homo sapiens
atcagtgtgctgtat

SEQ ID NO: 1771139 - DNA, 15 bp, Homo sapiens
tcagtgtgctgtatt

SEQ ID NO: 1771140 - DNA, 15 bp, Homo sapiens
cagtgtgctgtattc

SEQ ID NO: 1771141 - DNA, 15 bp, Homo sapiens
agtgtgctgtattca

SEQ ID NO: 1771142 - DNA, 15 bp, Homo sapiens
gtgtgctgtattcag

SEQ ID NO: 1771143 - DNA, 15 bp, Homo sapiens
tgtgctgtattcagg

SEQ ID NO: 1771144 - DNA, 15 bp, Homo sapiens
gtgctgtattcagga

SEQ ID NO: 1771145 - DNA, 15 bp, Homo sapiens
tgctgtattcaggag

SEQ ID NO: 1771146 - DNA, 15 bp, Homo sapiens
gctgtattcaggaga

SEQ ID NO: 1771147 - DNA, 15 bp, Homo sapiens
ctgtattcaggagac

SEQ ID NO: 1771148 - DNA, 15 bp, Homo sapiens
tgtattcaggagact

SEQ ID NO: 1771149 - DNA, 15 bp, Homo sapiens
gtattcaggagactc

SEQ ID NO: 1771150 - DNA, 15 bp, Homo sapiens
tattcaggagactca

SEQ ID NO: 1771151 - DNA, 15 bp, Homo sapiens
attcaggagactcat

SEQ ID NO: 1771152 - DNA, 15 bp, Homo sapiens
ttcaggagactcatc

SEQ ID NO: 1771153 - DNA, 15 bp, Homo sapiens
tcaggagactcatct

SEQ ID NO: 1771154 - DNA, 15 bp, Homo sapiens
caggagactcatctc

SEQ ID NO: 1771155 - DNA, 15 bp, Homo sapiens
aggagactcatctca

SEQ ID NO: 1771156 - DNA, 15 bp, Homo sapiens
ggagactcatctcac

SEQ ID NO: 1771157 - DNA, 15 bp, Homo sapiens
gagactcatctcaca

SEQ ID NO: 1771158 - DNA, 15 bp, Homo sapiens
agactcatctcacat

SEQ ID NO: 1771159 - DNA, 15 bp, Homo sapiens
gactcatctcacatg

SEQ ID NO: 1771160 - DNA, 15 bp, Homo sapiens
actcatctcacatgc

SEQ ID NO: 1771161 - DNA, 15 bp, Homo sapiens
ctcatctcacatgca

SEQ ID NO: 1771162 - DNA, 15 bp, Homo sapiens
tcatctcacatgcaa

SEQ ID NO: 1771163 - DNA, 15 bp, Homo sapiens
catctcacatgcaaa

SEQ ID NO: 1771164 - DNA, 15 bp, Homo sapiens
atctcacatgcaaag

SEQ ID NO: 1771165 - DNA, 15 bp, Homo sapiens
tctcacatgcaaaga

SEQ ID NO: 1771166 - DNA, 15 bp, Homo sapiens
ctcacatgcaaagac

SEQ ID NO: 1771167 - DNA, 15 bp, Homo sapiens
tcacatgcaaagaca

SEQ ID NO: 1771168 - DNA, 15 bp, Homo sapiens
cacatgcaaagacac

SEQ ID NO: 1771169 - DNA, 15 bp, Homo sapiens
acatgcaaagacacg

SEQ ID NO: 1771170 - DNA, 15 bp, Homo sapiens
catgcaaagacacgt

SEQ ID NO: 1771171 - DNA, 15 bp, Homo sapiens
atgcaaagacacgtg

SEQ ID NO: 1771172 - DNA, 15 bp, Homo sapiens
tgcaaagacacgtgc

SEQ ID NO: 1771173 - DNA, 15 bp, Homo sapiens
gcaaagacacgtgct

SEQ ID NO: 1771174 - DNA, 15 bp, Homo sapiens
caaagacacgtgctc

SEQ ID NO: 1771175 - DNA, 15 bp, Homo sapiens
aaagacacgtgctct

SEQ ID NO: 1771176 - DNA, 15 bp, Homo sapiens
aagacacgtgctcta

SEQ ID NO: 1771177 - DNA, 15 bp, Homo sapiens
agacacgtgctctaa

SEQ ID NO: 1771178 - DNA, 15 bp, Homo sapiens
gacacgtgctctaaa

SEQ ID NO: 1771179 - DNA, 15 bp, Homo sapiens
acacgtgctctaaat

SEQ ID NO: 1771180 - DNA, 15 bp, Homo sapiens
cacgtgctctaaata

SEQ ID NO: 1771181 - DNA, 15 bp, Homo sapiens
acgtgctctaaataa

SEQ ID NO: 1771182 - DNA, 15 bp, Homo sapiens
cgtgctctaaataag

SEQ ID NO: 1771183 - DNA, 15 bp, Homo sapiens
gtgctctaaataagg

SEQ ID NO: 1771184 - DNA, 15 bp, Homo sapiens
tgctctaaataaggg

SEQ ID NO: 1771185 - DNA, 15 bp, Homo sapiens
gctctaaataaggga

SEQ ID NO: 1771186 - DNA, 15 bp, Homo sapiens
ctctaaataagggaa

SEQ ID NO: 1771187 - DNA, 15 bp, Homo sapiens
tctaaataagggaat

SEQ ID NO: 1771188 - DNA, 15 bp, Homo sapiens
ctaaataagggaatg

SEQ ID NO: 1771189 - DNA, 15 bp, Homo sapiens
taaataagggaatgg

SEQ ID NO: 1771190 - DNA, 15 bp, Homo sapiens
aaataagggaatgga

SEQ ID NO: 1771191 - DNA, 15 bp, Homo sapiens
aataagggaatggag

SEQ ID NO: 1771192 - DNA, 15 bp, Homo sapiens
ataagggaatggagg

SEQ ID NO: 1771193 - DNA, 15 bp, Homo sapiens
taagggaatggagga

SEQ ID NO: 1771194 - DNA, 15 bp, Homo sapiens
aagggaatggaggaa

SEQ ID NO: 1771195 - DNA, 15 bp, Homo sapiens
agggaatggaggaag

SEQ ID NO: 1771196 - DNA, 15 bp, Homo sapiens
gggaatggaggaaga

SEQ ID NO: 1771197 - DNA, 15 bp, Homo sapiens
ggaatggaggaagat

SEQ ID NO: 1771198 - DNA, 15 bp, Homo sapiens
gaatggaggaagatt

SEQ ID NO: 1771199 - DNA, 15 bp, Homo sapiens
aatggaggaagattt

SEQ ID NO: 1771200 - DNA, 15 bp, Homo sapiens
atggaggaagattta

SEQ ID NO: 1771201 - DNA, 15 bp, Homo sapiens
tggaggaagatttac

SEQ ID NO: 1771202 - DNA, 15 bp, Homo sapiens
ggaggaagatttacc

SEQ ID NO: 1771203 - DNA, 15 bp, Homo sapiens
gaggaagatttacca

SEQ ID NO: 1771204 - DNA, 15 bp, Homo sapiens
aggaagatttaccaa

SEQ ID NO: 1771205 - DNA, 15 bp, Homo sapiens
ggaagatttaccaag

SEQ ID NO: 1771206 - DNA, 15 bp, Homo sapiens
gaagatttaccaagc

SEQ ID NO: 1771207 - DNA, 15 bp, Homo sapiens
aagatttaccaagca

SEQ ID NO: 1771208 - DNA, 15 bp, Homo sapiens
agatttaccaagcaa

SEQ ID NO: 1771209 - DNA, 15 bp, Homo sapiens
gatttaccaagcaaa

SEQ ID NO: 1771210 - DNA, 15 bp, Homo sapiens
atttaccaagcaaat

SEQ ID NO: 1771211 - DNA, 15 bp, Homo sapiens
tttaccaagcaaatg

SEQ ID NO: 1771212 - DNA, 15 bp, Homo sapiens
ttaccaagcaaatgg

SEQ ID NO: 1771213 - DNA, 15 bp, Homo sapiens
taccaagcaaatgga

SEQ ID NO: 1771214 - DNA, 15 bp, Homo sapiens
accaagcaaatggaa

SEQ ID NO: 1771215 - DNA, 15 bp, Homo sapiens
ccaagcaaatggaaa

SEQ ID NO: 1771216 - DNA, 15 bp, Homo sapiens
caagcaaatggaaag

SEQ ID NO: 1771217 - DNA, 15 bp, Homo sapiens
aagcaaatggaaagc

SEQ ID NO: 1771218 - DNA, 15 bp, Homo sapiens
agcaaatggaaagca

SEQ ID NO: 1771219 - DNA, 15 bp, Homo sapiens
gcaaatggaaagcaa

SEQ ID NO: 1771220 - DNA, 15 bp, Homo sapiens
caaatggaaagcaaa

SEQ ID NO: 1771221 - DNA, 15 bp, Homo sapiens
aaatggaaagcaaaa

SEQ ID NO: 1771222 - DNA, 15 bp, Homo sapiens
aatggaaagcaaaaa

SEQ ID NO: 1771223 - DNA, 15 bp, Homo sapiens
atggaaagcaaaaaa

SEQ ID NO: 1771224 - DNA, 15 bp, Homo sapiens
tggaaagcaaaaaaa

SEQ ID NO: 1771225 - DNA, 15 bp, Homo sapiens
ggaaagcaaaaaaaa

SEQ ID NO: 1771226 - DNA, 15 bp, Homo sapiens
gaaagcaaaaaaaaa

SEQ ID NO: 1771227 - DNA, 15 bp, Homo sapiens
aaagcaaaaaaaaaa

SEQ ID NO: 1771228 - DNA, 15 bp, Homo sapiens
aagcaaaaaaaaaaa

SEQ ID NO: 1771229 - DNA, 15 bp, Homo sapiens
agcaaaaaaaaaaaa

SEQ ID NO: 1771230 - DNA, 15 bp, Homo sapiens
aaaaaaaaaagcagg

SEQ ID NO: 1771231 - DNA, 15 bp, Homo sapiens
aaaaaaaaagcaggg

SEQ ID NO: 1771232 - DNA, 15 bp, Homo sapiens
aaaaaaaagcagggg

SEQ ID NO: 1771233 - DNA, 15 bp, Homo sapiens
aaaaaaagcaggggt

SEQ ID NO: 1771234 - DNA, 15 bp, Homo sapiens
aaaaaagcaggggtt

SEQ ID NO: 1771235 - DNA, 15 bp, Homo sapiens
aaaaagcaggggttg

SEQ ID NO: 1771236 - DNA, 15 bp, Homo sapiens
aaaagcaggggttgc

SEQ ID NO: 1771237 - DNA, 15 bp, Homo sapiens
aaagcaggggttgca

SEQ ID NO: 1771238 - DNA, 15 bp, Homo sapiens
aagcaggggttgcaa

SEQ ID NO: 1771239 - DNA, 15 bp, Homo sapiens
agcaggggttgcaat

SEQ ID NO: 1771240 - DNA, 15 bp, Homo sapiens
gcaggggttgcaatc

SEQ ID NO: 1771241 - DNA, 15 bp, Homo sapiens
caggggttgcaatcc

SEQ ID NO: 1771242 - DNA, 15 bp, Homo sapiens
aggggttgcaatcct

SEQ ID NO: 1771243 - DNA, 15 bp, Homo sapiens
ggggttgcaatccta

SEQ ID NO: 1771244 - DNA, 15 bp, Homo sapiens
gggttgcaatcctag

SEQ ID NO: 1771245 - DNA, 15 bp, Homo sapiens
ggttgcaatcctagt

SEQ ID NO: 1771246 - DNA, 15 bp, Homo sapiens
gttgcaatcctagtc

SEQ ID NO: 1771247 - DNA, 15 bp, Homo sapiens
ttgcaatcctagtct

SEQ ID NO: 1771248 - DNA, 15 bp, Homo sapiens
tgcaatcctagtctc

SEQ ID NO: 1771249 - DNA, 15 bp, Homo sapiens
gcaatcctagtctct

SEQ ID NO: 1771250 - DNA, 15 bp, Homo sapiens
caatcctagtctctg

SEQ ID NO: 1771251 - DNA, 15 bp, Homo sapiens
aatcctagtctctga

SEQ ID NO: 1771252 - DNA, 15 bp, Homo sapiens
atcctagtctctgat

SEQ ID NO: 1771253 - DNA, 15 bp, Homo sapiens
tcctagtctctgata

SEQ ID NO: 1771254 - DNA, 15 bp, Homo sapiens
cctagtctctgataa

SEQ ID NO: 1771255 - DNA, 15 bp, Homo sapiens
ctagtctctgataaa

SEQ ID NO: 1771256 - DNA, 15 bp, Homo sapiens
tagtctctgataaaa

SEQ ID NO: 1771257 - DNA, 15 bp, Homo sapiens
agtctctgataaaac

SEQ ID NO: 1771258 - DNA, 15 bp, Homo sapiens
gtctctgataaaaca

SEQ ID NO: 1771259 - DNA, 15 bp, Homo sapiens
tctctgataaaacag

SEQ ID NO: 1771260 - DNA, 15 bp, Homo sapiens
ctctgataaaacaga

SEQ ID NO: 1771261 - DNA, 15 bp, Homo sapiens
tctgataaaacagac

SEQ ID NO: 1771262 - DNA, 15 bp, Homo sapiens
ctgataaaacagact

SEQ ID NO: 1771263 - DNA, 15 bp, Homo sapiens
tgataaaacagactt

SEQ ID NO: 1771264 - DNA, 15 bp, Homo sapiens
gataaaacagacttt

SEQ ID NO: 1771265 - DNA, 15 bp, Homo sapiens
ataaaacagacttta

SEQ ID NO: 1771266 - DNA, 15 bp, Homo sapiens
taaaacagactttaa

SEQ ID NO: 1771267 - DNA, 15 bp, Homo sapiens
aaaacagactttaaa

SEQ ID NO: 1771268 - DNA, 15 bp, Homo sapiens
aaacagactttaaac

SEQ ID NO: 1771269 - DNA, 15 bp, Homo sapiens
aacagactttaaacc

SEQ ID NO: 1771270 - DNA, 15 bp, Homo sapiens
acagactttaaacca

SEQ ID NO: 1771271 - DNA, 15 bp, Homo sapiens
cagactttaaaccaa

SEQ ID NO: 1771272 - DNA, 15 bp, Homo sapiens
agactttaaaccaac

SEQ ID NO: 1771273 - DNA, 15 bp, Homo sapiens
gactttaaaccaacg

SEQ ID NO: 1771274 - DNA, 15 bp, Homo sapiens
actttaaaccaacga

SEQ ID NO: 1771275 - DNA, 15 bp, Homo sapiens
ctttaaaccaacgaa

SEQ ID NO: 1771276 - DNA, 15 bp, Homo sapiens
tttaaaccaacgaag

SEQ ID NO: 1771277 - DNA, 15 bp, Homo sapiens
ttaaaccaacgaaga

SEQ ID NO: 1771278 - DNA, 15 bp, Homo sapiens
taaaccaacgaagat

SEQ ID NO: 1771279 - DNA, 15 bp, Homo sapiens
aaaccaacgaagatc

SEQ ID NO: 1771280 - DNA, 15 bp, Homo sapiens
aaccaacgaagatca

SEQ ID NO: 1771281 - DNA, 15 bp, Homo sapiens
accaacgaagatcaa

SEQ ID NO: 1771282 - DNA, 15 bp, Homo sapiens
ccaacgaagatcaaa

SEQ ID NO: 1771283 - DNA, 15 bp, Homo sapiens
caacgaagatcaaaa

SEQ ID NO: 1771284 - DNA, 15 bp, Homo sapiens
aacgaagatcaaaaa

SEQ ID NO: 1771285 - DNA, 15 bp, Homo sapiens
acgaagatcaaaaaa

SEQ ID NO: 1771286 - DNA, 15 bp, Homo sapiens
cgaagatcaaaaaag

SEQ ID NO: 1771287 - DNA, 15 bp, Homo sapiens
gaagatcaaaaaaga

SEQ ID NO: 1771288 - DNA, 15 bp, Homo sapiens
aagatcaaaaaagac

SEQ ID NO: 1771289 - DNA, 15 bp, Homo sapiens
agatcaaaaaagaca

SEQ ID NO: 1771290 - DNA, 15 bp, Homo sapiens
gatcaaaaaagacaa

SEQ ID NO: 1771291 - DNA, 15 bp, Homo sapiens
atcaaaaaagacaag

SEQ ID NO: 1771292 - DNA, 15 bp, Homo sapiens
tcaaaaaagacaaga

SEQ ID NO: 1771293 - DNA, 15 bp, Homo sapiens
caaaaaagacaagaa

SEQ ID NO: 1771294 - DNA, 15 bp, Homo sapiens
aaaaaagacaagaag

SEQ ID NO: 1771295 - DNA, 15 bp, Homo sapiens
aaaaagacaagaagg

SEQ ID NO: 1771296 - DNA, 15 bp, Homo sapiens
aaaagacaagaaggg

SEQ ID NO: 1771297 - DNA, 15 bp, Homo sapiens
aaagacaagaagggc

SEQ ID NO: 1771298 - DNA, 15 bp, Homo sapiens
aagacaagaagggca

SEQ ID NO: 1771299 - DNA, 15 bp, Homo sapiens
agacaagaagggcat

SEQ ID NO: 1771300 - DNA, 15 bp, Homo sapiens
gacaagaagggcatt

SEQ ID NO: 1771301 - DNA, 15 bp, Homo sapiens
acaagaagggcatta

SEQ ID NO: 1771302 - DNA, 15 bp, Homo sapiens
caagaagggcattac

SEQ ID NO: 1771303 - DNA, 15 bp, Homo sapiens
aagaagggcattaca

SEQ ID NO: 1771304 - DNA, 15 bp, Homo sapiens
agaagggcattacat

SEQ ID NO: 1771305 - DNA, 15 bp, Homo sapiens
gaagggcattacata

SEQ ID NO: 1771306 - DNA, 15 bp, Homo sapiens
aagggcattacataa

SEQ ID NO: 1771307 - DNA, 15 bp, Homo sapiens
agggcattacataat

SEQ ID NO: 1771308 - DNA, 15 bp, Homo sapiens
gggcattacataatg

SEQ ID NO: 1771309 - DNA, 15 bp, Homo sapiens
ggcattacataatgg

SEQ ID NO: 1771310 - DNA, 15 bp, Homo sapiens
gcattacataatggt

SEQ ID NO: 1771311 - DNA, 15 bp, Homo sapiens
cattacataatggta

SEQ ID NO: 1771312 - DNA, 15 bp, Homo sapiens
attacataatggtaa

SEQ ID NO: 1771313 - DNA, 15 bp, Homo sapiens
ttacataatggtaaa

SEQ ID NO: 1771314 - DNA, 15 bp, Homo sapiens
tacataatggtaaag

SEQ ID NO: 1771315 - DNA, 15 bp, Homo sapiens
acataatggtaaagg

SEQ ID NO: 1771316 - DNA, 15 bp, Homo sapiens
cataatggtaaaggg

SEQ ID NO: 1771317 - DNA, 15 bp, Homo sapiens
ataatggtaaaggga

SEQ ID NO: 1771318 - DNA, 15 bp, Homo sapiens
taatggtaaagggat

SEQ ID NO: 1771319 - DNA, 15 bp, Homo sapiens
aatggtaaagggatc

SEQ ID NO: 1771320 - DNA, 15 bp, Homo sapiens
atggtaaagggatca

SEQ ID NO: 1771321 - DNA, 15 bp, Homo sapiens
tggtaaagggatcaa

SEQ ID NO: 1771322 - DNA, 15 bp, Homo sapiens
ggtaaagggatcaat

SEQ ID NO: 1771323 - DNA, 15 bp, Homo sapiens
gtaaagggatcaatg

SEQ ID NO: 1771324 - DNA, 15 bp, Homo sapiens
taaagggatcaatgc

SEQ ID NO: 1771325 - DNA, 15 bp, Homo sapiens
aaagggatcaatgca

SEQ ID NO: 1771326 - DNA, 15 bp, Homo sapiens
aagggatcaatgcaa

SEQ ID NO: 1771327 - DNA, 15 bp, Homo sapiens
agggatcaatgcaac

SEQ ID NO: 1771328 - DNA, 15 bp, Homo sapiens
gggatcaatgcaaca

SEQ ID NO: 1771329 - DNA, 15 bp, Homo sapiens
ggatcaatgcaacaa

SEQ ID NO: 1771330 - DNA, 15 bp, Homo sapiens
gatcaatgcaacaag

SEQ ID NO: 1771331 - DNA, 15 bp, Homo sapiens
atcaatgcaacaaga

SEQ ID NO: 1771332 - DNA, 15 bp, Homo sapiens
tcaatgcaacaagaa

SEQ ID NO: 1771333 - DNA, 15 bp, Homo sapiens
caatgcaacaagaag

SEQ ID NO: 1771334 - DNA, 15 bp, Homo sapiens
aatgcaacaagaaga

SEQ ID NO: 1771335 - DNA, 15 bp, Homo sapiens
atgcaacaagaagag

SEQ ID NO: 1771336 - DNA, 15 bp, Homo sapiens
tgcaacaagaagagc

SEQ ID NO: 1771337 - DNA, 15 bp, Homo sapiens
gcaacaagaagagct

SEQ ID NO: 1771338 - DNA, 15 bp, Homo sapiens
caacaagaagagcta

SEQ ID NO: 1771339 - DNA, 15 bp, Homo sapiens
aacaagaagagctaa

SEQ ID NO: 1771340 - DNA, 15 bp, Homo sapiens
acaagaagagctaac

SEQ ID NO: 1771341 - DNA, 15 bp, Homo sapiens
caagaagagctaact

SEQ ID NO: 1771342 - DNA, 15 bp, Homo sapiens
aagaagagctaacta

SEQ ID NO: 1771343 - DNA, 15 bp, Homo sapiens
agaagagctaactat

SEQ ID NO: 1771344 - DNA, 15 bp, Homo sapiens
gaagagctaactatc

SEQ ID NO: 1771345 - DNA, 15 bp, Homo sapiens
aagagctaactatcc

SEQ ID NO: 1771346 - DNA, 15 bp, Homo sapiens
agagctaactatcct

SEQ ID NO: 1771347 - DNA, 15 bp, Homo sapiens
gagctaactatccta

SEQ ID NO: 1771348 - DNA, 15 bp, Homo sapiens
agctaactatcctaa

SEQ ID NO: 1771349 - DNA, 15 bp, Homo sapiens
gctaactatcctaag

SEQ ID NO: 1771350 - DNA, 15 bp, Homo sapiens
ctaactatcctaagt

SEQ ID NO: 1771351 - DNA, 15 bp, Homo sapiens
taactatcctaagta

SEQ ID NO: 1771352 - DNA, 15 bp, Homo sapiens
aactatcctaagtat

SEQ ID NO: 1771353 - DNA, 15 bp, Homo sapiens
actatcctaagtatg

SEQ ID NO: 1771354 - DNA, 15 bp, Homo sapiens
ctatcctaagtatgt

SEQ ID NO: 1771355 - DNA, 15 bp, Homo sapiens
tatcctaagtatgta

SEQ ID NO: 1771356 - DNA, 15 bp, Homo sapiens
atcctaagtatgtat

SEQ ID NO: 1771357 - DNA, 15 bp, Homo sapiens
tcctaagtatgtatg

SEQ ID NO: 1771358 - DNA, 15 bp, Homo sapiens
cctaagtatgtatgc

SEQ ID NO: 1771359 - DNA, 15 bp, Homo sapiens
ctaagtatgtatgca

SEQ ID NO: 1771360 - DNA, 15 bp, Homo sapiens
taagtatgtatgcac

SEQ ID NO: 1771361 - DNA, 15 bp, Homo sapiens
aagtatgtatgcacc

SEQ ID NO: 1771362 - DNA, 15 bp, Homo sapiens
agtatgtatgcaccc

SEQ ID NO: 1771363 - DNA, 15 bp, Homo sapiens
gtatgtatgcaccca

SEQ ID NO: 1771364 - DNA, 15 bp, Homo sapiens
tatgtatgcacccaa

SEQ ID NO: 1771365 - DNA, 15 bp, Homo sapiens
atgtatgcacccaat

SEQ ID NO: 1771366 - DNA, 15 bp, Homo sapiens
tgtatgcacccaata

SEQ ID NO: 1771367 - DNA, 15 bp, Homo sapiens
gtatgcacccaatac

SEQ ID NO: 1771368 - DNA, 15 bp, Homo sapiens
tatgcacccaataca

SEQ ID NO: 1771369 - DNA, 15 bp, Homo sapiens
atgcacccaatacag

SEQ ID NO: 1771370 - DNA, 15 bp, Homo sapiens
tgcacccaatacagg

SEQ ID NO: 1771371 - DNA, 15 bp, Homo sapiens
gcacccaatacagga

SEQ ID NO: 1771372 - DNA, 15 bp, Homo sapiens
cacccaatacaggag

SEQ ID NO: 1771373 - DNA, 15 bp, Homo sapiens
acccaatacaggagc

SEQ ID NO: 1771374 - DNA, 15 bp, Homo sapiens
cccaatacaggagca

SEQ ID NO: 1771375 - DNA, 15 bp, Homo sapiens
ccaatacaggagcac

SEQ ID NO: 1771376 - DNA, 15 bp, Homo sapiens
caatacaggagcacc

SEQ ID NO: 1771377 - DNA, 15 bp, Homo sapiens
aatacaggagcaccc

SEQ ID NO: 1771378 - DNA, 15 bp, Homo sapiens
atacaggagcaccca

SEQ ID NO: 1771379 - DNA, 15 bp, Homo sapiens
tacaggagcacccag

SEQ ID NO: 1771380 - DNA, 15 bp, Homo sapiens
acaggagcacccaga

SEQ ID NO: 1771381 - DNA, 15 bp, Homo sapiens
caggagcacccagat

SEQ ID NO: 1771382 - DNA, 15 bp, Homo sapiens
aggagcacccagatt

SEQ ID NO: 1771383 - DNA, 15 bp, Homo sapiens
ggagcacccagattc

SEQ ID NO: 1771384 - DNA, 15 bp, Homo sapiens
gagcacccagattca

SEQ ID NO: 1771385 - DNA, 15 bp, Homo sapiens
agcacccagattcat

SEQ ID NO: 1771386 - DNA, 15 bp, Homo sapiens
gcacccagattcata

SEQ ID NO: 1771387 - DNA, 15 bp, Homo sapiens
cacccagattcataa

SEQ ID NO: 1771388 - DNA, 15 bp, Homo sapiens
acccagattcataaa

SEQ ID NO: 1771389 - DNA, 15 bp, Homo sapiens
cccagattcataaag

SEQ ID NO: 1771390 - DNA, 15 bp, Homo sapiens
ccagattcataaagc

SEQ ID NO: 1771391 - DNA, 15 bp, Homo sapiens
cagattcataaagca

SEQ ID NO: 1771392 - DNA, 15 bp, Homo sapiens
agattcataaagcaa

SEQ ID NO: 1771393 - DNA, 15 bp, Homo sapiens
gattcataaagcaag

SEQ ID NO: 1771394 - DNA, 15 bp, Homo sapiens
attcataaagcaagt

SEQ ID NO: 1771395 - DNA, 15 bp, Homo sapiens
ttcataaagcaagtc

SEQ ID NO: 1771396 - DNA, 15 bp, Homo sapiens
tcataaagcaagtcc

SEQ ID NO: 1771397 - DNA, 15 bp, Homo sapiens
cataaagcaagtcct

SEQ ID NO: 1771398 - DNA, 15 bp, Homo sapiens
ataaagcaagtcctt

SEQ ID NO: 1771399 - DNA, 15 bp, Homo sapiens
taaagcaagtccttg

SEQ ID NO: 1771400 - DNA, 15 bp, Homo sapiens
aaagcaagtccttgg

SEQ ID NO: 1771401 - DNA, 15 bp, Homo sapiens
aagcaagtccttgga

SEQ ID NO: 1771402 - DNA, 15 bp, Homo sapiens
agcaagtccttggag

SEQ ID NO: 1771403 - DNA, 15 bp, Homo sapiens
gcaagtccttggaga

SEQ ID NO: 1771404 - DNA, 15 bp, Homo sapiens
caagtccttggagac

SEQ ID NO: 1771405 - DNA, 15 bp, Homo sapiens
aagtccttggagacc

SEQ ID NO: 1771406 - DNA, 15 bp, Homo sapiens
agtccttggagacct

SEQ ID NO: 1771407 - DNA, 15 bp, Homo sapiens
gtccttggagaccta

SEQ ID NO: 1771408 - DNA, 15 bp, Homo sapiens
tccttggagacctac

SEQ ID NO: 1771409 - DNA, 15 bp, Homo sapiens
ccttggagacctaca

SEQ ID NO: 1771410 - DNA, 15 bp, Homo sapiens
cttggagacctacaa

SEQ ID NO: 1771411 - DNA, 15 bp, Homo sapiens
ttggagacctacaaa

SEQ ID NO: 1771412 - DNA, 15 bp, Homo sapiens
tggagacctacaaag

SEQ ID NO: 1771413 - DNA, 15 bp, Homo sapiens
ggagacctacaaaga

SEQ ID NO: 1771414 - DNA, 15 bp, Homo sapiens
gagacctacaaagag

SEQ ID NO: 1771415 - DNA, 15 bp, Homo sapiens
agacctacaaagaga

SEQ ID NO: 1771416 - DNA, 15 bp, Homo sapiens
gacctacaaagagac

SEQ ID NO: 1771417 - DNA, 15 bp, Homo sapiens
acctacaaagagact

SEQ ID NO: 1771418 - DNA, 15 bp, Homo sapiens
cctacaaagagactt

SEQ ID NO: 1771419 - DNA, 15 bp, Homo sapiens
ctacaaagagactta

SEQ ID NO: 1771420 - DNA, 15 bp, Homo sapiens
tacaaagagacttag

SEQ ID NO: 1771421 - DNA, 15 bp, Homo sapiens
acaaagagacttaga

SEQ ID NO: 1771422 - DNA, 15 bp, Homo sapiens
caaagagacttagac

SEQ ID NO: 1771423 - DNA, 15 bp, Homo sapiens
aaagagacttagact

SEQ ID NO: 1771424 - DNA, 15 bp, Homo sapiens
aagagacttagactc

SEQ ID NO: 1771425 - DNA, 15 bp, Homo sapiens
agagacttagactcc

SEQ ID NO: 1771426 - DNA, 15 bp, Homo sapiens
gagacttagactccc

SEQ ID NO: 1771427 - DNA, 15 bp, Homo sapiens
agacttagactccca

SEQ ID NO: 1771428 - DNA, 15 bp, Homo sapiens
gacttagactcccac

SEQ ID NO: 1771429 - DNA, 15 bp, Homo sapiens
acttagactcccaca

SEQ ID NO: 1771430 - DNA, 15 bp, Homo sapiens
cttagactcccacac

SEQ ID NO: 1771431 - DNA, 15 bp, Homo sapiens
ttagactcccacaca

SEQ ID NO: 1771432 - DNA, 15 bp, Homo sapiens
tagactcccacacaa

SEQ ID NO: 1771433 - DNA, 15 bp, Homo sapiens
agactcccacacaat

SEQ ID NO: 1771434 - DNA, 15 bp, Homo sapiens
gactcccacacaata

SEQ ID NO: 1771435 - DNA, 15 bp, Homo sapiens
actcccacacaataa

SEQ ID NO: 1771436 - DNA, 15 bp, Homo sapiens
ctcccacacaataat

SEQ ID NO: 1771437 - DNA, 15 bp, Homo sapiens
tcccacacaataata

SEQ ID NO: 1771438 - DNA, 15 bp, Homo sapiens
cccacacaataatag

SEQ ID NO: 1771439 - DNA, 15 bp, Homo sapiens
ccacacaataatagt

SEQ ID NO: 1771440 - DNA, 15 bp, Homo sapiens
cacacaataatagtg

SEQ ID NO: 1771441 - DNA, 15 bp, Homo sapiens
acacaataatagtgg

SEQ ID NO: 1771442 - DNA, 15 bp, Homo sapiens
cacaataatagtggg

SEQ ID NO: 1771443 - DNA, 15 bp, Homo sapiens
acaataatagtggga

SEQ ID NO: 1771444 - DNA, 15 bp, Homo sapiens
caataatagtgggag

SEQ ID NO: 1771445 - DNA, 15 bp, Homo sapiens
aataatagtgggaga

SEQ ID NO: 1771446 - DNA, 15 bp, Homo sapiens
ataatagtgggagac

SEQ ID NO: 1771447 - DNA, 15 bp, Homo sapiens
taatagtgggagact

SEQ ID NO: 1771448 - DNA, 15 bp, Homo sapiens
aatagtgggagactt

SEQ ID NO: 1771449 - DNA, 15 bp, Homo sapiens
atagtgggagacttt

SEQ ID NO: 1771450 - DNA, 15 bp, Homo sapiens
tagtgggagacttta

SEQ ID NO: 1771451 - DNA, 15 bp, Homo sapiens
agtgggagactttaa

SEQ ID NO: 1771452 - DNA, 15 bp, Homo sapiens
gtgggagactttaac

SEQ ID NO: 1771453 - DNA, 15 bp, Homo sapiens
tgggagactttaaca

SEQ ID NO: 1771454 - DNA, 15 bp, Homo sapiens
gggagactttaacac

SEQ ID NO: 1771455 - DNA, 15 bp, Homo sapiens
ggagactttaacacc

SEQ ID NO: 1771456 - DNA, 15 bp, Homo sapiens
gagactttaacaccc

SEQ ID NO: 1771457 - DNA, 15 bp, Homo sapiens
agactttaacacccc

SEQ ID NO: 1771458 - DNA, 15 bp, Homo sapiens
gactttaacacccca

SEQ ID NO: 1771459 - DNA, 15 bp, Homo sapiens
actttaacaccccac

SEQ ID NO: 1771460 - DNA, 15 bp, Homo sapiens
ctttaacaccccact

SEQ ID NO: 1771461 - DNA, 15 bp, Homo sapiens
tttaacaccccactg

SEQ ID NO: 1771462 - DNA, 15 bp, Homo sapiens
ttaacaccccactgt

SEQ ID NO: 1771463 - DNA, 15 bp, Homo sapiens
taacaccccactgtc

SEQ ID NO: 1771464 - DNA, 15 bp, Homo sapiens
aacaccccactgtca

SEQ ID NO: 1771465 - DNA, 15 bp, Homo sapiens
acaccccactgtcaa

SEQ ID NO: 1771466 - DNA, 15 bp, Homo sapiens
caccccactgtcaat

SEQ ID NO: 1771467 - DNA, 15 bp, Homo sapiens
accccactgtcaata

SEQ ID NO: 1771468 - DNA, 15 bp, Homo sapiens
ccccactgtcaatat

SEQ ID NO: 1771469 - DNA, 15 bp, Homo sapiens
cccactgtcaatatt

SEQ ID NO: 1771470 - DNA, 15 bp, Homo sapiens
ccactgtcaatattt

SEQ ID NO: 1771471 - DNA, 15 bp, Homo sapiens
cactgtcaatatttg

SEQ ID NO: 1771472 - DNA, 15 bp, Homo sapiens
actgtcaatatttga

SEQ ID NO: 1771473 - DNA, 15 bp, Homo sapiens
ctgtcaatatttgac

SEQ ID NO: 1771474 - DNA, 15 bp, Homo sapiens
tgtcaatatttgaca

SEQ ID NO: 1771475 - DNA, 15 bp, Homo sapiens
gtcaatatttgacag

SEQ ID NO: 1771476 - DNA, 15 bp, Homo sapiens
tcaatatttgacaga

SEQ ID NO: 1771477 - DNA, 15 bp, Homo sapiens
caatatttgacagat

SEQ ID NO: 1771478 - DNA, 15 bp, Homo sapiens
aatatttgacagatc

SEQ ID NO: 1771479 - DNA, 15 bp, Homo sapiens
atatttgacagatca

SEQ ID NO: 1771480 - DNA, 15 bp, Homo sapiens
tatttgacagatcaa

SEQ ID NO: 1771481 - DNA, 15 bp, Homo sapiens
atttgacagatcaat

SEQ ID NO: 1771482 - DNA, 15 bp, Homo sapiens
tttgacagatcaatg

SEQ ID NO: 1771483 - DNA, 15 bp, Homo sapiens
ttgacagatcaatga

SEQ ID NO: 1771484 - DNA, 15 bp, Homo sapiens
tgacagatcaatgag

SEQ ID NO: 1771485 - DNA, 15 bp, Homo sapiens
gacagatcaatgaga

SEQ ID NO: 1771486 - DNA, 15 bp, Homo sapiens
acagatcaatgagac

SEQ ID NO: 1771487 - DNA, 15 bp, Homo sapiens
cagatcaatgagaca

SEQ ID NO: 1771488 - DNA, 15 bp, Homo sapiens
agatcaatgagacag

SEQ ID NO: 1771489 - DNA, 15 bp, Homo sapiens
gatcaatgagacaga

SEQ ID NO: 1771490 - DNA, 15 bp, Homo sapiens
atcaatgagacagaa

SEQ ID NO: 1771491 - DNA, 15 bp, Homo sapiens
tcaatgagacagaaa

SEQ ID NO: 1771492 - DNA, 15 bp, Homo sapiens
caatgagacagaaaa

SEQ ID NO: 1771493 - DNA, 15 bp, Homo sapiens
aatgagacagaaaat

SEQ ID NO: 1771494 - DNA, 15 bp, Homo sapiens
atgagacagaaaatt

SEQ ID NO: 1771495 - DNA, 15 bp, Homo sapiens
tgagacagaaaatta

SEQ ID NO: 1771496 - DNA, 15 bp, Homo sapiens
gagacagaaaattaa

SEQ ID NO: 1771497 - DNA, 15 bp, Homo sapiens
agacagaaaattaac

SEQ ID NO: 1771498 - DNA, 15 bp, Homo sapiens
gacagaaaattaaca

SEQ ID NO: 1771499 - DNA, 15 bp, Homo sapiens
acagaaaattaacaa

SEQ ID NO: 1771500 - DNA, 15 bp, Homo sapiens
cagaaaattaacaag

SEQ ID NO: 1771501 - DNA, 15 bp, Homo sapiens
agaaaattaacaagg

SEQ ID NO: 1771502 - DNA, 15 bp, Homo sapiens
gaaaattaacaagga

SEQ ID NO: 1771503 - DNA, 15 bp, Homo sapiens
aaaattaacaaggat

SEQ ID NO: 1771504 - DNA, 15 bp, Homo sapiens
aaattaacaaggata

SEQ ID NO: 1771505 - DNA, 15 bp, Homo sapiens
aattaacaaggatat

SEQ ID NO: 1771506 - DNA, 15 bp, Homo sapiens
attaacaaggatatt

SEQ ID NO: 1771507 - DNA, 15 bp, Homo sapiens
ttaacaaggatattc

SEQ ID NO: 1771508 - DNA, 15 bp, Homo sapiens
taacaaggatattca

SEQ ID NO: 1771509 - DNA, 15 bp, Homo sapiens
aacaaggatattcag

SEQ ID NO: 1771510 - DNA, 15 bp, Homo sapiens
acaaggatattcagg

SEQ ID NO: 1771511 - DNA, 15 bp, Homo sapiens
caaggatattcagga

SEQ ID NO: 1771512 - DNA, 15 bp, Homo sapiens
aaggatattcaggac

SEQ ID NO: 1771513 - DNA, 15 bp, Homo sapiens
aggatattcaggact

SEQ ID NO: 1771514 - DNA, 15 bp, Homo sapiens
ggatattcaggactt

SEQ ID NO: 1771515 - DNA, 15 bp, Homo sapiens
gatattcaggacttg

SEQ ID NO: 1771516 - DNA, 15 bp, Homo sapiens
atattcaggacttga

SEQ ID NO: 1771517 - DNA, 15 bp, Homo sapiens
tattcaggacttgaa

SEQ ID NO: 1771518 - DNA, 15 bp, Homo sapiens
attcaggacttgaac

SEQ ID NO: 1771519 - DNA, 15 bp, Homo sapiens
ttcaggacttgaact

SEQ ID NO: 1771520 - DNA, 15 bp, Homo sapiens
tcaggacttgaactc

SEQ ID NO: 1771521 - DNA, 15 bp, Homo sapiens
caggacttgaactca

SEQ ID NO: 1771522 - DNA, 15 bp, Homo sapiens
aggacttgaactcag

SEQ ID NO: 1771523 - DNA, 15 bp, Homo sapiens
ggacttgaactcagc

SEQ ID NO: 1771524 - DNA, 15 bp, Homo sapiens
gacttgaactcagct

SEQ ID NO: 1771525 - DNA, 15 bp, Homo sapiens
acttgaactcagctc

SEQ ID NO: 1771526 - DNA, 15 bp, Homo sapiens
cttgaactcagctct

SEQ ID NO: 1771527 - DNA, 15 bp, Homo sapiens
ttgaactcagctctg

SEQ ID NO: 1771528 - DNA, 15 bp, Homo sapiens
tgaactcagctctgc

SEQ ID NO: 1771529 - DNA, 15 bp, Homo sapiens
gaactcagctctgca

SEQ ID NO: 1771530 - DNA, 15 bp, Homo sapiens
aactcagctctgcac

SEQ ID NO: 1771531 - DNA, 15 bp, Homo sapiens
actcagctctgcacc

SEQ ID NO: 1771532 - DNA, 15 bp, Homo sapiens
ctcagctctgcacca

SEQ ID NO: 1771533 - DNA, 15 bp, Homo sapiens
tcagctctgcaccaa

SEQ ID NO: 1771534 - DNA, 15 bp, Homo sapiens
cagctctgcaccaag

SEQ ID NO: 1771535 - DNA, 15 bp, Homo sapiens
agctctgcaccaagc

SEQ ID NO: 1771536 - DNA, 15 bp, Homo sapiens
gctctgcaccaagca

SEQ ID NO: 1771537 - DNA, 15 bp, Homo sapiens
ctctgcaccaagcag

SEQ ID NO: 1771538 - DNA, 15 bp, Homo sapiens
tctgcaccaagcaga

SEQ ID NO: 1771539 - DNA, 15 bp, Homo sapiens
ctgcaccaagcagac

SEQ ID NO: 1771540 - DNA, 15 bp, Homo sapiens
tgcaccaagcagacc

SEQ ID NO: 1771541 - DNA, 15 bp, Homo sapiens
gcaccaagcagacct

SEQ ID NO: 1771542 - DNA, 15 bp, Homo sapiens
caccaagcagaccta

SEQ ID NO: 1771543 - DNA, 15 bp, Homo sapiens
accaagcagacctaa

SEQ ID NO: 1771544 - DNA, 15 bp, Homo sapiens
ccaagcagacctaat

SEQ ID NO: 1771545 - DNA, 15 bp, Homo sapiens
caagcagacctaata

SEQ ID NO: 1771546 - DNA, 15 bp, Homo sapiens
aagcagacctaatag

SEQ ID NO: 1771547 - DNA, 15 bp, Homo sapiens
agcagacctaataga

SEQ ID NO: 1771548 - DNA, 15 bp, Homo sapiens
gcagacctaatagac

SEQ ID NO: 1771549 - DNA, 15 bp, Homo sapiens
cagacctaatagaca

SEQ ID NO: 1771550 - DNA, 15 bp, Homo sapiens
agacctaatagacat

SEQ ID NO: 1771551 - DNA, 15 bp, Homo sapiens
gacctaatagacatc

SEQ ID NO: 1771552 - DNA, 15 bp, Homo sapiens
acctaatagacatct

SEQ ID NO: 1771553 - DNA, 15 bp, Homo sapiens
cctaatagacatcta

SEQ ID NO: 1771554 - DNA, 15 bp, Homo sapiens
ctaatagacatctac

SEQ ID NO: 1771555 - DNA, 15 bp, Homo sapiens
taatagacatctaca

SEQ ID NO: 1771556 - DNA, 15 bp, Homo sapiens
aatagacatctacag

SEQ ID NO: 1771557 - DNA, 15 bp, Homo sapiens
atagacatctacaga

SEQ ID NO: 1771558 - DNA, 15 bp, Homo sapiens
tagacatctacagaa

SEQ ID NO: 1771559 - DNA, 15 bp, Homo sapiens
agacatctacagaac

SEQ ID NO: 1771560 - DNA, 15 bp, Homo sapiens
gacatctacagaact

SEQ ID NO: 1771561 - DNA, 15 bp, Homo sapiens
acatctacagaactc

SEQ ID NO: 1771562 - DNA, 15 bp, Homo sapiens
catctacagaactct

SEQ ID NO: 1771563 - DNA, 15 bp, Homo sapiens
atctacagaactctc

SEQ ID NO: 1771564 - DNA, 15 bp, Homo sapiens
tctacagaactctcc

SEQ ID NO: 1771565 - DNA, 15 bp, Homo sapiens
ctacagaactctcca

SEQ ID NO: 1771566 - DNA, 15 bp, Homo sapiens
tacagaactctccac

SEQ ID NO: 1771567 - DNA, 15 bp, Homo sapiens
acagaactctccacc

SEQ ID NO: 1771568 - DNA, 15 bp, Homo sapiens
cagaactctccaccc

SEQ ID NO: 1771569 - DNA, 15 bp, Homo sapiens
agaactctccacccc

SEQ ID NO: 1771570 - DNA, 15 bp, Homo sapiens
gaactctccacccca

SEQ ID NO: 1771571 - DNA, 15 bp, Homo sapiens
aactctccaccccaa

SEQ ID NO: 1771572 - DNA, 15 bp, Homo sapiens
actctccaccccaaa

SEQ ID NO: 1771573 - DNA, 15 bp, Homo sapiens
ctctccaccccaaat

SEQ ID NO: 1771574 - DNA, 15 bp, Homo sapiens
tctccaccccaaatc

SEQ ID NO: 1771575 - DNA, 15 bp, Homo sapiens
ctccaccccaaatca

SEQ ID NO: 1771576 - DNA, 15 bp, Homo sapiens
tccaccccaaatcaa

SEQ ID NO: 1771577 - DNA, 15 bp, Homo sapiens
ccaccccaaatcaac

SEQ ID NO: 1771578 - DNA, 15 bp, Homo sapiens
caccccaaatcaaca

SEQ ID NO: 1771579 - DNA, 15 bp, Homo sapiens
accccaaatcaacag

SEQ ID NO: 1771580 - DNA, 15 bp, Homo sapiens
ccccaaatcaacaga

SEQ ID NO: 1771581 - DNA, 15 bp, Homo sapiens
cccaaatcaacagaa

SEQ ID NO: 1771582 - DNA, 15 bp, Homo sapiens
ccaaatcaacagaat

SEQ ID NO: 1771583 - DNA, 15 bp, Homo sapiens
caaatcaacagaata

SEQ ID NO: 1771584 - DNA, 15 bp, Homo sapiens
aaatcaacagaatag

SEQ ID NO: 1771585 - DNA, 15 bp, Homo sapiens
aatcaacagaataga

SEQ ID NO: 1771586 - DNA, 15 bp, Homo sapiens
atcaacagaatagac

SEQ ID NO: 1771587 - DNA, 15 bp, Homo sapiens
tcaacagaatagaca

SEQ ID NO: 1771588 - DNA, 15 bp, Homo sapiens
caacagaatagacat

SEQ ID NO: 1771589 - DNA, 15 bp, Homo sapiens
aacagaatagacatt

SEQ ID NO: 1771590 - DNA, 15 bp, Homo sapiens
acagaatagacattc

SEQ ID NO: 1771591 - DNA, 15 bp, Homo sapiens
cagaatagacattct

SEQ ID NO: 1771592 - DNA, 15 bp, Homo sapiens
agaatagacattctt

SEQ ID NO: 1771593 - DNA, 15 bp, Homo sapiens
gaatagacattcttc

SEQ ID NO: 1771594 - DNA, 15 bp, Homo sapiens
aatagacattcttct

SEQ ID NO: 1771595 - DNA, 15 bp, Homo sapiens
atagacattcttctt

SEQ ID NO: 1771596 - DNA, 15 bp, Homo sapiens
tagacattcttctta

SEQ ID NO: 1771597 - DNA, 15 bp, Homo sapiens
agacattcttcttag

SEQ ID NO: 1771598 - DNA, 15 bp, Homo sapiens
gacattcttcttagc

SEQ ID NO: 1771599 - DNA, 15 bp, Homo sapiens
acattcttcttagca

SEQ ID NO: 1771600 - DNA, 15 bp, Homo sapiens
cattcttcttagcac

SEQ ID NO: 1771601 - DNA, 15 bp, Homo sapiens
attcttcttagcacc

SEQ ID NO: 1771602 - DNA, 15 bp, Homo sapiens
ttcttcttagcacca

SEQ ID NO: 1771603 - DNA, 15 bp, Homo sapiens
tcttcttagcaccac

SEQ ID NO: 1771604 - DNA, 15 bp, Homo sapiens
cttcttagcaccaca

SEQ ID NO: 1771605 - DNA, 15 bp, Homo sapiens
ttcttagcaccacat

SEQ ID NO: 1771606 - DNA, 15 bp, Homo sapiens
tcttagcaccacatc

SEQ ID NO: 1771607 - DNA, 15 bp, Homo sapiens
cttagcaccacatca

SEQ ID NO: 1771608 - DNA, 15 bp, Homo sapiens
ttagcaccacatcac

SEQ ID NO: 1771609 - DNA, 15 bp, Homo sapiens
tagcaccacatcaca

SEQ ID NO: 1771610 - DNA, 15 bp, Homo sapiens
agcaccacatcacac

SEQ ID NO: 1771611 - DNA, 15 bp, Homo sapiens
gcaccacatcacact

SEQ ID NO: 1771612 - DNA, 15 bp, Homo sapiens
caccacatcacactt

SEQ ID NO: 1771613 - DNA, 15 bp, Homo sapiens
accacatcacactta

SEQ ID NO: 1771614 - DNA, 15 bp, Homo sapiens
ccacatcacacttat

SEQ ID NO: 1771615 - DNA, 15 bp, Homo sapiens
cacatcacacttatt

SEQ ID NO: 1771616 - DNA, 15 bp, Homo sapiens
acatcacacttattc

SEQ ID NO: 1771617 - DNA, 15 bp, Homo sapiens
catcacacttattct

SEQ ID NO: 1771618 - DNA, 15 bp, Homo sapiens
atcacacttattcta

SEQ ID NO: 1771619 - DNA, 15 bp, Homo sapiens
tcacacttattctaa

SEQ ID NO: 1771620 - DNA, 15 bp, Homo sapiens
cacacttattctaaa

SEQ ID NO: 1771621 - DNA, 15 bp, Homo sapiens
acacttattctaaaa

SEQ ID NO: 1771622 - DNA, 15 bp, Homo sapiens
cacttattctaaaac

SEQ ID NO: 1771623 - DNA, 15 bp, Homo sapiens
acttattctaaaact

SEQ ID NO: 1771624 - DNA, 15 bp, Homo sapiens
cttattctaaaacta

SEQ ID NO: 1771625 - DNA, 15 bp, Homo sapiens
ttattctaaaactaa

SEQ ID NO: 1771626 - DNA, 15 bp, Homo sapiens
tattctaaaactaac

SEQ ID NO: 1771627 - DNA, 15 bp, Homo sapiens
attctaaaactaacc

SEQ ID NO: 1771628 - DNA, 15 bp, Homo sapiens
ttctaaaactaacca

SEQ ID NO: 1771629 - DNA, 15 bp, Homo sapiens
tctaaaactaaccac

SEQ ID NO: 1771630 - DNA, 15 bp, Homo sapiens
ctaaaactaaccaca

SEQ ID NO: 1771631 - DNA, 15 bp, Homo sapiens
taaaactaaccacat

SEQ ID NO: 1771632 - DNA, 15 bp, Homo sapiens
aaaactaaccacatg

SEQ ID NO: 1771633 - DNA, 15 bp, Homo sapiens
aaactaaccacatga

SEQ ID NO: 1771634 - DNA, 15 bp, Homo sapiens
aactaaccacatgat

SEQ ID NO: 1771635 - DNA, 15 bp, Homo sapiens
actaaccacatgatt

SEQ ID NO: 1771636 - DNA, 15 bp, Homo sapiens
ctaaccacatgattg

SEQ ID NO: 1771637 - DNA, 15 bp, Homo sapiens
taaccacatgattgg

SEQ ID NO: 1771638 - DNA, 15 bp, Homo sapiens
aaccacatgattggg

SEQ ID NO: 1771639 - DNA, 15 bp, Homo sapiens
accacatgattggga

SEQ ID NO: 1771640 - DNA, 15 bp, Homo sapiens
ccacatgattgggag

SEQ ID NO: 1771641 - DNA, 15 bp, Homo sapiens
cacatgattgggagt

SEQ ID NO: 1771642 - DNA, 15 bp, Homo sapiens
acatgattgggagta

SEQ ID NO: 1771643 - DNA, 15 bp, Homo sapiens
catgattgggagtaa

SEQ ID NO: 1771644 - DNA, 15 bp, Homo sapiens
atgattgggagtaaa

SEQ ID NO: 1771645 - DNA, 15 bp, Homo sapiens
tgattgggagtaaaa

SEQ ID NO: 1771646 - DNA, 15 bp, Homo sapiens
gattgggagtaaaac

SEQ ID NO: 1771647 - DNA, 15 bp, Homo sapiens
attgggagtaaaaca

SEQ ID NO: 1771648 - DNA, 15 bp, Homo sapiens
ttgggagtaaaacac

SEQ ID NO: 1771649 - DNA, 15 bp, Homo sapiens
tgggagtaaaacact

SEQ ID NO: 1771650 - DNA, 15 bp, Homo sapiens
gggagtaaaacactc

SEQ ID NO: 1771651 - DNA, 15 bp, Homo sapiens
ggagtaaaacactcc

SEQ ID NO: 1771652 - DNA, 15 bp, Homo sapiens
gagtaaaacactcct

SEQ ID NO: 1771653 - DNA, 15 bp, Homo sapiens
agtaaaacactcctc

SEQ ID NO: 1771654 - DNA, 15 bp, Homo sapiens
gtaaaacactcctca

SEQ ID NO: 1771655 - DNA, 15 bp, Homo sapiens
taaaacactcctcaa

SEQ ID NO: 1771656 - DNA, 15 bp, Homo sapiens
aaaacactcctcaac

SEQ ID NO: 1771657 - DNA, 15 bp, Homo sapiens
aaacactcctcaaca

SEQ ID NO: 1771658 - DNA, 15 bp, Homo sapiens
aacactcctcaacaa

SEQ ID NO: 1771659 - DNA, 15 bp, Homo sapiens
acactcctcaacaaa

SEQ ID NO: 1771660 - DNA, 15 bp, Homo sapiens
cactcctcaacaaat

SEQ ID NO: 1771661 - DNA, 15 bp, Homo sapiens
actcctcaacaaatg

SEQ ID NO: 1771662 - DNA, 15 bp, Homo sapiens
ctcctcaacaaatgc

SEQ ID NO: 1771663 - DNA, 15 bp, Homo sapiens
tcctcaacaaatgca

SEQ ID NO: 1771664 - DNA, 15 bp, Homo sapiens
cctcaacaaatgcaa

SEQ ID NO: 1771665 - DNA, 15 bp, Homo sapiens
ctcaacaaatgcaaa

SEQ ID NO: 1771666 - DNA, 15 bp, Homo sapiens
tcaacaaatgcaaaa

SEQ ID NO: 1771667 - DNA, 15 bp, Homo sapiens
caacaaatgcaaaac

SEQ ID NO: 1771668 - DNA, 15 bp, Homo sapiens
aacaaatgcaaaaca

SEQ ID NO: 1771669 - DNA, 15 bp, Homo sapiens
acaaatgcaaaacaa

SEQ ID NO: 1771670 - DNA, 15 bp, Homo sapiens
caaatgcaaaacaat

SEQ ID NO: 1771671 - DNA, 15 bp, Homo sapiens
aaatgcaaaacaatg

SEQ ID NO: 1771672 - DNA, 15 bp, Homo sapiens
aatgcaaaacaatgg

SEQ ID NO: 1771673 - DNA, 15 bp, Homo sapiens
atgcaaaacaatgga

SEQ ID NO: 1771674 - DNA, 15 bp, Homo sapiens
tgcaaaacaatggaa

SEQ ID NO: 1771675 - DNA, 15 bp, Homo sapiens
gcaaaacaatggaaa

SEQ ID NO: 1771676 - DNA, 15 bp, Homo sapiens
caaaacaatggaaat

SEQ ID NO: 1771677 - DNA, 15 bp, Homo sapiens
aaaacaatggaaatc

SEQ ID NO: 1771678 - DNA, 15 bp, Homo sapiens
aaacaatggaaatca

SEQ ID NO: 1771679 - DNA, 15 bp, Homo sapiens
aacaatggaaatcat

SEQ ID NO: 1771680 - DNA, 15 bp, Homo sapiens
acaatggaaatcata

SEQ ID NO: 1771681 - DNA, 15 bp, Homo sapiens
caatggaaatcataa

SEQ ID NO: 1771682 - DNA, 15 bp, Homo sapiens
aatggaaatcataac

SEQ ID NO: 1771683 - DNA, 15 bp, Homo sapiens
atggaaatcataaca

SEQ ID NO: 1771684 - DNA, 15 bp, Homo sapiens
tggaaatcataacac

SEQ ID NO: 1771685 - DNA, 15 bp, Homo sapiens
ggaaatcataacaca

SEQ ID NO: 1771686 - DNA, 15 bp, Homo sapiens
gaaatcataacacag

SEQ ID NO: 1771687 - DNA, 15 bp, Homo sapiens
aaatcataacacagt

SEQ ID NO: 1771688 - DNA, 15 bp, Homo sapiens
aatcataacacagtc

SEQ ID NO: 1771689 - DNA, 15 bp, Homo sapiens
atcataacacagtct

SEQ ID NO: 1771690 - DNA, 15 bp, Homo sapiens
tcataacacagtctc

SEQ ID NO: 1771691 - DNA, 15 bp, Homo sapiens
cataacacagtctct

SEQ ID NO: 1771692 - DNA, 15 bp, Homo sapiens
ataacacagtctctg

SEQ ID NO: 1771693 - DNA, 15 bp, Homo sapiens
taacacagtctctga

SEQ ID NO: 1771694 - DNA, 15 bp, Homo sapiens
aacacagtctctgag

SEQ ID NO: 1771695 - DNA, 15 bp, Homo sapiens
acacagtctctgaga

SEQ ID NO: 1771696 - DNA, 15 bp, Homo sapiens
cacagtctctgagac

SEQ ID NO: 1771697 - DNA, 15 bp, Homo sapiens
acagtctctgagacc

SEQ ID NO: 1771698 - DNA, 15 bp, Homo sapiens
cagtctctgagacct

SEQ ID NO: 1771699 - DNA, 15 bp, Homo sapiens
agtctctgagacctc

SEQ ID NO: 1771700 - DNA, 15 bp, Homo sapiens
gtctctgagacctca

SEQ ID NO: 1771701 - DNA, 15 bp, Homo sapiens
tctctgagacctcag

SEQ ID NO: 1771702 - DNA, 15 bp, Homo sapiens
ctctgagacctcagt

SEQ ID NO: 1771703 - DNA, 15 bp, Homo sapiens
tctgagacctcagtg

SEQ ID NO: 1771704 - DNA, 15 bp, Homo sapiens
ctgagacctcagtgc

SEQ ID NO: 1771705 - DNA, 15 bp, Homo sapiens
tgagacctcagtgca

SEQ ID NO: 1771706 - DNA, 15 bp, Homo sapiens
gagacctcagtgcaa

SEQ ID NO: 1771707 - DNA, 15 bp, Homo sapiens
agacctcagtgcaat

SEQ ID NO: 1771708 - DNA, 15 bp, Homo sapiens
gacctcagtgcaatc

SEQ ID NO: 1771709 - DNA, 15 bp, Homo sapiens
acctcagtgcaatca

SEQ ID NO: 1771710 - DNA, 15 bp, Homo sapiens
cctcagtgcaatcaa

SEQ ID NO: 1771711 - DNA, 15 bp, Homo sapiens
ctcagtgcaatcaaa

SEQ ID NO: 1771712 - DNA, 15 bp, Homo sapiens
tcagtgcaatcaaat

SEQ ID NO: 1771713 - DNA, 15 bp, Homo sapiens
cagtgcaatcaaatt

SEQ ID NO: 1771714 - DNA, 15 bp, Homo sapiens
agtgcaatcaaatta

SEQ ID NO: 1771715 - DNA, 15 bp, Homo sapiens
gtgcaatcaaattag

SEQ ID NO: 1771716 - DNA, 15 bp, Homo sapiens
tgcaatcaaattaga

SEQ ID NO: 1771717 - DNA, 15 bp, Homo sapiens
gcaatcaaattagaa

SEQ ID NO: 1771718 - DNA, 15 bp, Homo sapiens
caatcaaattagaac

SEQ ID NO: 1771719 - DNA, 15 bp, Homo sapiens
aatcaaattagaact

SEQ ID NO: 1771720 - DNA, 15 bp, Homo sapiens
atcaaattagaactc

SEQ ID NO: 1771721 - DNA, 15 bp, Homo sapiens
tcaaattagaactca

SEQ ID NO: 1771722 - DNA, 15 bp, Homo sapiens
caaattagaactcag

SEQ ID NO: 1771723 - DNA, 15 bp, Homo sapiens
aaattagaactcagg

SEQ ID NO: 1771724 - DNA, 15 bp, Homo sapiens
aattagaactcagga

SEQ ID NO: 1771725 - DNA, 15 bp, Homo sapiens
attagaactcaggat

SEQ ID NO: 1771726 - DNA, 15 bp, Homo sapiens
ttagaactcaggatt

SEQ ID NO: 1771727 - DNA, 15 bp, Homo sapiens
tagaactcaggatta

SEQ ID NO: 1771728 - DNA, 15 bp, Homo sapiens
agaactcaggattaa

SEQ ID NO: 1771729 - DNA, 15 bp, Homo sapiens
gaactcaggattaag

SEQ ID NO: 1771730 - DNA, 15 bp, Homo sapiens
aactcaggattaaga

SEQ ID NO: 1771731 - DNA, 15 bp, Homo sapiens
actcaggattaagaa

SEQ ID NO: 1771732 - DNA, 15 bp, Homo sapiens
ctcaggattaagaaa

SEQ ID NO: 1771733 - DNA, 15 bp, Homo sapiens
tcaggattaagaaac

SEQ ID NO: 1771734 - DNA, 15 bp, Homo sapiens
caggattaagaaact

SEQ ID NO: 1771735 - DNA, 15 bp, Homo sapiens
aggattaagaaactc

SEQ ID NO: 1771736 - DNA, 15 bp, Homo sapiens
ggattaagaaactca

SEQ ID NO: 1771737 - DNA, 15 bp, Homo sapiens
gattaagaaactcac

SEQ ID NO: 1771738 - DNA, 15 bp, Homo sapiens
attaagaaactcact

SEQ ID NO: 1771739 - DNA, 15 bp, Homo sapiens
ttaagaaactcactc

SEQ ID NO: 1771740 - DNA, 15 bp, Homo sapiens
taagaaactcactca

SEQ ID NO: 1771741 - DNA, 15 bp, Homo sapiens
aagaaactcactcaa

SEQ ID NO: 1771742 - DNA, 15 bp, Homo sapiens
agaaactcactcaaa

SEQ ID NO: 1771743 - DNA, 15 bp, Homo sapiens
gaaactcactcaaac

SEQ ID NO: 1771744 - DNA, 15 bp, Homo sapiens
aaactcactcaaacc

SEQ ID NO: 1771745 - DNA, 15 bp, Homo sapiens
aactcactcaaacct

SEQ ID NO: 1771746 - DNA, 15 bp, Homo sapiens
actcactcaaacctg

SEQ ID NO: 1771747 - DNA, 15 bp, Homo sapiens
ctcactcaaacctgc

SEQ ID NO: 1771748 - DNA, 15 bp, Homo sapiens
tcactcaaacctgca

SEQ ID NO: 1771749 - DNA, 15 bp, Homo sapiens
cactcaaacctgcac

SEQ ID NO: 1771750 - DNA, 15 bp, Homo sapiens
actcaaacctgcaca

SEQ ID NO: 1771751 - DNA, 15 bp, Homo sapiens
ctcaaacctgcacaa

SEQ ID NO: 1771752 - DNA, 15 bp, Homo sapiens
tcaaacctgcacaac

SEQ ID NO: 1771753 - DNA, 15 bp, Homo sapiens
caaacctgcacaact

SEQ ID NO: 1771754 - DNA, 15 bp, Homo sapiens
aaacctgcacaactg

SEQ ID NO: 1771755 - DNA, 15 bp, Homo sapiens
aacctgcacaactgc

SEQ ID NO: 1771756 - DNA, 15 bp, Homo sapiens
acctgcacaactgca

SEQ ID NO: 1771757 - DNA, 15 bp, Homo sapiens
cctgcacaactgcat

SEQ ID NO: 1771758 - DNA, 15 bp, Homo sapiens
ctgcacaactgcatg

SEQ ID NO: 1771759 - DNA, 15 bp, Homo sapiens
tgcacaactgcatgg

SEQ ID NO: 1771760 - DNA, 15 bp, Homo sapiens
gcacaactgcatgga

SEQ ID NO: 1771761 - DNA, 15 bp, Homo sapiens
cacaactgcatggaa

SEQ ID NO: 1771762 - DNA, 15 bp, Homo sapiens
acaactgcatggaaa

SEQ ID NO: 1771763 - DNA, 15 bp, Homo sapiens
caactgcatggaaac

SEQ ID NO: 1771764 - DNA, 15 bp, Homo sapiens
aactgcatggaaact

SEQ ID NO: 1771765 - DNA, 15 bp, Homo sapiens
actgcatggaaactg

SEQ ID NO: 1771766 - DNA, 15 bp, Homo sapiens
ctgcatggaaactga

SEQ ID NO: 1771767 - DNA, 15 bp, Homo sapiens
tgcatggaaactgaa

SEQ ID NO: 1771768 - DNA, 15 bp, Homo sapiens
gcatggaaactgaac

SEQ ID NO: 1771769 - DNA, 15 bp, Homo sapiens
catggaaactgaaca

SEQ ID NO: 1771770 - DNA, 15 bp, Homo sapiens
atggaaactgaacaa

SEQ ID NO: 1771771 - DNA, 15 bp, Homo sapiens
tggaaactgaacaac

SEQ ID NO: 1771772 - DNA, 15 bp, Homo sapiens
ggaaactgaacaacc

SEQ ID NO: 1771773 - DNA, 15 bp, Homo sapiens
gaaactgaacaacct

SEQ ID NO: 1771774 - DNA, 15 bp, Homo sapiens
aaactgaacaacctg

SEQ ID NO: 1771775 - DNA, 15 bp, Homo sapiens
aactgaacaacctgt

SEQ ID NO: 1771776 - DNA, 15 bp, Homo sapiens
actgaacaacctgtt

SEQ ID NO: 1771777 - DNA, 15 bp, Homo sapiens
ctgaacaacctgttc

SEQ ID NO: 1771778 - DNA, 15 bp, Homo sapiens
tgaacaacctgttcc

SEQ ID NO: 1771779 - DNA, 15 bp, Homo sapiens
gaacaacctgttcct

SEQ ID NO: 1771780 - DNA, 15 bp, Homo sapiens
aacaacctgttcctg

SEQ ID NO: 1771781 - DNA, 15 bp, Homo sapiens
acaacctgttcctga

SEQ ID NO: 1771782 - DNA, 15 bp, Homo sapiens
caacctgttcctgaa

SEQ ID NO: 1771783 - DNA, 15 bp, Homo sapiens
aacctgttcctgaat

SEQ ID NO: 1771784 - DNA, 15 bp, Homo sapiens
acctgttcctgaatg

SEQ ID NO: 1771785 - DNA, 15 bp, Homo sapiens
cctgttcctgaatga

SEQ ID NO: 1771786 - DNA, 15 bp, Homo sapiens
ctgttcctgaatgaa

SEQ ID NO: 1771787 - DNA, 15 bp, Homo sapiens
tgttcctgaatgaat

SEQ ID NO: 1771788 - DNA, 15 bp, Homo sapiens
gttcctgaatgaata

SEQ ID NO: 1771789 - DNA, 15 bp, Homo sapiens
ttcctgaatgaatac

SEQ ID NO: 1771790 - DNA, 15 bp, Homo sapiens
tcctgaatgaatact

SEQ ID NO: 1771791 - DNA, 15 bp, Homo sapiens
cctgaatgaatactg

SEQ ID NO: 1771792 - DNA, 15 bp, Homo sapiens
ctgaatgaatactgg

SEQ ID NO: 1771793 - DNA, 15 bp, Homo sapiens
tgaatgaatactggg

SEQ ID NO: 1771794 - DNA, 15 bp, Homo sapiens
gaatgaatactggga

SEQ ID NO: 1771795 - DNA, 15 bp, Homo sapiens
aatgaatactgggaa

SEQ ID NO: 1771796 - DNA, 15 bp, Homo sapiens
atgaatactgggaaa

SEQ ID NO: 1771797 - DNA, 15 bp, Homo sapiens
tgaatactgggaaaa

SEQ ID NO: 1771798 - DNA, 15 bp, Homo sapiens
gaatactgggaaaat

SEQ ID NO: 1771799 - DNA, 15 bp, Homo sapiens
aatactgggaaaata

SEQ ID NO: 1771800 - DNA, 15 bp, Homo sapiens
atactgggaaaataa

SEQ ID NO: 1771801 - DNA, 15 bp, Homo sapiens
tactgggaaaataat

SEQ ID NO: 1771802 - DNA, 15 bp, Homo sapiens
actgggaaaataatg

SEQ ID NO: 1771803 - DNA, 15 bp, Homo sapiens
ctgggaaaataatga

SEQ ID NO: 1771804 - DNA, 15 bp, Homo sapiens
tgggaaaataatgaa

SEQ ID NO: 1771805 - DNA, 15 bp, Homo sapiens
gggaaaataatgaaa

SEQ ID NO: 1771806 - DNA, 15 bp, Homo sapiens
ggaaaataatgaaat

SEQ ID NO: 1771807 - DNA, 15 bp, Homo sapiens
gaaaataatgaaatt

SEQ ID NO: 1771808 - DNA, 15 bp, Homo sapiens
aaaataatgaaatta

SEQ ID NO: 1771809 - DNA, 15 bp, Homo sapiens
aaataatgaaattaa

SEQ ID NO: 1771810 - DNA, 15 bp, Homo sapiens
aataatgaaattaag

SEQ ID NO: 1771811 - DNA, 15 bp, Homo sapiens
ataatgaaattaagg

SEQ ID NO: 1771812 - DNA, 15 bp, Homo sapiens
taatgaaattaaggc

SEQ ID NO: 1771813 - DNA, 15 bp, Homo sapiens
aatgaaattaaggca

SEQ ID NO: 1771814 - DNA, 15 bp, Homo sapiens
atgaaattaaggcag

SEQ ID NO: 1771815 - DNA, 15 bp, Homo sapiens
tgaaattaaggcaga

SEQ ID NO: 1771816 - DNA, 15 bp, Homo sapiens
gaaattaaggcagaa

SEQ ID NO: 1771817 - DNA, 15 bp, Homo sapiens
aaattaaggcagaaa

SEQ ID NO: 1771818 - DNA, 15 bp, Homo sapiens
aattaaggcagaaac

SEQ ID NO: 1771819 - DNA, 15 bp, Homo sapiens
attaaggcagaaaca

SEQ ID NO: 1771820 - DNA, 15 bp, Homo sapiens
ttaaggcagaaacaa

SEQ ID NO: 1771821 - DNA, 15 bp, Homo sapiens
taaggcagaaacaaa

SEQ ID NO: 1771822 - DNA, 15 bp, Homo sapiens
aaggcagaaacaaag

SEQ ID NO: 1771823 - DNA, 15 bp, Homo sapiens
aggcagaaacaaaga

SEQ ID NO: 1771824 - DNA, 15 bp, Homo sapiens
ggcagaaacaaagaa

SEQ ID NO: 1771825 - DNA, 15 bp, Homo sapiens
gcagaaacaaagaag

SEQ ID NO: 1771826 - DNA, 15 bp, Homo sapiens
cagaaacaaagaagt

SEQ ID NO: 1771827 - DNA, 15 bp, Homo sapiens
agaaacaaagaagtt

SEQ ID NO: 1771828 - DNA, 15 bp, Homo sapiens
gaaacaaagaagttc

SEQ ID NO: 1771829 - DNA, 15 bp, Homo sapiens
aaacaaagaagttct

SEQ ID NO: 1771830 - DNA, 15 bp, Homo sapiens
aacaaagaagttctt

SEQ ID NO: 1771831 - DNA, 15 bp, Homo sapiens
acaaagaagttcttt

SEQ ID NO: 1771832 - DNA, 15 bp, Homo sapiens
caaagaagttctttg

SEQ ID NO: 1771833 - DNA, 15 bp, Homo sapiens
aaagaagttctttga

SEQ ID NO: 1771834 - DNA, 15 bp, Homo sapiens
aagaagttctttgaa

SEQ ID NO: 1771835 - DNA, 15 bp, Homo sapiens
agaagttctttgaaa

SEQ ID NO: 1771836 - DNA, 15 bp, Homo sapiens
gaagttctttgaaac

SEQ ID NO: 1771837 - DNA, 15 bp, Homo sapiens
aagttctttgaaacc

SEQ ID NO: 1771838 - DNA, 15 bp, Homo sapiens
agttctttgaaacca

SEQ ID NO: 1771839 - DNA, 15 bp, Homo sapiens
gttctttgaaaccaa

SEQ ID NO: 1771840 - DNA, 15 bp, Homo sapiens
ttctttgaaaccaat

SEQ ID NO: 1771841 - DNA, 15 bp, Homo sapiens
tctttgaaaccaatg

SEQ ID NO: 1771842 - DNA, 15 bp, Homo sapiens
ctttgaaaccaatga

SEQ ID NO: 1771843 - DNA, 15 bp, Homo sapiens
tttgaaaccaatgag

SEQ ID NO: 1771844 - DNA, 15 bp, Homo sapiens
ttgaaaccaatgaga

SEQ ID NO: 1771845 - DNA, 15 bp, Homo sapiens
tgaaaccaatgagaa

SEQ ID NO: 1771846 - DNA, 15 bp, Homo sapiens
gaaaccaatgagaac

SEQ ID NO: 1771847 - DNA, 15 bp, Homo sapiens
aaaccaatgagaacc

SEQ ID NO: 1771848 - DNA, 15 bp, Homo sapiens
aaccaatgagaacca

SEQ ID NO: 1771849 - DNA, 15 bp, Homo sapiens
accaatgagaaccaa

SEQ ID NO: 1771850 - DNA, 15 bp, Homo sapiens
ccaatgagaaccaag

SEQ ID NO: 1771851 - DNA, 15 bp, Homo sapiens
caatgagaaccaaga

SEQ ID NO: 1771852 - DNA, 15 bp, Homo sapiens
aatgagaaccaagac

SEQ ID NO: 1771853 - DNA, 15 bp, Homo sapiens
atgagaaccaagaca

SEQ ID NO: 1771854 - DNA, 15 bp, Homo sapiens
tgagaaccaagacac

SEQ ID NO: 1771855 - DNA, 15 bp, Homo sapiens
gagaaccaagacaca

SEQ ID NO: 1771856 - DNA, 15 bp, Homo sapiens
agaaccaagacacaa

SEQ ID NO: 1771857 - DNA, 15 bp, Homo sapiens
gaaccaagacacaac

SEQ ID NO: 1771858 - DNA, 15 bp, Homo sapiens
aaccaagacacaaca

SEQ ID NO: 1771859 - DNA, 15 bp, Homo sapiens
accaagacacaacat

SEQ ID NO: 1771860 - DNA, 15 bp, Homo sapiens
ccaagacacaacata

SEQ ID NO: 1771861 - DNA, 15 bp, Homo sapiens
caagacacaacatac

SEQ ID NO: 1771862 - DNA, 15 bp, Homo sapiens
aagacacaacatacc

SEQ ID NO: 1771863 - DNA, 15 bp, Homo sapiens
agacacaacataccc

SEQ ID NO: 1771864 - DNA, 15 bp, Homo sapiens
gacacaacataccca

SEQ ID NO: 1771865 - DNA, 15 bp, Homo sapiens
acacaacatacccaa

SEQ ID NO: 1771866 - DNA, 15 bp, Homo sapiens
cacaacatacccaaa

SEQ ID NO: 1771867 - DNA, 15 bp, Homo sapiens
acaacatacccaaat

SEQ ID NO: 1771868 - DNA, 15 bp, Homo sapiens
caacatacccaaatc

SEQ ID NO: 1771869 - DNA, 15 bp, Homo sapiens
aacatacccaaatct

SEQ ID NO: 1771870 - DNA, 15 bp, Homo sapiens
acatacccaaatctc

SEQ ID NO: 1771871 - DNA, 15 bp, Homo sapiens
catacccaaatctct

SEQ ID NO: 1771872 - DNA, 15 bp, Homo sapiens
atacccaaatctctg

SEQ ID NO: 1771873 - DNA, 15 bp, Homo sapiens
tacccaaatctctgg

SEQ ID NO: 1771874 - DNA, 15 bp, Homo sapiens
acccaaatctctggg

SEQ ID NO: 1771875 - DNA, 15 bp, Homo sapiens
cccaaatctctggga

SEQ ID NO: 1771876 - DNA, 15 bp, Homo sapiens
ccaaatctctgggac

SEQ ID NO: 1771877 - DNA, 15 bp, Homo sapiens
caaatctctgggaca

SEQ ID NO: 1771878 - DNA, 15 bp, Homo sapiens
aaatctctgggacac

SEQ ID NO: 1771879 - DNA, 15 bp, Homo sapiens
aatctctgggacaca

SEQ ID NO: 1771880 - DNA, 15 bp, Homo sapiens
atctctgggacacag

SEQ ID NO: 1771881 - DNA, 15 bp, Homo sapiens
tctctgggacacagc

SEQ ID NO: 1771882 - DNA, 15 bp, Homo sapiens
ctctgggacacagct

SEQ ID NO: 1771883 - DNA, 15 bp, Homo sapiens
tctgggacacagcta

SEQ ID NO: 1771884 - DNA, 15 bp, Homo sapiens
ctgggacacagctaa

SEQ ID NO: 1771885 - DNA, 15 bp, Homo sapiens
tgggacacagctaaa

SEQ ID NO: 1771886 - DNA, 15 bp, Homo sapiens
gggacacagctaaag

SEQ ID NO: 1771887 - DNA, 15 bp, Homo sapiens
ggacacagctaaagc

SEQ ID NO: 1771888 - DNA, 15 bp, Homo sapiens
gacacagctaaagca

SEQ ID NO: 1771889 - DNA, 15 bp, Homo sapiens
acacagctaaagcaa

SEQ ID NO: 1771890 - DNA, 15 bp, Homo sapiens
cacagctaaagcaat

SEQ ID NO: 1771891 - DNA, 15 bp, Homo sapiens
acagctaaagcaatg

SEQ ID NO: 1771892 - DNA, 15 bp, Homo sapiens
cagctaaagcaatgt

SEQ ID NO: 1771893 - DNA, 15 bp, Homo sapiens
agctaaagcaatgtt

SEQ ID NO: 1771894 - DNA, 15 bp, Homo sapiens
gctaaagcaatgttt

SEQ ID NO: 1771895 - DNA, 15 bp, Homo sapiens
ctaaagcaatgttta

SEQ ID NO: 1771896 - DNA, 15 bp, Homo sapiens
taaagcaatgtttag

SEQ ID NO: 1771897 - DNA, 15 bp, Homo sapiens
aaagcaatgtttaga

SEQ ID NO: 1771898 - DNA, 15 bp, Homo sapiens
aagcaatgtttagag

SEQ ID NO: 1771899 - DNA, 15 bp, Homo sapiens
agcaatgtttagagg

SEQ ID NO: 1771900 - DNA, 15 bp, Homo sapiens
gcaatgtttagaggg

SEQ ID NO: 1771901 - DNA, 15 bp, Homo sapiens
caatgtttagaggga

SEQ ID NO: 1771902 - DNA, 15 bp, Homo sapiens
aatgtttagagggaa

SEQ ID NO: 1771903 - DNA, 15 bp, Homo sapiens
atgtttagagggaag

SEQ ID NO: 1771904 - DNA, 15 bp, Homo sapiens
tgtttagagggaagt

SEQ ID NO: 1771905 - DNA, 15 bp, Homo sapiens
gtttagagggaagtt

SEQ ID NO: 1771906 - DNA, 15 bp, Homo sapiens
tttagagggaagttt

SEQ ID NO: 1771907 - DNA, 15 bp, Homo sapiens
ttagagggaagttta

SEQ ID NO: 1771908 - DNA, 15 bp, Homo sapiens
tagagggaagtttat

SEQ ID NO: 1771909 - DNA, 15 bp, Homo sapiens
gggaagtttatagca

SEQ ID NO: 1771910 - DNA, 15 bp, Homo sapiens
ggaagtttatagcac

SEQ ID NO: 1771911 - DNA, 15 bp, Homo sapiens
gaagtttatagcact

SEQ ID NO: 1771912 - DNA, 15 bp, Homo sapiens
aagtttatagcacta

SEQ ID NO: 1771913 - DNA, 15 bp, Homo sapiens
agtttatagcactaa

SEQ ID NO: 1771914 - DNA, 15 bp, Homo sapiens
gtttatagcactaaa

SEQ ID NO: 1771915 - DNA, 15 bp, Homo sapiens
tttatagcactaaat

SEQ ID NO: 1771916 - DNA, 15 bp, Homo sapiens
ttatagcactaaatg

SEQ ID NO: 1771917 - DNA, 15 bp, Homo sapiens
tatagcactaaatgc

SEQ ID NO: 1771918 - DNA, 15 bp, Homo sapiens
atagcactaaatgcc

SEQ ID NO: 1771919 - DNA, 15 bp, Homo sapiens
tagcactaaatgccc

SEQ ID NO: 1771920 - DNA, 15 bp, Homo sapiens
agcactaaatgccca

SEQ ID NO: 1771921 - DNA, 15 bp, Homo sapiens
gcactaaatgcccac

SEQ ID NO: 1771922 - DNA, 15 bp, Homo sapiens
cactaaatgcccaca

SEQ ID NO: 1771923 - DNA, 15 bp, Homo sapiens
actaaatgcccacag

SEQ ID NO: 1771924 - DNA, 15 bp, Homo sapiens
ctaaatgcccacagg

SEQ ID NO: 1771925 - DNA, 15 bp, Homo sapiens
taaatgcccacagga

SEQ ID NO: 1771926 - DNA, 15 bp, Homo sapiens
aaatgcccacaggag

SEQ ID NO: 1771927 - DNA, 15 bp, Homo sapiens
aatgcccacaggaga

SEQ ID NO: 1771928 - DNA, 15 bp, Homo sapiens
atgcccacaggagaa

SEQ ID NO: 1771929 - DNA, 15 bp, Homo sapiens
tgcccacaggagaaa

SEQ ID NO: 1771930 - DNA, 15 bp, Homo sapiens
gcccacaggagaaag

SEQ ID NO: 1771931 - DNA, 15 bp, Homo sapiens
cccacaggagaaagc

SEQ ID NO: 1771932 - DNA, 15 bp, Homo sapiens
ccacaggagaaagca

SEQ ID NO: 1771933 - DNA, 15 bp, Homo sapiens
cacaggagaaagcag

SEQ ID NO: 1771934 - DNA, 15 bp, Homo sapiens
acaggagaaagcaga

SEQ ID NO: 1771935 - DNA, 15 bp, Homo sapiens
caggagaaagcagaa

SEQ ID NO: 1771936 - DNA, 15 bp, Homo sapiens
aggagaaagcagaaa

SEQ ID NO: 1771937 - DNA, 15 bp, Homo sapiens
ggagaaagcagaaaa

SEQ ID NO: 1771938 - DNA, 15 bp, Homo sapiens
gagaaagcagaaaag

SEQ ID NO: 1771939 - DNA, 15 bp, Homo sapiens
aagcagaaaagatgt

SEQ ID NO: 1771940 - DNA, 15 bp, Homo sapiens
agcagaaaagatgta

SEQ ID NO: 1771941 - DNA, 15 bp, Homo sapiens
gcagaaaagatgtaa

SEQ ID NO: 1771942 - DNA, 15 bp, Homo sapiens
cagaaaagatgtaaa

SEQ ID NO: 1771943 - DNA, 15 bp, Homo sapiens
agaaaagatgtaaaa

SEQ ID NO: 1771944 - DNA, 15 bp, Homo sapiens
gaaaagatgtaaaat

SEQ ID NO: 1771945 - DNA, 15 bp, Homo sapiens
aaaagatgtaaaatt

SEQ ID NO: 1771946 - DNA, 15 bp, Homo sapiens
aaagatgtaaaattg

SEQ ID NO: 1771947 - DNA, 15 bp, Homo sapiens
aagatgtaaaattga

SEQ ID NO: 1771948 - DNA, 15 bp, Homo sapiens
agatgtaaaattgac

SEQ ID NO: 1771949 - DNA, 15 bp, Homo sapiens
gatgtaaaattgaca

SEQ ID NO: 1771950 - DNA, 15 bp, Homo sapiens
atgtaaaattgacac

SEQ ID NO: 1771951 - DNA, 15 bp, Homo sapiens
tgtaaaattgacacc

SEQ ID NO: 1771952 - DNA, 15 bp, Homo sapiens
gtaaaattgacaccc

SEQ ID NO: 1771953 - DNA, 15 bp, Homo sapiens
taaaattgacaccct

SEQ ID NO: 1771954 - DNA, 15 bp, Homo sapiens
aaaattgacacccta

SEQ ID NO: 1771955 - DNA, 15 bp, Homo sapiens
aaattgacaccctaa

SEQ ID NO: 1771956 - DNA, 15 bp, Homo sapiens
aattgacaccctaac

SEQ ID NO: 1771957 - DNA, 15 bp, Homo sapiens
attgacaccctaaca

SEQ ID NO: 1771958 - DNA, 15 bp, Homo sapiens
ttgacaccctaacat

SEQ ID NO: 1771959 - DNA, 15 bp, Homo sapiens
tgacaccctaacatc

SEQ ID NO: 1771960 - DNA, 15 bp, Homo sapiens
gacaccctaacatca

SEQ ID NO: 1771961 - DNA, 15 bp, Homo sapiens
acaccctaacatcac

SEQ ID NO: 1771962 - DNA, 15 bp, Homo sapiens
caccctaacatcaca

SEQ ID NO: 1771963 - DNA, 15 bp, Homo sapiens
accctaacatcacaa

SEQ ID NO: 1771964 - DNA, 15 bp, Homo sapiens
ccctaacatcacaat

SEQ ID NO: 1771965 - DNA, 15 bp, Homo sapiens
cctaacatcacaatt

SEQ ID NO: 1771966 - DNA, 15 bp, Homo sapiens
ctaacatcacaatta

SEQ ID NO: 1771967 - DNA, 15 bp, Homo sapiens
taacatcacaattaa

SEQ ID NO: 1771968 - DNA, 15 bp, Homo sapiens
aacatcacaattaaa

SEQ ID NO: 1771969 - DNA, 15 bp, Homo sapiens
acatcacaattaaaa

SEQ ID NO: 1771970 - DNA, 15 bp, Homo sapiens
catcacaattaaaag

SEQ ID NO: 1771971 - DNA, 15 bp, Homo sapiens
atcacaattaaaaga

SEQ ID NO: 1771972 - DNA, 15 bp, Homo sapiens
tcacaattaaaagaa

SEQ ID NO: 1771973 - DNA, 15 bp, Homo sapiens
cacaattaaaagaac

SEQ ID NO: 1771974 - DNA, 15 bp, Homo sapiens
acaattaaaagaact

SEQ ID NO: 1771975 - DNA, 15 bp, Homo sapiens
caattaaaagaacta

SEQ ID NO: 1771976 - DNA, 15 bp, Homo sapiens
aattaaaagaactag

SEQ ID NO: 1771977 - DNA, 15 bp, Homo sapiens
attaaaagaactaga

SEQ ID NO: 1771978 - DNA, 15 bp, Homo sapiens
ttaaaagaactagag

SEQ ID NO: 1771979 - DNA, 15 bp, Homo sapiens
taaaagaactagaga

SEQ ID NO: 1771980 - DNA, 15 bp, Homo sapiens
aaaagaactagagaa

SEQ ID NO: 1771981 - DNA, 15 bp, Homo sapiens
aaagaactagagaag

SEQ ID NO: 1771982 - DNA, 15 bp, Homo sapiens
aagaactagagaagc

SEQ ID NO: 1771983 - DNA, 15 bp, Homo sapiens
agaactagagaagca

SEQ ID NO: 1771984 - DNA, 15 bp, Homo sapiens
gaactagagaagcaa

SEQ ID NO: 1771985 - DNA, 15 bp, Homo sapiens
aactagagaagcaag

SEQ ID NO: 1771986 - DNA, 15 bp, Homo sapiens
actagagaagcaaga

SEQ ID NO: 1771987 - DNA, 15 bp, Homo sapiens
ctagagaagcaagag

SEQ ID NO: 1771988 - DNA, 15 bp, Homo sapiens
tagagaagcaagagc

SEQ ID NO: 1771989 - DNA, 15 bp, Homo sapiens
agagaagcaagagca

SEQ ID NO: 1771990 - DNA, 15 bp, Homo sapiens
gagaagcaagagcaa

SEQ ID NO: 1771991 - DNA, 15 bp, Homo sapiens
agaagcaagagcaaa

SEQ ID NO: 1771992 - DNA, 15 bp, Homo sapiens
gaagcaagagcaaac

SEQ ID NO: 1771993 - DNA, 15 bp, Homo sapiens
aagcaagagcaaact

SEQ ID NO: 1771994 - DNA, 15 bp, Homo sapiens
agcaagagcaaacta

SEQ ID NO: 1771995 - DNA, 15 bp, Homo sapiens
gcaagagcaaactaa

SEQ ID NO: 1771996 - DNA, 15 bp, Homo sapiens
caagagcaaactaat

SEQ ID NO: 1771997 - DNA, 15 bp, Homo sapiens
aagagcaaactaatt

SEQ ID NO: 1771998 - DNA, 15 bp, Homo sapiens
agagcaaactaattc

SEQ ID NO: 1771999 - DNA, 15 bp, Homo sapiens
gagcaaactaattca

SEQ ID NO: 1772000 - DNA, 15 bp, Homo sapiens
agcaaactaattcaa

SEQ ID NO: 1772001 - DNA, 15 bp, Homo sapiens
gcaaactaattcaaa

SEQ ID NO: 1772002 - DNA, 15 bp, Homo sapiens
caaactaattcaaaa

SEQ ID NO: 1772003 - DNA, 15 bp, Homo sapiens
aaactaattcaaaag

SEQ ID NO: 1772004 - DNA, 15 bp, Homo sapiens
aactaattcaaaagc

SEQ ID NO: 1772005 - DNA, 15 bp, Homo sapiens
actaattcaaaagct

SEQ ID NO: 1772006 - DNA, 15 bp, Homo sapiens
ctaattcaaaagcta

SEQ ID NO: 1772007 - DNA, 15 bp, Homo sapiens
taattcaaaagctag

SEQ ID NO: 1772008 - DNA, 15 bp, Homo sapiens
aattcaaaagctagc

SEQ ID NO: 1772009 - DNA, 15 bp, Homo sapiens
attcaaaagctagca

SEQ ID NO: 1772010 - DNA, 15 bp, Homo sapiens
ttcaaaagctagcag

SEQ ID NO: 1772011 - DNA, 15 bp, Homo sapiens
tcaaaagctagcaga

SEQ ID NO: 1772012 - DNA, 15 bp, Homo sapiens
caaaagctagcagaa

SEQ ID NO: 1772013 - DNA, 15 bp, Homo sapiens
aaaagctagcagaag

SEQ ID NO: 1772014 - DNA, 15 bp, Homo sapiens
aaagctagcagaaga

SEQ ID NO: 1772015 - DNA, 15 bp, Homo sapiens
aagctagcagaagat

SEQ ID NO: 1772016 - DNA, 15 bp, Homo sapiens
agctagcagaagata

SEQ ID NO: 1772017 - DNA, 15 bp, Homo sapiens
gctagcagaagataa

SEQ ID NO: 1772018 - DNA, 15 bp, Homo sapiens
ctagcagaagataag

SEQ ID NO: 1772019 - DNA, 15 bp, Homo sapiens
tagcagaagataaga

SEQ ID NO: 1772020 - DNA, 15 bp, Homo sapiens
agcagaagataagaa

SEQ ID NO: 1772021 - DNA, 15 bp, Homo sapiens
gcagaagataagaaa

SEQ ID NO: 1772022 - DNA, 15 bp, Homo sapiens
cagaagataagaaat

SEQ ID NO: 1772023 - DNA, 15 bp, Homo sapiens
agaagataagaaata

SEQ ID NO: 1772024 - DNA, 15 bp, Homo sapiens
gaagataagaaataa

SEQ ID NO: 1772025 - DNA, 15 bp, Homo sapiens
aagataagaaataac

SEQ ID NO: 1772026 - DNA, 15 bp, Homo sapiens
agataagaaataacc

SEQ ID NO: 1772027 - DNA, 15 bp, Homo sapiens
gataagaaataacca

SEQ ID NO: 1772028 - DNA, 15 bp, Homo sapiens
ataagaaataaccaa

SEQ ID NO: 1772029 - DNA, 15 bp, Homo sapiens
taagaaataaccaag

SEQ ID NO: 1772030 - DNA, 15 bp, Homo sapiens
aagaaataaccaagg

SEQ ID NO: 1772031 - DNA, 15 bp, Homo sapiens
agaaataaccaaggt

SEQ ID NO: 1772032 - DNA, 15 bp, Homo sapiens
gaaataaccaaggtc

SEQ ID NO: 1772033 - DNA, 15 bp, Homo sapiens
aaataaccaaggtca

SEQ ID NO: 1772034 - DNA, 15 bp, Homo sapiens
aataaccaaggtcag

SEQ ID NO: 1772035 - DNA, 15 bp, Homo sapiens
ataaccaaggtcaga

SEQ ID NO: 1772036 - DNA, 15 bp, Homo sapiens
taaccaaggtcagag

SEQ ID NO: 1772037 - DNA, 15 bp, Homo sapiens
aaccaaggtcagaga

SEQ ID NO: 1772038 - DNA, 15 bp, Homo sapiens
accaaggtcagagaa

SEQ ID NO: 1772039 - DNA, 15 bp, Homo sapiens
ccaaggtcagagaag

SEQ ID NO: 1772040 - DNA, 15 bp, Homo sapiens
caaggtcagagaaga

SEQ ID NO: 1772041 - DNA, 15 bp, Homo sapiens
aaggtcagagaagaa

SEQ ID NO: 1772042 - DNA, 15 bp, Homo sapiens
aggtcagagaagaac

SEQ ID NO: 1772043 - DNA, 15 bp, Homo sapiens
ggtcagagaagaact

SEQ ID NO: 1772044 - DNA, 15 bp, Homo sapiens
gtcagagaagaactg

SEQ ID NO: 1772045 - DNA, 15 bp, Homo sapiens
tcagagaagaactga

SEQ ID NO: 1772046 - DNA, 15 bp, Homo sapiens
cagagaagaactgaa

SEQ ID NO: 1772047 - DNA, 15 bp, Homo sapiens
agagaagaactgaag

SEQ ID NO: 1772048 - DNA, 15 bp, Homo sapiens
gagaagaactgaagg

SEQ ID NO: 1772049 - DNA, 15 bp, Homo sapiens
agaagaactgaagga

SEQ ID NO: 1772050 - DNA, 15 bp, Homo sapiens
gaagaactgaaggag

SEQ ID NO: 1772051 - DNA, 15 bp, Homo sapiens
aagaactgaaggaga

SEQ ID NO: 1772052 - DNA, 15 bp, Homo sapiens
agaactgaaggagag

SEQ ID NO: 1772053 - DNA, 15 bp, Homo sapiens
gaactgaaggagaga

SEQ ID NO: 1772054 - DNA, 15 bp, Homo sapiens
aactgaaggagagag

SEQ ID NO: 1772055 - DNA, 15 bp, Homo sapiens
actgaaggagagaga

SEQ ID NO: 1772056 - DNA, 15 bp, Homo sapiens
ctgaaggagagagaa

SEQ ID NO: 1772057 - DNA, 15 bp, Homo sapiens
tgaaggagagagaaa

SEQ ID NO: 1772058 - DNA, 15 bp, Homo sapiens
gaaggagagagaaac

SEQ ID NO: 1772059 - DNA, 15 bp, Homo sapiens
aaggagagagaaaca

SEQ ID NO: 1772060 - DNA, 15 bp, Homo sapiens
aggagagagaaacac

SEQ ID NO: 1772061 - DNA, 15 bp, Homo sapiens
ggagagagaaacacg

SEQ ID NO: 1772062 - DNA, 15 bp, Homo sapiens
gagagagaaacacga

SEQ ID NO: 1772063 - DNA, 15 bp, Homo sapiens
agagagaaacacgaa

SEQ ID NO: 1772064 - DNA, 15 bp, Homo sapiens
gagagaaacacgaaa

SEQ ID NO: 1772065 - DNA, 15 bp, Homo sapiens
agagaaacacgaaaa

SEQ ID NO: 1772066 - DNA, 15 bp, Homo sapiens
gagaaacacgaaaaa

SEQ ID NO: 1772067 - DNA, 15 bp, Homo sapiens
agaaacacgaaaaac

SEQ ID NO: 1772068 - DNA, 15 bp, Homo sapiens
gaaacacgaaaaacc

SEQ ID NO: 1772069 - DNA, 15 bp, Homo sapiens
aaacacgaaaaaccc

SEQ ID NO: 1772070 - DNA, 15 bp, Homo sapiens
aacacgaaaaaccct

SEQ ID NO: 1772071 - DNA, 15 bp, Homo sapiens
acacgaaaaaccctt

SEQ ID NO: 1772072 - DNA, 15 bp, Homo sapiens
cacgaaaaacccttc

SEQ ID NO: 1772073 - DNA, 15 bp, Homo sapiens
acgaaaaacccttca

SEQ ID NO: 1772074 - DNA, 15 bp, Homo sapiens
cgaaaaacccttcaa

SEQ ID NO: 1772075 - DNA, 15 bp, Homo sapiens
gaaaaacccttcaaa

SEQ ID NO: 1772076 - DNA, 15 bp, Homo sapiens
aaaaacccttcaaaa

SEQ ID NO: 1772077 - DNA, 15 bp, Homo sapiens
aaaacccttcaaaaa

SEQ ID NO: 1772078 - DNA, 15 bp, Homo sapiens
aaacccttcaaaaaa

SEQ ID NO: 1772079 - DNA, 15 bp, Homo sapiens
aacccttcaaaaaat

SEQ ID NO: 1772080 - DNA, 15 bp, Homo sapiens
acccttcaaaaaatc

SEQ ID NO: 1772081 - DNA, 15 bp, Homo sapiens
cccttcaaaaaatca

SEQ ID NO: 1772082 - DNA, 15 bp, Homo sapiens
ccttcaaaaaatcaa

SEQ ID NO: 1772083 - DNA, 15 bp, Homo sapiens
cttcaaaaaatcaat

SEQ ID NO: 1772084 - DNA, 15 bp, Homo sapiens
ttcaaaaaatcaatg

SEQ ID NO: 1772085 - DNA, 15 bp, Homo sapiens
tcaaaaaatcaatga

SEQ ID NO: 1772086 - DNA, 15 bp, Homo sapiens
caaaaaatcaatgaa

SEQ ID NO: 1772087 - DNA, 15 bp, Homo sapiens
aaaaatcaatgaatc

SEQ ID NO: 1772088 - DNA, 15 bp, Homo sapiens
aaaatcaatgaatcc

SEQ ID NO: 1772089 - DNA, 15 bp, Homo sapiens
aaatcaatgaatcca

SEQ ID NO: 1772090 - DNA, 15 bp, Homo sapiens
aatcaatgaatccag

SEQ ID NO: 1772091 - DNA, 15 bp, Homo sapiens
atcaatgaatccagg

SEQ ID NO: 1772092 - DNA, 15 bp, Homo sapiens
tcaatgaatccagga

SEQ ID NO: 1772093 - DNA, 15 bp, Homo sapiens
caatgaatccaggag

SEQ ID NO: 1772094 - DNA, 15 bp, Homo sapiens
aatgaatccaggagc

SEQ ID NO: 1772095 - DNA, 15 bp, Homo sapiens
atgaatccaggagct

SEQ ID NO: 1772096 - DNA, 15 bp, Homo sapiens
tgaatccaggagctg

SEQ ID NO: 1772097 - DNA, 15 bp, Homo sapiens
gaatccaggagctgg

SEQ ID NO: 1772098 - DNA, 15 bp, Homo sapiens
aatccaggagctggt

SEQ ID NO: 1772099 - DNA, 15 bp, Homo sapiens
atccaggagctggtt

SEQ ID NO: 1772100 - DNA, 15 bp, Homo sapiens
tccaggagctggttt

SEQ ID NO: 1772101 - DNA, 15 bp, Homo sapiens
ccaggagctggtttt

SEQ ID NO: 1772102 - DNA, 15 bp, Homo sapiens
caggagctggttttt

SEQ ID NO: 1772103 - DNA, 15 bp, Homo sapiens
aggagctggtttttt

SEQ ID NO: 1772104 - DNA, 15 bp, Homo sapiens
ggagctggttttttg

SEQ ID NO: 1772105 - DNA, 15 bp, Homo sapiens
gagctggttttttga

SEQ ID NO: 1772106 - DNA, 15 bp, Homo sapiens
agctggttttttgaa

SEQ ID NO: 1772107 - DNA, 15 bp, Homo sapiens
gctggttttttgaaa

SEQ ID NO: 1772108 - DNA, 15 bp, Homo sapiens
ctggttttttgaaaa

SEQ ID NO: 1772109 - DNA, 15 bp, Homo sapiens
tggttttttgaaaag

SEQ ID NO: 1772110 - DNA, 15 bp, Homo sapiens
ggttttttgaaaaga

SEQ ID NO: 1772111 - DNA, 15 bp, Homo sapiens
gttttttgaaaagat

SEQ ID NO: 1772112 - DNA, 15 bp, Homo sapiens
ttttttgaaaagatt

SEQ ID NO: 1772113 - DNA, 15 bp, Homo sapiens
tttttgaaaagatta

SEQ ID NO: 1772114 - DNA, 15 bp, Homo sapiens
ttttgaaaagattaa

SEQ ID NO: 1772115 - DNA, 15 bp, Homo sapiens
tttgaaaagattaac

SEQ ID NO: 1772116 - DNA, 15 bp, Homo sapiens
ttgaaaagattaaca

SEQ ID NO: 1772117 - DNA, 15 bp, Homo sapiens
tgaaaagattaacaa

SEQ ID NO: 1772118 - DNA, 15 bp, Homo sapiens
gaaaagattaacaaa

SEQ ID NO: 1772119 - DNA, 15 bp, Homo sapiens
aaaagattaacaaaa

SEQ ID NO: 1772120 - DNA, 15 bp, Homo sapiens
aaagattaacaaaat

SEQ ID NO: 1772121 - DNA, 15 bp, Homo sapiens
aagattaacaaaata

SEQ ID NO: 1772122 - DNA, 15 bp, Homo sapiens
agattaacaaaatag

SEQ ID NO: 1772123 - DNA, 15 bp, Homo sapiens
gattaacaaaataga

SEQ ID NO: 1772124 - DNA, 15 bp, Homo sapiens
attaacaaaatagat

SEQ ID NO: 1772125 - DNA, 15 bp, Homo sapiens
ttaacaaaatagata

SEQ ID NO: 1772126 - DNA, 15 bp, Homo sapiens
taacaaaatagatag

SEQ ID NO: 1772127 - DNA, 15 bp, Homo sapiens
aaaagggttgtttta

SEQ ID NO: 1772128 - DNA, 15 bp, Homo sapiens
aaagggttgttttag

SEQ ID NO: 1772129 - DNA, 15 bp, Homo sapiens
aagggttgttttagt

SEQ ID NO: 1772130 - DNA, 15 bp, Homo sapiens
agggttgttttagtc

SEQ ID NO: 1772131 - DNA, 15 bp, Homo sapiens
gggttgttttagtca

SEQ ID NO: 1772132 - DNA, 15 bp, Homo sapiens
ggttgttttagtcaa

SEQ ID NO: 1772133 - DNA, 15 bp, Homo sapiens
gttgttttagtcaaa

SEQ ID NO: 1772134 - DNA, 15 bp, Homo sapiens
ttgttttagtcaaac

SEQ ID NO: 1772135 - DNA, 15 bp, Homo sapiens
tgttttagtcaaacc

SEQ ID NO: 1772136 - DNA, 15 bp, Homo sapiens
gttttagtcaaacca

SEQ ID NO: 1772137 - DNA, 15 bp, Homo sapiens
ttttagtcaaaccaa

SEQ ID NO: 1772138 - DNA, 15 bp, Homo sapiens
tttagtcaaaccaag

SEQ ID NO: 1772139 - DNA, 15 bp, Homo sapiens
ttagtcaaaccaagt

SEQ ID NO: 1772140 - DNA, 15 bp, Homo sapiens
tagtcaaaccaagtt

SEQ ID NO: 1772141 - DNA, 15 bp, Homo sapiens
agtcaaaccaagttc

SEQ ID NO: 1772142 - DNA, 15 bp, Homo sapiens
gtcaaaccaagttcg

SEQ ID NO: 1772143 - DNA, 15 bp, Homo sapiens
tcaaaccaagttcgg

SEQ ID NO: 1772144 - DNA, 15 bp, Homo sapiens
caaaccaagttcggt

SEQ ID NO: 1772145 - DNA, 15 bp, Homo sapiens
aaaccaagttcggtg

SEQ ID NO: 1772146 - DNA, 15 bp, Homo sapiens
aaccaagttcggtgc

SEQ ID NO: 1772147 - DNA, 15 bp, Homo sapiens
accaagttcggtgct

SEQ ID NO: 1772148 - DNA, 15 bp, Homo sapiens
ccaagttcggtgctt

SEQ ID NO: 1772149 - DNA, 15 bp, Homo sapiens
caagttcggtgcttt

SEQ ID NO: 1772150 - DNA, 15 bp, Homo sapiens
aagttcggtgctttg

SEQ ID NO: 1772151 - DNA, 15 bp, Homo sapiens
agttcggtgctttga

SEQ ID NO: 1772152 - DNA, 15 bp, Homo sapiens
gttcggtgctttgaa

SEQ ID NO: 1772153 - DNA, 15 bp, Homo sapiens
ttcggtgctttgaaa

SEQ ID NO: 1772154 - DNA, 15 bp, Homo sapiens
tcggtgctttgaaat

SEQ ID NO: 1772155 - DNA, 15 bp, Homo sapiens
cggtgctttgaaatg

SEQ ID NO: 1772156 - DNA, 15 bp, Homo sapiens
ggtgctttgaaatga

SEQ ID NO: 1772157 - DNA, 15 bp, Homo sapiens
gtgctttgaaatgac

SEQ ID NO: 1772158 - DNA, 15 bp, Homo sapiens
tgctttgaaatgact

SEQ ID NO: 1772159 - DNA, 15 bp, Homo sapiens
gctttgaaatgactc

SEQ ID NO: 1772160 - DNA, 15 bp, Homo sapiens
ctttgaaatgactca

SEQ ID NO: 1772161 - DNA, 15 bp, Homo sapiens
tttgaaatgactcag

SEQ ID NO: 1772162 - DNA, 15 bp, Homo sapiens
ttgaaatgactcaga

SEQ ID NO: 1772163 - DNA, 15 bp, Homo sapiens
tgaaatgactcagag

SEQ ID NO: 1772164 - DNA, 15 bp, Homo sapiens
gaaatgactcagagg

SEQ ID NO: 1772165 - DNA, 15 bp, Homo sapiens
aaatgactcagaggc

SEQ ID NO: 1772166 - DNA, 15 bp, Homo sapiens
aatgactcagaggca

SEQ ID NO: 1772167 - DNA, 15 bp, Homo sapiens
atgactcagaggcaa

SEQ ID NO: 1772168 - DNA, 15 bp, Homo sapiens
tgactcagaggcaag

SEQ ID NO: 1772169 - DNA, 15 bp, Homo sapiens
gactcagaggcaagt

SEQ ID NO: 1772170 - DNA, 15 bp, Homo sapiens
actcagaggcaagtt

SEQ ID NO: 1772171 - DNA, 15 bp, Homo sapiens
ctcagaggcaagttg

SEQ ID NO: 1772172 - DNA, 15 bp, Homo sapiens
tcagaggcaagttgc

SEQ ID NO: 1772173 - DNA, 15 bp, Homo sapiens
cagaggcaagttgca

SEQ ID NO: 1772174 - DNA, 15 bp, Homo sapiens
agaggcaagttgcag

SEQ ID NO: 1772175 - DNA, 15 bp, Homo sapiens
gaggcaagttgcaga

SEQ ID NO: 1772176 - DNA, 15 bp, Homo sapiens
aggcaagttgcagaa

SEQ ID NO: 1772177 - DNA, 15 bp, Homo sapiens
ggcaagttgcagaaa

SEQ ID NO: 1772178 - DNA, 15 bp, Homo sapiens
gcaagttgcagaaaa

SEQ ID NO: 1772179 - DNA, 15 bp, Homo sapiens
caagttgcagaaaat

SEQ ID NO: 1772180 - DNA, 15 bp, Homo sapiens
aagttgcagaaaata

SEQ ID NO: 1772181 - DNA, 15 bp, Homo sapiens
agttgcagaaaatat

SEQ ID NO: 1772182 - DNA, 15 bp, Homo sapiens
gttgcagaaaatatt

SEQ ID NO: 1772183 - DNA, 15 bp, Homo sapiens
ttgcagaaaatattg

SEQ ID NO: 1772184 - DNA, 15 bp, Homo sapiens
tgcagaaaatattgt

SEQ ID NO: 1772185 - DNA, 15 bp, Homo sapiens
gcagaaaatattgta

SEQ ID NO: 1772186 - DNA, 15 bp, Homo sapiens
cagaaaatattgtag

SEQ ID NO: 1772187 - DNA, 15 bp, Homo sapiens
agaaaatattgtaga

SEQ ID NO: 1772188 - DNA, 15 bp, Homo sapiens
gaaaatattgtagac

SEQ ID NO: 1772189 - DNA, 15 bp, Homo sapiens
aaaatattgtagact

SEQ ID NO: 1772190 - DNA, 15 bp, Homo sapiens
aaatattgtagactt

SEQ ID NO: 1772191 - DNA, 15 bp, Homo sapiens
aatattgtagactta

SEQ ID NO: 1772192 - DNA, 15 bp, Homo sapiens
atattgtagacttag

SEQ ID NO: 1772193 - DNA, 15 bp, Homo sapiens
tattgtagacttaga

SEQ ID NO: 1772194 - DNA, 15 bp, Homo sapiens
attgtagacttagat

SEQ ID NO: 1772195 - DNA, 15 bp, Homo sapiens
ttgtagacttagatg

SEQ ID NO: 1772196 - DNA, 15 bp, Homo sapiens
tgtagacttagatgt

SEQ ID NO: 1772197 - DNA, 15 bp, Homo sapiens
gtagacttagatgta

SEQ ID NO: 1772198 - DNA, 15 bp, Homo sapiens
tagacttagatgtag

SEQ ID NO: 1772199 - DNA, 15 bp, Homo sapiens
agacttagatgtaga

SEQ ID NO: 1772200 - DNA, 15 bp, Homo sapiens
gacttagatgtagaa

SEQ ID NO: 1772201 - DNA, 15 bp, Homo sapiens
acttagatgtagaaa

SEQ ID NO: 1772202 - DNA, 15 bp, Homo sapiens
cttagatgtagaaaa

SEQ ID NO: 1772203 - DNA, 15 bp, Homo sapiens
ttagatgtagaaaag

SEQ ID NO: 1772204 - DNA, 15 bp, Homo sapiens
tagatgtagaaaaga

SEQ ID NO: 1772205 - DNA, 15 bp, Homo sapiens
agatgtagaaaagat

SEQ ID NO: 1772206 - DNA, 15 bp, Homo sapiens
gatgtagaaaagata

SEQ ID NO: 1772207 - DNA, 15 bp, Homo sapiens
atgtagaaaagatat

SEQ ID NO: 1772208 - DNA, 15 bp, Homo sapiens
tgtagaaaagatatg

SEQ ID NO: 1772209 - DNA, 15 bp, Homo sapiens
gtagaaaagatatga

SEQ ID NO: 1772210 - DNA, 15 bp, Homo sapiens
tagaaaagatatgag

SEQ ID NO: 1772211 - DNA, 15 bp, Homo sapiens
agaaaagatatgagg

SEQ ID NO: 1772212 - DNA, 15 bp, Homo sapiens
gaaaagatatgaggg

SEQ ID NO: 1772213 - DNA, 15 bp, Homo sapiens
aaaagatatgagggg

SEQ ID NO: 1772214 - DNA, 15 bp, Homo sapiens
aaagatatgaggggg

SEQ ID NO: 1772215 - DNA, 15 bp, Homo sapiens
aagatatgagggggc

SEQ ID NO: 1772216 - DNA, 15 bp, Homo sapiens
agatatgagggggca

SEQ ID NO: 1772217 - DNA, 15 bp, Homo sapiens
gatatgagggggcaa

SEQ ID NO: 1772218 - DNA, 15 bp, Homo sapiens
atatgagggggcaac

SEQ ID NO: 1772219 - DNA, 15 bp, Homo sapiens
tatgagggggcaacg

SEQ ID NO: 1772220 - DNA, 15 bp, Homo sapiens
atgagggggcaacgt

SEQ ID NO: 1772221 - DNA, 15 bp, Homo sapiens
tgagggggcaacgta

SEQ ID NO: 1772222 - DNA, 15 bp, Homo sapiens
gagggggcaacgtaa

SEQ ID NO: 1772223 - DNA, 15 bp, Homo sapiens
agggggcaacgtaag

SEQ ID NO: 1772224 - DNA, 15 bp, Homo sapiens
gggggcaacgtaaga

SEQ ID NO: 1772225 - DNA, 15 bp, Homo sapiens
ggggcaacgtaagaa

SEQ ID NO: 1772226 - DNA, 15 bp, Homo sapiens
gggcaacgtaagaaa

SEQ ID NO: 1772227 - DNA, 15 bp, Homo sapiens
ggcaacgtaagaaac

SEQ ID NO: 1772228 - DNA, 15 bp, Homo sapiens
gcaacgtaagaaact

SEQ ID NO: 1772229 - DNA, 15 bp, Homo sapiens
caacgtaagaaacta

SEQ ID NO: 1772230 - DNA, 15 bp, Homo sapiens
aacgtaagaaactag

SEQ ID NO: 1772231 - DNA, 15 bp, Homo sapiens
acgtaagaaactaga

SEQ ID NO: 1772232 - DNA, 15 bp, Homo sapiens
cgtaagaaactagaa

SEQ ID NO: 1772233 - DNA, 15 bp, Homo sapiens
gtaagaaactagaaa

SEQ ID NO: 1772234 - DNA, 15 bp, Homo sapiens
taagaaactagaaag

SEQ ID NO: 1772235 - DNA, 15 bp, Homo sapiens
aagaaactagaaagg

SEQ ID NO: 1772236 - DNA, 15 bp, Homo sapiens
agaaactagaaagga

SEQ ID NO: 1772237 - DNA, 15 bp, Homo sapiens
gaaactagaaaggat

SEQ ID NO: 1772238 - DNA, 15 bp, Homo sapiens
aaactagaaaggatt

SEQ ID NO: 1772239 - DNA, 15 bp, Homo sapiens
aactagaaaggattg

SEQ ID NO: 1772240 - DNA, 15 bp, Homo sapiens
actagaaaggattgc

SEQ ID NO: 1772241 - DNA, 15 bp, Homo sapiens
ctagaaaggattgct

SEQ ID NO: 1772242 - DNA, 15 bp, Homo sapiens
tagaaaggattgcta

SEQ ID NO: 1772243 - DNA, 15 bp, Homo sapiens
agaaaggattgctag

SEQ ID NO: 1772244 - DNA, 15 bp, Homo sapiens
gaaaggattgctagg

SEQ ID NO: 1772245 - DNA, 15 bp, Homo sapiens
aaaggattgctaggt

SEQ ID NO: 1772246 - DNA, 15 bp, Homo sapiens
aaggattgctaggtg

SEQ ID NO: 1772247 - DNA, 15 bp, Homo sapiens
aggattgctaggtgc

SEQ ID NO: 1772248 - DNA, 15 bp, Homo sapiens
ggattgctaggtgca

SEQ ID NO: 1772249 - DNA, 15 bp, Homo sapiens
gattgctaggtgcag

SEQ ID NO: 1772250 - DNA, 15 bp, Homo sapiens
attgctaggtgcagt

SEQ ID NO: 1772251 - DNA, 15 bp, Homo sapiens
ttgctaggtgcagtg

SEQ ID NO: 1772252 - DNA, 15 bp, Homo sapiens
tgctaggtgcagtga

SEQ ID NO: 1772253 - DNA, 15 bp, Homo sapiens
gctaggtgcagtgac

SEQ ID NO: 1772254 - DNA, 15 bp, Homo sapiens
ctaggtgcagtgaca

SEQ ID NO: 1772255 - DNA, 15 bp, Homo sapiens
taggtgcagtgacac

SEQ ID NO: 1772256 - DNA, 15 bp, Homo sapiens
aggtgcagtgacaca

SEQ ID NO: 1772257 - DNA, 15 bp, Homo sapiens
ggtgcagtgacacat

SEQ ID NO: 1772258 - DNA, 15 bp, Homo sapiens
gtgcagtgacacatg

SEQ ID NO: 1772259 - DNA, 15 bp, Homo sapiens
tgcagtgacacatgc

SEQ ID NO: 1772260 - DNA, 15 bp, Homo sapiens
gcagtgacacatgcc

SEQ ID NO: 1772261 - DNA, 15 bp, Homo sapiens
agtgacacatgcctg

SEQ ID NO: 1772262 - DNA, 15 bp, Homo sapiens
gacacatgcctgtag

SEQ ID NO: 1772263 - DNA, 15 bp, Homo sapiens
acacatgcctgtagt

SEQ ID NO: 1772264 - DNA, 15 bp, Homo sapiens
tcccagctactctgt

SEQ ID NO: 1772265 - DNA, 15 bp, Homo sapiens
cccagctactctgta

SEQ ID NO: 1772266 - DNA, 15 bp, Homo sapiens
ccagctactctgtag

SEQ ID NO: 1772267 - DNA, 15 bp, Homo sapiens
cagctactctgtagg

SEQ ID NO: 1772268 - DNA, 15 bp, Homo sapiens
agctactctgtaggc

SEQ ID NO: 1772269 - DNA, 15 bp, Homo sapiens
gctactctgtaggct

SEQ ID NO: 1772270 - DNA, 15 bp, Homo sapiens
ctactctgtaggctg

SEQ ID NO: 1772271 - DNA, 15 bp, Homo sapiens
tactctgtaggctga

SEQ ID NO: 1772272 - DNA, 15 bp, Homo sapiens
actctgtaggctgag

SEQ ID NO: 1772273 - DNA, 15 bp, Homo sapiens
ctctgtaggctgagg

SEQ ID NO: 1772274 - DNA, 15 bp, Homo sapiens
tctgtaggctgaggt

SEQ ID NO: 1772275 - DNA, 15 bp, Homo sapiens
ctgtaggctgaggtg

SEQ ID NO: 1772276 - DNA, 15 bp, Homo sapiens
tgtaggctgaggtgg

SEQ ID NO: 1772277 - DNA, 15 bp, Homo sapiens
gtaggctgaggtggg

SEQ ID NO: 1772278 - DNA, 15 bp, Homo sapiens
taggctgaggtggga

SEQ ID NO: 1772279 - DNA, 15 bp, Homo sapiens
gtgggaagatcactg

SEQ ID NO: 1772280 - DNA, 15 bp, Homo sapiens
tgggaagatcactgg

SEQ ID NO: 1772281 - DNA, 15 bp, Homo sapiens
gggaagatcactgga

SEQ ID NO: 1772282 - DNA, 15 bp, Homo sapiens
ggaagatcactggag

SEQ ID NO: 1772283 - DNA, 15 bp, Homo sapiens
gaagatcactggagc

SEQ ID NO: 1772284 - DNA, 15 bp, Homo sapiens
aagatcactggagcc

SEQ ID NO: 1772285 - DNA, 15 bp, Homo sapiens
agatcactggagccc

SEQ ID NO: 1772286 - DNA, 15 bp, Homo sapiens
gatcactggagccca

SEQ ID NO: 1772287 - DNA, 15 bp, Homo sapiens
atcactggagcccag

SEQ ID NO: 1772288 - DNA, 15 bp, Homo sapiens
tcactggagcccagg

SEQ ID NO: 1772289 - DNA, 15 bp, Homo sapiens
cactggagcccagga

SEQ ID NO: 1772290 - DNA, 15 bp, Homo sapiens
actggagcccaggag

SEQ ID NO: 1772291 - DNA, 15 bp, Homo sapiens
ctggagcccaggagt

SEQ ID NO: 1772292 - DNA, 15 bp, Homo sapiens
tggagcccaggagtt

SEQ ID NO: 1772293 - DNA, 15 bp, Homo sapiens
ggagcccaggagttc

SEQ ID NO: 1772294 - DNA, 15 bp, Homo sapiens
gagcccaggagttct

SEQ ID NO: 1772295 - DNA, 15 bp, Homo sapiens
agcccaggagttctg

SEQ ID NO: 1772296 - DNA, 15 bp, Homo sapiens
gcccaggagttctgg

SEQ ID NO: 1772297 - DNA, 15 bp, Homo sapiens
cccaggagttctggg

SEQ ID NO: 1772298 - DNA, 15 bp, Homo sapiens
ccaggagttctgggc

SEQ ID NO: 1772299 - DNA, 15 bp, Homo sapiens
caggagttctgggct

SEQ ID NO: 1772300 - DNA, 15 bp, Homo sapiens
aggagttctgggctg

SEQ ID NO: 1772301 - DNA, 15 bp, Homo sapiens
ggagttctgggctgt

SEQ ID NO: 1772302 - DNA, 15 bp, Homo sapiens
gagttctgggctgtg

SEQ ID NO: 1772303 - DNA, 15 bp, Homo sapiens
agttctgggctgtgc

SEQ ID NO: 1772304 - DNA, 15 bp, Homo sapiens
gttctgggctgtgcg

SEQ ID NO: 1772305 - DNA, 15 bp, Homo sapiens
ttctgggctgtgcgc

SEQ ID NO: 1772306 - DNA, 15 bp, Homo sapiens
tctgggctgtgcgct

SEQ ID NO: 1772307 - DNA, 15 bp, Homo sapiens
ctgggctgtgcgcta

SEQ ID NO: 1772308 - DNA, 15 bp, Homo sapiens
tgggctgtgcgctat

SEQ ID NO: 1772309 - DNA, 15 bp, Homo sapiens
gggctgtgcgctatg

SEQ ID NO: 1772310 - DNA, 15 bp, Homo sapiens
ggctgtgcgctatgc

SEQ ID NO: 1772311 - DNA, 15 bp, Homo sapiens
gctgtgcgctatgct

SEQ ID NO: 1772312 - DNA, 15 bp, Homo sapiens
ctgtgcgctatgctg

SEQ ID NO: 1772313 - DNA, 15 bp, Homo sapiens
tgtgcgctatgctga

SEQ ID NO: 1772314 - DNA, 15 bp, Homo sapiens
gtgcgctatgctgat

SEQ ID NO: 1772315 - DNA, 15 bp, Homo sapiens
tgcgctatgctgatt

SEQ ID NO: 1772316 - DNA, 15 bp, Homo sapiens
gcgctatgctgatta

SEQ ID NO: 1772317 - DNA, 15 bp, Homo sapiens
cgctatgctgattag

SEQ ID NO: 1772318 - DNA, 15 bp, Homo sapiens
gctatgctgattagg

SEQ ID NO: 1772319 - DNA, 15 bp, Homo sapiens
ctatgctgattaggt

SEQ ID NO: 1772320 - DNA, 15 bp, Homo sapiens
tatgctgattaggtg

SEQ ID NO: 1772321 - DNA, 15 bp, Homo sapiens
atgctgattaggtgt

SEQ ID NO: 1772322 - DNA, 15 bp, Homo sapiens
tgctgattaggtgtc

SEQ ID NO: 1772323 - DNA, 15 bp, Homo sapiens
gctgattaggtgtcc

SEQ ID NO: 1772324 - DNA, 15 bp, Homo sapiens
ctgattaggtgtcca

SEQ ID NO: 1772325 - DNA, 15 bp, Homo sapiens
tgattaggtgtccac

SEQ ID NO: 1772326 - DNA, 15 bp, Homo sapiens
gattaggtgtccaca

SEQ ID NO: 1772327 - DNA, 15 bp, Homo sapiens
attaggtgtccacac

SEQ ID NO: 1772328 - DNA, 15 bp, Homo sapiens
ttaggtgtccacact

SEQ ID NO: 1772329 - DNA, 15 bp, Homo sapiens
taggtgtccacacta

SEQ ID NO: 1772330 - DNA, 15 bp, Homo sapiens
aggtgtccacactaa

SEQ ID NO: 1772331 - DNA, 15 bp, Homo sapiens
ggtgtccacactaag

SEQ ID NO: 1772332 - DNA, 15 bp, Homo sapiens
gtgtccacactaagt

SEQ ID NO: 1772333 - DNA, 15 bp, Homo sapiens
tgtccacactaagtt

SEQ ID NO: 1772334 - DNA, 15 bp, Homo sapiens
gtccacactaagttc

SEQ ID NO: 1772335 - DNA, 15 bp, Homo sapiens
tccacactaagttct

SEQ ID NO: 1772336 - DNA, 15 bp, Homo sapiens
ccacactaagttctg

SEQ ID NO: 1772337 - DNA, 15 bp, Homo sapiens
cacactaagttctgc

SEQ ID NO: 1772338 - DNA, 15 bp, Homo sapiens
acactaagttctgca

SEQ ID NO: 1772339 - DNA, 15 bp, Homo sapiens
cactaagttctgcat

SEQ ID NO: 1772340 - DNA, 15 bp, Homo sapiens
actaagttctgcatc

SEQ ID NO: 1772341 - DNA, 15 bp, Homo sapiens
ctaagttctgcatca

SEQ ID NO: 1772342 - DNA, 15 bp, Homo sapiens
taagttctgcatcaa

SEQ ID NO: 1772343 - DNA, 15 bp, Homo sapiens
aagttctgcatcaat

SEQ ID NO: 1772344 - DNA, 15 bp, Homo sapiens
agttctgcatcaata

SEQ ID NO: 1772345 - DNA, 15 bp, Homo sapiens
gttctgcatcaatat

SEQ ID NO: 1772346 - DNA, 15 bp, Homo sapiens
ttctgcatcaatatg

SEQ ID NO: 1772347 - DNA, 15 bp, Homo sapiens
tctgcatcaatatgg

SEQ ID NO: 1772348 - DNA, 15 bp, Homo sapiens
ctgcatcaatatggt

SEQ ID NO: 1772349 - DNA, 15 bp, Homo sapiens
tgcatcaatatggtg

SEQ ID NO: 1772350 - DNA, 15 bp, Homo sapiens
gcatcaatatggtga

SEQ ID NO: 1772351 - DNA, 15 bp, Homo sapiens
catcaatatggtgac

SEQ ID NO: 1772352 - DNA, 15 bp, Homo sapiens
atcaatatggtgacc

SEQ ID NO: 1772353 - DNA, 15 bp, Homo sapiens
tcaatatggtgacct

SEQ ID NO: 1772354 - DNA, 15 bp, Homo sapiens
caatatggtgacctc

SEQ ID NO: 1772355 - DNA, 15 bp, Homo sapiens
aatatggtgacctcc

SEQ ID NO: 1772356 - DNA, 15 bp, Homo sapiens
atatggtgacctcct

SEQ ID NO: 1772357 - DNA, 15 bp, Homo sapiens
tatggtgacctcctg

SEQ ID NO: 1772358 - DNA, 15 bp, Homo sapiens
atggtgacctcctgg

SEQ ID NO: 1772359 - DNA, 15 bp, Homo sapiens
tggtgacctcctggg

SEQ ID NO: 1772360 - DNA, 15 bp, Homo sapiens
ggtgacctcctggga

SEQ ID NO: 1772361 - DNA, 15 bp, Homo sapiens
gtgacctcctgggag

SEQ ID NO: 1772362 - DNA, 15 bp, Homo sapiens
tgacctcctgggagc

SEQ ID NO: 1772363 - DNA, 15 bp, Homo sapiens
gacctcctgggagca

SEQ ID NO: 1772364 - DNA, 15 bp, Homo sapiens
acctcctgggagcag

SEQ ID NO: 1772365 - DNA, 15 bp, Homo sapiens
cctcctgggagcagg

SEQ ID NO: 1772366 - DNA, 15 bp, Homo sapiens
ctcctgggagcaggg

SEQ ID NO: 1772367 - DNA, 15 bp, Homo sapiens
tcctgggagcagggg

SEQ ID NO: 1772368 - DNA, 15 bp, Homo sapiens
cctgggagcagggga

SEQ ID NO: 1772369 - DNA, 15 bp, Homo sapiens
ctgggagcaggggac

SEQ ID NO: 1772370 - DNA, 15 bp, Homo sapiens
tgggagcaggggact

SEQ ID NO: 1772371 - DNA, 15 bp, Homo sapiens
gggagcaggggacta

SEQ ID NO: 1772372 - DNA, 15 bp, Homo sapiens
ggagcaggggactac

SEQ ID NO: 1772373 - DNA, 15 bp, Homo sapiens
gagcaggggactacc

SEQ ID NO: 1772374 - DNA, 15 bp, Homo sapiens
agcaggggactacca

SEQ ID NO: 1772375 - DNA, 15 bp, Homo sapiens
gcaggggactaccag

SEQ ID NO: 1772376 - DNA, 15 bp, Homo sapiens
caggggactaccagg

SEQ ID NO: 1772377 - DNA, 15 bp, Homo sapiens
aggggactaccaggt

SEQ ID NO: 1772378 - DNA, 15 bp, Homo sapiens
ggggactaccaggtt

SEQ ID NO: 1772379 - DNA, 15 bp, Homo sapiens
gggactaccaggttg

SEQ ID NO: 1772380 - DNA, 15 bp, Homo sapiens
ggactaccaggttgc

SEQ ID NO: 1772381 - DNA, 15 bp, Homo sapiens
gactaccaggttgcc

SEQ ID NO: 1772382 - DNA, 15 bp, Homo sapiens
actaccaggttgccc

SEQ ID NO: 1772383 - DNA, 15 bp, Homo sapiens
ctaccaggttgccca

SEQ ID NO: 1772384 - DNA, 15 bp, Homo sapiens
taccaggttgcccaa

SEQ ID NO: 1772385 - DNA, 15 bp, Homo sapiens
accaggttgcccaag

SEQ ID NO: 1772386 - DNA, 15 bp, Homo sapiens
ccaggttgcccaagg

SEQ ID NO: 1772387 - DNA, 15 bp, Homo sapiens
caggttgcccaagga

SEQ ID NO: 1772388 - DNA, 15 bp, Homo sapiens
aggttgcccaaggag

SEQ ID NO: 1772389 - DNA, 15 bp, Homo sapiens
ggttgcccaaggagg

SEQ ID NO: 1772390 - DNA, 15 bp, Homo sapiens
gttgcccaaggaggg

SEQ ID NO: 1772391 - DNA, 15 bp, Homo sapiens
ttgcccaaggagggg

SEQ ID NO: 1772392 - DNA, 15 bp, Homo sapiens
tgcccaaggaggggc

SEQ ID NO: 1772393 - DNA, 15 bp, Homo sapiens
gcccaaggaggggcg

SEQ ID NO: 1772394 - DNA, 15 bp, Homo sapiens
cccaaggaggggcga

SEQ ID NO: 1772395 - DNA, 15 bp, Homo sapiens
ccaaggaggggcgaa

SEQ ID NO: 1772396 - DNA, 15 bp, Homo sapiens
caaggaggggcgaac

SEQ ID NO: 1772397 - DNA, 15 bp, Homo sapiens
aaggaggggcgaacc

SEQ ID NO: 1772398 - DNA, 15 bp, Homo sapiens
aggaggggcgaaccc

SEQ ID NO: 1772399 - DNA, 15 bp, Homo sapiens
ggaggggcgaaccca

SEQ ID NO: 1772400 - DNA, 15 bp, Homo sapiens
gaggggcgaacccac

SEQ ID NO: 1772401 - DNA, 15 bp, Homo sapiens
aggggcgaacccacc

SEQ ID NO: 1772402 - DNA, 15 bp, Homo sapiens
ggggcgaacccaccc

SEQ ID NO: 1772403 - DNA, 15 bp, Homo sapiens
gggcgaacccaccca

SEQ ID NO: 1772404 - DNA, 15 bp, Homo sapiens
ggcgaacccacccag

SEQ ID NO: 1772405 - DNA, 15 bp, Homo sapiens
gcgaacccacccagg

SEQ ID NO: 1772406 - DNA, 15 bp, Homo sapiens
cgaacccacccaggt

SEQ ID NO: 1772407 - DNA, 15 bp, Homo sapiens
gaacccacccaggtc

SEQ ID NO: 1772408 - DNA, 15 bp, Homo sapiens
aacccacccaggtcg

SEQ ID NO: 1772409 - DNA, 15 bp, Homo sapiens
acccacccaggtcgg

SEQ ID NO: 1772410 - DNA, 15 bp, Homo sapiens
cccacccaggtcgga

SEQ ID NO: 1772411 - DNA, 15 bp, Homo sapiens
ccacccaggtcggaa

SEQ ID NO: 1772412 - DNA, 15 bp, Homo sapiens
cacccaggtcggaaa

SEQ ID NO: 1772413 - DNA, 15 bp, Homo sapiens
acccaggtcggaaag

SEQ ID NO: 1772414 - DNA, 15 bp, Homo sapiens
cccaggtcggaaagt

SEQ ID NO: 1772415 - DNA, 15 bp, Homo sapiens
ccaggtcggaaagta

SEQ ID NO: 1772416 - DNA, 15 bp, Homo sapiens
caggtcggaaagtag

SEQ ID NO: 1772417 - DNA, 15 bp, Homo sapiens
aggtcggaaagtaga

SEQ ID NO: 1772418 - DNA, 15 bp, Homo sapiens
ggtcggaaagtagaa

SEQ ID NO: 1772419 - DNA, 15 bp, Homo sapiens
gtcggaaagtagaag

SEQ ID NO: 1772420 - DNA, 15 bp, Homo sapiens
tcggaaagtagaagg

SEQ ID NO: 1772421 - DNA, 15 bp, Homo sapiens
cggaaagtagaagga

SEQ ID NO: 1772422 - DNA, 15 bp, Homo sapiens
ggaaagtagaaggat

SEQ ID NO: 1772423 - DNA, 15 bp, Homo sapiens
gaaagtagaaggatt

SEQ ID NO: 1772424 - DNA, 15 bp, Homo sapiens
aaagtagaaggattg

SEQ ID NO: 1772425 - DNA, 15 bp, Homo sapiens
aagtagaaggattgt

SEQ ID NO: 1772426 - DNA, 15 bp, Homo sapiens
agtagaaggattgtg

SEQ ID NO: 1772427 - DNA, 15 bp, Homo sapiens
gtagaaggattgtgt

SEQ ID NO: 1772428 - DNA, 15 bp, Homo sapiens
tagaaggattgtgtc

SEQ ID NO: 1772429 - DNA, 15 bp, Homo sapiens
agaaggattgtgtct

SEQ ID NO: 1772430 - DNA, 15 bp, Homo sapiens
gaaggattgtgtctc

SEQ ID NO: 1772431 - DNA, 15 bp, Homo sapiens
aaggattgtgtctct

SEQ ID NO: 1772432 - DNA, 15 bp, Homo sapiens
aggattgtgtctcta

SEQ ID NO: 1772433 - DNA, 15 bp, Homo sapiens
ggattgtgtctctag

SEQ ID NO: 1772434 - DNA, 15 bp, Homo sapiens
gattgtgtctctagg

SEQ ID NO: 1772435 - DNA, 15 bp, Homo sapiens
attgtgtctctaggc

SEQ ID NO: 1772436 - DNA, 15 bp, Homo sapiens
ttgtgtctctaggcc

SEQ ID NO: 1772437 - DNA, 15 bp, Homo sapiens
tgtgtctctaggcct

SEQ ID NO: 1772438 - DNA, 15 bp, Homo sapiens
gtgtctctaggcctc

SEQ ID NO: 1772439 - DNA, 15 bp, Homo sapiens
tgtctctaggcctca

SEQ ID NO: 1772440 - DNA, 15 bp, Homo sapiens
gtctctaggcctcag

SEQ ID NO: 1772441 - DNA, 15 bp, Homo sapiens
tctctaggcctcaga

SEQ ID NO: 1772442 - DNA, 15 bp, Homo sapiens
ctctaggcctcagac

SEQ ID NO: 1772443 - DNA, 15 bp, Homo sapiens
tctaggcctcagact

SEQ ID NO: 1772444 - DNA, 15 bp, Homo sapiens
ctaggcctcagactc

SEQ ID NO: 1772445 - DNA, 15 bp, Homo sapiens
taggcctcagactcc

SEQ ID NO: 1772446 - DNA, 15 bp, Homo sapiens
aggcctcagactcct

SEQ ID NO: 1772447 - DNA, 15 bp, Homo sapiens
ggcctcagactcctt

SEQ ID NO: 1772448 - DNA, 15 bp, Homo sapiens
gcctcagactccttt

SEQ ID NO: 1772449 - DNA, 15 bp, Homo sapiens
cctcagactcctttg

SEQ ID NO: 1772450 - DNA, 15 bp, Homo sapiens
ctcagactcctttgc

SEQ ID NO: 1772451 - DNA, 15 bp, Homo sapiens
tcagactcctttgca

SEQ ID NO: 1772452 - DNA, 15 bp, Homo sapiens
cagactcctttgcat

SEQ ID NO: 1772453 - DNA, 15 bp, Homo sapiens
agactcctttgcatt

SEQ ID NO: 1772454 - DNA, 15 bp, Homo sapiens
gactcctttgcattt

SEQ ID NO: 1772455 - DNA, 15 bp, Homo sapiens
actcctttgcatttt

SEQ ID NO: 1772456 - DNA, 15 bp, Homo sapiens
ctcctttgcattttt

SEQ ID NO: 1772457 - DNA, 15 bp, Homo sapiens
tcctttgcatttttc

SEQ ID NO: 1772458 - DNA, 15 bp, Homo sapiens
cctttgcatttttct

SEQ ID NO: 1772459 - DNA, 15 bp, Homo sapiens
ctttgcatttttctg

SEQ ID NO: 1772460 - DNA, 15 bp, Homo sapiens
tttgcatttttctgt

SEQ ID NO: 1772461 - DNA, 15 bp, Homo sapiens
ttgcatttttctgtc

SEQ ID NO: 1772462 - DNA, 15 bp, Homo sapiens
tgcatttttctgtcc

SEQ ID NO: 1772463 - DNA, 15 bp, Homo sapiens
gcatttttctgtcct

SEQ ID NO: 1772464 - DNA, 15 bp, Homo sapiens
catttttctgtcctc

SEQ ID NO: 1772465 - DNA, 15 bp, Homo sapiens
atttttctgtcctca

SEQ ID NO: 1772466 - DNA, 15 bp, Homo sapiens
tttttctgtcctcac

SEQ ID NO: 1772467 - DNA, 15 bp, Homo sapiens
ttttctgtcctcacc

SEQ ID NO: 1772468 - DNA, 15 bp, Homo sapiens
tttctgtcctcaccc

SEQ ID NO: 1772469 - DNA, 15 bp, Homo sapiens
ttctgtcctcaccct

SEQ ID NO: 1772470 - DNA, 15 bp, Homo sapiens
tctgtcctcaccctg

SEQ ID NO: 1772471 - DNA, 15 bp, Homo sapiens
ctgtcctcaccctgc

SEQ ID NO: 1772472 - DNA, 15 bp, Homo sapiens
tgtcctcaccctgca

SEQ ID NO: 1772473 - DNA, 15 bp, Homo sapiens
gtcctcaccctgcac

SEQ ID NO: 1772474 - DNA, 15 bp, Homo sapiens
tcctcaccctgcaca

SEQ ID NO: 1772475 - DNA, 15 bp, Homo sapiens
cctcaccctgcacat

SEQ ID NO: 1772476 - DNA, 15 bp, Homo sapiens
ctcaccctgcacata

SEQ ID NO: 1772477 - DNA, 15 bp, Homo sapiens
tcaccctgcacatag

SEQ ID NO: 1772478 - DNA, 15 bp, Homo sapiens
caccctgcacatagt

SEQ ID NO: 1772479 - DNA, 15 bp, Homo sapiens
accctgcacatagtg

SEQ ID NO: 1772480 - DNA, 15 bp, Homo sapiens
ccctgcacatagtga

SEQ ID NO: 1772481 - DNA, 15 bp, Homo sapiens
cctgcacatagtgaa

SEQ ID NO: 1772482 - DNA, 15 bp, Homo sapiens
ctgcacatagtgaaa

SEQ ID NO: 1772483 - DNA, 15 bp, Homo sapiens
tgcacatagtgaaaa

SEQ ID NO: 1772484 - DNA, 15 bp, Homo sapiens
gcacatagtgaaaat

SEQ ID NO: 1772485 - DNA, 15 bp, Homo sapiens
cacatagtgaaaatc

SEQ ID NO: 1772486 - DNA, 15 bp, Homo sapiens
acatagtgaaaatca

SEQ ID NO: 1772487 - DNA, 15 bp, Homo sapiens
catagtgaaaatcat

SEQ ID NO: 1772488 - DNA, 15 bp, Homo sapiens
atagtgaaaatcata

SEQ ID NO: 1772489 - DNA, 15 bp, Homo sapiens
tagtgaaaatcataa

SEQ ID NO: 1772490 - DNA, 15 bp, Homo sapiens
agtgaaaatcataaa

SEQ ID NO: 1772491 - DNA, 15 bp, Homo sapiens
gtgaaaatcataaac

SEQ ID NO: 1772492 - DNA, 15 bp, Homo sapiens
tgaaaatcataaacc

SEQ ID NO: 1772493 - DNA, 15 bp, Homo sapiens
gaaaatcataaaccc

SEQ ID NO: 1772494 - DNA, 15 bp, Homo sapiens
aaaatcataaaccca

SEQ ID NO: 1772495 - DNA, 15 bp, Homo sapiens
aaatcataaacccac

SEQ ID NO: 1772496 - DNA, 15 bp, Homo sapiens
aatcataaacccaca

SEQ ID NO: 1772497 - DNA, 15 bp, Homo sapiens
atcataaacccacat

SEQ ID NO: 1772498 - DNA, 15 bp, Homo sapiens
tcataaacccacatt

SEQ ID NO: 1772499 - DNA, 15 bp, Homo sapiens
cataaacccacatta

SEQ ID NO: 1772500 - DNA, 15 bp, Homo sapiens
ataaacccacattat

SEQ ID NO: 1772501 - DNA, 15 bp, Homo sapiens
taaacccacattatt

SEQ ID NO: 1772502 - DNA, 15 bp, Homo sapiens
aaacccacattattg

SEQ ID NO: 1772503 - DNA, 15 bp, Homo sapiens
aacccacattattgg

SEQ ID NO: 1772504 - DNA, 15 bp, Homo sapiens
acccacattattggt

SEQ ID NO: 1772505 - DNA, 15 bp, Homo sapiens
cccacattattggtg

SEQ ID NO: 1772506 - DNA, 15 bp, Homo sapiens
ccacattattggtgt

SEQ ID NO: 1772507 - DNA, 15 bp, Homo sapiens
cacattattggtgtg

SEQ ID NO: 1772508 - DNA, 15 bp, Homo sapiens
acattattggtgtgg

SEQ ID NO: 1772509 - DNA, 15 bp, Homo sapiens
cattattggtgtggt

SEQ ID NO: 1772510 - DNA, 15 bp, Homo sapiens
attattggtgtggtt

SEQ ID NO: 1772511 - DNA, 15 bp, Homo sapiens
ttattggtgtggttt

SEQ ID NO: 1772512 - DNA, 15 bp, Homo sapiens
tattggtgtggttta

SEQ ID NO: 1772513 - DNA, 15 bp, Homo sapiens
attggtgtggtttat

SEQ ID NO: 1772514 - DNA, 15 bp, Homo sapiens
ttggtgtggtttata

SEQ ID NO: 1772515 - DNA, 15 bp, Homo sapiens
tggtgtggtttatag

SEQ ID NO: 1772516 - DNA, 15 bp, Homo sapiens
ggtgtggtttataga

SEQ ID NO: 1772517 - DNA, 15 bp, Homo sapiens
gtgtggtttatagaa

SEQ ID NO: 1772518 - DNA, 15 bp, Homo sapiens
tgtggtttatagaag

SEQ ID NO: 1772519 - DNA, 15 bp, Homo sapiens
gtggtttatagaaga

SEQ ID NO: 1772520 - DNA, 15 bp, Homo sapiens
tggtttatagaagaa

SEQ ID NO: 1772521 - DNA, 15 bp, Homo sapiens
ggtttatagaagaaa

SEQ ID NO: 1772522 - DNA, 15 bp, Homo sapiens
gtttatagaagaaaa

SEQ ID NO: 1772523 - DNA, 15 bp, Homo sapiens
tttatagaagaaaaa

SEQ ID NO: 1772524 - DNA, 15 bp, Homo sapiens
ttatagaagaaaaac

SEQ ID NO: 1772525 - DNA, 15 bp, Homo sapiens
tatagaagaaaaaca

SEQ ID NO: 1772526 - DNA, 15 bp, Homo sapiens
atagaagaaaaacaa

SEQ ID NO: 1772527 - DNA, 15 bp, Homo sapiens
tagaagaaaaacaac

SEQ ID NO: 1772528 - DNA, 15 bp, Homo sapiens
agaagaaaaacaact

SEQ ID NO: 1772529 - DNA, 15 bp, Homo sapiens
gaagaaaaacaactt

SEQ ID NO: 1772530 - DNA, 15 bp, Homo sapiens
aagaaaaacaactta

SEQ ID NO: 1772531 - DNA, 15 bp, Homo sapiens
agaaaaacaacttag

SEQ ID NO: 1772532 - DNA, 15 bp, Homo sapiens
gaaaaacaacttaga

SEQ ID NO: 1772533 - DNA, 15 bp, Homo sapiens
aaaaacaacttagaa

SEQ ID NO: 1772534 - DNA, 15 bp, Homo sapiens
aaaacaacttagaac

SEQ ID NO: 1772535 - DNA, 15 bp, Homo sapiens
aaacaacttagaact

SEQ ID NO: 1772536 - DNA, 15 bp, Homo sapiens
aacaacttagaacta

SEQ ID NO: 1772537 - DNA, 15 bp, Homo sapiens
acaacttagaactaa

SEQ ID NO: 1772538 - DNA, 15 bp, Homo sapiens
caacttagaactaaa

SEQ ID NO: 1772539 - DNA, 15 bp, Homo sapiens
aacttagaactaaaa

SEQ ID NO: 1772540 - DNA, 15 bp, Homo sapiens
acttagaactaaaaa

SEQ ID NO: 1772541 - DNA, 15 bp, Homo sapiens
cttagaactaaaaaa

SEQ ID NO: 1772542 - DNA, 15 bp, Homo sapiens
ttagaactaaaaaaa

SEQ ID NO: 1772543 - DNA, 15 bp, Homo sapiens
tagaactaaaaaaaa

SEQ ID NO: 1772544 - DNA, 15 bp, Homo sapiens
agaactaaaaaaaaa

SEQ ID NO: 1772545 - DNA, 15 bp, Homo sapiens
gaactaaaaaaaaaa

SEQ ID NO: 1772546 - DNA, 15 bp, Homo sapiens
aactaaaaaaaaaac

SEQ ID NO: 1772547 - DNA, 15 bp, Homo sapiens
actaaaaaaaaaaca

SEQ ID NO: 1772548 - DNA, 15 bp, Homo sapiens
aaaaaaacaaaaaac

SEQ ID NO: 1772549 - DNA, 15 bp, Homo sapiens
aaaaaacaaaaaacc

SEQ ID NO: 1772550 - DNA, 15 bp, Homo sapiens
aaaaacaaaaaacct

SEQ ID NO: 1772551 - DNA, 15 bp, Homo sapiens
aaaacaaaaaacctt

SEQ ID NO: 1772552 - DNA, 15 bp, Homo sapiens
aaacaaaaaaccttg

SEQ ID NO: 1772553 - DNA, 15 bp, Homo sapiens
aacaaaaaaccttga

SEQ ID NO: 1772554 - DNA, 15 bp, Homo sapiens
acaaaaaaccttgac

SEQ ID NO: 1772555 - DNA, 15 bp, Homo sapiens
caaaaaaccttgacc

SEQ ID NO: 1772556 - DNA, 15 bp, Homo sapiens
aaaaaaccttgacct

SEQ ID NO: 1772557 - DNA, 15 bp, Homo sapiens
aaaaaccttgacctt

SEQ ID NO: 1772558 - DNA, 15 bp, Homo sapiens
aaaaccttgacctta

SEQ ID NO: 1772559 - DNA, 15 bp, Homo sapiens
aaaccttgaccttac

SEQ ID NO: 1772560 - DNA, 15 bp, Homo sapiens
aaccttgaccttacg

SEQ ID NO: 1772561 - DNA, 15 bp, Homo sapiens
accttgaccttacgt

SEQ ID NO: 1772562 - DNA, 15 bp, Homo sapiens
ccttgaccttacgta

SEQ ID NO: 1772563 - DNA, 15 bp, Homo sapiens
cttgaccttacgtaa

SEQ ID NO: 1772564 - DNA, 15 bp, Homo sapiens
ttgaccttacgtaaa

SEQ ID NO: 1772565 - DNA, 15 bp, Homo sapiens
tgaccttacgtaaag

SEQ ID NO: 1772566 - DNA, 15 bp, Homo sapiens
gaccttacgtaaaga

SEQ ID NO: 1772567 - DNA, 15 bp, Homo sapiens
accttacgtaaagag

SEQ ID NO: 1772568 - DNA, 15 bp, Homo sapiens
ccttacgtaaagaga

SEQ ID NO: 1772569 - DNA, 15 bp, Homo sapiens
cttacgtaaagagat

SEQ ID NO: 1772570 - DNA, 15 bp, Homo sapiens
ttacgtaaagagatt

SEQ ID NO: 1772571 - DNA, 15 bp, Homo sapiens
tacgtaaagagattt

SEQ ID NO: 1772572 - DNA, 15 bp, Homo sapiens
acgtaaagagatttt

SEQ ID NO: 1772573 - DNA, 15 bp, Homo sapiens
cgtaaagagattttc

SEQ ID NO: 1772574 - DNA, 15 bp, Homo sapiens
gtaaagagattttca

SEQ ID NO: 1772575 - DNA, 15 bp, Homo sapiens
taaagagattttcaa

SEQ ID NO: 1772576 - DNA, 15 bp, Homo sapiens
aaagagattttcaaa

SEQ ID NO: 1772577 - DNA, 15 bp, Homo sapiens
aagagattttcaaat

SEQ ID NO: 1772578 - DNA, 15 bp, Homo sapiens
agagattttcaaatg

SEQ ID NO: 1772579 - DNA, 15 bp, Homo sapiens
gagattttcaaatga

SEQ ID NO: 1772580 - DNA, 15 bp, Homo sapiens
agattttcaaatgaa

SEQ ID NO: 1772581 - DNA, 15 bp, Homo sapiens
gattttcaaatgaat

SEQ ID NO: 1772582 - DNA, 15 bp, Homo sapiens
attttcaaatgaata

SEQ ID NO: 1772583 - DNA, 15 bp, Homo sapiens
ttttcaaatgaatac

SEQ ID NO: 1772584 - DNA, 15 bp, Homo sapiens
ttcaaatgaatacac

SEQ ID NO: 1772585 - DNA, 15 bp, Homo sapiens
tcaaatgaatacact

SEQ ID NO: 1772586 - DNA, 15 bp, Homo sapiens
caaatgaatacactt

SEQ ID NO: 1772587 - DNA, 15 bp, Homo sapiens
aaatgaatacacttt

SEQ ID NO: 1772588 - DNA, 15 bp, Homo sapiens
aatgaatacactttt

SEQ ID NO: 1772589 - DNA, 15 bp, Homo sapiens
atgaatacacttttt

SEQ ID NO: 1772590 - DNA, 15 bp, Homo sapiens
tgaatacactttttg

SEQ ID NO: 1772591 - DNA, 15 bp, Homo sapiens
gaatacactttttgt

SEQ ID NO: 1772592 - DNA, 15 bp, Homo sapiens
aatacactttttgtg

SEQ ID NO: 1772593 - DNA, 15 bp, Homo sapiens
atacactttttgtgt

SEQ ID NO: 1772594 - DNA, 15 bp, Homo sapiens
tacactttttgtgtt

SEQ ID NO: 1772595 - DNA, 15 bp, Homo sapiens
acactttttgtgttt

SEQ ID NO: 1772596 - DNA, 15 bp, Homo sapiens
cactttttgtgtttt

SEQ ID NO: 1772597 - DNA, 15 bp, Homo sapiens
actttttgtgttttt

SEQ ID NO: 1772598 - DNA, 15 bp, Homo sapiens
ctttttgtgttttta

SEQ ID NO: 1772599 - DNA, 15 bp, Homo sapiens
tttttgtgtttttaa

SEQ ID NO: 1772600 - DNA, 15 bp, Homo sapiens
ttttgtgtttttaaa

SEQ ID NO: 1772601 - DNA, 15 bp, Homo sapiens
tttgtgtttttaaaa

SEQ ID NO: 1772602 - DNA, 15 bp, Homo sapiens
ttgtgtttttaaaat

SEQ ID NO: 1772603 - DNA, 15 bp, Homo sapiens
tgtgtttttaaaatt

SEQ ID NO: 1772604 - DNA, 15 bp, Homo sapiens
gtgtttttaaaatta

SEQ ID NO: 1772605 - DNA, 15 bp, Homo sapiens
tgtttttaaaattaa

SEQ ID NO: 1772606 - DNA, 15 bp, Homo sapiens
gtttttaaaattaaa

SEQ ID NO: 1772607 - DNA, 15 bp, Homo sapiens
tttttaaaattaaaa

SEQ ID NO: 1772608 - DNA, 15 bp, Homo sapiens
ttttaaaattaaaat

SEQ ID NO: 1772609 - DNA, 15 bp, Homo sapiens
tttaaaattaaaatg

SEQ ID NO: 1772610 - DNA, 15 bp, Homo sapiens
ttaaaattaaaatgt

SEQ ID NO: 1772611 - DNA, 15 bp, Homo sapiens
taaaattaaaatgtt

SEQ ID NO: 1772612 - DNA, 15 bp, Homo sapiens
aaaattaaaatgtta

SEQ ID NO: 1772613 - DNA, 15 bp, Homo sapiens
aaattaaaatgttat

SEQ ID NO: 1772614 - DNA, 15 bp, Homo sapiens
aattaaaatgttata

SEQ ID NO: 1772615 - DNA, 15 bp, Homo sapiens
attaaaatgttatat

SEQ ID NO: 1772616 - DNA, 15 bp, Homo sapiens
ttaaaatgttatatg

SEQ ID NO: 1772617 - DNA, 15 bp, Homo sapiens
taaaatgttatatgg

SEQ ID NO: 1772618 - DNA, 15 bp, Homo sapiens
aaaatgttatatgga

SEQ ID NO: 1772619 - DNA, 15 bp, Homo sapiens
aaatgttatatggaa

SEQ ID NO: 1772620 - DNA, 15 bp, Homo sapiens
aatgttatatggaat

SEQ ID NO: 1772621 - DNA, 15 bp, Homo sapiens
atgttatatggaatt

SEQ ID NO: 1772622 - DNA, 15 bp, Homo sapiens
tgttatatggaatta

SEQ ID NO: 1772623 - DNA, 15 bp, Homo sapiens
gttatatggaattat

SEQ ID NO: 1772624 - DNA, 15 bp, Homo sapiens
ttatatggaattata

SEQ ID NO: 1772625 - DNA, 15 bp, Homo sapiens
tatatggaattatat

SEQ ID NO: 1772626 - DNA, 15 bp, Homo sapiens
atatggaattatata

SEQ ID NO: 1772627 - DNA, 15 bp, Homo sapiens
tatggaattatatat

SEQ ID NO: 1772628 - DNA, 15 bp, Homo sapiens
atggaattatatata

SEQ ID NO: 1772629 - DNA, 15 bp, Homo sapiens
tggaattatatatat

SEQ ID NO: 1772630 - DNA, 15 bp, Homo sapiens
ggaattatatatatt

SEQ ID NO: 1772631 - DNA, 15 bp, Homo sapiens
gaattatatatatta

SEQ ID NO: 1772632 - DNA, 15 bp, Homo sapiens
aattatatatattat

SEQ ID NO: 1772633 - DNA, 15 bp, Homo sapiens
attatatatattatt

SEQ ID NO: 1772634 - DNA, 15 bp, Homo sapiens
ttatatatattattt

SEQ ID NO: 1772635 - DNA, 15 bp, Homo sapiens
tatatatattatttt

SEQ ID NO: 1772636 - DNA, 15 bp, Homo sapiens
tatatattattttaa

SEQ ID NO: 1772637 - DNA, 15 bp, Homo sapiens
atatattattttaaa

SEQ ID NO: 1772638 - DNA, 15 bp, Homo sapiens
tatattattttaaaa

SEQ ID NO: 1772639 - DNA, 15 bp, Homo sapiens
atattattttaaaat

SEQ ID NO: 1772640 - DNA, 15 bp, Homo sapiens
tattattttaaaatg

SEQ ID NO: 1772641 - DNA, 15 bp, Homo sapiens
attattttaaaatga

SEQ ID NO: 1772642 - DNA, 15 bp, Homo sapiens
ttattttaaaatgat

SEQ ID NO: 1772643 - DNA, 15 bp, Homo sapiens
tattttaaaatgatt

SEQ ID NO: 1772644 - DNA, 15 bp, Homo sapiens
attttaaaatgattt

SEQ ID NO: 1772645 - DNA, 15 bp, Homo sapiens
ttttaaaatgatttc

SEQ ID NO: 1772646 - DNA, 15 bp, Homo sapiens
tttaaaatgatttcc

SEQ ID NO: 1772647 - DNA, 15 bp, Homo sapiens
ttaaaatgatttcct

SEQ ID NO: 1772648 - DNA, 15 bp, Homo sapiens
taaaatgatttcctg

SEQ ID NO: 1772649 - DNA, 15 bp, Homo sapiens
aaaatgatttcctgc

SEQ ID NO: 1772650 - DNA, 15 bp, Homo sapiens
aaatgatttcctgct

SEQ ID NO: 1772651 - DNA, 15 bp, Homo sapiens
aatgatttcctgctt

SEQ ID NO: 1772652 - DNA, 15 bp, Homo sapiens
atgatttcctgctta

SEQ ID NO: 1772653 - DNA, 15 bp, Homo sapiens
tgatttcctgcttag

SEQ ID NO: 1772654 - DNA, 15 bp, Homo sapiens
gatttcctgcttagc

SEQ ID NO: 1772655 - DNA, 15 bp, Homo sapiens
atttcctgcttagct

SEQ ID NO: 1772656 - DNA, 15 bp, Homo sapiens
tttcctgcttagctt

SEQ ID NO: 1772657 - DNA, 15 bp, Homo sapiens
ttcctgcttagcttt

SEQ ID NO: 1772658 - DNA, 15 bp, Homo sapiens
tcctgcttagctttt

SEQ ID NO: 1772659 - DNA, 15 bp, Homo sapiens
cctgcttagcttttt

SEQ ID NO: 1772660 - DNA, 15 bp, Homo sapiens
ctgcttagcttttta

SEQ ID NO: 1772661 - DNA, 15 bp, Homo sapiens
tgcttagctttttaa

SEQ ID NO: 1772662 - DNA, 15 bp, Homo sapiens
gcttagctttttaaa

SEQ ID NO: 1772663 - DNA, 15 bp, Homo sapiens
cttagctttttaaat

SEQ ID NO: 1772664 - DNA, 15 bp, Homo sapiens
ttagctttttaaatt

SEQ ID NO: 1772665 - DNA, 15 bp, Homo sapiens
tagctttttaaatta

SEQ ID NO: 1772666 - DNA, 15 bp, Homo sapiens
agctttttaaattaa

SEQ ID NO: 1772667 - DNA, 15 bp, Homo sapiens
gctttttaaattaac

SEQ ID NO: 1772668 - DNA, 15 bp, Homo sapiens
ctttttaaattaact

SEQ ID NO: 1772669 - DNA, 15 bp, Homo sapiens
tttttaaattaactg

SEQ ID NO: 1772670 - DNA, 15 bp, Homo sapiens
ttttaaattaactgg

SEQ ID NO: 1772671 - DNA, 15 bp, Homo sapiens
tttaaattaactggt

SEQ ID NO: 1772672 - DNA, 15 bp, Homo sapiens
ttaaattaactggtg

SEQ ID NO: 1772673 - DNA, 15 bp, Homo sapiens
taaattaactggtgc

SEQ ID NO: 1772674 - DNA, 15 bp, Homo sapiens
aaattaactggtgcc

SEQ ID NO: 1772675 - DNA, 15 bp, Homo sapiens
aattaactggtgcca

SEQ ID NO: 1772676 - DNA, 15 bp, Homo sapiens
attaactggtgccaa

SEQ ID NO: 1772677 - DNA, 15 bp, Homo sapiens
ttaactggtgccaat

SEQ ID NO: 1772678 - DNA, 15 bp, Homo sapiens
taactggtgccaatc

SEQ ID NO: 1772679 - DNA, 15 bp, Homo sapiens
aactggtgccaatct

SEQ ID NO: 1772680 - DNA, 15 bp, Homo sapiens
actggtgccaatctc

SEQ ID NO: 1772681 - DNA, 15 bp, Homo sapiens
ctggtgccaatctct

SEQ ID NO: 1772682 - DNA, 15 bp, Homo sapiens
tggtgccaatctctc

SEQ ID NO: 1772683 - DNA, 15 bp, Homo sapiens
ggtgccaatctctca

SEQ ID NO: 1772684 - DNA, 15 bp, Homo sapiens
gtgccaatctctcaa

SEQ ID NO: 1772685 - DNA, 15 bp, Homo sapiens
tgccaatctctcaaa

SEQ ID NO: 1772686 - DNA, 15 bp, Homo sapiens
gccaatctctcaaat

SEQ ID NO: 1772687 - DNA, 15 bp, Homo sapiens
ccaatctctcaaata

SEQ ID NO: 1772688 - DNA, 15 bp, Homo sapiens
caatctctcaaataa

SEQ ID NO: 1772689 - DNA, 15 bp, Homo sapiens
aatctctcaaataag

SEQ ID NO: 1772690 - DNA, 15 bp, Homo sapiens
atctctcaaataaga

SEQ ID NO: 1772691 - DNA, 15 bp, Homo sapiens
tctctcaaataagac

SEQ ID NO: 1772692 - DNA, 15 bp, Homo sapiens
ctctcaaataagaca

SEQ ID NO: 1772693 - DNA, 15 bp, Homo sapiens
tctcaaataagacaa

SEQ ID NO: 1772694 - DNA, 15 bp, Homo sapiens
ctcaaataagacaat

SEQ ID NO: 1772695 - DNA, 15 bp, Homo sapiens
tcaaataagacaatt

SEQ ID NO: 1772696 - DNA, 15 bp, Homo sapiens
caaataagacaattt

SEQ ID NO: 1772697 - DNA, 15 bp, Homo sapiens
aaataagacaattta

SEQ ID NO: 1772698 - DNA, 15 bp, Homo sapiens
aataagacaatttat

SEQ ID NO: 1772699 - DNA, 15 bp, Homo sapiens
ataagacaatttatg

SEQ ID NO: 1772700 - DNA, 15 bp, Homo sapiens
taagacaatttatgt

SEQ ID NO: 1772701 - DNA, 15 bp, Homo sapiens
aagacaatttatgta

SEQ ID NO: 1772702 - DNA, 15 bp, Homo sapiens
agacaatttatgtac

SEQ ID NO: 1772703 - DNA, 15 bp, Homo sapiens
gacaatttatgtacc

SEQ ID NO: 1772704 - DNA, 15 bp, Homo sapiens
acaatttatgtacca

SEQ ID NO: 1772705 - DNA, 15 bp, Homo sapiens
caatttatgtaccag

SEQ ID NO: 1772706 - DNA, 15 bp, Homo sapiens
aatttatgtaccagc

SEQ ID NO: 1772707 - DNA, 15 bp, Homo sapiens
atttatgtaccagca

SEQ ID NO: 1772708 - DNA, 15 bp, Homo sapiens
tttatgtaccagcag

SEQ ID NO: 1772709 - DNA, 15 bp, Homo sapiens
ttatgtaccagcagt

SEQ ID NO: 1772710 - DNA, 15 bp, Homo sapiens
tatgtaccagcagta

SEQ ID NO: 1772711 - DNA, 15 bp, Homo sapiens
atgtaccagcagtaa

SEQ ID NO: 1772712 - DNA, 15 bp, Homo sapiens
tgtaccagcagtaat

SEQ ID NO: 1772713 - DNA, 15 bp, Homo sapiens
gtaccagcagtaatc

SEQ ID NO: 1772714 - DNA, 15 bp, Homo sapiens
taccagcagtaatca

SEQ ID NO: 1772715 - DNA, 15 bp, Homo sapiens
accagcagtaatcaa

SEQ ID NO: 1772716 - DNA, 15 bp, Homo sapiens
ccagcagtaatcaac

SEQ ID NO: 1772717 - DNA, 15 bp, Homo sapiens
cagcagtaatcaact

SEQ ID NO: 1772718 - DNA, 15 bp, Homo sapiens
agcagtaatcaactg

SEQ ID NO: 1772719 - DNA, 15 bp, Homo sapiens
gcagtaatcaactgg

SEQ ID NO: 1772720 - DNA, 15 bp, Homo sapiens
cagtaatcaactgga

SEQ ID NO: 1772721 - DNA, 15 bp, Homo sapiens
agtaatcaactggaa

SEQ ID NO: 1772722 - DNA, 15 bp, Homo sapiens
gtaatcaactggaaa

SEQ ID NO: 1772723 - DNA, 15 bp, Homo sapiens
taatcaactggaaaa

SEQ ID NO: 1772724 - DNA, 15 bp, Homo sapiens
aatcaactggaaaat

SEQ ID NO: 1772725 - DNA, 15 bp, Homo sapiens
atcaactggaaaatg

SEQ ID NO: 1772726 - DNA, 15 bp, Homo sapiens
tcaactggaaaatgt

SEQ ID NO: 1772727 - DNA, 15 bp, Homo sapiens
caactggaaaatgta

SEQ ID NO: 1772728 - DNA, 15 bp, Homo sapiens
aactggaaaatgtaa

SEQ ID NO: 1772729 - DNA, 15 bp, Homo sapiens
actggaaaatgtaat

SEQ ID NO: 1772730 - DNA, 15 bp, Homo sapiens
ctggaaaatgtaatg

SEQ ID NO: 1772731 - DNA, 15 bp, Homo sapiens
tggaaaatgtaatga

SEQ ID NO: 1772732 - DNA, 15 bp, Homo sapiens
ggaaaatgtaatgaa

SEQ ID NO: 1772733 - DNA, 15 bp, Homo sapiens
gaaaatgtaatgaaa

SEQ ID NO: 1772734 - DNA, 15 bp, Homo sapiens
aaaatgtaatgaaaa

SEQ ID NO: 1772735 - DNA, 15 bp, Homo sapiens
aaatgtaatgaaaaa

SEQ ID NO: 1772736 - DNA, 15 bp, Homo sapiens
aatgtaatgaaaaat

SEQ ID NO: 1772737 - DNA, 15 bp, Homo sapiens
atgtaatgaaaaata

SEQ ID NO: 1772738 - DNA, 15 bp, Homo sapiens
tgtaatgaaaaatat

SEQ ID NO: 1772739 - DNA, 15 bp, Homo sapiens
gtaatgaaaaatatt

SEQ ID NO: 1772740 - DNA, 15 bp, Homo sapiens
taatgaaaaatattc

SEQ ID NO: 1772741 - DNA, 15 bp, Homo sapiens
aatgaaaaatattca

SEQ ID NO: 1772742 - DNA, 15 bp, Homo sapiens
atgaaaaatattcaa

SEQ ID NO: 1772743 - DNA, 15 bp, Homo sapiens
tgaaaaatattcaat

SEQ ID NO: 1772744 - DNA, 15 bp, Homo sapiens
gaaaaatattcaatt

SEQ ID NO: 1772745 - DNA, 15 bp, Homo sapiens
aaaaatattcaattt

SEQ ID NO: 1772746 - DNA, 15 bp, Homo sapiens
aaaatattcaattta

SEQ ID NO: 1772747 - DNA, 15 bp, Homo sapiens
aaatattcaatttac

SEQ ID NO: 1772748 - DNA, 15 bp, Homo sapiens
aatattcaatttaca

SEQ ID NO: 1772749 - DNA, 15 bp, Homo sapiens
atattcaatttacag

SEQ ID NO: 1772750 - DNA, 15 bp, Homo sapiens
tattcaatttacagc

SEQ ID NO: 1772751 - DNA, 15 bp, Homo sapiens
attcaatttacagca

SEQ ID NO: 1772752 - DNA, 15 bp, Homo sapiens
ttcaatttacagcaa

SEQ ID NO: 1772753 - DNA, 15 bp, Homo sapiens
tcaatttacagcaat

SEQ ID NO: 1772754 - DNA, 15 bp, Homo sapiens
caatttacagcaata

SEQ ID NO: 1772755 - DNA, 15 bp, Homo sapiens
aatttacagcaataa

SEQ ID NO: 1772756 - DNA, 15 bp, Homo sapiens
tttacagcaataaca

SEQ ID NO: 1772757 - DNA, 15 bp, Homo sapiens
ttacagcaataacaa

SEQ ID NO: 1772758 - DNA, 15 bp, Homo sapiens
tacagcaataacaaa

SEQ ID NO: 1772759 - DNA, 15 bp, Homo sapiens
acagcaataacaaat

SEQ ID NO: 1772760 - DNA, 15 bp, Homo sapiens
cagcaataacaaata

SEQ ID NO: 1772761 - DNA, 15 bp, Homo sapiens
agcaataacaaatag

SEQ ID NO: 1772762 - DNA, 15 bp, Homo sapiens
gcaataacaaatagt

SEQ ID NO: 1772763 - DNA, 15 bp, Homo sapiens
caataacaaatagta

SEQ ID NO: 1772764 - DNA, 15 bp, Homo sapiens
aataacaaatagtac

SEQ ID NO: 1772765 - DNA, 15 bp, Homo sapiens
ataacaaatagtaca

SEQ ID NO: 1772766 - DNA, 15 bp, Homo sapiens
taacaaatagtacaa

SEQ ID NO: 1772767 - DNA, 15 bp, Homo sapiens
aacaaatagtacaaa

SEQ ID NO: 1772768 - DNA, 15 bp, Homo sapiens
acaaatagtacaaaa

SEQ ID NO: 1772769 - DNA, 15 bp, Homo sapiens
caaatagtacaaaat

SEQ ID NO: 1772770 - DNA, 15 bp, Homo sapiens
aaatagtacaaaata

SEQ ID NO: 1772771 - DNA, 15 bp, Homo sapiens
aatagtacaaaatac

SEQ ID NO: 1772772 - DNA, 15 bp, Homo sapiens
atagtacaaaatacc

SEQ ID NO: 1772773 - DNA, 15 bp, Homo sapiens
tagtacaaaatacct

SEQ ID NO: 1772774 - DNA, 15 bp, Homo sapiens
agtacaaaatacctt

SEQ ID NO: 1772775 - DNA, 15 bp, Homo sapiens
gtacaaaatacctta

SEQ ID NO: 1772776 - DNA, 15 bp, Homo sapiens
tacaaaataccttag

SEQ ID NO: 1772777 - DNA, 15 bp, Homo sapiens
acaaaataccttagg

SEQ ID NO: 1772778 - DNA, 15 bp, Homo sapiens
caaaataccttagga

SEQ ID NO: 1772779 - DNA, 15 bp, Homo sapiens
aaaataccttaggaa

SEQ ID NO: 1772780 - DNA, 15 bp, Homo sapiens
aaataccttaggaat

SEQ ID NO: 1772781 - DNA, 15 bp, Homo sapiens
aataccttaggaata

SEQ ID NO: 1772782 - DNA, 15 bp, Homo sapiens
ataccttaggaataa

SEQ ID NO: 1772783 - DNA, 15 bp, Homo sapiens
taccttaggaataag

SEQ ID NO: 1772784 - DNA, 15 bp, Homo sapiens
accttaggaataagc

SEQ ID NO: 1772785 - DNA, 15 bp, Homo sapiens
ccttaggaataagct

SEQ ID NO: 1772786 - DNA, 15 bp, Homo sapiens
cttaggaataagctt

SEQ ID NO: 1772787 - DNA, 15 bp, Homo sapiens
ttaggaataagctta

SEQ ID NO: 1772788 - DNA, 15 bp, Homo sapiens
taggaataagcttaa

SEQ ID NO: 1772789 - DNA, 15 bp, Homo sapiens
aggaataagcttaat

SEQ ID NO: 1772790 - DNA, 15 bp, Homo sapiens
ggaataagcttaata

SEQ ID NO: 1772791 - DNA, 15 bp, Homo sapiens
gaataagcttaatag

SEQ ID NO: 1772792 - DNA, 15 bp, Homo sapiens
aataagcttaatagg

SEQ ID NO: 1772793 - DNA, 15 bp, Homo sapiens
ataagcttaataggc

SEQ ID NO: 1772794 - DNA, 15 bp, Homo sapiens
taagcttaataggca

SEQ ID NO: 1772795 - DNA, 15 bp, Homo sapiens
aagcttaataggcaa

SEQ ID NO: 1772796 - DNA, 15 bp, Homo sapiens
agcttaataggcaaa

SEQ ID NO: 1772797 - DNA, 15 bp, Homo sapiens
gcttaataggcaaag

SEQ ID NO: 1772798 - DNA, 15 bp, Homo sapiens
cttaataggcaaagt

SEQ ID NO: 1772799 - DNA, 15 bp, Homo sapiens
ttaataggcaaagtg

SEQ ID NO: 1772800 - DNA, 15 bp, Homo sapiens
taataggcaaagtgc

SEQ ID NO: 1772801 - DNA, 15 bp, Homo sapiens
aataggcaaagtgca

SEQ ID NO: 1772802 - DNA, 15 bp, Homo sapiens
ataggcaaagtgcag

SEQ ID NO: 1772803 - DNA, 15 bp, Homo sapiens
taggcaaagtgcagg

SEQ ID NO: 1772804 - DNA, 15 bp, Homo sapiens
aggcaaagtgcagga

SEQ ID NO: 1772805 - DNA, 15 bp, Homo sapiens
ggcaaagtgcaggat

SEQ ID NO: 1772806 - DNA, 15 bp, Homo sapiens
gcaaagtgcaggatg

SEQ ID NO: 1772807 - DNA, 15 bp, Homo sapiens
caaagtgcaggatgt

SEQ ID NO: 1772808 - DNA, 15 bp, Homo sapiens
aaagtgcaggatgta

SEQ ID NO: 1772809 - DNA, 15 bp, Homo sapiens
aagtgcaggatgtag

SEQ ID NO: 1772810 - DNA, 15 bp, Homo sapiens
agtgcaggatgtaga

SEQ ID NO: 1772811 - DNA, 15 bp, Homo sapiens
gtgcaggatgtagat

SEQ ID NO: 1772812 - DNA, 15 bp, Homo sapiens
tgcaggatgtagatg

SEQ ID NO: 1772813 - DNA, 15 bp, Homo sapiens
gcaggatgtagatga

SEQ ID NO: 1772814 - DNA, 15 bp, Homo sapiens
caggatgtagatgaa

SEQ ID NO: 1772815 - DNA, 15 bp, Homo sapiens
aggatgtagatgaaa

SEQ ID NO: 1772816 - DNA, 15 bp, Homo sapiens
ggatgtagatgaaaa

SEQ ID NO: 1772817 - DNA, 15 bp, Homo sapiens
gatgtagatgaaaac

SEQ ID NO: 1772818 - DNA, 15 bp, Homo sapiens
atgtagatgaaaaca

SEQ ID NO: 1772819 - DNA, 15 bp, Homo sapiens
tgtagatgaaaacaa

SEQ ID NO: 1772820 - DNA, 15 bp, Homo sapiens
gtagatgaaaacaaa

SEQ ID NO: 1772821 - DNA, 15 bp, Homo sapiens
tagatgaaaacaaag

SEQ ID NO: 1772822 - DNA, 15 bp, Homo sapiens
agatgaaaacaaagc

SEQ ID NO: 1772823 - DNA, 15 bp, Homo sapiens
gatgaaaacaaagca

SEQ ID NO: 1772824 - DNA, 15 bp, Homo sapiens
atgaaaacaaagcaa

SEQ ID NO: 1772825 - DNA, 15 bp, Homo sapiens
tgaaaacaaagcaaa

SEQ ID NO: 1772826 - DNA, 15 bp, Homo sapiens
gaaaacaaagcaaaa

SEQ ID NO: 1772827 - DNA, 15 bp, Homo sapiens
aaacaaagcaaaaga

SEQ ID NO: 1772828 - DNA, 15 bp, Homo sapiens
aacaaagcaaaagac

SEQ ID NO: 1772829 - DNA, 15 bp, Homo sapiens
acaaagcaaaagact

SEQ ID NO: 1772830 - DNA, 15 bp, Homo sapiens
caaagcaaaagacta

SEQ ID NO: 1772831 - DNA, 15 bp, Homo sapiens
aaagcaaaagactac

SEQ ID NO: 1772832 - DNA, 15 bp, Homo sapiens
aagcaaaagactaca

SEQ ID NO: 1772833 - DNA, 15 bp, Homo sapiens
agcaaaagactacaa

SEQ ID NO: 1772834 - DNA, 15 bp, Homo sapiens
gcaaaagactacaaa

SEQ ID NO: 1772835 - DNA, 15 bp, Homo sapiens
caaaagactacaaaa

SEQ ID NO: 1772836 - DNA, 15 bp, Homo sapiens
aaaagactacaaaac

SEQ ID NO: 1772837 - DNA, 15 bp, Homo sapiens
aaagactacaaaact

SEQ ID NO: 1772838 - DNA, 15 bp, Homo sapiens
aagactacaaaactt

SEQ ID NO: 1772839 - DNA, 15 bp, Homo sapiens
agactacaaaacttt

SEQ ID NO: 1772840 - DNA, 15 bp, Homo sapiens
gactacaaaacttta

SEQ ID NO: 1772841 - DNA, 15 bp, Homo sapiens
actacaaaactttaa

SEQ ID NO: 1772842 - DNA, 15 bp, Homo sapiens
ctacaaaactttaat

SEQ ID NO: 1772843 - DNA, 15 bp, Homo sapiens
tacaaaactttaata

SEQ ID NO: 1772844 - DNA, 15 bp, Homo sapiens
acaaaactttaataa

SEQ ID NO: 1772845 - DNA, 15 bp, Homo sapiens
caaaactttaataaa

SEQ ID NO: 1772846 - DNA, 15 bp, Homo sapiens
aaaactttaataaag

SEQ ID NO: 1772847 - DNA, 15 bp, Homo sapiens
aaactttaataaagg

SEQ ID NO: 1772848 - DNA, 15 bp, Homo sapiens
aactttaataaaggc

SEQ ID NO: 1772849 - DNA, 15 bp, Homo sapiens
actttaataaaggcc

SEQ ID NO: 1772850 - DNA, 15 bp, Homo sapiens
ctttaataaaggcca

SEQ ID NO: 1772851 - DNA, 15 bp, Homo sapiens
tttaataaaggccat

SEQ ID NO: 1772852 - DNA, 15 bp, Homo sapiens
ttaataaaggccata

SEQ ID NO: 1772853 - DNA, 15 bp, Homo sapiens
taataaaggccataa

SEQ ID NO: 1772854 - DNA, 15 bp, Homo sapiens
aataaaggccataag

SEQ ID NO: 1772855 - DNA, 15 bp, Homo sapiens
ataaaggccataaga

SEQ ID NO: 1772856 - DNA, 15 bp, Homo sapiens
taaaggccataagag

SEQ ID NO: 1772857 - DNA, 15 bp, Homo sapiens
aaaggccataagaga

SEQ ID NO: 1772858 - DNA, 15 bp, Homo sapiens
aaggccataagagaa

SEQ ID NO: 1772859 - DNA, 15 bp, Homo sapiens
aggccataagagaat

SEQ ID NO: 1772860 - DNA, 15 bp, Homo sapiens
ggccataagagaata

SEQ ID NO: 1772861 - DNA, 15 bp, Homo sapiens
gccataagagaatac

SEQ ID NO: 1772862 - DNA, 15 bp, Homo sapiens
ccataagagaatact

SEQ ID NO: 1772863 - DNA, 15 bp, Homo sapiens
cataagagaatactt

SEQ ID NO: 1772864 - DNA, 15 bp, Homo sapiens
ataagagaatacttg

SEQ ID NO: 1772865 - DNA, 15 bp, Homo sapiens
taagagaatacttga

SEQ ID NO: 1772866 - DNA, 15 bp, Homo sapiens
aagagaatacttgaa

SEQ ID NO: 1772867 - DNA, 15 bp, Homo sapiens
agagaatacttgaac

SEQ ID NO: 1772868 - DNA, 15 bp, Homo sapiens
gagaatacttgaaca

SEQ ID NO: 1772869 - DNA, 15 bp, Homo sapiens
agaatacttgaacat

SEQ ID NO: 1772870 - DNA, 15 bp, Homo sapiens
gaatacttgaacatg

SEQ ID NO: 1772871 - DNA, 15 bp, Homo sapiens
aatacttgaacatgt

SEQ ID NO: 1772872 - DNA, 15 bp, Homo sapiens
atacttgaacatgtg

SEQ ID NO: 1772873 - DNA, 15 bp, Homo sapiens
tacttgaacatgtgc

SEQ ID NO: 1772874 - DNA, 15 bp, Homo sapiens
acttgaacatgtgcc

SEQ ID NO: 1772875 - DNA, 15 bp, Homo sapiens
cttgaacatgtgcca

SEQ ID NO: 1772876 - DNA, 15 bp, Homo sapiens
ttgaacatgtgccag

SEQ ID NO: 1772877 - DNA, 15 bp, Homo sapiens
tgaacatgtgccagg

SEQ ID NO: 1772878 - DNA, 15 bp, Homo sapiens
gaacatgtgccaggc

SEQ ID NO: 1772879 - DNA, 15 bp, Homo sapiens
aacatgtgccaggca

SEQ ID NO: 1772880 - DNA, 15 bp, Homo sapiens
acatgtgccaggcag

SEQ ID NO: 1772881 - DNA, 15 bp, Homo sapiens
catgtgccaggcagt

SEQ ID NO: 1772882 - DNA, 15 bp, Homo sapiens
atgtgccaggcagtt

SEQ ID NO: 1772883 - DNA, 15 bp, Homo sapiens
tgtgccaggcagttt

SEQ ID NO: 1772884 - DNA, 15 bp, Homo sapiens
gtgccaggcagtttt

SEQ ID NO: 1772885 - DNA, 15 bp, Homo sapiens
tgccaggcagttttt

SEQ ID NO: 1772886 - DNA, 15 bp, Homo sapiens
gccaggcagtttttc

SEQ ID NO: 1772887 - DNA, 15 bp, Homo sapiens
ccaggcagtttttct

SEQ ID NO: 1772888 - DNA, 15 bp, Homo sapiens
caggcagtttttctg

SEQ ID NO: 1772889 - DNA, 15 bp, Homo sapiens
aggcagtttttctgg

SEQ ID NO: 1772890 - DNA, 15 bp, Homo sapiens
ggcagtttttctggg

SEQ ID NO: 1772891 - DNA, 15 bp, Homo sapiens
gcagtttttctggga

SEQ ID NO: 1772892 - DNA, 15 bp, Homo sapiens
cagtttttctgggac

SEQ ID NO: 1772893 - DNA, 15 bp, Homo sapiens
agtttttctgggaca

SEQ ID NO: 1772894 - DNA, 15 bp, Homo sapiens
gtttttctgggacaa

SEQ ID NO: 1772895 - DNA, 15 bp, Homo sapiens
tttttctgggacaaa

SEQ ID NO: 1772896 - DNA, 15 bp, Homo sapiens
ttttctgggacaaat

SEQ ID NO: 1772897 - DNA, 15 bp, Homo sapiens
tttctgggacaaatc

SEQ ID NO: 1772898 - DNA, 15 bp, Homo sapiens
ttctgggacaaatct

SEQ ID NO: 1772899 - DNA, 15 bp, Homo sapiens
tctgggacaaatcta

SEQ ID NO: 1772900 - DNA, 15 bp, Homo sapiens
ctgggacaaatctat

SEQ ID NO: 1772901 - DNA, 15 bp, Homo sapiens
tgggacaaatctata

SEQ ID NO: 1772902 - DNA, 15 bp, Homo sapiens
gggacaaatctatac

SEQ ID NO: 1772903 - DNA, 15 bp, Homo sapiens
ggacaaatctataca

SEQ ID NO: 1772904 - DNA, 15 bp, Homo sapiens
gacaaatctatacat

SEQ ID NO: 1772905 - DNA, 15 bp, Homo sapiens
acaaatctatacatt

SEQ ID NO: 1772906 - DNA, 15 bp, Homo sapiens
caaatctatacattt

SEQ ID NO: 1772907 - DNA, 15 bp, Homo sapiens
aaatctatacattta

SEQ ID NO: 1772908 - DNA, 15 bp, Homo sapiens
aatctatacatttaa

SEQ ID NO: 1772909 - DNA, 15 bp, Homo sapiens
atctatacatttaat

SEQ ID NO: 1772910 - DNA, 15 bp, Homo sapiens
tctatacatttaatg

SEQ ID NO: 1772911 - DNA, 15 bp, Homo sapiens
ctatacatttaatgc

SEQ ID NO: 1772912 - DNA, 15 bp, Homo sapiens
tatacatttaatgcc

SEQ ID NO: 1772913 - DNA, 15 bp, Homo sapiens
atacatttaatgcca

SEQ ID NO: 1772914 - DNA, 15 bp, Homo sapiens
tacatttaatgccaa

SEQ ID NO: 1772915 - DNA, 15 bp, Homo sapiens
acatttaatgccaat

SEQ ID NO: 1772916 - DNA, 15 bp, Homo sapiens
catttaatgccaatc

SEQ ID NO: 1772917 - DNA, 15 bp, Homo sapiens
atttaatgccaatcc

SEQ ID NO: 1772918 - DNA, 15 bp, Homo sapiens
tttaatgccaatcca

SEQ ID NO: 1772919 - DNA, 15 bp, Homo sapiens
ttaatgccaatccag

SEQ ID NO: 1772920 - DNA, 15 bp, Homo sapiens
taatgccaatccagt

SEQ ID NO: 1772921 - DNA, 15 bp, Homo sapiens
aatgccaatccagta

SEQ ID NO: 1772922 - DNA, 15 bp, Homo sapiens
atgccaatccagtaa

SEQ ID NO: 1772923 - DNA, 15 bp, Homo sapiens
tgccaatccagtaaa

SEQ ID NO: 1772924 - DNA, 15 bp, Homo sapiens
gccaatccagtaaaa

SEQ ID NO: 1772925 - DNA, 15 bp, Homo sapiens
ccaatccagtaaaaa

SEQ ID NO: 1772926 - DNA, 15 bp, Homo sapiens
caatccagtaaaaat

SEQ ID NO: 1772927 - DNA, 15 bp, Homo sapiens
aatccagtaaaaatc

SEQ ID NO: 1772928 - DNA, 15 bp, Homo sapiens
atccagtaaaaatct

SEQ ID NO: 1772929 - DNA, 15 bp, Homo sapiens
tccagtaaaaatctc

SEQ ID NO: 1772930 - DNA, 15 bp, Homo sapiens
ccagtaaaaatctca

SEQ ID NO: 1772931 - DNA, 15 bp, Homo sapiens
cagtaaaaatctcag

SEQ ID NO: 1772932 - DNA, 15 bp, Homo sapiens
agtaaaaatctcagt

SEQ ID NO: 1772933 - DNA, 15 bp, Homo sapiens
gtaaaaatctcagta

SEQ ID NO: 1772934 - DNA, 15 bp, Homo sapiens
taaaaatctcagtat

SEQ ID NO: 1772935 - DNA, 15 bp, Homo sapiens
aaaaatctcagtatg

SEQ ID NO: 1772936 - DNA, 15 bp, Homo sapiens
aaaatctcagtatgt

SEQ ID NO: 1772937 - DNA, 15 bp, Homo sapiens
aaatctcagtatgtt

SEQ ID NO: 1772938 - DNA, 15 bp, Homo sapiens
aatctcagtatgttt

SEQ ID NO: 1772939 - DNA, 15 bp, Homo sapiens
atctcagtatgtttt

SEQ ID NO: 1772940 - DNA, 15 bp, Homo sapiens
tctcagtatgttttc

SEQ ID NO: 1772941 - DNA, 15 bp, Homo sapiens
ctcagtatgttttca

SEQ ID NO: 1772942 - DNA, 15 bp, Homo sapiens
tcagtatgttttcag

SEQ ID NO: 1772943 - DNA, 15 bp, Homo sapiens
cagtatgttttcagt

SEQ ID NO: 1772944 - DNA, 15 bp, Homo sapiens
agtatgttttcagtg

SEQ ID NO: 1772945 - DNA, 15 bp, Homo sapiens
gtatgttttcagtgc

SEQ ID NO: 1772946 - DNA, 15 bp, Homo sapiens
tatgttttcagtgca

SEQ ID NO: 1772947 - DNA, 15 bp, Homo sapiens
atgttttcagtgcat

SEQ ID NO: 1772948 - DNA, 15 bp, Homo sapiens
tgttttcagtgcatg

SEQ ID NO: 1772949 - DNA, 15 bp, Homo sapiens
gttttcagtgcatgt

SEQ ID NO: 1772950 - DNA, 15 bp, Homo sapiens
ttttcagtgcatgtt

SEQ ID NO: 1772951 - DNA, 15 bp, Homo sapiens
tttcagtgcatgttt

SEQ ID NO: 1772952 - DNA, 15 bp, Homo sapiens
ttcagtgcatgtttt

SEQ ID NO: 1772953 - DNA, 15 bp, Homo sapiens
tcagtgcatgttttt

SEQ ID NO: 1772954 - DNA, 15 bp, Homo sapiens
cagtgcatgttttta

SEQ ID NO: 1772955 - DNA, 15 bp, Homo sapiens
agtgcatgtttttac

SEQ ID NO: 1772956 - DNA, 15 bp, Homo sapiens
gtgcatgtttttaca

SEQ ID NO: 1772957 - DNA, 15 bp, Homo sapiens
tgcatgtttttacaa

SEQ ID NO: 1772958 - DNA, 15 bp, Homo sapiens
gcatgtttttacaag

SEQ ID NO: 1772959 - DNA, 15 bp, Homo sapiens
catgtttttacaagt

SEQ ID NO: 1772960 - DNA, 15 bp, Homo sapiens
atgtttttacaagtt

SEQ ID NO: 1772961 - DNA, 15 bp, Homo sapiens
tgtttttacaagttt

SEQ ID NO: 1772962 - DNA, 15 bp, Homo sapiens
gtttttacaagtttg

SEQ ID NO: 1772963 - DNA, 15 bp, Homo sapiens
tttttacaagtttgt

SEQ ID NO: 1772964 - DNA, 15 bp, Homo sapiens
ttttacaagtttgtt

SEQ ID NO: 1772965 - DNA, 15 bp, Homo sapiens
tttacaagtttgttc

SEQ ID NO: 1772966 - DNA, 15 bp, Homo sapiens
ttacaagtttgttca

SEQ ID NO: 1772967 - DNA, 15 bp, Homo sapiens
tacaagtttgttcac

SEQ ID NO: 1772968 - DNA, 15 bp, Homo sapiens
acaagtttgttcacc

SEQ ID NO: 1772969 - DNA, 15 bp, Homo sapiens
caagtttgttcacct

SEQ ID NO: 1772970 - DNA, 15 bp, Homo sapiens
aagtttgttcacctg

SEQ ID NO: 1772971 - DNA, 15 bp, Homo sapiens
agtttgttcacctgt

SEQ ID NO: 1772972 - DNA, 15 bp, Homo sapiens
gtttgttcacctgta

SEQ ID NO: 1772973 - DNA, 15 bp, Homo sapiens
tttgttcacctgtag

SEQ ID NO: 1772974 - DNA, 15 bp, Homo sapiens
ttgttcacctgtaga

SEQ ID NO: 1772975 - DNA, 15 bp, Homo sapiens
tgttcacctgtagat

SEQ ID NO: 1772976 - DNA, 15 bp, Homo sapiens
gttcacctgtagata

SEQ ID NO: 1772977 - DNA, 15 bp, Homo sapiens
ttcacctgtagatac

SEQ ID NO: 1772978 - DNA, 15 bp, Homo sapiens
tcacctgtagatact

SEQ ID NO: 1772979 - DNA, 15 bp, Homo sapiens
cacctgtagatactg

SEQ ID NO: 1772980 - DNA, 15 bp, Homo sapiens
acctgtagatactgt

SEQ ID NO: 1772981 - DNA, 15 bp, Homo sapiens
cctgtagatactgtg

SEQ ID NO: 1772982 - DNA, 15 bp, Homo sapiens
ctgtagatactgtgg

SEQ ID NO: 1772983 - DNA, 15 bp, Homo sapiens
tgtagatactgtggg

SEQ ID NO: 1772984 - DNA, 15 bp, Homo sapiens
gtagatactgtgggt

SEQ ID NO: 1772985 - DNA, 15 bp, Homo sapiens
tagatactgtgggtt

SEQ ID NO: 1772986 - DNA, 15 bp, Homo sapiens
agatactgtgggtta

SEQ ID NO: 1772987 - DNA, 15 bp, Homo sapiens
gatactgtgggttat

SEQ ID NO: 1772988 - DNA, 15 bp, Homo sapiens
atactgtgggttata

SEQ ID NO: 1772989 - DNA, 15 bp, Homo sapiens
tactgtgggttatat

SEQ ID NO: 1772990 - DNA, 15 bp, Homo sapiens
actgtgggttatatc

SEQ ID NO: 1772991 - DNA, 15 bp, Homo sapiens
ctgtgggttatatca

SEQ ID NO: 1772992 - DNA, 15 bp, Homo sapiens
tgtgggttatatcac

SEQ ID NO: 1772993 - DNA, 15 bp, Homo sapiens
gtgggttatatcacc

SEQ ID NO: 1772994 - DNA, 15 bp, Homo sapiens
tgggttatatcacct

SEQ ID NO: 1772995 - DNA, 15 bp, Homo sapiens
gggttatatcaccta

SEQ ID NO: 1772996 - DNA, 15 bp, Homo sapiens
ggttatatcacctag

SEQ ID NO: 1772997 - DNA, 15 bp, Homo sapiens
gttatatcacctagc

SEQ ID NO: 1772998 - DNA, 15 bp, Homo sapiens
ttatatcacctagca

SEQ ID NO: 1772999 - DNA, 15 bp, Homo sapiens
tatatcacctagcag

SEQ ID NO: 1773000 - DNA, 15 bp, Homo sapiens
atatcacctagcagt

SEQ ID NO: 1773001 - DNA, 15 bp, Homo sapiens
tatcacctagcagtt

SEQ ID NO: 1773002 - DNA, 15 bp, Homo sapiens
atcacctagcagttt

SEQ ID NO: 1773003 - DNA, 15 bp, Homo sapiens
tcacctagcagtttc

SEQ ID NO: 1773004 - DNA, 15 bp, Homo sapiens
cacctagcagtttca

SEQ ID NO: 1773005 - DNA, 15 bp, Homo sapiens
acctagcagtttcat

SEQ ID NO: 1773006 - DNA, 15 bp, Homo sapiens
cctagcagtttcatt

SEQ ID NO: 1773007 - DNA, 15 bp, Homo sapiens
ctagcagtttcattt

SEQ ID NO: 1773008 - DNA, 15 bp, Homo sapiens
tagcagtttcatttc

SEQ ID NO: 1773009 - DNA, 15 bp, Homo sapiens
agcagtttcatttct

SEQ ID NO: 1773010 - DNA, 15 bp, Homo sapiens
gcagtttcatttcta

SEQ ID NO: 1773011 - DNA, 15 bp, Homo sapiens
cagtttcatttctaa

SEQ ID NO: 1773012 - DNA, 15 bp, Homo sapiens
agtttcatttctaag

SEQ ID NO: 1773013 - DNA, 15 bp, Homo sapiens
gtttcatttctaaga

SEQ ID NO: 1773014 - DNA, 15 bp, Homo sapiens
tttcatttctaagaa

SEQ ID NO: 1773015 - DNA, 15 bp, Homo sapiens
ttcatttctaagaaa

SEQ ID NO: 1773016 - DNA, 15 bp, Homo sapiens
tcatttctaagaaaa

SEQ ID NO: 1773017 - DNA, 15 bp, Homo sapiens
catttctaagaaaaa

SEQ ID NO: 1773018 - DNA, 15 bp, Homo sapiens
atttctaagaaaaaa

SEQ ID NO: 1773019 - DNA, 15 bp, Homo sapiens
tttctaagaaaaaaa

SEQ ID NO: 1773020 - DNA, 15 bp, Homo sapiens
ttctaagaaaaaaat

SEQ ID NO: 1773021 - DNA, 15 bp, Homo sapiens
tctaagaaaaaaatc

SEQ ID NO: 1773022 - DNA, 15 bp, Homo sapiens
ctaagaaaaaaatcc

SEQ ID NO: 1773023 - DNA, 15 bp, Homo sapiens
taagaaaaaaatccc

SEQ ID NO: 1773024 - DNA, 15 bp, Homo sapiens
aagaaaaaaatcccc

SEQ ID NO: 1773025 - DNA, 15 bp, Homo sapiens
agaaaaaaatcccct

SEQ ID NO: 1773026 - DNA, 15 bp, Homo sapiens
gaaaaaaatcccctc

SEQ ID NO: 1773027 - DNA, 15 bp, Homo sapiens
aaaaaaatcccctcc

SEQ ID NO: 1773028 - DNA, 15 bp, Homo sapiens
aaaaaatcccctcct

SEQ ID NO: 1773029 - DNA, 15 bp, Homo sapiens
aaaaatcccctccta

SEQ ID NO: 1773030 - DNA, 15 bp, Homo sapiens
aaaatcccctcctaa

SEQ ID NO: 1773031 - DNA, 15 bp, Homo sapiens
aaatcccctcctaat

SEQ ID NO: 1773032 - DNA, 15 bp, Homo sapiens
aatcccctcctaatt

SEQ ID NO: 1773033 - DNA, 15 bp, Homo sapiens
atcccctcctaattt

SEQ ID NO: 1773034 - DNA, 15 bp, Homo sapiens
tcccctcctaatttg

SEQ ID NO: 1773035 - DNA, 15 bp, Homo sapiens
cccctcctaatttgc

SEQ ID NO: 1773036 - DNA, 15 bp, Homo sapiens
ccctcctaatttgca

SEQ ID NO: 1773037 - DNA, 15 bp, Homo sapiens
cctcctaatttgcat

SEQ ID NO: 1773038 - DNA, 15 bp, Homo sapiens
ctcctaatttgcatt

SEQ ID NO: 1773039 - DNA, 15 bp, Homo sapiens
tcctaatttgcattc

SEQ ID NO: 1773040 - DNA, 15 bp, Homo sapiens
cctaatttgcattct

SEQ ID NO: 1773041 - DNA, 15 bp, Homo sapiens
ctaatttgcattctc

SEQ ID NO: 1773042 - DNA, 15 bp, Homo sapiens
taatttgcattctcc

SEQ ID NO: 1773043 - DNA, 15 bp, Homo sapiens
aatttgcattctcca

SEQ ID NO: 1773044 - DNA, 15 bp, Homo sapiens
atttgcattctccac

SEQ ID NO: 1773045 - DNA, 15 bp, Homo sapiens
tttgcattctccaca

SEQ ID NO: 1773046 - DNA, 15 bp, Homo sapiens
ttgcattctccacac

SEQ ID NO: 1773047 - DNA, 15 bp, Homo sapiens
gcattctccacacct

SEQ ID NO: 1773048 - DNA, 15 bp, Homo sapiens
cattctccacacctt

SEQ ID NO: 1773049 - DNA, 15 bp, Homo sapiens
attctccacaccttc

SEQ ID NO: 1773050 - DNA, 15 bp, Homo sapiens
ttctccacaccttca

SEQ ID NO: 1773051 - DNA, 15 bp, Homo sapiens
tctccacaccttcac

SEQ ID NO: 1773052 - DNA, 15 bp, Homo sapiens
ctccacaccttcacc

SEQ ID NO: 1773053 - DNA, 15 bp, Homo sapiens
tccacaccttcaccc

SEQ ID NO: 1773054 - DNA, 15 bp, Homo sapiens
ccacaccttcaccca

SEQ ID NO: 1773055 - DNA, 15 bp, Homo sapiens
cacaccttcacccaa

SEQ ID NO: 1773056 - DNA, 15 bp, Homo sapiens
acaccttcacccaaa

SEQ ID NO: 1773057 - DNA, 15 bp, Homo sapiens
caccttcacccaaac

SEQ ID NO: 1773058 - DNA, 15 bp, Homo sapiens
accttcacccaaacc

SEQ ID NO: 1773059 - DNA, 15 bp, Homo sapiens
ccttcacccaaacca

SEQ ID NO: 1773060 - DNA, 15 bp, Homo sapiens
cttcacccaaaccag

SEQ ID NO: 1773061 - DNA, 15 bp, Homo sapiens
ttcacccaaaccaga

SEQ ID NO: 1773062 - DNA, 15 bp, Homo sapiens
tcacccaaaccagat

SEQ ID NO: 1773063 - DNA, 15 bp, Homo sapiens
cacccaaaccagatt

SEQ ID NO: 1773064 - DNA, 15 bp, Homo sapiens
acccaaaccagatta

SEQ ID NO: 1773065 - DNA, 15 bp, Homo sapiens
cccaaaccagattat

SEQ ID NO: 1773066 - DNA, 15 bp, Homo sapiens
ccaaaccagattatt

SEQ ID NO: 1773067 - DNA, 15 bp, Homo sapiens
caaaccagattatta

SEQ ID NO: 1773068 - DNA, 15 bp, Homo sapiens
aaaccagattattat

SEQ ID NO: 1773069 - DNA, 15 bp, Homo sapiens
aaccagattattatt

SEQ ID NO: 1773070 - DNA, 15 bp, Homo sapiens
accagattattatta

SEQ ID NO: 1773071 - DNA, 15 bp, Homo sapiens
ccagattattattag

SEQ ID NO: 1773072 - DNA, 15 bp, Homo sapiens
cagattattattaga

SEQ ID NO: 1773073 - DNA, 15 bp, Homo sapiens
agattattattagac

SEQ ID NO: 1773074 - DNA, 15 bp, Homo sapiens
gattattattagact

SEQ ID NO: 1773075 - DNA, 15 bp, Homo sapiens
attattattagactt

SEQ ID NO: 1773076 - DNA, 15 bp, Homo sapiens
ttattattagacttt

SEQ ID NO: 1773077 - DNA, 15 bp, Homo sapiens
tattattagactttt

SEQ ID NO: 1773078 - DNA, 15 bp, Homo sapiens
attattagactttta

SEQ ID NO: 1773079 - DNA, 15 bp, Homo sapiens
ttattagacttttaa

SEQ ID NO: 1773080 - DNA, 15 bp, Homo sapiens
tattagacttttaac

SEQ ID NO: 1773081 - DNA, 15 bp, Homo sapiens
attagacttttaaca

SEQ ID NO: 1773082 - DNA, 15 bp, Homo sapiens
ttagacttttaacag

SEQ ID NO: 1773083 - DNA, 15 bp, Homo sapiens
tagacttttaacagg

SEQ ID NO: 1773084 - DNA, 15 bp, Homo sapiens
agacttttaacaggt

SEQ ID NO: 1773085 - DNA, 15 bp, Homo sapiens
gacttttaacaggtc

SEQ ID NO: 1773086 - DNA, 15 bp, Homo sapiens
acttttaacaggtca

SEQ ID NO: 1773087 - DNA, 15 bp, Homo sapiens
cttttaacaggtcaa

SEQ ID NO: 1773088 - DNA, 15 bp, Homo sapiens
ttttaacaggtcaaa

SEQ ID NO: 1773089 - DNA, 15 bp, Homo sapiens
tttaacaggtcaaag

SEQ ID NO: 1773090 - DNA, 15 bp, Homo sapiens
ttaacaggtcaaagt

SEQ ID NO: 1773091 - DNA, 15 bp, Homo sapiens
taacaggtcaaagta

SEQ ID NO: 1773092 - DNA, 15 bp, Homo sapiens
aacaggtcaaagtag

SEQ ID NO: 1773093 - DNA, 15 bp, Homo sapiens
acaggtcaaagtagt

SEQ ID NO: 1773094 - DNA, 15 bp, Homo sapiens
caggtcaaagtagta

SEQ ID NO: 1773095 - DNA, 15 bp, Homo sapiens
aggtcaaagtagtat

SEQ ID NO: 1773096 - DNA, 15 bp, Homo sapiens
ggtcaaagtagtatc

SEQ ID NO: 1773097 - DNA, 15 bp, Homo sapiens
gtcaaagtagtatct

SEQ ID NO: 1773098 - DNA, 15 bp, Homo sapiens
tcaaagtagtatctt

SEQ ID NO: 1773099 - DNA, 15 bp, Homo sapiens
caaagtagtatcttg

SEQ ID NO: 1773100 - DNA, 15 bp, Homo sapiens
aaagtagtatcttgt

SEQ ID NO: 1773101 - DNA, 15 bp, Homo sapiens
aagtagtatcttgtt

SEQ ID NO: 1773102 - DNA, 15 bp, Homo sapiens
agtagtatcttgttt

SEQ ID NO: 1773103 - DNA, 15 bp, Homo sapiens
gtagtatcttgttta

SEQ ID NO: 1773104 - DNA, 15 bp, Homo sapiens
tagtatcttgtttag

SEQ ID NO: 1773105 - DNA, 15 bp, Homo sapiens
agtatcttgtttagt

SEQ ID NO: 1773106 - DNA, 15 bp, Homo sapiens
gtatcttgtttagtt

SEQ ID NO: 1773107 - DNA, 15 bp, Homo sapiens
tatcttgtttagttt

SEQ ID NO: 1773108 - DNA, 15 bp, Homo sapiens
atcttgtttagtttg

SEQ ID NO: 1773109 - DNA, 15 bp, Homo sapiens
tcttgtttagtttgc

SEQ ID NO: 1773110 - DNA, 15 bp, Homo sapiens
cttgtttagtttgca

SEQ ID NO: 1773111 - DNA, 15 bp, Homo sapiens
ttgtttagtttgcat

SEQ ID NO: 1773112 - DNA, 15 bp, Homo sapiens
tgtttagtttgcatt

SEQ ID NO: 1773113 - DNA, 15 bp, Homo sapiens
gtttagtttgcattt

SEQ ID NO: 1773114 - DNA, 15 bp, Homo sapiens
tttagtttgcatttc

SEQ ID NO: 1773115 - DNA, 15 bp, Homo sapiens
ttagtttgcatttct

SEQ ID NO: 1773116 - DNA, 15 bp, Homo sapiens
tagtttgcatttctt

SEQ ID NO: 1773117 - DNA, 15 bp, Homo sapiens
agtttgcatttcttt

SEQ ID NO: 1773118 - DNA, 15 bp, Homo sapiens
gtttgcatttcttta

SEQ ID NO: 1773119 - DNA, 15 bp, Homo sapiens
tttgcatttctttag

SEQ ID NO: 1773120 - DNA, 15 bp, Homo sapiens
ttgcatttctttagt

SEQ ID NO: 1773121 - DNA, 15 bp, Homo sapiens
tgcatttctttagtt

SEQ ID NO: 1773122 - DNA, 15 bp, Homo sapiens
gcatttctttagtta

SEQ ID NO: 1773123 - DNA, 15 bp, Homo sapiens
catttctttagttat

SEQ ID NO: 1773124 - DNA, 15 bp, Homo sapiens
atttctttagttata

SEQ ID NO: 1773125 - DNA, 15 bp, Homo sapiens
tttctttagttataa

SEQ ID NO: 1773126 - DNA, 15 bp, Homo sapiens
ttctttagttataag

SEQ ID NO: 1773127 - DNA, 15 bp, Homo sapiens
tctttagttataagg

SEQ ID NO: 1773128 - DNA, 15 bp, Homo sapiens
ctttagttataagga

SEQ ID NO: 1773129 - DNA, 15 bp, Homo sapiens
tttagttataaggag

SEQ ID NO: 1773130 - DNA, 15 bp, Homo sapiens
ttagttataaggagt

SEQ ID NO: 1773131 - DNA, 15 bp, Homo sapiens
tagttataaggagtc

SEQ ID NO: 1773132 - DNA, 15 bp, Homo sapiens
agttataaggagtcc

SEQ ID NO: 1773133 - DNA, 15 bp, Homo sapiens
gttataaggagtcca

SEQ ID NO: 1773134 - DNA, 15 bp, Homo sapiens
ttataaggagtccag

SEQ ID NO: 1773135 - DNA, 15 bp, Homo sapiens
tataaggagtccaga

SEQ ID NO: 1773136 - DNA, 15 bp, Homo sapiens
ataaggagtccagaa

SEQ ID NO: 1773137 - DNA, 15 bp, Homo sapiens
taaggagtccagaaa

SEQ ID NO: 1773138 - DNA, 15 bp, Homo sapiens
aaggagtccagaaat

SEQ ID NO: 1773139 - DNA, 15 bp, Homo sapiens
aggagtccagaaata

SEQ ID NO: 1773140 - DNA, 15 bp, Homo sapiens
ggagtccagaaataa

SEQ ID NO: 1773141 - DNA, 15 bp, Homo sapiens
gagtccagaaataat

SEQ ID NO: 1773142 - DNA, 15 bp, Homo sapiens
agtccagaaataatc

SEQ ID NO: 1773143 - DNA, 15 bp, Homo sapiens
gtccagaaataatcc

SEQ ID NO: 1773144 - DNA, 15 bp, Homo sapiens
tccagaaataatccc

SEQ ID NO: 1773145 - DNA, 15 bp, Homo sapiens
ccagaaataatccca

SEQ ID NO: 1773146 - DNA, 15 bp, Homo sapiens
cagaaataatcccat

SEQ ID NO: 1773147 - DNA, 15 bp, Homo sapiens
agaaataatcccata

SEQ ID NO: 1773148 - DNA, 15 bp, Homo sapiens
gaaataatcccatac

SEQ ID NO: 1773149 - DNA, 15 bp, Homo sapiens
aaataatcccatacc

SEQ ID NO: 1773150 - DNA, 15 bp, Homo sapiens
aataatcccataccc

SEQ ID NO: 1773151 - DNA, 15 bp, Homo sapiens
ataatcccataccca

SEQ ID NO: 1773152 - DNA, 15 bp, Homo sapiens
taatcccatacccag

SEQ ID NO: 1773153 - DNA, 15 bp, Homo sapiens
aatcccatacccagg

SEQ ID NO: 1773154 - DNA, 15 bp, Homo sapiens
atcccatacccaggg

SEQ ID NO: 1773155 - DNA, 15 bp, Homo sapiens
tcccatacccagggg

SEQ ID NO: 1773156 - DNA, 15 bp, Homo sapiens
cccatacccagggga

SEQ ID NO: 1773157 - DNA, 15 bp, Homo sapiens
ccatacccaggggaa

SEQ ID NO: 1773158 - DNA, 15 bp, Homo sapiens
catacccaggggaat

SEQ ID NO: 1773159 - DNA, 15 bp, Homo sapiens
atacccaggggaatt

SEQ ID NO: 1773160 - DNA, 15 bp, Homo sapiens
tacccaggggaattt

SEQ ID NO: 1773161 - DNA, 15 bp, Homo sapiens
acccaggggaattta

SEQ ID NO: 1773162 - DNA, 15 bp, Homo sapiens
cccaggggaatttaa

SEQ ID NO: 1773163 - DNA, 15 bp, Homo sapiens
ccaggggaatttaat

SEQ ID NO: 1773164 - DNA, 15 bp, Homo sapiens
caggggaatttaatg

SEQ ID NO: 1773165 - DNA, 15 bp, Homo sapiens
aggggaatttaatgt

SEQ ID NO: 1773166 - DNA, 15 bp, Homo sapiens
ggggaatttaatgta

SEQ ID NO: 1773167 - DNA, 15 bp, Homo sapiens
gggaatttaatgtat

SEQ ID NO: 1773168 - DNA, 15 bp, Homo sapiens
ggaatttaatgtatg

SEQ ID NO: 1773169 - DNA, 15 bp, Homo sapiens
gaatttaatgtatga

SEQ ID NO: 1773170 - DNA, 15 bp, Homo sapiens
aatttaatgtatgat

SEQ ID NO: 1773171 - DNA, 15 bp, Homo sapiens
atttaatgtatgata

SEQ ID NO: 1773172 - DNA, 15 bp, Homo sapiens
tttaatgtatgataa

SEQ ID NO: 1773173 - DNA, 15 bp, Homo sapiens
ttaatgtatgataat

SEQ ID NO: 1773174 - DNA, 15 bp, Homo sapiens
taatgtatgataatt

SEQ ID NO: 1773175 - DNA, 15 bp, Homo sapiens
aatgtatgataattt

SEQ ID NO: 1773176 - DNA, 15 bp, Homo sapiens
atgtatgataattta

SEQ ID NO: 1773177 - DNA, 15 bp, Homo sapiens
tgtatgataatttat

SEQ ID NO: 1773178 - DNA, 15 bp, Homo sapiens
gtatgataatttatc

SEQ ID NO: 1773179 - DNA, 15 bp, Homo sapiens
tatgataatttatcc

SEQ ID NO: 1773180 - DNA, 15 bp, Homo sapiens
atgataatttatcca

SEQ ID NO: 1773181 - DNA, 15 bp, Homo sapiens
tgataatttatccac

SEQ ID NO: 1773182 - DNA, 15 bp, Homo sapiens
gataatttatccact

SEQ ID NO: 1773183 - DNA, 15 bp, Homo sapiens
ataatttatccactt

SEQ ID NO: 1773184 - DNA, 15 bp, Homo sapiens
taatttatccacttc

SEQ ID NO: 1773185 - DNA, 15 bp, Homo sapiens
aatttatccacttca

SEQ ID NO: 1773186 - DNA, 15 bp, Homo sapiens
atttatccacttcaa

SEQ ID NO: 1773187 - DNA, 15 bp, Homo sapiens
tttatccacttcaaa

SEQ ID NO: 1773188 - DNA, 15 bp, Homo sapiens
ttatccacttcaaat

SEQ ID NO: 1773189 - DNA, 15 bp, Homo sapiens
tatccacttcaaatc

SEQ ID NO: 1773190 - DNA, 15 bp, Homo sapiens
atccacttcaaatca

SEQ ID NO: 1773191 - DNA, 15 bp, Homo sapiens
tccacttcaaatcag

SEQ ID NO: 1773192 - DNA, 15 bp, Homo sapiens
ccacttcaaatcagt

SEQ ID NO: 1773193 - DNA, 15 bp, Homo sapiens
cacttcaaatcagtg

SEQ ID NO: 1773194 - DNA, 15 bp, Homo sapiens
acttcaaatcagtgg

SEQ ID NO: 1773195 - DNA, 15 bp, Homo sapiens
cttcaaatcagtgga

SEQ ID NO: 1773196 - DNA, 15 bp, Homo sapiens
ttcaaatcagtggag

SEQ ID NO: 1773197 - DNA, 15 bp, Homo sapiens
tcaaatcagtggaga

SEQ ID NO: 1773198 - DNA, 15 bp, Homo sapiens
caaatcagtggagaa

SEQ ID NO: 1773199 - DNA, 15 bp, Homo sapiens
aaatcagtggagaaa

SEQ ID NO: 1773200 - DNA, 15 bp, Homo sapiens
aatcagtggagaaaa

SEQ ID NO: 1773201 - DNA, 15 bp, Homo sapiens
atcagtggagaaaat

SEQ ID NO: 1773202 - DNA, 15 bp, Homo sapiens
tcagtggagaaaatt

SEQ ID NO: 1773203 - DNA, 15 bp, Homo sapiens
cagtggagaaaattc

SEQ ID NO: 1773204 - DNA, 15 bp, Homo sapiens
agtggagaaaattca

SEQ ID NO: 1773205 - DNA, 15 bp, Homo sapiens
gtggagaaaattcag

SEQ ID NO: 1773206 - DNA, 15 bp, Homo sapiens
tggagaaaattcagg

SEQ ID NO: 1773207 - DNA, 15 bp, Homo sapiens
ggagaaaattcagga

SEQ ID NO: 1773208 - DNA, 15 bp, Homo sapiens
gagaaaattcaggat

SEQ ID NO: 1773209 - DNA, 15 bp, Homo sapiens
agaaaattcaggata

SEQ ID NO: 1773210 - DNA, 15 bp, Homo sapiens
gaaaattcaggataa

SEQ ID NO: 1773211 - DNA, 15 bp, Homo sapiens
aaaattcaggataat

SEQ ID NO: 1773212 - DNA, 15 bp, Homo sapiens
aaattcaggataatt

SEQ ID NO: 1773213 - DNA, 15 bp, Homo sapiens
aattcaggataattc

SEQ ID NO: 1773214 - DNA, 15 bp, Homo sapiens
attcaggataattca

SEQ ID NO: 1773215 - DNA, 15 bp, Homo sapiens
ttcaggataattcag

SEQ ID NO: 1773216 - DNA, 15 bp, Homo sapiens
tcaggataattcagt

SEQ ID NO: 1773217 - DNA, 15 bp, Homo sapiens
caggataattcagta

SEQ ID NO: 1773218 - DNA, 15 bp, Homo sapiens
aggataattcagtaa

SEQ ID NO: 1773219 - DNA, 15 bp, Homo sapiens
ggataattcagtaaa

SEQ ID NO: 1773220 - DNA, 15 bp, Homo sapiens
gataattcagtaaat

SEQ ID NO: 1773221 - DNA, 15 bp, Homo sapiens
ataattcagtaaatg

SEQ ID NO: 1773222 - DNA, 15 bp, Homo sapiens
taattcagtaaatgc

SEQ ID NO: 1773223 - DNA, 15 bp, Homo sapiens
aattcagtaaatgct

SEQ ID NO: 1773224 - DNA, 15 bp, Homo sapiens
attcagtaaatgctc

SEQ ID NO: 1773225 - DNA, 15 bp, Homo sapiens
ttcagtaaatgctca

SEQ ID NO: 1773226 - DNA, 15 bp, Homo sapiens
tcagtaaatgctcat

SEQ ID NO: 1773227 - DNA, 15 bp, Homo sapiens
cagtaaatgctcatg

SEQ ID NO: 1773228 - DNA, 15 bp, Homo sapiens
agtaaatgctcatga

SEQ ID NO: 1773229 - DNA, 15 bp, Homo sapiens
gtaaatgctcatgag

SEQ ID NO: 1773230 - DNA, 15 bp, Homo sapiens
taaatgctcatgagt

SEQ ID NO: 1773231 - DNA, 15 bp, Homo sapiens
aaatgctcatgagtt

SEQ ID NO: 1773232 - DNA, 15 bp, Homo sapiens
aatgctcatgagtta

SEQ ID NO: 1773233 - DNA, 15 bp, Homo sapiens
atgctcatgagttat

SEQ ID NO: 1773234 - DNA, 15 bp, Homo sapiens
tgctcatgagttatc

SEQ ID NO: 1773235 - DNA, 15 bp, Homo sapiens
gctcatgagttatca

SEQ ID NO: 1773236 - DNA, 15 bp, Homo sapiens
ctcatgagttatcag

SEQ ID NO: 1773237 - DNA, 15 bp, Homo sapiens
tcatgagttatcagg

SEQ ID NO: 1773238 - DNA, 15 bp, Homo sapiens
catgagttatcagga

SEQ ID NO: 1773239 - DNA, 15 bp, Homo sapiens
atgagttatcaggat

SEQ ID NO: 1773240 - DNA, 15 bp, Homo sapiens
tgagttatcaggata

SEQ ID NO: 1773241 - DNA, 15 bp, Homo sapiens
gagttatcaggatag

SEQ ID NO: 1773242 - DNA, 15 bp, Homo sapiens
agttatcaggatagc

SEQ ID NO: 1773243 - DNA, 15 bp, Homo sapiens
gttatcaggatagca

SEQ ID NO: 1773244 - DNA, 15 bp, Homo sapiens
ttatcaggatagcaa

SEQ ID NO: 1773245 - DNA, 15 bp, Homo sapiens
tatcaggatagcaat

SEQ ID NO: 1773246 - DNA, 15 bp, Homo sapiens
atcaggatagcaatt

SEQ ID NO: 1773247 - DNA, 15 bp, Homo sapiens
tcaggatagcaattt

SEQ ID NO: 1773248 - DNA, 15 bp, Homo sapiens
caggatagcaatttg

SEQ ID NO: 1773249 - DNA, 15 bp, Homo sapiens
aggatagcaatttga

SEQ ID NO: 1773250 - DNA, 15 bp, Homo sapiens
ggatagcaatttgaa

SEQ ID NO: 1773251 - DNA, 15 bp, Homo sapiens
gatagcaatttgaaa

SEQ ID NO: 1773252 - DNA, 15 bp, Homo sapiens
atagcaatttgaaaa

SEQ ID NO: 1773253 - DNA, 15 bp, Homo sapiens
tagcaatttgaaaaa

SEQ ID NO: 1773254 - DNA, 15 bp, Homo sapiens
agcaatttgaaaaaa

SEQ ID NO: 1773255 - DNA, 15 bp, Homo sapiens
gcaatttgaaaaaaa

SEQ ID NO: 1773256 - DNA, 15 bp, Homo sapiens
caatttgaaaaaaag

SEQ ID NO: 1773257 - DNA, 15 bp, Homo sapiens
aatttgaaaaaaaga

SEQ ID NO: 1773258 - DNA, 15 bp, Homo sapiens
atttgaaaaaaagag

SEQ ID NO: 1773259 - DNA, 15 bp, Homo sapiens
tttgaaaaaaagagg

SEQ ID NO: 1773260 - DNA, 15 bp, Homo sapiens
ttgaaaaaaagaggt

SEQ ID NO: 1773261 - DNA, 15 bp, Homo sapiens
tgaaaaaaagaggta

SEQ ID NO: 1773262 - DNA, 15 bp, Homo sapiens
gaaaaaaagaggtag

SEQ ID NO: 1773263 - DNA, 15 bp, Homo sapiens
aaaaaagaggtagac

SEQ ID NO: 1773264 - DNA, 15 bp, Homo sapiens
aaaaagaggtagact

SEQ ID NO: 1773265 - DNA, 15 bp, Homo sapiens
aaaagaggtagactt

SEQ ID NO: 1773266 - DNA, 15 bp, Homo sapiens
aaagaggtagacttt

SEQ ID NO: 1773267 - DNA, 15 bp, Homo sapiens
aagaggtagactttg

SEQ ID NO: 1773268 - DNA, 15 bp, Homo sapiens
agaggtagactttga

SEQ ID NO: 1773269 - DNA, 15 bp, Homo sapiens
gaggtagactttgat

SEQ ID NO: 1773270 - DNA, 15 bp, Homo sapiens
aggtagactttgatt

SEQ ID NO: 1773271 - DNA, 15 bp, Homo sapiens
ggtagactttgattt

SEQ ID NO: 1773272 - DNA, 15 bp, Homo sapiens
gtagactttgattta

SEQ ID NO: 1773273 - DNA, 15 bp, Homo sapiens
tagactttgatttat

SEQ ID NO: 1773274 - DNA, 15 bp, Homo sapiens
agactttgatttatt

SEQ ID NO: 1773275 - DNA, 15 bp, Homo sapiens
gactttgatttattc

SEQ ID NO: 1773276 - DNA, 15 bp, Homo sapiens
actttgatttattct

SEQ ID NO: 1773277 - DNA, 15 bp, Homo sapiens
ctttgatttattctt

SEQ ID NO: 1773278 - DNA, 15 bp, Homo sapiens
tttgatttattcttt

SEQ ID NO: 1773279 - DNA, 15 bp, Homo sapiens
ttgatttattcttta

SEQ ID NO: 1773280 - DNA, 15 bp, Homo sapiens
tgatttattctttat

SEQ ID NO: 1773281 - DNA, 15 bp, Homo sapiens
gatttattctttata

SEQ ID NO: 1773282 - DNA, 15 bp, Homo sapiens
atttattctttatac

SEQ ID NO: 1773283 - DNA, 15 bp, Homo sapiens
tttattctttatacc

SEQ ID NO: 1773284 - DNA, 15 bp, Homo sapiens
ttattctttatacca

SEQ ID NO: 1773285 - DNA, 15 bp, Homo sapiens
tattctttataccaa

SEQ ID NO: 1773286 - DNA, 15 bp, Homo sapiens
attctttataccaaa

SEQ ID NO: 1773287 - DNA, 15 bp, Homo sapiens
ttctttataccaaaa

SEQ ID NO: 1773288 - DNA, 15 bp, Homo sapiens
tctttataccaaaat

SEQ ID NO: 1773289 - DNA, 15 bp, Homo sapiens
ctttataccaaaata

SEQ ID NO: 1773290 - DNA, 15 bp, Homo sapiens
tttataccaaaataa

SEQ ID NO: 1773291 - DNA, 15 bp, Homo sapiens
ttataccaaaataaa

SEQ ID NO: 1773292 - DNA, 15 bp, Homo sapiens
tataccaaaataaat

SEQ ID NO: 1773293 - DNA, 15 bp, Homo sapiens
ataccaaaataaatt

SEQ ID NO: 1773294 - DNA, 15 bp, Homo sapiens
taccaaaataaattc

SEQ ID NO: 1773295 - DNA, 15 bp, Homo sapiens
accaaaataaattct

SEQ ID NO: 1773296 - DNA, 15 bp, Homo sapiens
ccaaaataaattcta

SEQ ID NO: 1773297 - DNA, 15 bp, Homo sapiens
caaaataaattctag

SEQ ID NO: 1773298 - DNA, 15 bp, Homo sapiens
aaaataaattctagc

SEQ ID NO: 1773299 - DNA, 15 bp, Homo sapiens
aaataaattctagct

SEQ ID NO: 1773300 - DNA, 15 bp, Homo sapiens
aataaattctagcta

SEQ ID NO: 1773301 - DNA, 15 bp, Homo sapiens
ataaattctagctag

SEQ ID NO: 1773302 - DNA, 15 bp, Homo sapiens
taaattctagctaga

SEQ ID NO: 1773303 - DNA, 15 bp, Homo sapiens
aaattctagctagat

SEQ ID NO: 1773304 - DNA, 15 bp, Homo sapiens
aattctagctagatc

SEQ ID NO: 1773305 - DNA, 15 bp, Homo sapiens
attctagctagatca

SEQ ID NO: 1773306 - DNA, 15 bp, Homo sapiens
ttctagctagatcaa

SEQ ID NO: 1773307 - DNA, 15 bp, Homo sapiens
tctagctagatcaat

SEQ ID NO: 1773308 - DNA, 15 bp, Homo sapiens
ctagctagatcaata

SEQ ID NO: 1773309 - DNA, 15 bp, Homo sapiens
tagctagatcaataa

SEQ ID NO: 1773310 - DNA, 15 bp, Homo sapiens
agctagatcaataat

SEQ ID NO: 1773311 - DNA, 15 bp, Homo sapiens
gctagatcaataatc

SEQ ID NO: 1773312 - DNA, 15 bp, Homo sapiens
ctagatcaataatct

SEQ ID NO: 1773313 - DNA, 15 bp, Homo sapiens
tagatcaataatctc

SEQ ID NO: 1773314 - DNA, 15 bp, Homo sapiens
agatcaataatctca

SEQ ID NO: 1773315 - DNA, 15 bp, Homo sapiens
gatcaataatctcaa

SEQ ID NO: 1773316 - DNA, 15 bp, Homo sapiens
atcaataatctcaat

SEQ ID NO: 1773317 - DNA, 15 bp, Homo sapiens
tcaataatctcaata

SEQ ID NO: 1773318 - DNA, 15 bp, Homo sapiens
caataatctcaataa

SEQ ID NO: 1773319 - DNA, 15 bp, Homo sapiens
aataatctcaataaa

SEQ ID NO: 1773320 - DNA, 15 bp, Homo sapiens
ataatctcaataaaa

SEQ ID NO: 1773321 - DNA, 15 bp, Homo sapiens
taatctcaataaaaa

SEQ ID NO: 1773322 - DNA, 15 bp, Homo sapiens
aatctcaataaaaaa

SEQ ID NO: 1773323 - DNA, 15 bp, Homo sapiens
atctcaataaaaaat

SEQ ID NO: 1773324 - DNA, 15 bp, Homo sapiens
tctcaataaaaaatg

SEQ ID NO: 1773325 - DNA, 15 bp, Homo sapiens
ctcaataaaaaatga

SEQ ID NO: 1773326 - DNA, 15 bp, Homo sapiens
tcaataaaaaatgac

SEQ ID NO: 1773327 - DNA, 15 bp, Homo sapiens
caataaaaaatgact

SEQ ID NO: 1773328 - DNA, 15 bp, Homo sapiens
aataaaaaatgactc

SEQ ID NO: 1773329 - DNA, 15 bp, Homo sapiens
ataaaaaatgactcc

SEQ ID NO: 1773330 - DNA, 15 bp, Homo sapiens
taaaaaatgactcca

SEQ ID NO: 1773331 - DNA, 15 bp, Homo sapiens
aaaaaatgactccat

SEQ ID NO: 1773332 - DNA, 15 bp, Homo sapiens
aaaaatgactccatt

SEQ ID NO: 1773333 - DNA, 15 bp, Homo sapiens
aaaatgactccattt

SEQ ID NO: 1773334 - DNA, 15 bp, Homo sapiens
aaatgactccattta

SEQ ID NO: 1773335 - DNA, 15 bp, Homo sapiens
aatgactccatttaa

SEQ ID NO: 1773336 - DNA, 15 bp, Homo sapiens
atgactccatttaaa

SEQ ID NO: 1773337 - DNA, 15 bp, Homo sapiens
tgactccatttaaaa

SEQ ID NO: 1773338 - DNA, 15 bp, Homo sapiens
gactccatttaaaaa

SEQ ID NO: 1773339 - DNA, 15 bp, Homo sapiens
actccatttaaaaaa

SEQ ID NO: 1773340 - DNA, 15 bp, Homo sapiens
ctccatttaaaaaat

SEQ ID NO: 1773341 - DNA, 15 bp, Homo sapiens
tccatttaaaaaatg

SEQ ID NO: 1773342 - DNA, 15 bp, Homo sapiens
ccatttaaaaaatga

SEQ ID NO: 1773343 - DNA, 15 bp, Homo sapiens
catttaaaaaatgac

SEQ ID NO: 1773344 - DNA, 15 bp, Homo sapiens
atttaaaaaatgact

SEQ ID NO: 1773345 - DNA, 15 bp, Homo sapiens
tttaaaaaatgactc

SEQ ID NO: 1773346 - DNA, 15 bp, Homo sapiens
ttaaaaaatgactcc

SEQ ID NO: 1773347 - DNA, 15 bp, Homo sapiens
aaaaatgactccata

SEQ ID NO: 1773348 - DNA, 15 bp, Homo sapiens
aaaatgactccatat

SEQ ID NO: 1773349 - DNA, 15 bp, Homo sapiens
aaatgactccatata

SEQ ID NO: 1773350 - DNA, 15 bp, Homo sapiens
aatgactccatataa

SEQ ID NO: 1773351 - DNA, 15 bp, Homo sapiens
atgactccatataag

SEQ ID NO: 1773352 - DNA, 15 bp, Homo sapiens
tgactccatataagt

SEQ ID NO: 1773353 - DNA, 15 bp, Homo sapiens
gactccatataagtt

SEQ ID NO: 1773354 - DNA, 15 bp, Homo sapiens
actccatataagttc

SEQ ID NO: 1773355 - DNA, 15 bp, Homo sapiens
ctccatataagttct

SEQ ID NO: 1773356 - DNA, 15 bp, Homo sapiens
tccatataagttctg

SEQ ID NO: 1773357 - DNA, 15 bp, Homo sapiens
ccatataagttctgg

SEQ ID NO: 1773358 - DNA, 15 bp, Homo sapiens
catataagttctgga

SEQ ID NO: 1773359 - DNA, 15 bp, Homo sapiens
atataagttctggaa

SEQ ID NO: 1773360 - DNA, 15 bp, Homo sapiens
tataagttctggaaa

SEQ ID NO: 1773361 - DNA, 15 bp, Homo sapiens
ataagttctggaaaa

SEQ ID NO: 1773362 - DNA, 15 bp, Homo sapiens
taagttctggaaaaa

SEQ ID NO: 1773363 - DNA, 15 bp, Homo sapiens
aagttctggaaaaaa

SEQ ID NO: 1773364 - DNA, 15 bp, Homo sapiens
agttctggaaaaaaa

SEQ ID NO: 1773365 - DNA, 15 bp, Homo sapiens
gttctggaaaaaaat

SEQ ID NO: 1773366 - DNA, 15 bp, Homo sapiens
ttctggaaaaaaatg

SEQ ID NO: 1773367 - DNA, 15 bp, Homo sapiens
tctggaaaaaaatga

SEQ ID NO: 1773368 - DNA, 15 bp, Homo sapiens
ctggaaaaaaatgag

SEQ ID NO: 1773369 - DNA, 15 bp, Homo sapiens
tggaaaaaaatgagc

SEQ ID NO: 1773370 - DNA, 15 bp, Homo sapiens
ggaaaaaaatgagca

SEQ ID NO: 1773371 - DNA, 15 bp, Homo sapiens
gaaaaaaatgagcac

SEQ ID NO: 1773372 - DNA, 15 bp, Homo sapiens
aaaaaaatgagcacg

SEQ ID NO: 1773373 - DNA, 15 bp, Homo sapiens
aaaaaatgagcacgt

SEQ ID NO: 1773374 - DNA, 15 bp, Homo sapiens
aaaaatgagcacgtt

SEQ ID NO: 1773375 - DNA, 15 bp, Homo sapiens
aaaatgagcacgtta

SEQ ID NO: 1773376 - DNA, 15 bp, Homo sapiens
aaatgagcacgttag

SEQ ID NO: 1773377 - DNA, 15 bp, Homo sapiens
aatgagcacgttaga

SEQ ID NO: 1773378 - DNA, 15 bp, Homo sapiens
atgagcacgttagaa

SEQ ID NO: 1773379 - DNA, 15 bp, Homo sapiens
tgagcacgttagaaa

SEQ ID NO: 1773380 - DNA, 15 bp, Homo sapiens
gagcacgttagaaaa

SEQ ID NO: 1773381 - DNA, 15 bp, Homo sapiens
agcacgttagaaaaa

SEQ ID NO: 1773382 - DNA, 15 bp, Homo sapiens
gcacgttagaaaaat

SEQ ID NO: 1773383 - DNA, 15 bp, Homo sapiens
cacgttagaaaaata

SEQ ID NO: 1773384 - DNA, 15 bp, Homo sapiens
acgttagaaaaataa

SEQ ID NO: 1773385 - DNA, 15 bp, Homo sapiens
cgttagaaaaataac

SEQ ID NO: 1773386 - DNA, 15 bp, Homo sapiens
gttagaaaaataaca

SEQ ID NO: 1773387 - DNA, 15 bp, Homo sapiens
tagaaaaataacagt

SEQ ID NO: 1773388 - DNA, 15 bp, Homo sapiens
agaaaaataacagta

SEQ ID NO: 1773389 - DNA, 15 bp, Homo sapiens
gaaaaataacagtag

SEQ ID NO: 1773390 - DNA, 15 bp, Homo sapiens
aaaaataacagtaga

SEQ ID NO: 1773391 - DNA, 15 bp, Homo sapiens
aaaataacagtagag

SEQ ID NO: 1773392 - DNA, 15 bp, Homo sapiens
aaataacagtagagg

SEQ ID NO: 1773393 - DNA, 15 bp, Homo sapiens
aataacagtagaggc

SEQ ID NO: 1773394 - DNA, 15 bp, Homo sapiens
ataacagtagaggcc

SEQ ID NO: 1773395 - DNA, 15 bp, Homo sapiens
taacagtagaggcca

SEQ ID NO: 1773396 - DNA, 15 bp, Homo sapiens
aacagtagaggccag

SEQ ID NO: 1773397 - DNA, 15 bp, Homo sapiens
acagtagaggccagg

SEQ ID NO: 1773398 - DNA, 15 bp, Homo sapiens
cagtagaggccaggc

SEQ ID NO: 1773399 - DNA, 15 bp, Homo sapiens
agtagaggccaggca

SEQ ID NO: 1773400 - DNA, 15 bp, Homo sapiens
gtagaggccaggcac

SEQ ID NO: 1773401 - DNA, 15 bp, Homo sapiens
tagaggccaggcact

SEQ ID NO: 1773402 - DNA, 15 bp, Homo sapiens
agaggccaggcactg

SEQ ID NO: 1773403 - DNA, 15 bp, Homo sapiens
gaggccaggcactgt

SEQ ID NO: 1773404 - DNA, 15 bp, Homo sapiens
aggccaggcactgtg

SEQ ID NO: 1773405 - DNA, 15 bp, Homo sapiens
ggccaggcactgtgg

SEQ ID NO: 1773406 - DNA, 15 bp, Homo sapiens
ccaggcactgtggct

SEQ ID NO: 1773407 - DNA, 15 bp, Homo sapiens
caggcactgtggctc

SEQ ID NO: 1773408 - DNA, 15 bp, Homo sapiens
aggcactgtggctca

SEQ ID NO: 1773409 - DNA, 15 bp, Homo sapiens
ggcactgtggctcat

SEQ ID NO: 1773410 - DNA, 15 bp, Homo sapiens
gcactgtggctcatg

SEQ ID NO: 1773411 - DNA, 15 bp, Homo sapiens
cactgtggctcatgc

SEQ ID NO: 1773412 - DNA, 15 bp, Homo sapiens
actgtggctcatgcc

SEQ ID NO: 1773413 - DNA, 15 bp, Homo sapiens
tgtggctcatgccta

SEQ ID NO: 1773414 - DNA, 15 bp, Homo sapiens
cactttgggaggcga

SEQ ID NO: 1773415 - DNA, 15 bp, Homo sapiens
actttgggaggcgag

SEQ ID NO: 1773416 - DNA, 15 bp, Homo sapiens
ctttgggaggcgaga

SEQ ID NO: 1773417 - DNA, 15 bp, Homo sapiens
tttgggaggcgagac

SEQ ID NO: 1773418 - DNA, 15 bp, Homo sapiens
ttgggaggcgagaca

SEQ ID NO: 1773419 - DNA, 15 bp, Homo sapiens
tgggaggcgagacag

SEQ ID NO: 1773420 - DNA, 15 bp, Homo sapiens
gggaggcgagacagg

SEQ ID NO: 1773421 - DNA, 15 bp, Homo sapiens
ggaggcgagacaggt

SEQ ID NO: 1773422 - DNA, 15 bp, Homo sapiens
gaggcgagacaggtg

SEQ ID NO: 1773423 - DNA, 15 bp, Homo sapiens
aggcgagacaggtgg

SEQ ID NO: 1773424 - DNA, 15 bp, Homo sapiens
ggcgagacaggtggg

SEQ ID NO: 1773425 - DNA, 15 bp, Homo sapiens
gcgagacaggtgggt

SEQ ID NO: 1773426 - DNA, 15 bp, Homo sapiens
cgagacaggtgggtc

SEQ ID NO: 1773427 - DNA, 15 bp, Homo sapiens
gagacaggtgggtca

SEQ ID NO: 1773428 - DNA, 15 bp, Homo sapiens
agacaggtgggtcat

SEQ ID NO: 1773429 - DNA, 15 bp, Homo sapiens
gacaggtgggtcatc

SEQ ID NO: 1773430 - DNA, 15 bp, Homo sapiens
acaggtgggtcatct

SEQ ID NO: 1773431 - DNA, 15 bp, Homo sapiens
caggtgggtcatctg

SEQ ID NO: 1773432 - DNA, 15 bp, Homo sapiens
aggtgggtcatctga

SEQ ID NO: 1773433 - DNA, 15 bp, Homo sapiens
ggtgggtcatctgag

SEQ ID NO: 1773434 - DNA, 15 bp, Homo sapiens
gtgggtcatctgagg

SEQ ID NO: 1773435 - DNA, 15 bp, Homo sapiens
tgggtcatctgaggt

SEQ ID NO: 1773436 - DNA, 15 bp, Homo sapiens
gggtcatctgaggtc

SEQ ID NO: 1773437 - DNA, 15 bp, Homo sapiens
ggtcatctgaggtca

SEQ ID NO: 1773438 - DNA, 15 bp, Homo sapiens
gtcatctgaggtcag

SEQ ID NO: 1773439 - DNA, 15 bp, Homo sapiens
ggtcaggagtttgac

SEQ ID NO: 1773440 - DNA, 15 bp, Homo sapiens
gtcaggagtttgaca

SEQ ID NO: 1773441 - DNA, 15 bp, Homo sapiens
tcaggagtttgacac

SEQ ID NO: 1773442 - DNA, 15 bp, Homo sapiens
caggagtttgacacc

SEQ ID NO: 1773443 - DNA, 15 bp, Homo sapiens
aggagtttgacacca

SEQ ID NO: 1773444 - DNA, 15 bp, Homo sapiens
ggagtttgacaccag

SEQ ID NO: 1773445 - DNA, 15 bp, Homo sapiens
gagtttgacaccagc

SEQ ID NO: 1773446 - DNA, 15 bp, Homo sapiens
agtttgacaccagcc

SEQ ID NO: 1773447 - DNA, 15 bp, Homo sapiens
gtttgacaccagcct

SEQ ID NO: 1773448 - DNA, 15 bp, Homo sapiens
tttgacaccagccta

SEQ ID NO: 1773449 - DNA, 15 bp, Homo sapiens
ttgacaccagcctag

SEQ ID NO: 1773450 - DNA, 15 bp, Homo sapiens
tgacaccagcctagc

SEQ ID NO: 1773451 - DNA, 15 bp, Homo sapiens
gacaccagcctagct

SEQ ID NO: 1773452 - DNA, 15 bp, Homo sapiens
acaccagcctagcta

SEQ ID NO: 1773453 - DNA, 15 bp, Homo sapiens
caccagcctagctaa

SEQ ID NO: 1773454 - DNA, 15 bp, Homo sapiens
accagcctagctaac

SEQ ID NO: 1773455 - DNA, 15 bp, Homo sapiens
ccagcctagctaacg

SEQ ID NO: 1773456 - DNA, 15 bp, Homo sapiens
cagcctagctaacgt

SEQ ID NO: 1773457 - DNA, 15 bp, Homo sapiens
agcctagctaacgtg

SEQ ID NO: 1773458 - DNA, 15 bp, Homo sapiens
gcctagctaacgtgg

SEQ ID NO: 1773459 - DNA, 15 bp, Homo sapiens
cctagctaacgtggt

SEQ ID NO: 1773460 - DNA, 15 bp, Homo sapiens
ctagctaacgtggtg

SEQ ID NO: 1773461 - DNA, 15 bp, Homo sapiens
tagctaacgtggtga

SEQ ID NO: 1773462 - DNA, 15 bp, Homo sapiens
agctaacgtggtgaa

SEQ ID NO: 1773463 - DNA, 15 bp, Homo sapiens
cgtggtgaaaccccg

SEQ ID NO: 1773464 - DNA, 15 bp, Homo sapiens
gggcatggtggcacg

SEQ ID NO: 1773465 - DNA, 15 bp, Homo sapiens
ggcatggtggcacgt

SEQ ID NO: 1773466 - DNA, 15 bp, Homo sapiens
gcatggtggcacgtg

SEQ ID NO: 1773467 - DNA, 15 bp, Homo sapiens
catggtggcacgtgc

SEQ ID NO: 1773468 - DNA, 15 bp, Homo sapiens
atggtggcacgtgcc

SEQ ID NO: 1773469 - DNA, 15 bp, Homo sapiens
tggtggcacgtgcct

SEQ ID NO: 1773470 - DNA, 15 bp, Homo sapiens
tggcacgtgcctgta

SEQ ID NO: 1773471 - DNA, 15 bp, Homo sapiens
ggcacgtgcctgtag

SEQ ID NO: 1773472 - DNA, 15 bp, Homo sapiens
gcacgtgcctgtagt

SEQ ID NO: 1773473 - DNA, 15 bp, Homo sapiens
cacgtgcctgtagtc

SEQ ID NO: 1773474 - DNA, 15 bp, Homo sapiens
acgtgcctgtagtcc

SEQ ID NO: 1773475 - DNA, 15 bp, Homo sapiens
gcctgtagtcccaga

SEQ ID NO: 1773476 - DNA, 15 bp, Homo sapiens
cctgtagtcccagat

SEQ ID NO: 1773477 - DNA, 15 bp, Homo sapiens
ctgtagtcccagata

SEQ ID NO: 1773478 - DNA, 15 bp, Homo sapiens
tgtagtcccagatac

SEQ ID NO: 1773479 - DNA, 15 bp, Homo sapiens
gtagtcccagatact

SEQ ID NO: 1773480 - DNA, 15 bp, Homo sapiens
tagtcccagatactc

SEQ ID NO: 1773481 - DNA, 15 bp, Homo sapiens
agtcccagatactcg

SEQ ID NO: 1773482 - DNA, 15 bp, Homo sapiens
gtcccagatactcgg

SEQ ID NO: 1773483 - DNA, 15 bp, Homo sapiens
tcccagatactcgga

SEQ ID NO: 1773484 - DNA, 15 bp, Homo sapiens
cccagatactcggaa

SEQ ID NO: 1773485 - DNA, 15 bp, Homo sapiens
ccagatactcggaag

SEQ ID NO: 1773486 - DNA, 15 bp, Homo sapiens
cagatactcggaagg

SEQ ID NO: 1773487 - DNA, 15 bp, Homo sapiens
agatactcggaaggc

SEQ ID NO: 1773488 - DNA, 15 bp, Homo sapiens
gatactcggaaggct

SEQ ID NO: 1773489 - DNA, 15 bp, Homo sapiens
atactcggaaggctg

SEQ ID NO: 1773490 - DNA, 15 bp, Homo sapiens
tactcggaaggctga

SEQ ID NO: 1773491 - DNA, 15 bp, Homo sapiens
actcggaaggctgag

SEQ ID NO: 1773492 - DNA, 15 bp, Homo sapiens
ctcggaaggctgagg

SEQ ID NO: 1773493 - DNA, 15 bp, Homo sapiens
tcggaaggctgaggc

SEQ ID NO: 1773494 - DNA, 15 bp, Homo sapiens
cggaaggctgaggca

SEQ ID NO: 1773495 - DNA, 15 bp, Homo sapiens
ggaaggctgaggcag

SEQ ID NO: 1773496 - DNA, 15 bp, Homo sapiens
ggcttgaacccaggg

SEQ ID NO: 1773497 - DNA, 15 bp, Homo sapiens
gcttgaacccagggg

SEQ ID NO: 1773498 - DNA, 15 bp, Homo sapiens
cttgaacccaggggg

SEQ ID NO: 1773499 - DNA, 15 bp, Homo sapiens
ttgaacccagggggc

SEQ ID NO: 1773500 - DNA, 15 bp, Homo sapiens
tgaacccagggggcg

SEQ ID NO: 1773501 - DNA, 15 bp, Homo sapiens
gaacccagggggcgg

SEQ ID NO: 1773502 - DNA, 15 bp, Homo sapiens
aacccagggggcgga

SEQ ID NO: 1773503 - DNA, 15 bp, Homo sapiens
acccagggggcggag

SEQ ID NO: 1773504 - DNA, 15 bp, Homo sapiens
cccagggggcggagg

SEQ ID NO: 1773505 - DNA, 15 bp, Homo sapiens
ccagggggcggaggt

SEQ ID NO: 1773506 - DNA, 15 bp, Homo sapiens
cagggggcggaggtt

SEQ ID NO: 1773507 - DNA, 15 bp, Homo sapiens
agggggcggaggttg

SEQ ID NO: 1773508 - DNA, 15 bp, Homo sapiens
gggggcggaggttgc

SEQ ID NO: 1773509 - DNA, 15 bp, Homo sapiens
ggggcggaggttgca

SEQ ID NO: 1773510 - DNA, 15 bp, Homo sapiens
gggcggaggttgcag

SEQ ID NO: 1773511 - DNA, 15 bp, Homo sapiens
cactctagcctgggt

SEQ ID NO: 1773512 - DNA, 15 bp, Homo sapiens
tagcctgggtgacag

SEQ ID NO: 1773513 - DNA, 15 bp, Homo sapiens
ggtgacagagtgagt

SEQ ID NO: 1773514 - DNA, 15 bp, Homo sapiens
gtgacagagtgagtc

SEQ ID NO: 1773515 - DNA, 15 bp, Homo sapiens
tgacagagtgagtct

SEQ ID NO: 1773516 - DNA, 15 bp, Homo sapiens
gacagagtgagtctc

SEQ ID NO: 1773517 - DNA, 15 bp, Homo sapiens
acagagtgagtctcc

SEQ ID NO: 1773518 - DNA, 15 bp, Homo sapiens
cagagtgagtctcca

SEQ ID NO: 1773519 - DNA, 15 bp, Homo sapiens
agagtgagtctccat

SEQ ID NO: 1773520 - DNA, 15 bp, Homo sapiens
gagtgagtctccatc

SEQ ID NO: 1773521 - DNA, 15 bp, Homo sapiens
agtgagtctccatct

SEQ ID NO: 1773522 - DNA, 15 bp, Homo sapiens
gtgagtctccatctc

SEQ ID NO: 1773523 - DNA, 15 bp, Homo sapiens
tgagtctccatctca

SEQ ID NO: 1773524 - DNA, 15 bp, Homo sapiens
gagtctccatctcaa

SEQ ID NO: 1773525 - DNA, 15 bp, Homo sapiens
agtctccatctcaaa

SEQ ID NO: 1773526 - DNA, 15 bp, Homo sapiens
gtctccatctcaaaa

SEQ ID NO: 1773527 - DNA, 15 bp, Homo sapiens
tctccatctcaaaaa

SEQ ID NO: 1773528 - DNA, 15 bp, Homo sapiens
ctcaaaaacaaaaaa

SEQ ID NO: 1773529 - DNA, 15 bp, Homo sapiens
tcaaaaacaaaaaaa

SEQ ID NO: 1773530 - DNA, 15 bp, Homo sapiens
caaaaacaaaaaaac

SEQ ID NO: 1773531 - DNA, 15 bp, Homo sapiens
aaaaacaaaaaaaca

SEQ ID NO: 1773532 - DNA, 15 bp, Homo sapiens
aaaacaaaaaaacaa

SEQ ID NO: 1773533 - DNA, 15 bp, Homo sapiens
aaacaaaaaaacaaa

SEQ ID NO: 1773534 - DNA, 15 bp, Homo sapiens
aacaaaaaaacaaac

SEQ ID NO: 1773535 - DNA, 15 bp, Homo sapiens
acaaaaaaacaaaca

SEQ ID NO: 1773536 - DNA, 15 bp, Homo sapiens
caaaaaaacaaacaa

SEQ ID NO: 1773537 - DNA, 15 bp, Homo sapiens
aacaaaaaaaaaaaa

SEQ ID NO: 1773538 - DNA, 15 bp, Homo sapiens
acaaaaaaaaaaaac

SEQ ID NO: 1773539 - DNA, 15 bp, Homo sapiens
caaaaaaaaaaaaca

SEQ ID NO: 1773540 - DNA, 15 bp, Homo sapiens
aaaaaaaaaaaacag

SEQ ID NO: 1773541 - DNA, 15 bp, Homo sapiens
aaaaaaaaacagtag

SEQ ID NO: 1773542 - DNA, 15 bp, Homo sapiens
aaaaaaaacagtaga

SEQ ID NO: 1773543 - DNA, 15 bp, Homo sapiens
aaaaaaacagtagag

SEQ ID NO: 1773544 - DNA, 15 bp, Homo sapiens
aaaaaacagtagagg

SEQ ID NO: 1773545 - DNA, 15 bp, Homo sapiens
aaaaacagtagaggc

SEQ ID NO: 1773546 - DNA, 15 bp, Homo sapiens
aaaacagtagaggcc

SEQ ID NO: 1773547 - DNA, 15 bp, Homo sapiens
aaacagtagaggcct

SEQ ID NO: 1773548 - DNA, 15 bp, Homo sapiens
aacagtagaggcctg

SEQ ID NO: 1773549 - DNA, 15 bp, Homo sapiens
acagtagaggcctgc

SEQ ID NO: 1773550 - DNA, 15 bp, Homo sapiens
cagtagaggcctgct

SEQ ID NO: 1773551 - DNA, 15 bp, Homo sapiens
agtagaggcctgctg

SEQ ID NO: 1773552 - DNA, 15 bp, Homo sapiens
gtagaggcctgctgt

SEQ ID NO: 1773553 - DNA, 15 bp, Homo sapiens
tagaggcctgctgtg

SEQ ID NO: 1773554 - DNA, 15 bp, Homo sapiens
agaggcctgctgtgg

SEQ ID NO: 1773555 - DNA, 15 bp, Homo sapiens
gaggcctgctgtggc

SEQ ID NO: 1773556 - DNA, 15 bp, Homo sapiens
aggcctgctgtggct

SEQ ID NO: 1773557 - DNA, 15 bp, Homo sapiens
ggcctgctgtggctc

SEQ ID NO: 1773558 - DNA, 15 bp, Homo sapiens
gcctgctgtggctca

SEQ ID NO: 1773559 - DNA, 15 bp, Homo sapiens
cctgctgtggctcac

SEQ ID NO: 1773560 - DNA, 15 bp, Homo sapiens
ctgctgtggctcaca

SEQ ID NO: 1773561 - DNA, 15 bp, Homo sapiens
tgtggctcacacctg

SEQ ID NO: 1773562 - DNA, 15 bp, Homo sapiens
ctgtaatcccagcaa

SEQ ID NO: 1773563 - DNA, 15 bp, Homo sapiens
tgtaatcccagcaaa

SEQ ID NO: 1773564 - DNA, 15 bp, Homo sapiens
gtaatcccagcaaag

SEQ ID NO: 1773565 - DNA, 15 bp, Homo sapiens
taatcccagcaaaga

SEQ ID NO: 1773566 - DNA, 15 bp, Homo sapiens
aatcccagcaaagag

SEQ ID NO: 1773567 - DNA, 15 bp, Homo sapiens
atcccagcaaagagg

SEQ ID NO: 1773568 - DNA, 15 bp, Homo sapiens
tcccagcaaagaggc

SEQ ID NO: 1773569 - DNA, 15 bp, Homo sapiens
cccagcaaagaggct

SEQ ID NO: 1773570 - DNA, 15 bp, Homo sapiens
ccagcaaagaggctg

SEQ ID NO: 1773571 - DNA, 15 bp, Homo sapiens
cagcaaagaggctga

SEQ ID NO: 1773572 - DNA, 15 bp, Homo sapiens
agcaaagaggctgaa

SEQ ID NO: 1773573 - DNA, 15 bp, Homo sapiens
gcaaagaggctgaag

SEQ ID NO: 1773574 - DNA, 15 bp, Homo sapiens
caaagaggctgaagc

SEQ ID NO: 1773575 - DNA, 15 bp, Homo sapiens
aaagaggctgaagca

SEQ ID NO: 1773576 - DNA, 15 bp, Homo sapiens
aagaggctgaagcag

SEQ ID NO: 1773577 - DNA, 15 bp, Homo sapiens
agaggctgaagcaga

SEQ ID NO: 1773578 - DNA, 15 bp, Homo sapiens
gaggctgaagcagaa

SEQ ID NO: 1773579 - DNA, 15 bp, Homo sapiens
aggctgaagcagaag

SEQ ID NO: 1773580 - DNA, 15 bp, Homo sapiens
ggctgaagcagaagg

SEQ ID NO: 1773581 - DNA, 15 bp, Homo sapiens
gctgaagcagaagga

SEQ ID NO: 1773582 - DNA, 15 bp, Homo sapiens
ctgaagcagaaggat

SEQ ID NO: 1773583 - DNA, 15 bp, Homo sapiens
tgaagcagaaggatt

SEQ ID NO: 1773584 - DNA, 15 bp, Homo sapiens
gaagcagaaggattg

SEQ ID NO: 1773585 - DNA, 15 bp, Homo sapiens
aagcagaaggattga

SEQ ID NO: 1773586 - DNA, 15 bp, Homo sapiens
agcagaaggattgat

SEQ ID NO: 1773587 - DNA, 15 bp, Homo sapiens
gcagaaggattgatt

SEQ ID NO: 1773588 - DNA, 15 bp, Homo sapiens
cagaaggattgattt

SEQ ID NO: 1773589 - DNA, 15 bp, Homo sapiens
agaaggattgatttc

SEQ ID NO: 1773590 - DNA, 15 bp, Homo sapiens
gaaggattgatttct

SEQ ID NO: 1773591 - DNA, 15 bp, Homo sapiens
aaggattgatttctg

SEQ ID NO: 1773592 - DNA, 15 bp, Homo sapiens
aggattgatttctgg

SEQ ID NO: 1773593 - DNA, 15 bp, Homo sapiens
ggattgatttctgga

SEQ ID NO: 1773594 - DNA, 15 bp, Homo sapiens
gattgatttctggag

SEQ ID NO: 1773595 - DNA, 15 bp, Homo sapiens
attgatttctggagc

SEQ ID NO: 1773596 - DNA, 15 bp, Homo sapiens
ttgatttctggagcc

SEQ ID NO: 1773597 - DNA, 15 bp, Homo sapiens
tgatttctggagccc

SEQ ID NO: 1773598 - DNA, 15 bp, Homo sapiens
gatttctggagccca

SEQ ID NO: 1773599 - DNA, 15 bp, Homo sapiens
atttctggagcccag

SEQ ID NO: 1773600 - DNA, 15 bp, Homo sapiens
tttctggagcccagg

SEQ ID NO: 1773601 - DNA, 15 bp, Homo sapiens
ttctggagcccagga

SEQ ID NO: 1773602 - DNA, 15 bp, Homo sapiens
tctggagcccaggag

SEQ ID NO: 1773603 - DNA, 15 bp, Homo sapiens
ggagcccaggagttt

SEQ ID NO: 1773604 - DNA, 15 bp, Homo sapiens
gcccaggagtttggg

SEQ ID NO: 1773605 - DNA, 15 bp, Homo sapiens
cccaggagtttgggg

SEQ ID NO: 1773606 - DNA, 15 bp, Homo sapiens
ccaggagtttggggc

SEQ ID NO: 1773607 - DNA, 15 bp, Homo sapiens
caggagtttggggct

SEQ ID NO: 1773608 - DNA, 15 bp, Homo sapiens
aggagtttggggctg

SEQ ID NO: 1773609 - DNA, 15 bp, Homo sapiens
ggagtttggggctgc

SEQ ID NO: 1773610 - DNA, 15 bp, Homo sapiens
gagtttggggctgca

SEQ ID NO: 1773611 - DNA, 15 bp, Homo sapiens
agtttggggctgcag

SEQ ID NO: 1773612 - DNA, 15 bp, Homo sapiens
gtttggggctgcagt

SEQ ID NO: 1773613 - DNA, 15 bp, Homo sapiens
tttggggctgcagta

SEQ ID NO: 1773614 - DNA, 15 bp, Homo sapiens
ttggggctgcagtag

SEQ ID NO: 1773615 - DNA, 15 bp, Homo sapiens
tggggctgcagtagg

SEQ ID NO: 1773616 - DNA, 15 bp, Homo sapiens
ggggctgcagtaggc

SEQ ID NO: 1773617 - DNA, 15 bp, Homo sapiens
gggctgcagtaggcc

SEQ ID NO: 1773618 - DNA, 15 bp, Homo sapiens
ggctgcagtaggcca

SEQ ID NO: 1773619 - DNA, 15 bp, Homo sapiens
gctgcagtaggccat

SEQ ID NO: 1773620 - DNA, 15 bp, Homo sapiens
ctgcagtaggccatg

SEQ ID NO: 1773621 - DNA, 15 bp, Homo sapiens
tgcagtaggccatgc

SEQ ID NO: 1773622 - DNA, 15 bp, Homo sapiens
gcagtaggccatgcc

SEQ ID NO: 1773623 - DNA, 15 bp, Homo sapiens
cagtaggccatgcca

SEQ ID NO: 1773624 - DNA, 15 bp, Homo sapiens
agtaggccatgccac

SEQ ID NO: 1773625 - DNA, 15 bp, Homo sapiens
gtaggccatgccact

SEQ ID NO: 1773626 - DNA, 15 bp, Homo sapiens
taggccatgccactg

SEQ ID NO: 1773627 - DNA, 15 bp, Homo sapiens
aggccatgccactgt

SEQ ID NO: 1773628 - DNA, 15 bp, Homo sapiens
ggccatgccactgta

SEQ ID NO: 1773629 - DNA, 15 bp, Homo sapiens
gccatgccactgtac

SEQ ID NO: 1773630 - DNA, 15 bp, Homo sapiens
ccatgccactgtact

SEQ ID NO: 1773631 - DNA, 15 bp, Homo sapiens
catgccactgtactt

SEQ ID NO: 1773632 - DNA, 15 bp, Homo sapiens
atgccactgtacttc

SEQ ID NO: 1773633 - DNA, 15 bp, Homo sapiens
tgccactgtacttca

SEQ ID NO: 1773634 - DNA, 15 bp, Homo sapiens
gccactgtacttcag

SEQ ID NO: 1773635 - DNA, 15 bp, Homo sapiens
ccactgtacttcagc

SEQ ID NO: 1773636 - DNA, 15 bp, Homo sapiens
cactgtacttcagcc

SEQ ID NO: 1773637 - DNA, 15 bp, Homo sapiens
actgtacttcagcct

SEQ ID NO: 1773638 - DNA, 15 bp, Homo sapiens
ctgtacttcagcctg

SEQ ID NO: 1773639 - DNA, 15 bp, Homo sapiens
gtacttcagcctggg

SEQ ID NO: 1773640 - DNA, 15 bp, Homo sapiens
tacttcagcctgggt

SEQ ID NO: 1773641 - DNA, 15 bp, Homo sapiens
agcctgggtgacagc

SEQ ID NO: 1773642 - DNA, 15 bp, Homo sapiens
gcctgggtgacagcc

SEQ ID NO: 1773643 - DNA, 15 bp, Homo sapiens
cctgggtgacagccc

SEQ ID NO: 1773644 - DNA, 15 bp, Homo sapiens
ctgggtgacagccca

SEQ ID NO: 1773645 - DNA, 15 bp, Homo sapiens
tgggtgacagcccaa

SEQ ID NO: 1773646 - DNA, 15 bp, Homo sapiens
gggtgacagcccaac

SEQ ID NO: 1773647 - DNA, 15 bp, Homo sapiens
ggtgacagcccaact

SEQ ID NO: 1773648 - DNA, 15 bp, Homo sapiens
gtgacagcccaactc

SEQ ID NO: 1773649 - DNA, 15 bp, Homo sapiens
tgacagcccaactct

SEQ ID NO: 1773650 - DNA, 15 bp, Homo sapiens
gacagcccaactcta

SEQ ID NO: 1773651 - DNA, 15 bp, Homo sapiens
acagcccaactctaa

SEQ ID NO: 1773652 - DNA, 15 bp, Homo sapiens
cagcccaactctaac

SEQ ID NO: 1773653 - DNA, 15 bp, Homo sapiens
agcccaactctaaca

SEQ ID NO: 1773654 - DNA, 15 bp, Homo sapiens
gcccaactctaacaa

SEQ ID NO: 1773655 - DNA, 15 bp, Homo sapiens
cccaactctaacaat

SEQ ID NO: 1773656 - DNA, 15 bp, Homo sapiens
ccaactctaacaatt

SEQ ID NO: 1773657 - DNA, 15 bp, Homo sapiens
caactctaacaatta

SEQ ID NO: 1773658 - DNA, 15 bp, Homo sapiens
aactctaacaattaa

SEQ ID NO: 1773659 - DNA, 15 bp, Homo sapiens
actctaacaattaaa

SEQ ID NO: 1773660 - DNA, 15 bp, Homo sapiens
ctctaacaattaaaa

SEQ ID NO: 1773661 - DNA, 15 bp, Homo sapiens
tctaacaattaaaat

SEQ ID NO: 1773662 - DNA, 15 bp, Homo sapiens
ctaacaattaaaata

SEQ ID NO: 1773663 - DNA, 15 bp, Homo sapiens
taacaattaaaataa

SEQ ID NO: 1773664 - DNA, 15 bp, Homo sapiens
aacaattaaaataaa

SEQ ID NO: 1773665 - DNA, 15 bp, Homo sapiens
acaattaaaataaaa

SEQ ID NO: 1773666 - DNA, 15 bp, Homo sapiens
caattaaaataaaat

SEQ ID NO: 1773667 - DNA, 15 bp, Homo sapiens
aattaaaataaaata

SEQ ID NO: 1773668 - DNA, 15 bp, Homo sapiens
attaaaataaaataa

SEQ ID NO: 1773669 - DNA, 15 bp, Homo sapiens
ttaaaataaaataat

SEQ ID NO: 1773670 - DNA, 15 bp, Homo sapiens
taaaataaaataata

SEQ ID NO: 1773671 - DNA, 15 bp, Homo sapiens
aaaataaaataatat

SEQ ID NO: 1773672 - DNA, 15 bp, Homo sapiens
aaataaaataatata

SEQ ID NO: 1773673 - DNA, 15 bp, Homo sapiens
aataaaataatatat

SEQ ID NO: 1773674 - DNA, 15 bp, Homo sapiens
ataaaataatatatt

SEQ ID NO: 1773675 - DNA, 15 bp, Homo sapiens
taaaataatatattt

SEQ ID NO: 1773676 - DNA, 15 bp, Homo sapiens
aaaataatatattta

SEQ ID NO: 1773677 - DNA, 15 bp, Homo sapiens
aaataatatatttaa

SEQ ID NO: 1773678 - DNA, 15 bp, Homo sapiens
aataatatatttaaa

SEQ ID NO: 1773679 - DNA, 15 bp, Homo sapiens
ataatatatttaaaa

SEQ ID NO: 1773680 - DNA, 15 bp, Homo sapiens
taatatatttaaaaa

SEQ ID NO: 1773681 - DNA, 15 bp, Homo sapiens
aatatatttaaaaat

SEQ ID NO: 1773682 - DNA, 15 bp, Homo sapiens
atatatttaaaaata

SEQ ID NO: 1773683 - DNA, 15 bp, Homo sapiens
tatatttaaaaatag

SEQ ID NO: 1773684 - DNA, 15 bp, Homo sapiens
atatttaaaaatagc

SEQ ID NO: 1773685 - DNA, 15 bp, Homo sapiens
tatttaaaaatagca

SEQ ID NO: 1773686 - DNA, 15 bp, Homo sapiens
atttaaaaatagcag

SEQ ID NO: 1773687 - DNA, 15 bp, Homo sapiens
tttaaaaatagcagt

SEQ ID NO: 1773688 - DNA, 15 bp, Homo sapiens
ttaaaaatagcagta

SEQ ID NO: 1773689 - DNA, 15 bp, Homo sapiens
taaaaatagcagtag

SEQ ID NO: 1773690 - DNA, 15 bp, Homo sapiens
aaaaatagcagtaga

SEQ ID NO: 1773691 - DNA, 15 bp, Homo sapiens
aaaatagcagtagag

SEQ ID NO: 1773692 - DNA, 15 bp, Homo sapiens
aaatagcagtagagg

SEQ ID NO: 1773693 - DNA, 15 bp, Homo sapiens
aatagcagtagaggc

SEQ ID NO: 1773694 - DNA, 15 bp, Homo sapiens
atagcagtagaggct

SEQ ID NO: 1773695 - DNA, 15 bp, Homo sapiens
tagcagtagaggctt

SEQ ID NO: 1773696 - DNA, 15 bp, Homo sapiens
agcagtagaggcttt

SEQ ID NO: 1773697 - DNA, 15 bp, Homo sapiens
gcagtagaggctttc

SEQ ID NO: 1773698 - DNA, 15 bp, Homo sapiens
cagtagaggctttct

SEQ ID NO: 1773699 - DNA, 15 bp, Homo sapiens
agtagaggctttcta

SEQ ID NO: 1773700 - DNA, 15 bp, Homo sapiens
gtagaggctttctaa

SEQ ID NO: 1773701 - DNA, 15 bp, Homo sapiens
tagaggctttctaag

SEQ ID NO: 1773702 - DNA, 15 bp, Homo sapiens
agaggctttctaagt

SEQ ID NO: 1773703 - DNA, 15 bp, Homo sapiens
gaggctttctaagta

SEQ ID NO: 1773704 - DNA, 15 bp, Homo sapiens
aggctttctaagtat

SEQ ID NO: 1773705 - DNA, 15 bp, Homo sapiens
ggctttctaagtatt

SEQ ID NO: 1773706 - DNA, 15 bp, Homo sapiens
gctttctaagtatta

SEQ ID NO: 1773707 - DNA, 15 bp, Homo sapiens
ctttctaagtattat

SEQ ID NO: 1773708 - DNA, 15 bp, Homo sapiens
tttctaagtattata

SEQ ID NO: 1773709 - DNA, 15 bp, Homo sapiens
ttctaagtattatat

SEQ ID NO: 1773710 - DNA, 15 bp, Homo sapiens
tctaagtattatata

SEQ ID NO: 1773711 - DNA, 15 bp, Homo sapiens
ctaagtattatataa

SEQ ID NO: 1773712 - DNA, 15 bp, Homo sapiens
taagtattatataaa

SEQ ID NO: 1773713 - DNA, 15 bp, Homo sapiens
aagtattatataaaa

SEQ ID NO: 1773714 - DNA, 15 bp, Homo sapiens
agtattatataaaat

SEQ ID NO: 1773715 - DNA, 15 bp, Homo sapiens
gtattatataaaatc

SEQ ID NO: 1773716 - DNA, 15 bp, Homo sapiens
tattatataaaatct

SEQ ID NO: 1773717 - DNA, 15 bp, Homo sapiens
attatataaaatcta

SEQ ID NO: 1773718 - DNA, 15 bp, Homo sapiens
ttatataaaatctag

SEQ ID NO: 1773719 - DNA, 15 bp, Homo sapiens
tatataaaatctagt

SEQ ID NO: 1773720 - DNA, 15 bp, Homo sapiens
atataaaatctagtg

SEQ ID NO: 1773721 - DNA, 15 bp, Homo sapiens
tataaaatctagtgt

SEQ ID NO: 1773722 - DNA, 15 bp, Homo sapiens
ataaaatctagtgtt

SEQ ID NO: 1773723 - DNA, 15 bp, Homo sapiens
taaaatctagtgttt

SEQ ID NO: 1773724 - DNA, 15 bp, Homo sapiens
aaaatctagtgttta

SEQ ID NO: 1773725 - DNA, 15 bp, Homo sapiens
aaatctagtgtttaa

SEQ ID NO: 1773726 - DNA, 15 bp, Homo sapiens
aatctagtgtttaaa

SEQ ID NO: 1773727 - DNA, 15 bp, Homo sapiens
atctagtgtttaaaa

SEQ ID NO: 1773728 - DNA, 15 bp, Homo sapiens
tctagtgtttaaaaa

SEQ ID NO: 1773729 - DNA, 15 bp, Homo sapiens
ctagtgtttaaaaaa

SEQ ID NO: 1773730 - DNA, 15 bp, Homo sapiens
tagtgtttaaaaaaa

SEQ ID NO: 1773731 - DNA, 15 bp, Homo sapiens
agtgtttaaaaaaag

SEQ ID NO: 1773732 - DNA, 15 bp, Homo sapiens
gtgtttaaaaaaaga

SEQ ID NO: 1773733 - DNA, 15 bp, Homo sapiens
tgtttaaaaaaagat

SEQ ID NO: 1773734 - DNA, 15 bp, Homo sapiens
gtttaaaaaaagata

SEQ ID NO: 1773735 - DNA, 15 bp, Homo sapiens
tttaaaaaaagatag

SEQ ID NO: 1773736 - DNA, 15 bp, Homo sapiens
ttaaaaaaagatagg

SEQ ID NO: 1773737 - DNA, 15 bp, Homo sapiens
taaaaaaagataggt

SEQ ID NO: 1773738 - DNA, 15 bp, Homo sapiens
aaaaaaagataggtt

SEQ ID NO: 1773739 - DNA, 15 bp, Homo sapiens
aaaaaagataggttt

SEQ ID NO: 1773740 - DNA, 15 bp, Homo sapiens
aaaaagataggtttg

SEQ ID NO: 1773741 - DNA, 15 bp, Homo sapiens
aaaagataggtttga

SEQ ID NO: 1773742 - DNA, 15 bp, Homo sapiens
aaagataggtttgac

SEQ ID NO: 1773743 - DNA, 15 bp, Homo sapiens
aagataggtttgact

SEQ ID NO: 1773744 - DNA, 15 bp, Homo sapiens
agataggtttgacta

SEQ ID NO: 1773745 - DNA, 15 bp, Homo sapiens
gataggtttgactaa

SEQ ID NO: 1773746 - DNA, 15 bp, Homo sapiens
ataggtttgactaaa

SEQ ID NO: 1773747 - DNA, 15 bp, Homo sapiens
taggtttgactaaat

SEQ ID NO: 1773748 - DNA, 15 bp, Homo sapiens
aggtttgactaaata

SEQ ID NO: 1773749 - DNA, 15 bp, Homo sapiens
ggtttgactaaataa

SEQ ID NO: 1773750 - DNA, 15 bp, Homo sapiens
gtttgactaaataat

SEQ ID NO: 1773751 - DNA, 15 bp, Homo sapiens
tttgactaaataatt

SEQ ID NO: 1773752 - DNA, 15 bp, Homo sapiens
ttgactaaataattt

SEQ ID NO: 1773753 - DNA, 15 bp, Homo sapiens
tgactaaataatttt

SEQ ID NO: 1773754 - DNA, 15 bp, Homo sapiens
gactaaataattttg

SEQ ID NO: 1773755 - DNA, 15 bp, Homo sapiens
actaaataattttgt

SEQ ID NO: 1773756 - DNA, 15 bp, Homo sapiens
ctaaataattttgtt

SEQ ID NO: 1773757 - DNA, 15 bp, Homo sapiens
taaataattttgttg

SEQ ID NO: 1773758 - DNA, 15 bp, Homo sapiens
aaataattttgttgc

SEQ ID NO: 1773759 - DNA, 15 bp, Homo sapiens
aataattttgttgca

SEQ ID NO: 1773760 - DNA, 15 bp, Homo sapiens
ataattttgttgcaa

SEQ ID NO: 1773761 - DNA, 15 bp, Homo sapiens
taattttgttgcaag

SEQ ID NO: 1773762 - DNA, 15 bp, Homo sapiens
aattttgttgcaaga

SEQ ID NO: 1773763 - DNA, 15 bp, Homo sapiens
attttgttgcaagaa

SEQ ID NO: 1773764 - DNA, 15 bp, Homo sapiens
ttttgttgcaagaac

SEQ ID NO: 1773765 - DNA, 15 bp, Homo sapiens
tttgttgcaagaaca

SEQ ID NO: 1773766 - DNA, 15 bp, Homo sapiens
ttgttgcaagaacaa

SEQ ID NO: 1773767 - DNA, 15 bp, Homo sapiens
tgttgcaagaacaac

SEQ ID NO: 1773768 - DNA, 15 bp, Homo sapiens
gttgcaagaacaaca

SEQ ID NO: 1773769 - DNA, 15 bp, Homo sapiens
ttgcaagaacaacat

SEQ ID NO: 1773770 - DNA, 15 bp, Homo sapiens
tgcaagaacaacata

SEQ ID NO: 1773771 - DNA, 15 bp, Homo sapiens
gcaagaacaacataa

SEQ ID NO: 1773772 - DNA, 15 bp, Homo sapiens
caagaacaacataaa

SEQ ID NO: 1773773 - DNA, 15 bp, Homo sapiens
aagaacaacataaag

SEQ ID NO: 1773774 - DNA, 15 bp, Homo sapiens
agaacaacataaagt

SEQ ID NO: 1773775 - DNA, 15 bp, Homo sapiens
gaacaacataaagtg

SEQ ID NO: 1773776 - DNA, 15 bp, Homo sapiens
aacaacataaagtgg

SEQ ID NO: 1773777 - DNA, 15 bp, Homo sapiens
acaacataaagtgga

SEQ ID NO: 1773778 - DNA, 15 bp, Homo sapiens
caacataaagtggaa

SEQ ID NO: 1773779 - DNA, 15 bp, Homo sapiens
aacataaagtggaat

SEQ ID NO: 1773780 - DNA, 15 bp, Homo sapiens
acataaagtggaatg

SEQ ID NO: 1773781 - DNA, 15 bp, Homo sapiens
cataaagtggaatga

SEQ ID NO: 1773782 - DNA, 15 bp, Homo sapiens
ataaagtggaatgaa

SEQ ID NO: 1773783 - DNA, 15 bp, Homo sapiens
taaagtggaatgaaa

SEQ ID NO: 1773784 - DNA, 15 bp, Homo sapiens
aaagtggaatgaaaa

SEQ ID NO: 1773785 - DNA, 15 bp, Homo sapiens
aagtggaatgaaaac

SEQ ID NO: 1773786 - DNA, 15 bp, Homo sapiens
agtggaatgaaaaca

SEQ ID NO: 1773787 - DNA, 15 bp, Homo sapiens
gtggaatgaaaacat

SEQ ID NO: 1773788 - DNA, 15 bp, Homo sapiens
tggaatgaaaacatc

SEQ ID NO: 1773789 - DNA, 15 bp, Homo sapiens
ggaatgaaaacatca

SEQ ID NO: 1773790 - DNA, 15 bp, Homo sapiens
gaatgaaaacatcag

SEQ ID NO: 1773791 - DNA, 15 bp, Homo sapiens
aatgaaaacatcagt

SEQ ID NO: 1773792 - DNA, 15 bp, Homo sapiens
atgaaaacatcagtc

SEQ ID NO: 1773793 - DNA, 15 bp, Homo sapiens
tgaaaacatcagtcc

SEQ ID NO: 1773794 - DNA, 15 bp, Homo sapiens
gaaaacatcagtcca

SEQ ID NO: 1773795 - DNA, 15 bp, Homo sapiens
aaaacatcagtccat

SEQ ID NO: 1773796 - DNA, 15 bp, Homo sapiens
aaacatcagtccatc

SEQ ID NO: 1773797 - DNA, 15 bp, Homo sapiens
aacatcagtccatca

SEQ ID NO: 1773798 - DNA, 15 bp, Homo sapiens
acatcagtccatcat

SEQ ID NO: 1773799 - DNA, 15 bp, Homo sapiens
catcagtccatcata

SEQ ID NO: 1773800 - DNA, 15 bp, Homo sapiens
atcagtccatcatat

SEQ ID NO: 1773801 - DNA, 15 bp, Homo sapiens
tcagtccatcatatg

SEQ ID NO: 1773802 - DNA, 15 bp, Homo sapiens
cagtccatcatatga

SEQ ID NO: 1773803 - DNA, 15 bp, Homo sapiens
agtccatcatatgaa

SEQ ID NO: 1773804 - DNA, 15 bp, Homo sapiens
gtccatcatatgaat

SEQ ID NO: 1773805 - DNA, 15 bp, Homo sapiens
tccatcatatgaatc

SEQ ID NO: 1773806 - DNA, 15 bp, Homo sapiens
ccatcatatgaatca

SEQ ID NO: 1773807 - DNA, 15 bp, Homo sapiens
catcatatgaatcat

SEQ ID NO: 1773808 - DNA, 15 bp, Homo sapiens
atcatatgaatcata

SEQ ID NO: 1773809 - DNA, 15 bp, Homo sapiens
tcatatgaatcatat

SEQ ID NO: 1773810 - DNA, 15 bp, Homo sapiens
catatgaatcatatg

SEQ ID NO: 1773811 - DNA, 15 bp, Homo sapiens
atatgaatcatatga

SEQ ID NO: 1773812 - DNA, 15 bp, Homo sapiens
tatgaatcatatgag

SEQ ID NO: 1773813 - DNA, 15 bp, Homo sapiens
atgaatcatatgagt

SEQ ID NO: 1773814 - DNA, 15 bp, Homo sapiens
tgaatcatatgagtt

SEQ ID NO: 1773815 - DNA, 15 bp, Homo sapiens
gaatcatatgagtta

SEQ ID NO: 1773816 - DNA, 15 bp, Homo sapiens
aatcatatgagttat

SEQ ID NO: 1773817 - DNA, 15 bp, Homo sapiens
atcatatgagttata

SEQ ID NO: 1773818 - DNA, 15 bp, Homo sapiens
tcatatgagttataa

SEQ ID NO: 1773819 - DNA, 15 bp, Homo sapiens
catatgagttataac

SEQ ID NO: 1773820 - DNA, 15 bp, Homo sapiens
atatgagttataaca

SEQ ID NO: 1773821 - DNA, 15 bp, Homo sapiens
tatgagttataacat

SEQ ID NO: 1773822 - DNA, 15 bp, Homo sapiens
atgagttataacatt

SEQ ID NO: 1773823 - DNA, 15 bp, Homo sapiens
tgagttataacattt

SEQ ID NO: 1773824 - DNA, 15 bp, Homo sapiens
gagttataacattta

SEQ ID NO: 1773825 - DNA, 15 bp, Homo sapiens
agttataacatttac

SEQ ID NO: 1773826 - DNA, 15 bp, Homo sapiens
gttataacatttaca

SEQ ID NO: 1773827 - DNA, 15 bp, Homo sapiens
ttataacatttacag

SEQ ID NO: 1773828 - DNA, 15 bp, Homo sapiens
tataacatttacaga

SEQ ID NO: 1773829 - DNA, 15 bp, Homo sapiens
ataacatttacagaa

SEQ ID NO: 1773830 - DNA, 15 bp, Homo sapiens
taacatttacagaat

SEQ ID NO: 1773831 - DNA, 15 bp, Homo sapiens
aacatttacagaata

SEQ ID NO: 1773832 - DNA, 15 bp, Homo sapiens
acatttacagaatag

SEQ ID NO: 1773833 - DNA, 15 bp, Homo sapiens
catttacagaatagt

SEQ ID NO: 1773834 - DNA, 15 bp, Homo sapiens
atttacagaatagtt

SEQ ID NO: 1773835 - DNA, 15 bp, Homo sapiens
tttacagaatagtta

SEQ ID NO: 1773836 - DNA, 15 bp, Homo sapiens
ttacagaatagttaa

SEQ ID NO: 1773837 - DNA, 15 bp, Homo sapiens
tacagaatagttaaa

SEQ ID NO: 1773838 - DNA, 15 bp, Homo sapiens
acagaatagttaaat

SEQ ID NO: 1773839 - DNA, 15 bp, Homo sapiens
cagaatagttaaatg

SEQ ID NO: 1773840 - DNA, 15 bp, Homo sapiens
agaatagttaaatga

SEQ ID NO: 1773841 - DNA, 15 bp, Homo sapiens
gaatagttaaatgac

SEQ ID NO: 1773842 - DNA, 15 bp, Homo sapiens
aatagttaaatgaca

SEQ ID NO: 1773843 - DNA, 15 bp, Homo sapiens
atagttaaatgacaa

SEQ ID NO: 1773844 - DNA, 15 bp, Homo sapiens
tagttaaatgacaaa

SEQ ID NO: 1773845 - DNA, 15 bp, Homo sapiens
agttaaatgacaaat

SEQ ID NO: 1773846 - DNA, 15 bp, Homo sapiens
gttaaatgacaaatt

SEQ ID NO: 1773847 - DNA, 15 bp, Homo sapiens
ttaaatgacaaatta

SEQ ID NO: 1773848 - DNA, 15 bp, Homo sapiens
taaatgacaaattat

SEQ ID NO: 1773849 - DNA, 15 bp, Homo sapiens
aaatgacaaattatg

SEQ ID NO: 1773850 - DNA, 15 bp, Homo sapiens
aatgacaaattatgg

SEQ ID NO: 1773851 - DNA, 15 bp, Homo sapiens
atgacaaattatgga

SEQ ID NO: 1773852 - DNA, 15 bp, Homo sapiens
tgacaaattatggaa

SEQ ID NO: 1773853 - DNA, 15 bp, Homo sapiens
gacaaattatggaaa

SEQ ID NO: 1773854 - DNA, 15 bp, Homo sapiens
acaaattatggaaac

SEQ ID NO: 1773855 - DNA, 15 bp, Homo sapiens
caaattatggaaaca

SEQ ID NO: 1773856 - DNA, 15 bp, Homo sapiens
aaattatggaaacaa

SEQ ID NO: 1773857 - DNA, 15 bp, Homo sapiens
aattatggaaacaag

SEQ ID NO: 1773858 - DNA, 15 bp, Homo sapiens
attatggaaacaagt

SEQ ID NO: 1773859 - DNA, 15 bp, Homo sapiens
ttatggaaacaagtc

SEQ ID NO: 1773860 - DNA, 15 bp, Homo sapiens
tatggaaacaagtct

SEQ ID NO: 1773861 - DNA, 15 bp, Homo sapiens
atggaaacaagtctg

SEQ ID NO: 1773862 - DNA, 15 bp, Homo sapiens
tggaaacaagtctgt

SEQ ID NO: 1773863 - DNA, 15 bp, Homo sapiens
ggaaacaagtctgtt

SEQ ID NO: 1773864 - DNA, 15 bp, Homo sapiens
gaaacaagtctgtta

SEQ ID NO: 1773865 - DNA, 15 bp, Homo sapiens
aaacaagtctgttag

SEQ ID NO: 1773866 - DNA, 15 bp, Homo sapiens
aacaagtctgttaga

SEQ ID NO: 1773867 - DNA, 15 bp, Homo sapiens
acaagtctgttagaa

SEQ ID NO: 1773868 - DNA, 15 bp, Homo sapiens
caagtctgttagaac

SEQ ID NO: 1773869 - DNA, 15 bp, Homo sapiens
aagtctgttagaaca

SEQ ID NO: 1773870 - DNA, 15 bp, Homo sapiens
agtctgttagaacaa

SEQ ID NO: 1773871 - DNA, 15 bp, Homo sapiens
gtctgttagaacaaa

SEQ ID NO: 1773872 - DNA, 15 bp, Homo sapiens
tctgttagaacaaac

SEQ ID NO: 1773873 - DNA, 15 bp, Homo sapiens
ctgttagaacaaact

SEQ ID NO: 1773874 - DNA, 15 bp, Homo sapiens
tgttagaacaaacta

SEQ ID NO: 1773875 - DNA, 15 bp, Homo sapiens
gttagaacaaactaa

SEQ ID NO: 1773876 - DNA, 15 bp, Homo sapiens
ttagaacaaactaac

SEQ ID NO: 1773877 - DNA, 15 bp, Homo sapiens
tagaacaaactaaca

SEQ ID NO: 1773878 - DNA, 15 bp, Homo sapiens
agaacaaactaacaa

SEQ ID NO: 1773879 - DNA, 15 bp, Homo sapiens
gaacaaactaacaaa

SEQ ID NO: 1773880 - DNA, 15 bp, Homo sapiens
aacaaactaacaaaa

SEQ ID NO: 1773881 - DNA, 15 bp, Homo sapiens
acaaactaacaaaaa

SEQ ID NO: 1773882 - DNA, 15 bp, Homo sapiens
caaactaacaaaaaa

SEQ ID NO: 1773883 - DNA, 15 bp, Homo sapiens
aaactaacaaaaaat

SEQ ID NO: 1773884 - DNA, 15 bp, Homo sapiens
aactaacaaaaaata

SEQ ID NO: 1773885 - DNA, 15 bp, Homo sapiens
actaacaaaaaataa

SEQ ID NO: 1773886 - DNA, 15 bp, Homo sapiens
ctaacaaaaaataac

SEQ ID NO: 1773887 - DNA, 15 bp, Homo sapiens
taacaaaaaataaca

SEQ ID NO: 1773888 - DNA, 15 bp, Homo sapiens
aacaaaaaataacaa

SEQ ID NO: 1773889 - DNA, 15 bp, Homo sapiens
acaaaaaataacaac

SEQ ID NO: 1773890 - DNA, 15 bp, Homo sapiens
caaaaaataacaacc

SEQ ID NO: 1773891 - DNA, 15 bp, Homo sapiens
aaaaaataacaaccc

SEQ ID NO: 1773892 - DNA, 15 bp, Homo sapiens
aaaaataacaaccca

SEQ ID NO: 1773893 - DNA, 15 bp, Homo sapiens
aaaataacaacccat

SEQ ID NO: 1773894 - DNA, 15 bp, Homo sapiens
aaataacaacccatt

SEQ ID NO: 1773895 - DNA, 15 bp, Homo sapiens
aataacaacccattc

SEQ ID NO: 1773896 - DNA, 15 bp, Homo sapiens
ataacaacccattca

SEQ ID NO: 1773897 - DNA, 15 bp, Homo sapiens
taacaacccattcaa

SEQ ID NO: 1773898 - DNA, 15 bp, Homo sapiens
aacaacccattcaaa

SEQ ID NO: 1773899 - DNA, 15 bp, Homo sapiens
acaacccattcaaaa

SEQ ID NO: 1773900 - DNA, 15 bp, Homo sapiens
caacccattcaaaaa

SEQ ID NO: 1773901 - DNA, 15 bp, Homo sapiens
aacccattcaaaaag

SEQ ID NO: 1773902 - DNA, 15 bp, Homo sapiens
acccattcaaaaagg

SEQ ID NO: 1773903 - DNA, 15 bp, Homo sapiens
cccattcaaaaaggt

SEQ ID NO: 1773904 - DNA, 15 bp, Homo sapiens
ccattcaaaaaggtg

SEQ ID NO: 1773905 - DNA, 15 bp, Homo sapiens
cattcaaaaaggtgg

SEQ ID NO: 1773906 - DNA, 15 bp, Homo sapiens
attcaaaaaggtggg

SEQ ID NO: 1773907 - DNA, 15 bp, Homo sapiens
ttcaaaaaggtggga

SEQ ID NO: 1773908 - DNA, 15 bp, Homo sapiens
tcaaaaaggtgggag

SEQ ID NO: 1773909 - DNA, 15 bp, Homo sapiens
caaaaaggtgggaga

SEQ ID NO: 1773910 - DNA, 15 bp, Homo sapiens
aaaaaggtgggagat

SEQ ID NO: 1773911 - DNA, 15 bp, Homo sapiens
aaaaggtgggagatg

SEQ ID NO: 1773912 - DNA, 15 bp, Homo sapiens
aaaggtgggagatgc

SEQ ID NO: 1773913 - DNA, 15 bp, Homo sapiens
aaggtgggagatgca

SEQ ID NO: 1773914 - DNA, 15 bp, Homo sapiens
aggtgggagatgcat

SEQ ID NO: 1773915 - DNA, 15 bp, Homo sapiens
ggtgggagatgcatc

SEQ ID NO: 1773916 - DNA, 15 bp, Homo sapiens
gtgggagatgcatct

SEQ ID NO: 1773917 - DNA, 15 bp, Homo sapiens
tgggagatgcatcta

SEQ ID NO: 1773918 - DNA, 15 bp, Homo sapiens
gggagatgcatctaa

SEQ ID NO: 1773919 - DNA, 15 bp, Homo sapiens
ggagatgcatctaaa

SEQ ID NO: 1773920 - DNA, 15 bp, Homo sapiens
gagatgcatctaaac

SEQ ID NO: 1773921 - DNA, 15 bp, Homo sapiens
agatgcatctaaaca

SEQ ID NO: 1773922 - DNA, 15 bp, Homo sapiens
gatgcatctaaacaa

SEQ ID NO: 1773923 - DNA, 15 bp, Homo sapiens
atgcatctaaacaag

SEQ ID NO: 1773924 - DNA, 15 bp, Homo sapiens
tgcatctaaacaagc

SEQ ID NO: 1773925 - DNA, 15 bp, Homo sapiens
gcatctaaacaagca

SEQ ID NO: 1773926 - DNA, 15 bp, Homo sapiens
catctaaacaagcat

SEQ ID NO: 1773927 - DNA, 15 bp, Homo sapiens
atctaaacaagcata

SEQ ID NO: 1773928 - DNA, 15 bp, Homo sapiens
tctaaacaagcatat

SEQ ID NO: 1773929 - DNA, 15 bp, Homo sapiens
ctaaacaagcatatc

SEQ ID NO: 1773930 - DNA, 15 bp, Homo sapiens
taaacaagcatatca

SEQ ID NO: 1773931 - DNA, 15 bp, Homo sapiens
aaacaagcatatcat

SEQ ID NO: 1773932 - DNA, 15 bp, Homo sapiens
aacaagcatatcatt

SEQ ID NO: 1773933 - DNA, 15 bp, Homo sapiens
acaagcatatcattt

SEQ ID NO: 1773934 - DNA, 15 bp, Homo sapiens
caagcatatcatttt

SEQ ID NO: 1773935 - DNA, 15 bp, Homo sapiens
aagcatatcattttg

SEQ ID NO: 1773936 - DNA, 15 bp, Homo sapiens
agcatatcattttgt

SEQ ID NO: 1773937 - DNA, 15 bp, Homo sapiens
gcatatcattttgtc

SEQ ID NO: 1773938 - DNA, 15 bp, Homo sapiens
catatcattttgtcc

SEQ ID NO: 1773939 - DNA, 15 bp, Homo sapiens
atatcattttgtcct

SEQ ID NO: 1773940 - DNA, 15 bp, Homo sapiens
tatcattttgtcctt

SEQ ID NO: 1773941 - DNA, 15 bp, Homo sapiens
atcattttgtcctta

SEQ ID NO: 1773942 - DNA, 15 bp, Homo sapiens
tcattttgtccttaa

SEQ ID NO: 1773943 - DNA, 15 bp, Homo sapiens
cattttgtccttaac

SEQ ID NO: 1773944 - DNA, 15 bp, Homo sapiens
attttgtccttaact

SEQ ID NO: 1773945 - DNA, 15 bp, Homo sapiens
ttttgtccttaactt

SEQ ID NO: 1773946 - DNA, 15 bp, Homo sapiens
tttgtccttaactta

SEQ ID NO: 1773947 - DNA, 15 bp, Homo sapiens
ttgtccttaacttaa

SEQ ID NO: 1773948 - DNA, 15 bp, Homo sapiens
tgtccttaacttaaa

SEQ ID NO: 1773949 - DNA, 15 bp, Homo sapiens
gtccttaacttaaaa

SEQ ID NO: 1773950 - DNA, 15 bp, Homo sapiens
tccttaacttaaaag

SEQ ID NO: 1773951 - DNA, 15 bp, Homo sapiens
ccttaacttaaaagt

SEQ ID NO: 1773952 - DNA, 15 bp, Homo sapiens
cttaacttaaaagtg

SEQ ID NO: 1773953 - DNA, 15 bp, Homo sapiens
ttaacttaaaagtgg

SEQ ID NO: 1773954 - DNA, 15 bp, Homo sapiens
taacttaaaagtggt

SEQ ID NO: 1773955 - DNA, 15 bp, Homo sapiens
aacttaaaagtggtt

SEQ ID NO: 1773956 - DNA, 15 bp, Homo sapiens
acttaaaagtggttc

SEQ ID NO: 1773957 - DNA, 15 bp, Homo sapiens
cttaaaagtggttct

SEQ ID NO: 1773958 - DNA, 15 bp, Homo sapiens
ttaaaagtggttctc

SEQ ID NO: 1773959 - DNA, 15 bp, Homo sapiens
taaaagtggttctca

SEQ ID NO: 1773960 - DNA, 15 bp, Homo sapiens
aaaagtggttctcag

SEQ ID NO: 1773961 - DNA, 15 bp, Homo sapiens
aaagtggttctcagt

SEQ ID NO: 1773962 - DNA, 15 bp, Homo sapiens
aagtggttctcagtt

SEQ ID NO: 1773963 - DNA, 15 bp, Homo sapiens
agtggttctcagttt

SEQ ID NO: 1773964 - DNA, 15 bp, Homo sapiens
gtggttctcagtttt

SEQ ID NO: 1773965 - DNA, 15 bp, Homo sapiens
tggttctcagtttta

SEQ ID NO: 1773966 - DNA, 15 bp, Homo sapiens
ggttctcagttttag

SEQ ID NO: 1773967 - DNA, 15 bp, Homo sapiens
gttctcagttttagg

SEQ ID NO: 1773968 - DNA, 15 bp, Homo sapiens
ttctcagttttaggt

SEQ ID NO: 1773969 - DNA, 15 bp, Homo sapiens
tctcagttttaggta

SEQ ID NO: 1773970 - DNA, 15 bp, Homo sapiens
ctcagttttaggtac

SEQ ID NO: 1773971 - DNA, 15 bp, Homo sapiens
tcagttttaggtacc

SEQ ID NO: 1773972 - DNA, 15 bp, Homo sapiens
cagttttaggtaccc

SEQ ID NO: 1773973 - DNA, 15 bp, Homo sapiens
agttttaggtaccca

SEQ ID NO: 1773974 - DNA, 15 bp, Homo sapiens
gttttaggtacccaa

SEQ ID NO: 1773975 - DNA, 15 bp, Homo sapiens
ttttaggtacccaaa

SEQ ID NO: 1773976 - DNA, 15 bp, Homo sapiens
tttaggtacccaaat

SEQ ID NO: 1773977 - DNA, 15 bp, Homo sapiens
ttaggtacccaaatt

SEQ ID NO: 1773978 - DNA, 15 bp, Homo sapiens
taggtacccaaattt

SEQ ID NO: 1773979 - DNA, 15 bp, Homo sapiens
aggtacccaaattta

SEQ ID NO: 1773980 - DNA, 15 bp, Homo sapiens
ggtacccaaatttaa

SEQ ID NO: 1773981 - DNA, 15 bp, Homo sapiens
gtacccaaatttaat

SEQ ID NO: 1773982 - DNA, 15 bp, Homo sapiens
tacccaaatttaata

SEQ ID NO: 1773983 - DNA, 15 bp, Homo sapiens
acccaaatttaatat

SEQ ID NO: 1773984 - DNA, 15 bp, Homo sapiens
cccaaatttaatatt

SEQ ID NO: 1773985 - DNA, 15 bp, Homo sapiens
ccaaatttaatattt

SEQ ID NO: 1773986 - DNA, 15 bp, Homo sapiens
caaatttaatatttg

SEQ ID NO: 1773987 - DNA, 15 bp, Homo sapiens
aaatttaatatttgt

SEQ ID NO: 1773988 - DNA, 15 bp, Homo sapiens
aatttaatatttgta

SEQ ID NO: 1773989 - DNA, 15 bp, Homo sapiens
atttaatatttgtat

SEQ ID NO: 1773990 - DNA, 15 bp, Homo sapiens
tttaatatttgtatt

SEQ ID NO: 1773991 - DNA, 15 bp, Homo sapiens
ttaatatttgtattt

SEQ ID NO: 1773992 - DNA, 15 bp, Homo sapiens
atttgtatttttttt

SEQ ID NO: 1773993 - DNA, 15 bp, Homo sapiens
tttgtatttttttta

SEQ ID NO: 1773994 - DNA, 15 bp, Homo sapiens
ttgtattttttttaa

SEQ ID NO: 1773995 - DNA, 15 bp, Homo sapiens
tgtattttttttaag

SEQ ID NO: 1773996 - DNA, 15 bp, Homo sapiens
gtattttttttaagt

SEQ ID NO: 1773997 - DNA, 15 bp, Homo sapiens
tattttttttaagtt

SEQ ID NO: 1773998 - DNA, 15 bp, Homo sapiens
attttttttaagttt

SEQ ID NO: 1773999 - DNA, 15 bp, Homo sapiens
ttttttttaagtttt

SEQ ID NO: 1774000 - DNA, 15 bp, Homo sapiens
tttttttaagttttg

SEQ ID NO: 1774001 - DNA, 15 bp, Homo sapiens
ttttttaagttttgg

SEQ ID NO: 1774002 - DNA, 15 bp, Homo sapiens
tttttaagttttggc

SEQ ID NO: 1774003 - DNA, 15 bp, Homo sapiens
ttttaagttttggcc

SEQ ID NO: 1774004 - DNA, 15 bp, Homo sapiens
tttaagttttggcct

SEQ ID NO: 1774005 - DNA, 15 bp, Homo sapiens
ttaagttttggcctt

SEQ ID NO: 1774006 - DNA, 15 bp, Homo sapiens
taagttttggccttc

SEQ ID NO: 1774007 - DNA, 15 bp, Homo sapiens
aagttttggccttca

SEQ ID NO: 1774008 - DNA, 15 bp, Homo sapiens
agttttggccttcaa

SEQ ID NO: 1774009 - DNA, 15 bp, Homo sapiens
gttttggccttcaaa

SEQ ID NO: 1774010 - DNA, 15 bp, Homo sapiens
ttttggccttcaaaa

SEQ ID NO: 1774011 - DNA, 15 bp, Homo sapiens
tttggccttcaaaat

SEQ ID NO: 1774012 - DNA, 15 bp, Homo sapiens
ttggccttcaaaata

SEQ ID NO: 1774013 - DNA, 15 bp, Homo sapiens
tggccttcaaaataa

SEQ ID NO: 1774014 - DNA, 15 bp, Homo sapiens
ggccttcaaaataaa

SEQ ID NO: 1774015 - DNA, 15 bp, Homo sapiens
gccttcaaaataaaa

SEQ ID NO: 1774016 - DNA, 15 bp, Homo sapiens
ccttcaaaataaaaa

SEQ ID NO: 1774017 - DNA, 15 bp, Homo sapiens
cttcaaaataaaaat

SEQ ID NO: 1774018 - DNA, 15 bp, Homo sapiens
tcaaaataaaaatga

SEQ ID NO: 1774019 - DNA, 15 bp, Homo sapiens
caaaataaaaatgac

SEQ ID NO: 1774020 - DNA, 15 bp, Homo sapiens
aaaataaaaatgact

SEQ ID NO: 1774021 - DNA, 15 bp, Homo sapiens
aaataaaaatgacta

SEQ ID NO: 1774022 - DNA, 15 bp, Homo sapiens
aataaaaatgactat

SEQ ID NO: 1774023 - DNA, 15 bp, Homo sapiens
ataaaaatgactata

SEQ ID NO: 1774024 - DNA, 15 bp, Homo sapiens
taaaaatgactatac

SEQ ID NO: 1774025 - DNA, 15 bp, Homo sapiens
aaaaatgactataca

SEQ ID NO: 1774026 - DNA, 15 bp, Homo sapiens
aaaatgactatacat

SEQ ID NO: 1774027 - DNA, 15 bp, Homo sapiens
aaatgactatacatt

SEQ ID NO: 1774028 - DNA, 15 bp, Homo sapiens
aatgactatacattt

SEQ ID NO: 1774029 - DNA, 15 bp, Homo sapiens
atgactatacatttg

SEQ ID NO: 1774030 - DNA, 15 bp, Homo sapiens
tgactatacatttga

SEQ ID NO: 1774031 - DNA, 15 bp, Homo sapiens
gactatacatttgat

SEQ ID NO: 1774032 - DNA, 15 bp, Homo sapiens
actatacatttgatt

SEQ ID NO: 1774033 - DNA, 15 bp, Homo sapiens
ctatacatttgatta

SEQ ID NO: 1774034 - DNA, 15 bp, Homo sapiens
tatacatttgattag

SEQ ID NO: 1774035 - DNA, 15 bp, Homo sapiens
atacatttgattaga

SEQ ID NO: 1774036 - DNA, 15 bp, Homo sapiens
tacatttgattagac

SEQ ID NO: 1774037 - DNA, 15 bp, Homo sapiens
acatttgattagact

SEQ ID NO: 1774038 - DNA, 15 bp, Homo sapiens
catttgattagactt

SEQ ID NO: 1774039 - DNA, 15 bp, Homo sapiens
atttgattagacttc

SEQ ID NO: 1774040 - DNA, 15 bp, Homo sapiens
tttgattagacttct

SEQ ID NO: 1774041 - DNA, 15 bp, Homo sapiens
ttgattagacttctt

SEQ ID NO: 1774042 - DNA, 15 bp, Homo sapiens
tgattagacttcttt

SEQ ID NO: 1774043 - DNA, 15 bp, Homo sapiens
gattagacttctttc

SEQ ID NO: 1774044 - DNA, 15 bp, Homo sapiens
attagacttctttct

SEQ ID NO: 1774045 - DNA, 15 bp, Homo sapiens
ttagacttctttctt

SEQ ID NO: 1774046 - DNA, 15 bp, Homo sapiens
tagacttctttcttt

SEQ ID NO: 1774047 - DNA, 15 bp, Homo sapiens
agacttctttctttt

SEQ ID NO: 1774048 - DNA, 15 bp, Homo sapiens
gacttctttcttttc

SEQ ID NO: 1774049 - DNA, 15 bp, Homo sapiens
acttctttcttttct

SEQ ID NO: 1774050 - DNA, 15 bp, Homo sapiens
cttctttcttttctt

SEQ ID NO: 1774051 - DNA, 15 bp, Homo sapiens
tctttcttttctttt

SEQ ID NO: 1774052 - DNA, 15 bp, Homo sapiens
ctttcttttcttttt

SEQ ID NO: 1774053 - DNA, 15 bp, Homo sapiens
tttcttttcttttta

SEQ ID NO: 1774054 - DNA, 15 bp, Homo sapiens
ttcttttctttttat

SEQ ID NO: 1774055 - DNA, 15 bp, Homo sapiens
tcttttctttttatt

SEQ ID NO: 1774056 - DNA, 15 bp, Homo sapiens
cttttctttttatta

SEQ ID NO: 1774057 - DNA, 15 bp, Homo sapiens
ttttctttttattat

SEQ ID NO: 1774058 - DNA, 15 bp, Homo sapiens
tttctttttattata

SEQ ID NO: 1774059 - DNA, 15 bp, Homo sapiens
ttctttttattatag

SEQ ID NO: 1774060 - DNA, 15 bp, Homo sapiens
tctttttattataga

SEQ ID NO: 1774061 - DNA, 15 bp, Homo sapiens
ctttttattatagat

SEQ ID NO: 1774062 - DNA, 15 bp, Homo sapiens
tttttattatagatg

SEQ ID NO: 1774063 - DNA, 15 bp, Homo sapiens
ttttattatagatga

SEQ ID NO: 1774064 - DNA, 15 bp, Homo sapiens
ttattatagatgatt

SEQ ID NO: 1774065 - DNA, 15 bp, Homo sapiens
tattatagatgattg

SEQ ID NO: 1774066 - DNA, 15 bp, Homo sapiens
attatagatgattga

SEQ ID NO: 1774067 - DNA, 15 bp, Homo sapiens
ttatagatgattgat

SEQ ID NO: 1774068 - DNA, 15 bp, Homo sapiens
tatagatgattgatt

SEQ ID NO: 1774069 - DNA, 15 bp, Homo sapiens
atagatgattgattt

SEQ ID NO: 1774070 - DNA, 15 bp, Homo sapiens
tagatgattgatttt

SEQ ID NO: 1774071 - DNA, 15 bp, Homo sapiens
agatgattgattttt

SEQ ID NO: 1774072 - DNA, 15 bp, Homo sapiens
gatgattgattttta

SEQ ID NO: 1774073 - DNA, 15 bp, Homo sapiens
atgattgatttttaa

SEQ ID NO: 1774074 - DNA, 15 bp, Homo sapiens
tgattgatttttaag

SEQ ID NO: 1774075 - DNA, 15 bp, Homo sapiens
gattgatttttaagg

SEQ ID NO: 1774076 - DNA, 15 bp, Homo sapiens
attgatttttaagga

SEQ ID NO: 1774077 - DNA, 15 bp, Homo sapiens
ttgatttttaaggac

SEQ ID NO: 1774078 - DNA, 15 bp, Homo sapiens
tgatttttaaggact

SEQ ID NO: 1774079 - DNA, 15 bp, Homo sapiens
gatttttaaggacta

SEQ ID NO: 1774080 - DNA, 15 bp, Homo sapiens
atttttaaggactag

SEQ ID NO: 1774081 - DNA, 15 bp, Homo sapiens
tttttaaggactagt

SEQ ID NO: 1774082 - DNA, 15 bp, Homo sapiens
ttttaaggactagtg

SEQ ID NO: 1774083 - DNA, 15 bp, Homo sapiens
tttaaggactagtgc

SEQ ID NO: 1774084 - DNA, 15 bp, Homo sapiens
ttaaggactagtgct

SEQ ID NO: 1774085 - DNA, 15 bp, Homo sapiens
taaggactagtgcta

SEQ ID NO: 1774086 - DNA, 15 bp, Homo sapiens
aaggactagtgctat

SEQ ID NO: 1774087 - DNA, 15 bp, Homo sapiens
aggactagtgctatg

SEQ ID NO: 1774088 - DNA, 15 bp, Homo sapiens
ggactagtgctatga

SEQ ID NO: 1774089 - DNA, 15 bp, Homo sapiens
gactagtgctatgaa

SEQ ID NO: 1774090 - DNA, 15 bp, Homo sapiens
actagtgctatgaac

SEQ ID NO: 1774091 - DNA, 15 bp, Homo sapiens
ctagtgctatgaaca

SEQ ID NO: 1774092 - DNA, 15 bp, Homo sapiens
tagtgctatgaacat

SEQ ID NO: 1774093 - DNA, 15 bp, Homo sapiens
agtgctatgaacatt

SEQ ID NO: 1774094 - DNA, 15 bp, Homo sapiens
gtgctatgaacatta

SEQ ID NO: 1774095 - DNA, 15 bp, Homo sapiens
tgctatgaacattaa

SEQ ID NO: 1774096 - DNA, 15 bp, Homo sapiens
gctatgaacattaaa

SEQ ID NO: 1774097 - DNA, 15 bp, Homo sapiens
ctatgaacattaaag

SEQ ID NO: 1774098 - DNA, 15 bp, Homo sapiens
tatgaacattaaagc

SEQ ID NO: 1774099 - DNA, 15 bp, Homo sapiens
atgaacattaaagca

SEQ ID NO: 1774100 - DNA, 15 bp, Homo sapiens
tgaacattaaagcaa

SEQ ID NO: 1774101 - DNA, 15 bp, Homo sapiens
gaacattaaagcaag

SEQ ID NO: 1774102 - DNA, 15 bp, Homo sapiens
aacattaaagcaagt

SEQ ID NO: 1774103 - DNA, 15 bp, Homo sapiens
acattaaagcaagta

SEQ ID NO: 1774104 - DNA, 15 bp, Homo sapiens
cattaaagcaagtat

SEQ ID NO: 1774105 - DNA, 15 bp, Homo sapiens
attaaagcaagtatg

SEQ ID NO: 1774106 - DNA, 15 bp, Homo sapiens
ttaaagcaagtatgc

SEQ ID NO: 1774107 - DNA, 15 bp, Homo sapiens
taaagcaagtatgct

SEQ ID NO: 1774108 - DNA, 15 bp, Homo sapiens
aaagcaagtatgctt

SEQ ID NO: 1774109 - DNA, 15 bp, Homo sapiens
aagcaagtatgctta

SEQ ID NO: 1774110 - DNA, 15 bp, Homo sapiens
agcaagtatgcttaa

SEQ ID NO: 1774111 - DNA, 15 bp, Homo sapiens
gcaagtatgcttaaa

SEQ ID NO: 1774112 - DNA, 15 bp, Homo sapiens
caagtatgcttaaaa

SEQ ID NO: 1774113 - DNA, 15 bp, Homo sapiens
aagtatgcttaaaac

SEQ ID NO: 1774114 - DNA, 15 bp, Homo sapiens
agtatgcttaaaacc

SEQ ID NO: 1774115 - DNA, 15 bp, Homo sapiens
gtatgcttaaaacca

SEQ ID NO: 1774116 - DNA, 15 bp, Homo sapiens
tatgcttaaaaccaa

SEQ ID NO: 1774117 - DNA, 15 bp, Homo sapiens
atgcttaaaaccaaa

SEQ ID NO: 1774118 - DNA, 15 bp, Homo sapiens
tgcttaaaaccaaaa

SEQ ID NO: 1774119 - DNA, 15 bp, Homo sapiens
gcttaaaaccaaaaa

SEQ ID NO: 1774120 - DNA, 15 bp, Homo sapiens
cttaaaaccaaaaac

SEQ ID NO: 1774121 - DNA, 15 bp, Homo sapiens
ttaaaaccaaaaaca

SEQ ID NO: 1774122 - DNA, 15 bp, Homo sapiens
taaaaccaaaaacat

SEQ ID NO: 1774123 - DNA, 15 bp, Homo sapiens
aaaaccaaaaacata

SEQ ID NO: 1774124 - DNA, 15 bp, Homo sapiens
aaaccaaaaacatat

SEQ ID NO: 1774125 - DNA, 15 bp, Homo sapiens
aaccaaaaacatatt

SEQ ID NO: 1774126 - DNA, 15 bp, Homo sapiens
accaaaaacatattt

SEQ ID NO: 1774127 - DNA, 15 bp, Homo sapiens
ccaaaaacatatttt

SEQ ID NO: 1774128 - DNA, 15 bp, Homo sapiens
caaaaacatattttg

SEQ ID NO: 1774129 - DNA, 15 bp, Homo sapiens
aaaaacatattttga

SEQ ID NO: 1774130 - DNA, 15 bp, Homo sapiens
aaaacatattttgac

SEQ ID NO: 1774131 - DNA, 15 bp, Homo sapiens
aaacatattttgact

SEQ ID NO: 1774132 - DNA, 15 bp, Homo sapiens
aacatattttgactt

SEQ ID NO: 1774133 - DNA, 15 bp, Homo sapiens
acatattttgacttt

SEQ ID NO: 1774134 - DNA, 15 bp, Homo sapiens
catattttgacttta

SEQ ID NO: 1774135 - DNA, 15 bp, Homo sapiens
atattttgactttag

SEQ ID NO: 1774136 - DNA, 15 bp, Homo sapiens
tattttgactttagg

SEQ ID NO: 1774137 - DNA, 15 bp, Homo sapiens
attttgactttaggc

SEQ ID NO: 1774138 - DNA, 15 bp, Homo sapiens
ttttgactttaggca

SEQ ID NO: 1774139 - DNA, 15 bp, Homo sapiens
tttgactttaggcat

SEQ ID NO: 1774140 - DNA, 15 bp, Homo sapiens
ttgactttaggcatt

SEQ ID NO: 1774141 - DNA, 15 bp, Homo sapiens
tgactttaggcattt

SEQ ID NO: 1774142 - DNA, 15 bp, Homo sapiens
gactttaggcattta

SEQ ID NO: 1774143 - DNA, 15 bp, Homo sapiens
actttaggcatttat

SEQ ID NO: 1774144 - DNA, 15 bp, Homo sapiens
ctttaggcatttatg

SEQ ID NO: 1774145 - DNA, 15 bp, Homo sapiens
tttaggcatttatgc

SEQ ID NO: 1774146 - DNA, 15 bp, Homo sapiens
ttaggcatttatgca

SEQ ID NO: 1774147 - DNA, 15 bp, Homo sapiens
taggcatttatgcag

SEQ ID NO: 1774148 - DNA, 15 bp, Homo sapiens
aggcatttatgcaga

SEQ ID NO: 1774149 - DNA, 15 bp, Homo sapiens
ggcatttatgcagat

SEQ ID NO: 1774150 - DNA, 15 bp, Homo sapiens
gcatttatgcagata

SEQ ID NO: 1774151 - DNA, 15 bp, Homo sapiens
catttatgcagataa

SEQ ID NO: 1774152 - DNA, 15 bp, Homo sapiens
atttatgcagataaa

SEQ ID NO: 1774153 - DNA, 15 bp, Homo sapiens
tttatgcagataaat

SEQ ID NO: 1774154 - DNA, 15 bp, Homo sapiens
ttatgcagataaatg

SEQ ID NO: 1774155 - DNA, 15 bp, Homo sapiens
tatgcagataaatgt

SEQ ID NO: 1774156 - DNA, 15 bp, Homo sapiens
atgcagataaatgtt

SEQ ID NO: 1774157 - DNA, 15 bp, Homo sapiens
tgcagataaatgttt

SEQ ID NO: 1774158 - DNA, 15 bp, Homo sapiens
gcagataaatgtttc

SEQ ID NO: 1774159 - DNA, 15 bp, Homo sapiens
cagataaatgtttcg

SEQ ID NO: 1774160 - DNA, 15 bp, Homo sapiens
agataaatgtttcgc

SEQ ID NO: 1774161 - DNA, 15 bp, Homo sapiens
gataaatgtttcgct

SEQ ID NO: 1774162 - DNA, 15 bp, Homo sapiens
ataaatgtttcgctc

SEQ ID NO: 1774163 - DNA, 15 bp, Homo sapiens
taaatgtttcgctct

SEQ ID NO: 1774164 - DNA, 15 bp, Homo sapiens
aaatgtttcgctctt

SEQ ID NO: 1774165 - DNA, 15 bp, Homo sapiens
aatgtttcgctctta

SEQ ID NO: 1774166 - DNA, 15 bp, Homo sapiens
atgtttcgctcttaa

SEQ ID NO: 1774167 - DNA, 15 bp, Homo sapiens
tgtttcgctcttaac

SEQ ID NO: 1774168 - DNA, 15 bp, Homo sapiens
gtttcgctcttaacc

SEQ ID NO: 1774169 - DNA, 15 bp, Homo sapiens
tttcgctcttaaccc

SEQ ID NO: 1774170 - DNA, 15 bp, Homo sapiens
ttcgctcttaaccca

SEQ ID NO: 1774171 - DNA, 15 bp, Homo sapiens
tcgctcttaacccac

SEQ ID NO: 1774172 - DNA, 15 bp, Homo sapiens
cgctcttaacccact

SEQ ID NO: 1774173 - DNA, 15 bp, Homo sapiens
gctcttaacccactt

SEQ ID NO: 1774174 - DNA, 15 bp, Homo sapiens
ctcttaacccacttg

SEQ ID NO: 1774175 - DNA, 15 bp, Homo sapiens
tcttaacccacttgg

SEQ ID NO: 1774176 - DNA, 15 bp, Homo sapiens
cttaacccacttgga

SEQ ID NO: 1774177 - DNA, 15 bp, Homo sapiens
ttaacccacttggaa

SEQ ID NO: 1774178 - DNA, 15 bp, Homo sapiens
taacccacttggaat

SEQ ID NO: 1774179 - DNA, 15 bp, Homo sapiens
aacccacttggaatt

SEQ ID NO: 1774180 - DNA, 15 bp, Homo sapiens
acccacttggaattc

SEQ ID NO: 1774181 - DNA, 15 bp, Homo sapiens
cccacttggaattca

SEQ ID NO: 1774182 - DNA, 15 bp, Homo sapiens
ccacttggaattcaa

SEQ ID NO: 1774183 - DNA, 15 bp, Homo sapiens
cacttggaattcaaa

SEQ ID NO: 1774184 - DNA, 15 bp, Homo sapiens
acttggaattcaaag

SEQ ID NO: 1774185 - DNA, 15 bp, Homo sapiens
cttggaattcaaaga

SEQ ID NO: 1774186 - DNA, 15 bp, Homo sapiens
ttggaattcaaagag

SEQ ID NO: 1774187 - DNA, 15 bp, Homo sapiens
tggaattcaaagaga

SEQ ID NO: 1774188 - DNA, 15 bp, Homo sapiens
ggaattcaaagagac

SEQ ID NO: 1774189 - DNA, 15 bp, Homo sapiens
gaattcaaagagact

SEQ ID NO: 1774190 - DNA, 15 bp, Homo sapiens
aattcaaagagacta

SEQ ID NO: 1774191 - DNA, 15 bp, Homo sapiens
attcaaagagactag

SEQ ID NO: 1774192 - DNA, 15 bp, Homo sapiens
ttcaaagagactagc

SEQ ID NO: 1774193 - DNA, 15 bp, Homo sapiens
tcaaagagactagct

SEQ ID NO: 1774194 - DNA, 15 bp, Homo sapiens
caaagagactagctc

SEQ ID NO: 1774195 - DNA, 15 bp, Homo sapiens
aaagagactagctct

SEQ ID NO: 1774196 - DNA, 15 bp, Homo sapiens
aagagactagctctt

SEQ ID NO: 1774197 - DNA, 15 bp, Homo sapiens
agagactagctcttt

SEQ ID NO: 1774198 - DNA, 15 bp, Homo sapiens
gagactagctcttta

SEQ ID NO: 1774199 - DNA, 15 bp, Homo sapiens
agactagctctttaa

SEQ ID NO: 1774200 - DNA, 15 bp, Homo sapiens
gactagctctttaac

SEQ ID NO: 1774201 - DNA, 15 bp, Homo sapiens
actagctctttaaca

SEQ ID NO: 1774202 - DNA, 15 bp, Homo sapiens
ctagctctttaacag

SEQ ID NO: 1774203 - DNA, 15 bp, Homo sapiens
tagctctttaacaga

SEQ ID NO: 1774204 - DNA, 15 bp, Homo sapiens
agctctttaacagat

SEQ ID NO: 1774205 - DNA, 15 bp, Homo sapiens
gctctttaacagata

SEQ ID NO: 1774206 - DNA, 15 bp, Homo sapiens
ctctttaacagatac

SEQ ID NO: 1774207 - DNA, 15 bp, Homo sapiens
tctttaacagatact

SEQ ID NO: 1774208 - DNA, 15 bp, Homo sapiens
ctttaacagatactg

SEQ ID NO: 1774209 - DNA, 15 bp, Homo sapiens
tttaacagatactga

SEQ ID NO: 1774210 - DNA, 15 bp, Homo sapiens
ttaacagatactgat

SEQ ID NO: 1774211 - DNA, 15 bp, Homo sapiens
taacagatactgata

SEQ ID NO: 1774212 - DNA, 15 bp, Homo sapiens
aacagatactgatac

SEQ ID NO: 1774213 - DNA, 15 bp, Homo sapiens
acagatactgatact

SEQ ID NO: 1774214 - DNA, 15 bp, Homo sapiens
cagatactgatactc

SEQ ID NO: 1774215 - DNA, 15 bp, Homo sapiens
agatactgatactca

SEQ ID NO: 1774216 - DNA, 15 bp, Homo sapiens
gatactgatactcaa

SEQ ID NO: 1774217 - DNA, 15 bp, Homo sapiens
atactgatactcaaa

SEQ ID NO: 1774218 - DNA, 15 bp, Homo sapiens
tactgatactcaaag

SEQ ID NO: 1774219 - DNA, 15 bp, Homo sapiens
actgatactcaaagg

SEQ ID NO: 1774220 - DNA, 15 bp, Homo sapiens
ctgatactcaaaggt

SEQ ID NO: 1774221 - DNA, 15 bp, Homo sapiens
tgatactcaaaggta

SEQ ID NO: 1774222 - DNA, 15 bp, Homo sapiens
gatactcaaaggtaa

SEQ ID NO: 1774223 - DNA, 15 bp, Homo sapiens
atactcaaaggtaag

SEQ ID NO: 1774224 - DNA, 15 bp, Homo sapiens
tactcaaaggtaagg

SEQ ID NO: 1774225 - DNA, 15 bp, Homo sapiens
actcaaaggtaagga

SEQ ID NO: 1774226 - DNA, 15 bp, Homo sapiens
ctcaaaggtaaggaa

SEQ ID NO: 1774227 - DNA, 15 bp, Homo sapiens
tcaaaggtaaggaag

SEQ ID NO: 1774228 - DNA, 15 bp, Homo sapiens
caaaggtaaggaaga

SEQ ID NO: 1774229 - DNA, 15 bp, Homo sapiens
aaaggtaaggaagaa

SEQ ID NO: 1774230 - DNA, 15 bp, Homo sapiens
aaggtaaggaagaat

SEQ ID NO: 1774231 - DNA, 15 bp, Homo sapiens
aggtaaggaagaatt

SEQ ID NO: 1774232 - DNA, 15 bp, Homo sapiens
ggtaaggaagaatta

SEQ ID NO: 1774233 - DNA, 15 bp, Homo sapiens
gtaaggaagaattat

SEQ ID NO: 1774234 - DNA, 15 bp, Homo sapiens
taaggaagaattatt

SEQ ID NO: 1774235 - DNA, 15 bp, Homo sapiens
aaggaagaattattg

SEQ ID NO: 1774236 - DNA, 15 bp, Homo sapiens
aggaagaattattgg

SEQ ID NO: 1774237 - DNA, 15 bp, Homo sapiens
ggaagaattattggt

SEQ ID NO: 1774238 - DNA, 15 bp, Homo sapiens
gaagaattattggta

SEQ ID NO: 1774239 - DNA, 15 bp, Homo sapiens
aagaattattggtat

SEQ ID NO: 1774240 - DNA, 15 bp, Homo sapiens
agaattattggtatg

SEQ ID NO: 1774241 - DNA, 15 bp, Homo sapiens
gaattattggtatga

SEQ ID NO: 1774242 - DNA, 15 bp, Homo sapiens
aattattggtatgat

SEQ ID NO: 1774243 - DNA, 15 bp, Homo sapiens
attattggtatgatt

SEQ ID NO: 1774244 - DNA, 15 bp, Homo sapiens
ttattggtatgattc

SEQ ID NO: 1774245 - DNA, 15 bp, Homo sapiens
tattggtatgattct

SEQ ID NO: 1774246 - DNA, 15 bp, Homo sapiens
attggtatgattcta

SEQ ID NO: 1774247 - DNA, 15 bp, Homo sapiens
ttggtatgattctaa

SEQ ID NO: 1774248 - DNA, 15 bp, Homo sapiens
tggtatgattctaag

SEQ ID NO: 1774249 - DNA, 15 bp, Homo sapiens
ggtatgattctaagc

SEQ ID NO: 1774250 - DNA, 15 bp, Homo sapiens
gtatgattctaagcc

SEQ ID NO: 1774251 - DNA, 15 bp, Homo sapiens
tatgattctaagcca

SEQ ID NO: 1774252 - DNA, 15 bp, Homo sapiens
atgattctaagccac

SEQ ID NO: 1774253 - DNA, 15 bp, Homo sapiens
tgattctaagccact

SEQ ID NO: 1774254 - DNA, 15 bp, Homo sapiens
gattctaagccacta

SEQ ID NO: 1774255 - DNA, 15 bp, Homo sapiens
attctaagccactag

SEQ ID NO: 1774256 - DNA, 15 bp, Homo sapiens
ttctaagccactagt

SEQ ID NO: 1774257 - DNA, 15 bp, Homo sapiens
tctaagccactagtc

SEQ ID NO: 1774258 - DNA, 15 bp, Homo sapiens
ctaagccactagtca

SEQ ID NO: 1774259 - DNA, 15 bp, Homo sapiens
taagccactagtcat

SEQ ID NO: 1774260 - DNA, 15 bp, Homo sapiens
aagccactagtcatc

SEQ ID NO: 1774261 - DNA, 15 bp, Homo sapiens
agccactagtcatct

SEQ ID NO: 1774262 - DNA, 15 bp, Homo sapiens
gccactagtcatcta

SEQ ID NO: 1774263 - DNA, 15 bp, Homo sapiens
ccactagtcatctat

SEQ ID NO: 1774264 - DNA, 15 bp, Homo sapiens
cactagtcatctatt

SEQ ID NO: 1774265 - DNA, 15 bp, Homo sapiens
actagtcatctattc

SEQ ID NO: 1774266 - DNA, 15 bp, Homo sapiens
ctagtcatctattcc

SEQ ID NO: 1774267 - DNA, 15 bp, Homo sapiens
tagtcatctattccc

SEQ ID NO: 1774268 - DNA, 15 bp, Homo sapiens
agtcatctattccca

SEQ ID NO: 1774269 - DNA, 15 bp, Homo sapiens
gtcatctattcccag

SEQ ID NO: 1774270 - DNA, 15 bp, Homo sapiens
tcatctattcccaga

SEQ ID NO: 1774271 - DNA, 15 bp, Homo sapiens
catctattcccagag

SEQ ID NO: 1774272 - DNA, 15 bp, Homo sapiens
atctattcccagagc

SEQ ID NO: 1774273 - DNA, 15 bp, Homo sapiens
tctattcccagagca

SEQ ID NO: 1774274 - DNA, 15 bp, Homo sapiens
ctattcccagagcaa

SEQ ID NO: 1774275 - DNA, 15 bp, Homo sapiens
tattcccagagcaaa

SEQ ID NO: 1774276 - DNA, 15 bp, Homo sapiens
attcccagagcaaaa

SEQ ID NO: 1774277 - DNA, 15 bp, Homo sapiens
ttcccagagcaaaat

SEQ ID NO: 1774278 - DNA, 15 bp, Homo sapiens
tcccagagcaaaatt

SEQ ID NO: 1774279 - DNA, 15 bp, Homo sapiens
cccagagcaaaattt

SEQ ID NO: 1774280 - DNA, 15 bp, Homo sapiens
ccagagcaaaatttc

SEQ ID NO: 1774281 - DNA, 15 bp, Homo sapiens
cagagcaaaatttct

SEQ ID NO: 1774282 - DNA, 15 bp, Homo sapiens
agagcaaaatttctg

SEQ ID NO: 1774283 - DNA, 15 bp, Homo sapiens
gagcaaaatttctgt

SEQ ID NO: 1774284 - DNA, 15 bp, Homo sapiens
agcaaaatttctgtg

SEQ ID NO: 1774285 - DNA, 15 bp, Homo sapiens
gcaaaatttctgtgg

SEQ ID NO: 1774286 - DNA, 15 bp, Homo sapiens
caaaatttctgtggt

SEQ ID NO: 1774287 - DNA, 15 bp, Homo sapiens
aaaatttctgtggtt

SEQ ID NO: 1774288 - DNA, 15 bp, Homo sapiens
aaatttctgtggtta

SEQ ID NO: 1774289 - DNA, 15 bp, Homo sapiens
aatttctgtggttac

SEQ ID NO: 1774290 - DNA, 15 bp, Homo sapiens
atttctgtggttact

SEQ ID NO: 1774291 - DNA, 15 bp, Homo sapiens
tttctgtggttactt

SEQ ID NO: 1774292 - DNA, 15 bp, Homo sapiens
ttctgtggttacttt

SEQ ID NO: 1774293 - DNA, 15 bp, Homo sapiens
tctgtggttactttt

SEQ ID NO: 1774294 - DNA, 15 bp, Homo sapiens
ctgtggttacttttt

SEQ ID NO: 1774295 - DNA, 15 bp, Homo sapiens
tgtggttactttttt

SEQ ID NO: 1774296 - DNA, 15 bp, Homo sapiens
gtggttacttttttt

SEQ ID NO: 1774297 - DNA, 15 bp, Homo sapiens
tggttactttttttt

SEQ ID NO: 1774298 - DNA, 15 bp, Homo sapiens
ggttactttttttta

SEQ ID NO: 1774299 - DNA, 15 bp, Homo sapiens
gttacttttttttat

SEQ ID NO: 1774300 - DNA, 15 bp, Homo sapiens
ttacttttttttatt

SEQ ID NO: 1774301 - DNA, 15 bp, Homo sapiens
tacttttttttattg

SEQ ID NO: 1774302 - DNA, 15 bp, Homo sapiens
acttttttttattgg

SEQ ID NO: 1774303 - DNA, 15 bp, Homo sapiens
cttttttttattggt

SEQ ID NO: 1774304 - DNA, 15 bp, Homo sapiens
ttttttttattggtt

SEQ ID NO: 1774305 - DNA, 15 bp, Homo sapiens
tttttttattggttt

SEQ ID NO: 1774306 - DNA, 15 bp, Homo sapiens
ttttttattggtttt

SEQ ID NO: 1774307 - DNA, 15 bp, Homo sapiens
tttttattggttttc

SEQ ID NO: 1774308 - DNA, 15 bp, Homo sapiens
ttttattggttttct

SEQ ID NO: 1774309 - DNA, 15 bp, Homo sapiens
tttattggttttcta

SEQ ID NO: 1774310 - DNA, 15 bp, Homo sapiens
ttattggttttctag

SEQ ID NO: 1774311 - DNA, 15 bp, Homo sapiens
tattggttttctagt

SEQ ID NO: 1774312 - DNA, 15 bp, Homo sapiens
attggttttctagtg

SEQ ID NO: 1774313 - DNA, 15 bp, Homo sapiens
ttggttttctagtgt

SEQ ID NO: 1774314 - DNA, 15 bp, Homo sapiens
tggttttctagtgtg

SEQ ID NO: 1774315 - DNA, 15 bp, Homo sapiens
ggttttctagtgtgc

SEQ ID NO: 1774316 - DNA, 15 bp, Homo sapiens
gttttctagtgtgct

SEQ ID NO: 1774317 - DNA, 15 bp, Homo sapiens
ttttctagtgtgctt

SEQ ID NO: 1774318 - DNA, 15 bp, Homo sapiens
tttctagtgtgcttg

SEQ ID NO: 1774319 - DNA, 15 bp, Homo sapiens
ttctagtgtgcttgc

SEQ ID NO: 1774320 - DNA, 15 bp, Homo sapiens
tctagtgtgcttgct

SEQ ID NO: 1774321 - DNA, 15 bp, Homo sapiens
ctagtgtgcttgctt

SEQ ID NO: 1774322 - DNA, 15 bp, Homo sapiens
tagtgtgcttgcttt

SEQ ID NO: 1774323 - DNA, 15 bp, Homo sapiens
agtgtgcttgcttta

SEQ ID NO: 1774324 - DNA, 15 bp, Homo sapiens
gtgtgcttgctttaa

SEQ ID NO: 1774325 - DNA, 15 bp, Homo sapiens
tgtgcttgctttaat

SEQ ID NO: 1774326 - DNA, 15 bp, Homo sapiens
gtgcttgctttaatc

SEQ ID NO: 1774327 - DNA, 15 bp, Homo sapiens
tgcttgctttaatca

SEQ ID NO: 1774328 - DNA, 15 bp, Homo sapiens
gcttgctttaatcaa

SEQ ID NO: 1774329 - DNA, 15 bp, Homo sapiens
cttgctttaatcaac

SEQ ID NO: 1774330 - DNA, 15 bp, Homo sapiens
ttgctttaatcaact

SEQ ID NO: 1774331 - DNA, 15 bp, Homo sapiens
tgctttaatcaactg

SEQ ID NO: 1774332 - DNA, 15 bp, Homo sapiens
gctttaatcaactgt

SEQ ID NO: 1774333 - DNA, 15 bp, Homo sapiens
ctttaatcaactgtt

SEQ ID NO: 1774334 - DNA, 15 bp, Homo sapiens
tttaatcaactgttt

SEQ ID NO: 1774335 - DNA, 15 bp, Homo sapiens
ttaatcaactgtttt

SEQ ID NO: 1774336 - DNA, 15 bp, Homo sapiens
taatcaactgttttc

SEQ ID NO: 1774337 - DNA, 15 bp, Homo sapiens
aatcaactgttttca

SEQ ID NO: 1774338 - DNA, 15 bp, Homo sapiens
atcaactgttttcac

SEQ ID NO: 1774339 - DNA, 15 bp, Homo sapiens
tcaactgttttcaca

SEQ ID NO: 1774340 - DNA, 15 bp, Homo sapiens
caactgttttcacat

SEQ ID NO: 1774341 - DNA, 15 bp, Homo sapiens
aactgttttcacatg

SEQ ID NO: 1774342 - DNA, 15 bp, Homo sapiens
actgttttcacatgt

SEQ ID NO: 1774343 - DNA, 15 bp, Homo sapiens
ctgttttcacatgtt

SEQ ID NO: 1774344 - DNA, 15 bp, Homo sapiens
tgttttcacatgttt

SEQ ID NO: 1774345 - DNA, 15 bp, Homo sapiens
gttttcacatgtttg

SEQ ID NO: 1774346 - DNA, 15 bp, Homo sapiens
ttttcacatgtttgg

SEQ ID NO: 1774347 - DNA, 15 bp, Homo sapiens
tttcacatgtttgga

SEQ ID NO: 1774348 - DNA, 15 bp, Homo sapiens
ttcacatgtttggaa

SEQ ID NO: 1774349 - DNA, 15 bp, Homo sapiens
tcacatgtttggaaa

SEQ ID NO: 1774350 - DNA, 15 bp, Homo sapiens
cacatgtttggaaaa

SEQ ID NO: 1774351 - DNA, 15 bp, Homo sapiens
acatgtttggaaaat

SEQ ID NO: 1774352 - DNA, 15 bp, Homo sapiens
catgtttggaaaatt

SEQ ID NO: 1774353 - DNA, 15 bp, Homo sapiens
atgtttggaaaattt

SEQ ID NO: 1774354 - DNA, 15 bp, Homo sapiens
tgtttggaaaatttg

SEQ ID NO: 1774355 - DNA, 15 bp, Homo sapiens
gtttggaaaatttga

SEQ ID NO: 1774356 - DNA, 15 bp, Homo sapiens
tttggaaaatttgag

SEQ ID NO: 1774357 - DNA, 15 bp, Homo sapiens
ttggaaaatttgagg

SEQ ID NO: 1774358 - DNA, 15 bp, Homo sapiens
tggaaaatttgaggg

SEQ ID NO: 1774359 - DNA, 15 bp, Homo sapiens
ggaaaatttgagggt

SEQ ID NO: 1774360 - DNA, 15 bp, Homo sapiens
gaaaatttgagggtt

SEQ ID NO: 1774361 - DNA, 15 bp, Homo sapiens
aaaatttgagggttt

SEQ ID NO: 1774362 - DNA, 15 bp, Homo sapiens
aaatttgagggtttc

SEQ ID NO: 1774363 - DNA, 15 bp, Homo sapiens
aatttgagggtttcc

SEQ ID NO: 1774364 - DNA, 15 bp, Homo sapiens
atttgagggtttcct

SEQ ID NO: 1774365 - DNA, 15 bp, Homo sapiens
tttgagggtttcctg

SEQ ID NO: 1774366 - DNA, 15 bp, Homo sapiens
ttgagggtttcctgt

SEQ ID NO: 1774367 - DNA, 15 bp, Homo sapiens
tgagggtttcctgtc

SEQ ID NO: 1774368 - DNA, 15 bp, Homo sapiens
gagggtttcctgtct

SEQ ID NO: 1774369 - DNA, 15 bp, Homo sapiens
agggtttcctgtcta

SEQ ID NO: 1774370 - DNA, 15 bp, Homo sapiens
gggtttcctgtctat

SEQ ID NO: 1774371 - DNA, 15 bp, Homo sapiens
ggtttcctgtctata

SEQ ID NO: 1774372 - DNA, 15 bp, Homo sapiens
gtttcctgtctatac

SEQ ID NO: 1774373 - DNA, 15 bp, Homo sapiens
tttcctgtctatact

SEQ ID NO: 1774374 - DNA, 15 bp, Homo sapiens
ttcctgtctatacta

SEQ ID NO: 1774375 - DNA, 15 bp, Homo sapiens
tcctgtctatactag

SEQ ID NO: 1774376 - DNA, 15 bp, Homo sapiens
cctgtctatactaga

SEQ ID NO: 1774377 - DNA, 15 bp, Homo sapiens
ctgtctatactagaa

SEQ ID NO: 1774378 - DNA, 15 bp, Homo sapiens
tgtctatactagaag

SEQ ID NO: 1774379 - DNA, 15 bp, Homo sapiens
gtctatactagaaga

SEQ ID NO: 1774380 - DNA, 15 bp, Homo sapiens
tctatactagaagat

SEQ ID NO: 1774381 - DNA, 15 bp, Homo sapiens
ctatactagaagata

SEQ ID NO: 1774382 - DNA, 15 bp, Homo sapiens
tatactagaagatac

SEQ ID NO: 1774383 - DNA, 15 bp, Homo sapiens
atactagaagatacg

SEQ ID NO: 1774384 - DNA, 15 bp, Homo sapiens
tactagaagatacga

SEQ ID NO: 1774385 - DNA, 15 bp, Homo sapiens
actagaagatacgag

SEQ ID NO: 1774386 - DNA, 15 bp, Homo sapiens
ctagaagatacgagc

SEQ ID NO: 1774387 - DNA, 15 bp, Homo sapiens
tagaagatacgagca

SEQ ID NO: 1774388 - DNA, 15 bp, Homo sapiens
agaagatacgagcac

SEQ ID NO: 1774389 - DNA, 15 bp, Homo sapiens
gaagatacgagcact

SEQ ID NO: 1774390 - DNA, 15 bp, Homo sapiens
aagatacgagcacta

SEQ ID NO: 1774391 - DNA, 15 bp, Homo sapiens
agatacgagcactac

SEQ ID NO: 1774392 - DNA, 15 bp, Homo sapiens
gatacgagcactact

SEQ ID NO: 1774393 - DNA, 15 bp, Homo sapiens
atacgagcactactc

SEQ ID NO: 1774394 - DNA, 15 bp, Homo sapiens
tacgagcactactcc

SEQ ID NO: 1774395 - DNA, 15 bp, Homo sapiens
acgagcactactcca

SEQ ID NO: 1774396 - DNA, 15 bp, Homo sapiens
cgagcactactccag

SEQ ID NO: 1774397 - DNA, 15 bp, Homo sapiens
gagcactactccaga

SEQ ID NO: 1774398 - DNA, 15 bp, Homo sapiens
agcactactccagaa

SEQ ID NO: 1774399 - DNA, 15 bp, Homo sapiens
gcactactccagaaa

SEQ ID NO: 1774400 - DNA, 15 bp, Homo sapiens
cactactccagaaag

SEQ ID NO: 1774401 - DNA, 15 bp, Homo sapiens
actactccagaaagg

SEQ ID NO: 1774402 - DNA, 15 bp, Homo sapiens
ctactccagaaaggt

SEQ ID NO: 1774403 - DNA, 15 bp, Homo sapiens
tactccagaaaggtt

SEQ ID NO: 1774404 - DNA, 15 bp, Homo sapiens
actccagaaaggtta

SEQ ID NO: 1774405 - DNA, 15 bp, Homo sapiens
ctccagaaaggttag

SEQ ID NO: 1774406 - DNA, 15 bp, Homo sapiens
tccagaaaggttaga

SEQ ID NO: 1774407 - DNA, 15 bp, Homo sapiens
ccagaaaggttagaa

SEQ ID NO: 1774408 - DNA, 15 bp, Homo sapiens
cagaaaggttagaaa

SEQ ID NO: 1774409 - DNA, 15 bp, Homo sapiens
agaaaggttagaaac

SEQ ID NO: 1774410 - DNA, 15 bp, Homo sapiens
gaaaggttagaaaca

SEQ ID NO: 1774411 - DNA, 15 bp, Homo sapiens
aaaggttagaaacaa

SEQ ID NO: 1774412 - DNA, 15 bp, Homo sapiens
aaggttagaaacaaa

SEQ ID NO: 1774413 - DNA, 15 bp, Homo sapiens
aggttagaaacaaaa

SEQ ID NO: 1774414 - DNA, 15 bp, Homo sapiens
ggttagaaacaaaag

SEQ ID NO: 1774415 - DNA, 15 bp, Homo sapiens
gttagaaacaaaaga

SEQ ID NO: 1774416 - DNA, 15 bp, Homo sapiens
ttagaaacaaaagac

SEQ ID NO: 1774417 - DNA, 15 bp, Homo sapiens
tagaaacaaaagacc

SEQ ID NO: 1774418 - DNA, 15 bp, Homo sapiens
agaaacaaaagacca

SEQ ID NO: 1774419 - DNA, 15 bp, Homo sapiens
gaaacaaaagaccaa

SEQ ID NO: 1774420 - DNA, 15 bp, Homo sapiens
aaacaaaagaccaaa

SEQ ID NO: 1774421 - DNA, 15 bp, Homo sapiens
aacaaaagaccaaag

SEQ ID NO: 1774422 - DNA, 15 bp, Homo sapiens
acaaaagaccaaagg

SEQ ID NO: 1774423 - DNA, 15 bp, Homo sapiens
caaaagaccaaagga

SEQ ID NO: 1774424 - DNA, 15 bp, Homo sapiens
aaaagaccaaaggac

SEQ ID NO: 1774425 - DNA, 15 bp, Homo sapiens
aaagaccaaaggacg

SEQ ID NO: 1774426 - DNA, 15 bp, Homo sapiens
aagaccaaaggacgg

SEQ ID NO: 1774427 - DNA, 15 bp, Homo sapiens
agaccaaaggacggc

SEQ ID NO: 1774428 - DNA, 15 bp, Homo sapiens
gaccaaaggacggct

SEQ ID NO: 1774429 - DNA, 15 bp, Homo sapiens
accaaaggacggctt

SEQ ID NO: 1774430 - DNA, 15 bp, Homo sapiens
ccaaaggacggcttc

SEQ ID NO: 1774431 - DNA, 15 bp, Homo sapiens
caaaggacggcttct

SEQ ID NO: 1774432 - DNA, 15 bp, Homo sapiens
aaaggacggcttcta

SEQ ID NO: 1774433 - DNA, 15 bp, Homo sapiens
aaggacggcttctac

SEQ ID NO: 1774434 - DNA, 15 bp, Homo sapiens
aggacggcttctaca

SEQ ID NO: 1774435 - DNA, 15 bp, Homo sapiens
ggacggcttctacaa

SEQ ID NO: 1774436 - DNA, 15 bp, Homo sapiens
gacggcttctacaaa

SEQ ID NO: 1774437 - DNA, 15 bp, Homo sapiens
acggcttctacaaaa

SEQ ID NO: 1774438 - DNA, 15 bp, Homo sapiens
cggcttctacaaaag

SEQ ID NO: 1774439 - DNA, 15 bp, Homo sapiens
ggcttctacaaaagg

SEQ ID NO: 1774440 - DNA, 15 bp, Homo sapiens
gcttctacaaaaggc

SEQ ID NO: 1774441 - DNA, 15 bp, Homo sapiens
cttctacaaaaggcc

SEQ ID NO: 1774442 - DNA, 15 bp, Homo sapiens
ttctacaaaaggccc

SEQ ID NO: 1774443 - DNA, 15 bp, Homo sapiens
tctacaaaaggcccc

SEQ ID NO: 1774444 - DNA, 15 bp, Homo sapiens
ctacaaaaggccccc

SEQ ID NO: 1774445 - DNA, 15 bp, Homo sapiens
tacaaaaggccccct

SEQ ID NO: 1774446 - DNA, 15 bp, Homo sapiens
acaaaaggccccctg

SEQ ID NO: 1774447 - DNA, 15 bp, Homo sapiens
caaaaggccccctgt

SEQ ID NO: 1774448 - DNA, 15 bp, Homo sapiens
aaaaggccccctgtt

SEQ ID NO: 1774449 - DNA, 15 bp, Homo sapiens
aaaggccccctgtta

SEQ ID NO: 1774450 - DNA, 15 bp, Homo sapiens
aaggccccctgttaa

SEQ ID NO: 1774451 - DNA, 15 bp, Homo sapiens
aggccccctgttaaa

SEQ ID NO: 1774452 - DNA, 15 bp, Homo sapiens
ggccccctgttaaag

SEQ ID NO: 1774453 - DNA, 15 bp, Homo sapiens
gccccctgttaaagc

SEQ ID NO: 1774454 - DNA, 15 bp, Homo sapiens
ccccctgttaaagcc

SEQ ID NO: 1774455 - DNA, 15 bp, Homo sapiens
cccctgttaaagccc

SEQ ID NO: 1774456 - DNA, 15 bp, Homo sapiens
ccctgttaaagccca

SEQ ID NO: 1774457 - DNA, 15 bp, Homo sapiens
cctgttaaagcccag

SEQ ID NO: 1774458 - DNA, 15 bp, Homo sapiens
ctgttaaagcccagc

SEQ ID NO: 1774459 - DNA, 15 bp, Homo sapiens
tgttaaagcccagcc

SEQ ID NO: 1774460 - DNA, 15 bp, Homo sapiens
gttaaagcccagccg

SEQ ID NO: 1774461 - DNA, 15 bp, Homo sapiens
ttaaagcccagccgt

SEQ ID NO: 1774462 - DNA, 15 bp, Homo sapiens
taaagcccagccgtt

SEQ ID NO: 1774463 - DNA, 15 bp, Homo sapiens
aaagcccagccgttt

SEQ ID NO: 1774464 - DNA, 15 bp, Homo sapiens
aagcccagccgtttg

SEQ ID NO: 1774465 - DNA, 15 bp, Homo sapiens
agcccagccgtttgt

SEQ ID NO: 1774466 - DNA, 15 bp, Homo sapiens
gcccagccgtttgtt

SEQ ID NO: 1774467 - DNA, 15 bp, Homo sapiens
cccagccgtttgttg

SEQ ID NO: 1774468 - DNA, 15 bp, Homo sapiens
ccagccgtttgttgt

SEQ ID NO: 1774469 - DNA, 15 bp, Homo sapiens
cagccgtttgttgtt

SEQ ID NO: 1774470 - DNA, 15 bp, Homo sapiens
agccgtttgttgttg

SEQ ID NO: 1774471 - DNA, 15 bp, Homo sapiens
gccgtttgttgttgt

SEQ ID NO: 1774472 - DNA, 15 bp, Homo sapiens
ccgtttgttgttgtt

SEQ ID NO: 1774473 - DNA, 15 bp, Homo sapiens
cgtttgttgttgttt

SEQ ID NO: 1774474 - DNA, 15 bp, Homo sapiens
gtttgttgttgtttt

SEQ ID NO: 1774475 - DNA, 15 bp, Homo sapiens
ttgttgttgttttag

SEQ ID NO: 1774476 - DNA, 15 bp, Homo sapiens
tgttgttgttttagt

SEQ ID NO: 1774477 - DNA, 15 bp, Homo sapiens
gttgttgttttagtt

SEQ ID NO: 1774478 - DNA, 15 bp, Homo sapiens
ttgttgttttagtta

SEQ ID NO: 1774479 - DNA, 15 bp, Homo sapiens
tgttgttttagttaa

SEQ ID NO: 1774480 - DNA, 15 bp, Homo sapiens
gttgttttagttaaa

SEQ ID NO: 1774481 - DNA, 15 bp, Homo sapiens
ttgttttagttaaac

SEQ ID NO: 1774482 - DNA, 15 bp, Homo sapiens
tgttttagttaaaca

SEQ ID NO: 1774483 - DNA, 15 bp, Homo sapiens
gttttagttaaacag

SEQ ID NO: 1774484 - DNA, 15 bp, Homo sapiens
ttttagttaaacaga

SEQ ID NO: 1774485 - DNA, 15 bp, Homo sapiens
tttagttaaacagaa

SEQ ID NO: 1774486 - DNA, 15 bp, Homo sapiens
ttagttaaacagaag

SEQ ID NO: 1774487 - DNA, 15 bp, Homo sapiens
tagttaaacagaagt

SEQ ID NO: 1774488 - DNA, 15 bp, Homo sapiens
agttaaacagaagtg

SEQ ID NO: 1774489 - DNA, 15 bp, Homo sapiens
gttaaacagaagtgg

SEQ ID NO: 1774490 - DNA, 15 bp, Homo sapiens
ttaaacagaagtgga

SEQ ID NO: 1774491 - DNA, 15 bp, Homo sapiens
taaacagaagtggac

SEQ ID NO: 1774492 - DNA, 15 bp, Homo sapiens
aaacagaagtggact

SEQ ID NO: 1774493 - DNA, 15 bp, Homo sapiens
aacagaagtggacta

SEQ ID NO: 1774494 - DNA, 15 bp, Homo sapiens
acagaagtggactat

SEQ ID NO: 1774495 - DNA, 15 bp, Homo sapiens
cagaagtggactatt

SEQ ID NO: 1774496 - DNA, 15 bp, Homo sapiens
agaagtggactattt

SEQ ID NO: 1774497 - DNA, 15 bp, Homo sapiens
gaagtggactatttc

SEQ ID NO: 1774498 - DNA, 15 bp, Homo sapiens
aagtggactatttca

SEQ ID NO: 1774499 - DNA, 15 bp, Homo sapiens
agtggactatttcaa

SEQ ID NO: 1774500 - DNA, 15 bp, Homo sapiens
gtggactatttcaac

SEQ ID NO: 1774501 - DNA, 15 bp, Homo sapiens
tggactatttcaacc

SEQ ID NO: 1774502 - DNA, 15 bp, Homo sapiens
ggactatttcaacct

SEQ ID NO: 1774503 - DNA, 15 bp, Homo sapiens
gactatttcaaccta

SEQ ID NO: 1774504 - DNA, 15 bp, Homo sapiens
actatttcaacctaa

SEQ ID NO: 1774505 - DNA, 15 bp, Homo sapiens
ctatttcaacctaac

SEQ ID NO: 1774506 - DNA, 15 bp, Homo sapiens
tatttcaacctaacc

SEQ ID NO: 1774507 - DNA, 15 bp, Homo sapiens
atttcaacctaaccg

SEQ ID NO: 1774508 - DNA, 15 bp, Homo sapiens
tttcaacctaaccga

SEQ ID NO: 1774509 - DNA, 15 bp, Homo sapiens
ttcaacctaaccgaa

SEQ ID NO: 1774510 - DNA, 15 bp, Homo sapiens
tcaacctaaccgaaa

SEQ ID NO: 1774511 - DNA, 15 bp, Homo sapiens
caacctaaccgaaaa

SEQ ID NO: 1774512 - DNA, 15 bp, Homo sapiens
aacctaaccgaaaaa

SEQ ID NO: 1774513 - DNA, 15 bp, Homo sapiens
acctaaccgaaaaag

SEQ ID NO: 1774514 - DNA, 15 bp, Homo sapiens
cctaaccgaaaaaga

SEQ ID NO: 1774515 - DNA, 15 bp, Homo sapiens
ctaaccgaaaaagat

SEQ ID NO: 1774516 - DNA, 15 bp, Homo sapiens
taaccgaaaaagatt

SEQ ID NO: 1774517 - DNA, 15 bp, Homo sapiens
aaccgaaaaagattg

SEQ ID NO: 1774518 - DNA, 15 bp, Homo sapiens
accgaaaaagattgc

SEQ ID NO: 1774519 - DNA, 15 bp, Homo sapiens
ccgaaaaagattgct

SEQ ID NO: 1774520 - DNA, 15 bp, Homo sapiens
cgaaaaagattgctg

SEQ ID NO: 1774521 - DNA, 15 bp, Homo sapiens
gaaaaagattgctgg

SEQ ID NO: 1774522 - DNA, 15 bp, Homo sapiens
aaaaagattgctgga

SEQ ID NO: 1774523 - DNA, 15 bp, Homo sapiens
aaaagattgctggat

SEQ ID NO: 1774524 - DNA, 15 bp, Homo sapiens
aaagattgctggatt

SEQ ID NO: 1774525 - DNA, 15 bp, Homo sapiens
aagattgctggattt

SEQ ID NO: 1774526 - DNA, 15 bp, Homo sapiens
agattgctggatttt

SEQ ID NO: 1774527 - DNA, 15 bp, Homo sapiens
gattgctggattttt

SEQ ID NO: 1774528 - DNA, 15 bp, Homo sapiens
attgctggatttttg

SEQ ID NO: 1774529 - DNA, 15 bp, Homo sapiens
ttgctggatttttgc

SEQ ID NO: 1774530 - DNA, 15 bp, Homo sapiens
tgctggatttttgcc

SEQ ID NO: 1774531 - DNA, 15 bp, Homo sapiens
gctggatttttgccc

SEQ ID NO: 1774532 - DNA, 15 bp, Homo sapiens
ctggatttttgccct

SEQ ID NO: 1774533 - DNA, 15 bp, Homo sapiens
tggatttttgccctg

SEQ ID NO: 1774534 - DNA, 15 bp, Homo sapiens
ggatttttgccctgg

SEQ ID NO: 1774535 - DNA, 15 bp, Homo sapiens
gatttttgccctggc

SEQ ID NO: 1774536 - DNA, 15 bp, Homo sapiens
atttttgccctggcc

SEQ ID NO: 1774537 - DNA, 15 bp, Homo sapiens
tttttgccctggcca

SEQ ID NO: 1774538 - DNA, 15 bp, Homo sapiens
ttttgccctggccat

SEQ ID NO: 1774539 - DNA, 15 bp, Homo sapiens
tttgccctggccata

SEQ ID NO: 1774540 - DNA, 15 bp, Homo sapiens
ttgccctggccatat

SEQ ID NO: 1774541 - DNA, 15 bp, Homo sapiens
tgccctggccatata

SEQ ID NO: 1774542 - DNA, 15 bp, Homo sapiens
gccctggccatataa

SEQ ID NO: 1774543 - DNA, 15 bp, Homo sapiens
ccctggccatataaa

SEQ ID NO: 1774544 - DNA, 15 bp, Homo sapiens
cctggccatataaat

SEQ ID NO: 1774545 - DNA, 15 bp, Homo sapiens
ctggccatataaata

SEQ ID NO: 1774546 - DNA, 15 bp, Homo sapiens
tggccatataaatag

SEQ ID NO: 1774547 - DNA, 15 bp, Homo sapiens
ggccatataaatagg

SEQ ID NO: 1774548 - DNA, 15 bp, Homo sapiens
gccatataaatagga

SEQ ID NO: 1774549 - DNA, 15 bp, Homo sapiens
ccatataaataggaa

SEQ ID NO: 1774550 - DNA, 15 bp, Homo sapiens
catataaataggaaa

SEQ ID NO: 1774551 - DNA, 15 bp, Homo sapiens
atataaataggaaat

SEQ ID NO: 1774552 - DNA, 15 bp, Homo sapiens
tataaataggaaatt

SEQ ID NO: 1774553 - DNA, 15 bp, Homo sapiens
ataaataggaaatta

SEQ ID NO: 1774554 - DNA, 15 bp, Homo sapiens
taaataggaaattaa

SEQ ID NO: 1774555 - DNA, 15 bp, Homo sapiens
aaataggaaattaag

SEQ ID NO: 1774556 - DNA, 15 bp, Homo sapiens
aataggaaattaaga

SEQ ID NO: 1774557 - DNA, 15 bp, Homo sapiens
ataggaaattaagac

SEQ ID NO: 1774558 - DNA, 15 bp, Homo sapiens
taggaaattaagaca

SEQ ID NO: 1774559 - DNA, 15 bp, Homo sapiens
aggaaattaagacag

SEQ ID NO: 1774560 - DNA, 15 bp, Homo sapiens
ggaaattaagacagg

SEQ ID NO: 1774561 - DNA, 15 bp, Homo sapiens
gaaattaagacaggc

SEQ ID NO: 1774562 - DNA, 15 bp, Homo sapiens
aaattaagacaggca

SEQ ID NO: 1774563 - DNA, 15 bp, Homo sapiens
aattaagacaggcat

SEQ ID NO: 1774564 - DNA, 15 bp, Homo sapiens
attaagacaggcata

SEQ ID NO: 1774565 - DNA, 15 bp, Homo sapiens
ttaagacaggcatat

SEQ ID NO: 1774566 - DNA, 15 bp, Homo sapiens
taagacaggcatatt

SEQ ID NO: 1774567 - DNA, 15 bp, Homo sapiens
aagacaggcatatta

SEQ ID NO: 1774568 - DNA, 15 bp, Homo sapiens
agacaggcatattaa

SEQ ID NO: 1774569 - DNA, 15 bp, Homo sapiens
gacaggcatattaaa

SEQ ID NO: 1774570 - DNA, 15 bp, Homo sapiens
acaggcatattaaaa

SEQ ID NO: 1774571 - DNA, 15 bp, Homo sapiens
caggcatattaaaat

SEQ ID NO: 1774572 - DNA, 15 bp, Homo sapiens
aggcatattaaaatt

SEQ ID NO: 1774573 - DNA, 15 bp, Homo sapiens
ggcatattaaaattt

SEQ ID NO: 1774574 - DNA, 15 bp, Homo sapiens
gcatattaaaatttt

SEQ ID NO: 1774575 - DNA, 15 bp, Homo sapiens
catattaaaattttt

SEQ ID NO: 1774576 - DNA, 15 bp, Homo sapiens
atattaaaatttttt

SEQ ID NO: 1774577 - DNA, 15 bp, Homo sapiens
tattaaaattttttc

SEQ ID NO: 1774578 - DNA, 15 bp, Homo sapiens
attaaaattttttcc

SEQ ID NO: 1774579 - DNA, 15 bp, Homo sapiens
ttaaaattttttcct

SEQ ID NO: 1774580 - DNA, 15 bp, Homo sapiens
taaaattttttcctg

SEQ ID NO: 1774581 - DNA, 15 bp, Homo sapiens
aaaattttttcctgc

SEQ ID NO: 1774582 - DNA, 15 bp, Homo sapiens
aaattttttcctgct

SEQ ID NO: 1774583 - DNA, 15 bp, Homo sapiens
aattttttcctgctt

SEQ ID NO: 1774584 - DNA, 15 bp, Homo sapiens
attttttcctgctta

SEQ ID NO: 1774585 - DNA, 15 bp, Homo sapiens
ttttttcctgcttat

SEQ ID NO: 1774586 - DNA, 15 bp, Homo sapiens
tttttcctgcttatg

SEQ ID NO: 1774587 - DNA, 15 bp, Homo sapiens
ttttcctgcttatgt

SEQ ID NO: 1774588 - DNA, 15 bp, Homo sapiens
tttcctgcttatgtt

SEQ ID NO: 1774589 - DNA, 15 bp, Homo sapiens
ttcctgcttatgttg

SEQ ID NO: 1774590 - DNA, 15 bp, Homo sapiens
tcctgcttatgttgt

SEQ ID NO: 1774591 - DNA, 15 bp, Homo sapiens
cctgcttatgttgtc

SEQ ID NO: 1774592 - DNA, 15 bp, Homo sapiens
ctgcttatgttgtct

SEQ ID NO: 1774593 - DNA, 15 bp, Homo sapiens
tgcttatgttgtctt

SEQ ID NO: 1774594 - DNA, 15 bp, Homo sapiens
gcttatgttgtcttc

SEQ ID NO: 1774595 - DNA, 15 bp, Homo sapiens
cttatgttgtcttca

SEQ ID NO: 1774596 - DNA, 15 bp, Homo sapiens
ttatgttgtcttcat

SEQ ID NO: 1774597 - DNA, 15 bp, Homo sapiens
tatgttgtcttcatc

SEQ ID NO: 1774598 - DNA, 15 bp, Homo sapiens
atgttgtcttcatct

SEQ ID NO: 1774599 - DNA, 15 bp, Homo sapiens
tgttgtcttcatctc

SEQ ID NO: 1774600 - DNA, 15 bp, Homo sapiens
gttgtcttcatctct

SEQ ID NO: 1774601 - DNA, 15 bp, Homo sapiens
ttgtcttcatctctg

SEQ ID NO: 1774602 - DNA, 15 bp, Homo sapiens
tgtcttcatctctgg

SEQ ID NO: 1774603 - DNA, 15 bp, Homo sapiens
gtcttcatctctggg

SEQ ID NO: 1774604 - DNA, 15 bp, Homo sapiens
tcttcatctctgggt

SEQ ID NO: 1774605 - DNA, 15 bp, Homo sapiens
cttcatctctgggtc

SEQ ID NO: 1774606 - DNA, 15 bp, Homo sapiens
ttcatctctgggtca

SEQ ID NO: 1774607 - DNA, 15 bp, Homo sapiens
tcatctctgggtcaa

SEQ ID NO: 1774608 - DNA, 15 bp, Homo sapiens
catctctgggtcaac

SEQ ID NO: 1774609 - DNA, 15 bp, Homo sapiens
atctctgggtcaact

SEQ ID NO: 1774610 - DNA, 15 bp, Homo sapiens
tctctgggtcaactg

SEQ ID NO: 1774611 - DNA, 15 bp, Homo sapiens
ctctgggtcaactga

SEQ ID NO: 1774612 - DNA, 15 bp, Homo sapiens
tctgggtcaactgat

SEQ ID NO: 1774613 - DNA, 15 bp, Homo sapiens
ctgggtcaactgata

SEQ ID NO: 1774614 - DNA, 15 bp, Homo sapiens
tgggtcaactgatac

SEQ ID NO: 1774615 - DNA, 15 bp, Homo sapiens
gggtcaactgatact

SEQ ID NO: 1774616 - DNA, 15 bp, Homo sapiens
ggtcaactgatactt

SEQ ID NO: 1774617 - DNA, 15 bp, Homo sapiens
gtcaactgatactta

SEQ ID NO: 1774618 - DNA, 15 bp, Homo sapiens
tcaactgatacttat

SEQ ID NO: 1774619 - DNA, 15 bp, Homo sapiens
caactgatacttatt

SEQ ID NO: 1774620 - DNA, 15 bp, Homo sapiens
aactgatacttattt

SEQ ID NO: 1774621 - DNA, 15 bp, Homo sapiens
actgatacttatttt

SEQ ID NO: 1774622 - DNA, 15 bp, Homo sapiens
ctgatacttattttt

SEQ ID NO: 1774623 - DNA, 15 bp, Homo sapiens
tgatacttatttttt

SEQ ID NO: 1774624 - DNA, 15 bp, Homo sapiens
gatacttattttttt

SEQ ID NO: 1774625 - DNA, 15 bp, Homo sapiens
atacttatttttttt

SEQ ID NO: 1774626 - DNA, 15 bp, Homo sapiens
tacttattttttttt

SEQ ID NO: 1774627 - DNA, 15 bp, Homo sapiens
acttatttttttttc

SEQ ID NO: 1774628 - DNA, 15 bp, Homo sapiens
cttatttttttttcc

SEQ ID NO: 1774629 - DNA, 15 bp, Homo sapiens
ttatttttttttcca

SEQ ID NO: 1774630 - DNA, 15 bp, Homo sapiens
tatttttttttccag

SEQ ID NO: 1774631 - DNA, 15 bp, Homo sapiens
atttttttttccagt

SEQ ID NO: 1774632 - DNA, 15 bp, Homo sapiens
tttttttttccagta

SEQ ID NO: 1774633 - DNA, 15 bp, Homo sapiens
ttttttttccagtag

SEQ ID NO: 1774634 - DNA, 15 bp, Homo sapiens
tttttttccagtagc

SEQ ID NO: 1774635 - DNA, 15 bp, Homo sapiens
ttttttccagtagca

SEQ ID NO: 1774636 - DNA, 15 bp, Homo sapiens
tttttccagtagcaa

SEQ ID NO: 1774637 - DNA, 15 bp, Homo sapiens
ttttccagtagcaaa

SEQ ID NO: 1774638 - DNA, 15 bp, Homo sapiens
tttccagtagcaaaa

SEQ ID NO: 1774639 - DNA, 15 bp, Homo sapiens
ttccagtagcaaaat

SEQ ID NO: 1774640 - DNA, 15 bp, Homo sapiens
tccagtagcaaaata

SEQ ID NO: 1774641 - DNA, 15 bp, Homo sapiens
ccagtagcaaaatat

SEQ ID NO: 1774642 - DNA, 15 bp, Homo sapiens
tagcaaaatatttat

SEQ ID NO: 1774643 - DNA, 15 bp, Homo sapiens
agcaaaatatttatt

SEQ ID NO: 1774644 - DNA, 15 bp, Homo sapiens
gcaaaatatttattg

SEQ ID NO: 1774645 - DNA, 15 bp, Homo sapiens
caaaatatttattga

SEQ ID NO: 1774646 - DNA, 15 bp, Homo sapiens
aaaatatttattgag

SEQ ID NO: 1774647 - DNA, 15 bp, Homo sapiens
aaatatttattgagt

SEQ ID NO: 1774648 - DNA, 15 bp, Homo sapiens
aatatttattgagtg

SEQ ID NO: 1774649 - DNA, 15 bp, Homo sapiens
atatttattgagtgt

SEQ ID NO: 1774650 - DNA, 15 bp, Homo sapiens
tatttattgagtgta

SEQ ID NO: 1774651 - DNA, 15 bp, Homo sapiens
atttattgagtgtaa

SEQ ID NO: 1774652 - DNA, 15 bp, Homo sapiens
tttattgagtgtaac

SEQ ID NO: 1774653 - DNA, 15 bp, Homo sapiens
ttattgagtgtaact

SEQ ID NO: 1774654 - DNA, 15 bp, Homo sapiens
tattgagtgtaactg

SEQ ID NO: 1774655 - DNA, 15 bp, Homo sapiens
attgagtgtaactgt

SEQ ID NO: 1774656 - DNA, 15 bp, Homo sapiens
ttgagtgtaactgtg

SEQ ID NO: 1774657 - DNA, 15 bp, Homo sapiens
tgagtgtaactgtgt

SEQ ID NO: 1774658 - DNA, 15 bp, Homo sapiens
gagtgtaactgtgta

SEQ ID NO: 1774659 - DNA, 15 bp, Homo sapiens
agtgtaactgtgtac

SEQ ID NO: 1774660 - DNA, 15 bp, Homo sapiens
gtgtaactgtgtacc

SEQ ID NO: 1774661 - DNA, 15 bp, Homo sapiens
tgtaactgtgtacca

SEQ ID NO: 1774662 - DNA, 15 bp, Homo sapiens
gtaactgtgtaccag

SEQ ID NO: 1774663 - DNA, 15 bp, Homo sapiens
taactgtgtaccagg

SEQ ID NO: 1774664 - DNA, 15 bp, Homo sapiens
aactgtgtaccaggt

SEQ ID NO: 1774665 - DNA, 15 bp, Homo sapiens
actgtgtaccaggtg

SEQ ID NO: 1774666 - DNA, 15 bp, Homo sapiens
ctgtgtaccaggtgc

SEQ ID NO: 1774667 - DNA, 15 bp, Homo sapiens
tgtgtaccaggtgct

SEQ ID NO: 1774668 - DNA, 15 bp, Homo sapiens
gtgtaccaggtgctt

SEQ ID NO: 1774669 - DNA, 15 bp, Homo sapiens
tgtaccaggtgcttt

SEQ ID NO: 1774670 - DNA, 15 bp, Homo sapiens
gtaccaggtgctttt

SEQ ID NO: 1774671 - DNA, 15 bp, Homo sapiens
taccaggtgcttttc

SEQ ID NO: 1774672 - DNA, 15 bp, Homo sapiens
accaggtgcttttct

SEQ ID NO: 1774673 - DNA, 15 bp, Homo sapiens
ccaggtgcttttcta

SEQ ID NO: 1774674 - DNA, 15 bp, Homo sapiens
caggtgcttttctag

SEQ ID NO: 1774675 - DNA, 15 bp, Homo sapiens
aggtgcttttctagg

SEQ ID NO: 1774676 - DNA, 15 bp, Homo sapiens
ggtgcttttctaggt

SEQ ID NO: 1774677 - DNA, 15 bp, Homo sapiens
gtgcttttctaggtg

SEQ ID NO: 1774678 - DNA, 15 bp, Homo sapiens
tgcttttctaggtgc

SEQ ID NO: 1774679 - DNA, 15 bp, Homo sapiens
gcttttctaggtgct

SEQ ID NO: 1774680 - DNA, 15 bp, Homo sapiens
cttttctaggtgctg

SEQ ID NO: 1774681 - DNA, 15 bp, Homo sapiens
ttttctaggtgctgg

SEQ ID NO: 1774682 - DNA, 15 bp, Homo sapiens
tttctaggtgctggg

SEQ ID NO: 1774683 - DNA, 15 bp, Homo sapiens
ttctaggtgctggga

SEQ ID NO: 1774684 - DNA, 15 bp, Homo sapiens
tctaggtgctgggaa

SEQ ID NO: 1774685 - DNA, 15 bp, Homo sapiens
ctaggtgctgggaat

SEQ ID NO: 1774686 - DNA, 15 bp, Homo sapiens
taggtgctgggaata

SEQ ID NO: 1774687 - DNA, 15 bp, Homo sapiens
aggtgctgggaatat

SEQ ID NO: 1774688 - DNA, 15 bp, Homo sapiens
ggtgctgggaatata

SEQ ID NO: 1774689 - DNA, 15 bp, Homo sapiens
gtgctgggaatatag

SEQ ID NO: 1774690 - DNA, 15 bp, Homo sapiens
tgctgggaatatagc

SEQ ID NO: 1774691 - DNA, 15 bp, Homo sapiens
gctgggaatatagca

SEQ ID NO: 1774692 - DNA, 15 bp, Homo sapiens
ctgggaatatagcag

SEQ ID NO: 1774693 - DNA, 15 bp, Homo sapiens
tgggaatatagcagt

SEQ ID NO: 1774694 - DNA, 15 bp, Homo sapiens
gggaatatagcagtg

SEQ ID NO: 1774695 - DNA, 15 bp, Homo sapiens
ggaatatagcagtga

SEQ ID NO: 1774696 - DNA, 15 bp, Homo sapiens
gaatatagcagtgaa

SEQ ID NO: 1774697 - DNA, 15 bp, Homo sapiens
aatatagcagtgaat

SEQ ID NO: 1774698 - DNA, 15 bp, Homo sapiens
atatagcagtgaata

SEQ ID NO: 1774699 - DNA, 15 bp, Homo sapiens
tatagcagtgaataa

SEQ ID NO: 1774700 - DNA, 15 bp, Homo sapiens
atagcagtgaataaa

SEQ ID NO: 1774701 - DNA, 15 bp, Homo sapiens
tagcagtgaataaaa

SEQ ID NO: 1774702 - DNA, 15 bp, Homo sapiens
agcagtgaataaaac

SEQ ID NO: 1774703 - DNA, 15 bp, Homo sapiens
gcagtgaataaaaca

SEQ ID NO: 1774704 - DNA, 15 bp, Homo sapiens
cagtgaataaaacaa

SEQ ID NO: 1774705 - DNA, 15 bp, Homo sapiens
agtgaataaaacaaa

SEQ ID NO: 1774706 - DNA, 15 bp, Homo sapiens
gtgaataaaacaaaa

SEQ ID NO: 1774707 - DNA, 15 bp, Homo sapiens
tgaataaaacaaaat

SEQ ID NO: 1774708 - DNA, 15 bp, Homo sapiens
gaataaaacaaaatc

SEQ ID NO: 1774709 - DNA, 15 bp, Homo sapiens
aataaaacaaaatcc

SEQ ID NO: 1774710 - DNA, 15 bp, Homo sapiens
ataaaacaaaatccc

SEQ ID NO: 1774711 - DNA, 15 bp, Homo sapiens
taaaacaaaatccct

SEQ ID NO: 1774712 - DNA, 15 bp, Homo sapiens
aaaacaaaatccctg

SEQ ID NO: 1774713 - DNA, 15 bp, Homo sapiens
aaacaaaatccctga

SEQ ID NO: 1774714 - DNA, 15 bp, Homo sapiens
aacaaaatccctgag

SEQ ID NO: 1774715 - DNA, 15 bp, Homo sapiens
acaaaatccctgagc

SEQ ID NO: 1774716 - DNA, 15 bp, Homo sapiens
caaaatccctgagct

SEQ ID NO: 1774717 - DNA, 15 bp, Homo sapiens
aaaatccctgagctt

SEQ ID NO: 1774718 - DNA, 15 bp, Homo sapiens
aaatccctgagctta

SEQ ID NO: 1774719 - DNA, 15 bp, Homo sapiens
aatccctgagcttat

SEQ ID NO: 1774720 - DNA, 15 bp, Homo sapiens
atccctgagcttata

SEQ ID NO: 1774721 - DNA, 15 bp, Homo sapiens
tccctgagcttatat

SEQ ID NO: 1774722 - DNA, 15 bp, Homo sapiens
ccctgagcttatatt

SEQ ID NO: 1774723 - DNA, 15 bp, Homo sapiens
cctgagcttatattt

SEQ ID NO: 1774724 - DNA, 15 bp, Homo sapiens
ctgagcttatatttt

SEQ ID NO: 1774725 - DNA, 15 bp, Homo sapiens
tgagcttatatttta

SEQ ID NO: 1774726 - DNA, 15 bp, Homo sapiens
gagcttatattttat

SEQ ID NO: 1774727 - DNA, 15 bp, Homo sapiens
agcttatattttatt

SEQ ID NO: 1774728 - DNA, 15 bp, Homo sapiens
gcttatattttattt

SEQ ID NO: 1774729 - DNA, 15 bp, Homo sapiens
cttatattttatttg

SEQ ID NO: 1774730 - DNA, 15 bp, Homo sapiens
ttatattttatttgg

SEQ ID NO: 1774731 - DNA, 15 bp, Homo sapiens
tatattttatttgga

SEQ ID NO: 1774732 - DNA, 15 bp, Homo sapiens
atattttatttggag

SEQ ID NO: 1774733 - DNA, 15 bp, Homo sapiens
tattttatttggaga

SEQ ID NO: 1774734 - DNA, 15 bp, Homo sapiens
attttatttggagaa

SEQ ID NO: 1774735 - DNA, 15 bp, Homo sapiens
ttttatttggagaag

SEQ ID NO: 1774736 - DNA, 15 bp, Homo sapiens
tttatttggagaaga

SEQ ID NO: 1774737 - DNA, 15 bp, Homo sapiens
ttatttggagaagac

SEQ ID NO: 1774738 - DNA, 15 bp, Homo sapiens
tatttggagaagaca

SEQ ID NO: 1774739 - DNA, 15 bp, Homo sapiens
atttggagaagacaa

SEQ ID NO: 1774740 - DNA, 15 bp, Homo sapiens
tttggagaagacaat

SEQ ID NO: 1774741 - DNA, 15 bp, Homo sapiens
ttggagaagacaatc

SEQ ID NO: 1774742 - DNA, 15 bp, Homo sapiens
tggagaagacaatca

SEQ ID NO: 1774743 - DNA, 15 bp, Homo sapiens
ggagaagacaatcaa

SEQ ID NO: 1774744 - DNA, 15 bp, Homo sapiens
gagaagacaatcaat

SEQ ID NO: 1774745 - DNA, 15 bp, Homo sapiens
agaagacaatcaata

SEQ ID NO: 1774746 - DNA, 15 bp, Homo sapiens
gaagacaatcaataa

SEQ ID NO: 1774747 - DNA, 15 bp, Homo sapiens
aagacaatcaataaa

SEQ ID NO: 1774748 - DNA, 15 bp, Homo sapiens
agacaatcaataaat

SEQ ID NO: 1774749 - DNA, 15 bp, Homo sapiens
gacaatcaataaata

SEQ ID NO: 1774750 - DNA, 15 bp, Homo sapiens
acaatcaataaataa

SEQ ID NO: 1774751 - DNA, 15 bp, Homo sapiens
caatcaataaataaa

SEQ ID NO: 1774752 - DNA, 15 bp, Homo sapiens
aatcaataaataaac

SEQ ID NO: 1774753 - DNA, 15 bp, Homo sapiens
atcaataaataaaca

SEQ ID NO: 1774754 - DNA, 15 bp, Homo sapiens
tcaataaataaacaa

SEQ ID NO: 1774755 - DNA, 15 bp, Homo sapiens
caataaataaacaat

SEQ ID NO: 1774756 - DNA, 15 bp, Homo sapiens
aataaataaacaatt

SEQ ID NO: 1774757 - DNA, 15 bp, Homo sapiens
ataaataaacaatta

SEQ ID NO: 1774758 - DNA, 15 bp, Homo sapiens
taaataaacaattat

SEQ ID NO: 1774759 - DNA, 15 bp, Homo sapiens
aaataaacaattata

SEQ ID NO: 1774760 - DNA, 15 bp, Homo sapiens
aataaacaattatac

SEQ ID NO: 1774761 - DNA, 15 bp, Homo sapiens
ataaacaattataca

SEQ ID NO: 1774762 - DNA, 15 bp, Homo sapiens
taaacaattatacaa

SEQ ID NO: 1774763 - DNA, 15 bp, Homo sapiens
aaacaattatacaac

SEQ ID NO: 1774764 - DNA, 15 bp, Homo sapiens
aacaattatacaact

SEQ ID NO: 1774765 - DNA, 15 bp, Homo sapiens
acaattatacaactg

SEQ ID NO: 1774766 - DNA, 15 bp, Homo sapiens
caattatacaactgg

SEQ ID NO: 1774767 - DNA, 15 bp, Homo sapiens
aattatacaactggt

SEQ ID NO: 1774768 - DNA, 15 bp, Homo sapiens
attatacaactggtc

SEQ ID NO: 1774769 - DNA, 15 bp, Homo sapiens
ttatacaactggtca

SEQ ID NO: 1774770 - DNA, 15 bp, Homo sapiens
tatacaactggtcat

SEQ ID NO: 1774771 - DNA, 15 bp, Homo sapiens
atacaactggtcata

SEQ ID NO: 1774772 - DNA, 15 bp, Homo sapiens
tacaactggtcatat

SEQ ID NO: 1774773 - DNA, 15 bp, Homo sapiens
acaactggtcatatg

SEQ ID NO: 1774774 - DNA, 15 bp, Homo sapiens
caactggtcatatgg

SEQ ID NO: 1774775 - DNA, 15 bp, Homo sapiens
aactggtcatatggt

SEQ ID NO: 1774776 - DNA, 15 bp, Homo sapiens
actggtcatatggtg

SEQ ID NO: 1774777 - DNA, 15 bp, Homo sapiens
ctggtcatatggtga

SEQ ID NO: 1774778 - DNA, 15 bp, Homo sapiens
tggtcatatggtgat

SEQ ID NO: 1774779 - DNA, 15 bp, Homo sapiens
ggtcatatggtgata

SEQ ID NO: 1774780 - DNA, 15 bp, Homo sapiens
gtcatatggtgataa

SEQ ID NO: 1774781 - DNA, 15 bp, Homo sapiens
tcatatggtgataag

SEQ ID NO: 1774782 - DNA, 15 bp, Homo sapiens
catatggtgataagt

SEQ ID NO: 1774783 - DNA, 15 bp, Homo sapiens
atatggtgataagtt

SEQ ID NO: 1774784 - DNA, 15 bp, Homo sapiens
tatggtgataagttc

SEQ ID NO: 1774785 - DNA, 15 bp, Homo sapiens
atggtgataagttct

SEQ ID NO: 1774786 - DNA, 15 bp, Homo sapiens
tggtgataagttctc

SEQ ID NO: 1774787 - DNA, 15 bp, Homo sapiens
ggtgataagttctct

SEQ ID NO: 1774788 - DNA, 15 bp, Homo sapiens
gtgataagttctctg

SEQ ID NO: 1774789 - DNA, 15 bp, Homo sapiens
tgataagttctctga

SEQ ID NO: 1774790 - DNA, 15 bp, Homo sapiens
gataagttctctgaa

SEQ ID NO: 1774791 - DNA, 15 bp, Homo sapiens
ataagttctctgaag

SEQ ID NO: 1774792 - DNA, 15 bp, Homo sapiens
taagttctctgaaga

SEQ ID NO: 1774793 - DNA, 15 bp, Homo sapiens
aagttctctgaagaa

SEQ ID NO: 1774794 - DNA, 15 bp, Homo sapiens
agttctctgaagaaa

SEQ ID NO: 1774795 - DNA, 15 bp, Homo sapiens
gttctctgaagaaaa

SEQ ID NO: 1774796 - DNA, 15 bp, Homo sapiens
ttctctgaagaaaaa

SEQ ID NO: 1774797 - DNA, 15 bp, Homo sapiens
tctctgaagaaaaat

SEQ ID NO: 1774798 - DNA, 15 bp, Homo sapiens
ctctgaagaaaaata

SEQ ID NO: 1774799 - DNA, 15 bp, Homo sapiens
tctgaagaaaaataa

SEQ ID NO: 1774800 - DNA, 15 bp, Homo sapiens
ctgaagaaaaataat

SEQ ID NO: 1774801 - DNA, 15 bp, Homo sapiens
tgaagaaaaataatt

SEQ ID NO: 1774802 - DNA, 15 bp, Homo sapiens
gaagaaaaataattt

SEQ ID NO: 1774803 - DNA, 15 bp, Homo sapiens
aagaaaaataattta

SEQ ID NO: 1774804 - DNA, 15 bp, Homo sapiens
agaaaaataatttag

SEQ ID NO: 1774805 - DNA, 15 bp, Homo sapiens
gaaaaataatttagg

SEQ ID NO: 1774806 - DNA, 15 bp, Homo sapiens
aaaaataatttagga

SEQ ID NO: 1774807 - DNA, 15 bp, Homo sapiens
aaaataatttaggag

SEQ ID NO: 1774808 - DNA, 15 bp, Homo sapiens
aaataatttaggagg

SEQ ID NO: 1774809 - DNA, 15 bp, Homo sapiens
aataatttaggagga

SEQ ID NO: 1774810 - DNA, 15 bp, Homo sapiens
ataatttaggaggaa

SEQ ID NO: 1774811 - DNA, 15 bp, Homo sapiens
taatttaggaggaaa

SEQ ID NO: 1774812 - DNA, 15 bp, Homo sapiens
aatttaggaggaaaa

SEQ ID NO: 1774813 - DNA, 15 bp, Homo sapiens
atttaggaggaaaaa

SEQ ID NO: 1774814 - DNA, 15 bp, Homo sapiens
tttaggaggaaaaag

SEQ ID NO: 1774815 - DNA, 15 bp, Homo sapiens
ttaggaggaaaaagg

SEQ ID NO: 1774816 - DNA, 15 bp, Homo sapiens
taggaggaaaaaggg

SEQ ID NO: 1774817 - DNA, 15 bp, Homo sapiens
aggaggaaaaagggg

SEQ ID NO: 1774818 - DNA, 15 bp, Homo sapiens
ggaggaaaaaggggg

SEQ ID NO: 1774819 - DNA, 15 bp, Homo sapiens
gaggaaaaagggggt

SEQ ID NO: 1774820 - DNA, 15 bp, Homo sapiens
aggaaaaagggggtg

SEQ ID NO: 1774821 - DNA, 15 bp, Homo sapiens
ggaaaaagggggtgg

SEQ ID NO: 1774822 - DNA, 15 bp, Homo sapiens
gaaaaagggggtggg

SEQ ID NO: 1774823 - DNA, 15 bp, Homo sapiens
aaaaagggggtgggc

SEQ ID NO: 1774824 - DNA, 15 bp, Homo sapiens
aaaagggggtgggct

SEQ ID NO: 1774825 - DNA, 15 bp, Homo sapiens
aaagggggtgggctt

SEQ ID NO: 1774826 - DNA, 15 bp, Homo sapiens
aagggggtgggcttt

SEQ ID NO: 1774827 - DNA, 15 bp, Homo sapiens
agggggtgggctttt

SEQ ID NO: 1774828 - DNA, 15 bp, Homo sapiens
gggggtgggctttta

SEQ ID NO: 1774829 - DNA, 15 bp, Homo sapiens
ggggtgggcttttac

SEQ ID NO: 1774830 - DNA, 15 bp, Homo sapiens
gggtgggcttttact

SEQ ID NO: 1774831 - DNA, 15 bp, Homo sapiens
ggtgggcttttactg

SEQ ID NO: 1774832 - DNA, 15 bp, Homo sapiens
gtgggcttttactgt

SEQ ID NO: 1774833 - DNA, 15 bp, Homo sapiens
tgggcttttactgtt

SEQ ID NO: 1774834 - DNA, 15 bp, Homo sapiens
gggcttttactgttc

SEQ ID NO: 1774835 - DNA, 15 bp, Homo sapiens
ggcttttactgttct

SEQ ID NO: 1774836 - DNA, 15 bp, Homo sapiens
gcttttactgttcta

SEQ ID NO: 1774837 - DNA, 15 bp, Homo sapiens
cttttactgttctac

SEQ ID NO: 1774838 - DNA, 15 bp, Homo sapiens
ttttactgttctaca

SEQ ID NO: 1774839 - DNA, 15 bp, Homo sapiens
tttactgttctacat

SEQ ID NO: 1774840 - DNA, 15 bp, Homo sapiens
ttactgttctacata

SEQ ID NO: 1774841 - DNA, 15 bp, Homo sapiens
tactgttctacatag

SEQ ID NO: 1774842 - DNA, 15 bp, Homo sapiens
actgttctacatagg

SEQ ID NO: 1774843 - DNA, 15 bp, Homo sapiens
ctgttctacataggg

SEQ ID NO: 1774844 - DNA, 15 bp, Homo sapiens
tgttctacataggga

SEQ ID NO: 1774845 - DNA, 15 bp, Homo sapiens
gttctacatagggag

SEQ ID NO: 1774846 - DNA, 15 bp, Homo sapiens
ttctacatagggagg

SEQ ID NO: 1774847 - DNA, 15 bp, Homo sapiens
tctacatagggaggt

SEQ ID NO: 1774848 - DNA, 15 bp, Homo sapiens
ctacatagggaggtc

SEQ ID NO: 1774849 - DNA, 15 bp, Homo sapiens
tacatagggaggtca

SEQ ID NO: 1774850 - DNA, 15 bp, Homo sapiens
acatagggaggtcaa

SEQ ID NO: 1774851 - DNA, 15 bp, Homo sapiens
catagggaggtcaaa

SEQ ID NO: 1774852 - DNA, 15 bp, Homo sapiens
atagggaggtcaaag

SEQ ID NO: 1774853 - DNA, 15 bp, Homo sapiens
tagggaggtcaaaga

SEQ ID NO: 1774854 - DNA, 15 bp, Homo sapiens
agggaggtcaaagaa

SEQ ID NO: 1774855 - DNA, 15 bp, Homo sapiens
gggaggtcaaagaag

SEQ ID NO: 1774856 - DNA, 15 bp, Homo sapiens
ggaggtcaaagaagg

SEQ ID NO: 1774857 - DNA, 15 bp, Homo sapiens
gaggtcaaagaaggc

SEQ ID NO: 1774858 - DNA, 15 bp, Homo sapiens
aggtcaaagaaggcc

SEQ ID NO: 1774859 - DNA, 15 bp, Homo sapiens
ggtcaaagaaggcct

SEQ ID NO: 1774860 - DNA, 15 bp, Homo sapiens
gtcaaagaaggcctt

SEQ ID NO: 1774861 - DNA, 15 bp, Homo sapiens
tcaaagaaggccttg

SEQ ID NO: 1774862 - DNA, 15 bp, Homo sapiens
caaagaaggccttgc

SEQ ID NO: 1774863 - DNA, 15 bp, Homo sapiens
aaagaaggccttgct

SEQ ID NO: 1774864 - DNA, 15 bp, Homo sapiens
aagaaggccttgcta

SEQ ID NO: 1774865 - DNA, 15 bp, Homo sapiens
agaaggccttgctaa

SEQ ID NO: 1774866 - DNA, 15 bp, Homo sapiens
gaaggccttgctaat

SEQ ID NO: 1774867 - DNA, 15 bp, Homo sapiens
aaggccttgctaata

SEQ ID NO: 1774868 - DNA, 15 bp, Homo sapiens
aggccttgctaataa

SEQ ID NO: 1774869 - DNA, 15 bp, Homo sapiens
ggccttgctaataag

SEQ ID NO: 1774870 - DNA, 15 bp, Homo sapiens
gccttgctaataagg

SEQ ID NO: 1774871 - DNA, 15 bp, Homo sapiens
ccttgctaataaggg

SEQ ID NO: 1774872 - DNA, 15 bp, Homo sapiens
cttgctaataagggg

SEQ ID NO: 1774873 - DNA, 15 bp, Homo sapiens
ttgctaataagggga

SEQ ID NO: 1774874 - DNA, 15 bp, Homo sapiens
tgctaataaggggac

SEQ ID NO: 1774875 - DNA, 15 bp, Homo sapiens
gctaataaggggaca

SEQ ID NO: 1774876 - DNA, 15 bp, Homo sapiens
ctaataaggggacat

SEQ ID NO: 1774877 - DNA, 15 bp, Homo sapiens
taataaggggacatt

SEQ ID NO: 1774878 - DNA, 15 bp, Homo sapiens
aataaggggacattt

SEQ ID NO: 1774879 - DNA, 15 bp, Homo sapiens
ataaggggacatttg

SEQ ID NO: 1774880 - DNA, 15 bp, Homo sapiens
taaggggacatttga

SEQ ID NO: 1774881 - DNA, 15 bp, Homo sapiens
aaggggacatttgaa

SEQ ID NO: 1774882 - DNA, 15 bp, Homo sapiens
aggggacatttgaac

SEQ ID NO: 1774883 - DNA, 15 bp, Homo sapiens
ggggacatttgaaca

SEQ ID NO: 1774884 - DNA, 15 bp, Homo sapiens
gggacatttgaacag

SEQ ID NO: 1774885 - DNA, 15 bp, Homo sapiens
ggacatttgaacaga

SEQ ID NO: 1774886 - DNA, 15 bp, Homo sapiens
gacatttgaacagag

SEQ ID NO: 1774887 - DNA, 15 bp, Homo sapiens
acatttgaacagaga

SEQ ID NO: 1774888 - DNA, 15 bp, Homo sapiens
catttgaacagagac

SEQ ID NO: 1774889 - DNA, 15 bp, Homo sapiens
atttgaacagagact

SEQ ID NO: 1774890 - DNA, 15 bp, Homo sapiens
tttgaacagagactt

SEQ ID NO: 1774891 - DNA, 15 bp, Homo sapiens
ttgaacagagacttg

SEQ ID NO: 1774892 - DNA, 15 bp, Homo sapiens
tgaacagagacttga

SEQ ID NO: 1774893 - DNA, 15 bp, Homo sapiens
gaacagagacttgaa

SEQ ID NO: 1774894 - DNA, 15 bp, Homo sapiens
aacagagacttgaaa

SEQ ID NO: 1774895 - DNA, 15 bp, Homo sapiens
acagagacttgaaag

SEQ ID NO: 1774896 - DNA, 15 bp, Homo sapiens
cagagacttgaaaga

SEQ ID NO: 1774897 - DNA, 15 bp, Homo sapiens
agagacttgaaagaa

SEQ ID NO: 1774898 - DNA, 15 bp, Homo sapiens
gagacttgaaagaag

SEQ ID NO: 1774899 - DNA, 15 bp, Homo sapiens
agacttgaaagaagt

SEQ ID NO: 1774900 - DNA, 15 bp, Homo sapiens
gacttgaaagaagtg

SEQ ID NO: 1774901 - DNA, 15 bp, Homo sapiens
acttgaaagaagtga

SEQ ID NO: 1774902 - DNA, 15 bp, Homo sapiens
cttgaaagaagtgaa

SEQ ID NO: 1774903 - DNA, 15 bp, Homo sapiens
ttgaaagaagtgaag

SEQ ID NO: 1774904 - DNA, 15 bp, Homo sapiens
tgaaagaagtgaagg

SEQ ID NO: 1774905 - DNA, 15 bp, Homo sapiens
gaaagaagtgaagga

SEQ ID NO: 1774906 - DNA, 15 bp, Homo sapiens
aaagaagtgaaggaa

SEQ ID NO: 1774907 - DNA, 15 bp, Homo sapiens
aagaagtgaaggaat

SEQ ID NO: 1774908 - DNA, 15 bp, Homo sapiens
agaagtgaaggaatg

SEQ ID NO: 1774909 - DNA, 15 bp, Homo sapiens
gaagtgaaggaatga

SEQ ID NO: 1774910 - DNA, 15 bp, Homo sapiens
aagtgaaggaatgaa

SEQ ID NO: 1774911 - DNA, 15 bp, Homo sapiens
agtgaaggaatgaat

SEQ ID NO: 1774912 - DNA, 15 bp, Homo sapiens
gtgaaggaatgaatc

SEQ ID NO: 1774913 - DNA, 15 bp, Homo sapiens
tgaaggaatgaatca

SEQ ID NO: 1774914 - DNA, 15 bp, Homo sapiens
gaaggaatgaatcat

SEQ ID NO: 1774915 - DNA, 15 bp, Homo sapiens
aaggaatgaatcatg

SEQ ID NO: 1774916 - DNA, 15 bp, Homo sapiens
aggaatgaatcatgt

SEQ ID NO: 1774917 - DNA, 15 bp, Homo sapiens
ggaatgaatcatgtg

SEQ ID NO: 1774918 - DNA, 15 bp, Homo sapiens
gaatgaatcatgtgg

SEQ ID NO: 1774919 - DNA, 15 bp, Homo sapiens
aatgaatcatgtggt

SEQ ID NO: 1774920 - DNA, 15 bp, Homo sapiens
atgaatcatgtggtt

SEQ ID NO: 1774921 - DNA, 15 bp, Homo sapiens
tgaatcatgtggttg

SEQ ID NO: 1774922 - DNA, 15 bp, Homo sapiens
gaatcatgtggttgt

SEQ ID NO: 1774923 - DNA, 15 bp, Homo sapiens
aatcatgtggttgtc

SEQ ID NO: 1774924 - DNA, 15 bp, Homo sapiens
atcatgtggttgtct

SEQ ID NO: 1774925 - DNA, 15 bp, Homo sapiens
tcatgtggttgtctc

SEQ ID NO: 1774926 - DNA, 15 bp, Homo sapiens
catgtggttgtctca

SEQ ID NO: 1774927 - DNA, 15 bp, Homo sapiens
atgtggttgtctcag

SEQ ID NO: 1774928 - DNA, 15 bp, Homo sapiens
tgtggttgtctcagg

SEQ ID NO: 1774929 - DNA, 15 bp, Homo sapiens
gtggttgtctcaggg

SEQ ID NO: 1774930 - DNA, 15 bp, Homo sapiens
tggttgtctcaggga

SEQ ID NO: 1774931 - DNA, 15 bp, Homo sapiens
ggttgtctcagggaa

SEQ ID NO: 1774932 - DNA, 15 bp, Homo sapiens
gttgtctcagggaat

SEQ ID NO: 1774933 - DNA, 15 bp, Homo sapiens
ttgtctcagggaatt

SEQ ID NO: 1774934 - DNA, 15 bp, Homo sapiens
tgtctcagggaatta

SEQ ID NO: 1774935 - DNA, 15 bp, Homo sapiens
gtctcagggaattaa

SEQ ID NO: 1774936 - DNA, 15 bp, Homo sapiens
tctcagggaattaac

SEQ ID NO: 1774937 - DNA, 15 bp, Homo sapiens
ctcagggaattaacc

SEQ ID NO: 1774938 - DNA, 15 bp, Homo sapiens
tcagggaattaacct

SEQ ID NO: 1774939 - DNA, 15 bp, Homo sapiens
cagggaattaacctt

SEQ ID NO: 1774940 - DNA, 15 bp, Homo sapiens
agggaattaaccttt

SEQ ID NO: 1774941 - DNA, 15 bp, Homo sapiens
gggaattaaccttta

SEQ ID NO: 1774942 - DNA, 15 bp, Homo sapiens
ggaattaacctttaa

SEQ ID NO: 1774943 - DNA, 15 bp, Homo sapiens
gaattaacctttaac

SEQ ID NO: 1774944 - DNA, 15 bp, Homo sapiens
aattaacctttaact

SEQ ID NO: 1774945 - DNA, 15 bp, Homo sapiens
attaacctttaactg

SEQ ID NO: 1774946 - DNA, 15 bp, Homo sapiens
ttaacctttaactga

SEQ ID NO: 1774947 - DNA, 15 bp, Homo sapiens
taacctttaactgat

SEQ ID NO: 1774948 - DNA, 15 bp, Homo sapiens
aacctttaactgatc

SEQ ID NO: 1774949 - DNA, 15 bp, Homo sapiens
acctttaactgatca

SEQ ID NO: 1774950 - DNA, 15 bp, Homo sapiens
cctttaactgatcaa

SEQ ID NO: 1774951 - DNA, 15 bp, Homo sapiens
ctttaactgatcaac

SEQ ID NO: 1774952 - DNA, 15 bp, Homo sapiens
tttaactgatcaaca

SEQ ID NO: 1774953 - DNA, 15 bp, Homo sapiens
ttaactgatcaacat

SEQ ID NO: 1774954 - DNA, 15 bp, Homo sapiens
taactgatcaacatc

SEQ ID NO: 1774955 - DNA, 15 bp, Homo sapiens
aactgatcaacatct

SEQ ID NO: 1774956 - DNA, 15 bp, Homo sapiens
actgatcaacatctt

SEQ ID NO: 1774957 - DNA, 15 bp, Homo sapiens
ctgatcaacatcttt

SEQ ID NO: 1774958 - DNA, 15 bp, Homo sapiens
tgatcaacatcttta

SEQ ID NO: 1774959 - DNA, 15 bp, Homo sapiens
gatcaacatctttaa

SEQ ID NO: 1774960 - DNA, 15 bp, Homo sapiens
atcaacatctttaaa

SEQ ID NO: 1774961 - DNA, 15 bp, Homo sapiens
tcaacatctttaaaa

SEQ ID NO: 1774962 - DNA, 15 bp, Homo sapiens
caacatctttaaaag

SEQ ID NO: 1774963 - DNA, 15 bp, Homo sapiens
aacatctttaaaagg

SEQ ID NO: 1774964 - DNA, 15 bp, Homo sapiens
acatctttaaaaggc

SEQ ID NO: 1774965 - DNA, 15 bp, Homo sapiens
catctttaaaaggcc

SEQ ID NO: 1774966 - DNA, 15 bp, Homo sapiens
atctttaaaaggcct

SEQ ID NO: 1774967 - DNA, 15 bp, Homo sapiens
tctttaaaaggcctt

SEQ ID NO: 1774968 - DNA, 15 bp, Homo sapiens
ctttaaaaggccttc

SEQ ID NO: 1774969 - DNA, 15 bp, Homo sapiens
tttaaaaggccttct

SEQ ID NO: 1774970 - DNA, 15 bp, Homo sapiens
ttaaaaggccttctc

SEQ ID NO: 1774971 - DNA, 15 bp, Homo sapiens
taaaaggccttctcc

SEQ ID NO: 1774972 - DNA, 15 bp, Homo sapiens
aaaaggccttctcca

SEQ ID NO: 1774973 - DNA, 15 bp, Homo sapiens
aaaggccttctccaa

SEQ ID NO: 1774974 - DNA, 15 bp, Homo sapiens
aaggccttctccaat

SEQ ID NO: 1774975 - DNA, 15 bp, Homo sapiens
aggccttctccaatc

SEQ ID NO: 1774976 - DNA, 15 bp, Homo sapiens
ggccttctccaatct

SEQ ID NO: 1774977 - DNA, 15 bp, Homo sapiens
gccttctccaatctg

SEQ ID NO: 1774978 - DNA, 15 bp, Homo sapiens
ccttctccaatctgt

SEQ ID NO: 1774979 - DNA, 15 bp, Homo sapiens
cttctccaatctgta

SEQ ID NO: 1774980 - DNA, 15 bp, Homo sapiens
ttctccaatctgtat

SEQ ID NO: 1774981 - DNA, 15 bp, Homo sapiens
tctccaatctgtatt

SEQ ID NO: 1774982 - DNA, 15 bp, Homo sapiens
ctccaatctgtattt

SEQ ID NO: 1774983 - DNA, 15 bp, Homo sapiens
tccaatctgtatttc

SEQ ID NO: 1774984 - DNA, 15 bp, Homo sapiens
ccaatctgtatttcc

SEQ ID NO: 1774985 - DNA, 15 bp, Homo sapiens
caatctgtatttcca

SEQ ID NO: 1774986 - DNA, 15 bp, Homo sapiens
aatctgtatttccag

SEQ ID NO: 1774987 - DNA, 15 bp, Homo sapiens
atctgtatttccagc

SEQ ID NO: 1774988 - DNA, 15 bp, Homo sapiens
tctgtatttccagct

SEQ ID NO: 1774989 - DNA, 15 bp, Homo sapiens
ctgtatttccagctc

SEQ ID NO: 1774990 - DNA, 15 bp, Homo sapiens
tgtatttccagctca

SEQ ID NO: 1774991 - DNA, 15 bp, Homo sapiens
gtatttccagctcac

SEQ ID NO: 1774992 - DNA, 15 bp, Homo sapiens
tatttccagctcacc

SEQ ID NO: 1774993 - DNA, 15 bp, Homo sapiens
atttccagctcacct

SEQ ID NO: 1774994 - DNA, 15 bp, Homo sapiens
tttccagctcacctc

SEQ ID NO: 1774995 - DNA, 15 bp, Homo sapiens
ttccagctcacctcc

SEQ ID NO: 1774996 - DNA, 15 bp, Homo sapiens
tccagctcacctccc

SEQ ID NO: 1774997 - DNA, 15 bp, Homo sapiens
ccagctcacctccca

SEQ ID NO: 1774998 - DNA, 15 bp, Homo sapiens
cagctcacctcccag

SEQ ID NO: 1774999 - DNA, 15 bp, Homo sapiens
agctcacctcccaga

SEQ ID NO: 1775000 - DNA, 15 bp, Homo sapiens
gctcacctcccagaa

SEQ ID NO: 1775001 - DNA, 15 bp, Homo sapiens
ctcacctcccagaaa

SEQ ID NO: 1775002 - DNA, 15 bp, Homo sapiens
tcacctcccagaaat

SEQ ID NO: 1775003 - DNA, 15 bp, Homo sapiens
cacctcccagaaatt

SEQ ID NO: 1775004 - DNA, 15 bp, Homo sapiens
acctcccagaaattc

SEQ ID NO: 1775005 - DNA, 15 bp, Homo sapiens
cctcccagaaattca

SEQ ID NO: 1775006 - DNA, 15 bp, Homo sapiens
ctcccagaaattcac

SEQ ID NO: 1775007 - DNA, 15 bp, Homo sapiens
tcccagaaattcact

SEQ ID NO: 1775008 - DNA, 15 bp, Homo sapiens
cccagaaattcactc

SEQ ID NO: 1775009 - DNA, 15 bp, Homo sapiens
ccagaaattcactca

SEQ ID NO: 1775010 - DNA, 15 bp, Homo sapiens
cagaaattcactcac

SEQ ID NO: 1775011 - DNA, 15 bp, Homo sapiens
agaaattcactcacc

SEQ ID NO: 1775012 - DNA, 15 bp, Homo sapiens
gaaattcactcacca

SEQ ID NO: 1775013 - DNA, 15 bp, Homo sapiens
aaattcactcaccat

SEQ ID NO: 1775014 - DNA, 15 bp, Homo sapiens
aattcactcaccatg

SEQ ID NO: 1775015 - DNA, 15 bp, Homo sapiens
attcactcaccatgt

SEQ ID NO: 1775016 - DNA, 15 bp, Homo sapiens
ttcactcaccatgtt

SEQ ID NO: 1775017 - DNA, 15 bp, Homo sapiens
tcactcaccatgttc

SEQ ID NO: 1775018 - DNA, 15 bp, Homo sapiens
cactcaccatgttca

SEQ ID NO: 1775019 - DNA, 15 bp, Homo sapiens
actcaccatgttcat

SEQ ID NO: 1775020 - DNA, 15 bp, Homo sapiens
ctcaccatgttcatg

SEQ ID NO: 1775021 - DNA, 15 bp, Homo sapiens
tcaccatgttcatgt

SEQ ID NO: 1775022 - DNA, 15 bp, Homo sapiens
caccatgttcatgtc

SEQ ID NO: 1775023 - DNA, 15 bp, Homo sapiens
accatgttcatgtcc

SEQ ID NO: 1775024 - DNA, 15 bp, Homo sapiens
ccatgttcatgtccc

SEQ ID NO: 1775025 - DNA, 15 bp, Homo sapiens
catgttcatgtcccc

SEQ ID NO: 1775026 - DNA, 15 bp, Homo sapiens
atgttcatgtcccca

SEQ ID NO: 1775027 - DNA, 15 bp, Homo sapiens
tgttcatgtccccaa

SEQ ID NO: 1775028 - DNA, 15 bp, Homo sapiens
gttcatgtccccaag

SEQ ID NO: 1775029 - DNA, 15 bp, Homo sapiens
ttcatgtccccaaga

SEQ ID NO: 1775030 - DNA, 15 bp, Homo sapiens
tcatgtccccaagat

SEQ ID NO: 1775031 - DNA, 15 bp, Homo sapiens
catgtccccaagatc

SEQ ID NO: 1775032 - DNA, 15 bp, Homo sapiens
atgtccccaagatct

SEQ ID NO: 1775033 - DNA, 15 bp, Homo sapiens
tgtccccaagatctt

SEQ ID NO: 1775034 - DNA, 15 bp, Homo sapiens
gtccccaagatcttt

SEQ ID NO: 1775035 - DNA, 15 bp, Homo sapiens
tccccaagatctttg

SEQ ID NO: 1775036 - DNA, 15 bp, Homo sapiens
ccccaagatctttgg

SEQ ID NO: 1775037 - DNA, 15 bp, Homo sapiens
cccaagatctttggg

SEQ ID NO: 1775038 - DNA, 15 bp, Homo sapiens
ccaagatctttgggg

SEQ ID NO: 1775039 - DNA, 15 bp, Homo sapiens
caagatctttggggc

SEQ ID NO: 1775040 - DNA, 15 bp, Homo sapiens
aagatctttggggca

SEQ ID NO: 1775041 - DNA, 15 bp, Homo sapiens
agatctttggggcaa

SEQ ID NO: 1775042 - DNA, 15 bp, Homo sapiens
gatctttggggcaaa

SEQ ID NO: 1775043 - DNA, 15 bp, Homo sapiens
atctttggggcaaat

SEQ ID NO: 1775044 - DNA, 15 bp, Homo sapiens
tctttggggcaaata

SEQ ID NO: 1775045 - DNA, 15 bp, Homo sapiens
ctttggggcaaatag

SEQ ID NO: 1775046 - DNA, 15 bp, Homo sapiens
tttggggcaaataga

SEQ ID NO: 1775047 - DNA, 15 bp, Homo sapiens
ttggggcaaatagaa

SEQ ID NO: 1775048 - DNA, 15 bp, Homo sapiens
tggggcaaatagaaa

SEQ ID NO: 1775049 - DNA, 15 bp, Homo sapiens
ggggcaaatagaaat

SEQ ID NO: 1775050 - DNA, 15 bp, Homo sapiens
gggcaaatagaaatt

SEQ ID NO: 1775051 - DNA, 15 bp, Homo sapiens
ggcaaatagaaattt

SEQ ID NO: 1775052 - DNA, 15 bp, Homo sapiens
gcaaatagaaatttc

SEQ ID NO: 1775053 - DNA, 15 bp, Homo sapiens
caaatagaaatttct

SEQ ID NO: 1775054 - DNA, 15 bp, Homo sapiens
aaatagaaatttcta

SEQ ID NO: 1775055 - DNA, 15 bp, Homo sapiens
aatagaaatttctaa

SEQ ID NO: 1775056 - DNA, 15 bp, Homo sapiens
atagaaatttctaaa

SEQ ID NO: 1775057 - DNA, 15 bp, Homo sapiens
tagaaatttctaaac

SEQ ID NO: 1775058 - DNA, 15 bp, Homo sapiens
agaaatttctaaaca

SEQ ID NO: 1775059 - DNA, 15 bp, Homo sapiens
gaaatttctaaacag

SEQ ID NO: 1775060 - DNA, 15 bp, Homo sapiens
aaatttctaaacagt

SEQ ID NO: 1775061 - DNA, 15 bp, Homo sapiens
aatttctaaacagta

SEQ ID NO: 1775062 - DNA, 15 bp, Homo sapiens
atttctaaacagtat

SEQ ID NO: 1775063 - DNA, 15 bp, Homo sapiens
tttctaaacagtatt

SEQ ID NO: 1775064 - DNA, 15 bp, Homo sapiens
ttctaaacagtattt

SEQ ID NO: 1775065 - DNA, 15 bp, Homo sapiens
tctaaacagtatttc

SEQ ID NO: 1775066 - DNA, 15 bp, Homo sapiens
ctaaacagtatttca

SEQ ID NO: 1775067 - DNA, 15 bp, Homo sapiens
taaacagtatttcaa

SEQ ID NO: 1775068 - DNA, 15 bp, Homo sapiens
aaacagtatttcaac

SEQ ID NO: 1775069 - DNA, 15 bp, Homo sapiens
aacagtatttcaact

SEQ ID NO: 1775070 - DNA, 15 bp, Homo sapiens
acagtatttcaactt

SEQ ID NO: 1775071 - DNA, 15 bp, Homo sapiens
cagtatttcaacttg

SEQ ID NO: 1775072 - DNA, 15 bp, Homo sapiens
agtatttcaacttgg

SEQ ID NO: 1775073 - DNA, 15 bp, Homo sapiens
gtatttcaacttggt

SEQ ID NO: 1775074 - DNA, 15 bp, Homo sapiens
tatttcaacttggta

SEQ ID NO: 1775075 - DNA, 15 bp, Homo sapiens
atttcaacttggtaa

SEQ ID NO: 1775076 - DNA, 15 bp, Homo sapiens
tttcaacttggtaag

SEQ ID NO: 1775077 - DNA, 15 bp, Homo sapiens
ttcaacttggtaaga

SEQ ID NO: 1775078 - DNA, 15 bp, Homo sapiens
tcaacttggtaagat

SEQ ID NO: 1775079 - DNA, 15 bp, Homo sapiens
caacttggtaagatt

SEQ ID NO: 1775080 - DNA, 15 bp, Homo sapiens
aacttggtaagattc

SEQ ID NO: 1775081 - DNA, 15 bp, Homo sapiens
acttggtaagattct

SEQ ID NO: 1775082 - DNA, 15 bp, Homo sapiens
cttggtaagattcta

SEQ ID NO: 1775083 - DNA, 15 bp, Homo sapiens
ttggtaagattctac

SEQ ID NO: 1775084 - DNA, 15 bp, Homo sapiens
tggtaagattctaca

SEQ ID NO: 1775085 - DNA, 15 bp, Homo sapiens
ggtaagattctacat

SEQ ID NO: 1775086 - DNA, 15 bp, Homo sapiens
gtaagattctacatt

SEQ ID NO: 1775087 - DNA, 15 bp, Homo sapiens
taagattctacattt

SEQ ID NO: 1775088 - DNA, 15 bp, Homo sapiens
aagattctacatttc

SEQ ID NO: 1775089 - DNA, 15 bp, Homo sapiens
agattctacatttct

SEQ ID NO: 1775090 - DNA, 15 bp, Homo sapiens
gattctacatttctg

SEQ ID NO: 1775091 - DNA, 15 bp, Homo sapiens
attctacatttctgc

SEQ ID NO: 1775092 - DNA, 15 bp, Homo sapiens
ttctacatttctgct

SEQ ID NO: 1775093 - DNA, 15 bp, Homo sapiens
tctacatttctgctt

SEQ ID NO: 1775094 - DNA, 15 bp, Homo sapiens
ctacatttctgcttc

SEQ ID NO: 1775095 - DNA, 15 bp, Homo sapiens
tacatttctgcttct

SEQ ID NO: 1775096 - DNA, 15 bp, Homo sapiens
acatttctgcttctg

SEQ ID NO: 1775097 - DNA, 15 bp, Homo sapiens
catttctgcttctga

SEQ ID NO: 1775098 - DNA, 15 bp, Homo sapiens
atttctgcttctgat

SEQ ID NO: 1775099 - DNA, 15 bp, Homo sapiens
tttctgcttctgatt

SEQ ID NO: 1775100 - DNA, 15 bp, Homo sapiens
ttctgcttctgattc

SEQ ID NO: 1775101 - DNA, 15 bp, Homo sapiens
tctgcttctgattct

SEQ ID NO: 1775102 - DNA, 15 bp, Homo sapiens
ctgcttctgattctt

SEQ ID NO: 1775103 - DNA, 15 bp, Homo sapiens
tgcttctgattctta

SEQ ID NO: 1775104 - DNA, 15 bp, Homo sapiens
gcttctgattcttat

SEQ ID NO: 1775105 - DNA, 15 bp, Homo sapiens
cttctgattcttatt

SEQ ID NO: 1775106 - DNA, 15 bp, Homo sapiens
ttctgattcttattt

SEQ ID NO: 1775107 - DNA, 15 bp, Homo sapiens
tctgattcttatttt

SEQ ID NO: 1775108 - DNA, 15 bp, Homo sapiens
ctgattcttattttt

SEQ ID NO: 1775109 - DNA, 15 bp, Homo sapiens
tgattcttatttttc

SEQ ID NO: 1775110 - DNA, 15 bp, Homo sapiens
gattcttatttttca

SEQ ID NO: 1775111 - DNA, 15 bp, Homo sapiens
attcttatttttcat

SEQ ID NO: 1775112 - DNA, 15 bp, Homo sapiens
ttcttatttttcatg

SEQ ID NO: 1775113 - DNA, 15 bp, Homo sapiens
tcttatttttcatgg

SEQ ID NO: 1775114 - DNA, 15 bp, Homo sapiens
cttatttttcatggc

SEQ ID NO: 1775115 - DNA, 15 bp, Homo sapiens
ttatttttcatggca

SEQ ID NO: 1775116 - DNA, 15 bp, Homo sapiens
tatttttcatggcac

SEQ ID NO: 1775117 - DNA, 15 bp, Homo sapiens
atttttcatggcacc

SEQ ID NO: 1775118 - DNA, 15 bp, Homo sapiens
tttttcatggcacct

SEQ ID NO: 1775119 - DNA, 15 bp, Homo sapiens
ttttcatggcacctc

SEQ ID NO: 1775120 - DNA, 15 bp, Homo sapiens
tttcatggcacctca

SEQ ID NO: 1775121 - DNA, 15 bp, Homo sapiens
ttcatggcacctcat

SEQ ID NO: 1775122 - DNA, 15 bp, Homo sapiens
tcatggcacctcata

SEQ ID NO: 1775123 - DNA, 15 bp, Homo sapiens
catggcacctcataa

SEQ ID NO: 1775124 - DNA, 15 bp, Homo sapiens
atggcacctcataaa

SEQ ID NO: 1775125 - DNA, 15 bp, Homo sapiens
tggcacctcataaaa

SEQ ID NO: 1775126 - DNA, 15 bp, Homo sapiens
ggcacctcataaaat

SEQ ID NO: 1775127 - DNA, 15 bp, Homo sapiens
gcacctcataaaata

SEQ ID NO: 1775128 - DNA, 15 bp, Homo sapiens
cacctcataaaatag

SEQ ID NO: 1775129 - DNA, 15 bp, Homo sapiens
acctcataaaatagg

SEQ ID NO: 1775130 - DNA, 15 bp, Homo sapiens
cctcataaaatagga

SEQ ID NO: 1775131 - DNA, 15 bp, Homo sapiens
ctcataaaataggaa

SEQ ID NO: 1775132 - DNA, 15 bp, Homo sapiens
tcataaaataggaat

SEQ ID NO: 1775133 - DNA, 15 bp, Homo sapiens
cataaaataggaatg

SEQ ID NO: 1775134 - DNA, 15 bp, Homo sapiens
ataaaataggaatgc

SEQ ID NO: 1775135 - DNA, 15 bp, Homo sapiens
taaaataggaatgca

SEQ ID NO: 1775136 - DNA, 15 bp, Homo sapiens
aaaataggaatgcat

SEQ ID NO: 1775137 - DNA, 15 bp, Homo sapiens
aaataggaatgcatg

SEQ ID NO: 1775138 - DNA, 15 bp, Homo sapiens
aataggaatgcatgt

SEQ ID NO: 1775139 - DNA, 15 bp, Homo sapiens
ataggaatgcatgtt

SEQ ID NO: 1775140 - DNA, 15 bp, Homo sapiens
taggaatgcatgttt

SEQ ID NO: 1775141 - DNA, 15 bp, Homo sapiens
aggaatgcatgtttt

SEQ ID NO: 1775142 - DNA, 15 bp, Homo sapiens
ggaatgcatgttttg

SEQ ID NO: 1775143 - DNA, 15 bp, Homo sapiens
gaatgcatgttttgt

SEQ ID NO: 1775144 - DNA, 15 bp, Homo sapiens
aatgcatgttttgtt

SEQ ID NO: 1775145 - DNA, 15 bp, Homo sapiens
atgcatgttttgttt

SEQ ID NO: 1775146 - DNA, 15 bp, Homo sapiens
tgcatgttttgtttt

SEQ ID NO: 1775147 - DNA, 15 bp, Homo sapiens
gcatgttttgttttt

SEQ ID NO: 1775148 - DNA, 15 bp, Homo sapiens
catgttttgtttttt

SEQ ID NO: 1775149 - DNA, 15 bp, Homo sapiens
tgttttgtttttttg

SEQ ID NO: 1775150 - DNA, 15 bp, Homo sapiens
gttttgtttttttgt

SEQ ID NO: 1775151 - DNA, 15 bp, Homo sapiens
tgtttttttttttgg

SEQ ID NO: 1775152 - DNA, 15 bp, Homo sapiens
gtttttttttttggg

SEQ ID NO: 1775153 - DNA, 15 bp, Homo sapiens
tttttttttttgggc

SEQ ID NO: 1775154 - DNA, 15 bp, Homo sapiens
ttttttttttgggct

SEQ ID NO: 1775155 - DNA, 15 bp, Homo sapiens
tttttttttgggcta

SEQ ID NO: 1775156 - DNA, 15 bp, Homo sapiens
ttttttttgggctac

SEQ ID NO: 1775157 - DNA, 15 bp, Homo sapiens
tttttttgggctact

SEQ ID NO: 1775158 - DNA, 15 bp, Homo sapiens
ttttttgggctactt

SEQ ID NO: 1775159 - DNA, 15 bp, Homo sapiens
tttttgggctacttg

SEQ ID NO: 1775160 - DNA, 15 bp, Homo sapiens
ttttgggctacttgc

SEQ ID NO: 1775161 - DNA, 15 bp, Homo sapiens
tttgggctacttgcc

SEQ ID NO: 1775162 - DNA, 15 bp, Homo sapiens
ttgggctacttgcca

SEQ ID NO: 1775163 - DNA, 15 bp, Homo sapiens
tgggctacttgccag

SEQ ID NO: 1775164 - DNA, 15 bp, Homo sapiens
gggctacttgccagt

SEQ ID NO: 1775165 - DNA, 15 bp, Homo sapiens
ggctacttgccagtg

SEQ ID NO: 1775166 - DNA, 15 bp, Homo sapiens
gctacttgccagtgt

SEQ ID NO: 1775167 - DNA, 15 bp, Homo sapiens
ctacttgccagtgtt

SEQ ID NO: 1775168 - DNA, 15 bp, Homo sapiens
tacttgccagtgttc

SEQ ID NO: 1775169 - DNA, 15 bp, Homo sapiens
acttgccagtgttct

SEQ ID NO: 1775170 - DNA, 15 bp, Homo sapiens
cttgccagtgttctg

SEQ ID NO: 1775171 - DNA, 15 bp, Homo sapiens
ttgccagtgttctga

SEQ ID NO: 1775172 - DNA, 15 bp, Homo sapiens
tgccagtgttctgaa

SEQ ID NO: 1775173 - DNA, 15 bp, Homo sapiens
gccagtgttctgaaa

SEQ ID NO: 1775174 - DNA, 15 bp, Homo sapiens
ccagtgttctgaaac

SEQ ID NO: 1775175 - DNA, 15 bp, Homo sapiens
cagtgttctgaaact

SEQ ID NO: 1775176 - DNA, 15 bp, Homo sapiens
agtgttctgaaacta

SEQ ID NO: 1775177 - DNA, 15 bp, Homo sapiens
gtgttctgaaactaa

SEQ ID NO: 1775178 - DNA, 15 bp, Homo sapiens
tgttctgaaactaaa

SEQ ID NO: 1775179 - DNA, 15 bp, Homo sapiens
gttctgaaactaaat

SEQ ID NO: 1775180 - DNA, 15 bp, Homo sapiens
ttctgaaactaaata

SEQ ID NO: 1775181 - DNA, 15 bp, Homo sapiens
tctgaaactaaatac

SEQ ID NO: 1775182 - DNA, 15 bp, Homo sapiens
ctgaaactaaatact

SEQ ID NO: 1775183 - DNA, 15 bp, Homo sapiens
tgaaactaaatactt

SEQ ID NO: 1775184 - DNA, 15 bp, Homo sapiens
gaaactaaatacttc

SEQ ID NO: 1775185 - DNA, 15 bp, Homo sapiens
aaactaaatacttct

SEQ ID NO: 1775186 - DNA, 15 bp, Homo sapiens
aactaaatacttctc

SEQ ID NO: 1775187 - DNA, 15 bp, Homo sapiens
actaaatacttctcg

SEQ ID NO: 1775188 - DNA, 15 bp, Homo sapiens
ctaaatacttctcgg

SEQ ID NO: 1775189 - DNA, 15 bp, Homo sapiens
taaatacttctcgga

SEQ ID NO: 1775190 - DNA, 15 bp, Homo sapiens
aaatacttctcggag

SEQ ID NO: 1775191 - DNA, 15 bp, Homo sapiens
aatacttctcggaga

SEQ ID NO: 1775192 - DNA, 15 bp, Homo sapiens
atacttctcggagag

SEQ ID NO: 1775193 - DNA, 15 bp, Homo sapiens
tacttctcggagagt

SEQ ID NO: 1775194 - DNA, 15 bp, Homo sapiens
acttctcggagagta

SEQ ID NO: 1775195 - DNA, 15 bp, Homo sapiens
cttctcggagagtag

SEQ ID NO: 1775196 - DNA, 15 bp, Homo sapiens
ttctcggagagtagc

SEQ ID NO: 1775197 - DNA, 15 bp, Homo sapiens
tctcggagagtagct

SEQ ID NO: 1775198 - DNA, 15 bp, Homo sapiens
ctcggagagtagctg

SEQ ID NO: 1775199 - DNA, 15 bp, Homo sapiens
tcggagagtagctgt

SEQ ID NO: 1775200 - DNA, 15 bp, Homo sapiens
cggagagtagctgtc

SEQ ID NO: 1775201 - DNA, 15 bp, Homo sapiens
ggagagtagctgtct

SEQ ID NO: 1775202 - DNA, 15 bp, Homo sapiens
gagagtagctgtctc

SEQ ID NO: 1775203 - DNA, 15 bp, Homo sapiens
agagtagctgtctct

SEQ ID NO: 1775204 - DNA, 15 bp, Homo sapiens
gagtagctgtctctc

SEQ ID NO: 1775205 - DNA, 15 bp, Homo sapiens
agtagctgtctctca

SEQ ID NO: 1775206 - DNA, 15 bp, Homo sapiens
gtagctgtctctcat

SEQ ID NO: 1775207 - DNA, 15 bp, Homo sapiens
tagctgtctctcatt

SEQ ID NO: 1775208 - DNA, 15 bp, Homo sapiens
agctgtctctcatta

SEQ ID NO: 1775209 - DNA, 15 bp, Homo sapiens
gctgtctctcattaa

SEQ ID NO: 1775210 - DNA, 15 bp, Homo sapiens
ctgtctctcattaaa

SEQ ID NO: 1775211 - DNA, 15 bp, Homo sapiens
tgtctctcattaaag

SEQ ID NO: 1775212 - DNA, 15 bp, Homo sapiens
gtctctcattaaaga

SEQ ID NO: 1775213 - DNA, 15 bp, Homo sapiens
tctctcattaaagag

SEQ ID NO: 1775214 - DNA, 15 bp, Homo sapiens
ctctcattaaagagc

SEQ ID NO: 1775215 - DNA, 15 bp, Homo sapiens
tctcattaaagagcc

SEQ ID NO: 1775216 - DNA, 15 bp, Homo sapiens
ctcattaaagagccc

SEQ ID NO: 1775217 - DNA, 15 bp, Homo sapiens
tcattaaagagcccc

SEQ ID NO: 1775218 - DNA, 15 bp, Homo sapiens
cattaaagagcccca

SEQ ID NO: 1775219 - DNA, 15 bp, Homo sapiens
attaaagagccccag

SEQ ID NO: 1775220 - DNA, 15 bp, Homo sapiens
ttaaagagccccaga

SEQ ID NO: 1775221 - DNA, 15 bp, Homo sapiens
taaagagccccagat

SEQ ID NO: 1775222 - DNA, 15 bp, Homo sapiens
aaagagccccagatc

SEQ ID NO: 1775223 - DNA, 15 bp, Homo sapiens
aagagccccagatca

SEQ ID NO: 1775224 - DNA, 15 bp, Homo sapiens
agagccccagatcaa

SEQ ID NO: 1775225 - DNA, 15 bp, Homo sapiens
gagccccagatcaac

SEQ ID NO: 1775226 - DNA, 15 bp, Homo sapiens
agccccagatcaaca

SEQ ID NO: 1775227 - DNA, 15 bp, Homo sapiens
gccccagatcaacag

SEQ ID NO: 1775228 - DNA, 15 bp, Homo sapiens
ccccagatcaacagt

SEQ ID NO: 1775229 - DNA, 15 bp, Homo sapiens
cccagatcaacagtt

SEQ ID NO: 1775230 - DNA, 15 bp, Homo sapiens
ccagatcaacagttc

SEQ ID NO: 1775231 - DNA, 15 bp, Homo sapiens
cagatcaacagttcc

SEQ ID NO: 1775232 - DNA, 15 bp, Homo sapiens
agatcaacagttcca

SEQ ID NO: 1775233 - DNA, 15 bp, Homo sapiens
gatcaacagttccat

SEQ ID NO: 1775234 - DNA, 15 bp, Homo sapiens
atcaacagttccatt

SEQ ID NO: 1775235 - DNA, 15 bp, Homo sapiens
tcaacagttccattt

SEQ ID NO: 1775236 - DNA, 15 bp, Homo sapiens
caacagttccatttc

SEQ ID NO: 1775237 - DNA, 15 bp, Homo sapiens
aacagttccatttca

SEQ ID NO: 1775238 - DNA, 15 bp, Homo sapiens
acagttccatttcag

SEQ ID NO: 1775239 - DNA, 15 bp, Homo sapiens
cagttccatttcagt

SEQ ID NO: 1775240 - DNA, 15 bp, Homo sapiens
agttccatttcagtc

SEQ ID NO: 1775241 - DNA, 15 bp, Homo sapiens
gttccatttcagtca

SEQ ID NO: 1775242 - DNA, 15 bp, Homo sapiens
ttccatttcagtcac

SEQ ID NO: 1775243 - DNA, 15 bp, Homo sapiens
tccatttcagtcaca

SEQ ID NO: 1775244 - DNA, 15 bp, Homo sapiens
ccatttcagtcacat

SEQ ID NO: 1775245 - DNA, 15 bp, Homo sapiens
catttcagtcacatt

SEQ ID NO: 1775246 - DNA, 15 bp, Homo sapiens
ttcagtcacattcca

SEQ ID NO: 1775247 - DNA, 15 bp, Homo sapiens
tcagtcacattccac

SEQ ID NO: 1775248 - DNA, 15 bp, Homo sapiens
cagtcacattccacc

SEQ ID NO: 1775249 - DNA, 15 bp, Homo sapiens
agtcacattccaccc

SEQ ID NO: 1775250 - DNA, 15 bp, Homo sapiens
gtcacattccaccct

SEQ ID NO: 1775251 - DNA, 15 bp, Homo sapiens
tcacattccaccctg

SEQ ID NO: 1775252 - DNA, 15 bp, Homo sapiens
cacattccaccctga

SEQ ID NO: 1775253 - DNA, 15 bp, Homo sapiens
acattccaccctgac

SEQ ID NO: 1775254 - DNA, 15 bp, Homo sapiens
cattccaccctgact

SEQ ID NO: 1775255 - DNA, 15 bp, Homo sapiens
attccaccctgactt

SEQ ID NO: 1775256 - DNA, 15 bp, Homo sapiens
ttccaccctgacttg

SEQ ID NO: 1775257 - DNA, 15 bp, Homo sapiens
tccaccctgacttgt

SEQ ID NO: 1775258 - DNA, 15 bp, Homo sapiens
ccaccctgacttgtc

SEQ ID NO: 1775259 - DNA, 15 bp, Homo sapiens
caccctgacttgtct

SEQ ID NO: 1775260 - DNA, 15 bp, Homo sapiens
accctgacttgtctc

SEQ ID NO: 1775261 - DNA, 15 bp, Homo sapiens
ccctgacttgtctct

SEQ ID NO: 1775262 - DNA, 15 bp, Homo sapiens
cctgacttgtctctt

SEQ ID NO: 1775263 - DNA, 15 bp, Homo sapiens
ctgacttgtctcttc

SEQ ID NO: 1775264 - DNA, 15 bp, Homo sapiens
tgacttgtctcttct

SEQ ID NO: 1775265 - DNA, 15 bp, Homo sapiens
gacttgtctcttctc

SEQ ID NO: 1775266 - DNA, 15 bp, Homo sapiens
acttgtctcttctca

SEQ ID NO: 1775267 - DNA, 15 bp, Homo sapiens
cttgtctcttctcac

SEQ ID NO: 1775268 - DNA, 15 bp, Homo sapiens
ttgtctcttctcacc

SEQ ID NO: 1775269 - DNA, 15 bp, Homo sapiens
tgtctcttctcacca

SEQ ID NO: 1775270 - DNA, 15 bp, Homo sapiens
gtctcttctcaccat

SEQ ID NO: 1775271 - DNA, 15 bp, Homo sapiens
tctcttctcaccatt

SEQ ID NO: 1775272 - DNA, 15 bp, Homo sapiens
ctcttctcaccattc

SEQ ID NO: 1775273 - DNA, 15 bp, Homo sapiens
tcttctcaccattcg

SEQ ID NO: 1775274 - DNA, 15 bp, Homo sapiens
cttctcaccattcgg

SEQ ID NO: 1775275 - DNA, 15 bp, Homo sapiens
ttctcaccattcggt

SEQ ID NO: 1775276 - DNA, 15 bp, Homo sapiens
tctcaccattcggtg

SEQ ID NO: 1775277 - DNA, 15 bp, Homo sapiens
ctcaccattcggtga

SEQ ID NO: 1775278 - DNA, 15 bp, Homo sapiens
tcaccattcggtgat

SEQ ID NO: 1775279 - DNA, 15 bp, Homo sapiens
caccattcggtgatt

SEQ ID NO: 1775280 - DNA, 15 bp, Homo sapiens
accattcggtgatta

SEQ ID NO: 1775281 - DNA, 15 bp, Homo sapiens
ccattcggtgattag

SEQ ID NO: 1775282 - DNA, 15 bp, Homo sapiens
cattcggtgattagg

SEQ ID NO: 1775283 - DNA, 15 bp, Homo sapiens
attcggtgattaggt

SEQ ID NO: 1775284 - DNA, 15 bp, Homo sapiens
ttcggtgattaggtt

SEQ ID NO: 1775285 - DNA, 15 bp, Homo sapiens
tcggtgattaggttc

SEQ ID NO: 1775286 - DNA, 15 bp, Homo sapiens
cggtgattaggttca

SEQ ID NO: 1775287 - DNA, 15 bp, Homo sapiens
ggtgattaggttcat

SEQ ID NO: 1775288 - DNA, 15 bp, Homo sapiens
gtgattaggttcatg

SEQ ID NO: 1775289 - DNA, 15 bp, Homo sapiens
tgattaggttcatgt

SEQ ID NO: 1775290 - DNA, 15 bp, Homo sapiens
gattaggttcatgtc

SEQ ID NO: 1775291 - DNA, 15 bp, Homo sapiens
attaggttcatgtct

SEQ ID NO: 1775292 - DNA, 15 bp, Homo sapiens
ttaggttcatgtctt

SEQ ID NO: 1775293 - DNA, 15 bp, Homo sapiens
taggttcatgtcttt

SEQ ID NO: 1775294 - DNA, 15 bp, Homo sapiens
aggttcatgtctttt

SEQ ID NO: 1775295 - DNA, 15 bp, Homo sapiens
ggttcatgtctttta

SEQ ID NO: 1775296 - DNA, 15 bp, Homo sapiens
gttcatgtcttttac

SEQ ID NO: 1775297 - DNA, 15 bp, Homo sapiens
ttcatgtcttttact

SEQ ID NO: 1775298 - DNA, 15 bp, Homo sapiens
tcatgtcttttactc

SEQ ID NO: 1775299 - DNA, 15 bp, Homo sapiens
catgtcttttactct

SEQ ID NO: 1775300 - DNA, 15 bp, Homo sapiens
atgtcttttactctt

SEQ ID NO: 1775301 - DNA, 15 bp, Homo sapiens
tgtcttttactcttt

SEQ ID NO: 1775302 - DNA, 15 bp, Homo sapiens
gtcttttactcttta

SEQ ID NO: 1775303 - DNA, 15 bp, Homo sapiens
tcttttactctttaa

SEQ ID NO: 1775304 - DNA, 15 bp, Homo sapiens
cttttactctttaat

SEQ ID NO: 1775305 - DNA, 15 bp, Homo sapiens
ttttactctttaatg

SEQ ID NO: 1775306 - DNA, 15 bp, Homo sapiens
tttactctttaatgc

SEQ ID NO: 1775307 - DNA, 15 bp, Homo sapiens
ttactctttaatgct

SEQ ID NO: 1775308 - DNA, 15 bp, Homo sapiens
tactctttaatgctt

SEQ ID NO: 1775309 - DNA, 15 bp, Homo sapiens
actctttaatgcttt

SEQ ID NO: 1775310 - DNA, 15 bp, Homo sapiens
ctctttaatgctttg

SEQ ID NO: 1775311 - DNA, 15 bp, Homo sapiens
tctttaatgctttgg

SEQ ID NO: 1775312 - DNA, 15 bp, Homo sapiens
ctttaatgctttggt

SEQ ID NO: 1775313 - DNA, 15 bp, Homo sapiens
tttaatgctttggtt

SEQ ID NO: 1775314 - DNA, 15 bp, Homo sapiens
ttaatgctttggtta

SEQ ID NO: 1775315 - DNA, 15 bp, Homo sapiens
taatgctttggttag

SEQ ID NO: 1775316 - DNA, 15 bp, Homo sapiens
aatgctttggttagc

SEQ ID NO: 1775317 - DNA, 15 bp, Homo sapiens
atgctttggttagca

SEQ ID NO: 1775318 - DNA, 15 bp, Homo sapiens
tgctttggttagcat

SEQ ID NO: 1775319 - DNA, 15 bp, Homo sapiens
gctttggttagcatc

SEQ ID NO: 1775320 - DNA, 15 bp, Homo sapiens
ctttggttagcatcc

SEQ ID NO: 1775321 - DNA, 15 bp, Homo sapiens
tttggttagcatcct

SEQ ID NO: 1775322 - DNA, 15 bp, Homo sapiens
ttggttagcatcctg

SEQ ID NO: 1775323 - DNA, 15 bp, Homo sapiens
tggttagcatcctgt

SEQ ID NO: 1775324 - DNA, 15 bp, Homo sapiens
ggttagcatcctgtt

SEQ ID NO: 1775325 - DNA, 15 bp, Homo sapiens
gttagcatcctgttt

SEQ ID NO: 1775326 - DNA, 15 bp, Homo sapiens
ttagcatcctgttta

SEQ ID NO: 1775327 - DNA, 15 bp, Homo sapiens
tagcatcctgtttac

SEQ ID NO: 1775328 - DNA, 15 bp, Homo sapiens
agcatcctgtttacc

SEQ ID NO: 1775329 - DNA, 15 bp, Homo sapiens
gcatcctgtttacct

SEQ ID NO: 1775330 - DNA, 15 bp, Homo sapiens
catcctgtttacctc

SEQ ID NO: 1775331 - DNA, 15 bp, Homo sapiens
atcctgtttacctca

SEQ ID NO: 1775332 - DNA, 15 bp, Homo sapiens
tcctgtttacctcaa

SEQ ID NO: 1775333 - DNA, 15 bp, Homo sapiens
cctgtttacctcaag

SEQ ID NO: 1775334 - DNA, 15 bp, Homo sapiens
ctgtttacctcaaga

SEQ ID NO: 1775335 - DNA, 15 bp, Homo sapiens
tgtttacctcaagag

SEQ ID NO: 1775336 - DNA, 15 bp, Homo sapiens
gtttacctcaagaga

SEQ ID NO: 1775337 - DNA, 15 bp, Homo sapiens
tttacctcaagagac

SEQ ID NO: 1775338 - DNA, 15 bp, Homo sapiens
ttacctcaagagact

SEQ ID NO: 1775339 - DNA, 15 bp, Homo sapiens
tacctcaagagactg

SEQ ID NO: 1775340 - DNA, 15 bp, Homo sapiens
acctcaagagactga

SEQ ID NO: 1775341 - DNA, 15 bp, Homo sapiens
cctcaagagactgaa

SEQ ID NO: 1775342 - DNA, 15 bp, Homo sapiens
ctcaagagactgaac

SEQ ID NO: 1775343 - DNA, 15 bp, Homo sapiens
tcaagagactgaact

SEQ ID NO: 1775344 - DNA, 15 bp, Homo sapiens
caagagactgaactt

SEQ ID NO: 1775345 - DNA, 15 bp, Homo sapiens
aagagactgaacttt

SEQ ID NO: 1775346 - DNA, 15 bp, Homo sapiens
agagactgaactttc

SEQ ID NO: 1775347 - DNA, 15 bp, Homo sapiens
gagactgaactttct

SEQ ID NO: 1775348 - DNA, 15 bp, Homo sapiens
agactgaactttctt

SEQ ID NO: 1775349 - DNA, 15 bp, Homo sapiens
gactgaactttcttc

SEQ ID NO: 1775350 - DNA, 15 bp, Homo sapiens
actgaactttcttct

SEQ ID NO: 1775351 - DNA, 15 bp, Homo sapiens
ctgaactttcttctc

SEQ ID NO: 1775352 - DNA, 15 bp, Homo sapiens
tgaactttcttctcc

SEQ ID NO: 1775353 - DNA, 15 bp, Homo sapiens
gaactttcttctcct

SEQ ID NO: 1775354 - DNA, 15 bp, Homo sapiens
aactttcttctcctg

SEQ ID NO: 1775355 - DNA, 15 bp, Homo sapiens
actttcttctcctga

SEQ ID NO: 1775356 - DNA, 15 bp, Homo sapiens
ctttcttctcctgaa

SEQ ID NO: 1775357 - DNA, 15 bp, Homo sapiens
tttcttctcctgaat

SEQ ID NO: 1775358 - DNA, 15 bp, Homo sapiens
ttcttctcctgaatt

SEQ ID NO: 1775359 - DNA, 15 bp, Homo sapiens
tcttctcctgaattt

SEQ ID NO: 1775360 - DNA, 15 bp, Homo sapiens
cttctcctgaattta

SEQ ID NO: 1775361 - DNA, 15 bp, Homo sapiens
ttctcctgaatttaa

SEQ ID NO: 1775362 - DNA, 15 bp, Homo sapiens
tctcctgaatttaat

SEQ ID NO: 1775363 - DNA, 15 bp, Homo sapiens
ctcctgaatttaatt

SEQ ID NO: 1775364 - DNA, 15 bp, Homo sapiens
tcctgaatttaattt

SEQ ID NO: 1775365 - DNA, 15 bp, Homo sapiens
cctgaatttaatttc

SEQ ID NO: 1775366 - DNA, 15 bp, Homo sapiens
ctgaatttaatttcc

SEQ ID NO: 1775367 - DNA, 15 bp, Homo sapiens
tgaatttaatttccc

SEQ ID NO: 1775368 - DNA, 15 bp, Homo sapiens
gaatttaatttccct

SEQ ID NO: 1775369 - DNA, 15 bp, Homo sapiens
aatttaatttccctg

SEQ ID NO: 1775370 - DNA, 15 bp, Homo sapiens
atttaatttccctga

SEQ ID NO: 1775371 - DNA, 15 bp, Homo sapiens
tttaatttccctgat

SEQ ID NO: 1775372 - DNA, 15 bp, Homo sapiens
ttaatttccctgata

SEQ ID NO: 1775373 - DNA, 15 bp, Homo sapiens
taatttccctgatag

SEQ ID NO: 1775374 - DNA, 15 bp, Homo sapiens
aatttccctgatagc

SEQ ID NO: 1775375 - DNA, 15 bp, Homo sapiens
atttccctgatagca

SEQ ID NO: 1775376 - DNA, 15 bp, Homo sapiens
tttccctgatagcag

SEQ ID NO: 1775377 - DNA, 15 bp, Homo sapiens
ttccctgatagcagg

SEQ ID NO: 1775378 - DNA, 15 bp, Homo sapiens
tccctgatagcaggg

SEQ ID NO: 1775379 - DNA, 15 bp, Homo sapiens
ccctgatagcaggga

SEQ ID NO: 1775380 - DNA, 15 bp, Homo sapiens
cctgatagcagggac

SEQ ID NO: 1775381 - DNA, 15 bp, Homo sapiens
ctgatagcagggaca

SEQ ID NO: 1775382 - DNA, 15 bp, Homo sapiens
tgatagcagggacat

SEQ ID NO: 1775383 - DNA, 15 bp, Homo sapiens
gatagcagggacatc

SEQ ID NO: 1775384 - DNA, 15 bp, Homo sapiens
atagcagggacatct

SEQ ID NO: 1775385 - DNA, 15 bp, Homo sapiens
tagcagggacatctg

SEQ ID NO: 1775386 - DNA, 15 bp, Homo sapiens
agcagggacatctga

SEQ ID NO: 1775387 - DNA, 15 bp, Homo sapiens
gcagggacatctgac

SEQ ID NO: 1775388 - DNA, 15 bp, Homo sapiens
cagggacatctgaca

SEQ ID NO: 1775389 - DNA, 15 bp, Homo sapiens
agggacatctgacag

SEQ ID NO: 1775390 - DNA, 15 bp, Homo sapiens
gggacatctgacagc

SEQ ID NO: 1775391 - DNA, 15 bp, Homo sapiens
ggacatctgacagcc

SEQ ID NO: 1775392 - DNA, 15 bp, Homo sapiens
gacatctgacagcct

SEQ ID NO: 1775393 - DNA, 15 bp, Homo sapiens
acatctgacagccta

SEQ ID NO: 1775394 - DNA, 15 bp, Homo sapiens
catctgacagcctat

SEQ ID NO: 1775395 - DNA, 15 bp, Homo sapiens
atctgacagcctatg

SEQ ID NO: 1775396 - DNA, 15 bp, Homo sapiens
tctgacagcctatgt

SEQ ID NO: 1775397 - DNA, 15 bp, Homo sapiens
ctgacagcctatgtc

SEQ ID NO: 1775398 - DNA, 15 bp, Homo sapiens
tgacagcctatgtca

SEQ ID NO: 1775399 - DNA, 15 bp, Homo sapiens
gacagcctatgtcaa

SEQ ID NO: 1775400 - DNA, 15 bp, Homo sapiens
acagcctatgtcaac

SEQ ID NO: 1775401 - DNA, 15 bp, Homo sapiens
cagcctatgtcaact

SEQ ID NO: 1775402 - DNA, 15 bp, Homo sapiens
agcctatgtcaactg

SEQ ID NO: 1775403 - DNA, 15 bp, Homo sapiens
gcctatgtcaactgt

SEQ ID NO: 1775404 - DNA, 15 bp, Homo sapiens
cctatgtcaactgtc

SEQ ID NO: 1775405 - DNA, 15 bp, Homo sapiens
ctatgtcaactgtct

SEQ ID NO: 1775406 - DNA, 15 bp, Homo sapiens
tatgtcaactgtctt

SEQ ID NO: 1775407 - DNA, 15 bp, Homo sapiens
atgtcaactgtcttc

SEQ ID NO: 1775408 - DNA, 15 bp, Homo sapiens
tgtcaactgtcttcc

SEQ ID NO: 1775409 - DNA, 15 bp, Homo sapiens
gtcaactgtcttcct

SEQ ID NO: 1775410 - DNA, 15 bp, Homo sapiens
tcaactgtcttcctt

SEQ ID NO: 1775411 - DNA, 15 bp, Homo sapiens
caactgtcttccttg

SEQ ID NO: 1775412 - DNA, 15 bp, Homo sapiens
aactgtcttccttga

SEQ ID NO: 1775413 - DNA, 15 bp, Homo sapiens
actgtcttccttgac

SEQ ID NO: 1775414 - DNA, 15 bp, Homo sapiens
ctgtcttccttgact

SEQ ID NO: 1775415 - DNA, 15 bp, Homo sapiens
tgtcttccttgactt

SEQ ID NO: 1775416 - DNA, 15 bp, Homo sapiens
gtcttccttgacttc

SEQ ID NO: 1775417 - DNA, 15 bp, Homo sapiens
tcttccttgacttct

SEQ ID NO: 1775418 - DNA, 15 bp, Homo sapiens
cttccttgacttctg

SEQ ID NO: 1775419 - DNA, 15 bp, Homo sapiens
ttccttgacttctgt

SEQ ID NO: 1775420 - DNA, 15 bp, Homo sapiens
tccttgacttctgtc

SEQ ID NO: 1775421 - DNA, 15 bp, Homo sapiens
ccttgacttctgtca

SEQ ID NO: 1775422 - DNA, 15 bp, Homo sapiens
cttgacttctgtcaa

SEQ ID NO: 1775423 - DNA, 15 bp, Homo sapiens
ttgacttctgtcaat

SEQ ID NO: 1775424 - DNA, 15 bp, Homo sapiens
tgacttctgtcaatt

SEQ ID NO: 1775425 - DNA, 15 bp, Homo sapiens
gacttctgtcaatta

SEQ ID NO: 1775426 - DNA, 15 bp, Homo sapiens
acttctgtcaattat

SEQ ID NO: 1775427 - DNA, 15 bp, Homo sapiens
tctgtcaattatttg

SEQ ID NO: 1775428 - DNA, 15 bp, Homo sapiens
ctgtcaattatttgt

SEQ ID NO: 1775429 - DNA, 15 bp, Homo sapiens
tgtcaattatttgtc

SEQ ID NO: 1775430 - DNA, 15 bp, Homo sapiens
gtcaattatttgtcc

SEQ ID NO: 1775431 - DNA, 15 bp, Homo sapiens
tcaattatttgtcct

SEQ ID NO: 1775432 - DNA, 15 bp, Homo sapiens
caattatttgtccta

SEQ ID NO: 1775433 - DNA, 15 bp, Homo sapiens
aattatttgtcctaa

SEQ ID NO: 1775434 - DNA, 15 bp, Homo sapiens
attatttgtcctaac

SEQ ID NO: 1775435 - DNA, 15 bp, Homo sapiens
ttatttgtcctaact

SEQ ID NO: 1775436 - DNA, 15 bp, Homo sapiens
tatttgtcctaacta

SEQ ID NO: 1775437 - DNA, 15 bp, Homo sapiens
atttgtcctaactat

SEQ ID NO: 1775438 - DNA, 15 bp, Homo sapiens
tttgtcctaactatg

SEQ ID NO: 1775439 - DNA, 15 bp, Homo sapiens
ttgtcctaactatgc

SEQ ID NO: 1775440 - DNA, 15 bp, Homo sapiens
tgtcctaactatgct

SEQ ID NO: 1775441 - DNA, 15 bp, Homo sapiens
gtcctaactatgctt

SEQ ID NO: 1775442 - DNA, 15 bp, Homo sapiens
tcctaactatgcttg

SEQ ID NO: 1775443 - DNA, 15 bp, Homo sapiens
cctaactatgcttga

SEQ ID NO: 1775444 - DNA, 15 bp, Homo sapiens
ctaactatgcttgag

SEQ ID NO: 1775445 - DNA, 15 bp, Homo sapiens
taactatgcttgagt

SEQ ID NO: 1775446 - DNA, 15 bp, Homo sapiens
aactatgcttgagta

SEQ ID NO: 1775447 - DNA, 15 bp, Homo sapiens
actatgcttgagtaa

SEQ ID NO: 1775448 - DNA, 15 bp, Homo sapiens
ctatgcttgagtaag

SEQ ID NO: 1775449 - DNA, 15 bp, Homo sapiens
tatgcttgagtaagc

SEQ ID NO: 1775450 - DNA, 15 bp, Homo sapiens
atgcttgagtaagcg

SEQ ID NO: 1775451 - DNA, 15 bp, Homo sapiens
tgcttgagtaagcgt

SEQ ID NO: 1775452 - DNA, 15 bp, Homo sapiens
gcttgagtaagcgta

SEQ ID NO: 1775453 - DNA, 15 bp, Homo sapiens
cttgagtaagcgtac

SEQ ID NO: 1775454 - DNA, 15 bp, Homo sapiens
ttgagtaagcgtaca

SEQ ID NO: 1775455 - DNA, 15 bp, Homo sapiens
tgagtaagcgtacag

SEQ ID NO: 1775456 - DNA, 15 bp, Homo sapiens
gagtaagcgtacagg

SEQ ID NO: 1775457 - DNA, 15 bp, Homo sapiens
agtaagcgtacagga

SEQ ID NO: 1775458 - DNA, 15 bp, Homo sapiens
gtaagcgtacaggaa

SEQ ID NO: 1775459 - DNA, 15 bp, Homo sapiens
taagcgtacaggaat

SEQ ID NO: 1775460 - DNA, 15 bp, Homo sapiens
aagcgtacaggaata

SEQ ID NO: 1775461 - DNA, 15 bp, Homo sapiens
agcgtacaggaatat

SEQ ID NO: 1775462 - DNA, 15 bp, Homo sapiens
gcgtacaggaatata

SEQ ID NO: 1775463 - DNA, 15 bp, Homo sapiens
cgtacaggaatataa

SEQ ID NO: 1775464 - DNA, 15 bp, Homo sapiens
gtacaggaatataaa

SEQ ID NO: 1775465 - DNA, 15 bp, Homo sapiens
tacaggaatataaaa

SEQ ID NO: 1775466 - DNA, 15 bp, Homo sapiens
acaggaatataaaat

SEQ ID NO: 1775467 - DNA, 15 bp, Homo sapiens
caggaatataaaatt

SEQ ID NO: 1775468 - DNA, 15 bp, Homo sapiens
aggaatataaaattt

SEQ ID NO: 1775469 - DNA, 15 bp, Homo sapiens
ggaatataaaatttt

SEQ ID NO: 1775470 - DNA, 15 bp, Homo sapiens
gaatataaaatttta

SEQ ID NO: 1775471 - DNA, 15 bp, Homo sapiens
aatataaaattttat

SEQ ID NO: 1775472 - DNA, 15 bp, Homo sapiens
atataaaattttatt

SEQ ID NO: 1775473 - DNA, 15 bp, Homo sapiens
tataaaattttattt

SEQ ID NO: 1775474 - DNA, 15 bp, Homo sapiens
ataaaattttatttc

SEQ ID NO: 1775475 - DNA, 15 bp, Homo sapiens
taaaattttatttcc

SEQ ID NO: 1775476 - DNA, 15 bp, Homo sapiens
aaaattttatttcct

SEQ ID NO: 1775477 - DNA, 15 bp, Homo sapiens
aaattttatttcctt

SEQ ID NO: 1775478 - DNA, 15 bp, Homo sapiens
aattttatttccttg

SEQ ID NO: 1775479 - DNA, 15 bp, Homo sapiens
attttatttccttgg

SEQ ID NO: 1775480 - DNA, 15 bp, Homo sapiens
ttttatttccttgga

SEQ ID NO: 1775481 - DNA, 15 bp, Homo sapiens
tttatttccttggaa

SEQ ID NO: 1775482 - DNA, 15 bp, Homo sapiens
ttatttccttggaat

SEQ ID NO: 1775483 - DNA, 15 bp, Homo sapiens
tatttccttggaata

SEQ ID NO: 1775484 - DNA, 15 bp, Homo sapiens
atttccttggaataa

SEQ ID NO: 1775485 - DNA, 15 bp, Homo sapiens
ttccttggaataaaa

SEQ ID NO: 1775486 - DNA, 15 bp, Homo sapiens
tccttggaataaaat

SEQ ID NO: 1775487 - DNA, 15 bp, Homo sapiens
ccttggaataaaatt

SEQ ID NO: 1775488 - DNA, 15 bp, Homo sapiens
cttggaataaaattt

SEQ ID NO: 1775489 - DNA, 15 bp, Homo sapiens
ttggaataaaatttt

SEQ ID NO: 1775490 - DNA, 15 bp, Homo sapiens
tggaataaaatttta

SEQ ID NO: 1775491 - DNA, 15 bp, Homo sapiens
ggaataaaattttaa

SEQ ID NO: 1775492 - DNA, 15 bp, Homo sapiens
gaataaaattttaat

SEQ ID NO: 1775493 - DNA, 15 bp, Homo sapiens
aataaaattttaatt

SEQ ID NO: 1775494 - DNA, 15 bp, Homo sapiens
ataaaattttaattt

SEQ ID NO: 1775495 - DNA, 15 bp, Homo sapiens
taaaattttaattta

SEQ ID NO: 1775496 - DNA, 15 bp, Homo sapiens
aaaattttaatttat

SEQ ID NO: 1775497 - DNA, 15 bp, Homo sapiens
aaattttaatttata

SEQ ID NO: 1775498 - DNA, 15 bp, Homo sapiens
aattttaatttataa

SEQ ID NO: 1775499 - DNA, 15 bp, Homo sapiens
attttaatttataat

SEQ ID NO: 1775500 - DNA, 15 bp, Homo sapiens
ttttaatttataata

SEQ ID NO: 1775501 - DNA, 15 bp, Homo sapiens
tttaatttataatat

SEQ ID NO: 1775502 - DNA, 15 bp, Homo sapiens
ttaatttataatata

SEQ ID NO: 1775503 - DNA, 15 bp, Homo sapiens
taatttataatatag

SEQ ID NO: 1775504 - DNA, 15 bp, Homo sapiens
aatttataatatagg

SEQ ID NO: 1775505 - DNA, 15 bp, Homo sapiens
atttataatatagga

SEQ ID NO: 1775506 - DNA, 15 bp, Homo sapiens
tttataatataggag

SEQ ID NO: 1775507 - DNA, 15 bp, Homo sapiens
ttataatataggaga

SEQ ID NO: 1775508 - DNA, 15 bp, Homo sapiens
tataatataggagag

SEQ ID NO: 1775509 - DNA, 15 bp, Homo sapiens
ataatataggagaga

SEQ ID NO: 1775510 - DNA, 15 bp, Homo sapiens
taatataggagagat

SEQ ID NO: 1775511 - DNA, 15 bp, Homo sapiens
aatataggagagata

SEQ ID NO: 1775512 - DNA, 15 bp, Homo sapiens
atataggagagatat

SEQ ID NO: 1775513 - DNA, 15 bp, Homo sapiens
tataggagagatatt

SEQ ID NO: 1775514 - DNA, 15 bp, Homo sapiens
ataggagagatatta

SEQ ID NO: 1775515 - DNA, 15 bp, Homo sapiens
taggagagatattac

SEQ ID NO: 1775516 - DNA, 15 bp, Homo sapiens
aggagagatattact

SEQ ID NO: 1775517 - DNA, 15 bp, Homo sapiens
ggagagatattacta

SEQ ID NO: 1775518 - DNA, 15 bp, Homo sapiens
gagagatattactat

SEQ ID NO: 1775519 - DNA, 15 bp, Homo sapiens
agagatattactatt

SEQ ID NO: 1775520 - DNA, 15 bp, Homo sapiens
gagatattactatta

SEQ ID NO: 1775521 - DNA, 15 bp, Homo sapiens
agatattactattaa

SEQ ID NO: 1775522 - DNA, 15 bp, Homo sapiens
gatattactattaag

SEQ ID NO: 1775523 - DNA, 15 bp, Homo sapiens
atattactattaagg

SEQ ID NO: 1775524 - DNA, 15 bp, Homo sapiens
tattactattaaggc

SEQ ID NO: 1775525 - DNA, 15 bp, Homo sapiens
attactattaaggct

SEQ ID NO: 1775526 - DNA, 15 bp, Homo sapiens
ttactattaaggctc

SEQ ID NO: 1775527 - DNA, 15 bp, Homo sapiens
tactattaaggctct

SEQ ID NO: 1775528 - DNA, 15 bp, Homo sapiens
actattaaggctctt

SEQ ID NO: 1775529 - DNA, 15 bp, Homo sapiens
ctattaaggctcttg

SEQ ID NO: 1775530 - DNA, 15 bp, Homo sapiens
tattaaggctcttga

SEQ ID NO: 1775531 - DNA, 15 bp, Homo sapiens
attaaggctcttgaa

SEQ ID NO: 1775532 - DNA, 15 bp, Homo sapiens
ttaaggctcttgaaa

SEQ ID NO: 1775533 - DNA, 15 bp, Homo sapiens
taaggctcttgaaaa

SEQ ID NO: 1775534 - DNA, 15 bp, Homo sapiens
aaggctcttgaaaag

SEQ ID NO: 1775535 - DNA, 15 bp, Homo sapiens
aggctcttgaaaagc

SEQ ID NO: 1775536 - DNA, 15 bp, Homo sapiens
ggctcttgaaaagca

SEQ ID NO: 1775537 - DNA, 15 bp, Homo sapiens
gctcttgaaaagcaa

SEQ ID NO: 1775538 - DNA, 15 bp, Homo sapiens
ctcttgaaaagcaat

SEQ ID NO: 1775539 - DNA, 15 bp, Homo sapiens
tcttgaaaagcaatt

SEQ ID NO: 1775540 - DNA, 15 bp, Homo sapiens
cttgaaaagcaatta

SEQ ID NO: 1775541 - DNA, 15 bp, Homo sapiens
ttgaaaagcaattat

SEQ ID NO: 1775542 - DNA, 15 bp, Homo sapiens
tgaaaagcaattata

SEQ ID NO: 1775543 - DNA, 15 bp, Homo sapiens
gaaaagcaattataa

SEQ ID NO: 1775544 - DNA, 15 bp, Homo sapiens
aaaagcaattataag

SEQ ID NO: 1775545 - DNA, 15 bp, Homo sapiens
aaagcaattataaga

SEQ ID NO: 1775546 - DNA, 15 bp, Homo sapiens
aagcaattataagag

SEQ ID NO: 1775547 - DNA, 15 bp, Homo sapiens
agcaattataagaga

SEQ ID NO: 1775548 - DNA, 15 bp, Homo sapiens
gcaattataagagac

SEQ ID NO: 1775549 - DNA, 15 bp, Homo sapiens
caattataagagaca

SEQ ID NO: 1775550 - DNA, 15 bp, Homo sapiens
aattataagagacag

SEQ ID NO: 1775551 - DNA, 15 bp, Homo sapiens
attataagagacaga

SEQ ID NO: 1775552 - DNA, 15 bp, Homo sapiens
ttataagagacagaa

SEQ ID NO: 1775553 - DNA, 15 bp, Homo sapiens
tataagagacagaat

SEQ ID NO: 1775554 - DNA, 15 bp, Homo sapiens
ataagagacagaata

SEQ ID NO: 1775555 - DNA, 15 bp, Homo sapiens
taagagacagaataa

SEQ ID NO: 1775556 - DNA, 15 bp, Homo sapiens
aagagacagaataaa

SEQ ID NO: 1775557 - DNA, 15 bp, Homo sapiens
agagacagaataaaa

SEQ ID NO: 1775558 - DNA, 15 bp, Homo sapiens
gagacagaataaaat

SEQ ID NO: 1775559 - DNA, 15 bp, Homo sapiens
agacagaataaaatt

SEQ ID NO: 1775560 - DNA, 15 bp, Homo sapiens
gacagaataaaatta

SEQ ID NO: 1775561 - DNA, 15 bp, Homo sapiens
acagaataaaattaa

SEQ ID NO: 1775562 - DNA, 15 bp, Homo sapiens
cagaataaaattaaa

SEQ ID NO: 1775563 - DNA, 15 bp, Homo sapiens
agaataaaattaaaa

SEQ ID NO: 1775564 - DNA, 15 bp, Homo sapiens
gaataaaattaaaag

SEQ ID NO: 1775565 - DNA, 15 bp, Homo sapiens
aataaaattaaaagg

SEQ ID NO: 1775566 - DNA, 15 bp, Homo sapiens
ataaaattaaaagga

SEQ ID NO: 1775567 - DNA, 15 bp, Homo sapiens
taaaattaaaaggaa

SEQ ID NO: 1775568 - DNA, 15 bp, Homo sapiens
aaaattaaaaggaaa

SEQ ID NO: 1775569 - DNA, 15 bp, Homo sapiens
aaattaaaaggaaaa

SEQ ID NO: 1775570 - DNA, 15 bp, Homo sapiens
aattaaaaggaaaaa

SEQ ID NO: 1775571 - DNA, 15 bp, Homo sapiens
attaaaaggaaaaaa

SEQ ID NO: 1775572 - DNA, 15 bp, Homo sapiens
ttaaaaggaaaaaag

SEQ ID NO: 1775573 - DNA, 15 bp, Homo sapiens
taaaaggaaaaaaga

SEQ ID NO: 1775574 - DNA, 15 bp, Homo sapiens
aaaaggaaaaaagat

SEQ ID NO: 1775575 - DNA, 15 bp, Homo sapiens
aaaggaaaaaagata

SEQ ID NO: 1775576 - DNA, 15 bp, Homo sapiens
aaggaaaaaagatag

SEQ ID NO: 1775577 - DNA, 15 bp, Homo sapiens
aggaaaaaagatagc

SEQ ID NO: 1775578 - DNA, 15 bp, Homo sapiens
ggaaaaaagatagca

SEQ ID NO: 1775579 - DNA, 15 bp, Homo sapiens
gaaaaaagatagcat

SEQ ID NO: 1775580 - DNA, 15 bp, Homo sapiens
aaaaaagatagcata

SEQ ID NO: 1775581 - DNA, 15 bp, Homo sapiens
aaaaagatagcataa

SEQ ID NO: 1775582 - DNA, 15 bp, Homo sapiens
aaaagatagcataac

SEQ ID NO: 1775583 - DNA, 15 bp, Homo sapiens
aaagatagcataacc

SEQ ID NO: 1775584 - DNA, 15 bp, Homo sapiens
aagatagcataaccc

SEQ ID NO: 1775585 - DNA, 15 bp, Homo sapiens
agatagcataaccct

SEQ ID NO: 1775586 - DNA, 15 bp, Homo sapiens
gatagcataacccta

SEQ ID NO: 1775587 - DNA, 15 bp, Homo sapiens
atagcataaccctac

SEQ ID NO: 1775588 - DNA, 15 bp, Homo sapiens
tagcataaccctaca

SEQ ID NO: 1775589 - DNA, 15 bp, Homo sapiens
agcataaccctacaa

SEQ ID NO: 1775590 - DNA, 15 bp, Homo sapiens
gcataaccctacaac

SEQ ID NO: 1775591 - DNA, 15 bp, Homo sapiens
cataaccctacaact

SEQ ID NO: 1775592 - DNA, 15 bp, Homo sapiens
ataaccctacaactc

SEQ ID NO: 1775593 - DNA, 15 bp, Homo sapiens
taaccctacaactct

SEQ ID NO: 1775594 - DNA, 15 bp, Homo sapiens
aaccctacaactcta

SEQ ID NO: 1775595 - DNA, 15 bp, Homo sapiens
accctacaactctaa

SEQ ID NO: 1775596 - DNA, 15 bp, Homo sapiens
ccctacaactctaat

SEQ ID NO: 1775597 - DNA, 15 bp, Homo sapiens
cctacaactctaata

SEQ ID NO: 1775598 - DNA, 15 bp, Homo sapiens
ctacaactctaataa

SEQ ID NO: 1775599 - DNA, 15 bp, Homo sapiens
tacaactctaataaa

SEQ ID NO: 1775600 - DNA, 15 bp, Homo sapiens
acaactctaataaat

SEQ ID NO: 1775601 - DNA, 15 bp, Homo sapiens
caactctaataaatc

SEQ ID NO: 1775602 - DNA, 15 bp, Homo sapiens
aactctaataaatct

SEQ ID NO: 1775603 - DNA, 15 bp, Homo sapiens
actctaataaatctg

SEQ ID NO: 1775604 - DNA, 15 bp, Homo sapiens
ctctaataaatctgc

SEQ ID NO: 1775605 - DNA, 15 bp, Homo sapiens
tctaataaatctgct

SEQ ID NO: 1775606 - DNA, 15 bp, Homo sapiens
ctaataaatctgctg

SEQ ID NO: 1775607 - DNA, 15 bp, Homo sapiens
taataaatctgctgt

SEQ ID NO: 1775608 - DNA, 15 bp, Homo sapiens
aataaatctgctgtt

SEQ ID NO: 1775609 - DNA, 15 bp, Homo sapiens
ataaatctgctgttt

SEQ ID NO: 1775610 - DNA, 15 bp, Homo sapiens
taaatctgctgttta

SEQ ID NO: 1775611 - DNA, 15 bp, Homo sapiens
aaatctgctgtttat

SEQ ID NO: 1775612 - DNA, 15 bp, Homo sapiens
aatctgctgtttatg

SEQ ID NO: 1775613 - DNA, 15 bp, Homo sapiens
atctgctgtttatga

SEQ ID NO: 1775614 - DNA, 15 bp, Homo sapiens
tctgctgtttatgat

SEQ ID NO: 1775615 - DNA, 15 bp, Homo sapiens
ctgctgtttatgatt

SEQ ID NO: 1775616 - DNA, 15 bp, Homo sapiens
tgctgtttatgattt

SEQ ID NO: 1775617 - DNA, 15 bp, Homo sapiens
gctgtttatgatttt

SEQ ID NO: 1775618 - DNA, 15 bp, Homo sapiens
ctgtttatgattttc

SEQ ID NO: 1775619 - DNA, 15 bp, Homo sapiens
tgtttatgattttcc

SEQ ID NO: 1775620 - DNA, 15 bp, Homo sapiens
gtttatgattttcca

SEQ ID NO: 1775621 - DNA, 15 bp, Homo sapiens
tttatgattttccag

SEQ ID NO: 1775622 - DNA, 15 bp, Homo sapiens
ttatgattttccaga

SEQ ID NO: 1775623 - DNA, 15 bp, Homo sapiens
tatgattttccagat

SEQ ID NO: 1775624 - DNA, 15 bp, Homo sapiens
atgattttccagatt

SEQ ID NO: 1775625 - DNA, 15 bp, Homo sapiens
tgattttccagattt

SEQ ID NO: 1775626 - DNA, 15 bp, Homo sapiens
gattttccagattta

SEQ ID NO: 1775627 - DNA, 15 bp, Homo sapiens
attttccagatttaa

SEQ ID NO: 1775628 - DNA, 15 bp, Homo sapiens
ttttccagatttaat

SEQ ID NO: 1775629 - DNA, 15 bp, Homo sapiens
tttccagatttaatt

SEQ ID NO: 1775630 - DNA, 15 bp, Homo sapiens
ttccagatttaattt

SEQ ID NO: 1775631 - DNA, 15 bp, Homo sapiens
tccagatttaatttc

SEQ ID NO: 1775632 - DNA, 15 bp, Homo sapiens
ccagatttaatttca

SEQ ID NO: 1775633 - DNA, 15 bp, Homo sapiens
cagatttaatttcag

SEQ ID NO: 1775634 - DNA, 15 bp, Homo sapiens
agatttaatttcagt

SEQ ID NO: 1775635 - DNA, 15 bp, Homo sapiens
gatttaatttcagtc

SEQ ID NO: 1775636 - DNA, 15 bp, Homo sapiens
atttaatttcagtct

SEQ ID NO: 1775637 - DNA, 15 bp, Homo sapiens
tttaatttcagtctt

SEQ ID NO: 1775638 - DNA, 15 bp, Homo sapiens
ttaatttcagtcttt

SEQ ID NO: 1775639 - DNA, 15 bp, Homo sapiens
taatttcagtctttg

SEQ ID NO: 1775640 - DNA, 15 bp, Homo sapiens
aatttcagtctttgc

SEQ ID NO: 1775641 - DNA, 15 bp, Homo sapiens
atttcagtctttgct

SEQ ID NO: 1775642 - DNA, 15 bp, Homo sapiens
tttcagtctttgcta

SEQ ID NO: 1775643 - DNA, 15 bp, Homo sapiens
ttcagtctttgctat

SEQ ID NO: 1775644 - DNA, 15 bp, Homo sapiens
tcagtctttgctatt

SEQ ID NO: 1775645 - DNA, 15 bp, Homo sapiens
cagtctttgctatta

SEQ ID NO: 1775646 - DNA, 15 bp, Homo sapiens
agtctttgctattat

SEQ ID NO: 1775647 - DNA, 15 bp, Homo sapiens
gtctttgctattatg

SEQ ID NO: 1775648 - DNA, 15 bp, Homo sapiens
tctttgctattatgc

SEQ ID NO: 1775649 - DNA, 15 bp, Homo sapiens
ctttgctattatgct

SEQ ID NO: 1775650 - DNA, 15 bp, Homo sapiens
tttgctattatgctt

SEQ ID NO: 1775651 - DNA, 15 bp, Homo sapiens
ttgctattatgctta

SEQ ID NO: 1775652 - DNA, 15 bp, Homo sapiens
tgctattatgcttat

SEQ ID NO: 1775653 - DNA, 15 bp, Homo sapiens
gctattatgcttata

SEQ ID NO: 1775654 - DNA, 15 bp, Homo sapiens
ctattatgcttatat

SEQ ID NO: 1775655 - DNA, 15 bp, Homo sapiens
tattatgcttatata

SEQ ID NO: 1775656 - DNA, 15 bp, Homo sapiens
attatgcttatatag

SEQ ID NO: 1775657 - DNA, 15 bp, Homo sapiens
ttatgcttatatagt

SEQ ID NO: 1775658 - DNA, 15 bp, Homo sapiens
tatgcttatatagtt

SEQ ID NO: 1775659 - DNA, 15 bp, Homo sapiens
atgcttatatagttg

SEQ ID NO: 1775660 - DNA, 15 bp, Homo sapiens
tgcttatatagttga

SEQ ID NO: 1775661 - DNA, 15 bp, Homo sapiens
gcttatatagttgaa

SEQ ID NO: 1775662 - DNA, 15 bp, Homo sapiens
cttatatagttgaaa

SEQ ID NO: 1775663 - DNA, 15 bp, Homo sapiens
ttatatagttgaaat

SEQ ID NO: 1775664 - DNA, 15 bp, Homo sapiens
tatatagttgaaatc

SEQ ID NO: 1775665 - DNA, 15 bp, Homo sapiens
atatagttgaaatca

SEQ ID NO: 1775666 - DNA, 15 bp, Homo sapiens
tatagttgaaatcag

SEQ ID NO: 1775667 - DNA, 15 bp, Homo sapiens
atagttgaaatcaga

SEQ ID NO: 1775668 - DNA, 15 bp, Homo sapiens
tagttgaaatcagag

SEQ ID NO: 1775669 - DNA, 15 bp, Homo sapiens
agttgaaatcagaga

SEQ ID NO: 1775670 - DNA, 15 bp, Homo sapiens
gttgaaatcagagaa

SEQ ID NO: 1775671 - DNA, 15 bp, Homo sapiens
ttgaaatcagagaat

SEQ ID NO: 1775672 - DNA, 15 bp, Homo sapiens
tgaaatcagagaata

SEQ ID NO: 1775673 - DNA, 15 bp, Homo sapiens
gaaatcagagaataa

SEQ ID NO: 1775674 - DNA, 15 bp, Homo sapiens
aaatcagagaataat

SEQ ID NO: 1775675 - DNA, 15 bp, Homo sapiens
aatcagagaataata

SEQ ID NO: 1775676 - DNA, 15 bp, Homo sapiens
atcagagaataatat

SEQ ID NO: 1775677 - DNA, 15 bp, Homo sapiens
tcagagaataatatc

SEQ ID NO: 1775678 - DNA, 15 bp, Homo sapiens
cagagaataatatct

SEQ ID NO: 1775679 - DNA, 15 bp, Homo sapiens
agagaataatatctt

SEQ ID NO: 1775680 - DNA, 15 bp, Homo sapiens
gagaataatatcttt

SEQ ID NO: 1775681 - DNA, 15 bp, Homo sapiens
agaataatatcttta

SEQ ID NO: 1775682 - DNA, 15 bp, Homo sapiens
gaataatatctttaa

SEQ ID NO: 1775683 - DNA, 15 bp, Homo sapiens
aataatatctttaag

SEQ ID NO: 1775684 - DNA, 15 bp, Homo sapiens
ataatatctttaaga

SEQ ID NO: 1775685 - DNA, 15 bp, Homo sapiens
taatatctttaagat

SEQ ID NO: 1775686 - DNA, 15 bp, Homo sapiens
aatatctttaagatt

SEQ ID NO: 1775687 - DNA, 15 bp, Homo sapiens
atatctttaagattt

SEQ ID NO: 1775688 - DNA, 15 bp, Homo sapiens
tatctttaagatttg

SEQ ID NO: 1775689 - DNA, 15 bp, Homo sapiens
atctttaagatttgg

SEQ ID NO: 1775690 - DNA, 15 bp, Homo sapiens
tctttaagatttgga

SEQ ID NO: 1775691 - DNA, 15 bp, Homo sapiens
ctttaagatttggaa

SEQ ID NO: 1775692 - DNA, 15 bp, Homo sapiens
tttaagatttggaat

SEQ ID NO: 1775693 - DNA, 15 bp, Homo sapiens
ttaagatttggaatg

SEQ ID NO: 1775694 - DNA, 15 bp, Homo sapiens
taagatttggaatgg

SEQ ID NO: 1775695 - DNA, 15 bp, Homo sapiens
aagatttggaatggg

SEQ ID NO: 1775696 - DNA, 15 bp, Homo sapiens
agatttggaatggga

SEQ ID NO: 1775697 - DNA, 15 bp, Homo sapiens
gatttggaatgggat

SEQ ID NO: 1775698 - DNA, 15 bp, Homo sapiens
atttggaatgggata

SEQ ID NO: 1775699 - DNA, 15 bp, Homo sapiens
tttggaatgggatac

SEQ ID NO: 1775700 - DNA, 15 bp, Homo sapiens
ttggaatgggatact

SEQ ID NO: 1775701 - DNA, 15 bp, Homo sapiens
tggaatgggatactg

SEQ ID NO: 1775702 - DNA, 15 bp, Homo sapiens
ggaatgggatactgc

SEQ ID NO: 1775703 - DNA, 15 bp, Homo sapiens
gaatgggatactgct

SEQ ID NO: 1775704 - DNA, 15 bp, Homo sapiens
aatgggatactgctc

SEQ ID NO: 1775705 - DNA, 15 bp, Homo sapiens
atgggatactgctct

SEQ ID NO: 1775706 - DNA, 15 bp, Homo sapiens
tgggatactgctctt

SEQ ID NO: 1775707 - DNA, 15 bp, Homo sapiens
gggatactgctcttt

SEQ ID NO: 1775708 - DNA, 15 bp, Homo sapiens
ggatactgctctttc

SEQ ID NO: 1775709 - DNA, 15 bp, Homo sapiens
gatactgctctttct

SEQ ID NO: 1775710 - DNA, 15 bp, Homo sapiens
atactgctctttctt

SEQ ID NO: 1775711 - DNA, 15 bp, Homo sapiens
tactgctctttcttt

SEQ ID NO: 1775712 - DNA, 15 bp, Homo sapiens
actgctctttctttt

SEQ ID NO: 1775713 - DNA, 15 bp, Homo sapiens
ctgctctttcttttt

SEQ ID NO: 1775714 - DNA, 15 bp, Homo sapiens
tgctctttcttttta

SEQ ID NO: 1775715 - DNA, 15 bp, Homo sapiens
gctctttctttttat

SEQ ID NO: 1775716 - DNA, 15 bp, Homo sapiens
ctctttctttttatg

SEQ ID NO: 1775717 - DNA, 15 bp, Homo sapiens
tctttctttttatgt

SEQ ID NO: 1775718 - DNA, 15 bp, Homo sapiens
ctttctttttatgtg

SEQ ID NO: 1775719 - DNA, 15 bp, Homo sapiens
tttctttttatgtgc

SEQ ID NO: 1775720 - DNA, 15 bp, Homo sapiens
ttctttttatgtgct

SEQ ID NO: 1775721 - DNA, 15 bp, Homo sapiens
tctttttatgtgctc

SEQ ID NO: 1775722 - DNA, 15 bp, Homo sapiens
tttttatgtgctctt

SEQ ID NO: 1775723 - DNA, 15 bp, Homo sapiens
ttttatgtgctctta

SEQ ID NO: 1775724 - DNA, 15 bp, Homo sapiens
tttatgtgctcttag

SEQ ID NO: 1775725 - DNA, 15 bp, Homo sapiens
ttatgtgctcttaga

SEQ ID NO: 1775726 - DNA, 15 bp, Homo sapiens
tatgtgctcttagat

SEQ ID NO: 1775727 - DNA, 15 bp, Homo sapiens
atgtgctcttagata

SEQ ID NO: 1775728 - DNA, 15 bp, Homo sapiens
tgtgctcttagataa

SEQ ID NO: 1775729 - DNA, 15 bp, Homo sapiens
gtgctcttagataag

SEQ ID NO: 1775730 - DNA, 15 bp, Homo sapiens
tgctcttagataaga

SEQ ID NO: 1775731 - DNA, 15 bp, Homo sapiens
gctcttagataagaa

SEQ ID NO: 1775732 - DNA, 15 bp, Homo sapiens
ctcttagataagaac

SEQ ID NO: 1775733 - DNA, 15 bp, Homo sapiens
tcttagataagaact

SEQ ID NO: 1775734 - DNA, 15 bp, Homo sapiens
cttagataagaactc

SEQ ID NO: 1775735 - DNA, 15 bp, Homo sapiens
ttagataagaactct

SEQ ID NO: 1775736 - DNA, 15 bp, Homo sapiens
tagataagaactctt

SEQ ID NO: 1775737 - DNA, 15 bp, Homo sapiens
agataagaactcttt

SEQ ID NO: 1775738 - DNA, 15 bp, Homo sapiens
gataagaactctttc

SEQ ID NO: 1775739 - DNA, 15 bp, Homo sapiens
ataagaactctttct

SEQ ID NO: 1775740 - DNA, 15 bp, Homo sapiens
taagaactctttcta

SEQ ID NO: 1775741 - DNA, 15 bp, Homo sapiens
aagaactctttctac

SEQ ID NO: 1775742 - DNA, 15 bp, Homo sapiens
agaactctttctact

SEQ ID NO: 1775743 - DNA, 15 bp, Homo sapiens
gaactctttctactg

SEQ ID NO: 1775744 - DNA, 15 bp, Homo sapiens
aactctttctactgt

SEQ ID NO: 1775745 - DNA, 15 bp, Homo sapiens
actctttctactgtg

SEQ ID NO: 1775746 - DNA, 15 bp, Homo sapiens
ctctttctactgtgt

SEQ ID NO: 1775747 - DNA, 15 bp, Homo sapiens
tctttctactgtgtc

SEQ ID NO: 1775748 - DNA, 15 bp, Homo sapiens
ctttctactgtgtct

SEQ ID NO: 1775749 - DNA, 15 bp, Homo sapiens
tttctactgtgtctt

SEQ ID NO: 1775750 - DNA, 15 bp, Homo sapiens
ttctactgtgtctta

SEQ ID NO: 1775751 - DNA, 15 bp, Homo sapiens
tctactgtgtcttat

SEQ ID NO: 1775752 - DNA, 15 bp, Homo sapiens
ctactgtgtcttata

SEQ ID NO: 1775753 - DNA, 15 bp, Homo sapiens
tactgtgtcttataa

SEQ ID NO: 1775754 - DNA, 15 bp, Homo sapiens
actgtgtcttataaa

SEQ ID NO: 1775755 - DNA, 15 bp, Homo sapiens
ctgtgtcttataaac

SEQ ID NO: 1775756 - DNA, 15 bp, Homo sapiens
tgtgtcttataaact

SEQ ID NO: 1775757 - DNA, 15 bp, Homo sapiens
gtgtcttataaactc

SEQ ID NO: 1775758 - DNA, 15 bp, Homo sapiens
tgtcttataaactct

SEQ ID NO: 1775759 - DNA, 15 bp, Homo sapiens
gtcttataaactctg

SEQ ID NO: 1775760 - DNA, 15 bp, Homo sapiens
tcttataaactctgt

SEQ ID NO: 1775761 - DNA, 15 bp, Homo sapiens
cttataaactctgtc

SEQ ID NO: 1775762 - DNA, 15 bp, Homo sapiens
ttataaactctgtca

SEQ ID NO: 1775763 - DNA, 15 bp, Homo sapiens
tataaactctgtcat

SEQ ID NO: 1775764 - DNA, 15 bp, Homo sapiens
ataaactctgtcata

SEQ ID NO: 1775765 - DNA, 15 bp, Homo sapiens
taaactctgtcatac

SEQ ID NO: 1775766 - DNA, 15 bp, Homo sapiens
aaactctgtcatacc

SEQ ID NO: 1775767 - DNA, 15 bp, Homo sapiens
aactctgtcatacca

SEQ ID NO: 1775768 - DNA, 15 bp, Homo sapiens
actctgtcataccat

SEQ ID NO: 1775769 - DNA, 15 bp, Homo sapiens
ctctgtcataccata

SEQ ID NO: 1775770 - DNA, 15 bp, Homo sapiens
tctgtcataccataa

SEQ ID NO: 1775771 - DNA, 15 bp, Homo sapiens
ctgtcataccataag

SEQ ID NO: 1775772 - DNA, 15 bp, Homo sapiens
tgtcataccataagt

SEQ ID NO: 1775773 - DNA, 15 bp, Homo sapiens
gtcataccataagtt

SEQ ID NO: 1775774 - DNA, 15 bp, Homo sapiens
tcataccataagttt

SEQ ID NO: 1775775 - DNA, 15 bp, Homo sapiens
cataccataagtttc

SEQ ID NO: 1775776 - DNA, 15 bp, Homo sapiens
ataccataagtttct

SEQ ID NO: 1775777 - DNA, 15 bp, Homo sapiens
taccataagtttctc

SEQ ID NO: 1775778 - DNA, 15 bp, Homo sapiens
accataagtttctca

SEQ ID NO: 1775779 - DNA, 15 bp, Homo sapiens
ccataagtttctcaa

SEQ ID NO: 1775780 - DNA, 15 bp, Homo sapiens
cataagtttctcaaa

SEQ ID NO: 1775781 - DNA, 15 bp, Homo sapiens
ataagtttctcaaag

SEQ ID NO: 1775782 - DNA, 15 bp, Homo sapiens
taagtttctcaaagt

SEQ ID NO: 1775783 - DNA, 15 bp, Homo sapiens
aagtttctcaaagtg

SEQ ID NO: 1775784 - DNA, 15 bp, Homo sapiens
agtttctcaaagtga

SEQ ID NO: 1775785 - DNA, 15 bp, Homo sapiens
gtttctcaaagtgat

SEQ ID NO: 1775786 - DNA, 15 bp, Homo sapiens
tttctcaaagtgatt

SEQ ID NO: 1775787 - DNA, 15 bp, Homo sapiens
ttctcaaagtgattt

SEQ ID NO: 1775788 - DNA, 15 bp, Homo sapiens
tctcaaagtgatttt

SEQ ID NO: 1775789 - DNA, 15 bp, Homo sapiens
ctcaaagtgatttta

SEQ ID NO: 1775790 - DNA, 15 bp, Homo sapiens
tcaaagtgattttaa

SEQ ID NO: 1775791 - DNA, 15 bp, Homo sapiens
caaagtgattttaac

SEQ ID NO: 1775792 - DNA, 15 bp, Homo sapiens
aaagtgattttaacc

SEQ ID NO: 1775793 - DNA, 15 bp, Homo sapiens
aagtgattttaacca

SEQ ID NO: 1775794 - DNA, 15 bp, Homo sapiens
agtgattttaaccac

SEQ ID NO: 1775795 - DNA, 15 bp, Homo sapiens
gtgattttaaccact

SEQ ID NO: 1775796 - DNA, 15 bp, Homo sapiens
tgattttaaccactg

SEQ ID NO: 1775797 - DNA, 15 bp, Homo sapiens
gattttaaccactgt

SEQ ID NO: 1775798 - DNA, 15 bp, Homo sapiens
attttaaccactgta

SEQ ID NO: 1775799 - DNA, 15 bp, Homo sapiens
ttttaaccactgtac

SEQ ID NO: 1775800 - DNA, 15 bp, Homo sapiens
tttaaccactgtaca

SEQ ID NO: 1775801 - DNA, 15 bp, Homo sapiens
ttaaccactgtacat

SEQ ID NO: 1775802 - DNA, 15 bp, Homo sapiens
taaccactgtacatt

SEQ ID NO: 1775803 - DNA, 15 bp, Homo sapiens
aaccactgtacattt

SEQ ID NO: 1775804 - DNA, 15 bp, Homo sapiens
accactgtacatttt

SEQ ID NO: 1775805 - DNA, 15 bp, Homo sapiens
ccactgtacatttta

SEQ ID NO: 1775806 - DNA, 15 bp, Homo sapiens
cactgtacattttaa

SEQ ID NO: 1775807 - DNA, 15 bp, Homo sapiens
actgtacattttaaa

SEQ ID NO: 1775808 - DNA, 15 bp, Homo sapiens
ctgtacattttaaac

SEQ ID NO: 1775809 - DNA, 15 bp, Homo sapiens
tgtacattttaaaca

SEQ ID NO: 1775810 - DNA, 15 bp, Homo sapiens
gtacattttaaacaa

SEQ ID NO: 1775811 - DNA, 15 bp, Homo sapiens
tacattttaaacaat

SEQ ID NO: 1775812 - DNA, 15 bp, Homo sapiens
acattttaaacaata

SEQ ID NO: 1775813 - DNA, 15 bp, Homo sapiens
cattttaaacaatat

SEQ ID NO: 1775814 - DNA, 15 bp, Homo sapiens
attttaaacaatatg

SEQ ID NO: 1775815 - DNA, 15 bp, Homo sapiens
ttttaaacaatatga

SEQ ID NO: 1775816 - DNA, 15 bp, Homo sapiens
tttaaacaatatgag

SEQ ID NO: 1775817 - DNA, 15 bp, Homo sapiens
ttaaacaatatgaga

SEQ ID NO: 1775818 - DNA, 15 bp, Homo sapiens
taaacaatatgagaa

SEQ ID NO: 1775819 - DNA, 15 bp, Homo sapiens
aaacaatatgagaaa

SEQ ID NO: 1775820 - DNA, 15 bp, Homo sapiens
aacaatatgagaaat

SEQ ID NO: 1775821 - DNA, 15 bp, Homo sapiens
acaatatgagaaata

SEQ ID NO: 1775822 - DNA, 15 bp, Homo sapiens
caatatgagaaataa

SEQ ID NO: 1775823 - DNA, 15 bp, Homo sapiens
aatatgagaaataaa

SEQ ID NO: 1775824 - DNA, 15 bp, Homo sapiens
atatgagaaataaat

SEQ ID NO: 1775825 - DNA, 15 bp, Homo sapiens
tatgagaaataaatt

SEQ ID NO: 1775826 - DNA, 15 bp, Homo sapiens
atgagaaataaatta

SEQ ID NO: 1775827 - DNA, 15 bp, Homo sapiens
tgagaaataaattaa

SEQ ID NO: 1775828 - DNA, 15 bp, Homo sapiens
gagaaataaattaat

SEQ ID NO: 1775829 - DNA, 15 bp, Homo sapiens
agaaataaattaatt

SEQ ID NO: 1775830 - DNA, 15 bp, Homo sapiens
gaaataaattaattt

SEQ ID NO: 1775831 - DNA, 15 bp, Homo sapiens
aaataaattaatttc

SEQ ID NO: 1775832 - DNA, 15 bp, Homo sapiens
aataaattaatttct

SEQ ID NO: 1775833 - DNA, 15 bp, Homo sapiens
ataaattaatttctg

SEQ ID NO: 1775834 - DNA, 15 bp, Homo sapiens
taaattaatttctga

SEQ ID NO: 1775835 - DNA, 15 bp, Homo sapiens
aaattaatttctgat

SEQ ID NO: 1775836 - DNA, 15 bp, Homo sapiens
aattaatttctgata

SEQ ID NO: 1775837 - DNA, 15 bp, Homo sapiens
attaatttctgatat

SEQ ID NO: 1775838 - DNA, 15 bp, Homo sapiens
ttaatttctgatatg

SEQ ID NO: 1775839 - DNA, 15 bp, Homo sapiens
taatttctgatatga

SEQ ID NO: 1775840 - DNA, 15 bp, Homo sapiens
aatttctgatatgaa

SEQ ID NO: 1775841 - DNA, 15 bp, Homo sapiens
atttctgatatgaac

SEQ ID NO: 1775842 - DNA, 15 bp, Homo sapiens
tttctgatatgaaca

SEQ ID NO: 1775843 - DNA, 15 bp, Homo sapiens
ttctgatatgaacat

SEQ ID NO: 1775844 - DNA, 15 bp, Homo sapiens
tctgatatgaacata

SEQ ID NO: 1775845 - DNA, 15 bp, Homo sapiens
ctgatatgaacatac

SEQ ID NO: 1775846 - DNA, 15 bp, Homo sapiens
tgatatgaacataca

SEQ ID NO: 1775847 - DNA, 15 bp, Homo sapiens
gatatgaacatacat

SEQ ID NO: 1775848 - DNA, 15 bp, Homo sapiens
atatgaacatacatg

SEQ ID NO: 1775849 - DNA, 15 bp, Homo sapiens
tatgaacatacatgt

SEQ ID NO: 1775850 - DNA, 15 bp, Homo sapiens
atgaacatacatgta

SEQ ID NO: 1775851 - DNA, 15 bp, Homo sapiens
tgaacatacatgtaa

SEQ ID NO: 1775852 - DNA, 15 bp, Homo sapiens
gaacatacatgtaag

SEQ ID NO: 1775853 - DNA, 15 bp, Homo sapiens
aacatacatgtaagc

SEQ ID NO: 1775854 - DNA, 15 bp, Homo sapiens
acatacatgtaagct

SEQ ID NO: 1775855 - DNA, 15 bp, Homo sapiens
catacatgtaagcta

SEQ ID NO: 1775856 - DNA, 15 bp, Homo sapiens
atacatgtaagctac

SEQ ID NO: 1775857 - DNA, 15 bp, Homo sapiens
tacatgtaagctact

SEQ ID NO: 1775858 - DNA, 15 bp, Homo sapiens
acatgtaagctacta

SEQ ID NO: 1775859 - DNA, 15 bp, Homo sapiens
catgtaagctactaa

SEQ ID NO: 1775860 - DNA, 15 bp, Homo sapiens
atgtaagctactaaa

SEQ ID NO: 1775861 - DNA, 15 bp, Homo sapiens
tgtaagctactaaac

SEQ ID NO: 1775862 - DNA, 15 bp, Homo sapiens
gtaagctactaaacc

SEQ ID NO: 1775863 - DNA, 15 bp, Homo sapiens
taagctactaaacct

SEQ ID NO: 1775864 - DNA, 15 bp, Homo sapiens
aagctactaaacctc

SEQ ID NO: 1775865 - DNA, 15 bp, Homo sapiens
agctactaaacctca

SEQ ID NO: 1775866 - DNA, 15 bp, Homo sapiens
gctactaaacctcag

SEQ ID NO: 1775867 - DNA, 15 bp, Homo sapiens
ctactaaacctcagt

SEQ ID NO: 1775868 - DNA, 15 bp, Homo sapiens
tactaaacctcagta

SEQ ID NO: 1775869 - DNA, 15 bp, Homo sapiens
actaaacctcagtat

SEQ ID NO: 1775870 - DNA, 15 bp, Homo sapiens
ctaaacctcagtatt

SEQ ID NO: 1775871 - DNA, 15 bp, Homo sapiens
taaacctcagtatta

SEQ ID NO: 1775872 - DNA, 15 bp, Homo sapiens
aaacctcagtattat

SEQ ID NO: 1775873 - DNA, 15 bp, Homo sapiens
aacctcagtattatg

SEQ ID NO: 1775874 - DNA, 15 bp, Homo sapiens
acctcagtattatga

SEQ ID NO: 1775875 - DNA, 15 bp, Homo sapiens
cctcagtattatgaa

SEQ ID NO: 1775876 - DNA, 15 bp, Homo sapiens
ctcagtattatgaaa

SEQ ID NO: 1775877 - DNA, 15 bp, Homo sapiens
tcagtattatgaaat

SEQ ID NO: 1775878 - DNA, 15 bp, Homo sapiens
cagtattatgaaata

SEQ ID NO: 1775879 - DNA, 15 bp, Homo sapiens
agtattatgaaatat

SEQ ID NO: 1775880 - DNA, 15 bp, Homo sapiens
gtattatgaaatatc

SEQ ID NO: 1775881 - DNA, 15 bp, Homo sapiens
tattatgaaatatct

SEQ ID NO: 1775882 - DNA, 15 bp, Homo sapiens
attatgaaatatcta

SEQ ID NO: 1775883 - DNA, 15 bp, Homo sapiens
ttatgaaatatctaa

SEQ ID NO: 1775884 - DNA, 15 bp, Homo sapiens
tatgaaatatctaaa

SEQ ID NO: 1775885 - DNA, 15 bp, Homo sapiens
atgaaatatctaaaa

SEQ ID NO: 1775886 - DNA, 15 bp, Homo sapiens
tgaaatatctaaaac

SEQ ID NO: 1775887 - DNA, 15 bp, Homo sapiens
gaaatatctaaaacg

SEQ ID NO: 1775888 - DNA, 15 bp, Homo sapiens
aaatatctaaaacgt

SEQ ID NO: 1775889 - DNA, 15 bp, Homo sapiens
aatatctaaaacgtg

SEQ ID NO: 1775890 - DNA, 15 bp, Homo sapiens
atatctaaaacgtga

SEQ ID NO: 1775891 - DNA, 15 bp, Homo sapiens
tatctaaaacgtgac

SEQ ID NO: 1775892 - DNA, 15 bp, Homo sapiens
atctaaaacgtgact

SEQ ID NO: 1775893 - DNA, 15 bp, Homo sapiens
tctaaaacgtgactt

SEQ ID NO: 1775894 - DNA, 15 bp, Homo sapiens
ctaaaacgtgactta

SEQ ID NO: 1775895 - DNA, 15 bp, Homo sapiens
taaaacgtgacttat

SEQ ID NO: 1775896 - DNA, 15 bp, Homo sapiens
aaaacgtgacttatt

SEQ ID NO: 1775897 - DNA, 15 bp, Homo sapiens
aaacgtgacttatta

SEQ ID NO: 1775898 - DNA, 15 bp, Homo sapiens
aacgtgacttattag

SEQ ID NO: 1775899 - DNA, 15 bp, Homo sapiens
acgtgacttattaga

SEQ ID NO: 1775900 - DNA, 15 bp, Homo sapiens
cgtgacttattagaa

SEQ ID NO: 1775901 - DNA, 15 bp, Homo sapiens
gtgacttattagaaa

SEQ ID NO: 1775902 - DNA, 15 bp, Homo sapiens
tgacttattagaaat

SEQ ID NO: 1775903 - DNA, 15 bp, Homo sapiens
gacttattagaaata

SEQ ID NO: 1775904 - DNA, 15 bp, Homo sapiens
acttattagaaatag

SEQ ID NO: 1775905 - DNA, 15 bp, Homo sapiens
cttattagaaataga

SEQ ID NO: 1775906 - DNA, 15 bp, Homo sapiens
ttattagaaatagat

SEQ ID NO: 1775907 - DNA, 15 bp, Homo sapiens
tattagaaatagatt

SEQ ID NO: 1775908 - DNA, 15 bp, Homo sapiens
attagaaatagattc

SEQ ID NO: 1775909 - DNA, 15 bp, Homo sapiens
ttagaaatagattct

SEQ ID NO: 1775910 - DNA, 15 bp, Homo sapiens
tagaaatagattctt

SEQ ID NO: 1775911 - DNA, 15 bp, Homo sapiens
agaaatagattcttt

SEQ ID NO: 1775912 - DNA, 15 bp, Homo sapiens
gaaatagattctttt

SEQ ID NO: 1775913 - DNA, 15 bp, Homo sapiens
aaatagattctttta

SEQ ID NO: 1775914 - DNA, 15 bp, Homo sapiens
aatagattcttttag

SEQ ID NO: 1775915 - DNA, 15 bp, Homo sapiens
atagattcttttaga

SEQ ID NO: 1775916 - DNA, 15 bp, Homo sapiens
tagattcttttagac

SEQ ID NO: 1775917 - DNA, 15 bp, Homo sapiens
agattcttttagacg

SEQ ID NO: 1775918 - DNA, 15 bp, Homo sapiens
gattcttttagacgt

SEQ ID NO: 1775919 - DNA, 15 bp, Homo sapiens
attcttttagacgtt

SEQ ID NO: 1775920 - DNA, 15 bp, Homo sapiens
ttcttttagacgtta

SEQ ID NO: 1775921 - DNA, 15 bp, Homo sapiens
tcttttagacgttaa

SEQ ID NO: 1775922 - DNA, 15 bp, Homo sapiens
cttttagacgttaat

SEQ ID NO: 1775923 - DNA, 15 bp, Homo sapiens
ttttagacgttaatt

SEQ ID NO: 1775924 - DNA, 15 bp, Homo sapiens
tttagacgttaattt

SEQ ID NO: 1775925 - DNA, 15 bp, Homo sapiens
ttagacgttaatttt

SEQ ID NO: 1775926 - DNA, 15 bp, Homo sapiens
tagacgttaattttt

SEQ ID NO: 1775927 - DNA, 15 bp, Homo sapiens
agacgttaatttttt

SEQ ID NO: 1775928 - DNA, 15 bp, Homo sapiens
gacgttaattttttt

SEQ ID NO: 1775929 - DNA, 15 bp, Homo sapiens
acgttaatttttttt

SEQ ID NO: 1775930 - DNA, 15 bp, Homo sapiens
cgttaattttttttt

SEQ ID NO: 1775931 - DNA, 15 bp, Homo sapiens
gttaatttttttttc

SEQ ID NO: 1775932 - DNA, 15 bp, Homo sapiens
ttaatttttttttca

SEQ ID NO: 1775933 - DNA, 15 bp, Homo sapiens
taatttttttttcaa

SEQ ID NO: 1775934 - DNA, 15 bp, Homo sapiens
aatttttttttcaaa

SEQ ID NO: 1775935 - DNA, 15 bp, Homo sapiens
atttttttttcaaaa

SEQ ID NO: 1775936 - DNA, 15 bp, Homo sapiens
tttttttttcaaaaa

SEQ ID NO: 1775937 - DNA, 15 bp, Homo sapiens
ttttttttcaaaaag

SEQ ID NO: 1775938 - DNA, 15 bp, Homo sapiens
tttttttcaaaaaga

SEQ ID NO: 1775939 - DNA, 15 bp, Homo sapiens
ttttttcaaaaagat

SEQ ID NO: 1775940 - DNA, 15 bp, Homo sapiens
tttttcaaaaagata

SEQ ID NO: 1775941 - DNA, 15 bp, Homo sapiens
ttttcaaaaagatac

SEQ ID NO: 1775942 - DNA, 15 bp, Homo sapiens
tttcaaaaagataca

SEQ ID NO: 1775943 - DNA, 15 bp, Homo sapiens
ttcaaaaagatacat

SEQ ID NO: 1775944 - DNA, 15 bp, Homo sapiens
tcaaaaagatacata

SEQ ID NO: 1775945 - DNA, 15 bp, Homo sapiens
caaaaagatacatat

SEQ ID NO: 1775946 - DNA, 15 bp, Homo sapiens
aaaaagatacatatg

SEQ ID NO: 1775947 - DNA, 15 bp, Homo sapiens
aaaagatacatatgt

SEQ ID NO: 1775948 - DNA, 15 bp, Homo sapiens
aaagatacatatgta

SEQ ID NO: 1775949 - DNA, 15 bp, Homo sapiens
aagatacatatgtac

SEQ ID NO: 1775950 - DNA, 15 bp, Homo sapiens
agatacatatgtact

SEQ ID NO: 1775951 - DNA, 15 bp, Homo sapiens
gatacatatgtactt

SEQ ID NO: 1775952 - DNA, 15 bp, Homo sapiens
atacatatgtacttt

SEQ ID NO: 1775953 - DNA, 15 bp, Homo sapiens
tacatatgtactttt

SEQ ID NO: 1775954 - DNA, 15 bp, Homo sapiens
acatatgtacttttc

SEQ ID NO: 1775955 - DNA, 15 bp, Homo sapiens
catatgtacttttct

SEQ ID NO: 1775956 - DNA, 15 bp, Homo sapiens
atatgtacttttcta

SEQ ID NO: 1775957 - DNA, 15 bp, Homo sapiens
tatgtacttttctat

SEQ ID NO: 1775958 - DNA, 15 bp, Homo sapiens
atgtacttttctatt

SEQ ID NO: 1775959 - DNA, 15 bp, Homo sapiens
tgtacttttctattt

SEQ ID NO: 1775960 - DNA, 15 bp, Homo sapiens
gtacttttctattta

SEQ ID NO: 1775961 - DNA, 15 bp, Homo sapiens
tacttttctatttat

SEQ ID NO: 1775962 - DNA, 15 bp, Homo sapiens
acttttctatttatg

SEQ ID NO: 1775963 - DNA, 15 bp, Homo sapiens
cttttctatttatga

SEQ ID NO: 1775964 - DNA, 15 bp, Homo sapiens
ttttctatttatgag

SEQ ID NO: 1775965 - DNA, 15 bp, Homo sapiens
tttctatttatgagt

SEQ ID NO: 1775966 - DNA, 15 bp, Homo sapiens
ttctatttatgagta

SEQ ID NO: 1775967 - DNA, 15 bp, Homo sapiens
tctatttatgagtat

SEQ ID NO: 1775968 - DNA, 15 bp, Homo sapiens
ctatttatgagtata

SEQ ID NO: 1775969 - DNA, 15 bp, Homo sapiens
tatttatgagtatac

SEQ ID NO: 1775970 - DNA, 15 bp, Homo sapiens
atttatgagtatacc

SEQ ID NO: 1775971 - DNA, 15 bp, Homo sapiens
tttatgagtatacct

SEQ ID NO: 1775972 - DNA, 15 bp, Homo sapiens
ttatgagtatacctg

SEQ ID NO: 1775973 - DNA, 15 bp, Homo sapiens
tatgagtatacctgg

SEQ ID NO: 1775974 - DNA, 15 bp, Homo sapiens
atgagtatacctggg

SEQ ID NO: 1775975 - DNA, 15 bp, Homo sapiens
tgagtatacctgggt

SEQ ID NO: 1775976 - DNA, 15 bp, Homo sapiens
gagtatacctgggta

SEQ ID NO: 1775977 - DNA, 15 bp, Homo sapiens
agtatacctgggtaa

SEQ ID NO: 1775978 - DNA, 15 bp, Homo sapiens
gtatacctgggtaaa

SEQ ID NO: 1775979 - DNA, 15 bp, Homo sapiens
tatacctgggtaaat

SEQ ID NO: 1775980 - DNA, 15 bp, Homo sapiens
atacctgggtaaata

SEQ ID NO: 1775981 - DNA, 15 bp, Homo sapiens
tacctgggtaaatat

SEQ ID NO: 1775982 - DNA, 15 bp, Homo sapiens
acctgggtaaatata

SEQ ID NO: 1775983 - DNA, 15 bp, Homo sapiens
cctgggtaaatatag

SEQ ID NO: 1775984 - DNA, 15 bp, Homo sapiens
ctgggtaaatataga

SEQ ID NO: 1775985 - DNA, 15 bp, Homo sapiens
tgggtaaatatagaa

SEQ ID NO: 1775986 - DNA, 15 bp, Homo sapiens
gggtaaatatagaac

SEQ ID NO: 1775987 - DNA, 15 bp, Homo sapiens
ggtaaatatagaaca

SEQ ID NO: 1775988 - DNA, 15 bp, Homo sapiens
gtaaatatagaacat

SEQ ID NO: 1775989 - DNA, 15 bp, Homo sapiens
taaatatagaacata

SEQ ID NO: 1775990 - DNA, 15 bp, Homo sapiens
aaatatagaacatag

SEQ ID NO: 1775991 - DNA, 15 bp, Homo sapiens
aatatagaacatagg

SEQ ID NO: 1775992 - DNA, 15 bp, Homo sapiens
atatagaacatagga

SEQ ID NO: 1775993 - DNA, 15 bp, Homo sapiens
tatagaacataggaa

SEQ ID NO: 1775994 - DNA, 15 bp, Homo sapiens
atagaacataggaaa

SEQ ID NO: 1775995 - DNA, 15 bp, Homo sapiens
tagaacataggaaaa

SEQ ID NO: 1775996 - DNA, 15 bp, Homo sapiens
agaacataggaaaat

SEQ ID NO: 1775997 - DNA, 15 bp, Homo sapiens
gaacataggaaaatg

SEQ ID NO: 1775998 - DNA, 15 bp, Homo sapiens
aacataggaaaatgt

SEQ ID NO: 1775999 - DNA, 15 bp, Homo sapiens
acataggaaaatgta

SEQ ID NO: 1776000 - DNA, 15 bp, Homo sapiens
cataggaaaatgtac

SEQ ID NO: 1776001 - DNA, 15 bp, Homo sapiens
ataggaaaatgtact

SEQ ID NO: 1776002 - DNA, 15 bp, Homo sapiens
taggaaaatgtactt

SEQ ID NO: 1776003 - DNA, 15 bp, Homo sapiens
aggaaaatgtacttt

SEQ ID NO: 1776004 - DNA, 15 bp, Homo sapiens
ggaaaatgtactttg

SEQ ID NO: 1776005 - DNA, 15 bp, Homo sapiens
gaaaatgtactttga

SEQ ID NO: 1776006 - DNA, 15 bp, Homo sapiens
aaaatgtactttgat

SEQ ID NO: 1776007 - DNA, 15 bp, Homo sapiens
aaatgtactttgatg

SEQ ID NO: 1776008 - DNA, 15 bp, Homo sapiens
aatgtactttgatgt

SEQ ID NO: 1776009 - DNA, 15 bp, Homo sapiens
atgtactttgatgtt

SEQ ID NO: 1776010 - DNA, 15 bp, Homo sapiens
tgtactttgatgttt

SEQ ID NO: 1776011 - DNA, 15 bp, Homo sapiens
gtactttgatgtttt

SEQ ID NO: 1776012 - DNA, 15 bp, Homo sapiens
tactttgatgtttta

SEQ ID NO: 1776013 - DNA, 15 bp, Homo sapiens
actttgatgttttaa

SEQ ID NO: 1776014 - DNA, 15 bp, Homo sapiens
ctttgatgttttaaa

SEQ ID NO: 1776015 - DNA, 15 bp, Homo sapiens
tttgatgttttaaaa

SEQ ID NO: 1776016 - DNA, 15 bp, Homo sapiens
ttgatgttttaaaac

SEQ ID NO: 1776017 - DNA, 15 bp, Homo sapiens
tgatgttttaaaaca

SEQ ID NO: 1776018 - DNA, 15 bp, Homo sapiens
gatgttttaaaacat

SEQ ID NO: 1776019 - DNA, 15 bp, Homo sapiens
atgttttaaaacatt

SEQ ID NO: 1776020 - DNA, 15 bp, Homo sapiens
tgttttaaaacattt

SEQ ID NO: 1776021 - DNA, 15 bp, Homo sapiens
gttttaaaacattta

SEQ ID NO: 1776022 - DNA, 15 bp, Homo sapiens
ttttaaaacatttaa

SEQ ID NO: 1776023 - DNA, 15 bp, Homo sapiens
tttaaaacatttaaa

SEQ ID NO: 1776024 - DNA, 15 bp, Homo sapiens
ttaaaacatttaaaa

SEQ ID NO: 1776025 - DNA, 15 bp, Homo sapiens
taaaacatttaaaat

SEQ ID NO: 1776026 - DNA, 15 bp, Homo sapiens
aaaacatttaaaatt

SEQ ID NO: 1776027 - DNA, 15 bp, Homo sapiens
aaacatttaaaatta

SEQ ID NO: 1776028 - DNA, 15 bp, Homo sapiens
aacatttaaaattat

SEQ ID NO: 1776029 - DNA, 15 bp, Homo sapiens
acatttaaaattatt

SEQ ID NO: 1776030 - DNA, 15 bp, Homo sapiens
catttaaaattattt

SEQ ID NO: 1776031 - DNA, 15 bp, Homo sapiens
atttaaaattattta

SEQ ID NO: 1776032 - DNA, 15 bp, Homo sapiens
ttaaaattatttaaa

SEQ ID NO: 1776033 - DNA, 15 bp, Homo sapiens
taaaattatttaaat

SEQ ID NO: 1776034 - DNA, 15 bp, Homo sapiens
aaaattatttaaata

SEQ ID NO: 1776035 - DNA, 15 bp, Homo sapiens
aaattatttaaatat

SEQ ID NO: 1776036 - DNA, 15 bp, Homo sapiens
aattatttaaatata

SEQ ID NO: 1776037 - DNA, 15 bp, Homo sapiens
attatttaaatatac

SEQ ID NO: 1776038 - DNA, 15 bp, Homo sapiens
ttatttaaatatacc

SEQ ID NO: 1776039 - DNA, 15 bp, Homo sapiens
tatttaaatatacca

SEQ ID NO: 1776040 - DNA, 15 bp, Homo sapiens
atttaaatataccac

SEQ ID NO: 1776041 - DNA, 15 bp, Homo sapiens
tttaaatataccact

SEQ ID NO: 1776042 - DNA, 15 bp, Homo sapiens
ttaaatataccacta

SEQ ID NO: 1776043 - DNA, 15 bp, Homo sapiens
taaatataccactaa

SEQ ID NO: 1776044 - DNA, 15 bp, Homo sapiens
aaatataccactaac

SEQ ID NO: 1776045 - DNA, 15 bp, Homo sapiens
aatataccactaact

SEQ ID NO: 1776046 - DNA, 15 bp, Homo sapiens
atataccactaactc

SEQ ID NO: 1776047 - DNA, 15 bp, Homo sapiens
tataccactaactct

SEQ ID NO: 1776048 - DNA, 15 bp, Homo sapiens
ataccactaactcta

SEQ ID NO: 1776049 - DNA, 15 bp, Homo sapiens
taccactaactctaa

SEQ ID NO: 1776050 - DNA, 15 bp, Homo sapiens
accactaactctaaa

SEQ ID NO: 1776051 - DNA, 15 bp, Homo sapiens
ccactaactctaaat

SEQ ID NO: 1776052 - DNA, 15 bp, Homo sapiens
cactaactctaaatt

SEQ ID NO: 1776053 - DNA, 15 bp, Homo sapiens
actaactctaaattt

SEQ ID NO: 1776054 - DNA, 15 bp, Homo sapiens
ctaactctaaatttt

SEQ ID NO: 1776055 - DNA, 15 bp, Homo sapiens
taactctaaatttta

SEQ ID NO: 1776056 - DNA, 15 bp, Homo sapiens
aactctaaattttaa

SEQ ID NO: 1776057 - DNA, 15 bp, Homo sapiens
actctaaattttaaa

SEQ ID NO: 1776058 - DNA, 15 bp, Homo sapiens
ctctaaattttaaaa

SEQ ID NO: 1776059 - DNA, 15 bp, Homo sapiens
tctaaattttaaaat

SEQ ID NO: 1776060 - DNA, 15 bp, Homo sapiens
ctaaattttaaaatt

SEQ ID NO: 1776061 - DNA, 15 bp, Homo sapiens
taaattttaaaatta

SEQ ID NO: 1776062 - DNA, 15 bp, Homo sapiens
aaattttaaaattat

SEQ ID NO: 1776063 - DNA, 15 bp, Homo sapiens
aattttaaaattatc

SEQ ID NO: 1776064 - DNA, 15 bp, Homo sapiens
attttaaaattatct

SEQ ID NO: 1776065 - DNA, 15 bp, Homo sapiens
ttttaaaattatctt

SEQ ID NO: 1776066 - DNA, 15 bp, Homo sapiens
tttaaaattatcttt

SEQ ID NO: 1776067 - DNA, 15 bp, Homo sapiens
ttaaaattatctttg

SEQ ID NO: 1776068 - DNA, 15 bp, Homo sapiens
taaaattatctttga

SEQ ID NO: 1776069 - DNA, 15 bp, Homo sapiens
aaaattatctttgat

SEQ ID NO: 1776070 - DNA, 15 bp, Homo sapiens
aaattatctttgatt

SEQ ID NO: 1776071 - DNA, 15 bp, Homo sapiens
aattatctttgatta

SEQ ID NO: 1776072 - DNA, 15 bp, Homo sapiens
attatctttgattag

SEQ ID NO: 1776073 - DNA, 15 bp, Homo sapiens
ttatctttgattaga

SEQ ID NO: 1776074 - DNA, 15 bp, Homo sapiens
tatctttgattagaa

SEQ ID NO: 1776075 - DNA, 15 bp, Homo sapiens
atctttgattagaag

SEQ ID NO: 1776076 - DNA, 15 bp, Homo sapiens
tctttgattagaagc

SEQ ID NO: 1776077 - DNA, 15 bp, Homo sapiens
ctttgattagaagca

SEQ ID NO: 1776078 - DNA, 15 bp, Homo sapiens
tttgattagaagcat

SEQ ID NO: 1776079 - DNA, 15 bp, Homo sapiens
ttgattagaagcatt

SEQ ID NO: 1776080 - DNA, 15 bp, Homo sapiens
tgattagaagcatta

SEQ ID NO: 1776081 - DNA, 15 bp, Homo sapiens
gattagaagcattaa

SEQ ID NO: 1776082 - DNA, 15 bp, Homo sapiens
attagaagcattaaa

SEQ ID NO: 1776083 - DNA, 15 bp, Homo sapiens
ttagaagcattaaaa

SEQ ID NO: 1776084 - DNA, 15 bp, Homo sapiens
tagaagcattaaaat

SEQ ID NO: 1776085 - DNA, 15 bp, Homo sapiens
agaagcattaaaatt

SEQ ID NO: 1776086 - DNA, 15 bp, Homo sapiens
gaagcattaaaattc

SEQ ID NO: 1776087 - DNA, 15 bp, Homo sapiens
aagcattaaaattct

SEQ ID NO: 1776088 - DNA, 15 bp, Homo sapiens
agcattaaaattctt

SEQ ID NO: 1776089 - DNA, 15 bp, Homo sapiens
gcattaaaattctta

SEQ ID NO: 1776090 - DNA, 15 bp, Homo sapiens
cattaaaattcttat

SEQ ID NO: 1776091 - DNA, 15 bp, Homo sapiens
attaaaattcttatt

SEQ ID NO: 1776092 - DNA, 15 bp, Homo sapiens
taaaattcttattta

SEQ ID NO: 1776093 - DNA, 15 bp, Homo sapiens
aaaattcttatttaa

SEQ ID NO: 1776094 - DNA, 15 bp, Homo sapiens
aaattcttatttaag

SEQ ID NO: 1776095 - DNA, 15 bp, Homo sapiens
aattcttatttaaga

SEQ ID NO: 1776096 - DNA, 15 bp, Homo sapiens
attcttatttaagat

SEQ ID NO: 1776097 - DNA, 15 bp, Homo sapiens
ttcttatttaagatg

SEQ ID NO: 1776098 - DNA, 15 bp, Homo sapiens
tcttatttaagatgt

SEQ ID NO: 1776099 - DNA, 15 bp, Homo sapiens
cttatttaagatgta

SEQ ID NO: 1776100 - DNA, 15 bp, Homo sapiens
ttatttaagatgtat

SEQ ID NO: 1776101 - DNA, 15 bp, Homo sapiens
tatttaagatgtata

SEQ ID NO: 1776102 - DNA, 15 bp, Homo sapiens
atttaagatgtatac

SEQ ID NO: 1776103 - DNA, 15 bp, Homo sapiens
tttaagatgtatact

SEQ ID NO: 1776104 - DNA, 15 bp, Homo sapiens
ttaagatgtatacta

SEQ ID NO: 1776105 - DNA, 15 bp, Homo sapiens
taagatgtatactat

SEQ ID NO: 1776106 - DNA, 15 bp, Homo sapiens
aagatgtatactatt

SEQ ID NO: 1776107 - DNA, 15 bp, Homo sapiens
agatgtatactattt

SEQ ID NO: 1776108 - DNA, 15 bp, Homo sapiens
gatgtatactatttg

SEQ ID NO: 1776109 - DNA, 15 bp, Homo sapiens
atgtatactatttga

SEQ ID NO: 1776110 - DNA, 15 bp, Homo sapiens
tgtatactatttgaa

SEQ ID NO: 1776111 - DNA, 15 bp, Homo sapiens
gtatactatttgaag

SEQ ID NO: 1776112 - DNA, 15 bp, Homo sapiens
tatactatttgaaga

SEQ ID NO: 1776113 - DNA, 15 bp, Homo sapiens
atactatttgaagaa

SEQ ID NO: 1776114 - DNA, 15 bp, Homo sapiens
tactatttgaagaag

SEQ ID NO: 1776115 - DNA, 15 bp, Homo sapiens
actatttgaagaaga

SEQ ID NO: 1776116 - DNA, 15 bp, Homo sapiens
ctatttgaagaagag

SEQ ID NO: 1776117 - DNA, 15 bp, Homo sapiens
tatttgaagaagaga

SEQ ID NO: 1776118 - DNA, 15 bp, Homo sapiens
atttgaagaagagaa

SEQ ID NO: 1776119 - DNA, 15 bp, Homo sapiens
tttgaagaagagaat

SEQ ID NO: 1776120 - DNA, 15 bp, Homo sapiens
ttgaagaagagaatt

SEQ ID NO: 1776121 - DNA, 15 bp, Homo sapiens
tgaagaagagaattg

SEQ ID NO: 1776122 - DNA, 15 bp, Homo sapiens
gaagaagagaattgg

SEQ ID NO: 1776123 - DNA, 15 bp, Homo sapiens
aagaagagaattggg

SEQ ID NO: 1776124 - DNA, 15 bp, Homo sapiens
agaagagaattggga

SEQ ID NO: 1776125 - DNA, 15 bp, Homo sapiens
gaagagaattgggat

SEQ ID NO: 1776126 - DNA, 15 bp, Homo sapiens
aagagaattgggatt

SEQ ID NO: 1776127 - DNA, 15 bp, Homo sapiens
agagaattgggattc

SEQ ID NO: 1776128 - DNA, 15 bp, Homo sapiens
gagaattgggattct

SEQ ID NO: 1776129 - DNA, 15 bp, Homo sapiens
agaattgggattctg

SEQ ID NO: 1776130 - DNA, 15 bp, Homo sapiens
gaattgggattctgt

SEQ ID NO: 1776131 - DNA, 15 bp, Homo sapiens
aattgggattctgtt

SEQ ID NO: 1776132 - DNA, 15 bp, Homo sapiens
attgggattctgttg

SEQ ID NO: 1776133 - DNA, 15 bp, Homo sapiens
ttgggattctgttgc

SEQ ID NO: 1776134 - DNA, 15 bp, Homo sapiens
tgggattctgttgcc

SEQ ID NO: 1776135 - DNA, 15 bp, Homo sapiens
gggattctgttgcct

SEQ ID NO: 1776136 - DNA, 15 bp, Homo sapiens
ggattctgttgcctt

SEQ ID NO: 1776137 - DNA, 15 bp, Homo sapiens
gattctgttgccttg

SEQ ID NO: 1776138 - DNA, 15 bp, Homo sapiens
attctgttgccttgc

SEQ ID NO: 1776139 - DNA, 15 bp, Homo sapiens
ttctgttgccttgct

SEQ ID NO: 1776140 - DNA, 15 bp, Homo sapiens
tctgttgccttgctt

SEQ ID NO: 1776141 - DNA, 15 bp, Homo sapiens
ctgttgccttgcttt

SEQ ID NO: 1776142 - DNA, 15 bp, Homo sapiens
tgttgccttgctttg

SEQ ID NO: 1776143 - DNA, 15 bp, Homo sapiens
gttgccttgctttgt

SEQ ID NO: 1776144 - DNA, 15 bp, Homo sapiens
ttgccttgctttgta

SEQ ID NO: 1776145 - DNA, 15 bp, Homo sapiens
tgccttgctttgtaa

SEQ ID NO: 1776146 - DNA, 15 bp, Homo sapiens
gccttgctttgtaac

SEQ ID NO: 1776147 - DNA, 15 bp, Homo sapiens
ccttgctttgtaact

SEQ ID NO: 1776148 - DNA, 15 bp, Homo sapiens
cttgctttgtaactt

SEQ ID NO: 1776149 - DNA, 15 bp, Homo sapiens
ttgctttgtaactta

SEQ ID NO: 1776150 - DNA, 15 bp, Homo sapiens
tgctttgtaacttaa

SEQ ID NO: 1776151 - DNA, 15 bp, Homo sapiens
gctttgtaacttaaa

SEQ ID NO: 1776152 - DNA, 15 bp, Homo sapiens
ctttgtaacttaaaa

SEQ ID NO: 1776153 - DNA, 15 bp, Homo sapiens
tttgtaacttaaaag

SEQ ID NO: 1776154 - DNA, 15 bp, Homo sapiens
ttgtaacttaaaaga

SEQ ID NO: 1776155 - DNA, 15 bp, Homo sapiens
tgtaacttaaaagag

SEQ ID NO: 1776156 - DNA, 15 bp, Homo sapiens
gtaacttaaaagagc

SEQ ID NO: 1776157 - DNA, 15 bp, Homo sapiens
taacttaaaagagct

SEQ ID NO: 1776158 - DNA, 15 bp, Homo sapiens
aacttaaaagagctt

SEQ ID NO: 1776159 - DNA, 15 bp, Homo sapiens
acttaaaagagcttt

SEQ ID NO: 1776160 - DNA, 15 bp, Homo sapiens
cttaaaagagctttt

SEQ ID NO: 1776161 - DNA, 15 bp, Homo sapiens
ttaaaagagcttttt

SEQ ID NO: 1776162 - DNA, 15 bp, Homo sapiens
taaaagagctttttc

SEQ ID NO: 1776163 - DNA, 15 bp, Homo sapiens
aaaagagctttttca

SEQ ID NO: 1776164 - DNA, 15 bp, Homo sapiens
aaagagctttttcag

SEQ ID NO: 1776165 - DNA, 15 bp, Homo sapiens
aagagctttttcagg

SEQ ID NO: 1776166 - DNA, 15 bp, Homo sapiens
agagctttttcaggg

SEQ ID NO: 1776167 - DNA, 15 bp, Homo sapiens
gagctttttcaggga

SEQ ID NO: 1776168 - DNA, 15 bp, Homo sapiens
agctttttcagggac

SEQ ID NO: 1776169 - DNA, 15 bp, Homo sapiens
gctttttcagggact

SEQ ID NO: 1776170 - DNA, 15 bp, Homo sapiens
ctttttcagggactc

SEQ ID NO: 1776171 - DNA, 15 bp, Homo sapiens
tttttcagggactcc

SEQ ID NO: 1776172 - DNA, 15 bp, Homo sapiens
ttttcagggactccc

SEQ ID NO: 1776173 - DNA, 15 bp, Homo sapiens
tttcagggactccct

SEQ ID NO: 1776174 - DNA, 15 bp, Homo sapiens
ttcagggactccctc

SEQ ID NO: 1776175 - DNA, 15 bp, Homo sapiens
tcagggactccctca

SEQ ID NO: 1776176 - DNA, 15 bp, Homo sapiens
cagggactccctcag

SEQ ID NO: 1776177 - DNA, 15 bp, Homo sapiens
agggactccctcaga

SEQ ID NO: 1776178 - DNA, 15 bp, Homo sapiens
gggactccctcagag

SEQ ID NO: 1776179 - DNA, 15 bp, Homo sapiens
ggactccctcagagt

SEQ ID NO: 1776180 - DNA, 15 bp, Homo sapiens
gactccctcagagta

SEQ ID NO: 1776181 - DNA, 15 bp, Homo sapiens
actccctcagagtac

SEQ ID NO: 1776182 - DNA, 15 bp, Homo sapiens
ctccctcagagtacc

SEQ ID NO: 1776183 - DNA, 15 bp, Homo sapiens
tccctcagagtacct

SEQ ID NO: 1776184 - DNA, 15 bp, Homo sapiens
ccctcagagtacctg

SEQ ID NO: 1776185 - DNA, 15 bp, Homo sapiens
cctcagagtacctgc

SEQ ID NO: 1776186 - DNA, 15 bp, Homo sapiens
ctcagagtacctgct

SEQ ID NO: 1776187 - DNA, 15 bp, Homo sapiens
tcagagtacctgctg

SEQ ID NO: 1776188 - DNA, 15 bp, Homo sapiens
cagagtacctgctgg

SEQ ID NO: 1776189 - DNA, 15 bp, Homo sapiens
agagtacctgctgga

SEQ ID NO: 1776190 - DNA, 15 bp, Homo sapiens
gagtacctgctggag

SEQ ID NO: 1776191 - DNA, 15 bp, Homo sapiens
agtacctgctggaga

SEQ ID NO: 1776192 - DNA, 15 bp, Homo sapiens
gtacctgctggagat

SEQ ID NO: 1776193 - DNA, 15 bp, Homo sapiens
tacctgctggagatg

SEQ ID NO: 1776194 - DNA, 15 bp, Homo sapiens
acctgctggagatga

SEQ ID NO: 1776195 - DNA, 15 bp, Homo sapiens
cctgctggagatgaa

SEQ ID NO: 1776196 - DNA, 15 bp, Homo sapiens
ctgctggagatgaat

SEQ ID NO: 1776197 - DNA, 15 bp, Homo sapiens
tgctggagatgaatc

SEQ ID NO: 1776198 - DNA, 15 bp, Homo sapiens
gctggagatgaatct

SEQ ID NO: 1776199 - DNA, 15 bp, Homo sapiens
ctggagatgaatctg

SEQ ID NO: 1776200 - DNA, 15 bp, Homo sapiens
tggagatgaatctgt

SEQ ID NO: 1776201 - DNA, 15 bp, Homo sapiens
ggagatgaatctgta

SEQ ID NO: 1776202 - DNA, 15 bp, Homo sapiens
gagatgaatctgtaa

SEQ ID NO: 1776203 - DNA, 15 bp, Homo sapiens
agatgaatctgtaaa

SEQ ID NO: 1776204 - DNA, 15 bp, Homo sapiens
gatgaatctgtaaaa

SEQ ID NO: 1776205 - DNA, 15 bp, Homo sapiens
atgaatctgtaaaaa

SEQ ID NO: 1776206 - DNA, 15 bp, Homo sapiens
tgaatctgtaaaaaa

SEQ ID NO: 1776207 - DNA, 15 bp, Homo sapiens
gaatctgtaaaaaat

SEQ ID NO: 1776208 - DNA, 15 bp, Homo sapiens
aatctgtaaaaaatt

SEQ ID NO: 1776209 - DNA, 15 bp, Homo sapiens
atctgtaaaaaattt

SEQ ID NO: 1776210 - DNA, 15 bp, Homo sapiens
tctgtaaaaaatttt

SEQ ID NO: 1776211 - DNA, 15 bp, Homo sapiens
ctgtaaaaaattttt

SEQ ID NO: 1776212 - DNA, 15 bp, Homo sapiens
tgtaaaaaatttttg

SEQ ID NO: 1776213 - DNA, 15 bp, Homo sapiens
gtaaaaaatttttgt

SEQ ID NO: 1776214 - DNA, 15 bp, Homo sapiens
taaaaaatttttgtt

SEQ ID NO: 1776215 - DNA, 15 bp, Homo sapiens
aaaaaatttttgttc

SEQ ID NO: 1776216 - DNA, 15 bp, Homo sapiens
aaaaatttttgttca

SEQ ID NO: 1776217 - DNA, 15 bp, Homo sapiens
aaaatttttgttcag

SEQ ID NO: 1776218 - DNA, 15 bp, Homo sapiens
aaatttttgttcaga

SEQ ID NO: 1776219 - DNA, 15 bp, Homo sapiens
aatttttgttcagag

SEQ ID NO: 1776220 - DNA, 15 bp, Homo sapiens
atttttgttcagaga

SEQ ID NO: 1776221 - DNA, 15 bp, Homo sapiens
tttttgttcagagaa

SEQ ID NO: 1776222 - DNA, 15 bp, Homo sapiens
ttttgttcagagaat

SEQ ID NO: 1776223 - DNA, 15 bp, Homo sapiens
tttgttcagagaatt

SEQ ID NO: 1776224 - DNA, 15 bp, Homo sapiens
ttgttcagagaattt

SEQ ID NO: 1776225 - DNA, 15 bp, Homo sapiens
tgttcagagaatttc

SEQ ID NO: 1776226 - DNA, 15 bp, Homo sapiens
gttcagagaatttct

SEQ ID NO: 1776227 - DNA, 15 bp, Homo sapiens
ttcagagaatttctg

SEQ ID NO: 1776228 - DNA, 15 bp, Homo sapiens
tcagagaatttctgc

SEQ ID NO: 1776229 - DNA, 15 bp, Homo sapiens
cagagaatttctgcc

SEQ ID NO: 1776230 - DNA, 15 bp, Homo sapiens
agagaatttctgcca

SEQ ID NO: 1776231 - DNA, 15 bp, Homo sapiens
gagaatttctgccac

SEQ ID NO: 1776232 - DNA, 15 bp, Homo sapiens
agaatttctgccact

SEQ ID NO: 1776233 - DNA, 15 bp, Homo sapiens
gaatttctgccacta

SEQ ID NO: 1776234 - DNA, 15 bp, Homo sapiens
aatttctgccactaa

SEQ ID NO: 1776235 - DNA, 15 bp, Homo sapiens
atttctgccactaaa

SEQ ID NO: 1776236 - DNA, 15 bp, Homo sapiens
tttctgccactaaat

SEQ ID NO: 1776237 - DNA, 15 bp, Homo sapiens
ttctgccactaaata

SEQ ID NO: 1776238 - DNA, 15 bp, Homo sapiens
tctgccactaaataa

SEQ ID NO: 1776239 - DNA, 15 bp, Homo sapiens
ctgccactaaataag

SEQ ID NO: 1776240 - DNA, 15 bp, Homo sapiens
tgccactaaataagt

SEQ ID NO: 1776241 - DNA, 15 bp, Homo sapiens
gccactaaataagtc

SEQ ID NO: 1776242 - DNA, 15 bp, Homo sapiens
ccactaaataagtct

SEQ ID NO: 1776243 - DNA, 15 bp, Homo sapiens
cactaaataagtctt

SEQ ID NO: 1776244 - DNA, 15 bp, Homo sapiens
actaaataagtctta

SEQ ID NO: 1776245 - DNA, 15 bp, Homo sapiens
ctaaataagtcttaa

SEQ ID NO: 1776246 - DNA, 15 bp, Homo sapiens
taaataagtcttaaa

SEQ ID NO: 1776247 - DNA, 15 bp, Homo sapiens
aaataagtcttaaat

SEQ ID NO: 1776248 - DNA, 15 bp, Homo sapiens
aataagtcttaaata

SEQ ID NO: 1776249 - DNA, 15 bp, Homo sapiens
ataagtcttaaataa

SEQ ID NO: 1776250 - DNA, 15 bp, Homo sapiens
taagtcttaaataag

SEQ ID NO: 1776251 - DNA, 15 bp, Homo sapiens
aagtcttaaataagt

SEQ ID NO: 1776252 - DNA, 15 bp, Homo sapiens
agtcttaaataagta

SEQ ID NO: 1776253 - DNA, 15 bp, Homo sapiens
gtcttaaataagtat

SEQ ID NO: 1776254 - DNA, 15 bp, Homo sapiens
tcttaaataagtatg

SEQ ID NO: 1776255 - DNA, 15 bp, Homo sapiens
cttaaataagtatgc

SEQ ID NO: 1776256 - DNA, 15 bp, Homo sapiens
ttaaataagtatgcc

SEQ ID NO: 1776257 - DNA, 15 bp, Homo sapiens
taaataagtatgcca

SEQ ID NO: 1776258 - DNA, 15 bp, Homo sapiens
aaataagtatgccac

SEQ ID NO: 1776259 - DNA, 15 bp, Homo sapiens
aataagtatgccaca

SEQ ID NO: 1776260 - DNA, 15 bp, Homo sapiens
ataagtatgccacat

SEQ ID NO: 1776261 - DNA, 15 bp, Homo sapiens
taagtatgccacata

SEQ ID NO: 1776262 - DNA, 15 bp, Homo sapiens
aagtatgccacatag

SEQ ID NO: 1776263 - DNA, 15 bp, Homo sapiens
agtatgccacatagg

SEQ ID NO: 1776264 - DNA, 15 bp, Homo sapiens
gtatgccacatagga

SEQ ID NO: 1776265 - DNA, 15 bp, Homo sapiens
tatgccacataggat

SEQ ID NO: 1776266 - DNA, 15 bp, Homo sapiens
atgccacataggata

SEQ ID NO: 1776267 - DNA, 15 bp, Homo sapiens
tgccacataggatag

SEQ ID NO: 1776268 - DNA, 15 bp, Homo sapiens
gccacataggataga

SEQ ID NO: 1776269 - DNA, 15 bp, Homo sapiens
ccacataggatagac

SEQ ID NO: 1776270 - DNA, 15 bp, Homo sapiens
cacataggatagact

SEQ ID NO: 1776271 - DNA, 15 bp, Homo sapiens
acataggatagactg

SEQ ID NO: 1776272 - DNA, 15 bp, Homo sapiens
cataggatagactgt

SEQ ID NO: 1776273 - DNA, 15 bp, Homo sapiens
ataggatagactgta

SEQ ID NO: 1776274 - DNA, 15 bp, Homo sapiens
taggatagactgtat

SEQ ID NO: 1776275 - DNA, 15 bp, Homo sapiens
aggatagactgtatt

SEQ ID NO: 1776276 - DNA, 15 bp, Homo sapiens
ggatagactgtattt

SEQ ID NO: 1776277 - DNA, 15 bp, Homo sapiens
gatagactgtattta

SEQ ID NO: 1776278 - DNA, 15 bp, Homo sapiens
atagactgtatttaa

SEQ ID NO: 1776279 - DNA, 15 bp, Homo sapiens
tagactgtatttaaa

SEQ ID NO: 1776280 - DNA, 15 bp, Homo sapiens
agactgtatttaaat

SEQ ID NO: 1776281 - DNA, 15 bp, Homo sapiens
gactgtatttaaatg

SEQ ID NO: 1776282 - DNA, 15 bp, Homo sapiens
actgtatttaaatga

SEQ ID NO: 1776283 - DNA, 15 bp, Homo sapiens
ctgtatttaaatgaa

SEQ ID NO: 1776284 - DNA, 15 bp, Homo sapiens
tgtatttaaatgaaa

SEQ ID NO: 1776285 - DNA, 15 bp, Homo sapiens
gtatttaaatgaaac

SEQ ID NO: 1776286 - DNA, 15 bp, Homo sapiens
tatttaaatgaaacc

SEQ ID NO: 1776287 - DNA, 15 bp, Homo sapiens
atttaaatgaaacca

SEQ ID NO: 1776288 - DNA, 15 bp, Homo sapiens
tttaaatgaaaccat

SEQ ID NO: 1776289 - DNA, 15 bp, Homo sapiens
ttaaatgaaaccatt

SEQ ID NO: 1776290 - DNA, 15 bp, Homo sapiens
taaatgaaaccattt

SEQ ID NO: 1776291 - DNA, 15 bp, Homo sapiens
aaatgaaaccatttt

SEQ ID NO: 1776292 - DNA, 15 bp, Homo sapiens
aatgaaaccattttt

SEQ ID NO: 1776293 - DNA, 15 bp, Homo sapiens
atgaaaccatttttt

SEQ ID NO: 1776294 - DNA, 15 bp, Homo sapiens
tgaaaccatttttta

SEQ ID NO: 1776295 - DNA, 15 bp, Homo sapiens
gaaaccattttttat

SEQ ID NO: 1776296 - DNA, 15 bp, Homo sapiens
aaaccattttttata

SEQ ID NO: 1776297 - DNA, 15 bp, Homo sapiens
aaccattttttataa

SEQ ID NO: 1776298 - DNA, 15 bp, Homo sapiens
accattttttataac

SEQ ID NO: 1776299 - DNA, 15 bp, Homo sapiens
ccattttttataact

SEQ ID NO: 1776300 - DNA, 15 bp, Homo sapiens
cattttttataactt

SEQ ID NO: 1776301 - DNA, 15 bp, Homo sapiens
attttttataactta

SEQ ID NO: 1776302 - DNA, 15 bp, Homo sapiens
ttttttataacttac

SEQ ID NO: 1776303 - DNA, 15 bp, Homo sapiens
tttttataacttaca

SEQ ID NO: 1776304 - DNA, 15 bp, Homo sapiens
ttttataacttacac

SEQ ID NO: 1776305 - DNA, 15 bp, Homo sapiens
tttataacttacacc

SEQ ID NO: 1776306 - DNA, 15 bp, Homo sapiens
ttataacttacacca

SEQ ID NO: 1776307 - DNA, 15 bp, Homo sapiens
tataacttacaccaa

SEQ ID NO: 1776308 - DNA, 15 bp, Homo sapiens
ataacttacaccaaa

SEQ ID NO: 1776309 - DNA, 15 bp, Homo sapiens
taacttacaccaaat

SEQ ID NO: 1776310 - DNA, 15 bp, Homo sapiens
aacttacaccaaata

SEQ ID NO: 1776311 - DNA, 15 bp, Homo sapiens
acttacaccaaatat

SEQ ID NO: 1776312 - DNA, 15 bp, Homo sapiens
cttacaccaaatatt

SEQ ID NO: 1776313 - DNA, 15 bp, Homo sapiens
ttacaccaaatatta

SEQ ID NO: 1776314 - DNA, 15 bp, Homo sapiens
tacaccaaatattat

SEQ ID NO: 1776315 - DNA, 15 bp, Homo sapiens
acaccaaatattatg

SEQ ID NO: 1776316 - DNA, 15 bp, Homo sapiens
caccaaatattatga

SEQ ID NO: 1776317 - DNA, 15 bp, Homo sapiens
accaaatattatgac

SEQ ID NO: 1776318 - DNA, 15 bp, Homo sapiens
ccaaatattatgaca

SEQ ID NO: 1776319 - DNA, 15 bp, Homo sapiens
caaatattatgacaa

SEQ ID NO: 1776320 - DNA, 15 bp, Homo sapiens
aaatattatgacaaa

SEQ ID NO: 1776321 - DNA, 15 bp, Homo sapiens
aatattatgacaaaa

SEQ ID NO: 1776322 - DNA, 15 bp, Homo sapiens
atattatgacaaaag

SEQ ID NO: 1776323 - DNA, 15 bp, Homo sapiens
tattatgacaaaagc

SEQ ID NO: 1776324 - DNA, 15 bp, Homo sapiens
attatgacaaaagca

SEQ ID NO: 1776325 - DNA, 15 bp, Homo sapiens
ttatgacaaaagcat

SEQ ID NO: 1776326 - DNA, 15 bp, Homo sapiens
tatgacaaaagcata

SEQ ID NO: 1776327 - DNA, 15 bp, Homo sapiens
atgacaaaagcataa

SEQ ID NO: 1776328 - DNA, 15 bp, Homo sapiens
tgacaaaagcataat

SEQ ID NO: 1776329 - DNA, 15 bp, Homo sapiens
gacaaaagcataatt

SEQ ID NO: 1776330 - DNA, 15 bp, Homo sapiens
acaaaagcataattg

SEQ ID NO: 1776331 - DNA, 15 bp, Homo sapiens
caaaagcataattgt

SEQ ID NO: 1776332 - DNA, 15 bp, Homo sapiens
aaaagcataattgtt

SEQ ID NO: 1776333 - DNA, 15 bp, Homo sapiens
aaagcataattgttt

SEQ ID NO: 1776334 - DNA, 15 bp, Homo sapiens
aagcataattgtttc

SEQ ID NO: 1776335 - DNA, 15 bp, Homo sapiens
agcataattgtttct

SEQ ID NO: 1776336 - DNA, 15 bp, Homo sapiens
gcataattgtttctt

SEQ ID NO: 1776337 - DNA, 15 bp, Homo sapiens
cataattgtttcttg

SEQ ID NO: 1776338 - DNA, 15 bp, Homo sapiens
ataattgtttcttga

SEQ ID NO: 1776339 - DNA, 15 bp, Homo sapiens
taattgtttcttgat

SEQ ID NO: 1776340 - DNA, 15 bp, Homo sapiens
aattgtttcttgata

SEQ ID NO: 1776341 - DNA, 15 bp, Homo sapiens
attgtttcttgataa

SEQ ID NO: 1776342 - DNA, 15 bp, Homo sapiens
ttgtttcttgataaa

SEQ ID NO: 1776343 - DNA, 15 bp, Homo sapiens
tgtttcttgataaaa

SEQ ID NO: 1776344 - DNA, 15 bp, Homo sapiens
gtttcttgataaaac

SEQ ID NO: 1776345 - DNA, 15 bp, Homo sapiens
tcttgataaaactgt

SEQ ID NO: 1776346 - DNA, 15 bp, Homo sapiens
cttgataaaactgtt

SEQ ID NO: 1776347 - DNA, 15 bp, Homo sapiens
ttgataaaactgttc

SEQ ID NO: 1776348 - DNA, 15 bp, Homo sapiens
tgataaaactgttcc

SEQ ID NO: 1776349 - DNA, 15 bp, Homo sapiens
gataaaactgttcca

SEQ ID NO: 1776350 - DNA, 15 bp, Homo sapiens
ataaaactgttccac

SEQ ID NO: 1776351 - DNA, 15 bp, Homo sapiens
taaaactgttccact

SEQ ID NO: 1776352 - DNA, 15 bp, Homo sapiens
aaaactgttccactg

SEQ ID NO: 1776353 - DNA, 15 bp, Homo sapiens
aaactgttccactgt

SEQ ID NO: 1776354 - DNA, 15 bp, Homo sapiens
aactgttccactgtt

SEQ ID NO: 1776355 - DNA, 15 bp, Homo sapiens
actgttccactgttt

SEQ ID NO: 1776356 - DNA, 15 bp, Homo sapiens
ctgttccactgtttt

SEQ ID NO: 1776357 - DNA, 15 bp, Homo sapiens
tgttccactgtttta

SEQ ID NO: 1776358 - DNA, 15 bp, Homo sapiens
gttccactgttttat

SEQ ID NO: 1776359 - DNA, 15 bp, Homo sapiens
ttccactgttttatt

SEQ ID NO: 1776360 - DNA, 15 bp, Homo sapiens
tccactgttttattt

SEQ ID NO: 1776361 - DNA, 15 bp, Homo sapiens
ccactgttttatttg

SEQ ID NO: 1776362 - DNA, 15 bp, Homo sapiens
cactgttttatttgt

SEQ ID NO: 1776363 - DNA, 15 bp, Homo sapiens
actgttttatttgtt

SEQ ID NO: 1776364 - DNA, 15 bp, Homo sapiens
ctgttttatttgttt

SEQ ID NO: 1776365 - DNA, 15 bp, Homo sapiens
tgttttatttgtttt

SEQ ID NO: 1776366 - DNA, 15 bp, Homo sapiens
gttttatttgtttta

SEQ ID NO: 1776367 - DNA, 15 bp, Homo sapiens
ttttatttgttttac

SEQ ID NO: 1776368 - DNA, 15 bp, Homo sapiens
tttatttgttttact

SEQ ID NO: 1776369 - DNA, 15 bp, Homo sapiens
ttatttgttttactg

SEQ ID NO: 1776370 - DNA, 15 bp, Homo sapiens
tatttgttttactgt

SEQ ID NO: 1776371 - DNA, 15 bp, Homo sapiens
atttgttttactgtt

SEQ ID NO: 1776372 - DNA, 15 bp, Homo sapiens
tttgttttactgtta

SEQ ID NO: 1776373 - DNA, 15 bp, Homo sapiens
ttgttttactgttaa

SEQ ID NO: 1776374 - DNA, 15 bp, Homo sapiens
tgttttactgttaac

SEQ ID NO: 1776375 - DNA, 15 bp, Homo sapiens
gttttactgttaaca

SEQ ID NO: 1776376 - DNA, 15 bp, Homo sapiens
ttttactgttaacaa

SEQ ID NO: 1776377 - DNA, 15 bp, Homo sapiens
tttactgttaacaaa

SEQ ID NO: 1776378 - DNA, 15 bp, Homo sapiens
ttactgttaacaaaa

SEQ ID NO: 1776379 - DNA, 15 bp, Homo sapiens
tactgttaacaaaaa

SEQ ID NO: 1776380 - DNA, 15 bp, Homo sapiens
actgttaacaaaaat

SEQ ID NO: 1776381 - DNA, 15 bp, Homo sapiens
ctgttaacaaaaatg

SEQ ID NO: 1776382 - DNA, 15 bp, Homo sapiens
tgttaacaaaaatgc

SEQ ID NO: 1776383 - DNA, 15 bp, Homo sapiens
gttaacaaaaatgca

SEQ ID NO: 1776384 - DNA, 15 bp, Homo sapiens
ttaacaaaaatgcat

SEQ ID NO: 1776385 - DNA, 15 bp, Homo sapiens
taacaaaaatgcatt

SEQ ID NO: 1776386 - DNA, 15 bp, Homo sapiens
aacaaaaatgcattt

SEQ ID NO: 1776387 - DNA, 15 bp, Homo sapiens
acaaaaatgcatttt

SEQ ID NO: 1776388 - DNA, 15 bp, Homo sapiens
caaaaatgcattttt

SEQ ID NO: 1776389 - DNA, 15 bp, Homo sapiens
aaaaatgcatttttt

SEQ ID NO: 1776390 - DNA, 15 bp, Homo sapiens
aaaatgcattttttt

SEQ ID NO: 1776391 - DNA, 15 bp, Homo sapiens
aaatgcatttttttt

SEQ ID NO: 1776392 - DNA, 15 bp, Homo sapiens
aatgcattttttttt

SEQ ID NO: 1776393 - DNA, 15 bp, Homo sapiens
atgcatttttttttt

SEQ ID NO: 1776394 - DNA, 15 bp, Homo sapiens
ttttttttttttacc

SEQ ID NO: 1776395 - DNA, 15 bp, Homo sapiens
tttttttttttacct

SEQ ID NO: 1776396 - DNA, 15 bp, Homo sapiens
ttttttttttacctt

SEQ ID NO: 1776397 - DNA, 15 bp, Homo sapiens
tttttttttaccttt

SEQ ID NO: 1776398 - DNA, 15 bp, Homo sapiens
ttttttttaccttta

SEQ ID NO: 1776399 - DNA, 15 bp, Homo sapiens
tttttttacctttag

SEQ ID NO: 1776400 - DNA, 15 bp, Homo sapiens
ttttttacctttagt

SEQ ID NO: 1776401 - DNA, 15 bp, Homo sapiens
tttttacctttagta

SEQ ID NO: 1776402 - DNA, 15 bp, Homo sapiens
ttttacctttagtag

SEQ ID NO: 1776403 - DNA, 15 bp, Homo sapiens
tttacctttagtagg

SEQ ID NO: 1776404 - DNA, 15 bp, Homo sapiens
ttacctttagtaggt

SEQ ID NO: 1776405 - DNA, 15 bp, Homo sapiens
tacctttagtaggta

SEQ ID NO: 1776406 - DNA, 15 bp, Homo sapiens
acctttagtaggtat

SEQ ID NO: 1776407 - DNA, 15 bp, Homo sapiens
cctttagtaggtatg

SEQ ID NO: 1776408 - DNA, 15 bp, Homo sapiens
ctttagtaggtatgc

SEQ ID NO: 1776409 - DNA, 15 bp, Homo sapiens
tttagtaggtatgca

SEQ ID NO: 1776410 - DNA, 15 bp, Homo sapiens
ttagtaggtatgcat

SEQ ID NO: 1776411 - DNA, 15 bp, Homo sapiens
tagtaggtatgcatt

SEQ ID NO: 1776412 - DNA, 15 bp, Homo sapiens
agtaggtatgcattg

SEQ ID NO: 1776413 - DNA, 15 bp, Homo sapiens
gtaggtatgcattgt

SEQ ID NO: 1776414 - DNA, 15 bp, Homo sapiens
taggtatgcattgta

SEQ ID NO: 1776415 - DNA, 15 bp, Homo sapiens
aggtatgcattgtat

SEQ ID NO: 1776416 - DNA, 15 bp, Homo sapiens
ggtatgcattgtatt

SEQ ID NO: 1776417 - DNA, 15 bp, Homo sapiens
gtatgcattgtatta

SEQ ID NO: 1776418 - DNA, 15 bp, Homo sapiens
tatgcattgtattac

SEQ ID NO: 1776419 - DNA, 15 bp, Homo sapiens
atgcattgtattaca

SEQ ID NO: 1776420 - DNA, 15 bp, Homo sapiens
tgcattgtattacaa

SEQ ID NO: 1776421 - DNA, 15 bp, Homo sapiens
gcattgtattacaaa

SEQ ID NO: 1776422 - DNA, 15 bp, Homo sapiens
cattgtattacaaaa

SEQ ID NO: 1776423 - DNA, 15 bp, Homo sapiens
attgtattacaaaac

SEQ ID NO: 1776424 - DNA, 15 bp, Homo sapiens
ttgtattacaaaaca

SEQ ID NO: 1776425 - DNA, 15 bp, Homo sapiens
tgtattacaaaacaa

SEQ ID NO: 1776426 - DNA, 15 bp, Homo sapiens
gtattacaaaacaat

SEQ ID NO: 1776427 - DNA, 15 bp, Homo sapiens
tattacaaaacaatg

SEQ ID NO: 1776428 - DNA, 15 bp, Homo sapiens
attacaaaacaatga

SEQ ID NO: 1776429 - DNA, 15 bp, Homo sapiens
ttacaaaacaatgat

SEQ ID NO: 1776430 - DNA, 15 bp, Homo sapiens
tacaaaacaatgata

SEQ ID NO: 1776431 - DNA, 15 bp, Homo sapiens
acaaaacaatgatat

SEQ ID NO: 1776432 - DNA, 15 bp, Homo sapiens
caaaacaatgatatc

SEQ ID NO: 1776433 - DNA, 15 bp, Homo sapiens
aaaacaatgatatct

SEQ ID NO: 1776434 - DNA, 15 bp, Homo sapiens
aaacaatgatatctt

SEQ ID NO: 1776435 - DNA, 15 bp, Homo sapiens
aacaatgatatcttt

SEQ ID NO: 1776436 - DNA, 15 bp, Homo sapiens
acaatgatatctttt

SEQ ID NO: 1776437 - DNA, 15 bp, Homo sapiens
caatgatatcttttg

SEQ ID NO: 1776438 - DNA, 15 bp, Homo sapiens
aatgatatcttttgg

SEQ ID NO: 1776439 - DNA, 15 bp, Homo sapiens
atgatatcttttgga

SEQ ID NO: 1776440 - DNA, 15 bp, Homo sapiens
tgatatcttttggaa

SEQ ID NO: 1776441 - DNA, 15 bp, Homo sapiens
gatatcttttggaaa

SEQ ID NO: 1776442 - DNA, 15 bp, Homo sapiens
atatcttttggaaaa

SEQ ID NO: 1776443 - DNA, 15 bp, Homo sapiens
tatcttttggaaaac

SEQ ID NO: 1776444 - DNA, 15 bp, Homo sapiens
atcttttggaaaact

SEQ ID NO: 1776445 - DNA, 15 bp, Homo sapiens
tcttttggaaaactt

SEQ ID NO: 1776446 - DNA, 15 bp, Homo sapiens
cttttggaaaacttt

SEQ ID NO: 1776447 - DNA, 15 bp, Homo sapiens
ttttggaaaactttc

SEQ ID NO: 1776448 - DNA, 15 bp, Homo sapiens
tttggaaaactttca

SEQ ID NO: 1776449 - DNA, 15 bp, Homo sapiens
ttggaaaactttcag

SEQ ID NO: 1776450 - DNA, 15 bp, Homo sapiens
tggaaaactttcagt

SEQ ID NO: 1776451 - DNA, 15 bp, Homo sapiens
ggaaaactttcagtt

SEQ ID NO: 1776452 - DNA, 15 bp, Homo sapiens
gaaaactttcagtta

SEQ ID NO: 1776453 - DNA, 15 bp, Homo sapiens
aaaactttcagttaa

SEQ ID NO: 1776454 - DNA, 15 bp, Homo sapiens
aaactttcagttaaa

SEQ ID NO: 1776455 - DNA, 15 bp, Homo sapiens
aactttcagttaaac

SEQ ID NO: 1776456 - DNA, 15 bp, Homo sapiens
actttcagttaaact

SEQ ID NO: 1776457 - DNA, 15 bp, Homo sapiens
ctttcagttaaacta

SEQ ID NO: 1776458 - DNA, 15 bp, Homo sapiens
tttcagttaaactag

SEQ ID NO: 1776459 - DNA, 15 bp, Homo sapiens
ttcagttaaactaga

SEQ ID NO: 1776460 - DNA, 15 bp, Homo sapiens
tcagttaaactagac

SEQ ID NO: 1776461 - DNA, 15 bp, Homo sapiens
cagttaaactagaca

SEQ ID NO: 1776462 - DNA, 15 bp, Homo sapiens
agttaaactagacaa

SEQ ID NO: 1776463 - DNA, 15 bp, Homo sapiens
gttaaactagacaaa

SEQ ID NO: 1776464 - DNA, 15 bp, Homo sapiens
ttaaactagacaaat

SEQ ID NO: 1776465 - DNA, 15 bp, Homo sapiens
taaactagacaaata

SEQ ID NO: 1776466 - DNA, 15 bp, Homo sapiens
aaactagacaaataa

SEQ ID NO: 1776467 - DNA, 15 bp, Homo sapiens
aactagacaaataag

SEQ ID NO: 1776468 - DNA, 15 bp, Homo sapiens
actagacaaataagg

SEQ ID NO: 1776469 - DNA, 15 bp, Homo sapiens
ctagacaaataagga

SEQ ID NO: 1776470 - DNA, 15 bp, Homo sapiens
tagacaaataaggac

SEQ ID NO: 1776471 - DNA, 15 bp, Homo sapiens
agacaaataaggact

SEQ ID NO: 1776472 - DNA, 15 bp, Homo sapiens
gacaaataaggactt

SEQ ID NO: 1776473 - DNA, 15 bp, Homo sapiens
acaaataaggacttt

SEQ ID NO: 1776474 - DNA, 15 bp, Homo sapiens
caaataaggactttg

SEQ ID NO: 1776475 - DNA, 15 bp, Homo sapiens
aaataaggactttgg

SEQ ID NO: 1776476 - DNA, 15 bp, Homo sapiens
aataaggactttggc

SEQ ID NO: 1776477 - DNA, 15 bp, Homo sapiens
ataaggactttggct

SEQ ID NO: 1776478 - DNA, 15 bp, Homo sapiens
taaggactttggctt

SEQ ID NO: 1776479 - DNA, 15 bp, Homo sapiens
aaggactttggctta

SEQ ID NO: 1776480 - DNA, 15 bp, Homo sapiens
aggactttggcttat

SEQ ID NO: 1776481 - DNA, 15 bp, Homo sapiens
ggactttggcttatt

SEQ ID NO: 1776482 - DNA, 15 bp, Homo sapiens
gactttggcttattc

SEQ ID NO: 1776483 - DNA, 15 bp, Homo sapiens
actttggcttattca

SEQ ID NO: 1776484 - DNA, 15 bp, Homo sapiens
ctttggcttattcag

SEQ ID NO: 1776485 - DNA, 15 bp, Homo sapiens
tttggcttattcaga

SEQ ID NO: 1776486 - DNA, 15 bp, Homo sapiens
ttggcttattcagat

SEQ ID NO: 1776487 - DNA, 15 bp, Homo sapiens
tggcttattcagatt

SEQ ID NO: 1776488 - DNA, 15 bp, Homo sapiens
ggcttattcagattt

SEQ ID NO: 1776489 - DNA, 15 bp, Homo sapiens
gcttattcagattta

SEQ ID NO: 1776490 - DNA, 15 bp, Homo sapiens
cttattcagatttat

SEQ ID NO: 1776491 - DNA, 15 bp, Homo sapiens
ttattcagatttatt

SEQ ID NO: 1776492 - DNA, 15 bp, Homo sapiens
tattcagatttattc

SEQ ID NO: 1776493 - DNA, 15 bp, Homo sapiens
attcagatttattcc

SEQ ID NO: 1776494 - DNA, 15 bp, Homo sapiens
ttcagatttattcca

SEQ ID NO: 1776495 - DNA, 15 bp, Homo sapiens
tcagatttattccat

SEQ ID NO: 1776496 - DNA, 15 bp, Homo sapiens
cagatttattccatt

SEQ ID NO: 1776497 - DNA, 15 bp, Homo sapiens
agatttattccattc

SEQ ID NO: 1776498 - DNA, 15 bp, Homo sapiens
gatttattccattca

SEQ ID NO: 1776499 - DNA, 15 bp, Homo sapiens
atttattccattcat

SEQ ID NO: 1776500 - DNA, 15 bp, Homo sapiens
tttattccattcatc

SEQ ID NO: 1776501 - DNA, 15 bp, Homo sapiens
ttattccattcatca

SEQ ID NO: 1776502 - DNA, 15 bp, Homo sapiens
tattccattcatcat

SEQ ID NO: 1776503 - DNA, 15 bp, Homo sapiens
attccattcatcatc

SEQ ID NO: 1776504 - DNA, 15 bp, Homo sapiens
ttccattcatcatct

SEQ ID NO: 1776505 - DNA, 15 bp, Homo sapiens
tccattcatcatctt

SEQ ID NO: 1776506 - DNA, 15 bp, Homo sapiens
ccattcatcatcttt

SEQ ID NO: 1776507 - DNA, 15 bp, Homo sapiens
cattcatcatctttg

SEQ ID NO: 1776508 - DNA, 15 bp, Homo sapiens
attcatcatctttga

SEQ ID NO: 1776509 - DNA, 15 bp, Homo sapiens
ttcatcatctttgaa

SEQ ID NO: 1776510 - DNA, 15 bp, Homo sapiens
tcatcatctttgaat

SEQ ID NO: 1776511 - DNA, 15 bp, Homo sapiens
catcatctttgaatt

SEQ ID NO: 1776512 - DNA, 15 bp, Homo sapiens
atcatctttgaatta

SEQ ID NO: 1776513 - DNA, 15 bp, Homo sapiens
tcatctttgaattag

SEQ ID NO: 1776514 - DNA, 15 bp, Homo sapiens
catctttgaattagt

SEQ ID NO: 1776515 - DNA, 15 bp, Homo sapiens
atctttgaattagtt

SEQ ID NO: 1776516 - DNA, 15 bp, Homo sapiens
tctttgaattagttt

SEQ ID NO: 1776517 - DNA, 15 bp, Homo sapiens
ctttgaattagtttc

SEQ ID NO: 1776518 - DNA, 15 bp, Homo sapiens
tttgaattagtttct

SEQ ID NO: 1776519 - DNA, 15 bp, Homo sapiens
ttgaattagtttctt

SEQ ID NO: 1776520 - DNA, 15 bp, Homo sapiens
tgaattagtttcttc

SEQ ID NO: 1776521 - DNA, 15 bp, Homo sapiens
gaattagtttcttct

SEQ ID NO: 1776522 - DNA, 15 bp, Homo sapiens
aattagtttcttctt

SEQ ID NO: 1776523 - DNA, 15 bp, Homo sapiens
attagtttcttcttg

SEQ ID NO: 1776524 - DNA, 15 bp, Homo sapiens
ttagtttcttcttga

SEQ ID NO: 1776525 - DNA, 15 bp, Homo sapiens
tagtttcttcttgag

SEQ ID NO: 1776526 - DNA, 15 bp, Homo sapiens
agtttcttcttgaga

SEQ ID NO: 1776527 - DNA, 15 bp, Homo sapiens
gtttcttcttgagaa

SEQ ID NO: 1776528 - DNA, 15 bp, Homo sapiens
tttcttcttgagaag

SEQ ID NO: 1776529 - DNA, 15 bp, Homo sapiens
ttcttcttgagaaga

SEQ ID NO: 1776530 - DNA, 15 bp, Homo sapiens
tcttcttgagaagaa

SEQ ID NO: 1776531 - DNA, 15 bp, Homo sapiens
cttcttgagaagaag

SEQ ID NO: 1776532 - DNA, 15 bp, Homo sapiens
ttcttgagaagaagc

SEQ ID NO: 1776533 - DNA, 15 bp, Homo sapiens
tcttgagaagaagca

SEQ ID NO: 1776534 - DNA, 15 bp, Homo sapiens
cttgagaagaagcat

SEQ ID NO: 1776535 - DNA, 15 bp, Homo sapiens
ttgagaagaagcata

SEQ ID NO: 1776536 - DNA, 15 bp, Homo sapiens
tgagaagaagcatat

SEQ ID NO: 1776537 - DNA, 15 bp, Homo sapiens
gagaagaagcatatc

SEQ ID NO: 1776538 - DNA, 15 bp, Homo sapiens
agaagaagcatatct

SEQ ID NO: 1776539 - DNA, 15 bp, Homo sapiens
gaagaagcatatctt

SEQ ID NO: 1776540 - DNA, 15 bp, Homo sapiens
aagaagcatatctta

SEQ ID NO: 1776541 - DNA, 15 bp, Homo sapiens
agaagcatatcttac

SEQ ID NO: 1776542 - DNA, 15 bp, Homo sapiens
gaagcatatcttaca

SEQ ID NO: 1776543 - DNA, 15 bp, Homo sapiens
aagcatatcttacaa

SEQ ID NO: 1776544 - DNA, 15 bp, Homo sapiens
agcatatcttacaac

SEQ ID NO: 1776545 - DNA, 15 bp, Homo sapiens
gcatatcttacaact

SEQ ID NO: 1776546 - DNA, 15 bp, Homo sapiens
catatcttacaactt

SEQ ID NO: 1776547 - DNA, 15 bp, Homo sapiens
atatcttacaacttt

SEQ ID NO: 1776548 - DNA, 15 bp, Homo sapiens
tatcttacaactttt

SEQ ID NO: 1776549 - DNA, 15 bp, Homo sapiens
atcttacaacttttg

SEQ ID NO: 1776550 - DNA, 15 bp, Homo sapiens
tcttacaacttttgt

SEQ ID NO: 1776551 - DNA, 15 bp, Homo sapiens
cttacaacttttgtc

SEQ ID NO: 1776552 - DNA, 15 bp, Homo sapiens
ttacaacttttgtct

SEQ ID NO: 1776553 - DNA, 15 bp, Homo sapiens
tacaacttttgtctt

SEQ ID NO: 1776554 - DNA, 15 bp, Homo sapiens
acaacttttgtcttt

SEQ ID NO: 1776555 - DNA, 15 bp, Homo sapiens
caacttttgtcttta

SEQ ID NO: 1776556 - DNA, 15 bp, Homo sapiens
aacttttgtctttat

SEQ ID NO: 1776557 - DNA, 15 bp, Homo sapiens
acttttgtctttatt

SEQ ID NO: 1776558 - DNA, 15 bp, Homo sapiens
cttttgtctttatta

SEQ ID NO: 1776559 - DNA, 15 bp, Homo sapiens
ttttgtctttattac

SEQ ID NO: 1776560 - DNA, 15 bp, Homo sapiens
tttgtctttattacc

SEQ ID NO: 1776561 - DNA, 15 bp, Homo sapiens
ttgtctttattacct

SEQ ID NO: 1776562 - DNA, 15 bp, Homo sapiens
tgtctttattacctc

SEQ ID NO: 1776563 - DNA, 15 bp, Homo sapiens
gtctttattacctca

SEQ ID NO: 1776564 - DNA, 15 bp, Homo sapiens
tctttattacctcaa

SEQ ID NO: 1776565 - DNA, 15 bp, Homo sapiens
ctttattacctcaat

SEQ ID NO: 1776566 - DNA, 15 bp, Homo sapiens
tttattacctcaata

SEQ ID NO: 1776567 - DNA, 15 bp, Homo sapiens
ttattacctcaatat

SEQ ID NO: 1776568 - DNA, 15 bp, Homo sapiens
tattacctcaatatg

SEQ ID NO: 1776569 - DNA, 15 bp, Homo sapiens
attacctcaatatgt

SEQ ID NO: 1776570 - DNA, 15 bp, Homo sapiens
ttacctcaatatgtt

SEQ ID NO: 1776571 - DNA, 15 bp, Homo sapiens
tacctcaatatgttt

SEQ ID NO: 1776572 - DNA, 15 bp, Homo sapiens
acctcaatatgtttt

SEQ ID NO: 1776573 - DNA, 15 bp, Homo sapiens
cctcaatatgtttta

SEQ ID NO: 1776574 - DNA, 15 bp, Homo sapiens
ctcaatatgttttat

SEQ ID NO: 1776575 - DNA, 15 bp, Homo sapiens
tcaatatgttttatt

SEQ ID NO: 1776576 - DNA, 15 bp, Homo sapiens
caatatgttttattt

SEQ ID NO: 1776577 - DNA, 15 bp, Homo sapiens
aatatgttttattta

SEQ ID NO: 1776578 - DNA, 15 bp, Homo sapiens
atatgttttatttat

SEQ ID NO: 1776579 - DNA, 15 bp, Homo sapiens
tatgttttatttata

SEQ ID NO: 1776580 - DNA, 15 bp, Homo sapiens
atgttttatttatat

SEQ ID NO: 1776581 - DNA, 15 bp, Homo sapiens
tgttttatttatatg

SEQ ID NO: 1776582 - DNA, 15 bp, Homo sapiens
gttttatttatatgt

SEQ ID NO: 1776583 - DNA, 15 bp, Homo sapiens
ttttatttatatgta

SEQ ID NO: 1776584 - DNA, 15 bp, Homo sapiens
tttatttatatgtat

SEQ ID NO: 1776585 - DNA, 15 bp, Homo sapiens
ttatttatatgtata

SEQ ID NO: 1776586 - DNA, 15 bp, Homo sapiens
tatttatatgtatat

SEQ ID NO: 1776587 - DNA, 15 bp, Homo sapiens
atttatatgtatata

SEQ ID NO: 1776588 - DNA, 15 bp, Homo sapiens
tttatatgtatatac

SEQ ID NO: 1776589 - DNA, 15 bp, Homo sapiens
ttatatgtatataca

SEQ ID NO: 1776590 - DNA, 15 bp, Homo sapiens
tatatgtatatacat

SEQ ID NO: 1776591 - DNA, 15 bp, Homo sapiens
atatgtatatacata

SEQ ID NO: 1776592 - DNA, 15 bp, Homo sapiens
tatgtatatacatat

SEQ ID NO: 1776593 - DNA, 15 bp, Homo sapiens
atgtatatacatata

SEQ ID NO: 1776594 - DNA, 15 bp, Homo sapiens
tgtatatacatatat

SEQ ID NO: 1776595 - DNA, 15 bp, Homo sapiens
atatacatatatact

SEQ ID NO: 1776596 - DNA, 15 bp, Homo sapiens
tatacatatatactt

SEQ ID NO: 1776597 - DNA, 15 bp, Homo sapiens
atacatatatacttt

SEQ ID NO: 1776598 - DNA, 15 bp, Homo sapiens
tacatatatactttt

SEQ ID NO: 1776599 - DNA, 15 bp, Homo sapiens
acatatatacttttt

SEQ ID NO: 1776600 - DNA, 15 bp, Homo sapiens
catatatactttttt

SEQ ID NO: 1776601 - DNA, 15 bp, Homo sapiens
atatatacttttttt

SEQ ID NO: 1776602 - DNA, 15 bp, Homo sapiens
tatatactttttttc

SEQ ID NO: 1776603 - DNA, 15 bp, Homo sapiens
atatactttttttca

SEQ ID NO: 1776604 - DNA, 15 bp, Homo sapiens
tatactttttttcag

SEQ ID NO: 1776605 - DNA, 15 bp, Homo sapiens
atactttttttcaga

SEQ ID NO: 1776606 - DNA, 15 bp, Homo sapiens
tactttttttcagat

SEQ ID NO: 1776607 - DNA, 15 bp, Homo sapiens
actttttttcagata

SEQ ID NO: 1776608 - DNA, 15 bp, Homo sapiens
ctttttttcagatag

SEQ ID NO: 1776609 - DNA, 15 bp, Homo sapiens
tttttttcagatagg

SEQ ID NO: 1776610 - DNA, 15 bp, Homo sapiens
ttttttcagataggg

SEQ ID NO: 1776611 - DNA, 15 bp, Homo sapiens
tttttcagatagggt

SEQ ID NO: 1776612 - DNA, 15 bp, Homo sapiens
ttttcagatagggtc

SEQ ID NO: 1776613 - DNA, 15 bp, Homo sapiens
tttcagatagggtct

SEQ ID NO: 1776614 - DNA, 15 bp, Homo sapiens
ttcagatagggtctt

SEQ ID NO: 1776615 - DNA, 15 bp, Homo sapiens
tcagatagggtcttg

SEQ ID NO: 1776616 - DNA, 15 bp, Homo sapiens
cagatagggtcttgc

SEQ ID NO: 1776617 - DNA, 15 bp, Homo sapiens
tcttgaactcctgga

SEQ ID NO: 1776618 - DNA, 15 bp, Homo sapiens
tcctggactcaagtt

SEQ ID NO: 1776619 - DNA, 15 bp, Homo sapiens
cctggactcaagtta

SEQ ID NO: 1776620 - DNA, 15 bp, Homo sapiens
ctggactcaagttat

SEQ ID NO: 1776621 - DNA, 15 bp, Homo sapiens
tggactcaagttatt

SEQ ID NO: 1776622 - DNA, 15 bp, Homo sapiens
ggactcaagttattc

SEQ ID NO: 1776623 - DNA, 15 bp, Homo sapiens
gactcaagttattct

SEQ ID NO: 1776624 - DNA, 15 bp, Homo sapiens
actcaagttattctc

SEQ ID NO: 1776625 - DNA, 15 bp, Homo sapiens
ctcaagttattctcc

SEQ ID NO: 1776626 - DNA, 15 bp, Homo sapiens
tcaagttattctcct

SEQ ID NO: 1776627 - DNA, 15 bp, Homo sapiens
caagttattctcctg

SEQ ID NO: 1776628 - DNA, 15 bp, Homo sapiens
aagttattctcctgc

SEQ ID NO: 1776629 - DNA, 15 bp, Homo sapiens
agttattctcctgcc

SEQ ID NO: 1776630 - DNA, 15 bp, Homo sapiens
gttattctcctgcct

SEQ ID NO: 1776631 - DNA, 15 bp, Homo sapiens
ttattctcctgcctt

SEQ ID NO: 1776632 - DNA, 15 bp, Homo sapiens
tattctcctgcctta

SEQ ID NO: 1776633 - DNA, 15 bp, Homo sapiens
actgtgcctggcctc

SEQ ID NO: 1776634 - DNA, 15 bp, Homo sapiens
ctgtgcctggcctca

SEQ ID NO: 1776635 - DNA, 15 bp, Homo sapiens
tgtgcctggcctcaa

SEQ ID NO: 1776636 - DNA, 15 bp, Homo sapiens
gtgcctggcctcaat

SEQ ID NO: 1776637 - DNA, 15 bp, Homo sapiens
tgcctggcctcaata

SEQ ID NO: 1776638 - DNA, 15 bp, Homo sapiens
gcctggcctcaatat

SEQ ID NO: 1776639 - DNA, 15 bp, Homo sapiens
cctggcctcaatatt

SEQ ID NO: 1776640 - DNA, 15 bp, Homo sapiens
ctggcctcaatattt

SEQ ID NO: 1776641 - DNA, 15 bp, Homo sapiens
tggcctcaatattta

SEQ ID NO: 1776642 - DNA, 15 bp, Homo sapiens
ggcctcaatatttat

SEQ ID NO: 1776643 - DNA, 15 bp, Homo sapiens
gcctcaatatttatt

SEQ ID NO: 1776644 - DNA, 15 bp, Homo sapiens
cctcaatatttattt

SEQ ID NO: 1776645 - DNA, 15 bp, Homo sapiens
ctcaatatttattta

SEQ ID NO: 1776646 - DNA, 15 bp, Homo sapiens
tcaatatttatttaa

SEQ ID NO: 1776647 - DNA, 15 bp, Homo sapiens
caatatttatttaaa

SEQ ID NO: 1776648 - DNA, 15 bp, Homo sapiens
aatatttatttaaag

SEQ ID NO: 1776649 - DNA, 15 bp, Homo sapiens
atatttatttaaagg

SEQ ID NO: 1776650 - DNA, 15 bp, Homo sapiens
tatttatttaaaggt

SEQ ID NO: 1776651 - DNA, 15 bp, Homo sapiens
atttatttaaaggtt

SEQ ID NO: 1776652 - DNA, 15 bp, Homo sapiens
tttatttaaaggtta

SEQ ID NO: 1776653 - DNA, 15 bp, Homo sapiens
ttatttaaaggttac

SEQ ID NO: 1776654 - DNA, 15 bp, Homo sapiens
tatttaaaggttaca

SEQ ID NO: 1776655 - DNA, 15 bp, Homo sapiens
atttaaaggttacaa

SEQ ID NO: 1776656 - DNA, 15 bp, Homo sapiens
tttaaaggttacaag

SEQ ID NO: 1776657 - DNA, 15 bp, Homo sapiens
ttaaaggttacaaga

SEQ ID NO: 1776658 - DNA, 15 bp, Homo sapiens
taaaggttacaagaa

SEQ ID NO: 1776659 - DNA, 15 bp, Homo sapiens
aaaggttacaagaat

SEQ ID NO: 1776660 - DNA, 15 bp, Homo sapiens
aaggttacaagaata

SEQ ID NO: 1776661 - DNA, 15 bp, Homo sapiens
aggttacaagaatat

SEQ ID NO: 1776662 - DNA, 15 bp, Homo sapiens
ggttacaagaatata

SEQ ID NO: 1776663 - DNA, 15 bp, Homo sapiens
gttacaagaatatat

SEQ ID NO: 1776664 - DNA, 15 bp, Homo sapiens
ttacaagaatatatg

SEQ ID NO: 1776665 - DNA, 15 bp, Homo sapiens
tacaagaatatatgt

SEQ ID NO: 1776666 - DNA, 15 bp, Homo sapiens
acaagaatatatgtt

SEQ ID NO: 1776667 - DNA, 15 bp, Homo sapiens
caagaatatatgttc

SEQ ID NO: 1776668 - DNA, 15 bp, Homo sapiens
aagaatatatgttct

SEQ ID NO: 1776669 - DNA, 15 bp, Homo sapiens
agaatatatgttctt

SEQ ID NO: 1776670 - DNA, 15 bp, Homo sapiens
gaatatatgttctta

SEQ ID NO: 1776671 - DNA, 15 bp, Homo sapiens
aatatatgttcttaa

SEQ ID NO: 1776672 - DNA, 15 bp, Homo sapiens
atatatgttcttaaa

SEQ ID NO: 1776673 - DNA, 15 bp, Homo sapiens
tatatgttcttaaaa

SEQ ID NO: 1776674 - DNA, 15 bp, Homo sapiens
atatgttcttaaaat

SEQ ID NO: 1776675 - DNA, 15 bp, Homo sapiens
tatgttcttaaaatg

SEQ ID NO: 1776676 - DNA, 15 bp, Homo sapiens
ttcttaaaatgttga

SEQ ID NO: 1776677 - DNA, 15 bp, Homo sapiens
tcttaaaatgttgag

SEQ ID NO: 1776678 - DNA, 15 bp, Homo sapiens
cttaaaatgttgaga

SEQ ID NO: 1776679 - DNA, 15 bp, Homo sapiens
ttaaaatgttgagaa

SEQ ID NO: 1776680 - DNA, 15 bp, Homo sapiens
taaaatgttgagaat

SEQ ID NO: 1776681 - DNA, 15 bp, Homo sapiens
aaaatgttgagaatt

SEQ ID NO: 1776682 - DNA, 15 bp, Homo sapiens
aaatgttgagaatta

SEQ ID NO: 1776683 - DNA, 15 bp, Homo sapiens
aatgttgagaattaa

SEQ ID NO: 1776684 - DNA, 15 bp, Homo sapiens
atgttgagaattaaa

SEQ ID NO: 1776685 - DNA, 15 bp, Homo sapiens
tgttgagaattaaaa

SEQ ID NO: 1776686 - DNA, 15 bp, Homo sapiens
gttgagaattaaaat

SEQ ID NO: 1776687 - DNA, 15 bp, Homo sapiens
ttgagaattaaaata

SEQ ID NO: 1776688 - DNA, 15 bp, Homo sapiens
tgagaattaaaataa

SEQ ID NO: 1776689 - DNA, 15 bp, Homo sapiens
gagaattaaaataaa

SEQ ID NO: 1776690 - DNA, 15 bp, Homo sapiens
agaattaaaataaat

SEQ ID NO: 1776691 - DNA, 15 bp, Homo sapiens
gaattaaaataaata

SEQ ID NO: 1776692 - DNA, 15 bp, Homo sapiens
aattaaaataaataa

SEQ ID NO: 1776693 - DNA, 15 bp, Homo sapiens
attaaaataaataat

SEQ ID NO: 1776694 - DNA, 15 bp, Homo sapiens
ttaaaataaataatt

SEQ ID NO: 1776695 - DNA, 15 bp, Homo sapiens
taaaataaataattt

SEQ ID NO: 1776696 - DNA, 15 bp, Homo sapiens
aaaataaataatttc

SEQ ID NO: 1776697 - DNA, 15 bp, Homo sapiens
aaataaataatttct

SEQ ID NO: 1776698 - DNA, 15 bp, Homo sapiens
aataaataatttctc

SEQ ID NO: 1776699 - DNA, 15 bp, Homo sapiens
ataaataatttctcc

SEQ ID NO: 1776700 - DNA, 15 bp, Homo sapiens
taaataatttctcca

SEQ ID NO: 1776701 - DNA, 15 bp, Homo sapiens
aaataatttctccaa

SEQ ID NO: 1776702 - DNA, 15 bp, Homo sapiens
aataatttctccaat

SEQ ID NO: 1776703 - DNA, 15 bp, Homo sapiens
ataatttctccaatc

SEQ ID NO: 1776704 - DNA, 15 bp, Homo sapiens
taatttctccaatca

SEQ ID NO: 1776705 - DNA, 15 bp, Homo sapiens
aatttctccaatcat

SEQ ID NO: 1776706 - DNA, 15 bp, Homo sapiens
atttctccaatcata

SEQ ID NO: 1776707 - DNA, 15 bp, Homo sapiens
tttctccaatcataa

SEQ ID NO: 1776708 - DNA, 15 bp, Homo sapiens
ttctccaatcataat

SEQ ID NO: 1776709 - DNA, 15 bp, Homo sapiens
tctccaatcataata

SEQ ID NO: 1776710 - DNA, 15 bp, Homo sapiens
ctccaatcataatag

SEQ ID NO: 1776711 - DNA, 15 bp, Homo sapiens
tccaatcataatagc

SEQ ID NO: 1776712 - DNA, 15 bp, Homo sapiens
ccaatcataatagct

SEQ ID NO: 1776713 - DNA, 15 bp, Homo sapiens
caatcataatagctt

SEQ ID NO: 1776714 - DNA, 15 bp, Homo sapiens
aatcataatagcttt

SEQ ID NO: 1776715 - DNA, 15 bp, Homo sapiens
atcataatagctttg

SEQ ID NO: 1776716 - DNA, 15 bp, Homo sapiens
tcataatagctttgt

SEQ ID NO: 1776717 - DNA, 15 bp, Homo sapiens
cataatagctttgta

SEQ ID NO: 1776718 - DNA, 15 bp, Homo sapiens
ataatagctttgtat

SEQ ID NO: 1776719 - DNA, 15 bp, Homo sapiens
taatagctttgtatt

SEQ ID NO: 1776720 - DNA, 15 bp, Homo sapiens
aatagctttgtattt

SEQ ID NO: 1776721 - DNA, 15 bp, Homo sapiens
atagctttgtatttt

SEQ ID NO: 1776722 - DNA, 15 bp, Homo sapiens
tagctttgtatttta

SEQ ID NO: 1776723 - DNA, 15 bp, Homo sapiens
agctttgtattttat

SEQ ID NO: 1776724 - DNA, 15 bp, Homo sapiens
gctttgtattttatt

SEQ ID NO: 1776725 - DNA, 15 bp, Homo sapiens
ctttgtattttatta

SEQ ID NO: 1776726 - DNA, 15 bp, Homo sapiens
tttgtattttattat

SEQ ID NO: 1776727 - DNA, 15 bp, Homo sapiens
ttgtattttattata

SEQ ID NO: 1776728 - DNA, 15 bp, Homo sapiens
tgtattttattatat

SEQ ID NO: 1776729 - DNA, 15 bp, Homo sapiens
gtattttattatatt

SEQ ID NO: 1776730 - DNA, 15 bp, Homo sapiens
tattttattatatta

SEQ ID NO: 1776731 - DNA, 15 bp, Homo sapiens
attttattatattat

SEQ ID NO: 1776732 - DNA, 15 bp, Homo sapiens
ttttattatattata

SEQ ID NO: 1776733 - DNA, 15 bp, Homo sapiens
tttattatattataa

SEQ ID NO: 1776734 - DNA, 15 bp, Homo sapiens
ttattatattataaa

SEQ ID NO: 1776735 - DNA, 15 bp, Homo sapiens
tattatattataaat

SEQ ID NO: 1776736 - DNA, 15 bp, Homo sapiens
attatattataaatt

SEQ ID NO: 1776737 - DNA, 15 bp, Homo sapiens
ttatattataaattg

SEQ ID NO: 1776738 - DNA, 15 bp, Homo sapiens
tatattataaattga

SEQ ID NO: 1776739 - DNA, 15 bp, Homo sapiens
atattataaattgaa

SEQ ID NO: 1776740 - DNA, 15 bp, Homo sapiens
tattataaattgaaa

SEQ ID NO: 1776741 - DNA, 15 bp, Homo sapiens
attataaattgaaac

SEQ ID NO: 1776742 - DNA, 15 bp, Homo sapiens
ttataaattgaaaca

SEQ ID NO: 1776743 - DNA, 15 bp, Homo sapiens
tataaattgaaacat

SEQ ID NO: 1776744 - DNA, 15 bp, Homo sapiens
ataaattgaaacatt

SEQ ID NO: 1776745 - DNA, 15 bp, Homo sapiens
taaattgaaacattg

SEQ ID NO: 1776746 - DNA, 15 bp, Homo sapiens
aaattgaaacattga

SEQ ID NO: 1776747 - DNA, 15 bp, Homo sapiens
aattgaaacattgaa

SEQ ID NO: 1776748 - DNA, 15 bp, Homo sapiens
attgaaacattgaag

SEQ ID NO: 1776749 - DNA, 15 bp, Homo sapiens
ttgaaacattgaagt

SEQ ID NO: 1776750 - DNA, 15 bp, Homo sapiens
tgaaacattgaagtt

SEQ ID NO: 1776751 - DNA, 15 bp, Homo sapiens
gaaacattgaagttt

SEQ ID NO: 1776752 - DNA, 15 bp, Homo sapiens
aaacattgaagtttt

SEQ ID NO: 1776753 - DNA, 15 bp, Homo sapiens
aacattgaagtttta

SEQ ID NO: 1776754 - DNA, 15 bp, Homo sapiens
acattgaagttttaa

SEQ ID NO: 1776755 - DNA, 15 bp, Homo sapiens
cattgaagttttaaa

SEQ ID NO: 1776756 - DNA, 15 bp, Homo sapiens
attgaagttttaaaa

SEQ ID NO: 1776757 - DNA, 15 bp, Homo sapiens
ttgaagttttaaaat

SEQ ID NO: 1776758 - DNA, 15 bp, Homo sapiens
tgaagttttaaaatt

SEQ ID NO: 1776759 - DNA, 15 bp, Homo sapiens
gaagttttaaaattc

SEQ ID NO: 1776760 - DNA, 15 bp, Homo sapiens
aagttttaaaattct

SEQ ID NO: 1776761 - DNA, 15 bp, Homo sapiens
agttttaaaattctt

SEQ ID NO: 1776762 - DNA, 15 bp, Homo sapiens
gttttaaaattcttc

SEQ ID NO: 1776763 - DNA, 15 bp, Homo sapiens
ttttaaaattcttct

SEQ ID NO: 1776764 - DNA, 15 bp, Homo sapiens
tttaaaattcttctt

SEQ ID NO: 1776765 - DNA, 15 bp, Homo sapiens
ttaaaattcttcttc

SEQ ID NO: 1776766 - DNA, 15 bp, Homo sapiens
taaaattcttcttca

SEQ ID NO: 1776767 - DNA, 15 bp, Homo sapiens
aaaattcttcttcaa

SEQ ID NO: 1776768 - DNA, 15 bp, Homo sapiens
aaattcttcttcaat

SEQ ID NO: 1776769 - DNA, 15 bp, Homo sapiens
aattcttcttcaatg

SEQ ID NO: 1776770 - DNA, 15 bp, Homo sapiens
attcttcttcaatga

SEQ ID NO: 1776771 - DNA, 15 bp, Homo sapiens
ttcttcttcaatgag

SEQ ID NO: 1776772 - DNA, 15 bp, Homo sapiens
tcttcttcaatgagc

SEQ ID NO: 1776773 - DNA, 15 bp, Homo sapiens
cttcttcaatgagcc

SEQ ID NO: 1776774 - DNA, 15 bp, Homo sapiens
ttcttcaatgagcca

SEQ ID NO: 1776775 - DNA, 15 bp, Homo sapiens
tcttcaatgagccag

SEQ ID NO: 1776776 - DNA, 15 bp, Homo sapiens
cttcaatgagccagg

SEQ ID NO: 1776777 - DNA, 15 bp, Homo sapiens
ttcaatgagccaggc

SEQ ID NO: 1776778 - DNA, 15 bp, Homo sapiens
tcaatgagccaggcc

SEQ ID NO: 1776779 - DNA, 15 bp, Homo sapiens
caatgagccaggcct

SEQ ID NO: 1776780 - DNA, 15 bp, Homo sapiens
aatgagccaggcctg

SEQ ID NO: 1776781 - DNA, 15 bp, Homo sapiens
atgagccaggcctgg

SEQ ID NO: 1776782 - DNA, 15 bp, Homo sapiens
tgagccaggcctggt

SEQ ID NO: 1776783 - DNA, 15 bp, Homo sapiens
gagccaggcctggtg

SEQ ID NO: 1776784 - DNA, 15 bp, Homo sapiens
agccaggcctggtgg

SEQ ID NO: 1776785 - DNA, 15 bp, Homo sapiens
gccaggcctggtggc

SEQ ID NO: 1776786 - DNA, 15 bp, Homo sapiens
ccaggcctggtggct

SEQ ID NO: 1776787 - DNA, 15 bp, Homo sapiens
caggcctggtggctc

SEQ ID NO: 1776788 - DNA, 15 bp, Homo sapiens
aggcctggtggctca

SEQ ID NO: 1776789 - DNA, 15 bp, Homo sapiens
ggcctggtggctcat

SEQ ID NO: 1776790 - DNA, 15 bp, Homo sapiens
gcctggtggctcatg

SEQ ID NO: 1776791 - DNA, 15 bp, Homo sapiens
cctggtggctcatgc

SEQ ID NO: 1776792 - DNA, 15 bp, Homo sapiens
ctggtggctcatgcc

SEQ ID NO: 1776793 - DNA, 15 bp, Homo sapiens
atgcctgtaatcctt

SEQ ID NO: 1776794 - DNA, 15 bp, Homo sapiens
tgcctgtaatcctta

SEQ ID NO: 1776795 - DNA, 15 bp, Homo sapiens
gcctgtaatccttac

SEQ ID NO: 1776796 - DNA, 15 bp, Homo sapiens
cctgtaatccttaca

SEQ ID NO: 1776797 - DNA, 15 bp, Homo sapiens
ctgtaatccttacac

SEQ ID NO: 1776798 - DNA, 15 bp, Homo sapiens
tgtaatccttacact

SEQ ID NO: 1776799 - DNA, 15 bp, Homo sapiens
gtaatccttacactt

SEQ ID NO: 1776800 - DNA, 15 bp, Homo sapiens
taatccttacacttt

SEQ ID NO: 1776801 - DNA, 15 bp, Homo sapiens
aatccttacactttg

SEQ ID NO: 1776802 - DNA, 15 bp, Homo sapiens
atccttacactttgg

SEQ ID NO: 1776803 - DNA, 15 bp, Homo sapiens
tccttacactttggg

SEQ ID NO: 1776804 - DNA, 15 bp, Homo sapiens
ccttacactttggga

SEQ ID NO: 1776805 - DNA, 15 bp, Homo sapiens
cttacactttgggag

SEQ ID NO: 1776806 - DNA, 15 bp, Homo sapiens
ttacactttgggagg

SEQ ID NO: 1776807 - DNA, 15 bp, Homo sapiens
tacactttgggaggc

SEQ ID NO: 1776808 - DNA, 15 bp, Homo sapiens
aggcaggaggatcag

SEQ ID NO: 1776809 - DNA, 15 bp, Homo sapiens
ggcaggaggatcagt

SEQ ID NO: 1776810 - DNA, 15 bp, Homo sapiens
gcaggaggatcagtt

SEQ ID NO: 1776811 - DNA, 15 bp, Homo sapiens
caggaggatcagttg

SEQ ID NO: 1776812 - DNA, 15 bp, Homo sapiens
gaggatcagttgagg

SEQ ID NO: 1776813 - DNA, 15 bp, Homo sapiens
aggatcagttgaggc

SEQ ID NO: 1776814 - DNA, 15 bp, Homo sapiens
ggatcagttgaggcc

SEQ ID NO: 1776815 - DNA, 15 bp, Homo sapiens
gatcagttgaggcca

SEQ ID NO: 1776816 - DNA, 15 bp, Homo sapiens
atcagttgaggccag

SEQ ID NO: 1776817 - DNA, 15 bp, Homo sapiens
tcagttgaggccagt

SEQ ID NO: 1776818 - DNA, 15 bp, Homo sapiens
cagttgaggccagta

SEQ ID NO: 1776819 - DNA, 15 bp, Homo sapiens
agttgaggccagtag

SEQ ID NO: 1776820 - DNA, 15 bp, Homo sapiens
gttgaggccagtagt

SEQ ID NO: 1776821 - DNA, 15 bp, Homo sapiens
ttgaggccagtagtt

SEQ ID NO: 1776822 - DNA, 15 bp, Homo sapiens
tgaggccagtagttt

SEQ ID NO: 1776823 - DNA, 15 bp, Homo sapiens
gaggccagtagtttg

SEQ ID NO: 1776824 - DNA, 15 bp, Homo sapiens
aggccagtagtttga

SEQ ID NO: 1776825 - DNA, 15 bp, Homo sapiens
ggccagtagtttgag

SEQ ID NO: 1776826 - DNA, 15 bp, Homo sapiens
gccagtagtttgaga

SEQ ID NO: 1776827 - DNA, 15 bp, Homo sapiens
ccagtagtttgagaa

SEQ ID NO: 1776828 - DNA, 15 bp, Homo sapiens
cagtagtttgagaac

SEQ ID NO: 1776829 - DNA, 15 bp, Homo sapiens
agtagtttgagaacg

SEQ ID NO: 1776830 - DNA, 15 bp, Homo sapiens
gtagtttgagaacgg

SEQ ID NO: 1776831 - DNA, 15 bp, Homo sapiens
tagtttgagaacggc

SEQ ID NO: 1776832 - DNA, 15 bp, Homo sapiens
agtttgagaacggcc

SEQ ID NO: 1776833 - DNA, 15 bp, Homo sapiens
gtttgagaacggcct

SEQ ID NO: 1776834 - DNA, 15 bp, Homo sapiens
tttgagaacggcctg

SEQ ID NO: 1776835 - DNA, 15 bp, Homo sapiens
ttgagaacggcctgg

SEQ ID NO: 1776836 - DNA, 15 bp, Homo sapiens
tgagaacggcctgga

SEQ ID NO: 1776837 - DNA, 15 bp, Homo sapiens
gagaacggcctggac

SEQ ID NO: 1776838 - DNA, 15 bp, Homo sapiens
agaacggcctggaca

SEQ ID NO: 1776839 - DNA, 15 bp, Homo sapiens
gaacggcctggacaa

SEQ ID NO: 1776840 - DNA, 15 bp, Homo sapiens
aacggcctggacaac

SEQ ID NO: 1776841 - DNA, 15 bp, Homo sapiens
acggcctggacaaca

SEQ ID NO: 1776842 - DNA, 15 bp, Homo sapiens
cggcctggacaacat

SEQ ID NO: 1776843 - DNA, 15 bp, Homo sapiens
ggcctggacaacata

SEQ ID NO: 1776844 - DNA, 15 bp, Homo sapiens
gcctggacaacatag

SEQ ID NO: 1776845 - DNA, 15 bp, Homo sapiens
cctggacaacatagt

SEQ ID NO: 1776846 - DNA, 15 bp, Homo sapiens
ctggacaacatagtg

SEQ ID NO: 1776847 - DNA, 15 bp, Homo sapiens
tggacaacatagtga

SEQ ID NO: 1776848 - DNA, 15 bp, Homo sapiens
ggacaacatagtgag

SEQ ID NO: 1776849 - DNA, 15 bp, Homo sapiens
gacaacatagtgaga

SEQ ID NO: 1776850 - DNA, 15 bp, Homo sapiens
acaacatagtgagaa

SEQ ID NO: 1776851 - DNA, 15 bp, Homo sapiens
caacatagtgagaat

SEQ ID NO: 1776852 - DNA, 15 bp, Homo sapiens
aacatagtgagaatc

SEQ ID NO: 1776853 - DNA, 15 bp, Homo sapiens
acatagtgagaatct

SEQ ID NO: 1776854 - DNA, 15 bp, Homo sapiens
catagtgagaatctc

SEQ ID NO: 1776855 - DNA, 15 bp, Homo sapiens
atagtgagaatctct

SEQ ID NO: 1776856 - DNA, 15 bp, Homo sapiens
tagtgagaatctctc

SEQ ID NO: 1776857 - DNA, 15 bp, Homo sapiens
agtgagaatctctct

SEQ ID NO: 1776858 - DNA, 15 bp, Homo sapiens
gtgagaatctctctc

SEQ ID NO: 1776859 - DNA, 15 bp, Homo sapiens
tgagaatctctctcc

SEQ ID NO: 1776860 - DNA, 15 bp, Homo sapiens
gagaatctctctcca

SEQ ID NO: 1776861 - DNA, 15 bp, Homo sapiens
agaatctctctccat

SEQ ID NO: 1776862 - DNA, 15 bp, Homo sapiens
gaatctctctccatt

SEQ ID NO: 1776863 - DNA, 15 bp, Homo sapiens
aatctctctccattt

SEQ ID NO: 1776864 - DNA, 15 bp, Homo sapiens
atctctctccattta

SEQ ID NO: 1776865 - DNA, 15 bp, Homo sapiens
tctctctccatttaa

SEQ ID NO: 1776866 - DNA, 15 bp, Homo sapiens
ctctctccatttaat

SEQ ID NO: 1776867 - DNA, 15 bp, Homo sapiens
tctctccatttaata

SEQ ID NO: 1776868 - DNA, 15 bp, Homo sapiens
ctctccatttaataa

SEQ ID NO: 1776869 - DNA, 15 bp, Homo sapiens
tctccatttaataaa

SEQ ID NO: 1776870 - DNA, 15 bp, Homo sapiens
ctccatttaataaat

SEQ ID NO: 1776871 - DNA, 15 bp, Homo sapiens
tccatttaataaata

SEQ ID NO: 1776872 - DNA, 15 bp, Homo sapiens
ccatttaataaataa

SEQ ID NO: 1776873 - DNA, 15 bp, Homo sapiens
catttaataaataaa

SEQ ID NO: 1776874 - DNA, 15 bp, Homo sapiens
atttaataaataaat

SEQ ID NO: 1776875 - DNA, 15 bp, Homo sapiens
tttaataaataaata

SEQ ID NO: 1776876 - DNA, 15 bp, Homo sapiens
ttaataaataaataa

SEQ ID NO: 1776877 - DNA, 15 bp, Homo sapiens
taaataaataaaatt

SEQ ID NO: 1776878 - DNA, 15 bp, Homo sapiens
aaataaataaaatta

SEQ ID NO: 1776879 - DNA, 15 bp, Homo sapiens
aataaataaaattat

SEQ ID NO: 1776880 - DNA, 15 bp, Homo sapiens
ataaataaaattatt

SEQ ID NO: 1776881 - DNA, 15 bp, Homo sapiens
taaataaaattattc

SEQ ID NO: 1776882 - DNA, 15 bp, Homo sapiens
aaataaaattattct

SEQ ID NO: 1776883 - DNA, 15 bp, Homo sapiens
aataaaattattctt

SEQ ID NO: 1776884 - DNA, 15 bp, Homo sapiens
ataaaattattcttc

SEQ ID NO: 1776885 - DNA, 15 bp, Homo sapiens
taaaattattcttca

SEQ ID NO: 1776886 - DNA, 15 bp, Homo sapiens
aaaattattcttcag

SEQ ID NO: 1776887 - DNA, 15 bp, Homo sapiens
aaattattcttcagt

SEQ ID NO: 1776888 - DNA, 15 bp, Homo sapiens
aattattcttcagtg

SEQ ID NO: 1776889 - DNA, 15 bp, Homo sapiens
attattcttcagtga

SEQ ID NO: 1776890 - DNA, 15 bp, Homo sapiens
ttattcttcagtgaa

SEQ ID NO: 1776891 - DNA, 15 bp, Homo sapiens
tattcttcagtgaat

SEQ ID NO: 1776892 - DNA, 15 bp, Homo sapiens
attcttcagtgaatc

SEQ ID NO: 1776893 - DNA, 15 bp, Homo sapiens
ttcttcagtgaatct

SEQ ID NO: 1776894 - DNA, 15 bp, Homo sapiens
tcttcagtgaatctg

SEQ ID NO: 1776895 - DNA, 15 bp, Homo sapiens
cttcagtgaatctgt

SEQ ID NO: 1776896 - DNA, 15 bp, Homo sapiens
ttcagtgaatctgtt

SEQ ID NO: 1776897 - DNA, 15 bp, Homo sapiens
tcagtgaatctgttt

SEQ ID NO: 1776898 - DNA, 15 bp, Homo sapiens
cagtgaatctgtttt

SEQ ID NO: 1776899 - DNA, 15 bp, Homo sapiens
agtgaatctgttttt

SEQ ID NO: 1776900 - DNA, 15 bp, Homo sapiens
gtgaatctgtttttg

SEQ ID NO: 1776901 - DNA, 15 bp, Homo sapiens
tgaatctgtttttgg

SEQ ID NO: 1776902 - DNA, 15 bp, Homo sapiens
gaatctgtttttgga

SEQ ID NO: 1776903 - DNA, 15 bp, Homo sapiens
aatctgtttttggat

SEQ ID NO: 1776904 - DNA, 15 bp, Homo sapiens
atctgtttttggatt

SEQ ID NO: 1776905 - DNA, 15 bp, Homo sapiens
tctgtttttggattc

SEQ ID NO: 1776906 - DNA, 15 bp, Homo sapiens
ctgtttttggattca

SEQ ID NO: 1776907 - DNA, 15 bp, Homo sapiens
tgtttttggattcag

SEQ ID NO: 1776908 - DNA, 15 bp, Homo sapiens
gtttttggattcagt

SEQ ID NO: 1776909 - DNA, 15 bp, Homo sapiens
tttttggattcagtc

SEQ ID NO: 1776910 - DNA, 15 bp, Homo sapiens
ttttggattcagtct

SEQ ID NO: 1776911 - DNA, 15 bp, Homo sapiens
tttggattcagtctt

SEQ ID NO: 1776912 - DNA, 15 bp, Homo sapiens
ttggattcagtcttg

SEQ ID NO: 1776913 - DNA, 15 bp, Homo sapiens
tggattcagtcttga

SEQ ID NO: 1776914 - DNA, 15 bp, Homo sapiens
ggattcagtcttgat

SEQ ID NO: 1776915 - DNA, 15 bp, Homo sapiens
gattcagtcttgata

SEQ ID NO: 1776916 - DNA, 15 bp, Homo sapiens
attcagtcttgataa

SEQ ID NO: 1776917 - DNA, 15 bp, Homo sapiens
ttcagtcttgataat

SEQ ID NO: 1776918 - DNA, 15 bp, Homo sapiens
tcagtcttgataata

SEQ ID NO: 1776919 - DNA, 15 bp, Homo sapiens
cagtcttgataataa

SEQ ID NO: 1776920 - DNA, 15 bp, Homo sapiens
agtcttgataataaa

SEQ ID NO: 1776921 - DNA, 15 bp, Homo sapiens
gtcttgataataaaa

SEQ ID NO: 1776922 - DNA, 15 bp, Homo sapiens
tcttgataataaaaa

SEQ ID NO: 1776923 - DNA, 15 bp, Homo sapiens
cttgataataaaaac

SEQ ID NO: 1776924 - DNA, 15 bp, Homo sapiens
ttgataataaaaacg

SEQ ID NO: 1776925 - DNA, 15 bp, Homo sapiens
tgataataaaaacgg

SEQ ID NO: 1776926 - DNA, 15 bp, Homo sapiens
gataataaaaacgga

SEQ ID NO: 1776927 - DNA, 15 bp, Homo sapiens
ataataaaaacggag

SEQ ID NO: 1776928 - DNA, 15 bp, Homo sapiens
taataaaaacggaga

SEQ ID NO: 1776929 - DNA, 15 bp, Homo sapiens
aataaaaacggagaa

SEQ ID NO: 1776930 - DNA, 15 bp, Homo sapiens
ataaaaacggagaaa

SEQ ID NO: 1776931 - DNA, 15 bp, Homo sapiens
taaaaacggagaaaa

SEQ ID NO: 1776932 - DNA, 15 bp, Homo sapiens
aaaaacggagaaaaa

SEQ ID NO: 1776933 - DNA, 15 bp, Homo sapiens
aaaacggagaaaaaa

SEQ ID NO: 1776934 - DNA, 15 bp, Homo sapiens
aaacggagaaaaaaa

SEQ ID NO: 1776935 - DNA, 15 bp, Homo sapiens
aacggagaaaaaaaa

SEQ ID NO: 1776936 - DNA, 15 bp, Homo sapiens
cggagaaaaaaaatt

SEQ ID NO: 1776937 - DNA, 15 bp, Homo sapiens
ggagaaaaaaaattt

SEQ ID NO: 1776938 - DNA, 15 bp, Homo sapiens
gagaaaaaaaatttt

SEQ ID NO: 1776939 - DNA, 15 bp, Homo sapiens
agaaaaaaaatttta

SEQ ID NO: 1776940 - DNA, 15 bp, Homo sapiens
gaaaaaaaattttaa

SEQ ID NO: 1776941 - DNA, 15 bp, Homo sapiens
aaaaaaaattttaac

SEQ ID NO: 1776942 - DNA, 15 bp, Homo sapiens
aaaaaaattttaaca

SEQ ID NO: 1776943 - DNA, 15 bp, Homo sapiens
aaaaaattttaacag

SEQ ID NO: 1776944 - DNA, 15 bp, Homo sapiens
aaaaattttaacaga

SEQ ID NO: 1776945 - DNA, 15 bp, Homo sapiens
aaaattttaacagat

SEQ ID NO: 1776946 - DNA, 15 bp, Homo sapiens
aaattttaacagata

SEQ ID NO: 1776947 - DNA, 15 bp, Homo sapiens
aattttaacagatag

SEQ ID NO: 1776948 - DNA, 15 bp, Homo sapiens
attttaacagataga

SEQ ID NO: 1776949 - DNA, 15 bp, Homo sapiens
ttttaacagatagat

SEQ ID NO: 1776950 - DNA, 15 bp, Homo sapiens
tttaacagatagatt

SEQ ID NO: 1776951 - DNA, 15 bp, Homo sapiens
ttaacagatagatta

SEQ ID NO: 1776952 - DNA, 15 bp, Homo sapiens
taacagatagattat

SEQ ID NO: 1776953 - DNA, 15 bp, Homo sapiens
aacagatagattatt

SEQ ID NO: 1776954 - DNA, 15 bp, Homo sapiens
acagatagattattt

SEQ ID NO: 1776955 - DNA, 15 bp, Homo sapiens
cagatagattatttc

SEQ ID NO: 1776956 - DNA, 15 bp, Homo sapiens
agatagattatttca

SEQ ID NO: 1776957 - DNA, 15 bp, Homo sapiens
gatagattatttcaa

SEQ ID NO: 1776958 - DNA, 15 bp, Homo sapiens
atagattatttcaat

SEQ ID NO: 1776959 - DNA, 15 bp, Homo sapiens
tagattatttcaata

SEQ ID NO: 1776960 - DNA, 15 bp, Homo sapiens
agattatttcaatat

SEQ ID NO: 1776961 - DNA, 15 bp, Homo sapiens
gattatttcaatatt

SEQ ID NO: 1776962 - DNA, 15 bp, Homo sapiens
attatttcaatattg

SEQ ID NO: 1776963 - DNA, 15 bp, Homo sapiens
ttatttcaatattgc

SEQ ID NO: 1776964 - DNA, 15 bp, Homo sapiens
tatttcaatattgct

SEQ ID NO: 1776965 - DNA, 15 bp, Homo sapiens
atttcaatattgctc

SEQ ID NO: 1776966 - DNA, 15 bp, Homo sapiens
tttcaatattgctct

SEQ ID NO: 1776967 - DNA, 15 bp, Homo sapiens
ttcaatattgctctg

SEQ ID NO: 1776968 - DNA, 15 bp, Homo sapiens
tcaatattgctctgt

SEQ ID NO: 1776969 - DNA, 15 bp, Homo sapiens
caatattgctctgtc

SEQ ID NO: 1776970 - DNA, 15 bp, Homo sapiens
aatattgctctgtca

SEQ ID NO: 1776971 - DNA, 15 bp, Homo sapiens
atattgctctgtcag

SEQ ID NO: 1776972 - DNA, 15 bp, Homo sapiens
tattgctctgtcagc

SEQ ID NO: 1776973 - DNA, 15 bp, Homo sapiens
attgctctgtcagca

SEQ ID NO: 1776974 - DNA, 15 bp, Homo sapiens
ttgctctgtcagcaa

SEQ ID NO: 1776975 - DNA, 15 bp, Homo sapiens
tgctctgtcagcaat

SEQ ID NO: 1776976 - DNA, 15 bp, Homo sapiens
gctctgtcagcaata

SEQ ID NO: 1776977 - DNA, 15 bp, Homo sapiens
ctctgtcagcaatat

SEQ ID NO: 1776978 - DNA, 15 bp, Homo sapiens
tctgtcagcaatatc

SEQ ID NO: 1776979 - DNA, 15 bp, Homo sapiens
ctgtcagcaatatct

SEQ ID NO: 1776980 - DNA, 15 bp, Homo sapiens
tgtcagcaatatctg

SEQ ID NO: 1776981 - DNA, 15 bp, Homo sapiens
gtcagcaatatctgg

SEQ ID NO: 1776982 - DNA, 15 bp, Homo sapiens
tcagcaatatctgga

SEQ ID NO: 1776983 - DNA, 15 bp, Homo sapiens
cagcaatatctggaa

SEQ ID NO: 1776984 - DNA, 15 bp, Homo sapiens
agcaatatctggaaa

SEQ ID NO: 1776985 - DNA, 15 bp, Homo sapiens
gcaatatctggaaat

SEQ ID NO: 1776986 - DNA, 15 bp, Homo sapiens
caatatctggaaata

SEQ ID NO: 1776987 - DNA, 15 bp, Homo sapiens
aatatctggaaatag

SEQ ID NO: 1776988 - DNA, 15 bp, Homo sapiens
atatctggaaatagc

SEQ ID NO: 1776989 - DNA, 15 bp, Homo sapiens
tatctggaaatagca

SEQ ID NO: 1776990 - DNA, 15 bp, Homo sapiens
atctggaaatagcat

SEQ ID NO: 1776991 - DNA, 15 bp, Homo sapiens
tctggaaatagcatt

SEQ ID NO: 1776992 - DNA, 15 bp, Homo sapiens
ctggaaatagcatta

SEQ ID NO: 1776993 - DNA, 15 bp, Homo sapiens
tggaaatagcattag

SEQ ID NO: 1776994 - DNA, 15 bp, Homo sapiens
ggaaatagcattagt

SEQ ID NO: 1776995 - DNA, 15 bp, Homo sapiens
gaaatagcattagtc

SEQ ID NO: 1776996 - DNA, 15 bp, Homo sapiens
aaatagcattagtca

SEQ ID NO: 1776997 - DNA, 15 bp, Homo sapiens
aatagcattagtcat

SEQ ID NO: 1776998 - DNA, 15 bp, Homo sapiens
atagcattagtcatt

SEQ ID NO: 1776999 - DNA, 15 bp, Homo sapiens
tagcattagtcattt

SEQ ID NO: 1777000 - DNA, 15 bp, Homo sapiens
agcattagtcatttt

SEQ ID NO: 1777001 - DNA, 15 bp, Homo sapiens
gcattagtcattttt

SEQ ID NO: 1777002 - DNA, 15 bp, Homo sapiens
cattagtcatttttc

SEQ ID NO: 1777003 - DNA, 15 bp, Homo sapiens
ttagtcatttttctt

SEQ ID NO: 1777004 - DNA, 15 bp, Homo sapiens
tagtcatttttcttc

SEQ ID NO: 1777005 - DNA, 15 bp, Homo sapiens
agtcatttttcttca

SEQ ID NO: 1777006 - DNA, 15 bp, Homo sapiens
gtcatttttcttcag

SEQ ID NO: 1777007 - DNA, 15 bp, Homo sapiens
tcatttttcttcagg

SEQ ID NO: 1777008 - DNA, 15 bp, Homo sapiens
catttttcttcaggt

SEQ ID NO: 1777009 - DNA, 15 bp, Homo sapiens
atttttcttcaggtg

SEQ ID NO: 1777010 - DNA, 15 bp, Homo sapiens
tttttcttcaggtgc

SEQ ID NO: 1777011 - DNA, 15 bp, Homo sapiens
ttttcttcaggtgct

SEQ ID NO: 1777012 - DNA, 15 bp, Homo sapiens
tttcttcaggtgctt

SEQ ID NO: 1777013 - DNA, 15 bp, Homo sapiens
ttcttcaggtgcttt

SEQ ID NO: 1777014 - DNA, 15 bp, Homo sapiens
tcttcaggtgctttt

SEQ ID NO: 1777015 - DNA, 15 bp, Homo sapiens
cttcaggtgctttta

SEQ ID NO: 1777016 - DNA, 15 bp, Homo sapiens
ttcaggtgcttttat

SEQ ID NO: 1777017 - DNA, 15 bp, Homo sapiens
tcaggtgcttttatc

SEQ ID NO: 1777018 - DNA, 15 bp, Homo sapiens
caggtgcttttatcc

SEQ ID NO: 1777019 - DNA, 15 bp, Homo sapiens
aggtgcttttatcca

SEQ ID NO: 1777020 - DNA, 15 bp, Homo sapiens
ggtgcttttatccaa

SEQ ID NO: 1777021 - DNA, 15 bp, Homo sapiens
gtgcttttatccaac

SEQ ID NO: 1777022 - DNA, 15 bp, Homo sapiens
tgcttttatccaaca

SEQ ID NO: 1777023 - DNA, 15 bp, Homo sapiens
gcttttatccaacaa

SEQ ID NO: 1777024 - DNA, 15 bp, Homo sapiens
cttttatccaacaag

SEQ ID NO: 1777025 - DNA, 15 bp, Homo sapiens
ttttatccaacaagc

SEQ ID NO: 1777026 - DNA, 15 bp, Homo sapiens
tttatccaacaagcc

SEQ ID NO: 1777027 - DNA, 15 bp, Homo sapiens
ttatccaacaagcct

SEQ ID NO: 1777028 - DNA, 15 bp, Homo sapiens
tatccaacaagccta

SEQ ID NO: 1777029 - DNA, 15 bp, Homo sapiens
atccaacaagcctaa

SEQ ID NO: 1777030 - DNA, 15 bp, Homo sapiens
tccaacaagcctaag

SEQ ID NO: 1777031 - DNA, 15 bp, Homo sapiens
ccaacaagcctaaga

SEQ ID NO: 1777032 - DNA, 15 bp, Homo sapiens
caacaagcctaagac

SEQ ID NO: 1777033 - DNA, 15 bp, Homo sapiens
aacaagcctaagact

SEQ ID NO: 1777034 - DNA, 15 bp, Homo sapiens
acaagcctaagactc

SEQ ID NO: 1777035 - DNA, 15 bp, Homo sapiens
caagcctaagactcc

SEQ ID NO: 1777036 - DNA, 15 bp, Homo sapiens
aagcctaagactcct

SEQ ID NO: 1777037 - DNA, 15 bp, Homo sapiens
agcctaagactccta

SEQ ID NO: 1777038 - DNA, 15 bp, Homo sapiens
gcctaagactcctaa

SEQ ID NO: 1777039 - DNA, 15 bp, Homo sapiens
cctaagactcctaag

SEQ ID NO: 1777040 - DNA, 15 bp, Homo sapiens
ctaagactcctaaga

SEQ ID NO: 1777041 - DNA, 15 bp, Homo sapiens
taagactcctaagat

SEQ ID NO: 1777042 - DNA, 15 bp, Homo sapiens
aagactcctaagatt

SEQ ID NO: 1777043 - DNA, 15 bp, Homo sapiens
agactcctaagattc

SEQ ID NO: 1777044 - DNA, 15 bp, Homo sapiens
gactcctaagattcc

SEQ ID NO: 1777045 - DNA, 15 bp, Homo sapiens
actcctaagattccc

SEQ ID NO: 1777046 - DNA, 15 bp, Homo sapiens
ctcctaagattccct

SEQ ID NO: 1777047 - DNA, 15 bp, Homo sapiens
tcctaagattccctt

SEQ ID NO: 1777048 - DNA, 15 bp, Homo sapiens
cctaagattcccttc

SEQ ID NO: 1777049 - DNA, 15 bp, Homo sapiens
ctaagattcccttcc

SEQ ID NO: 1777050 - DNA, 15 bp, Homo sapiens
taagattcccttccc

SEQ ID NO: 1777051 - DNA, 15 bp, Homo sapiens
aagattcccttcccc

SEQ ID NO: 1777052 - DNA, 15 bp, Homo sapiens
agattcccttcccca

SEQ ID NO: 1777053 - DNA, 15 bp, Homo sapiens
gattcccttccccat

SEQ ID NO: 1777054 - DNA, 15 bp, Homo sapiens
attcccttccccatt

SEQ ID NO: 1777055 - DNA, 15 bp, Homo sapiens
ttcccttccccatta

SEQ ID NO: 1777056 - DNA, 15 bp, Homo sapiens
tcccttccccattag

SEQ ID NO: 1777057 - DNA, 15 bp, Homo sapiens
cccttccccattagg

SEQ ID NO: 1777058 - DNA, 15 bp, Homo sapiens
ccttccccattagga

SEQ ID NO: 1777059 - DNA, 15 bp, Homo sapiens
cttccccattaggaa

SEQ ID NO: 1777060 - DNA, 15 bp, Homo sapiens
ttccccattaggaag

SEQ ID NO: 1777061 - DNA, 15 bp, Homo sapiens
tccccattaggaagc

SEQ ID NO: 1777062 - DNA, 15 bp, Homo sapiens
ccccattaggaagct

SEQ ID NO: 1777063 - DNA, 15 bp, Homo sapiens
cccattaggaagctc

SEQ ID NO: 1777064 - DNA, 15 bp, Homo sapiens
ccattaggaagctcc

SEQ ID NO: 1777065 - DNA, 15 bp, Homo sapiens
cattaggaagctcca

SEQ ID NO: 1777066 - DNA, 15 bp, Homo sapiens
attaggaagctccag

SEQ ID NO: 1777067 - DNA, 15 bp, Homo sapiens
ttaggaagctccagg

SEQ ID NO: 1777068 - DNA, 15 bp, Homo sapiens
taggaagctccaggc

SEQ ID NO: 1777069 - DNA, 15 bp, Homo sapiens
aggaagctccaggca

SEQ ID NO: 1777070 - DNA, 15 bp, Homo sapiens
ggaagctccaggcaa

SEQ ID NO: 1777071 - DNA, 15 bp, Homo sapiens
gaagctccaggcaag

SEQ ID NO: 1777072 - DNA, 15 bp, Homo sapiens
aagctccaggcaagc

SEQ ID NO: 1777073 - DNA, 15 bp, Homo sapiens
agctccaggcaagca

SEQ ID NO: 1777074 - DNA, 15 bp, Homo sapiens
gctccaggcaagcaa

SEQ ID NO: 1777075 - DNA, 15 bp, Homo sapiens
ctccaggcaagcaag

SEQ ID NO: 1777076 - DNA, 15 bp, Homo sapiens
tccaggcaagcaagt

SEQ ID NO: 1777077 - DNA, 15 bp, Homo sapiens
ccaggcaagcaagtg

SEQ ID NO: 1777078 - DNA, 15 bp, Homo sapiens
caggcaagcaagtga

SEQ ID NO: 1777079 - DNA, 15 bp, Homo sapiens
aggcaagcaagtgaa

SEQ ID NO: 1777080 - DNA, 15 bp, Homo sapiens
ggcaagcaagtgaaa

SEQ ID NO: 1777081 - DNA, 15 bp, Homo sapiens
gcaagcaagtgaaac

SEQ ID NO: 1777082 - DNA, 15 bp, Homo sapiens
caagcaagtgaaacc

SEQ ID NO: 1777083 - DNA, 15 bp, Homo sapiens
aagcaagtgaaacca

SEQ ID NO: 1777084 - DNA, 15 bp, Homo sapiens
agcaagtgaaaccag

SEQ ID NO: 1777085 - DNA, 15 bp, Homo sapiens
gcaagtgaaaccagc

SEQ ID NO: 1777086 - DNA, 15 bp, Homo sapiens
caagtgaaaccagca

SEQ ID NO: 1777087 - DNA, 15 bp, Homo sapiens
aagtgaaaccagcag

SEQ ID NO: 1777088 - DNA, 15 bp, Homo sapiens
agtgaaaccagcaga

SEQ ID NO: 1777089 - DNA, 15 bp, Homo sapiens
gtgaaaccagcagaa

SEQ ID NO: 1777090 - DNA, 15 bp, Homo sapiens
tgaaaccagcagaag

SEQ ID NO: 1777091 - DNA, 15 bp, Homo sapiens
gaaaccagcagaagg

SEQ ID NO: 1777092 - DNA, 15 bp, Homo sapiens
aaaccagcagaaggc

SEQ ID NO: 1777093 - DNA, 15 bp, Homo sapiens
aaccagcagaaggca

SEQ ID NO: 1777094 - DNA, 15 bp, Homo sapiens
accagcagaaggcac

SEQ ID NO: 1777095 - DNA, 15 bp, Homo sapiens
ccagcagaaggcacc

SEQ ID NO: 1777096 - DNA, 15 bp, Homo sapiens
cagcagaaggcaccc

SEQ ID NO: 1777097 - DNA, 15 bp, Homo sapiens
agcagaaggcaccca

SEQ ID NO: 1777098 - DNA, 15 bp, Homo sapiens
gcagaaggcacccag

SEQ ID NO: 1777099 - DNA, 15 bp, Homo sapiens
cagaaggcacccagc

SEQ ID NO: 1777100 - DNA, 15 bp, Homo sapiens
agaaggcacccagcc

SEQ ID NO: 1777101 - DNA, 15 bp, Homo sapiens
gaaggcacccagcca

SEQ ID NO: 1777102 - DNA, 15 bp, Homo sapiens
aaggcacccagccac

SEQ ID NO: 1777103 - DNA, 15 bp, Homo sapiens
aggcacccagccaca

SEQ ID NO: 1777104 - DNA, 15 bp, Homo sapiens
ggcacccagccacaa

SEQ ID NO: 1777105 - DNA, 15 bp, Homo sapiens
gcacccagccacaaa

SEQ ID NO: 1777106 - DNA, 15 bp, Homo sapiens
cacccagccacaaaa

SEQ ID NO: 1777107 - DNA, 15 bp, Homo sapiens
acccagccacaaaaa

SEQ ID NO: 1777108 - DNA, 15 bp, Homo sapiens
cccagccacaaaaaa

SEQ ID NO: 1777109 - DNA, 15 bp, Homo sapiens
ccagccacaaaaaac

SEQ ID NO: 1777110 - DNA, 15 bp, Homo sapiens
cagccacaaaaaaca

SEQ ID NO: 1777111 - DNA, 15 bp, Homo sapiens
agccacaaaaaacac

SEQ ID NO: 1777112 - DNA, 15 bp, Homo sapiens
gccacaaaaaacacc

SEQ ID NO: 1777113 - DNA, 15 bp, Homo sapiens
ccacaaaaaacaccc

SEQ ID NO: 1777114 - DNA, 15 bp, Homo sapiens
cacaaaaaacaccct

SEQ ID NO: 1777115 - DNA, 15 bp, Homo sapiens
acaaaaaacaccctg

SEQ ID NO: 1777116 - DNA, 15 bp, Homo sapiens
caaaaaacaccctgg

SEQ ID NO: 1777117 - DNA, 15 bp, Homo sapiens
aaaaaacaccctggc

SEQ ID NO: 1777118 - DNA, 15 bp, Homo sapiens
aaaaacaccctggcc

SEQ ID NO: 1777119 - DNA, 15 bp, Homo sapiens
aaaacaccctggccc

SEQ ID NO: 1777120 - DNA, 15 bp, Homo sapiens
aaacaccctggccca

SEQ ID NO: 1777121 - DNA, 15 bp, Homo sapiens
aacaccctggcccag

SEQ ID NO: 1777122 - DNA, 15 bp, Homo sapiens
acaccctggcccagg

SEQ ID NO: 1777123 - DNA, 15 bp, Homo sapiens
caccctggcccagga

SEQ ID NO: 1777124 - DNA, 15 bp, Homo sapiens
accctggcccaggaa

SEQ ID NO: 1777125 - DNA, 15 bp, Homo sapiens
ccctggcccaggaag

SEQ ID NO: 1777126 - DNA, 15 bp, Homo sapiens
cctggcccaggaagt

SEQ ID NO: 1777127 - DNA, 15 bp, Homo sapiens
ctggcccaggaagtc

SEQ ID NO: 1777128 - DNA, 15 bp, Homo sapiens
tggcccaggaagtct

SEQ ID NO: 1777129 - DNA, 15 bp, Homo sapiens
ggcccaggaagtctc

SEQ ID NO: 1777130 - DNA, 15 bp, Homo sapiens
gcccaggaagtctct

SEQ ID NO: 1777131 - DNA, 15 bp, Homo sapiens
cccaggaagtctctt

SEQ ID NO: 1777132 - DNA, 15 bp, Homo sapiens
ccaggaagtctcttt

SEQ ID NO: 1777133 - DNA, 15 bp, Homo sapiens
caggaagtctcttta

SEQ ID NO: 1777134 - DNA, 15 bp, Homo sapiens
aggaagtctctttaa

SEQ ID NO: 1777135 - DNA, 15 bp, Homo sapiens
ggaagtctctttaac

SEQ ID NO: 1777136 - DNA, 15 bp, Homo sapiens
gaagtctctttaacc

SEQ ID NO: 1777137 - DNA, 15 bp, Homo sapiens
aagtctctttaaccc

SEQ ID NO: 1777138 - DNA, 15 bp, Homo sapiens
agtctctttaaccct

SEQ ID NO: 1777139 - DNA, 15 bp, Homo sapiens
gtctctttaacccta

SEQ ID NO: 1777140 - DNA, 15 bp, Homo sapiens
tctctttaaccctac

SEQ ID NO: 1777141 - DNA, 15 bp, Homo sapiens
ctctttaaccctaca

SEQ ID NO: 1777142 - DNA, 15 bp, Homo sapiens
tctttaaccctacag

SEQ ID NO: 1777143 - DNA, 15 bp, Homo sapiens
ctttaaccctacagc

SEQ ID NO: 1777144 - DNA, 15 bp, Homo sapiens
tttaaccctacagcc

SEQ ID NO: 1777145 - DNA, 15 bp, Homo sapiens
ttaaccctacagccg

SEQ ID NO: 1777146 - DNA, 15 bp, Homo sapiens
taaccctacagccga

SEQ ID NO: 1777147 - DNA, 15 bp, Homo sapiens
aaccctacagccgag

SEQ ID NO: 1777148 - DNA, 15 bp, Homo sapiens
accctacagccgaga

SEQ ID NO: 1777149 - DNA, 15 bp, Homo sapiens
ccctacagccgagac

SEQ ID NO: 1777150 - DNA, 15 bp, Homo sapiens
cctacagccgagact

SEQ ID NO: 1777151 - DNA, 15 bp, Homo sapiens
ctacagccgagactc

SEQ ID NO: 1777152 - DNA, 15 bp, Homo sapiens
tacagccgagactct

SEQ ID NO: 1777153 - DNA, 15 bp, Homo sapiens
acagccgagactctt

SEQ ID NO: 1777154 - DNA, 15 bp, Homo sapiens
cagccgagactcttt

SEQ ID NO: 1777155 - DNA, 15 bp, Homo sapiens
agccgagactctttc

SEQ ID NO: 1777156 - DNA, 15 bp, Homo sapiens
gccgagactctttct

SEQ ID NO: 1777157 - DNA, 15 bp, Homo sapiens
ccgagactctttctc

SEQ ID NO: 1777158 - DNA, 15 bp, Homo sapiens
cgagactctttctca

SEQ ID NO: 1777159 - DNA, 15 bp, Homo sapiens
gagactctttctcag

SEQ ID NO: 1777160 - DNA, 15 bp, Homo sapiens
agactctttctcagc

SEQ ID NO: 1777161 - DNA, 15 bp, Homo sapiens
gactctttctcagcc

SEQ ID NO: 1777162 - DNA, 15 bp, Homo sapiens
actctttctcagccc

SEQ ID NO: 1777163 - DNA, 15 bp, Homo sapiens
ctctttctcagccca

SEQ ID NO: 1777164 - DNA, 15 bp, Homo sapiens
tctttctcagcccag

SEQ ID NO: 1777165 - DNA, 15 bp, Homo sapiens
ctttctcagcccagg

SEQ ID NO: 1777166 - DNA, 15 bp, Homo sapiens
tttctcagcccagga

SEQ ID NO: 1777167 - DNA, 15 bp, Homo sapiens
ttctcagcccaggaa

SEQ ID NO: 1777168 - DNA, 15 bp, Homo sapiens
tctcagcccaggaac

SEQ ID NO: 1777169 - DNA, 15 bp, Homo sapiens
ctcagcccaggaaca

SEQ ID NO: 1777170 - DNA, 15 bp, Homo sapiens
tcagcccaggaacac

SEQ ID NO: 1777171 - DNA, 15 bp, Homo sapiens
cagcccaggaacacc

SEQ ID NO: 1777172 - DNA, 15 bp, Homo sapiens
agcccaggaacacca

SEQ ID NO: 1777173 - DNA, 15 bp, Homo sapiens
gcccaggaacaccag

SEQ ID NO: 1777174 - DNA, 15 bp, Homo sapiens
cccaggaacaccagg

SEQ ID NO: 1777175 - DNA, 15 bp, Homo sapiens
ccaggaacaccaggc

SEQ ID NO: 1777176 - DNA, 15 bp, Homo sapiens
caggaacaccaggcc

SEQ ID NO: 1777177 - DNA, 15 bp, Homo sapiens
aggaacaccaggcct

SEQ ID NO: 1777178 - DNA, 15 bp, Homo sapiens
ggaacaccaggcctg

SEQ ID NO: 1777179 - DNA, 15 bp, Homo sapiens
gaacaccaggcctgt

SEQ ID NO: 1777180 - DNA, 15 bp, Homo sapiens
aacaccaggcctgta

SEQ ID NO: 1777181 - DNA, 15 bp, Homo sapiens
acaccaggcctgtag

SEQ ID NO: 1777182 - DNA, 15 bp, Homo sapiens
caccaggcctgtaga

SEQ ID NO: 1777183 - DNA, 15 bp, Homo sapiens
accaggcctgtagag

SEQ ID NO: 1777184 - DNA, 15 bp, Homo sapiens
ccaggcctgtagaga

SEQ ID NO: 1777185 - DNA, 15 bp, Homo sapiens
caggcctgtagagag

SEQ ID NO: 1777186 - DNA, 15 bp, Homo sapiens
aggcctgtagagaga

SEQ ID NO: 1777187 - DNA, 15 bp, Homo sapiens
ggcctgtagagagac

SEQ ID NO: 1777188 - DNA, 15 bp, Homo sapiens
gcctgtagagagaca

SEQ ID NO: 1777189 - DNA, 15 bp, Homo sapiens
cctgtagagagacac

SEQ ID NO: 1777190 - DNA, 15 bp, Homo sapiens
ctgtagagagacact

SEQ ID NO: 1777191 - DNA, 15 bp, Homo sapiens
tgtagagagacacta

SEQ ID NO: 1777192 - DNA, 15 bp, Homo sapiens
gtagagagacactat

SEQ ID NO: 1777193 - DNA, 15 bp, Homo sapiens
tagagagacactatt

SEQ ID NO: 1777194 - DNA, 15 bp, Homo sapiens
agagagacactattc

SEQ ID NO: 1777195 - DNA, 15 bp, Homo sapiens
gagagacactattca

SEQ ID NO: 1777196 - DNA, 15 bp, Homo sapiens
agagacactattcag

SEQ ID NO: 1777197 - DNA, 15 bp, Homo sapiens
gagacactattcagg

SEQ ID NO: 1777198 - DNA, 15 bp, Homo sapiens
agacactattcaggg

SEQ ID NO: 1777199 - DNA, 15 bp, Homo sapiens
gacactattcagggg

SEQ ID NO: 1777200 - DNA, 15 bp, Homo sapiens
acactattcaggggt

SEQ ID NO: 1777201 - DNA, 15 bp, Homo sapiens
cactattcaggggtt

SEQ ID NO: 1777202 - DNA, 15 bp, Homo sapiens
actattcaggggttt

SEQ ID NO: 1777203 - DNA, 15 bp, Homo sapiens
ctattcaggggtttc

SEQ ID NO: 1777204 - DNA, 15 bp, Homo sapiens
tattcaggggtttcc

SEQ ID NO: 1777205 - DNA, 15 bp, Homo sapiens
attcaggggtttcca

SEQ ID NO: 1777206 - DNA, 15 bp, Homo sapiens
ttcaggggtttccac

SEQ ID NO: 1777207 - DNA, 15 bp, Homo sapiens
tcaggggtttccact

SEQ ID NO: 1777208 - DNA, 15 bp, Homo sapiens
caggggtttccacta

SEQ ID NO: 1777209 - DNA, 15 bp, Homo sapiens
aggggtttccactat

SEQ ID NO: 1777210 - DNA, 15 bp, Homo sapiens
ggggtttccactata

SEQ ID NO: 1777211 - DNA, 15 bp, Homo sapiens
gggtttccactatac

SEQ ID NO: 1777212 - DNA, 15 bp, Homo sapiens
ggtttccactataca

SEQ ID NO: 1777213 - DNA, 15 bp, Homo sapiens
gtttccactatacac

SEQ ID NO: 1777214 - DNA, 15 bp, Homo sapiens
tttccactatacacc

SEQ ID NO: 1777215 - DNA, 15 bp, Homo sapiens
ttccactatacacca

SEQ ID NO: 1777216 - DNA, 15 bp, Homo sapiens
tccactatacaccat

SEQ ID NO: 1777217 - DNA, 15 bp, Homo sapiens
ccactatacaccatt

SEQ ID NO: 1777218 - DNA, 15 bp, Homo sapiens
cactatacaccattc

SEQ ID NO: 1777219 - DNA, 15 bp, Homo sapiens
actatacaccattcc

SEQ ID NO: 1777220 - DNA, 15 bp, Homo sapiens
ctatacaccattcca

SEQ ID NO: 1777221 - DNA, 15 bp, Homo sapiens
tatacaccattccac

SEQ ID NO: 1777222 - DNA, 15 bp, Homo sapiens
atacaccattccacc

SEQ ID NO: 1777223 - DNA, 15 bp, Homo sapiens
tacaccattccacca

SEQ ID NO: 1777224 - DNA, 15 bp, Homo sapiens
acaccattccaccag

SEQ ID NO: 1777225 - DNA, 15 bp, Homo sapiens
caccattccaccagg

SEQ ID NO: 1777226 - DNA, 15 bp, Homo sapiens
accattccaccaggc

SEQ ID NO: 1777227 - DNA, 15 bp, Homo sapiens
ccattccaccaggca

SEQ ID NO: 1777228 - DNA, 15 bp, Homo sapiens
cattccaccaggcag

SEQ ID NO: 1777229 - DNA, 15 bp, Homo sapiens
attccaccaggcagc

SEQ ID NO: 1777230 - DNA, 15 bp, Homo sapiens
ttccaccaggcagct

SEQ ID NO: 1777231 - DNA, 15 bp, Homo sapiens
tccaccaggcagctt

SEQ ID NO: 1777232 - DNA, 15 bp, Homo sapiens
ccaccaggcagcttg

SEQ ID NO: 1777233 - DNA, 15 bp, Homo sapiens
caccaggcagcttga

SEQ ID NO: 1777234 - DNA, 15 bp, Homo sapiens
accaggcagcttgac

SEQ ID NO: 1777235 - DNA, 15 bp, Homo sapiens
ccaggcagcttgacc

SEQ ID NO: 1777236 - DNA, 15 bp, Homo sapiens
caggcagcttgacct

SEQ ID NO: 1777237 - DNA, 15 bp, Homo sapiens
aggcagcttgacctg

SEQ ID NO: 1777238 - DNA, 15 bp, Homo sapiens
ggcagcttgacctgg

SEQ ID NO: 1777239 - DNA, 15 bp, Homo sapiens
gcagcttgacctggt

SEQ ID NO: 1777240 - DNA, 15 bp, Homo sapiens
cagcttgacctggtg

SEQ ID NO: 1777241 - DNA, 15 bp, Homo sapiens
agcttgacctggtga

SEQ ID NO: 1777242 - DNA, 15 bp, Homo sapiens
gcttgacctggtgaa

SEQ ID NO: 1777243 - DNA, 15 bp, Homo sapiens
cttgacctggtgaaa

SEQ ID NO: 1777244 - DNA, 15 bp, Homo sapiens
ttgacctggtgaaaa

SEQ ID NO: 1777245 - DNA, 15 bp, Homo sapiens
tgacctggtgaaaat

SEQ ID NO: 1777246 - DNA, 15 bp, Homo sapiens
gacctggtgaaaatg

SEQ ID NO: 1777247 - DNA, 15 bp, Homo sapiens
acctggtgaaaatgt

SEQ ID NO: 1777248 - DNA, 15 bp, Homo sapiens
cctggtgaaaatgtg

SEQ ID NO: 1777249 - DNA, 15 bp, Homo sapiens
ctggtgaaaatgtgt

SEQ ID NO: 1777250 - DNA, 15 bp, Homo sapiens
tggtgaaaatgtgta

SEQ ID NO: 1777251 - DNA, 15 bp, Homo sapiens
ggtgaaaatgtgtag

SEQ ID NO: 1777252 - DNA, 15 bp, Homo sapiens
gtgaaaatgtgtagg

SEQ ID NO: 1777253 - DNA, 15 bp, Homo sapiens
tgaaaatgtgtaggt

SEQ ID NO: 1777254 - DNA, 15 bp, Homo sapiens
gaaaatgtgtaggtc

SEQ ID NO: 1777255 - DNA, 15 bp, Homo sapiens
aaaatgtgtaggtcc

SEQ ID NO: 1777256 - DNA, 15 bp, Homo sapiens
aaatgtgtaggtcca

SEQ ID NO: 1777257 - DNA, 15 bp, Homo sapiens
aatgtgtaggtccat

SEQ ID NO: 1777258 - DNA, 15 bp, Homo sapiens
atgtgtaggtccatg

SEQ ID NO: 1777259 - DNA, 15 bp, Homo sapiens
tgtgtaggtccatgt

SEQ ID NO: 1777260 - DNA, 15 bp, Homo sapiens
gtgtaggtccatgta

SEQ ID NO: 1777261 - DNA, 15 bp, Homo sapiens
tgtaggtccatgtat

SEQ ID NO: 1777262 - DNA, 15 bp, Homo sapiens
gtaggtccatgtatc

SEQ ID NO: 1777263 - DNA, 15 bp, Homo sapiens
taggtccatgtatcc

SEQ ID NO: 1777264 - DNA, 15 bp, Homo sapiens
aggtccatgtatcca

SEQ ID NO: 1777265 - DNA, 15 bp, Homo sapiens
ggtccatgtatccac

SEQ ID NO: 1777266 - DNA, 15 bp, Homo sapiens
gtccatgtatccacc

SEQ ID NO: 1777267 - DNA, 15 bp, Homo sapiens
tccatgtatccacca

SEQ ID NO: 1777268 - DNA, 15 bp, Homo sapiens
ccatgtatccaccac

SEQ ID NO: 1777269 - DNA, 15 bp, Homo sapiens
catgtatccaccacc

SEQ ID NO: 1777270 - DNA, 15 bp, Homo sapiens
atgtatccaccacca

SEQ ID NO: 1777271 - DNA, 15 bp, Homo sapiens
tgtatccaccaccac

SEQ ID NO: 1777272 - DNA, 15 bp, Homo sapiens
gtatccaccaccaca

SEQ ID NO: 1777273 - DNA, 15 bp, Homo sapiens
tatccaccaccacaa

SEQ ID NO: 1777274 - DNA, 15 bp, Homo sapiens
atccaccaccacaag

SEQ ID NO: 1777275 - DNA, 15 bp, Homo sapiens
tccaccaccacaagc

SEQ ID NO: 1777276 - DNA, 15 bp, Homo sapiens
ccaccaccacaagca

SEQ ID NO: 1777277 - DNA, 15 bp, Homo sapiens
caccaccacaagcaa

SEQ ID NO: 1777278 - DNA, 15 bp, Homo sapiens
accaccacaagcaat

SEQ ID NO: 1777279 - DNA, 15 bp, Homo sapiens
ccaccacaagcaatt

SEQ ID NO: 1777280 - DNA, 15 bp, Homo sapiens
caccacaagcaattg

SEQ ID NO: 1777281 - DNA, 15 bp, Homo sapiens
accacaagcaattgc

SEQ ID NO: 1777282 - DNA, 15 bp, Homo sapiens
ccacaagcaattgca

SEQ ID NO: 1777283 - DNA, 15 bp, Homo sapiens
cacaagcaattgcac

SEQ ID NO: 1777284 - DNA, 15 bp, Homo sapiens
acaagcaattgcacc

SEQ ID NO: 1777285 - DNA, 15 bp, Homo sapiens
caagcaattgcaccc

SEQ ID NO: 1777286 - DNA, 15 bp, Homo sapiens
aagcaattgcaccca

SEQ ID NO: 1777287 - DNA, 15 bp, Homo sapiens
agcaattgcacccat

SEQ ID NO: 1777288 - DNA, 15 bp, Homo sapiens
gcaattgcacccata

SEQ ID NO: 1777289 - DNA, 15 bp, Homo sapiens
caattgcacccatat

SEQ ID NO: 1777290 - DNA, 15 bp, Homo sapiens
aattgcacccatatc

SEQ ID NO: 1777291 - DNA, 15 bp, Homo sapiens
attgcacccatatcc

SEQ ID NO: 1777292 - DNA, 15 bp, Homo sapiens
ttgcacccatatccc

SEQ ID NO: 1777293 - DNA, 15 bp, Homo sapiens
tgcacccatatccct

SEQ ID NO: 1777294 - DNA, 15 bp, Homo sapiens
gcacccatatccctc

SEQ ID NO: 1777295 - DNA, 15 bp, Homo sapiens
cacccatatccctcc

SEQ ID NO: 1777296 - DNA, 15 bp, Homo sapiens
acccatatccctcca

SEQ ID NO: 1777297 - DNA, 15 bp, Homo sapiens
cccatatccctccag

SEQ ID NO: 1777298 - DNA, 15 bp, Homo sapiens
ccatatccctccagc

SEQ ID NO: 1777299 - DNA, 15 bp, Homo sapiens
catatccctccagcc

SEQ ID NO: 1777300 - DNA, 15 bp, Homo sapiens
atatccctccagcct

SEQ ID NO: 1777301 - DNA, 15 bp, Homo sapiens
tatccctccagcctc

SEQ ID NO: 1777302 - DNA, 15 bp, Homo sapiens
atccctccagcctct

SEQ ID NO: 1777303 - DNA, 15 bp, Homo sapiens
tccctccagcctctc

SEQ ID NO: 1777304 - DNA, 15 bp, Homo sapiens
ccctccagcctctct

SEQ ID NO: 1777305 - DNA, 15 bp, Homo sapiens
cctccagcctctcta

SEQ ID NO: 1777306 - DNA, 15 bp, Homo sapiens
ctccagcctctctac

SEQ ID NO: 1777307 - DNA, 15 bp, Homo sapiens
tccagcctctctacc

SEQ ID NO: 1777308 - DNA, 15 bp, Homo sapiens
ccagcctctctaccc

SEQ ID NO: 1777309 - DNA, 15 bp, Homo sapiens
cagcctctctacccc

SEQ ID NO: 1777310 - DNA, 15 bp, Homo sapiens
agcctctctacccct

SEQ ID NO: 1777311 - DNA, 15 bp, Homo sapiens
gcctctctacccctg

SEQ ID NO: 1777312 - DNA, 15 bp, Homo sapiens
cctctctacccctgt

SEQ ID NO: 1777313 - DNA, 15 bp, Homo sapiens
ctctctacccctgtc

SEQ ID NO: 1777314 - DNA, 15 bp, Homo sapiens
tctctacccctgtcc

SEQ ID NO: 1777315 - DNA, 15 bp, Homo sapiens
ctctacccctgtccc

SEQ ID NO: 1777316 - DNA, 15 bp, Homo sapiens
tctacccctgtccct

SEQ ID NO: 1777317 - DNA, 15 bp, Homo sapiens
ctacccctgtcccta

SEQ ID NO: 1777318 - DNA, 15 bp, Homo sapiens
tacccctgtccctaa

SEQ ID NO: 1777319 - DNA, 15 bp, Homo sapiens
acccctgtccctaac

SEQ ID NO: 1777320 - DNA, 15 bp, Homo sapiens
cccctgtccctaaca

SEQ ID NO: 1777321 - DNA, 15 bp, Homo sapiens
ccctgtccctaacac

SEQ ID NO: 1777322 - DNA, 15 bp, Homo sapiens
cctgtccctaacacc

SEQ ID NO: 1777323 - DNA, 15 bp, Homo sapiens
ctgtccctaacacct

SEQ ID NO: 1777324 - DNA, 15 bp, Homo sapiens
tgtccctaacacctg

SEQ ID NO: 1777325 - DNA, 15 bp, Homo sapiens
gtccctaacacctgg

SEQ ID NO: 1777326 - DNA, 15 bp, Homo sapiens
tccctaacacctggc

SEQ ID NO: 1777327 - DNA, 15 bp, Homo sapiens
ccctaacacctggcc

SEQ ID NO: 1777328 - DNA, 15 bp, Homo sapiens
cctaacacctggcca

SEQ ID NO: 1777329 - DNA, 15 bp, Homo sapiens
ctaacacctggccac

SEQ ID NO: 1777330 - DNA, 15 bp, Homo sapiens
taacacctggccact

SEQ ID NO: 1777331 - DNA, 15 bp, Homo sapiens
acacctggccactgc

SEQ ID NO: 1777332 - DNA, 15 bp, Homo sapiens
cacctggccactgct

SEQ ID NO: 1777333 - DNA, 15 bp, Homo sapiens
acctggccactgcta

SEQ ID NO: 1777334 - DNA, 15 bp, Homo sapiens
cctggccactgctaa

SEQ ID NO: 1777335 - DNA, 15 bp, Homo sapiens
ctggccactgctaat

SEQ ID NO: 1777336 - DNA, 15 bp, Homo sapiens
tggccactgctaatc

SEQ ID NO: 1777337 - DNA, 15 bp, Homo sapiens
ggccactgctaatct

SEQ ID NO: 1777338 - DNA, 15 bp, Homo sapiens
gccactgctaatctg

SEQ ID NO: 1777339 - DNA, 15 bp, Homo sapiens
ccactgctaatctgc

SEQ ID NO: 1777340 - DNA, 15 bp, Homo sapiens
cactgctaatctgcc

SEQ ID NO: 1777341 - DNA, 15 bp, Homo sapiens
actgctaatctgccc

SEQ ID NO: 1777342 - DNA, 15 bp, Homo sapiens
ctgctaatctgccct

SEQ ID NO: 1777343 - DNA, 15 bp, Homo sapiens
tgctaatctgccctt

SEQ ID NO: 1777344 - DNA, 15 bp, Homo sapiens
gctaatctgcccttc

SEQ ID NO: 1777345 - DNA, 15 bp, Homo sapiens
ctaatctgcccttca

SEQ ID NO: 1777346 - DNA, 15 bp, Homo sapiens
taatctgcccttcaa

SEQ ID NO: 1777347 - DNA, 15 bp, Homo sapiens
aatctgcccttcaat

SEQ ID NO: 1777348 - DNA, 15 bp, Homo sapiens
atctgcccttcaatt

SEQ ID NO: 1777349 - DNA, 15 bp, Homo sapiens
tctgcccttcaattc

SEQ ID NO: 1777350 - DNA, 15 bp, Homo sapiens
ctgcccttcaattct

SEQ ID NO: 1777351 - DNA, 15 bp, Homo sapiens
tgcccttcaattctc

SEQ ID NO: 1777352 - DNA, 15 bp, Homo sapiens
gcccttcaattctca

SEQ ID NO: 1777353 - DNA, 15 bp, Homo sapiens
cccttcaattctcaa

SEQ ID NO: 1777354 - DNA, 15 bp, Homo sapiens
ccttcaattctcaaa

SEQ ID NO: 1777355 - DNA, 15 bp, Homo sapiens
cttcaattctcaaat

SEQ ID NO: 1777356 - DNA, 15 bp, Homo sapiens
ttcaattctcaaatt

SEQ ID NO: 1777357 - DNA, 15 bp, Homo sapiens
tcaattctcaaattt

SEQ ID NO: 1777358 - DNA, 15 bp, Homo sapiens
caattctcaaatttt

SEQ ID NO: 1777359 - DNA, 15 bp, Homo sapiens
aattctcaaattttg

SEQ ID NO: 1777360 - DNA, 15 bp, Homo sapiens
attctcaaattttgt

SEQ ID NO: 1777361 - DNA, 15 bp, Homo sapiens
ttctcaaattttgtc

SEQ ID NO: 1777362 - DNA, 15 bp, Homo sapiens
tctcaaattttgtca

SEQ ID NO: 1777363 - DNA, 15 bp, Homo sapiens
ctcaaattttgtcat

SEQ ID NO: 1777364 - DNA, 15 bp, Homo sapiens
tcaaattttgtcatt

SEQ ID NO: 1777365 - DNA, 15 bp, Homo sapiens
caaattttgtcattt

SEQ ID NO: 1777366 - DNA, 15 bp, Homo sapiens
aaattttgtcatttc

SEQ ID NO: 1777367 - DNA, 15 bp, Homo sapiens
aattttgtcatttca

SEQ ID NO: 1777368 - DNA, 15 bp, Homo sapiens
attttgtcatttcaa

SEQ ID NO: 1777369 - DNA, 15 bp, Homo sapiens
ttttgtcatttcaaa

SEQ ID NO: 1777370 - DNA, 15 bp, Homo sapiens
tttgtcatttcaaaa

SEQ ID NO: 1777371 - DNA, 15 bp, Homo sapiens
ttgtcatttcaaaaa

SEQ ID NO: 1777372 - DNA, 15 bp, Homo sapiens
tgtcatttcaaaaat

SEQ ID NO: 1777373 - DNA, 15 bp, Homo sapiens
gtcatttcaaaaatg

SEQ ID NO: 1777374 - DNA, 15 bp, Homo sapiens
tcatttcaaaaatgt

SEQ ID NO: 1777375 - DNA, 15 bp, Homo sapiens
catttcaaaaatgtt

SEQ ID NO: 1777376 - DNA, 15 bp, Homo sapiens
atttcaaaaatgtta

SEQ ID NO: 1777377 - DNA, 15 bp, Homo sapiens
tttcaaaaatgttat

SEQ ID NO: 1777378 - DNA, 15 bp, Homo sapiens
ttcaaaaatgttatg

SEQ ID NO: 1777379 - DNA, 15 bp, Homo sapiens
tcaaaaatgttatgt

SEQ ID NO: 1777380 - DNA, 15 bp, Homo sapiens
caaaaatgttatgta

SEQ ID NO: 1777381 - DNA, 15 bp, Homo sapiens
aaaaatgttatgtaa

SEQ ID NO: 1777382 - DNA, 15 bp, Homo sapiens
aaaatgttatgtaag

SEQ ID NO: 1777383 - DNA, 15 bp, Homo sapiens
aaatgttatgtaagt

SEQ ID NO: 1777384 - DNA, 15 bp, Homo sapiens
aatgttatgtaagtg

SEQ ID NO: 1777385 - DNA, 15 bp, Homo sapiens
atgttatgtaagtgg

SEQ ID NO: 1777386 - DNA, 15 bp, Homo sapiens
tgttatgtaagtgga

SEQ ID NO: 1777387 - DNA, 15 bp, Homo sapiens
gttatgtaagtggaa

SEQ ID NO: 1777388 - DNA, 15 bp, Homo sapiens
ttatgtaagtggaat

SEQ ID NO: 1777389 - DNA, 15 bp, Homo sapiens
tatgtaagtggaatc

SEQ ID NO: 1777390 - DNA, 15 bp, Homo sapiens
atgtaagtggaatca

SEQ ID NO: 1777391 - DNA, 15 bp, Homo sapiens
tgtaagtggaatcaa

SEQ ID NO: 1777392 - DNA, 15 bp, Homo sapiens
gtaagtggaatcaaa

SEQ ID NO: 1777393 - DNA, 15 bp, Homo sapiens
taagtggaatcaaac

SEQ ID NO: 1777394 - DNA, 15 bp, Homo sapiens
aagtggaatcaaaca

SEQ ID NO: 1777395 - DNA, 15 bp, Homo sapiens
agtggaatcaaacag

SEQ ID NO: 1777396 - DNA, 15 bp, Homo sapiens
gtggaatcaaacagg

SEQ ID NO: 1777397 - DNA, 15 bp, Homo sapiens
tggaatcaaacagga

SEQ ID NO: 1777398 - DNA, 15 bp, Homo sapiens
ggaatcaaacaggat

SEQ ID NO: 1777399 - DNA, 15 bp, Homo sapiens
gaatcaaacaggatt

SEQ ID NO: 1777400 - DNA, 15 bp, Homo sapiens
aatcaaacaggatta

SEQ ID NO: 1777401 - DNA, 15 bp, Homo sapiens
atcaaacaggattag

SEQ ID NO: 1777402 - DNA, 15 bp, Homo sapiens
tcaaacaggattagt

SEQ ID NO: 1777403 - DNA, 15 bp, Homo sapiens
caaacaggattagtt

SEQ ID NO: 1777404 - DNA, 15 bp, Homo sapiens
aaacaggattagttt

SEQ ID NO: 1777405 - DNA, 15 bp, Homo sapiens
aacaggattagtttt

SEQ ID NO: 1777406 - DNA, 15 bp, Homo sapiens
acaggattagttttt

SEQ ID NO: 1777407 - DNA, 15 bp, Homo sapiens
caggattagtttttt

SEQ ID NO: 1777408 - DNA, 15 bp, Homo sapiens
aggattagttttttt

SEQ ID NO: 1777409 - DNA, 15 bp, Homo sapiens
ggattagtttttttt

SEQ ID NO: 1777410 - DNA, 15 bp, Homo sapiens
gattagttttttttc

SEQ ID NO: 1777411 - DNA, 15 bp, Homo sapiens
attagttttttttct

SEQ ID NO: 1777412 - DNA, 15 bp, Homo sapiens
ttagttttttttctc

SEQ ID NO: 1777413 - DNA, 15 bp, Homo sapiens
tagttttttttctca

SEQ ID NO: 1777414 - DNA, 15 bp, Homo sapiens
agttttttttctcat

SEQ ID NO: 1777415 - DNA, 15 bp, Homo sapiens
gttttttttctcatt

SEQ ID NO: 1777416 - DNA, 15 bp, Homo sapiens
ttttttttctcattc

SEQ ID NO: 1777417 - DNA, 15 bp, Homo sapiens
tttttttctcattca

SEQ ID NO: 1777418 - DNA, 15 bp, Homo sapiens
ttttttctcattcag

SEQ ID NO: 1777419 - DNA, 15 bp, Homo sapiens
tttttctcattcagt

SEQ ID NO: 1777420 - DNA, 15 bp, Homo sapiens
ttttctcattcagta

SEQ ID NO: 1777421 - DNA, 15 bp, Homo sapiens
tttctcattcagtat

SEQ ID NO: 1777422 - DNA, 15 bp, Homo sapiens
ttctcattcagtata

SEQ ID NO: 1777423 - DNA, 15 bp, Homo sapiens
tctcattcagtataa

SEQ ID NO: 1777424 - DNA, 15 bp, Homo sapiens
ctcattcagtataat

SEQ ID NO: 1777425 - DNA, 15 bp, Homo sapiens
tcattcagtataatt

SEQ ID NO: 1777426 - DNA, 15 bp, Homo sapiens
cattcagtataattt

SEQ ID NO: 1777427 - DNA, 15 bp, Homo sapiens
attcagtataatttt

SEQ ID NO: 1777428 - DNA, 15 bp, Homo sapiens
ttcagtataattttc

SEQ ID NO: 1777429 - DNA, 15 bp, Homo sapiens
tcagtataattttct

SEQ ID NO: 1777430 - DNA, 15 bp, Homo sapiens
cagtataattttctg

SEQ ID NO: 1777431 - DNA, 15 bp, Homo sapiens
agtataattttctgg

SEQ ID NO: 1777432 - DNA, 15 bp, Homo sapiens
gtataattttctgga

SEQ ID NO: 1777433 - DNA, 15 bp, Homo sapiens
tataattttctggag

SEQ ID NO: 1777434 - DNA, 15 bp, Homo sapiens
ataattttctggaga

SEQ ID NO: 1777435 - DNA, 15 bp, Homo sapiens
taattttctggagat

SEQ ID NO: 1777436 - DNA, 15 bp, Homo sapiens
aattttctggagatc

SEQ ID NO: 1777437 - DNA, 15 bp, Homo sapiens
attttctggagatcc

SEQ ID NO: 1777438 - DNA, 15 bp, Homo sapiens
ttttctggagatcca

SEQ ID NO: 1777439 - DNA, 15 bp, Homo sapiens
tttctggagatccat

SEQ ID NO: 1777440 - DNA, 15 bp, Homo sapiens
ttctggagatccatt

SEQ ID NO: 1777441 - DNA, 15 bp, Homo sapiens
tctggagatccattc

SEQ ID NO: 1777442 - DNA, 15 bp, Homo sapiens
ctggagatccattca

SEQ ID NO: 1777443 - DNA, 15 bp, Homo sapiens
tggagatccattcac

SEQ ID NO: 1777444 - DNA, 15 bp, Homo sapiens
ggagatccattcacg

SEQ ID NO: 1777445 - DNA, 15 bp, Homo sapiens
gagatccattcacga

SEQ ID NO: 1777446 - DNA, 15 bp, Homo sapiens
agatccattcacgat

SEQ ID NO: 1777447 - DNA, 15 bp, Homo sapiens
gatccattcacgata

SEQ ID NO: 1777448 - DNA, 15 bp, Homo sapiens
atccattcacgatat

SEQ ID NO: 1777449 - DNA, 15 bp, Homo sapiens
tccattcacgatatt

SEQ ID NO: 1777450 - DNA, 15 bp, Homo sapiens
ccattcacgatattg

SEQ ID NO: 1777451 - DNA, 15 bp, Homo sapiens
cattcacgatattgc

SEQ ID NO: 1777452 - DNA, 15 bp, Homo sapiens
attcacgatattgca

SEQ ID NO: 1777453 - DNA, 15 bp, Homo sapiens
ttcacgatattgcat

SEQ ID NO: 1777454 - DNA, 15 bp, Homo sapiens
tcacgatattgcatg

SEQ ID NO: 1777455 - DNA, 15 bp, Homo sapiens
cacgatattgcatgt

SEQ ID NO: 1777456 - DNA, 15 bp, Homo sapiens
acgatattgcatgta

SEQ ID NO: 1777457 - DNA, 15 bp, Homo sapiens
cgatattgcatgtat

SEQ ID NO: 1777458 - DNA, 15 bp, Homo sapiens
gatattgcatgtatc

SEQ ID NO: 1777459 - DNA, 15 bp, Homo sapiens
atattgcatgtatca

SEQ ID NO: 1777460 - DNA, 15 bp, Homo sapiens
tattgcatgtatcaa

SEQ ID NO: 1777461 - DNA, 15 bp, Homo sapiens
attgcatgtatcaat

SEQ ID NO: 1777462 - DNA, 15 bp, Homo sapiens
ttgcatgtatcaata

SEQ ID NO: 1777463 - DNA, 15 bp, Homo sapiens
tgcatgtatcaatag

SEQ ID NO: 1777464 - DNA, 15 bp, Homo sapiens
gcatgtatcaatagt

SEQ ID NO: 1777465 - DNA, 15 bp, Homo sapiens
catgtatcaatagtt

SEQ ID NO: 1777466 - DNA, 15 bp, Homo sapiens
atgtatcaatagttc

SEQ ID NO: 1777467 - DNA, 15 bp, Homo sapiens
tgtatcaatagttca

SEQ ID NO: 1777468 - DNA, 15 bp, Homo sapiens
gtatcaatagttcat

SEQ ID NO: 1777469 - DNA, 15 bp, Homo sapiens
tatcaatagttcata

SEQ ID NO: 1777470 - DNA, 15 bp, Homo sapiens
atcaatagttcatac

SEQ ID NO: 1777471 - DNA, 15 bp, Homo sapiens
tcaatagttcatacc

SEQ ID NO: 1777472 - DNA, 15 bp, Homo sapiens
caatagttcatacct

SEQ ID NO: 1777473 - DNA, 15 bp, Homo sapiens
aatagttcatacctt

SEQ ID NO: 1777474 - DNA, 15 bp, Homo sapiens
atagttcataccttt

SEQ ID NO: 1777475 - DNA, 15 bp, Homo sapiens
tagttcatacctttt

SEQ ID NO: 1777476 - DNA, 15 bp, Homo sapiens
agttcataccttttt

SEQ ID NO: 1777477 - DNA, 15 bp, Homo sapiens
gttcataccttttta

SEQ ID NO: 1777478 - DNA, 15 bp, Homo sapiens
ttcatacctttttat

SEQ ID NO: 1777479 - DNA, 15 bp, Homo sapiens
tcatacctttttatt

SEQ ID NO: 1777480 - DNA, 15 bp, Homo sapiens
catacctttttattg

SEQ ID NO: 1777481 - DNA, 15 bp, Homo sapiens
atacctttttattgc

SEQ ID NO: 1777482 - DNA, 15 bp, Homo sapiens
tacctttttattgct

SEQ ID NO: 1777483 - DNA, 15 bp, Homo sapiens
acctttttattgctg

SEQ ID NO: 1777484 - DNA, 15 bp, Homo sapiens
cctttttattgctga

SEQ ID NO: 1777485 - DNA, 15 bp, Homo sapiens
ctttttattgctgac

SEQ ID NO: 1777486 - DNA, 15 bp, Homo sapiens
tttttattgctgact

SEQ ID NO: 1777487 - DNA, 15 bp, Homo sapiens
ttttattgctgacta

SEQ ID NO: 1777488 - DNA, 15 bp, Homo sapiens
tttattgctgactag

SEQ ID NO: 1777489 - DNA, 15 bp, Homo sapiens
ttattgctgactagt

SEQ ID NO: 1777490 - DNA, 15 bp, Homo sapiens
tattgctgactagta

SEQ ID NO: 1777491 - DNA, 15 bp, Homo sapiens
attgctgactagtat

SEQ ID NO: 1777492 - DNA, 15 bp, Homo sapiens
ttgctgactagtatt

SEQ ID NO: 1777493 - DNA, 15 bp, Homo sapiens
tgctgactagtattt

SEQ ID NO: 1777494 - DNA, 15 bp, Homo sapiens
gctgactagtatttt

SEQ ID NO: 1777495 - DNA, 15 bp, Homo sapiens
ctgactagtattttg

SEQ ID NO: 1777496 - DNA, 15 bp, Homo sapiens
tgactagtattttgt

SEQ ID NO: 1777497 - DNA, 15 bp, Homo sapiens
gactagtattttgta

SEQ ID NO: 1777498 - DNA, 15 bp, Homo sapiens
actagtattttgtag

SEQ ID NO: 1777499 - DNA, 15 bp, Homo sapiens
ctagtattttgtagc

SEQ ID NO: 1777500 - DNA, 15 bp, Homo sapiens
tagtattttgtagca

SEQ ID NO: 1777501 - DNA, 15 bp, Homo sapiens
agtattttgtagcat

SEQ ID NO: 1777502 - DNA, 15 bp, Homo sapiens
gtattttgtagcatg

SEQ ID NO: 1777503 - DNA, 15 bp, Homo sapiens
tattttgtagcatga

SEQ ID NO: 1777504 - DNA, 15 bp, Homo sapiens
attttgtagcatgaa

SEQ ID NO: 1777505 - DNA, 15 bp, Homo sapiens
ttttgtagcatgaat

SEQ ID NO: 1777506 - DNA, 15 bp, Homo sapiens
tttgtagcatgaatg

SEQ ID NO: 1777507 - DNA, 15 bp, Homo sapiens
ttgtagcatgaatgt

SEQ ID NO: 1777508 - DNA, 15 bp, Homo sapiens
tgtagcatgaatgta

SEQ ID NO: 1777509 - DNA, 15 bp, Homo sapiens
gtagcatgaatgtac

SEQ ID NO: 1777510 - DNA, 15 bp, Homo sapiens
tagcatgaatgtact

SEQ ID NO: 1777511 - DNA, 15 bp, Homo sapiens
agcatgaatgtacta

SEQ ID NO: 1777512 - DNA, 15 bp, Homo sapiens
gcatgaatgtactac

SEQ ID NO: 1777513 - DNA, 15 bp, Homo sapiens
catgaatgtactaca

SEQ ID NO: 1777514 - DNA, 15 bp, Homo sapiens
atgaatgtactacag

SEQ ID NO: 1777515 - DNA, 15 bp, Homo sapiens
tgaatgtactacagt

SEQ ID NO: 1777516 - DNA, 15 bp, Homo sapiens
gaatgtactacagtt

SEQ ID NO: 1777517 - DNA, 15 bp, Homo sapiens
aatgtactacagttt

SEQ ID NO: 1777518 - DNA, 15 bp, Homo sapiens
atgtactacagtttc

SEQ ID NO: 1777519 - DNA, 15 bp, Homo sapiens
tgtactacagtttct

SEQ ID NO: 1777520 - DNA, 15 bp, Homo sapiens
gtactacagtttctt

SEQ ID NO: 1777521 - DNA, 15 bp, Homo sapiens
tactacagtttcttt

SEQ ID NO: 1777522 - DNA, 15 bp, Homo sapiens
actacagtttctttg

SEQ ID NO: 1777523 - DNA, 15 bp, Homo sapiens
ctacagtttctttgg

SEQ ID NO: 1777524 - DNA, 15 bp, Homo sapiens
tacagtttctttggc

SEQ ID NO: 1777525 - DNA, 15 bp, Homo sapiens
acagtttctttggcc

SEQ ID NO: 1777526 - DNA, 15 bp, Homo sapiens
cagtttctttggcca

SEQ ID NO: 1777527 - DNA, 15 bp, Homo sapiens
agtttctttggccag

SEQ ID NO: 1777528 - DNA, 15 bp, Homo sapiens
gtttctttggccaga

SEQ ID NO: 1777529 - DNA, 15 bp, Homo sapiens
tttctttggccagac

SEQ ID NO: 1777530 - DNA, 15 bp, Homo sapiens
ttctttggccagaca

SEQ ID NO: 1777531 - DNA, 15 bp, Homo sapiens
tctttggccagacac

SEQ ID NO: 1777532 - DNA, 15 bp, Homo sapiens
ctttggccagacaca

SEQ ID NO: 1777533 - DNA, 15 bp, Homo sapiens
tttggccagacacat

SEQ ID NO: 1777534 - DNA, 15 bp, Homo sapiens
ttggccagacacatg

SEQ ID NO: 1777535 - DNA, 15 bp, Homo sapiens
tggccagacacatgt

SEQ ID NO: 1777536 - DNA, 15 bp, Homo sapiens
ggccagacacatgtt

SEQ ID NO: 1777537 - DNA, 15 bp, Homo sapiens
gccagacacatgttg

SEQ ID NO: 1777538 - DNA, 15 bp, Homo sapiens
ccagacacatgttga

SEQ ID NO: 1777539 - DNA, 15 bp, Homo sapiens
cagacacatgttgaa

SEQ ID NO: 1777540 - DNA, 15 bp, Homo sapiens
agacacatgttgaag

SEQ ID NO: 1777541 - DNA, 15 bp, Homo sapiens
gacacatgttgaaga

SEQ ID NO: 1777542 - DNA, 15 bp, Homo sapiens
acacatgttgaagaa

SEQ ID NO: 1777543 - DNA, 15 bp, Homo sapiens
cacatgttgaagaat

SEQ ID NO: 1777544 - DNA, 15 bp, Homo sapiens
acatgttgaagaata

SEQ ID NO: 1777545 - DNA, 15 bp, Homo sapiens
catgttgaagaatat

SEQ ID NO: 1777546 - DNA, 15 bp, Homo sapiens
atgttgaagaatatc

SEQ ID NO: 1777547 - DNA, 15 bp, Homo sapiens
tgttgaagaatatca

SEQ ID NO: 1777548 - DNA, 15 bp, Homo sapiens
gttgaagaatatcag

SEQ ID NO: 1777549 - DNA, 15 bp, Homo sapiens
ttgaagaatatcagg

SEQ ID NO: 1777550 - DNA, 15 bp, Homo sapiens
tgaagaatatcagga

SEQ ID NO: 1777551 - DNA, 15 bp, Homo sapiens
gaagaatatcaggac

SEQ ID NO: 1777552 - DNA, 15 bp, Homo sapiens
aagaatatcaggaca

SEQ ID NO: 1777553 - DNA, 15 bp, Homo sapiens
agaatatcaggacag

SEQ ID NO: 1777554 - DNA, 15 bp, Homo sapiens
gaatatcaggacagg

SEQ ID NO: 1777555 - DNA, 15 bp, Homo sapiens
aatatcaggacaggt

SEQ ID NO: 1777556 - DNA, 15 bp, Homo sapiens
atatcaggacaggtt

SEQ ID NO: 1777557 - DNA, 15 bp, Homo sapiens
tatcaggacaggttc

SEQ ID NO: 1777558 - DNA, 15 bp, Homo sapiens
atcaggacaggttct

SEQ ID NO: 1777559 - DNA, 15 bp, Homo sapiens
tcaggacaggttcta

SEQ ID NO: 1777560 - DNA, 15 bp, Homo sapiens
caggacaggttctag

SEQ ID NO: 1777561 - DNA, 15 bp, Homo sapiens
aggacaggttctagt

SEQ ID NO: 1777562 - DNA, 15 bp, Homo sapiens
ggacaggttctagtt

SEQ ID NO: 1777563 - DNA, 15 bp, Homo sapiens
gacaggttctagttt

SEQ ID NO: 1777564 - DNA, 15 bp, Homo sapiens
acaggttctagtttt

SEQ ID NO: 1777565 - DNA, 15 bp, Homo sapiens
caggttctagttttt

SEQ ID NO: 1777566 - DNA, 15 bp, Homo sapiens
aggttctagtttttg

SEQ ID NO: 1777567 - DNA, 15 bp, Homo sapiens
ggttctagtttttgg

SEQ ID NO: 1777568 - DNA, 15 bp, Homo sapiens
gttctagtttttggc

SEQ ID NO: 1777569 - DNA, 15 bp, Homo sapiens
ttctagtttttggct

SEQ ID NO: 1777570 - DNA, 15 bp, Homo sapiens
tctagtttttggcta

SEQ ID NO: 1777571 - DNA, 15 bp, Homo sapiens
ctagtttttggctat

SEQ ID NO: 1777572 - DNA, 15 bp, Homo sapiens
tagtttttggctatc

SEQ ID NO: 1777573 - DNA, 15 bp, Homo sapiens
agtttttggctatca

SEQ ID NO: 1777574 - DNA, 15 bp, Homo sapiens
gtttttggctatcac

SEQ ID NO: 1777575 - DNA, 15 bp, Homo sapiens
tttttggctatcaca

SEQ ID NO: 1777576 - DNA, 15 bp, Homo sapiens
ttttggctatcacaa

SEQ ID NO: 1777577 - DNA, 15 bp, Homo sapiens
tttggctatcacaaa

SEQ ID NO: 1777578 - DNA, 15 bp, Homo sapiens
ttggctatcacaaat

SEQ ID NO: 1777579 - DNA, 15 bp, Homo sapiens
tggctatcacaaata

SEQ ID NO: 1777580 - DNA, 15 bp, Homo sapiens
ggctatcacaaataa

SEQ ID NO: 1777581 - DNA, 15 bp, Homo sapiens
gctatcacaaataaa

SEQ ID NO: 1777582 - DNA, 15 bp, Homo sapiens
ctatcacaaataaag

SEQ ID NO: 1777583 - DNA, 15 bp, Homo sapiens
tatcacaaataaagc

SEQ ID NO: 1777584 - DNA, 15 bp, Homo sapiens
atcacaaataaagct

SEQ ID NO: 1777585 - DNA, 15 bp, Homo sapiens
tcacaaataaagctg

SEQ ID NO: 1777586 - DNA, 15 bp, Homo sapiens
cacaaataaagctgc

SEQ ID NO: 1777587 - DNA, 15 bp, Homo sapiens
acaaataaagctgct

SEQ ID NO: 1777588 - DNA, 15 bp, Homo sapiens
caaataaagctgcta

SEQ ID NO: 1777589 - DNA, 15 bp, Homo sapiens
aaataaagctgctat

SEQ ID NO: 1777590 - DNA, 15 bp, Homo sapiens
aataaagctgctatg

SEQ ID NO: 1777591 - DNA, 15 bp, Homo sapiens
ataaagctgctatga

SEQ ID NO: 1777592 - DNA, 15 bp, Homo sapiens
taaagctgctatgaa

SEQ ID NO: 1777593 - DNA, 15 bp, Homo sapiens
aaagctgctatgaac

SEQ ID NO: 1777594 - DNA, 15 bp, Homo sapiens
ctgctatgaacattt

SEQ ID NO: 1777595 - DNA, 15 bp, Homo sapiens
tgctatgaacattta

SEQ ID NO: 1777596 - DNA, 15 bp, Homo sapiens
gctatgaacatttat

SEQ ID NO: 1777597 - DNA, 15 bp, Homo sapiens
ctatgaacatttatg

SEQ ID NO: 1777598 - DNA, 15 bp, Homo sapiens
tatgaacatttatgt

SEQ ID NO: 1777599 - DNA, 15 bp, Homo sapiens
atgaacatttatgtt

SEQ ID NO: 1777600 - DNA, 15 bp, Homo sapiens
tgaacatttatgttt

SEQ ID NO: 1777601 - DNA, 15 bp, Homo sapiens
gaacatttatgttta

SEQ ID NO: 1777602 - DNA, 15 bp, Homo sapiens
aacatttatgtttag

SEQ ID NO: 1777603 - DNA, 15 bp, Homo sapiens
acatttatgtttagt

SEQ ID NO: 1777604 - DNA, 15 bp, Homo sapiens
catttatgtttagta

SEQ ID NO: 1777605 - DNA, 15 bp, Homo sapiens
atttatgtttagtat

SEQ ID NO: 1777606 - DNA, 15 bp, Homo sapiens
tttatgtttagtatc

SEQ ID NO: 1777607 - DNA, 15 bp, Homo sapiens
ttatgtttagtatca

SEQ ID NO: 1777608 - DNA, 15 bp, Homo sapiens
tatgtttagtatcag

SEQ ID NO: 1777609 - DNA, 15 bp, Homo sapiens
atgtttagtatcagt

SEQ ID NO: 1777610 - DNA, 15 bp, Homo sapiens
tgtttagtatcagta

SEQ ID NO: 1777611 - DNA, 15 bp, Homo sapiens
gtttagtatcagtat

SEQ ID NO: 1777612 - DNA, 15 bp, Homo sapiens
tttagtatcagtatg

SEQ ID NO: 1777613 - DNA, 15 bp, Homo sapiens
ttagtatcagtatgg

SEQ ID NO: 1777614 - DNA, 15 bp, Homo sapiens
tagtatcagtatggg

SEQ ID NO: 1777615 - DNA, 15 bp, Homo sapiens
agtatcagtatgggt

SEQ ID NO: 1777616 - DNA, 15 bp, Homo sapiens
gtatcagtatgggtt

SEQ ID NO: 1777617 - DNA, 15 bp, Homo sapiens
tatcagtatgggttt

SEQ ID NO: 1777618 - DNA, 15 bp, Homo sapiens
atcagtatgggtttt

SEQ ID NO: 1777619 - DNA, 15 bp, Homo sapiens
tcagtatgggttttc

SEQ ID NO: 1777620 - DNA, 15 bp, Homo sapiens
cagtatgggttttct

SEQ ID NO: 1777621 - DNA, 15 bp, Homo sapiens
agtatgggttttctt

SEQ ID NO: 1777622 - DNA, 15 bp, Homo sapiens
gtatgggttttcttt

SEQ ID NO: 1777623 - DNA, 15 bp, Homo sapiens
tatgggttttctttt

SEQ ID NO: 1777624 - DNA, 15 bp, Homo sapiens
atgggttttcttttc

SEQ ID NO: 1777625 - DNA, 15 bp, Homo sapiens
tgggttttcttttct

SEQ ID NO: 1777626 - DNA, 15 bp, Homo sapiens
gggttttcttttctc

SEQ ID NO: 1777627 - DNA, 15 bp, Homo sapiens
ggttttcttttctct

SEQ ID NO: 1777628 - DNA, 15 bp, Homo sapiens
gttttcttttctctg

SEQ ID NO: 1777629 - DNA, 15 bp, Homo sapiens
ttttcttttctctgg

SEQ ID NO: 1777630 - DNA, 15 bp, Homo sapiens
tttcttttctctggg

SEQ ID NO: 1777631 - DNA, 15 bp, Homo sapiens
ttcttttctctggga

SEQ ID NO: 1777632 - DNA, 15 bp, Homo sapiens
tcttttctctgggat

SEQ ID NO: 1777633 - DNA, 15 bp, Homo sapiens
cttttctctgggata

SEQ ID NO: 1777634 - DNA, 15 bp, Homo sapiens
ttttctctgggataa

SEQ ID NO: 1777635 - DNA, 15 bp, Homo sapiens
tttctctgggataaa

SEQ ID NO: 1777636 - DNA, 15 bp, Homo sapiens
ttctctgggataaat

SEQ ID NO: 1777637 - DNA, 15 bp, Homo sapiens
tctctgggataaatg

SEQ ID NO: 1777638 - DNA, 15 bp, Homo sapiens
ctctgggataaatgc

SEQ ID NO: 1777639 - DNA, 15 bp, Homo sapiens
tctgggataaatgcc

SEQ ID NO: 1777640 - DNA, 15 bp, Homo sapiens
ctgggataaatgcct

SEQ ID NO: 1777641 - DNA, 15 bp, Homo sapiens
tgggataaatgccta

SEQ ID NO: 1777642 - DNA, 15 bp, Homo sapiens
gggataaatgcctaa

SEQ ID NO: 1777643 - DNA, 15 bp, Homo sapiens
ggataaatgcctaat

SEQ ID NO: 1777644 - DNA, 15 bp, Homo sapiens
gataaatgcctaatg

SEQ ID NO: 1777645 - DNA, 15 bp, Homo sapiens
ataaatgcctaatga

SEQ ID NO: 1777646 - DNA, 15 bp, Homo sapiens
taaatgcctaatgag

SEQ ID NO: 1777647 - DNA, 15 bp, Homo sapiens
aaatgcctaatgagt

SEQ ID NO: 1777648 - DNA, 15 bp, Homo sapiens
aatgcctaatgagta

SEQ ID NO: 1777649 - DNA, 15 bp, Homo sapiens
atgcctaatgagtaa

SEQ ID NO: 1777650 - DNA, 15 bp, Homo sapiens
tgcctaatgagtaaa

SEQ ID NO: 1777651 - DNA, 15 bp, Homo sapiens
gcctaatgagtaaaa

SEQ ID NO: 1777652 - DNA, 15 bp, Homo sapiens
cctaatgagtaaaat

SEQ ID NO: 1777653 - DNA, 15 bp, Homo sapiens
ctaatgagtaaaatt

SEQ ID NO: 1777654 - DNA, 15 bp, Homo sapiens
taatgagtaaaattg

SEQ ID NO: 1777655 - DNA, 15 bp, Homo sapiens
aatgagtaaaattga

SEQ ID NO: 1777656 - DNA, 15 bp, Homo sapiens
atgagtaaaattgaa

SEQ ID NO: 1777657 - DNA, 15 bp, Homo sapiens
tgagtaaaattgaag

SEQ ID NO: 1777658 - DNA, 15 bp, Homo sapiens
gagtaaaattgaaga

SEQ ID NO: 1777659 - DNA, 15 bp, Homo sapiens
agtaaaattgaagag

SEQ ID NO: 1777660 - DNA, 15 bp, Homo sapiens
gtaaaattgaagagt

SEQ ID NO: 1777661 - DNA, 15 bp, Homo sapiens
taaaattgaagagtt

SEQ ID NO: 1777662 - DNA, 15 bp, Homo sapiens
aaaattgaagagttg

SEQ ID NO: 1777663 - DNA, 15 bp, Homo sapiens
aaattgaagagttgt

SEQ ID NO: 1777664 - DNA, 15 bp, Homo sapiens
aattgaagagttgta

SEQ ID NO: 1777665 - DNA, 15 bp, Homo sapiens
attgaagagttgtat

SEQ ID NO: 1777666 - DNA, 15 bp, Homo sapiens
ttgaagagttgtatg

SEQ ID NO: 1777667 - DNA, 15 bp, Homo sapiens
tgaagagttgtatgg

SEQ ID NO: 1777668 - DNA, 15 bp, Homo sapiens
gaagagttgtatggt

SEQ ID NO: 1777669 - DNA, 15 bp, Homo sapiens
aagagttgtatggtt

SEQ ID NO: 1777670 - DNA, 15 bp, Homo sapiens
agagttgtatggtta

SEQ ID NO: 1777671 - DNA, 15 bp, Homo sapiens
gagttgtatggttat

SEQ ID NO: 1777672 - DNA, 15 bp, Homo sapiens
agttgtatggttatt

SEQ ID NO: 1777673 - DNA, 15 bp, Homo sapiens
gttgtatggttattt

SEQ ID NO: 1777674 - DNA, 15 bp, Homo sapiens
ttgtatggttatttt

SEQ ID NO: 1777675 - DNA, 15 bp, Homo sapiens
tgtatggttattttg

SEQ ID NO: 1777676 - DNA, 15 bp, Homo sapiens
gtatggttattttgc

SEQ ID NO: 1777677 - DNA, 15 bp, Homo sapiens
tatggttattttgca

SEQ ID NO: 1777678 - DNA, 15 bp, Homo sapiens
atggttattttgcat

SEQ ID NO: 1777679 - DNA, 15 bp, Homo sapiens
tggttattttgcatt

SEQ ID NO: 1777680 - DNA, 15 bp, Homo sapiens
ggttattttgcattt

SEQ ID NO: 1777681 - DNA, 15 bp, Homo sapiens
gttattttgcatttt

SEQ ID NO: 1777682 - DNA, 15 bp, Homo sapiens
ttattttgcattttc

SEQ ID NO: 1777683 - DNA, 15 bp, Homo sapiens
tattttgcattttct

SEQ ID NO: 1777684 - DNA, 15 bp, Homo sapiens
attttgcattttctt

SEQ ID NO: 1777685 - DNA, 15 bp, Homo sapiens
ttttgcattttcttt

SEQ ID NO: 1777686 - DNA, 15 bp, Homo sapiens
tttgcattttctttg

SEQ ID NO: 1777687 - DNA, 15 bp, Homo sapiens
ttgcattttctttga

SEQ ID NO: 1777688 - DNA, 15 bp, Homo sapiens
tgcattttctttgat

SEQ ID NO: 1777689 - DNA, 15 bp, Homo sapiens
gcattttctttgata

SEQ ID NO: 1777690 - DNA, 15 bp, Homo sapiens
cattttctttgataa

SEQ ID NO: 1777691 - DNA, 15 bp, Homo sapiens
attttctttgataaa

SEQ ID NO: 1777692 - DNA, 15 bp, Homo sapiens
ttttctttgataaaa

SEQ ID NO: 1777693 - DNA, 15 bp, Homo sapiens
tttctttgataaaag

SEQ ID NO: 1777694 - DNA, 15 bp, Homo sapiens
ttctttgataaaaga

SEQ ID NO: 1777695 - DNA, 15 bp, Homo sapiens
tctttgataaaagac

SEQ ID NO: 1777696 - DNA, 15 bp, Homo sapiens
ctttgataaaagact

SEQ ID NO: 1777697 - DNA, 15 bp, Homo sapiens
tttgataaaagactg

SEQ ID NO: 1777698 - DNA, 15 bp, Homo sapiens
ttgataaaagactgc

SEQ ID NO: 1777699 - DNA, 15 bp, Homo sapiens
tgataaaagactgca

SEQ ID NO: 1777700 - DNA, 15 bp, Homo sapiens
gataaaagactgcaa

SEQ ID NO: 1777701 - DNA, 15 bp, Homo sapiens
ataaaagactgcaaa

SEQ ID NO: 1777702 - DNA, 15 bp, Homo sapiens
taaaagactgcaaaa

SEQ ID NO: 1777703 - DNA, 15 bp, Homo sapiens
aaaagactgcaaaag

SEQ ID NO: 1777704 - DNA, 15 bp, Homo sapiens
aaagactgcaaaagt

SEQ ID NO: 1777705 - DNA, 15 bp, Homo sapiens
aagactgcaaaagta

SEQ ID NO: 1777706 - DNA, 15 bp, Homo sapiens
agactgcaaaagtat

SEQ ID NO: 1777707 - DNA, 15 bp, Homo sapiens
gactgcaaaagtatt

SEQ ID NO: 1777708 - DNA, 15 bp, Homo sapiens
actgcaaaagtattt

SEQ ID NO: 1777709 - DNA, 15 bp, Homo sapiens
ctgcaaaagtatttt

SEQ ID NO: 1777710 - DNA, 15 bp, Homo sapiens
tgcaaaagtattttc

SEQ ID NO: 1777711 - DNA, 15 bp, Homo sapiens
gcaaaagtattttcc

SEQ ID NO: 1777712 - DNA, 15 bp, Homo sapiens
caaaagtattttcca

SEQ ID NO: 1777713 - DNA, 15 bp, Homo sapiens
aaaagtattttccag

SEQ ID NO: 1777714 - DNA, 15 bp, Homo sapiens
aaagtattttccaga

SEQ ID NO: 1777715 - DNA, 15 bp, Homo sapiens
aagtattttccagag

SEQ ID NO: 1777716 - DNA, 15 bp, Homo sapiens
agtattttccagagt

SEQ ID NO: 1777717 - DNA, 15 bp, Homo sapiens
gtattttccagagtg

SEQ ID NO: 1777718 - DNA, 15 bp, Homo sapiens
tattttccagagtgg

SEQ ID NO: 1777719 - DNA, 15 bp, Homo sapiens
attttccagagtggt

SEQ ID NO: 1777720 - DNA, 15 bp, Homo sapiens
ttttccagagtggtt

SEQ ID NO: 1777721 - DNA, 15 bp, Homo sapiens
tttccagagtggttg

SEQ ID NO: 1777722 - DNA, 15 bp, Homo sapiens
ttccagagtggttga

SEQ ID NO: 1777723 - DNA, 15 bp, Homo sapiens
tccagagtggttgaa

SEQ ID NO: 1777724 - DNA, 15 bp, Homo sapiens
ccagagtggttgaat

SEQ ID NO: 1777725 - DNA, 15 bp, Homo sapiens
cagagtggttgaatc

SEQ ID NO: 1777726 - DNA, 15 bp, Homo sapiens
agagtggttgaatca

SEQ ID NO: 1777727 - DNA, 15 bp, Homo sapiens
gagtggttgaatcat

SEQ ID NO: 1777728 - DNA, 15 bp, Homo sapiens
agtggttgaatcatt

SEQ ID NO: 1777729 - DNA, 15 bp, Homo sapiens
gtggttgaatcattt

SEQ ID NO: 1777730 - DNA, 15 bp, Homo sapiens
tggttgaatcatttt

SEQ ID NO: 1777731 - DNA, 15 bp, Homo sapiens
ggttgaatcatttta

SEQ ID NO: 1777732 - DNA, 15 bp, Homo sapiens
gttgaatcattttaa

SEQ ID NO: 1777733 - DNA, 15 bp, Homo sapiens
ttgaatcattttaaa

SEQ ID NO: 1777734 - DNA, 15 bp, Homo sapiens
tgaatcattttaaat

SEQ ID NO: 1777735 - DNA, 15 bp, Homo sapiens
gaatcattttaaatt

SEQ ID NO: 1777736 - DNA, 15 bp, Homo sapiens
aatcattttaaattt

SEQ ID NO: 1777737 - DNA, 15 bp, Homo sapiens
atcattttaaatttc

SEQ ID NO: 1777738 - DNA, 15 bp, Homo sapiens
tcattttaaatttcc

SEQ ID NO: 1777739 - DNA, 15 bp, Homo sapiens
cattttaaatttccg

SEQ ID NO: 1777740 - DNA, 15 bp, Homo sapiens
attttaaatttccgc

SEQ ID NO: 1777741 - DNA, 15 bp, Homo sapiens
ttttaaatttccgcc

SEQ ID NO: 1777742 - DNA, 15 bp, Homo sapiens
tttaaatttccgcca

SEQ ID NO: 1777743 - DNA, 15 bp, Homo sapiens
ttaaatttccgccag

SEQ ID NO: 1777744 - DNA, 15 bp, Homo sapiens
taaatttccgccagc

SEQ ID NO: 1777745 - DNA, 15 bp, Homo sapiens
aaatttccgccagca

SEQ ID NO: 1777746 - DNA, 15 bp, Homo sapiens
aatttccgccagcaa

SEQ ID NO: 1777747 - DNA, 15 bp, Homo sapiens
atttccgccagcaat

SEQ ID NO: 1777748 - DNA, 15 bp, Homo sapiens
tttccgccagcaata

SEQ ID NO: 1777749 - DNA, 15 bp, Homo sapiens
ttccgccagcaatat

SEQ ID NO: 1777750 - DNA, 15 bp, Homo sapiens
tccgccagcaatata

SEQ ID NO: 1777751 - DNA, 15 bp, Homo sapiens
ccgccagcaatatac

SEQ ID NO: 1777752 - DNA, 15 bp, Homo sapiens
cgccagcaatatacg

SEQ ID NO: 1777753 - DNA, 15 bp, Homo sapiens
gccagcaatatacga

SEQ ID NO: 1777754 - DNA, 15 bp, Homo sapiens
ccagcaatatacgag

SEQ ID NO: 1777755 - DNA, 15 bp, Homo sapiens
cagcaatatacgagt

SEQ ID NO: 1777756 - DNA, 15 bp, Homo sapiens
agcaatatacgagtg

SEQ ID NO: 1777757 - DNA, 15 bp, Homo sapiens
gcaatatacgagtga

SEQ ID NO: 1777758 - DNA, 15 bp, Homo sapiens
caatatacgagtgag

SEQ ID NO: 1777759 - DNA, 15 bp, Homo sapiens
aatatacgagtgagt

SEQ ID NO: 1777760 - DNA, 15 bp, Homo sapiens
atatacgagtgagtg

SEQ ID NO: 1777761 - DNA, 15 bp, Homo sapiens
tatacgagtgagtga

SEQ ID NO: 1777762 - DNA, 15 bp, Homo sapiens
atacgagtgagtgat

SEQ ID NO: 1777763 - DNA, 15 bp, Homo sapiens
tacgagtgagtgatc

SEQ ID NO: 1777764 - DNA, 15 bp, Homo sapiens
acgagtgagtgatcc

SEQ ID NO: 1777765 - DNA, 15 bp, Homo sapiens
cgagtgagtgatcca

SEQ ID NO: 1777766 - DNA, 15 bp, Homo sapiens
gagtgagtgatccag

SEQ ID NO: 1777767 - DNA, 15 bp, Homo sapiens
agtgagtgatccagt

SEQ ID NO: 1777768 - DNA, 15 bp, Homo sapiens
gtgagtgatccagtt

SEQ ID NO: 1777769 - DNA, 15 bp, Homo sapiens
tgagtgatccagttt

SEQ ID NO: 1777770 - DNA, 15 bp, Homo sapiens
gagtgatccagtttc

SEQ ID NO: 1777771 - DNA, 15 bp, Homo sapiens
agtgatccagtttct

SEQ ID NO: 1777772 - DNA, 15 bp, Homo sapiens
gtgatccagtttctc

SEQ ID NO: 1777773 - DNA, 15 bp, Homo sapiens
tgatccagtttctct

SEQ ID NO: 1777774 - DNA, 15 bp, Homo sapiens
gatccagtttctctg

SEQ ID NO: 1777775 - DNA, 15 bp, Homo sapiens
atccagtttctctgc

SEQ ID NO: 1777776 - DNA, 15 bp, Homo sapiens
tccagtttctctgca

SEQ ID NO: 1777777 - DNA, 15 bp, Homo sapiens
ccagtttctctgcat

SEQ ID NO: 1777778 - DNA, 15 bp, Homo sapiens
cagtttctctgcatt

SEQ ID NO: 1777779 - DNA, 15 bp, Homo sapiens
agtttctctgcattc

SEQ ID NO: 1777780 - DNA, 15 bp, Homo sapiens
gtttctctgcattct

SEQ ID NO: 1777781 - DNA, 15 bp, Homo sapiens
tttctctgcattctt

SEQ ID NO: 1777782 - DNA, 15 bp, Homo sapiens
ttctctgcattcttt

SEQ ID NO: 1777783 - DNA, 15 bp, Homo sapiens
tctctgcattctttc

SEQ ID NO: 1777784 - DNA, 15 bp, Homo sapiens
ctctgcattctttcc

SEQ ID NO: 1777785 - DNA, 15 bp, Homo sapiens
tctgcattctttcca

SEQ ID NO: 1777786 - DNA, 15 bp, Homo sapiens
ctgcattctttccat

SEQ ID NO: 1777787 - DNA, 15 bp, Homo sapiens
tgcattctttccatc

SEQ ID NO: 1777788 - DNA, 15 bp, Homo sapiens
gcattctttccatca

SEQ ID NO: 1777789 - DNA, 15 bp, Homo sapiens
cattctttccatcat

SEQ ID NO: 1777790 - DNA, 15 bp, Homo sapiens
attctttccatcatt

SEQ ID NO: 1777791 - DNA, 15 bp, Homo sapiens
ttctttccatcattt

SEQ ID NO: 1777792 - DNA, 15 bp, Homo sapiens
tctttccatcatttg

SEQ ID NO: 1777793 - DNA, 15 bp, Homo sapiens
ctttccatcatttgg

SEQ ID NO: 1777794 - DNA, 15 bp, Homo sapiens
tttccatcatttggt

SEQ ID NO: 1777795 - DNA, 15 bp, Homo sapiens
ttccatcatttggtg

SEQ ID NO: 1777796 - DNA, 15 bp, Homo sapiens
tccatcatttggtga

SEQ ID NO: 1777797 - DNA, 15 bp, Homo sapiens
ccatcatttggtgat

SEQ ID NO: 1777798 - DNA, 15 bp, Homo sapiens
catcatttggtgatg

SEQ ID NO: 1777799 - DNA, 15 bp, Homo sapiens
atcatttggtgatgt

SEQ ID NO: 1777800 - DNA, 15 bp, Homo sapiens
tcatttggtgatgtc

SEQ ID NO: 1777801 - DNA, 15 bp, Homo sapiens
catttggtgatgtct

SEQ ID NO: 1777802 - DNA, 15 bp, Homo sapiens
atttggtgatgtctt

SEQ ID NO: 1777803 - DNA, 15 bp, Homo sapiens
tttggtgatgtcttt

SEQ ID NO: 1777804 - DNA, 15 bp, Homo sapiens
ttggtgatgtcttta

SEQ ID NO: 1777805 - DNA, 15 bp, Homo sapiens
tggtgatgtctttat

SEQ ID NO: 1777806 - DNA, 15 bp, Homo sapiens
ggtgatgtctttatt

SEQ ID NO: 1777807 - DNA, 15 bp, Homo sapiens
gtgatgtctttattt

SEQ ID NO: 1777808 - DNA, 15 bp, Homo sapiens
tgatgtctttatttt

SEQ ID NO: 1777809 - DNA, 15 bp, Homo sapiens
gatgtctttattttt

SEQ ID NO: 1777810 - DNA, 15 bp, Homo sapiens
atgtctttatttttt

SEQ ID NO: 1777811 - DNA, 15 bp, Homo sapiens
tgtctttatttttta

SEQ ID NO: 1777812 - DNA, 15 bp, Homo sapiens
gtctttattttttat

SEQ ID NO: 1777813 - DNA, 15 bp, Homo sapiens
tctttattttttatt

SEQ ID NO: 1777814 - DNA, 15 bp, Homo sapiens
ctttattttttattt

SEQ ID NO: 1777815 - DNA, 15 bp, Homo sapiens
tttattttttatttt

SEQ ID NO: 1777816 - DNA, 15 bp, Homo sapiens
ttattttttatttta

SEQ ID NO: 1777817 - DNA, 15 bp, Homo sapiens
tattttttattttag

SEQ ID NO: 1777818 - DNA, 15 bp, Homo sapiens
attttttattttagt

SEQ ID NO: 1777819 - DNA, 15 bp, Homo sapiens
ttttttattttagtc

SEQ ID NO: 1777820 - DNA, 15 bp, Homo sapiens
tttttattttagtca

SEQ ID NO: 1777821 - DNA, 15 bp, Homo sapiens
ttttattttagtcat

SEQ ID NO: 1777822 - DNA, 15 bp, Homo sapiens
tttattttagtcatt

SEQ ID NO: 1777823 - DNA, 15 bp, Homo sapiens
ttattttagtcattc

SEQ ID NO: 1777824 - DNA, 15 bp, Homo sapiens
tattttagtcattct

SEQ ID NO: 1777825 - DNA, 15 bp, Homo sapiens
attttagtcattctg

SEQ ID NO: 1777826 - DNA, 15 bp, Homo sapiens
ttttagtcattctga

SEQ ID NO: 1777827 - DNA, 15 bp, Homo sapiens
tttagtcattctgat

SEQ ID NO: 1777828 - DNA, 15 bp, Homo sapiens
ttagtcattctgata

SEQ ID NO: 1777829 - DNA, 15 bp, Homo sapiens
tagtcattctgatag

SEQ ID NO: 1777830 - DNA, 15 bp, Homo sapiens
agtcattctgatagt

SEQ ID NO: 1777831 - DNA, 15 bp, Homo sapiens
gtcattctgatagtg

SEQ ID NO: 1777832 - DNA, 15 bp, Homo sapiens
tcattctgatagtgt

SEQ ID NO: 1777833 - DNA, 15 bp, Homo sapiens
cattctgatagtgta

SEQ ID NO: 1777834 - DNA, 15 bp, Homo sapiens
attctgatagtgtaa

SEQ ID NO: 1777835 - DNA, 15 bp, Homo sapiens
ttctgatagtgtaag

SEQ ID NO: 1777836 - DNA, 15 bp, Homo sapiens
tctgatagtgtaagg

SEQ ID NO: 1777837 - DNA, 15 bp, Homo sapiens
ctgatagtgtaagga

SEQ ID NO: 1777838 - DNA, 15 bp, Homo sapiens
tgatagtgtaaggat

SEQ ID NO: 1777839 - DNA, 15 bp, Homo sapiens
gatagtgtaaggata

SEQ ID NO: 1777840 - DNA, 15 bp, Homo sapiens
atagtgtaaggatat

SEQ ID NO: 1777841 - DNA, 15 bp, Homo sapiens
tagtgtaaggatatc

SEQ ID NO: 1777842 - DNA, 15 bp, Homo sapiens
agtgtaaggatatct

SEQ ID NO: 1777843 - DNA, 15 bp, Homo sapiens
gtgtaaggatatctc

SEQ ID NO: 1777844 - DNA, 15 bp, Homo sapiens
tgtaaggatatctca

SEQ ID NO: 1777845 - DNA, 15 bp, Homo sapiens
gtaaggatatctcag

SEQ ID NO: 1777846 - DNA, 15 bp, Homo sapiens
taaggatatctcagt

SEQ ID NO: 1777847 - DNA, 15 bp, Homo sapiens
aaggatatctcagtg

SEQ ID NO: 1777848 - DNA, 15 bp, Homo sapiens
aggatatctcagtga

SEQ ID NO: 1777849 - DNA, 15 bp, Homo sapiens
ggatatctcagtgag

SEQ ID NO: 1777850 - DNA, 15 bp, Homo sapiens
gatatctcagtgagg

SEQ ID NO: 1777851 - DNA, 15 bp, Homo sapiens
atatctcagtgaggt

SEQ ID NO: 1777852 - DNA, 15 bp, Homo sapiens
tatctcagtgaggtt

SEQ ID NO: 1777853 - DNA, 15 bp, Homo sapiens
atctcagtgaggtta

SEQ ID NO: 1777854 - DNA, 15 bp, Homo sapiens
tctcagtgaggttat

SEQ ID NO: 1777855 - DNA, 15 bp, Homo sapiens
ctcagtgaggttata

SEQ ID NO: 1777856 - DNA, 15 bp, Homo sapiens
tcagtgaggttataa

SEQ ID NO: 1777857 - DNA, 15 bp, Homo sapiens
cagtgaggttataat

SEQ ID NO: 1777858 - DNA, 15 bp, Homo sapiens
agtgaggttataatt

SEQ ID NO: 1777859 - DNA, 15 bp, Homo sapiens
gtgaggttataattt

SEQ ID NO: 1777860 - DNA, 15 bp, Homo sapiens
tgaggttataatttg

SEQ ID NO: 1777861 - DNA, 15 bp, Homo sapiens
gaggttataatttgc

SEQ ID NO: 1777862 - DNA, 15 bp, Homo sapiens
aggttataatttgca

SEQ ID NO: 1777863 - DNA, 15 bp, Homo sapiens
ggttataatttgcat

SEQ ID NO: 1777864 - DNA, 15 bp, Homo sapiens
gttataatttgcatt

SEQ ID NO: 1777865 - DNA, 15 bp, Homo sapiens
ttataatttgcattt

SEQ ID NO: 1777866 - DNA, 15 bp, Homo sapiens
tataatttgcatttc

SEQ ID NO: 1777867 - DNA, 15 bp, Homo sapiens
ataatttgcatttcc

SEQ ID NO: 1777868 - DNA, 15 bp, Homo sapiens
taatttgcatttccc

SEQ ID NO: 1777869 - DNA, 15 bp, Homo sapiens
aatttgcatttccca

SEQ ID NO: 1777870 - DNA, 15 bp, Homo sapiens
atttgcatttcccat

SEQ ID NO: 1777871 - DNA, 15 bp, Homo sapiens
tttgcatttcccatc

SEQ ID NO: 1777872 - DNA, 15 bp, Homo sapiens
ttgcatttcccatca

SEQ ID NO: 1777873 - DNA, 15 bp, Homo sapiens
tgcatttcccatcag

SEQ ID NO: 1777874 - DNA, 15 bp, Homo sapiens
gcatttcccatcagg

SEQ ID NO: 1777875 - DNA, 15 bp, Homo sapiens
catttcccatcagga

SEQ ID NO: 1777876 - DNA, 15 bp, Homo sapiens
atttcccatcaggat

SEQ ID NO: 1777877 - DNA, 15 bp, Homo sapiens
tttcccatcaggatg

SEQ ID NO: 1777878 - DNA, 15 bp, Homo sapiens
ttcccatcaggatga

SEQ ID NO: 1777879 - DNA, 15 bp, Homo sapiens
tcccatcaggatgat

SEQ ID NO: 1777880 - DNA, 15 bp, Homo sapiens
cccatcaggatgata

SEQ ID NO: 1777881 - DNA, 15 bp, Homo sapiens
ccatcaggatgatag

SEQ ID NO: 1777882 - DNA, 15 bp, Homo sapiens
catcaggatgatagc

SEQ ID NO: 1777883 - DNA, 15 bp, Homo sapiens
atcaggatgatagct

SEQ ID NO: 1777884 - DNA, 15 bp, Homo sapiens
tcaggatgatagcta

SEQ ID NO: 1777885 - DNA, 15 bp, Homo sapiens
caggatgatagctaa

SEQ ID NO: 1777886 - DNA, 15 bp, Homo sapiens
aggatgatagctaat

SEQ ID NO: 1777887 - DNA, 15 bp, Homo sapiens
ggatgatagctaatg

SEQ ID NO: 1777888 - DNA, 15 bp, Homo sapiens
gatgatagctaatga

SEQ ID NO: 1777889 - DNA, 15 bp, Homo sapiens
atgatagctaatgat

SEQ ID NO: 1777890 - DNA, 15 bp, Homo sapiens
tgatagctaatgata

SEQ ID NO: 1777891 - DNA, 15 bp, Homo sapiens
gatagctaatgatat

SEQ ID NO: 1777892 - DNA, 15 bp, Homo sapiens
atagctaatgatatt

SEQ ID NO: 1777893 - DNA, 15 bp, Homo sapiens
tagctaatgatattg

SEQ ID NO: 1777894 - DNA, 15 bp, Homo sapiens
agctaatgatattga

SEQ ID NO: 1777895 - DNA, 15 bp, Homo sapiens
gctaatgatattgat

SEQ ID NO: 1777896 - DNA, 15 bp, Homo sapiens
ctaatgatattgatt

SEQ ID NO: 1777897 - DNA, 15 bp, Homo sapiens
taatgatattgatta

SEQ ID NO: 1777898 - DNA, 15 bp, Homo sapiens
aatgatattgattaa

SEQ ID NO: 1777899 - DNA, 15 bp, Homo sapiens
atgatattgattaac

SEQ ID NO: 1777900 - DNA, 15 bp, Homo sapiens
tgatattgattaacc

SEQ ID NO: 1777901 - DNA, 15 bp, Homo sapiens
gatattgattaacct

SEQ ID NO: 1777902 - DNA, 15 bp, Homo sapiens
atattgattaacctt

SEQ ID NO: 1777903 - DNA, 15 bp, Homo sapiens
tattgattaaccttt

SEQ ID NO: 1777904 - DNA, 15 bp, Homo sapiens
attgattaacctttc

SEQ ID NO: 1777905 - DNA, 15 bp, Homo sapiens
ttgattaacctttcc

SEQ ID NO: 1777906 - DNA, 15 bp, Homo sapiens
tgattaacctttccc

SEQ ID NO: 1777907 - DNA, 15 bp, Homo sapiens
gattaacctttccct

SEQ ID NO: 1777908 - DNA, 15 bp, Homo sapiens
attaacctttccctg

SEQ ID NO: 1777909 - DNA, 15 bp, Homo sapiens
ttaacctttccctgt

SEQ ID NO: 1777910 - DNA, 15 bp, Homo sapiens
taacctttccctgtt

SEQ ID NO: 1777911 - DNA, 15 bp, Homo sapiens
aacctttccctgttt

SEQ ID NO: 1777912 - DNA, 15 bp, Homo sapiens
acctttccctgttta

SEQ ID NO: 1777913 - DNA, 15 bp, Homo sapiens
cctttccctgtttat

SEQ ID NO: 1777914 - DNA, 15 bp, Homo sapiens
ctttccctgtttatt

SEQ ID NO: 1777915 - DNA, 15 bp, Homo sapiens
tttccctgtttattt

SEQ ID NO: 1777916 - DNA, 15 bp, Homo sapiens
ttccctgtttatttg

SEQ ID NO: 1777917 - DNA, 15 bp, Homo sapiens
tccctgtttatttgt

SEQ ID NO: 1777918 - DNA, 15 bp, Homo sapiens
ccctgtttatttgtg

SEQ ID NO: 1777919 - DNA, 15 bp, Homo sapiens
cctgtttatttgtga

SEQ ID NO: 1777920 - DNA, 15 bp, Homo sapiens
ctgtttatttgtgac

SEQ ID NO: 1777921 - DNA, 15 bp, Homo sapiens
tgtttatttgtgacc

SEQ ID NO: 1777922 - DNA, 15 bp, Homo sapiens
gtttatttgtgacct

SEQ ID NO: 1777923 - DNA, 15 bp, Homo sapiens
tttatttgtgacctg

SEQ ID NO: 1777924 - DNA, 15 bp, Homo sapiens
ttatttgtgacctgt

SEQ ID NO: 1777925 - DNA, 15 bp, Homo sapiens
tatttgtgacctgta

SEQ ID NO: 1777926 - DNA, 15 bp, Homo sapiens
atttgtgacctgtat

SEQ ID NO: 1777927 - DNA, 15 bp, Homo sapiens
tttgtgacctgtatt

SEQ ID NO: 1777928 - DNA, 15 bp, Homo sapiens
ttgtgacctgtattt

SEQ ID NO: 1777929 - DNA, 15 bp, Homo sapiens
tgtgacctgtatttc

SEQ ID NO: 1777930 - DNA, 15 bp, Homo sapiens
gtgacctgtatttcc

SEQ ID NO: 1777931 - DNA, 15 bp, Homo sapiens
tgacctgtatttcct

SEQ ID NO: 1777932 - DNA, 15 bp, Homo sapiens
gacctgtatttcctc

SEQ ID NO: 1777933 - DNA, 15 bp, Homo sapiens
acctgtatttcctct

SEQ ID NO: 1777934 - DNA, 15 bp, Homo sapiens
cctgtatttcctctc

SEQ ID NO: 1777935 - DNA, 15 bp, Homo sapiens
ctgtatttcctctct

SEQ ID NO: 1777936 - DNA, 15 bp, Homo sapiens
tgtatttcctctctg

SEQ ID NO: 1777937 - DNA, 15 bp, Homo sapiens
gtatttcctctctgg

SEQ ID NO: 1777938 - DNA, 15 bp, Homo sapiens
tatttcctctctggt

SEQ ID NO: 1777939 - DNA, 15 bp, Homo sapiens
atttcctctctggtg

SEQ ID NO: 1777940 - DNA, 15 bp, Homo sapiens
tttcctctctggtga

SEQ ID NO: 1777941 - DNA, 15 bp, Homo sapiens
ttcctctctggtgaa

SEQ ID NO: 1777942 - DNA, 15 bp, Homo sapiens
tcctctctggtgaaa

SEQ ID NO: 1777943 - DNA, 15 bp, Homo sapiens
cctctctggtgaaat

SEQ ID NO: 1777944 - DNA, 15 bp, Homo sapiens
ctctctggtgaaatt

SEQ ID NO: 1777945 - DNA, 15 bp, Homo sapiens
tctctggtgaaattt

SEQ ID NO: 1777946 - DNA, 15 bp, Homo sapiens
ctctggtgaaatttc

SEQ ID NO: 1777947 - DNA, 15 bp, Homo sapiens
tctggtgaaatttct

SEQ ID NO: 1777948 - DNA, 15 bp, Homo sapiens
ctggtgaaatttctc

SEQ ID NO: 1777949 - DNA, 15 bp, Homo sapiens
tggtgaaatttctct

SEQ ID NO: 1777950 - DNA, 15 bp, Homo sapiens
ggtgaaatttctctt

SEQ ID NO: 1777951 - DNA, 15 bp, Homo sapiens
gtgaaatttctcttc

SEQ ID NO: 1777952 - DNA, 15 bp, Homo sapiens
tgaaatttctcttca

SEQ ID NO: 1777953 - DNA, 15 bp, Homo sapiens
gaaatttctcttcat

SEQ ID NO: 1777954 - DNA, 15 bp, Homo sapiens
aaatttctcttcatg

SEQ ID NO: 1777955 - DNA, 15 bp, Homo sapiens
aatttctcttcatgt

SEQ ID NO: 1777956 - DNA, 15 bp, Homo sapiens
atttctcttcatgtc

SEQ ID NO: 1777957 - DNA, 15 bp, Homo sapiens
tttctcttcatgtct

SEQ ID NO: 1777958 - DNA, 15 bp, Homo sapiens
ttctcttcatgtctt

SEQ ID NO: 1777959 - DNA, 15 bp, Homo sapiens
tctcttcatgtcttt

SEQ ID NO: 1777960 - DNA, 15 bp, Homo sapiens
ctcttcatgtctttg

SEQ ID NO: 1777961 - DNA, 15 bp, Homo sapiens
tcttcatgtctttgc

SEQ ID NO: 1777962 - DNA, 15 bp, Homo sapiens
cttcatgtctttgct

SEQ ID NO: 1777963 - DNA, 15 bp, Homo sapiens
ttcatgtctttgctc

SEQ ID NO: 1777964 - DNA, 15 bp, Homo sapiens
tcatgtctttgctca

SEQ ID NO: 1777965 - DNA, 15 bp, Homo sapiens
catgtctttgctcat

SEQ ID NO: 1777966 - DNA, 15 bp, Homo sapiens
atgtctttgctcatt

SEQ ID NO: 1777967 - DNA, 15 bp, Homo sapiens
tgtctttgctcattt

SEQ ID NO: 1777968 - DNA, 15 bp, Homo sapiens
gtctttgctcatttt

SEQ ID NO: 1777969 - DNA, 15 bp, Homo sapiens
tctttgctcattttc

SEQ ID NO: 1777970 - DNA, 15 bp, Homo sapiens
ctttgctcattttct

SEQ ID NO: 1777971 - DNA, 15 bp, Homo sapiens
tttgctcattttctg

SEQ ID NO: 1777972 - DNA, 15 bp, Homo sapiens
ttgctcattttctga

SEQ ID NO: 1777973 - DNA, 15 bp, Homo sapiens
tgctcattttctgat

SEQ ID NO: 1777974 - DNA, 15 bp, Homo sapiens
gctcattttctgatt

SEQ ID NO: 1777975 - DNA, 15 bp, Homo sapiens
ctcattttctgattg

SEQ ID NO: 1777976 - DNA, 15 bp, Homo sapiens
tcattttctgattgg

SEQ ID NO: 1777977 - DNA, 15 bp, Homo sapiens
cattttctgattgga

SEQ ID NO: 1777978 - DNA, 15 bp, Homo sapiens
attttctgattggat

SEQ ID NO: 1777979 - DNA, 15 bp, Homo sapiens
ttttctgattggatt

SEQ ID NO: 1777980 - DNA, 15 bp, Homo sapiens
tttctgattggattg

SEQ ID NO: 1777981 - DNA, 15 bp, Homo sapiens
ttctgattggattgt

SEQ ID NO: 1777982 - DNA, 15 bp, Homo sapiens
tctgattggattgtt

SEQ ID NO: 1777983 - DNA, 15 bp, Homo sapiens
ctgattggattgttt

SEQ ID NO: 1777984 - DNA, 15 bp, Homo sapiens
tgattggattgtttg

SEQ ID NO: 1777985 - DNA, 15 bp, Homo sapiens
gattggattgtttgt

SEQ ID NO: 1777986 - DNA, 15 bp, Homo sapiens
attggattgtttgtt

SEQ ID NO: 1777987 - DNA, 15 bp, Homo sapiens
ttggattgtttgttt

SEQ ID NO: 1777988 - DNA, 15 bp, Homo sapiens
tggattgtttgtttt

SEQ ID NO: 1777989 - DNA, 15 bp, Homo sapiens
ggattgtttgttttt

SEQ ID NO: 1777990 - DNA, 15 bp, Homo sapiens
gattgtttgtttttt

SEQ ID NO: 1777991 - DNA, 15 bp, Homo sapiens
attgtttgtttttta

SEQ ID NO: 1777992 - DNA, 15 bp, Homo sapiens
ttgtttgttttttac

SEQ ID NO: 1777993 - DNA, 15 bp, Homo sapiens
tgtttgttttttacc

SEQ ID NO: 1777994 - DNA, 15 bp, Homo sapiens
gtttgttttttacca

SEQ ID NO: 1777995 - DNA, 15 bp, Homo sapiens
tttgttttttaccat

SEQ ID NO: 1777996 - DNA, 15 bp, Homo sapiens
ttgttttttaccatt

SEQ ID NO: 1777997 - DNA, 15 bp, Homo sapiens
tgttttttaccattg

SEQ ID NO: 1777998 - DNA, 15 bp, Homo sapiens
gttttttaccattga

SEQ ID NO: 1777999 - DNA, 15 bp, Homo sapiens
ttttttaccattgag

SEQ ID NO: 1778000 - DNA, 15 bp, Homo sapiens
tttttaccattgagt

SEQ ID NO: 1778001 - DNA, 15 bp, Homo sapiens
ttttaccattgagtt

SEQ ID NO: 1778002 - DNA, 15 bp, Homo sapiens
tttaccattgagttt

SEQ ID NO: 1778003 - DNA, 15 bp, Homo sapiens
ttaccattgagtttt

SEQ ID NO: 1778004 - DNA, 15 bp, Homo sapiens
taccattgagttttg

SEQ ID NO: 1778005 - DNA, 15 bp, Homo sapiens
accattgagttttga

SEQ ID NO: 1778006 - DNA, 15 bp, Homo sapiens
ccattgagttttgag

SEQ ID NO: 1778007 - DNA, 15 bp, Homo sapiens
cattgagttttgagg

SEQ ID NO: 1778008 - DNA, 15 bp, Homo sapiens
attgagttttgaggg

SEQ ID NO: 1778009 - DNA, 15 bp, Homo sapiens
ttgagttttgagggt

SEQ ID NO: 1778010 - DNA, 15 bp, Homo sapiens
tgagttttgagggtt

SEQ ID NO: 1778011 - DNA, 15 bp, Homo sapiens
gagttttgagggttc

SEQ ID NO: 1778012 - DNA, 15 bp, Homo sapiens
agttttgagggttct

SEQ ID NO: 1778013 - DNA, 15 bp, Homo sapiens
gttttgagggttctt

SEQ ID NO: 1778014 - DNA, 15 bp, Homo sapiens
ttttgagggttcttt

SEQ ID NO: 1778015 - DNA, 15 bp, Homo sapiens
tttgagggttcttta

SEQ ID NO: 1778016 - DNA, 15 bp, Homo sapiens
ttgagggttctttat

SEQ ID NO: 1778017 - DNA, 15 bp, Homo sapiens
tgagggttctttata

SEQ ID NO: 1778018 - DNA, 15 bp, Homo sapiens
gagggttctttatat

SEQ ID NO: 1778019 - DNA, 15 bp, Homo sapiens
agggttctttatatg

SEQ ID NO: 1778020 - DNA, 15 bp, Homo sapiens
gggttctttatatgt

SEQ ID NO: 1778021 - DNA, 15 bp, Homo sapiens
ggttctttatatgtt

SEQ ID NO: 1778022 - DNA, 15 bp, Homo sapiens
gttctttatatgttc

SEQ ID NO: 1778023 - DNA, 15 bp, Homo sapiens
ttctttatatgttct

SEQ ID NO: 1778024 - DNA, 15 bp, Homo sapiens
tctttatatgttctc

SEQ ID NO: 1778025 - DNA, 15 bp, Homo sapiens
ctttatatgttctca

SEQ ID NO: 1778026 - DNA, 15 bp, Homo sapiens
tttatatgttctcaa

SEQ ID NO: 1778027 - DNA, 15 bp, Homo sapiens
ttatatgttctcaat

SEQ ID NO: 1778028 - DNA, 15 bp, Homo sapiens
tatatgttctcaata

SEQ ID NO: 1778029 - DNA, 15 bp, Homo sapiens
atatgttctcaatac

SEQ ID NO: 1778030 - DNA, 15 bp, Homo sapiens
tatgttctcaatact

SEQ ID NO: 1778031 - DNA, 15 bp, Homo sapiens
atgttctcaatacta

SEQ ID NO: 1778032 - DNA, 15 bp, Homo sapiens
tgttctcaatactag

SEQ ID NO: 1778033 - DNA, 15 bp, Homo sapiens
gttctcaatactagt

SEQ ID NO: 1778034 - DNA, 15 bp, Homo sapiens
ttctcaatactagtc

SEQ ID NO: 1778035 - DNA, 15 bp, Homo sapiens
tctcaatactagtct

SEQ ID NO: 1778036 - DNA, 15 bp, Homo sapiens
ctcaatactagtctt

SEQ ID NO: 1778037 - DNA, 15 bp, Homo sapiens
tcaatactagtcttt

SEQ ID NO: 1778038 - DNA, 15 bp, Homo sapiens
caatactagtctttt

SEQ ID NO: 1778039 - DNA, 15 bp, Homo sapiens
aatactagtcttttt

SEQ ID NO: 1778040 - DNA, 15 bp, Homo sapiens
atactagtctttttt

SEQ ID NO: 1778041 - DNA, 15 bp, Homo sapiens
tactagtcttttttg

SEQ ID NO: 1778042 - DNA, 15 bp, Homo sapiens
actagtcttttttgt

SEQ ID NO: 1778043 - DNA, 15 bp, Homo sapiens
ctagtcttttttgtt

SEQ ID NO: 1778044 - DNA, 15 bp, Homo sapiens
tagtcttttttgtta

SEQ ID NO: 1778045 - DNA, 15 bp, Homo sapiens
agtcttttttgttag

SEQ ID NO: 1778046 - DNA, 15 bp, Homo sapiens
gtcttttttgttaga

SEQ ID NO: 1778047 - DNA, 15 bp, Homo sapiens
tcttttttgttagat

SEQ ID NO: 1778048 - DNA, 15 bp, Homo sapiens
cttttttgttagata

SEQ ID NO: 1778049 - DNA, 15 bp, Homo sapiens
ttttttgttagatat

SEQ ID NO: 1778050 - DNA, 15 bp, Homo sapiens
tttttgttagatatg

SEQ ID NO: 1778051 - DNA, 15 bp, Homo sapiens
ttttgttagatatgt

SEQ ID NO: 1778052 - DNA, 15 bp, Homo sapiens
tttgttagatatgtg

SEQ ID NO: 1778053 - DNA, 15 bp, Homo sapiens
ttgttagatatgtgg

SEQ ID NO: 1778054 - DNA, 15 bp, Homo sapiens
tgttagatatgtggt

SEQ ID NO: 1778055 - DNA, 15 bp, Homo sapiens
gttagatatgtggtt

SEQ ID NO: 1778056 - DNA, 15 bp, Homo sapiens
ttagatatgtggtta

SEQ ID NO: 1778057 - DNA, 15 bp, Homo sapiens
tagatatgtggttag

SEQ ID NO: 1778058 - DNA, 15 bp, Homo sapiens
agatatgtggttagc

SEQ ID NO: 1778059 - DNA, 15 bp, Homo sapiens
gatatgtggttagca

SEQ ID NO: 1778060 - DNA, 15 bp, Homo sapiens
atatgtggttagcaa

SEQ ID NO: 1778061 - DNA, 15 bp, Homo sapiens
tatgtggttagcaaa

SEQ ID NO: 1778062 - DNA, 15 bp, Homo sapiens
atgtggttagcaaat

SEQ ID NO: 1778063 - DNA, 15 bp, Homo sapiens
tgtggttagcaaata

SEQ ID NO: 1778064 - DNA, 15 bp, Homo sapiens
gtggttagcaaatat

SEQ ID NO: 1778065 - DNA, 15 bp, Homo sapiens
tggttagcaaatatt

SEQ ID NO: 1778066 - DNA, 15 bp, Homo sapiens
ggttagcaaatattt

SEQ ID NO: 1778067 - DNA, 15 bp, Homo sapiens
gttagcaaatatttt

SEQ ID NO: 1778068 - DNA, 15 bp, Homo sapiens
ttagcaaatattttc

SEQ ID NO: 1778069 - DNA, 15 bp, Homo sapiens
tagcaaatattttct

SEQ ID NO: 1778070 - DNA, 15 bp, Homo sapiens
agcaaatattttctc

SEQ ID NO: 1778071 - DNA, 15 bp, Homo sapiens
gcaaatattttctct

SEQ ID NO: 1778072 - DNA, 15 bp, Homo sapiens
caaatattttctctt

SEQ ID NO: 1778073 - DNA, 15 bp, Homo sapiens
aaatattttctcttg

SEQ ID NO: 1778074 - DNA, 15 bp, Homo sapiens
aatattttctcttgg

SEQ ID NO: 1778075 - DNA, 15 bp, Homo sapiens
atattttctcttggc

SEQ ID NO: 1778076 - DNA, 15 bp, Homo sapiens
tattttctcttggcc

SEQ ID NO: 1778077 - DNA, 15 bp, Homo sapiens
attttctcttggcct

SEQ ID NO: 1778078 - DNA, 15 bp, Homo sapiens
ttttctcttggcctg

SEQ ID NO: 1778079 - DNA, 15 bp, Homo sapiens
tttctcttggcctgt

SEQ ID NO: 1778080 - DNA, 15 bp, Homo sapiens
ttctcttggcctgta

SEQ ID NO: 1778081 - DNA, 15 bp, Homo sapiens
tctcttggcctgtag

SEQ ID NO: 1778082 - DNA, 15 bp, Homo sapiens
ctcttggcctgtagc

SEQ ID NO: 1778083 - DNA, 15 bp, Homo sapiens
tcttggcctgtagct

SEQ ID NO: 1778084 - DNA, 15 bp, Homo sapiens
cttggcctgtagctt

SEQ ID NO: 1778085 - DNA, 15 bp, Homo sapiens
ttggcctgtagcttc

SEQ ID NO: 1778086 - DNA, 15 bp, Homo sapiens
tggcctgtagcttct

SEQ ID NO: 1778087 - DNA, 15 bp, Homo sapiens
ggcctgtagcttctt

SEQ ID NO: 1778088 - DNA, 15 bp, Homo sapiens
gcctgtagcttcttt

SEQ ID NO: 1778089 - DNA, 15 bp, Homo sapiens
cctgtagcttctttc

SEQ ID NO: 1778090 - DNA, 15 bp, Homo sapiens
ctgtagcttctttct

SEQ ID NO: 1778091 - DNA, 15 bp, Homo sapiens
tgtagcttctttctt

SEQ ID NO: 1778092 - DNA, 15 bp, Homo sapiens
gtagcttctttcttc

SEQ ID NO: 1778093 - DNA, 15 bp, Homo sapiens
tagcttctttcttca

SEQ ID NO: 1778094 - DNA, 15 bp, Homo sapiens
agcttctttcttcat

SEQ ID NO: 1778095 - DNA, 15 bp, Homo sapiens
gcttctttcttcatc

SEQ ID NO: 1778096 - DNA, 15 bp, Homo sapiens
cttctttcttcatct

SEQ ID NO: 1778097 - DNA, 15 bp, Homo sapiens
ttctttcttcatctt

SEQ ID NO: 1778098 - DNA, 15 bp, Homo sapiens
tctttcttcatcttc

SEQ ID NO: 1778099 - DNA, 15 bp, Homo sapiens
ctttcttcatcttct

SEQ ID NO: 1778100 - DNA, 15 bp, Homo sapiens
tttcttcatcttctt

SEQ ID NO: 1778101 - DNA, 15 bp, Homo sapiens
ttcttcatcttcttc

SEQ ID NO: 1778102 - DNA, 15 bp, Homo sapiens
tcttcatcttcttca

SEQ ID NO: 1778103 - DNA, 15 bp, Homo sapiens
cttcatcttcttcac

SEQ ID NO: 1778104 - DNA, 15 bp, Homo sapiens
ttcatcttcttcaca

SEQ ID NO: 1778105 - DNA, 15 bp, Homo sapiens
tcatcttcttcacat

SEQ ID NO: 1778106 - DNA, 15 bp, Homo sapiens
catcttcttcacatc

SEQ ID NO: 1778107 - DNA, 15 bp, Homo sapiens
atcttcttcacatca

SEQ ID NO: 1778108 - DNA, 15 bp, Homo sapiens
tcttcttcacatcat

SEQ ID NO: 1778109 - DNA, 15 bp, Homo sapiens
cttcttcacatcatg

SEQ ID NO: 1778110 - DNA, 15 bp, Homo sapiens
ttcttcacatcatgt

SEQ ID NO: 1778111 - DNA, 15 bp, Homo sapiens
tcttcacatcatgtt

SEQ ID NO: 1778112 - DNA, 15 bp, Homo sapiens
cttcacatcatgttt

SEQ ID NO: 1778113 - DNA, 15 bp, Homo sapiens
ttcacatcatgtttc

SEQ ID NO: 1778114 - DNA, 15 bp, Homo sapiens
tcacatcatgtttct

SEQ ID NO: 1778115 - DNA, 15 bp, Homo sapiens
cacatcatgtttctc

SEQ ID NO: 1778116 - DNA, 15 bp, Homo sapiens
acatcatgtttctca

SEQ ID NO: 1778117 - DNA, 15 bp, Homo sapiens
catcatgtttctcat

SEQ ID NO: 1778118 - DNA, 15 bp, Homo sapiens
atcatgtttctcatc

SEQ ID NO: 1778119 - DNA, 15 bp, Homo sapiens
tcatgtttctcatcc

SEQ ID NO: 1778120 - DNA, 15 bp, Homo sapiens
catgtttctcatcca

SEQ ID NO: 1778121 - DNA, 15 bp, Homo sapiens
atgtttctcatccaa

SEQ ID NO: 1778122 - DNA, 15 bp, Homo sapiens
tgtttctcatccaaa

SEQ ID NO: 1778123 - DNA, 15 bp, Homo sapiens
gtttctcatccaaaa

SEQ ID NO: 1778124 - DNA, 15 bp, Homo sapiens
tttctcatccaaaag

SEQ ID NO: 1778125 - DNA, 15 bp, Homo sapiens
ttctcatccaaaagt

SEQ ID NO: 1778126 - DNA, 15 bp, Homo sapiens
tctcatccaaaagtt

SEQ ID NO: 1778127 - DNA, 15 bp, Homo sapiens
ctcatccaaaagttt

SEQ ID NO: 1778128 - DNA, 15 bp, Homo sapiens
tcatccaaaagtttt

SEQ ID NO: 1778129 - DNA, 15 bp, Homo sapiens
catccaaaagttttt

SEQ ID NO: 1778130 - DNA, 15 bp, Homo sapiens
atccaaaagttttta

SEQ ID NO: 1778131 - DNA, 15 bp, Homo sapiens
tccaaaagtttttaa

SEQ ID NO: 1778132 - DNA, 15 bp, Homo sapiens
ccaaaagtttttaat

SEQ ID NO: 1778133 - DNA, 15 bp, Homo sapiens
caaaagtttttaatt

SEQ ID NO: 1778134 - DNA, 15 bp, Homo sapiens
aaaagtttttaattt

SEQ ID NO: 1778135 - DNA, 15 bp, Homo sapiens
aaagtttttaatttt

SEQ ID NO: 1778136 - DNA, 15 bp, Homo sapiens
aagtttttaattttc

SEQ ID NO: 1778137 - DNA, 15 bp, Homo sapiens
agtttttaattttca

SEQ ID NO: 1778138 - DNA, 15 bp, Homo sapiens
gtttttaattttcat

SEQ ID NO: 1778139 - DNA, 15 bp, Homo sapiens
tttttaattttcata

SEQ ID NO: 1778140 - DNA, 15 bp, Homo sapiens
ttttaattttcataa

SEQ ID NO: 1778141 - DNA, 15 bp, Homo sapiens
tttaattttcataaa

SEQ ID NO: 1778142 - DNA, 15 bp, Homo sapiens
ttaattttcataaag

SEQ ID NO: 1778143 - DNA, 15 bp, Homo sapiens
taattttcataaagt

SEQ ID NO: 1778144 - DNA, 15 bp, Homo sapiens
aattttcataaagtc

SEQ ID NO: 1778145 - DNA, 15 bp, Homo sapiens
attttcataaagtcc

SEQ ID NO: 1778146 - DNA, 15 bp, Homo sapiens
ttttcataaagtcca

SEQ ID NO: 1778147 - DNA, 15 bp, Homo sapiens
tttcataaagtccag

SEQ ID NO: 1778148 - DNA, 15 bp, Homo sapiens
ttcataaagtccagt

SEQ ID NO: 1778149 - DNA, 15 bp, Homo sapiens
tcataaagtccagtt

SEQ ID NO: 1778150 - DNA, 15 bp, Homo sapiens
cataaagtccagttt

SEQ ID NO: 1778151 - DNA, 15 bp, Homo sapiens
ataaagtccagttta

SEQ ID NO: 1778152 - DNA, 15 bp, Homo sapiens
taaagtccagtttat

SEQ ID NO: 1778153 - DNA, 15 bp, Homo sapiens
aaagtccagtttatc

SEQ ID NO: 1778154 - DNA, 15 bp, Homo sapiens
aagtccagtttatca

SEQ ID NO: 1778155 - DNA, 15 bp, Homo sapiens
agtccagtttatcac

SEQ ID NO: 1778156 - DNA, 15 bp, Homo sapiens
gtccagtttatcact

SEQ ID NO: 1778157 - DNA, 15 bp, Homo sapiens
tccagtttatcactt

SEQ ID NO: 1778158 - DNA, 15 bp, Homo sapiens
ccagtttatcacttt

SEQ ID NO: 1778159 - DNA, 15 bp, Homo sapiens
cagtttatcactttt

SEQ ID NO: 1778160 - DNA, 15 bp, Homo sapiens
agtttatcacttttt

SEQ ID NO: 1778161 - DNA, 15 bp, Homo sapiens
gtttatcactttttc

SEQ ID NO: 1778162 - DNA, 15 bp, Homo sapiens
tttatcactttttcc

SEQ ID NO: 1778163 - DNA, 15 bp, Homo sapiens
ttatcactttttcct

SEQ ID NO: 1778164 - DNA, 15 bp, Homo sapiens
tatcactttttcctt

SEQ ID NO: 1778165 - DNA, 15 bp, Homo sapiens
atcactttttccttt

SEQ ID NO: 1778166 - DNA, 15 bp, Homo sapiens
tcactttttcctttt

SEQ ID NO: 1778167 - DNA, 15 bp, Homo sapiens
cactttttcctttta

SEQ ID NO: 1778168 - DNA, 15 bp, Homo sapiens
actttttccttttat

SEQ ID NO: 1778169 - DNA, 15 bp, Homo sapiens
ctttttccttttatg

SEQ ID NO: 1778170 - DNA, 15 bp, Homo sapiens
tttttccttttatgg

SEQ ID NO: 1778171 - DNA, 15 bp, Homo sapiens
tttccttttatggat

SEQ ID NO: 1778172 - DNA, 15 bp, Homo sapiens
ttccttttatggatt

SEQ ID NO: 1778173 - DNA, 15 bp, Homo sapiens
tccttttatggatta

SEQ ID NO: 1778174 - DNA, 15 bp, Homo sapiens
ccttttatggattat

SEQ ID NO: 1778175 - DNA, 15 bp, Homo sapiens
cttttatggattatg

SEQ ID NO: 1778176 - DNA, 15 bp, Homo sapiens
ttttatggattatgc

SEQ ID NO: 1778177 - DNA, 15 bp, Homo sapiens
tttatggattatgct

SEQ ID NO: 1778178 - DNA, 15 bp, Homo sapiens
ttatggattatgctt

SEQ ID NO: 1778179 - DNA, 15 bp, Homo sapiens
tatggattatgcttt

SEQ ID NO: 1778180 - DNA, 15 bp, Homo sapiens
atggattatgctttt

SEQ ID NO: 1778181 - DNA, 15 bp, Homo sapiens
tggattatgcttttg

SEQ ID NO: 1778182 - DNA, 15 bp, Homo sapiens
ggattatgcttttgg

SEQ ID NO: 1778183 - DNA, 15 bp, Homo sapiens
gattatgcttttggt

SEQ ID NO: 1778184 - DNA, 15 bp, Homo sapiens
attatgcttttggtg

SEQ ID NO: 1778185 - DNA, 15 bp, Homo sapiens
ttatgcttttggtgt

SEQ ID NO: 1778186 - DNA, 15 bp, Homo sapiens
tatgcttttggtgtc

SEQ ID NO: 1778187 - DNA, 15 bp, Homo sapiens
atgcttttggtgtca

SEQ ID NO: 1778188 - DNA, 15 bp, Homo sapiens
tgcttttggtgtcaa

SEQ ID NO: 1778189 - DNA, 15 bp, Homo sapiens
gcttttggtgtcaaa

SEQ ID NO: 1778190 - DNA, 15 bp, Homo sapiens
cttttggtgtcaaat

SEQ ID NO: 1778191 - DNA, 15 bp, Homo sapiens
ttttggtgtcaaatc

SEQ ID NO: 1778192 - DNA, 15 bp, Homo sapiens
tttggtgtcaaatct

SEQ ID NO: 1778193 - DNA, 15 bp, Homo sapiens
ttggtgtcaaatcta

SEQ ID NO: 1778194 - DNA, 15 bp, Homo sapiens
tggtgtcaaatctaa

SEQ ID NO: 1778195 - DNA, 15 bp, Homo sapiens
ggtgtcaaatctaag

SEQ ID NO: 1778196 - DNA, 15 bp, Homo sapiens
gtgtcaaatctaaga

SEQ ID NO: 1778197 - DNA, 15 bp, Homo sapiens
tgtcaaatctaagaa

SEQ ID NO: 1778198 - DNA, 15 bp, Homo sapiens
gtcaaatctaagaac

SEQ ID NO: 1778199 - DNA, 15 bp, Homo sapiens
tcaaatctaagaact

SEQ ID NO: 1778200 - DNA, 15 bp, Homo sapiens
caaatctaagaactc

SEQ ID NO: 1778201 - DNA, 15 bp, Homo sapiens
aaatctaagaactcc

SEQ ID NO: 1778202 - DNA, 15 bp, Homo sapiens
aatctaagaactcca

SEQ ID NO: 1778203 - DNA, 15 bp, Homo sapiens
atctaagaactccag

SEQ ID NO: 1778204 - DNA, 15 bp, Homo sapiens
tctaagaactccaga

SEQ ID NO: 1778205 - DNA, 15 bp, Homo sapiens
ctaagaactccagat

SEQ ID NO: 1778206 - DNA, 15 bp, Homo sapiens
taagaactccagatc

SEQ ID NO: 1778207 - DNA, 15 bp, Homo sapiens
aagaactccagatcc

SEQ ID NO: 1778208 - DNA, 15 bp, Homo sapiens
agaactccagatcct

SEQ ID NO: 1778209 - DNA, 15 bp, Homo sapiens
gaactccagatcctg

SEQ ID NO: 1778210 - DNA, 15 bp, Homo sapiens
aactccagatcctga

SEQ ID NO: 1778211 - DNA, 15 bp, Homo sapiens
actccagatcctgaa

SEQ ID NO: 1778212 - DNA, 15 bp, Homo sapiens
ctccagatcctgaag

SEQ ID NO: 1778213 - DNA, 15 bp, Homo sapiens
tccagatcctgaaga

SEQ ID NO: 1778214 - DNA, 15 bp, Homo sapiens
ccagatcctgaagat

SEQ ID NO: 1778215 - DNA, 15 bp, Homo sapiens
cagatcctgaagatt

SEQ ID NO: 1778216 - DNA, 15 bp, Homo sapiens
agatcctgaagattt

SEQ ID NO: 1778217 - DNA, 15 bp, Homo sapiens
gatcctgaagatttt

SEQ ID NO: 1778218 - DNA, 15 bp, Homo sapiens
atcctgaagattttc

SEQ ID NO: 1778219 - DNA, 15 bp, Homo sapiens
tcctgaagattttcc

SEQ ID NO: 1778220 - DNA, 15 bp, Homo sapiens
cctgaagattttccc

SEQ ID NO: 1778221 - DNA, 15 bp, Homo sapiens
ctgaagattttccct

SEQ ID NO: 1778222 - DNA, 15 bp, Homo sapiens
tgaagattttccctt

SEQ ID NO: 1778223 - DNA, 15 bp, Homo sapiens
gaagattttccctta

SEQ ID NO: 1778224 - DNA, 15 bp, Homo sapiens
aagattttcccttat

SEQ ID NO: 1778225 - DNA, 15 bp, Homo sapiens
agattttcccttata

SEQ ID NO: 1778226 - DNA, 15 bp, Homo sapiens
gattttcccttatac

SEQ ID NO: 1778227 - DNA, 15 bp, Homo sapiens
attttcccttatact

SEQ ID NO: 1778228 - DNA, 15 bp, Homo sapiens
ttttcccttatactt

SEQ ID NO: 1778229 - DNA, 15 bp, Homo sapiens
tttcccttatactta

SEQ ID NO: 1778230 - DNA, 15 bp, Homo sapiens
ttcccttatacttaa

SEQ ID NO: 1778231 - DNA, 15 bp, Homo sapiens
tcccttatacttaaa

SEQ ID NO: 1778232 - DNA, 15 bp, Homo sapiens
cccttatacttaaaa

SEQ ID NO: 1778233 - DNA, 15 bp, Homo sapiens
ccttatacttaaaaa

SEQ ID NO: 1778234 - DNA, 15 bp, Homo sapiens
cttatacttaaaaaa

SEQ ID NO: 1778235 - DNA, 15 bp, Homo sapiens
ttatacttaaaaaat

SEQ ID NO: 1778236 - DNA, 15 bp, Homo sapiens
tatacttaaaaaatt

SEQ ID NO: 1778237 - DNA, 15 bp, Homo sapiens
atacttaaaaaatta

SEQ ID NO: 1778238 - DNA, 15 bp, Homo sapiens
tacttaaaaaattat

SEQ ID NO: 1778239 - DNA, 15 bp, Homo sapiens
acttaaaaaattata

SEQ ID NO: 1778240 - DNA, 15 bp, Homo sapiens
cttaaaaaattatag

SEQ ID NO: 1778241 - DNA, 15 bp, Homo sapiens
ttaaaaaattatagt

SEQ ID NO: 1778242 - DNA, 15 bp, Homo sapiens
taaaaaattatagtt

SEQ ID NO: 1778243 - DNA, 15 bp, Homo sapiens
aaaaaattatagttt

SEQ ID NO: 1778244 - DNA, 15 bp, Homo sapiens
aaaaattatagtttc

SEQ ID NO: 1778245 - DNA, 15 bp, Homo sapiens
aaaattatagtttca

SEQ ID NO: 1778246 - DNA, 15 bp, Homo sapiens
aaattatagtttcac

SEQ ID NO: 1778247 - DNA, 15 bp, Homo sapiens
aattatagtttcaca

SEQ ID NO: 1778248 - DNA, 15 bp, Homo sapiens
attatagtttcacat

SEQ ID NO: 1778249 - DNA, 15 bp, Homo sapiens
ttatagtttcacatt

SEQ ID NO: 1778250 - DNA, 15 bp, Homo sapiens
tatagtttcacattt

SEQ ID NO: 1778251 - DNA, 15 bp, Homo sapiens
atagtttcacatttt

SEQ ID NO: 1778252 - DNA, 15 bp, Homo sapiens
tagtttcacatttta

SEQ ID NO: 1778253 - DNA, 15 bp, Homo sapiens
agtttcacattttaa

SEQ ID NO: 1778254 - DNA, 15 bp, Homo sapiens
gtttcacattttaag

SEQ ID NO: 1778255 - DNA, 15 bp, Homo sapiens
tttcacattttaagt

SEQ ID NO: 1778256 - DNA, 15 bp, Homo sapiens
ttcacattttaagtc

SEQ ID NO: 1778257 - DNA, 15 bp, Homo sapiens
tcacattttaagtcc

SEQ ID NO: 1778258 - DNA, 15 bp, Homo sapiens
cacattttaagtcca

SEQ ID NO: 1778259 - DNA, 15 bp, Homo sapiens
acattttaagtccat

SEQ ID NO: 1778260 - DNA, 15 bp, Homo sapiens
cattttaagtccatg

SEQ ID NO: 1778261 - DNA, 15 bp, Homo sapiens
attttaagtccatga

SEQ ID NO: 1778262 - DNA, 15 bp, Homo sapiens
ttttaagtccatgat

SEQ ID NO: 1778263 - DNA, 15 bp, Homo sapiens
tttaagtccatgatc

SEQ ID NO: 1778264 - DNA, 15 bp, Homo sapiens
ttaagtccatgatcc

SEQ ID NO: 1778265 - DNA, 15 bp, Homo sapiens
taagtccatgatcca

SEQ ID NO: 1778266 - DNA, 15 bp, Homo sapiens
aagtccatgatccat

SEQ ID NO: 1778267 - DNA, 15 bp, Homo sapiens
agtccatgatccatt

SEQ ID NO: 1778268 - DNA, 15 bp, Homo sapiens
gtccatgatccattt

SEQ ID NO: 1778269 - DNA, 15 bp, Homo sapiens
tccatgatccatttt

SEQ ID NO: 1778270 - DNA, 15 bp, Homo sapiens
ccatgatccatttta

SEQ ID NO: 1778271 - DNA, 15 bp, Homo sapiens
catgatccattttaa

SEQ ID NO: 1778272 - DNA, 15 bp, Homo sapiens
atgatccattttaag

SEQ ID NO: 1778273 - DNA, 15 bp, Homo sapiens
tgatccattttaagt

SEQ ID NO: 1778274 - DNA, 15 bp, Homo sapiens
gatccattttaagtt

SEQ ID NO: 1778275 - DNA, 15 bp, Homo sapiens
atccattttaagttt

SEQ ID NO: 1778276 - DNA, 15 bp, Homo sapiens
tccattttaagttta

SEQ ID NO: 1778277 - DNA, 15 bp, Homo sapiens
ccattttaagtttat

SEQ ID NO: 1778278 - DNA, 15 bp, Homo sapiens
cattttaagtttatt

SEQ ID NO: 1778279 - DNA, 15 bp, Homo sapiens
attttaagtttattt

SEQ ID NO: 1778280 - DNA, 15 bp, Homo sapiens
ttttaagtttatttt

SEQ ID NO: 1778281 - DNA, 15 bp, Homo sapiens
tttaagtttattttt

SEQ ID NO: 1778282 - DNA, 15 bp, Homo sapiens
ttaagtttatttttg

SEQ ID NO: 1778283 - DNA, 15 bp, Homo sapiens
taagtttatttttgt

SEQ ID NO: 1778284 - DNA, 15 bp, Homo sapiens
aagtttatttttgta

SEQ ID NO: 1778285 - DNA, 15 bp, Homo sapiens
agtttatttttgtac

SEQ ID NO: 1778286 - DNA, 15 bp, Homo sapiens
gtttatttttgtaca

SEQ ID NO: 1778287 - DNA, 15 bp, Homo sapiens
tttatttttgtacaa

SEQ ID NO: 1778288 - DNA, 15 bp, Homo sapiens
ttatttttgtacaaa

SEQ ID NO: 1778289 - DNA, 15 bp, Homo sapiens
tatttttgtacaaag

SEQ ID NO: 1778290 - DNA, 15 bp, Homo sapiens
atttttgtacaaagt

SEQ ID NO: 1778291 - DNA, 15 bp, Homo sapiens
tttttgtacaaagtt

SEQ ID NO: 1778292 - DNA, 15 bp, Homo sapiens
ttttgtacaaagttt

SEQ ID NO: 1778293 - DNA, 15 bp, Homo sapiens
tttgtacaaagtttg

SEQ ID NO: 1778294 - DNA, 15 bp, Homo sapiens
ttgtacaaagtttga

SEQ ID NO: 1778295 - DNA, 15 bp, Homo sapiens
tgtacaaagtttgag

SEQ ID NO: 1778296 - DNA, 15 bp, Homo sapiens
gtacaaagtttgaga

SEQ ID NO: 1778297 - DNA, 15 bp, Homo sapiens
tacaaagtttgagat

SEQ ID NO: 1778298 - DNA, 15 bp, Homo sapiens
acaaagtttgagatt

SEQ ID NO: 1778299 - DNA, 15 bp, Homo sapiens
caaagtttgagattt

SEQ ID NO: 1778300 - DNA, 15 bp, Homo sapiens
aaagtttgagatttg

SEQ ID NO: 1778301 - DNA, 15 bp, Homo sapiens
aagtttgagatttgg

SEQ ID NO: 1778302 - DNA, 15 bp, Homo sapiens
agtttgagatttggg

SEQ ID NO: 1778303 - DNA, 15 bp, Homo sapiens
gtttgagatttgggt

SEQ ID NO: 1778304 - DNA, 15 bp, Homo sapiens
tttgagatttgggtt

SEQ ID NO: 1778305 - DNA, 15 bp, Homo sapiens
ttgagatttgggttg

SEQ ID NO: 1778306 - DNA, 15 bp, Homo sapiens
tgagatttgggttga

SEQ ID NO: 1778307 - DNA, 15 bp, Homo sapiens
gagatttgggttgag

SEQ ID NO: 1778308 - DNA, 15 bp, Homo sapiens
agatttgggttgagg

SEQ ID NO: 1778309 - DNA, 15 bp, Homo sapiens
gatttgggttgaggt

SEQ ID NO: 1778310 - DNA, 15 bp, Homo sapiens
atttgggttgaggtt

SEQ ID NO: 1778311 - DNA, 15 bp, Homo sapiens
tttgggttgaggttt

SEQ ID NO: 1778312 - DNA, 15 bp, Homo sapiens
ttgggttgaggtttt

SEQ ID NO: 1778313 - DNA, 15 bp, Homo sapiens
tgggttgaggttttt

SEQ ID NO: 1778314 - DNA, 15 bp, Homo sapiens
gggttgaggtttttt

SEQ ID NO: 1778315 - DNA, 15 bp, Homo sapiens
ggttgaggttttttt

SEQ ID NO: 1778316 - DNA, 15 bp, Homo sapiens
gttgaggttttttta

SEQ ID NO: 1778317 - DNA, 15 bp, Homo sapiens
ttgaggtttttttag

SEQ ID NO: 1778318 - DNA, 15 bp, Homo sapiens
tgaggtttttttagg

SEQ ID NO: 1778319 - DNA, 15 bp, Homo sapiens
gaggtttttttaggg

SEQ ID NO: 1778320 - DNA, 15 bp, Homo sapiens
aggtttttttagggg

SEQ ID NO: 1778321 - DNA, 15 bp, Homo sapiens
ggtttttttaggggg

SEQ ID NO: 1778322 - DNA, 15 bp, Homo sapiens
gtttttttagggggt

SEQ ID NO: 1778323 - DNA, 15 bp, Homo sapiens
tttttttagggggtg

SEQ ID NO: 1778324 - DNA, 15 bp, Homo sapiens
ttttttagggggtgc

SEQ ID NO: 1778325 - DNA, 15 bp, Homo sapiens
tttttagggggtgct

SEQ ID NO: 1778326 - DNA, 15 bp, Homo sapiens
ttttagggggtgctg

SEQ ID NO: 1778327 - DNA, 15 bp, Homo sapiens
tttagggggtgctga

SEQ ID NO: 1778328 - DNA, 15 bp, Homo sapiens
ttagggggtgctgag

SEQ ID NO: 1778329 - DNA, 15 bp, Homo sapiens
tagggggtgctgagt

SEQ ID NO: 1778330 - DNA, 15 bp, Homo sapiens
agggggtgctgagtt

SEQ ID NO: 1778331 - DNA, 15 bp, Homo sapiens
gggggtgctgagttg

SEQ ID NO: 1778332 - DNA, 15 bp, Homo sapiens
ggggtgctgagttgg

SEQ ID NO: 1778333 - DNA, 15 bp, Homo sapiens
gggtgctgagttggg

SEQ ID NO: 1778334 - DNA, 15 bp, Homo sapiens
ggtgctgagttgggc

SEQ ID NO: 1778335 - DNA, 15 bp, Homo sapiens
gtgctgagttgggca

SEQ ID NO: 1778336 - DNA, 15 bp, Homo sapiens
tgctgagttgggcac

SEQ ID NO: 1778337 - DNA, 15 bp, Homo sapiens
gctgagttgggcacc

SEQ ID NO: 1778338 - DNA, 15 bp, Homo sapiens
ctgagttgggcacca

SEQ ID NO: 1778339 - DNA, 15 bp, Homo sapiens
tgagttgggcaccat

SEQ ID NO: 1778340 - DNA, 15 bp, Homo sapiens
gagttgggcaccatg

SEQ ID NO: 1778341 - DNA, 15 bp, Homo sapiens
agttgggcaccatgg

SEQ ID NO: 1778342 - DNA, 15 bp, Homo sapiens
gttgggcaccatgga

SEQ ID NO: 1778343 - DNA, 15 bp, Homo sapiens
ttgggcaccatggat

SEQ ID NO: 1778344 - DNA, 15 bp, Homo sapiens
tgggcaccatggatg

SEQ ID NO: 1778345 - DNA, 15 bp, Homo sapiens
gggcaccatggatgt

SEQ ID NO: 1778346 - DNA, 15 bp, Homo sapiens
ggcaccatggatgtt

SEQ ID NO: 1778347 - DNA, 15 bp, Homo sapiens
gcaccatggatgttc

SEQ ID NO: 1778348 - DNA, 15 bp, Homo sapiens
caccatggatgttca

SEQ ID NO: 1778349 - DNA, 15 bp, Homo sapiens
accatggatgttcag

SEQ ID NO: 1778350 - DNA, 15 bp, Homo sapiens
ccatggatgttcagt

SEQ ID NO: 1778351 - DNA, 15 bp, Homo sapiens
catggatgttcagtt

SEQ ID NO: 1778352 - DNA, 15 bp, Homo sapiens
atggatgttcagttg

SEQ ID NO: 1778353 - DNA, 15 bp, Homo sapiens
tggatgttcagttgt

SEQ ID NO: 1778354 - DNA, 15 bp, Homo sapiens
ggatgttcagttgtt

SEQ ID NO: 1778355 - DNA, 15 bp, Homo sapiens
gatgttcagttgttt

SEQ ID NO: 1778356 - DNA, 15 bp, Homo sapiens
atgttcagttgtttc

SEQ ID NO: 1778357 - DNA, 15 bp, Homo sapiens
tgttcagttgtttca

SEQ ID NO: 1778358 - DNA, 15 bp, Homo sapiens
gttcagttgtttcag

SEQ ID NO: 1778359 - DNA, 15 bp, Homo sapiens
ttcagttgtttcagc

SEQ ID NO: 1778360 - DNA, 15 bp, Homo sapiens
tcagttgtttcagca

SEQ ID NO: 1778361 - DNA, 15 bp, Homo sapiens
cagttgtttcagcac

SEQ ID NO: 1778362 - DNA, 15 bp, Homo sapiens
agttgtttcagcacc

SEQ ID NO: 1778363 - DNA, 15 bp, Homo sapiens
gttgtttcagcacca

SEQ ID NO: 1778364 - DNA, 15 bp, Homo sapiens
ttgtttcagcaccat

SEQ ID NO: 1778365 - DNA, 15 bp, Homo sapiens
tgtttcagcaccatt

SEQ ID NO: 1778366 - DNA, 15 bp, Homo sapiens
gtttcagcaccattt

SEQ ID NO: 1778367 - DNA, 15 bp, Homo sapiens
tttcagcaccattta

SEQ ID NO: 1778368 - DNA, 15 bp, Homo sapiens
ttcagcaccatttat

SEQ ID NO: 1778369 - DNA, 15 bp, Homo sapiens
tcagcaccatttatt

SEQ ID NO: 1778370 - DNA, 15 bp, Homo sapiens
cagcaccatttattt

SEQ ID NO: 1778371 - DNA, 15 bp, Homo sapiens
agcaccatttatttt

SEQ ID NO: 1778372 - DNA, 15 bp, Homo sapiens
gcaccatttatttta

SEQ ID NO: 1778373 - DNA, 15 bp, Homo sapiens
caccatttattttaa

SEQ ID NO: 1778374 - DNA, 15 bp, Homo sapiens
accatttattttaaa

SEQ ID NO: 1778375 - DNA, 15 bp, Homo sapiens
ccatttattttaaag

SEQ ID NO: 1778376 - DNA, 15 bp, Homo sapiens
catttattttaaagg

SEQ ID NO: 1778377 - DNA, 15 bp, Homo sapiens
atttattttaaaggc

SEQ ID NO: 1778378 - DNA, 15 bp, Homo sapiens
tttattttaaaggct

SEQ ID NO: 1778379 - DNA, 15 bp, Homo sapiens
ttattttaaaggcta

SEQ ID NO: 1778380 - DNA, 15 bp, Homo sapiens
tattttaaaggctat

SEQ ID NO: 1778381 - DNA, 15 bp, Homo sapiens
attttaaaggctatc

SEQ ID NO: 1778382 - DNA, 15 bp, Homo sapiens
ttttaaaggctatcc

SEQ ID NO: 1778383 - DNA, 15 bp, Homo sapiens
tttaaaggctatcct

SEQ ID NO: 1778384 - DNA, 15 bp, Homo sapiens
ttaaaggctatcctt

SEQ ID NO: 1778385 - DNA, 15 bp, Homo sapiens
taaaggctatccttt

SEQ ID NO: 1778386 - DNA, 15 bp, Homo sapiens
aaaggctatcctttt

SEQ ID NO: 1778387 - DNA, 15 bp, Homo sapiens
aaggctatccttttt

SEQ ID NO: 1778388 - DNA, 15 bp, Homo sapiens
aggctatcctttttc

SEQ ID NO: 1778389 - DNA, 15 bp, Homo sapiens
ggctatcctttttct

SEQ ID NO: 1778390 - DNA, 15 bp, Homo sapiens
gctatcctttttcta

SEQ ID NO: 1778391 - DNA, 15 bp, Homo sapiens
ctatcctttttctat

SEQ ID NO: 1778392 - DNA, 15 bp, Homo sapiens
tatcctttttctatt

SEQ ID NO: 1778393 - DNA, 15 bp, Homo sapiens
atcctttttctattg

SEQ ID NO: 1778394 - DNA, 15 bp, Homo sapiens
tcctttttctattga

SEQ ID NO: 1778395 - DNA, 15 bp, Homo sapiens
cctttttctattgat

SEQ ID NO: 1778396 - DNA, 15 bp, Homo sapiens
tttttctattgattt

SEQ ID NO: 1778397 - DNA, 15 bp, Homo sapiens
ttttctattgatttg

SEQ ID NO: 1778398 - DNA, 15 bp, Homo sapiens
tttctattgatttgc

SEQ ID NO: 1778399 - DNA, 15 bp, Homo sapiens
ttctattgatttgct

SEQ ID NO: 1778400 - DNA, 15 bp, Homo sapiens
tctattgatttgctt

SEQ ID NO: 1778401 - DNA, 15 bp, Homo sapiens
ctattgatttgcttt

SEQ ID NO: 1778402 - DNA, 15 bp, Homo sapiens
tattgatttgctttt

SEQ ID NO: 1778403 - DNA, 15 bp, Homo sapiens
attgatttgcttttg

SEQ ID NO: 1778404 - DNA, 15 bp, Homo sapiens
ttgatttgcttttgt

SEQ ID NO: 1778405 - DNA, 15 bp, Homo sapiens
tgatttgcttttgta

SEQ ID NO: 1778406 - DNA, 15 bp, Homo sapiens
gatttgcttttgtat

SEQ ID NO: 1778407 - DNA, 15 bp, Homo sapiens
atttgcttttgtatc

SEQ ID NO: 1778408 - DNA, 15 bp, Homo sapiens
tttgcttttgtatct

SEQ ID NO: 1778409 - DNA, 15 bp, Homo sapiens
ttgcttttgtatctt

SEQ ID NO: 1778410 - DNA, 15 bp, Homo sapiens
tgcttttgtatcttt

SEQ ID NO: 1778411 - DNA, 15 bp, Homo sapiens
gcttttgtatctttg

SEQ ID NO: 1778412 - DNA, 15 bp, Homo sapiens
cttttgtatctttgt

SEQ ID NO: 1778413 - DNA, 15 bp, Homo sapiens
ttttgtatctttgtc

SEQ ID NO: 1778414 - DNA, 15 bp, Homo sapiens
tttgtatctttgtca

SEQ ID NO: 1778415 - DNA, 15 bp, Homo sapiens
ttgtatctttgtcaa

SEQ ID NO: 1778416 - DNA, 15 bp, Homo sapiens
tgtatctttgtcaaa

SEQ ID NO: 1778417 - DNA, 15 bp, Homo sapiens
gtatctttgtcaaaa

SEQ ID NO: 1778418 - DNA, 15 bp, Homo sapiens
tatctttgtcaaaaa

SEQ ID NO: 1778419 - DNA, 15 bp, Homo sapiens
atctttgtcaaaaag

SEQ ID NO: 1778420 - DNA, 15 bp, Homo sapiens
tctttgtcaaaaagg

SEQ ID NO: 1778421 - DNA, 15 bp, Homo sapiens
ctttgtcaaaaaggg

SEQ ID NO: 1778422 - DNA, 15 bp, Homo sapiens
tttgtcaaaaaggga

SEQ ID NO: 1778423 - DNA, 15 bp, Homo sapiens
ttgtcaaaaagggaa

SEQ ID NO: 1778424 - DNA, 15 bp, Homo sapiens
tgtcaaaaagggaac

SEQ ID NO: 1778425 - DNA, 15 bp, Homo sapiens
gtcaaaaagggaaca

SEQ ID NO: 1778426 - DNA, 15 bp, Homo sapiens
tcaaaaagggaacaa

SEQ ID NO: 1778427 - DNA, 15 bp, Homo sapiens
caaaaagggaacaaa

SEQ ID NO: 1778428 - DNA, 15 bp, Homo sapiens
aaaaagggaacaaag

SEQ ID NO: 1778429 - DNA, 15 bp, Homo sapiens
aaaagggaacaaaga

SEQ ID NO: 1778430 - DNA, 15 bp, Homo sapiens
aaagggaacaaagaa

SEQ ID NO: 1778431 - DNA, 15 bp, Homo sapiens
aagggaacaaagaaa

SEQ ID NO: 1778432 - DNA, 15 bp, Homo sapiens
agggaacaaagaaaa

SEQ ID NO: 1778433 - DNA, 15 bp, Homo sapiens
gggaacaaagaaaag

SEQ ID NO: 1778434 - DNA, 15 bp, Homo sapiens
ggaacaaagaaaaga

SEQ ID NO: 1778435 - DNA, 15 bp, Homo sapiens
gaacaaagaaaagat

SEQ ID NO: 1778436 - DNA, 15 bp, Homo sapiens
aacaaagaaaagatg

SEQ ID NO: 1778437 - DNA, 15 bp, Homo sapiens
acaaagaaaagatga

SEQ ID NO: 1778438 - DNA, 15 bp, Homo sapiens
caaagaaaagatgag

SEQ ID NO: 1778439 - DNA, 15 bp, Homo sapiens
aaagaaaagatgaga

SEQ ID NO: 1778440 - DNA, 15 bp, Homo sapiens
aagaaaagatgagac

SEQ ID NO: 1778441 - DNA, 15 bp, Homo sapiens
agaaaagatgagaca

SEQ ID NO: 1778442 - DNA, 15 bp, Homo sapiens
gaaaagatgagacaa

SEQ ID NO: 1778443 - DNA, 15 bp, Homo sapiens
aaaagatgagacaaa

SEQ ID NO: 1778444 - DNA, 15 bp, Homo sapiens
aaagatgagacaaat

SEQ ID NO: 1778445 - DNA, 15 bp, Homo sapiens
aagatgagacaaata

SEQ ID NO: 1778446 - DNA, 15 bp, Homo sapiens
atgagacaaatagat

SEQ ID NO: 1778447 - DNA, 15 bp, Homo sapiens
tgagacaaatagatg

SEQ ID NO: 1778448 - DNA, 15 bp, Homo sapiens
gagacaaatagatgt

SEQ ID NO: 1778449 - DNA, 15 bp, Homo sapiens
agacaaatagatgta

SEQ ID NO: 1778450 - DNA, 15 bp, Homo sapiens
gacaaatagatgtag

SEQ ID NO: 1778451 - DNA, 15 bp, Homo sapiens
acaaatagatgtaga

SEQ ID NO: 1778452 - DNA, 15 bp, Homo sapiens
caaatagatgtagaa

SEQ ID NO: 1778453 - DNA, 15 bp, Homo sapiens
aaatagatgtagaat

SEQ ID NO: 1778454 - DNA, 15 bp, Homo sapiens
aatagatgtagaatt

SEQ ID NO: 1778455 - DNA, 15 bp, Homo sapiens
atagatgtagaattt

SEQ ID NO: 1778456 - DNA, 15 bp, Homo sapiens
tagatgtagaattta

SEQ ID NO: 1778457 - DNA, 15 bp, Homo sapiens
agatgtagaatttaa

SEQ ID NO: 1778458 - DNA, 15 bp, Homo sapiens
gatgtagaatttaaa

SEQ ID NO: 1778459 - DNA, 15 bp, Homo sapiens
atgtagaatttaaac

SEQ ID NO: 1778460 - DNA, 15 bp, Homo sapiens
tgtagaatttaaact

SEQ ID NO: 1778461 - DNA, 15 bp, Homo sapiens
gtagaatttaaacta

SEQ ID NO: 1778462 - DNA, 15 bp, Homo sapiens
tagaatttaaactaa

SEQ ID NO: 1778463 - DNA, 15 bp, Homo sapiens
agaatttaaactaat

SEQ ID NO: 1778464 - DNA, 15 bp, Homo sapiens
gaatttaaactaatt

SEQ ID NO: 1778465 - DNA, 15 bp, Homo sapiens
aatttaaactaatta

SEQ ID NO: 1778466 - DNA, 15 bp, Homo sapiens
atttaaactaattat

SEQ ID NO: 1778467 - DNA, 15 bp, Homo sapiens
ttaaactaattatat

SEQ ID NO: 1778468 - DNA, 15 bp, Homo sapiens
taaactaattatatt

SEQ ID NO: 1778469 - DNA, 15 bp, Homo sapiens
aaactaattatatta

SEQ ID NO: 1778470 - DNA, 15 bp, Homo sapiens
aactaattatattaa

SEQ ID NO: 1778471 - DNA, 15 bp, Homo sapiens
actaattatattaat

SEQ ID NO: 1778472 - DNA, 15 bp, Homo sapiens
ctaattatattaata

SEQ ID NO: 1778473 - DNA, 15 bp, Homo sapiens
taattatattaataa

SEQ ID NO: 1778474 - DNA, 15 bp, Homo sapiens
aattatattaataat

SEQ ID NO: 1778475 - DNA, 15 bp, Homo sapiens
attatattaataatt

SEQ ID NO: 1778476 - DNA, 15 bp, Homo sapiens
ttatattaataattg

SEQ ID NO: 1778477 - DNA, 15 bp, Homo sapiens
tatattaataattgc

SEQ ID NO: 1778478 - DNA, 15 bp, Homo sapiens
atattaataattgca

SEQ ID NO: 1778479 - DNA, 15 bp, Homo sapiens
tattaataattgcat

SEQ ID NO: 1778480 - DNA, 15 bp, Homo sapiens
attaataattgcatt

SEQ ID NO: 1778481 - DNA, 15 bp, Homo sapiens
ttaataattgcatta

SEQ ID NO: 1778482 - DNA, 15 bp, Homo sapiens
taataattgcattaa

SEQ ID NO: 1778483 - DNA, 15 bp, Homo sapiens
aataattgcattaaa

SEQ ID NO: 1778484 - DNA, 15 bp, Homo sapiens
ataattgcattaaat

SEQ ID NO: 1778485 - DNA, 15 bp, Homo sapiens
taattgcattaaatg

SEQ ID NO: 1778486 - DNA, 15 bp, Homo sapiens
aattgcattaaatgt

SEQ ID NO: 1778487 - DNA, 15 bp, Homo sapiens
attgcattaaatgtc

SEQ ID NO: 1778488 - DNA, 15 bp, Homo sapiens
ttgcattaaatgtca

SEQ ID NO: 1778489 - DNA, 15 bp, Homo sapiens
tgcattaaatgtcag

SEQ ID NO: 1778490 - DNA, 15 bp, Homo sapiens
gcattaaatgtcagt

SEQ ID NO: 1778491 - DNA, 15 bp, Homo sapiens
attaaatgtcagtgc

SEQ ID NO: 1778492 - DNA, 15 bp, Homo sapiens
ttaaatgtcagtgct

SEQ ID NO: 1778493 - DNA, 15 bp, Homo sapiens
taaatgtcagtgctc

SEQ ID NO: 1778494 - DNA, 15 bp, Homo sapiens
aaatgtcagtgctct

SEQ ID NO: 1778495 - DNA, 15 bp, Homo sapiens
aatgtcagtgctcta

SEQ ID NO: 1778496 - DNA, 15 bp, Homo sapiens
atgtcagtgctctaa

SEQ ID NO: 1778497 - DNA, 15 bp, Homo sapiens
tgtcagtgctctaag

SEQ ID NO: 1778498 - DNA, 15 bp, Homo sapiens
gtcagtgctctaagc

SEQ ID NO: 1778499 - DNA, 15 bp, Homo sapiens
tcagtgctctaagca

SEQ ID NO: 1778500 - DNA, 15 bp, Homo sapiens
cagtgctctaagcag

SEQ ID NO: 1778501 - DNA, 15 bp, Homo sapiens
agtgctctaagcagc

SEQ ID NO: 1778502 - DNA, 15 bp, Homo sapiens
gtgctctaagcagcc

SEQ ID NO: 1778503 - DNA, 15 bp, Homo sapiens
tgctctaagcagccc

SEQ ID NO: 1778504 - DNA, 15 bp, Homo sapiens
gctctaagcagccca

SEQ ID NO: 1778505 - DNA, 15 bp, Homo sapiens
ctctaagcagcccaa

SEQ ID NO: 1778506 - DNA, 15 bp, Homo sapiens
tctaagcagcccaat

SEQ ID NO: 1778507 - DNA, 15 bp, Homo sapiens
ctaagcagcccaatt

SEQ ID NO: 1778508 - DNA, 15 bp, Homo sapiens
taagcagcccaatta

SEQ ID NO: 1778509 - DNA, 15 bp, Homo sapiens
aagcagcccaattaa

SEQ ID NO: 1778510 - DNA, 15 bp, Homo sapiens
agcagcccaattaaa

SEQ ID NO: 1778511 - DNA, 15 bp, Homo sapiens
gcagcccaattaaaa

SEQ ID NO: 1778512 - DNA, 15 bp, Homo sapiens
cagcccaattaaaag

SEQ ID NO: 1778513 - DNA, 15 bp, Homo sapiens
agcccaattaaaagg

SEQ ID NO: 1778514 - DNA, 15 bp, Homo sapiens
gcccaattaaaaggc

SEQ ID NO: 1778515 - DNA, 15 bp, Homo sapiens
aattaaaaggcagag

SEQ ID NO: 1778516 - DNA, 15 bp, Homo sapiens
attaaaaggcagaga

SEQ ID NO: 1778517 - DNA, 15 bp, Homo sapiens
ttaaaaggcagagat

SEQ ID NO: 1778518 - DNA, 15 bp, Homo sapiens
taaaaggcagagatt

SEQ ID NO: 1778519 - DNA, 15 bp, Homo sapiens
aaaaggcagagatta

SEQ ID NO: 1778520 - DNA, 15 bp, Homo sapiens
aaaggcagagattat

SEQ ID NO: 1778521 - DNA, 15 bp, Homo sapiens
aaggcagagattatc

SEQ ID NO: 1778522 - DNA, 15 bp, Homo sapiens
aggcagagattatca

SEQ ID NO: 1778523 - DNA, 15 bp, Homo sapiens
ggcagagattatcag

SEQ ID NO: 1778524 - DNA, 15 bp, Homo sapiens
gcagagattatcaga

SEQ ID NO: 1778525 - DNA, 15 bp, Homo sapiens
cagagattatcagag

SEQ ID NO: 1778526 - DNA, 15 bp, Homo sapiens
agagattatcagagt

SEQ ID NO: 1778527 - DNA, 15 bp, Homo sapiens
gagattatcagagtg

SEQ ID NO: 1778528 - DNA, 15 bp, Homo sapiens
agattatcagagtgg

SEQ ID NO: 1778529 - DNA, 15 bp, Homo sapiens
gattatcagagtgga

SEQ ID NO: 1778530 - DNA, 15 bp, Homo sapiens
attatcagagtggat

SEQ ID NO: 1778531 - DNA, 15 bp, Homo sapiens
ttatcagagtggatg

SEQ ID NO: 1778532 - DNA, 15 bp, Homo sapiens
tatcagagtggatga

SEQ ID NO: 1778533 - DNA, 15 bp, Homo sapiens
atcagagtggatgaa

SEQ ID NO: 1778534 - DNA, 15 bp, Homo sapiens
tcagagtggatgaaa

SEQ ID NO: 1778535 - DNA, 15 bp, Homo sapiens
cagagtggatgaaaa

SEQ ID NO: 1778536 - DNA, 15 bp, Homo sapiens
agagtggatgaaaaa

SEQ ID NO: 1778537 - DNA, 15 bp, Homo sapiens
gagtggatgaaaaac

SEQ ID NO: 1778538 - DNA, 15 bp, Homo sapiens
agtggatgaaaaaca

SEQ ID NO: 1778539 - DNA, 15 bp, Homo sapiens
gtggatgaaaaacaa

SEQ ID NO: 1778540 - DNA, 15 bp, Homo sapiens
tggatgaaaaacaaa

SEQ ID NO: 1778541 - DNA, 15 bp, Homo sapiens
ggatgaaaaacaaaa

SEQ ID NO: 1778542 - DNA, 15 bp, Homo sapiens
gatgaaaaacaaaac

SEQ ID NO: 1778543 - DNA, 15 bp, Homo sapiens
atgaaaaacaaaacc

SEQ ID NO: 1778544 - DNA, 15 bp, Homo sapiens
tgaaaaacaaaaccc

SEQ ID NO: 1778545 - DNA, 15 bp, Homo sapiens
gaaaaacaaaaccca

SEQ ID NO: 1778546 - DNA, 15 bp, Homo sapiens
aaaaacaaaacccaa

SEQ ID NO: 1778547 - DNA, 15 bp, Homo sapiens
aaaacaaaacccaac

SEQ ID NO: 1778548 - DNA, 15 bp, Homo sapiens
aaacaaaacccaact

SEQ ID NO: 1778549 - DNA, 15 bp, Homo sapiens
aacaaaacccaactc

SEQ ID NO: 1778550 - DNA, 15 bp, Homo sapiens
acaaaacccaactct

SEQ ID NO: 1778551 - DNA, 15 bp, Homo sapiens
caaaacccaactcta

SEQ ID NO: 1778552 - DNA, 15 bp, Homo sapiens
aaaacccaactctat

SEQ ID NO: 1778553 - DNA, 15 bp, Homo sapiens
aaacccaactctatg

SEQ ID NO: 1778554 - DNA, 15 bp, Homo sapiens
aacccaactctatgc

SEQ ID NO: 1778555 - DNA, 15 bp, Homo sapiens
acccaactctatgct

SEQ ID NO: 1778556 - DNA, 15 bp, Homo sapiens
cccaactctatgcta

SEQ ID NO: 1778557 - DNA, 15 bp, Homo sapiens
ccaactctatgctat

SEQ ID NO: 1778558 - DNA, 15 bp, Homo sapiens
caactctatgctatc

SEQ ID NO: 1778559 - DNA, 15 bp, Homo sapiens
aactctatgctatct

SEQ ID NO: 1778560 - DNA, 15 bp, Homo sapiens
actctatgctatcta

SEQ ID NO: 1778561 - DNA, 15 bp, Homo sapiens
ctctatgctatctaa

SEQ ID NO: 1778562 - DNA, 15 bp, Homo sapiens
tctatgctatctaaa

SEQ ID NO: 1778563 - DNA, 15 bp, Homo sapiens
ctatgctatctaaaa

SEQ ID NO: 1778564 - DNA, 15 bp, Homo sapiens
tatgctatctaaaag

SEQ ID NO: 1778565 - DNA, 15 bp, Homo sapiens
atgctatctaaaaga

SEQ ID NO: 1778566 - DNA, 15 bp, Homo sapiens
tgctatctaaaagaa

SEQ ID NO: 1778567 - DNA, 15 bp, Homo sapiens
gctatctaaaagaaa

SEQ ID NO: 1778568 - DNA, 15 bp, Homo sapiens
ctatctaaaagaaat

SEQ ID NO: 1778569 - DNA, 15 bp, Homo sapiens
tatctaaaagaaatc

SEQ ID NO: 1778570 - DNA, 15 bp, Homo sapiens
atctaaaagaaatct

SEQ ID NO: 1778571 - DNA, 15 bp, Homo sapiens
tctaaaagaaatcta

SEQ ID NO: 1778572 - DNA, 15 bp, Homo sapiens
ctaaaagaaatctat

SEQ ID NO: 1778573 - DNA, 15 bp, Homo sapiens
taaaagaaatctatt

SEQ ID NO: 1778574 - DNA, 15 bp, Homo sapiens
aaaagaaatctattg

SEQ ID NO: 1778575 - DNA, 15 bp, Homo sapiens
aaagaaatctattgt

SEQ ID NO: 1778576 - DNA, 15 bp, Homo sapiens
aagaaatctattgta

SEQ ID NO: 1778577 - DNA, 15 bp, Homo sapiens
agaaatctattgtaa

SEQ ID NO: 1778578 - DNA, 15 bp, Homo sapiens
gaaatctattgtaaa

SEQ ID NO: 1778579 - DNA, 15 bp, Homo sapiens
aaatctattgtaaat

SEQ ID NO: 1778580 - DNA, 15 bp, Homo sapiens
aatctattgtaaata

SEQ ID NO: 1778581 - DNA, 15 bp, Homo sapiens
atctattgtaaatat

SEQ ID NO: 1778582 - DNA, 15 bp, Homo sapiens
tctattgtaaatata

SEQ ID NO: 1778583 - DNA, 15 bp, Homo sapiens
ctattgtaaatataa

SEQ ID NO: 1778584 - DNA, 15 bp, Homo sapiens
tattgtaaatataaa

SEQ ID NO: 1778585 - DNA, 15 bp, Homo sapiens
attgtaaatataaag

SEQ ID NO: 1778586 - DNA, 15 bp, Homo sapiens
ttgtaaatataaaga

SEQ ID NO: 1778587 - DNA, 15 bp, Homo sapiens
tgtaaatataaagac

SEQ ID NO: 1778588 - DNA, 15 bp, Homo sapiens
gtaaatataaagaca

SEQ ID NO: 1778589 - DNA, 15 bp, Homo sapiens
taaatataaagacac

SEQ ID NO: 1778590 - DNA, 15 bp, Homo sapiens
aaatataaagacacg

SEQ ID NO: 1778591 - DNA, 15 bp, Homo sapiens
aatataaagacacga

SEQ ID NO: 1778592 - DNA, 15 bp, Homo sapiens
atataaagacacgaa

SEQ ID NO: 1778593 - DNA, 15 bp, Homo sapiens
tataaagacacgaat

SEQ ID NO: 1778594 - DNA, 15 bp, Homo sapiens
ataaagacacgaata

SEQ ID NO: 1778595 - DNA, 15 bp, Homo sapiens
taaagacacgaatat

SEQ ID NO: 1778596 - DNA, 15 bp, Homo sapiens
aaagacacgaatatg

SEQ ID NO: 1778597 - DNA, 15 bp, Homo sapiens
aagacacgaatatgt

SEQ ID NO: 1778598 - DNA, 15 bp, Homo sapiens
agacacgaatatgtt

SEQ ID NO: 1778599 - DNA, 15 bp, Homo sapiens
gacacgaatatgtta

SEQ ID NO: 1778600 - DNA, 15 bp, Homo sapiens
acacgaatatgttaa

SEQ ID NO: 1778601 - DNA, 15 bp, Homo sapiens
cacgaatatgttaaa

SEQ ID NO: 1778602 - DNA, 15 bp, Homo sapiens
acgaatatgttaaaa

SEQ ID NO: 1778603 - DNA, 15 bp, Homo sapiens
cgaatatgttaaaag

SEQ ID NO: 1778604 - DNA, 15 bp, Homo sapiens
gaatatgttaaaagg

SEQ ID NO: 1778605 - DNA, 15 bp, Homo sapiens
aatatgttaaaagga

SEQ ID NO: 1778606 - DNA, 15 bp, Homo sapiens
atatgttaaaaggat

SEQ ID NO: 1778607 - DNA, 15 bp, Homo sapiens
tatgttaaaaggatg

SEQ ID NO: 1778608 - DNA, 15 bp, Homo sapiens
atgttaaaaggatga

SEQ ID NO: 1778609 - DNA, 15 bp, Homo sapiens
tgttaaaaggatgaa

SEQ ID NO: 1778610 - DNA, 15 bp, Homo sapiens
gttaaaaggatgaat

SEQ ID NO: 1778611 - DNA, 15 bp, Homo sapiens
ttaaaaggatgaatg

SEQ ID NO: 1778612 - DNA, 15 bp, Homo sapiens
taaaaggatgaatga

SEQ ID NO: 1778613 - DNA, 15 bp, Homo sapiens
aaaaggatgaatgaa

SEQ ID NO: 1778614 - DNA, 15 bp, Homo sapiens
aaaggatgaatgaaa

SEQ ID NO: 1778615 - DNA, 15 bp, Homo sapiens
aaggatgaatgaaaa

SEQ ID NO: 1778616 - DNA, 15 bp, Homo sapiens
aggatgaatgaaaag

SEQ ID NO: 1778617 - DNA, 15 bp, Homo sapiens
ggatgaatgaaaaga

SEQ ID NO: 1778618 - DNA, 15 bp, Homo sapiens
gatgaatgaaaagat

SEQ ID NO: 1778619 - DNA, 15 bp, Homo sapiens
atgaatgaaaagatt

SEQ ID NO: 1778620 - DNA, 15 bp, Homo sapiens
tgaatgaaaagatta

SEQ ID NO: 1778621 - DNA, 15 bp, Homo sapiens
gaatgaaaagattag

SEQ ID NO: 1778622 - DNA, 15 bp, Homo sapiens
aatgaaaagattagg

SEQ ID NO: 1778623 - DNA, 15 bp, Homo sapiens
atgaaaagattaggt

SEQ ID NO: 1778624 - DNA, 15 bp, Homo sapiens
tgaaaagattaggtc

SEQ ID NO: 1778625 - DNA, 15 bp, Homo sapiens
gaaaagattaggtcc

SEQ ID NO: 1778626 - DNA, 15 bp, Homo sapiens
aaaagattaggtcct

SEQ ID NO: 1778627 - DNA, 15 bp, Homo sapiens
aaagattaggtcctg

SEQ ID NO: 1778628 - DNA, 15 bp, Homo sapiens
aagattaggtcctgg

SEQ ID NO: 1778629 - DNA, 15 bp, Homo sapiens
agattaggtcctgga

SEQ ID NO: 1778630 - DNA, 15 bp, Homo sapiens
gattaggtcctggat

SEQ ID NO: 1778631 - DNA, 15 bp, Homo sapiens
attaggtcctggatg

SEQ ID NO: 1778632 - DNA, 15 bp, Homo sapiens
ttaggtcctggatgg

SEQ ID NO: 1778633 - DNA, 15 bp, Homo sapiens
taggtcctggatgga

SEQ ID NO: 1778634 - DNA, 15 bp, Homo sapiens
aggtcctggatggaa

SEQ ID NO: 1778635 - DNA, 15 bp, Homo sapiens
ggtcctggatggaac

SEQ ID NO: 1778636 - DNA, 15 bp, Homo sapiens
gtcctggatggaact

SEQ ID NO: 1778637 - DNA, 15 bp, Homo sapiens
tcctggatggaactg

SEQ ID NO: 1778638 - DNA, 15 bp, Homo sapiens
cctggatggaactga

SEQ ID NO: 1778639 - DNA, 15 bp, Homo sapiens
ctggatggaactgag

SEQ ID NO: 1778640 - DNA, 15 bp, Homo sapiens
tggatggaactgagg

SEQ ID NO: 1778641 - DNA, 15 bp, Homo sapiens
ggatggaactgaggt

SEQ ID NO: 1778642 - DNA, 15 bp, Homo sapiens
gatggaactgaggtt

SEQ ID NO: 1778643 - DNA, 15 bp, Homo sapiens
atggaactgaggtta

SEQ ID NO: 1778644 - DNA, 15 bp, Homo sapiens
tggaactgaggttaa

SEQ ID NO: 1778645 - DNA, 15 bp, Homo sapiens
ggaactgaggttaac

SEQ ID NO: 1778646 - DNA, 15 bp, Homo sapiens
gaactgaggttaact

SEQ ID NO: 1778647 - DNA, 15 bp, Homo sapiens
aactgaggttaactg

SEQ ID NO: 1778648 - DNA, 15 bp, Homo sapiens
actgaggttaactga

SEQ ID NO: 1778649 - DNA, 15 bp, Homo sapiens
ctgaggttaactgag

SEQ ID NO: 1778650 - DNA, 15 bp, Homo sapiens
tgaggttaactgagg

SEQ ID NO: 1778651 - DNA, 15 bp, Homo sapiens
gaggttaactgagga

SEQ ID NO: 1778652 - DNA, 15 bp, Homo sapiens
aggttaactgaggat

SEQ ID NO: 1778653 - DNA, 15 bp, Homo sapiens
ggttaactgaggata

SEQ ID NO: 1778654 - DNA, 15 bp, Homo sapiens
gttaactgaggataa

SEQ ID NO: 1778655 - DNA, 15 bp, Homo sapiens
ttaactgaggataat

SEQ ID NO: 1778656 - DNA, 15 bp, Homo sapiens
taactgaggataatt

SEQ ID NO: 1778657 - DNA, 15 bp, Homo sapiens
aactgaggataattt

SEQ ID NO: 1778658 - DNA, 15 bp, Homo sapiens
actgaggataatttt

SEQ ID NO: 1778659 - DNA, 15 bp, Homo sapiens
ctgaggataatttta

SEQ ID NO: 1778660 - DNA, 15 bp, Homo sapiens
tgaggataattttaa

SEQ ID NO: 1778661 - DNA, 15 bp, Homo sapiens
gaggataattttaag

SEQ ID NO: 1778662 - DNA, 15 bp, Homo sapiens
aggataattttaaga

SEQ ID NO: 1778663 - DNA, 15 bp, Homo sapiens
ggataattttaagat

SEQ ID NO: 1778664 - DNA, 15 bp, Homo sapiens
gataattttaagatt

SEQ ID NO: 1778665 - DNA, 15 bp, Homo sapiens
ataattttaagattt

SEQ ID NO: 1778666 - DNA, 15 bp, Homo sapiens
taattttaagatttg

SEQ ID NO: 1778667 - DNA, 15 bp, Homo sapiens
aattttaagatttgt

SEQ ID NO: 1778668 - DNA, 15 bp, Homo sapiens
attttaagatttgta

SEQ ID NO: 1778669 - DNA, 15 bp, Homo sapiens
ttttaagatttgtac

SEQ ID NO: 1778670 - DNA, 15 bp, Homo sapiens
tttaagatttgtact

SEQ ID NO: 1778671 - DNA, 15 bp, Homo sapiens
ttaagatttgtacta

SEQ ID NO: 1778672 - DNA, 15 bp, Homo sapiens
taagatttgtactat

SEQ ID NO: 1778673 - DNA, 15 bp, Homo sapiens
aagatttgtactatg

SEQ ID NO: 1778674 - DNA, 15 bp, Homo sapiens
agatttgtactatgg

SEQ ID NO: 1778675 - DNA, 15 bp, Homo sapiens
gatttgtactatggg

SEQ ID NO: 1778676 - DNA, 15 bp, Homo sapiens
atttgtactatgggt

SEQ ID NO: 1778677 - DNA, 15 bp, Homo sapiens
tttgtactatgggtg

SEQ ID NO: 1778678 - DNA, 15 bp, Homo sapiens
ttgtactatgggtga

SEQ ID NO: 1778679 - DNA, 15 bp, Homo sapiens
tgtactatgggtgat

SEQ ID NO: 1778680 - DNA, 15 bp, Homo sapiens
gtactatgggtgatt

SEQ ID NO: 1778681 - DNA, 15 bp, Homo sapiens
tactatgggtgatta

SEQ ID NO: 1778682 - DNA, 15 bp, Homo sapiens
actatgggtgattag

SEQ ID NO: 1778683 - DNA, 15 bp, Homo sapiens
ctatgggtgattagg

SEQ ID NO: 1778684 - DNA, 15 bp, Homo sapiens
tatgggtgattaggt

SEQ ID NO: 1778685 - DNA, 15 bp, Homo sapiens
atgggtgattaggtg

SEQ ID NO: 1778686 - DNA, 15 bp, Homo sapiens
tgggtgattaggtgg

SEQ ID NO: 1778687 - DNA, 15 bp, Homo sapiens
gggtgattaggtggt

SEQ ID NO: 1778688 - DNA, 15 bp, Homo sapiens
ggtgattaggtggtt

SEQ ID NO: 1778689 - DNA, 15 bp, Homo sapiens
gtgattaggtggttg

SEQ ID NO: 1778690 - DNA, 15 bp, Homo sapiens
tgattaggtggttga

SEQ ID NO: 1778691 - DNA, 15 bp, Homo sapiens
gattaggtggttgat

SEQ ID NO: 1778692 - DNA, 15 bp, Homo sapiens
attaggtggttgata

SEQ ID NO: 1778693 - DNA, 15 bp, Homo sapiens
ttaggtggttgataa

SEQ ID NO: 1778694 - DNA, 15 bp, Homo sapiens
taggtggttgataac

SEQ ID NO: 1778695 - DNA, 15 bp, Homo sapiens
aggtggttgataaca

SEQ ID NO: 1778696 - DNA, 15 bp, Homo sapiens
ggtggttgataacac

SEQ ID NO: 1778697 - DNA, 15 bp, Homo sapiens
gtggttgataacaca

SEQ ID NO: 1778698 - DNA, 15 bp, Homo sapiens
tggttgataacacaa

SEQ ID NO: 1778699 - DNA, 15 bp, Homo sapiens
ggttgataacacaat

SEQ ID NO: 1778700 - DNA, 15 bp, Homo sapiens
gttgataacacaatt

SEQ ID NO: 1778701 - DNA, 15 bp, Homo sapiens
ttgataacacaatta

SEQ ID NO: 1778702 - DNA, 15 bp, Homo sapiens
tgataacacaattaa

SEQ ID NO: 1778703 - DNA, 15 bp, Homo sapiens
gataacacaattaac

SEQ ID NO: 1778704 - DNA, 15 bp, Homo sapiens
ataacacaattaacc

SEQ ID NO: 1778705 - DNA, 15 bp, Homo sapiens
taacacaattaacca

SEQ ID NO: 1778706 - DNA, 15 bp, Homo sapiens
aacacaattaaccaa

SEQ ID NO: 1778707 - DNA, 15 bp, Homo sapiens
acacaattaaccaaa

SEQ ID NO: 1778708 - DNA, 15 bp, Homo sapiens
cacaattaaccaaag

SEQ ID NO: 1778709 - DNA, 15 bp, Homo sapiens
acaattaaccaaagt

SEQ ID NO: 1778710 - DNA, 15 bp, Homo sapiens
caattaaccaaagta

SEQ ID NO: 1778711 - DNA, 15 bp, Homo sapiens
aattaaccaaagtag

SEQ ID NO: 1778712 - DNA, 15 bp, Homo sapiens
attaaccaaagtagg

SEQ ID NO: 1778713 - DNA, 15 bp, Homo sapiens
ttaaccaaagtaggt

SEQ ID NO: 1778714 - DNA, 15 bp, Homo sapiens
taaccaaagtaggta

SEQ ID NO: 1778715 - DNA, 15 bp, Homo sapiens
aaccaaagtaggtat

SEQ ID NO: 1778716 - DNA, 15 bp, Homo sapiens
accaaagtaggtatt

SEQ ID NO: 1778717 - DNA, 15 bp, Homo sapiens
ccaaagtaggtattg

SEQ ID NO: 1778718 - DNA, 15 bp, Homo sapiens
caaagtaggtattga

SEQ ID NO: 1778719 - DNA, 15 bp, Homo sapiens
aaagtaggtattgaa

SEQ ID NO: 1778720 - DNA, 15 bp, Homo sapiens
aagtaggtattgaaa

SEQ ID NO: 1778721 - DNA, 15 bp, Homo sapiens
agtaggtattgaaag

SEQ ID NO: 1778722 - DNA, 15 bp, Homo sapiens
gtaggtattgaaaga

SEQ ID NO: 1778723 - DNA, 15 bp, Homo sapiens
taggtattgaaagac

SEQ ID NO: 1778724 - DNA, 15 bp, Homo sapiens
aggtattgaaagacc

SEQ ID NO: 1778725 - DNA, 15 bp, Homo sapiens
ggtattgaaagacca

SEQ ID NO: 1778726 - DNA, 15 bp, Homo sapiens
gtattgaaagaccat

SEQ ID NO: 1778727 - DNA, 15 bp, Homo sapiens
tattgaaagaccatc

SEQ ID NO: 1778728 - DNA, 15 bp, Homo sapiens
attgaaagaccatct

SEQ ID NO: 1778729 - DNA, 15 bp, Homo sapiens
ttgaaagaccatctc

SEQ ID NO: 1778730 - DNA, 15 bp, Homo sapiens
tgaaagaccatctca

SEQ ID NO: 1778731 - DNA, 15 bp, Homo sapiens
gaaagaccatctcat

SEQ ID NO: 1778732 - DNA, 15 bp, Homo sapiens
aaagaccatctcata

SEQ ID NO: 1778733 - DNA, 15 bp, Homo sapiens
aagaccatctcatag

SEQ ID NO: 1778734 - DNA, 15 bp, Homo sapiens
agaccatctcatagc

SEQ ID NO: 1778735 - DNA, 15 bp, Homo sapiens
gaccatctcatagct

SEQ ID NO: 1778736 - DNA, 15 bp, Homo sapiens
accatctcatagctg

SEQ ID NO: 1778737 - DNA, 15 bp, Homo sapiens
ccatctcatagctgg

SEQ ID NO: 1778738 - DNA, 15 bp, Homo sapiens
catctcatagctggt

SEQ ID NO: 1778739 - DNA, 15 bp, Homo sapiens
atctcatagctggtt

SEQ ID NO: 1778740 - DNA, 15 bp, Homo sapiens
tctcatagctggttg

SEQ ID NO: 1778741 - DNA, 15 bp, Homo sapiens
ctcatagctggttgg

SEQ ID NO: 1778742 - DNA, 15 bp, Homo sapiens
tcatagctggttggt

SEQ ID NO: 1778743 - DNA, 15 bp, Homo sapiens
catagctggttggtg

SEQ ID NO: 1778744 - DNA, 15 bp, Homo sapiens
atagctggttggtga

SEQ ID NO: 1778745 - DNA, 15 bp, Homo sapiens
tagctggttggtgat

SEQ ID NO: 1778746 - DNA, 15 bp, Homo sapiens
agctggttggtgatg

SEQ ID NO: 1778747 - DNA, 15 bp, Homo sapiens
gctggttggtgatga

SEQ ID NO: 1778748 - DNA, 15 bp, Homo sapiens
ctggttggtgatgaa

SEQ ID NO: 1778749 - DNA, 15 bp, Homo sapiens
tggttggtgatgaag

SEQ ID NO: 1778750 - DNA, 15 bp, Homo sapiens
ggttggtgatgaagg

SEQ ID NO: 1778751 - DNA, 15 bp, Homo sapiens
gttggtgatgaagga

SEQ ID NO: 1778752 - DNA, 15 bp, Homo sapiens
ttggtgatgaaggaa

SEQ ID NO: 1778753 - DNA, 15 bp, Homo sapiens
tggtgatgaaggaaa

SEQ ID NO: 1778754 - DNA, 15 bp, Homo sapiens
ggtgatgaaggaaat

SEQ ID NO: 1778755 - DNA, 15 bp, Homo sapiens
gtgatgaaggaaatg

SEQ ID NO: 1778756 - DNA, 15 bp, Homo sapiens
tgatgaaggaaatga

SEQ ID NO: 1778757 - DNA, 15 bp, Homo sapiens
gatgaaggaaatgag

SEQ ID NO: 1778758 - DNA, 15 bp, Homo sapiens
atgaaggaaatgagt

SEQ ID NO: 1778759 - DNA, 15 bp, Homo sapiens
tgaaggaaatgagtt

SEQ ID NO: 1778760 - DNA, 15 bp, Homo sapiens
gaaggaaatgagttc

SEQ ID NO: 1778761 - DNA, 15 bp, Homo sapiens
aaggaaatgagttca

SEQ ID NO: 1778762 - DNA, 15 bp, Homo sapiens
aggaaatgagttcat

SEQ ID NO: 1778763 - DNA, 15 bp, Homo sapiens
ggaaatgagttcatg

SEQ ID NO: 1778764 - DNA, 15 bp, Homo sapiens
gaaatgagttcatgt

SEQ ID NO: 1778765 - DNA, 15 bp, Homo sapiens
aaatgagttcatgtt

SEQ ID NO: 1778766 - DNA, 15 bp, Homo sapiens
aatgagttcatgtta

SEQ ID NO: 1778767 - DNA, 15 bp, Homo sapiens
atgagttcatgttaa

SEQ ID NO: 1778768 - DNA, 15 bp, Homo sapiens
tgagttcatgttaat

SEQ ID NO: 1778769 - DNA, 15 bp, Homo sapiens
gagttcatgttaatg

SEQ ID NO: 1778770 - DNA, 15 bp, Homo sapiens
agttcatgttaatgt

SEQ ID NO: 1778771 - DNA, 15 bp, Homo sapiens
gttcatgttaatgtt

SEQ ID NO: 1778772 - DNA, 15 bp, Homo sapiens
ttcatgttaatgttt

SEQ ID NO: 1778773 - DNA, 15 bp, Homo sapiens
tcatgttaatgtttg

SEQ ID NO: 1778774 - DNA, 15 bp, Homo sapiens
catgttaatgtttga

SEQ ID NO: 1778775 - DNA, 15 bp, Homo sapiens
atgttaatgtttgaa

SEQ ID NO: 1778776 - DNA, 15 bp, Homo sapiens
tgttaatgtttgaac

SEQ ID NO: 1778777 - DNA, 15 bp, Homo sapiens
gttaatgtttgaacc

SEQ ID NO: 1778778 - DNA, 15 bp, Homo sapiens
ttaatgtttgaacct

SEQ ID NO: 1778779 - DNA, 15 bp, Homo sapiens
taatgtttgaaccta

SEQ ID NO: 1778780 - DNA, 15 bp, Homo sapiens
aatgtttgaacctat

SEQ ID NO: 1778781 - DNA, 15 bp, Homo sapiens
atgtttgaacctatt

SEQ ID NO: 1778782 - DNA, 15 bp, Homo sapiens
tgtttgaacctatta

SEQ ID NO: 1778783 - DNA, 15 bp, Homo sapiens
gtttgaacctattat

SEQ ID NO: 1778784 - DNA, 15 bp, Homo sapiens
tttgaacctattata

SEQ ID NO: 1778785 - DNA, 15 bp, Homo sapiens
ttgaacctattatat

SEQ ID NO: 1778786 - DNA, 15 bp, Homo sapiens
tgaacctattatatt

SEQ ID NO: 1778787 - DNA, 15 bp, Homo sapiens
gaacctattatattt

SEQ ID NO: 1778788 - DNA, 15 bp, Homo sapiens
aacctattatatttg

SEQ ID NO: 1778789 - DNA, 15 bp, Homo sapiens
acctattatatttga

SEQ ID NO: 1778790 - DNA, 15 bp, Homo sapiens
cctattatatttgag

SEQ ID NO: 1778791 - DNA, 15 bp, Homo sapiens
ctattatatttgaga

SEQ ID NO: 1778792 - DNA, 15 bp, Homo sapiens
tattatatttgagat

SEQ ID NO: 1778793 - DNA, 15 bp, Homo sapiens
attatatttgagatg

SEQ ID NO: 1778794 - DNA, 15 bp, Homo sapiens
ttatatttgagatgt

SEQ ID NO: 1778795 - DNA, 15 bp, Homo sapiens
tatatttgagatgtt

SEQ ID NO: 1778796 - DNA, 15 bp, Homo sapiens
atatttgagatgttt

SEQ ID NO: 1778797 - DNA, 15 bp, Homo sapiens
tatttgagatgtttg

SEQ ID NO: 1778798 - DNA, 15 bp, Homo sapiens
atttgagatgtttgc

SEQ ID NO: 1778799 - DNA, 15 bp, Homo sapiens
tttgagatgtttgcc

SEQ ID NO: 1778800 - DNA, 15 bp, Homo sapiens
ttgagatgtttgcca

SEQ ID NO: 1778801 - DNA, 15 bp, Homo sapiens
tgagatgtttgccac

SEQ ID NO: 1778802 - DNA, 15 bp, Homo sapiens
gagatgtttgccaca

SEQ ID NO: 1778803 - DNA, 15 bp, Homo sapiens
agatgtttgccacat

SEQ ID NO: 1778804 - DNA, 15 bp, Homo sapiens
gatgtttgccacata

SEQ ID NO: 1778805 - DNA, 15 bp, Homo sapiens
atgtttgccacatat

SEQ ID NO: 1778806 - DNA, 15 bp, Homo sapiens
tgtttgccacatatt

SEQ ID NO: 1778807 - DNA, 15 bp, Homo sapiens
gtttgccacatattc

SEQ ID NO: 1778808 - DNA, 15 bp, Homo sapiens
tttgccacatattca

SEQ ID NO: 1778809 - DNA, 15 bp, Homo sapiens
ttgccacatattcat

SEQ ID NO: 1778810 - DNA, 15 bp, Homo sapiens
tgccacatattcatg

SEQ ID NO: 1778811 - DNA, 15 bp, Homo sapiens
gccacatattcatgt

SEQ ID NO: 1778812 - DNA, 15 bp, Homo sapiens
ccacatattcatgtg

SEQ ID NO: 1778813 - DNA, 15 bp, Homo sapiens
cacatattcatgtgg

SEQ ID NO: 1778814 - DNA, 15 bp, Homo sapiens
acatattcatgtgga

SEQ ID NO: 1778815 - DNA, 15 bp, Homo sapiens
catattcatgtggat

SEQ ID NO: 1778816 - DNA, 15 bp, Homo sapiens
atattcatgtggata

SEQ ID NO: 1778817 - DNA, 15 bp, Homo sapiens
tattcatgtggatat

SEQ ID NO: 1778818 - DNA, 15 bp, Homo sapiens
attcatgtggatatc

SEQ ID NO: 1778819 - DNA, 15 bp, Homo sapiens
ttcatgtggatatct

SEQ ID NO: 1778820 - DNA, 15 bp, Homo sapiens
tcatgtggatatctt

SEQ ID NO: 1778821 - DNA, 15 bp, Homo sapiens
catgtggatatcttt

SEQ ID NO: 1778822 - DNA, 15 bp, Homo sapiens
atgtggatatctttg

SEQ ID NO: 1778823 - DNA, 15 bp, Homo sapiens
tgtggatatctttgg

SEQ ID NO: 1778824 - DNA, 15 bp, Homo sapiens
gtggatatctttggt

SEQ ID NO: 1778825 - DNA, 15 bp, Homo sapiens
tggatatctttggtg

SEQ ID NO: 1778826 - DNA, 15 bp, Homo sapiens
ggatatctttggtgt

SEQ ID NO: 1778827 - DNA, 15 bp, Homo sapiens
gatatctttggtgtc

SEQ ID NO: 1778828 - DNA, 15 bp, Homo sapiens
atatctttggtgtcc

SEQ ID NO: 1778829 - DNA, 15 bp, Homo sapiens
tatctttggtgtcca

SEQ ID NO: 1778830 - DNA, 15 bp, Homo sapiens
atctttggtgtccag

SEQ ID NO: 1778831 - DNA, 15 bp, Homo sapiens
tctttggtgtccagt

SEQ ID NO: 1778832 - DNA, 15 bp, Homo sapiens
ctttggtgtccagtt

SEQ ID NO: 1778833 - DNA, 15 bp, Homo sapiens
tttggtgtccagttg

SEQ ID NO: 1778834 - DNA, 15 bp, Homo sapiens
ttggtgtccagttgg

SEQ ID NO: 1778835 - DNA, 15 bp, Homo sapiens
tggtgtccagttgga

SEQ ID NO: 1778836 - DNA, 15 bp, Homo sapiens
ggtgtccagttggaa

SEQ ID NO: 1778837 - DNA, 15 bp, Homo sapiens
gtgtccagttggaaa

SEQ ID NO: 1778838 - DNA, 15 bp, Homo sapiens
tgtccagttggaaat

SEQ ID NO: 1778839 - DNA, 15 bp, Homo sapiens
gtccagttggaaata

SEQ ID NO: 1778840 - DNA, 15 bp, Homo sapiens
tccagttggaaatat

SEQ ID NO: 1778841 - DNA, 15 bp, Homo sapiens
ccagttggaaatatg

SEQ ID NO: 1778842 - DNA, 15 bp, Homo sapiens
cagttggaaatatgg

SEQ ID NO: 1778843 - DNA, 15 bp, Homo sapiens
agttggaaatatgga

SEQ ID NO: 1778844 - DNA, 15 bp, Homo sapiens
gttggaaatatggat

SEQ ID NO: 1778845 - DNA, 15 bp, Homo sapiens
ttggaaatatggatc

SEQ ID NO: 1778846 - DNA, 15 bp, Homo sapiens
tggaaatatggatct

SEQ ID NO: 1778847 - DNA, 15 bp, Homo sapiens
ggaaatatggatcta

SEQ ID NO: 1778848 - DNA, 15 bp, Homo sapiens
gaaatatggatctag

SEQ ID NO: 1778849 - DNA, 15 bp, Homo sapiens
aaatatggatctaga

SEQ ID NO: 1778850 - DNA, 15 bp, Homo sapiens
aatatggatctagaa

SEQ ID NO: 1778851 - DNA, 15 bp, Homo sapiens
atatggatctagaac

SEQ ID NO: 1778852 - DNA, 15 bp, Homo sapiens
tatggatctagaact

SEQ ID NO: 1778853 - DNA, 15 bp, Homo sapiens
atggatctagaactt

SEQ ID NO: 1778854 - DNA, 15 bp, Homo sapiens
tggatctagaacttg

SEQ ID NO: 1778855 - DNA, 15 bp, Homo sapiens
ggatctagaacttga

SEQ ID NO: 1778856 - DNA, 15 bp, Homo sapiens
gatctagaacttgaa

SEQ ID NO: 1778857 - DNA, 15 bp, Homo sapiens
atctagaacttgaaa

SEQ ID NO: 1778858 - DNA, 15 bp, Homo sapiens
tctagaacttgaaag

SEQ ID NO: 1778859 - DNA, 15 bp, Homo sapiens
ctagaacttgaaagc

SEQ ID NO: 1778860 - DNA, 15 bp, Homo sapiens
tagaacttgaaagca

SEQ ID NO: 1778861 - DNA, 15 bp, Homo sapiens
agaacttgaaagcat

SEQ ID NO: 1778862 - DNA, 15 bp, Homo sapiens
gaacttgaaagcata

SEQ ID NO: 1778863 - DNA, 15 bp, Homo sapiens
aacttgaaagcatag

SEQ ID NO: 1778864 - DNA, 15 bp, Homo sapiens
acttgaaagcatagt

SEQ ID NO: 1778865 - DNA, 15 bp, Homo sapiens
cttgaaagcatagtt

SEQ ID NO: 1778866 - DNA, 15 bp, Homo sapiens
ttgaaagcatagttt

SEQ ID NO: 1778867 - DNA, 15 bp, Homo sapiens
tgaaagcatagtttt

SEQ ID NO: 1778868 - DNA, 15 bp, Homo sapiens
gaaagcatagtttta

SEQ ID NO: 1778869 - DNA, 15 bp, Homo sapiens
aaagcatagttttag

SEQ ID NO: 1778870 - DNA, 15 bp, Homo sapiens
aagcatagttttagt

SEQ ID NO: 1778871 - DNA, 15 bp, Homo sapiens
agcatagttttagtc

SEQ ID NO: 1778872 - DNA, 15 bp, Homo sapiens
gcatagttttagtca

SEQ ID NO: 1778873 - DNA, 15 bp, Homo sapiens
catagttttagtcag

SEQ ID NO: 1778874 - DNA, 15 bp, Homo sapiens
atagttttagtcaga

SEQ ID NO: 1778875 - DNA, 15 bp, Homo sapiens
tagttttagtcagaa

SEQ ID NO: 1778876 - DNA, 15 bp, Homo sapiens
agttttagtcagaaa

SEQ ID NO: 1778877 - DNA, 15 bp, Homo sapiens
gttttagtcagaaat

SEQ ID NO: 1778878 - DNA, 15 bp, Homo sapiens
ttttagtcagaaatg

SEQ ID NO: 1778879 - DNA, 15 bp, Homo sapiens
tttagtcagaaatgt

SEQ ID NO: 1778880 - DNA, 15 bp, Homo sapiens
ttagtcagaaatgta

SEQ ID NO: 1778881 - DNA, 15 bp, Homo sapiens
tagtcagaaatgtag

SEQ ID NO: 1778882 - DNA, 15 bp, Homo sapiens
agtcagaaatgtaga

SEQ ID NO: 1778883 - DNA, 15 bp, Homo sapiens
gtcagaaatgtagac

SEQ ID NO: 1778884 - DNA, 15 bp, Homo sapiens
tcagaaatgtagact

SEQ ID NO: 1778885 - DNA, 15 bp, Homo sapiens
cagaaatgtagactt

SEQ ID NO: 1778886 - DNA, 15 bp, Homo sapiens
agaaatgtagactta

SEQ ID NO: 1778887 - DNA, 15 bp, Homo sapiens
gaaatgtagacttag

SEQ ID NO: 1778888 - DNA, 15 bp, Homo sapiens
aaatgtagacttagg

SEQ ID NO: 1778889 - DNA, 15 bp, Homo sapiens
aatgtagacttagga

SEQ ID NO: 1778890 - DNA, 15 bp, Homo sapiens
atgtagacttaggaa

SEQ ID NO: 1778891 - DNA, 15 bp, Homo sapiens
tgtagacttaggaat

SEQ ID NO: 1778892 - DNA, 15 bp, Homo sapiens
gtagacttaggaata

SEQ ID NO: 1778893 - DNA, 15 bp, Homo sapiens
tagacttaggaataa

SEQ ID NO: 1778894 - DNA, 15 bp, Homo sapiens
agacttaggaataat

SEQ ID NO: 1778895 - DNA, 15 bp, Homo sapiens
gacttaggaataata

SEQ ID NO: 1778896 - DNA, 15 bp, Homo sapiens
acttaggaataatat

SEQ ID NO: 1778897 - DNA, 15 bp, Homo sapiens
cttaggaataatata

SEQ ID NO: 1778898 - DNA, 15 bp, Homo sapiens
ttaggaataatatag

SEQ ID NO: 1778899 - DNA, 15 bp, Homo sapiens
taggaataatataga

SEQ ID NO: 1778900 - DNA, 15 bp, Homo sapiens
aggaataatatagat

SEQ ID NO: 1778901 - DNA, 15 bp, Homo sapiens
ggaataatatagata

SEQ ID NO: 1778902 - DNA, 15 bp, Homo sapiens
gaataatatagatat

SEQ ID NO: 1778903 - DNA, 15 bp, Homo sapiens
aataatatagatata

SEQ ID NO: 1778904 - DNA, 15 bp, Homo sapiens
ataatatagatatag

SEQ ID NO: 1778905 - DNA, 15 bp, Homo sapiens
taatatagatatagt

SEQ ID NO: 1778906 - DNA, 15 bp, Homo sapiens
aatatagatatagtt

SEQ ID NO: 1778907 - DNA, 15 bp, Homo sapiens
atatagatatagtta

SEQ ID NO: 1778908 - DNA, 15 bp, Homo sapiens
tatagatatagttaa

SEQ ID NO: 1778909 - DNA, 15 bp, Homo sapiens
atagatatagttaaa

SEQ ID NO: 1778910 - DNA, 15 bp, Homo sapiens
tagatatagttaaaa

SEQ ID NO: 1778911 - DNA, 15 bp, Homo sapiens
agatatagttaaaat

SEQ ID NO: 1778912 - DNA, 15 bp, Homo sapiens
gatatagttaaaatc

SEQ ID NO: 1778913 - DNA, 15 bp, Homo sapiens
atatagttaaaatca

SEQ ID NO: 1778914 - DNA, 15 bp, Homo sapiens
tatagttaaaatcat

SEQ ID NO: 1778915 - DNA, 15 bp, Homo sapiens
atagttaaaatcatg

SEQ ID NO: 1778916 - DNA, 15 bp, Homo sapiens
tagttaaaatcatga

SEQ ID NO: 1778917 - DNA, 15 bp, Homo sapiens
agttaaaatcatgag

SEQ ID NO: 1778918 - DNA, 15 bp, Homo sapiens
gttaaaatcatgagg

SEQ ID NO: 1778919 - DNA, 15 bp, Homo sapiens
ttaaaatcatgaggc

SEQ ID NO: 1778920 - DNA, 15 bp, Homo sapiens
taaaatcatgaggcc

SEQ ID NO: 1778921 - DNA, 15 bp, Homo sapiens
aaaatcatgaggcca

SEQ ID NO: 1778922 - DNA, 15 bp, Homo sapiens
aaatcatgaggccaa

SEQ ID NO: 1778923 - DNA, 15 bp, Homo sapiens
aatcatgaggccaat

SEQ ID NO: 1778924 - DNA, 15 bp, Homo sapiens
atcatgaggccaatt

SEQ ID NO: 1778925 - DNA, 15 bp, Homo sapiens
tcatgaggccaattg

SEQ ID NO: 1778926 - DNA, 15 bp, Homo sapiens
catgaggccaattgc

SEQ ID NO: 1778927 - DNA, 15 bp, Homo sapiens
atgaggccaattgct

SEQ ID NO: 1778928 - DNA, 15 bp, Homo sapiens
tgaggccaattgctg

SEQ ID NO: 1778929 - DNA, 15 bp, Homo sapiens
gaggccaattgctgt

SEQ ID NO: 1778930 - DNA, 15 bp, Homo sapiens
aggccaattgctgtg

SEQ ID NO: 1778931 - DNA, 15 bp, Homo sapiens
ggccaattgctgtgg

SEQ ID NO: 1778932 - DNA, 15 bp, Homo sapiens
gccaattgctgtggc

SEQ ID NO: 1778933 - DNA, 15 bp, Homo sapiens
ccaattgctgtggct

SEQ ID NO: 1778934 - DNA, 15 bp, Homo sapiens
caattgctgtggctc

SEQ ID NO: 1778935 - DNA, 15 bp, Homo sapiens
aattgctgtggctca

SEQ ID NO: 1778936 - DNA, 15 bp, Homo sapiens
attgctgtggctcat

SEQ ID NO: 1778937 - DNA, 15 bp, Homo sapiens
ttgctgtggctcatg

SEQ ID NO: 1778938 - DNA, 15 bp, Homo sapiens
tgctgtggctcatgc

SEQ ID NO: 1778939 - DNA, 15 bp, Homo sapiens
gctgtggctcatgct

SEQ ID NO: 1778940 - DNA, 15 bp, Homo sapiens
ctgtggctcatgctt

SEQ ID NO: 1778941 - DNA, 15 bp, Homo sapiens
tgtggctcatgcttg

SEQ ID NO: 1778942 - DNA, 15 bp, Homo sapiens
tcatgcttgtaatct

SEQ ID NO: 1778943 - DNA, 15 bp, Homo sapiens
catgcttgtaatctc

SEQ ID NO: 1778944 - DNA, 15 bp, Homo sapiens
atgcttgtaatctca

SEQ ID NO: 1778945 - DNA, 15 bp, Homo sapiens
tgcttgtaatctcag

SEQ ID NO: 1778946 - DNA, 15 bp, Homo sapiens
gcttgtaatctcagc

SEQ ID NO: 1778947 - DNA, 15 bp, Homo sapiens
aggcggatcacctgc

SEQ ID NO: 1778948 - DNA, 15 bp, Homo sapiens
ggcggatcacctgcg

SEQ ID NO: 1778949 - DNA, 15 bp, Homo sapiens
gcggatcacctgcgg

SEQ ID NO: 1778950 - DNA, 15 bp, Homo sapiens
cggatcacctgcggt

SEQ ID NO: 1778951 - DNA, 15 bp, Homo sapiens
ggatcacctgcggtc

SEQ ID NO: 1778952 - DNA, 15 bp, Homo sapiens
gatcacctgcggtca

SEQ ID NO: 1778953 - DNA, 15 bp, Homo sapiens
atcacctgcggtcag

SEQ ID NO: 1778954 - DNA, 15 bp, Homo sapiens
tcacctgcggtcaga

SEQ ID NO: 1778955 - DNA, 15 bp, Homo sapiens
cacctgcggtcagaa

SEQ ID NO: 1778956 - DNA, 15 bp, Homo sapiens
acctgcggtcagaag

SEQ ID NO: 1778957 - DNA, 15 bp, Homo sapiens
cctgcggtcagaagt

SEQ ID NO: 1778958 - DNA, 15 bp, Homo sapiens
ctgcggtcagaagtt

SEQ ID NO: 1778959 - DNA, 15 bp, Homo sapiens
tgcggtcagaagttc

SEQ ID NO: 1778960 - DNA, 15 bp, Homo sapiens
gcggtcagaagttcg

SEQ ID NO: 1778961 - DNA, 15 bp, Homo sapiens
cggtcagaagttcga

SEQ ID NO: 1778962 - DNA, 15 bp, Homo sapiens
ggtcagaagttcgag

SEQ ID NO: 1778963 - DNA, 15 bp, Homo sapiens
gtcagaagttcgaga

SEQ ID NO: 1778964 - DNA, 15 bp, Homo sapiens
tcagaagttcgagac

SEQ ID NO: 1778965 - DNA, 15 bp, Homo sapiens
cagaagttcgagacc

SEQ ID NO: 1778966 - DNA, 15 bp, Homo sapiens
agaagttcgagacca

SEQ ID NO: 1778967 - DNA, 15 bp, Homo sapiens
aacatggtgaaacct

SEQ ID NO: 1778968 - DNA, 15 bp, Homo sapiens
acatggtgaaacctc

SEQ ID NO: 1778969 - DNA, 15 bp, Homo sapiens
catggtgaaacctca

SEQ ID NO: 1778970 - DNA, 15 bp, Homo sapiens
atggtgaaacctcat

SEQ ID NO: 1778971 - DNA, 15 bp, Homo sapiens
acaaaaattagctga

SEQ ID NO: 1778972 - DNA, 15 bp, Homo sapiens
caaaaattagctgag

SEQ ID NO: 1778973 - DNA, 15 bp, Homo sapiens
aaaaattagctgagt

SEQ ID NO: 1778974 - DNA, 15 bp, Homo sapiens
aaaattagctgagta

SEQ ID NO: 1778975 - DNA, 15 bp, Homo sapiens
aaattagctgagtat

SEQ ID NO: 1778976 - DNA, 15 bp, Homo sapiens
aattagctgagtatg

SEQ ID NO: 1778977 - DNA, 15 bp, Homo sapiens
attagctgagtatgg

SEQ ID NO: 1778978 - DNA, 15 bp, Homo sapiens
ttagctgagtatggt

SEQ ID NO: 1778979 - DNA, 15 bp, Homo sapiens
tagctgagtatggtg

SEQ ID NO: 1778980 - DNA, 15 bp, Homo sapiens
agctgagtatggtgg

SEQ ID NO: 1778981 - DNA, 15 bp, Homo sapiens
gctgagtatggtggc

SEQ ID NO: 1778982 - DNA, 15 bp, Homo sapiens
ctgagtatggtggca

SEQ ID NO: 1778983 - DNA, 15 bp, Homo sapiens
tgagtatggtggcac

SEQ ID NO: 1778984 - DNA, 15 bp, Homo sapiens
gagtatggtggcaca

SEQ ID NO: 1778985 - DNA, 15 bp, Homo sapiens
agtatggtggcacat

SEQ ID NO: 1778986 - DNA, 15 bp, Homo sapiens
cttgaacccgggaga

SEQ ID NO: 1778987 - DNA, 15 bp, Homo sapiens
ttgaacccgggagac

SEQ ID NO: 1778988 - DNA, 15 bp, Homo sapiens
cccgggagacggagg

SEQ ID NO: 1778989 - DNA, 15 bp, Homo sapiens
ccgggagacggaggt

SEQ ID NO: 1778990 - DNA, 15 bp, Homo sapiens
cgggagacggaggtt

SEQ ID NO: 1778991 - DNA, 15 bp, Homo sapiens
gagacggaggttgca

SEQ ID NO: 1778992 - DNA, 15 bp, Homo sapiens
agacggaggttgcag

SEQ ID NO: 1778993 - DNA, 15 bp, Homo sapiens
gacggaggttgcagt

SEQ ID NO: 1778994 - DNA, 15 bp, Homo sapiens
acggaggttgcagtg

SEQ ID NO: 1778995 - DNA, 15 bp, Homo sapiens
gagccaagattgcac

SEQ ID NO: 1778996 - DNA, 15 bp, Homo sapiens
agccaagattgcacc

SEQ ID NO: 1778997 - DNA, 15 bp, Homo sapiens
gccaagattgcacca

SEQ ID NO: 1778998 - DNA, 15 bp, Homo sapiens
ccaagattgcaccac

SEQ ID NO: 1778999 - DNA, 15 bp, Homo sapiens
caagattgcaccact

SEQ ID NO: 1779000 - DNA, 15 bp, Homo sapiens
aagattgcaccactg

SEQ ID NO: 1779001 - DNA, 15 bp, Homo sapiens
tgggtgacaagagca

SEQ ID NO: 1779002 - DNA, 15 bp, Homo sapiens
gggtgacaagagcaa

SEQ ID NO: 1779003 - DNA, 15 bp, Homo sapiens
ggtgacaagagcaag

SEQ ID NO: 1779004 - DNA, 15 bp, Homo sapiens
gtgacaagagcaaga

SEQ ID NO: 1779005 - DNA, 15 bp, Homo sapiens
tgacaagagcaagac

SEQ ID NO: 1779006 - DNA, 15 bp, Homo sapiens
gacaagagcaagact

SEQ ID NO: 1779007 - DNA, 15 bp, Homo sapiens
acaagagcaagactc

SEQ ID NO: 1779008 - DNA, 15 bp, Homo sapiens
caagagcaagactct

SEQ ID NO: 1779009 - DNA, 15 bp, Homo sapiens
aagagcaagactctc

SEQ ID NO: 1779010 - DNA, 15 bp, Homo sapiens
agagcaagactctct

SEQ ID NO: 1779011 - DNA, 15 bp, Homo sapiens
gagcaagactctctc

SEQ ID NO: 1779012 - DNA, 15 bp, Homo sapiens
agcaagactctctct

SEQ ID NO: 1779013 - DNA, 15 bp, Homo sapiens
gcaagactctctctt

SEQ ID NO: 1779014 - DNA, 15 bp, Homo sapiens
caagactctctctta

SEQ ID NO: 1779015 - DNA, 15 bp, Homo sapiens
aagactctctcttaa

SEQ ID NO: 1779016 - DNA, 15 bp, Homo sapiens
agactctctcttaaa

SEQ ID NO: 1779017 - DNA, 15 bp, Homo sapiens
gactctctcttaaaa

SEQ ID NO: 1779018 - DNA, 15 bp, Homo sapiens
actctctcttaaaaa

SEQ ID NO: 1779019 - DNA, 15 bp, Homo sapiens
ctctctcttaaaaaa

SEQ ID NO: 1779020 - DNA, 15 bp, Homo sapiens
taaaaaaaaaaatca

SEQ ID NO: 1779021 - DNA, 15 bp, Homo sapiens
aaaaaaaaaaatcat

SEQ ID NO: 1779022 - DNA, 15 bp, Homo sapiens
aaaaaaaaaatcatg

SEQ ID NO: 1779023 - DNA, 15 bp, Homo sapiens
aaaaaaaaatcatga

SEQ ID NO: 1779024 - DNA, 15 bp, Homo sapiens
aaaaaaaatcatgat

SEQ ID NO: 1779025 - DNA, 15 bp, Homo sapiens
aaaaaaatcatgata

SEQ ID NO: 1779026 - DNA, 15 bp, Homo sapiens
aaaaaatcatgatag

SEQ ID NO: 1779027 - DNA, 15 bp, Homo sapiens
aaaaatcatgatagt

SEQ ID NO: 1779028 - DNA, 15 bp, Homo sapiens
aaaatcatgatagtg

SEQ ID NO: 1779029 - DNA, 15 bp, Homo sapiens
aaatcatgatagtgg

SEQ ID NO: 1779030 - DNA, 15 bp, Homo sapiens
aatcatgatagtggc

SEQ ID NO: 1779031 - DNA, 15 bp, Homo sapiens
atcatgatagtggct

SEQ ID NO: 1779032 - DNA, 15 bp, Homo sapiens
tcatgatagtggctc

SEQ ID NO: 1779033 - DNA, 15 bp, Homo sapiens
catgatagtggctca

SEQ ID NO: 1779034 - DNA, 15 bp, Homo sapiens
atgatagtggctcag

SEQ ID NO: 1779035 - DNA, 15 bp, Homo sapiens
tgatagtggctcagc

SEQ ID NO: 1779036 - DNA, 15 bp, Homo sapiens
gatagtggctcagcc

SEQ ID NO: 1779037 - DNA, 15 bp, Homo sapiens
atagtggctcagcca

SEQ ID NO: 1779038 - DNA, 15 bp, Homo sapiens
tagtggctcagccag

SEQ ID NO: 1779039 - DNA, 15 bp, Homo sapiens
agtggctcagccagc

SEQ ID NO: 1779040 - DNA, 15 bp, Homo sapiens
gtggctcagccagca

SEQ ID NO: 1779041 - DNA, 15 bp, Homo sapiens
tggctcagccagcat

SEQ ID NO: 1779042 - DNA, 15 bp, Homo sapiens
ggctcagccagcata

SEQ ID NO: 1779043 - DNA, 15 bp, Homo sapiens
gctcagccagcatat

SEQ ID NO: 1779044 - DNA, 15 bp, Homo sapiens
ctcagccagcatatg

SEQ ID NO: 1779045 - DNA, 15 bp, Homo sapiens
tcagccagcatatgt

SEQ ID NO: 1779046 - DNA, 15 bp, Homo sapiens
cagccagcatatgta

SEQ ID NO: 1779047 - DNA, 15 bp, Homo sapiens
agccagcatatgtat

SEQ ID NO: 1779048 - DNA, 15 bp, Homo sapiens
gccagcatatgtatt

SEQ ID NO: 1779049 - DNA, 15 bp, Homo sapiens
ccagcatatgtattg

SEQ ID NO: 1779050 - DNA, 15 bp, Homo sapiens
cagcatatgtattgg

SEQ ID NO: 1779051 - DNA, 15 bp, Homo sapiens
agcatatgtattggc

SEQ ID NO: 1779052 - DNA, 15 bp, Homo sapiens
gcatatgtattggca

SEQ ID NO: 1779053 - DNA, 15 bp, Homo sapiens
catatgtattggcaa

SEQ ID NO: 1779054 - DNA, 15 bp, Homo sapiens
atatgtattggcaag

SEQ ID NO: 1779055 - DNA, 15 bp, Homo sapiens
tatgtattggcaagc

SEQ ID NO: 1779056 - DNA, 15 bp, Homo sapiens
atgtattggcaagca

SEQ ID NO: 1779057 - DNA, 15 bp, Homo sapiens
tgtattggcaagcag

SEQ ID NO: 1779058 - DNA, 15 bp, Homo sapiens
gtattggcaagcaga

SEQ ID NO: 1779059 - DNA, 15 bp, Homo sapiens
tattggcaagcagat

SEQ ID NO: 1779060 - DNA, 15 bp, Homo sapiens
attggcaagcagatc

SEQ ID NO: 1779061 - DNA, 15 bp, Homo sapiens
ttggcaagcagatct

SEQ ID NO: 1779062 - DNA, 15 bp, Homo sapiens
tggcaagcagatctg

SEQ ID NO: 1779063 - DNA, 15 bp, Homo sapiens
ggcaagcagatctgc

SEQ ID NO: 1779064 - DNA, 15 bp, Homo sapiens
gcaagcagatctgca

SEQ ID NO: 1779065 - DNA, 15 bp, Homo sapiens
caagcagatctgcag

SEQ ID NO: 1779066 - DNA, 15 bp, Homo sapiens
aagcagatctgcaga

SEQ ID NO: 1779067 - DNA, 15 bp, Homo sapiens
ccctatattgtaata

SEQ ID NO: 1779068 - DNA, 15 bp, Homo sapiens
cctatattgtaatat

SEQ ID NO: 1779069 - DNA, 15 bp, Homo sapiens
ctatattgtaatatt

SEQ ID NO: 1779070 - DNA, 15 bp, Homo sapiens
tatattgtaatattc

SEQ ID NO: 1779071 - DNA, 15 bp, Homo sapiens
atattgtaatattca

SEQ ID NO: 1779072 - DNA, 15 bp, Homo sapiens
tattgtaatattcaa

SEQ ID NO: 1779073 - DNA, 15 bp, Homo sapiens
attgtaatattcaag

SEQ ID NO: 1779074 - DNA, 15 bp, Homo sapiens
ttgtaatattcaagg

SEQ ID NO: 1779075 - DNA, 15 bp, Homo sapiens
tgtaatattcaaggt

SEQ ID NO: 1779076 - DNA, 15 bp, Homo sapiens
gtaatattcaaggtt

SEQ ID NO: 1779077 - DNA, 15 bp, Homo sapiens
taatattcaaggttt

SEQ ID NO: 1779078 - DNA, 15 bp, Homo sapiens
aatattcaaggtttg

SEQ ID NO: 1779079 - DNA, 15 bp, Homo sapiens
atattcaaggtttgc

SEQ ID NO: 1779080 - DNA, 15 bp, Homo sapiens
tattcaaggtttgct

SEQ ID NO: 1779081 - DNA, 15 bp, Homo sapiens
attcaaggtttgctt

SEQ ID NO: 1779082 - DNA, 15 bp, Homo sapiens
ttcaaggtttgctta

SEQ ID NO: 1779083 - DNA, 15 bp, Homo sapiens
tcaaggtttgcttat

SEQ ID NO: 1779084 - DNA, 15 bp, Homo sapiens
caaggtttgcttata

SEQ ID NO: 1779085 - DNA, 15 bp, Homo sapiens
aaggtttgcttataa

SEQ ID NO: 1779086 - DNA, 15 bp, Homo sapiens
aggtttgcttataat

SEQ ID NO: 1779087 - DNA, 15 bp, Homo sapiens
ggtttgcttataatt

SEQ ID NO: 1779088 - DNA, 15 bp, Homo sapiens
gtttgcttataatta

SEQ ID NO: 1779089 - DNA, 15 bp, Homo sapiens
tttgcttataattaa

SEQ ID NO: 1779090 - DNA, 15 bp, Homo sapiens
ttgcttataattaaa

SEQ ID NO: 1779091 - DNA, 15 bp, Homo sapiens
tgcttataattaaaa

SEQ ID NO: 1779092 - DNA, 15 bp, Homo sapiens
gcttataattaaaat

SEQ ID NO: 1779093 - DNA, 15 bp, Homo sapiens
cttataattaaaatg

SEQ ID NO: 1779094 - DNA, 15 bp, Homo sapiens
ttataattaaaatgt

SEQ ID NO: 1779095 - DNA, 15 bp, Homo sapiens
tataattaaaatgta

SEQ ID NO: 1779096 - DNA, 15 bp, Homo sapiens
ataattaaaatgtag

SEQ ID NO: 1779097 - DNA, 15 bp, Homo sapiens
taattaaaatgtagg

SEQ ID NO: 1779098 - DNA, 15 bp, Homo sapiens
aattaaaatgtaggg

SEQ ID NO: 1779099 - DNA, 15 bp, Homo sapiens
attaaaatgtaggga

SEQ ID NO: 1779100 - DNA, 15 bp, Homo sapiens
ttaaaatgtagggaa

SEQ ID NO: 1779101 - DNA, 15 bp, Homo sapiens
taaaatgtagggaag

SEQ ID NO: 1779102 - DNA, 15 bp, Homo sapiens
aaaatgtagggaaga

SEQ ID NO: 1779103 - DNA, 15 bp, Homo sapiens
aaatgtagggaagaa

SEQ ID NO: 1779104 - DNA, 15 bp, Homo sapiens
aatgtagggaagaaa

SEQ ID NO: 1779105 - DNA, 15 bp, Homo sapiens
atgtagggaagaaaa

SEQ ID NO: 1779106 - DNA, 15 bp, Homo sapiens
tgtagggaagaaaaa

SEQ ID NO: 1779107 - DNA, 15 bp, Homo sapiens
gtagggaagaaaaaa

SEQ ID NO: 1779108 - DNA, 15 bp, Homo sapiens
tagggaagaaaaaaa

SEQ ID NO: 1779109 - DNA, 15 bp, Homo sapiens
agggaagaaaaaaag

SEQ ID NO: 1779110 - DNA, 15 bp, Homo sapiens
gggaagaaaaaaaga

SEQ ID NO: 1779111 - DNA, 15 bp, Homo sapiens
ggaagaaaaaaagaa

SEQ ID NO: 1779112 - DNA, 15 bp, Homo sapiens
gaagaaaaaaagaat

SEQ ID NO: 1779113 - DNA, 15 bp, Homo sapiens
aagaaaaaaagaatc

SEQ ID NO: 1779114 - DNA, 15 bp, Homo sapiens
agaaaaaaagaatcc

SEQ ID NO: 1779115 - DNA, 15 bp, Homo sapiens
gaaaaaaagaatcct

SEQ ID NO: 1779116 - DNA, 15 bp, Homo sapiens
aaaaaaagaatcctg

SEQ ID NO: 1779117 - DNA, 15 bp, Homo sapiens
aaaaaagaatcctgc

SEQ ID NO: 1779118 - DNA, 15 bp, Homo sapiens
aaaaagaatcctgca

SEQ ID NO: 1779119 - DNA, 15 bp, Homo sapiens
aaaagaatcctgcag

SEQ ID NO: 1779120 - DNA, 15 bp, Homo sapiens
aaagaatcctgcaga

SEQ ID NO: 1779121 - DNA, 15 bp, Homo sapiens
aagaatcctgcagac

SEQ ID NO: 1779122 - DNA, 15 bp, Homo sapiens
agaatcctgcagaca

SEQ ID NO: 1779123 - DNA, 15 bp, Homo sapiens
gaatcctgcagacat

SEQ ID NO: 1779124 - DNA, 15 bp, Homo sapiens
aatcctgcagacatt

SEQ ID NO: 1779125 - DNA, 15 bp, Homo sapiens
atcctgcagacattc

SEQ ID NO: 1779126 - DNA, 15 bp, Homo sapiens
tcctgcagacattct

SEQ ID NO: 1779127 - DNA, 15 bp, Homo sapiens
cctgcagacattcta

SEQ ID NO: 1779128 - DNA, 15 bp, Homo sapiens
ctgcagacattctaa

SEQ ID NO: 1779129 - DNA, 15 bp, Homo sapiens
tgcagacattctaag

SEQ ID NO: 1779130 - DNA, 15 bp, Homo sapiens
gcagacattctaagg

SEQ ID NO: 1779131 - DNA, 15 bp, Homo sapiens
cagacattctaagga

SEQ ID NO: 1779132 - DNA, 15 bp, Homo sapiens
agacattctaaggat

SEQ ID NO: 1779133 - DNA, 15 bp, Homo sapiens
gacattctaaggatg

SEQ ID NO: 1779134 - DNA, 15 bp, Homo sapiens
acattctaaggatga

SEQ ID NO: 1779135 - DNA, 15 bp, Homo sapiens
cattctaaggatgac

SEQ ID NO: 1779136 - DNA, 15 bp, Homo sapiens
attctaaggatgacc

SEQ ID NO: 1779137 - DNA, 15 bp, Homo sapiens
ttctaaggatgacct

SEQ ID NO: 1779138 - DNA, 15 bp, Homo sapiens
tctaaggatgaccta

SEQ ID NO: 1779139 - DNA, 15 bp, Homo sapiens
ctaaggatgacctag

SEQ ID NO: 1779140 - DNA, 15 bp, Homo sapiens
taaggatgacctagg

SEQ ID NO: 1779141 - DNA, 15 bp, Homo sapiens
aaggatgacctaggc

SEQ ID NO: 1779142 - DNA, 15 bp, Homo sapiens
aggatgacctaggcc

SEQ ID NO: 1779143 - DNA, 15 bp, Homo sapiens
ggatgacctaggcca

SEQ ID NO: 1779144 - DNA, 15 bp, Homo sapiens
gatgacctaggccat

SEQ ID NO: 1779145 - DNA, 15 bp, Homo sapiens
atgacctaggccatt

SEQ ID NO: 1779146 - DNA, 15 bp, Homo sapiens
tgacctaggccattg

SEQ ID NO: 1779147 - DNA, 15 bp, Homo sapiens
gacctaggccattga

SEQ ID NO: 1779148 - DNA, 15 bp, Homo sapiens
acctaggccattgat

SEQ ID NO: 1779149 - DNA, 15 bp, Homo sapiens
cctaggccattgata

SEQ ID NO: 1779150 - DNA, 15 bp, Homo sapiens
ctaggccattgatag

SEQ ID NO: 1779151 - DNA, 15 bp, Homo sapiens
taggccattgatagt

SEQ ID NO: 1779152 - DNA, 15 bp, Homo sapiens
aggccattgatagtc

SEQ ID NO: 1779153 - DNA, 15 bp, Homo sapiens
ggccattgatagtct

SEQ ID NO: 1779154 - DNA, 15 bp, Homo sapiens
gccattgatagtcta

SEQ ID NO: 1779155 - DNA, 15 bp, Homo sapiens
ccattgatagtctaa

SEQ ID NO: 1779156 - DNA, 15 bp, Homo sapiens
cattgatagtctaag

SEQ ID NO: 1779157 - DNA, 15 bp, Homo sapiens
attgatagtctaagc

SEQ ID NO: 1779158 - DNA, 15 bp, Homo sapiens
ttgatagtctaagct

SEQ ID NO: 1779159 - DNA, 15 bp, Homo sapiens
tgatagtctaagctt

SEQ ID NO: 1779160 - DNA, 15 bp, Homo sapiens
gatagtctaagcttg

SEQ ID NO: 1779161 - DNA, 15 bp, Homo sapiens
atagtctaagcttga

SEQ ID NO: 1779162 - DNA, 15 bp, Homo sapiens
tagtctaagcttgaa

SEQ ID NO: 1779163 - DNA, 15 bp, Homo sapiens
agtctaagcttgaaa

SEQ ID NO: 1779164 - DNA, 15 bp, Homo sapiens
gtctaagcttgaaat

SEQ ID NO: 1779165 - DNA, 15 bp, Homo sapiens
tctaagcttgaaatt

SEQ ID NO: 1779166 - DNA, 15 bp, Homo sapiens
ctaagcttgaaatta

SEQ ID NO: 1779167 - DNA, 15 bp, Homo sapiens
aagcttgaaattaat

SEQ ID NO: 1779168 - DNA, 15 bp, Homo sapiens
agcttgaaattaatc

SEQ ID NO: 1779169 - DNA, 15 bp, Homo sapiens
gcttgaaattaatca

SEQ ID NO: 1779170 - DNA, 15 bp, Homo sapiens
cttgaaattaatcat

SEQ ID NO: 1779171 - DNA, 15 bp, Homo sapiens
ttgaaattaatcatt

SEQ ID NO: 1779172 - DNA, 15 bp, Homo sapiens
tgaaattaatcatta

SEQ ID NO: 1779173 - DNA, 15 bp, Homo sapiens
gaaattaatcattag

SEQ ID NO: 1779174 - DNA, 15 bp, Homo sapiens
aaattaatcattaga

SEQ ID NO: 1779175 - DNA, 15 bp, Homo sapiens
aattaatcattagat

SEQ ID NO: 1779176 - DNA, 15 bp, Homo sapiens
attaatcattagatt

SEQ ID NO: 1779177 - DNA, 15 bp, Homo sapiens
ttaatcattagattt

SEQ ID NO: 1779178 - DNA, 15 bp, Homo sapiens
taatcattagatttt

SEQ ID NO: 1779179 - DNA, 15 bp, Homo sapiens
aatcattagattttc

SEQ ID NO: 1779180 - DNA, 15 bp, Homo sapiens
atcattagattttct

SEQ ID NO: 1779181 - DNA, 15 bp, Homo sapiens
tcattagattttctg

SEQ ID NO: 1779182 - DNA, 15 bp, Homo sapiens
cattagattttctga

SEQ ID NO: 1779183 - DNA, 15 bp, Homo sapiens
attagattttctgaa

SEQ ID NO: 1779184 - DNA, 15 bp, Homo sapiens
ttagattttctgaac

SEQ ID NO: 1779185 - DNA, 15 bp, Homo sapiens
tagattttctgaact

SEQ ID NO: 1779186 - DNA, 15 bp, Homo sapiens
agattttctgaactc

SEQ ID NO: 1779187 - DNA, 15 bp, Homo sapiens
gattttctgaactct

SEQ ID NO: 1779188 - DNA, 15 bp, Homo sapiens
attttctgaactctt

SEQ ID NO: 1779189 - DNA, 15 bp, Homo sapiens
ttttctgaactctta

SEQ ID NO: 1779190 - DNA, 15 bp, Homo sapiens
tttctgaactcttat

SEQ ID NO: 1779191 - DNA, 15 bp, Homo sapiens
ttctgaactcttatt

SEQ ID NO: 1779192 - DNA, 15 bp, Homo sapiens
tctgaactcttatta

SEQ ID NO: 1779193 - DNA, 15 bp, Homo sapiens
ctgaactcttattac

SEQ ID NO: 1779194 - DNA, 15 bp, Homo sapiens
tgaactcttattaca

SEQ ID NO: 1779195 - DNA, 15 bp, Homo sapiens
gaactcttattacac

SEQ ID NO: 1779196 - DNA, 15 bp, Homo sapiens
aactcttattacact

SEQ ID NO: 1779197 - DNA, 15 bp, Homo sapiens
actcttattacactg

SEQ ID NO: 1779198 - DNA, 15 bp, Homo sapiens
ctcttattacactgg

SEQ ID NO: 1779199 - DNA, 15 bp, Homo sapiens
tcttattacactgga

SEQ ID NO: 1779200 - DNA, 15 bp, Homo sapiens
cttattacactggat

SEQ ID NO: 1779201 - DNA, 15 bp, Homo sapiens
ttattacactggatc

SEQ ID NO: 1779202 - DNA, 15 bp, Homo sapiens
tattacactggatct

SEQ ID NO: 1779203 - DNA, 15 bp, Homo sapiens
attacactggatctg

SEQ ID NO: 1779204 - DNA, 15 bp, Homo sapiens
ttacactggatctgt

SEQ ID NO: 1779205 - DNA, 15 bp, Homo sapiens
tacactggatctgtt

SEQ ID NO: 1779206 - DNA, 15 bp, Homo sapiens
acactggatctgttc

SEQ ID NO: 1779207 - DNA, 15 bp, Homo sapiens
cactggatctgttca

SEQ ID NO: 1779208 - DNA, 15 bp, Homo sapiens
actggatctgttcag

SEQ ID NO: 1779209 - DNA, 15 bp, Homo sapiens
ctggatctgttcagt

SEQ ID NO: 1779210 - DNA, 15 bp, Homo sapiens
tggatctgttcagtc

SEQ ID NO: 1779211 - DNA, 15 bp, Homo sapiens
ggatctgttcagtct

SEQ ID NO: 1779212 - DNA, 15 bp, Homo sapiens
gatctgttcagtctg

SEQ ID NO: 1779213 - DNA, 15 bp, Homo sapiens
atctgttcagtctgc

SEQ ID NO: 1779214 - DNA, 15 bp, Homo sapiens
tctgttcagtctgct

SEQ ID NO: 1779215 - DNA, 15 bp, Homo sapiens
ctgttcagtctgctt

SEQ ID NO: 1779216 - DNA, 15 bp, Homo sapiens
tgttcagtctgcttt

SEQ ID NO: 1779217 - DNA, 15 bp, Homo sapiens
gttcagtctgcttta

SEQ ID NO: 1779218 - DNA, 15 bp, Homo sapiens
ttcagtctgctttaa

SEQ ID NO: 1779219 - DNA, 15 bp, Homo sapiens
tcagtctgctttaac

SEQ ID NO: 1779220 - DNA, 15 bp, Homo sapiens
cagtctgctttaaca

SEQ ID NO: 1779221 - DNA, 15 bp, Homo sapiens
agtctgctttaacaa

SEQ ID NO: 1779222 - DNA, 15 bp, Homo sapiens
gtctgctttaacaaa

SEQ ID NO: 1779223 - DNA, 15 bp, Homo sapiens
tctgctttaacaaaa

SEQ ID NO: 1779224 - DNA, 15 bp, Homo sapiens
ctgctttaacaaaat

SEQ ID NO: 1779225 - DNA, 15 bp, Homo sapiens
tgctttaacaaaata

SEQ ID NO: 1779226 - DNA, 15 bp, Homo sapiens
gctttaacaaaatac

SEQ ID NO: 1779227 - DNA, 15 bp, Homo sapiens
ctttaacaaaatacc

SEQ ID NO: 1779228 - DNA, 15 bp, Homo sapiens
tttaacaaaatacca

SEQ ID NO: 1779229 - DNA, 15 bp, Homo sapiens
ttaacaaaataccat

SEQ ID NO: 1779230 - DNA, 15 bp, Homo sapiens
taacaaaataccata

SEQ ID NO: 1779231 - DNA, 15 bp, Homo sapiens
aacaaaataccatag

SEQ ID NO: 1779232 - DNA, 15 bp, Homo sapiens
acaaaataccataga

SEQ ID NO: 1779233 - DNA, 15 bp, Homo sapiens
caaaataccatagat

SEQ ID NO: 1779234 - DNA, 15 bp, Homo sapiens
aaaataccatagatt

SEQ ID NO: 1779235 - DNA, 15 bp, Homo sapiens
aaataccatagattt

SEQ ID NO: 1779236 - DNA, 15 bp, Homo sapiens
aataccatagatttg

SEQ ID NO: 1779237 - DNA, 15 bp, Homo sapiens
ataccatagatttgg

SEQ ID NO: 1779238 - DNA, 15 bp, Homo sapiens
taccatagatttggt

SEQ ID NO: 1779239 - DNA, 15 bp, Homo sapiens
accatagatttggtg

SEQ ID NO: 1779240 - DNA, 15 bp, Homo sapiens
ccatagatttggtgg

SEQ ID NO: 1779241 - DNA, 15 bp, Homo sapiens
catagatttggtggc

SEQ ID NO: 1779242 - DNA, 15 bp, Homo sapiens
atagatttggtggct

SEQ ID NO: 1779243 - DNA, 15 bp, Homo sapiens
tagatttggtggctt

SEQ ID NO: 1779244 - DNA, 15 bp, Homo sapiens
agatttggtggctta

SEQ ID NO: 1779245 - DNA, 15 bp, Homo sapiens
gatttggtggcttat

SEQ ID NO: 1779246 - DNA, 15 bp, Homo sapiens
atttggtggcttata

SEQ ID NO: 1779247 - DNA, 15 bp, Homo sapiens
tttggtggcttataa

SEQ ID NO: 1779248 - DNA, 15 bp, Homo sapiens
ttggtggcttataaa

SEQ ID NO: 1779249 - DNA, 15 bp, Homo sapiens
tggtggcttataaac

SEQ ID NO: 1779250 - DNA, 15 bp, Homo sapiens
ggtggcttataaaca

SEQ ID NO: 1779251 - DNA, 15 bp, Homo sapiens
gtggcttataaacaa

SEQ ID NO: 1779252 - DNA, 15 bp, Homo sapiens
tggcttataaacaac

SEQ ID NO: 1779253 - DNA, 15 bp, Homo sapiens
ggcttataaacaaca

SEQ ID NO: 1779254 - DNA, 15 bp, Homo sapiens
gcttataaacaacag

SEQ ID NO: 1779255 - DNA, 15 bp, Homo sapiens
cttataaacaacaga

SEQ ID NO: 1779256 - DNA, 15 bp, Homo sapiens
ttataaacaacagaa

SEQ ID NO: 1779257 - DNA, 15 bp, Homo sapiens
tataaacaacagaaa

SEQ ID NO: 1779258 - DNA, 15 bp, Homo sapiens
ataaacaacagaaat

SEQ ID NO: 1779259 - DNA, 15 bp, Homo sapiens
taaacaacagaaatg

SEQ ID NO: 1779260 - DNA, 15 bp, Homo sapiens
aaacaacagaaatgt

SEQ ID NO: 1779261 - DNA, 15 bp, Homo sapiens
aacaacagaaatgta

SEQ ID NO: 1779262 - DNA, 15 bp, Homo sapiens
acaacagaaatgtat

SEQ ID NO: 1779263 - DNA, 15 bp, Homo sapiens
caacagaaatgtatt

SEQ ID NO: 1779264 - DNA, 15 bp, Homo sapiens
aacagaaatgtattt

SEQ ID NO: 1779265 - DNA, 15 bp, Homo sapiens
acagaaatgtatttc

SEQ ID NO: 1779266 - DNA, 15 bp, Homo sapiens
cagaaatgtatttct

SEQ ID NO: 1779267 - DNA, 15 bp, Homo sapiens
agaaatgtatttctc

SEQ ID NO: 1779268 - DNA, 15 bp, Homo sapiens
gaaatgtatttctca

SEQ ID NO: 1779269 - DNA, 15 bp, Homo sapiens
aaatgtatttctcac

SEQ ID NO: 1779270 - DNA, 15 bp, Homo sapiens
aatgtatttctcaca

SEQ ID NO: 1779271 - DNA, 15 bp, Homo sapiens
atgtatttctcacag

SEQ ID NO: 1779272 - DNA, 15 bp, Homo sapiens
tgtatttctcacagt

SEQ ID NO: 1779273 - DNA, 15 bp, Homo sapiens
gtatttctcacagtt

SEQ ID NO: 1779274 - DNA, 15 bp, Homo sapiens
tatttctcacagttc

SEQ ID NO: 1779275 - DNA, 15 bp, Homo sapiens
atttctcacagttct

SEQ ID NO: 1779276 - DNA, 15 bp, Homo sapiens
tttctcacagttctg

SEQ ID NO: 1779277 - DNA, 15 bp, Homo sapiens
ttctcacagttctga

SEQ ID NO: 1779278 - DNA, 15 bp, Homo sapiens
tctcacagttctgaa

SEQ ID NO: 1779279 - DNA, 15 bp, Homo sapiens
ctcacagttctgaaa

SEQ ID NO: 1779280 - DNA, 15 bp, Homo sapiens
tcacagttctgaaag

SEQ ID NO: 1779281 - DNA, 15 bp, Homo sapiens
cacagttctgaaagc

SEQ ID NO: 1779282 - DNA, 15 bp, Homo sapiens
acagttctgaaagct

SEQ ID NO: 1779283 - DNA, 15 bp, Homo sapiens
cagttctgaaagctg

SEQ ID NO: 1779284 - DNA, 15 bp, Homo sapiens
agttctgaaagctgg

SEQ ID NO: 1779285 - DNA, 15 bp, Homo sapiens
gttctgaaagctggg

SEQ ID NO: 1779286 - DNA, 15 bp, Homo sapiens
ttctgaaagctggga

SEQ ID NO: 1779287 - DNA, 15 bp, Homo sapiens
tctgaaagctgggaa

SEQ ID NO: 1779288 - DNA, 15 bp, Homo sapiens
ctgaaagctgggaag

SEQ ID NO: 1779289 - DNA, 15 bp, Homo sapiens
tgaaagctgggaagt

SEQ ID NO: 1779290 - DNA, 15 bp, Homo sapiens
gaaagctgggaagtc

SEQ ID NO: 1779291 - DNA, 15 bp, Homo sapiens
aaagctgggaagtcc

SEQ ID NO: 1779292 - DNA, 15 bp, Homo sapiens
aagctgggaagtcca

SEQ ID NO: 1779293 - DNA, 15 bp, Homo sapiens
agctgggaagtccaa

SEQ ID NO: 1779294 - DNA, 15 bp, Homo sapiens
gctgggaagtccaag

SEQ ID NO: 1779295 - DNA, 15 bp, Homo sapiens
ctgggaagtccaaga

SEQ ID NO: 1779296 - DNA, 15 bp, Homo sapiens
tgggaagtccaagat

SEQ ID NO: 1779297 - DNA, 15 bp, Homo sapiens
gggaagtccaagatc

SEQ ID NO: 1779298 - DNA, 15 bp, Homo sapiens
ggaagtccaagatca

SEQ ID NO: 1779299 - DNA, 15 bp, Homo sapiens
gaagtccaagatcaa

SEQ ID NO: 1779300 - DNA, 15 bp, Homo sapiens
aagtccaagatcaag

SEQ ID NO: 1779301 - DNA, 15 bp, Homo sapiens
agtccaagatcaagt

SEQ ID NO: 1779302 - DNA, 15 bp, Homo sapiens
gtccaagatcaagtt

SEQ ID NO: 1779303 - DNA, 15 bp, Homo sapiens
tccaagatcaagttt

SEQ ID NO: 1779304 - DNA, 15 bp, Homo sapiens
ccaagatcaagtttc

SEQ ID NO: 1779305 - DNA, 15 bp, Homo sapiens
caagatcaagtttcc

SEQ ID NO: 1779306 - DNA, 15 bp, Homo sapiens
aagatcaagtttcca

SEQ ID NO: 1779307 - DNA, 15 bp, Homo sapiens
agatcaagtttccag

SEQ ID NO: 1779308 - DNA, 15 bp, Homo sapiens
gatcaagtttccagc

SEQ ID NO: 1779309 - DNA, 15 bp, Homo sapiens
atcaagtttccagca

SEQ ID NO: 1779310 - DNA, 15 bp, Homo sapiens
tcaagtttccagcag

SEQ ID NO: 1779311 - DNA, 15 bp, Homo sapiens
caagtttccagcaga

SEQ ID NO: 1779312 - DNA, 15 bp, Homo sapiens
aagtttccagcagat

SEQ ID NO: 1779313 - DNA, 15 bp, Homo sapiens
agtttccagcagatc

SEQ ID NO: 1779314 - DNA, 15 bp, Homo sapiens
gtttccagcagatct

SEQ ID NO: 1779315 - DNA, 15 bp, Homo sapiens
tttccagcagatctg

SEQ ID NO: 1779316 - DNA, 15 bp, Homo sapiens
ttccagcagatctga

SEQ ID NO: 1779317 - DNA, 15 bp, Homo sapiens
tccagcagatctgat

SEQ ID NO: 1779318 - DNA, 15 bp, Homo sapiens
ccagcagatctgata

SEQ ID NO: 1779319 - DNA, 15 bp, Homo sapiens
cagcagatctgatat

SEQ ID NO: 1779320 - DNA, 15 bp, Homo sapiens
agcagatctgatatc

SEQ ID NO: 1779321 - DNA, 15 bp, Homo sapiens
gcagatctgatatct

SEQ ID NO: 1779322 - DNA, 15 bp, Homo sapiens
cagatctgatatctg

SEQ ID NO: 1779323 - DNA, 15 bp, Homo sapiens
agatctgatatctgg

SEQ ID NO: 1779324 - DNA, 15 bp, Homo sapiens
gatctgatatctggc

SEQ ID NO: 1779325 - DNA, 15 bp, Homo sapiens
atctgatatctggcg

SEQ ID NO: 1779326 - DNA, 15 bp, Homo sapiens
tctgatatctggcgg

SEQ ID NO: 1779327 - DNA, 15 bp, Homo sapiens
ctgatatctggcgga

SEQ ID NO: 1779328 - DNA, 15 bp, Homo sapiens
tgatatctggcggag

SEQ ID NO: 1779329 - DNA, 15 bp, Homo sapiens
gatatctggcggagg

SEQ ID NO: 1779330 - DNA, 15 bp, Homo sapiens
atatctggcggaggc

SEQ ID NO: 1779331 - DNA, 15 bp, Homo sapiens
tatctggcggaggcc

SEQ ID NO: 1779332 - DNA, 15 bp, Homo sapiens
atctggcggaggcct

SEQ ID NO: 1779333 - DNA, 15 bp, Homo sapiens
tctggcggaggcctg

SEQ ID NO: 1779334 - DNA, 15 bp, Homo sapiens
ctggcggaggcctgt

SEQ ID NO: 1779335 - DNA, 15 bp, Homo sapiens
tggcggaggcctgtt

SEQ ID NO: 1779336 - DNA, 15 bp, Homo sapiens
ggcggaggcctgttt

SEQ ID NO: 1779337 - DNA, 15 bp, Homo sapiens
gcggaggcctgtttc

SEQ ID NO: 1779338 - DNA, 15 bp, Homo sapiens
cggaggcctgtttcc

SEQ ID NO: 1779339 - DNA, 15 bp, Homo sapiens
ggaggcctgtttcct

SEQ ID NO: 1779340 - DNA, 15 bp, Homo sapiens
gaggcctgtttcctg

SEQ ID NO: 1779341 - DNA, 15 bp, Homo sapiens
aggcctgtttcctgg

SEQ ID NO: 1779342 - DNA, 15 bp, Homo sapiens
ggcctgtttcctggt

SEQ ID NO: 1779343 - DNA, 15 bp, Homo sapiens
gcctgtttcctggtt

SEQ ID NO: 1779344 - DNA, 15 bp, Homo sapiens
cctgtttcctggttc

SEQ ID NO: 1779345 - DNA, 15 bp, Homo sapiens
ctgtttcctggttca

SEQ ID NO: 1779346 - DNA, 15 bp, Homo sapiens
tgtttcctggttcat

SEQ ID NO: 1779347 - DNA, 15 bp, Homo sapiens
gtttcctggttcata

SEQ ID NO: 1779348 - DNA, 15 bp, Homo sapiens
tttcctggttcatag

SEQ ID NO: 1779349 - DNA, 15 bp, Homo sapiens
ttcctggttcataga

SEQ ID NO: 1779350 - DNA, 15 bp, Homo sapiens
tcctggttcatagat

SEQ ID NO: 1779351 - DNA, 15 bp, Homo sapiens
cctggttcatagatg

SEQ ID NO: 1779352 - DNA, 15 bp, Homo sapiens
ctggttcatagatgg

SEQ ID NO: 1779353 - DNA, 15 bp, Homo sapiens
tggttcatagatggc

SEQ ID NO: 1779354 - DNA, 15 bp, Homo sapiens
ggttcatagatggca

SEQ ID NO: 1779355 - DNA, 15 bp, Homo sapiens
gttcatagatggcac

SEQ ID NO: 1779356 - DNA, 15 bp, Homo sapiens
ttcatagatggcacc

SEQ ID NO: 1779357 - DNA, 15 bp, Homo sapiens
tcatagatggcacct

SEQ ID NO: 1779358 - DNA, 15 bp, Homo sapiens
catagatggcacctt

SEQ ID NO: 1779359 - DNA, 15 bp, Homo sapiens
atagatggcaccttc

SEQ ID NO: 1779360 - DNA, 15 bp, Homo sapiens
tagatggcaccttct

SEQ ID NO: 1779361 - DNA, 15 bp, Homo sapiens
agatggcaccttctt

SEQ ID NO: 1779362 - DNA, 15 bp, Homo sapiens
gatggcaccttctta

SEQ ID NO: 1779363 - DNA, 15 bp, Homo sapiens
atggcaccttcttac

SEQ ID NO: 1779364 - DNA, 15 bp, Homo sapiens
tggcaccttcttacc

SEQ ID NO: 1779365 - DNA, 15 bp, Homo sapiens
ggcaccttcttacca

SEQ ID NO: 1779366 - DNA, 15 bp, Homo sapiens
gcaccttcttaccat

SEQ ID NO: 1779367 - DNA, 15 bp, Homo sapiens
caccttcttaccatg

SEQ ID NO: 1779368 - DNA, 15 bp, Homo sapiens
accttcttaccatgt

SEQ ID NO: 1779369 - DNA, 15 bp, Homo sapiens
ccttcttaccatgtc

SEQ ID NO: 1779370 - DNA, 15 bp, Homo sapiens
cttcttaccatgtcc

SEQ ID NO: 1779371 - DNA, 15 bp, Homo sapiens
ttcttaccatgtcct

SEQ ID NO: 1779372 - DNA, 15 bp, Homo sapiens
tcttaccatgtcctc

SEQ ID NO: 1779373 - DNA, 15 bp, Homo sapiens
cttaccatgtcctca

SEQ ID NO: 1779374 - DNA, 15 bp, Homo sapiens
ttaccatgtcctcag

SEQ ID NO: 1779375 - DNA, 15 bp, Homo sapiens
taccatgtcctcaga

SEQ ID NO: 1779376 - DNA, 15 bp, Homo sapiens
accatgtcctcagat

SEQ ID NO: 1779377 - DNA, 15 bp, Homo sapiens
ccatgtcctcagatg

SEQ ID NO: 1779378 - DNA, 15 bp, Homo sapiens
catgtcctcagatgg

SEQ ID NO: 1779379 - DNA, 15 bp, Homo sapiens
atgtcctcagatggt

SEQ ID NO: 1779380 - DNA, 15 bp, Homo sapiens
tgtcctcagatggtg

SEQ ID NO: 1779381 - DNA, 15 bp, Homo sapiens
gtcctcagatggtgg

SEQ ID NO: 1779382 - DNA, 15 bp, Homo sapiens
tcctcagatggtgga

SEQ ID NO: 1779383 - DNA, 15 bp, Homo sapiens
cctcagatggtggaa

SEQ ID NO: 1779384 - DNA, 15 bp, Homo sapiens
ctcagatggtggaag

SEQ ID NO: 1779385 - DNA, 15 bp, Homo sapiens
tcagatggtggaagg

SEQ ID NO: 1779386 - DNA, 15 bp, Homo sapiens
cagatggtggaaggg

SEQ ID NO: 1779387 - DNA, 15 bp, Homo sapiens
agatggtggaaggga

SEQ ID NO: 1779388 - DNA, 15 bp, Homo sapiens
gatggtggaagggac

SEQ ID NO: 1779389 - DNA, 15 bp, Homo sapiens
atggtggaagggaca

SEQ ID NO: 1779390 - DNA, 15 bp, Homo sapiens
tggtggaagggacaa

SEQ ID NO: 1779391 - DNA, 15 bp, Homo sapiens
ggtggaagggacaag

SEQ ID NO: 1779392 - DNA, 15 bp, Homo sapiens
gtggaagggacaagg

SEQ ID NO: 1779393 - DNA, 15 bp, Homo sapiens
tggaagggacaaggc

SEQ ID NO: 1779394 - DNA, 15 bp, Homo sapiens
ggaagggacaaggca

SEQ ID NO: 1779395 - DNA, 15 bp, Homo sapiens
gaagggacaaggcag

SEQ ID NO: 1779396 - DNA, 15 bp, Homo sapiens
aagggacaaggcagc

SEQ ID NO: 1779397 - DNA, 15 bp, Homo sapiens
agggacaaggcagct

SEQ ID NO: 1779398 - DNA, 15 bp, Homo sapiens
gggacaaggcagctc

SEQ ID NO: 1779399 - DNA, 15 bp, Homo sapiens
ggacaaggcagctct

SEQ ID NO: 1779400 - DNA, 15 bp, Homo sapiens
gacaaggcagctctc

SEQ ID NO: 1779401 - DNA, 15 bp, Homo sapiens
acaaggcagctctct

SEQ ID NO: 1779402 - DNA, 15 bp, Homo sapiens
caaggcagctctctg

SEQ ID NO: 1779403 - DNA, 15 bp, Homo sapiens
aaggcagctctctgg

SEQ ID NO: 1779404 - DNA, 15 bp, Homo sapiens
aggcagctctctggg

SEQ ID NO: 1779405 - DNA, 15 bp, Homo sapiens
ggcagctctctgggg

SEQ ID NO: 1779406 - DNA, 15 bp, Homo sapiens
gcagctctctggggt

SEQ ID NO: 1779407 - DNA, 15 bp, Homo sapiens
cagctctctggggtc

SEQ ID NO: 1779408 - DNA, 15 bp, Homo sapiens
agctctctggggtcc

SEQ ID NO: 1779409 - DNA, 15 bp, Homo sapiens
gctctctggggtccc

SEQ ID NO: 1779410 - DNA, 15 bp, Homo sapiens
ctctctggggtccct

SEQ ID NO: 1779411 - DNA, 15 bp, Homo sapiens
tctctggggtccctt

SEQ ID NO: 1779412 - DNA, 15 bp, Homo sapiens
ctctggggtcccttt

SEQ ID NO: 1779413 - DNA, 15 bp, Homo sapiens
tctggggtccctttt

SEQ ID NO: 1779414 - DNA, 15 bp, Homo sapiens
ctggggtccctttta

SEQ ID NO: 1779415 - DNA, 15 bp, Homo sapiens
tggggtcccttttat

SEQ ID NO: 1779416 - DNA, 15 bp, Homo sapiens
ggggtcccttttata

SEQ ID NO: 1779417 - DNA, 15 bp, Homo sapiens
gggtcccttttataa

SEQ ID NO: 1779418 - DNA, 15 bp, Homo sapiens
ggtcccttttataag

SEQ ID NO: 1779419 - DNA, 15 bp, Homo sapiens
gtcccttttataagg

SEQ ID NO: 1779420 - DNA, 15 bp, Homo sapiens
tcccttttataaggg

SEQ ID NO: 1779421 - DNA, 15 bp, Homo sapiens
cccttttataagggt

SEQ ID NO: 1779422 - DNA, 15 bp, Homo sapiens
ccttttataagggta

SEQ ID NO: 1779423 - DNA, 15 bp, Homo sapiens
cttttataagggtac

SEQ ID NO: 1779424 - DNA, 15 bp, Homo sapiens
ttttataagggtact

SEQ ID NO: 1779425 - DNA, 15 bp, Homo sapiens
tttataagggtacta

SEQ ID NO: 1779426 - DNA, 15 bp, Homo sapiens
ttataagggtactaa

SEQ ID NO: 1779427 - DNA, 15 bp, Homo sapiens
tataagggtactaat

SEQ ID NO: 1779428 - DNA, 15 bp, Homo sapiens
ataagggtactaatc

SEQ ID NO: 1779429 - DNA, 15 bp, Homo sapiens
taagggtactaatca

SEQ ID NO: 1779430 - DNA, 15 bp, Homo sapiens
aagggtactaatcat

SEQ ID NO: 1779431 - DNA, 15 bp, Homo sapiens
agggtactaatcatc

SEQ ID NO: 1779432 - DNA, 15 bp, Homo sapiens
gggtactaatcatcc

SEQ ID NO: 1779433 - DNA, 15 bp, Homo sapiens
ggtactaatcatcct

SEQ ID NO: 1779434 - DNA, 15 bp, Homo sapiens
gtactaatcatcctt

SEQ ID NO: 1779435 - DNA, 15 bp, Homo sapiens
tactaatcatccttt

SEQ ID NO: 1779436 - DNA, 15 bp, Homo sapiens
actaatcatcctttt

SEQ ID NO: 1779437 - DNA, 15 bp, Homo sapiens
ctaatcatccttttc

SEQ ID NO: 1779438 - DNA, 15 bp, Homo sapiens
taatcatccttttca

SEQ ID NO: 1779439 - DNA, 15 bp, Homo sapiens
aatcatccttttcat

SEQ ID NO: 1779440 - DNA, 15 bp, Homo sapiens
atcatccttttcatg

SEQ ID NO: 1779441 - DNA, 15 bp, Homo sapiens
tcatccttttcatga

SEQ ID NO: 1779442 - DNA, 15 bp, Homo sapiens
catccttttcatgag

SEQ ID NO: 1779443 - DNA, 15 bp, Homo sapiens
atccttttcatgagg

SEQ ID NO: 1779444 - DNA, 15 bp, Homo sapiens
tccttttcatgaggg

SEQ ID NO: 1779445 - DNA, 15 bp, Homo sapiens
ccttttcatgaggga

SEQ ID NO: 1779446 - DNA, 15 bp, Homo sapiens
cttttcatgagggat

SEQ ID NO: 1779447 - DNA, 15 bp, Homo sapiens
ttttcatgagggatg

SEQ ID NO: 1779448 - DNA, 15 bp, Homo sapiens
tttcatgagggatgt

SEQ ID NO: 1779449 - DNA, 15 bp, Homo sapiens
ttcatgagggatgtg

SEQ ID NO: 1779450 - DNA, 15 bp, Homo sapiens
tcatgagggatgtgt

SEQ ID NO: 1779451 - DNA, 15 bp, Homo sapiens
catgagggatgtgtt

SEQ ID NO: 1779452 - DNA, 15 bp, Homo sapiens
atgagggatgtgttg

SEQ ID NO: 1779453 - DNA, 15 bp, Homo sapiens
tgagggatgtgttga

SEQ ID NO: 1779454 - DNA, 15 bp, Homo sapiens
gagggatgtgttgaa

SEQ ID NO: 1779455 - DNA, 15 bp, Homo sapiens
agggatgtgttgaaa

SEQ ID NO: 1779456 - DNA, 15 bp, Homo sapiens
gggatgtgttgaaac

SEQ ID NO: 1779457 - DNA, 15 bp, Homo sapiens
ggatgtgttgaaact

SEQ ID NO: 1779458 - DNA, 15 bp, Homo sapiens
gatgtgttgaaacta

SEQ ID NO: 1779459 - DNA, 15 bp, Homo sapiens
atgtgttgaaactaa

SEQ ID NO: 1779460 - DNA, 15 bp, Homo sapiens
tgtgttgaaactaaa

SEQ ID NO: 1779461 - DNA, 15 bp, Homo sapiens
gtgttgaaactaaat

SEQ ID NO: 1779462 - DNA, 15 bp, Homo sapiens
tgttgaaactaaatt

SEQ ID NO: 1779463 - DNA, 15 bp, Homo sapiens
gttgaaactaaattg

SEQ ID NO: 1779464 - DNA, 15 bp, Homo sapiens
ttgaaactaaattgt

SEQ ID NO: 1779465 - DNA, 15 bp, Homo sapiens
tgaaactaaattgtg

SEQ ID NO: 1779466 - DNA, 15 bp, Homo sapiens
gaaactaaattgtgc

SEQ ID NO: 1779467 - DNA, 15 bp, Homo sapiens
aaactaaattgtgcc

SEQ ID NO: 1779468 - DNA, 15 bp, Homo sapiens
aactaaattgtgcct

SEQ ID NO: 1779469 - DNA, 15 bp, Homo sapiens
actaaattgtgcctg

SEQ ID NO: 1779470 - DNA, 15 bp, Homo sapiens
ctaaattgtgcctga

SEQ ID NO: 1779471 - DNA, 15 bp, Homo sapiens
taaattgtgcctgaa

SEQ ID NO: 1779472 - DNA, 15 bp, Homo sapiens
aaattgtgcctgaag

SEQ ID NO: 1779473 - DNA, 15 bp, Homo sapiens
aattgtgcctgaaga

SEQ ID NO: 1779474 - DNA, 15 bp, Homo sapiens
attgtgcctgaagac

SEQ ID NO: 1779475 - DNA, 15 bp, Homo sapiens
ttgtgcctgaagacc

SEQ ID NO: 1779476 - DNA, 15 bp, Homo sapiens
tgtgcctgaagaccc

SEQ ID NO: 1779477 - DNA, 15 bp, Homo sapiens
gtgcctgaagaccct

SEQ ID NO: 1779478 - DNA, 15 bp, Homo sapiens
tgcctgaagaccctt

SEQ ID NO: 1779479 - DNA, 15 bp, Homo sapiens
gcctgaagaccctta

SEQ ID NO: 1779480 - DNA, 15 bp, Homo sapiens
cctgaagacccttat

SEQ ID NO: 1779481 - DNA, 15 bp, Homo sapiens
ctgaagacccttatg

SEQ ID NO: 1779482 - DNA, 15 bp, Homo sapiens
tgaagacccttatgt

SEQ ID NO: 1779483 - DNA, 15 bp, Homo sapiens
gaagacccttatgtt

SEQ ID NO: 1779484 - DNA, 15 bp, Homo sapiens
aagacccttatgtta

SEQ ID NO: 1779485 - DNA, 15 bp, Homo sapiens
agacccttatgttac

SEQ ID NO: 1779486 - DNA, 15 bp, Homo sapiens
gacccttatgttacc

SEQ ID NO: 1779487 - DNA, 15 bp, Homo sapiens
acccttatgttacct

SEQ ID NO: 1779488 - DNA, 15 bp, Homo sapiens
cccttatgttacctt

SEQ ID NO: 1779489 - DNA, 15 bp, Homo sapiens
ccttatgttaccttt

SEQ ID NO: 1779490 - DNA, 15 bp, Homo sapiens
cttatgttaccttta

SEQ ID NO: 1779491 - DNA, 15 bp, Homo sapiens
ttatgttacctttac

SEQ ID NO: 1779492 - DNA, 15 bp, Homo sapiens
tatgttacctttaca

SEQ ID NO: 1779493 - DNA, 15 bp, Homo sapiens
atgttacctttacat

SEQ ID NO: 1779494 - DNA, 15 bp, Homo sapiens
tgttacctttacata

SEQ ID NO: 1779495 - DNA, 15 bp, Homo sapiens
gttacctttacatat

SEQ ID NO: 1779496 - DNA, 15 bp, Homo sapiens
ttacctttacatatc

SEQ ID NO: 1779497 - DNA, 15 bp, Homo sapiens
tacctttacatatca

SEQ ID NO: 1779498 - DNA, 15 bp, Homo sapiens
acctttacatatcaa

SEQ ID NO: 1779499 - DNA, 15 bp, Homo sapiens
cctttacatatcaaa

SEQ ID NO: 1779500 - DNA, 15 bp, Homo sapiens
ctttacatatcaaat

SEQ ID NO: 1779501 - DNA, 15 bp, Homo sapiens
tttacatatcaaatt

SEQ ID NO: 1779502 - DNA, 15 bp, Homo sapiens
ttacatatcaaattt

SEQ ID NO: 1779503 - DNA, 15 bp, Homo sapiens
tacatatcaaatttc

SEQ ID NO: 1779504 - DNA, 15 bp, Homo sapiens
acatatcaaatttct

SEQ ID NO: 1779505 - DNA, 15 bp, Homo sapiens
catatcaaatttcta

SEQ ID NO: 1779506 - DNA, 15 bp, Homo sapiens
atatcaaatttctat

SEQ ID NO: 1779507 - DNA, 15 bp, Homo sapiens
tatcaaatttctatt

SEQ ID NO: 1779508 - DNA, 15 bp, Homo sapiens
atcaaatttctattg

SEQ ID NO: 1779509 - DNA, 15 bp, Homo sapiens
tcaaatttctattgt

SEQ ID NO: 1779510 - DNA, 15 bp, Homo sapiens
caaatttctattgta

SEQ ID NO: 1779511 - DNA, 15 bp, Homo sapiens
aaatttctattgtat

SEQ ID NO: 1779512 - DNA, 15 bp, Homo sapiens
aatttctattgtatc

SEQ ID NO: 1779513 - DNA, 15 bp, Homo sapiens
atttctattgtatct

SEQ ID NO: 1779514 - DNA, 15 bp, Homo sapiens
tttctattgtatctg

SEQ ID NO: 1779515 - DNA, 15 bp, Homo sapiens
ttctattgtatctgg

SEQ ID NO: 1779516 - DNA, 15 bp, Homo sapiens
tctattgtatctggc

SEQ ID NO: 1779517 - DNA, 15 bp, Homo sapiens
ctattgtatctggcc

SEQ ID NO: 1779518 - DNA, 15 bp, Homo sapiens
tattgtatctggcca

SEQ ID NO: 1779519 - DNA, 15 bp, Homo sapiens
attgtatctggccaa

SEQ ID NO: 1779520 - DNA, 15 bp, Homo sapiens
ttgtatctggccaac

SEQ ID NO: 1779521 - DNA, 15 bp, Homo sapiens
tgtatctggccaacc

SEQ ID NO: 1779522 - DNA, 15 bp, Homo sapiens
gtatctggccaacct

SEQ ID NO: 1779523 - DNA, 15 bp, Homo sapiens
tatctggccaacctt

SEQ ID NO: 1779524 - DNA, 15 bp, Homo sapiens
atctggccaaccttt

SEQ ID NO: 1779525 - DNA, 15 bp, Homo sapiens
tctggccaacctttg

SEQ ID NO: 1779526 - DNA, 15 bp, Homo sapiens
ctggccaacctttga

SEQ ID NO: 1779527 - DNA, 15 bp, Homo sapiens
tggccaacctttgat

SEQ ID NO: 1779528 - DNA, 15 bp, Homo sapiens
ggccaacctttgatt

SEQ ID NO: 1779529 - DNA, 15 bp, Homo sapiens
gccaacctttgattt

SEQ ID NO: 1779530 - DNA, 15 bp, Homo sapiens
ccaacctttgatttt

SEQ ID NO: 1779531 - DNA, 15 bp, Homo sapiens
caacctttgatttta

SEQ ID NO: 1779532 - DNA, 15 bp, Homo sapiens
aacctttgattttaa

SEQ ID NO: 1779533 - DNA, 15 bp, Homo sapiens
acctttgattttaag

SEQ ID NO: 1779534 - DNA, 15 bp, Homo sapiens
cctttgattttaagg

SEQ ID NO: 1779535 - DNA, 15 bp, Homo sapiens
ctttgattttaaggc

SEQ ID NO: 1779536 - DNA, 15 bp, Homo sapiens
tttgattttaaggca

SEQ ID NO: 1779537 - DNA, 15 bp, Homo sapiens
ttgattttaaggcac

SEQ ID NO: 1779538 - DNA, 15 bp, Homo sapiens
tgattttaaggcact

SEQ ID NO: 1779539 - DNA, 15 bp, Homo sapiens
gattttaaggcacta

SEQ ID NO: 1779540 - DNA, 15 bp, Homo sapiens
attttaaggcactag

SEQ ID NO: 1779541 - DNA, 15 bp, Homo sapiens
ttttaaggcactagg

SEQ ID NO: 1779542 - DNA, 15 bp, Homo sapiens
tttaaggcactaggg

SEQ ID NO: 1779543 - DNA, 15 bp, Homo sapiens
ttaaggcactagggc

SEQ ID NO: 1779544 - DNA, 15 bp, Homo sapiens
taaggcactagggca

SEQ ID NO: 1779545 - DNA, 15 bp, Homo sapiens
aaggcactagggcaa

SEQ ID NO: 1779546 - DNA, 15 bp, Homo sapiens
aggcactagggcaag

SEQ ID NO: 1779547 - DNA, 15 bp, Homo sapiens
ggcactagggcaaga

SEQ ID NO: 1779548 - DNA, 15 bp, Homo sapiens
gcactagggcaagaa

SEQ ID NO: 1779549 - DNA, 15 bp, Homo sapiens
cactagggcaagaat

SEQ ID NO: 1779550 - DNA, 15 bp, Homo sapiens
actagggcaagaatg

SEQ ID NO: 1779551 - DNA, 15 bp, Homo sapiens
ctagggcaagaatga

SEQ ID NO: 1779552 - DNA, 15 bp, Homo sapiens
tagggcaagaatgac

SEQ ID NO: 1779553 - DNA, 15 bp, Homo sapiens
agggcaagaatgacc

SEQ ID NO: 1779554 - DNA, 15 bp, Homo sapiens
gggcaagaatgacca

SEQ ID NO: 1779555 - DNA, 15 bp, Homo sapiens
ggcaagaatgaccaa

SEQ ID NO: 1779556 - DNA, 15 bp, Homo sapiens
gcaagaatgaccaac

SEQ ID NO: 1779557 - DNA, 15 bp, Homo sapiens
caagaatgaccaacg

SEQ ID NO: 1779558 - DNA, 15 bp, Homo sapiens
aagaatgaccaacgg

SEQ ID NO: 1779559 - DNA, 15 bp, Homo sapiens
agaatgaccaacggg

SEQ ID NO: 1779560 - DNA, 15 bp, Homo sapiens
gaatgaccaacgggt

SEQ ID NO: 1779561 - DNA, 15 bp, Homo sapiens
aatgaccaacgggtt

SEQ ID NO: 1779562 - DNA, 15 bp, Homo sapiens
atgaccaacgggttt

SEQ ID NO: 1779563 - DNA, 15 bp, Homo sapiens
tgaccaacgggtttc

SEQ ID NO: 1779564 - DNA, 15 bp, Homo sapiens
gaccaacgggtttcc

SEQ ID NO: 1779565 - DNA, 15 bp, Homo sapiens
accaacgggtttcca

SEQ ID NO: 1779566 - DNA, 15 bp, Homo sapiens
ccaacgggtttccaa

SEQ ID NO: 1779567 - DNA, 15 bp, Homo sapiens
caacgggtttccaaa

SEQ ID NO: 1779568 - DNA, 15 bp, Homo sapiens
aacgggtttccaaac

SEQ ID NO: 1779569 - DNA, 15 bp, Homo sapiens
acgggtttccaaaca

SEQ ID NO: 1779570 - DNA, 15 bp, Homo sapiens
cgggtttccaaacat

SEQ ID NO: 1779571 - DNA, 15 bp, Homo sapiens
gggtttccaaacata

SEQ ID NO: 1779572 - DNA, 15 bp, Homo sapiens
ggtttccaaacatat

SEQ ID NO: 1779573 - DNA, 15 bp, Homo sapiens
gtttccaaacatata

SEQ ID NO: 1779574 - DNA, 15 bp, Homo sapiens
tttccaaacatatag

SEQ ID NO: 1779575 - DNA, 15 bp, Homo sapiens
ttccaaacatataga

SEQ ID NO: 1779576 - DNA, 15 bp, Homo sapiens
tccaaacatatagaa

SEQ ID NO: 1779577 - DNA, 15 bp, Homo sapiens
ccaaacatatagaag

SEQ ID NO: 1779578 - DNA, 15 bp, Homo sapiens
caaacatatagaagt

SEQ ID NO: 1779579 - DNA, 15 bp, Homo sapiens
aaacatatagaagta

SEQ ID NO: 1779580 - DNA, 15 bp, Homo sapiens
aacatatagaagtag

SEQ ID NO: 1779581 - DNA, 15 bp, Homo sapiens
acatatagaagtagt

SEQ ID NO: 1779582 - DNA, 15 bp, Homo sapiens
catatagaagtagta

SEQ ID NO: 1779583 - DNA, 15 bp, Homo sapiens
atatagaagtagtaa

SEQ ID NO: 1779584 - DNA, 15 bp, Homo sapiens
tatagaagtagtaac

SEQ ID NO: 1779585 - DNA, 15 bp, Homo sapiens
atagaagtagtaaca

SEQ ID NO: 1779586 - DNA, 15 bp, Homo sapiens
tagaagtagtaacat

SEQ ID NO: 1779587 - DNA, 15 bp, Homo sapiens
agaagtagtaacatg

SEQ ID NO: 1779588 - DNA, 15 bp, Homo sapiens
gaagtagtaacatgt

SEQ ID NO: 1779589 - DNA, 15 bp, Homo sapiens
aagtagtaacatgtg

SEQ ID NO: 1779590 - DNA, 15 bp, Homo sapiens
agtagtaacatgtgc

SEQ ID NO: 1779591 - DNA, 15 bp, Homo sapiens
gtagtaacatgtgca

SEQ ID NO: 1779592 - DNA, 15 bp, Homo sapiens
tagtaacatgtgcat

SEQ ID NO: 1779593 - DNA, 15 bp, Homo sapiens
agtaacatgtgcata

SEQ ID NO: 1779594 - DNA, 15 bp, Homo sapiens
gtaacatgtgcatat

SEQ ID NO: 1779595 - DNA, 15 bp, Homo sapiens
taacatgtgcatatc

SEQ ID NO: 1779596 - DNA, 15 bp, Homo sapiens
aacatgtgcatatca

SEQ ID NO: 1779597 - DNA, 15 bp, Homo sapiens
acatgtgcatatcaa

SEQ ID NO: 1779598 - DNA, 15 bp, Homo sapiens
catgtgcatatcaac

SEQ ID NO: 1779599 - DNA, 15 bp, Homo sapiens
atgtgcatatcaaca

SEQ ID NO: 1779600 - DNA, 15 bp, Homo sapiens
tgtgcatatcaacaa

SEQ ID NO: 1779601 - DNA, 15 bp, Homo sapiens
gtgcatatcaacaaa

SEQ ID NO: 1779602 - DNA, 15 bp, Homo sapiens
tgcatatcaacaaaa

SEQ ID NO: 1779603 - DNA, 15 bp, Homo sapiens
gcatatcaacaaaaa

SEQ ID NO: 1779604 - DNA, 15 bp, Homo sapiens
catatcaacaaaaat

SEQ ID NO: 1779605 - DNA, 15 bp, Homo sapiens
atatcaacaaaaatc

SEQ ID NO: 1779606 - DNA, 15 bp, Homo sapiens
tatcaacaaaaatca

SEQ ID NO: 1779607 - DNA, 15 bp, Homo sapiens
atcaacaaaaatcac

SEQ ID NO: 1779608 - DNA, 15 bp, Homo sapiens
tcaacaaaaatcact

SEQ ID NO: 1779609 - DNA, 15 bp, Homo sapiens
caacaaaaatcactt

SEQ ID NO: 1779610 - DNA, 15 bp, Homo sapiens
aacaaaaatcacttg

SEQ ID NO: 1779611 - DNA, 15 bp, Homo sapiens
acaaaaatcacttgg

SEQ ID NO: 1779612 - DNA, 15 bp, Homo sapiens
caaaaatcacttggt

SEQ ID NO: 1779613 - DNA, 15 bp, Homo sapiens
aaaaatcacttggta

SEQ ID NO: 1779614 - DNA, 15 bp, Homo sapiens
aaaatcacttggtag

SEQ ID NO: 1779615 - DNA, 15 bp, Homo sapiens
aaatcacttggtagg

SEQ ID NO: 1779616 - DNA, 15 bp, Homo sapiens
aatcacttggtagga

SEQ ID NO: 1779617 - DNA, 15 bp, Homo sapiens
atcacttggtaggaa

SEQ ID NO: 1779618 - DNA, 15 bp, Homo sapiens
tcacttggtaggaac

SEQ ID NO: 1779619 - DNA, 15 bp, Homo sapiens
cacttggtaggaacc

SEQ ID NO: 1779620 - DNA, 15 bp, Homo sapiens
acttggtaggaaccc

SEQ ID NO: 1779621 - DNA, 15 bp, Homo sapiens
cttggtaggaaccca

SEQ ID NO: 1779622 - DNA, 15 bp, Homo sapiens
ttggtaggaacccaa

SEQ ID NO: 1779623 - DNA, 15 bp, Homo sapiens
tggtaggaacccaat

SEQ ID NO: 1779624 - DNA, 15 bp, Homo sapiens
ggtaggaacccaata

SEQ ID NO: 1779625 - DNA, 15 bp, Homo sapiens
gtaggaacccaatac

SEQ ID NO: 1779626 - DNA, 15 bp, Homo sapiens
taggaacccaatact

SEQ ID NO: 1779627 - DNA, 15 bp, Homo sapiens
aggaacccaatacta

SEQ ID NO: 1779628 - DNA, 15 bp, Homo sapiens
ggaacccaatactag

SEQ ID NO: 1779629 - DNA, 15 bp, Homo sapiens
gaacccaatactagc

SEQ ID NO: 1779630 - DNA, 15 bp, Homo sapiens
aacccaatactagct

SEQ ID NO: 1779631 - DNA, 15 bp, Homo sapiens
acccaatactagcta

SEQ ID NO: 1779632 - DNA, 15 bp, Homo sapiens
cccaatactagctaa

SEQ ID NO: 1779633 - DNA, 15 bp, Homo sapiens
ccaatactagctaat

SEQ ID NO: 1779634 - DNA, 15 bp, Homo sapiens
caatactagctaata

SEQ ID NO: 1779635 - DNA, 15 bp, Homo sapiens
aatactagctaataa

SEQ ID NO: 1779636 - DNA, 15 bp, Homo sapiens
atactagctaataag

SEQ ID NO: 1779637 - DNA, 15 bp, Homo sapiens
tactagctaataagc

SEQ ID NO: 1779638 - DNA, 15 bp, Homo sapiens
actagctaataagcc

SEQ ID NO: 1779639 - DNA, 15 bp, Homo sapiens
ctagctaataagcct

SEQ ID NO: 1779640 - DNA, 15 bp, Homo sapiens
tagctaataagccta

SEQ ID NO: 1779641 - DNA, 15 bp, Homo sapiens
agctaataagcctac

SEQ ID NO: 1779642 - DNA, 15 bp, Homo sapiens
gctaataagcctact

SEQ ID NO: 1779643 - DNA, 15 bp, Homo sapiens
ctaataagcctactc

SEQ ID NO: 1779644 - DNA, 15 bp, Homo sapiens
taataagcctactcc

SEQ ID NO: 1779645 - DNA, 15 bp, Homo sapiens
aataagcctactcct

SEQ ID NO: 1779646 - DNA, 15 bp, Homo sapiens
ataagcctactccta

SEQ ID NO: 1779647 - DNA, 15 bp, Homo sapiens
taagcctactcctac

SEQ ID NO: 1779648 - DNA, 15 bp, Homo sapiens
aagcctactcctact

SEQ ID NO: 1779649 - DNA, 15 bp, Homo sapiens
agcctactcctactg

SEQ ID NO: 1779650 - DNA, 15 bp, Homo sapiens
gcctactcctactgt

SEQ ID NO: 1779651 - DNA, 15 bp, Homo sapiens
cctactcctactgtc

SEQ ID NO: 1779652 - DNA, 15 bp, Homo sapiens
ctactcctactgtct

SEQ ID NO: 1779653 - DNA, 15 bp, Homo sapiens
tactcctactgtctt

SEQ ID NO: 1779654 - DNA, 15 bp, Homo sapiens
actcctactgtctta

SEQ ID NO: 1779655 - DNA, 15 bp, Homo sapiens
ctcctactgtcttag

SEQ ID NO: 1779656 - DNA, 15 bp, Homo sapiens
tcctactgtcttaga

SEQ ID NO: 1779657 - DNA, 15 bp, Homo sapiens
cctactgtcttagat

SEQ ID NO: 1779658 - DNA, 15 bp, Homo sapiens
ctactgtcttagatc

SEQ ID NO: 1779659 - DNA, 15 bp, Homo sapiens
tactgtcttagatct

SEQ ID NO: 1779660 - DNA, 15 bp, Homo sapiens
actgtcttagatcta

SEQ ID NO: 1779661 - DNA, 15 bp, Homo sapiens
ctgtcttagatctag

SEQ ID NO: 1779662 - DNA, 15 bp, Homo sapiens
tgtcttagatctagt

SEQ ID NO: 1779663 - DNA, 15 bp, Homo sapiens
gtcttagatctagtt

SEQ ID NO: 1779664 - DNA, 15 bp, Homo sapiens
tcttagatctagttc

SEQ ID NO: 1779665 - DNA, 15 bp, Homo sapiens
cttagatctagttct

SEQ ID NO: 1779666 - DNA, 15 bp, Homo sapiens
ttagatctagttctg

SEQ ID NO: 1779667 - DNA, 15 bp, Homo sapiens
tagatctagttctgt

SEQ ID NO: 1779668 - DNA, 15 bp, Homo sapiens
agatctagttctgtt

SEQ ID NO: 1779669 - DNA, 15 bp, Homo sapiens
gatctagttctgttt

SEQ ID NO: 1779670 - DNA, 15 bp, Homo sapiens
atctagttctgtttc

SEQ ID NO: 1779671 - DNA, 15 bp, Homo sapiens
tctagttctgtttca

SEQ ID NO: 1779672 - DNA, 15 bp, Homo sapiens
ctagttctgtttcag

SEQ ID NO: 1779673 - DNA, 15 bp, Homo sapiens
tagttctgtttcaga

SEQ ID NO: 1779674 - DNA, 15 bp, Homo sapiens
agttctgtttcagaa

SEQ ID NO: 1779675 - DNA, 15 bp, Homo sapiens
gttctgtttcagaat

SEQ ID NO: 1779676 - DNA, 15 bp, Homo sapiens
ttctgtttcagaatt

SEQ ID NO: 1779677 - DNA, 15 bp, Homo sapiens
tctgtttcagaattg

SEQ ID NO: 1779678 - DNA, 15 bp, Homo sapiens
ctgtttcagaattgg

SEQ ID NO: 1779679 - DNA, 15 bp, Homo sapiens
tgtttcagaattgga

SEQ ID NO: 1779680 - DNA, 15 bp, Homo sapiens
gtttcagaattggaa

SEQ ID NO: 1779681 - DNA, 15 bp, Homo sapiens
tttcagaattggaag

SEQ ID NO: 1779682 - DNA, 15 bp, Homo sapiens
ttcagaattggaagc

SEQ ID NO: 1779683 - DNA, 15 bp, Homo sapiens
tcagaattggaagct

SEQ ID NO: 1779684 - DNA, 15 bp, Homo sapiens
cagaattggaagctt

SEQ ID NO: 1779685 - DNA, 15 bp, Homo sapiens
agaattggaagcttt

SEQ ID NO: 1779686 - DNA, 15 bp, Homo sapiens
gaattggaagcttta

SEQ ID NO: 1779687 - DNA, 15 bp, Homo sapiens
aattggaagctttaa

SEQ ID NO: 1779688 - DNA, 15 bp, Homo sapiens
attggaagctttaag

SEQ ID NO: 1779689 - DNA, 15 bp, Homo sapiens
ttggaagctttaagg

SEQ ID NO: 1779690 - DNA, 15 bp, Homo sapiens
tggaagctttaagga

SEQ ID NO: 1779691 - DNA, 15 bp, Homo sapiens
ggaagctttaaggat

SEQ ID NO: 1779692 - DNA, 15 bp, Homo sapiens
gaagctttaaggatt

SEQ ID NO: 1779693 - DNA, 15 bp, Homo sapiens
aagctttaaggatta

SEQ ID NO: 1779694 - DNA, 15 bp, Homo sapiens
agctttaaggattat

SEQ ID NO: 1779695 - DNA, 15 bp, Homo sapiens
gctttaaggattatg

SEQ ID NO: 1779696 - DNA, 15 bp, Homo sapiens
ctttaaggattatga

SEQ ID NO: 1779697 - DNA, 15 bp, Homo sapiens
tttaaggattatgaa

SEQ ID NO: 1779698 - DNA, 15 bp, Homo sapiens
ttaaggattatgaaa

SEQ ID NO: 1779699 - DNA, 15 bp, Homo sapiens
taaggattatgaaat

SEQ ID NO: 1779700 - DNA, 15 bp, Homo sapiens
aaggattatgaaatt

SEQ ID NO: 1779701 - DNA, 15 bp, Homo sapiens
aggattatgaaattc

SEQ ID NO: 1779702 - DNA, 15 bp, Homo sapiens
ggattatgaaattct

SEQ ID NO: 1779703 - DNA, 15 bp, Homo sapiens
gattatgaaattctg

SEQ ID NO: 1779704 - DNA, 15 bp, Homo sapiens
attatgaaattctgg

SEQ ID NO: 1779705 - DNA, 15 bp, Homo sapiens
ttatgaaattctggg

SEQ ID NO: 1779706 - DNA, 15 bp, Homo sapiens
tatgaaattctggga

SEQ ID NO: 1779707 - DNA, 15 bp, Homo sapiens
atgaaattctgggaa

SEQ ID NO: 1779708 - DNA, 15 bp, Homo sapiens
tgaaattctgggaac

SEQ ID NO: 1779709 - DNA, 15 bp, Homo sapiens
gaaattctgggaact

SEQ ID NO: 1779710 - DNA, 15 bp, Homo sapiens
aaattctgggaactt

SEQ ID NO: 1779711 - DNA, 15 bp, Homo sapiens
aattctgggaacttg

SEQ ID NO: 1779712 - DNA, 15 bp, Homo sapiens
attctgggaacttgg

SEQ ID NO: 1779713 - DNA, 15 bp, Homo sapiens
ttctgggaacttgga

SEQ ID NO: 1779714 - DNA, 15 bp, Homo sapiens
tctgggaacttggag

SEQ ID NO: 1779715 - DNA, 15 bp, Homo sapiens
ctgggaacttggagt

SEQ ID NO: 1779716 - DNA, 15 bp, Homo sapiens
tgggaacttggagta

SEQ ID NO: 1779717 - DNA, 15 bp, Homo sapiens
gggaacttggagtag

SEQ ID NO: 1779718 - DNA, 15 bp, Homo sapiens
ggaacttggagtagg

SEQ ID NO: 1779719 - DNA, 15 bp, Homo sapiens
gaacttggagtaggt

SEQ ID NO: 1779720 - DNA, 15 bp, Homo sapiens
aacttggagtaggtc

SEQ ID NO: 1779721 - DNA, 15 bp, Homo sapiens
acttggagtaggtcc

SEQ ID NO: 1779722 - DNA, 15 bp, Homo sapiens
cttggagtaggtcca

SEQ ID NO: 1779723 - DNA, 15 bp, Homo sapiens
ttggagtaggtccac

SEQ ID NO: 1779724 - DNA, 15 bp, Homo sapiens
tggagtaggtccacc

SEQ ID NO: 1779725 - DNA, 15 bp, Homo sapiens
ggagtaggtccacct

SEQ ID NO: 1779726 - DNA, 15 bp, Homo sapiens
gagtaggtccaccta

SEQ ID NO: 1779727 - DNA, 15 bp, Homo sapiens
agtaggtccacctag

SEQ ID NO: 1779728 - DNA, 15 bp, Homo sapiens
gtaggtccacctaga

SEQ ID NO: 1779729 - DNA, 15 bp, Homo sapiens
taggtccacctagaa

SEQ ID NO: 1779730 - DNA, 15 bp, Homo sapiens
aggtccacctagaag

SEQ ID NO: 1779731 - DNA, 15 bp, Homo sapiens
ggtccacctagaagt

SEQ ID NO: 1779732 - DNA, 15 bp, Homo sapiens
gtccacctagaagta

SEQ ID NO: 1779733 - DNA, 15 bp, Homo sapiens
tccacctagaagtag

SEQ ID NO: 1779734 - DNA, 15 bp, Homo sapiens
ccacctagaagtaga

SEQ ID NO: 1779735 - DNA, 15 bp, Homo sapiens
cacctagaagtagaa

SEQ ID NO: 1779736 - DNA, 15 bp, Homo sapiens
acctagaagtagaag

SEQ ID NO: 1779737 - DNA, 15 bp, Homo sapiens
cctagaagtagaagc

SEQ ID NO: 1779738 - DNA, 15 bp, Homo sapiens
ctagaagtagaagca

SEQ ID NO: 1779739 - DNA, 15 bp, Homo sapiens
tagaagtagaagcag

SEQ ID NO: 1779740 - DNA, 15 bp, Homo sapiens
agaagtagaagcagc

SEQ ID NO: 1779741 - DNA, 15 bp, Homo sapiens
gaagtagaagcagca

SEQ ID NO: 1779742 - DNA, 15 bp, Homo sapiens
aagtagaagcagcaa

SEQ ID NO: 1779743 - DNA, 15 bp, Homo sapiens
agtagaagcagcaaa

SEQ ID NO: 1779744 - DNA, 15 bp, Homo sapiens
gtagaagcagcaaaa

SEQ ID NO: 1779745 - DNA, 15 bp, Homo sapiens
tagaagcagcaaaac

SEQ ID NO: 1779746 - DNA, 15 bp, Homo sapiens
agaagcagcaaaacc

SEQ ID NO: 1779747 - DNA, 15 bp, Homo sapiens
gaagcagcaaaaccc

SEQ ID NO: 1779748 - DNA, 15 bp, Homo sapiens
aagcagcaaaaccca

SEQ ID NO: 1779749 - DNA, 15 bp, Homo sapiens
agcagcaaaacccaa

SEQ ID NO: 1779750 - DNA, 15 bp, Homo sapiens
gcagcaaaacccaaa

SEQ ID NO: 1779751 - DNA, 15 bp, Homo sapiens
cagcaaaacccaaaa

SEQ ID NO: 1779752 - DNA, 15 bp, Homo sapiens
agcaaaacccaaaaa

SEQ ID NO: 1779753 - DNA, 15 bp, Homo sapiens
gcaaaacccaaaaaa

SEQ ID NO: 1779754 - DNA, 15 bp, Homo sapiens
caaaacccaaaaaac

SEQ ID NO: 1779755 - DNA, 15 bp, Homo sapiens
aaaacccaaaaaacc

SEQ ID NO: 1779756 - DNA, 15 bp, Homo sapiens
aaacccaaaaaacca

SEQ ID NO: 1779757 - DNA, 15 bp, Homo sapiens
aacccaaaaaaccaa

SEQ ID NO: 1779758 - DNA, 15 bp, Homo sapiens
acccaaaaaaccaat

SEQ ID NO: 1779759 - DNA, 15 bp, Homo sapiens
cccaaaaaaccaata

SEQ ID NO: 1779760 - DNA, 15 bp, Homo sapiens
ccaaaaaaccaatac

SEQ ID NO: 1779761 - DNA, 15 bp, Homo sapiens
caaaaaaccaataca

SEQ ID NO: 1779762 - DNA, 15 bp, Homo sapiens
aaaaaaccaatacaa

SEQ ID NO: 1779763 - DNA, 15 bp, Homo sapiens
aaaaaccaatacaat

SEQ ID NO: 1779764 - DNA, 15 bp, Homo sapiens
aaaaccaatacaatt

SEQ ID NO: 1779765 - DNA, 15 bp, Homo sapiens
aaaccaatacaattt

SEQ ID NO: 1779766 - DNA, 15 bp, Homo sapiens
aaccaatacaatttt

SEQ ID NO: 1779767 - DNA, 15 bp, Homo sapiens
accaatacaattttt

SEQ ID NO: 1779768 - DNA, 15 bp, Homo sapiens
ccaatacaattttta

SEQ ID NO: 1779769 - DNA, 15 bp, Homo sapiens
caatacaatttttaa

SEQ ID NO: 1779770 - DNA, 15 bp, Homo sapiens
aatacaatttttaat

SEQ ID NO: 1779771 - DNA, 15 bp, Homo sapiens
atacaatttttaata

SEQ ID NO: 1779772 - DNA, 15 bp, Homo sapiens
tacaatttttaatag

SEQ ID NO: 1779773 - DNA, 15 bp, Homo sapiens
acaatttttaatagt

SEQ ID NO: 1779774 - DNA, 15 bp, Homo sapiens
caatttttaatagtg

SEQ ID NO: 1779775 - DNA, 15 bp, Homo sapiens
aatttttaatagtgt

SEQ ID NO: 1779776 - DNA, 15 bp, Homo sapiens
atttttaatagtgtt

SEQ ID NO: 1779777 - DNA, 15 bp, Homo sapiens
tttttaatagtgttg

SEQ ID NO: 1779778 - DNA, 15 bp, Homo sapiens
ttttaatagtgttgt

SEQ ID NO: 1779779 - DNA, 15 bp, Homo sapiens
tttaatagtgttgtt

SEQ ID NO: 1779780 - DNA, 15 bp, Homo sapiens
ttaatagtgttgttt

SEQ ID NO: 1779781 - DNA, 15 bp, Homo sapiens
taatagtgttgttta

SEQ ID NO: 1779782 - DNA, 15 bp, Homo sapiens
aatagtgttgtttaa

SEQ ID NO: 1779783 - DNA, 15 bp, Homo sapiens
atagtgttgtttaat

SEQ ID NO: 1779784 - DNA, 15 bp, Homo sapiens
tagtgttgtttaatt

SEQ ID NO: 1779785 - DNA, 15 bp, Homo sapiens
agtgttgtttaattt

SEQ ID NO: 1779786 - DNA, 15 bp, Homo sapiens
gtgttgtttaatttt

SEQ ID NO: 1779787 - DNA, 15 bp, Homo sapiens
tgttgtttaattttt

SEQ ID NO: 1779788 - DNA, 15 bp, Homo sapiens
gttgtttaattttta

SEQ ID NO: 1779789 - DNA, 15 bp, Homo sapiens
ttgtttaatttttaa

SEQ ID NO: 1779790 - DNA, 15 bp, Homo sapiens
tgtttaatttttaag

SEQ ID NO: 1779791 - DNA, 15 bp, Homo sapiens
gtttaatttttaagt

SEQ ID NO: 1779792 - DNA, 15 bp, Homo sapiens
tttaatttttaagtg

SEQ ID NO: 1779793 - DNA, 15 bp, Homo sapiens
ttaatttttaagtgt

SEQ ID NO: 1779794 - DNA, 15 bp, Homo sapiens
taatttttaagtgtt

SEQ ID NO: 1779795 - DNA, 15 bp, Homo sapiens
aatttttaagtgtta

SEQ ID NO: 1779796 - DNA, 15 bp, Homo sapiens
atttttaagtgttat

SEQ ID NO: 1779797 - DNA, 15 bp, Homo sapiens
tttttaagtgttatt

SEQ ID NO: 1779798 - DNA, 15 bp, Homo sapiens
ttttaagtgttattt

SEQ ID NO: 1779799 - DNA, 15 bp, Homo sapiens
tttaagtgttattta

SEQ ID NO: 1779800 - DNA, 15 bp, Homo sapiens
ttaagtgttatttac

SEQ ID NO: 1779801 - DNA, 15 bp, Homo sapiens
taagtgttatttact

SEQ ID NO: 1779802 - DNA, 15 bp, Homo sapiens
aagtgttatttacta

SEQ ID NO: 1779803 - DNA, 15 bp, Homo sapiens
agtgttatttactag

SEQ ID NO: 1779804 - DNA, 15 bp, Homo sapiens
gtgttatttactaga

SEQ ID NO: 1779805 - DNA, 15 bp, Homo sapiens
tgttatttactagaa

SEQ ID NO: 1779806 - DNA, 15 bp, Homo sapiens
gttatttactagaaa

SEQ ID NO: 1779807 - DNA, 15 bp, Homo sapiens
ttatttactagaaaa

SEQ ID NO: 1779808 - DNA, 15 bp, Homo sapiens
tatttactagaaaat

SEQ ID NO: 1779809 - DNA, 15 bp, Homo sapiens
atttactagaaaata

SEQ ID NO: 1779810 - DNA, 15 bp, Homo sapiens
tttactagaaaataa

SEQ ID NO: 1779811 - DNA, 15 bp, Homo sapiens
ttactagaaaataaa

SEQ ID NO: 1779812 - DNA, 15 bp, Homo sapiens
tactagaaaataaaa

SEQ ID NO: 1779813 - DNA, 15 bp, Homo sapiens
actagaaaataaaac

SEQ ID NO: 1779814 - DNA, 15 bp, Homo sapiens
ctagaaaataaaact

SEQ ID NO: 1779815 - DNA, 15 bp, Homo sapiens
agaaaataaaactat

SEQ ID NO: 1779816 - DNA, 15 bp, Homo sapiens
gaaaataaaactata

SEQ ID NO: 1779817 - DNA, 15 bp, Homo sapiens
aaaataaaactatac

SEQ ID NO: 1779818 - DNA, 15 bp, Homo sapiens
aaataaaactatact

SEQ ID NO: 1779819 - DNA, 15 bp, Homo sapiens
aataaaactatactg

SEQ ID NO: 1779820 - DNA, 15 bp, Homo sapiens
ataaaactatactgt

SEQ ID NO: 1779821 - DNA, 15 bp, Homo sapiens
taaaactatactgtg

SEQ ID NO: 1779822 - DNA, 15 bp, Homo sapiens
aaaactatactgtgt

SEQ ID NO: 1779823 - DNA, 15 bp, Homo sapiens
aaactatactgtgtt

SEQ ID NO: 1779824 - DNA, 15 bp, Homo sapiens
aactatactgtgttt

SEQ ID NO: 1779825 - DNA, 15 bp, Homo sapiens
actatactgtgttta

SEQ ID NO: 1779826 - DNA, 15 bp, Homo sapiens
ctatactgtgtttaa

SEQ ID NO: 1779827 - DNA, 15 bp, Homo sapiens
tatactgtgtttaat

SEQ ID NO: 1779828 - DNA, 15 bp, Homo sapiens
atactgtgtttaatc

SEQ ID NO: 1779829 - DNA, 15 bp, Homo sapiens
tactgtgtttaatca

SEQ ID NO: 1779830 - DNA, 15 bp, Homo sapiens
actgtgtttaatcat

SEQ ID NO: 1779831 - DNA, 15 bp, Homo sapiens
ctgtgtttaatcatc

SEQ ID NO: 1779832 - DNA, 15 bp, Homo sapiens
tgtgtttaatcatca

SEQ ID NO: 1779833 - DNA, 15 bp, Homo sapiens
gtgtttaatcatcaa

SEQ ID NO: 1779834 - DNA, 15 bp, Homo sapiens
tgtttaatcatcaag

SEQ ID NO: 1779835 - DNA, 15 bp, Homo sapiens
gtttaatcatcaagc

SEQ ID NO: 1779836 - DNA, 15 bp, Homo sapiens
tttaatcatcaagca

SEQ ID NO: 1779837 - DNA, 15 bp, Homo sapiens
ttaatcatcaagcaa

SEQ ID NO: 1779838 - DNA, 15 bp, Homo sapiens
taatcatcaagcaat

SEQ ID NO: 1779839 - DNA, 15 bp, Homo sapiens
aatcatcaagcaatt

SEQ ID NO: 1779840 - DNA, 15 bp, Homo sapiens
atcatcaagcaattt

SEQ ID NO: 1779841 - DNA, 15 bp, Homo sapiens
tcatcaagcaatttt

SEQ ID NO: 1779842 - DNA, 15 bp, Homo sapiens
catcaagcaattttt

SEQ ID NO: 1779843 - DNA, 15 bp, Homo sapiens
atcaagcaattttta

SEQ ID NO: 1779844 - DNA, 15 bp, Homo sapiens
tcaagcaatttttaa

SEQ ID NO: 1779845 - DNA, 15 bp, Homo sapiens
caagcaatttttaac

SEQ ID NO: 1779846 - DNA, 15 bp, Homo sapiens
aagcaatttttaaca

SEQ ID NO: 1779847 - DNA, 15 bp, Homo sapiens
agcaatttttaacaa

SEQ ID NO: 1779848 - DNA, 15 bp, Homo sapiens
gcaatttttaacaaa

SEQ ID NO: 1779849 - DNA, 15 bp, Homo sapiens
caatttttaacaaaa

SEQ ID NO: 1779850 - DNA, 15 bp, Homo sapiens
aatttttaacaaaaa

SEQ ID NO: 1779851 - DNA, 15 bp, Homo sapiens
atttttaacaaaaaa

SEQ ID NO: 1779852 - DNA, 15 bp, Homo sapiens
ttttaacaaaaaagt

SEQ ID NO: 1779853 - DNA, 15 bp, Homo sapiens
tttaacaaaaaagtt

SEQ ID NO: 1779854 - DNA, 15 bp, Homo sapiens
ttaacaaaaaagttt

SEQ ID NO: 1779855 - DNA, 15 bp, Homo sapiens
taacaaaaaagttta

SEQ ID NO: 1779856 - DNA, 15 bp, Homo sapiens
aacaaaaaagtttag

SEQ ID NO: 1779857 - DNA, 15 bp, Homo sapiens
acaaaaaagtttagc

SEQ ID NO: 1779858 - DNA, 15 bp, Homo sapiens
caaaaaagtttagca

SEQ ID NO: 1779859 - DNA, 15 bp, Homo sapiens
aaaaaagtttagcac

SEQ ID NO: 1779860 - DNA, 15 bp, Homo sapiens
aaaaagtttagcact

SEQ ID NO: 1779861 - DNA, 15 bp, Homo sapiens
aaaagtttagcacta

SEQ ID NO: 1779862 - DNA, 15 bp, Homo sapiens
aaagtttagcactag

SEQ ID NO: 1779863 - DNA, 15 bp, Homo sapiens
aagtttagcactagg

SEQ ID NO: 1779864 - DNA, 15 bp, Homo sapiens
agtttagcactagga

SEQ ID NO: 1779865 - DNA, 15 bp, Homo sapiens
gtttagcactaggaa

SEQ ID NO: 1779866 - DNA, 15 bp, Homo sapiens
tttagcactaggaat

SEQ ID NO: 1779867 - DNA, 15 bp, Homo sapiens
ttagcactaggaata

SEQ ID NO: 1779868 - DNA, 15 bp, Homo sapiens
tagcactaggaatag

SEQ ID NO: 1779869 - DNA, 15 bp, Homo sapiens
agcactaggaatagg

SEQ ID NO: 1779870 - DNA, 15 bp, Homo sapiens
gcactaggaataggt

SEQ ID NO: 1779871 - DNA, 15 bp, Homo sapiens
cactaggaataggtt

SEQ ID NO: 1779872 - DNA, 15 bp, Homo sapiens
actaggaataggtta

SEQ ID NO: 1779873 - DNA, 15 bp, Homo sapiens
ctaggaataggttaa

SEQ ID NO: 1779874 - DNA, 15 bp, Homo sapiens
taggaataggttaaa

SEQ ID NO: 1779875 - DNA, 15 bp, Homo sapiens
aggaataggttaaac

SEQ ID NO: 1779876 - DNA, 15 bp, Homo sapiens
ggaataggttaaact

SEQ ID NO: 1779877 - DNA, 15 bp, Homo sapiens
gaataggttaaactt

SEQ ID NO: 1779878 - DNA, 15 bp, Homo sapiens
aataggttaaacttg

SEQ ID NO: 1779879 - DNA, 15 bp, Homo sapiens
ataggttaaacttga

SEQ ID NO: 1779880 - DNA, 15 bp, Homo sapiens
taggttaaacttgac

SEQ ID NO: 1779881 - DNA, 15 bp, Homo sapiens
aggttaaacttgaca

SEQ ID NO: 1779882 - DNA, 15 bp, Homo sapiens
ggttaaacttgacac

SEQ ID NO: 1779883 - DNA, 15 bp, Homo sapiens
gttaaacttgacaca

SEQ ID NO: 1779884 - DNA, 15 bp, Homo sapiens
ttaaacttgacacaa

SEQ ID NO: 1779885 - DNA, 15 bp, Homo sapiens
taaacttgacacaat

SEQ ID NO: 1779886 - DNA, 15 bp, Homo sapiens
aaacttgacacaatt

SEQ ID NO: 1779887 - DNA, 15 bp, Homo sapiens
aacttgacacaattt

SEQ ID NO: 1779888 - DNA, 15 bp, Homo sapiens
acttgacacaatttg

SEQ ID NO: 1779889 - DNA, 15 bp, Homo sapiens
cttgacacaatttgc

SEQ ID NO: 1779890 - DNA, 15 bp, Homo sapiens
ttgacacaatttgct

SEQ ID NO: 1779891 - DNA, 15 bp, Homo sapiens
tgacacaatttgcta

SEQ ID NO: 1779892 - DNA, 15 bp, Homo sapiens
gacacaatttgctat

SEQ ID NO: 1779893 - DNA, 15 bp, Homo sapiens
acacaatttgctatc

SEQ ID NO: 1779894 - DNA, 15 bp, Homo sapiens
cacaatttgctatca

SEQ ID NO: 1779895 - DNA, 15 bp, Homo sapiens
acaatttgctatcat

SEQ ID NO: 1779896 - DNA, 15 bp, Homo sapiens
caatttgctatcata

SEQ ID NO: 1779897 - DNA, 15 bp, Homo sapiens
aatttgctatcatag

SEQ ID NO: 1779898 - DNA, 15 bp, Homo sapiens
atttgctatcataga

SEQ ID NO: 1779899 - DNA, 15 bp, Homo sapiens
tttgctatcatagaa

SEQ ID NO: 1779900 - DNA, 15 bp, Homo sapiens
ttgctatcatagaat

SEQ ID NO: 1779901 - DNA, 15 bp, Homo sapiens
tgctatcatagaatt

SEQ ID NO: 1779902 - DNA, 15 bp, Homo sapiens
gctatcatagaatta

SEQ ID NO: 1779903 - DNA, 15 bp, Homo sapiens
ctatcatagaattat

SEQ ID NO: 1779904 - DNA, 15 bp, Homo sapiens
tatcatagaattata

SEQ ID NO: 1779905 - DNA, 15 bp, Homo sapiens
atcatagaattatat

SEQ ID NO: 1779906 - DNA, 15 bp, Homo sapiens
tcatagaattatata

SEQ ID NO: 1779907 - DNA, 15 bp, Homo sapiens
catagaattatatat

SEQ ID NO: 1779908 - DNA, 15 bp, Homo sapiens
atagaattatatata

SEQ ID NO: 1779909 - DNA, 15 bp, Homo sapiens
tagaattatatatat

SEQ ID NO: 1779910 - DNA, 15 bp, Homo sapiens
agaattatatatatg

SEQ ID NO: 1779911 - DNA, 15 bp, Homo sapiens
gaattatatatatgg

SEQ ID NO: 1779912 - DNA, 15 bp, Homo sapiens
aattatatatatggg

SEQ ID NO: 1779913 - DNA, 15 bp, Homo sapiens
attatatatatgggt

SEQ ID NO: 1779914 - DNA, 15 bp, Homo sapiens
ttatatatatgggta

SEQ ID NO: 1779915 - DNA, 15 bp, Homo sapiens
tatatatatgggtaa

SEQ ID NO: 1779916 - DNA, 15 bp, Homo sapiens
atatatatgggtaaa

SEQ ID NO: 1779917 - DNA, 15 bp, Homo sapiens
tatatatgggtaaag

SEQ ID NO: 1779918 - DNA, 15 bp, Homo sapiens
atatatgggtaaagg

SEQ ID NO: 1779919 - DNA, 15 bp, Homo sapiens
tatatgggtaaaggg

SEQ ID NO: 1779920 - DNA, 15 bp, Homo sapiens
atatgggtaaagggt

SEQ ID NO: 1779921 - DNA, 15 bp, Homo sapiens
tatgggtaaagggta

SEQ ID NO: 1779922 - DNA, 15 bp, Homo sapiens
atgggtaaagggtac

SEQ ID NO: 1779923 - DNA, 15 bp, Homo sapiens
tgggtaaagggtacc

SEQ ID NO: 1779924 - DNA, 15 bp, Homo sapiens
gggtaaagggtacca

SEQ ID NO: 1779925 - DNA, 15 bp, Homo sapiens
ggtaaagggtaccag

SEQ ID NO: 1779926 - DNA, 15 bp, Homo sapiens
gtaaagggtaccagt

SEQ ID NO: 1779927 - DNA, 15 bp, Homo sapiens
taaagggtaccagtt

SEQ ID NO: 1779928 - DNA, 15 bp, Homo sapiens
aaagggtaccagtta

SEQ ID NO: 1779929 - DNA, 15 bp, Homo sapiens
aagggtaccagttag

SEQ ID NO: 1779930 - DNA, 15 bp, Homo sapiens
agggtaccagttaga

SEQ ID NO: 1779931 - DNA, 15 bp, Homo sapiens
gggtaccagttagat

SEQ ID NO: 1779932 - DNA, 15 bp, Homo sapiens
ggtaccagttagatt

SEQ ID NO: 1779933 - DNA, 15 bp, Homo sapiens
gtaccagttagattc

SEQ ID NO: 1779934 - DNA, 15 bp, Homo sapiens
taccagttagattcc

SEQ ID NO: 1779935 - DNA, 15 bp, Homo sapiens
accagttagattccc

SEQ ID NO: 1779936 - DNA, 15 bp, Homo sapiens
ccagttagattccca

SEQ ID NO: 1779937 - DNA, 15 bp, Homo sapiens
cagttagattcccat

SEQ ID NO: 1779938 - DNA, 15 bp, Homo sapiens
agttagattcccatt

SEQ ID NO: 1779939 - DNA, 15 bp, Homo sapiens
gttagattcccattg

SEQ ID NO: 1779940 - DNA, 15 bp, Homo sapiens
ttagattcccattgg

SEQ ID NO: 1779941 - DNA, 15 bp, Homo sapiens
tagattcccattggc

SEQ ID NO: 1779942 - DNA, 15 bp, Homo sapiens
agattcccattggca

SEQ ID NO: 1779943 - DNA, 15 bp, Homo sapiens
gattcccattggcaa

SEQ ID NO: 1779944 - DNA, 15 bp, Homo sapiens
attcccattggcaaa

SEQ ID NO: 1779945 - DNA, 15 bp, Homo sapiens
ttcccattggcaaaa

SEQ ID NO: 1779946 - DNA, 15 bp, Homo sapiens
tcccattggcaaaaa

SEQ ID NO: 1779947 - DNA, 15 bp, Homo sapiens
cccattggcaaaaac

SEQ ID NO: 1779948 - DNA, 15 bp, Homo sapiens
ccattggcaaaaacc

SEQ ID NO: 1779949 - DNA, 15 bp, Homo sapiens
cattggcaaaaacct

SEQ ID NO: 1779950 - DNA, 15 bp, Homo sapiens
attggcaaaaacctg

SEQ ID NO: 1779951 - DNA, 15 bp, Homo sapiens
ttggcaaaaacctgg

SEQ ID NO: 1779952 - DNA, 15 bp, Homo sapiens
tggcaaaaacctggt

SEQ ID NO: 1779953 - DNA, 15 bp, Homo sapiens
ggcaaaaacctggtg

SEQ ID NO: 1779954 - DNA, 15 bp, Homo sapiens
gcaaaaacctggtga

SEQ ID NO: 1779955 - DNA, 15 bp, Homo sapiens
caaaaacctggtgat

SEQ ID NO: 1779956 - DNA, 15 bp, Homo sapiens
aaaaacctggtgatt

SEQ ID NO: 1779957 - DNA, 15 bp, Homo sapiens
aaaacctggtgattt

SEQ ID NO: 1779958 - DNA, 15 bp, Homo sapiens
aaacctggtgatttt

SEQ ID NO: 1779959 - DNA, 15 bp, Homo sapiens
aacctggtgattttc

SEQ ID NO: 1779960 - DNA, 15 bp, Homo sapiens
acctggtgattttca

SEQ ID NO: 1779961 - DNA, 15 bp, Homo sapiens
cctggtgattttcat

SEQ ID NO: 1779962 - DNA, 15 bp, Homo sapiens
ctggtgattttcatt

SEQ ID NO: 1779963 - DNA, 15 bp, Homo sapiens
tggtgattttcattc

SEQ ID NO: 1779964 - DNA, 15 bp, Homo sapiens
ggtgattttcattct

SEQ ID NO: 1779965 - DNA, 15 bp, Homo sapiens
gtgattttcattctg

SEQ ID NO: 1779966 - DNA, 15 bp, Homo sapiens
tgattttcattctgt

SEQ ID NO: 1779967 - DNA, 15 bp, Homo sapiens
gattttcattctgtg

SEQ ID NO: 1779968 - DNA, 15 bp, Homo sapiens
attttcattctgtgg

SEQ ID NO: 1779969 - DNA, 15 bp, Homo sapiens
ttttcattctgtggt

SEQ ID NO: 1779970 - DNA, 15 bp, Homo sapiens
tttcattctgtggta

SEQ ID NO: 1779971 - DNA, 15 bp, Homo sapiens
ttcattctgtggtat

SEQ ID NO: 1779972 - DNA, 15 bp, Homo sapiens
tcattctgtggtata

SEQ ID NO: 1779973 - DNA, 15 bp, Homo sapiens
cattctgtggtatag

SEQ ID NO: 1779974 - DNA, 15 bp, Homo sapiens
attctgtggtataga

SEQ ID NO: 1779975 - DNA, 15 bp, Homo sapiens
ttctgtggtatagag

SEQ ID NO: 1779976 - DNA, 15 bp, Homo sapiens
tctgtggtatagaga

SEQ ID NO: 1779977 - DNA, 15 bp, Homo sapiens
ctgtggtatagagat

SEQ ID NO: 1779978 - DNA, 15 bp, Homo sapiens
tgtggtatagagatc

SEQ ID NO: 1779979 - DNA, 15 bp, Homo sapiens
gtggtatagagatcc

SEQ ID NO: 1779980 - DNA, 15 bp, Homo sapiens
tggtatagagatcct

SEQ ID NO: 1779981 - DNA, 15 bp, Homo sapiens
ggtatagagatccta

SEQ ID NO: 1779982 - DNA, 15 bp, Homo sapiens
gtatagagatcctag

SEQ ID NO: 1779983 - DNA, 15 bp, Homo sapiens
tatagagatcctagt

SEQ ID NO: 1779984 - DNA, 15 bp, Homo sapiens
atagagatcctagtt

SEQ ID NO: 1779985 - DNA, 15 bp, Homo sapiens
tagagatcctagtta

SEQ ID NO: 1779986 - DNA, 15 bp, Homo sapiens
agagatcctagttaa

SEQ ID NO: 1779987 - DNA, 15 bp, Homo sapiens
gagatcctagttaag

SEQ ID NO: 1779988 - DNA, 15 bp, Homo sapiens
agatcctagttaaga

SEQ ID NO: 1779989 - DNA, 15 bp, Homo sapiens
gatcctagttaagag

SEQ ID NO: 1779990 - DNA, 15 bp, Homo sapiens
atcctagttaagagg

SEQ ID NO: 1779991 - DNA, 15 bp, Homo sapiens
tcctagttaagaggc

SEQ ID NO: 1779992 - DNA, 15 bp, Homo sapiens
cctagttaagaggca

SEQ ID NO: 1779993 - DNA, 15 bp, Homo sapiens
ctagttaagaggcag

SEQ ID NO: 1779994 - DNA, 15 bp, Homo sapiens
tagttaagaggcagg

SEQ ID NO: 1779995 - DNA, 15 bp, Homo sapiens
agttaagaggcagga

SEQ ID NO: 1779996 - DNA, 15 bp, Homo sapiens
gttaagaggcaggaa

SEQ ID NO: 1779997 - DNA, 15 bp, Homo sapiens
ttaagaggcaggaat

SEQ ID NO: 1779998 - DNA, 15 bp, Homo sapiens
taagaggcaggaatt

SEQ ID NO: 1779999 - DNA, 15 bp, Homo sapiens
aagaggcaggaatta

SEQ ID NO: 1780000 - DNA, 15 bp, Homo sapiens
agaggcaggaattat

SEQ ID NO: 1780001 - DNA, 15 bp, Homo sapiens
gaggcaggaattatt

SEQ ID NO: 1780002 - DNA, 15 bp, Homo sapiens
aggcaggaattattt

SEQ ID NO: 1780003 - DNA, 15 bp, Homo sapiens
ggcaggaattattta

SEQ ID NO: 1780004 - DNA, 15 bp, Homo sapiens
gcaggaattatttaa

SEQ ID NO: 1780005 - DNA, 15 bp, Homo sapiens
caggaattatttaaa

SEQ ID NO: 1780006 - DNA, 15 bp, Homo sapiens
aggaattatttaaaa

SEQ ID NO: 1780007 - DNA, 15 bp, Homo sapiens
ggaattatttaaaaa

SEQ ID NO: 1780008 - DNA, 15 bp, Homo sapiens
gaattatttaaaaat

SEQ ID NO: 1780009 - DNA, 15 bp, Homo sapiens
aattatttaaaaatg

SEQ ID NO: 1780010 - DNA, 15 bp, Homo sapiens
attatttaaaaatga

SEQ ID NO: 1780011 - DNA, 15 bp, Homo sapiens
ttatttaaaaatgac

SEQ ID NO: 1780012 - DNA, 15 bp, Homo sapiens
tatttaaaaatgact

SEQ ID NO: 1780013 - DNA, 15 bp, Homo sapiens
atttaaaaatgactt

SEQ ID NO: 1780014 - DNA, 15 bp, Homo sapiens
tttaaaaatgacttt

SEQ ID NO: 1780015 - DNA, 15 bp, Homo sapiens
ttaaaaatgacttta

SEQ ID NO: 1780016 - DNA, 15 bp, Homo sapiens
taaaaatgactttaa

SEQ ID NO: 1780017 - DNA, 15 bp, Homo sapiens
aaaaatgactttaat

SEQ ID NO: 1780018 - DNA, 15 bp, Homo sapiens
aaaatgactttaatt

SEQ ID NO: 1780019 - DNA, 15 bp, Homo sapiens
aaatgactttaattt

SEQ ID NO: 1780020 - DNA, 15 bp, Homo sapiens
aatgactttaatttt

SEQ ID NO: 1780021 - DNA, 15 bp, Homo sapiens
atgactttaattttg

SEQ ID NO: 1780022 - DNA, 15 bp, Homo sapiens
tgactttaattttga

SEQ ID NO: 1780023 - DNA, 15 bp, Homo sapiens
gactttaattttgat

SEQ ID NO: 1780024 - DNA, 15 bp, Homo sapiens
actttaattttgatc

SEQ ID NO: 1780025 - DNA, 15 bp, Homo sapiens
ctttaattttgatca

SEQ ID NO: 1780026 - DNA, 15 bp, Homo sapiens
tttaattttgatcat

SEQ ID NO: 1780027 - DNA, 15 bp, Homo sapiens
ttaattttgatcatt

SEQ ID NO: 1780028 - DNA, 15 bp, Homo sapiens
taattttgatcattt

SEQ ID NO: 1780029 - DNA, 15 bp, Homo sapiens
aattttgatcattta

SEQ ID NO: 1780030 - DNA, 15 bp, Homo sapiens
attttgatcatttaa

SEQ ID NO: 1780031 - DNA, 15 bp, Homo sapiens
ttttgatcatttaat

SEQ ID NO: 1780032 - DNA, 15 bp, Homo sapiens
tttgatcatttaatt

SEQ ID NO: 1780033 - DNA, 15 bp, Homo sapiens
ttgatcatttaatta

SEQ ID NO: 1780034 - DNA, 15 bp, Homo sapiens
tgatcatttaattat

SEQ ID NO: 1780035 - DNA, 15 bp, Homo sapiens
gatcatttaattata

SEQ ID NO: 1780036 - DNA, 15 bp, Homo sapiens
atcatttaattatag

SEQ ID NO: 1780037 - DNA, 15 bp, Homo sapiens
tcatttaattatagg

SEQ ID NO: 1780038 - DNA, 15 bp, Homo sapiens
catttaattatagga

SEQ ID NO: 1780039 - DNA, 15 bp, Homo sapiens
atttaattataggac

SEQ ID NO: 1780040 - DNA, 15 bp, Homo sapiens
tttaattataggacc

SEQ ID NO: 1780041 - DNA, 15 bp, Homo sapiens
ttaattataggacct

SEQ ID NO: 1780042 - DNA, 15 bp, Homo sapiens
taattataggaccta

SEQ ID NO: 1780043 - DNA, 15 bp, Homo sapiens
aattataggacctat

SEQ ID NO: 1780044 - DNA, 15 bp, Homo sapiens
attataggacctatt

SEQ ID NO: 1780045 - DNA, 15 bp, Homo sapiens
ttataggacctattt

SEQ ID NO: 1780046 - DNA, 15 bp, Homo sapiens
tataggacctattta

SEQ ID NO: 1780047 - DNA, 15 bp, Homo sapiens
ataggacctatttat

SEQ ID NO: 1780048 - DNA, 15 bp, Homo sapiens
taggacctatttatt

SEQ ID NO: 1780049 - DNA, 15 bp, Homo sapiens
aggacctatttattc

SEQ ID NO: 1780050 - DNA, 15 bp, Homo sapiens
ggacctatttattca

SEQ ID NO: 1780051 - DNA, 15 bp, Homo sapiens
gacctatttattcac

SEQ ID NO: 1780052 - DNA, 15 bp, Homo sapiens
acctatttattcact

SEQ ID NO: 1780053 - DNA, 15 bp, Homo sapiens
cctatttattcactt

SEQ ID NO: 1780054 - DNA, 15 bp, Homo sapiens
ctatttattcacttg

SEQ ID NO: 1780055 - DNA, 15 bp, Homo sapiens
tatttattcacttgt

SEQ ID NO: 1780056 - DNA, 15 bp, Homo sapiens
atttattcacttgtt

SEQ ID NO: 1780057 - DNA, 15 bp, Homo sapiens
tttattcacttgttt

SEQ ID NO: 1780058 - DNA, 15 bp, Homo sapiens
ttattcacttgtttt

SEQ ID NO: 1780059 - DNA, 15 bp, Homo sapiens
tattcacttgttttt

SEQ ID NO: 1780060 - DNA, 15 bp, Homo sapiens
attcacttgttttta

SEQ ID NO: 1780061 - DNA, 15 bp, Homo sapiens
ttcacttgtttttaa

SEQ ID NO: 1780062 - DNA, 15 bp, Homo sapiens
tcacttgtttttaac

SEQ ID NO: 1780063 - DNA, 15 bp, Homo sapiens
cacttgtttttaact

SEQ ID NO: 1780064 - DNA, 15 bp, Homo sapiens
acttgtttttaactt

SEQ ID NO: 1780065 - DNA, 15 bp, Homo sapiens
cttgtttttaactta

SEQ ID NO: 1780066 - DNA, 15 bp, Homo sapiens
ttgtttttaacttat

SEQ ID NO: 1780067 - DNA, 15 bp, Homo sapiens
tgtttttaacttatt

SEQ ID NO: 1780068 - DNA, 15 bp, Homo sapiens
gtttttaacttattc

SEQ ID NO: 1780069 - DNA, 15 bp, Homo sapiens
tttttaacttattca

SEQ ID NO: 1780070 - DNA, 15 bp, Homo sapiens
ttttaacttattcac

SEQ ID NO: 1780071 - DNA, 15 bp, Homo sapiens
tttaacttattcaca

SEQ ID NO: 1780072 - DNA, 15 bp, Homo sapiens
ttaacttattcacaa

SEQ ID NO: 1780073 - DNA, 15 bp, Homo sapiens
taacttattcacaaa

SEQ ID NO: 1780074 - DNA, 15 bp, Homo sapiens
aacttattcacaaat

SEQ ID NO: 1780075 - DNA, 15 bp, Homo sapiens
acttattcacaaatc

SEQ ID NO: 1780076 - DNA, 15 bp, Homo sapiens
cttattcacaaatct

SEQ ID NO: 1780077 - DNA, 15 bp, Homo sapiens
attcacaaatcttag

SEQ ID NO: 1780078 - DNA, 15 bp, Homo sapiens
ttcacaaatcttagt

SEQ ID NO: 1780079 - DNA, 15 bp, Homo sapiens
tcacaaatcttagtc

SEQ ID NO: 1780080 - DNA, 15 bp, Homo sapiens
cacaaatcttagtca

SEQ ID NO: 1780081 - DNA, 15 bp, Homo sapiens
acaaatcttagtcat

SEQ ID NO: 1780082 - DNA, 15 bp, Homo sapiens
caaatcttagtcatg

SEQ ID NO: 1780083 - DNA, 15 bp, Homo sapiens
aaatcttagtcatga

SEQ ID NO: 1780084 - DNA, 15 bp, Homo sapiens
aatcttagtcatgag

SEQ ID NO: 1780085 - DNA, 15 bp, Homo sapiens
atcttagtcatgagc

SEQ ID NO: 1780086 - DNA, 15 bp, Homo sapiens
tcttagtcatgagca

SEQ ID NO: 1780087 - DNA, 15 bp, Homo sapiens
cttagtcatgagcat

SEQ ID NO: 1780088 - DNA, 15 bp, Homo sapiens
ttagtcatgagcatt

SEQ ID NO: 1780089 - DNA, 15 bp, Homo sapiens
tagtcatgagcatta

SEQ ID NO: 1780090 - DNA, 15 bp, Homo sapiens
agtcatgagcattat

SEQ ID NO: 1780091 - DNA, 15 bp, Homo sapiens
gtcatgagcattatt

SEQ ID NO: 1780092 - DNA, 15 bp, Homo sapiens
tcatgagcattatta

SEQ ID NO: 1780093 - DNA, 15 bp, Homo sapiens
catgagcattattaa

SEQ ID NO: 1780094 - DNA, 15 bp, Homo sapiens
atgagcattattaat

SEQ ID NO: 1780095 - DNA, 15 bp, Homo sapiens
tgagcattattaata

SEQ ID NO: 1780096 - DNA, 15 bp, Homo sapiens
gagcattattaatag

SEQ ID NO: 1780097 - DNA, 15 bp, Homo sapiens
agcattattaataga

SEQ ID NO: 1780098 - DNA, 15 bp, Homo sapiens
gcattattaatagat

SEQ ID NO: 1780099 - DNA, 15 bp, Homo sapiens
cattattaatagata

SEQ ID NO: 1780100 - DNA, 15 bp, Homo sapiens
attattaatagataa

SEQ ID NO: 1780101 - DNA, 15 bp, Homo sapiens
ttattaatagataat

SEQ ID NO: 1780102 - DNA, 15 bp, Homo sapiens
tattaatagataatt

SEQ ID NO: 1780103 - DNA, 15 bp, Homo sapiens
attaatagataattt

SEQ ID NO: 1780104 - DNA, 15 bp, Homo sapiens
ttaatagataatttg

SEQ ID NO: 1780105 - DNA, 15 bp, Homo sapiens
taatagataatttga

SEQ ID NO: 1780106 - DNA, 15 bp, Homo sapiens
aatagataatttgat

SEQ ID NO: 1780107 - DNA, 15 bp, Homo sapiens
atagataatttgatg

SEQ ID NO: 1780108 - DNA, 15 bp, Homo sapiens
tagataatttgatgc

SEQ ID NO: 1780109 - DNA, 15 bp, Homo sapiens
agataatttgatgcc

SEQ ID NO: 1780110 - DNA, 15 bp, Homo sapiens
gataatttgatgcct

SEQ ID NO: 1780111 - DNA, 15 bp, Homo sapiens
ataatttgatgcctt

SEQ ID NO: 1780112 - DNA, 15 bp, Homo sapiens
taatttgatgccttg

SEQ ID NO: 1780113 - DNA, 15 bp, Homo sapiens
aatttgatgccttgt

SEQ ID NO: 1780114 - DNA, 15 bp, Homo sapiens
atttgatgccttgtc

SEQ ID NO: 1780115 - DNA, 15 bp, Homo sapiens
tttgatgccttgtca

SEQ ID NO: 1780116 - DNA, 15 bp, Homo sapiens
ttgatgccttgtcac

SEQ ID NO: 1780117 - DNA, 15 bp, Homo sapiens
tgatgccttgtcact

SEQ ID NO: 1780118 - DNA, 15 bp, Homo sapiens
gatgccttgtcactt

SEQ ID NO: 1780119 - DNA, 15 bp, Homo sapiens
atgccttgtcactta

SEQ ID NO: 1780120 - DNA, 15 bp, Homo sapiens
tgccttgtcacttag

SEQ ID NO: 1780121 - DNA, 15 bp, Homo sapiens
gccttgtcacttagc

SEQ ID NO: 1780122 - DNA, 15 bp, Homo sapiens
ccttgtcacttagca

SEQ ID NO: 1780123 - DNA, 15 bp, Homo sapiens
cttgtcacttagcag

SEQ ID NO: 1780124 - DNA, 15 bp, Homo sapiens
ttgtcacttagcagt

SEQ ID NO: 1780125 - DNA, 15 bp, Homo sapiens
tgtcacttagcagta

SEQ ID NO: 1780126 - DNA, 15 bp, Homo sapiens
gtcacttagcagtac

SEQ ID NO: 1780127 - DNA, 15 bp, Homo sapiens
tcacttagcagtaca

SEQ ID NO: 1780128 - DNA, 15 bp, Homo sapiens
cacttagcagtacaa

SEQ ID NO: 1780129 - DNA, 15 bp, Homo sapiens
acttagcagtacaag

SEQ ID NO: 1780130 - DNA, 15 bp, Homo sapiens
cttagcagtacaagc

SEQ ID NO: 1780131 - DNA, 15 bp, Homo sapiens
ttagcagtacaagca

SEQ ID NO: 1780132 - DNA, 15 bp, Homo sapiens
tagcagtacaagcat

SEQ ID NO: 1780133 - DNA, 15 bp, Homo sapiens
agcagtacaagcatg

SEQ ID NO: 1780134 - DNA, 15 bp, Homo sapiens
gcagtacaagcatgt

SEQ ID NO: 1780135 - DNA, 15 bp, Homo sapiens
cagtacaagcatgtt

SEQ ID NO: 1780136 - DNA, 15 bp, Homo sapiens
agtacaagcatgttt

SEQ ID NO: 1780137 - DNA, 15 bp, Homo sapiens
gtacaagcatgttta

SEQ ID NO: 1780138 - DNA, 15 bp, Homo sapiens
tacaagcatgtttat

SEQ ID NO: 1780139 - DNA, 15 bp, Homo sapiens
acaagcatgtttatt

SEQ ID NO: 1780140 - DNA, 15 bp, Homo sapiens
caagcatgtttattt

SEQ ID NO: 1780141 - DNA, 15 bp, Homo sapiens
aagcatgtttatttc

SEQ ID NO: 1780142 - DNA, 15 bp, Homo sapiens
agcatgtttatttct

SEQ ID NO: 1780143 - DNA, 15 bp, Homo sapiens
gcatgtttatttctg

SEQ ID NO: 1780144 - DNA, 15 bp, Homo sapiens
catgtttatttctga

SEQ ID NO: 1780145 - DNA, 15 bp, Homo sapiens
atgtttatttctgac

SEQ ID NO: 1780146 - DNA, 15 bp, Homo sapiens
tgtttatttctgact

SEQ ID NO: 1780147 - DNA, 15 bp, Homo sapiens
gtttatttctgactt

SEQ ID NO: 1780148 - DNA, 15 bp, Homo sapiens
tttatttctgacttt

SEQ ID NO: 1780149 - DNA, 15 bp, Homo sapiens
ttatttctgactttt

SEQ ID NO: 1780150 - DNA, 15 bp, Homo sapiens
tatttctgactttta

SEQ ID NO: 1780151 - DNA, 15 bp, Homo sapiens
atttctgacttttaa

SEQ ID NO: 1780152 - DNA, 15 bp, Homo sapiens
tttctgacttttaaa

SEQ ID NO: 1780153 - DNA, 15 bp, Homo sapiens
ttctgacttttaaac

SEQ ID NO: 1780154 - DNA, 15 bp, Homo sapiens
tctgacttttaaact

SEQ ID NO: 1780155 - DNA, 15 bp, Homo sapiens
ctgacttttaaactc

SEQ ID NO: 1780156 - DNA, 15 bp, Homo sapiens
tgacttttaaactcg

SEQ ID NO: 1780157 - DNA, 15 bp, Homo sapiens
gacttttaaactcga

SEQ ID NO: 1780158 - DNA, 15 bp, Homo sapiens
acttttaaactcgaa

SEQ ID NO: 1780159 - DNA, 15 bp, Homo sapiens
cttttaaactcgaat

SEQ ID NO: 1780160 - DNA, 15 bp, Homo sapiens
ttttaaactcgaatt

SEQ ID NO: 1780161 - DNA, 15 bp, Homo sapiens
tttaaactcgaattc

SEQ ID NO: 1780162 - DNA, 15 bp, Homo sapiens
ttaaactcgaattca

SEQ ID NO: 1780163 - DNA, 15 bp, Homo sapiens
taaactcgaattcac

SEQ ID NO: 1780164 - DNA, 15 bp, Homo sapiens
aaactcgaattcacc

SEQ ID NO: 1780165 - DNA, 15 bp, Homo sapiens
aactcgaattcaccc

SEQ ID NO: 1780166 - DNA, 15 bp, Homo sapiens
actcgaattcaccct

SEQ ID NO: 1780167 - DNA, 15 bp, Homo sapiens
ctcgaattcaccctt

SEQ ID NO: 1780168 - DNA, 15 bp, Homo sapiens
tcgaattcacccttc

SEQ ID NO: 1780169 - DNA, 15 bp, Homo sapiens
cgaattcacccttct

SEQ ID NO: 1780170 - DNA, 15 bp, Homo sapiens
gaattcacccttctt

SEQ ID NO: 1780171 - DNA, 15 bp, Homo sapiens
aattcacccttcttg

SEQ ID NO: 1780172 - DNA, 15 bp, Homo sapiens
attcacccttcttgt

SEQ ID NO: 1780173 - DNA, 15 bp, Homo sapiens
ttcacccttcttgtg

SEQ ID NO: 1780174 - DNA, 15 bp, Homo sapiens
tcacccttcttgtgt

SEQ ID NO: 1780175 - DNA, 15 bp, Homo sapiens
cacccttcttgtgtt

SEQ ID NO: 1780176 - DNA, 15 bp, Homo sapiens
acccttcttgtgttt

SEQ ID NO: 1780177 - DNA, 15 bp, Homo sapiens
cccttcttgtgtttt

SEQ ID NO: 1780178 - DNA, 15 bp, Homo sapiens
ccttcttgtgttttt

SEQ ID NO: 1780179 - DNA, 15 bp, Homo sapiens
cttcttgtgtttttc

SEQ ID NO: 1780180 - DNA, 15 bp, Homo sapiens
ttcttgtgtttttct

SEQ ID NO: 1780181 - DNA, 15 bp, Homo sapiens
tcttgtgtttttcta

SEQ ID NO: 1780182 - DNA, 15 bp, Homo sapiens
cttgtgtttttctat

SEQ ID NO: 1780183 - DNA, 15 bp, Homo sapiens
ttgtgtttttctatt

SEQ ID NO: 1780184 - DNA, 15 bp, Homo sapiens
tgtgtttttctattc

SEQ ID NO: 1780185 - DNA, 15 bp, Homo sapiens
gtgtttttctattca

SEQ ID NO: 1780186 - DNA, 15 bp, Homo sapiens
tgtttttctattcag

SEQ ID NO: 1780187 - DNA, 15 bp, Homo sapiens
gtttttctattcagt

SEQ ID NO: 1780188 - DNA, 15 bp, Homo sapiens
tttttctattcagtc

SEQ ID NO: 1780189 - DNA, 15 bp, Homo sapiens
ttttctattcagtcg

SEQ ID NO: 1780190 - DNA, 15 bp, Homo sapiens
tttctattcagtcgt

SEQ ID NO: 1780191 - DNA, 15 bp, Homo sapiens
ttctattcagtcgta

SEQ ID NO: 1780192 - DNA, 15 bp, Homo sapiens
tctattcagtcgtaa

SEQ ID NO: 1780193 - DNA, 15 bp, Homo sapiens
ctattcagtcgtaac

SEQ ID NO: 1780194 - DNA, 15 bp, Homo sapiens
tattcagtcgtaacc

SEQ ID NO: 1780195 - DNA, 15 bp, Homo sapiens
attcagtcgtaaccc

SEQ ID NO: 1780196 - DNA, 15 bp, Homo sapiens
ttcagtcgtaaccca

SEQ ID NO: 1780197 - DNA, 15 bp, Homo sapiens
tcagtcgtaacccac

SEQ ID NO: 1780198 - DNA, 15 bp, Homo sapiens
cagtcgtaacccact

SEQ ID NO: 1780199 - DNA, 15 bp, Homo sapiens
agtcgtaacccactc

SEQ ID NO: 1780200 - DNA, 15 bp, Homo sapiens
gtcgtaacccactcc

SEQ ID NO: 1780201 - DNA, 15 bp, Homo sapiens
tcgtaacccactcct

SEQ ID NO: 1780202 - DNA, 15 bp, Homo sapiens
cgtaacccactcctt

SEQ ID NO: 1780203 - DNA, 15 bp, Homo sapiens
gtaacccactccttc

SEQ ID NO: 1780204 - DNA, 15 bp, Homo sapiens
taacccactccttct

SEQ ID NO: 1780205 - DNA, 15 bp, Homo sapiens
aacccactccttcta

SEQ ID NO: 1780206 - DNA, 15 bp, Homo sapiens
acccactccttctac

SEQ ID NO: 1780207 - DNA, 15 bp, Homo sapiens
cccactccttctaca

SEQ ID NO: 1780208 - DNA, 15 bp, Homo sapiens
ccactccttctacat

SEQ ID NO: 1780209 - DNA, 15 bp, Homo sapiens
cactccttctacatc

SEQ ID NO: 1780210 - DNA, 15 bp, Homo sapiens
actccttctacatct

SEQ ID NO: 1780211 - DNA, 15 bp, Homo sapiens
ctccttctacatcta

SEQ ID NO: 1780212 - DNA, 15 bp, Homo sapiens
tccttctacatctac

SEQ ID NO: 1780213 - DNA, 15 bp, Homo sapiens
ccttctacatctaca

SEQ ID NO: 1780214 - DNA, 15 bp, Homo sapiens
cttctacatctacaa

SEQ ID NO: 1780215 - DNA, 15 bp, Homo sapiens
ttctacatctacaaa

SEQ ID NO: 1780216 - DNA, 15 bp, Homo sapiens
tctacatctacaaaa

SEQ ID NO: 1780217 - DNA, 15 bp, Homo sapiens
ctacatctacaaaat

SEQ ID NO: 1780218 - DNA, 15 bp, Homo sapiens
tacatctacaaaatt

SEQ ID NO: 1780219 - DNA, 15 bp, Homo sapiens
acatctacaaaattt

SEQ ID NO: 1780220 - DNA, 15 bp, Homo sapiens
catctacaaaatttg

SEQ ID NO: 1780221 - DNA, 15 bp, Homo sapiens
atctacaaaatttgg

SEQ ID NO: 1780222 - DNA, 15 bp, Homo sapiens
tctacaaaatttggt

SEQ ID NO: 1780223 - DNA, 15 bp, Homo sapiens
ctacaaaatttggtg

SEQ ID NO: 1780224 - DNA, 15 bp, Homo sapiens
tacaaaatttggtga

SEQ ID NO: 1780225 - DNA, 15 bp, Homo sapiens
acaaaatttggtgag

SEQ ID NO: 1780226 - DNA, 15 bp, Homo sapiens
caaaatttggtgagg

SEQ ID NO: 1780227 - DNA, 15 bp, Homo sapiens
aaaatttggtgaggc

SEQ ID NO: 1780228 - DNA, 15 bp, Homo sapiens
aaatttggtgaggca

SEQ ID NO: 1780229 - DNA, 15 bp, Homo sapiens
aatttggtgaggcat

SEQ ID NO: 1780230 - DNA, 15 bp, Homo sapiens
atttggtgaggcatc

SEQ ID NO: 1780231 - DNA, 15 bp, Homo sapiens
tttggtgaggcatct

SEQ ID NO: 1780232 - DNA, 15 bp, Homo sapiens
ttggtgaggcatctt

SEQ ID NO: 1780233 - DNA, 15 bp, Homo sapiens
tggtgaggcatcttt

SEQ ID NO: 1780234 - DNA, 15 bp, Homo sapiens
ggtgaggcatctttg

SEQ ID NO: 1780235 - DNA, 15 bp, Homo sapiens
gtgaggcatctttga

SEQ ID NO: 1780236 - DNA, 15 bp, Homo sapiens
tgaggcatctttgac

SEQ ID NO: 1780237 - DNA, 15 bp, Homo sapiens
gaggcatctttgact

SEQ ID NO: 1780238 - DNA, 15 bp, Homo sapiens
aggcatctttgactt

SEQ ID NO: 1780239 - DNA, 15 bp, Homo sapiens
ggcatctttgacttt

SEQ ID NO: 1780240 - DNA, 15 bp, Homo sapiens
gcatctttgactttc

SEQ ID NO: 1780241 - DNA, 15 bp, Homo sapiens
catctttgactttca

SEQ ID NO: 1780242 - DNA, 15 bp, Homo sapiens
atctttgactttcat

SEQ ID NO: 1780243 - DNA, 15 bp, Homo sapiens
tctttgactttcatc

SEQ ID NO: 1780244 - DNA, 15 bp, Homo sapiens
ctttgactttcatca

SEQ ID NO: 1780245 - DNA, 15 bp, Homo sapiens
tttgactttcatcat

SEQ ID NO: 1780246 - DNA, 15 bp, Homo sapiens
ttgactttcatcata

SEQ ID NO: 1780247 - DNA, 15 bp, Homo sapiens
tgactttcatcatat

SEQ ID NO: 1780248 - DNA, 15 bp, Homo sapiens
gactttcatcatatt

SEQ ID NO: 1780249 - DNA, 15 bp, Homo sapiens
actttcatcatattc

SEQ ID NO: 1780250 - DNA, 15 bp, Homo sapiens
ctttcatcatattca

SEQ ID NO: 1780251 - DNA, 15 bp, Homo sapiens
tttcatcatattcag

SEQ ID NO: 1780252 - DNA, 15 bp, Homo sapiens
ttcatcatattcaga

SEQ ID NO: 1780253 - DNA, 15 bp, Homo sapiens
tcatcatattcagac

SEQ ID NO: 1780254 - DNA, 15 bp, Homo sapiens
catcatattcagaca

SEQ ID NO: 1780255 - DNA, 15 bp, Homo sapiens
atcatattcagacat

SEQ ID NO: 1780256 - DNA, 15 bp, Homo sapiens
tcatattcagacatg

SEQ ID NO: 1780257 - DNA, 15 bp, Homo sapiens
catattcagacatgc

SEQ ID NO: 1780258 - DNA, 15 bp, Homo sapiens
atattcagacatgct

SEQ ID NO: 1780259 - DNA, 15 bp, Homo sapiens
tattcagacatgcta

SEQ ID NO: 1780260 - DNA, 15 bp, Homo sapiens
attcagacatgctag

SEQ ID NO: 1780261 - DNA, 15 bp, Homo sapiens
ttcagacatgctagc

SEQ ID NO: 1780262 - DNA, 15 bp, Homo sapiens
tcagacatgctagct

SEQ ID NO: 1780263 - DNA, 15 bp, Homo sapiens
cagacatgctagctt

SEQ ID NO: 1780264 - DNA, 15 bp, Homo sapiens
agacatgctagcttc

SEQ ID NO: 1780265 - DNA, 15 bp, Homo sapiens
gacatgctagcttca

SEQ ID NO: 1780266 - DNA, 15 bp, Homo sapiens
acatgctagcttcaa

SEQ ID NO: 1780267 - DNA, 15 bp, Homo sapiens
catgctagcttcaag

SEQ ID NO: 1780268 - DNA, 15 bp, Homo sapiens
atgctagcttcaaga

SEQ ID NO: 1780269 - DNA, 15 bp, Homo sapiens
tgctagcttcaagaa

SEQ ID NO: 1780270 - DNA, 15 bp, Homo sapiens
gctagcttcaagaac

SEQ ID NO: 1780271 - DNA, 15 bp, Homo sapiens
ctagcttcaagaact

SEQ ID NO: 1780272 - DNA, 15 bp, Homo sapiens
tagcttcaagaactt

SEQ ID NO: 1780273 - DNA, 15 bp, Homo sapiens
agcttcaagaacttt

SEQ ID NO: 1780274 - DNA, 15 bp, Homo sapiens
gcttcaagaactttc

SEQ ID NO: 1780275 - DNA, 15 bp, Homo sapiens
cttcaagaactttcc

SEQ ID NO: 1780276 - DNA, 15 bp, Homo sapiens
ttcaagaactttcct

SEQ ID NO: 1780277 - DNA, 15 bp, Homo sapiens
tcaagaactttccta

SEQ ID NO: 1780278 - DNA, 15 bp, Homo sapiens
caagaactttcctat

SEQ ID NO: 1780279 - DNA, 15 bp, Homo sapiens
aagaactttcctatt

SEQ ID NO: 1780280 - DNA, 15 bp, Homo sapiens
agaactttcctattc

SEQ ID NO: 1780281 - DNA, 15 bp, Homo sapiens
gaactttcctattcc

SEQ ID NO: 1780282 - DNA, 15 bp, Homo sapiens
aactttcctattcct

SEQ ID NO: 1780283 - DNA, 15 bp, Homo sapiens
actttcctattcctc

SEQ ID NO: 1780284 - DNA, 15 bp, Homo sapiens
ctttcctattcctct

SEQ ID NO: 1780285 - DNA, 15 bp, Homo sapiens
tttcctattcctctt

SEQ ID NO: 1780286 - DNA, 15 bp, Homo sapiens
ttcctattcctcttt

SEQ ID NO: 1780287 - DNA, 15 bp, Homo sapiens
tcctattcctctttt

SEQ ID NO: 1780288 - DNA, 15 bp, Homo sapiens
cctattcctctttta

SEQ ID NO: 1780289 - DNA, 15 bp, Homo sapiens
ctattcctcttttaa

SEQ ID NO: 1780290 - DNA, 15 bp, Homo sapiens
tattcctcttttaat

SEQ ID NO: 1780291 - DNA, 15 bp, Homo sapiens
attcctcttttaatg

SEQ ID NO: 1780292 - DNA, 15 bp, Homo sapiens
ttcctcttttaatgt

SEQ ID NO: 1780293 - DNA, 15 bp, Homo sapiens
tcctcttttaatgtc

SEQ ID NO: 1780294 - DNA, 15 bp, Homo sapiens
cctcttttaatgtct

SEQ ID NO: 1780295 - DNA, 15 bp, Homo sapiens
ctcttttaatgtctg

SEQ ID NO: 1780296 - DNA, 15 bp, Homo sapiens
tcttttaatgtctgt

SEQ ID NO: 1780297 - DNA, 15 bp, Homo sapiens
cttttaatgtctgtt

SEQ ID NO: 1780298 - DNA, 15 bp, Homo sapiens
ttttaatgtctgttt

SEQ ID NO: 1780299 - DNA, 15 bp, Homo sapiens
tttaatgtctgtttc

SEQ ID NO: 1780300 - DNA, 15 bp, Homo sapiens
ttaatgtctgtttct

SEQ ID NO: 1780301 - DNA, 15 bp, Homo sapiens
taatgtctgtttctc

SEQ ID NO: 1780302 - DNA, 15 bp, Homo sapiens
aatgtctgtttctca

SEQ ID NO: 1780303 - DNA, 15 bp, Homo sapiens
atgtctgtttctcac

SEQ ID NO: 1780304 - DNA, 15 bp, Homo sapiens
tgtctgtttctcaca

SEQ ID NO: 1780305 - DNA, 15 bp, Homo sapiens
gtctgtttctcacat

SEQ ID NO: 1780306 - DNA, 15 bp, Homo sapiens
tctgtttctcacatt

SEQ ID NO: 1780307 - DNA, 15 bp, Homo sapiens
ctgtttctcacattg

SEQ ID NO: 1780308 - DNA, 15 bp, Homo sapiens
tgtttctcacattgt

SEQ ID NO: 1780309 - DNA, 15 bp, Homo sapiens
gtttctcacattgta

SEQ ID NO: 1780310 - DNA, 15 bp, Homo sapiens
tttctcacattgtat

SEQ ID NO: 1780311 - DNA, 15 bp, Homo sapiens
ttctcacattgtatt

SEQ ID NO: 1780312 - DNA, 15 bp, Homo sapiens
tctcacattgtatta

SEQ ID NO: 1780313 - DNA, 15 bp, Homo sapiens
ctcacattgtattag

SEQ ID NO: 1780314 - DNA, 15 bp, Homo sapiens
tcacattgtattagt

SEQ ID NO: 1780315 - DNA, 15 bp, Homo sapiens
cacattgtattagtt

SEQ ID NO: 1780316 - DNA, 15 bp, Homo sapiens
acattgtattagttc

SEQ ID NO: 1780317 - DNA, 15 bp, Homo sapiens
cattgtattagttcc

SEQ ID NO: 1780318 - DNA, 15 bp, Homo sapiens
attgtattagttcct

SEQ ID NO: 1780319 - DNA, 15 bp, Homo sapiens
ttgtattagttcctt

SEQ ID NO: 1780320 - DNA, 15 bp, Homo sapiens
tgtattagttccttt

SEQ ID NO: 1780321 - DNA, 15 bp, Homo sapiens
gtattagttcctttt

SEQ ID NO: 1780322 - DNA, 15 bp, Homo sapiens
tattagttcctttta

SEQ ID NO: 1780323 - DNA, 15 bp, Homo sapiens
attagttccttttat

SEQ ID NO: 1780324 - DNA, 15 bp, Homo sapiens
ttagttccttttata

SEQ ID NO: 1780325 - DNA, 15 bp, Homo sapiens
tagttccttttatag

SEQ ID NO: 1780326 - DNA, 15 bp, Homo sapiens
agttccttttatagt

SEQ ID NO: 1780327 - DNA, 15 bp, Homo sapiens
gttccttttatagta

SEQ ID NO: 1780328 - DNA, 15 bp, Homo sapiens
ttccttttatagtat

SEQ ID NO: 1780329 - DNA, 15 bp, Homo sapiens
tccttttatagtatt

SEQ ID NO: 1780330 - DNA, 15 bp, Homo sapiens
ccttttatagtatta

SEQ ID NO: 1780331 - DNA, 15 bp, Homo sapiens
cttttatagtattaa

SEQ ID NO: 1780332 - DNA, 15 bp, Homo sapiens
ttttatagtattaat

SEQ ID NO: 1780333 - DNA, 15 bp, Homo sapiens
tttatagtattaatt

SEQ ID NO: 1780334 - DNA, 15 bp, Homo sapiens
ttatagtattaattc

SEQ ID NO: 1780335 - DNA, 15 bp, Homo sapiens
tatagtattaattct

SEQ ID NO: 1780336 - DNA, 15 bp, Homo sapiens
atagtattaattctt

SEQ ID NO: 1780337 - DNA, 15 bp, Homo sapiens
tagtattaattcttc

SEQ ID NO: 1780338 - DNA, 15 bp, Homo sapiens
agtattaattcttcc

SEQ ID NO: 1780339 - DNA, 15 bp, Homo sapiens
gtattaattcttcct

SEQ ID NO: 1780340 - DNA, 15 bp, Homo sapiens
tattaattcttccta

SEQ ID NO: 1780341 - DNA, 15 bp, Homo sapiens
attaattcttcctac

SEQ ID NO: 1780342 - DNA, 15 bp, Homo sapiens
ttaattcttcctaca

SEQ ID NO: 1780343 - DNA, 15 bp, Homo sapiens
taattcttcctacag

SEQ ID NO: 1780344 - DNA, 15 bp, Homo sapiens
aattcttcctacagt

SEQ ID NO: 1780345 - DNA, 15 bp, Homo sapiens
attcttcctacagta

SEQ ID NO: 1780346 - DNA, 15 bp, Homo sapiens
ttcttcctacagtat

SEQ ID NO: 1780347 - DNA, 15 bp, Homo sapiens
tcttcctacagtatg

SEQ ID NO: 1780348 - DNA, 15 bp, Homo sapiens
cttcctacagtatga

SEQ ID NO: 1780349 - DNA, 15 bp, Homo sapiens
ttcctacagtatgaa

SEQ ID NO: 1780350 - DNA, 15 bp, Homo sapiens
tcctacagtatgaat

SEQ ID NO: 1780351 - DNA, 15 bp, Homo sapiens
cctacagtatgaatt

SEQ ID NO: 1780352 - DNA, 15 bp, Homo sapiens
ctacagtatgaattt

SEQ ID NO: 1780353 - DNA, 15 bp, Homo sapiens
tacagtatgaatttt

SEQ ID NO: 1780354 - DNA, 15 bp, Homo sapiens
acagtatgaatttta

SEQ ID NO: 1780355 - DNA, 15 bp, Homo sapiens
cagtatgaattttat

SEQ ID NO: 1780356 - DNA, 15 bp, Homo sapiens
agtatgaattttatt

SEQ ID NO: 1780357 - DNA, 15 bp, Homo sapiens
gtatgaattttattt

SEQ ID NO: 1780358 - DNA, 15 bp, Homo sapiens
tatgaattttatttt

SEQ ID NO: 1780359 - DNA, 15 bp, Homo sapiens
atgaattttattttt

SEQ ID NO: 1780360 - DNA, 15 bp, Homo sapiens
tgaattttatttttt

SEQ ID NO: 1780361 - DNA, 15 bp, Homo sapiens
gaattttattttttt

SEQ ID NO: 1780362 - DNA, 15 bp, Homo sapiens
aattttatttttttt

SEQ ID NO: 1780363 - DNA, 15 bp, Homo sapiens
attttattttttttt

SEQ ID NO: 1780364 - DNA, 15 bp, Homo sapiens
ttttatttttttttt

SEQ ID NO: 1780365 - DNA, 15 bp, Homo sapiens
ttttttttttttgaa

SEQ ID NO: 1780366 - DNA, 15 bp, Homo sapiens
ttttttttttgaaat

SEQ ID NO: 1780367 - DNA, 15 bp, Homo sapiens
tttttttttgaaatg

SEQ ID NO: 1780368 - DNA, 15 bp, Homo sapiens
ttttttttgaaatgg

SEQ ID NO: 1780369 - DNA, 15 bp, Homo sapiens
tttttttgaaatgga

SEQ ID NO: 1780370 - DNA, 15 bp, Homo sapiens
ttttttgaaatggag

SEQ ID NO: 1780371 - DNA, 15 bp, Homo sapiens
tttttgaaatggagt

SEQ ID NO: 1780372 - DNA, 15 bp, Homo sapiens
ttttgaaatggagtc

SEQ ID NO: 1780373 - DNA, 15 bp, Homo sapiens
tttgaaatggagtct

SEQ ID NO: 1780374 - DNA, 15 bp, Homo sapiens
ttgaaatggagtctt

SEQ ID NO: 1780375 - DNA, 15 bp, Homo sapiens
tgaaatggagtcttg

SEQ ID NO: 1780376 - DNA, 15 bp, Homo sapiens
gaaatggagtcttgc

SEQ ID NO: 1780377 - DNA, 15 bp, Homo sapiens
aaatggagtcttgct

SEQ ID NO: 1780378 - DNA, 15 bp, Homo sapiens
aatggagtcttgctc

SEQ ID NO: 1780379 - DNA, 15 bp, Homo sapiens
agtggcaccatctcc

SEQ ID NO: 1780380 - DNA, 15 bp, Homo sapiens
gtggcaccatctcca

SEQ ID NO: 1780381 - DNA, 15 bp, Homo sapiens
tggcaccatctccac

SEQ ID NO: 1780382 - DNA, 15 bp, Homo sapiens
ggcaccatctccact

SEQ ID NO: 1780383 - DNA, 15 bp, Homo sapiens
gcaccatctccactc

SEQ ID NO: 1780384 - DNA, 15 bp, Homo sapiens
caccatctccactca

SEQ ID NO: 1780385 - DNA, 15 bp, Homo sapiens
accatctccactcac

SEQ ID NO: 1780386 - DNA, 15 bp, Homo sapiens
ccatctccactcact

SEQ ID NO: 1780387 - DNA, 15 bp, Homo sapiens
catctccactcactg

SEQ ID NO: 1780388 - DNA, 15 bp, Homo sapiens
atctccactcactgc

SEQ ID NO: 1780389 - DNA, 15 bp, Homo sapiens
tctccactcactgca

SEQ ID NO: 1780390 - DNA, 15 bp, Homo sapiens
ctccactcactgcaa

SEQ ID NO: 1780391 - DNA, 15 bp, Homo sapiens
tccactcactgcaag

SEQ ID NO: 1780392 - DNA, 15 bp, Homo sapiens
ccactcactgcaagc

SEQ ID NO: 1780393 - DNA, 15 bp, Homo sapiens
cactcactgcaagct

SEQ ID NO: 1780394 - DNA, 15 bp, Homo sapiens
cctcctgggttcacg

SEQ ID NO: 1780395 - DNA, 15 bp, Homo sapiens
cacgccattctcctt

SEQ ID NO: 1780396 - DNA, 15 bp, Homo sapiens
acgccattctccttc

SEQ ID NO: 1780397 - DNA, 15 bp, Homo sapiens
cgccattctccttcc

SEQ ID NO: 1780398 - DNA, 15 bp, Homo sapiens
gccattctccttcct

SEQ ID NO: 1780399 - DNA, 15 bp, Homo sapiens
ccattctccttcctc

SEQ ID NO: 1780400 - DNA, 15 bp, Homo sapiens
cattctccttcctca

SEQ ID NO: 1780401 - DNA, 15 bp, Homo sapiens
attctccttcctcag

SEQ ID NO: 1780402 - DNA, 15 bp, Homo sapiens
ttctccttcctcagc

SEQ ID NO: 1780403 - DNA, 15 bp, Homo sapiens
tctccttcctcagcc

SEQ ID NO: 1780404 - DNA, 15 bp, Homo sapiens
ctccttcctcagcct

SEQ ID NO: 1780405 - DNA, 15 bp, Homo sapiens
tccttcctcagcctc

SEQ ID NO: 1780406 - DNA, 15 bp, Homo sapiens
ccttcctcagcctcc

SEQ ID NO: 1780407 - DNA, 15 bp, Homo sapiens
cttcctcagcctccc

SEQ ID NO: 1780408 - DNA, 15 bp, Homo sapiens
ttcctcagcctcccg

SEQ ID NO: 1780409 - DNA, 15 bp, Homo sapiens
tcctcagcctcccga

SEQ ID NO: 1780410 - DNA, 15 bp, Homo sapiens
ctacaggcgcatgca

SEQ ID NO: 1780411 - DNA, 15 bp, Homo sapiens
tacaggcgcatgcaa

SEQ ID NO: 1780412 - DNA, 15 bp, Homo sapiens
acaggcgcatgcaac

SEQ ID NO: 1780413 - DNA, 15 bp, Homo sapiens
caggcgcatgcaacc

SEQ ID NO: 1780414 - DNA, 15 bp, Homo sapiens
aggcgcatgcaacca

SEQ ID NO: 1780415 - DNA, 15 bp, Homo sapiens
ggcgcatgcaaccat

SEQ ID NO: 1780416 - DNA, 15 bp, Homo sapiens
gcgcatgcaaccatg

SEQ ID NO: 1780417 - DNA, 15 bp, Homo sapiens
cgcatgcaaccatgc

SEQ ID NO: 1780418 - DNA, 15 bp, Homo sapiens
gcatgcaaccatgcc

SEQ ID NO: 1780419 - DNA, 15 bp, Homo sapiens
catgcaaccatgccc

SEQ ID NO: 1780420 - DNA, 15 bp, Homo sapiens
atgcaaccatgcccg

SEQ ID NO: 1780421 - DNA, 15 bp, Homo sapiens
tgcaaccatgcccgg

SEQ ID NO: 1780422 - DNA, 15 bp, Homo sapiens
gcaaccatgcccggc

SEQ ID NO: 1780423 - DNA, 15 bp, Homo sapiens
caaccatgcccggct

SEQ ID NO: 1780424 - DNA, 15 bp, Homo sapiens
aaccatgcccggcta

SEQ ID NO: 1780425 - DNA, 15 bp, Homo sapiens
gttagccaggatgga

SEQ ID NO: 1780426 - DNA, 15 bp, Homo sapiens
ttagccaggatggat

SEQ ID NO: 1780427 - DNA, 15 bp, Homo sapiens
tagccaggatggata

SEQ ID NO: 1780428 - DNA, 15 bp, Homo sapiens
agccaggatggatat

SEQ ID NO: 1780429 - DNA, 15 bp, Homo sapiens
gccaggatggatata

SEQ ID NO: 1780430 - DNA, 15 bp, Homo sapiens
ccaggatggatatag

SEQ ID NO: 1780431 - DNA, 15 bp, Homo sapiens
caggatggatatagt

SEQ ID NO: 1780432 - DNA, 15 bp, Homo sapiens
aggatggatatagta

SEQ ID NO: 1780433 - DNA, 15 bp, Homo sapiens
ggatggatatagtat

SEQ ID NO: 1780434 - DNA, 15 bp, Homo sapiens
gatggatatagtatg

SEQ ID NO: 1780435 - DNA, 15 bp, Homo sapiens
atggatatagtatga

SEQ ID NO: 1780436 - DNA, 15 bp, Homo sapiens
tggatatagtatgag

SEQ ID NO: 1780437 - DNA, 15 bp, Homo sapiens
ggatatagtatgagt

SEQ ID NO: 1780438 - DNA, 15 bp, Homo sapiens
gatatagtatgagtt

SEQ ID NO: 1780439 - DNA, 15 bp, Homo sapiens
atatagtatgagttt

SEQ ID NO: 1780440 - DNA, 15 bp, Homo sapiens
tatagtatgagtttt

SEQ ID NO: 1780441 - DNA, 15 bp, Homo sapiens
atagtatgagttttt

SEQ ID NO: 1780442 - DNA, 15 bp, Homo sapiens
tagtatgagttttta

SEQ ID NO: 1780443 - DNA, 15 bp, Homo sapiens
agtatgagtttttat

SEQ ID NO: 1780444 - DNA, 15 bp, Homo sapiens
gtatgagtttttatt

SEQ ID NO: 1780445 - DNA, 15 bp, Homo sapiens
tatgagtttttattc

SEQ ID NO: 1780446 - DNA, 15 bp, Homo sapiens
atgagtttttattca

SEQ ID NO: 1780447 - DNA, 15 bp, Homo sapiens
tgagtttttattcat

SEQ ID NO: 1780448 - DNA, 15 bp, Homo sapiens
gagtttttattcatt

SEQ ID NO: 1780449 - DNA, 15 bp, Homo sapiens
agtttttattcattt

SEQ ID NO: 1780450 - DNA, 15 bp, Homo sapiens
gtttttattcatttt

SEQ ID NO: 1780451 - DNA, 15 bp, Homo sapiens
tttttattcattttg

SEQ ID NO: 1780452 - DNA, 15 bp, Homo sapiens
ttttattcattttgc

SEQ ID NO: 1780453 - DNA, 15 bp, Homo sapiens
tttattcattttgca

SEQ ID NO: 1780454 - DNA, 15 bp, Homo sapiens
ttattcattttgcaa

SEQ ID NO: 1780455 - DNA, 15 bp, Homo sapiens
tattcattttgcaaa

SEQ ID NO: 1780456 - DNA, 15 bp, Homo sapiens
attcattttgcaaat

SEQ ID NO: 1780457 - DNA, 15 bp, Homo sapiens
ttcattttgcaaata

SEQ ID NO: 1780458 - DNA, 15 bp, Homo sapiens
tcattttgcaaatat

SEQ ID NO: 1780459 - DNA, 15 bp, Homo sapiens
cattttgcaaatatt

SEQ ID NO: 1780460 - DNA, 15 bp, Homo sapiens
attttgcaaatattc

SEQ ID NO: 1780461 - DNA, 15 bp, Homo sapiens
ttttgcaaatattca

SEQ ID NO: 1780462 - DNA, 15 bp, Homo sapiens
tttgcaaatattcat

SEQ ID NO: 1780463 - DNA, 15 bp, Homo sapiens
ttgcaaatattcatc

SEQ ID NO: 1780464 - DNA, 15 bp, Homo sapiens
tgcaaatattcatca

SEQ ID NO: 1780465 - DNA, 15 bp, Homo sapiens
gcaaatattcatcat

SEQ ID NO: 1780466 - DNA, 15 bp, Homo sapiens
caaatattcatcata

SEQ ID NO: 1780467 - DNA, 15 bp, Homo sapiens
aaatattcatcatag

SEQ ID NO: 1780468 - DNA, 15 bp, Homo sapiens
aatattcatcataga

SEQ ID NO: 1780469 - DNA, 15 bp, Homo sapiens
atattcatcatagat

SEQ ID NO: 1780470 - DNA, 15 bp, Homo sapiens
tattcatcatagata

SEQ ID NO: 1780471 - DNA, 15 bp, Homo sapiens
attcatcatagatat

SEQ ID NO: 1780472 - DNA, 15 bp, Homo sapiens
ttcatcatagatatt

SEQ ID NO: 1780473 - DNA, 15 bp, Homo sapiens
tcatcatagatattt

SEQ ID NO: 1780474 - DNA, 15 bp, Homo sapiens
catcatagatatttt

SEQ ID NO: 1780475 - DNA, 15 bp, Homo sapiens
atcatagatattttt

SEQ ID NO: 1780476 - DNA, 15 bp, Homo sapiens
tcatagatatttttg

SEQ ID NO: 1780477 - DNA, 15 bp, Homo sapiens
catagatatttttgt

SEQ ID NO: 1780478 - DNA, 15 bp, Homo sapiens
atagatatttttgtc

SEQ ID NO: 1780479 - DNA, 15 bp, Homo sapiens
tagatatttttgtct

SEQ ID NO: 1780480 - DNA, 15 bp, Homo sapiens
agatatttttgtctt

SEQ ID NO: 1780481 - DNA, 15 bp, Homo sapiens
gatatttttgtctta

SEQ ID NO: 1780482 - DNA, 15 bp, Homo sapiens
atatttttgtcttat

SEQ ID NO: 1780483 - DNA, 15 bp, Homo sapiens
tatttttgtcttatt

SEQ ID NO: 1780484 - DNA, 15 bp, Homo sapiens
atttttgtcttattt

SEQ ID NO: 1780485 - DNA, 15 bp, Homo sapiens
tttttgtcttatttc

SEQ ID NO: 1780486 - DNA, 15 bp, Homo sapiens
ttttgtcttatttca

SEQ ID NO: 1780487 - DNA, 15 bp, Homo sapiens
tttgtcttatttcag

SEQ ID NO: 1780488 - DNA, 15 bp, Homo sapiens
ttgtcttatttcagt

SEQ ID NO: 1780489 - DNA, 15 bp, Homo sapiens
tgtcttatttcagtt

SEQ ID NO: 1780490 - DNA, 15 bp, Homo sapiens
gtcttatttcagtta

SEQ ID NO: 1780491 - DNA, 15 bp, Homo sapiens
tcttatttcagttag

SEQ ID NO: 1780492 - DNA, 15 bp, Homo sapiens
cttatttcagttaga

SEQ ID NO: 1780493 - DNA, 15 bp, Homo sapiens
ttatttcagttagaa

SEQ ID NO: 1780494 - DNA, 15 bp, Homo sapiens
atttcagttagaaca

SEQ ID NO: 1780495 - DNA, 15 bp, Homo sapiens
tttcagttagaacag

SEQ ID NO: 1780496 - DNA, 15 bp, Homo sapiens
ttcagttagaacagg

SEQ ID NO: 1780497 - DNA, 15 bp, Homo sapiens
tcagttagaacagga

SEQ ID NO: 1780498 - DNA, 15 bp, Homo sapiens
cagttagaacaggat

SEQ ID NO: 1780499 - DNA, 15 bp, Homo sapiens
agttagaacaggatt

SEQ ID NO: 1780500 - DNA, 15 bp, Homo sapiens
gttagaacaggattt

SEQ ID NO: 1780501 - DNA, 15 bp, Homo sapiens
ttagaacaggatttt

SEQ ID NO: 1780502 - DNA, 15 bp, Homo sapiens
tagaacaggattttt

SEQ ID NO: 1780503 - DNA, 15 bp, Homo sapiens
agaacaggatttttt

SEQ ID NO: 1780504 - DNA, 15 bp, Homo sapiens
gaacaggattttttt

SEQ ID NO: 1780505 - DNA, 15 bp, Homo sapiens
aacaggatttttttc

SEQ ID NO: 1780506 - DNA, 15 bp, Homo sapiens
acaggatttttttct

SEQ ID NO: 1780507 - DNA, 15 bp, Homo sapiens
caggatttttttctt

SEQ ID NO: 1780508 - DNA, 15 bp, Homo sapiens
ggatttttttctttg

SEQ ID NO: 1780509 - DNA, 15 bp, Homo sapiens
gatttttttctttgg

SEQ ID NO: 1780510 - DNA, 15 bp, Homo sapiens
atttttttctttgga

SEQ ID NO: 1780511 - DNA, 15 bp, Homo sapiens
tttttttctttggat

SEQ ID NO: 1780512 - DNA, 15 bp, Homo sapiens
ttttttctttggatt

SEQ ID NO: 1780513 - DNA, 15 bp, Homo sapiens
tttttctttggattc

SEQ ID NO: 1780514 - DNA, 15 bp, Homo sapiens
ttttctttggattca

SEQ ID NO: 1780515 - DNA, 15 bp, Homo sapiens
tttctttggattcag

SEQ ID NO: 1780516 - DNA, 15 bp, Homo sapiens
ttctttggattcaga

SEQ ID NO: 1780517 - DNA, 15 bp, Homo sapiens
tctttggattcagaa

SEQ ID NO: 1780518 - DNA, 15 bp, Homo sapiens
ctttggattcagaag

SEQ ID NO: 1780519 - DNA, 15 bp, Homo sapiens
tttggattcagaagg

SEQ ID NO: 1780520 - DNA, 15 bp, Homo sapiens
ttggattcagaaggt

SEQ ID NO: 1780521 - DNA, 15 bp, Homo sapiens
tggattcagaaggta

SEQ ID NO: 1780522 - DNA, 15 bp, Homo sapiens
ggattcagaaggtaa

SEQ ID NO: 1780523 - DNA, 15 bp, Homo sapiens
gattcagaaggtaac

SEQ ID NO: 1780524 - DNA, 15 bp, Homo sapiens
attcagaaggtaact

SEQ ID NO: 1780525 - DNA, 15 bp, Homo sapiens
ttcagaaggtaactt

SEQ ID NO: 1780526 - DNA, 15 bp, Homo sapiens
tcagaaggtaacttt

SEQ ID NO: 1780527 - DNA, 15 bp, Homo sapiens
cagaaggtaactttc

SEQ ID NO: 1780528 - DNA, 15 bp, Homo sapiens
agaaggtaactttcc

SEQ ID NO: 1780529 - DNA, 15 bp, Homo sapiens
gaaggtaactttcct

SEQ ID NO: 1780530 - DNA, 15 bp, Homo sapiens
aaggtaactttccta

SEQ ID NO: 1780531 - DNA, 15 bp, Homo sapiens
aggtaactttcctac

SEQ ID NO: 1780532 - DNA, 15 bp, Homo sapiens
ggtaactttcctact

SEQ ID NO: 1780533 - DNA, 15 bp, Homo sapiens
gtaactttcctactg

SEQ ID NO: 1780534 - DNA, 15 bp, Homo sapiens
taactttcctactgt

SEQ ID NO: 1780535 - DNA, 15 bp, Homo sapiens
aactttcctactgta

SEQ ID NO: 1780536 - DNA, 15 bp, Homo sapiens
actttcctactgtac

SEQ ID NO: 1780537 - DNA, 15 bp, Homo sapiens
ctttcctactgtact

SEQ ID NO: 1780538 - DNA, 15 bp, Homo sapiens
tttcctactgtactt

SEQ ID NO: 1780539 - DNA, 15 bp, Homo sapiens
ttcctactgtactta

SEQ ID NO: 1780540 - DNA, 15 bp, Homo sapiens
tcctactgtacttag

SEQ ID NO: 1780541 - DNA, 15 bp, Homo sapiens
cctactgtacttagg

SEQ ID NO: 1780542 - DNA, 15 bp, Homo sapiens
ctactgtacttagga

SEQ ID NO: 1780543 - DNA, 15 bp, Homo sapiens
tactgtacttaggat

SEQ ID NO: 1780544 - DNA, 15 bp, Homo sapiens
actgtacttaggata

SEQ ID NO: 1780545 - DNA, 15 bp, Homo sapiens
ctgtacttaggataa

SEQ ID NO: 1780546 - DNA, 15 bp, Homo sapiens
tgtacttaggataaa

SEQ ID NO: 1780547 - DNA, 15 bp, Homo sapiens
gtacttaggataaat

SEQ ID NO: 1780548 - DNA, 15 bp, Homo sapiens
tacttaggataaatt

SEQ ID NO: 1780549 - DNA, 15 bp, Homo sapiens
acttaggataaattc

SEQ ID NO: 1780550 - DNA, 15 bp, Homo sapiens
cttaggataaattcc

SEQ ID NO: 1780551 - DNA, 15 bp, Homo sapiens
ttaggataaattcca

SEQ ID NO: 1780552 - DNA, 15 bp, Homo sapiens
taggataaattccac

SEQ ID NO: 1780553 - DNA, 15 bp, Homo sapiens
aggataaattccaca

SEQ ID NO: 1780554 - DNA, 15 bp, Homo sapiens
ggataaattccacaa

SEQ ID NO: 1780555 - DNA, 15 bp, Homo sapiens
gataaattccacaaa

SEQ ID NO: 1780556 - DNA, 15 bp, Homo sapiens
ataaattccacaaaa

SEQ ID NO: 1780557 - DNA, 15 bp, Homo sapiens
taaattccacaaaaa

SEQ ID NO: 1780558 - DNA, 15 bp, Homo sapiens
aaattccacaaaaac

SEQ ID NO: 1780559 - DNA, 15 bp, Homo sapiens
aattccacaaaaact

SEQ ID NO: 1780560 - DNA, 15 bp, Homo sapiens
attccacaaaaactc

SEQ ID NO: 1780561 - DNA, 15 bp, Homo sapiens
ttccacaaaaactct

SEQ ID NO: 1780562 - DNA, 15 bp, Homo sapiens
tccacaaaaactctt

SEQ ID NO: 1780563 - DNA, 15 bp, Homo sapiens
ccacaaaaactcttt

SEQ ID NO: 1780564 - DNA, 15 bp, Homo sapiens
cacaaaaactcttta

SEQ ID NO: 1780565 - DNA, 15 bp, Homo sapiens
acaaaaactctttaa

SEQ ID NO: 1780566 - DNA, 15 bp, Homo sapiens
caaaaactctttaac

SEQ ID NO: 1780567 - DNA, 15 bp, Homo sapiens
aaaaactctttaaca

SEQ ID NO: 1780568 - DNA, 15 bp, Homo sapiens
aaaactctttaacaa

SEQ ID NO: 1780569 - DNA, 15 bp, Homo sapiens
aaactctttaacaag

SEQ ID NO: 1780570 - DNA, 15 bp, Homo sapiens
aactctttaacaagg

SEQ ID NO: 1780571 - DNA, 15 bp, Homo sapiens
actctttaacaaggt

SEQ ID NO: 1780572 - DNA, 15 bp, Homo sapiens
ctctttaacaaggtt

SEQ ID NO: 1780573 - DNA, 15 bp, Homo sapiens
tctttaacaaggttt

SEQ ID NO: 1780574 - DNA, 15 bp, Homo sapiens
ctttaacaaggtttt

SEQ ID NO: 1780575 - DNA, 15 bp, Homo sapiens
tttaacaaggttttt

SEQ ID NO: 1780576 - DNA, 15 bp, Homo sapiens
ttaacaaggtttttt

SEQ ID NO: 1780577 - DNA, 15 bp, Homo sapiens
taacaaggttttttt

SEQ ID NO: 1780578 - DNA, 15 bp, Homo sapiens
aacaaggtttttttc

SEQ ID NO: 1780579 - DNA, 15 bp, Homo sapiens
acaaggtttttttcc

SEQ ID NO: 1780580 - DNA, 15 bp, Homo sapiens
caaggtttttttcct

SEQ ID NO: 1780581 - DNA, 15 bp, Homo sapiens
aaggtttttttcctg

SEQ ID NO: 1780582 - DNA, 15 bp, Homo sapiens
aggtttttttcctgg

SEQ ID NO: 1780583 - DNA, 15 bp, Homo sapiens
ggtttttttcctggc

SEQ ID NO: 1780584 - DNA, 15 bp, Homo sapiens
gtttttttcctggct

SEQ ID NO: 1780585 - DNA, 15 bp, Homo sapiens
tttttttcctggcta

SEQ ID NO: 1780586 - DNA, 15 bp, Homo sapiens
ttttttcctggctat

SEQ ID NO: 1780587 - DNA, 15 bp, Homo sapiens
tttttcctggctatt

SEQ ID NO: 1780588 - DNA, 15 bp, Homo sapiens
ttttcctggctatta

SEQ ID NO: 1780589 - DNA, 15 bp, Homo sapiens
tttcctggctattag

SEQ ID NO: 1780590 - DNA, 15 bp, Homo sapiens
ttcctggctattaga

SEQ ID NO: 1780591 - DNA, 15 bp, Homo sapiens
tcctggctattagaa

SEQ ID NO: 1780592 - DNA, 15 bp, Homo sapiens
cctggctattagaaa

SEQ ID NO: 1780593 - DNA, 15 bp, Homo sapiens
ctggctattagaaag

SEQ ID NO: 1780594 - DNA, 15 bp, Homo sapiens
tggctattagaaagg

SEQ ID NO: 1780595 - DNA, 15 bp, Homo sapiens
ggctattagaaagga

SEQ ID NO: 1780596 - DNA, 15 bp, Homo sapiens
gctattagaaaggag

SEQ ID NO: 1780597 - DNA, 15 bp, Homo sapiens
ctattagaaaggagg

SEQ ID NO: 1780598 - DNA, 15 bp, Homo sapiens
tattagaaaggagga

SEQ ID NO: 1780599 - DNA, 15 bp, Homo sapiens
attagaaaggaggaa

SEQ ID NO: 1780600 - DNA, 15 bp, Homo sapiens
ttagaaaggaggaag

SEQ ID NO: 1780601 - DNA, 15 bp, Homo sapiens
tagaaaggaggaaga

SEQ ID NO: 1780602 - DNA, 15 bp, Homo sapiens
agaaaggaggaagac

SEQ ID NO: 1780603 - DNA, 15 bp, Homo sapiens
gaaaggaggaagacc

SEQ ID NO: 1780604 - DNA, 15 bp, Homo sapiens
aaaggaggaagaccc

SEQ ID NO: 1780605 - DNA, 15 bp, Homo sapiens
aaggaggaagaccct

SEQ ID NO: 1780606 - DNA, 15 bp, Homo sapiens
aggaggaagaccctc

SEQ ID NO: 1780607 - DNA, 15 bp, Homo sapiens
ggaggaagaccctca

SEQ ID NO: 1780608 - DNA, 15 bp, Homo sapiens
gaggaagaccctcac

SEQ ID NO: 1780609 - DNA, 15 bp, Homo sapiens
aggaagaccctcact

SEQ ID NO: 1780610 - DNA, 15 bp, Homo sapiens
ggaagaccctcactg

SEQ ID NO: 1780611 - DNA, 15 bp, Homo sapiens
gaagaccctcactga

SEQ ID NO: 1780612 - DNA, 15 bp, Homo sapiens
aagaccctcactgaa

SEQ ID NO: 1780613 - DNA, 15 bp, Homo sapiens
agaccctcactgaat

SEQ ID NO: 1780614 - DNA, 15 bp, Homo sapiens
gaccctcactgaatt

SEQ ID NO: 1780615 - DNA, 15 bp, Homo sapiens
accctcactgaattg

SEQ ID NO: 1780616 - DNA, 15 bp, Homo sapiens
ccctcactgaattga

SEQ ID NO: 1780617 - DNA, 15 bp, Homo sapiens
cctcactgaattgaa

SEQ ID NO: 1780618 - DNA, 15 bp, Homo sapiens
ctcactgaattgaag

SEQ ID NO: 1780619 - DNA, 15 bp, Homo sapiens
tcactgaattgaaga

SEQ ID NO: 1780620 - DNA, 15 bp, Homo sapiens
cactgaattgaagat

SEQ ID NO: 1780621 - DNA, 15 bp, Homo sapiens
actgaattgaagata

SEQ ID NO: 1780622 - DNA, 15 bp, Homo sapiens
ctgaattgaagatag

SEQ ID NO: 1780623 - DNA, 15 bp, Homo sapiens
tgaattgaagatagt

SEQ ID NO: 1780624 - DNA, 15 bp, Homo sapiens
gaattgaagatagta

SEQ ID NO: 1780625 - DNA, 15 bp, Homo sapiens
aattgaagatagtaa

SEQ ID NO: 1780626 - DNA, 15 bp, Homo sapiens
attgaagatagtaat

SEQ ID NO: 1780627 - DNA, 15 bp, Homo sapiens
ttgaagatagtaatg

SEQ ID NO: 1780628 - DNA, 15 bp, Homo sapiens
tgaagatagtaatga

SEQ ID NO: 1780629 - DNA, 15 bp, Homo sapiens
gaagatagtaatgat

SEQ ID NO: 1780630 - DNA, 15 bp, Homo sapiens
aagatagtaatgatg

SEQ ID NO: 1780631 - DNA, 15 bp, Homo sapiens
agatagtaatgatgg

SEQ ID NO: 1780632 - DNA, 15 bp, Homo sapiens
gatagtaatgatggg

SEQ ID NO: 1780633 - DNA, 15 bp, Homo sapiens
atagtaatgatgggt

SEQ ID NO: 1780634 - DNA, 15 bp, Homo sapiens
tagtaatgatgggtg

SEQ ID NO: 1780635 - DNA, 15 bp, Homo sapiens
agtaatgatgggtga

SEQ ID NO: 1780636 - DNA, 15 bp, Homo sapiens
gtaatgatgggtgag

SEQ ID NO: 1780637 - DNA, 15 bp, Homo sapiens
taatgatgggtgagg

SEQ ID NO: 1780638 - DNA, 15 bp, Homo sapiens
aatgatgggtgagga

SEQ ID NO: 1780639 - DNA, 15 bp, Homo sapiens
atgatgggtgaggac

SEQ ID NO: 1780640 - DNA, 15 bp, Homo sapiens
tgatgggtgaggact

SEQ ID NO: 1780641 - DNA, 15 bp, Homo sapiens
gatgggtgaggactt

SEQ ID NO: 1780642 - DNA, 15 bp, Homo sapiens
atgggtgaggacttt

SEQ ID NO: 1780643 - DNA, 15 bp, Homo sapiens
tgggtgaggactttg

SEQ ID NO: 1780644 - DNA, 15 bp, Homo sapiens
gggtgaggactttga

SEQ ID NO: 1780645 - DNA, 15 bp, Homo sapiens
ggtgaggactttgac

SEQ ID NO: 1780646 - DNA, 15 bp, Homo sapiens
gtgaggactttgact

SEQ ID NO: 1780647 - DNA, 15 bp, Homo sapiens
tgaggactttgactt

SEQ ID NO: 1780648 - DNA, 15 bp, Homo sapiens
gaggactttgacttc

SEQ ID NO: 1780649 - DNA, 15 bp, Homo sapiens
aggactttgacttct

SEQ ID NO: 1780650 - DNA, 15 bp, Homo sapiens
ggactttgacttctg

SEQ ID NO: 1780651 - DNA, 15 bp, Homo sapiens
gactttgacttctgt

SEQ ID NO: 1780652 - DNA, 15 bp, Homo sapiens
actttgacttctgtt

SEQ ID NO: 1780653 - DNA, 15 bp, Homo sapiens
ctttgacttctgtta

SEQ ID NO: 1780654 - DNA, 15 bp, Homo sapiens
tttgacttctgttaa

SEQ ID NO: 1780655 - DNA, 15 bp, Homo sapiens
ttgacttctgttaac

SEQ ID NO: 1780656 - DNA, 15 bp, Homo sapiens
tgacttctgttaaca

SEQ ID NO: 1780657 - DNA, 15 bp, Homo sapiens
gacttctgttaacac

SEQ ID NO: 1780658 - DNA, 15 bp, Homo sapiens
acttctgttaacacc

SEQ ID NO: 1780659 - DNA, 15 bp, Homo sapiens
cttctgttaacacct

SEQ ID NO: 1780660 - DNA, 15 bp, Homo sapiens
ttctgttaacacctc

SEQ ID NO: 1780661 - DNA, 15 bp, Homo sapiens
tctgttaacacctca

SEQ ID NO: 1780662 - DNA, 15 bp, Homo sapiens
ctgttaacacctcat

SEQ ID NO: 1780663 - DNA, 15 bp, Homo sapiens
tgttaacacctcatt

SEQ ID NO: 1780664 - DNA, 15 bp, Homo sapiens
gttaacacctcattc

SEQ ID NO: 1780665 - DNA, 15 bp, Homo sapiens
ttaacacctcattca

SEQ ID NO: 1780666 - DNA, 15 bp, Homo sapiens
taacacctcattcag

SEQ ID NO: 1780667 - DNA, 15 bp, Homo sapiens
aacacctcattcaga

SEQ ID NO: 1780668 - DNA, 15 bp, Homo sapiens
acacctcattcagat

SEQ ID NO: 1780669 - DNA, 15 bp, Homo sapiens
cacctcattcagata

SEQ ID NO: 1780670 - DNA, 15 bp, Homo sapiens
acctcattcagataa

SEQ ID NO: 1780671 - DNA, 15 bp, Homo sapiens
cctcattcagataag

SEQ ID NO: 1780672 - DNA, 15 bp, Homo sapiens
ctcattcagataagt

SEQ ID NO: 1780673 - DNA, 15 bp, Homo sapiens
tcattcagataagtg

SEQ ID NO: 1780674 - DNA, 15 bp, Homo sapiens
cattcagataagtga

SEQ ID NO: 1780675 - DNA, 15 bp, Homo sapiens
attcagataagtgac

SEQ ID NO: 1780676 - DNA, 15 bp, Homo sapiens
ttcagataagtgact

SEQ ID NO: 1780677 - DNA, 15 bp, Homo sapiens
tcagataagtgacta

SEQ ID NO: 1780678 - DNA, 15 bp, Homo sapiens
cagataagtgactat

SEQ ID NO: 1780679 - DNA, 15 bp, Homo sapiens
agataagtgactatt

SEQ ID NO: 1780680 - DNA, 15 bp, Homo sapiens
gataagtgactattt

SEQ ID NO: 1780681 - DNA, 15 bp, Homo sapiens
ataagtgactatttt

SEQ ID NO: 1780682 - DNA, 15 bp, Homo sapiens
taagtgactatttta

SEQ ID NO: 1780683 - DNA, 15 bp, Homo sapiens
aagtgactattttag

SEQ ID NO: 1780684 - DNA, 15 bp, Homo sapiens
agtgactattttagt

SEQ ID NO: 1780685 - DNA, 15 bp, Homo sapiens
gtgactattttagtt

SEQ ID NO: 1780686 - DNA, 15 bp, Homo sapiens
tgactattttagttt

SEQ ID NO: 1780687 - DNA, 15 bp, Homo sapiens
gactattttagttta

SEQ ID NO: 1780688 - DNA, 15 bp, Homo sapiens
actattttagtttaa

SEQ ID NO: 1780689 - DNA, 15 bp, Homo sapiens
ctattttagtttaat

SEQ ID NO: 1780690 - DNA, 15 bp, Homo sapiens
tattttagtttaatt

SEQ ID NO: 1780691 - DNA, 15 bp, Homo sapiens
attttagtttaatta

SEQ ID NO: 1780692 - DNA, 15 bp, Homo sapiens
ttttagtttaattac

SEQ ID NO: 1780693 - DNA, 15 bp, Homo sapiens
tttagtttaattaca

SEQ ID NO: 1780694 - DNA, 15 bp, Homo sapiens
ttagtttaattacat

SEQ ID NO: 1780695 - DNA, 15 bp, Homo sapiens
tagtttaattacatg

SEQ ID NO: 1780696 - DNA, 15 bp, Homo sapiens
agtttaattacatga

SEQ ID NO: 1780697 - DNA, 15 bp, Homo sapiens
gtttaattacatgaa

SEQ ID NO: 1780698 - DNA, 15 bp, Homo sapiens
tttaattacatgaat

SEQ ID NO: 1780699 - DNA, 15 bp, Homo sapiens
ttaattacatgaatt

SEQ ID NO: 1780700 - DNA, 15 bp, Homo sapiens
taattacatgaattt

SEQ ID NO: 1780701 - DNA, 15 bp, Homo sapiens
aattacatgaatttt

SEQ ID NO: 1780702 - DNA, 15 bp, Homo sapiens
attacatgaattttg

SEQ ID NO: 1780703 - DNA, 15 bp, Homo sapiens
ttacatgaattttgt

SEQ ID NO: 1780704 - DNA, 15 bp, Homo sapiens
tacatgaattttgtc

SEQ ID NO: 1780705 - DNA, 15 bp, Homo sapiens
acatgaattttgtca

SEQ ID NO: 1780706 - DNA, 15 bp, Homo sapiens
catgaattttgtcat

SEQ ID NO: 1780707 - DNA, 15 bp, Homo sapiens
atgaattttgtcatc

SEQ ID NO: 1780708 - DNA, 15 bp, Homo sapiens
tgaattttgtcatct

SEQ ID NO: 1780709 - DNA, 15 bp, Homo sapiens
gaattttgtcatctc

SEQ ID NO: 1780710 - DNA, 15 bp, Homo sapiens
aattttgtcatctcc

SEQ ID NO: 1780711 - DNA, 15 bp, Homo sapiens
attttgtcatctccc

SEQ ID NO: 1780712 - DNA, 15 bp, Homo sapiens
ttttgtcatctccct

SEQ ID NO: 1780713 - DNA, 15 bp, Homo sapiens
tttgtcatctccctt

SEQ ID NO: 1780714 - DNA, 15 bp, Homo sapiens
ttgtcatctcccttg

SEQ ID NO: 1780715 - DNA, 15 bp, Homo sapiens
tgtcatctcccttgg

SEQ ID NO: 1780716 - DNA, 15 bp, Homo sapiens
gtcatctcccttgga

SEQ ID NO: 1780717 - DNA, 15 bp, Homo sapiens
tcatctcccttggag

SEQ ID NO: 1780718 - DNA, 15 bp, Homo sapiens
catctcccttggagc

SEQ ID NO: 1780719 - DNA, 15 bp, Homo sapiens
atctcccttggagct

SEQ ID NO: 1780720 - DNA, 15 bp, Homo sapiens
tctcccttggagctg

SEQ ID NO: 1780721 - DNA, 15 bp, Homo sapiens
ctcccttggagctgc

SEQ ID NO: 1780722 - DNA, 15 bp, Homo sapiens
tcccttggagctgcc

SEQ ID NO: 1780723 - DNA, 15 bp, Homo sapiens
cccttggagctgcct

SEQ ID NO: 1780724 - DNA, 15 bp, Homo sapiens
ccttggagctgcctc

SEQ ID NO: 1780725 - DNA, 15 bp, Homo sapiens
cttggagctgcctcc

SEQ ID NO: 1780726 - DNA, 15 bp, Homo sapiens
ttggagctgcctccc

SEQ ID NO: 1780727 - DNA, 15 bp, Homo sapiens
tggagctgcctccca

SEQ ID NO: 1780728 - DNA, 15 bp, Homo sapiens
ggagctgcctcccag

SEQ ID NO: 1780729 - DNA, 15 bp, Homo sapiens
gagctgcctcccaga

SEQ ID NO: 1780730 - DNA, 15 bp, Homo sapiens
agctgcctcccagag

SEQ ID NO: 1780731 - DNA, 15 bp, Homo sapiens
gctgcctcccagagc

SEQ ID NO: 1780732 - DNA, 15 bp, Homo sapiens
ctgcctcccagagct

SEQ ID NO: 1780733 - DNA, 15 bp, Homo sapiens
tgcctcccagagctg

SEQ ID NO: 1780734 - DNA, 15 bp, Homo sapiens
gcctcccagagctgg

SEQ ID NO: 1780735 - DNA, 15 bp, Homo sapiens
cctcccagagctggt

SEQ ID NO: 1780736 - DNA, 15 bp, Homo sapiens
ctcccagagctggta

SEQ ID NO: 1780737 - DNA, 15 bp, Homo sapiens
tcccagagctggtat

SEQ ID NO: 1780738 - DNA, 15 bp, Homo sapiens
cccagagctggtata

SEQ ID NO: 1780739 - DNA, 15 bp, Homo sapiens
ccagagctggtatat

SEQ ID NO: 1780740 - DNA, 15 bp, Homo sapiens
cagagctggtatatc

SEQ ID NO: 1780741 - DNA, 15 bp, Homo sapiens
agagctggtatatca

SEQ ID NO: 1780742 - DNA, 15 bp, Homo sapiens
gagctggtatatcag

SEQ ID NO: 1780743 - DNA, 15 bp, Homo sapiens
agctggtatatcaga

SEQ ID NO: 1780744 - DNA, 15 bp, Homo sapiens
gctggtatatcagac

SEQ ID NO: 1780745 - DNA, 15 bp, Homo sapiens
ctggtatatcagaca

SEQ ID NO: 1780746 - DNA, 15 bp, Homo sapiens
tggtatatcagacat

SEQ ID NO: 1780747 - DNA, 15 bp, Homo sapiens
ggtatatcagacatc

SEQ ID NO: 1780748 - DNA, 15 bp, Homo sapiens
gtatatcagacatcc

SEQ ID NO: 1780749 - DNA, 15 bp, Homo sapiens
tatatcagacatcct

SEQ ID NO: 1780750 - DNA, 15 bp, Homo sapiens
atatcagacatcctc

SEQ ID NO: 1780751 - DNA, 15 bp, Homo sapiens
tatcagacatcctca

SEQ ID NO: 1780752 - DNA, 15 bp, Homo sapiens
atcagacatcctcaa

SEQ ID NO: 1780753 - DNA, 15 bp, Homo sapiens
tcagacatcctcaag

SEQ ID NO: 1780754 - DNA, 15 bp, Homo sapiens
cagacatcctcaagt

SEQ ID NO: 1780755 - DNA, 15 bp, Homo sapiens
agacatcctcaagta

SEQ ID NO: 1780756 - DNA, 15 bp, Homo sapiens
gacatcctcaagtaa

SEQ ID NO: 1780757 - DNA, 15 bp, Homo sapiens
acatcctcaagtaaa

SEQ ID NO: 1780758 - DNA, 15 bp, Homo sapiens
catcctcaagtaaac

SEQ ID NO: 1780759 - DNA, 15 bp, Homo sapiens
atcctcaagtaaacc

SEQ ID NO: 1780760 - DNA, 15 bp, Homo sapiens
tcctcaagtaaacct

SEQ ID NO: 1780761 - DNA, 15 bp, Homo sapiens
cctcaagtaaacctg

SEQ ID NO: 1780762 - DNA, 15 bp, Homo sapiens
ctcaagtaaacctgg

SEQ ID NO: 1780763 - DNA, 15 bp, Homo sapiens
tcaagtaaacctgga

SEQ ID NO: 1780764 - DNA, 15 bp, Homo sapiens
caagtaaacctggac

SEQ ID NO: 1780765 - DNA, 15 bp, Homo sapiens
aagtaaacctggacc

SEQ ID NO: 1780766 - DNA, 15 bp, Homo sapiens
agtaaacctggaccc

SEQ ID NO: 1780767 - DNA, 15 bp, Homo sapiens
gtaaacctggaccca

SEQ ID NO: 1780768 - DNA, 15 bp, Homo sapiens
taaacctggacccaa

SEQ ID NO: 1780769 - DNA, 15 bp, Homo sapiens
aaacctggacccaat

SEQ ID NO: 1780770 - DNA, 15 bp, Homo sapiens
aacctggacccaatt

SEQ ID NO: 1780771 - DNA, 15 bp, Homo sapiens
acctggacccaattt

SEQ ID NO: 1780772 - DNA, 15 bp, Homo sapiens
cctggacccaatttt

SEQ ID NO: 1780773 - DNA, 15 bp, Homo sapiens
ctggacccaatttta

SEQ ID NO: 1780774 - DNA, 15 bp, Homo sapiens
tggacccaattttag

SEQ ID NO: 1780775 - DNA, 15 bp, Homo sapiens
ggacccaattttaga

SEQ ID NO: 1780776 - DNA, 15 bp, Homo sapiens
gacccaattttagaa

SEQ ID NO: 1780777 - DNA, 15 bp, Homo sapiens
acccaattttagaaa

SEQ ID NO: 1780778 - DNA, 15 bp, Homo sapiens
cccaattttagaaat

SEQ ID NO: 1780779 - DNA, 15 bp, Homo sapiens
ccaattttagaaatc

SEQ ID NO: 1780780 - DNA, 15 bp, Homo sapiens
caattttagaaatct

SEQ ID NO: 1780781 - DNA, 15 bp, Homo sapiens
aattttagaaatctt

SEQ ID NO: 1780782 - DNA, 15 bp, Homo sapiens
attttagaaatcttg

SEQ ID NO: 1780783 - DNA, 15 bp, Homo sapiens
ttttagaaatcttgg

SEQ ID NO: 1780784 - DNA, 15 bp, Homo sapiens
tttagaaatcttggc

SEQ ID NO: 1780785 - DNA, 15 bp, Homo sapiens
ttagaaatcttggct

SEQ ID NO: 1780786 - DNA, 15 bp, Homo sapiens
tagaaatcttggcta

SEQ ID NO: 1780787 - DNA, 15 bp, Homo sapiens
agaaatcttggctaa

SEQ ID NO: 1780788 - DNA, 15 bp, Homo sapiens
gaaatcttggctaat

SEQ ID NO: 1780789 - DNA, 15 bp, Homo sapiens
aaatcttggctaatt

SEQ ID NO: 1780790 - DNA, 15 bp, Homo sapiens
aatcttggctaattt

SEQ ID NO: 1780791 - DNA, 15 bp, Homo sapiens
atcttggctaatttt

SEQ ID NO: 1780792 - DNA, 15 bp, Homo sapiens
tcttggctaattttg

SEQ ID NO: 1780793 - DNA, 15 bp, Homo sapiens
cttggctaattttga

SEQ ID NO: 1780794 - DNA, 15 bp, Homo sapiens
ttggctaattttgag

SEQ ID NO: 1780795 - DNA, 15 bp, Homo sapiens
tggctaattttgagt

SEQ ID NO: 1780796 - DNA, 15 bp, Homo sapiens
ggctaattttgagtt

SEQ ID NO: 1780797 - DNA, 15 bp, Homo sapiens
gctaattttgagtta

SEQ ID NO: 1780798 - DNA, 15 bp, Homo sapiens
aattttgagttagga

SEQ ID NO: 1780799 - DNA, 15 bp, Homo sapiens
attttgagttaggaa

SEQ ID NO: 1780800 - DNA, 15 bp, Homo sapiens
ttttgagttaggaag

SEQ ID NO: 1780801 - DNA, 15 bp, Homo sapiens
tttgagttaggaagt

SEQ ID NO: 1780802 - DNA, 15 bp, Homo sapiens
ttgagttaggaagtc

SEQ ID NO: 1780803 - DNA, 15 bp, Homo sapiens
tgagttaggaagtcc

SEQ ID NO: 1780804 - DNA, 15 bp, Homo sapiens
gagttaggaagtcct

SEQ ID NO: 1780805 - DNA, 15 bp, Homo sapiens
agttaggaagtcctt

SEQ ID NO: 1780806 - DNA, 15 bp, Homo sapiens
gttaggaagtccttt

SEQ ID NO: 1780807 - DNA, 15 bp, Homo sapiens
ttaggaagtcctttc

SEQ ID NO: 1780808 - DNA, 15 bp, Homo sapiens
ggaagtcctttcttt

SEQ ID NO: 1780809 - DNA, 15 bp, Homo sapiens
gaagtcctttcttta

SEQ ID NO: 1780810 - DNA, 15 bp, Homo sapiens
aagtcctttctttaa

SEQ ID NO: 1780811 - DNA, 15 bp, Homo sapiens
agtcctttctttaaa

SEQ ID NO: 1780812 - DNA, 15 bp, Homo sapiens
gtcctttctttaaac

SEQ ID NO: 1780813 - DNA, 15 bp, Homo sapiens
tcctttctttaaaca

SEQ ID NO: 1780814 - DNA, 15 bp, Homo sapiens
cctttctttaaacaa

SEQ ID NO: 1780815 - DNA, 15 bp, Homo sapiens
ctttctttaaacaat

SEQ ID NO: 1780816 - DNA, 15 bp, Homo sapiens
tttctttaaacaata

SEQ ID NO: 1780817 - DNA, 15 bp, Homo sapiens
ttctttaaacaatat

SEQ ID NO: 1780818 - DNA, 15 bp, Homo sapiens
tctttaaacaatatt

SEQ ID NO: 1780819 - DNA, 15 bp, Homo sapiens
ctttaaacaatattt

SEQ ID NO: 1780820 - DNA, 15 bp, Homo sapiens
tttaaacaatatttt

SEQ ID NO: 1780821 - DNA, 15 bp, Homo sapiens
ttaaacaatatttta

SEQ ID NO: 1780822 - DNA, 15 bp, Homo sapiens
taaacaatattttaa

SEQ ID NO: 1780823 - DNA, 15 bp, Homo sapiens
aaacaatattttaaa

SEQ ID NO: 1780824 - DNA, 15 bp, Homo sapiens
aacaatattttaaaa

SEQ ID NO: 1780825 - DNA, 15 bp, Homo sapiens
atattttaaaattaa

SEQ ID NO: 1780826 - DNA, 15 bp, Homo sapiens
tattttaaaattaac

SEQ ID NO: 1780827 - DNA, 15 bp, Homo sapiens
attttaaaattaaca

SEQ ID NO: 1780828 - DNA, 15 bp, Homo sapiens
ttttaaaattaacag

SEQ ID NO: 1780829 - DNA, 15 bp, Homo sapiens
tttaaaattaacaga

SEQ ID NO: 1780830 - DNA, 15 bp, Homo sapiens
ttaaaattaacagaa

SEQ ID NO: 1780831 - DNA, 15 bp, Homo sapiens
taaaattaacagaac

SEQ ID NO: 1780832 - DNA, 15 bp, Homo sapiens
aaaattaacagaaca

SEQ ID NO: 1780833 - DNA, 15 bp, Homo sapiens
aaattaacagaacaa

SEQ ID NO: 1780834 - DNA, 15 bp, Homo sapiens
aattaacagaacaat

SEQ ID NO: 1780835 - DNA, 15 bp, Homo sapiens
attaacagaacaatc

SEQ ID NO: 1780836 - DNA, 15 bp, Homo sapiens
ttaacagaacaatca

SEQ ID NO: 1780837 - DNA, 15 bp, Homo sapiens
taacagaacaatcac

SEQ ID NO: 1780838 - DNA, 15 bp, Homo sapiens
aacagaacaatcaca

SEQ ID NO: 1780839 - DNA, 15 bp, Homo sapiens
acagaacaatcacaa

SEQ ID NO: 1780840 - DNA, 15 bp, Homo sapiens
cagaacaatcacaaa

SEQ ID NO: 1780841 - DNA, 15 bp, Homo sapiens
agaacaatcacaaaa

SEQ ID NO: 1780842 - DNA, 15 bp, Homo sapiens
gaacaatcacaaaat

SEQ ID NO: 1780843 - DNA, 15 bp, Homo sapiens
aacaatcacaaaata

SEQ ID NO: 1780844 - DNA, 15 bp, Homo sapiens
acaatcacaaaatat

SEQ ID NO: 1780845 - DNA, 15 bp, Homo sapiens
caatcacaaaatata

SEQ ID NO: 1780846 - DNA, 15 bp, Homo sapiens
aatcacaaaatatat

SEQ ID NO: 1780847 - DNA, 15 bp, Homo sapiens
atcacaaaatatatt

SEQ ID NO: 1780848 - DNA, 15 bp, Homo sapiens
tcacaaaatatattt

SEQ ID NO: 1780849 - DNA, 15 bp, Homo sapiens
cacaaaatatatttt

SEQ ID NO: 1780850 - DNA, 15 bp, Homo sapiens
acaaaatatatttta

SEQ ID NO: 1780851 - DNA, 15 bp, Homo sapiens
caaaatatattttac

SEQ ID NO: 1780852 - DNA, 15 bp, Homo sapiens
atatattttacatat

SEQ ID NO: 1780853 - DNA, 15 bp, Homo sapiens
tatattttacatatt

SEQ ID NO: 1780854 - DNA, 15 bp, Homo sapiens
atattttacatattg

SEQ ID NO: 1780855 - DNA, 15 bp, Homo sapiens
tattttacatattgc

SEQ ID NO: 1780856 - DNA, 15 bp, Homo sapiens
attttacatattgca

SEQ ID NO: 1780857 - DNA, 15 bp, Homo sapiens
ttttacatattgcac

SEQ ID NO: 1780858 - DNA, 15 bp, Homo sapiens
tttacatattgcact

SEQ ID NO: 1780859 - DNA, 15 bp, Homo sapiens
ttacatattgcactt

SEQ ID NO: 1780860 - DNA, 15 bp, Homo sapiens
tacatattgcacttt

SEQ ID NO: 1780861 - DNA, 15 bp, Homo sapiens
acatattgcactttt

SEQ ID NO: 1780862 - DNA, 15 bp, Homo sapiens
catattgcacttttc

SEQ ID NO: 1780863 - DNA, 15 bp, Homo sapiens
atattgcacttttca

SEQ ID NO: 1780864 - DNA, 15 bp, Homo sapiens
tattgcacttttcaa

SEQ ID NO: 1780865 - DNA, 15 bp, Homo sapiens
attgcacttttcaaa

SEQ ID NO: 1780866 - DNA, 15 bp, Homo sapiens
ttgcacttttcaaaa

SEQ ID NO: 1780867 - DNA, 15 bp, Homo sapiens
tgcacttttcaaaat

SEQ ID NO: 1780868 - DNA, 15 bp, Homo sapiens
gcacttttcaaaata

SEQ ID NO: 1780869 - DNA, 15 bp, Homo sapiens
cacttttcaaaatac

SEQ ID NO: 1780870 - DNA, 15 bp, Homo sapiens
acttttcaaaatact

SEQ ID NO: 1780871 - DNA, 15 bp, Homo sapiens
cttttcaaaatactt

SEQ ID NO: 1780872 - DNA, 15 bp, Homo sapiens
ttttcaaaatacttt

SEQ ID NO: 1780873 - DNA, 15 bp, Homo sapiens
tttcaaaatacttta

SEQ ID NO: 1780874 - DNA, 15 bp, Homo sapiens
ttcaaaatactttaa

SEQ ID NO: 1780875 - DNA, 15 bp, Homo sapiens
tcaaaatactttaaa

SEQ ID NO: 1780876 - DNA, 15 bp, Homo sapiens
caaaatactttaaat

SEQ ID NO: 1780877 - DNA, 15 bp, Homo sapiens
aaaatactttaaata

SEQ ID NO: 1780878 - DNA, 15 bp, Homo sapiens
aaatactttaaatat

SEQ ID NO: 1780879 - DNA, 15 bp, Homo sapiens
aatactttaaatatt

SEQ ID NO: 1780880 - DNA, 15 bp, Homo sapiens
atactttaaatattt

SEQ ID NO: 1780881 - DNA, 15 bp, Homo sapiens
tactttaaatattta

SEQ ID NO: 1780882 - DNA, 15 bp, Homo sapiens
actttaaatatttaa

SEQ ID NO: 1780883 - DNA, 15 bp, Homo sapiens
ctttaaatatttaaa

SEQ ID NO: 1780884 - DNA, 15 bp, Homo sapiens
tttaaatatttaaaa

SEQ ID NO: 1780885 - DNA, 15 bp, Homo sapiens
ttaaatatttaaaaa

SEQ ID NO: 1780886 - DNA, 15 bp, Homo sapiens
taaatatttaaaaaa

SEQ ID NO: 1780887 - DNA, 15 bp, Homo sapiens
aaatatttaaaaaaa

SEQ ID NO: 1780888 - DNA, 15 bp, Homo sapiens
aatatttaaaaaaat

SEQ ID NO: 1780889 - DNA, 15 bp, Homo sapiens
atatttaaaaaaata

SEQ ID NO: 1780890 - DNA, 15 bp, Homo sapiens
tatttaaaaaaatac

SEQ ID NO: 1780891 - DNA, 15 bp, Homo sapiens
atttaaaaaaatacc

SEQ ID NO: 1780892 - DNA, 15 bp, Homo sapiens
tttaaaaaaataccc

SEQ ID NO: 1780893 - DNA, 15 bp, Homo sapiens
ttaaaaaaataccca

SEQ ID NO: 1780894 - DNA, 15 bp, Homo sapiens
taaaaaaatacccaa

SEQ ID NO: 1780895 - DNA, 15 bp, Homo sapiens
aaaaaaatacccaac

SEQ ID NO: 1780896 - DNA, 15 bp, Homo sapiens
aaaaaatacccaaca

SEQ ID NO: 1780897 - DNA, 15 bp, Homo sapiens
aaaaatacccaacac

SEQ ID NO: 1780898 - DNA, 15 bp, Homo sapiens
aaaatacccaacacc

SEQ ID NO: 1780899 - DNA, 15 bp, Homo sapiens
aaatacccaacacca

SEQ ID NO: 1780900 - DNA, 15 bp, Homo sapiens
aatacccaacaccac

SEQ ID NO: 1780901 - DNA, 15 bp, Homo sapiens
atacccaacaccaca

SEQ ID NO: 1780902 - DNA, 15 bp, Homo sapiens
tacccaacaccacaa

SEQ ID NO: 1780903 - DNA, 15 bp, Homo sapiens
acccaacaccacaaa

SEQ ID NO: 1780904 - DNA, 15 bp, Homo sapiens
cccaacaccacaaag

SEQ ID NO: 1780905 - DNA, 15 bp, Homo sapiens
ccaacaccacaaagt

SEQ ID NO: 1780906 - DNA, 15 bp, Homo sapiens
caacaccacaaagta

SEQ ID NO: 1780907 - DNA, 15 bp, Homo sapiens
aacaccacaaagtaa

SEQ ID NO: 1780908 - DNA, 15 bp, Homo sapiens
acaccacaaagtaac

SEQ ID NO: 1780909 - DNA, 15 bp, Homo sapiens
caccacaaagtaact

SEQ ID NO: 1780910 - DNA, 15 bp, Homo sapiens
accacaaagtaactt

SEQ ID NO: 1780911 - DNA, 15 bp, Homo sapiens
ccacaaagtaactta

SEQ ID NO: 1780912 - DNA, 15 bp, Homo sapiens
cacaaagtaacttag

SEQ ID NO: 1780913 - DNA, 15 bp, Homo sapiens
acaaagtaacttagt

SEQ ID NO: 1780914 - DNA, 15 bp, Homo sapiens
caaagtaacttagtt

SEQ ID NO: 1780915 - DNA, 15 bp, Homo sapiens
aaagtaacttagttt

SEQ ID NO: 1780916 - DNA, 15 bp, Homo sapiens
aagtaacttagttta

SEQ ID NO: 1780917 - DNA, 15 bp, Homo sapiens
agtaacttagtttaa

SEQ ID NO: 1780918 - DNA, 15 bp, Homo sapiens
gtaacttagtttaaa

SEQ ID NO: 1780919 - DNA, 15 bp, Homo sapiens
taacttagtttaaaa

SEQ ID NO: 1780920 - DNA, 15 bp, Homo sapiens
aacttagtttaaaat

SEQ ID NO: 1780921 - DNA, 15 bp, Homo sapiens
acttagtttaaaata

SEQ ID NO: 1780922 - DNA, 15 bp, Homo sapiens
cttagtttaaaataa

SEQ ID NO: 1780923 - DNA, 15 bp, Homo sapiens
ttagtttaaaataaa

SEQ ID NO: 1780924 - DNA, 15 bp, Homo sapiens
tagtttaaaataaaa

SEQ ID NO: 1780925 - DNA, 15 bp, Homo sapiens
agtttaaaataaaat

SEQ ID NO: 1780926 - DNA, 15 bp, Homo sapiens
gtttaaaataaaata

SEQ ID NO: 1780927 - DNA, 15 bp, Homo sapiens
tttaaaataaaataa

SEQ ID NO: 1780928 - DNA, 15 bp, Homo sapiens
ttaaaataaaataaa

SEQ ID NO: 1780929 - DNA, 15 bp, Homo sapiens
aataaaataaaaatt

SEQ ID NO: 1780930 - DNA, 15 bp, Homo sapiens
ataaaataaaaattt

SEQ ID NO: 1780931 - DNA, 15 bp, Homo sapiens
taaaataaaaatttt

SEQ ID NO: 1780932 - DNA, 15 bp, Homo sapiens
aaaataaaaattttt

SEQ ID NO: 1780933 - DNA, 15 bp, Homo sapiens
aaataaaaatttttg

SEQ ID NO: 1780934 - DNA, 15 bp, Homo sapiens
aataaaaatttttga

SEQ ID NO: 1780935 - DNA, 15 bp, Homo sapiens
ataaaaatttttgaa

SEQ ID NO: 1780936 - DNA, 15 bp, Homo sapiens
taaaaatttttgaaa

SEQ ID NO: 1780937 - DNA, 15 bp, Homo sapiens
aaaaatttttgaaat

SEQ ID NO: 1780938 - DNA, 15 bp, Homo sapiens
aaaatttttgaaatc

SEQ ID NO: 1780939 - DNA, 15 bp, Homo sapiens
aaatttttgaaatca

SEQ ID NO: 1780940 - DNA, 15 bp, Homo sapiens
aatttttgaaatcag

SEQ ID NO: 1780941 - DNA, 15 bp, Homo sapiens
atttttgaaatcaga

SEQ ID NO: 1780942 - DNA, 15 bp, Homo sapiens
tttttgaaatcagac

SEQ ID NO: 1780943 - DNA, 15 bp, Homo sapiens
ttttgaaatcagacc

SEQ ID NO: 1780944 - DNA, 15 bp, Homo sapiens
tttgaaatcagacct

SEQ ID NO: 1780945 - DNA, 15 bp, Homo sapiens
ttgaaatcagaccta

SEQ ID NO: 1780946 - DNA, 15 bp, Homo sapiens
tgaaatcagacctaa

SEQ ID NO: 1780947 - DNA, 15 bp, Homo sapiens
gaaatcagacctaat

SEQ ID NO: 1780948 - DNA, 15 bp, Homo sapiens
aaatcagacctaatc

SEQ ID NO: 1780949 - DNA, 15 bp, Homo sapiens
aatcagacctaatca

SEQ ID NO: 1780950 - DNA, 15 bp, Homo sapiens
atcagacctaatcaa

SEQ ID NO: 1780951 - DNA, 15 bp, Homo sapiens
tcagacctaatcaaa

SEQ ID NO: 1780952 - DNA, 15 bp, Homo sapiens
cagacctaatcaaat

SEQ ID NO: 1780953 - DNA, 15 bp, Homo sapiens
agacctaatcaaatt

SEQ ID NO: 1780954 - DNA, 15 bp, Homo sapiens
gacctaatcaaattg

SEQ ID NO: 1780955 - DNA, 15 bp, Homo sapiens
acctaatcaaattga

SEQ ID NO: 1780956 - DNA, 15 bp, Homo sapiens
cctaatcaaattgat

SEQ ID NO: 1780957 - DNA, 15 bp, Homo sapiens
ctaatcaaattgata

SEQ ID NO: 1780958 - DNA, 15 bp, Homo sapiens
taatcaaattgatat

SEQ ID NO: 1780959 - DNA, 15 bp, Homo sapiens
aatcaaattgatata

SEQ ID NO: 1780960 - DNA, 15 bp, Homo sapiens
atcaaattgatatat

SEQ ID NO: 1780961 - DNA, 15 bp, Homo sapiens
tcaaattgatatatc

SEQ ID NO: 1780962 - DNA, 15 bp, Homo sapiens
caaattgatatatct

SEQ ID NO: 1780963 - DNA, 15 bp, Homo sapiens
aaattgatatatctc

SEQ ID NO: 1780964 - DNA, 15 bp, Homo sapiens
aattgatatatctct

SEQ ID NO: 1780965 - DNA, 15 bp, Homo sapiens
attgatatatctctc

SEQ ID NO: 1780966 - DNA, 15 bp, Homo sapiens
ttgatatatctctca

SEQ ID NO: 1780967 - DNA, 15 bp, Homo sapiens
tgatatatctctcat

SEQ ID NO: 1780968 - DNA, 15 bp, Homo sapiens
gatatatctctcatt

SEQ ID NO: 1780969 - DNA, 15 bp, Homo sapiens
atatatctctcattt

SEQ ID NO: 1780970 - DNA, 15 bp, Homo sapiens
tatatctctcatttt

SEQ ID NO: 1780971 - DNA, 15 bp, Homo sapiens
atatctctcattttc

SEQ ID NO: 1780972 - DNA, 15 bp, Homo sapiens
tatctctcattttct

SEQ ID NO: 1780973 - DNA, 15 bp, Homo sapiens
atctctcattttctt

SEQ ID NO: 1780974 - DNA, 15 bp, Homo sapiens
tctctcattttcttt

SEQ ID NO: 1780975 - DNA, 15 bp, Homo sapiens
ctctcattttctttg

SEQ ID NO: 1780976 - DNA, 15 bp, Homo sapiens
tctcattttctttga

SEQ ID NO: 1780977 - DNA, 15 bp, Homo sapiens
ctcattttctttgaa

SEQ ID NO: 1780978 - DNA, 15 bp, Homo sapiens
tcattttctttgaaa

SEQ ID NO: 1780979 - DNA, 15 bp, Homo sapiens
cattttctttgaaaa

SEQ ID NO: 1780980 - DNA, 15 bp, Homo sapiens
attttctttgaaaat

SEQ ID NO: 1780981 - DNA, 15 bp, Homo sapiens
ttttctttgaaaatt

SEQ ID NO: 1780982 - DNA, 15 bp, Homo sapiens
tttctttgaaaattt

SEQ ID NO: 1780983 - DNA, 15 bp, Homo sapiens
ttctttgaaaatttt

SEQ ID NO: 1780984 - DNA, 15 bp, Homo sapiens
tctttgaaaattttg

SEQ ID NO: 1780985 - DNA, 15 bp, Homo sapiens
ctttgaaaattttga

SEQ ID NO: 1780986 - DNA, 15 bp, Homo sapiens
tttgaaaattttgac

SEQ ID NO: 1780987 - DNA, 15 bp, Homo sapiens
ttgaaaattttgacc

SEQ ID NO: 1780988 - DNA, 15 bp, Homo sapiens
tgaaaattttgacca

SEQ ID NO: 1780989 - DNA, 15 bp, Homo sapiens
gaaaattttgaccaa

SEQ ID NO: 1780990 - DNA, 15 bp, Homo sapiens
aaaattttgaccaag

SEQ ID NO: 1780991 - DNA, 15 bp, Homo sapiens
aaattttgaccaaga

SEQ ID NO: 1780992 - DNA, 15 bp, Homo sapiens
aattttgaccaagat

SEQ ID NO: 1780993 - DNA, 15 bp, Homo sapiens
attttgaccaagata

SEQ ID NO: 1780994 - DNA, 15 bp, Homo sapiens
ttttgaccaagatat

SEQ ID NO: 1780995 - DNA, 15 bp, Homo sapiens
tttgaccaagatatc

SEQ ID NO: 1780996 - DNA, 15 bp, Homo sapiens
ttgaccaagatatca

SEQ ID NO: 1780997 - DNA, 15 bp, Homo sapiens
tgaccaagatatcaa

SEQ ID NO: 1780998 - DNA, 15 bp, Homo sapiens
gaccaagatatcaat

SEQ ID NO: 1780999 - DNA, 15 bp, Homo sapiens
accaagatatcaatt

SEQ ID NO: 1781000 - DNA, 15 bp, Homo sapiens
ccaagatatcaatta

SEQ ID NO: 1781001 - DNA, 15 bp, Homo sapiens
caagatatcaattaa

SEQ ID NO: 1781002 - DNA, 15 bp, Homo sapiens
aagatatcaattaat

SEQ ID NO: 1781003 - DNA, 15 bp, Homo sapiens
agatatcaattaata

SEQ ID NO: 1781004 - DNA, 15 bp, Homo sapiens
gatatcaattaataa

SEQ ID NO: 1781005 - DNA, 15 bp, Homo sapiens
atatcaattaataaa

SEQ ID NO: 1781006 - DNA, 15 bp, Homo sapiens
tatcaattaataaat

SEQ ID NO: 1781007 - DNA, 15 bp, Homo sapiens
atcaattaataaatc

SEQ ID NO: 1781008 - DNA, 15 bp, Homo sapiens
tcaattaataaatcc

SEQ ID NO: 1781009 - DNA, 15 bp, Homo sapiens
caattaataaatcca

SEQ ID NO: 1781010 - DNA, 15 bp, Homo sapiens
aattaataaatccac

SEQ ID NO: 1781011 - DNA, 15 bp, Homo sapiens
attaataaatccact

SEQ ID NO: 1781012 - DNA, 15 bp, Homo sapiens
ttaataaatccactt

SEQ ID NO: 1781013 - DNA, 15 bp, Homo sapiens
taataaatccacttt

SEQ ID NO: 1781014 - DNA, 15 bp, Homo sapiens
aataaatccactttg

SEQ ID NO: 1781015 - DNA, 15 bp, Homo sapiens
ataaatccactttga

SEQ ID NO: 1781016 - DNA, 15 bp, Homo sapiens
taaatccactttgaa

SEQ ID NO: 1781017 - DNA, 15 bp, Homo sapiens
aaatccactttgaaa

SEQ ID NO: 1781018 - DNA, 15 bp, Homo sapiens
aatccactttgaaag

SEQ ID NO: 1781019 - DNA, 15 bp, Homo sapiens
atccactttgaaaga

SEQ ID NO: 1781020 - DNA, 15 bp, Homo sapiens
tccactttgaaagac

SEQ ID NO: 1781021 - DNA, 15 bp, Homo sapiens
ccactttgaaagaca

SEQ ID NO: 1781022 - DNA, 15 bp, Homo sapiens
cactttgaaagacat

SEQ ID NO: 1781023 - DNA, 15 bp, Homo sapiens
actttgaaagacatt

SEQ ID NO: 1781024 - DNA, 15 bp, Homo sapiens
ctttgaaagacattt

SEQ ID NO: 1781025 - DNA, 15 bp, Homo sapiens
tttgaaagacatttt

SEQ ID NO: 1781026 - DNA, 15 bp, Homo sapiens
ttgaaagacatttta

SEQ ID NO: 1781027 - DNA, 15 bp, Homo sapiens
tgaaagacattttaa

SEQ ID NO: 1781028 - DNA, 15 bp, Homo sapiens
gaaagacattttaag

SEQ ID NO: 1781029 - DNA, 15 bp, Homo sapiens
aaagacattttaaga

SEQ ID NO: 1781030 - DNA, 15 bp, Homo sapiens
aagacattttaagac

SEQ ID NO: 1781031 - DNA, 15 bp, Homo sapiens
agacattttaagaca

SEQ ID NO: 1781032 - DNA, 15 bp, Homo sapiens
gacattttaagacat

SEQ ID NO: 1781033 - DNA, 15 bp, Homo sapiens
acattttaagacatt

SEQ ID NO: 1781034 - DNA, 15 bp, Homo sapiens
cattttaagacattt

SEQ ID NO: 1781035 - DNA, 15 bp, Homo sapiens
attttaagacattta

SEQ ID NO: 1781036 - DNA, 15 bp, Homo sapiens
ttttaagacatttaa

SEQ ID NO: 1781037 - DNA, 15 bp, Homo sapiens
tttaagacatttaat

SEQ ID NO: 1781038 - DNA, 15 bp, Homo sapiens
ttaagacatttaatt

SEQ ID NO: 1781039 - DNA, 15 bp, Homo sapiens
taagacatttaatta

SEQ ID NO: 1781040 - DNA, 15 bp, Homo sapiens
aagacatttaattaa

SEQ ID NO: 1781041 - DNA, 15 bp, Homo sapiens
agacatttaattaat

SEQ ID NO: 1781042 - DNA, 15 bp, Homo sapiens
gacatttaattaata

SEQ ID NO: 1781043 - DNA, 15 bp, Homo sapiens
acatttaattaataa

SEQ ID NO: 1781044 - DNA, 15 bp, Homo sapiens
catttaattaataaa

SEQ ID NO: 1781045 - DNA, 15 bp, Homo sapiens
atttaattaataaat

SEQ ID NO: 1781046 - DNA, 15 bp, Homo sapiens
tttaattaataaatc

SEQ ID NO: 1781047 - DNA, 15 bp, Homo sapiens
ttaattaataaatcc

SEQ ID NO: 1781048 - DNA, 15 bp, Homo sapiens
taattaataaatcca

SEQ ID NO: 1781049 - DNA, 15 bp, Homo sapiens
aattaataaatccat

SEQ ID NO: 1781050 - DNA, 15 bp, Homo sapiens
attaataaatccatt

SEQ ID NO: 1781051 - DNA, 15 bp, Homo sapiens
ttaataaatccattt

SEQ ID NO: 1781052 - DNA, 15 bp, Homo sapiens
taataaatccatttg

SEQ ID NO: 1781053 - DNA, 15 bp, Homo sapiens
aataaatccatttga

SEQ ID NO: 1781054 - DNA, 15 bp, Homo sapiens
ataaatccatttgaa

SEQ ID NO: 1781055 - DNA, 15 bp, Homo sapiens
taaatccatttgaaa

SEQ ID NO: 1781056 - DNA, 15 bp, Homo sapiens
aaatccatttgaaac

SEQ ID NO: 1781057 - DNA, 15 bp, Homo sapiens
aatccatttgaaaca

SEQ ID NO: 1781058 - DNA, 15 bp, Homo sapiens
atccatttgaaacac

SEQ ID NO: 1781059 - DNA, 15 bp, Homo sapiens
tccatttgaaacaca

SEQ ID NO: 1781060 - DNA, 15 bp, Homo sapiens
ccatttgaaacacat

SEQ ID NO: 1781061 - DNA, 15 bp, Homo sapiens
catttgaaacacatt

SEQ ID NO: 1781062 - DNA, 15 bp, Homo sapiens
atttgaaacacattt

SEQ ID NO: 1781063 - DNA, 15 bp, Homo sapiens
tttgaaacacatttt

SEQ ID NO: 1781064 - DNA, 15 bp, Homo sapiens
ttgaaacacatttta

SEQ ID NO: 1781065 - DNA, 15 bp, Homo sapiens
tgaaacacattttaa

SEQ ID NO: 1781066 - DNA, 15 bp, Homo sapiens
gaaacacattttaaa

SEQ ID NO: 1781067 - DNA, 15 bp, Homo sapiens
aaacacattttaaaa

SEQ ID NO: 1781068 - DNA, 15 bp, Homo sapiens
aacacattttaaaat

SEQ ID NO: 1781069 - DNA, 15 bp, Homo sapiens
acacattttaaaatg

SEQ ID NO: 1781070 - DNA, 15 bp, Homo sapiens
cacattttaaaatgt

SEQ ID NO: 1781071 - DNA, 15 bp, Homo sapiens
acattttaaaatgtg

SEQ ID NO: 1781072 - DNA, 15 bp, Homo sapiens
cattttaaaatgtgt

SEQ ID NO: 1781073 - DNA, 15 bp, Homo sapiens
attttaaaatgtgtt

SEQ ID NO: 1781074 - DNA, 15 bp, Homo sapiens
ttttaaaatgtgttt

SEQ ID NO: 1781075 - DNA, 15 bp, Homo sapiens
tttaaaatgtgtttg

SEQ ID NO: 1781076 - DNA, 15 bp, Homo sapiens
ttaaaatgtgtttgt

SEQ ID NO: 1781077 - DNA, 15 bp, Homo sapiens
taaaatgtgtttgtt

SEQ ID NO: 1781078 - DNA, 15 bp, Homo sapiens
aaaatgtgtttgttc

SEQ ID NO: 1781079 - DNA, 15 bp, Homo sapiens
aaatgtgtttgttca

SEQ ID NO: 1781080 - DNA, 15 bp, Homo sapiens
aatgtgtttgttcat

SEQ ID NO: 1781081 - DNA, 15 bp, Homo sapiens
atgtgtttgttcatg

SEQ ID NO: 1781082 - DNA, 15 bp, Homo sapiens
tgtgtttgttcatgt

SEQ ID NO: 1781083 - DNA, 15 bp, Homo sapiens
gtgtttgttcatgtg

SEQ ID NO: 1781084 - DNA, 15 bp, Homo sapiens
tgtttgttcatgtgt

SEQ ID NO: 1781085 - DNA, 15 bp, Homo sapiens
gtttgttcatgtgta

SEQ ID NO: 1781086 - DNA, 15 bp, Homo sapiens
tttgttcatgtgtat

SEQ ID NO: 1781087 - DNA, 15 bp, Homo sapiens
ttgttcatgtgtata

SEQ ID NO: 1781088 - DNA, 15 bp, Homo sapiens
tgttcatgtgtataa

SEQ ID NO: 1781089 - DNA, 15 bp, Homo sapiens
gttcatgtgtataaa

SEQ ID NO: 1781090 - DNA, 15 bp, Homo sapiens
ttcatgtgtataaaa

SEQ ID NO: 1781091 - DNA, 15 bp, Homo sapiens
tcatgtgtataaaat

SEQ ID NO: 1781092 - DNA, 15 bp, Homo sapiens
catgtgtataaaatt

SEQ ID NO: 1781093 - DNA, 15 bp, Homo sapiens
atgtgtataaaatta

SEQ ID NO: 1781094 - DNA, 15 bp, Homo sapiens
tgtgtataaaattat

SEQ ID NO: 1781095 - DNA, 15 bp, Homo sapiens
gtgtataaaattatg

SEQ ID NO: 1781096 - DNA, 15 bp, Homo sapiens
tgtataaaattatgt

SEQ ID NO: 1781097 - DNA, 15 bp, Homo sapiens
gtataaaattatgtc

SEQ ID NO: 1781098 - DNA, 15 bp, Homo sapiens
tataaaattatgtca

SEQ ID NO: 1781099 - DNA, 15 bp, Homo sapiens
ataaaattatgtcat

SEQ ID NO: 1781100 - DNA, 15 bp, Homo sapiens
taaaattatgtcatt

SEQ ID NO: 1781101 - DNA, 15 bp, Homo sapiens
aaaattatgtcattg

SEQ ID NO: 1781102 - DNA, 15 bp, Homo sapiens
aaattatgtcattga

SEQ ID NO: 1781103 - DNA, 15 bp, Homo sapiens
aattatgtcattgat

SEQ ID NO: 1781104 - DNA, 15 bp, Homo sapiens
attatgtcattgata

SEQ ID NO: 1781105 - DNA, 15 bp, Homo sapiens
ttatgtcattgatat

SEQ ID NO: 1781106 - DNA, 15 bp, Homo sapiens
tatgtcattgatata

SEQ ID NO: 1781107 - DNA, 15 bp, Homo sapiens
atgtcattgatataa

SEQ ID NO: 1781108 - DNA, 15 bp, Homo sapiens
tgtcattgatataac

SEQ ID NO: 1781109 - DNA, 15 bp, Homo sapiens
gtcattgatataaca

SEQ ID NO: 1781110 - DNA, 15 bp, Homo sapiens
tcattgatataacat

SEQ ID NO: 1781111 - DNA, 15 bp, Homo sapiens
cattgatataacatt

SEQ ID NO: 1781112 - DNA, 15 bp, Homo sapiens
attgatataacatta

SEQ ID NO: 1781113 - DNA, 15 bp, Homo sapiens
ttgatataacattac

SEQ ID NO: 1781114 - DNA, 15 bp, Homo sapiens
tgatataacattact

SEQ ID NO: 1781115 - DNA, 15 bp, Homo sapiens
gatataacattacta

SEQ ID NO: 1781116 - DNA, 15 bp, Homo sapiens
atataacattactat

SEQ ID NO: 1781117 - DNA, 15 bp, Homo sapiens
tataacattactatt

SEQ ID NO: 1781118 - DNA, 15 bp, Homo sapiens
ataacattactattc

SEQ ID NO: 1781119 - DNA, 15 bp, Homo sapiens
taacattactattcc

SEQ ID NO: 1781120 - DNA, 15 bp, Homo sapiens
aacattactattcct

SEQ ID NO: 1781121 - DNA, 15 bp, Homo sapiens
acattactattcctt

SEQ ID NO: 1781122 - DNA, 15 bp, Homo sapiens
cattactattccttt

SEQ ID NO: 1781123 - DNA, 15 bp, Homo sapiens
attactattccttta

SEQ ID NO: 1781124 - DNA, 15 bp, Homo sapiens
ttactattcctttaa

SEQ ID NO: 1781125 - DNA, 15 bp, Homo sapiens
tactattcctttaaa

SEQ ID NO: 1781126 - DNA, 15 bp, Homo sapiens
actattcctttaaac

SEQ ID NO: 1781127 - DNA, 15 bp, Homo sapiens
ctattcctttaaaca

SEQ ID NO: 1781128 - DNA, 15 bp, Homo sapiens
tattcctttaaacat

SEQ ID NO: 1781129 - DNA, 15 bp, Homo sapiens
attcctttaaacatt

SEQ ID NO: 1781130 - DNA, 15 bp, Homo sapiens
ttcctttaaacattg

SEQ ID NO: 1781131 - DNA, 15 bp, Homo sapiens
tcctttaaacattgt

SEQ ID NO: 1781132 - DNA, 15 bp, Homo sapiens
cctttaaacattgtt

SEQ ID NO: 1781133 - DNA, 15 bp, Homo sapiens
ctttaaacattgtta

SEQ ID NO: 1781134 - DNA, 15 bp, Homo sapiens
tttaaacattgttat

SEQ ID NO: 1781135 - DNA, 15 bp, Homo sapiens
ttaaacattgttatg

SEQ ID NO: 1781136 - DNA, 15 bp, Homo sapiens
taaacattgttatgt

SEQ ID NO: 1781137 - DNA, 15 bp, Homo sapiens
aaacattgttatgtt

SEQ ID NO: 1781138 - DNA, 15 bp, Homo sapiens
aacattgttatgttc

SEQ ID NO: 1781139 - DNA, 15 bp, Homo sapiens
acattgttatgttct

SEQ ID NO: 1781140 - DNA, 15 bp, Homo sapiens
cattgttatgttctt

SEQ ID NO: 1781141 - DNA, 15 bp, Homo sapiens
attgttatgttctta

SEQ ID NO: 1781142 - DNA, 15 bp, Homo sapiens
ttgttatgttcttaa

SEQ ID NO: 1781143 - DNA, 15 bp, Homo sapiens
tgttatgttcttaaa

SEQ ID NO: 1781144 - DNA, 15 bp, Homo sapiens
gttatgttcttaaaa

SEQ ID NO: 1781145 - DNA, 15 bp, Homo sapiens
ttatgttcttaaaaa

SEQ ID NO: 1781146 - DNA, 15 bp, Homo sapiens
tatgttcttaaaaat

SEQ ID NO: 1781147 - DNA, 15 bp, Homo sapiens
atgttcttaaaaata

SEQ ID NO: 1781148 - DNA, 15 bp, Homo sapiens
tgttcttaaaaatat

SEQ ID NO: 1781149 - DNA, 15 bp, Homo sapiens
gttcttaaaaatatc

SEQ ID NO: 1781150 - DNA, 15 bp, Homo sapiens
ttcttaaaaatatct

SEQ ID NO: 1781151 - DNA, 15 bp, Homo sapiens
tcttaaaaatatctc

SEQ ID NO: 1781152 - DNA, 15 bp, Homo sapiens
cttaaaaatatctcc

SEQ ID NO: 1781153 - DNA, 15 bp, Homo sapiens
aaaaatatctcctct

SEQ ID NO: 1781154 - DNA, 15 bp, Homo sapiens
aaaatatctcctctt

SEQ ID NO: 1781155 - DNA, 15 bp, Homo sapiens
aaatatctcctctta

SEQ ID NO: 1781156 - DNA, 15 bp, Homo sapiens
aatatctcctcttag

SEQ ID NO: 1781157 - DNA, 15 bp, Homo sapiens
atatctcctcttagt

SEQ ID NO: 1781158 - DNA, 15 bp, Homo sapiens
tatctcctcttagtc

SEQ ID NO: 1781159 - DNA, 15 bp, Homo sapiens
atctcctcttagtct

SEQ ID NO: 1781160 - DNA, 15 bp, Homo sapiens
tctcctcttagtcta

SEQ ID NO: 1781161 - DNA, 15 bp, Homo sapiens
ctcctcttagtctat

SEQ ID NO: 1781162 - DNA, 15 bp, Homo sapiens
tcctcttagtctata

SEQ ID NO: 1781163 - DNA, 15 bp, Homo sapiens
cctcttagtctataa

SEQ ID NO: 1781164 - DNA, 15 bp, Homo sapiens
ctcttagtctataat

SEQ ID NO: 1781165 - DNA, 15 bp, Homo sapiens
tcttagtctataatt

SEQ ID NO: 1781166 - DNA, 15 bp, Homo sapiens
cttagtctataattt

SEQ ID NO: 1781167 - DNA, 15 bp, Homo sapiens
ttagtctataattta

SEQ ID NO: 1781168 - DNA, 15 bp, Homo sapiens
tagtctataatttag

SEQ ID NO: 1781169 - DNA, 15 bp, Homo sapiens
agtctataatttagc

SEQ ID NO: 1781170 - DNA, 15 bp, Homo sapiens
gtctataatttagcg

SEQ ID NO: 1781171 - DNA, 15 bp, Homo sapiens
tctataatttagcga

SEQ ID NO: 1781172 - DNA, 15 bp, Homo sapiens
ctataatttagcgaa

SEQ ID NO: 1781173 - DNA, 15 bp, Homo sapiens
tataatttagcgaaa

SEQ ID NO: 1781174 - DNA, 15 bp, Homo sapiens
ataatttagcgaaag

SEQ ID NO: 1781175 - DNA, 15 bp, Homo sapiens
taatttagcgaaagg

SEQ ID NO: 1781176 - DNA, 15 bp, Homo sapiens
aatttagcgaaagga

SEQ ID NO: 1781177 - DNA, 15 bp, Homo sapiens
atttagcgaaaggat

SEQ ID NO: 1781178 - DNA, 15 bp, Homo sapiens
tttagcgaaaggatt

SEQ ID NO: 1781179 - DNA, 15 bp, Homo sapiens
ttagcgaaaggatta

SEQ ID NO: 1781180 - DNA, 15 bp, Homo sapiens
tagcgaaaggattac

SEQ ID NO: 1781181 - DNA, 15 bp, Homo sapiens
agcgaaaggattact

SEQ ID NO: 1781182 - DNA, 15 bp, Homo sapiens
gcgaaaggattactg

SEQ ID NO: 1781183 - DNA, 15 bp, Homo sapiens
cgaaaggattactgt

SEQ ID NO: 1781184 - DNA, 15 bp, Homo sapiens
gaaaggattactgtt

SEQ ID NO: 1781185 - DNA, 15 bp, Homo sapiens
aaaggattactgttt

SEQ ID NO: 1781186 - DNA, 15 bp, Homo sapiens
aaggattactgtttt

SEQ ID NO: 1781187 - DNA, 15 bp, Homo sapiens
aggattactgttttg

SEQ ID NO: 1781188 - DNA, 15 bp, Homo sapiens
ggattactgttttga

SEQ ID NO: 1781189 - DNA, 15 bp, Homo sapiens
gattactgttttgaa

SEQ ID NO: 1781190 - DNA, 15 bp, Homo sapiens
attactgttttgaaa

SEQ ID NO: 1781191 - DNA, 15 bp, Homo sapiens
ttactgttttgaaag

SEQ ID NO: 1781192 - DNA, 15 bp, Homo sapiens
tactgttttgaaaga

SEQ ID NO: 1781193 - DNA, 15 bp, Homo sapiens
actgttttgaaagac

SEQ ID NO: 1781194 - DNA, 15 bp, Homo sapiens
ctgttttgaaagact

SEQ ID NO: 1781195 - DNA, 15 bp, Homo sapiens
tgttttgaaagactt

SEQ ID NO: 1781196 - DNA, 15 bp, Homo sapiens
gttttgaaagactta

SEQ ID NO: 1781197 - DNA, 15 bp, Homo sapiens
ttttgaaagacttaa

SEQ ID NO: 1781198 - DNA, 15 bp, Homo sapiens
tttgaaagacttaaa

SEQ ID NO: 1781199 - DNA, 15 bp, Homo sapiens
ttgaaagacttaaaa

SEQ ID NO: 1781200 - DNA, 15 bp, Homo sapiens
tgaaagacttaaaaa

SEQ ID NO: 1781201 - DNA, 15 bp, Homo sapiens
gaaagacttaaaaaa

SEQ ID NO: 1781202 - DNA, 15 bp, Homo sapiens
aaagacttaaaaaaa

SEQ ID NO: 1781203 - DNA, 15 bp, Homo sapiens
aagacttaaaaaaaa

SEQ ID NO: 1781204 - DNA, 15 bp, Homo sapiens
agacttaaaaaaaat

SEQ ID NO: 1781205 - DNA, 15 bp, Homo sapiens
gacttaaaaaaaatg

SEQ ID NO: 1781206 - DNA, 15 bp, Homo sapiens
acttaaaaaaaatgc

SEQ ID NO: 1781207 - DNA, 15 bp, Homo sapiens
cttaaaaaaaatgct

SEQ ID NO: 1781208 - DNA, 15 bp, Homo sapiens
ttaaaaaaaatgctt

SEQ ID NO: 1781209 - DNA, 15 bp, Homo sapiens
taaaaaaaatgctta

SEQ ID NO: 1781210 - DNA, 15 bp, Homo sapiens
aaaaaaaatgcttag

SEQ ID NO: 1781211 - DNA, 15 bp, Homo sapiens
aaaaaaatgcttagc

SEQ ID NO: 1781212 - DNA, 15 bp, Homo sapiens
aaaaaatgcttagct

SEQ ID NO: 1781213 - DNA, 15 bp, Homo sapiens
aaaaatgcttagcta

SEQ ID NO: 1781214 - DNA, 15 bp, Homo sapiens
aaaatgcttagctat

SEQ ID NO: 1781215 - DNA, 15 bp, Homo sapiens
aaatgcttagctatt

SEQ ID NO: 1781216 - DNA, 15 bp, Homo sapiens
aatgcttagctattt

SEQ ID NO: 1781217 - DNA, 15 bp, Homo sapiens
atgcttagctatttt

SEQ ID NO: 1781218 - DNA, 15 bp, Homo sapiens
tgcttagctattttt

SEQ ID NO: 1781219 - DNA, 15 bp, Homo sapiens
gcttagctatttttt

SEQ ID NO: 1781220 - DNA, 15 bp, Homo sapiens
cttagctatttttta

SEQ ID NO: 1781221 - DNA, 15 bp, Homo sapiens
ttagctattttttag

SEQ ID NO: 1781222 - DNA, 15 bp, Homo sapiens
tagctattttttagc

SEQ ID NO: 1781223 - DNA, 15 bp, Homo sapiens
agctattttttagct

SEQ ID NO: 1781224 - DNA, 15 bp, Homo sapiens
gctattttttagcta

SEQ ID NO: 1781225 - DNA, 15 bp, Homo sapiens
ctattttttagctaa

SEQ ID NO: 1781226 - DNA, 15 bp, Homo sapiens
tattttttagctaag

SEQ ID NO: 1781227 - DNA, 15 bp, Homo sapiens
attttttagctaaga

SEQ ID NO: 1781228 - DNA, 15 bp, Homo sapiens
ttttttagctaagaa

SEQ ID NO: 1781229 - DNA, 15 bp, Homo sapiens
tttttagctaagaaa

SEQ ID NO: 1781230 - DNA, 15 bp, Homo sapiens
ttttagctaagaaaa

SEQ ID NO: 1781231 - DNA, 15 bp, Homo sapiens
tttagctaagaaaaa

SEQ ID NO: 1781232 - DNA, 15 bp, Homo sapiens
ttagctaagaaaaaa

SEQ ID NO: 1781233 - DNA, 15 bp, Homo sapiens
tagctaagaaaaaag

SEQ ID NO: 1781234 - DNA, 15 bp, Homo sapiens
ctaagaaaaaagatt

SEQ ID NO: 1781235 - DNA, 15 bp, Homo sapiens
taagaaaaaagattc

SEQ ID NO: 1781236 - DNA, 15 bp, Homo sapiens
aagaaaaaagattcc

SEQ ID NO: 1781237 - DNA, 15 bp, Homo sapiens
agaaaaaagattcct

SEQ ID NO: 1781238 - DNA, 15 bp, Homo sapiens
gaaaaaagattcctt

SEQ ID NO: 1781239 - DNA, 15 bp, Homo sapiens
aaaaaagattccttt

SEQ ID NO: 1781240 - DNA, 15 bp, Homo sapiens
aaaaagattcctttt

SEQ ID NO: 1781241 - DNA, 15 bp, Homo sapiens
aaaagattccttttt

SEQ ID NO: 1781242 - DNA, 15 bp, Homo sapiens
aaagattcctttttc

SEQ ID NO: 1781243 - DNA, 15 bp, Homo sapiens
aagattcctttttca

SEQ ID NO: 1781244 - DNA, 15 bp, Homo sapiens
agattcctttttcag

SEQ ID NO: 1781245 - DNA, 15 bp, Homo sapiens
gattcctttttcagt

SEQ ID NO: 1781246 - DNA, 15 bp, Homo sapiens
attcctttttcagta

SEQ ID NO: 1781247 - DNA, 15 bp, Homo sapiens
ttcctttttcagtaa

SEQ ID NO: 1781248 - DNA, 15 bp, Homo sapiens
tcctttttcagtaaa

SEQ ID NO: 1781249 - DNA, 15 bp, Homo sapiens
cctttttcagtaaat

SEQ ID NO: 1781250 - DNA, 15 bp, Homo sapiens
ctttttcagtaaatg

SEQ ID NO: 1781251 - DNA, 15 bp, Homo sapiens
tttttcagtaaatgg

SEQ ID NO: 1781252 - DNA, 15 bp, Homo sapiens
ttttcagtaaatgga

SEQ ID NO: 1781253 - DNA, 15 bp, Homo sapiens
tttcagtaaatggat

SEQ ID NO: 1781254 - DNA, 15 bp, Homo sapiens
ttcagtaaatggata

SEQ ID NO: 1781255 - DNA, 15 bp, Homo sapiens
tcagtaaatggataa

SEQ ID NO: 1781256 - DNA, 15 bp, Homo sapiens
cagtaaatggataaa

SEQ ID NO: 1781257 - DNA, 15 bp, Homo sapiens
agtaaatggataaag

SEQ ID NO: 1781258 - DNA, 15 bp, Homo sapiens
gtaaatggataaagc

SEQ ID NO: 1781259 - DNA, 15 bp, Homo sapiens
taaatggataaagct

SEQ ID NO: 1781260 - DNA, 15 bp, Homo sapiens
aaatggataaagctg

SEQ ID NO: 1781261 - DNA, 15 bp, Homo sapiens
aatggataaagctga

SEQ ID NO: 1781262 - DNA, 15 bp, Homo sapiens
atggataaagctgaa

SEQ ID NO: 1781263 - DNA, 15 bp, Homo sapiens
tggataaagctgaaa

SEQ ID NO: 1781264 - DNA, 15 bp, Homo sapiens
ggataaagctgaaaa

SEQ ID NO: 1781265 - DNA, 15 bp, Homo sapiens
gataaagctgaaaaa

SEQ ID NO: 1781266 - DNA, 15 bp, Homo sapiens
ataaagctgaaaaat

SEQ ID NO: 1781267 - DNA, 15 bp, Homo sapiens
taaagctgaaaaata

SEQ ID NO: 1781268 - DNA, 15 bp, Homo sapiens
aaagctgaaaaataa

SEQ ID NO: 1781269 - DNA, 15 bp, Homo sapiens
aagctgaaaaataag

SEQ ID NO: 1781270 - DNA, 15 bp, Homo sapiens
agctgaaaaataaga

SEQ ID NO: 1781271 - DNA, 15 bp, Homo sapiens
gctgaaaaataagaa

SEQ ID NO: 1781272 - DNA, 15 bp, Homo sapiens
ctgaaaaataagaaa

SEQ ID NO: 1781273 - DNA, 15 bp, Homo sapiens
tgaaaaataagaaat

SEQ ID NO: 1781274 - DNA, 15 bp, Homo sapiens
gaaaaataagaaatt

SEQ ID NO: 1781275 - DNA, 15 bp, Homo sapiens
aaaaataagaaatta

SEQ ID NO: 1781276 - DNA, 15 bp, Homo sapiens
aaaataagaaattaa

SEQ ID NO: 1781277 - DNA, 15 bp, Homo sapiens
aaataagaaattaat

SEQ ID NO: 1781278 - DNA, 15 bp, Homo sapiens
aataagaaattaata

SEQ ID NO: 1781279 - DNA, 15 bp, Homo sapiens
ataagaaattaataa

SEQ ID NO: 1781280 - DNA, 15 bp, Homo sapiens
taagaaattaataaa

SEQ ID NO: 1781281 - DNA, 15 bp, Homo sapiens
aagaaattaataaaa

SEQ ID NO: 1781282 - DNA, 15 bp, Homo sapiens
agaaattaataaaat

SEQ ID NO: 1781283 - DNA, 15 bp, Homo sapiens
gaaattaataaaatg

SEQ ID NO: 1781284 - DNA, 15 bp, Homo sapiens
aaattaataaaatgt

SEQ ID NO: 1781285 - DNA, 15 bp, Homo sapiens
aattaataaaatgtt

SEQ ID NO: 1781286 - DNA, 15 bp, Homo sapiens
attaataaaatgttt

SEQ ID NO: 1781287 - DNA, 15 bp, Homo sapiens
ttaataaaatgtttt

SEQ ID NO: 1781288 - DNA, 15 bp, Homo sapiens
taataaaatgtttta

SEQ ID NO: 1781289 - DNA, 15 bp, Homo sapiens
aataaaatgttttaa

SEQ ID NO: 1781290 - DNA, 15 bp, Homo sapiens
ataaaatgttttaaa

SEQ ID NO: 1781291 - DNA, 15 bp, Homo sapiens
taaaatgttttaaag

SEQ ID NO: 1781292 - DNA, 15 bp, Homo sapiens
aaaatgttttaaaga

SEQ ID NO: 1781293 - DNA, 15 bp, Homo sapiens
aaatgttttaaagaa

SEQ ID NO: 1781294 - DNA, 15 bp, Homo sapiens
aatgttttaaagaaa

SEQ ID NO: 1781295 - DNA, 15 bp, Homo sapiens
atgttttaaagaaag

SEQ ID NO: 1781296 - DNA, 15 bp, Homo sapiens
tgttttaaagaaaga

SEQ ID NO: 1781297 - DNA, 15 bp, Homo sapiens
gttttaaagaaagag

SEQ ID NO: 1781298 - DNA, 15 bp, Homo sapiens
ttttaaagaaagagt

SEQ ID NO: 1781299 - DNA, 15 bp, Homo sapiens
tttaaagaaagagtc

SEQ ID NO: 1781300 - DNA, 15 bp, Homo sapiens
ttaaagaaagagtca

SEQ ID NO: 1781301 - DNA, 15 bp, Homo sapiens
taaagaaagagtcat

SEQ ID NO: 1781302 - DNA, 15 bp, Homo sapiens
aaagaaagagtcata

SEQ ID NO: 1781303 - DNA, 15 bp, Homo sapiens
aagaaagagtcataa

SEQ ID NO: 1781304 - DNA, 15 bp, Homo sapiens
agaaagagtcataaa

SEQ ID NO: 1781305 - DNA, 15 bp, Homo sapiens
gaaagagtcataaat

SEQ ID NO: 1781306 - DNA, 15 bp, Homo sapiens
aaagagtcataaata

SEQ ID NO: 1781307 - DNA, 15 bp, Homo sapiens
aagagtcataaatat

SEQ ID NO: 1781308 - DNA, 15 bp, Homo sapiens
agagtcataaatatc

SEQ ID NO: 1781309 - DNA, 15 bp, Homo sapiens
gagtcataaatatct

SEQ ID NO: 1781310 - DNA, 15 bp, Homo sapiens
agtcataaatatctt

SEQ ID NO: 1781311 - DNA, 15 bp, Homo sapiens
gtcataaatatctta

SEQ ID NO: 1781312 - DNA, 15 bp, Homo sapiens
tcataaatatcttaa

SEQ ID NO: 1781313 - DNA, 15 bp, Homo sapiens
cataaatatcttaat

SEQ ID NO: 1781314 - DNA, 15 bp, Homo sapiens
ataaatatcttaata

SEQ ID NO: 1781315 - DNA, 15 bp, Homo sapiens
taaatatcttaatat

SEQ ID NO: 1781316 - DNA, 15 bp, Homo sapiens
aaatatcttaatatt

SEQ ID NO: 1781317 - DNA, 15 bp, Homo sapiens
aatatcttaatattt

SEQ ID NO: 1781318 - DNA, 15 bp, Homo sapiens
atatcttaatattta

SEQ ID NO: 1781319 - DNA, 15 bp, Homo sapiens
tatcttaatatttaa

SEQ ID NO: 1781320 - DNA, 15 bp, Homo sapiens
atcttaatatttaat

SEQ ID NO: 1781321 - DNA, 15 bp, Homo sapiens
tcttaatatttaatt

SEQ ID NO: 1781322 - DNA, 15 bp, Homo sapiens
cttaatatttaattc

SEQ ID NO: 1781323 - DNA, 15 bp, Homo sapiens
ttaatatttaattct

SEQ ID NO: 1781324 - DNA, 15 bp, Homo sapiens
taatatttaattcta

SEQ ID NO: 1781325 - DNA, 15 bp, Homo sapiens
aatatttaattctag

SEQ ID NO: 1781326 - DNA, 15 bp, Homo sapiens
atatttaattctagg

SEQ ID NO: 1781327 - DNA, 15 bp, Homo sapiens
tatttaattctagga

SEQ ID NO: 1781328 - DNA, 15 bp, Homo sapiens
atttaattctaggaa

SEQ ID NO: 1781329 - DNA, 15 bp, Homo sapiens
tttaattctaggaag

SEQ ID NO: 1781330 - DNA, 15 bp, Homo sapiens
ttaattctaggaagc

SEQ ID NO: 1781331 - DNA, 15 bp, Homo sapiens
taattctaggaagct

SEQ ID NO: 1781332 - DNA, 15 bp, Homo sapiens
aattctaggaagctt

SEQ ID NO: 1781333 - DNA, 15 bp, Homo sapiens
attctaggaagcttc

SEQ ID NO: 1781334 - DNA, 15 bp, Homo sapiens
ttctaggaagcttct

SEQ ID NO: 1781335 - DNA, 15 bp, Homo sapiens
tctaggaagcttctc

SEQ ID NO: 1781336 - DNA, 15 bp, Homo sapiens
ctaggaagcttctct

SEQ ID NO: 1781337 - DNA, 15 bp, Homo sapiens
taggaagcttctcta

SEQ ID NO: 1781338 - DNA, 15 bp, Homo sapiens
aggaagcttctctat

SEQ ID NO: 1781339 - DNA, 15 bp, Homo sapiens
ggaagcttctctatt

SEQ ID NO: 1781340 - DNA, 15 bp, Homo sapiens
gaagcttctctattc

SEQ ID NO: 1781341 - DNA, 15 bp, Homo sapiens
aagcttctctattca

SEQ ID NO: 1781342 - DNA, 15 bp, Homo sapiens
agcttctctattcat

SEQ ID NO: 1781343 - DNA, 15 bp, Homo sapiens
gcttctctattcatt

SEQ ID NO: 1781344 - DNA, 15 bp, Homo sapiens
cttctctattcattt

SEQ ID NO: 1781345 - DNA, 15 bp, Homo sapiens
ttctctattcatttg

SEQ ID NO: 1781346 - DNA, 15 bp, Homo sapiens
tctctattcatttgc

SEQ ID NO: 1781347 - DNA, 15 bp, Homo sapiens
ctctattcatttgct

SEQ ID NO: 1781348 - DNA, 15 bp, Homo sapiens
tctattcatttgctt

SEQ ID NO: 1781349 - DNA, 15 bp, Homo sapiens
ctattcatttgcttt

SEQ ID NO: 1781350 - DNA, 15 bp, Homo sapiens
tattcatttgctttt

SEQ ID NO: 1781351 - DNA, 15 bp, Homo sapiens
attcatttgcttttt

SEQ ID NO: 1781352 - DNA, 15 bp, Homo sapiens
ttcatttgctttttt

SEQ ID NO: 1781353 - DNA, 15 bp, Homo sapiens
tcatttgctttttta

SEQ ID NO: 1781354 - DNA, 15 bp, Homo sapiens
catttgcttttttat

SEQ ID NO: 1781355 - DNA, 15 bp, Homo sapiens
atttgcttttttatt

SEQ ID NO: 1781356 - DNA, 15 bp, Homo sapiens
tttgcttttttattt

SEQ ID NO: 1781357 - DNA, 15 bp, Homo sapiens
ttgcttttttatttt

SEQ ID NO: 1781358 - DNA, 15 bp, Homo sapiens
tgcttttttattttt

SEQ ID NO: 1781359 - DNA, 15 bp, Homo sapiens
gcttttttattttta

SEQ ID NO: 1781360 - DNA, 15 bp, Homo sapiens
cttttttatttttaa

SEQ ID NO: 1781361 - DNA, 15 bp, Homo sapiens
ttttttatttttaaa

SEQ ID NO: 1781362 - DNA, 15 bp, Homo sapiens
tttttatttttaaaa

SEQ ID NO: 1781363 - DNA, 15 bp, Homo sapiens
tttatttttaaaaag

SEQ ID NO: 1781364 - DNA, 15 bp, Homo sapiens
ttatttttaaaaaga

SEQ ID NO: 1781365 - DNA, 15 bp, Homo sapiens
tatttttaaaaagaa

SEQ ID NO: 1781366 - DNA, 15 bp, Homo sapiens
atttttaaaaagaag

SEQ ID NO: 1781367 - DNA, 15 bp, Homo sapiens
tttttaaaaagaagt

SEQ ID NO: 1781368 - DNA, 15 bp, Homo sapiens
ttttaaaaagaagtt

SEQ ID NO: 1781369 - DNA, 15 bp, Homo sapiens
tttaaaaagaagttt

SEQ ID NO: 1781370 - DNA, 15 bp, Homo sapiens
ttaaaaagaagttta

SEQ ID NO: 1781371 - DNA, 15 bp, Homo sapiens
taaaaagaagtttaa

SEQ ID NO: 1781372 - DNA, 15 bp, Homo sapiens
aaaaagaagtttaaa

SEQ ID NO: 1781373 - DNA, 15 bp, Homo sapiens
aaaagaagtttaaaa

SEQ ID NO: 1781374 - DNA, 15 bp, Homo sapiens
aaagaagtttaaaag

SEQ ID NO: 1781375 - DNA, 15 bp, Homo sapiens
aagaagtttaaaaga

SEQ ID NO: 1781376 - DNA, 15 bp, Homo sapiens
agaagtttaaaagag

SEQ ID NO: 1781377 - DNA, 15 bp, Homo sapiens
gaagtttaaaagagt

SEQ ID NO: 1781378 - DNA, 15 bp, Homo sapiens
aagtttaaaagagtt

SEQ ID NO: 1781379 - DNA, 15 bp, Homo sapiens
agtttaaaagagttt

SEQ ID NO: 1781380 - DNA, 15 bp, Homo sapiens
gtttaaaagagtttt

SEQ ID NO: 1781381 - DNA, 15 bp, Homo sapiens
tttaaaagagtttta

SEQ ID NO: 1781382 - DNA, 15 bp, Homo sapiens
ttaaaagagttttag

SEQ ID NO: 1781383 - DNA, 15 bp, Homo sapiens
taaaagagttttagt

SEQ ID NO: 1781384 - DNA, 15 bp, Homo sapiens
aaaagagttttagtt

SEQ ID NO: 1781385 - DNA, 15 bp, Homo sapiens
aaagagttttagttt

SEQ ID NO: 1781386 - DNA, 15 bp, Homo sapiens
aagagttttagtttt

SEQ ID NO: 1781387 - DNA, 15 bp, Homo sapiens
agagttttagtttta

SEQ ID NO: 1781388 - DNA, 15 bp, Homo sapiens
gagttttagttttaa

SEQ ID NO: 1781389 - DNA, 15 bp, Homo sapiens
agttttagttttaat

SEQ ID NO: 1781390 - DNA, 15 bp, Homo sapiens
gttttagttttaata

SEQ ID NO: 1781391 - DNA, 15 bp, Homo sapiens
ttttagttttaatat

SEQ ID NO: 1781392 - DNA, 15 bp, Homo sapiens
tttagttttaatatc

SEQ ID NO: 1781393 - DNA, 15 bp, Homo sapiens
ttagttttaatatct

SEQ ID NO: 1781394 - DNA, 15 bp, Homo sapiens
tagttttaatatcta

SEQ ID NO: 1781395 - DNA, 15 bp, Homo sapiens
agttttaatatctat

SEQ ID NO: 1781396 - DNA, 15 bp, Homo sapiens
gttttaatatctata

SEQ ID NO: 1781397 - DNA, 15 bp, Homo sapiens
ttttaatatctataa

SEQ ID NO: 1781398 - DNA, 15 bp, Homo sapiens
tttaatatctataaa

SEQ ID NO: 1781399 - DNA, 15 bp, Homo sapiens
ttaatatctataaac

SEQ ID NO: 1781400 - DNA, 15 bp, Homo sapiens
taatatctataaact

SEQ ID NO: 1781401 - DNA, 15 bp, Homo sapiens
aatatctataaactt

SEQ ID NO: 1781402 - DNA, 15 bp, Homo sapiens
atatctataaacttc

SEQ ID NO: 1781403 - DNA, 15 bp, Homo sapiens
tatctataaacttca

SEQ ID NO: 1781404 - DNA, 15 bp, Homo sapiens
atctataaacttcaa

SEQ ID NO: 1781405 - DNA, 15 bp, Homo sapiens
tctataaacttcaaa

SEQ ID NO: 1781406 - DNA, 15 bp, Homo sapiens
tataaacttcaaatg

SEQ ID NO: 1781407 - DNA, 15 bp, Homo sapiens
ataaacttcaaatgt

SEQ ID NO: 1781408 - DNA, 15 bp, Homo sapiens
taaacttcaaatgtt

SEQ ID NO: 1781409 - DNA, 15 bp, Homo sapiens
aaacttcaaatgtta

SEQ ID NO: 1781410 - DNA, 15 bp, Homo sapiens
aacttcaaatgttat

SEQ ID NO: 1781411 - DNA, 15 bp, Homo sapiens
acttcaaatgttatt

SEQ ID NO: 1781412 - DNA, 15 bp, Homo sapiens
cttcaaatgttattc

SEQ ID NO: 1781413 - DNA, 15 bp, Homo sapiens
ttcaaatgttattcc

SEQ ID NO: 1781414 - DNA, 15 bp, Homo sapiens
tcaaatgttattcca

SEQ ID NO: 1781415 - DNA, 15 bp, Homo sapiens
caaatgttattccac

SEQ ID NO: 1781416 - DNA, 15 bp, Homo sapiens
aaatgttattccaca

SEQ ID NO: 1781417 - DNA, 15 bp, Homo sapiens
aatgttattccacac

SEQ ID NO: 1781418 - DNA, 15 bp, Homo sapiens
atgttattccacact

SEQ ID NO: 1781419 - DNA, 15 bp, Homo sapiens
tgttattccacactc

SEQ ID NO: 1781420 - DNA, 15 bp, Homo sapiens
gttattccacactca

SEQ ID NO: 1781421 - DNA, 15 bp, Homo sapiens
ttattccacactcaa

SEQ ID NO: 1781422 - DNA, 15 bp, Homo sapiens
tattccacactcaaa

SEQ ID NO: 1781423 - DNA, 15 bp, Homo sapiens
attccacactcaaaa

SEQ ID NO: 1781424 - DNA, 15 bp, Homo sapiens
ttccacactcaaaaa

SEQ ID NO: 1781425 - DNA, 15 bp, Homo sapiens
tccacactcaaaaaa

SEQ ID NO: 1781426 - DNA, 15 bp, Homo sapiens
ccacactcaaaaaat

SEQ ID NO: 1781427 - DNA, 15 bp, Homo sapiens
cacactcaaaaaata

SEQ ID NO: 1781428 - DNA, 15 bp, Homo sapiens
acactcaaaaaatat

SEQ ID NO: 1781429 - DNA, 15 bp, Homo sapiens
cactcaaaaaatatt

SEQ ID NO: 1781430 - DNA, 15 bp, Homo sapiens
actcaaaaaatattt

SEQ ID NO: 1781431 - DNA, 15 bp, Homo sapiens
ctcaaaaaatatttc

SEQ ID NO: 1781432 - DNA, 15 bp, Homo sapiens
tcaaaaaatatttct

SEQ ID NO: 1781433 - DNA, 15 bp, Homo sapiens
caaaaaatatttcta

SEQ ID NO: 1781434 - DNA, 15 bp, Homo sapiens
aaaaaatatttctaa

SEQ ID NO: 1781435 - DNA, 15 bp, Homo sapiens
aaaaatatttctaat

SEQ ID NO: 1781436 - DNA, 15 bp, Homo sapiens
aaaatatttctaatg

SEQ ID NO: 1781437 - DNA, 15 bp, Homo sapiens
aaatatttctaatgt

SEQ ID NO: 1781438 - DNA, 15 bp, Homo sapiens
aatatttctaatgta

SEQ ID NO: 1781439 - DNA, 15 bp, Homo sapiens
atatttctaatgtat

SEQ ID NO: 1781440 - DNA, 15 bp, Homo sapiens
tatttctaatgtatt

SEQ ID NO: 1781441 - DNA, 15 bp, Homo sapiens
atttctaatgtatta

SEQ ID NO: 1781442 - DNA, 15 bp, Homo sapiens
tttctaatgtattaa

SEQ ID NO: 1781443 - DNA, 15 bp, Homo sapiens
ttctaatgtattaag

SEQ ID NO: 1781444 - DNA, 15 bp, Homo sapiens
tctaatgtattaagt

SEQ ID NO: 1781445 - DNA, 15 bp, Homo sapiens
ctaatgtattaagtc

SEQ ID NO: 1781446 - DNA, 15 bp, Homo sapiens
taatgtattaagtca

SEQ ID NO: 1781447 - DNA, 15 bp, Homo sapiens
aatgtattaagtcac

SEQ ID NO: 1781448 - DNA, 15 bp, Homo sapiens
atgtattaagtcaca

SEQ ID NO: 1781449 - DNA, 15 bp, Homo sapiens
tgtattaagtcacag

SEQ ID NO: 1781450 - DNA, 15 bp, Homo sapiens
gtattaagtcacagt

SEQ ID NO: 1781451 - DNA, 15 bp, Homo sapiens
tattaagtcacagtt

SEQ ID NO: 1781452 - DNA, 15 bp, Homo sapiens
attaagtcacagttt

SEQ ID NO: 1781453 - DNA, 15 bp, Homo sapiens
ttaagtcacagttta

SEQ ID NO: 1781454 - DNA, 15 bp, Homo sapiens
taagtcacagtttac

SEQ ID NO: 1781455 - DNA, 15 bp, Homo sapiens
aagtcacagtttact

SEQ ID NO: 1781456 - DNA, 15 bp, Homo sapiens
agtcacagtttacta

SEQ ID NO: 1781457 - DNA, 15 bp, Homo sapiens
gtcacagtttactaa

SEQ ID NO: 1781458 - DNA, 15 bp, Homo sapiens
tcacagtttactaaa

SEQ ID NO: 1781459 - DNA, 15 bp, Homo sapiens
cacagtttactaaaa

SEQ ID NO: 1781460 - DNA, 15 bp, Homo sapiens
acagtttactaaaat

SEQ ID NO: 1781461 - DNA, 15 bp, Homo sapiens
cagtttactaaaata

SEQ ID NO: 1781462 - DNA, 15 bp, Homo sapiens
agtttactaaaatag

SEQ ID NO: 1781463 - DNA, 15 bp, Homo sapiens
gtttactaaaatagc

SEQ ID NO: 1781464 - DNA, 15 bp, Homo sapiens
tttactaaaatagct

SEQ ID NO: 1781465 - DNA, 15 bp, Homo sapiens
ttactaaaatagcta

SEQ ID NO: 1781466 - DNA, 15 bp, Homo sapiens
tactaaaatagctaa

SEQ ID NO: 1781467 - DNA, 15 bp, Homo sapiens
actaaaatagctaag

SEQ ID NO: 1781468 - DNA, 15 bp, Homo sapiens
ctaaaatagctaagt

SEQ ID NO: 1781469 - DNA, 15 bp, Homo sapiens
taaaatagctaagtt

SEQ ID NO: 1781470 - DNA, 15 bp, Homo sapiens
aaaatagctaagttt

SEQ ID NO: 1781471 - DNA, 15 bp, Homo sapiens
aaatagctaagtttt

SEQ ID NO: 1781472 - DNA, 15 bp, Homo sapiens
aatagctaagttttc

SEQ ID NO: 1781473 - DNA, 15 bp, Homo sapiens
atagctaagttttct

SEQ ID NO: 1781474 - DNA, 15 bp, Homo sapiens
tagctaagttttctg

SEQ ID NO: 1781475 - DNA, 15 bp, Homo sapiens
agctaagttttctga

SEQ ID NO: 1781476 - DNA, 15 bp, Homo sapiens
gctaagttttctgat

SEQ ID NO: 1781477 - DNA, 15 bp, Homo sapiens
ctaagttttctgatt

SEQ ID NO: 1781478 - DNA, 15 bp, Homo sapiens
taagttttctgattc

SEQ ID NO: 1781479 - DNA, 15 bp, Homo sapiens
aagttttctgattca

SEQ ID NO: 1781480 - DNA, 15 bp, Homo sapiens
agttttctgattcat

SEQ ID NO: 1781481 - DNA, 15 bp, Homo sapiens
gttttctgattcata

SEQ ID NO: 1781482 - DNA, 15 bp, Homo sapiens
ttttctgattcataa

SEQ ID NO: 1781483 - DNA, 15 bp, Homo sapiens
tttctgattcataaa

SEQ ID NO: 1781484 - DNA, 15 bp, Homo sapiens
ttctgattcataaaa

SEQ ID NO: 1781485 - DNA, 15 bp, Homo sapiens
tctgattcataaaat

SEQ ID NO: 1781486 - DNA, 15 bp, Homo sapiens
ctgattcataaaatg

SEQ ID NO: 1781487 - DNA, 15 bp, Homo sapiens
tgattcataaaatga

SEQ ID NO: 1781488 - DNA, 15 bp, Homo sapiens
gattcataaaatgaa

SEQ ID NO: 1781489 - DNA, 15 bp, Homo sapiens
attcataaaatgaat

SEQ ID NO: 1781490 - DNA, 15 bp, Homo sapiens
ttcataaaatgaata

SEQ ID NO: 1781491 - DNA, 15 bp, Homo sapiens
tcataaaatgaataa

SEQ ID NO: 1781492 - DNA, 15 bp, Homo sapiens
cataaaatgaataat

SEQ ID NO: 1781493 - DNA, 15 bp, Homo sapiens
ataaaatgaataata

SEQ ID NO: 1781494 - DNA, 15 bp, Homo sapiens
taaaatgaataataa

SEQ ID NO: 1781495 - DNA, 15 bp, Homo sapiens
aaaatgaataataac

SEQ ID NO: 1781496 - DNA, 15 bp, Homo sapiens
aaatgaataataaca

SEQ ID NO: 1781497 - DNA, 15 bp, Homo sapiens
aatgaataataacac

SEQ ID NO: 1781498 - DNA, 15 bp, Homo sapiens
atgaataataacact

SEQ ID NO: 1781499 - DNA, 15 bp, Homo sapiens
tgaataataacactt

SEQ ID NO: 1781500 - DNA, 15 bp, Homo sapiens
gaataataacactta

SEQ ID NO: 1781501 - DNA, 15 bp, Homo sapiens
aataataacacttaa

SEQ ID NO: 1781502 - DNA, 15 bp, Homo sapiens
ataataacacttaat

SEQ ID NO: 1781503 - DNA, 15 bp, Homo sapiens
taataacacttaatt

SEQ ID NO: 1781504 - DNA, 15 bp, Homo sapiens
aataacacttaattt

SEQ ID NO: 1781505 - DNA, 15 bp, Homo sapiens
ataacacttaatttt

SEQ ID NO: 1781506 - DNA, 15 bp, Homo sapiens
taacacttaatttta

SEQ ID NO: 1781507 - DNA, 15 bp, Homo sapiens
aacacttaattttaa

SEQ ID NO: 1781508 - DNA, 15 bp, Homo sapiens
acacttaattttaag

SEQ ID NO: 1781509 - DNA, 15 bp, Homo sapiens
cacttaattttaaga

SEQ ID NO: 1781510 - DNA, 15 bp, Homo sapiens
acttaattttaagac

SEQ ID NO: 1781511 - DNA, 15 bp, Homo sapiens
cttaattttaagact

SEQ ID NO: 1781512 - DNA, 15 bp, Homo sapiens
taattttaagactta

SEQ ID NO: 1781513 - DNA, 15 bp, Homo sapiens
aattttaagacttat

SEQ ID NO: 1781514 - DNA, 15 bp, Homo sapiens
attttaagacttatt

SEQ ID NO: 1781515 - DNA, 15 bp, Homo sapiens
ttttaagacttattt

SEQ ID NO: 1781516 - DNA, 15 bp, Homo sapiens
tttaagacttatttt

SEQ ID NO: 1781517 - DNA, 15 bp, Homo sapiens
ttaagacttattttg

SEQ ID NO: 1781518 - DNA, 15 bp, Homo sapiens
taagacttattttga

SEQ ID NO: 1781519 - DNA, 15 bp, Homo sapiens
aagacttattttgaa

SEQ ID NO: 1781520 - DNA, 15 bp, Homo sapiens
agacttattttgaag

SEQ ID NO: 1781521 - DNA, 15 bp, Homo sapiens
gacttattttgaaga

SEQ ID NO: 1781522 - DNA, 15 bp, Homo sapiens
acttattttgaagat

SEQ ID NO: 1781523 - DNA, 15 bp, Homo sapiens
cttattttgaagatt

SEQ ID NO: 1781524 - DNA, 15 bp, Homo sapiens
ttattttgaagatta

SEQ ID NO: 1781525 - DNA, 15 bp, Homo sapiens
gaagattaaatgagg

SEQ ID NO: 1781526 - DNA, 15 bp, Homo sapiens
aagattaaatgaggt

SEQ ID NO: 1781527 - DNA, 15 bp, Homo sapiens
agattaaatgaggta

SEQ ID NO: 1781528 - DNA, 15 bp, Homo sapiens
gattaaatgaggtaa

SEQ ID NO: 1781529 - DNA, 15 bp, Homo sapiens
attaaatgaggtaat

SEQ ID NO: 1781530 - DNA, 15 bp, Homo sapiens
ttaaatgaggtaata

SEQ ID NO: 1781531 - DNA, 15 bp, Homo sapiens
taaatgaggtaatac

SEQ ID NO: 1781532 - DNA, 15 bp, Homo sapiens
aaatgaggtaataca

SEQ ID NO: 1781533 - DNA, 15 bp, Homo sapiens
aatgaggtaatacat

SEQ ID NO: 1781534 - DNA, 15 bp, Homo sapiens
atgaggtaatacatt

SEQ ID NO: 1781535 - DNA, 15 bp, Homo sapiens
tgaggtaatacattc

SEQ ID NO: 1781536 - DNA, 15 bp, Homo sapiens
gaggtaatacattca

SEQ ID NO: 1781537 - DNA, 15 bp, Homo sapiens
aggtaatacattcaa

SEQ ID NO: 1781538 - DNA, 15 bp, Homo sapiens
ggtaatacattcaaa

SEQ ID NO: 1781539 - DNA, 15 bp, Homo sapiens
gtaatacattcaaat

SEQ ID NO: 1781540 - DNA, 15 bp, Homo sapiens
taatacattcaaata

SEQ ID NO: 1781541 - DNA, 15 bp, Homo sapiens
aatacattcaaataa

SEQ ID NO: 1781542 - DNA, 15 bp, Homo sapiens
atacattcaaataaa

SEQ ID NO: 1781543 - DNA, 15 bp, Homo sapiens
tacattcaaataaaa

SEQ ID NO: 1781544 - DNA, 15 bp, Homo sapiens
acattcaaataaaac

SEQ ID NO: 1781545 - DNA, 15 bp, Homo sapiens
cattcaaataaaacc

SEQ ID NO: 1781546 - DNA, 15 bp, Homo sapiens
attcaaataaaacct

SEQ ID NO: 1781547 - DNA, 15 bp, Homo sapiens
ttcaaataaaacctt

SEQ ID NO: 1781548 - DNA, 15 bp, Homo sapiens
tcaaataaaaccttt

SEQ ID NO: 1781549 - DNA, 15 bp, Homo sapiens
caaataaaacctttt

SEQ ID NO: 1781550 - DNA, 15 bp, Homo sapiens
aaataaaacctttta

SEQ ID NO: 1781551 - DNA, 15 bp, Homo sapiens
aataaaaccttttaa

SEQ ID NO: 1781552 - DNA, 15 bp, Homo sapiens
ataaaaccttttaaa

SEQ ID NO: 1781553 - DNA, 15 bp, Homo sapiens
taaaaccttttaaac

SEQ ID NO: 1781554 - DNA, 15 bp, Homo sapiens
aaaaccttttaaact

SEQ ID NO: 1781555 - DNA, 15 bp, Homo sapiens
aaaccttttaaactg

SEQ ID NO: 1781556 - DNA, 15 bp, Homo sapiens
aaccttttaaactga

SEQ ID NO: 1781557 - DNA, 15 bp, Homo sapiens
accttttaaactgaa

SEQ ID NO: 1781558 - DNA, 15 bp, Homo sapiens
ccttttaaactgaaa

SEQ ID NO: 1781559 - DNA, 15 bp, Homo sapiens
cttttaaactgaaag

SEQ ID NO: 1781560 - DNA, 15 bp, Homo sapiens
ttttaaactgaaagt

SEQ ID NO: 1781561 - DNA, 15 bp, Homo sapiens
tttaaactgaaagta

SEQ ID NO: 1781562 - DNA, 15 bp, Homo sapiens
ttaaactgaaagtac

SEQ ID NO: 1781563 - DNA, 15 bp, Homo sapiens
taaactgaaagtact

SEQ ID NO: 1781564 - DNA, 15 bp, Homo sapiens
aaactgaaagtactt

SEQ ID NO: 1781565 - DNA, 15 bp, Homo sapiens
aactgaaagtacttt

SEQ ID NO: 1781566 - DNA, 15 bp, Homo sapiens
actgaaagtactttc

SEQ ID NO: 1781567 - DNA, 15 bp, Homo sapiens
ctgaaagtactttca

SEQ ID NO: 1781568 - DNA, 15 bp, Homo sapiens
tgaaagtactttcat

SEQ ID NO: 1781569 - DNA, 15 bp, Homo sapiens
gaaagtactttcatt

SEQ ID NO: 1781570 - DNA, 15 bp, Homo sapiens
aaagtactttcattc

SEQ ID NO: 1781571 - DNA, 15 bp, Homo sapiens
aagtactttcattct

SEQ ID NO: 1781572 - DNA, 15 bp, Homo sapiens
agtactttcattctt

SEQ ID NO: 1781573 - DNA, 15 bp, Homo sapiens
gtactttcattcttg

SEQ ID NO: 1781574 - DNA, 15 bp, Homo sapiens
tactttcattcttgt

SEQ ID NO: 1781575 - DNA, 15 bp, Homo sapiens
actttcattcttgtg

SEQ ID NO: 1781576 - DNA, 15 bp, Homo sapiens
ctttcattcttgtgt

SEQ ID NO: 1781577 - DNA, 15 bp, Homo sapiens
ttcattcttgtgtaa

SEQ ID NO: 1781578 - DNA, 15 bp, Homo sapiens
tcattcttgtgtaag

SEQ ID NO: 1781579 - DNA, 15 bp, Homo sapiens
cattcttgtgtaagg

SEQ ID NO: 1781580 - DNA, 15 bp, Homo sapiens
attcttgtgtaagga

SEQ ID NO: 1781581 - DNA, 15 bp, Homo sapiens
ttcttgtgtaaggaa

SEQ ID NO: 1781582 - DNA, 15 bp, Homo sapiens
tcttgtgtaaggaaa

SEQ ID NO: 1781583 - DNA, 15 bp, Homo sapiens
cttgtgtaaggaaac

SEQ ID NO: 1781584 - DNA, 15 bp, Homo sapiens
ttgtgtaaggaaacc

SEQ ID NO: 1781585 - DNA, 15 bp, Homo sapiens
tgtgtaaggaaacca

SEQ ID NO: 1781586 - DNA, 15 bp, Homo sapiens
gtgtaaggaaaccat

SEQ ID NO: 1781587 - DNA, 15 bp, Homo sapiens
tgtaaggaaaccatg

SEQ ID NO: 1781588 - DNA, 15 bp, Homo sapiens
gtaaggaaaccatga

SEQ ID NO: 1781589 - DNA, 15 bp, Homo sapiens
taaggaaaccatgaa

SEQ ID NO: 1781590 - DNA, 15 bp, Homo sapiens
ggaaaccatgaaagt

SEQ ID NO: 1781591 - DNA, 15 bp, Homo sapiens
gaaaccatgaaagta

SEQ ID NO: 1781592 - DNA, 15 bp, Homo sapiens
aaaccatgaaagtaa

SEQ ID NO: 1781593 - DNA, 15 bp, Homo sapiens
aaccatgaaagtaaa

SEQ ID NO: 1781594 - DNA, 15 bp, Homo sapiens
accatgaaagtaaaa

SEQ ID NO: 1781595 - DNA, 15 bp, Homo sapiens
ccatgaaagtaaaag

SEQ ID NO: 1781596 - DNA, 15 bp, Homo sapiens
catgaaagtaaaaga

SEQ ID NO: 1781597 - DNA, 15 bp, Homo sapiens
atgaaagtaaaagac

SEQ ID NO: 1781598 - DNA, 15 bp, Homo sapiens
tgaaagtaaaagaca

SEQ ID NO: 1781599 - DNA, 15 bp, Homo sapiens
gaaagtaaaagacac

SEQ ID NO: 1781600 - DNA, 15 bp, Homo sapiens
aaagtaaaagacaca

SEQ ID NO: 1781601 - DNA, 15 bp, Homo sapiens
aagtaaaagacacat

SEQ ID NO: 1781602 - DNA, 15 bp, Homo sapiens
agtaaaagacacatc

SEQ ID NO: 1781603 - DNA, 15 bp, Homo sapiens
gtaaaagacacatca

SEQ ID NO: 1781604 - DNA, 15 bp, Homo sapiens
taaaagacacatcat

SEQ ID NO: 1781605 - DNA, 15 bp, Homo sapiens
aaaagacacatcatt

SEQ ID NO: 1781606 - DNA, 15 bp, Homo sapiens
aaagacacatcattc

SEQ ID NO: 1781607 - DNA, 15 bp, Homo sapiens
aagacacatcattct

SEQ ID NO: 1781608 - DNA, 15 bp, Homo sapiens
agacacatcattcta

SEQ ID NO: 1781609 - DNA, 15 bp, Homo sapiens
gacacatcattctat

SEQ ID NO: 1781610 - DNA, 15 bp, Homo sapiens
acacatcattctatt

SEQ ID NO: 1781611 - DNA, 15 bp, Homo sapiens
cacatcattctattt

SEQ ID NO: 1781612 - DNA, 15 bp, Homo sapiens
acatcattctatttt

SEQ ID NO: 1781613 - DNA, 15 bp, Homo sapiens
catcattctattttg

SEQ ID NO: 1781614 - DNA, 15 bp, Homo sapiens
atcattctattttgc

SEQ ID NO: 1781615 - DNA, 15 bp, Homo sapiens
tcattctattttgcc

SEQ ID NO: 1781616 - DNA, 15 bp, Homo sapiens
cattctattttgcca

SEQ ID NO: 1781617 - DNA, 15 bp, Homo sapiens
attctattttgccag

SEQ ID NO: 1781618 - DNA, 15 bp, Homo sapiens
ttctattttgccagt

SEQ ID NO: 1781619 - DNA, 15 bp, Homo sapiens
tctattttgccagtg

SEQ ID NO: 1781620 - DNA, 15 bp, Homo sapiens
ctattttgccagtgt

SEQ ID NO: 1781621 - DNA, 15 bp, Homo sapiens
tattttgccagtgta

SEQ ID NO: 1781622 - DNA, 15 bp, Homo sapiens
attttgccagtgtat

SEQ ID NO: 1781623 - DNA, 15 bp, Homo sapiens
ttttgccagtgtatc

SEQ ID NO: 1781624 - DNA, 15 bp, Homo sapiens
tttgccagtgtatct

SEQ ID NO: 1781625 - DNA, 15 bp, Homo sapiens
ttgccagtgtatctt

SEQ ID NO: 1781626 - DNA, 15 bp, Homo sapiens
tgccagtgtatctta

SEQ ID NO: 1781627 - DNA, 15 bp, Homo sapiens
gccagtgtatcttaa

SEQ ID NO: 1781628 - DNA, 15 bp, Homo sapiens
ccagtgtatcttaaa

SEQ ID NO: 1781629 - DNA, 15 bp, Homo sapiens
cagtgtatcttaaat

SEQ ID NO: 1781630 - DNA, 15 bp, Homo sapiens
agtgtatcttaaatt

SEQ ID NO: 1781631 - DNA, 15 bp, Homo sapiens
gtgtatcttaaatta

SEQ ID NO: 1781632 - DNA, 15 bp, Homo sapiens
tgtatcttaaattaa

SEQ ID NO: 1781633 - DNA, 15 bp, Homo sapiens
gtatcttaaattaac

SEQ ID NO: 1781634 - DNA, 15 bp, Homo sapiens
tatcttaaattaact

SEQ ID NO: 1781635 - DNA, 15 bp, Homo sapiens
atcttaaattaacta

SEQ ID NO: 1781636 - DNA, 15 bp, Homo sapiens
tcttaaattaactag

SEQ ID NO: 1781637 - DNA, 15 bp, Homo sapiens
cttaaattaactagc

SEQ ID NO: 1781638 - DNA, 15 bp, Homo sapiens
ttaaattaactagct

SEQ ID NO: 1781639 - DNA, 15 bp, Homo sapiens
taaattaactagctt

SEQ ID NO: 1781640 - DNA, 15 bp, Homo sapiens
aaattaactagcttt

SEQ ID NO: 1781641 - DNA, 15 bp, Homo sapiens
aattaactagctttt

SEQ ID NO: 1781642 - DNA, 15 bp, Homo sapiens
attaactagctttta

SEQ ID NO: 1781643 - DNA, 15 bp, Homo sapiens
ttaactagcttttat

SEQ ID NO: 1781644 - DNA, 15 bp, Homo sapiens
taactagcttttatt

SEQ ID NO: 1781645 - DNA, 15 bp, Homo sapiens
aactagcttttattg

SEQ ID NO: 1781646 - DNA, 15 bp, Homo sapiens
actagcttttattgt

SEQ ID NO: 1781647 - DNA, 15 bp, Homo sapiens
ctagcttttattgtc

SEQ ID NO: 1781648 - DNA, 15 bp, Homo sapiens
tagcttttattgtca

SEQ ID NO: 1781649 - DNA, 15 bp, Homo sapiens
agcttttattgtcag

SEQ ID NO: 1781650 - DNA, 15 bp, Homo sapiens
gcttttattgtcagt

SEQ ID NO: 1781651 - DNA, 15 bp, Homo sapiens
cttttattgtcagtt

SEQ ID NO: 1781652 - DNA, 15 bp, Homo sapiens
ttttattgtcagttt

SEQ ID NO: 1781653 - DNA, 15 bp, Homo sapiens
tttattgtcagttta

SEQ ID NO: 1781654 - DNA, 15 bp, Homo sapiens
ttattgtcagtttag

SEQ ID NO: 1781655 - DNA, 15 bp, Homo sapiens
tattgtcagtttagt

SEQ ID NO: 1781656 - DNA, 15 bp, Homo sapiens
attgtcagtttagtg

SEQ ID NO: 1781657 - DNA, 15 bp, Homo sapiens
ttgtcagtttagtgt

SEQ ID NO: 1781658 - DNA, 15 bp, Homo sapiens
tgtcagtttagtgtt

SEQ ID NO: 1781659 - DNA, 15 bp, Homo sapiens
gtcagtttagtgttc

SEQ ID NO: 1781660 - DNA, 15 bp, Homo sapiens
tcagtttagtgttca

SEQ ID NO: 1781661 - DNA, 15 bp, Homo sapiens
cagtttagtgttcag

SEQ ID NO: 1781662 - DNA, 15 bp, Homo sapiens
agtttagtgttcagg

SEQ ID NO: 1781663 - DNA, 15 bp, Homo sapiens
gtttagtgttcaggg

SEQ ID NO: 1781664 - DNA, 15 bp, Homo sapiens
tttagtgttcagggc

SEQ ID NO: 1781665 - DNA, 15 bp, Homo sapiens
ttagtgttcagggca

SEQ ID NO: 1781666 - DNA, 15 bp, Homo sapiens
tagtgttcagggcac

SEQ ID NO: 1781667 - DNA, 15 bp, Homo sapiens
agtgttcagggcacc

SEQ ID NO: 1781668 - DNA, 15 bp, Homo sapiens
gtgttcagggcacca

SEQ ID NO: 1781669 - DNA, 15 bp, Homo sapiens
tgttcagggcaccaa

SEQ ID NO: 1781670 - DNA, 15 bp, Homo sapiens
gttcagggcaccaag

SEQ ID NO: 1781671 - DNA, 15 bp, Homo sapiens
ttcagggcaccaagg

SEQ ID NO: 1781672 - DNA, 15 bp, Homo sapiens
tcagggcaccaaggg

SEQ ID NO: 1781673 - DNA, 15 bp, Homo sapiens
cagggcaccaagggt

SEQ ID NO: 1781674 - DNA, 15 bp, Homo sapiens
agggcaccaagggta

SEQ ID NO: 1781675 - DNA, 15 bp, Homo sapiens
gggcaccaagggtac

SEQ ID NO: 1781676 - DNA, 15 bp, Homo sapiens
ggcaccaagggtaca

SEQ ID NO: 1781677 - DNA, 15 bp, Homo sapiens
gcaccaagggtacat

SEQ ID NO: 1781678 - DNA, 15 bp, Homo sapiens
caccaagggtacatt

SEQ ID NO: 1781679 - DNA, 15 bp, Homo sapiens
accaagggtacattt

SEQ ID NO: 1781680 - DNA, 15 bp, Homo sapiens
ccaagggtacatttc

SEQ ID NO: 1781681 - DNA, 15 bp, Homo sapiens
caagggtacatttca

SEQ ID NO: 1781682 - DNA, 15 bp, Homo sapiens
aagggtacatttcat

SEQ ID NO: 1781683 - DNA, 15 bp, Homo sapiens
agggtacatttcata

SEQ ID NO: 1781684 - DNA, 15 bp, Homo sapiens
gggtacatttcatac

SEQ ID NO: 1781685 - DNA, 15 bp, Homo sapiens
ggtacatttcatact

SEQ ID NO: 1781686 - DNA, 15 bp, Homo sapiens
gtacatttcatacta

SEQ ID NO: 1781687 - DNA, 15 bp, Homo sapiens
tacatttcatactaa

SEQ ID NO: 1781688 - DNA, 15 bp, Homo sapiens
acatttcatactaag

SEQ ID NO: 1781689 - DNA, 15 bp, Homo sapiens
catttcatactaaga

SEQ ID NO: 1781690 - DNA, 15 bp, Homo sapiens
atttcatactaagat

SEQ ID NO: 1781691 - DNA, 15 bp, Homo sapiens
tttcatactaagatt

SEQ ID NO: 1781692 - DNA, 15 bp, Homo sapiens
ttcatactaagattg

SEQ ID NO: 1781693 - DNA, 15 bp, Homo sapiens
tcatactaagattgt

SEQ ID NO: 1781694 - DNA, 15 bp, Homo sapiens
catactaagattgtg

SEQ ID NO: 1781695 - DNA, 15 bp, Homo sapiens
atactaagattgtgc

SEQ ID NO: 1781696 - DNA, 15 bp, Homo sapiens
tactaagattgtgca

SEQ ID NO: 1781697 - DNA, 15 bp, Homo sapiens
actaagattgtgcaa

SEQ ID NO: 1781698 - DNA, 15 bp, Homo sapiens
ctaagattgtgcaag

SEQ ID NO: 1781699 - DNA, 15 bp, Homo sapiens
taagattgtgcaagt

SEQ ID NO: 1781700 - DNA, 15 bp, Homo sapiens
aagattgtgcaagtg

SEQ ID NO: 1781701 - DNA, 15 bp, Homo sapiens
agattgtgcaagtga

SEQ ID NO: 1781702 - DNA, 15 bp, Homo sapiens
gattgtgcaagtgag

SEQ ID NO: 1781703 - DNA, 15 bp, Homo sapiens
attgtgcaagtgaga

SEQ ID NO: 1781704 - DNA, 15 bp, Homo sapiens
ttgtgcaagtgagag

SEQ ID NO: 1781705 - DNA, 15 bp, Homo sapiens
tgtgcaagtgagagt

SEQ ID NO: 1781706 - DNA, 15 bp, Homo sapiens
gtgcaagtgagagta

SEQ ID NO: 1781707 - DNA, 15 bp, Homo sapiens
tgcaagtgagagtaa

SEQ ID NO: 1781708 - DNA, 15 bp, Homo sapiens
gcaagtgagagtaaa

SEQ ID NO: 1781709 - DNA, 15 bp, Homo sapiens
caagtgagagtaaat

SEQ ID NO: 1781710 - DNA, 15 bp, Homo sapiens
aagtgagagtaaatg

SEQ ID NO: 1781711 - DNA, 15 bp, Homo sapiens
agtgagagtaaatgc

SEQ ID NO: 1781712 - DNA, 15 bp, Homo sapiens
gtgagagtaaatgcc

SEQ ID NO: 1781713 - DNA, 15 bp, Homo sapiens
tgagagtaaatgcct

SEQ ID NO: 1781714 - DNA, 15 bp, Homo sapiens
gagagtaaatgcctc

SEQ ID NO: 1781715 - DNA, 15 bp, Homo sapiens
agagtaaatgcctcc

SEQ ID NO: 1781716 - DNA, 15 bp, Homo sapiens
gagtaaatgcctcct

SEQ ID NO: 1781717 - DNA, 15 bp, Homo sapiens
agtaaatgcctcctt

SEQ ID NO: 1781718 - DNA, 15 bp, Homo sapiens
gtaaatgcctcctta

SEQ ID NO: 1781719 - DNA, 15 bp, Homo sapiens
taaatgcctccttaa

SEQ ID NO: 1781720 - DNA, 15 bp, Homo sapiens
aaatgcctccttaaa

SEQ ID NO: 1781721 - DNA, 15 bp, Homo sapiens
aatgcctccttaaat

SEQ ID NO: 1781722 - DNA, 15 bp, Homo sapiens
atgcctccttaaatt

SEQ ID NO: 1781723 - DNA, 15 bp, Homo sapiens
tgcctccttaaattt

SEQ ID NO: 1781724 - DNA, 15 bp, Homo sapiens
gcctccttaaatttt

SEQ ID NO: 1781725 - DNA, 15 bp, Homo sapiens
cctccttaaattttc

SEQ ID NO: 1781726 - DNA, 15 bp, Homo sapiens
ctccttaaattttcc

SEQ ID NO: 1781727 - DNA, 15 bp, Homo sapiens
tccttaaattttcca

SEQ ID NO: 1781728 - DNA, 15 bp, Homo sapiens
ccttaaattttccat

SEQ ID NO: 1781729 - DNA, 15 bp, Homo sapiens
cttaaattttccatc

SEQ ID NO: 1781730 - DNA, 15 bp, Homo sapiens
ttaaattttccatct

SEQ ID NO: 1781731 - DNA, 15 bp, Homo sapiens
taaattttccatctt

SEQ ID NO: 1781732 - DNA, 15 bp, Homo sapiens
aaattttccatctta

SEQ ID NO: 1781733 - DNA, 15 bp, Homo sapiens
aattttccatcttag

SEQ ID NO: 1781734 - DNA, 15 bp, Homo sapiens
attttccatcttagg

SEQ ID NO: 1781735 - DNA, 15 bp, Homo sapiens
ttttccatcttaggc

SEQ ID NO: 1781736 - DNA, 15 bp, Homo sapiens
tttccatcttaggca

SEQ ID NO: 1781737 - DNA, 15 bp, Homo sapiens
ttccatcttaggcac

SEQ ID NO: 1781738 - DNA, 15 bp, Homo sapiens
tccatcttaggcacc

SEQ ID NO: 1781739 - DNA, 15 bp, Homo sapiens
ccatcttaggcacct

SEQ ID NO: 1781740 - DNA, 15 bp, Homo sapiens
catcttaggcacctc

SEQ ID NO: 1781741 - DNA, 15 bp, Homo sapiens
atcttaggcacctcc

SEQ ID NO: 1781742 - DNA, 15 bp, Homo sapiens
tcttaggcacctccg

SEQ ID NO: 1781743 - DNA, 15 bp, Homo sapiens
cttaggcacctccgt

SEQ ID NO: 1781744 - DNA, 15 bp, Homo sapiens
ttaggcacctccgtt

SEQ ID NO: 1781745 - DNA, 15 bp, Homo sapiens
taggcacctccgttg

SEQ ID NO: 1781746 - DNA, 15 bp, Homo sapiens
aggcacctccgttgc

SEQ ID NO: 1781747 - DNA, 15 bp, Homo sapiens
ggcacctccgttgct

SEQ ID NO: 1781748 - DNA, 15 bp, Homo sapiens
gcacctccgttgctt

SEQ ID NO: 1781749 - DNA, 15 bp, Homo sapiens
cacctccgttgcttt

SEQ ID NO: 1781750 - DNA, 15 bp, Homo sapiens
acctccgttgctttt

SEQ ID NO: 1781751 - DNA, 15 bp, Homo sapiens
cctccgttgctttta

SEQ ID NO: 1781752 - DNA, 15 bp, Homo sapiens
ctccgttgcttttag

SEQ ID NO: 1781753 - DNA, 15 bp, Homo sapiens
tccgttgcttttaga

SEQ ID NO: 1781754 - DNA, 15 bp, Homo sapiens
ccgttgcttttagac

SEQ ID NO: 1781755 - DNA, 15 bp, Homo sapiens
cgttgcttttagacc

SEQ ID NO: 1781756 - DNA, 15 bp, Homo sapiens
gttgcttttagacct

SEQ ID NO: 1781757 - DNA, 15 bp, Homo sapiens
ttgcttttagacctg

SEQ ID NO: 1781758 - DNA, 15 bp, Homo sapiens
tgcttttagacctgg

SEQ ID NO: 1781759 - DNA, 15 bp, Homo sapiens
gcttttagacctggc

SEQ ID NO: 1781760 - DNA, 15 bp, Homo sapiens
cttttagacctggct

SEQ ID NO: 1781761 - DNA, 15 bp, Homo sapiens
ttttagacctggcta

SEQ ID NO: 1781762 - DNA, 15 bp, Homo sapiens
tttagacctggctat

SEQ ID NO: 1781763 - DNA, 15 bp, Homo sapiens
ttagacctggctatg

SEQ ID NO: 1781764 - DNA, 15 bp, Homo sapiens
tagacctggctatgt

SEQ ID NO: 1781765 - DNA, 15 bp, Homo sapiens
agacctggctatgtt

SEQ ID NO: 1781766 - DNA, 15 bp, Homo sapiens
gacctggctatgttt

SEQ ID NO: 1781767 - DNA, 15 bp, Homo sapiens
acctggctatgtttt

SEQ ID NO: 1781768 - DNA, 15 bp, Homo sapiens
cctggctatgtttta

SEQ ID NO: 1781769 - DNA, 15 bp, Homo sapiens
ctggctatgttttat

SEQ ID NO: 1781770 - DNA, 15 bp, Homo sapiens
tggctatgttttata

SEQ ID NO: 1781771 - DNA, 15 bp, Homo sapiens
ggctatgttttatat

SEQ ID NO: 1781772 - DNA, 15 bp, Homo sapiens
gctatgttttatatt

SEQ ID NO: 1781773 - DNA, 15 bp, Homo sapiens
ctatgttttatattg

SEQ ID NO: 1781774 - DNA, 15 bp, Homo sapiens
tatgttttatattgc

SEQ ID NO: 1781775 - DNA, 15 bp, Homo sapiens
atgttttatattgct

SEQ ID NO: 1781776 - DNA, 15 bp, Homo sapiens
tgttttatattgctt

SEQ ID NO: 1781777 - DNA, 15 bp, Homo sapiens
gttttatattgctta

SEQ ID NO: 1781778 - DNA, 15 bp, Homo sapiens
ttttatattgcttat

SEQ ID NO: 1781779 - DNA, 15 bp, Homo sapiens
tttatattgcttata

SEQ ID NO: 1781780 - DNA, 15 bp, Homo sapiens
ttatattgcttatat

SEQ ID NO: 1781781 - DNA, 15 bp, Homo sapiens
tatattgcttatata

SEQ ID NO: 1781782 - DNA, 15 bp, Homo sapiens
atattgcttatatac

SEQ ID NO: 1781783 - DNA, 15 bp, Homo sapiens
tattgcttatataca

SEQ ID NO: 1781784 - DNA, 15 bp, Homo sapiens
attgcttatatacat

SEQ ID NO: 1781785 - DNA, 15 bp, Homo sapiens
ttgcttatatacatt

SEQ ID NO: 1781786 - DNA, 15 bp, Homo sapiens
tgcttatatacattt

SEQ ID NO: 1781787 - DNA, 15 bp, Homo sapiens
gcttatatacatttt

SEQ ID NO: 1781788 - DNA, 15 bp, Homo sapiens
cttatatacattttt

SEQ ID NO: 1781789 - DNA, 15 bp, Homo sapiens
ttatatacatttttt

SEQ ID NO: 1781790 - DNA, 15 bp, Homo sapiens
tatatacattttttt

SEQ ID NO: 1781791 - DNA, 15 bp, Homo sapiens
atatacatttttttt

SEQ ID NO: 1781792 - DNA, 15 bp, Homo sapiens
tatacattttttttt

SEQ ID NO: 1781793 - DNA, 15 bp, Homo sapiens
atacatttttttttc

SEQ ID NO: 1781794 - DNA, 15 bp, Homo sapiens
tacatttttttttct

SEQ ID NO: 1781795 - DNA, 15 bp, Homo sapiens
acatttttttttctt

SEQ ID NO: 1781796 - DNA, 15 bp, Homo sapiens
catttttttttcttt

SEQ ID NO: 1781797 - DNA, 15 bp, Homo sapiens
ttttttttcttttgg

SEQ ID NO: 1781798 - DNA, 15 bp, Homo sapiens
tttttttcttttgga

SEQ ID NO: 1781799 - DNA, 15 bp, Homo sapiens
ttttttcttttggaa

SEQ ID NO: 1781800 - DNA, 15 bp, Homo sapiens
tttttcttttggaaa

SEQ ID NO: 1781801 - DNA, 15 bp, Homo sapiens
ttttcttttggaaaa

SEQ ID NO: 1781802 - DNA, 15 bp, Homo sapiens
tttcttttggaaaaa

SEQ ID NO: 1781803 - DNA, 15 bp, Homo sapiens
ttcttttggaaaaaa

SEQ ID NO: 1781804 - DNA, 15 bp, Homo sapiens
tcttttggaaaaaag

SEQ ID NO: 1781805 - DNA, 15 bp, Homo sapiens
cttttggaaaaaaga

SEQ ID NO: 1781806 - DNA, 15 bp, Homo sapiens
ttttggaaaaaagat

SEQ ID NO: 1781807 - DNA, 15 bp, Homo sapiens
tttggaaaaaagata

SEQ ID NO: 1781808 - DNA, 15 bp, Homo sapiens
ttggaaaaaagataa

SEQ ID NO: 1781809 - DNA, 15 bp, Homo sapiens
tggaaaaaagataag

SEQ ID NO: 1781810 - DNA, 15 bp, Homo sapiens
ggaaaaaagataagc

SEQ ID NO: 1781811 - DNA, 15 bp, Homo sapiens
gaaaaaagataagct

SEQ ID NO: 1781812 - DNA, 15 bp, Homo sapiens
aaaaaagataagctg

SEQ ID NO: 1781813 - DNA, 15 bp, Homo sapiens
aaaaagataagctga

SEQ ID NO: 1781814 - DNA, 15 bp, Homo sapiens
aaaagataagctgaa

SEQ ID NO: 1781815 - DNA, 15 bp, Homo sapiens
aaagataagctgaaa

SEQ ID NO: 1781816 - DNA, 15 bp, Homo sapiens
aagataagctgaaaa

SEQ ID NO: 1781817 - DNA, 15 bp, Homo sapiens
agataagctgaaaaa

SEQ ID NO: 1781818 - DNA, 15 bp, Homo sapiens
gataagctgaaaaac

SEQ ID NO: 1781819 - DNA, 15 bp, Homo sapiens
ataagctgaaaaaca

SEQ ID NO: 1781820 - DNA, 15 bp, Homo sapiens
taagctgaaaaacat

SEQ ID NO: 1781821 - DNA, 15 bp, Homo sapiens
aagctgaaaaacatt

SEQ ID NO: 1781822 - DNA, 15 bp, Homo sapiens
agctgaaaaacattt

SEQ ID NO: 1781823 - DNA, 15 bp, Homo sapiens
gctgaaaaacatttt

SEQ ID NO: 1781824 - DNA, 15 bp, Homo sapiens
ctgaaaaacattttt

SEQ ID NO: 1781825 - DNA, 15 bp, Homo sapiens
tgaaaaacatttttg

SEQ ID NO: 1781826 - DNA, 15 bp, Homo sapiens
gaaaaacatttttgt

SEQ ID NO: 1781827 - DNA, 15 bp, Homo sapiens
aaaaacatttttgtt

SEQ ID NO: 1781828 - DNA, 15 bp, Homo sapiens
aaaacatttttgttg

SEQ ID NO: 1781829 - DNA, 15 bp, Homo sapiens
aaacatttttgttga

SEQ ID NO: 1781830 - DNA, 15 bp, Homo sapiens
aacatttttgttgat

SEQ ID NO: 1781831 - DNA, 15 bp, Homo sapiens
acatttttgttgatg

SEQ ID NO: 1781832 - DNA, 15 bp, Homo sapiens
catttttgttgatga

SEQ ID NO: 1781833 - DNA, 15 bp, Homo sapiens
atttttgttgatgac

SEQ ID NO: 1781834 - DNA, 15 bp, Homo sapiens
tttttgttgatgaca

SEQ ID NO: 1781835 - DNA, 15 bp, Homo sapiens
ttttgttgatgacat

SEQ ID NO: 1781836 - DNA, 15 bp, Homo sapiens
tttgttgatgacatg

SEQ ID NO: 1781837 - DNA, 15 bp, Homo sapiens
ttgttgatgacatgc

SEQ ID NO: 1781838 - DNA, 15 bp, Homo sapiens
tgttgatgacatgct

SEQ ID NO: 1781839 - DNA, 15 bp, Homo sapiens
gttgatgacatgcta

SEQ ID NO: 1781840 - DNA, 15 bp, Homo sapiens
ttgatgacatgctat

SEQ ID NO: 1781841 - DNA, 15 bp, Homo sapiens
tgatgacatgctatt

SEQ ID NO: 1781842 - DNA, 15 bp, Homo sapiens
gatgacatgctattg

SEQ ID NO: 1781843 - DNA, 15 bp, Homo sapiens
atgacatgctattgc

SEQ ID NO: 1781844 - DNA, 15 bp, Homo sapiens
tgacatgctattgct

SEQ ID NO: 1781845 - DNA, 15 bp, Homo sapiens
gacatgctattgctg

SEQ ID NO: 1781846 - DNA, 15 bp, Homo sapiens
acatgctattgctga

SEQ ID NO: 1781847 - DNA, 15 bp, Homo sapiens
catgctattgctgaa

SEQ ID NO: 1781848 - DNA, 15 bp, Homo sapiens
atgctattgctgaaa

SEQ ID NO: 1781849 - DNA, 15 bp, Homo sapiens
tgctattgctgaaat

SEQ ID NO: 1781850 - DNA, 15 bp, Homo sapiens
gctattgctgaaata

SEQ ID NO: 1781851 - DNA, 15 bp, Homo sapiens
ctattgctgaaataa

SEQ ID NO: 1781852 - DNA, 15 bp, Homo sapiens
tattgctgaaataaa

SEQ ID NO: 1781853 - DNA, 15 bp, Homo sapiens
attgctgaaataaaa

SEQ ID NO: 1781854 - DNA, 15 bp, Homo sapiens
ttgctgaaataaaaa

SEQ ID NO: 1781855 - DNA, 15 bp, Homo sapiens
tgctgaaataaaaac

SEQ ID NO: 1781856 - DNA, 15 bp, Homo sapiens
gctgaaataaaaacc

SEQ ID NO: 1781857 - DNA, 15 bp, Homo sapiens
ctgaaataaaaaccc

SEQ ID NO: 1781858 - DNA, 15 bp, Homo sapiens
tgaaataaaaaccca

SEQ ID NO: 1781859 - DNA, 15 bp, Homo sapiens
gaaataaaaacccag

SEQ ID NO: 1781860 - DNA, 15 bp, Homo sapiens
aaataaaaacccaga

SEQ ID NO: 1781861 - DNA, 15 bp, Homo sapiens
aataaaaacccagaa

SEQ ID NO: 1781862 - DNA, 15 bp, Homo sapiens
ataaaaacccagaac

SEQ ID NO: 1781863 - DNA, 15 bp, Homo sapiens
taaaaacccagaaca

SEQ ID NO: 1781864 - DNA, 15 bp, Homo sapiens
aaaaacccagaacat

SEQ ID NO: 1781865 - DNA, 15 bp, Homo sapiens
aaaacccagaacata

SEQ ID NO: 1781866 - DNA, 15 bp, Homo sapiens
aaacccagaacatag

SEQ ID NO: 1781867 - DNA, 15 bp, Homo sapiens
aacccagaacatagt

SEQ ID NO: 1781868 - DNA, 15 bp, Homo sapiens
acccagaacatagtg

SEQ ID NO: 1781869 - DNA, 15 bp, Homo sapiens
cccagaacatagtga

SEQ ID NO: 1781870 - DNA, 15 bp, Homo sapiens
ccagaacatagtgat

SEQ ID NO: 1781871 - DNA, 15 bp, Homo sapiens
cagaacatagtgatg

SEQ ID NO: 1781872 - DNA, 15 bp, Homo sapiens
agaacatagtgatgt

SEQ ID NO: 1781873 - DNA, 15 bp, Homo sapiens
gaacatagtgatgtg

SEQ ID NO: 1781874 - DNA, 15 bp, Homo sapiens
aacatagtgatgtgt

SEQ ID NO: 1781875 - DNA, 15 bp, Homo sapiens
acatagtgatgtgta

SEQ ID NO: 1781876 - DNA, 15 bp, Homo sapiens
catagtgatgtgtag

SEQ ID NO: 1781877 - DNA, 15 bp, Homo sapiens
atagtgatgtgtagg

SEQ ID NO: 1781878 - DNA, 15 bp, Homo sapiens
tagtgatgtgtagga

SEQ ID NO: 1781879 - DNA, 15 bp, Homo sapiens
agtgatgtgtaggaa

SEQ ID NO: 1781880 - DNA, 15 bp, Homo sapiens
gtgatgtgtaggaaa

SEQ ID NO: 1781881 - DNA, 15 bp, Homo sapiens
tgatgtgtaggaaaa

SEQ ID NO: 1781882 - DNA, 15 bp, Homo sapiens
gatgtgtaggaaaaa

SEQ ID NO: 1781883 - DNA, 15 bp, Homo sapiens
atgtgtaggaaaaaa

SEQ ID NO: 1781884 - DNA, 15 bp, Homo sapiens
tgtgtaggaaaaaac

SEQ ID NO: 1781885 - DNA, 15 bp, Homo sapiens
gtgtaggaaaaaact

SEQ ID NO: 1781886 - DNA, 15 bp, Homo sapiens
tgtaggaaaaaactc

SEQ ID NO: 1781887 - DNA, 15 bp, Homo sapiens
gtaggaaaaaactct

SEQ ID NO: 1781888 - DNA, 15 bp, Homo sapiens
taggaaaaaactctc

SEQ ID NO: 1781889 - DNA, 15 bp, Homo sapiens
aggaaaaaactctct

SEQ ID NO: 1781890 - DNA, 15 bp, Homo sapiens
ggaaaaaactctctc

SEQ ID NO: 1781891 - DNA, 15 bp, Homo sapiens
gaaaaaactctctca

SEQ ID NO: 1781892 - DNA, 15 bp, Homo sapiens
aaaaaactctctcaa

SEQ ID NO: 1781893 - DNA, 15 bp, Homo sapiens
aaaaactctctcaaa

SEQ ID NO: 1781894 - DNA, 15 bp, Homo sapiens
aaaactctctcaaac

SEQ ID NO: 1781895 - DNA, 15 bp, Homo sapiens
aaactctctcaaacc

SEQ ID NO: 1781896 - DNA, 15 bp, Homo sapiens
aactctctcaaacca

SEQ ID NO: 1781897 - DNA, 15 bp, Homo sapiens
actctctcaaaccat

SEQ ID NO: 1781898 - DNA, 15 bp, Homo sapiens
ctctctcaaaccatg

SEQ ID NO: 1781899 - DNA, 15 bp, Homo sapiens
tctctcaaaccatgt

SEQ ID NO: 1781900 - DNA, 15 bp, Homo sapiens
ctctcaaaccatgtt

SEQ ID NO: 1781901 - DNA, 15 bp, Homo sapiens
tctcaaaccatgttt

SEQ ID NO: 1781902 - DNA, 15 bp, Homo sapiens
ctcaaaccatgtttt

SEQ ID NO: 1781903 - DNA, 15 bp, Homo sapiens
tcaaaccatgttttt

SEQ ID NO: 1781904 - DNA, 15 bp, Homo sapiens
caaaccatgtttttc

SEQ ID NO: 1781905 - DNA, 15 bp, Homo sapiens
aaaccatgtttttct

SEQ ID NO: 1781906 - DNA, 15 bp, Homo sapiens
aaccatgtttttctt

SEQ ID NO: 1781907 - DNA, 15 bp, Homo sapiens
accatgtttttcttc

SEQ ID NO: 1781908 - DNA, 15 bp, Homo sapiens
ccatgtttttcttct

SEQ ID NO: 1781909 - DNA, 15 bp, Homo sapiens
catgtttttcttctg

SEQ ID NO: 1781910 - DNA, 15 bp, Homo sapiens
atgtttttcttctgc

SEQ ID NO: 1781911 - DNA, 15 bp, Homo sapiens
tgtttttcttctgct

SEQ ID NO: 1781912 - DNA, 15 bp, Homo sapiens
gtttttcttctgctc

SEQ ID NO: 1781913 - DNA, 15 bp, Homo sapiens
tttttcttctgctct

SEQ ID NO: 1781914 - DNA, 15 bp, Homo sapiens
ttttcttctgctctc

SEQ ID NO: 1781915 - DNA, 15 bp, Homo sapiens
tttcttctgctctca

SEQ ID NO: 1781916 - DNA, 15 bp, Homo sapiens
ttcttctgctctcat

SEQ ID NO: 1781917 - DNA, 15 bp, Homo sapiens
tcttctgctctcata

SEQ ID NO: 1781918 - DNA, 15 bp, Homo sapiens
cttctgctctcatac

SEQ ID NO: 1781919 - DNA, 15 bp, Homo sapiens
ttctgctctcatacc

SEQ ID NO: 1781920 - DNA, 15 bp, Homo sapiens
tctgctctcatacca

SEQ ID NO: 1781921 - DNA, 15 bp, Homo sapiens
ctgctctcataccac

SEQ ID NO: 1781922 - DNA, 15 bp, Homo sapiens
tgctctcataccacc

SEQ ID NO: 1781923 - DNA, 15 bp, Homo sapiens
gctctcataccacca

SEQ ID NO: 1781924 - DNA, 15 bp, Homo sapiens
ctctcataccaccac

SEQ ID NO: 1781925 - DNA, 15 bp, Homo sapiens
tctcataccaccaca

SEQ ID NO: 1781926 - DNA, 15 bp, Homo sapiens
ctcataccaccacaa

SEQ ID NO: 1781927 - DNA, 15 bp, Homo sapiens
tcataccaccacaac

SEQ ID NO: 1781928 - DNA, 15 bp, Homo sapiens
cataccaccacaaca

SEQ ID NO: 1781929 - DNA, 15 bp, Homo sapiens
ataccaccacaacag

SEQ ID NO: 1781930 - DNA, 15 bp, Homo sapiens
taccaccacaacagt

SEQ ID NO: 1781931 - DNA, 15 bp, Homo sapiens
accaccacaacagtt

SEQ ID NO: 1781932 - DNA, 15 bp, Homo sapiens
ccaccacaacagttg

SEQ ID NO: 1781933 - DNA, 15 bp, Homo sapiens
caccacaacagttgt

SEQ ID NO: 1781934 - DNA, 15 bp, Homo sapiens
accacaacagttgtc

SEQ ID NO: 1781935 - DNA, 15 bp, Homo sapiens
ccacaacagttgtca

SEQ ID NO: 1781936 - DNA, 15 bp, Homo sapiens
cacaacagttgtcaa

SEQ ID NO: 1781937 - DNA, 15 bp, Homo sapiens
acaacagttgtcaac

SEQ ID NO: 1781938 - DNA, 15 bp, Homo sapiens
caacagttgtcaaca

SEQ ID NO: 1781939 - DNA, 15 bp, Homo sapiens
aacagttgtcaacac

SEQ ID NO: 1781940 - DNA, 15 bp, Homo sapiens
acagttgtcaacaca

SEQ ID NO: 1781941 - DNA, 15 bp, Homo sapiens
cagttgtcaacacaa

SEQ ID NO: 1781942 - DNA, 15 bp, Homo sapiens
agttgtcaacacaaa

SEQ ID NO: 1781943 - DNA, 15 bp, Homo sapiens
gttgtcaacacaaaa

SEQ ID NO: 1781944 - DNA, 15 bp, Homo sapiens
ttgtcaacacaaaag

SEQ ID NO: 1781945 - DNA, 15 bp, Homo sapiens
tgtcaacacaaaaga

SEQ ID NO: 1781946 - DNA, 15 bp, Homo sapiens
gtcaacacaaaagac

SEQ ID NO: 1781947 - DNA, 15 bp, Homo sapiens
tcaacacaaaagact

SEQ ID NO: 1781948 - DNA, 15 bp, Homo sapiens
caacacaaaagactt

SEQ ID NO: 1781949 - DNA, 15 bp, Homo sapiens
aacacaaaagacttc

SEQ ID NO: 1781950 - DNA, 15 bp, Homo sapiens
acacaaaagacttct

SEQ ID NO: 1781951 - DNA, 15 bp, Homo sapiens
cacaaaagacttctg

SEQ ID NO: 1781952 - DNA, 15 bp, Homo sapiens
acaaaagacttctgt

SEQ ID NO: 1781953 - DNA, 15 bp, Homo sapiens
caaaagacttctgtg

SEQ ID NO: 1781954 - DNA, 15 bp, Homo sapiens
aaaagacttctgtga

SEQ ID NO: 1781955 - DNA, 15 bp, Homo sapiens
aaagacttctgtgac

SEQ ID NO: 1781956 - DNA, 15 bp, Homo sapiens
aagacttctgtgaca

SEQ ID NO: 1781957 - DNA, 15 bp, Homo sapiens
agacttctgtgacaa

SEQ ID NO: 1781958 - DNA, 15 bp, Homo sapiens
gacttctgtgacaaa

SEQ ID NO: 1781959 - DNA, 15 bp, Homo sapiens
acttctgtgacaaaa

SEQ ID NO: 1781960 - DNA, 15 bp, Homo sapiens
cttctgtgacaaaat

SEQ ID NO: 1781961 - DNA, 15 bp, Homo sapiens
ttctgtgacaaaatg

SEQ ID NO: 1781962 - DNA, 15 bp, Homo sapiens
tctgtgacaaaatgt

SEQ ID NO: 1781963 - DNA, 15 bp, Homo sapiens
ctgtgacaaaatgtg

SEQ ID NO: 1781964 - DNA, 15 bp, Homo sapiens
tgtgacaaaatgtgt

SEQ ID NO: 1781965 - DNA, 15 bp, Homo sapiens
gtgacaaaatgtgtg

SEQ ID NO: 1781966 - DNA, 15 bp, Homo sapiens
tgacaaaatgtgtgg

SEQ ID NO: 1781967 - DNA, 15 bp, Homo sapiens
gacaaaatgtgtggg

SEQ ID NO: 1781968 - DNA, 15 bp, Homo sapiens
acaaaatgtgtgggt

SEQ ID NO: 1781969 - DNA, 15 bp, Homo sapiens
caaaatgtgtgggtt

SEQ ID NO: 1781970 - DNA, 15 bp, Homo sapiens
aaaatgtgtgggttt

SEQ ID NO: 1781971 - DNA, 15 bp, Homo sapiens
aaatgtgtgggtttt

SEQ ID NO: 1781972 - DNA, 15 bp, Homo sapiens
aatgtgtgggttttt

SEQ ID NO: 1781973 - DNA, 15 bp, Homo sapiens
atgtgtgggtttttt

SEQ ID NO: 1781974 - DNA, 15 bp, Homo sapiens
tgtgtgggttttttt

SEQ ID NO: 1781975 - DNA, 15 bp, Homo sapiens
gtgtgggtttttttc

SEQ ID NO: 1781976 - DNA, 15 bp, Homo sapiens
tgtgggtttttttcc

SEQ ID NO: 1781977 - DNA, 15 bp, Homo sapiens
gtgggtttttttccc

SEQ ID NO: 1781978 - DNA, 15 bp, Homo sapiens
tgggtttttttcccc

SEQ ID NO: 1781979 - DNA, 15 bp, Homo sapiens
gggtttttttcccca

SEQ ID NO: 1781980 - DNA, 15 bp, Homo sapiens
ggtttttttccccac

SEQ ID NO: 1781981 - DNA, 15 bp, Homo sapiens
gtttttttccccaca

SEQ ID NO: 1781982 - DNA, 15 bp, Homo sapiens
tttttttccccacac

SEQ ID NO: 1781983 - DNA, 15 bp, Homo sapiens
ttttttccccacaca

SEQ ID NO: 1781984 - DNA, 15 bp, Homo sapiens
tttttccccacacac

SEQ ID NO: 1781985 - DNA, 15 bp, Homo sapiens
ttttccccacacact

SEQ ID NO: 1781986 - DNA, 15 bp, Homo sapiens
tttccccacacacta

SEQ ID NO: 1781987 - DNA, 15 bp, Homo sapiens
ttccccacacactaa

SEQ ID NO: 1781988 - DNA, 15 bp, Homo sapiens
tccccacacactaag

SEQ ID NO: 1781989 - DNA, 15 bp, Homo sapiens
ccccacacactaagc

SEQ ID NO: 1781990 - DNA, 15 bp, Homo sapiens
cccacacactaagca

SEQ ID NO: 1781991 - DNA, 15 bp, Homo sapiens
ccacacactaagcag

SEQ ID NO: 1781992 - DNA, 15 bp, Homo sapiens
cacacactaagcagc

SEQ ID NO: 1781993 - DNA, 15 bp, Homo sapiens
acacactaagcagca

SEQ ID NO: 1781994 - DNA, 15 bp, Homo sapiens
cacactaagcagcag

SEQ ID NO: 1781995 - DNA, 15 bp, Homo sapiens
acactaagcagcaga

SEQ ID NO: 1781996 - DNA, 15 bp, Homo sapiens
cactaagcagcagat

SEQ ID NO: 1781997 - DNA, 15 bp, Homo sapiens
actaagcagcagata

SEQ ID NO: 1781998 - DNA, 15 bp, Homo sapiens
ctaagcagcagatac

SEQ ID NO: 1781999 - DNA, 15 bp, Homo sapiens
taagcagcagatacc

SEQ ID NO: 1782000 - DNA, 15 bp, Homo sapiens
aagcagcagatacca

SEQ ID NO: 1782001 - DNA, 15 bp, Homo sapiens
agcagcagataccag

SEQ ID NO: 1782002 - DNA, 15 bp, Homo sapiens
gcagcagataccagc

SEQ ID NO: 1782003 - DNA, 15 bp, Homo sapiens
cagcagataccagct

SEQ ID NO: 1782004 - DNA, 15 bp, Homo sapiens
agcagataccagctg

SEQ ID NO: 1782005 - DNA, 15 bp, Homo sapiens
gcagataccagctgg

SEQ ID NO: 1782006 - DNA, 15 bp, Homo sapiens
cagataccagctggg

SEQ ID NO: 1782007 - DNA, 15 bp, Homo sapiens
agataccagctgggc

SEQ ID NO: 1782008 - DNA, 15 bp, Homo sapiens
gataccagctgggca

SEQ ID NO: 1782009 - DNA, 15 bp, Homo sapiens
ataccagctgggcat

SEQ ID NO: 1782010 - DNA, 15 bp, Homo sapiens
taccagctgggcatc

SEQ ID NO: 1782011 - DNA, 15 bp, Homo sapiens
accagctgggcatcc

SEQ ID NO: 1782012 - DNA, 15 bp, Homo sapiens
ccagctgggcatcct

SEQ ID NO: 1782013 - DNA, 15 bp, Homo sapiens
cagctgggcatcctc

SEQ ID NO: 1782014 - DNA, 15 bp, Homo sapiens
agctgggcatcctcc

SEQ ID NO: 1782015 - DNA, 15 bp, Homo sapiens
gctgggcatcctcca

SEQ ID NO: 1782016 - DNA, 15 bp, Homo sapiens
ctgggcatcctccaa

SEQ ID NO: 1782017 - DNA, 15 bp, Homo sapiens
tgggcatcctccaac

SEQ ID NO: 1782018 - DNA, 15 bp, Homo sapiens
gggcatcctccaact

SEQ ID NO: 1782019 - DNA, 15 bp, Homo sapiens
ggcatcctccaactc

SEQ ID NO: 1782020 - DNA, 15 bp, Homo sapiens
gcatcctccaactca

SEQ ID NO: 1782021 - DNA, 15 bp, Homo sapiens
catcctccaactcag

SEQ ID NO: 1782022 - DNA, 15 bp, Homo sapiens
atcctccaactcagt

SEQ ID NO: 1782023 - DNA, 15 bp, Homo sapiens
tcctccaactcagtt

SEQ ID NO: 1782024 - DNA, 15 bp, Homo sapiens
cctccaactcagttc

SEQ ID NO: 1782025 - DNA, 15 bp, Homo sapiens
ctccaactcagttct

SEQ ID NO: 1782026 - DNA, 15 bp, Homo sapiens
tccaactcagttctg

SEQ ID NO: 1782027 - DNA, 15 bp, Homo sapiens
ccaactcagttctga

SEQ ID NO: 1782028 - DNA, 15 bp, Homo sapiens
caactcagttctgat

SEQ ID NO: 1782029 - DNA, 15 bp, Homo sapiens
aactcagttctgata

SEQ ID NO: 1782030 - DNA, 15 bp, Homo sapiens
actcagttctgatac

SEQ ID NO: 1782031 - DNA, 15 bp, Homo sapiens
ctcagttctgatact

SEQ ID NO: 1782032 - DNA, 15 bp, Homo sapiens
tcagttctgatactg

SEQ ID NO: 1782033 - DNA, 15 bp, Homo sapiens
cagttctgatactgt

SEQ ID NO: 1782034 - DNA, 15 bp, Homo sapiens
agttctgatactgtc

SEQ ID NO: 1782035 - DNA, 15 bp, Homo sapiens
gttctgatactgtct

SEQ ID NO: 1782036 - DNA, 15 bp, Homo sapiens
ttctgatactgtcta

SEQ ID NO: 1782037 - DNA, 15 bp, Homo sapiens
tctgatactgtctac

SEQ ID NO: 1782038 - DNA, 15 bp, Homo sapiens
ctgatactgtctact

SEQ ID NO: 1782039 - DNA, 15 bp, Homo sapiens
tgatactgtctactt

SEQ ID NO: 1782040 - DNA, 15 bp, Homo sapiens
gatactgtctacttg

SEQ ID NO: 1782041 - DNA, 15 bp, Homo sapiens
atactgtctacttgg

SEQ ID NO: 1782042 - DNA, 15 bp, Homo sapiens
tactgtctacttgga

SEQ ID NO: 1782043 - DNA, 15 bp, Homo sapiens
actgtctacttggag

SEQ ID NO: 1782044 - DNA, 15 bp, Homo sapiens
ctgtctacttggaga

SEQ ID NO: 1782045 - DNA, 15 bp, Homo sapiens
tgtctacttggagat

SEQ ID NO: 1782046 - DNA, 15 bp, Homo sapiens
gtctacttggagata

SEQ ID NO: 1782047 - DNA, 15 bp, Homo sapiens
tctacttggagatag

SEQ ID NO: 1782048 - DNA, 15 bp, Homo sapiens
ctacttggagatagt

SEQ ID NO: 1782049 - DNA, 15 bp, Homo sapiens
tacttggagatagtg

SEQ ID NO: 1782050 - DNA, 15 bp, Homo sapiens
acttggagatagtgt

SEQ ID NO: 1782051 - DNA, 15 bp, Homo sapiens
cttggagatagtgtc

SEQ ID NO: 1782052 - DNA, 15 bp, Homo sapiens
ttggagatagtgtca

SEQ ID NO: 1782053 - DNA, 15 bp, Homo sapiens
gtgtcagatcccact

SEQ ID NO: 1782054 - DNA, 15 bp, Homo sapiens
tgtcagatcccactg

SEQ ID NO: 1782055 - DNA, 15 bp, Homo sapiens
gtcagatcccactgg

SEQ ID NO: 1782056 - DNA, 15 bp, Homo sapiens
tcagatcccactggt

SEQ ID NO: 1782057 - DNA, 15 bp, Homo sapiens
cagatcccactggtt

SEQ ID NO: 1782058 - DNA, 15 bp, Homo sapiens
agatcccactggttg

SEQ ID NO: 1782059 - DNA, 15 bp, Homo sapiens
gatcccactggttgg

SEQ ID NO: 1782060 - DNA, 15 bp, Homo sapiens
atcccactggttggg

SEQ ID NO: 1782061 - DNA, 15 bp, Homo sapiens
tcccactggttgggg

SEQ ID NO: 1782062 - DNA, 15 bp, Homo sapiens
cccactggttggggt

SEQ ID NO: 1782063 - DNA, 15 bp, Homo sapiens
ccactggttggggtc

SEQ ID NO: 1782064 - DNA, 15 bp, Homo sapiens
cactggttggggtct

SEQ ID NO: 1782065 - DNA, 15 bp, Homo sapiens
actggttggggtctc

SEQ ID NO: 1782066 - DNA, 15 bp, Homo sapiens
ctggttggggtctca

SEQ ID NO: 1782067 - DNA, 15 bp, Homo sapiens
tggttggggtctcag

SEQ ID NO: 1782068 - DNA, 15 bp, Homo sapiens
ggttggggtctcagt

SEQ ID NO: 1782069 - DNA, 15 bp, Homo sapiens
gttggggtctcagtg

SEQ ID NO: 1782070 - DNA, 15 bp, Homo sapiens
ttggggtctcagtgc

SEQ ID NO: 1782071 - DNA, 15 bp, Homo sapiens
tggggtctcagtgcc

SEQ ID NO: 1782072 - DNA, 15 bp, Homo sapiens
ggggtctcagtgccc

SEQ ID NO: 1782073 - DNA, 15 bp, Homo sapiens
gggtctcagtgccca

SEQ ID NO: 1782074 - DNA, 15 bp, Homo sapiens
ggtctcagtgcccat

SEQ ID NO: 1782075 - DNA, 15 bp, Homo sapiens
gtctcagtgcccata

SEQ ID NO: 1782076 - DNA, 15 bp, Homo sapiens
tctcagtgcccatac

SEQ ID NO: 1782077 - DNA, 15 bp, Homo sapiens
ctcagtgcccatacc

SEQ ID NO: 1782078 - DNA, 15 bp, Homo sapiens
tcagtgcccatacct

SEQ ID NO: 1782079 - DNA, 15 bp, Homo sapiens
cagtgcccatacctc

SEQ ID NO: 1782080 - DNA, 15 bp, Homo sapiens
agtgcccatacctca

SEQ ID NO: 1782081 - DNA, 15 bp, Homo sapiens
gtgcccatacctcat

SEQ ID NO: 1782082 - DNA, 15 bp, Homo sapiens
tgcccatacctcata

SEQ ID NO: 1782083 - DNA, 15 bp, Homo sapiens
gcccatacctcatac

SEQ ID NO: 1782084 - DNA, 15 bp, Homo sapiens
cccatacctcatacc

SEQ ID NO: 1782085 - DNA, 15 bp, Homo sapiens
ccatacctcataccc

SEQ ID NO: 1782086 - DNA, 15 bp, Homo sapiens
catacctcatacccc

SEQ ID NO: 1782087 - DNA, 15 bp, Homo sapiens
atacctcataccccc

SEQ ID NO: 1782088 - DNA, 15 bp, Homo sapiens
tacctcataccccca

SEQ ID NO: 1782089 - DNA, 15 bp, Homo sapiens
acctcatacccccag

SEQ ID NO: 1782090 - DNA, 15 bp, Homo sapiens
cctcatacccccaga

SEQ ID NO: 1782091 - DNA, 15 bp, Homo sapiens
ctcatacccccagac

SEQ ID NO: 1782092 - DNA, 15 bp, Homo sapiens
tcatacccccagaca

SEQ ID NO: 1782093 - DNA, 15 bp, Homo sapiens
catacccccagacac

SEQ ID NO: 1782094 - DNA, 15 bp, Homo sapiens
atacccccagacacc

SEQ ID NO: 1782095 - DNA, 15 bp, Homo sapiens
tacccccagacacca

SEQ ID NO: 1782096 - DNA, 15 bp, Homo sapiens
acccccagacaccat

SEQ ID NO: 1782097 - DNA, 15 bp, Homo sapiens
cccccagacaccatc

SEQ ID NO: 1782098 - DNA, 15 bp, Homo sapiens
ccccagacaccatcc

SEQ ID NO: 1782099 - DNA, 15 bp, Homo sapiens
cccagacaccatcct

SEQ ID NO: 1782100 - DNA, 15 bp, Homo sapiens
ccagacaccatccta

SEQ ID NO: 1782101 - DNA, 15 bp, Homo sapiens
cagacaccatcctag

SEQ ID NO: 1782102 - DNA, 15 bp, Homo sapiens
agacaccatcctagg

SEQ ID NO: 1782103 - DNA, 15 bp, Homo sapiens
gacaccatcctaggc

SEQ ID NO: 1782104 - DNA, 15 bp, Homo sapiens
acaccatcctaggcc

SEQ ID NO: 1782105 - DNA, 15 bp, Homo sapiens
caccatcctaggcct

SEQ ID NO: 1782106 - DNA, 15 bp, Homo sapiens
accatcctaggcctc

SEQ ID NO: 1782107 - DNA, 15 bp, Homo sapiens
ccatcctaggcctcc

SEQ ID NO: 1782108 - DNA, 15 bp, Homo sapiens
catcctaggcctcca

SEQ ID NO: 1782109 - DNA, 15 bp, Homo sapiens
atcctaggcctccag

SEQ ID NO: 1782110 - DNA, 15 bp, Homo sapiens
tcctaggcctccaga

SEQ ID NO: 1782111 - DNA, 15 bp, Homo sapiens
cctaggcctccagaa

SEQ ID NO: 1782112 - DNA, 15 bp, Homo sapiens
ctaggcctccagaac

SEQ ID NO: 1782113 - DNA, 15 bp, Homo sapiens
taggcctccagaact

SEQ ID NO: 1782114 - DNA, 15 bp, Homo sapiens
aggcctccagaactt

SEQ ID NO: 1782115 - DNA, 15 bp, Homo sapiens
ggcctccagaacttc

SEQ ID NO: 1782116 - DNA, 15 bp, Homo sapiens
gcctccagaacttct

SEQ ID NO: 1782117 - DNA, 15 bp, Homo sapiens
cctccagaacttctg

SEQ ID NO: 1782118 - DNA, 15 bp, Homo sapiens
ctccagaacttctga

SEQ ID NO: 1782119 - DNA, 15 bp, Homo sapiens
tccagaacttctgac

SEQ ID NO: 1782120 - DNA, 15 bp, Homo sapiens
ccagaacttctgacc

SEQ ID NO: 1782121 - DNA, 15 bp, Homo sapiens
cagaacttctgacct

SEQ ID NO: 1782122 - DNA, 15 bp, Homo sapiens
agaacttctgaccta

SEQ ID NO: 1782123 - DNA, 15 bp, Homo sapiens
gaacttctgacctac

SEQ ID NO: 1782124 - DNA, 15 bp, Homo sapiens
aacttctgacctact

SEQ ID NO: 1782125 - DNA, 15 bp, Homo sapiens
acttctgacctactg

SEQ ID NO: 1782126 - DNA, 15 bp, Homo sapiens
cttctgacctactgg

SEQ ID NO: 1782127 - DNA, 15 bp, Homo sapiens
ttctgacctactggc

SEQ ID NO: 1782128 - DNA, 15 bp, Homo sapiens
tctgacctactggct

SEQ ID NO: 1782129 - DNA, 15 bp, Homo sapiens
ctgacctactggctt

SEQ ID NO: 1782130 - DNA, 15 bp, Homo sapiens
tgacctactggcttc

SEQ ID NO: 1782131 - DNA, 15 bp, Homo sapiens
gacctactggcttca

SEQ ID NO: 1782132 - DNA, 15 bp, Homo sapiens
acctactggcttcaa

SEQ ID NO: 1782133 - DNA, 15 bp, Homo sapiens
cctactggcttcaaa

SEQ ID NO: 1782134 - DNA, 15 bp, Homo sapiens
ctactggcttcaaat

SEQ ID NO: 1782135 - DNA, 15 bp, Homo sapiens
tactggcttcaaatt

SEQ ID NO: 1782136 - DNA, 15 bp, Homo sapiens
actggcttcaaattg

SEQ ID NO: 1782137 - DNA, 15 bp, Homo sapiens
ctggcttcaaattgg

SEQ ID NO: 1782138 - DNA, 15 bp, Homo sapiens
tggcttcaaattggg

SEQ ID NO: 1782139 - DNA, 15 bp, Homo sapiens
ggcttcaaattgggg

SEQ ID NO: 1782140 - DNA, 15 bp, Homo sapiens
gcttcaaattggggt

SEQ ID NO: 1782141 - DNA, 15 bp, Homo sapiens
cttcaaattggggtt

SEQ ID NO: 1782142 - DNA, 15 bp, Homo sapiens
ttcaaattggggttc

SEQ ID NO: 1782143 - DNA, 15 bp, Homo sapiens
tcaaattggggttct

SEQ ID NO: 1782144 - DNA, 15 bp, Homo sapiens
caaattggggttctc

SEQ ID NO: 1782145 - DNA, 15 bp, Homo sapiens
aaattggggttctca

SEQ ID NO: 1782146 - DNA, 15 bp, Homo sapiens
aattggggttctcac

SEQ ID NO: 1782147 - DNA, 15 bp, Homo sapiens
attggggttctcaca

SEQ ID NO: 1782148 - DNA, 15 bp, Homo sapiens
ttggggttctcacac

SEQ ID NO: 1782149 - DNA, 15 bp, Homo sapiens
tggggttctcacacc

SEQ ID NO: 1782150 - DNA, 15 bp, Homo sapiens
ggggttctcacacca

SEQ ID NO: 1782151 - DNA, 15 bp, Homo sapiens
gggttctcacaccac

SEQ ID NO: 1782152 - DNA, 15 bp, Homo sapiens
ggttctcacaccaca

SEQ ID NO: 1782153 - DNA, 15 bp, Homo sapiens
gttctcacaccacac

SEQ ID NO: 1782154 - DNA, 15 bp, Homo sapiens
ttctcacaccacact

SEQ ID NO: 1782155 - DNA, 15 bp, Homo sapiens
tctcacaccacactc

SEQ ID NO: 1782156 - DNA, 15 bp, Homo sapiens
ctcacaccacactct

SEQ ID NO: 1782157 - DNA, 15 bp, Homo sapiens
tcacaccacactctt

SEQ ID NO: 1782158 - DNA, 15 bp, Homo sapiens
cacaccacactcttc

SEQ ID NO: 1782159 - DNA, 15 bp, Homo sapiens
acaccacactcttca

SEQ ID NO: 1782160 - DNA, 15 bp, Homo sapiens
caccacactcttcag

SEQ ID NO: 1782161 - DNA, 15 bp, Homo sapiens
accacactcttcagg

SEQ ID NO: 1782162 - DNA, 15 bp, Homo sapiens
ccacactcttcaggt

SEQ ID NO: 1782163 - DNA, 15 bp, Homo sapiens
cacactcttcaggtt

SEQ ID NO: 1782164 - DNA, 15 bp, Homo sapiens
acactcttcaggttc

SEQ ID NO: 1782165 - DNA, 15 bp, Homo sapiens
cactcttcaggttca

SEQ ID NO: 1782166 - DNA, 15 bp, Homo sapiens
actcttcaggttcaa

SEQ ID NO: 1782167 - DNA, 15 bp, Homo sapiens
ctcttcaggttcaat

SEQ ID NO: 1782168 - DNA, 15 bp, Homo sapiens
tcttcaggttcaatt

SEQ ID NO: 1782169 - DNA, 15 bp, Homo sapiens
cttcaggttcaatta

SEQ ID NO: 1782170 - DNA, 15 bp, Homo sapiens
ttcaggttcaattaa

SEQ ID NO: 1782171 - DNA, 15 bp, Homo sapiens
tcaggttcaattaat

SEQ ID NO: 1782172 - DNA, 15 bp, Homo sapiens
caggttcaattaatt

SEQ ID NO: 1782173 - DNA, 15 bp, Homo sapiens
aggttcaattaattt

SEQ ID NO: 1782174 - DNA, 15 bp, Homo sapiens
ggttcaattaatttg

SEQ ID NO: 1782175 - DNA, 15 bp, Homo sapiens
gttcaattaatttgc

SEQ ID NO: 1782176 - DNA, 15 bp, Homo sapiens
ttcaattaatttgct

SEQ ID NO: 1782177 - DNA, 15 bp, Homo sapiens
tcaattaatttgctg

SEQ ID NO: 1782178 - DNA, 15 bp, Homo sapiens
caattaatttgctgg

SEQ ID NO: 1782179 - DNA, 15 bp, Homo sapiens
aattaatttgctgga

SEQ ID NO: 1782180 - DNA, 15 bp, Homo sapiens
attaatttgctggag

SEQ ID NO: 1782181 - DNA, 15 bp, Homo sapiens
ttaatttgctggagc

SEQ ID NO: 1782182 - DNA, 15 bp, Homo sapiens
taatttgctggagct

SEQ ID NO: 1782183 - DNA, 15 bp, Homo sapiens
aatttgctggagctg

SEQ ID NO: 1782184 - DNA, 15 bp, Homo sapiens
atttgctggagctgc

SEQ ID NO: 1782185 - DNA, 15 bp, Homo sapiens
tttgctggagctgct

SEQ ID NO: 1782186 - DNA, 15 bp, Homo sapiens
ttgctggagctgctc

SEQ ID NO: 1782187 - DNA, 15 bp, Homo sapiens
tgctggagctgctca

SEQ ID NO: 1782188 - DNA, 15 bp, Homo sapiens
gctggagctgctcac

SEQ ID NO: 1782189 - DNA, 15 bp, Homo sapiens
ctggagctgctcaca

SEQ ID NO: 1782190 - DNA, 15 bp, Homo sapiens
tggagctgctcacaa

SEQ ID NO: 1782191 - DNA, 15 bp, Homo sapiens
ggagctgctcacaaa

SEQ ID NO: 1782192 - DNA, 15 bp, Homo sapiens
gagctgctcacaaaa

SEQ ID NO: 1782193 - DNA, 15 bp, Homo sapiens
agctgctcacaaaac

SEQ ID NO: 1782194 - DNA, 15 bp, Homo sapiens
gctgctcacaaaact

SEQ ID NO: 1782195 - DNA, 15 bp, Homo sapiens
ctgctcacaaaactc

SEQ ID NO: 1782196 - DNA, 15 bp, Homo sapiens
tgctcacaaaactca

SEQ ID NO: 1782197 - DNA, 15 bp, Homo sapiens
gctcacaaaactcaa

SEQ ID NO: 1782198 - DNA, 15 bp, Homo sapiens
ctcacaaaactcaag

SEQ ID NO: 1782199 - DNA, 15 bp, Homo sapiens
acaaaactcaaggat

SEQ ID NO: 1782200 - DNA, 15 bp, Homo sapiens
caaaactcaaggata

SEQ ID NO: 1782201 - DNA, 15 bp, Homo sapiens
aaaactcaaggatac

SEQ ID NO: 1782202 - DNA, 15 bp, Homo sapiens
aaactcaaggatact

SEQ ID NO: 1782203 - DNA, 15 bp, Homo sapiens
aactcaaggatactg

SEQ ID NO: 1782204 - DNA, 15 bp, Homo sapiens
actcaaggatactgg

SEQ ID NO: 1782205 - DNA, 15 bp, Homo sapiens
ctcaaggatactggg

SEQ ID NO: 1782206 - DNA, 15 bp, Homo sapiens
tcaaggatactgggc

SEQ ID NO: 1782207 - DNA, 15 bp, Homo sapiens
caaggatactgggca

SEQ ID NO: 1782208 - DNA, 15 bp, Homo sapiens
aaggatactgggcac

SEQ ID NO: 1782209 - DNA, 15 bp, Homo sapiens
aggatactgggcacg

SEQ ID NO: 1782210 - DNA, 15 bp, Homo sapiens
ggatactgggcacgg

SEQ ID NO: 1782211 - DNA, 15 bp, Homo sapiens
gatactgggcacggt

SEQ ID NO: 1782212 - DNA, 15 bp, Homo sapiens
atactgggcacggtg

SEQ ID NO: 1782213 - DNA, 15 bp, Homo sapiens
tactgggcacggtgg

SEQ ID NO: 1782214 - DNA, 15 bp, Homo sapiens
actgggcacggtggc

SEQ ID NO: 1782215 - DNA, 15 bp, Homo sapiens
actttgggaggtcga

SEQ ID NO: 1782216 - DNA, 15 bp, Homo sapiens
ctttgggaggtcgag

SEQ ID NO: 1782217 - DNA, 15 bp, Homo sapiens
tttgggaggtcgagg

SEQ ID NO: 1782218 - DNA, 15 bp, Homo sapiens
ttgggaggtcgaggt

SEQ ID NO: 1782219 - DNA, 15 bp, Homo sapiens
tgggaggtcgaggtg

SEQ ID NO: 1782220 - DNA, 15 bp, Homo sapiens
gggaggtcgaggtgg

SEQ ID NO: 1782221 - DNA, 15 bp, Homo sapiens
ggaggtcgaggtggg

SEQ ID NO: 1782222 - DNA, 15 bp, Homo sapiens
gaggtcgaggtgggc

SEQ ID NO: 1782223 - DNA, 15 bp, Homo sapiens
aggtcgaggtgggca

SEQ ID NO: 1782224 - DNA, 15 bp, Homo sapiens
ggtcgaggtgggcag

SEQ ID NO: 1782225 - DNA, 15 bp, Homo sapiens
gtcgaggtgggcaga

SEQ ID NO: 1782226 - DNA, 15 bp, Homo sapiens
tcgaggtgggcagat

SEQ ID NO: 1782227 - DNA, 15 bp, Homo sapiens
ccaggagttcaagaa

SEQ ID NO: 1782228 - DNA, 15 bp, Homo sapiens
caggagttcaagaac

SEQ ID NO: 1782229 - DNA, 15 bp, Homo sapiens
aggagttcaagaaca

SEQ ID NO: 1782230 - DNA, 15 bp, Homo sapiens
ggagttcaagaacag

SEQ ID NO: 1782231 - DNA, 15 bp, Homo sapiens
gagttcaagaacagc

SEQ ID NO: 1782232 - DNA, 15 bp, Homo sapiens
agttcaagaacagcc

SEQ ID NO: 1782233 - DNA, 15 bp, Homo sapiens
gttcaagaacagcct

SEQ ID NO: 1782234 - DNA, 15 bp, Homo sapiens
ttcaagaacagcctg

SEQ ID NO: 1782235 - DNA, 15 bp, Homo sapiens
tcaagaacagcctgg

SEQ ID NO: 1782236 - DNA, 15 bp, Homo sapiens
caagaacagcctggc

SEQ ID NO: 1782237 - DNA, 15 bp, Homo sapiens
aagaacagcctggcc

SEQ ID NO: 1782238 - DNA, 15 bp, Homo sapiens
gaacagcctggccaa

SEQ ID NO: 1782239 - DNA, 15 bp, Homo sapiens
aacagcctggccaac

SEQ ID NO: 1782240 - DNA, 15 bp, Homo sapiens
acagcctggccaaca

SEQ ID NO: 1782241 - DNA, 15 bp, Homo sapiens
aaaaattatctgggt

SEQ ID NO: 1782242 - DNA, 15 bp, Homo sapiens
aaaattatctgggtg

SEQ ID NO: 1782243 - DNA, 15 bp, Homo sapiens
aaattatctgggtgt

SEQ ID NO: 1782244 - DNA, 15 bp, Homo sapiens
aattatctgggtgtg

SEQ ID NO: 1782245 - DNA, 15 bp, Homo sapiens
attatctgggtgtgg

SEQ ID NO: 1782246 - DNA, 15 bp, Homo sapiens
ttatctgggtgtggt

SEQ ID NO: 1782247 - DNA, 15 bp, Homo sapiens
tatctgggtgtggtg

SEQ ID NO: 1782248 - DNA, 15 bp, Homo sapiens
atctgggtgtggtgg

SEQ ID NO: 1782249 - DNA, 15 bp, Homo sapiens
tctgggtgtggtggc

SEQ ID NO: 1782250 - DNA, 15 bp, Homo sapiens
gtgtggtggcatgcc

SEQ ID NO: 1782251 - DNA, 15 bp, Homo sapiens
tgtggtggcatgccc

SEQ ID NO: 1782252 - DNA, 15 bp, Homo sapiens
gtggtggcatgcccc

SEQ ID NO: 1782253 - DNA, 15 bp, Homo sapiens
tggtggcatgcccct

SEQ ID NO: 1782254 - DNA, 15 bp, Homo sapiens
ggtggcatgcccctg

SEQ ID NO: 1782255 - DNA, 15 bp, Homo sapiens
gtggcatgcccctgt

SEQ ID NO: 1782256 - DNA, 15 bp, Homo sapiens
tggcatgcccctgta

SEQ ID NO: 1782257 - DNA, 15 bp, Homo sapiens
ggcatgcccctgtag

SEQ ID NO: 1782258 - DNA, 15 bp, Homo sapiens
gcatgcccctgtagt

SEQ ID NO: 1782259 - DNA, 15 bp, Homo sapiens
catgcccctgtagtc

SEQ ID NO: 1782260 - DNA, 15 bp, Homo sapiens
atgcccctgtagtcc

SEQ ID NO: 1782261 - DNA, 15 bp, Homo sapiens
tgcccctgtagtccc

SEQ ID NO: 1782262 - DNA, 15 bp, Homo sapiens
gcccctgtagtccca

SEQ ID NO: 1782263 - DNA, 15 bp, Homo sapiens
gtcccagctactcca

SEQ ID NO: 1782264 - DNA, 15 bp, Homo sapiens
tcccagctactccag

SEQ ID NO: 1782265 - DNA, 15 bp, Homo sapiens
cccagctactccaga

SEQ ID NO: 1782266 - DNA, 15 bp, Homo sapiens
ccagctactccagag

SEQ ID NO: 1782267 - DNA, 15 bp, Homo sapiens
cagctactccagagg

SEQ ID NO: 1782268 - DNA, 15 bp, Homo sapiens
agctactccagaggc

SEQ ID NO: 1782269 - DNA, 15 bp, Homo sapiens
gctactccagaggct

SEQ ID NO: 1782270 - DNA, 15 bp, Homo sapiens
ctactccagaggctg

SEQ ID NO: 1782271 - DNA, 15 bp, Homo sapiens
tactccagaggctga

SEQ ID NO: 1782272 - DNA, 15 bp, Homo sapiens
actccagaggctgag

SEQ ID NO: 1782273 - DNA, 15 bp, Homo sapiens
ctccagaggctgagg

SEQ ID NO: 1782274 - DNA, 15 bp, Homo sapiens
tccagaggctgaggc

SEQ ID NO: 1782275 - DNA, 15 bp, Homo sapiens
ccagaggctgaggca

SEQ ID NO: 1782276 - DNA, 15 bp, Homo sapiens
cagaggctgaggcac

SEQ ID NO: 1782277 - DNA, 15 bp, Homo sapiens
agaggctgaggcacg

SEQ ID NO: 1782278 - DNA, 15 bp, Homo sapiens
tgaggcacgagaatc

SEQ ID NO: 1782279 - DNA, 15 bp, Homo sapiens
gaggcacgagaatca

SEQ ID NO: 1782280 - DNA, 15 bp, Homo sapiens
aggcacgagaatcac

SEQ ID NO: 1782281 - DNA, 15 bp, Homo sapiens
ggcacgagaatcacc

SEQ ID NO: 1782282 - DNA, 15 bp, Homo sapiens
gcacgagaatcacct

SEQ ID NO: 1782283 - DNA, 15 bp, Homo sapiens
cacgagaatcaccta

SEQ ID NO: 1782284 - DNA, 15 bp, Homo sapiens
acgagaatcacctaa

SEQ ID NO: 1782285 - DNA, 15 bp, Homo sapiens
cgagaatcacctaaa

SEQ ID NO: 1782286 - DNA, 15 bp, Homo sapiens
gagaatcacctaaac

SEQ ID NO: 1782287 - DNA, 15 bp, Homo sapiens
agaatcacctaaacc

SEQ ID NO: 1782288 - DNA, 15 bp, Homo sapiens
gaatcacctaaaccc

SEQ ID NO: 1782289 - DNA, 15 bp, Homo sapiens
aatcacctaaaccca

SEQ ID NO: 1782290 - DNA, 15 bp, Homo sapiens
atcacctaaacccag

SEQ ID NO: 1782291 - DNA, 15 bp, Homo sapiens
tcacctaaacccagg

SEQ ID NO: 1782292 - DNA, 15 bp, Homo sapiens
cacctaaacccagga

SEQ ID NO: 1782293 - DNA, 15 bp, Homo sapiens
acctaaacccaggag

SEQ ID NO: 1782294 - DNA, 15 bp, Homo sapiens
cctaaacccaggagg

SEQ ID NO: 1782295 - DNA, 15 bp, Homo sapiens
ctaaacccaggaggc

SEQ ID NO: 1782296 - DNA, 15 bp, Homo sapiens
taaacccaggaggca

SEQ ID NO: 1782297 - DNA, 15 bp, Homo sapiens
aaacccaggaggcag

SEQ ID NO: 1782298 - DNA, 15 bp, Homo sapiens
agaggttgcagtgaa

SEQ ID NO: 1782299 - DNA, 15 bp, Homo sapiens
gttgcagtgaactga

SEQ ID NO: 1782300 - DNA, 15 bp, Homo sapiens
ttgcagtgaactgag

SEQ ID NO: 1782301 - DNA, 15 bp, Homo sapiens
tgcagtgaactgaga

SEQ ID NO: 1782302 - DNA, 15 bp, Homo sapiens
gcagtgaactgagat

SEQ ID NO: 1782303 - DNA, 15 bp, Homo sapiens
cagtgaactgagatt

SEQ ID NO: 1782304 - DNA, 15 bp, Homo sapiens
agtgaactgagattg

SEQ ID NO: 1782305 - DNA, 15 bp, Homo sapiens
gtgaactgagattgt

SEQ ID NO: 1782306 - DNA, 15 bp, Homo sapiens
tgaactgagattgtg

SEQ ID NO: 1782307 - DNA, 15 bp, Homo sapiens
gaactgagattgtgc

SEQ ID NO: 1782308 - DNA, 15 bp, Homo sapiens
aactgagattgtgcc

SEQ ID NO: 1782309 - DNA, 15 bp, Homo sapiens
actgagattgtgcca

SEQ ID NO: 1782310 - DNA, 15 bp, Homo sapiens
ctgagattgtgccac

SEQ ID NO: 1782311 - DNA, 15 bp, Homo sapiens
tgagattgtgccact

SEQ ID NO: 1782312 - DNA, 15 bp, Homo sapiens
tgccactgcactcct

SEQ ID NO: 1782313 - DNA, 15 bp, Homo sapiens
gccactgcactcctg

SEQ ID NO: 1782314 - DNA, 15 bp, Homo sapiens
ccactgcactcctgc

SEQ ID NO: 1782315 - DNA, 15 bp, Homo sapiens
cactcctgcctgggc

SEQ ID NO: 1782316 - DNA, 15 bp, Homo sapiens
actcctgcctgggcc

SEQ ID NO: 1782317 - DNA, 15 bp, Homo sapiens
ctcctgcctgggccg

SEQ ID NO: 1782318 - DNA, 15 bp, Homo sapiens
tcctgcctgggccgc

SEQ ID NO: 1782319 - DNA, 15 bp, Homo sapiens
cctgcctgggccgca

SEQ ID NO: 1782320 - DNA, 15 bp, Homo sapiens
ctgcctgggccgcag

SEQ ID NO: 1782321 - DNA, 15 bp, Homo sapiens
tgcctgggccgcaga

SEQ ID NO: 1782322 - DNA, 15 bp, Homo sapiens
gcctgggccgcagag

SEQ ID NO: 1782323 - DNA, 15 bp, Homo sapiens
cctgggccgcagagc

SEQ ID NO: 1782324 - DNA, 15 bp, Homo sapiens
ctgggccgcagagca

SEQ ID NO: 1782325 - DNA, 15 bp, Homo sapiens
tgggccgcagagcaa

SEQ ID NO: 1782326 - DNA, 15 bp, Homo sapiens
gggccgcagagcaag

SEQ ID NO: 1782327 - DNA, 15 bp, Homo sapiens
ggccgcagagcaaga

SEQ ID NO: 1782328 - DNA, 15 bp, Homo sapiens
gccgcagagcaagac

SEQ ID NO: 1782329 - DNA, 15 bp, Homo sapiens
ccgcagagcaagact

SEQ ID NO: 1782330 - DNA, 15 bp, Homo sapiens
cgcagagcaagactg

SEQ ID NO: 1782331 - DNA, 15 bp, Homo sapiens
gcagagcaagactgt

SEQ ID NO: 1782332 - DNA, 15 bp, Homo sapiens
gagcaagactgtctg

SEQ ID NO: 1782333 - DNA, 15 bp, Homo sapiens
agcaagactgtctga

SEQ ID NO: 1782334 - DNA, 15 bp, Homo sapiens
gcaagactgtctgaa

SEQ ID NO: 1782335 - DNA, 15 bp, Homo sapiens
caagactgtctgaaa

SEQ ID NO: 1782336 - DNA, 15 bp, Homo sapiens
aagactgtctgaaaa

SEQ ID NO: 1782337 - DNA, 15 bp, Homo sapiens
agactgtctgaaaaa

SEQ ID NO: 1782338 - DNA, 15 bp, Homo sapiens
gactgtctgaaaaaa

SEQ ID NO: 1782339 - DNA, 15 bp, Homo sapiens
actgtctgaaaaaac

SEQ ID NO: 1782340 - DNA, 15 bp, Homo sapiens
ctgtctgaaaaaaca

SEQ ID NO: 1782341 - DNA, 15 bp, Homo sapiens
tgtctgaaaaaacaa

SEQ ID NO: 1782342 - DNA, 15 bp, Homo sapiens
gtctgaaaaaacaaa

SEQ ID NO: 1782343 - DNA, 15 bp, Homo sapiens
tctgaaaaaacaaaa

SEQ ID NO: 1782344 - DNA, 15 bp, Homo sapiens
ctgaaaaaacaaaaa

SEQ ID NO: 1782345 - DNA, 15 bp, Homo sapiens
tgaaaaaacaaaaag

SEQ ID NO: 1782346 - DNA, 15 bp, Homo sapiens
aaaacaaaaagaaaa

SEQ ID NO: 1782347 - DNA, 15 bp, Homo sapiens
aaacaaaaagaaaaa

SEQ ID NO: 1782348 - DNA, 15 bp, Homo sapiens
aacaaaaagaaaaaa

SEQ ID NO: 1782349 - DNA, 15 bp, Homo sapiens
acaaaaagaaaaaat

SEQ ID NO: 1782350 - DNA, 15 bp, Homo sapiens
caaaaagaaaaaatc

SEQ ID NO: 1782351 - DNA, 15 bp, Homo sapiens
aaaaagaaaaaatca

SEQ ID NO: 1782352 - DNA, 15 bp, Homo sapiens
aaaagaaaaaatcaa

SEQ ID NO: 1782353 - DNA, 15 bp, Homo sapiens
aaagaaaaaatcaaa

SEQ ID NO: 1782354 - DNA, 15 bp, Homo sapiens
aagaaaaaatcaaag

SEQ ID NO: 1782355 - DNA, 15 bp, Homo sapiens
agaaaaaatcaaagg

SEQ ID NO: 1782356 - DNA, 15 bp, Homo sapiens
gaaaaaatcaaagga

SEQ ID NO: 1782357 - DNA, 15 bp, Homo sapiens
aaaaaatcaaaggaa

SEQ ID NO: 1782358 - DNA, 15 bp, Homo sapiens
aaaaatcaaaggaaa

SEQ ID NO: 1782359 - DNA, 15 bp, Homo sapiens
aaaatcaaaggaaac

SEQ ID NO: 1782360 - DNA, 15 bp, Homo sapiens
aaatcaaaggaaaca

SEQ ID NO: 1782361 - DNA, 15 bp, Homo sapiens
aatcaaaggaaacac

SEQ ID NO: 1782362 - DNA, 15 bp, Homo sapiens
atcaaaggaaacaca

SEQ ID NO: 1782363 - DNA, 15 bp, Homo sapiens
tcaaaggaaacacac

SEQ ID NO: 1782364 - DNA, 15 bp, Homo sapiens
caaaggaaacacact

SEQ ID NO: 1782365 - DNA, 15 bp, Homo sapiens
aaaggaaacacactt

SEQ ID NO: 1782366 - DNA, 15 bp, Homo sapiens
aaggaaacacactta

SEQ ID NO: 1782367 - DNA, 15 bp, Homo sapiens
aggaaacacacttac

SEQ ID NO: 1782368 - DNA, 15 bp, Homo sapiens
ggaaacacacttacc

SEQ ID NO: 1782369 - DNA, 15 bp, Homo sapiens
gaaacacacttaccg

SEQ ID NO: 1782370 - DNA, 15 bp, Homo sapiens
aaacacacttaccgg

SEQ ID NO: 1782371 - DNA, 15 bp, Homo sapiens
aacacacttaccggt

SEQ ID NO: 1782372 - DNA, 15 bp, Homo sapiens
acacacttaccggtt

SEQ ID NO: 1782373 - DNA, 15 bp, Homo sapiens
cacacttaccggttt

SEQ ID NO: 1782374 - DNA, 15 bp, Homo sapiens
acacttaccggttta

SEQ ID NO: 1782375 - DNA, 15 bp, Homo sapiens
cacttaccggtttat

SEQ ID NO: 1782376 - DNA, 15 bp, Homo sapiens
acttaccggtttatt

SEQ ID NO: 1782377 - DNA, 15 bp, Homo sapiens
cttaccggtttatta

SEQ ID NO: 1782378 - DNA, 15 bp, Homo sapiens
ttaccggtttattac

SEQ ID NO: 1782379 - DNA, 15 bp, Homo sapiens
taccggtttattaca

SEQ ID NO: 1782380 - DNA, 15 bp, Homo sapiens
accggtttattacaa

SEQ ID NO: 1782381 - DNA, 15 bp, Homo sapiens
ccggtttattacaaa

SEQ ID NO: 1782382 - DNA, 15 bp, Homo sapiens
cggtttattacaaag

SEQ ID NO: 1782383 - DNA, 15 bp, Homo sapiens
ggtttattacaaagg

SEQ ID NO: 1782384 - DNA, 15 bp, Homo sapiens
gtttattacaaagga

SEQ ID NO: 1782385 - DNA, 15 bp, Homo sapiens
tttattacaaaggat

SEQ ID NO: 1782386 - DNA, 15 bp, Homo sapiens
ttattacaaaggata

SEQ ID NO: 1782387 - DNA, 15 bp, Homo sapiens
tattacaaaggatat

SEQ ID NO: 1782388 - DNA, 15 bp, Homo sapiens
attacaaaggatatt

SEQ ID NO: 1782389 - DNA, 15 bp, Homo sapiens
ttacaaaggatattg

SEQ ID NO: 1782390 - DNA, 15 bp, Homo sapiens
tacaaaggatattgc

SEQ ID NO: 1782391 - DNA, 15 bp, Homo sapiens
acaaaggatattgca

SEQ ID NO: 1782392 - DNA, 15 bp, Homo sapiens
caaaggatattgcaa

SEQ ID NO: 1782393 - DNA, 15 bp, Homo sapiens
aaaggatattgcaaa

SEQ ID NO: 1782394 - DNA, 15 bp, Homo sapiens
aaggatattgcaaag

SEQ ID NO: 1782395 - DNA, 15 bp, Homo sapiens
aggatattgcaaagg

SEQ ID NO: 1782396 - DNA, 15 bp, Homo sapiens
ggatattgcaaagga

SEQ ID NO: 1782397 - DNA, 15 bp, Homo sapiens
gatattgcaaaggat

SEQ ID NO: 1782398 - DNA, 15 bp, Homo sapiens
atattgcaaaggata

SEQ ID NO: 1782399 - DNA, 15 bp, Homo sapiens
tattgcaaaggatac

SEQ ID NO: 1782400 - DNA, 15 bp, Homo sapiens
attgcaaaggataca

SEQ ID NO: 1782401 - DNA, 15 bp, Homo sapiens
ttgcaaaggatacag

SEQ ID NO: 1782402 - DNA, 15 bp, Homo sapiens
tgcaaaggatacaga

SEQ ID NO: 1782403 - DNA, 15 bp, Homo sapiens
gcaaaggatacagat

SEQ ID NO: 1782404 - DNA, 15 bp, Homo sapiens
caaaggatacagatg

SEQ ID NO: 1782405 - DNA, 15 bp, Homo sapiens
aaaggatacagatga

SEQ ID NO: 1782406 - DNA, 15 bp, Homo sapiens
aaggatacagatgag

SEQ ID NO: 1782407 - DNA, 15 bp, Homo sapiens
aggatacagatgagg

SEQ ID NO: 1782408 - DNA, 15 bp, Homo sapiens
ggatacagatgagga

SEQ ID NO: 1782409 - DNA, 15 bp, Homo sapiens
gatacagatgaggag

SEQ ID NO: 1782410 - DNA, 15 bp, Homo sapiens
atacagatgaggaga

SEQ ID NO: 1782411 - DNA, 15 bp, Homo sapiens
tacagatgaggagat

SEQ ID NO: 1782412 - DNA, 15 bp, Homo sapiens
acagatgaggagatg

SEQ ID NO: 1782413 - DNA, 15 bp, Homo sapiens
cagatgaggagatgc

SEQ ID NO: 1782414 - DNA, 15 bp, Homo sapiens
agatgaggagatgcg

SEQ ID NO: 1782415 - DNA, 15 bp, Homo sapiens
gatgaggagatgcgt

SEQ ID NO: 1782416 - DNA, 15 bp, Homo sapiens
atgaggagatgcgta

SEQ ID NO: 1782417 - DNA, 15 bp, Homo sapiens
tgaggagatgcgtag

SEQ ID NO: 1782418 - DNA, 15 bp, Homo sapiens
gaggagatgcgtagg

SEQ ID NO: 1782419 - DNA, 15 bp, Homo sapiens
aggagatgcgtaggg

SEQ ID NO: 1782420 - DNA, 15 bp, Homo sapiens
ggagatgcgtagggt

SEQ ID NO: 1782421 - DNA, 15 bp, Homo sapiens
gagatgcgtagggtg

SEQ ID NO: 1782422 - DNA, 15 bp, Homo sapiens
agatgcgtagggtga

SEQ ID NO: 1782423 - DNA, 15 bp, Homo sapiens
gatgcgtagggtgag

SEQ ID NO: 1782424 - DNA, 15 bp, Homo sapiens
atgcgtagggtgagg

SEQ ID NO: 1782425 - DNA, 15 bp, Homo sapiens
tgcgtagggtgaggt

SEQ ID NO: 1782426 - DNA, 15 bp, Homo sapiens
gcgtagggtgaggta

SEQ ID NO: 1782427 - DNA, 15 bp, Homo sapiens
cgtagggtgaggtat

SEQ ID NO: 1782428 - DNA, 15 bp, Homo sapiens
gtagggtgaggtatg

SEQ ID NO: 1782429 - DNA, 15 bp, Homo sapiens
tagggtgaggtatgg

SEQ ID NO: 1782430 - DNA, 15 bp, Homo sapiens
agggtgaggtatggg

SEQ ID NO: 1782431 - DNA, 15 bp, Homo sapiens
gggtgaggtatggga

SEQ ID NO: 1782432 - DNA, 15 bp, Homo sapiens
ggtgaggtatgggag

SEQ ID NO: 1782433 - DNA, 15 bp, Homo sapiens
gtgaggtatgggagc

SEQ ID NO: 1782434 - DNA, 15 bp, Homo sapiens
tgaggtatgggagca

SEQ ID NO: 1782435 - DNA, 15 bp, Homo sapiens
gaggtatgggagcag

SEQ ID NO: 1782436 - DNA, 15 bp, Homo sapiens
aggtatgggagcagg

SEQ ID NO: 1782437 - DNA, 15 bp, Homo sapiens
ggtatgggagcaggg

SEQ ID NO: 1782438 - DNA, 15 bp, Homo sapiens
gtatgggagcagggg

SEQ ID NO: 1782439 - DNA, 15 bp, Homo sapiens
tatgggagcaggggt

SEQ ID NO: 1782440 - DNA, 15 bp, Homo sapiens
atgggagcaggggtg

SEQ ID NO: 1782441 - DNA, 15 bp, Homo sapiens
tgggagcaggggtgc

SEQ ID NO: 1782442 - DNA, 15 bp, Homo sapiens
gggagcaggggtgca

SEQ ID NO: 1782443 - DNA, 15 bp, Homo sapiens
ggagcaggggtgcag

SEQ ID NO: 1782444 - DNA, 15 bp, Homo sapiens
gagcaggggtgcaga

SEQ ID NO: 1782445 - DNA, 15 bp, Homo sapiens
agcaggggtgcagag

SEQ ID NO: 1782446 - DNA, 15 bp, Homo sapiens
gcaggggtgcagagc

SEQ ID NO: 1782447 - DNA, 15 bp, Homo sapiens
caggggtgcagagct

SEQ ID NO: 1782448 - DNA, 15 bp, Homo sapiens
aggggtgcagagctt

SEQ ID NO: 1782449 - DNA, 15 bp, Homo sapiens
ggggtgcagagcttc

SEQ ID NO: 1782450 - DNA, 15 bp, Homo sapiens
gggtgcagagcttcc

SEQ ID NO: 1782451 - DNA, 15 bp, Homo sapiens
ggtgcagagcttcca

SEQ ID NO: 1782452 - DNA, 15 bp, Homo sapiens
gtgcagagcttccat

SEQ ID NO: 1782453 - DNA, 15 bp, Homo sapiens
tgcagagcttccatg

SEQ ID NO: 1782454 - DNA, 15 bp, Homo sapiens
gcagagcttccatgc

SEQ ID NO: 1782455 - DNA, 15 bp, Homo sapiens
cagagcttccatgcc

SEQ ID NO: 1782456 - DNA, 15 bp, Homo sapiens
agagcttccatgccc

SEQ ID NO: 1782457 - DNA, 15 bp, Homo sapiens
gagcttccatgccct

SEQ ID NO: 1782458 - DNA, 15 bp, Homo sapiens
agcttccatgccctc

SEQ ID NO: 1782459 - DNA, 15 bp, Homo sapiens
gcttccatgccctct

SEQ ID NO: 1782460 - DNA, 15 bp, Homo sapiens
cttccatgccctctg

SEQ ID NO: 1782461 - DNA, 15 bp, Homo sapiens
ttccatgccctctgg

SEQ ID NO: 1782462 - DNA, 15 bp, Homo sapiens
tccatgccctctggg

SEQ ID NO: 1782463 - DNA, 15 bp, Homo sapiens
ccatgccctctgggg

SEQ ID NO: 1782464 - DNA, 15 bp, Homo sapiens
catgccctctggggg

SEQ ID NO: 1782465 - DNA, 15 bp, Homo sapiens
atgccctctgggggc

SEQ ID NO: 1782466 - DNA, 15 bp, Homo sapiens
tgccctctgggggcc

SEQ ID NO: 1782467 - DNA, 15 bp, Homo sapiens
gccctctgggggcca

SEQ ID NO: 1782468 - DNA, 15 bp, Homo sapiens
ccctctgggggccac

SEQ ID NO: 1782469 - DNA, 15 bp, Homo sapiens
cctctgggggccaca

SEQ ID NO: 1782470 - DNA, 15 bp, Homo sapiens
ctctgggggccacac

SEQ ID NO: 1782471 - DNA, 15 bp, Homo sapiens
tctgggggccacacc

SEQ ID NO: 1782472 - DNA, 15 bp, Homo sapiens
ctgggggccacaccc

SEQ ID NO: 1782473 - DNA, 15 bp, Homo sapiens
tgggggccacaccct

SEQ ID NO: 1782474 - DNA, 15 bp, Homo sapiens
gggggccacaccctc

SEQ ID NO: 1782475 - DNA, 15 bp, Homo sapiens
ggggccacaccctcc

SEQ ID NO: 1782476 - DNA, 15 bp, Homo sapiens
gggccacaccctcca

SEQ ID NO: 1782477 - DNA, 15 bp, Homo sapiens
ggccacaccctccag

SEQ ID NO: 1782478 - DNA, 15 bp, Homo sapiens
gccacaccctccaga

SEQ ID NO: 1782479 - DNA, 15 bp, Homo sapiens
ccacaccctccagaa

SEQ ID NO: 1782480 - DNA, 15 bp, Homo sapiens
cacaccctccagaaa

SEQ ID NO: 1782481 - DNA, 15 bp, Homo sapiens
acaccctccagaaac

SEQ ID NO: 1782482 - DNA, 15 bp, Homo sapiens
caccctccagaaacc

SEQ ID NO: 1782483 - DNA, 15 bp, Homo sapiens
accctccagaaacct

SEQ ID NO: 1782484 - DNA, 15 bp, Homo sapiens
ccctccagaaacctc

SEQ ID NO: 1782485 - DNA, 15 bp, Homo sapiens
cctccagaaacctcc

SEQ ID NO: 1782486 - DNA, 15 bp, Homo sapiens
ctccagaaacctcca

SEQ ID NO: 1782487 - DNA, 15 bp, Homo sapiens
tccagaaacctccat

SEQ ID NO: 1782488 - DNA, 15 bp, Homo sapiens
ccagaaacctccatg

SEQ ID NO: 1782489 - DNA, 15 bp, Homo sapiens
cagaaacctccatgt

SEQ ID NO: 1782490 - DNA, 15 bp, Homo sapiens
agaaacctccatgtg

SEQ ID NO: 1782491 - DNA, 15 bp, Homo sapiens
gaaacctccatgtgt

SEQ ID NO: 1782492 - DNA, 15 bp, Homo sapiens
aaacctccatgtgtt

SEQ ID NO: 1782493 - DNA, 15 bp, Homo sapiens
aacctccatgtgttc

SEQ ID NO: 1782494 - DNA, 15 bp, Homo sapiens
acctccatgtgttca

SEQ ID NO: 1782495 - DNA, 15 bp, Homo sapiens
cctccatgtgttcag

SEQ ID NO: 1782496 - DNA, 15 bp, Homo sapiens
ctccatgtgttcagc

SEQ ID NO: 1782497 - DNA, 15 bp, Homo sapiens
tccatgtgttcagct

SEQ ID NO: 1782498 - DNA, 15 bp, Homo sapiens
ccatgtgttcagcta

SEQ ID NO: 1782499 - DNA, 15 bp, Homo sapiens
catgtgttcagctat

SEQ ID NO: 1782500 - DNA, 15 bp, Homo sapiens
atgtgttcagctatc

SEQ ID NO: 1782501 - DNA, 15 bp, Homo sapiens
tgtgttcagctatcc

SEQ ID NO: 1782502 - DNA, 15 bp, Homo sapiens
gtgttcagctatcca

SEQ ID NO: 1782503 - DNA, 15 bp, Homo sapiens
tgttcagctatccag

SEQ ID NO: 1782504 - DNA, 15 bp, Homo sapiens
gttcagctatccaga

SEQ ID NO: 1782505 - DNA, 15 bp, Homo sapiens
ttcagctatccagaa

SEQ ID NO: 1782506 - DNA, 15 bp, Homo sapiens
tcagctatccagaag

SEQ ID NO: 1782507 - DNA, 15 bp, Homo sapiens
cagctatccagaagc

SEQ ID NO: 1782508 - DNA, 15 bp, Homo sapiens
agctatccagaagct

SEQ ID NO: 1782509 - DNA, 15 bp, Homo sapiens
gctatccagaagctc

SEQ ID NO: 1782510 - DNA, 15 bp, Homo sapiens
ctatccagaagctct

SEQ ID NO: 1782511 - DNA, 15 bp, Homo sapiens
tatccagaagctctc

SEQ ID NO: 1782512 - DNA, 15 bp, Homo sapiens
atccagaagctctcc

SEQ ID NO: 1782513 - DNA, 15 bp, Homo sapiens
tccagaagctctcct

SEQ ID NO: 1782514 - DNA, 15 bp, Homo sapiens
ccagaagctctccta

SEQ ID NO: 1782515 - DNA, 15 bp, Homo sapiens
cagaagctctcctaa

SEQ ID NO: 1782516 - DNA, 15 bp, Homo sapiens
agaagctctcctaat

SEQ ID NO: 1782517 - DNA, 15 bp, Homo sapiens
gaagctctcctaatc

SEQ ID NO: 1782518 - DNA, 15 bp, Homo sapiens
aagctctcctaatcc

SEQ ID NO: 1782519 - DNA, 15 bp, Homo sapiens
agctctcctaatcca

SEQ ID NO: 1782520 - DNA, 15 bp, Homo sapiens
gctctcctaatccag

SEQ ID NO: 1782521 - DNA, 15 bp, Homo sapiens
ctctcctaatccagt

SEQ ID NO: 1782522 - DNA, 15 bp, Homo sapiens
tctcctaatccagtt

SEQ ID NO: 1782523 - DNA, 15 bp, Homo sapiens
ctcctaatccagttt

SEQ ID NO: 1782524 - DNA, 15 bp, Homo sapiens
tcctaatccagtttt

SEQ ID NO: 1782525 - DNA, 15 bp, Homo sapiens
cctaatccagttttt

SEQ ID NO: 1782526 - DNA, 15 bp, Homo sapiens
ctaatccagttttta

SEQ ID NO: 1782527 - DNA, 15 bp, Homo sapiens
taatccagtttttat

SEQ ID NO: 1782528 - DNA, 15 bp, Homo sapiens
aatccagtttttatg

SEQ ID NO: 1782529 - DNA, 15 bp, Homo sapiens
atccagtttttatga

SEQ ID NO: 1782530 - DNA, 15 bp, Homo sapiens
tccagtttttatgat

SEQ ID NO: 1782531 - DNA, 15 bp, Homo sapiens
ccagtttttatgatg

SEQ ID NO: 1782532 - DNA, 15 bp, Homo sapiens
cagtttttatgatgt

SEQ ID NO: 1782533 - DNA, 15 bp, Homo sapiens
agtttttatgatgtc

SEQ ID NO: 1782534 - DNA, 15 bp, Homo sapiens
gtttttatgatgtca

SEQ ID NO: 1782535 - DNA, 15 bp, Homo sapiens
tttttatgatgtcag

SEQ ID NO: 1782536 - DNA, 15 bp, Homo sapiens
ttttatgatgtcagc

SEQ ID NO: 1782537 - DNA, 15 bp, Homo sapiens
tttatgatgtcagca

SEQ ID NO: 1782538 - DNA, 15 bp, Homo sapiens
ttatgatgtcagcat

SEQ ID NO: 1782539 - DNA, 15 bp, Homo sapiens
tatgatgtcagcatt

SEQ ID NO: 1782540 - DNA, 15 bp, Homo sapiens
atgatgtcagcattg

SEQ ID NO: 1782541 - DNA, 15 bp, Homo sapiens
tgatgtcagcattgg

SEQ ID NO: 1782542 - DNA, 15 bp, Homo sapiens
gatgtcagcattggg

SEQ ID NO: 1782543 - DNA, 15 bp, Homo sapiens
atgtcagcattggga

SEQ ID NO: 1782544 - DNA, 15 bp, Homo sapiens
tgtcagcattgggat

SEQ ID NO: 1782545 - DNA, 15 bp, Homo sapiens
gtcagcattgggatt

SEQ ID NO: 1782546 - DNA, 15 bp, Homo sapiens
tcagcattgggattt

SEQ ID NO: 1782547 - DNA, 15 bp, Homo sapiens
cagcattgggatttt

SEQ ID NO: 1782548 - DNA, 15 bp, Homo sapiens
agcattgggattttt

SEQ ID NO: 1782549 - DNA, 15 bp, Homo sapiens
gcattgggattttta

SEQ ID NO: 1782550 - DNA, 15 bp, Homo sapiens
cattgggatttttat

SEQ ID NO: 1782551 - DNA, 15 bp, Homo sapiens
attgggatttttatg

SEQ ID NO: 1782552 - DNA, 15 bp, Homo sapiens
ttgggatttttatga

SEQ ID NO: 1782553 - DNA, 15 bp, Homo sapiens
tgggatttttatgat

SEQ ID NO: 1782554 - DNA, 15 bp, Homo sapiens
gggatttttatgatg

SEQ ID NO: 1782555 - DNA, 15 bp, Homo sapiens
ggatttttatgatgt

SEQ ID NO: 1782556 - DNA, 15 bp, Homo sapiens
gatttttatgatgtc

SEQ ID NO: 1782557 - DNA, 15 bp, Homo sapiens
atttttatgatgtca

SEQ ID NO: 1782558 - DNA, 15 bp, Homo sapiens
atgatgtcagcattc

SEQ ID NO: 1782559 - DNA, 15 bp, Homo sapiens
tgatgtcagcattcc

SEQ ID NO: 1782560 - DNA, 15 bp, Homo sapiens
gatgtcagcattcct

SEQ ID NO: 1782561 - DNA, 15 bp, Homo sapiens
atgtcagcattcctc

SEQ ID NO: 1782562 - DNA, 15 bp, Homo sapiens
tgtcagcattcctcc

SEQ ID NO: 1782563 - DNA, 15 bp, Homo sapiens
gtcagcattcctccc

SEQ ID NO: 1782564 - DNA, 15 bp, Homo sapiens
tcagcattcctcccc

SEQ ID NO: 1782565 - DNA, 15 bp, Homo sapiens
cagcattcctcccct

SEQ ID NO: 1782566 - DNA, 15 bp, Homo sapiens
agcattcctccccta

SEQ ID NO: 1782567 - DNA, 15 bp, Homo sapiens
gcattcctcccctac

SEQ ID NO: 1782568 - DNA, 15 bp, Homo sapiens
cattcctcccctaca

SEQ ID NO: 1782569 - DNA, 15 bp, Homo sapiens
attcctcccctacac

SEQ ID NO: 1782570 - DNA, 15 bp, Homo sapiens
ttcctcccctacact

SEQ ID NO: 1782571 - DNA, 15 bp, Homo sapiens
tcctcccctacacta

SEQ ID NO: 1782572 - DNA, 15 bp, Homo sapiens
cctcccctacactat

SEQ ID NO: 1782573 - DNA, 15 bp, Homo sapiens
ctcccctacactata

SEQ ID NO: 1782574 - DNA, 15 bp, Homo sapiens
tcccctacactatag

SEQ ID NO: 1782575 - DNA, 15 bp, Homo sapiens
cccctacactatagg

SEQ ID NO: 1782576 - DNA, 15 bp, Homo sapiens
ccctacactataggg

SEQ ID NO: 1782577 - DNA, 15 bp, Homo sapiens
cctacactatagggc

SEQ ID NO: 1782578 - DNA, 15 bp, Homo sapiens
ctacactatagggca

SEQ ID NO: 1782579 - DNA, 15 bp, Homo sapiens
tacactatagggcaa

SEQ ID NO: 1782580 - DNA, 15 bp, Homo sapiens
acactatagggcaaa

SEQ ID NO: 1782581 - DNA, 15 bp, Homo sapiens
cactatagggcaaaa

SEQ ID NO: 1782582 - DNA, 15 bp, Homo sapiens
actatagggcaaaaa

SEQ ID NO: 1782583 - DNA, 15 bp, Homo sapiens
ctatagggcaaaaac

SEQ ID NO: 1782584 - DNA, 15 bp, Homo sapiens
tatagggcaaaaacc

SEQ ID NO: 1782585 - DNA, 15 bp, Homo sapiens
atagggcaaaaacca

SEQ ID NO: 1782586 - DNA, 15 bp, Homo sapiens
tagggcaaaaaccat

SEQ ID NO: 1782587 - DNA, 15 bp, Homo sapiens
agggcaaaaaccatc

SEQ ID NO: 1782588 - DNA, 15 bp, Homo sapiens
gggcaaaaaccatct

SEQ ID NO: 1782589 - DNA, 15 bp, Homo sapiens
ggcaaaaaccatctc

SEQ ID NO: 1782590 - DNA, 15 bp, Homo sapiens
gcaaaaaccatctct

SEQ ID NO: 1782591 - DNA, 15 bp, Homo sapiens
caaaaaccatctctg

SEQ ID NO: 1782592 - DNA, 15 bp, Homo sapiens
aaaaaccatctctgg

SEQ ID NO: 1782593 - DNA, 15 bp, Homo sapiens
aaaaccatctctggg

SEQ ID NO: 1782594 - DNA, 15 bp, Homo sapiens
aaaccatctctgggg

SEQ ID NO: 1782595 - DNA, 15 bp, Homo sapiens
aaccatctctgggga

SEQ ID NO: 1782596 - DNA, 15 bp, Homo sapiens
accatctctggggag

SEQ ID NO: 1782597 - DNA, 15 bp, Homo sapiens
ccatctctggggagg

SEQ ID NO: 1782598 - DNA, 15 bp, Homo sapiens
catctctggggaggg

SEQ ID NO: 1782599 - DNA, 15 bp, Homo sapiens
atctctggggagggt

SEQ ID NO: 1782600 - DNA, 15 bp, Homo sapiens
tctctggggagggtc

SEQ ID NO: 1782601 - DNA, 15 bp, Homo sapiens
ctctggggagggtct

SEQ ID NO: 1782602 - DNA, 15 bp, Homo sapiens
tctggggagggtctt

SEQ ID NO: 1782603 - DNA, 15 bp, Homo sapiens
ctggggagggtctta

SEQ ID NO: 1782604 - DNA, 15 bp, Homo sapiens
tggggagggtcttaa

SEQ ID NO: 1782605 - DNA, 15 bp, Homo sapiens
ggggagggtcttaaa

SEQ ID NO: 1782606 - DNA, 15 bp, Homo sapiens
gggagggtcttaaag

SEQ ID NO: 1782607 - DNA, 15 bp, Homo sapiens
ggagggtcttaaaga

SEQ ID NO: 1782608 - DNA, 15 bp, Homo sapiens
gagggtcttaaagac

SEQ ID NO: 1782609 - DNA, 15 bp, Homo sapiens
agggtcttaaagaca

SEQ ID NO: 1782610 - DNA, 15 bp, Homo sapiens
gggtcttaaagacac

SEQ ID NO: 1782611 - DNA, 15 bp, Homo sapiens
ggtcttaaagacaca

SEQ ID NO: 1782612 - DNA, 15 bp, Homo sapiens
gtcttaaagacacac

SEQ ID NO: 1782613 - DNA, 15 bp, Homo sapiens
tcttaaagacacaca

SEQ ID NO: 1782614 - DNA, 15 bp, Homo sapiens
cttaaagacacacaa

SEQ ID NO: 1782615 - DNA, 15 bp, Homo sapiens
ttaaagacacacaat

SEQ ID NO: 1782616 - DNA, 15 bp, Homo sapiens
taaagacacacaatt

SEQ ID NO: 1782617 - DNA, 15 bp, Homo sapiens
aaagacacacaattt

SEQ ID NO: 1782618 - DNA, 15 bp, Homo sapiens
aagacacacaattta

SEQ ID NO: 1782619 - DNA, 15 bp, Homo sapiens
agacacacaatttac

SEQ ID NO: 1782620 - DNA, 15 bp, Homo sapiens
gacacacaatttaca

SEQ ID NO: 1782621 - DNA, 15 bp, Homo sapiens
acacacaatttacaa

SEQ ID NO: 1782622 - DNA, 15 bp, Homo sapiens
cacacaatttacaat

SEQ ID NO: 1782623 - DNA, 15 bp, Homo sapiens
acacaatttacaatg

SEQ ID NO: 1782624 - DNA, 15 bp, Homo sapiens
cacaatttacaatga

SEQ ID NO: 1782625 - DNA, 15 bp, Homo sapiens
acaatttacaatgat

SEQ ID NO: 1782626 - DNA, 15 bp, Homo sapiens
caatttacaatgatg

SEQ ID NO: 1782627 - DNA, 15 bp, Homo sapiens
aatttacaatgatgg

SEQ ID NO: 1782628 - DNA, 15 bp, Homo sapiens
atttacaatgatggg

SEQ ID NO: 1782629 - DNA, 15 bp, Homo sapiens
tttacaatgatgggg

SEQ ID NO: 1782630 - DNA, 15 bp, Homo sapiens
ttacaatgatggggg

SEQ ID NO: 1782631 - DNA, 15 bp, Homo sapiens
tacaatgatggggga

SEQ ID NO: 1782632 - DNA, 15 bp, Homo sapiens
acaatgatgggggaa

SEQ ID NO: 1782633 - DNA, 15 bp, Homo sapiens
caatgatgggggaaa

SEQ ID NO: 1782634 - DNA, 15 bp, Homo sapiens
aatgatgggggaaaa

SEQ ID NO: 1782635 - DNA, 15 bp, Homo sapiens
atgatgggggaaaaa

SEQ ID NO: 1782636 - DNA, 15 bp, Homo sapiens
tgatgggggaaaaat

SEQ ID NO: 1782637 - DNA, 15 bp, Homo sapiens
gatgggggaaaaatt

SEQ ID NO: 1782638 - DNA, 15 bp, Homo sapiens
atgggggaaaaatta

SEQ ID NO: 1782639 - DNA, 15 bp, Homo sapiens
tgggggaaaaattag

SEQ ID NO: 1782640 - DNA, 15 bp, Homo sapiens
gggggaaaaattaga

SEQ ID NO: 1782641 - DNA, 15 bp, Homo sapiens
ggggaaaaattagag

SEQ ID NO: 1782642 - DNA, 15 bp, Homo sapiens
gggaaaaattagagt

SEQ ID NO: 1782643 - DNA, 15 bp, Homo sapiens
ggaaaaattagagtc

SEQ ID NO: 1782644 - DNA, 15 bp, Homo sapiens
gaaaaattagagtcc

SEQ ID NO: 1782645 - DNA, 15 bp, Homo sapiens
aaaaattagagtcct

SEQ ID NO: 1782646 - DNA, 15 bp, Homo sapiens
aaaattagagtcctg

SEQ ID NO: 1782647 - DNA, 15 bp, Homo sapiens
aaattagagtcctgc

SEQ ID NO: 1782648 - DNA, 15 bp, Homo sapiens
aattagagtcctgcc

SEQ ID NO: 1782649 - DNA, 15 bp, Homo sapiens
attagagtcctgcct

SEQ ID NO: 1782650 - DNA, 15 bp, Homo sapiens
ttagagtcctgcctt

SEQ ID NO: 1782651 - DNA, 15 bp, Homo sapiens
tagagtcctgccttg

SEQ ID NO: 1782652 - DNA, 15 bp, Homo sapiens
agagtcctgccttgg

SEQ ID NO: 1782653 - DNA, 15 bp, Homo sapiens
gagtcctgccttgga

SEQ ID NO: 1782654 - DNA, 15 bp, Homo sapiens
agtcctgccttggaa

SEQ ID NO: 1782655 - DNA, 15 bp, Homo sapiens
gtcctgccttggaac

SEQ ID NO: 1782656 - DNA, 15 bp, Homo sapiens
tcctgccttggaaca

SEQ ID NO: 1782657 - DNA, 15 bp, Homo sapiens
cctgccttggaacag

SEQ ID NO: 1782658 - DNA, 15 bp, Homo sapiens
ctgccttggaacagg

SEQ ID NO: 1782659 - DNA, 15 bp, Homo sapiens
tgccttggaacaggt

SEQ ID NO: 1782660 - DNA, 15 bp, Homo sapiens
gccttggaacaggtt

SEQ ID NO: 1782661 - DNA, 15 bp, Homo sapiens
ccttggaacaggtta

SEQ ID NO: 1782662 - DNA, 15 bp, Homo sapiens
cttggaacaggttaa

SEQ ID NO: 1782663 - DNA, 15 bp, Homo sapiens
ttggaacaggttaaa

SEQ ID NO: 1782664 - DNA, 15 bp, Homo sapiens
tggaacaggttaaag

SEQ ID NO: 1782665 - DNA, 15 bp, Homo sapiens
ggaacaggttaaagg

SEQ ID NO: 1782666 - DNA, 15 bp, Homo sapiens
gaacaggttaaagga

SEQ ID NO: 1782667 - DNA, 15 bp, Homo sapiens
aacaggttaaaggag

SEQ ID NO: 1782668 - DNA, 15 bp, Homo sapiens
acaggttaaaggagg

SEQ ID NO: 1782669 - DNA, 15 bp, Homo sapiens
caggttaaaggaggg

SEQ ID NO: 1782670 - DNA, 15 bp, Homo sapiens
aggttaaaggagggc

SEQ ID NO: 1782671 - DNA, 15 bp, Homo sapiens
ggttaaaggagggca

SEQ ID NO: 1782672 - DNA, 15 bp, Homo sapiens
gttaaaggagggcaa

SEQ ID NO: 1782673 - DNA, 15 bp, Homo sapiens
ttaaaggagggcaag

SEQ ID NO: 1782674 - DNA, 15 bp, Homo sapiens
taaaggagggcaaga

SEQ ID NO: 1782675 - DNA, 15 bp, Homo sapiens
aaaggagggcaagag

SEQ ID NO: 1782676 - DNA, 15 bp, Homo sapiens
aaggagggcaagaga

SEQ ID NO: 1782677 - DNA, 15 bp, Homo sapiens
aggagggcaagagaa

SEQ ID NO: 1782678 - DNA, 15 bp, Homo sapiens
ggagggcaagagaag

SEQ ID NO: 1782679 - DNA, 15 bp, Homo sapiens
gagggcaagagaagg

SEQ ID NO: 1782680 - DNA, 15 bp, Homo sapiens
agggcaagagaaggt

SEQ ID NO: 1782681 - DNA, 15 bp, Homo sapiens
gggcaagagaaggtc

SEQ ID NO: 1782682 - DNA, 15 bp, Homo sapiens
ggcaagagaaggtcc

SEQ ID NO: 1782683 - DNA, 15 bp, Homo sapiens
gcaagagaaggtccg

SEQ ID NO: 1782684 - DNA, 15 bp, Homo sapiens
caagagaaggtccga

SEQ ID NO: 1782685 - DNA, 15 bp, Homo sapiens
aagagaaggtccgag

SEQ ID NO: 1782686 - DNA, 15 bp, Homo sapiens
agagaaggtccgagg

SEQ ID NO: 1782687 - DNA, 15 bp, Homo sapiens
gagaaggtccgaggc

SEQ ID NO: 1782688 - DNA, 15 bp, Homo sapiens
agaaggtccgaggcc

SEQ ID NO: 1782689 - DNA, 15 bp, Homo sapiens
gaaggtccgaggcct

SEQ ID NO: 1782690 - DNA, 15 bp, Homo sapiens
aaggtccgaggcctg

SEQ ID NO: 1782691 - DNA, 15 bp, Homo sapiens
aggtccgaggcctgc

SEQ ID NO: 1782692 - DNA, 15 bp, Homo sapiens
ggtccgaggcctgcc

SEQ ID NO: 1782693 - DNA, 15 bp, Homo sapiens
gtccgaggcctgccc

SEQ ID NO: 1782694 - DNA, 15 bp, Homo sapiens
tccgaggcctgcccc

SEQ ID NO: 1782695 - DNA, 15 bp, Homo sapiens
ccgaggcctgcccct

SEQ ID NO: 1782696 - DNA, 15 bp, Homo sapiens
cgaggcctgcccctg

SEQ ID NO: 1782697 - DNA, 15 bp, Homo sapiens
gaggcctgcccctga

SEQ ID NO: 1782698 - DNA, 15 bp, Homo sapiens
aggcctgcccctgag

SEQ ID NO: 1782699 - DNA, 15 bp, Homo sapiens
ggcctgcccctgagg

SEQ ID NO: 1782700 - DNA, 15 bp, Homo sapiens
gcctgcccctgaggc

SEQ ID NO: 1782701 - DNA, 15 bp, Homo sapiens
cctgcccctgaggcc

SEQ ID NO: 1782702 - DNA, 15 bp, Homo sapiens
ctgcccctgaggcct

SEQ ID NO: 1782703 - DNA, 15 bp, Homo sapiens
tgcccctgaggccta

SEQ ID NO: 1782704 - DNA, 15 bp, Homo sapiens
gcccctgaggcctac

SEQ ID NO: 1782705 - DNA, 15 bp, Homo sapiens
cccctgaggcctacc

SEQ ID NO: 1782706 - DNA, 15 bp, Homo sapiens
ccctgaggcctacca

SEQ ID NO: 1782707 - DNA, 15 bp, Homo sapiens
cctgaggcctaccac

SEQ ID NO: 1782708 - DNA, 15 bp, Homo sapiens
ctgaggcctaccaca

SEQ ID NO: 1782709 - DNA, 15 bp, Homo sapiens
tgaggcctaccacac

SEQ ID NO: 1782710 - DNA, 15 bp, Homo sapiens
gaggcctaccacacc

SEQ ID NO: 1782711 - DNA, 15 bp, Homo sapiens
aggcctaccacacca

SEQ ID NO: 1782712 - DNA, 15 bp, Homo sapiens
ggcctaccacaccaa

SEQ ID NO: 1782713 - DNA, 15 bp, Homo sapiens
gcctaccacaccaaa

SEQ ID NO: 1782714 - DNA, 15 bp, Homo sapiens
cctaccacaccaaac

SEQ ID NO: 1782715 - DNA, 15 bp, Homo sapiens
ctaccacaccaaacg

SEQ ID NO: 1782716 - DNA, 15 bp, Homo sapiens
taccacaccaaacgt

SEQ ID NO: 1782717 - DNA, 15 bp, Homo sapiens
accacaccaaacgtt

SEQ ID NO: 1782718 - DNA, 15 bp, Homo sapiens
ccacaccaaacgtta

SEQ ID NO: 1782719 - DNA, 15 bp, Homo sapiens
cacaccaaacgttat

SEQ ID NO: 1782720 - DNA, 15 bp, Homo sapiens
acaccaaacgttata

SEQ ID NO: 1782721 - DNA, 15 bp, Homo sapiens
caccaaacgttataa

SEQ ID NO: 1782722 - DNA, 15 bp, Homo sapiens
accaaacgttataac

SEQ ID NO: 1782723 - DNA, 15 bp, Homo sapiens
ccaaacgttataaca

SEQ ID NO: 1782724 - DNA, 15 bp, Homo sapiens
caaacgttataacaa

SEQ ID NO: 1782725 - DNA, 15 bp, Homo sapiens
aaacgttataacaac

SEQ ID NO: 1782726 - DNA, 15 bp, Homo sapiens
aacgttataacaaca

SEQ ID NO: 1782727 - DNA, 15 bp, Homo sapiens
acgttataacaacac

SEQ ID NO: 1782728 - DNA, 15 bp, Homo sapiens
cgttataacaacaca

SEQ ID NO: 1782729 - DNA, 15 bp, Homo sapiens
gttataacaacacaa

SEQ ID NO: 1782730 - DNA, 15 bp, Homo sapiens
ttataacaacacaac

SEQ ID NO: 1782731 - DNA, 15 bp, Homo sapiens
tataacaacacaaca

SEQ ID NO: 1782732 - DNA, 15 bp, Homo sapiens
ataacaacacaacag

SEQ ID NO: 1782733 - DNA, 15 bp, Homo sapiens
taacaacacaacagt

SEQ ID NO: 1782734 - DNA, 15 bp, Homo sapiens
aacaacacaacagtt

SEQ ID NO: 1782735 - DNA, 15 bp, Homo sapiens
acaacacaacagttt

SEQ ID NO: 1782736 - DNA, 15 bp, Homo sapiens
caacacaacagtttt

SEQ ID NO: 1782737 - DNA, 15 bp, Homo sapiens
aacacaacagttttt

SEQ ID NO: 1782738 - DNA, 15 bp, Homo sapiens
acacaacagttttta

SEQ ID NO: 1782739 - DNA, 15 bp, Homo sapiens
cacaacagtttttat

SEQ ID NO: 1782740 - DNA, 15 bp, Homo sapiens
acaacagtttttata

SEQ ID NO: 1782741 - DNA, 15 bp, Homo sapiens
caacagtttttatat

SEQ ID NO: 1782742 - DNA, 15 bp, Homo sapiens
aacagtttttatata

SEQ ID NO: 1782743 - DNA, 15 bp, Homo sapiens
acagtttttatatat

SEQ ID NO: 1782744 - DNA, 15 bp, Homo sapiens
cagtttttatatatt

SEQ ID NO: 1782745 - DNA, 15 bp, Homo sapiens
agtttttatatattt

SEQ ID NO: 1782746 - DNA, 15 bp, Homo sapiens
tttttatatattttc

SEQ ID NO: 1782747 - DNA, 15 bp, Homo sapiens
ttttatatattttca

SEQ ID NO: 1782748 - DNA, 15 bp, Homo sapiens
tttatatattttcag

SEQ ID NO: 1782749 - DNA, 15 bp, Homo sapiens
ttatatattttcagt

SEQ ID NO: 1782750 - DNA, 15 bp, Homo sapiens
tatatattttcagtt

SEQ ID NO: 1782751 - DNA, 15 bp, Homo sapiens
atatattttcagttt

SEQ ID NO: 1782752 - DNA, 15 bp, Homo sapiens
tatattttcagtttt

SEQ ID NO: 1782753 - DNA, 15 bp, Homo sapiens
atattttcagttttg

SEQ ID NO: 1782754 - DNA, 15 bp, Homo sapiens
tattttcagttttgc

SEQ ID NO: 1782755 - DNA, 15 bp, Homo sapiens
attttcagttttgca

SEQ ID NO: 1782756 - DNA, 15 bp, Homo sapiens
ttttcagttttgcat

SEQ ID NO: 1782757 - DNA, 15 bp, Homo sapiens
tttcagttttgcata

SEQ ID NO: 1782758 - DNA, 15 bp, Homo sapiens
ttcagttttgcataa

SEQ ID NO: 1782759 - DNA, 15 bp, Homo sapiens
tcagttttgcataat

SEQ ID NO: 1782760 - DNA, 15 bp, Homo sapiens
cagttttgcataata

SEQ ID NO: 1782761 - DNA, 15 bp, Homo sapiens
agttttgcataatat

SEQ ID NO: 1782762 - DNA, 15 bp, Homo sapiens
gttttgcataatatg

SEQ ID NO: 1782763 - DNA, 15 bp, Homo sapiens
ttttgcataatatga

SEQ ID NO: 1782764 - DNA, 15 bp, Homo sapiens
tttgcataatatgaa

SEQ ID NO: 1782765 - DNA, 15 bp, Homo sapiens
ttgcataatatgaag

SEQ ID NO: 1782766 - DNA, 15 bp, Homo sapiens
tgcataatatgaagt

SEQ ID NO: 1782767 - DNA, 15 bp, Homo sapiens
gcataatatgaagtt

SEQ ID NO: 1782768 - DNA, 15 bp, Homo sapiens
cataatatgaagtta

SEQ ID NO: 1782769 - DNA, 15 bp, Homo sapiens
ataatatgaagttaa

SEQ ID NO: 1782770 - DNA, 15 bp, Homo sapiens
taatatgaagttaaa

SEQ ID NO: 1782771 - DNA, 15 bp, Homo sapiens
aatatgaagttaaag

SEQ ID NO: 1782772 - DNA, 15 bp, Homo sapiens
atatgaagttaaaga

SEQ ID NO: 1782773 - DNA, 15 bp, Homo sapiens
tatgaagttaaagac

SEQ ID NO: 1782774 - DNA, 15 bp, Homo sapiens
atgaagttaaagact

SEQ ID NO: 1782775 - DNA, 15 bp, Homo sapiens
tgaagttaaagactt

SEQ ID NO: 1782776 - DNA, 15 bp, Homo sapiens
gaagttaaagactta

SEQ ID NO: 1782777 - DNA, 15 bp, Homo sapiens
aagttaaagacttaa

SEQ ID NO: 1782778 - DNA, 15 bp, Homo sapiens
agttaaagacttaag

SEQ ID NO: 1782779 - DNA, 15 bp, Homo sapiens
gttaaagacttaagt

SEQ ID NO: 1782780 - DNA, 15 bp, Homo sapiens
ttaaagacttaagta

SEQ ID NO: 1782781 - DNA, 15 bp, Homo sapiens
taaagacttaagtaa

SEQ ID NO: 1782782 - DNA, 15 bp, Homo sapiens
aaagacttaagtaaa

SEQ ID NO: 1782783 - DNA, 15 bp, Homo sapiens
aagacttaagtaaat

SEQ ID NO: 1782784 - DNA, 15 bp, Homo sapiens
agacttaagtaaatt

SEQ ID NO: 1782785 - DNA, 15 bp, Homo sapiens
gacttaagtaaattg

SEQ ID NO: 1782786 - DNA, 15 bp, Homo sapiens
acttaagtaaattga

SEQ ID NO: 1782787 - DNA, 15 bp, Homo sapiens
cttaagtaaattgag

SEQ ID NO: 1782788 - DNA, 15 bp, Homo sapiens
ttaagtaaattgagt

SEQ ID NO: 1782789 - DNA, 15 bp, Homo sapiens
taagtaaattgagta

SEQ ID NO: 1782790 - DNA, 15 bp, Homo sapiens
aagtaaattgagtaa

SEQ ID NO: 1782791 - DNA, 15 bp, Homo sapiens
agtaaattgagtaaa

SEQ ID NO: 1782792 - DNA, 15 bp, Homo sapiens
gtaaattgagtaaat

SEQ ID NO: 1782793 - DNA, 15 bp, Homo sapiens
taaattgagtaaata

SEQ ID NO: 1782794 - DNA, 15 bp, Homo sapiens
aaattgagtaaatag

SEQ ID NO: 1782795 - DNA, 15 bp, Homo sapiens
aattgagtaaatagt

SEQ ID NO: 1782796 - DNA, 15 bp, Homo sapiens
attgagtaaatagta

SEQ ID NO: 1782797 - DNA, 15 bp, Homo sapiens
ttgagtaaatagtag

SEQ ID NO: 1782798 - DNA, 15 bp, Homo sapiens
tgagtaaatagtagt

SEQ ID NO: 1782799 - DNA, 15 bp, Homo sapiens
gagtaaatagtagtt

SEQ ID NO: 1782800 - DNA, 15 bp, Homo sapiens
agtaaatagtagttt

SEQ ID NO: 1782801 - DNA, 15 bp, Homo sapiens
gtaaatagtagtttt

SEQ ID NO: 1782802 - DNA, 15 bp, Homo sapiens
taaatagtagttttt

SEQ ID NO: 1782803 - DNA, 15 bp, Homo sapiens
aaatagtagtttttt

SEQ ID NO: 1782804 - DNA, 15 bp, Homo sapiens
aatagtagttttttt

SEQ ID NO: 1782805 - DNA, 15 bp, Homo sapiens
atagtagtttttttt

SEQ ID NO: 1782806 - DNA, 15 bp, Homo sapiens
tagtagttttttttt

SEQ ID NO: 1782807 - DNA, 15 bp, Homo sapiens
agtagtttttttttt

SEQ ID NO: 1782808 - DNA, 15 bp, Homo sapiens
ttttttttaatttca

SEQ ID NO: 1782809 - DNA, 15 bp, Homo sapiens
tttttttaatttcac

SEQ ID NO: 1782810 - DNA, 15 bp, Homo sapiens
ttttttaatttcaca

SEQ ID NO: 1782811 - DNA, 15 bp, Homo sapiens
tttttaatttcacag

SEQ ID NO: 1782812 - DNA, 15 bp, Homo sapiens
ttttaatttcacaga

SEQ ID NO: 1782813 - DNA, 15 bp, Homo sapiens
tttaatttcacagat

SEQ ID NO: 1782814 - DNA, 15 bp, Homo sapiens
ttaatttcacagatc

SEQ ID NO: 1782815 - DNA, 15 bp, Homo sapiens
taatttcacagatca

SEQ ID NO: 1782816 - DNA, 15 bp, Homo sapiens
aatttcacagatcaa

SEQ ID NO: 1782817 - DNA, 15 bp, Homo sapiens
atttcacagatcaat

SEQ ID NO: 1782818 - DNA, 15 bp, Homo sapiens
tttcacagatcaata

SEQ ID NO: 1782819 - DNA, 15 bp, Homo sapiens
ttcacagatcaatag

SEQ ID NO: 1782820 - DNA, 15 bp, Homo sapiens
tcacagatcaataga

SEQ ID NO: 1782821 - DNA, 15 bp, Homo sapiens
cacagatcaatagag

SEQ ID NO: 1782822 - DNA, 15 bp, Homo sapiens
acagatcaatagagt

SEQ ID NO: 1782823 - DNA, 15 bp, Homo sapiens
cagatcaatagagtt

SEQ ID NO: 1782824 - DNA, 15 bp, Homo sapiens
agatcaatagagtta

SEQ ID NO: 1782825 - DNA, 15 bp, Homo sapiens
gatcaatagagttaa

SEQ ID NO: 1782826 - DNA, 15 bp, Homo sapiens
atcaatagagttaac

SEQ ID NO: 1782827 - DNA, 15 bp, Homo sapiens
tcaatagagttaact

SEQ ID NO: 1782828 - DNA, 15 bp, Homo sapiens
caatagagttaactc

SEQ ID NO: 1782829 - DNA, 15 bp, Homo sapiens
aatagagttaactcc

SEQ ID NO: 1782830 - DNA, 15 bp, Homo sapiens
atagagttaactcct

SEQ ID NO: 1782831 - DNA, 15 bp, Homo sapiens
tagagttaactcctg

SEQ ID NO: 1782832 - DNA, 15 bp, Homo sapiens
agagttaactcctga

SEQ ID NO: 1782833 - DNA, 15 bp, Homo sapiens
gagttaactcctgag

SEQ ID NO: 1782834 - DNA, 15 bp, Homo sapiens
agttaactcctgagt

SEQ ID NO: 1782835 - DNA, 15 bp, Homo sapiens
gttaactcctgagtt

SEQ ID NO: 1782836 - DNA, 15 bp, Homo sapiens
ttaactcctgagtta

SEQ ID NO: 1782837 - DNA, 15 bp, Homo sapiens
taactcctgagttat

SEQ ID NO: 1782838 - DNA, 15 bp, Homo sapiens
aactcctgagttata

SEQ ID NO: 1782839 - DNA, 15 bp, Homo sapiens
actcctgagttatat

SEQ ID NO: 1782840 - DNA, 15 bp, Homo sapiens
ctcctgagttatatg

SEQ ID NO: 1782841 - DNA, 15 bp, Homo sapiens
tcctgagttatatgc

SEQ ID NO: 1782842 - DNA, 15 bp, Homo sapiens
cctgagttatatgca

SEQ ID NO: 1782843 - DNA, 15 bp, Homo sapiens
ctgagttatatgcat

SEQ ID NO: 1782844 - DNA, 15 bp, Homo sapiens
tgagttatatgcata

SEQ ID NO: 1782845 - DNA, 15 bp, Homo sapiens
gagttatatgcatac

SEQ ID NO: 1782846 - DNA, 15 bp, Homo sapiens
agttatatgcataca

SEQ ID NO: 1782847 - DNA, 15 bp, Homo sapiens
gttatatgcatacaa

SEQ ID NO: 1782848 - DNA, 15 bp, Homo sapiens
ttatatgcatacaac

SEQ ID NO: 1782849 - DNA, 15 bp, Homo sapiens
tatatgcatacaacc

SEQ ID NO: 1782850 - DNA, 15 bp, Homo sapiens
atatgcatacaaccc

SEQ ID NO: 1782851 - DNA, 15 bp, Homo sapiens
tatgcatacaacccc

SEQ ID NO: 1782852 - DNA, 15 bp, Homo sapiens
atgcatacaacccca

SEQ ID NO: 1782853 - DNA, 15 bp, Homo sapiens
tgcatacaaccccaa

SEQ ID NO: 1782854 - DNA, 15 bp, Homo sapiens
gcatacaaccccaaa

SEQ ID NO: 1782855 - DNA, 15 bp, Homo sapiens
catacaaccccaaag

SEQ ID NO: 1782856 - DNA, 15 bp, Homo sapiens
atacaaccccaaagt

SEQ ID NO: 1782857 - DNA, 15 bp, Homo sapiens
tacaaccccaaagtt

SEQ ID NO: 1782858 - DNA, 15 bp, Homo sapiens
acaaccccaaagttg

SEQ ID NO: 1782859 - DNA, 15 bp, Homo sapiens
caaccccaaagttgt

SEQ ID NO: 1782860 - DNA, 15 bp, Homo sapiens
aaccccaaagttgtt

SEQ ID NO: 1782861 - DNA, 15 bp, Homo sapiens
accccaaagttgttt

SEQ ID NO: 1782862 - DNA, 15 bp, Homo sapiens
ccccaaagttgtttg

SEQ ID NO: 1782863 - DNA, 15 bp, Homo sapiens
cccaaagttgtttgc

SEQ ID NO: 1782864 - DNA, 15 bp, Homo sapiens
ccaaagttgtttgct

SEQ ID NO: 1782865 - DNA, 15 bp, Homo sapiens
caaagttgtttgctg

SEQ ID NO: 1782866 - DNA, 15 bp, Homo sapiens
aaagttgtttgctgt

SEQ ID NO: 1782867 - DNA, 15 bp, Homo sapiens
aagttgtttgctgtc

SEQ ID NO: 1782868 - DNA, 15 bp, Homo sapiens
agttgtttgctgtct

SEQ ID NO: 1782869 - DNA, 15 bp, Homo sapiens
gttgtttgctgtctg

SEQ ID NO: 1782870 - DNA, 15 bp, Homo sapiens
ttgtttgctgtctgg

SEQ ID NO: 1782871 - DNA, 15 bp, Homo sapiens
tgtttgctgtctgga

SEQ ID NO: 1782872 - DNA, 15 bp, Homo sapiens
gtttgctgtctggag

SEQ ID NO: 1782873 - DNA, 15 bp, Homo sapiens
tttgctgtctggagc

SEQ ID NO: 1782874 - DNA, 15 bp, Homo sapiens
ttgctgtctggagct

SEQ ID NO: 1782875 - DNA, 15 bp, Homo sapiens
tgctgtctggagctg

SEQ ID NO: 1782876 - DNA, 15 bp, Homo sapiens
gctgtctggagctgt

SEQ ID NO: 1782877 - DNA, 15 bp, Homo sapiens
ctgtctggagctgtg

SEQ ID NO: 1782878 - DNA, 15 bp, Homo sapiens
tgtctggagctgtgc

SEQ ID NO: 1782879 - DNA, 15 bp, Homo sapiens
gtctggagctgtgcc

SEQ ID NO: 1782880 - DNA, 15 bp, Homo sapiens
tctggagctgtgcct

SEQ ID NO: 1782881 - DNA, 15 bp, Homo sapiens
ctggagctgtgccta

SEQ ID NO: 1782882 - DNA, 15 bp, Homo sapiens
tggagctgtgcctac

SEQ ID NO: 1782883 - DNA, 15 bp, Homo sapiens
ggagctgtgcctaca

SEQ ID NO: 1782884 - DNA, 15 bp, Homo sapiens
gagctgtgcctacac

SEQ ID NO: 1782885 - DNA, 15 bp, Homo sapiens
agctgtgcctacacc

SEQ ID NO: 1782886 - DNA, 15 bp, Homo sapiens
gctgtgcctacaccc

SEQ ID NO: 1782887 - DNA, 15 bp, Homo sapiens
ctgtgcctacacccg

SEQ ID NO: 1782888 - DNA, 15 bp, Homo sapiens
tgtgcctacacccgc

SEQ ID NO: 1782889 - DNA, 15 bp, Homo sapiens
gtgcctacacccgcc

SEQ ID NO: 1782890 - DNA, 15 bp, Homo sapiens
tgcctacacccgcct

SEQ ID NO: 1782891 - DNA, 15 bp, Homo sapiens
gcctacacccgcctg

SEQ ID NO: 1782892 - DNA, 15 bp, Homo sapiens
cctacacccgcctgg

SEQ ID NO: 1782893 - DNA, 15 bp, Homo sapiens
ctacacccgcctggc

SEQ ID NO: 1782894 - DNA, 15 bp, Homo sapiens
tacacccgcctggca

SEQ ID NO: 1782895 - DNA, 15 bp, Homo sapiens
acacccgcctggcat

SEQ ID NO: 1782896 - DNA, 15 bp, Homo sapiens
cacccgcctggcata

SEQ ID NO: 1782897 - DNA, 15 bp, Homo sapiens
acccgcctggcatat

SEQ ID NO: 1782898 - DNA, 15 bp, Homo sapiens
cccgcctggcatatt

SEQ ID NO: 1782899 - DNA, 15 bp, Homo sapiens
ccgcctggcatattc

SEQ ID NO: 1782900 - DNA, 15 bp, Homo sapiens
cgcctggcatattct

SEQ ID NO: 1782901 - DNA, 15 bp, Homo sapiens
gcctggcatattctt

SEQ ID NO: 1782902 - DNA, 15 bp, Homo sapiens
cctggcatattcttg

SEQ ID NO: 1782903 - DNA, 15 bp, Homo sapiens
ctggcatattcttga

SEQ ID NO: 1782904 - DNA, 15 bp, Homo sapiens
tggcatattcttgag

SEQ ID NO: 1782905 - DNA, 15 bp, Homo sapiens
ggcatattcttgaga

SEQ ID NO: 1782906 - DNA, 15 bp, Homo sapiens
gcatattcttgagac

SEQ ID NO: 1782907 - DNA, 15 bp, Homo sapiens
catattcttgagaca

SEQ ID NO: 1782908 - DNA, 15 bp, Homo sapiens
atattcttgagacat

SEQ ID NO: 1782909 - DNA, 15 bp, Homo sapiens
tattcttgagacatt

SEQ ID NO: 1782910 - DNA, 15 bp, Homo sapiens
attcttgagacattg

SEQ ID NO: 1782911 - DNA, 15 bp, Homo sapiens
ttcttgagacattgg

SEQ ID NO: 1782912 - DNA, 15 bp, Homo sapiens
tcttgagacattgga

SEQ ID NO: 1782913 - DNA, 15 bp, Homo sapiens
cttgagacattggag

SEQ ID NO: 1782914 - DNA, 15 bp, Homo sapiens
ttgagacattggagc

SEQ ID NO: 1782915 - DNA, 15 bp, Homo sapiens
tgagacattggagct

SEQ ID NO: 1782916 - DNA, 15 bp, Homo sapiens
gagacattggagcta

SEQ ID NO: 1782917 - DNA, 15 bp, Homo sapiens
agacattggagctag

SEQ ID NO: 1782918 - DNA, 15 bp, Homo sapiens
gacattggagctagg

SEQ ID NO: 1782919 - DNA, 15 bp, Homo sapiens
acattggagctagga

SEQ ID NO: 1782920 - DNA, 15 bp, Homo sapiens
cattggagctaggaa

SEQ ID NO: 1782921 - DNA, 15 bp, Homo sapiens
attggagctaggaag

SEQ ID NO: 1782922 - DNA, 15 bp, Homo sapiens
ttggagctaggaagt

SEQ ID NO: 1782923 - DNA, 15 bp, Homo sapiens
tggagctaggaagtt

SEQ ID NO: 1782924 - DNA, 15 bp, Homo sapiens
ggagctaggaagttg

SEQ ID NO: 1782925 - DNA, 15 bp, Homo sapiens
gagctaggaagttgg

SEQ ID NO: 1782926 - DNA, 15 bp, Homo sapiens
agctaggaagttgga

SEQ ID NO: 1782927 - DNA, 15 bp, Homo sapiens
gctaggaagttggaa

SEQ ID NO: 1782928 - DNA, 15 bp, Homo sapiens
ctaggaagttggaaa

SEQ ID NO: 1782929 - DNA, 15 bp, Homo sapiens
taggaagttggaaat

SEQ ID NO: 1782930 - DNA, 15 bp, Homo sapiens
aggaagttggaaatt

SEQ ID NO: 1782931 - DNA, 15 bp, Homo sapiens
ggaagttggaaattg

SEQ ID NO: 1782932 - DNA, 15 bp, Homo sapiens
gaagttggaaattga

SEQ ID NO: 1782933 - DNA, 15 bp, Homo sapiens
aagttggaaattgat

SEQ ID NO: 1782934 - DNA, 15 bp, Homo sapiens
agttggaaattgata

SEQ ID NO: 1782935 - DNA, 15 bp, Homo sapiens
gttggaaattgatag

SEQ ID NO: 1782936 - DNA, 15 bp, Homo sapiens
ttggaaattgataga

SEQ ID NO: 1782937 - DNA, 15 bp, Homo sapiens
tggaaattgatagaa

SEQ ID NO: 1782938 - DNA, 15 bp, Homo sapiens
ggaaattgatagaaa

SEQ ID NO: 1782939 - DNA, 15 bp, Homo sapiens
gaaattgatagaaaa

SEQ ID NO: 1782940 - DNA, 15 bp, Homo sapiens
aaattgatagaaaat

SEQ ID NO: 1782941 - DNA, 15 bp, Homo sapiens
aattgatagaaaatt

SEQ ID NO: 1782942 - DNA, 15 bp, Homo sapiens
attgatagaaaattt

SEQ ID NO: 1782943 - DNA, 15 bp, Homo sapiens
ttgatagaaaatttt

SEQ ID NO: 1782944 - DNA, 15 bp, Homo sapiens
tgatagaaaattttg

SEQ ID NO: 1782945 - DNA, 15 bp, Homo sapiens
gatagaaaattttgt

SEQ ID NO: 1782946 - DNA, 15 bp, Homo sapiens
atagaaaattttgtc

SEQ ID NO: 1782947 - DNA, 15 bp, Homo sapiens
tagaaaattttgtca

SEQ ID NO: 1782948 - DNA, 15 bp, Homo sapiens
agaaaattttgtcac

SEQ ID NO: 1782949 - DNA, 15 bp, Homo sapiens
gaaaattttgtcact

SEQ ID NO: 1782950 - DNA, 15 bp, Homo sapiens
aaaattttgtcactt

SEQ ID NO: 1782951 - DNA, 15 bp, Homo sapiens
aaattttgtcacttg

SEQ ID NO: 1782952 - DNA, 15 bp, Homo sapiens
aattttgtcacttgt

SEQ ID NO: 1782953 - DNA, 15 bp, Homo sapiens
attttgtcacttgta

SEQ ID NO: 1782954 - DNA, 15 bp, Homo sapiens
ttttgtcacttgtaa

SEQ ID NO: 1782955 - DNA, 15 bp, Homo sapiens
tttgtcacttgtaac

SEQ ID NO: 1782956 - DNA, 15 bp, Homo sapiens
ttgtcacttgtaaca

SEQ ID NO: 1782957 - DNA, 15 bp, Homo sapiens
tgtcacttgtaacag

SEQ ID NO: 1782958 - DNA, 15 bp, Homo sapiens
gtcacttgtaacaga

SEQ ID NO: 1782959 - DNA, 15 bp, Homo sapiens
tcacttgtaacagag

SEQ ID NO: 1782960 - DNA, 15 bp, Homo sapiens
cacttgtaacagagc

SEQ ID NO: 1782961 - DNA, 15 bp, Homo sapiens
acttgtaacagagct

SEQ ID NO: 1782962 - DNA, 15 bp, Homo sapiens
cttgtaacagagcta

SEQ ID NO: 1782963 - DNA, 15 bp, Homo sapiens
ttgtaacagagctaa

SEQ ID NO: 1782964 - DNA, 15 bp, Homo sapiens
tgtaacagagctaaa

SEQ ID NO: 1782965 - DNA, 15 bp, Homo sapiens
gtaacagagctaaag

SEQ ID NO: 1782966 - DNA, 15 bp, Homo sapiens
taacagagctaaagc

SEQ ID NO: 1782967 - DNA, 15 bp, Homo sapiens
aacagagctaaagca

SEQ ID NO: 1782968 - DNA, 15 bp, Homo sapiens
acagagctaaagcaa

SEQ ID NO: 1782969 - DNA, 15 bp, Homo sapiens
cagagctaaagcaat

SEQ ID NO: 1782970 - DNA, 15 bp, Homo sapiens
agagctaaagcaata

SEQ ID NO: 1782971 - DNA, 15 bp, Homo sapiens
gagctaaagcaatat

SEQ ID NO: 1782972 - DNA, 15 bp, Homo sapiens
agctaaagcaatatg

SEQ ID NO: 1782973 - DNA, 15 bp, Homo sapiens
gctaaagcaatatgg

SEQ ID NO: 1782974 - DNA, 15 bp, Homo sapiens
ctaaagcaatatgga

SEQ ID NO: 1782975 - DNA, 15 bp, Homo sapiens
taaagcaatatggat

SEQ ID NO: 1782976 - DNA, 15 bp, Homo sapiens
aaagcaatatggatt

SEQ ID NO: 1782977 - DNA, 15 bp, Homo sapiens
aagcaatatggatta

SEQ ID NO: 1782978 - DNA, 15 bp, Homo sapiens
agcaatatggattat

SEQ ID NO: 1782979 - DNA, 15 bp, Homo sapiens
gcaatatggattatg

SEQ ID NO: 1782980 - DNA, 15 bp, Homo sapiens
caatatggattatgg

SEQ ID NO: 1782981 - DNA, 15 bp, Homo sapiens
aatatggattatggt

SEQ ID NO: 1782982 - DNA, 15 bp, Homo sapiens
atatggattatggtg

SEQ ID NO: 1782983 - DNA, 15 bp, Homo sapiens
tatggattatggtgg

SEQ ID NO: 1782984 - DNA, 15 bp, Homo sapiens
atggattatggtgga

SEQ ID NO: 1782985 - DNA, 15 bp, Homo sapiens
tggattatggtggac

SEQ ID NO: 1782986 - DNA, 15 bp, Homo sapiens
ggattatggtggacc

SEQ ID NO: 1782987 - DNA, 15 bp, Homo sapiens
gattatggtggaccc

SEQ ID NO: 1782988 - DNA, 15 bp, Homo sapiens
attatggtggaccct

SEQ ID NO: 1782989 - DNA, 15 bp, Homo sapiens
ttatggtggacccta

SEQ ID NO: 1782990 - DNA, 15 bp, Homo sapiens
tatggtggaccctat

SEQ ID NO: 1782991 - DNA, 15 bp, Homo sapiens
atggtggaccctatc

SEQ ID NO: 1782992 - DNA, 15 bp, Homo sapiens
tggtggaccctatca

SEQ ID NO: 1782993 - DNA, 15 bp, Homo sapiens
ggtggaccctatcac

SEQ ID NO: 1782994 - DNA, 15 bp, Homo sapiens
gtggaccctatcact

SEQ ID NO: 1782995 - DNA, 15 bp, Homo sapiens
tggaccctatcactt

SEQ ID NO: 1782996 - DNA, 15 bp, Homo sapiens
ggaccctatcacttg

SEQ ID NO: 1782997 - DNA, 15 bp, Homo sapiens
gaccctatcacttgg

SEQ ID NO: 1782998 - DNA, 15 bp, Homo sapiens
accctatcacttgga

SEQ ID NO: 1782999 - DNA, 15 bp, Homo sapiens
ccctatcacttggaa

SEQ ID NO: 1783000 - DNA, 15 bp, Homo sapiens
cctatcacttggaat

SEQ ID NO: 1783001 - DNA, 15 bp, Homo sapiens
ctatcacttggaata

SEQ ID NO: 1783002 - DNA, 15 bp, Homo sapiens
tatcacttggaatac

SEQ ID NO: 1783003 - DNA, 15 bp, Homo sapiens
atcacttggaatact

SEQ ID NO: 1783004 - DNA, 15 bp, Homo sapiens
tcacttggaatactt

SEQ ID NO: 1783005 - DNA, 15 bp, Homo sapiens
cacttggaatacttt

SEQ ID NO: 1783006 - DNA, 15 bp, Homo sapiens
acttggaatactttc

SEQ ID NO: 1783007 - DNA, 15 bp, Homo sapiens
cttggaatactttcc

SEQ ID NO: 1783008 - DNA, 15 bp, Homo sapiens
ttggaatactttcct

SEQ ID NO: 1783009 - DNA, 15 bp, Homo sapiens
tggaatactttcctg

SEQ ID NO: 1783010 - DNA, 15 bp, Homo sapiens
ggaatactttcctga

SEQ ID NO: 1783011 - DNA, 15 bp, Homo sapiens
gaatactttcctgaa

SEQ ID NO: 1783012 - DNA, 15 bp, Homo sapiens
aatactttcctgaaa

SEQ ID NO: 1783013 - DNA, 15 bp, Homo sapiens
atactttcctgaaag

SEQ ID NO: 1783014 - DNA, 15 bp, Homo sapiens
tactttcctgaaagc

SEQ ID NO: 1783015 - DNA, 15 bp, Homo sapiens
actttcctgaaagca

SEQ ID NO: 1783016 - DNA, 15 bp, Homo sapiens
ctttcctgaaagcaa

SEQ ID NO: 1783017 - DNA, 15 bp, Homo sapiens
tttcctgaaagcaac

SEQ ID NO: 1783018 - DNA, 15 bp, Homo sapiens
ttcctgaaagcaaca

SEQ ID NO: 1783019 - DNA, 15 bp, Homo sapiens
tcctgaaagcaacac

SEQ ID NO: 1783020 - DNA, 15 bp, Homo sapiens
cctgaaagcaacaca

SEQ ID NO: 1783021 - DNA, 15 bp, Homo sapiens
ctgaaagcaacacag

SEQ ID NO: 1783022 - DNA, 15 bp, Homo sapiens
tgaaagcaacacagg

SEQ ID NO: 1783023 - DNA, 15 bp, Homo sapiens
gaaagcaacacaggt

SEQ ID NO: 1783024 - DNA, 15 bp, Homo sapiens
aaagcaacacaggtc

SEQ ID NO: 1783025 - DNA, 15 bp, Homo sapiens
aagcaacacaggtca

SEQ ID NO: 1783026 - DNA, 15 bp, Homo sapiens
agcaacacaggtcat

SEQ ID NO: 1783027 - DNA, 15 bp, Homo sapiens
gcaacacaggtcatc

SEQ ID NO: 1783028 - DNA, 15 bp, Homo sapiens
caacacaggtcatca

SEQ ID NO: 1783029 - DNA, 15 bp, Homo sapiens
aacacaggtcatcat

SEQ ID NO: 1783030 - DNA, 15 bp, Homo sapiens
acacaggtcatcatt

SEQ ID NO: 1783031 - DNA, 15 bp, Homo sapiens
cacaggtcatcattg

SEQ ID NO: 1783032 - DNA, 15 bp, Homo sapiens
acaggtcatcattgc

SEQ ID NO: 1783033 - DNA, 15 bp, Homo sapiens
caggtcatcattgcc

SEQ ID NO: 1783034 - DNA, 15 bp, Homo sapiens
aggtcatcattgcca

SEQ ID NO: 1783035 - DNA, 15 bp, Homo sapiens
ggtcatcattgccaa

SEQ ID NO: 1783036 - DNA, 15 bp, Homo sapiens
gtcatcattgccaaa

SEQ ID NO: 1783037 - DNA, 15 bp, Homo sapiens
tcatcattgccaaat

SEQ ID NO: 1783038 - DNA, 15 bp, Homo sapiens
catcattgccaaata

SEQ ID NO: 1783039 - DNA, 15 bp, Homo sapiens
atcattgccaaatat

SEQ ID NO: 1783040 - DNA, 15 bp, Homo sapiens
tcattgccaaatatt

SEQ ID NO: 1783041 - DNA, 15 bp, Homo sapiens
cattgccaaatattt

SEQ ID NO: 1783042 - DNA, 15 bp, Homo sapiens
attgccaaatatttt

SEQ ID NO: 1783043 - DNA, 15 bp, Homo sapiens
ttgccaaatattttt

SEQ ID NO: 1783044 - DNA, 15 bp, Homo sapiens
tgccaaatattttta

SEQ ID NO: 1783045 - DNA, 15 bp, Homo sapiens
gccaaatatttttag

SEQ ID NO: 1783046 - DNA, 15 bp, Homo sapiens
ccaaatatttttagg

SEQ ID NO: 1783047 - DNA, 15 bp, Homo sapiens
caaatatttttagga

SEQ ID NO: 1783048 - DNA, 15 bp, Homo sapiens
aaatatttttaggac

SEQ ID NO: 1783049 - DNA, 15 bp, Homo sapiens
aatatttttaggacc

SEQ ID NO: 1783050 - DNA, 15 bp, Homo sapiens
atatttttaggaccc

SEQ ID NO: 1783051 - DNA, 15 bp, Homo sapiens
tatttttaggacccc

SEQ ID NO: 1783052 - DNA, 15 bp, Homo sapiens
atttttaggacccca

SEQ ID NO: 1783053 - DNA, 15 bp, Homo sapiens
tttttaggaccccaa

SEQ ID NO: 1783054 - DNA, 15 bp, Homo sapiens
ttttaggaccccaat

SEQ ID NO: 1783055 - DNA, 15 bp, Homo sapiens
tttaggaccccaatt

SEQ ID NO: 1783056 - DNA, 15 bp, Homo sapiens
ttaggaccccaattc

SEQ ID NO: 1783057 - DNA, 15 bp, Homo sapiens
taggaccccaattct

SEQ ID NO: 1783058 - DNA, 15 bp, Homo sapiens
aggaccccaattctg

SEQ ID NO: 1783059 - DNA, 15 bp, Homo sapiens
ggaccccaattctgt

SEQ ID NO: 1783060 - DNA, 15 bp, Homo sapiens
gaccccaattctgta

SEQ ID NO: 1783061 - DNA, 15 bp, Homo sapiens
accccaattctgtac

SEQ ID NO: 1783062 - DNA, 15 bp, Homo sapiens
ccccaattctgtact

SEQ ID NO: 1783063 - DNA, 15 bp, Homo sapiens
cccaattctgtacta

SEQ ID NO: 1783064 - DNA, 15 bp, Homo sapiens
ccaattctgtactaa

SEQ ID NO: 1783065 - DNA, 15 bp, Homo sapiens
caattctgtactaag

SEQ ID NO: 1783066 - DNA, 15 bp, Homo sapiens
aattctgtactaagt

SEQ ID NO: 1783067 - DNA, 15 bp, Homo sapiens
attctgtactaagtg

SEQ ID NO: 1783068 - DNA, 15 bp, Homo sapiens
ttctgtactaagtgc

SEQ ID NO: 1783069 - DNA, 15 bp, Homo sapiens
tctgtactaagtgct

SEQ ID NO: 1783070 - DNA, 15 bp, Homo sapiens
ctgtactaagtgcta

SEQ ID NO: 1783071 - DNA, 15 bp, Homo sapiens
tgtactaagtgctag

SEQ ID NO: 1783072 - DNA, 15 bp, Homo sapiens
gtactaagtgctagt

SEQ ID NO: 1783073 - DNA, 15 bp, Homo sapiens
tactaagtgctagtg

SEQ ID NO: 1783074 - DNA, 15 bp, Homo sapiens
actaagtgctagtga

SEQ ID NO: 1783075 - DNA, 15 bp, Homo sapiens
ctaagtgctagtgat

SEQ ID NO: 1783076 - DNA, 15 bp, Homo sapiens
taagtgctagtgatg

SEQ ID NO: 1783077 - DNA, 15 bp, Homo sapiens
aagtgctagtgatgt

SEQ ID NO: 1783078 - DNA, 15 bp, Homo sapiens
agtgctagtgatgtg

SEQ ID NO: 1783079 - DNA, 15 bp, Homo sapiens
gtgctagtgatgtga

SEQ ID NO: 1783080 - DNA, 15 bp, Homo sapiens
tgctagtgatgtgat

SEQ ID NO: 1783081 - DNA, 15 bp, Homo sapiens
gctagtgatgtgata

SEQ ID NO: 1783082 - DNA, 15 bp, Homo sapiens
ctagtgatgtgatag

SEQ ID NO: 1783083 - DNA, 15 bp, Homo sapiens
tagtgatgtgatagg

SEQ ID NO: 1783084 - DNA, 15 bp, Homo sapiens
agtgatgtgatagga

SEQ ID NO: 1783085 - DNA, 15 bp, Homo sapiens
gtgatgtgataggaa

SEQ ID NO: 1783086 - DNA, 15 bp, Homo sapiens
tgatgtgataggaag

SEQ ID NO: 1783087 - DNA, 15 bp, Homo sapiens
gatgtgataggaagc

SEQ ID NO: 1783088 - DNA, 15 bp, Homo sapiens
atgtgataggaagcc

SEQ ID NO: 1783089 - DNA, 15 bp, Homo sapiens
tgtgataggaagcca

SEQ ID NO: 1783090 - DNA, 15 bp, Homo sapiens
gtgataggaagccag

SEQ ID NO: 1783091 - DNA, 15 bp, Homo sapiens
tgataggaagccaga

SEQ ID NO: 1783092 - DNA, 15 bp, Homo sapiens
gataggaagccagac

SEQ ID NO: 1783093 - DNA, 15 bp, Homo sapiens
ataggaagccagaca

SEQ ID NO: 1783094 - DNA, 15 bp, Homo sapiens
taggaagccagacac

SEQ ID NO: 1783095 - DNA, 15 bp, Homo sapiens
aggaagccagacaca

SEQ ID NO: 1783096 - DNA, 15 bp, Homo sapiens
ggaagccagacacaa

SEQ ID NO: 1783097 - DNA, 15 bp, Homo sapiens
gaagccagacacaat

SEQ ID NO: 1783098 - DNA, 15 bp, Homo sapiens
aagccagacacaatt

SEQ ID NO: 1783099 - DNA, 15 bp, Homo sapiens
agccagacacaattg

SEQ ID NO: 1783100 - DNA, 15 bp, Homo sapiens
gccagacacaattga

SEQ ID NO: 1783101 - DNA, 15 bp, Homo sapiens
ccagacacaattgaa

SEQ ID NO: 1783102 - DNA, 15 bp, Homo sapiens
cagacacaattgaac

SEQ ID NO: 1783103 - DNA, 15 bp, Homo sapiens
agacacaattgaact

SEQ ID NO: 1783104 - DNA, 15 bp, Homo sapiens
gacacaattgaacta

SEQ ID NO: 1783105 - DNA, 15 bp, Homo sapiens
acacaattgaactag

SEQ ID NO: 1783106 - DNA, 15 bp, Homo sapiens
cacaattgaactagc

SEQ ID NO: 1783107 - DNA, 15 bp, Homo sapiens
acaattgaactagct

SEQ ID NO: 1783108 - DNA, 15 bp, Homo sapiens
caattgaactagcta

SEQ ID NO: 1783109 - DNA, 15 bp, Homo sapiens
aattgaactagctat

SEQ ID NO: 1783110 - DNA, 15 bp, Homo sapiens
attgaactagctatc

SEQ ID NO: 1783111 - DNA, 15 bp, Homo sapiens
ttgaactagctatct

SEQ ID NO: 1783112 - DNA, 15 bp, Homo sapiens
tgaactagctatctc

SEQ ID NO: 1783113 - DNA, 15 bp, Homo sapiens
gaactagctatctct

SEQ ID NO: 1783114 - DNA, 15 bp, Homo sapiens
aactagctatctcta

SEQ ID NO: 1783115 - DNA, 15 bp, Homo sapiens
actagctatctctat

SEQ ID NO: 1783116 - DNA, 15 bp, Homo sapiens
ctagctatctctata

SEQ ID NO: 1783117 - DNA, 15 bp, Homo sapiens
tagctatctctatat

SEQ ID NO: 1783118 - DNA, 15 bp, Homo sapiens
agctatctctatatt

SEQ ID NO: 1783119 - DNA, 15 bp, Homo sapiens
gctatctctatatta

SEQ ID NO: 1783120 - DNA, 15 bp, Homo sapiens
ctatctctatattag

SEQ ID NO: 1783121 - DNA, 15 bp, Homo sapiens
tatctctatattagt

SEQ ID NO: 1783122 - DNA, 15 bp, Homo sapiens
atctctatattagtg

SEQ ID NO: 1783123 - DNA, 15 bp, Homo sapiens
tctctatattagtga

SEQ ID NO: 1783124 - DNA, 15 bp, Homo sapiens
ctctatattagtgac

SEQ ID NO: 1783125 - DNA, 15 bp, Homo sapiens
tctatattagtgact

SEQ ID NO: 1783126 - DNA, 15 bp, Homo sapiens
ctatattagtgactt

SEQ ID NO: 1783127 - DNA, 15 bp, Homo sapiens
tatattagtgactta

SEQ ID NO: 1783128 - DNA, 15 bp, Homo sapiens
atattagtgacttat

SEQ ID NO: 1783129 - DNA, 15 bp, Homo sapiens
tattagtgacttatc

SEQ ID NO: 1783130 - DNA, 15 bp, Homo sapiens
attagtgacttatcc

SEQ ID NO: 1783131 - DNA, 15 bp, Homo sapiens
ttagtgacttatcct

SEQ ID NO: 1783132 - DNA, 15 bp, Homo sapiens
tagtgacttatccta

SEQ ID NO: 1783133 - DNA, 15 bp, Homo sapiens
agtgacttatcctaa

SEQ ID NO: 1783134 - DNA, 15 bp, Homo sapiens
gtgacttatcctaaa

SEQ ID NO: 1783135 - DNA, 15 bp, Homo sapiens
tgacttatcctaaaa

SEQ ID NO: 1783136 - DNA, 15 bp, Homo sapiens
gacttatcctaaaac

SEQ ID NO: 1783137 - DNA, 15 bp, Homo sapiens
acttatcctaaaaca

SEQ ID NO: 1783138 - DNA, 15 bp, Homo sapiens
cttatcctaaaacag

SEQ ID NO: 1783139 - DNA, 15 bp, Homo sapiens
ttatcctaaaacaga

SEQ ID NO: 1783140 - DNA, 15 bp, Homo sapiens
tatcctaaaacagag

SEQ ID NO: 1783141 - DNA, 15 bp, Homo sapiens
atcctaaaacagagt

SEQ ID NO: 1783142 - DNA, 15 bp, Homo sapiens
tcctaaaacagagtt

SEQ ID NO: 1783143 - DNA, 15 bp, Homo sapiens
cctaaaacagagttt

SEQ ID NO: 1783144 - DNA, 15 bp, Homo sapiens
ctaaaacagagtttc

SEQ ID NO: 1783145 - DNA, 15 bp, Homo sapiens
taaaacagagtttct

SEQ ID NO: 1783146 - DNA, 15 bp, Homo sapiens
aaaacagagtttctg

SEQ ID NO: 1783147 - DNA, 15 bp, Homo sapiens
aaacagagtttctgt

SEQ ID NO: 1783148 - DNA, 15 bp, Homo sapiens
aacagagtttctgtt

SEQ ID NO: 1783149 - DNA, 15 bp, Homo sapiens
acagagtttctgttg

SEQ ID NO: 1783150 - DNA, 15 bp, Homo sapiens
cagagtttctgttgt

SEQ ID NO: 1783151 - DNA, 15 bp, Homo sapiens
agagtttctgttgta

SEQ ID NO: 1783152 - DNA, 15 bp, Homo sapiens
gagtttctgttgtaa

SEQ ID NO: 1783153 - DNA, 15 bp, Homo sapiens
agtttctgttgtaat

SEQ ID NO: 1783154 - DNA, 15 bp, Homo sapiens
gtttctgttgtaatt

SEQ ID NO: 1783155 - DNA, 15 bp, Homo sapiens
tttctgttgtaattg

SEQ ID NO: 1783156 - DNA, 15 bp, Homo sapiens
ttctgttgtaattgg

SEQ ID NO: 1783157 - DNA, 15 bp, Homo sapiens
tctgttgtaattggt

SEQ ID NO: 1783158 - DNA, 15 bp, Homo sapiens
ctgttgtaattggtt

SEQ ID NO: 1783159 - DNA, 15 bp, Homo sapiens
tgttgtaattggttt

SEQ ID NO: 1783160 - DNA, 15 bp, Homo sapiens
gttgtaattggttta

SEQ ID NO: 1783161 - DNA, 15 bp, Homo sapiens
ttgtaattggtttac

SEQ ID NO: 1783162 - DNA, 15 bp, Homo sapiens
tgtaattggtttact

SEQ ID NO: 1783163 - DNA, 15 bp, Homo sapiens
gtaattggtttactg

SEQ ID NO: 1783164 - DNA, 15 bp, Homo sapiens
taattggtttactgt

SEQ ID NO: 1783165 - DNA, 15 bp, Homo sapiens
aattggtttactgtt

SEQ ID NO: 1783166 - DNA, 15 bp, Homo sapiens
attggtttactgttt

SEQ ID NO: 1783167 - DNA, 15 bp, Homo sapiens
ttggtttactgtttc

SEQ ID NO: 1783168 - DNA, 15 bp, Homo sapiens
tggtttactgtttct

SEQ ID NO: 1783169 - DNA, 15 bp, Homo sapiens
ggtttactgtttctc

SEQ ID NO: 1783170 - DNA, 15 bp, Homo sapiens
gtttactgtttctct

SEQ ID NO: 1783171 - DNA, 15 bp, Homo sapiens
tttactgtttctctt

SEQ ID NO: 1783172 - DNA, 15 bp, Homo sapiens
ttactgtttctctta

SEQ ID NO: 1783173 - DNA, 15 bp, Homo sapiens
tactgtttctcttag

SEQ ID NO: 1783174 - DNA, 15 bp, Homo sapiens
actgtttctcttaga

SEQ ID NO: 1783175 - DNA, 15 bp, Homo sapiens
ctgtttctcttagaa

SEQ ID NO: 1783176 - DNA, 15 bp, Homo sapiens
tgtttctcttagaat

SEQ ID NO: 1783177 - DNA, 15 bp, Homo sapiens
gtttctcttagaata

SEQ ID NO: 1783178 - DNA, 15 bp, Homo sapiens
tttctcttagaatat

SEQ ID NO: 1783179 - DNA, 15 bp, Homo sapiens
ttctcttagaatatt

SEQ ID NO: 1783180 - DNA, 15 bp, Homo sapiens
tctcttagaatattt

SEQ ID NO: 1783181 - DNA, 15 bp, Homo sapiens
ctcttagaatattta

SEQ ID NO: 1783182 - DNA, 15 bp, Homo sapiens
tcttagaatatttaa

SEQ ID NO: 1783183 - DNA, 15 bp, Homo sapiens
cttagaatatttaaa

SEQ ID NO: 1783184 - DNA, 15 bp, Homo sapiens
ttagaatatttaaac

SEQ ID NO: 1783185 - DNA, 15 bp, Homo sapiens
tagaatatttaaacg

SEQ ID NO: 1783186 - DNA, 15 bp, Homo sapiens
agaatatttaaacgt

SEQ ID NO: 1783187 - DNA, 15 bp, Homo sapiens
gaatatttaaacgtt

SEQ ID NO: 1783188 - DNA, 15 bp, Homo sapiens
aatatttaaacgttt

SEQ ID NO: 1783189 - DNA, 15 bp, Homo sapiens
atatttaaacgtttt

SEQ ID NO: 1783190 - DNA, 15 bp, Homo sapiens
tatttaaacgtttta

SEQ ID NO: 1783191 - DNA, 15 bp, Homo sapiens
atttaaacgttttac

SEQ ID NO: 1783192 - DNA, 15 bp, Homo sapiens
tttaaacgttttacc

SEQ ID NO: 1783193 - DNA, 15 bp, Homo sapiens
ttaaacgttttacca

SEQ ID NO: 1783194 - DNA, 15 bp, Homo sapiens
taaacgttttaccat

SEQ ID NO: 1783195 - DNA, 15 bp, Homo sapiens
aaacgttttaccatg

SEQ ID NO: 1783196 - DNA, 15 bp, Homo sapiens
aacgttttaccatgg

SEQ ID NO: 1783197 - DNA, 15 bp, Homo sapiens
acgttttaccatggt

SEQ ID NO: 1783198 - DNA, 15 bp, Homo sapiens
cgttttaccatggtc

SEQ ID NO: 1783199 - DNA, 15 bp, Homo sapiens
gttttaccatggtct

SEQ ID NO: 1783200 - DNA, 15 bp, Homo sapiens
ttttaccatggtctt

SEQ ID NO: 1783201 - DNA, 15 bp, Homo sapiens
tttaccatggtcttt

SEQ ID NO: 1783202 - DNA, 15 bp, Homo sapiens
ttaccatggtctttc

SEQ ID NO: 1783203 - DNA, 15 bp, Homo sapiens
taccatggtctttca

SEQ ID NO: 1783204 - DNA, 15 bp, Homo sapiens
accatggtctttcag

SEQ ID NO: 1783205 - DNA, 15 bp, Homo sapiens
ccatggtctttcaga

SEQ ID NO: 1783206 - DNA, 15 bp, Homo sapiens
catggtctttcagat

SEQ ID NO: 1783207 - DNA, 15 bp, Homo sapiens
atggtctttcagatt

SEQ ID NO: 1783208 - DNA, 15 bp, Homo sapiens
tggtctttcagattc

SEQ ID NO: 1783209 - DNA, 15 bp, Homo sapiens
ggtctttcagattct

SEQ ID NO: 1783210 - DNA, 15 bp, Homo sapiens
gtctttcagattctg

SEQ ID NO: 1783211 - DNA, 15 bp, Homo sapiens
tctttcagattctgc

SEQ ID NO: 1783212 - DNA, 15 bp, Homo sapiens
ctttcagattctgcg

SEQ ID NO: 1783213 - DNA, 15 bp, Homo sapiens
tttcagattctgcgt

SEQ ID NO: 1783214 - DNA, 15 bp, Homo sapiens
ttcagattctgcgtg

SEQ ID NO: 1783215 - DNA, 15 bp, Homo sapiens
tcagattctgcgtga

SEQ ID NO: 1783216 - DNA, 15 bp, Homo sapiens
cagattctgcgtgat

SEQ ID NO: 1783217 - DNA, 15 bp, Homo sapiens
agattctgcgtgatc

SEQ ID NO: 1783218 - DNA, 15 bp, Homo sapiens
gattctgcgtgatca

SEQ ID NO: 1783219 - DNA, 15 bp, Homo sapiens
attctgcgtgatcat

SEQ ID NO: 1783220 - DNA, 15 bp, Homo sapiens
ttctgcgtgatcata

SEQ ID NO: 1783221 - DNA, 15 bp, Homo sapiens
tctgcgtgatcatac

SEQ ID NO: 1783222 - DNA, 15 bp, Homo sapiens
ctgcgtgatcataca

SEQ ID NO: 1783223 - DNA, 15 bp, Homo sapiens
tgcgtgatcatacag

SEQ ID NO: 1783224 - DNA, 15 bp, Homo sapiens
gcgtgatcatacagc

SEQ ID NO: 1783225 - DNA, 15 bp, Homo sapiens
cgtgatcatacagca

SEQ ID NO: 1783226 - DNA, 15 bp, Homo sapiens
gtgatcatacagcaa

SEQ ID NO: 1783227 - DNA, 15 bp, Homo sapiens
tgatcatacagcaac

SEQ ID NO: 1783228 - DNA, 15 bp, Homo sapiens
gatcatacagcaacc

SEQ ID NO: 1783229 - DNA, 15 bp, Homo sapiens
atcatacagcaacct

SEQ ID NO: 1783230 - DNA, 15 bp, Homo sapiens
tcatacagcaacctc

SEQ ID NO: 1783231 - DNA, 15 bp, Homo sapiens
catacagcaacctct

SEQ ID NO: 1783232 - DNA, 15 bp, Homo sapiens
atacagcaacctctt

SEQ ID NO: 1783233 - DNA, 15 bp, Homo sapiens
tacagcaacctcttc

SEQ ID NO: 1783234 - DNA, 15 bp, Homo sapiens
acagcaacctcttct

SEQ ID NO: 1783235 - DNA, 15 bp, Homo sapiens
cagcaacctcttctt

SEQ ID NO: 1783236 - DNA, 15 bp, Homo sapiens
agcaacctcttcttt

SEQ ID NO: 1783237 - DNA, 15 bp, Homo sapiens
gcaacctcttcttta

SEQ ID NO: 1783238 - DNA, 15 bp, Homo sapiens
caacctcttctttag

SEQ ID NO: 1783239 - DNA, 15 bp, Homo sapiens
aacctcttctttagc

SEQ ID NO: 1783240 - DNA, 15 bp, Homo sapiens
acctcttctttagca

SEQ ID NO: 1783241 - DNA, 15 bp, Homo sapiens
cctcttctttagcaa

SEQ ID NO: 1783242 - DNA, 15 bp, Homo sapiens
ctcttctttagcaac

SEQ ID NO: 1783243 - DNA, 15 bp, Homo sapiens
tcttctttagcaacc

SEQ ID NO: 1783244 - DNA, 15 bp, Homo sapiens
cttctttagcaacct

SEQ ID NO: 1783245 - DNA, 15 bp, Homo sapiens
ttctttagcaacctc

SEQ ID NO: 1783246 - DNA, 15 bp, Homo sapiens
tctttagcaacctct

SEQ ID NO: 1783247 - DNA, 15 bp, Homo sapiens
ctttagcaacctctc

SEQ ID NO: 1783248 - DNA, 15 bp, Homo sapiens
tttagcaacctctcc

SEQ ID NO: 1783249 - DNA, 15 bp, Homo sapiens
ttagcaacctctcca

SEQ ID NO: 1783250 - DNA, 15 bp, Homo sapiens
tagcaacctctccac

SEQ ID NO: 1783251 - DNA, 15 bp, Homo sapiens
agcaacctctccact

SEQ ID NO: 1783252 - DNA, 15 bp, Homo sapiens
gcaacctctccacta

SEQ ID NO: 1783253 - DNA, 15 bp, Homo sapiens
caacctctccactat

SEQ ID NO: 1783254 - DNA, 15 bp, Homo sapiens
aacctctccactatc

SEQ ID NO: 1783255 - DNA, 15 bp, Homo sapiens
acctctccactatcc

SEQ ID NO: 1783256 - DNA, 15 bp, Homo sapiens
cctctccactatccc

SEQ ID NO: 1783257 - DNA, 15 bp, Homo sapiens
ctctccactatccca

SEQ ID NO: 1783258 - DNA, 15 bp, Homo sapiens
tctccactatcccac

SEQ ID NO: 1783259 - DNA, 15 bp, Homo sapiens
ctccactatcccacc

SEQ ID NO: 1783260 - DNA, 15 bp, Homo sapiens
tccactatcccaccc

SEQ ID NO: 1783261 - DNA, 15 bp, Homo sapiens
ccactatcccacccg

SEQ ID NO: 1783262 - DNA, 15 bp, Homo sapiens
cactatcccacccgg

SEQ ID NO: 1783263 - DNA, 15 bp, Homo sapiens
actatcccacccggg

SEQ ID NO: 1783264 - DNA, 15 bp, Homo sapiens
ctatcccacccgggt

SEQ ID NO: 1783265 - DNA, 15 bp, Homo sapiens
tatcccacccgggta

SEQ ID NO: 1783266 - DNA, 15 bp, Homo sapiens
atcccacccgggtac

SEQ ID NO: 1783267 - DNA, 15 bp, Homo sapiens
tcccacccgggtact

SEQ ID NO: 1783268 - DNA, 15 bp, Homo sapiens
cccacccgggtactt

SEQ ID NO: 1783269 - DNA, 15 bp, Homo sapiens
ccacccgggtacttt

SEQ ID NO: 1783270 - DNA, 15 bp, Homo sapiens
cacccgggtacttta

SEQ ID NO: 1783271 - DNA, 15 bp, Homo sapiens
acccgggtactttag

SEQ ID NO: 1783272 - DNA, 15 bp, Homo sapiens
cccgggtactttagt

SEQ ID NO: 1783273 - DNA, 15 bp, Homo sapiens
ccgggtactttagtt

SEQ ID NO: 1783274 - DNA, 15 bp, Homo sapiens
cgggtactttagttc

SEQ ID NO: 1783275 - DNA, 15 bp, Homo sapiens
gggtactttagttct

SEQ ID NO: 1783276 - DNA, 15 bp, Homo sapiens
ggtactttagttctg

SEQ ID NO: 1783277 - DNA, 15 bp, Homo sapiens
gtactttagttctgg

SEQ ID NO: 1783278 - DNA, 15 bp, Homo sapiens
tactttagttctggt

SEQ ID NO: 1783279 - DNA, 15 bp, Homo sapiens
actttagttctggtg

SEQ ID NO: 1783280 - DNA, 15 bp, Homo sapiens
ctttagttctggtgg

SEQ ID NO: 1783281 - DNA, 15 bp, Homo sapiens
tttagttctggtggc

SEQ ID NO: 1783282 - DNA, 15 bp, Homo sapiens
ttagttctggtggcc

SEQ ID NO: 1783283 - DNA, 15 bp, Homo sapiens
tagttctggtggcct

SEQ ID NO: 1783284 - DNA, 15 bp, Homo sapiens
agttctggtggcctc

SEQ ID NO: 1783285 - DNA, 15 bp, Homo sapiens
gttctggtggcctct

SEQ ID NO: 1783286 - DNA, 15 bp, Homo sapiens
ttctggtggcctctt

SEQ ID NO: 1783287 - DNA, 15 bp, Homo sapiens
tctggtggcctcttt

SEQ ID NO: 1783288 - DNA, 15 bp, Homo sapiens
ctggtggcctctttc

SEQ ID NO: 1783289 - DNA, 15 bp, Homo sapiens
tggtggcctctttca

SEQ ID NO: 1783290 - DNA, 15 bp, Homo sapiens
ggtggcctctttcat

SEQ ID NO: 1783291 - DNA, 15 bp, Homo sapiens
gtggcctctttcatt

SEQ ID NO: 1783292 - DNA, 15 bp, Homo sapiens
tggcctctttcattt

SEQ ID NO: 1783293 - DNA, 15 bp, Homo sapiens
ggcctctttcatttt

SEQ ID NO: 1783294 - DNA, 15 bp, Homo sapiens
gcctctttcattttc

SEQ ID NO: 1783295 - DNA, 15 bp, Homo sapiens
cctctttcattttct

SEQ ID NO: 1783296 - DNA, 15 bp, Homo sapiens
ctctttcattttctg

SEQ ID NO: 1783297 - DNA, 15 bp, Homo sapiens
tctttcattttctga

SEQ ID NO: 1783298 - DNA, 15 bp, Homo sapiens
ctttcattttctgaa

SEQ ID NO: 1783299 - DNA, 15 bp, Homo sapiens
tttcattttctgaaa

SEQ ID NO: 1783300 - DNA, 15 bp, Homo sapiens
ttcattttctgaaag

SEQ ID NO: 1783301 - DNA, 15 bp, Homo sapiens
tcattttctgaaaga

SEQ ID NO: 1783302 - DNA, 15 bp, Homo sapiens
cattttctgaaagaa

SEQ ID NO: 1783303 - DNA, 15 bp, Homo sapiens
attttctgaaagaac

SEQ ID NO: 1783304 - DNA, 15 bp, Homo sapiens
ttttctgaaagaaca

SEQ ID NO: 1783305 - DNA, 15 bp, Homo sapiens
tttctgaaagaacat

SEQ ID NO: 1783306 - DNA, 15 bp, Homo sapiens
ttctgaaagaacatc

SEQ ID NO: 1783307 - DNA, 15 bp, Homo sapiens
tctgaaagaacatca

SEQ ID NO: 1783308 - DNA, 15 bp, Homo sapiens
ctgaaagaacatcag

SEQ ID NO: 1783309 - DNA, 15 bp, Homo sapiens
tgaaagaacatcagt

SEQ ID NO: 1783310 - DNA, 15 bp, Homo sapiens
gaaagaacatcagtt

SEQ ID NO: 1783311 - DNA, 15 bp, Homo sapiens
aaagaacatcagttt

SEQ ID NO: 1783312 - DNA, 15 bp, Homo sapiens
aagaacatcagtttc

SEQ ID NO: 1783313 - DNA, 15 bp, Homo sapiens
agaacatcagtttct

SEQ ID NO: 1783314 - DNA, 15 bp, Homo sapiens
gaacatcagtttctt

SEQ ID NO: 1783315 - DNA, 15 bp, Homo sapiens
aacatcagtttctta

SEQ ID NO: 1783316 - DNA, 15 bp, Homo sapiens
acatcagtttcttag

SEQ ID NO: 1783317 - DNA, 15 bp, Homo sapiens
catcagtttcttagc

SEQ ID NO: 1783318 - DNA, 15 bp, Homo sapiens
atcagtttcttagca

SEQ ID NO: 1783319 - DNA, 15 bp, Homo sapiens
tcagtttcttagcat

SEQ ID NO: 1783320 - DNA, 15 bp, Homo sapiens
cagtttcttagcata

SEQ ID NO: 1783321 - DNA, 15 bp, Homo sapiens
agtttcttagcatat

SEQ ID NO: 1783322 - DNA, 15 bp, Homo sapiens
gtttcttagcatatg

SEQ ID NO: 1783323 - DNA, 15 bp, Homo sapiens
tttcttagcatatga

SEQ ID NO: 1783324 - DNA, 15 bp, Homo sapiens
ttcttagcatatgat

SEQ ID NO: 1783325 - DNA, 15 bp, Homo sapiens
tcttagcatatgatc

SEQ ID NO: 1783326 - DNA, 15 bp, Homo sapiens
cttagcatatgatct

SEQ ID NO: 1783327 - DNA, 15 bp, Homo sapiens
ttagcatatgatctt

SEQ ID NO: 1783328 - DNA, 15 bp, Homo sapiens
tagcatatgatcttt

SEQ ID NO: 1783329 - DNA, 15 bp, Homo sapiens
agcatatgatctttc

SEQ ID NO: 1783330 - DNA, 15 bp, Homo sapiens
gcatatgatctttca

SEQ ID NO: 1783331 - DNA, 15 bp, Homo sapiens
catatgatctttcat

SEQ ID NO: 1783332 - DNA, 15 bp, Homo sapiens
atatgatctttcatc

SEQ ID NO: 1783333 - DNA, 15 bp, Homo sapiens
tatgatctttcatct

SEQ ID NO: 1783334 - DNA, 15 bp, Homo sapiens
atgatctttcatctt

SEQ ID NO: 1783335 - DNA, 15 bp, Homo sapiens
tgatctttcatcttt

SEQ ID NO: 1783336 - DNA, 15 bp, Homo sapiens
gatctttcatctttt

SEQ ID NO: 1783337 - DNA, 15 bp, Homo sapiens
atctttcatcttttg

SEQ ID NO: 1783338 - DNA, 15 bp, Homo sapiens
tctttcatcttttgg

SEQ ID NO: 1783339 - DNA, 15 bp, Homo sapiens
ctttcatcttttgga

SEQ ID NO: 1783340 - DNA, 15 bp, Homo sapiens
tttcatcttttggaa

SEQ ID NO: 1783341 - DNA, 15 bp, Homo sapiens
ttcatcttttggaag

SEQ ID NO: 1783342 - DNA, 15 bp, Homo sapiens
tcatcttttggaaga

SEQ ID NO: 1783343 - DNA, 15 bp, Homo sapiens
catcttttggaagat

SEQ ID NO: 1783344 - DNA, 15 bp, Homo sapiens
atcttttggaagatc

SEQ ID NO: 1783345 - DNA, 15 bp, Homo sapiens
tcttttggaagatct

SEQ ID NO: 1783346 - DNA, 15 bp, Homo sapiens
cttttggaagatctc

SEQ ID NO: 1783347 - DNA, 15 bp, Homo sapiens
ttttggaagatctct

SEQ ID NO: 1783348 - DNA, 15 bp, Homo sapiens
tttggaagatctctg

SEQ ID NO: 1783349 - DNA, 15 bp, Homo sapiens
ttggaagatctctgc

SEQ ID NO: 1783350 - DNA, 15 bp, Homo sapiens
tggaagatctctgcc

SEQ ID NO: 1783351 - DNA, 15 bp, Homo sapiens
ggaagatctctgccc

SEQ ID NO: 1783352 - DNA, 15 bp, Homo sapiens
gaagatctctgcccc

SEQ ID NO: 1783353 - DNA, 15 bp, Homo sapiens
aagatctctgcccct

SEQ ID NO: 1783354 - DNA, 15 bp, Homo sapiens
agatctctgcccctt

SEQ ID NO: 1783355 - DNA, 15 bp, Homo sapiens
gatctctgccccttc

SEQ ID NO: 1783356 - DNA, 15 bp, Homo sapiens
atctctgccccttct

SEQ ID NO: 1783357 - DNA, 15 bp, Homo sapiens
tctctgccccttctc

SEQ ID NO: 1783358 - DNA, 15 bp, Homo sapiens
ctctgccccttctcc

SEQ ID NO: 1783359 - DNA, 15 bp, Homo sapiens
tctgccccttctcct

SEQ ID NO: 1783360 - DNA, 15 bp, Homo sapiens
ctgccccttctcctt

SEQ ID NO: 1783361 - DNA, 15 bp, Homo sapiens
tgccccttctccttt

SEQ ID NO: 1783362 - DNA, 15 bp, Homo sapiens
gccccttctcctttc

SEQ ID NO: 1783363 - DNA, 15 bp, Homo sapiens
ccccttctcctttca

SEQ ID NO: 1783364 - DNA, 15 bp, Homo sapiens
cccttctcctttcaa

SEQ ID NO: 1783365 - DNA, 15 bp, Homo sapiens
ccttctcctttcaaa

SEQ ID NO: 1783366 - DNA, 15 bp, Homo sapiens
cttctcctttcaaag

SEQ ID NO: 1783367 - DNA, 15 bp, Homo sapiens
ttctcctttcaaagc

SEQ ID NO: 1783368 - DNA, 15 bp, Homo sapiens
tctcctttcaaagca

SEQ ID NO: 1783369 - DNA, 15 bp, Homo sapiens
ctcctttcaaagcac

SEQ ID NO: 1783370 - DNA, 15 bp, Homo sapiens
tcctttcaaagcaca

SEQ ID NO: 1783371 - DNA, 15 bp, Homo sapiens
cctttcaaagcacag

SEQ ID NO: 1783372 - DNA, 15 bp, Homo sapiens
ctttcaaagcacagc

SEQ ID NO: 1783373 - DNA, 15 bp, Homo sapiens
tttcaaagcacagcc

SEQ ID NO: 1783374 - DNA, 15 bp, Homo sapiens
ttcaaagcacagcct

SEQ ID NO: 1783375 - DNA, 15 bp, Homo sapiens
tcaaagcacagcctc

SEQ ID NO: 1783376 - DNA, 15 bp, Homo sapiens
caaagcacagcctcc

SEQ ID NO: 1783377 - DNA, 15 bp, Homo sapiens
aaagcacagcctcct

SEQ ID NO: 1783378 - DNA, 15 bp, Homo sapiens
aagcacagcctcctt

SEQ ID NO: 1783379 - DNA, 15 bp, Homo sapiens
agcacagcctccttc

SEQ ID NO: 1783380 - DNA, 15 bp, Homo sapiens
gcacagcctccttct

SEQ ID NO: 1783381 - DNA, 15 bp, Homo sapiens
cacagcctccttctc

SEQ ID NO: 1783382 - DNA, 15 bp, Homo sapiens
acagcctccttctca

SEQ ID NO: 1783383 - DNA, 15 bp, Homo sapiens
cagcctccttctcac

SEQ ID NO: 1783384 - DNA, 15 bp, Homo sapiens
agcctccttctcaca

SEQ ID NO: 1783385 - DNA, 15 bp, Homo sapiens
gcctccttctcacat

SEQ ID NO: 1783386 - DNA, 15 bp, Homo sapiens
cctccttctcacatt

SEQ ID NO: 1783387 - DNA, 15 bp, Homo sapiens
ctccttctcacattt

SEQ ID NO: 1783388 - DNA, 15 bp, Homo sapiens
tccttctcacatttc

SEQ ID NO: 1783389 - DNA, 15 bp, Homo sapiens
ccttctcacatttca

SEQ ID NO: 1783390 - DNA, 15 bp, Homo sapiens
cttctcacatttcaa

SEQ ID NO: 1783391 - DNA, 15 bp, Homo sapiens
ttctcacatttcaag

SEQ ID NO: 1783392 - DNA, 15 bp, Homo sapiens
tctcacatttcaaga

SEQ ID NO: 1783393 - DNA, 15 bp, Homo sapiens
ctcacatttcaagac

SEQ ID NO: 1783394 - DNA, 15 bp, Homo sapiens
tcacatttcaagact

SEQ ID NO: 1783395 - DNA, 15 bp, Homo sapiens
cacatttcaagactc

SEQ ID NO: 1783396 - DNA, 15 bp, Homo sapiens
acatttcaagactca

SEQ ID NO: 1783397 - DNA, 15 bp, Homo sapiens
catttcaagactcag

SEQ ID NO: 1783398 - DNA, 15 bp, Homo sapiens
atttcaagactcagc

SEQ ID NO: 1783399 - DNA, 15 bp, Homo sapiens
tttcaagactcagcg

SEQ ID NO: 1783400 - DNA, 15 bp, Homo sapiens
ttcaagactcagcgt

SEQ ID NO: 1783401 - DNA, 15 bp, Homo sapiens
tcaagactcagcgtc

SEQ ID NO: 1783402 - DNA, 15 bp, Homo sapiens
caagactcagcgtcc

SEQ ID NO: 1783403 - DNA, 15 bp, Homo sapiens
aagactcagcgtcca

SEQ ID NO: 1783404 - DNA, 15 bp, Homo sapiens
agactcagcgtccat

SEQ ID NO: 1783405 - DNA, 15 bp, Homo sapiens
gactcagcgtccatg

SEQ ID NO: 1783406 - DNA, 15 bp, Homo sapiens
actcagcgtccatgt

SEQ ID NO: 1783407 - DNA, 15 bp, Homo sapiens
ctcagcgtccatgtt

SEQ ID NO: 1783408 - DNA, 15 bp, Homo sapiens
tcagcgtccatgtta

SEQ ID NO: 1783409 - DNA, 15 bp, Homo sapiens
cagcgtccatgttac

SEQ ID NO: 1783410 - DNA, 15 bp, Homo sapiens
agcgtccatgttacc

SEQ ID NO: 1783411 - DNA, 15 bp, Homo sapiens
gcgtccatgttacct

SEQ ID NO: 1783412 - DNA, 15 bp, Homo sapiens
cgtccatgttacctt

SEQ ID NO: 1783413 - DNA, 15 bp, Homo sapiens
gtccatgttaccttc

SEQ ID NO: 1783414 - DNA, 15 bp, Homo sapiens
tccatgttaccttcc

SEQ ID NO: 1783415 - DNA, 15 bp, Homo sapiens
ccatgttaccttccc

SEQ ID NO: 1783416 - DNA, 15 bp, Homo sapiens
catgttaccttccca

SEQ ID NO: 1783417 - DNA, 15 bp, Homo sapiens
atgttaccttcccag

SEQ ID NO: 1783418 - DNA, 15 bp, Homo sapiens
tgttaccttcccaga

SEQ ID NO: 1783419 - DNA, 15 bp, Homo sapiens
gttaccttcccagat

SEQ ID NO: 1783420 - DNA, 15 bp, Homo sapiens
ttaccttcccagatc

SEQ ID NO: 1783421 - DNA, 15 bp, Homo sapiens
taccttcccagatca

SEQ ID NO: 1783422 - DNA, 15 bp, Homo sapiens
accttcccagatcag

SEQ ID NO: 1783423 - DNA, 15 bp, Homo sapiens
ccttcccagatcagc

SEQ ID NO: 1783424 - DNA, 15 bp, Homo sapiens
cttcccagatcagcc

SEQ ID NO: 1783425 - DNA, 15 bp, Homo sapiens
ttcccagatcagcct

SEQ ID NO: 1783426 - DNA, 15 bp, Homo sapiens
tcccagatcagcctt

SEQ ID NO: 1783427 - DNA, 15 bp, Homo sapiens
cccagatcagccttc

SEQ ID NO: 1783428 - DNA, 15 bp, Homo sapiens
ccagatcagccttcc

SEQ ID NO: 1783429 - DNA, 15 bp, Homo sapiens
cagatcagccttcct

SEQ ID NO: 1783430 - DNA, 15 bp, Homo sapiens
agatcagccttcctt

SEQ ID NO: 1783431 - DNA, 15 bp, Homo sapiens
gatcagccttccttg

SEQ ID NO: 1783432 - DNA, 15 bp, Homo sapiens
atcagccttccttga

SEQ ID NO: 1783433 - DNA, 15 bp, Homo sapiens
tcagccttccttgaa

SEQ ID NO: 1783434 - DNA, 15 bp, Homo sapiens
cagccttccttgaac

SEQ ID NO: 1783435 - DNA, 15 bp, Homo sapiens
agccttccttgaacc

SEQ ID NO: 1783436 - DNA, 15 bp, Homo sapiens
gccttccttgaaccc

SEQ ID NO: 1783437 - DNA, 15 bp, Homo sapiens
ccttccttgaaccca

SEQ ID NO: 1783438 - DNA, 15 bp, Homo sapiens
cttccttgaacccac

SEQ ID NO: 1783439 - DNA, 15 bp, Homo sapiens
ttccttgaacccacc

SEQ ID NO: 1783440 - DNA, 15 bp, Homo sapiens
tccttgaacccaccc

SEQ ID NO: 1783441 - DNA, 15 bp, Homo sapiens
ccttgaacccacccc

SEQ ID NO: 1783442 - DNA, 15 bp, Homo sapiens
cttgaacccacccca

SEQ ID NO: 1783443 - DNA, 15 bp, Homo sapiens
ttgaacccaccccat

SEQ ID NO: 1783444 - DNA, 15 bp, Homo sapiens
tgaacccaccccatc

SEQ ID NO: 1783445 - DNA, 15 bp, Homo sapiens
gaacccaccccatcc

SEQ ID NO: 1783446 - DNA, 15 bp, Homo sapiens
aacccaccccatcca

SEQ ID NO: 1783447 - DNA, 15 bp, Homo sapiens
acccaccccatccac

SEQ ID NO: 1783448 - DNA, 15 bp, Homo sapiens
ccaccccatccacct

SEQ ID NO: 1783449 - DNA, 15 bp, Homo sapiens
caccccatccacctg

SEQ ID NO: 1783450 - DNA, 15 bp, Homo sapiens
accccatccacctgg

SEQ ID NO: 1783451 - DNA, 15 bp, Homo sapiens
ccccatccacctgga

SEQ ID NO: 1783452 - DNA, 15 bp, Homo sapiens
cccatccacctggat

SEQ ID NO: 1783453 - DNA, 15 bp, Homo sapiens
ccatccacctggatc

SEQ ID NO: 1783454 - DNA, 15 bp, Homo sapiens
catccacctggatct

SEQ ID NO: 1783455 - DNA, 15 bp, Homo sapiens
atccacctggatctc

SEQ ID NO: 1783456 - DNA, 15 bp, Homo sapiens
tccacctggatctcc

SEQ ID NO: 1783457 - DNA, 15 bp, Homo sapiens
ccacctggatctccc

SEQ ID NO: 1783458 - DNA, 15 bp, Homo sapiens
cacctggatctccct

SEQ ID NO: 1783459 - DNA, 15 bp, Homo sapiens
acctggatctccctg

SEQ ID NO: 1783460 - DNA, 15 bp, Homo sapiens
cctggatctccctgt

SEQ ID NO: 1783461 - DNA, 15 bp, Homo sapiens
ctggatctccctgtt

SEQ ID NO: 1783462 - DNA, 15 bp, Homo sapiens
tggatctccctgttt

SEQ ID NO: 1783463 - DNA, 15 bp, Homo sapiens
ggatctccctgttta

SEQ ID NO: 1783464 - DNA, 15 bp, Homo sapiens
gatctccctgtttat

SEQ ID NO: 1783465 - DNA, 15 bp, Homo sapiens
atctccctgtttatt

SEQ ID NO: 1783466 - DNA, 15 bp, Homo sapiens
tctccctgtttattc

SEQ ID NO: 1783467 - DNA, 15 bp, Homo sapiens
ctccctgtttattct

SEQ ID NO: 1783468 - DNA, 15 bp, Homo sapiens
tccctgtttattctt

SEQ ID NO: 1783469 - DNA, 15 bp, Homo sapiens
ccctgtttattcttc

SEQ ID NO: 1783470 - DNA, 15 bp, Homo sapiens
cctgtttattcttca

SEQ ID NO: 1783471 - DNA, 15 bp, Homo sapiens
ctgtttattcttcat

SEQ ID NO: 1783472 - DNA, 15 bp, Homo sapiens
tgtttattcttcatg

SEQ ID NO: 1783473 - DNA, 15 bp, Homo sapiens
gtttattcttcatga

SEQ ID NO: 1783474 - DNA, 15 bp, Homo sapiens
tttattcttcatgag

SEQ ID NO: 1783475 - DNA, 15 bp, Homo sapiens
ttattcttcatgaga

SEQ ID NO: 1783476 - DNA, 15 bp, Homo sapiens
tattcttcatgagag

SEQ ID NO: 1783477 - DNA, 15 bp, Homo sapiens
attcttcatgagaga

SEQ ID NO: 1783478 - DNA, 15 bp, Homo sapiens
ttcttcatgagagaa

SEQ ID NO: 1783479 - DNA, 15 bp, Homo sapiens
tcttcatgagagaac

SEQ ID NO: 1783480 - DNA, 15 bp, Homo sapiens
cttcatgagagaacc

SEQ ID NO: 1783481 - DNA, 15 bp, Homo sapiens
ttcatgagagaaccc

SEQ ID NO: 1783482 - DNA, 15 bp, Homo sapiens
tcatgagagaaccct

SEQ ID NO: 1783483 - DNA, 15 bp, Homo sapiens
catgagagaaccctg

SEQ ID NO: 1783484 - DNA, 15 bp, Homo sapiens
atgagagaaccctgt

SEQ ID NO: 1783485 - DNA, 15 bp, Homo sapiens
tgagagaaccctgtt

SEQ ID NO: 1783486 - DNA, 15 bp, Homo sapiens
gagagaaccctgttc

SEQ ID NO: 1783487 - DNA, 15 bp, Homo sapiens
agagaaccctgttct

SEQ ID NO: 1783488 - DNA, 15 bp, Homo sapiens
gagaaccctgttctt

SEQ ID NO: 1783489 - DNA, 15 bp, Homo sapiens
agaaccctgttcttt

SEQ ID NO: 1783490 - DNA, 15 bp, Homo sapiens
gaaccctgttctttc

SEQ ID NO: 1783491 - DNA, 15 bp, Homo sapiens
aaccctgttctttca

SEQ ID NO: 1783492 - DNA, 15 bp, Homo sapiens
accctgttctttcat

SEQ ID NO: 1783493 - DNA, 15 bp, Homo sapiens
ccctgttctttcata

SEQ ID NO: 1783494 - DNA, 15 bp, Homo sapiens
cctgttctttcatag

SEQ ID NO: 1783495 - DNA, 15 bp, Homo sapiens
ctgttctttcatagg

SEQ ID NO: 1783496 - DNA, 15 bp, Homo sapiens
tgttctttcatagga

SEQ ID NO: 1783497 - DNA, 15 bp, Homo sapiens
gttctttcataggat

SEQ ID NO: 1783498 - DNA, 15 bp, Homo sapiens
ttctttcataggatt

SEQ ID NO: 1783499 - DNA, 15 bp, Homo sapiens
tctttcataggattt

SEQ ID NO: 1783500 - DNA, 15 bp, Homo sapiens
ctttcataggatttt

SEQ ID NO: 1783501 - DNA, 15 bp, Homo sapiens
tttcataggattttt

SEQ ID NO: 1783502 - DNA, 15 bp, Homo sapiens
ttcataggatttttc

SEQ ID NO: 1783503 - DNA, 15 bp, Homo sapiens
tcataggatttttct

SEQ ID NO: 1783504 - DNA, 15 bp, Homo sapiens
cataggatttttctg

SEQ ID NO: 1783505 - DNA, 15 bp, Homo sapiens
ataggatttttctga

SEQ ID NO: 1783506 - DNA, 15 bp, Homo sapiens
taggatttttctgaa

SEQ ID NO: 1783507 - DNA, 15 bp, Homo sapiens
aggatttttctgaat

SEQ ID NO: 1783508 - DNA, 15 bp, Homo sapiens
ggatttttctgaatt

SEQ ID NO: 1783509 - DNA, 15 bp, Homo sapiens
gatttttctgaattt

SEQ ID NO: 1783510 - DNA, 15 bp, Homo sapiens
atttttctgaatttg

SEQ ID NO: 1783511 - DNA, 15 bp, Homo sapiens
tttttctgaatttgt

SEQ ID NO: 1783512 - DNA, 15 bp, Homo sapiens
ttttctgaatttgtc

SEQ ID NO: 1783513 - DNA, 15 bp, Homo sapiens
tttctgaatttgtca

SEQ ID NO: 1783514 - DNA, 15 bp, Homo sapiens
ttctgaatttgtcat

SEQ ID NO: 1783515 - DNA, 15 bp, Homo sapiens
tctgaatttgtcatc

SEQ ID NO: 1783516 - DNA, 15 bp, Homo sapiens
ctgaatttgtcatca

SEQ ID NO: 1783517 - DNA, 15 bp, Homo sapiens
tgaatttgtcatcac

SEQ ID NO: 1783518 - DNA, 15 bp, Homo sapiens
gaatttgtcatcaca

SEQ ID NO: 1783519 - DNA, 15 bp, Homo sapiens
aatttgtcatcacat

SEQ ID NO: 1783520 - DNA, 15 bp, Homo sapiens
atttgtcatcacata

SEQ ID NO: 1783521 - DNA, 15 bp, Homo sapiens
tttgtcatcacatac

SEQ ID NO: 1783522 - DNA, 15 bp, Homo sapiens
ttgtcatcacatact

SEQ ID NO: 1783523 - DNA, 15 bp, Homo sapiens
tgtcatcacatactt

SEQ ID NO: 1783524 - DNA, 15 bp, Homo sapiens
gtcatcacatactta

SEQ ID NO: 1783525 - DNA, 15 bp, Homo sapiens
tcatcacatacttat

SEQ ID NO: 1783526 - DNA, 15 bp, Homo sapiens
catcacatacttatt

SEQ ID NO: 1783527 - DNA, 15 bp, Homo sapiens
atcacatacttattt

SEQ ID NO: 1783528 - DNA, 15 bp, Homo sapiens
tcacatacttatttc

SEQ ID NO: 1783529 - DNA, 15 bp, Homo sapiens
cacatacttatttcc

SEQ ID NO: 1783530 - DNA, 15 bp, Homo sapiens
acatacttatttcct

SEQ ID NO: 1783531 - DNA, 15 bp, Homo sapiens
catacttatttcctt

SEQ ID NO: 1783532 - DNA, 15 bp, Homo sapiens
atacttatttccttg

SEQ ID NO: 1783533 - DNA, 15 bp, Homo sapiens
acttatttccttgtt

SEQ ID NO: 1783534 - DNA, 15 bp, Homo sapiens
cttatttccttgttt

SEQ ID NO: 1783535 - DNA, 15 bp, Homo sapiens
ttatttccttgtttg

SEQ ID NO: 1783536 - DNA, 15 bp, Homo sapiens
tatttccttgtttgt

SEQ ID NO: 1783537 - DNA, 15 bp, Homo sapiens
atttccttgtttgtg

SEQ ID NO: 1783538 - DNA, 15 bp, Homo sapiens
tttccttgtttgtgt

SEQ ID NO: 1783539 - DNA, 15 bp, Homo sapiens
ttccttgtttgtgtg

SEQ ID NO: 1783540 - DNA, 15 bp, Homo sapiens
tccttgtttgtgtgc

SEQ ID NO: 1783541 - DNA, 15 bp, Homo sapiens
ccttgtttgtgtgcc

SEQ ID NO: 1783542 - DNA, 15 bp, Homo sapiens
cttgtttgtgtgcct

SEQ ID NO: 1783543 - DNA, 15 bp, Homo sapiens
ttgtttgtgtgcctc

SEQ ID NO: 1783544 - DNA, 15 bp, Homo sapiens
tgtttgtgtgcctct

SEQ ID NO: 1783545 - DNA, 15 bp, Homo sapiens
gtttgtgtgcctctt

SEQ ID NO: 1783546 - DNA, 15 bp, Homo sapiens
tttgtgtgcctcttc

SEQ ID NO: 1783547 - DNA, 15 bp, Homo sapiens
ttgtgtgcctcttct

SEQ ID NO: 1783548 - DNA, 15 bp, Homo sapiens
tgtgtgcctcttctc

SEQ ID NO: 1783549 - DNA, 15 bp, Homo sapiens
gtgtgcctcttctca

SEQ ID NO: 1783550 - DNA, 15 bp, Homo sapiens
tgtgcctcttctcac

SEQ ID NO: 1783551 - DNA, 15 bp, Homo sapiens
gtgcctcttctcacc

SEQ ID NO: 1783552 - DNA, 15 bp, Homo sapiens
tgcctcttctcacca

SEQ ID NO: 1783553 - DNA, 15 bp, Homo sapiens
gcctcttctcaccag

SEQ ID NO: 1783554 - DNA, 15 bp, Homo sapiens
cctcttctcaccaga

SEQ ID NO: 1783555 - DNA, 15 bp, Homo sapiens
ctcttctcaccagac

SEQ ID NO: 1783556 - DNA, 15 bp, Homo sapiens
tcttctcaccagacc

SEQ ID NO: 1783557 - DNA, 15 bp, Homo sapiens
cttctcaccagaccc

SEQ ID NO: 1783558 - DNA, 15 bp, Homo sapiens
ttctcaccagaccct

SEQ ID NO: 1783559 - DNA, 15 bp, Homo sapiens
tctcaccagaccctg

SEQ ID NO: 1783560 - DNA, 15 bp, Homo sapiens
ctcaccagaccctga

SEQ ID NO: 1783561 - DNA, 15 bp, Homo sapiens
tcaccagaccctgag

SEQ ID NO: 1783562 - DNA, 15 bp, Homo sapiens
caccagaccctgagc

SEQ ID NO: 1783563 - DNA, 15 bp, Homo sapiens
accagaccctgagca

SEQ ID NO: 1783564 - DNA, 15 bp, Homo sapiens
ccagaccctgagcac

SEQ ID NO: 1783565 - DNA, 15 bp, Homo sapiens
cagaccctgagcacc

SEQ ID NO: 1783566 - DNA, 15 bp, Homo sapiens
agaccctgagcaccg

SEQ ID NO: 1783567 - DNA, 15 bp, Homo sapiens
gaccctgagcaccgt

SEQ ID NO: 1783568 - DNA, 15 bp, Homo sapiens
accctgagcaccgtg

SEQ ID NO: 1783569 - DNA, 15 bp, Homo sapiens
ccctgagcaccgtgt

SEQ ID NO: 1783570 - DNA, 15 bp, Homo sapiens
cctgagcaccgtgta

SEQ ID NO: 1783571 - DNA, 15 bp, Homo sapiens
ctgagcaccgtgtaa

SEQ ID NO: 1783572 - DNA, 15 bp, Homo sapiens
tgagcaccgtgtaag

SEQ ID NO: 1783573 - DNA, 15 bp, Homo sapiens
gagcaccgtgtaagt

SEQ ID NO: 1783574 - DNA, 15 bp, Homo sapiens
agcaccgtgtaagta

SEQ ID NO: 1783575 - DNA, 15 bp, Homo sapiens
gcaccgtgtaagtag

SEQ ID NO: 1783576 - DNA, 15 bp, Homo sapiens
caccgtgtaagtagg

SEQ ID NO: 1783577 - DNA, 15 bp, Homo sapiens
accgtgtaagtagga

SEQ ID NO: 1783578 - DNA, 15 bp, Homo sapiens
ccgtgtaagtaggaa

SEQ ID NO: 1783579 - DNA, 15 bp, Homo sapiens
cgtgtaagtaggaac

SEQ ID NO: 1783580 - DNA, 15 bp, Homo sapiens
gtgtaagtaggaaca

SEQ ID NO: 1783581 - DNA, 15 bp, Homo sapiens
tgtaagtaggaacaa

SEQ ID NO: 1783582 - DNA, 15 bp, Homo sapiens
gtaagtaggaacaaa

SEQ ID NO: 1783583 - DNA, 15 bp, Homo sapiens
taagtaggaacaaag

SEQ ID NO: 1783584 - DNA, 15 bp, Homo sapiens
aagtaggaacaaagt

SEQ ID NO: 1783585 - DNA, 15 bp, Homo sapiens
agtaggaacaaagta

SEQ ID NO: 1783586 - DNA, 15 bp, Homo sapiens
gtaggaacaaagtat

SEQ ID NO: 1783587 - DNA, 15 bp, Homo sapiens
taggaacaaagtatt

SEQ ID NO: 1783588 - DNA, 15 bp, Homo sapiens
aggaacaaagtatta

SEQ ID NO: 1783589 - DNA, 15 bp, Homo sapiens
ggaacaaagtattat

SEQ ID NO: 1783590 - DNA, 15 bp, Homo sapiens
gaacaaagtattatt

SEQ ID NO: 1783591 - DNA, 15 bp, Homo sapiens
aacaaagtattattt

SEQ ID NO: 1783592 - DNA, 15 bp, Homo sapiens
acaaagtattatttc

SEQ ID NO: 1783593 - DNA, 15 bp, Homo sapiens
caaagtattatttca

SEQ ID NO: 1783594 - DNA, 15 bp, Homo sapiens
aaagtattatttcaa

SEQ ID NO: 1783595 - DNA, 15 bp, Homo sapiens
aagtattatttcaaa

SEQ ID NO: 1783596 - DNA, 15 bp, Homo sapiens
agtattatttcaaag

SEQ ID NO: 1783597 - DNA, 15 bp, Homo sapiens
gtattatttcaaaga

SEQ ID NO: 1783598 - DNA, 15 bp, Homo sapiens
tattatttcaaagac

SEQ ID NO: 1783599 - DNA, 15 bp, Homo sapiens
attatttcaaagacc

SEQ ID NO: 1783600 - DNA, 15 bp, Homo sapiens
ttatttcaaagaccc

SEQ ID NO: 1783601 - DNA, 15 bp, Homo sapiens
tatttcaaagaccca

SEQ ID NO: 1783602 - DNA, 15 bp, Homo sapiens
atttcaaagacccaa

SEQ ID NO: 1783603 - DNA, 15 bp, Homo sapiens
tttcaaagacccaag

SEQ ID NO: 1783604 - DNA, 15 bp, Homo sapiens
ttcaaagacccaagt

SEQ ID NO: 1783605 - DNA, 15 bp, Homo sapiens
tcaaagacccaagtc

SEQ ID NO: 1783606 - DNA, 15 bp, Homo sapiens
caaagacccaagtct

SEQ ID NO: 1783607 - DNA, 15 bp, Homo sapiens
aaagacccaagtctg

SEQ ID NO: 1783608 - DNA, 15 bp, Homo sapiens
aagacccaagtctga

SEQ ID NO: 1783609 - DNA, 15 bp, Homo sapiens
agacccaagtctgaa

SEQ ID NO: 1783610 - DNA, 15 bp, Homo sapiens
gacccaagtctgaaa

SEQ ID NO: 1783611 - DNA, 15 bp, Homo sapiens
acccaagtctgaaac

SEQ ID NO: 1783612 - DNA, 15 bp, Homo sapiens
cccaagtctgaaacg

SEQ ID NO: 1783613 - DNA, 15 bp, Homo sapiens
ccaagtctgaaacgg

SEQ ID NO: 1783614 - DNA, 15 bp, Homo sapiens
caagtctgaaacggt

SEQ ID NO: 1783615 - DNA, 15 bp, Homo sapiens
aagtctgaaacggtt

SEQ ID NO: 1783616 - DNA, 15 bp, Homo sapiens
agtctgaaacggttt

SEQ ID NO: 1783617 - DNA, 15 bp, Homo sapiens
gtctgaaacggttta

SEQ ID NO: 1783618 - DNA, 15 bp, Homo sapiens
tctgaaacggtttat

SEQ ID NO: 1783619 - DNA, 15 bp, Homo sapiens
ctgaaacggtttatc

SEQ ID NO: 1783620 - DNA, 15 bp, Homo sapiens
tgaaacggtttatct

SEQ ID NO: 1783621 - DNA, 15 bp, Homo sapiens
gaaacggtttatctg

SEQ ID NO: 1783622 - DNA, 15 bp, Homo sapiens
aaacggtttatctgt

SEQ ID NO: 1783623 - DNA, 15 bp, Homo sapiens
aacggtttatctgtt

SEQ ID NO: 1783624 - DNA, 15 bp, Homo sapiens
acggtttatctgttt

SEQ ID NO: 1783625 - DNA, 15 bp, Homo sapiens
cggtttatctgttta

SEQ ID NO: 1783626 - DNA, 15 bp, Homo sapiens
ggtttatctgtttat

SEQ ID NO: 1783627 - DNA, 15 bp, Homo sapiens
gtttatctgtttata

SEQ ID NO: 1783628 - DNA, 15 bp, Homo sapiens
tttatctgtttatac

SEQ ID NO: 1783629 - DNA, 15 bp, Homo sapiens
ttatctgtttatact

SEQ ID NO: 1783630 - DNA, 15 bp, Homo sapiens
tatctgtttatactt

SEQ ID NO: 1783631 - DNA, 15 bp, Homo sapiens
atctgtttatactta

SEQ ID NO: 1783632 - DNA, 15 bp, Homo sapiens
tctgtttatacttaa

SEQ ID NO: 1783633 - DNA, 15 bp, Homo sapiens
ctgtttatacttaat

SEQ ID NO: 1783634 - DNA, 15 bp, Homo sapiens
gtttatacttaatgg

SEQ ID NO: 1783635 - DNA, 15 bp, Homo sapiens
tttatacttaatggc

SEQ ID NO: 1783636 - DNA, 15 bp, Homo sapiens
ttatacttaatggct

SEQ ID NO: 1783637 - DNA, 15 bp, Homo sapiens
tatacttaatggcta

SEQ ID NO: 1783638 - DNA, 15 bp, Homo sapiens
atacttaatggctaa

SEQ ID NO: 1783639 - DNA, 15 bp, Homo sapiens
tacttaatggctaag

SEQ ID NO: 1783640 - DNA, 15 bp, Homo sapiens
acttaatggctaagg

SEQ ID NO: 1783641 - DNA, 15 bp, Homo sapiens
cttaatggctaaggt

SEQ ID NO: 1783642 - DNA, 15 bp, Homo sapiens
ttaatggctaaggta

SEQ ID NO: 1783643 - DNA, 15 bp, Homo sapiens
taatggctaaggtat

SEQ ID NO: 1783644 - DNA, 15 bp, Homo sapiens
aatggctaaggtata

SEQ ID NO: 1783645 - DNA, 15 bp, Homo sapiens
atggctaaggtatac

SEQ ID NO: 1783646 - DNA, 15 bp, Homo sapiens
tggctaaggtataca

SEQ ID NO: 1783647 - DNA, 15 bp, Homo sapiens
ggctaaggtatacat

SEQ ID NO: 1783648 - DNA, 15 bp, Homo sapiens
gctaaggtatacatg

SEQ ID NO: 1783649 - DNA, 15 bp, Homo sapiens
ctaaggtatacatgt

SEQ ID NO: 1783650 - DNA, 15 bp, Homo sapiens
taaggtatacatgta

SEQ ID NO: 1783651 - DNA, 15 bp, Homo sapiens
aaggtatacatgtac

SEQ ID NO: 1783652 - DNA, 15 bp, Homo sapiens
aggtatacatgtaca

SEQ ID NO: 1783653 - DNA, 15 bp, Homo sapiens
ggtatacatgtacac

SEQ ID NO: 1783654 - DNA, 15 bp, Homo sapiens
gtatacatgtacacg

SEQ ID NO: 1783655 - DNA, 15 bp, Homo sapiens
tatacatgtacacgt

SEQ ID NO: 1783656 - DNA, 15 bp, Homo sapiens
atacatgtacacgta

SEQ ID NO: 1783657 - DNA, 15 bp, Homo sapiens
tacatgtacacgtat

SEQ ID NO: 1783658 - DNA, 15 bp, Homo sapiens
acatgtacacgtatt

SEQ ID NO: 1783659 - DNA, 15 bp, Homo sapiens
catgtacacgtattc

SEQ ID NO: 1783660 - DNA, 15 bp, Homo sapiens
atgtacacgtattct

SEQ ID NO: 1783661 - DNA, 15 bp, Homo sapiens
tgtacacgtattcta

SEQ ID NO: 1783662 - DNA, 15 bp, Homo sapiens
gtacacgtattctat

SEQ ID NO: 1783663 - DNA, 15 bp, Homo sapiens
tacacgtattctatt

SEQ ID NO: 1783664 - DNA, 15 bp, Homo sapiens
acacgtattctattt

SEQ ID NO: 1783665 - DNA, 15 bp, Homo sapiens
cacgtattctatttg

SEQ ID NO: 1783666 - DNA, 15 bp, Homo sapiens
acgtattctatttga

SEQ ID NO: 1783667 - DNA, 15 bp, Homo sapiens
cgtattctatttgac

SEQ ID NO: 1783668 - DNA, 15 bp, Homo sapiens
gtattctatttgact

SEQ ID NO: 1783669 - DNA, 15 bp, Homo sapiens
tattctatttgacta

SEQ ID NO: 1783670 - DNA, 15 bp, Homo sapiens
attctatttgactaa

SEQ ID NO: 1783671 - DNA, 15 bp, Homo sapiens
ttctatttgactaac

SEQ ID NO: 1783672 - DNA, 15 bp, Homo sapiens
tctatttgactaaca

SEQ ID NO: 1783673 - DNA, 15 bp, Homo sapiens
ctatttgactaacat

SEQ ID NO: 1783674 - DNA, 15 bp, Homo sapiens
tatttgactaacatt

SEQ ID NO: 1783675 - DNA, 15 bp, Homo sapiens
atttgactaacattt

SEQ ID NO: 1783676 - DNA, 15 bp, Homo sapiens
tttgactaacatttg

SEQ ID NO: 1783677 - DNA, 15 bp, Homo sapiens
ttgactaacatttga

SEQ ID NO: 1783678 - DNA, 15 bp, Homo sapiens
tgactaacatttgag

SEQ ID NO: 1783679 - DNA, 15 bp, Homo sapiens
gactaacatttgagg

SEQ ID NO: 1783680 - DNA, 15 bp, Homo sapiens
actaacatttgaggt

SEQ ID NO: 1783681 - DNA, 15 bp, Homo sapiens
ctaacatttgaggta

SEQ ID NO: 1783682 - DNA, 15 bp, Homo sapiens
taacatttgaggtaa

SEQ ID NO: 1783683 - DNA, 15 bp, Homo sapiens
aacatttgaggtaaa

SEQ ID NO: 1783684 - DNA, 15 bp, Homo sapiens
acatttgaggtaaaa

SEQ ID NO: 1783685 - DNA, 15 bp, Homo sapiens
catttgaggtaaaaa

SEQ ID NO: 1783686 - DNA, 15 bp, Homo sapiens
atttgaggtaaaaaa

SEQ ID NO: 1783687 - DNA, 15 bp, Homo sapiens
tttgaggtaaaaaac

SEQ ID NO: 1783688 - DNA, 15 bp, Homo sapiens
ttgaggtaaaaaaca

SEQ ID NO: 1783689 - DNA, 15 bp, Homo sapiens
tgaggtaaaaaacat

SEQ ID NO: 1783690 - DNA, 15 bp, Homo sapiens
gaggtaaaaaacatg

SEQ ID NO: 1783691 - DNA, 15 bp, Homo sapiens
aggtaaaaaacatgg

SEQ ID NO: 1783692 - DNA, 15 bp, Homo sapiens
ggtaaaaaacatggg

SEQ ID NO: 1783693 - DNA, 15 bp, Homo sapiens
gtaaaaaacatgggg

SEQ ID NO: 1783694 - DNA, 15 bp, Homo sapiens
taaaaaacatggggg

SEQ ID NO: 1783695 - DNA, 15 bp, Homo sapiens
aaaaaacatggggga

SEQ ID NO: 1783696 - DNA, 15 bp, Homo sapiens
aaaaacatgggggaa

SEQ ID NO: 1783697 - DNA, 15 bp, Homo sapiens
aaaacatgggggaaa

SEQ ID NO: 1783698 - DNA, 15 bp, Homo sapiens
aaacatgggggaaag

SEQ ID NO: 1783699 - DNA, 15 bp, Homo sapiens
aacatgggggaaagg

SEQ ID NO: 1783700 - DNA, 15 bp, Homo sapiens
acatgggggaaagga

SEQ ID NO: 1783701 - DNA, 15 bp, Homo sapiens
catgggggaaaggag

SEQ ID NO: 1783702 - DNA, 15 bp, Homo sapiens
atgggggaaaggagc

SEQ ID NO: 1783703 - DNA, 15 bp, Homo sapiens
tgggggaaaggagca

SEQ ID NO: 1783704 - DNA, 15 bp, Homo sapiens
gggggaaaggagcag

SEQ ID NO: 1783705 - DNA, 15 bp, Homo sapiens
ggggaaaggagcaga

SEQ ID NO: 1783706 - DNA, 15 bp, Homo sapiens
gggaaaggagcagat

SEQ ID NO: 1783707 - DNA, 15 bp, Homo sapiens
ggaaaggagcagata

SEQ ID NO: 1783708 - DNA, 15 bp, Homo sapiens
gaaaggagcagataa

SEQ ID NO: 1783709 - DNA, 15 bp, Homo sapiens
aaaggagcagataac

SEQ ID NO: 1783710 - DNA, 15 bp, Homo sapiens
aaggagcagataaca

SEQ ID NO: 1783711 - DNA, 15 bp, Homo sapiens
aggagcagataacac

SEQ ID NO: 1783712 - DNA, 15 bp, Homo sapiens
ggagcagataacaca

SEQ ID NO: 1783713 - DNA, 15 bp, Homo sapiens
gagcagataacacat

SEQ ID NO: 1783714 - DNA, 15 bp, Homo sapiens
agcagataacacata

SEQ ID NO: 1783715 - DNA, 15 bp, Homo sapiens
gcagataacacatat

SEQ ID NO: 1783716 - DNA, 15 bp, Homo sapiens
cagataacacatatt

SEQ ID NO: 1783717 - DNA, 15 bp, Homo sapiens
agataacacatattt

SEQ ID NO: 1783718 - DNA, 15 bp, Homo sapiens
gataacacatatttt

SEQ ID NO: 1783719 - DNA, 15 bp, Homo sapiens
ataacacatattttt

SEQ ID NO: 1783720 - DNA, 15 bp, Homo sapiens
taacacatattttta

SEQ ID NO: 1783721 - DNA, 15 bp, Homo sapiens
aacacatatttttag

SEQ ID NO: 1783722 - DNA, 15 bp, Homo sapiens
acacatatttttaga

SEQ ID NO: 1783723 - DNA, 15 bp, Homo sapiens
cacatatttttagag

SEQ ID NO: 1783724 - DNA, 15 bp, Homo sapiens
acatatttttagagg

SEQ ID NO: 1783725 - DNA, 15 bp, Homo sapiens
catatttttagagga

SEQ ID NO: 1783726 - DNA, 15 bp, Homo sapiens
atatttttagaggat

SEQ ID NO: 1783727 - DNA, 15 bp, Homo sapiens
tatttttagaggatt

SEQ ID NO: 1783728 - DNA, 15 bp, Homo sapiens
atttttagaggattt

SEQ ID NO: 1783729 - DNA, 15 bp, Homo sapiens
tttttagaggattta

SEQ ID NO: 1783730 - DNA, 15 bp, Homo sapiens
ttttagaggatttag

SEQ ID NO: 1783731 - DNA, 15 bp, Homo sapiens
tttagaggatttaga

SEQ ID NO: 1783732 - DNA, 15 bp, Homo sapiens
ttagaggatttagag

SEQ ID NO: 1783733 - DNA, 15 bp, Homo sapiens
tagaggatttagagt

SEQ ID NO: 1783734 - DNA, 15 bp, Homo sapiens
agaggatttagagta

SEQ ID NO: 1783735 - DNA, 15 bp, Homo sapiens
gaggatttagagtat

SEQ ID NO: 1783736 - DNA, 15 bp, Homo sapiens
aggatttagagtata

SEQ ID NO: 1783737 - DNA, 15 bp, Homo sapiens
ggatttagagtatat

SEQ ID NO: 1783738 - DNA, 15 bp, Homo sapiens
gatttagagtatata

SEQ ID NO: 1783739 - DNA, 15 bp, Homo sapiens
atttagagtatatat

SEQ ID NO: 1783740 - DNA, 15 bp, Homo sapiens
tttagagtatatata

SEQ ID NO: 1783741 - DNA, 15 bp, Homo sapiens
ttagagtatatataa

SEQ ID NO: 1783742 - DNA, 15 bp, Homo sapiens
tagagtatatataac

SEQ ID NO: 1783743 - DNA, 15 bp, Homo sapiens
agagtatatataact

SEQ ID NO: 1783744 - DNA, 15 bp, Homo sapiens
gagtatatataacta

SEQ ID NO: 1783745 - DNA, 15 bp, Homo sapiens
agtatatataactaa

SEQ ID NO: 1783746 - DNA, 15 bp, Homo sapiens
gtatatataactaag

SEQ ID NO: 1783747 - DNA, 15 bp, Homo sapiens
tatatataactaaga

SEQ ID NO: 1783748 - DNA, 15 bp, Homo sapiens
atatataactaagaa

SEQ ID NO: 1783749 - DNA, 15 bp, Homo sapiens
tatataactaagaag

SEQ ID NO: 1783750 - DNA, 15 bp, Homo sapiens
atataactaagaagg

SEQ ID NO: 1783751 - DNA, 15 bp, Homo sapiens
tataactaagaaggt

SEQ ID NO: 1783752 - DNA, 15 bp, Homo sapiens
ataactaagaaggtt

SEQ ID NO: 1783753 - DNA, 15 bp, Homo sapiens
taactaagaaggttc

SEQ ID NO: 1783754 - DNA, 15 bp, Homo sapiens
aactaagaaggttcc

SEQ ID NO: 1783755 - DNA, 15 bp, Homo sapiens
actaagaaggttccc

SEQ ID NO: 1783756 - DNA, 15 bp, Homo sapiens
ctaagaaggttccct

SEQ ID NO: 1783757 - DNA, 15 bp, Homo sapiens
taagaaggttccctt

SEQ ID NO: 1783758 - DNA, 15 bp, Homo sapiens
aagaaggttcccttt

SEQ ID NO: 1783759 - DNA, 15 bp, Homo sapiens
agaaggttcccttta

SEQ ID NO: 1783760 - DNA, 15 bp, Homo sapiens
gaaggttccctttat

SEQ ID NO: 1783761 - DNA, 15 bp, Homo sapiens
aaggttccctttatt

SEQ ID NO: 1783762 - DNA, 15 bp, Homo sapiens
aggttccctttattt

SEQ ID NO: 1783763 - DNA, 15 bp, Homo sapiens
ggttccctttatttg

SEQ ID NO: 1783764 - DNA, 15 bp, Homo sapiens
gttccctttatttgt

SEQ ID NO: 1783765 - DNA, 15 bp, Homo sapiens
ttccctttatttgtt

SEQ ID NO: 1783766 - DNA, 15 bp, Homo sapiens
tccctttatttgtta

SEQ ID NO: 1783767 - DNA, 15 bp, Homo sapiens
ccctttatttgttat

SEQ ID NO: 1783768 - DNA, 15 bp, Homo sapiens
cctttatttgttatt

SEQ ID NO: 1783769 - DNA, 15 bp, Homo sapiens
ctttatttgttattt

SEQ ID NO: 1783770 - DNA, 15 bp, Homo sapiens
tttatttgttatttt

SEQ ID NO: 1783771 - DNA, 15 bp, Homo sapiens
ttatttgttattttt

SEQ ID NO: 1783772 - DNA, 15 bp, Homo sapiens
tatttgttatttttt

SEQ ID NO: 1783773 - DNA, 15 bp, Homo sapiens
atttgttattttttg

SEQ ID NO: 1783774 - DNA, 15 bp, Homo sapiens
tttgttattttttgg

SEQ ID NO: 1783775 - DNA, 15 bp, Homo sapiens
ttgttattttttggg

SEQ ID NO: 1783776 - DNA, 15 bp, Homo sapiens
tgttattttttggga

SEQ ID NO: 1783777 - DNA, 15 bp, Homo sapiens
gttattttttgggag

SEQ ID NO: 1783778 - DNA, 15 bp, Homo sapiens
ttattttttgggagg

SEQ ID NO: 1783779 - DNA, 15 bp, Homo sapiens
tttttgggagggaat

SEQ ID NO: 1783780 - DNA, 15 bp, Homo sapiens
ttttgggagggaatc

SEQ ID NO: 1783781 - DNA, 15 bp, Homo sapiens
tttgggagggaatcc

SEQ ID NO: 1783782 - DNA, 15 bp, Homo sapiens
ttgggagggaatcct

SEQ ID NO: 1783783 - DNA, 15 bp, Homo sapiens
tgggagggaatcctg

SEQ ID NO: 1783784 - DNA, 15 bp, Homo sapiens
gggagggaatcctgc

SEQ ID NO: 1783785 - DNA, 15 bp, Homo sapiens
ggagggaatcctgct

SEQ ID NO: 1783786 - DNA, 15 bp, Homo sapiens
gagggaatcctgctc

SEQ ID NO: 1783787 - DNA, 15 bp, Homo sapiens
agggaatcctgctct

SEQ ID NO: 1783788 - DNA, 15 bp, Homo sapiens
gggaatcctgctctg

SEQ ID NO: 1783789 - DNA, 15 bp, Homo sapiens
ggaatcctgctctgt

SEQ ID NO: 1783790 - DNA, 15 bp, Homo sapiens
gaatcctgctctgtc

SEQ ID NO: 1783791 - DNA, 15 bp, Homo sapiens
aatcctgctctgtca

SEQ ID NO: 1783792 - DNA, 15 bp, Homo sapiens
atcctgctctgtcac

SEQ ID NO: 1783793 - DNA, 15 bp, Homo sapiens
ctgtcacccagacta

SEQ ID NO: 1783794 - DNA, 15 bp, Homo sapiens
tgtcacccagactag

SEQ ID NO: 1783795 - DNA, 15 bp, Homo sapiens
gtcacccagactaga

SEQ ID NO: 1783796 - DNA, 15 bp, Homo sapiens
tcacccagactagag

SEQ ID NO: 1783797 - DNA, 15 bp, Homo sapiens
cacccagactagagt

SEQ ID NO: 1783798 - DNA, 15 bp, Homo sapiens
acccagactagagta

SEQ ID NO: 1783799 - DNA, 15 bp, Homo sapiens
cccagactagagtac

SEQ ID NO: 1783800 - DNA, 15 bp, Homo sapiens
ccagactagagtaca

SEQ ID NO: 1783801 - DNA, 15 bp, Homo sapiens
cagactagagtacag

SEQ ID NO: 1783802 - DNA, 15 bp, Homo sapiens
agactagagtacagt

SEQ ID NO: 1783803 - DNA, 15 bp, Homo sapiens
gactagagtacagtg

SEQ ID NO: 1783804 - DNA, 15 bp, Homo sapiens
actagagtacagtgg

SEQ ID NO: 1783805 - DNA, 15 bp, Homo sapiens
ctagagtacagtggc

SEQ ID NO: 1783806 - DNA, 15 bp, Homo sapiens
tagagtacagtggca

SEQ ID NO: 1783807 - DNA, 15 bp, Homo sapiens
agagtacagtggcac

SEQ ID NO: 1783808 - DNA, 15 bp, Homo sapiens
ctgcaacctctgccc

SEQ ID NO: 1783809 - DNA, 15 bp, Homo sapiens
tgcaacctctgccct

SEQ ID NO: 1783810 - DNA, 15 bp, Homo sapiens
gcaacctctgccctc

SEQ ID NO: 1783811 - DNA, 15 bp, Homo sapiens
caacctctgccctct

SEQ ID NO: 1783812 - DNA, 15 bp, Homo sapiens
aacctctgccctctg

SEQ ID NO: 1783813 - DNA, 15 bp, Homo sapiens
acctctgccctctgg

SEQ ID NO: 1783814 - DNA, 15 bp, Homo sapiens
cctctgccctctggg

SEQ ID NO: 1783815 - DNA, 15 bp, Homo sapiens
ctctgccctctgggt

SEQ ID NO: 1783816 - DNA, 15 bp, Homo sapiens
tctgccctctgggtt

SEQ ID NO: 1783817 - DNA, 15 bp, Homo sapiens
ctgccctctgggttc

SEQ ID NO: 1783818 - DNA, 15 bp, Homo sapiens
tgccctctgggttca

SEQ ID NO: 1783819 - DNA, 15 bp, Homo sapiens
gccctctgggttcaa

SEQ ID NO: 1783820 - DNA, 15 bp, Homo sapiens
ccctctgggttcaag

SEQ ID NO: 1783821 - DNA, 15 bp, Homo sapiens
cctctgggttcaagc

SEQ ID NO: 1783822 - DNA, 15 bp, Homo sapiens
ctctgggttcaagcg

SEQ ID NO: 1783823 - DNA, 15 bp, Homo sapiens
tctgggttcaagcga

SEQ ID NO: 1783824 - DNA, 15 bp, Homo sapiens
gggattataggtgcg

SEQ ID NO: 1783825 - DNA, 15 bp, Homo sapiens
ggattataggtgcgt

SEQ ID NO: 1783826 - DNA, 15 bp, Homo sapiens
gattataggtgcgtg

SEQ ID NO: 1783827 - DNA, 15 bp, Homo sapiens
attataggtgcgtgc

SEQ ID NO: 1783828 - DNA, 15 bp, Homo sapiens
ttataggtgcgtgcc

SEQ ID NO: 1783829 - DNA, 15 bp, Homo sapiens
tataggtgcgtgcca

SEQ ID NO: 1783830 - DNA, 15 bp, Homo sapiens
ataggtgcgtgccac

SEQ ID NO: 1783831 - DNA, 15 bp, Homo sapiens
taggtgcgtgccacc

SEQ ID NO: 1783832 - DNA, 15 bp, Homo sapiens
gtgccaccatgcccg

SEQ ID NO: 1783833 - DNA, 15 bp, Homo sapiens
cccggctaattttta

SEQ ID NO: 1783834 - DNA, 15 bp, Homo sapiens
ccggctaatttttat

SEQ ID NO: 1783835 - DNA, 15 bp, Homo sapiens
cggctaatttttata

SEQ ID NO: 1783836 - DNA, 15 bp, Homo sapiens
tttatatttttagtg

SEQ ID NO: 1783837 - DNA, 15 bp, Homo sapiens
ttatatttttagtgg

SEQ ID NO: 1783838 - DNA, 15 bp, Homo sapiens
tatatttttagtgga

SEQ ID NO: 1783839 - DNA, 15 bp, Homo sapiens
atatttttagtggag

SEQ ID NO: 1783840 - DNA, 15 bp, Homo sapiens
ggagatggggtttca

SEQ ID NO: 1783841 - DNA, 15 bp, Homo sapiens
tcttgaactcctgat

SEQ ID NO: 1783842 - DNA, 15 bp, Homo sapiens
cttgaactcctgatc

SEQ ID NO: 1783843 - DNA, 15 bp, Homo sapiens
ttgaactcctgatct

SEQ ID NO: 1783844 - DNA, 15 bp, Homo sapiens
tgaactcctgatctc

SEQ ID NO: 1783845 - DNA, 15 bp, Homo sapiens
acctgcctcagcctt

SEQ ID NO: 1783846 - DNA, 15 bp, Homo sapiens
tgcctcagccttcca

SEQ ID NO: 1783847 - DNA, 15 bp, Homo sapiens
gcctcagccttccaa

SEQ ID NO: 1783848 - DNA, 15 bp, Homo sapiens
ctcagccttccaagg

SEQ ID NO: 1783849 - DNA, 15 bp, Homo sapiens
tcagccttccaaggt

SEQ ID NO: 1783850 - DNA, 15 bp, Homo sapiens
cagccttccaaggtg

SEQ ID NO: 1783851 - DNA, 15 bp, Homo sapiens
agccttccaaggtgc

SEQ ID NO: 1783852 - DNA, 15 bp, Homo sapiens
gccttccaaggtgct

SEQ ID NO: 1783853 - DNA, 15 bp, Homo sapiens
ccttccaaggtgctg

SEQ ID NO: 1783854 - DNA, 15 bp, Homo sapiens
cttccaaggtgctgg

SEQ ID NO: 1783855 - DNA, 15 bp, Homo sapiens
ttccaaggtgctggg

SEQ ID NO: 1783856 - DNA, 15 bp, Homo sapiens
tccaaggtgctggga

SEQ ID NO: 1783857 - DNA, 15 bp, Homo sapiens
ggcctgagccaccat

SEQ ID NO: 1783858 - DNA, 15 bp, Homo sapiens
gcctgagccaccatg

SEQ ID NO: 1783859 - DNA, 15 bp, Homo sapiens
cctgagccaccatgc

SEQ ID NO: 1783860 - DNA, 15 bp, Homo sapiens
ctgagccaccatgcc

SEQ ID NO: 1783861 - DNA, 15 bp, Homo sapiens
ccaccatgcctggcc

SEQ ID NO: 1783862 - DNA, 15 bp, Homo sapiens
caccatgcctggccc

SEQ ID NO: 1783863 - DNA, 15 bp, Homo sapiens
accatgcctggcccc

SEQ ID NO: 1783864 - DNA, 15 bp, Homo sapiens
ccatgcctggcccca

SEQ ID NO: 1783865 - DNA, 15 bp, Homo sapiens
catgcctggccccat

SEQ ID NO: 1783866 - DNA, 15 bp, Homo sapiens
atgcctggccccatt

SEQ ID NO: 1783867 - DNA, 15 bp, Homo sapiens
tgcctggccccattt

SEQ ID NO: 1783868 - DNA, 15 bp, Homo sapiens
gcctggccccatttt

SEQ ID NO: 1783869 - DNA, 15 bp, Homo sapiens
cctggccccatttta

SEQ ID NO: 1783870 - DNA, 15 bp, Homo sapiens
ctggccccattttaa

SEQ ID NO: 1783871 - DNA, 15 bp, Homo sapiens
tggccccattttaaa

SEQ ID NO: 1783872 - DNA, 15 bp, Homo sapiens
ggccccattttaaat

SEQ ID NO: 1783873 - DNA, 15 bp, Homo sapiens
gccccattttaaatc

SEQ ID NO: 1783874 - DNA, 15 bp, Homo sapiens
ccccattttaaatct

SEQ ID NO: 1783875 - DNA, 15 bp, Homo sapiens
cccattttaaatctt

SEQ ID NO: 1783876 - DNA, 15 bp, Homo sapiens
ccattttaaatctta

SEQ ID NO: 1783877 - DNA, 15 bp, Homo sapiens
cattttaaatcttat

SEQ ID NO: 1783878 - DNA, 15 bp, Homo sapiens
attttaaatcttatt

SEQ ID NO: 1783879 - DNA, 15 bp, Homo sapiens
ttttaaatcttattc

SEQ ID NO: 1783880 - DNA, 15 bp, Homo sapiens
tttaaatcttattct

SEQ ID NO: 1783881 - DNA, 15 bp, Homo sapiens
ttaaatcttattctc

SEQ ID NO: 1783882 - DNA, 15 bp, Homo sapiens
taaatcttattctca

SEQ ID NO: 1783883 - DNA, 15 bp, Homo sapiens
aaatcttattctcac

SEQ ID NO: 1783884 - DNA, 15 bp, Homo sapiens
aatcttattctcact

SEQ ID NO: 1783885 - DNA, 15 bp, Homo sapiens
atcttattctcactt

SEQ ID NO: 1783886 - DNA, 15 bp, Homo sapiens
tcttattctcacttt

SEQ ID NO: 1783887 - DNA, 15 bp, Homo sapiens
cttattctcactttg

SEQ ID NO: 1783888 - DNA, 15 bp, Homo sapiens
ttattctcactttga

SEQ ID NO: 1783889 - DNA, 15 bp, Homo sapiens
tattctcactttgag

SEQ ID NO: 1783890 - DNA, 15 bp, Homo sapiens
attctcactttgagg

SEQ ID NO: 1783891 - DNA, 15 bp, Homo sapiens
ttctcactttgaggt

SEQ ID NO: 1783892 - DNA, 15 bp, Homo sapiens
tctcactttgaggtg

SEQ ID NO: 1783893 - DNA, 15 bp, Homo sapiens
ctcactttgaggtgg

SEQ ID NO: 1783894 - DNA, 15 bp, Homo sapiens
tcactttgaggtgga

SEQ ID NO: 1783895 - DNA, 15 bp, Homo sapiens
cactttgaggtggag

SEQ ID NO: 1783896 - DNA, 15 bp, Homo sapiens
actttgaggtggagt

SEQ ID NO: 1783897 - DNA, 15 bp, Homo sapiens
ctttgaggtggagtt

SEQ ID NO: 1783898 - DNA, 15 bp, Homo sapiens
tttgaggtggagtta

SEQ ID NO: 1783899 - DNA, 15 bp, Homo sapiens
ttgaggtggagttaa

SEQ ID NO: 1783900 - DNA, 15 bp, Homo sapiens
tgaggtggagttaat

SEQ ID NO: 1783901 - DNA, 15 bp, Homo sapiens
gaggtggagttaatc

SEQ ID NO: 1783902 - DNA, 15 bp, Homo sapiens
aggtggagttaatct

SEQ ID NO: 1783903 - DNA, 15 bp, Homo sapiens
ggtggagttaatctc

SEQ ID NO: 1783904 - DNA, 15 bp, Homo sapiens
gtggagttaatctca

SEQ ID NO: 1783905 - DNA, 15 bp, Homo sapiens
tggagttaatctcag

SEQ ID NO: 1783906 - DNA, 15 bp, Homo sapiens
ggagttaatctcaga

SEQ ID NO: 1783907 - DNA, 15 bp, Homo sapiens
gagttaatctcagaa

SEQ ID NO: 1783908 - DNA, 15 bp, Homo sapiens
agttaatctcagaaa

SEQ ID NO: 1783909 - DNA, 15 bp, Homo sapiens
gttaatctcagaaaa

SEQ ID NO: 1783910 - DNA, 15 bp, Homo sapiens
ttaatctcagaaaac

SEQ ID NO: 1783911 - DNA, 15 bp, Homo sapiens
taatctcagaaaact

SEQ ID NO: 1783912 - DNA, 15 bp, Homo sapiens
aatctcagaaaactt

SEQ ID NO: 1783913 - DNA, 15 bp, Homo sapiens
atctcagaaaacttt

SEQ ID NO: 1783914 - DNA, 15 bp, Homo sapiens
tctcagaaaactttg

SEQ ID NO: 1783915 - DNA, 15 bp, Homo sapiens
ctcagaaaactttga

SEQ ID NO: 1783916 - DNA, 15 bp, Homo sapiens
tcagaaaactttgag

SEQ ID NO: 1783917 - DNA, 15 bp, Homo sapiens
cagaaaactttgaga

SEQ ID NO: 1783918 - DNA, 15 bp, Homo sapiens
agaaaactttgagat

SEQ ID NO: 1783919 - DNA, 15 bp, Homo sapiens
gaaaactttgagatt

SEQ ID NO: 1783920 - DNA, 15 bp, Homo sapiens
aaaactttgagatta

SEQ ID NO: 1783921 - DNA, 15 bp, Homo sapiens
aaactttgagattaa

SEQ ID NO: 1783922 - DNA, 15 bp, Homo sapiens
aactttgagattaag

SEQ ID NO: 1783923 - DNA, 15 bp, Homo sapiens
actttgagattaagt

SEQ ID NO: 1783924 - DNA, 15 bp, Homo sapiens
ctttgagattaagtt

SEQ ID NO: 1783925 - DNA, 15 bp, Homo sapiens
tttgagattaagtta

SEQ ID NO: 1783926 - DNA, 15 bp, Homo sapiens
ttgagattaagttat

SEQ ID NO: 1783927 - DNA, 15 bp, Homo sapiens
tgagattaagttatc

SEQ ID NO: 1783928 - DNA, 15 bp, Homo sapiens
gagattaagttatct

SEQ ID NO: 1783929 - DNA, 15 bp, Homo sapiens
agattaagttatctt

SEQ ID NO: 1783930 - DNA, 15 bp, Homo sapiens
gattaagttatctta

SEQ ID NO: 1783931 - DNA, 15 bp, Homo sapiens
attaagttatcttaa

SEQ ID NO: 1783932 - DNA, 15 bp, Homo sapiens
ttaagttatcttaat

SEQ ID NO: 1783933 - DNA, 15 bp, Homo sapiens
taagttatcttaata

SEQ ID NO: 1783934 - DNA, 15 bp, Homo sapiens
aagttatcttaatat

SEQ ID NO: 1783935 - DNA, 15 bp, Homo sapiens
agttatcttaatatc

SEQ ID NO: 1783936 - DNA, 15 bp, Homo sapiens
gttatcttaatatca

SEQ ID NO: 1783937 - DNA, 15 bp, Homo sapiens
ttatcttaatatcaa

SEQ ID NO: 1783938 - DNA, 15 bp, Homo sapiens
tatcttaatatcaac

SEQ ID NO: 1783939 - DNA, 15 bp, Homo sapiens
atcttaatatcaacc

SEQ ID NO: 1783940 - DNA, 15 bp, Homo sapiens
tcttaatatcaacct

SEQ ID NO: 1783941 - DNA, 15 bp, Homo sapiens
cttaatatcaacctt

SEQ ID NO: 1783942 - DNA, 15 bp, Homo sapiens
ttaatatcaaccttc

SEQ ID NO: 1783943 - DNA, 15 bp, Homo sapiens
taatatcaaccttct

SEQ ID NO: 1783944 - DNA, 15 bp, Homo sapiens
aatatcaaccttctc

SEQ ID NO: 1783945 - DNA, 15 bp, Homo sapiens
atatcaaccttctca

SEQ ID NO: 1783946 - DNA, 15 bp, Homo sapiens
tatcaaccttctcac

SEQ ID NO: 1783947 - DNA, 15 bp, Homo sapiens
atcaaccttctcact

SEQ ID NO: 1783948 - DNA, 15 bp, Homo sapiens
tcaaccttctcactt

SEQ ID NO: 1783949 - DNA, 15 bp, Homo sapiens
caaccttctcacttt

SEQ ID NO: 1783950 - DNA, 15 bp, Homo sapiens
aaccttctcacttta

SEQ ID NO: 1783951 - DNA, 15 bp, Homo sapiens
accttctcactttat

SEQ ID NO: 1783952 - DNA, 15 bp, Homo sapiens
ccttctcactttatt

SEQ ID NO: 1783953 - DNA, 15 bp, Homo sapiens
cttctcactttattc

SEQ ID NO: 1783954 - DNA, 15 bp, Homo sapiens
ttctcactttattca

SEQ ID NO: 1783955 - DNA, 15 bp, Homo sapiens
tctcactttattcat

SEQ ID NO: 1783956 - DNA, 15 bp, Homo sapiens
ctcactttattcatt

SEQ ID NO: 1783957 - DNA, 15 bp, Homo sapiens
tcactttattcattt

SEQ ID NO: 1783958 - DNA, 15 bp, Homo sapiens
cactttattcattta

SEQ ID NO: 1783959 - DNA, 15 bp, Homo sapiens
actttattcatttat

SEQ ID NO: 1783960 - DNA, 15 bp, Homo sapiens
ctttattcatttatt

SEQ ID NO: 1783961 - DNA, 15 bp, Homo sapiens
tttattcatttattc

SEQ ID NO: 1783962 - DNA, 15 bp, Homo sapiens
ttattcatttattca

SEQ ID NO: 1783963 - DNA, 15 bp, Homo sapiens
tattcatttattcaa

SEQ ID NO: 1783964 - DNA, 15 bp, Homo sapiens
attcatttattcaac

SEQ ID NO: 1783965 - DNA, 15 bp, Homo sapiens
ttcatttattcaaca

SEQ ID NO: 1783966 - DNA, 15 bp, Homo sapiens
tcatttattcaacaa

SEQ ID NO: 1783967 - DNA, 15 bp, Homo sapiens
catttattcaacaaa

SEQ ID NO: 1783968 - DNA, 15 bp, Homo sapiens
atttattcaacaaat

SEQ ID NO: 1783969 - DNA, 15 bp, Homo sapiens
tttattcaacaaatg

SEQ ID NO: 1783970 - DNA, 15 bp, Homo sapiens
ttattcaacaaatgt

SEQ ID NO: 1783971 - DNA, 15 bp, Homo sapiens
tattcaacaaatgtt

SEQ ID NO: 1783972 - DNA, 15 bp, Homo sapiens
caacaaatgtttatt

SEQ ID NO: 1783973 - DNA, 15 bp, Homo sapiens
aacaaatgtttattg

SEQ ID NO: 1783974 - DNA, 15 bp, Homo sapiens
acaaatgtttattga

SEQ ID NO: 1783975 - DNA, 15 bp, Homo sapiens
caaatgtttattgag

SEQ ID NO: 1783976 - DNA, 15 bp, Homo sapiens
aaatgtttattgagc

SEQ ID NO: 1783977 - DNA, 15 bp, Homo sapiens
aatgtttattgagcc

SEQ ID NO: 1783978 - DNA, 15 bp, Homo sapiens
atgtttattgagccc

SEQ ID NO: 1783979 - DNA, 15 bp, Homo sapiens
tgtttattgagccct

SEQ ID NO: 1783980 - DNA, 15 bp, Homo sapiens
gtttattgagccctt

SEQ ID NO: 1783981 - DNA, 15 bp, Homo sapiens
tttattgagccctta

SEQ ID NO: 1783982 - DNA, 15 bp, Homo sapiens
ttattgagcccttac

SEQ ID NO: 1783983 - DNA, 15 bp, Homo sapiens
tattgagcccttact

SEQ ID NO: 1783984 - DNA, 15 bp, Homo sapiens
attgagcccttactg

SEQ ID NO: 1783985 - DNA, 15 bp, Homo sapiens
ttgagcccttactgt

SEQ ID NO: 1783986 - DNA, 15 bp, Homo sapiens
tgagcccttactgtg

SEQ ID NO: 1783987 - DNA, 15 bp, Homo sapiens
gagcccttactgtgt

SEQ ID NO: 1783988 - DNA, 15 bp, Homo sapiens
agcccttactgtgtg

SEQ ID NO: 1783989 - DNA, 15 bp, Homo sapiens
gcccttactgtgtgc

SEQ ID NO: 1783990 - DNA, 15 bp, Homo sapiens
cccttactgtgtgcc

SEQ ID NO: 1783991 - DNA, 15 bp, Homo sapiens
ccttactgtgtgcca

SEQ ID NO: 1783992 - DNA, 15 bp, Homo sapiens
cttactgtgtgccag

SEQ ID NO: 1783993 - DNA, 15 bp, Homo sapiens
ttactgtgtgccagg

SEQ ID NO: 1783994 - DNA, 15 bp, Homo sapiens
tgtgtgccaggtagt

SEQ ID NO: 1783995 - DNA, 15 bp, Homo sapiens
gtgtgccaggtagtt

SEQ ID NO: 1783996 - DNA, 15 bp, Homo sapiens
tgtgccaggtagttt

SEQ ID NO: 1783997 - DNA, 15 bp, Homo sapiens
gtgccaggtagtttt

SEQ ID NO: 1783998 - DNA, 15 bp, Homo sapiens
tgccaggtagtttta

SEQ ID NO: 1783999 - DNA, 15 bp, Homo sapiens
gccaggtagttttaa

SEQ ID NO: 1784000 - DNA, 15 bp, Homo sapiens
ccaggtagttttaaa

SEQ ID NO: 1784001 - DNA, 15 bp, Homo sapiens
caggtagttttaaac

SEQ ID NO: 1784002 - DNA, 15 bp, Homo sapiens
aggtagttttaaaca

SEQ ID NO: 1784003 - DNA, 15 bp, Homo sapiens
ggtagttttaaacat

SEQ ID NO: 1784004 - DNA, 15 bp, Homo sapiens
gtagttttaaacatt

SEQ ID NO: 1784005 - DNA, 15 bp, Homo sapiens
gtacatgacccaaat

SEQ ID NO: 1784006 - DNA, 15 bp, Homo sapiens
tacatgacccaaata

SEQ ID NO: 1784007 - DNA, 15 bp, Homo sapiens
acatgacccaaataa

SEQ ID NO: 1784008 - DNA, 15 bp, Homo sapiens
catgacccaaataaa

SEQ ID NO: 1784009 - DNA, 15 bp, Homo sapiens
atgacccaaataaag

SEQ ID NO: 1784010 - DNA, 15 bp, Homo sapiens
tgacccaaataaagt

SEQ ID NO: 1784011 - DNA, 15 bp, Homo sapiens
gacccaaataaagtc

SEQ ID NO: 1784012 - DNA, 15 bp, Homo sapiens
acccaaataaagtca

SEQ ID NO: 1784013 - DNA, 15 bp, Homo sapiens
cccaaataaagtcat

SEQ ID NO: 1784014 - DNA, 15 bp, Homo sapiens
ccaaataaagtcata

SEQ ID NO: 1784015 - DNA, 15 bp, Homo sapiens
caaataaagtcatat

SEQ ID NO: 1784016 - DNA, 15 bp, Homo sapiens
aaataaagtcatata

SEQ ID NO: 1784017 - DNA, 15 bp, Homo sapiens
aataaagtcatataa

SEQ ID NO: 1784018 - DNA, 15 bp, Homo sapiens
ataaagtcatataaa

SEQ ID NO: 1784019 - DNA, 15 bp, Homo sapiens
taaagtcatataaaa

SEQ ID NO: 1784020 - DNA, 15 bp, Homo sapiens
aaagtcatataaaag

SEQ ID NO: 1784021 - DNA, 15 bp, Homo sapiens
aagtcatataaaaga

SEQ ID NO: 1784022 - DNA, 15 bp, Homo sapiens
agtcatataaaagag

SEQ ID NO: 1784023 - DNA, 15 bp, Homo sapiens
gtcatataaaagagt

SEQ ID NO: 1784024 - DNA, 15 bp, Homo sapiens
catataaaagagtac

SEQ ID NO: 1784025 - DNA, 15 bp, Homo sapiens
atataaaagagtaca

SEQ ID NO: 1784026 - DNA, 15 bp, Homo sapiens
tataaaagagtacag

SEQ ID NO: 1784027 - DNA, 15 bp, Homo sapiens
ataaaagagtacaga

SEQ ID NO: 1784028 - DNA, 15 bp, Homo sapiens
taaaagagtacagag

SEQ ID NO: 1784029 - DNA, 15 bp, Homo sapiens
aaaagagtacagagt

SEQ ID NO: 1784030 - DNA, 15 bp, Homo sapiens
aaagagtacagagtg

SEQ ID NO: 1784031 - DNA, 15 bp, Homo sapiens
aagagtacagagtgc

SEQ ID NO: 1784032 - DNA, 15 bp, Homo sapiens
agagtacagagtgct

SEQ ID NO: 1784033 - DNA, 15 bp, Homo sapiens
gagtacagagtgcta

SEQ ID NO: 1784034 - DNA, 15 bp, Homo sapiens
agtacagagtgctac

SEQ ID NO: 1784035 - DNA, 15 bp, Homo sapiens
gtacagagtgctact

SEQ ID NO: 1784036 - DNA, 15 bp, Homo sapiens
tacagagtgctactg

SEQ ID NO: 1784037 - DNA, 15 bp, Homo sapiens
acagagtgctactga

SEQ ID NO: 1784038 - DNA, 15 bp, Homo sapiens
cagagtgctactgaa

SEQ ID NO: 1784039 - DNA, 15 bp, Homo sapiens
agagtgctactgaat

SEQ ID NO: 1784040 - DNA, 15 bp, Homo sapiens
gagtgctactgaatc

SEQ ID NO: 1784041 - DNA, 15 bp, Homo sapiens
agtgctactgaatca

SEQ ID NO: 1784042 - DNA, 15 bp, Homo sapiens
gtgctactgaatcac

SEQ ID NO: 1784043 - DNA, 15 bp, Homo sapiens
tgctactgaatcacc

SEQ ID NO: 1784044 - DNA, 15 bp, Homo sapiens
gctactgaatcacct

SEQ ID NO: 1784045 - DNA, 15 bp, Homo sapiens
ctactgaatcaccta

SEQ ID NO: 1784046 - DNA, 15 bp, Homo sapiens
tactgaatcacctag

SEQ ID NO: 1784047 - DNA, 15 bp, Homo sapiens
actgaatcacctagg

SEQ ID NO: 1784048 - DNA, 15 bp, Homo sapiens
ctgaatcacctagga

SEQ ID NO: 1784049 - DNA, 15 bp, Homo sapiens
tgaatcacctaggat

SEQ ID NO: 1784050 - DNA, 15 bp, Homo sapiens
gaatcacctaggatt

SEQ ID NO: 1784051 - DNA, 15 bp, Homo sapiens
aatcacctaggattt

SEQ ID NO: 1784052 - DNA, 15 bp, Homo sapiens
atcacctaggatttg

SEQ ID NO: 1784053 - DNA, 15 bp, Homo sapiens
tcacctaggatttgc

SEQ ID NO: 1784054 - DNA, 15 bp, Homo sapiens
cacctaggatttgca

SEQ ID NO: 1784055 - DNA, 15 bp, Homo sapiens
acctaggatttgcat

SEQ ID NO: 1784056 - DNA, 15 bp, Homo sapiens
cctaggatttgcata

SEQ ID NO: 1784057 - DNA, 15 bp, Homo sapiens
ctaggatttgcataa

SEQ ID NO: 1784058 - DNA, 15 bp, Homo sapiens
taggatttgcataat

SEQ ID NO: 1784059 - DNA, 15 bp, Homo sapiens
aggatttgcataatg

SEQ ID NO: 1784060 - DNA, 15 bp, Homo sapiens
ggatttgcataatga

SEQ ID NO: 1784061 - DNA, 15 bp, Homo sapiens
gatttgcataatgag

SEQ ID NO: 1784062 - DNA, 15 bp, Homo sapiens
atttgcataatgaga

SEQ ID NO: 1784063 - DNA, 15 bp, Homo sapiens
tttgcataatgagag

SEQ ID NO: 1784064 - DNA, 15 bp, Homo sapiens
ttgcataatgagagc

SEQ ID NO: 1784065 - DNA, 15 bp, Homo sapiens
tgcataatgagagca

SEQ ID NO: 1784066 - DNA, 15 bp, Homo sapiens
gcataatgagagcag

SEQ ID NO: 1784067 - DNA, 15 bp, Homo sapiens
cataatgagagcagt

SEQ ID NO: 1784068 - DNA, 15 bp, Homo sapiens
ataatgagagcagtt

SEQ ID NO: 1784069 - DNA, 15 bp, Homo sapiens
taatgagagcagttt

SEQ ID NO: 1784070 - DNA, 15 bp, Homo sapiens
aatgagagcagtttt

SEQ ID NO: 1784071 - DNA, 15 bp, Homo sapiens
atgagagcagttttc

SEQ ID NO: 1784072 - DNA, 15 bp, Homo sapiens
tgagagcagttttca

SEQ ID NO: 1784073 - DNA, 15 bp, Homo sapiens
gagagcagttttcat

SEQ ID NO: 1784074 - DNA, 15 bp, Homo sapiens
agagcagttttcatg

SEQ ID NO: 1784075 - DNA, 15 bp, Homo sapiens
gagcagttttcatgg

SEQ ID NO: 1784076 - DNA, 15 bp, Homo sapiens
agcagttttcatggc

SEQ ID NO: 1784077 - DNA, 15 bp, Homo sapiens
gcagttttcatggca

SEQ ID NO: 1784078 - DNA, 15 bp, Homo sapiens
cagttttcatggcag

SEQ ID NO: 1784079 - DNA, 15 bp, Homo sapiens
agttttcatggcaga

SEQ ID NO: 1784080 - DNA, 15 bp, Homo sapiens
gttttcatggcagag

SEQ ID NO: 1784081 - DNA, 15 bp, Homo sapiens
ttttcatggcagagt

SEQ ID NO: 1784082 - DNA, 15 bp, Homo sapiens
tttcatggcagagtt

SEQ ID NO: 1784083 - DNA, 15 bp, Homo sapiens
ttcatggcagagttg

SEQ ID NO: 1784084 - DNA, 15 bp, Homo sapiens
tcatggcagagttgg

SEQ ID NO: 1784085 - DNA, 15 bp, Homo sapiens
catggcagagttggc

SEQ ID NO: 1784086 - DNA, 15 bp, Homo sapiens
atggcagagttggca

SEQ ID NO: 1784087 - DNA, 15 bp, Homo sapiens
tggcagagttggcag

SEQ ID NO: 1784088 - DNA, 15 bp, Homo sapiens
ggcagagttggcagt

SEQ ID NO: 1784089 - DNA, 15 bp, Homo sapiens
gcagagttggcagtt

SEQ ID NO: 1784090 - DNA, 15 bp, Homo sapiens
cagagttggcagttt

SEQ ID NO: 1784091 - DNA, 15 bp, Homo sapiens
agagttggcagttta

SEQ ID NO: 1784092 - DNA, 15 bp, Homo sapiens
gagttggcagtttag

SEQ ID NO: 1784093 - DNA, 15 bp, Homo sapiens
agttggcagtttagg

SEQ ID NO: 1784094 - DNA, 15 bp, Homo sapiens
gttggcagtttaggt

SEQ ID NO: 1784095 - DNA, 15 bp, Homo sapiens
ttggcagtttaggtg

SEQ ID NO: 1784096 - DNA, 15 bp, Homo sapiens
tggcagtttaggtgg

SEQ ID NO: 1784097 - DNA, 15 bp, Homo sapiens
ggcagtttaggtgga

SEQ ID NO: 1784098 - DNA, 15 bp, Homo sapiens
gcagtttaggtggaa

SEQ ID NO: 1784099 - DNA, 15 bp, Homo sapiens
cagtttaggtggaat

SEQ ID NO: 1784100 - DNA, 15 bp, Homo sapiens
agtttaggtggaata

SEQ ID NO: 1784101 - DNA, 15 bp, Homo sapiens
gtttaggtggaatag

SEQ ID NO: 1784102 - DNA, 15 bp, Homo sapiens
tttaggtggaatagg

SEQ ID NO: 1784103 - DNA, 15 bp, Homo sapiens
ttaggtggaatagga

SEQ ID NO: 1784104 - DNA, 15 bp, Homo sapiens
taggtggaataggat

SEQ ID NO: 1784105 - DNA, 15 bp, Homo sapiens
aggtggaataggatt

SEQ ID NO: 1784106 - DNA, 15 bp, Homo sapiens
ggtggaataggattt

SEQ ID NO: 1784107 - DNA, 15 bp, Homo sapiens
gtggaataggatttc

SEQ ID NO: 1784108 - DNA, 15 bp, Homo sapiens
tggaataggatttca

SEQ ID NO: 1784109 - DNA, 15 bp, Homo sapiens
ggaataggatttcaa

SEQ ID NO: 1784110 - DNA, 15 bp, Homo sapiens
gaataggatttcaat

SEQ ID NO: 1784111 - DNA, 15 bp, Homo sapiens
aataggatttcaatg

SEQ ID NO: 1784112 - DNA, 15 bp, Homo sapiens
ataggatttcaatgt

SEQ ID NO: 1784113 - DNA, 15 bp, Homo sapiens
taggatttcaatgtg

SEQ ID NO: 1784114 - DNA, 15 bp, Homo sapiens
aggatttcaatgtgg

SEQ ID NO: 1784115 - DNA, 15 bp, Homo sapiens
ggatttcaatgtgga

SEQ ID NO: 1784116 - DNA, 15 bp, Homo sapiens
gatttcaatgtggaa

SEQ ID NO: 1784117 - DNA, 15 bp, Homo sapiens
atttcaatgtggaaa

SEQ ID NO: 1784118 - DNA, 15 bp, Homo sapiens
tttcaatgtggaaac

SEQ ID NO: 1784119 - DNA, 15 bp, Homo sapiens
ttcaatgtggaaact

SEQ ID NO: 1784120 - DNA, 15 bp, Homo sapiens
tcaatgtggaaactg

SEQ ID NO: 1784121 - DNA, 15 bp, Homo sapiens
caatgtggaaactgg

SEQ ID NO: 1784122 - DNA, 15 bp, Homo sapiens
aatgtggaaactgga

SEQ ID NO: 1784123 - DNA, 15 bp, Homo sapiens
atgtggaaactggag

SEQ ID NO: 1784124 - DNA, 15 bp, Homo sapiens
tgtggaaactggaga

SEQ ID NO: 1784125 - DNA, 15 bp, Homo sapiens
gtggaaactggagag

SEQ ID NO: 1784126 - DNA, 15 bp, Homo sapiens
tggaaactggagaga

SEQ ID NO: 1784127 - DNA, 15 bp, Homo sapiens
ggaaactggagagaa

SEQ ID NO: 1784128 - DNA, 15 bp, Homo sapiens
gaaactggagagaat

SEQ ID NO: 1784129 - DNA, 15 bp, Homo sapiens
aaactggagagaata

SEQ ID NO: 1784130 - DNA, 15 bp, Homo sapiens
aactggagagaatag

SEQ ID NO: 1784131 - DNA, 15 bp, Homo sapiens
actggagagaataga

SEQ ID NO: 1784132 - DNA, 15 bp, Homo sapiens
ctggagagaatagag

SEQ ID NO: 1784133 - DNA, 15 bp, Homo sapiens
tggagagaatagagg

SEQ ID NO: 1784134 - DNA, 15 bp, Homo sapiens
ggagagaatagagga

SEQ ID NO: 1784135 - DNA, 15 bp, Homo sapiens
gagagaatagaggag

SEQ ID NO: 1784136 - DNA, 15 bp, Homo sapiens
agagaatagaggaga

SEQ ID NO: 1784137 - DNA, 15 bp, Homo sapiens
gagaatagaggagac

SEQ ID NO: 1784138 - DNA, 15 bp, Homo sapiens
agaatagaggagaca

SEQ ID NO: 1784139 - DNA, 15 bp, Homo sapiens
gaatagaggagacag

SEQ ID NO: 1784140 - DNA, 15 bp, Homo sapiens
aatagaggagacaga

SEQ ID NO: 1784141 - DNA, 15 bp, Homo sapiens
atagaggagacagag

SEQ ID NO: 1784142 - DNA, 15 bp, Homo sapiens
tagaggagacagagg

SEQ ID NO: 1784143 - DNA, 15 bp, Homo sapiens
agaggagacagagga

SEQ ID NO: 1784144 - DNA, 15 bp, Homo sapiens
gaggagacagaggag

SEQ ID NO: 1784145 - DNA, 15 bp, Homo sapiens
aggagacagaggagt

SEQ ID NO: 1784146 - DNA, 15 bp, Homo sapiens
ggagacagaggagtg

SEQ ID NO: 1784147 - DNA, 15 bp, Homo sapiens
gagacagaggagtgt

SEQ ID NO: 1784148 - DNA, 15 bp, Homo sapiens
agacagaggagtgtg

SEQ ID NO: 1784149 - DNA, 15 bp, Homo sapiens
gacagaggagtgtgt

SEQ ID NO: 1784150 - DNA, 15 bp, Homo sapiens
acagaggagtgtgtt

SEQ ID NO: 1784151 - DNA, 15 bp, Homo sapiens
cagaggagtgtgttc

SEQ ID NO: 1784152 - DNA, 15 bp, Homo sapiens
agaggagtgtgttcc

SEQ ID NO: 1784153 - DNA, 15 bp, Homo sapiens
gaggagtgtgttcca

SEQ ID NO: 1784154 - DNA, 15 bp, Homo sapiens
aggagtgtgttccaa

SEQ ID NO: 1784155 - DNA, 15 bp, Homo sapiens
ggagtgtgttccaag

SEQ ID NO: 1784156 - DNA, 15 bp, Homo sapiens
gagtgtgttccaaga

SEQ ID NO: 1784157 - DNA, 15 bp, Homo sapiens
agtgtgttccaagag

SEQ ID NO: 1784158 - DNA, 15 bp, Homo sapiens
gtgtgttccaagagt

SEQ ID NO: 1784159 - DNA, 15 bp, Homo sapiens
tgtgttccaagagtc

SEQ ID NO: 1784160 - DNA, 15 bp, Homo sapiens
gtgttccaagagtca

SEQ ID NO: 1784161 - DNA, 15 bp, Homo sapiens
tgttccaagagtcag

SEQ ID NO: 1784162 - DNA, 15 bp, Homo sapiens
gttccaagagtcaga

SEQ ID NO: 1784163 - DNA, 15 bp, Homo sapiens
ttccaagagtcagaa

SEQ ID NO: 1784164 - DNA, 15 bp, Homo sapiens
tccaagagtcagaat

SEQ ID NO: 1784165 - DNA, 15 bp, Homo sapiens
ccaagagtcagaatg

SEQ ID NO: 1784166 - DNA, 15 bp, Homo sapiens
caagagtcagaatgg

SEQ ID NO: 1784167 - DNA, 15 bp, Homo sapiens
aagagtcagaatggc

SEQ ID NO: 1784168 - DNA, 15 bp, Homo sapiens
agagtcagaatggca

SEQ ID NO: 1784169 - DNA, 15 bp, Homo sapiens
gagtcagaatggcat

SEQ ID NO: 1784170 - DNA, 15 bp, Homo sapiens
agtcagaatggcatt

SEQ ID NO: 1784171 - DNA, 15 bp, Homo sapiens
gtcagaatggcatta

SEQ ID NO: 1784172 - DNA, 15 bp, Homo sapiens
tcagaatggcattaa

SEQ ID NO: 1784173 - DNA, 15 bp, Homo sapiens
cagaatggcattaac

SEQ ID NO: 1784174 - DNA, 15 bp, Homo sapiens
agaatggcattaact

SEQ ID NO: 1784175 - DNA, 15 bp, Homo sapiens
gaatggcattaactc

SEQ ID NO: 1784176 - DNA, 15 bp, Homo sapiens
aatggcattaactca

SEQ ID NO: 1784177 - DNA, 15 bp, Homo sapiens
atggcattaactcaa

SEQ ID NO: 1784178 - DNA, 15 bp, Homo sapiens
tggcattaactcaaa

SEQ ID NO: 1784179 - DNA, 15 bp, Homo sapiens
ggcattaactcaaaa

SEQ ID NO: 1784180 - DNA, 15 bp, Homo sapiens
gcattaactcaaaaa

SEQ ID NO: 1784181 - DNA, 15 bp, Homo sapiens
cattaactcaaaaat

SEQ ID NO: 1784182 - DNA, 15 bp, Homo sapiens
attaactcaaaaatg

SEQ ID NO: 1784183 - DNA, 15 bp, Homo sapiens
ttaactcaaaaatgt

SEQ ID NO: 1784184 - DNA, 15 bp, Homo sapiens
taactcaaaaatgtc

SEQ ID NO: 1784185 - DNA, 15 bp, Homo sapiens
aactcaaaaatgtca

SEQ ID NO: 1784186 - DNA, 15 bp, Homo sapiens
actcaaaaatgtcaa

SEQ ID NO: 1784187 - DNA, 15 bp, Homo sapiens
ctcaaaaatgtcaaa

SEQ ID NO: 1784188 - DNA, 15 bp, Homo sapiens
tcaaaaatgtcaaag

SEQ ID NO: 1784189 - DNA, 15 bp, Homo sapiens
caaaaatgtcaaagg

SEQ ID NO: 1784190 - DNA, 15 bp, Homo sapiens
aaaaatgtcaaagga

SEQ ID NO: 1784191 - DNA, 15 bp, Homo sapiens
aaaatgtcaaaggaa

SEQ ID NO: 1784192 - DNA, 15 bp, Homo sapiens
aaatgtcaaaggaag

SEQ ID NO: 1784193 - DNA, 15 bp, Homo sapiens
aatgtcaaaggaagc

SEQ ID NO: 1784194 - DNA, 15 bp, Homo sapiens
atgtcaaaggaagca

SEQ ID NO: 1784195 - DNA, 15 bp, Homo sapiens
tgtcaaaggaagcag

SEQ ID NO: 1784196 - DNA, 15 bp, Homo sapiens
gtcaaaggaagcaga

SEQ ID NO: 1784197 - DNA, 15 bp, Homo sapiens
tcaaaggaagcagaa

SEQ ID NO: 1784198 - DNA, 15 bp, Homo sapiens
caaaggaagcagaaa

SEQ ID NO: 1784199 - DNA, 15 bp, Homo sapiens
aaaggaagcagaaaa

SEQ ID NO: 1784200 - DNA, 15 bp, Homo sapiens
aaggaagcagaaaac

SEQ ID NO: 1784201 - DNA, 15 bp, Homo sapiens
aggaagcagaaaaca

SEQ ID NO: 1784202 - DNA, 15 bp, Homo sapiens
ggaagcagaaaacat

SEQ ID NO: 1784203 - DNA, 15 bp, Homo sapiens
gaagcagaaaacatt

SEQ ID NO: 1784204 - DNA, 15 bp, Homo sapiens
aagcagaaaacattt

SEQ ID NO: 1784205 - DNA, 15 bp, Homo sapiens
agcagaaaacatttt

SEQ ID NO: 1784206 - DNA, 15 bp, Homo sapiens
gcagaaaacattttt

SEQ ID NO: 1784207 - DNA, 15 bp, Homo sapiens
cagaaaacatttttc

SEQ ID NO: 1784208 - DNA, 15 bp, Homo sapiens
agaaaacatttttca

SEQ ID NO: 1784209 - DNA, 15 bp, Homo sapiens
gaaaacatttttcag

SEQ ID NO: 1784210 - DNA, 15 bp, Homo sapiens
aaaacatttttcaga

SEQ ID NO: 1784211 - DNA, 15 bp, Homo sapiens
aaacatttttcagag

SEQ ID NO: 1784212 - DNA, 15 bp, Homo sapiens
aacatttttcagagt

SEQ ID NO: 1784213 - DNA, 15 bp, Homo sapiens
acatttttcagagtg

SEQ ID NO: 1784214 - DNA, 15 bp, Homo sapiens
catttttcagagtgt

SEQ ID NO: 1784215 - DNA, 15 bp, Homo sapiens
atttttcagagtgtg

SEQ ID NO: 1784216 - DNA, 15 bp, Homo sapiens
tttttcagagtgtgc

SEQ ID NO: 1784217 - DNA, 15 bp, Homo sapiens
ttttcagagtgtgca

SEQ ID NO: 1784218 - DNA, 15 bp, Homo sapiens
tttcagagtgtgcag

SEQ ID NO: 1784219 - DNA, 15 bp, Homo sapiens
ttcagagtgtgcagg

SEQ ID NO: 1784220 - DNA, 15 bp, Homo sapiens
tcagagtgtgcaggt

SEQ ID NO: 1784221 - DNA, 15 bp, Homo sapiens
cagagtgtgcaggtc

SEQ ID NO: 1784222 - DNA, 15 bp, Homo sapiens
agagtgtgcaggtca

SEQ ID NO: 1784223 - DNA, 15 bp, Homo sapiens
gagtgtgcaggtcag

SEQ ID NO: 1784224 - DNA, 15 bp, Homo sapiens
agtgtgcaggtcagt

SEQ ID NO: 1784225 - DNA, 15 bp, Homo sapiens
gtgtgcaggtcagtc

SEQ ID NO: 1784226 - DNA, 15 bp, Homo sapiens
tgtgcaggtcagtcc

SEQ ID NO: 1784227 - DNA, 15 bp, Homo sapiens
gtgcaggtcagtcca

SEQ ID NO: 1784228 - DNA, 15 bp, Homo sapiens
tgcaggtcagtccat

SEQ ID NO: 1784229 - DNA, 15 bp, Homo sapiens
gcaggtcagtccatt

SEQ ID NO: 1784230 - DNA, 15 bp, Homo sapiens
caggtcagtccattt

SEQ ID NO: 1784231 - DNA, 15 bp, Homo sapiens
aggtcagtccatttg

SEQ ID NO: 1784232 - DNA, 15 bp, Homo sapiens
ggtcagtccatttgg

SEQ ID NO: 1784233 - DNA, 15 bp, Homo sapiens
gtcagtccatttgga

SEQ ID NO: 1784234 - DNA, 15 bp, Homo sapiens
tcagtccatttggag

SEQ ID NO: 1784235 - DNA, 15 bp, Homo sapiens
cagtccatttggagt

SEQ ID NO: 1784236 - DNA, 15 bp, Homo sapiens
agtccatttggagtg

SEQ ID NO: 1784237 - DNA, 15 bp, Homo sapiens
gtccatttggagtga

SEQ ID NO: 1784238 - DNA, 15 bp, Homo sapiens
tccatttggagtgaa

SEQ ID NO: 1784239 - DNA, 15 bp, Homo sapiens
ccatttggagtgaag

SEQ ID NO: 1784240 - DNA, 15 bp, Homo sapiens
catttggagtgaagc

SEQ ID NO: 1784241 - DNA, 15 bp, Homo sapiens
atttggagtgaagca

SEQ ID NO: 1784242 - DNA, 15 bp, Homo sapiens
tttggagtgaagcat

SEQ ID NO: 1784243 - DNA, 15 bp, Homo sapiens
ttggagtgaagcata

SEQ ID NO: 1784244 - DNA, 15 bp, Homo sapiens
tggagtgaagcatag

SEQ ID NO: 1784245 - DNA, 15 bp, Homo sapiens
ggagtgaagcatagg

SEQ ID NO: 1784246 - DNA, 15 bp, Homo sapiens
gagtgaagcatagga

SEQ ID NO: 1784247 - DNA, 15 bp, Homo sapiens
agtgaagcataggat

SEQ ID NO: 1784248 - DNA, 15 bp, Homo sapiens
gtgaagcataggata

SEQ ID NO: 1784249 - DNA, 15 bp, Homo sapiens
tgaagcataggataa

SEQ ID NO: 1784250 - DNA, 15 bp, Homo sapiens
gaagcataggataag

SEQ ID NO: 1784251 - DNA, 15 bp, Homo sapiens
aagcataggataagt

SEQ ID NO: 1784252 - DNA, 15 bp, Homo sapiens
agcataggataagtg

SEQ ID NO: 1784253 - DNA, 15 bp, Homo sapiens
gcataggataagtgt

SEQ ID NO: 1784254 - DNA, 15 bp, Homo sapiens
cataggataagtgta

SEQ ID NO: 1784255 - DNA, 15 bp, Homo sapiens
ataggataagtgtag

SEQ ID NO: 1784256 - DNA, 15 bp, Homo sapiens
taggataagtgtagg

SEQ ID NO: 1784257 - DNA, 15 bp, Homo sapiens
aggataagtgtaggg

SEQ ID NO: 1784258 - DNA, 15 bp, Homo sapiens
ggataagtgtaggga

SEQ ID NO: 1784259 - DNA, 15 bp, Homo sapiens
gataagtgtagggag

SEQ ID NO: 1784260 - DNA, 15 bp, Homo sapiens
ataagtgtagggaga

SEQ ID NO: 1784261 - DNA, 15 bp, Homo sapiens
taagtgtagggagaa

SEQ ID NO: 1784262 - DNA, 15 bp, Homo sapiens
aagtgtagggagaag

SEQ ID NO: 1784263 - DNA, 15 bp, Homo sapiens
agtgtagggagaagt

SEQ ID NO: 1784264 - DNA, 15 bp, Homo sapiens
gtgtagggagaagta

SEQ ID NO: 1784265 - DNA, 15 bp, Homo sapiens
tgtagggagaagtat

SEQ ID NO: 1784266 - DNA, 15 bp, Homo sapiens
gtagggagaagtatg

SEQ ID NO: 1784267 - DNA, 15 bp, Homo sapiens
tagggagaagtatgg

SEQ ID NO: 1784268 - DNA, 15 bp, Homo sapiens
agggagaagtatggg

SEQ ID NO: 1784269 - DNA, 15 bp, Homo sapiens
gggagaagtatggga

SEQ ID NO: 1784270 - DNA, 15 bp, Homo sapiens
ggagaagtatgggat

SEQ ID NO: 1784271 - DNA, 15 bp, Homo sapiens
gagaagtatgggatg

SEQ ID NO: 1784272 - DNA, 15 bp, Homo sapiens
agaagtatgggatgt

SEQ ID NO: 1784273 - DNA, 15 bp, Homo sapiens
gaagtatgggatgtg

SEQ ID NO: 1784274 - DNA, 15 bp, Homo sapiens
aagtatgggatgtgg

SEQ ID NO: 1784275 - DNA, 15 bp, Homo sapiens
agtatgggatgtgga

SEQ ID NO: 1784276 - DNA, 15 bp, Homo sapiens
gtatgggatgtggac

SEQ ID NO: 1784277 - DNA, 15 bp, Homo sapiens
tatgggatgtggact

SEQ ID NO: 1784278 - DNA, 15 bp, Homo sapiens
atgggatgtggacta

SEQ ID NO: 1784279 - DNA, 15 bp, Homo sapiens
tgggatgtggactaa

SEQ ID NO: 1784280 - DNA, 15 bp, Homo sapiens
gggatgtggactaac

SEQ ID NO: 1784281 - DNA, 15 bp, Homo sapiens
ggatgtggactaaca

SEQ ID NO: 1784282 - DNA, 15 bp, Homo sapiens
gatgtggactaacac

SEQ ID NO: 1784283 - DNA, 15 bp, Homo sapiens
atgtggactaacaca

SEQ ID NO: 1784284 - DNA, 15 bp, Homo sapiens
tgtggactaacacac

SEQ ID NO: 1784285 - DNA, 15 bp, Homo sapiens
gtggactaacacaca

SEQ ID NO: 1784286 - DNA, 15 bp, Homo sapiens
tggactaacacacag

SEQ ID NO: 1784287 - DNA, 15 bp, Homo sapiens
ggactaacacacagt

SEQ ID NO: 1784288 - DNA, 15 bp, Homo sapiens
gactaacacacagtt

SEQ ID NO: 1784289 - DNA, 15 bp, Homo sapiens
actaacacacagttg

SEQ ID NO: 1784290 - DNA, 15 bp, Homo sapiens
ctaacacacagttga

SEQ ID NO: 1784291 - DNA, 15 bp, Homo sapiens
taacacacagttgat

SEQ ID NO: 1784292 - DNA, 15 bp, Homo sapiens
aacacacagttgatt

SEQ ID NO: 1784293 - DNA, 15 bp, Homo sapiens
acacacagttgatta

SEQ ID NO: 1784294 - DNA, 15 bp, Homo sapiens
cacacagttgattag

SEQ ID NO: 1784295 - DNA, 15 bp, Homo sapiens
acacagttgattagt

SEQ ID NO: 1784296 - DNA, 15 bp, Homo sapiens
cacagttgattagtg

SEQ ID NO: 1784297 - DNA, 15 bp, Homo sapiens
acagttgattagtgt

SEQ ID NO: 1784298 - DNA, 15 bp, Homo sapiens
cagttgattagtgtg

SEQ ID NO: 1784299 - DNA, 15 bp, Homo sapiens
agttgattagtgtgt

SEQ ID NO: 1784300 - DNA, 15 bp, Homo sapiens
gttgattagtgtgtg

SEQ ID NO: 1784301 - DNA, 15 bp, Homo sapiens
ttgattagtgtgtgc

SEQ ID NO: 1784302 - DNA, 15 bp, Homo sapiens
tgattagtgtgtgct

SEQ ID NO: 1784303 - DNA, 15 bp, Homo sapiens
gattagtgtgtgctg

SEQ ID NO: 1784304 - DNA, 15 bp, Homo sapiens
attagtgtgtgctgg

SEQ ID NO: 1784305 - DNA, 15 bp, Homo sapiens
ttagtgtgtgctggt

SEQ ID NO: 1784306 - DNA, 15 bp, Homo sapiens
tagtgtgtgctggtg

SEQ ID NO: 1784307 - DNA, 15 bp, Homo sapiens
agtgtgtgctggtga

SEQ ID NO: 1784308 - DNA, 15 bp, Homo sapiens
gtgtgtgctggtgat

SEQ ID NO: 1784309 - DNA, 15 bp, Homo sapiens
tgtgtgctggtgatg

SEQ ID NO: 1784310 - DNA, 15 bp, Homo sapiens
gtgtgctggtgatga

SEQ ID NO: 1784311 - DNA, 15 bp, Homo sapiens
tgtgctggtgatgac

SEQ ID NO: 1784312 - DNA, 15 bp, Homo sapiens
gtgctggtgatgacg

SEQ ID NO: 1784313 - DNA, 15 bp, Homo sapiens
tgctggtgatgacga

SEQ ID NO: 1784314 - DNA, 15 bp, Homo sapiens
gctggtgatgacgat

SEQ ID NO: 1784315 - DNA, 15 bp, Homo sapiens
ctggtgatgacgatg

SEQ ID NO: 1784316 - DNA, 15 bp, Homo sapiens
tggtgatgacgatgg

SEQ ID NO: 1784317 - DNA, 15 bp, Homo sapiens
ggtgatgacgatggg

SEQ ID NO: 1784318 - DNA, 15 bp, Homo sapiens
gtgatgacgatggga

SEQ ID NO: 1784319 - DNA, 15 bp, Homo sapiens
tgatgacgatgggaa

SEQ ID NO: 1784320 - DNA, 15 bp, Homo sapiens
gatgacgatgggaaa

SEQ ID NO: 1784321 - DNA, 15 bp, Homo sapiens
atgacgatgggaaaa

SEQ ID NO: 1784322 - DNA, 15 bp, Homo sapiens
tgacgatgggaaaag

SEQ ID NO: 1784323 - DNA, 15 bp, Homo sapiens
gacgatgggaaaaga

SEQ ID NO: 1784324 - DNA, 15 bp, Homo sapiens
acgatgggaaaagaa

SEQ ID NO: 1784325 - DNA, 15 bp, Homo sapiens
cgatgggaaaagaaa

SEQ ID NO: 1784326 - DNA, 15 bp, Homo sapiens
gatgggaaaagaaaa

SEQ ID NO: 1784327 - DNA, 15 bp, Homo sapiens
atgggaaaagaaaat

SEQ ID NO: 1784328 - DNA, 15 bp, Homo sapiens
tgggaaaagaaaatg

SEQ ID NO: 1784329 - DNA, 15 bp, Homo sapiens
gggaaaagaaaatgt

SEQ ID NO: 1784330 - DNA, 15 bp, Homo sapiens
ggaaaagaaaatgta

SEQ ID NO: 1784331 - DNA, 15 bp, Homo sapiens
gaaaagaaaatgtaa

SEQ ID NO: 1784332 - DNA, 15 bp, Homo sapiens
aaaagaaaatgtaaa

SEQ ID NO: 1784333 - DNA, 15 bp, Homo sapiens
aaagaaaatgtaaac

SEQ ID NO: 1784334 - DNA, 15 bp, Homo sapiens
aagaaaatgtaaacc

SEQ ID NO: 1784335 - DNA, 15 bp, Homo sapiens
agaaaatgtaaaccc

SEQ ID NO: 1784336 - DNA, 15 bp, Homo sapiens
gaaaatgtaaaccca

SEQ ID NO: 1784337 - DNA, 15 bp, Homo sapiens
aaaatgtaaacccaa

SEQ ID NO: 1784338 - DNA, 15 bp, Homo sapiens
aaatgtaaacccaaa

SEQ ID NO: 1784339 - DNA, 15 bp, Homo sapiens
aatgtaaacccaaat

SEQ ID NO: 1784340 - DNA, 15 bp, Homo sapiens
atgtaaacccaaatg

SEQ ID NO: 1784341 - DNA, 15 bp, Homo sapiens
tgtaaacccaaatgt

SEQ ID NO: 1784342 - DNA, 15 bp, Homo sapiens
gtaaacccaaatgta

SEQ ID NO: 1784343 - DNA, 15 bp, Homo sapiens
taaacccaaatgtat

SEQ ID NO: 1784344 - DNA, 15 bp, Homo sapiens
aaacccaaatgtatc

SEQ ID NO: 1784345 - DNA, 15 bp, Homo sapiens
aacccaaatgtatct

SEQ ID NO: 1784346 - DNA, 15 bp, Homo sapiens
acccaaatgtatctg

SEQ ID NO: 1784347 - DNA, 15 bp, Homo sapiens
cccaaatgtatctga

SEQ ID NO: 1784348 - DNA, 15 bp, Homo sapiens
ccaaatgtatctgaa

SEQ ID NO: 1784349 - DNA, 15 bp, Homo sapiens
caaatgtatctgaaa

SEQ ID NO: 1784350 - DNA, 15 bp, Homo sapiens
aaatgtatctgaaac

SEQ ID NO: 1784351 - DNA, 15 bp, Homo sapiens
aatgtatctgaaaca

SEQ ID NO: 1784352 - DNA, 15 bp, Homo sapiens
atgtatctgaaacag

SEQ ID NO: 1784353 - DNA, 15 bp, Homo sapiens
tgtatctgaaacagg

SEQ ID NO: 1784354 - DNA, 15 bp, Homo sapiens
gtatctgaaacaggt

SEQ ID NO: 1784355 - DNA, 15 bp, Homo sapiens
tatctgaaacaggtc

SEQ ID NO: 1784356 - DNA, 15 bp, Homo sapiens
atctgaaacaggtct

SEQ ID NO: 1784357 - DNA, 15 bp, Homo sapiens
tctgaaacaggtctc

SEQ ID NO: 1784358 - DNA, 15 bp, Homo sapiens
ctgaaacaggtctca

SEQ ID NO: 1784359 - DNA, 15 bp, Homo sapiens
tgaaacaggtctcaa

SEQ ID NO: 1784360 - DNA, 15 bp, Homo sapiens
gaaacaggtctcaat

SEQ ID NO: 1784361 - DNA, 15 bp, Homo sapiens
aaacaggtctcaatc

SEQ ID NO: 1784362 - DNA, 15 bp, Homo sapiens
aacaggtctcaatca

SEQ ID NO: 1784363 - DNA, 15 bp, Homo sapiens
acaggtctcaatcaa

SEQ ID NO: 1784364 - DNA, 15 bp, Homo sapiens
caggtctcaatcaat

SEQ ID NO: 1784365 - DNA, 15 bp, Homo sapiens
aggtctcaatcaatg

SEQ ID NO: 1784366 - DNA, 15 bp, Homo sapiens
ggtctcaatcaatgt

SEQ ID NO: 1784367 - DNA, 15 bp, Homo sapiens
gtctcaatcaatgta

SEQ ID NO: 1784368 - DNA, 15 bp, Homo sapiens
tctcaatcaatgtag

SEQ ID NO: 1784369 - DNA, 15 bp, Homo sapiens
ctcaatcaatgtagt

SEQ ID NO: 1784370 - DNA, 15 bp, Homo sapiens
tcaatcaatgtagta

SEQ ID NO: 1784371 - DNA, 15 bp, Homo sapiens
caatcaatgtagtag

SEQ ID NO: 1784372 - DNA, 15 bp, Homo sapiens
aatcaatgtagtagt

SEQ ID NO: 1784373 - DNA, 15 bp, Homo sapiens
atcaatgtagtagtt

SEQ ID NO: 1784374 - DNA, 15 bp, Homo sapiens
tcaatgtagtagttt

SEQ ID NO: 1784375 - DNA, 15 bp, Homo sapiens
caatgtagtagttta

SEQ ID NO: 1784376 - DNA, 15 bp, Homo sapiens
aatgtagtagtttat

SEQ ID NO: 1784377 - DNA, 15 bp, Homo sapiens
atgtagtagtttatt

SEQ ID NO: 1784378 - DNA, 15 bp, Homo sapiens
tgtagtagtttattt

SEQ ID NO: 1784379 - DNA, 15 bp, Homo sapiens
gtagtagtttatttt

SEQ ID NO: 1784380 - DNA, 15 bp, Homo sapiens
tagtagtttattttg

SEQ ID NO: 1784381 - DNA, 15 bp, Homo sapiens
agtagtttattttgc

SEQ ID NO: 1784382 - DNA, 15 bp, Homo sapiens
gtagtttattttgcc

SEQ ID NO: 1784383 - DNA, 15 bp, Homo sapiens
tagtttattttgcca

SEQ ID NO: 1784384 - DNA, 15 bp, Homo sapiens
agtttattttgccaa

SEQ ID NO: 1784385 - DNA, 15 bp, Homo sapiens
gtttattttgccaaa

SEQ ID NO: 1784386 - DNA, 15 bp, Homo sapiens
tttattttgccaaag

SEQ ID NO: 1784387 - DNA, 15 bp, Homo sapiens
ttattttgccaaagt

SEQ ID NO: 1784388 - DNA, 15 bp, Homo sapiens
tattttgccaaagtt

SEQ ID NO: 1784389 - DNA, 15 bp, Homo sapiens
attttgccaaagtta

SEQ ID NO: 1784390 - DNA, 15 bp, Homo sapiens
ttttgccaaagttaa

SEQ ID NO: 1784391 - DNA, 15 bp, Homo sapiens
tttgccaaagttaag

SEQ ID NO: 1784392 - DNA, 15 bp, Homo sapiens
ttgccaaagttaagg

SEQ ID NO: 1784393 - DNA, 15 bp, Homo sapiens
tgccaaagttaagga

SEQ ID NO: 1784394 - DNA, 15 bp, Homo sapiens
gccaaagttaaggac

SEQ ID NO: 1784395 - DNA, 15 bp, Homo sapiens
ccaaagttaaggacg

SEQ ID NO: 1784396 - DNA, 15 bp, Homo sapiens
caaagttaaggacgt

SEQ ID NO: 1784397 - DNA, 15 bp, Homo sapiens
aaagttaaggacgtg

SEQ ID NO: 1784398 - DNA, 15 bp, Homo sapiens
aagttaaggacgtgc

SEQ ID NO: 1784399 - DNA, 15 bp, Homo sapiens
agttaaggacgtgcc

SEQ ID NO: 1784400 - DNA, 15 bp, Homo sapiens
gttaaggacgtgccc

SEQ ID NO: 1784401 - DNA, 15 bp, Homo sapiens
ttaaggacgtgccca

SEQ ID NO: 1784402 - DNA, 15 bp, Homo sapiens
taaggacgtgcccag

SEQ ID NO: 1784403 - DNA, 15 bp, Homo sapiens
aaggacgtgcccagg

SEQ ID NO: 1784404 - DNA, 15 bp, Homo sapiens
aggacgtgcccagga

SEQ ID NO: 1784405 - DNA, 15 bp, Homo sapiens
ggacgtgcccaggag

SEQ ID NO: 1784406 - DNA, 15 bp, Homo sapiens
gacgtgcccaggaga

SEQ ID NO: 1784407 - DNA, 15 bp, Homo sapiens
acgtgcccaggagag

SEQ ID NO: 1784408 - DNA, 15 bp, Homo sapiens
cgtgcccaggagaga

SEQ ID NO: 1784409 - DNA, 15 bp, Homo sapiens
gtgcccaggagagag

SEQ ID NO: 1784410 - DNA, 15 bp, Homo sapiens
tgcccaggagagaga

SEQ ID NO: 1784411 - DNA, 15 bp, Homo sapiens
gcccaggagagagat

SEQ ID NO: 1784412 - DNA, 15 bp, Homo sapiens
cccaggagagagatc

SEQ ID NO: 1784413 - DNA, 15 bp, Homo sapiens
ccaggagagagatct

SEQ ID NO: 1784414 - DNA, 15 bp, Homo sapiens
caggagagagatctg

SEQ ID NO: 1784415 - DNA, 15 bp, Homo sapiens
aggagagagatctgt

SEQ ID NO: 1784416 - DNA, 15 bp, Homo sapiens
ggagagagatctgtg

SEQ ID NO: 1784417 - DNA, 15 bp, Homo sapiens
gagagagatctgtgc

SEQ ID NO: 1784418 - DNA, 15 bp, Homo sapiens
agagagatctgtgcc

SEQ ID NO: 1784419 - DNA, 15 bp, Homo sapiens
gagagatctgtgcct

SEQ ID NO: 1784420 - DNA, 15 bp, Homo sapiens
agagatctgtgcctt

SEQ ID NO: 1784421 - DNA, 15 bp, Homo sapiens
gagatctgtgccttt

SEQ ID NO: 1784422 - DNA, 15 bp, Homo sapiens
agatctgtgcctttc

SEQ ID NO: 1784423 - DNA, 15 bp, Homo sapiens
gatctgtgcctttct

SEQ ID NO: 1784424 - DNA, 15 bp, Homo sapiens
atctgtgcctttctc

SEQ ID NO: 1784425 - DNA, 15 bp, Homo sapiens
tctgtgcctttctcc

SEQ ID NO: 1784426 - DNA, 15 bp, Homo sapiens
ctgtgcctttctcca

SEQ ID NO: 1784427 - DNA, 15 bp, Homo sapiens
tgtgcctttctccag

SEQ ID NO: 1784428 - DNA, 15 bp, Homo sapiens
gtgcctttctccagt

SEQ ID NO: 1784429 - DNA, 15 bp, Homo sapiens
tgcctttctccagtg

SEQ ID NO: 1784430 - DNA, 15 bp, Homo sapiens
gcctttctccagtga

SEQ ID NO: 1784431 - DNA, 15 bp, Homo sapiens
cctttctccagtgat

SEQ ID NO: 1784432 - DNA, 15 bp, Homo sapiens
ctttctccagtgatg

SEQ ID NO: 1784433 - DNA, 15 bp, Homo sapiens
tttctccagtgatga

SEQ ID NO: 1784434 - DNA, 15 bp, Homo sapiens
ttctccagtgatgat

SEQ ID NO: 1784435 - DNA, 15 bp, Homo sapiens
tctccagtgatgatt

SEQ ID NO: 1784436 - DNA, 15 bp, Homo sapiens
ctccagtgatgattt

SEQ ID NO: 1784437 - DNA, 15 bp, Homo sapiens
tccagtgatgatttt

SEQ ID NO: 1784438 - DNA, 15 bp, Homo sapiens
ccagtgatgattttg

SEQ ID NO: 1784439 - DNA, 15 bp, Homo sapiens
cagtgatgattttga

SEQ ID NO: 1784440 - DNA, 15 bp, Homo sapiens
agtgatgattttgag

SEQ ID NO: 1784441 - DNA, 15 bp, Homo sapiens
gtgatgattttgagg

SEQ ID NO: 1784442 - DNA, 15 bp, Homo sapiens
tgatgattttgaggg

SEQ ID NO: 1784443 - DNA, 15 bp, Homo sapiens
gatgattttgagggc

SEQ ID NO: 1784444 - DNA, 15 bp, Homo sapiens
atgattttgagggct

SEQ ID NO: 1784445 - DNA, 15 bp, Homo sapiens
tgattttgagggctc

SEQ ID NO: 1784446 - DNA, 15 bp, Homo sapiens
gattttgagggctcc

SEQ ID NO: 1784447 - DNA, 15 bp, Homo sapiens
attttgagggctcca

SEQ ID NO: 1784448 - DNA, 15 bp, Homo sapiens
ttttgagggctccaa

SEQ ID NO: 1784449 - DNA, 15 bp, Homo sapiens
tttgagggctccaat

SEQ ID NO: 1784450 - DNA, 15 bp, Homo sapiens
ttgagggctccaata

SEQ ID NO: 1784451 - DNA, 15 bp, Homo sapiens
tgagggctccaatat

SEQ ID NO: 1784452 - DNA, 15 bp, Homo sapiens
gagggctccaatatt

SEQ ID NO: 1784453 - DNA, 15 bp, Homo sapiens
agggctccaatattt

SEQ ID NO: 1784454 - DNA, 15 bp, Homo sapiens
gggctccaatattta

SEQ ID NO: 1784455 - DNA, 15 bp, Homo sapiens
ggctccaatatttaa

SEQ ID NO: 1784456 - DNA, 15 bp, Homo sapiens
gctccaatatttaaa

SEQ ID NO: 1784457 - DNA, 15 bp, Homo sapiens
ctccaatatttaaat

SEQ ID NO: 1784458 - DNA, 15 bp, Homo sapiens
tccaatatttaaatg

SEQ ID NO: 1784459 - DNA, 15 bp, Homo sapiens
ccaatatttaaatgg

SEQ ID NO: 1784460 - DNA, 15 bp, Homo sapiens
caatatttaaatggg

SEQ ID NO: 1784461 - DNA, 15 bp, Homo sapiens
aatatttaaatggga

SEQ ID NO: 1784462 - DNA, 15 bp, Homo sapiens
atatttaaatgggaa

SEQ ID NO: 1784463 - DNA, 15 bp, Homo sapiens
tatttaaatgggaaa

SEQ ID NO: 1784464 - DNA, 15 bp, Homo sapiens
atttaaatgggaaag

SEQ ID NO: 1784465 - DNA, 15 bp, Homo sapiens
tttaaatgggaaagt

SEQ ID NO: 1784466 - DNA, 15 bp, Homo sapiens
ttaaatgggaaagtc

SEQ ID NO: 1784467 - DNA, 15 bp, Homo sapiens
taaatgggaaagtca

SEQ ID NO: 1784468 - DNA, 15 bp, Homo sapiens
aaatgggaaagtcag

SEQ ID NO: 1784469 - DNA, 15 bp, Homo sapiens
aatgggaaagtcagt

SEQ ID NO: 1784470 - DNA, 15 bp, Homo sapiens
atgggaaagtcagtc

SEQ ID NO: 1784471 - DNA, 15 bp, Homo sapiens
tgggaaagtcagtct

SEQ ID NO: 1784472 - DNA, 15 bp, Homo sapiens
gggaaagtcagtctg

SEQ ID NO: 1784473 - DNA, 15 bp, Homo sapiens
ggaaagtcagtctgg

SEQ ID NO: 1784474 - DNA, 15 bp, Homo sapiens
gaaagtcagtctgga

SEQ ID NO: 1784475 - DNA, 15 bp, Homo sapiens
aaagtcagtctggag

SEQ ID NO: 1784476 - DNA, 15 bp, Homo sapiens
aagtcagtctggagg

SEQ ID NO: 1784477 - DNA, 15 bp, Homo sapiens
agtcagtctggaggg

SEQ ID NO: 1784478 - DNA, 15 bp, Homo sapiens
gtcagtctggagggg

SEQ ID NO: 1784479 - DNA, 15 bp, Homo sapiens
tcagtctggagggga

SEQ ID NO: 1784480 - DNA, 15 bp, Homo sapiens
cagtctggaggggaa

SEQ ID NO: 1784481 - DNA, 15 bp, Homo sapiens
agtctggaggggaaa

SEQ ID NO: 1784482 - DNA, 15 bp, Homo sapiens
gtctggaggggaaag

SEQ ID NO: 1784483 - DNA, 15 bp, Homo sapiens
tctggaggggaaaga

SEQ ID NO: 1784484 - DNA, 15 bp, Homo sapiens
ctggaggggaaagaa

SEQ ID NO: 1784485 - DNA, 15 bp, Homo sapiens
tggaggggaaagaaa

SEQ ID NO: 1784486 - DNA, 15 bp, Homo sapiens
ggaggggaaagaaaa

SEQ ID NO: 1784487 - DNA, 15 bp, Homo sapiens
gaggggaaagaaaaa

SEQ ID NO: 1784488 - DNA, 15 bp, Homo sapiens
aggggaaagaaaaag

SEQ ID NO: 1784489 - DNA, 15 bp, Homo sapiens
ggggaaagaaaaagg

SEQ ID NO: 1784490 - DNA, 15 bp, Homo sapiens
gggaaagaaaaaggg

SEQ ID NO: 1784491 - DNA, 15 bp, Homo sapiens
ggaaagaaaaagggt

SEQ ID NO: 1784492 - DNA, 15 bp, Homo sapiens
gaaagaaaaagggta

SEQ ID NO: 1784493 - DNA, 15 bp, Homo sapiens
aaagaaaaagggtat

SEQ ID NO: 1784494 - DNA, 15 bp, Homo sapiens
aagaaaaagggtatg

SEQ ID NO: 1784495 - DNA, 15 bp, Homo sapiens
agaaaaagggtatgg

SEQ ID NO: 1784496 - DNA, 15 bp, Homo sapiens
gaaaaagggtatggt

SEQ ID NO: 1784497 - DNA, 15 bp, Homo sapiens
aaaaagggtatggta

SEQ ID NO: 1784498 - DNA, 15 bp, Homo sapiens
aaaagggtatggtaa

SEQ ID NO: 1784499 - DNA, 15 bp, Homo sapiens
aaagggtatggtaat

SEQ ID NO: 1784500 - DNA, 15 bp, Homo sapiens
aagggtatggtaatc

SEQ ID NO: 1784501 - DNA, 15 bp, Homo sapiens
agggtatggtaatcc

SEQ ID NO: 1784502 - DNA, 15 bp, Homo sapiens
gggtatggtaatcca

SEQ ID NO: 1784503 - DNA, 15 bp, Homo sapiens
ggtatggtaatccac

SEQ ID NO: 1784504 - DNA, 15 bp, Homo sapiens
gtatggtaatccaca

SEQ ID NO: 1784505 - DNA, 15 bp, Homo sapiens
tatggtaatccacat

SEQ ID NO: 1784506 - DNA, 15 bp, Homo sapiens
atggtaatccacatg

SEQ ID NO: 1784507 - DNA, 15 bp, Homo sapiens
tggtaatccacatgt

SEQ ID NO: 1784508 - DNA, 15 bp, Homo sapiens
ggtaatccacatgtt

SEQ ID NO: 1784509 - DNA, 15 bp, Homo sapiens
gtaatccacatgttg

SEQ ID NO: 1784510 - DNA, 15 bp, Homo sapiens
taatccacatgttgc

SEQ ID NO: 1784511 - DNA, 15 bp, Homo sapiens
aatccacatgttgca

SEQ ID NO: 1784512 - DNA, 15 bp, Homo sapiens
atccacatgttgcaa

SEQ ID NO: 1784513 - DNA, 15 bp, Homo sapiens
tccacatgttgcaag

SEQ ID NO: 1784514 - DNA, 15 bp, Homo sapiens
ccacatgttgcaaga

SEQ ID NO: 1784515 - DNA, 15 bp, Homo sapiens
cacatgttgcaagag

SEQ ID NO: 1784516 - DNA, 15 bp, Homo sapiens
acatgttgcaagaga

SEQ ID NO: 1784517 - DNA, 15 bp, Homo sapiens
catgttgcaagagaa

SEQ ID NO: 1784518 - DNA, 15 bp, Homo sapiens
atgttgcaagagaaa

SEQ ID NO: 1784519 - DNA, 15 bp, Homo sapiens
tgttgcaagagaaaa

SEQ ID NO: 1784520 - DNA, 15 bp, Homo sapiens
gttgcaagagaaaaa

SEQ ID NO: 1784521 - DNA, 15 bp, Homo sapiens
ttgcaagagaaaaag

SEQ ID NO: 1784522 - DNA, 15 bp, Homo sapiens
tgcaagagaaaaaga

SEQ ID NO: 1784523 - DNA, 15 bp, Homo sapiens
gcaagagaaaaagag

SEQ ID NO: 1784524 - DNA, 15 bp, Homo sapiens
aagagaaaaagagca

SEQ ID NO: 1784525 - DNA, 15 bp, Homo sapiens
agagaaaaagagcag

SEQ ID NO: 1784526 - DNA, 15 bp, Homo sapiens
gagaaaaagagcagg

SEQ ID NO: 1784527 - DNA, 15 bp, Homo sapiens
agaaaaagagcaggt

SEQ ID NO: 1784528 - DNA, 15 bp, Homo sapiens
gaaaaagagcaggta

SEQ ID NO: 1784529 - DNA, 15 bp, Homo sapiens
aaaaagagcaggtag

SEQ ID NO: 1784530 - DNA, 15 bp, Homo sapiens
aaaagagcaggtaga

SEQ ID NO: 1784531 - DNA, 15 bp, Homo sapiens
aaagagcaggtagag

SEQ ID NO: 1784532 - DNA, 15 bp, Homo sapiens
aagagcaggtagagg

SEQ ID NO: 1784533 - DNA, 15 bp, Homo sapiens
agagcaggtagagga

SEQ ID NO: 1784534 - DNA, 15 bp, Homo sapiens
gagcaggtagaggaa

SEQ ID NO: 1784535 - DNA, 15 bp, Homo sapiens
agcaggtagaggaat

SEQ ID NO: 1784536 - DNA, 15 bp, Homo sapiens
gcaggtagaggaatc

SEQ ID NO: 1784537 - DNA, 15 bp, Homo sapiens
caggtagaggaatcg

SEQ ID NO: 1784538 - DNA, 15 bp, Homo sapiens
aggtagaggaatcgt

SEQ ID NO: 1784539 - DNA, 15 bp, Homo sapiens
ggtagaggaatcgtc

SEQ ID NO: 1784540 - DNA, 15 bp, Homo sapiens
gtagaggaatcgtca

SEQ ID NO: 1784541 - DNA, 15 bp, Homo sapiens
tagaggaatcgtcaa

SEQ ID NO: 1784542 - DNA, 15 bp, Homo sapiens
agaggaatcgtcaat

SEQ ID NO: 1784543 - DNA, 15 bp, Homo sapiens
gaggaatcgtcaatt

SEQ ID NO: 1784544 - DNA, 15 bp, Homo sapiens
aggaatcgtcaatta

SEQ ID NO: 1784545 - DNA, 15 bp, Homo sapiens
ggaatcgtcaattat

SEQ ID NO: 1784546 - DNA, 15 bp, Homo sapiens
gaatcgtcaattatc

SEQ ID NO: 1784547 - DNA, 15 bp, Homo sapiens
aatcgtcaattatct

SEQ ID NO: 1784548 - DNA, 15 bp, Homo sapiens
atcgtcaattatcta

SEQ ID NO: 1784549 - DNA, 15 bp, Homo sapiens
tcgtcaattatctat

SEQ ID NO: 1784550 - DNA, 15 bp, Homo sapiens
cgtcaattatctatc

SEQ ID NO: 1784551 - DNA, 15 bp, Homo sapiens
gtcaattatctatcc

SEQ ID NO: 1784552 - DNA, 15 bp, Homo sapiens
tcaattatctatcca

SEQ ID NO: 1784553 - DNA, 15 bp, Homo sapiens
caattatctatccat

SEQ ID NO: 1784554 - DNA, 15 bp, Homo sapiens
aattatctatccatc

SEQ ID NO: 1784555 - DNA, 15 bp, Homo sapiens
attatctatccatct

SEQ ID NO: 1784556 - DNA, 15 bp, Homo sapiens
ttatctatccatctc

SEQ ID NO: 1784557 - DNA, 15 bp, Homo sapiens
tatctatccatctca

SEQ ID NO: 1784558 - DNA, 15 bp, Homo sapiens
atctatccatctcat

SEQ ID NO: 1784559 - DNA, 15 bp, Homo sapiens
tctatccatctcatg

SEQ ID NO: 1784560 - DNA, 15 bp, Homo sapiens
ctatccatctcatgc

SEQ ID NO: 1784561 - DNA, 15 bp, Homo sapiens
tatccatctcatgct

SEQ ID NO: 1784562 - DNA, 15 bp, Homo sapiens
atccatctcatgctg

SEQ ID NO: 1784563 - DNA, 15 bp, Homo sapiens
tccatctcatgctga

SEQ ID NO: 1784564 - DNA, 15 bp, Homo sapiens
ccatctcatgctgag

SEQ ID NO: 1784565 - DNA, 15 bp, Homo sapiens
catctcatgctgagt

SEQ ID NO: 1784566 - DNA, 15 bp, Homo sapiens
atctcatgctgagtg

SEQ ID NO: 1784567 - DNA, 15 bp, Homo sapiens
tctcatgctgagtga

SEQ ID NO: 1784568 - DNA, 15 bp, Homo sapiens
ctcatgctgagtgaa

SEQ ID NO: 1784569 - DNA, 15 bp, Homo sapiens
tcatgctgagtgaat

SEQ ID NO: 1784570 - DNA, 15 bp, Homo sapiens
catgctgagtgaatc

SEQ ID NO: 1784571 - DNA, 15 bp, Homo sapiens
atgctgagtgaatcg

SEQ ID NO: 1784572 - DNA, 15 bp, Homo sapiens
tgctgagtgaatcga

SEQ ID NO: 1784573 - DNA, 15 bp, Homo sapiens
gctgagtgaatcgac

SEQ ID NO: 1784574 - DNA, 15 bp, Homo sapiens
ctgagtgaatcgaca

SEQ ID NO: 1784575 - DNA, 15 bp, Homo sapiens
tgagtgaatcgacat

SEQ ID NO: 1784576 - DNA, 15 bp, Homo sapiens
gagtgaatcgacatt

SEQ ID NO: 1784577 - DNA, 15 bp, Homo sapiens
agtgaatcgacattt

SEQ ID NO: 1784578 - DNA, 15 bp, Homo sapiens
gtgaatcgacatttt

SEQ ID NO: 1784579 - DNA, 15 bp, Homo sapiens
tgaatcgacatttta

SEQ ID NO: 1784580 - DNA, 15 bp, Homo sapiens
gaatcgacattttac

SEQ ID NO: 1784581 - DNA, 15 bp, Homo sapiens
aatcgacattttaca

SEQ ID NO: 1784582 - DNA, 15 bp, Homo sapiens
atcgacattttacat

SEQ ID NO: 1784583 - DNA, 15 bp, Homo sapiens
tcgacattttacata

SEQ ID NO: 1784584 - DNA, 15 bp, Homo sapiens
cgacattttacataa

SEQ ID NO: 1784585 - DNA, 15 bp, Homo sapiens
gacattttacataag

SEQ ID NO: 1784586 - DNA, 15 bp, Homo sapiens
acattttacataaga

SEQ ID NO: 1784587 - DNA, 15 bp, Homo sapiens
cattttacataagat

SEQ ID NO: 1784588 - DNA, 15 bp, Homo sapiens
attttacataagata

SEQ ID NO: 1784589 - DNA, 15 bp, Homo sapiens
ttttacataagataa

SEQ ID NO: 1784590 - DNA, 15 bp, Homo sapiens
tttacataagataag

SEQ ID NO: 1784591 - DNA, 15 bp, Homo sapiens
ttacataagataagg

SEQ ID NO: 1784592 - DNA, 15 bp, Homo sapiens
tacataagataaggt

SEQ ID NO: 1784593 - DNA, 15 bp, Homo sapiens
acataagataaggtg

SEQ ID NO: 1784594 - DNA, 15 bp, Homo sapiens
cataagataaggtga

SEQ ID NO: 1784595 - DNA, 15 bp, Homo sapiens
ataagataaggtgaa

SEQ ID NO: 1784596 - DNA, 15 bp, Homo sapiens
taagataaggtgaac

SEQ ID NO: 1784597 - DNA, 15 bp, Homo sapiens
aagataaggtgaaca

SEQ ID NO: 1784598 - DNA, 15 bp, Homo sapiens
agataaggtgaacat

SEQ ID NO: 1784599 - DNA, 15 bp, Homo sapiens
gataaggtgaacata

SEQ ID NO: 1784600 - DNA, 15 bp, Homo sapiens
ataaggtgaacatag

SEQ ID NO: 1784601 - DNA, 15 bp, Homo sapiens
taaggtgaacataga

SEQ ID NO: 1784602 - DNA, 15 bp, Homo sapiens
aaggtgaacatagag

SEQ ID NO: 1784603 - DNA, 15 bp, Homo sapiens
aggtgaacatagagt

SEQ ID NO: 1784604 - DNA, 15 bp, Homo sapiens
ggtgaacatagagtc

SEQ ID NO: 1784605 - DNA, 15 bp, Homo sapiens
gtgaacatagagtca

SEQ ID NO: 1784606 - DNA, 15 bp, Homo sapiens
tgaacatagagtcac

SEQ ID NO: 1784607 - DNA, 15 bp, Homo sapiens
gaacatagagtcact

SEQ ID NO: 1784608 - DNA, 15 bp, Homo sapiens
aacatagagtcactg

SEQ ID NO: 1784609 - DNA, 15 bp, Homo sapiens
acatagagtcactgt

SEQ ID NO: 1784610 - DNA, 15 bp, Homo sapiens
catagagtcactgtc

SEQ ID NO: 1784611 - DNA, 15 bp, Homo sapiens
atagagtcactgtct

SEQ ID NO: 1784612 - DNA, 15 bp, Homo sapiens
tagagtcactgtctg

SEQ ID NO: 1784613 - DNA, 15 bp, Homo sapiens
agagtcactgtctgt

SEQ ID NO: 1784614 - DNA, 15 bp, Homo sapiens
gagtcactgtctgtg

SEQ ID NO: 1784615 - DNA, 15 bp, Homo sapiens
agtcactgtctgtgg

SEQ ID NO: 1784616 - DNA, 15 bp, Homo sapiens
gtcactgtctgtgga

SEQ ID NO: 1784617 - DNA, 15 bp, Homo sapiens
tcactgtctgtggag

SEQ ID NO: 1784618 - DNA, 15 bp, Homo sapiens
cactgtctgtggagg

SEQ ID NO: 1784619 - DNA, 15 bp, Homo sapiens
actgtctgtggaggt

SEQ ID NO: 1784620 - DNA, 15 bp, Homo sapiens
ctgtctgtggaggta

SEQ ID NO: 1784621 - DNA, 15 bp, Homo sapiens
tgtctgtggaggtat

SEQ ID NO: 1784622 - DNA, 15 bp, Homo sapiens
gtctgtggaggtatt

SEQ ID NO: 1784623 - DNA, 15 bp, Homo sapiens
tctgtggaggtattt

SEQ ID NO: 1784624 - DNA, 15 bp, Homo sapiens
ctgtggaggtattta

SEQ ID NO: 1784625 - DNA, 15 bp, Homo sapiens
tgtggaggtatttaa

SEQ ID NO: 1784626 - DNA, 15 bp, Homo sapiens
gtggaggtatttaac

SEQ ID NO: 1784627 - DNA, 15 bp, Homo sapiens
tggaggtatttaacc

SEQ ID NO: 1784628 - DNA, 15 bp, Homo sapiens
ggaggtatttaacct

SEQ ID NO: 1784629 - DNA, 15 bp, Homo sapiens
gaggtatttaacctt

SEQ ID NO: 1784630 - DNA, 15 bp, Homo sapiens
aggtatttaaccttt

SEQ ID NO: 1784631 - DNA, 15 bp, Homo sapiens
ggtatttaacctttt

SEQ ID NO: 1784632 - DNA, 15 bp, Homo sapiens
gtatttaacctttta

SEQ ID NO: 1784633 - DNA, 15 bp, Homo sapiens
tatttaaccttttat

SEQ ID NO: 1784634 - DNA, 15 bp, Homo sapiens
atttaaccttttatc

SEQ ID NO: 1784635 - DNA, 15 bp, Homo sapiens
tttaaccttttatct

SEQ ID NO: 1784636 - DNA, 15 bp, Homo sapiens
ttaaccttttatctg

SEQ ID NO: 1784637 - DNA, 15 bp, Homo sapiens
taaccttttatctgt

SEQ ID NO: 1784638 - DNA, 15 bp, Homo sapiens
aaccttttatctgta

SEQ ID NO: 1784639 - DNA, 15 bp, Homo sapiens
accttttatctgtat

SEQ ID NO: 1784640 - DNA, 15 bp, Homo sapiens
ccttttatctgtatt

SEQ ID NO: 1784641 - DNA, 15 bp, Homo sapiens
cttttatctgtattt

SEQ ID NO: 1784642 - DNA, 15 bp, Homo sapiens
ttttatctgtattta

SEQ ID NO: 1784643 - DNA, 15 bp, Homo sapiens
tttatctgtatttat

SEQ ID NO: 1784644 - DNA, 15 bp, Homo sapiens
ttatctgtatttatt

SEQ ID NO: 1784645 - DNA, 15 bp, Homo sapiens
tatctgtatttattt

SEQ ID NO: 1784646 - DNA, 15 bp, Homo sapiens
atctgtatttatttg

SEQ ID NO: 1784647 - DNA, 15 bp, Homo sapiens
tctgtatttatttgt

SEQ ID NO: 1784648 - DNA, 15 bp, Homo sapiens
ctgtatttatttgtg

SEQ ID NO: 1784649 - DNA, 15 bp, Homo sapiens
tgtatttatttgtgt

SEQ ID NO: 1784650 - DNA, 15 bp, Homo sapiens
gtatttatttgtgtg

SEQ ID NO: 1784651 - DNA, 15 bp, Homo sapiens
tatttatttgtgtgg

SEQ ID NO: 1784652 - DNA, 15 bp, Homo sapiens
atttatttgtgtggg

SEQ ID NO: 1784653 - DNA, 15 bp, Homo sapiens
tttatttgtgtggga

SEQ ID NO: 1784654 - DNA, 15 bp, Homo sapiens
ttatttgtgtgggaa

SEQ ID NO: 1784655 - DNA, 15 bp, Homo sapiens
tatttgtgtgggaac

SEQ ID NO: 1784656 - DNA, 15 bp, Homo sapiens
atttgtgtgggaaca

SEQ ID NO: 1784657 - DNA, 15 bp, Homo sapiens
tttgtgtgggaacaa

SEQ ID NO: 1784658 - DNA, 15 bp, Homo sapiens
ttgtgtgggaacaaa

SEQ ID NO: 1784659 - DNA, 15 bp, Homo sapiens
tgtgtgggaacaaaa

SEQ ID NO: 1784660 - DNA, 15 bp, Homo sapiens
gtgtgggaacaaaag

SEQ ID NO: 1784661 - DNA, 15 bp, Homo sapiens
tgtgggaacaaaagg

SEQ ID NO: 1784662 - DNA, 15 bp, Homo sapiens
gtgggaacaaaagga

SEQ ID NO: 1784663 - DNA, 15 bp, Homo sapiens
tgggaacaaaaggaa

SEQ ID NO: 1784664 - DNA, 15 bp, Homo sapiens
gggaacaaaaggaaa

SEQ ID NO: 1784665 - DNA, 15 bp, Homo sapiens
ggaacaaaaggaaag

SEQ ID NO: 1784666 - DNA, 15 bp, Homo sapiens
gaacaaaaggaaagg

SEQ ID NO: 1784667 - DNA, 15 bp, Homo sapiens
aacaaaaggaaaggc

SEQ ID NO: 1784668 - DNA, 15 bp, Homo sapiens
acaaaaggaaaggca

SEQ ID NO: 1784669 - DNA, 15 bp, Homo sapiens
caaaaggaaaggcag

SEQ ID NO: 1784670 - DNA, 15 bp, Homo sapiens
aaaaggaaaggcagt

SEQ ID NO: 1784671 - DNA, 15 bp, Homo sapiens
aaaggaaaggcagtt

SEQ ID NO: 1784672 - DNA, 15 bp, Homo sapiens
aaggaaaggcagttt

SEQ ID NO: 1784673 - DNA, 15 bp, Homo sapiens
aggaaaggcagtttc

SEQ ID NO: 1784674 - DNA, 15 bp, Homo sapiens
ggaaaggcagtttct

SEQ ID NO: 1784675 - DNA, 15 bp, Homo sapiens
gaaaggcagtttctt

SEQ ID NO: 1784676 - DNA, 15 bp, Homo sapiens
aaaggcagtttcttg

SEQ ID NO: 1784677 - DNA, 15 bp, Homo sapiens
aaggcagtttcttgc

SEQ ID NO: 1784678 - DNA, 15 bp, Homo sapiens
aggcagtttcttgca

SEQ ID NO: 1784679 - DNA, 15 bp, Homo sapiens
ggcagtttcttgcat

SEQ ID NO: 1784680 - DNA, 15 bp, Homo sapiens
gcagtttcttgcatg

SEQ ID NO: 1784681 - DNA, 15 bp, Homo sapiens
cagtttcttgcatga

SEQ ID NO: 1784682 - DNA, 15 bp, Homo sapiens
agtttcttgcatgac

SEQ ID NO: 1784683 - DNA, 15 bp, Homo sapiens
gtttcttgcatgact

SEQ ID NO: 1784684 - DNA, 15 bp, Homo sapiens
tttcttgcatgactc

SEQ ID NO: 1784685 - DNA, 15 bp, Homo sapiens
ttcttgcatgactca

SEQ ID NO: 1784686 - DNA, 15 bp, Homo sapiens
tcttgcatgactcag

SEQ ID NO: 1784687 - DNA, 15 bp, Homo sapiens
cttgcatgactcaga

SEQ ID NO: 1784688 - DNA, 15 bp, Homo sapiens
ttgcatgactcagat

SEQ ID NO: 1784689 - DNA, 15 bp, Homo sapiens
tgcatgactcagatt

SEQ ID NO: 1784690 - DNA, 15 bp, Homo sapiens
gcatgactcagattt

SEQ ID NO: 1784691 - DNA, 15 bp, Homo sapiens
catgactcagatttc

SEQ ID NO: 1784692 - DNA, 15 bp, Homo sapiens
atgactcagatttca

SEQ ID NO: 1784693 - DNA, 15 bp, Homo sapiens
tgactcagatttcag

SEQ ID NO: 1784694 - DNA, 15 bp, Homo sapiens
gactcagatttcagc

SEQ ID NO: 1784695 - DNA, 15 bp, Homo sapiens
actcagatttcagct

SEQ ID NO: 1784696 - DNA, 15 bp, Homo sapiens
ctcagatttcagctt

SEQ ID NO: 1784697 - DNA, 15 bp, Homo sapiens
tcagatttcagctta

SEQ ID NO: 1784698 - DNA, 15 bp, Homo sapiens
cagatttcagcttaa

SEQ ID NO: 1784699 - DNA, 15 bp, Homo sapiens
agatttcagcttaat

SEQ ID NO: 1784700 - DNA, 15 bp, Homo sapiens
gatttcagcttaatt

SEQ ID NO: 1784701 - DNA, 15 bp, Homo sapiens
atttcagcttaattt

SEQ ID NO: 1784702 - DNA, 15 bp, Homo sapiens
tttcagcttaatttt

SEQ ID NO: 1784703 - DNA, 15 bp, Homo sapiens
ttcagcttaattttt

SEQ ID NO: 1784704 - DNA, 15 bp, Homo sapiens
tcagcttaatttttt

SEQ ID NO: 1784705 - DNA, 15 bp, Homo sapiens
cagcttaattttttc

SEQ ID NO: 1784706 - DNA, 15 bp, Homo sapiens
agcttaattttttcc

SEQ ID NO: 1784707 - DNA, 15 bp, Homo sapiens
gcttaattttttcct

SEQ ID NO: 1784708 - DNA, 15 bp, Homo sapiens
cttaattttttcctt

SEQ ID NO: 1784709 - DNA, 15 bp, Homo sapiens
ttaattttttccttt

SEQ ID NO: 1784710 - DNA, 15 bp, Homo sapiens
taattttttcctttt

SEQ ID NO: 1784711 - DNA, 15 bp, Homo sapiens
aattttttccttttg

SEQ ID NO: 1784712 - DNA, 15 bp, Homo sapiens
attttttccttttgg

SEQ ID NO: 1784713 - DNA, 15 bp, Homo sapiens
ttttttccttttggc

SEQ ID NO: 1784714 - DNA, 15 bp, Homo sapiens
tttttccttttggca

SEQ ID NO: 1784715 - DNA, 15 bp, Homo sapiens
ttttccttttggcat

SEQ ID NO: 1784716 - DNA, 15 bp, Homo sapiens
tttccttttggcata

SEQ ID NO: 1784717 - DNA, 15 bp, Homo sapiens
ttccttttggcatag

SEQ ID NO: 1784718 - DNA, 15 bp, Homo sapiens
tccttttggcatagt

SEQ ID NO: 1784719 - DNA, 15 bp, Homo sapiens
ccttttggcatagtg

SEQ ID NO: 1784720 - DNA, 15 bp, Homo sapiens
cttttggcatagtga

SEQ ID NO: 1784721 - DNA, 15 bp, Homo sapiens
ttttggcatagtgaa

SEQ ID NO: 1784722 - DNA, 15 bp, Homo sapiens
tttggcatagtgaat

SEQ ID NO: 1784723 - DNA, 15 bp, Homo sapiens
ttggcatagtgaatt

SEQ ID NO: 1784724 - DNA, 15 bp, Homo sapiens
tggcatagtgaattg

SEQ ID NO: 1784725 - DNA, 15 bp, Homo sapiens
ggcatagtgaattgg

SEQ ID NO: 1784726 - DNA, 15 bp, Homo sapiens
gcatagtgaattggg

SEQ ID NO: 1784727 - DNA, 15 bp, Homo sapiens
catagtgaattgggg

SEQ ID NO: 1784728 - DNA, 15 bp, Homo sapiens
atagtgaattggggt

SEQ ID NO: 1784729 - DNA, 15 bp, Homo sapiens
tagtgaattggggtc

SEQ ID NO: 1784730 - DNA, 15 bp, Homo sapiens
agtgaattggggtcc

SEQ ID NO: 1784731 - DNA, 15 bp, Homo sapiens
gtgaattggggtccc

SEQ ID NO: 1784732 - DNA, 15 bp, Homo sapiens
tgaattggggtccca

SEQ ID NO: 1784733 - DNA, 15 bp, Homo sapiens
gaattggggtcccaa

SEQ ID NO: 1784734 - DNA, 15 bp, Homo sapiens
aattggggtcccaag

SEQ ID NO: 1784735 - DNA, 15 bp, Homo sapiens
attggggtcccaagt

SEQ ID NO: 1784736 - DNA, 15 bp, Homo sapiens
ttggggtcccaagtg

SEQ ID NO: 1784737 - DNA, 15 bp, Homo sapiens
tggggtcccaagtgt

SEQ ID NO: 1784738 - DNA, 15 bp, Homo sapiens
ggggtcccaagtgtt

SEQ ID NO: 1784739 - DNA, 15 bp, Homo sapiens
gggtcccaagtgttt

SEQ ID NO: 1784740 - DNA, 15 bp, Homo sapiens
ggtcccaagtgttta

SEQ ID NO: 1784741 - DNA, 15 bp, Homo sapiens
gtcccaagtgtttat

SEQ ID NO: 1784742 - DNA, 15 bp, Homo sapiens
tcccaagtgtttatt

SEQ ID NO: 1784743 - DNA, 15 bp, Homo sapiens
cccaagtgtttattt

SEQ ID NO: 1784744 - DNA, 15 bp, Homo sapiens
ccaagtgtttatttt

SEQ ID NO: 1784745 - DNA, 15 bp, Homo sapiens
caagtgtttattttc

SEQ ID NO: 1784746 - DNA, 15 bp, Homo sapiens
aagtgtttattttcc

SEQ ID NO: 1784747 - DNA, 15 bp, Homo sapiens
agtgtttattttcct

SEQ ID NO: 1784748 - DNA, 15 bp, Homo sapiens
gtgtttattttcctt

SEQ ID NO: 1784749 - DNA, 15 bp, Homo sapiens
tgtttattttccttt

SEQ ID NO: 1784750 - DNA, 15 bp, Homo sapiens
gtttattttcctttc

SEQ ID NO: 1784751 - DNA, 15 bp, Homo sapiens
tttattttcctttca

SEQ ID NO: 1784752 - DNA, 15 bp, Homo sapiens
ttattttcctttcac

SEQ ID NO: 1784753 - DNA, 15 bp, Homo sapiens
tattttcctttcaca

SEQ ID NO: 1784754 - DNA, 15 bp, Homo sapiens
attttcctttcacaa

SEQ ID NO: 1784755 - DNA, 15 bp, Homo sapiens
ttttcctttcacaaa

SEQ ID NO: 1784756 - DNA, 15 bp, Homo sapiens
tttcctttcacaaaa

SEQ ID NO: 1784757 - DNA, 15 bp, Homo sapiens
ttcctttcacaaaag

SEQ ID NO: 1784758 - DNA, 15 bp, Homo sapiens
tcctttcacaaaagc

SEQ ID NO: 1784759 - DNA, 15 bp, Homo sapiens
cctttcacaaaagca

SEQ ID NO: 1784760 - DNA, 15 bp, Homo sapiens
ctttcacaaaagcaa

SEQ ID NO: 1784761 - DNA, 15 bp, Homo sapiens
tttcacaaaagcaat

SEQ ID NO: 1784762 - DNA, 15 bp, Homo sapiens
ttcacaaaagcaatc

SEQ ID NO: 1784763 - DNA, 15 bp, Homo sapiens
tcacaaaagcaatca

SEQ ID NO: 1784764 - DNA, 15 bp, Homo sapiens
cacaaaagcaatcac

SEQ ID NO: 1784765 - DNA, 15 bp, Homo sapiens
acaaaagcaatcact

SEQ ID NO: 1784766 - DNA, 15 bp, Homo sapiens
caaaagcaatcacta

SEQ ID NO: 1784767 - DNA, 15 bp, Homo sapiens
aaaagcaatcactaa

SEQ ID NO: 1784768 - DNA, 15 bp, Homo sapiens
aaagcaatcactaac

SEQ ID NO: 1784769 - DNA, 15 bp, Homo sapiens
aagcaatcactaact

SEQ ID NO: 1784770 - DNA, 15 bp, Homo sapiens
agcaatcactaactg

SEQ ID NO: 1784771 - DNA, 15 bp, Homo sapiens
gcaatcactaactgt

SEQ ID NO: 1784772 - DNA, 15 bp, Homo sapiens
caatcactaactgtg

SEQ ID NO: 1784773 - DNA, 15 bp, Homo sapiens
aatcactaactgtgt

SEQ ID NO: 1784774 - DNA, 15 bp, Homo sapiens
atcactaactgtgtg

SEQ ID NO: 1784775 - DNA, 15 bp, Homo sapiens
tcactaactgtgtgc

SEQ ID NO: 1784776 - DNA, 15 bp, Homo sapiens
cactaactgtgtgct

SEQ ID NO: 1784777 - DNA, 15 bp, Homo sapiens
actaactgtgtgctg

SEQ ID NO: 1784778 - DNA, 15 bp, Homo sapiens
ctaactgtgtgctgg

SEQ ID NO: 1784779 - DNA, 15 bp, Homo sapiens
taactgtgtgctggg

SEQ ID NO: 1784780 - DNA, 15 bp, Homo sapiens
aactgtgtgctgggc

SEQ ID NO: 1784781 - DNA, 15 bp, Homo sapiens
actgtgtgctgggca

SEQ ID NO: 1784782 - DNA, 15 bp, Homo sapiens
ctgtgtgctgggcaa

SEQ ID NO: 1784783 - DNA, 15 bp, Homo sapiens
tgtgtgctgggcaat

SEQ ID NO: 1784784 - DNA, 15 bp, Homo sapiens
gtgtgctgggcaatg

SEQ ID NO: 1784785 - DNA, 15 bp, Homo sapiens
tgtgctgggcaatgg

SEQ ID NO: 1784786 - DNA, 15 bp, Homo sapiens
gtgctgggcaatggc

SEQ ID NO: 1784787 - DNA, 15 bp, Homo sapiens
tgctgggcaatggcc

SEQ ID NO: 1784788 - DNA, 15 bp, Homo sapiens
gctgggcaatggcct

SEQ ID NO: 1784789 - DNA, 15 bp, Homo sapiens
ctgggcaatggccta

SEQ ID NO: 1784790 - DNA, 15 bp, Homo sapiens
tgggcaatggcctaa

SEQ ID NO: 1784791 - DNA, 15 bp, Homo sapiens
gggcaatggcctaag

SEQ ID NO: 1784792 - DNA, 15 bp, Homo sapiens
ggcaatggcctaagt

SEQ ID NO: 1784793 - DNA, 15 bp, Homo sapiens
gcaatggcctaagta

SEQ ID NO: 1784794 - DNA, 15 bp, Homo sapiens
caatggcctaagtac

SEQ ID NO: 1784795 - DNA, 15 bp, Homo sapiens
aatggcctaagtact

SEQ ID NO: 1784796 - DNA, 15 bp, Homo sapiens
atggcctaagtactt

SEQ ID NO: 1784797 - DNA, 15 bp, Homo sapiens
tggcctaagtactta

SEQ ID NO: 1784798 - DNA, 15 bp, Homo sapiens
ggcctaagtacttaa

SEQ ID NO: 1784799 - DNA, 15 bp, Homo sapiens
gcctaagtacttaag

SEQ ID NO: 1784800 - DNA, 15 bp, Homo sapiens
cctaagtacttaaga

SEQ ID NO: 1784801 - DNA, 15 bp, Homo sapiens
ctaagtacttaagat

SEQ ID NO: 1784802 - DNA, 15 bp, Homo sapiens
taagtacttaagatt

SEQ ID NO: 1784803 - DNA, 15 bp, Homo sapiens
aagtacttaagattt

SEQ ID NO: 1784804 - DNA, 15 bp, Homo sapiens
agtacttaagattta

SEQ ID NO: 1784805 - DNA, 15 bp, Homo sapiens
gtacttaagatttat

SEQ ID NO: 1784806 - DNA, 15 bp, Homo sapiens
tacttaagatttatt

SEQ ID NO: 1784807 - DNA, 15 bp, Homo sapiens
acttaagatttattt

SEQ ID NO: 1784808 - DNA, 15 bp, Homo sapiens
cttaagatttatttt

SEQ ID NO: 1784809 - DNA, 15 bp, Homo sapiens
ttaagatttattttt

SEQ ID NO: 1784810 - DNA, 15 bp, Homo sapiens
taagatttatttttt

SEQ ID NO: 1784811 - DNA, 15 bp, Homo sapiens
aagatttattttttc

SEQ ID NO: 1784812 - DNA, 15 bp, Homo sapiens
agatttattttttca

SEQ ID NO: 1784813 - DNA, 15 bp, Homo sapiens
gatttattttttcat

SEQ ID NO: 1784814 - DNA, 15 bp, Homo sapiens
atttattttttcatt

SEQ ID NO: 1784815 - DNA, 15 bp, Homo sapiens
tttattttttcattt

SEQ ID NO: 1784816 - DNA, 15 bp, Homo sapiens
ttattttttcattta

SEQ ID NO: 1784817 - DNA, 15 bp, Homo sapiens
tattttttcatttaa

SEQ ID NO: 1784818 - DNA, 15 bp, Homo sapiens
attttttcatttaat

SEQ ID NO: 1784819 - DNA, 15 bp, Homo sapiens
ttttttcatttaatc

SEQ ID NO: 1784820 - DNA, 15 bp, Homo sapiens
tttttcatttaatct

SEQ ID NO: 1784821 - DNA, 15 bp, Homo sapiens
ttttcatttaatctt

SEQ ID NO: 1784822 - DNA, 15 bp, Homo sapiens
tttcatttaatcttc

SEQ ID NO: 1784823 - DNA, 15 bp, Homo sapiens
ttcatttaatcttca

SEQ ID NO: 1784824 - DNA, 15 bp, Homo sapiens
tcatttaatcttcat

SEQ ID NO: 1784825 - DNA, 15 bp, Homo sapiens
tttaatcttcataac

SEQ ID NO: 1784826 - DNA, 15 bp, Homo sapiens
ttaatcttcataaca

SEQ ID NO: 1784827 - DNA, 15 bp, Homo sapiens
taatcttcataacag

SEQ ID NO: 1784828 - DNA, 15 bp, Homo sapiens
aatcttcataacagc

SEQ ID NO: 1784829 - DNA, 15 bp, Homo sapiens
atcttcataacagcc

SEQ ID NO: 1784830 - DNA, 15 bp, Homo sapiens
tcttcataacagccc

SEQ ID NO: 1784831 - DNA, 15 bp, Homo sapiens
cttcataacagccca

SEQ ID NO: 1784832 - DNA, 15 bp, Homo sapiens
ttcataacagcccat

SEQ ID NO: 1784833 - DNA, 15 bp, Homo sapiens
tcataacagcccata

SEQ ID NO: 1784834 - DNA, 15 bp, Homo sapiens
cataacagcccataa

SEQ ID NO: 1784835 - DNA, 15 bp, Homo sapiens
ataacagcccataag

SEQ ID NO: 1784836 - DNA, 15 bp, Homo sapiens
taacagcccataagg

SEQ ID NO: 1784837 - DNA, 15 bp, Homo sapiens
aacagcccataaggt

SEQ ID NO: 1784838 - DNA, 15 bp, Homo sapiens
acagcccataaggta

SEQ ID NO: 1784839 - DNA, 15 bp, Homo sapiens
cagcccataaggtaa

SEQ ID NO: 1784840 - DNA, 15 bp, Homo sapiens
agcccataaggtaac

SEQ ID NO: 1784841 - DNA, 15 bp, Homo sapiens
gcccataaggtaaca

SEQ ID NO: 1784842 - DNA, 15 bp, Homo sapiens
cccataaggtaacag

SEQ ID NO: 1784843 - DNA, 15 bp, Homo sapiens
ccataaggtaacaga

SEQ ID NO: 1784844 - DNA, 15 bp, Homo sapiens
cataaggtaacagat

SEQ ID NO: 1784845 - DNA, 15 bp, Homo sapiens
ataaggtaacagata

SEQ ID NO: 1784846 - DNA, 15 bp, Homo sapiens
taaggtaacagatac

SEQ ID NO: 1784847 - DNA, 15 bp, Homo sapiens
aaggtaacagatact

SEQ ID NO: 1784848 - DNA, 15 bp, Homo sapiens
aggtaacagatactg

SEQ ID NO: 1784849 - DNA, 15 bp, Homo sapiens
ggtaacagatactgc

SEQ ID NO: 1784850 - DNA, 15 bp, Homo sapiens
gtaacagatactgct

SEQ ID NO: 1784851 - DNA, 15 bp, Homo sapiens
taacagatactgctg

SEQ ID NO: 1784852 - DNA, 15 bp, Homo sapiens
aacagatactgctgt

SEQ ID NO: 1784853 - DNA, 15 bp, Homo sapiens
acagatactgctgtc

SEQ ID NO: 1784854 - DNA, 15 bp, Homo sapiens
cagatactgctgtca

SEQ ID NO: 1784855 - DNA, 15 bp, Homo sapiens
agatactgctgtcag

SEQ ID NO: 1784856 - DNA, 15 bp, Homo sapiens
gatactgctgtcagc

SEQ ID NO: 1784857 - DNA, 15 bp, Homo sapiens
atactgctgtcagcc

SEQ ID NO: 1784858 - DNA, 15 bp, Homo sapiens
tactgctgtcagcct

SEQ ID NO: 1784859 - DNA, 15 bp, Homo sapiens
actgctgtcagcctg

SEQ ID NO: 1784860 - DNA, 15 bp, Homo sapiens
ctgctgtcagcctgt

SEQ ID NO: 1784861 - DNA, 15 bp, Homo sapiens
tgctgtcagcctgtt

SEQ ID NO: 1784862 - DNA, 15 bp, Homo sapiens
gctgtcagcctgtta

SEQ ID NO: 1784863 - DNA, 15 bp, Homo sapiens
ctgtcagcctgttaa

SEQ ID NO: 1784864 - DNA, 15 bp, Homo sapiens
tgtcagcctgttaac

SEQ ID NO: 1784865 - DNA, 15 bp, Homo sapiens
gtcagcctgttaact

SEQ ID NO: 1784866 - DNA, 15 bp, Homo sapiens
tcagcctgttaacta

SEQ ID NO: 1784867 - DNA, 15 bp, Homo sapiens
cagcctgttaactat

SEQ ID NO: 1784868 - DNA, 15 bp, Homo sapiens
agcctgttaactata

SEQ ID NO: 1784869 - DNA, 15 bp, Homo sapiens
gcctgttaactataa

SEQ ID NO: 1784870 - DNA, 15 bp, Homo sapiens
cctgttaactataaa

SEQ ID NO: 1784871 - DNA, 15 bp, Homo sapiens
ctgttaactataaaa

SEQ ID NO: 1784872 - DNA, 15 bp, Homo sapiens
tgttaactataaaat

SEQ ID NO: 1784873 - DNA, 15 bp, Homo sapiens
gttaactataaaata

SEQ ID NO: 1784874 - DNA, 15 bp, Homo sapiens
ttaactataaaatag

SEQ ID NO: 1784875 - DNA, 15 bp, Homo sapiens
taactataaaatagg

SEQ ID NO: 1784876 - DNA, 15 bp, Homo sapiens
aactataaaatagga

SEQ ID NO: 1784877 - DNA, 15 bp, Homo sapiens
actataaaataggaa

SEQ ID NO: 1784878 - DNA, 15 bp, Homo sapiens
ctataaaataggaat

SEQ ID NO: 1784879 - DNA, 15 bp, Homo sapiens
tataaaataggaatt

SEQ ID NO: 1784880 - DNA, 15 bp, Homo sapiens
ataaaataggaatta

SEQ ID NO: 1784881 - DNA, 15 bp, Homo sapiens
taaaataggaattag

SEQ ID NO: 1784882 - DNA, 15 bp, Homo sapiens
aaaataggaattaga

SEQ ID NO: 1784883 - DNA, 15 bp, Homo sapiens
aaataggaattagag

SEQ ID NO: 1784884 - DNA, 15 bp, Homo sapiens
aataggaattagaga

SEQ ID NO: 1784885 - DNA, 15 bp, Homo sapiens
ataggaattagagaa

SEQ ID NO: 1784886 - DNA, 15 bp, Homo sapiens
taggaattagagaaa

SEQ ID NO: 1784887 - DNA, 15 bp, Homo sapiens
aggaattagagaaat

SEQ ID NO: 1784888 - DNA, 15 bp, Homo sapiens
ggaattagagaaata

SEQ ID NO: 1784889 - DNA, 15 bp, Homo sapiens
gaattagagaaataa

SEQ ID NO: 1784890 - DNA, 15 bp, Homo sapiens
aattagagaaataag

SEQ ID NO: 1784891 - DNA, 15 bp, Homo sapiens
attagagaaataaga

SEQ ID NO: 1784892 - DNA, 15 bp, Homo sapiens
ttagagaaataagat

SEQ ID NO: 1784893 - DNA, 15 bp, Homo sapiens
tagagaaataagata

SEQ ID NO: 1784894 - DNA, 15 bp, Homo sapiens
agagaaataagataa

SEQ ID NO: 1784895 - DNA, 15 bp, Homo sapiens
gagaaataagataac

SEQ ID NO: 1784896 - DNA, 15 bp, Homo sapiens
agaaataagataact

SEQ ID NO: 1784897 - DNA, 15 bp, Homo sapiens
gaaataagataactt

SEQ ID NO: 1784898 - DNA, 15 bp, Homo sapiens
aaataagataacttg

SEQ ID NO: 1784899 - DNA, 15 bp, Homo sapiens
aataagataacttgc

SEQ ID NO: 1784900 - DNA, 15 bp, Homo sapiens
ataagataacttgcc

SEQ ID NO: 1784901 - DNA, 15 bp, Homo sapiens
taagataacttgcct

SEQ ID NO: 1784902 - DNA, 15 bp, Homo sapiens
aagataacttgccta

SEQ ID NO: 1784903 - DNA, 15 bp, Homo sapiens
agataacttgcctaa

SEQ ID NO: 1784904 - DNA, 15 bp, Homo sapiens
gataacttgcctaag

SEQ ID NO: 1784905 - DNA, 15 bp, Homo sapiens
ataacttgcctaagg

SEQ ID NO: 1784906 - DNA, 15 bp, Homo sapiens
taacttgcctaaggt

SEQ ID NO: 1784907 - DNA, 15 bp, Homo sapiens
aacttgcctaaggtc

SEQ ID NO: 1784908 - DNA, 15 bp, Homo sapiens
acttgcctaaggtca

SEQ ID NO: 1784909 - DNA, 15 bp, Homo sapiens
cttgcctaaggtcaa

SEQ ID NO: 1784910 - DNA, 15 bp, Homo sapiens
ttgcctaaggtcaat

SEQ ID NO: 1784911 - DNA, 15 bp, Homo sapiens
tgcctaaggtcaata

SEQ ID NO: 1784912 - DNA, 15 bp, Homo sapiens
gcctaaggtcaatag

SEQ ID NO: 1784913 - DNA, 15 bp, Homo sapiens
cctaaggtcaataga

SEQ ID NO: 1784914 - DNA, 15 bp, Homo sapiens
ctaaggtcaatagaa

SEQ ID NO: 1784915 - DNA, 15 bp, Homo sapiens
taaggtcaatagaat

SEQ ID NO: 1784916 - DNA, 15 bp, Homo sapiens
aaggtcaatagaatt

SEQ ID NO: 1784917 - DNA, 15 bp, Homo sapiens
aggtcaatagaattc

SEQ ID NO: 1784918 - DNA, 15 bp, Homo sapiens
ggtcaatagaattca

SEQ ID NO: 1784919 - DNA, 15 bp, Homo sapiens
gtcaatagaattcaa

SEQ ID NO: 1784920 - DNA, 15 bp, Homo sapiens
tcaatagaattcaaa

SEQ ID NO: 1784921 - DNA, 15 bp, Homo sapiens
caatagaattcaaac

SEQ ID NO: 1784922 - DNA, 15 bp, Homo sapiens
agaattcaaacccaa

SEQ ID NO: 1784923 - DNA, 15 bp, Homo sapiens
gaattcaaacccaag

SEQ ID NO: 1784924 - DNA, 15 bp, Homo sapiens
aattcaaacccaagc

SEQ ID NO: 1784925 - DNA, 15 bp, Homo sapiens
attcaaacccaagct

SEQ ID NO: 1784926 - DNA, 15 bp, Homo sapiens
ttcaaacccaagcta

SEQ ID NO: 1784927 - DNA, 15 bp, Homo sapiens
tcaaacccaagctat

SEQ ID NO: 1784928 - DNA, 15 bp, Homo sapiens
caaacccaagctatc

SEQ ID NO: 1784929 - DNA, 15 bp, Homo sapiens
aaacccaagctatct

SEQ ID NO: 1784930 - DNA, 15 bp, Homo sapiens
aacccaagctatcta

SEQ ID NO: 1784931 - DNA, 15 bp, Homo sapiens
acccaagctatctaa

SEQ ID NO: 1784932 - DNA, 15 bp, Homo sapiens
cccaagctatctaat

SEQ ID NO: 1784933 - DNA, 15 bp, Homo sapiens
ccaagctatctaatc

SEQ ID NO: 1784934 - DNA, 15 bp, Homo sapiens
caagctatctaatcc

SEQ ID NO: 1784935 - DNA, 15 bp, Homo sapiens
aagctatctaatccc

SEQ ID NO: 1784936 - DNA, 15 bp, Homo sapiens
agctatctaatccca

SEQ ID NO: 1784937 - DNA, 15 bp, Homo sapiens
gctatctaatcccaa

SEQ ID NO: 1784938 - DNA, 15 bp, Homo sapiens
ctatctaatcccaaa

SEQ ID NO: 1784939 - DNA, 15 bp, Homo sapiens
tatctaatcccaaag

SEQ ID NO: 1784940 - DNA, 15 bp, Homo sapiens
atctaatcccaaagt

SEQ ID NO: 1784941 - DNA, 15 bp, Homo sapiens
tctaatcccaaagtc

SEQ ID NO: 1784942 - DNA, 15 bp, Homo sapiens
ctaatcccaaagtcc

SEQ ID NO: 1784943 - DNA, 15 bp, Homo sapiens
taatcccaaagtcca

SEQ ID NO: 1784944 - DNA, 15 bp, Homo sapiens
aatcccaaagtccag

SEQ ID NO: 1784945 - DNA, 15 bp, Homo sapiens
atcccaaagtccagg

SEQ ID NO: 1784946 - DNA, 15 bp, Homo sapiens
tcccaaagtccaggc

SEQ ID NO: 1784947 - DNA, 15 bp, Homo sapiens
cccaaagtccaggct

SEQ ID NO: 1784948 - DNA, 15 bp, Homo sapiens
ccaaagtccaggctc

SEQ ID NO: 1784949 - DNA, 15 bp, Homo sapiens
caaagtccaggctct

SEQ ID NO: 1784950 - DNA, 15 bp, Homo sapiens
aaagtccaggctctt

SEQ ID NO: 1784951 - DNA, 15 bp, Homo sapiens
aagtccaggctctta

SEQ ID NO: 1784952 - DNA, 15 bp, Homo sapiens
agtccaggctcttaa

SEQ ID NO: 1784953 - DNA, 15 bp, Homo sapiens
gtccaggctcttaat

SEQ ID NO: 1784954 - DNA, 15 bp, Homo sapiens
tccaggctcttaatc

SEQ ID NO: 1784955 - DNA, 15 bp, Homo sapiens
ccaggctcttaatca

SEQ ID NO: 1784956 - DNA, 15 bp, Homo sapiens
caggctcttaatcac

SEQ ID NO: 1784957 - DNA, 15 bp, Homo sapiens
aggctcttaatcact

SEQ ID NO: 1784958 - DNA, 15 bp, Homo sapiens
ggctcttaatcactc

SEQ ID NO: 1784959 - DNA, 15 bp, Homo sapiens
gctcttaatcactct

SEQ ID NO: 1784960 - DNA, 15 bp, Homo sapiens
ctcttaatcactcta

SEQ ID NO: 1784961 - DNA, 15 bp, Homo sapiens
tcttaatcactctaa

SEQ ID NO: 1784962 - DNA, 15 bp, Homo sapiens
cttaatcactctaac

SEQ ID NO: 1784963 - DNA, 15 bp, Homo sapiens
ttaatcactctaact

SEQ ID NO: 1784964 - DNA, 15 bp, Homo sapiens
taatcactctaacta

SEQ ID NO: 1784965 - DNA, 15 bp, Homo sapiens
aatcactctaactac

SEQ ID NO: 1784966 - DNA, 15 bp, Homo sapiens
atcactctaactaca

SEQ ID NO: 1784967 - DNA, 15 bp, Homo sapiens
tcactctaactacat

SEQ ID NO: 1784968 - DNA, 15 bp, Homo sapiens
cactctaactacatt

SEQ ID NO: 1784969 - DNA, 15 bp, Homo sapiens
actctaactacattg

SEQ ID NO: 1784970 - DNA, 15 bp, Homo sapiens
ctctaactacattgc

SEQ ID NO: 1784971 - DNA, 15 bp, Homo sapiens
tctaactacattgcc

SEQ ID NO: 1784972 - DNA, 15 bp, Homo sapiens
ctaactacattgcct

SEQ ID NO: 1784973 - DNA, 15 bp, Homo sapiens
taactacattgcctt

SEQ ID NO: 1784974 - DNA, 15 bp, Homo sapiens
aactacattgccttt

SEQ ID NO: 1784975 - DNA, 15 bp, Homo sapiens
actacattgcctttc

SEQ ID NO: 1784976 - DNA, 15 bp, Homo sapiens
ctacattgcctttca

SEQ ID NO: 1784977 - DNA, 15 bp, Homo sapiens
tacattgcctttcac

SEQ ID NO: 1784978 - DNA, 15 bp, Homo sapiens
acattgcctttcaca

SEQ ID NO: 1784979 - DNA, 15 bp, Homo sapiens
cattgcctttcacag

SEQ ID NO: 1784980 - DNA, 15 bp, Homo sapiens
attgcctttcacaga

SEQ ID NO: 1784981 - DNA, 15 bp, Homo sapiens
ttgcctttcacagaa

SEQ ID NO: 1784982 - DNA, 15 bp, Homo sapiens
tgcctttcacagaaa

SEQ ID NO: 1784983 - DNA, 15 bp, Homo sapiens
gcctttcacagaaat

SEQ ID NO: 1784984 - DNA, 15 bp, Homo sapiens
cctttcacagaaatg

SEQ ID NO: 1784985 - DNA, 15 bp, Homo sapiens
ctttcacagaaatgt

SEQ ID NO: 1784986 - DNA, 15 bp, Homo sapiens
tttcacagaaatgtg

SEQ ID NO: 1784987 - DNA, 15 bp, Homo sapiens
ttcacagaaatgtgc

SEQ ID NO: 1784988 - DNA, 15 bp, Homo sapiens
tcacagaaatgtgcc

SEQ ID NO: 1784989 - DNA, 15 bp, Homo sapiens
cacagaaatgtgcct

SEQ ID NO: 1784990 - DNA, 15 bp, Homo sapiens
acagaaatgtgccta

SEQ ID NO: 1784991 - DNA, 15 bp, Homo sapiens
cagaaatgtgcctaa

SEQ ID NO: 1784992 - DNA, 15 bp, Homo sapiens
agaaatgtgcctaat

SEQ ID NO: 1784993 - DNA, 15 bp, Homo sapiens
gaaatgtgcctaata

SEQ ID NO: 1784994 - DNA, 15 bp, Homo sapiens
aaatgtgcctaatat

SEQ ID NO: 1784995 - DNA, 15 bp, Homo sapiens
aatgtgcctaatatt

SEQ ID NO: 1784996 - DNA, 15 bp, Homo sapiens
atgtgcctaatattt

SEQ ID NO: 1784997 - DNA, 15 bp, Homo sapiens
tgtgcctaatatttt

SEQ ID NO: 1784998 - DNA, 15 bp, Homo sapiens
gtgcctaatattttg

SEQ ID NO: 1784999 - DNA, 15 bp, Homo sapiens
tgcctaatattttgt

SEQ ID NO: 1785000 - DNA, 15 bp, Homo sapiens
gcctaatattttgtt

SEQ ID NO: 1785001 - DNA, 15 bp, Homo sapiens
cctaatattttgttt

SEQ ID NO: 1785002 - DNA, 15 bp, Homo sapiens
ctaatattttgtttc

SEQ ID NO: 1785003 - DNA, 15 bp, Homo sapiens
taatattttgtttct

SEQ ID NO: 1785004 - DNA, 15 bp, Homo sapiens
aatattttgtttctg

SEQ ID NO: 1785005 - DNA, 15 bp, Homo sapiens
atattttgtttctgt

SEQ ID NO: 1785006 - DNA, 15 bp, Homo sapiens
tattttgtttctgtt

SEQ ID NO: 1785007 - DNA, 15 bp, Homo sapiens
ttttgtttctgttta

SEQ ID NO: 1785008 - DNA, 15 bp, Homo sapiens
tttgtttctgtttaa

SEQ ID NO: 1785009 - DNA, 15 bp, Homo sapiens
ttgtttctgtttaat

SEQ ID NO: 1785010 - DNA, 15 bp, Homo sapiens
tgtttctgtttaatt

SEQ ID NO: 1785011 - DNA, 15 bp, Homo sapiens
gtttctgtttaattc

SEQ ID NO: 1785012 - DNA, 15 bp, Homo sapiens
tttctgtttaattct

SEQ ID NO: 1785013 - DNA, 15 bp, Homo sapiens
ttctgtttaattctg

SEQ ID NO: 1785014 - DNA, 15 bp, Homo sapiens
tctgtttaattctgt

SEQ ID NO: 1785015 - DNA, 15 bp, Homo sapiens
ctgtttaattctgtg

SEQ ID NO: 1785016 - DNA, 15 bp, Homo sapiens
tgtttaattctgtgt

SEQ ID NO: 1785017 - DNA, 15 bp, Homo sapiens
gtttaattctgtgta

SEQ ID NO: 1785018 - DNA, 15 bp, Homo sapiens
tttaattctgtgtag

SEQ ID NO: 1785019 - DNA, 15 bp, Homo sapiens
ttaattctgtgtagg

SEQ ID NO: 1785020 - DNA, 15 bp, Homo sapiens
taattctgtgtagga

SEQ ID NO: 1785021 - DNA, 15 bp, Homo sapiens
aattctgtgtaggaa

SEQ ID NO: 1785022 - DNA, 15 bp, Homo sapiens
attctgtgtaggaac

SEQ ID NO: 1785023 - DNA, 15 bp, Homo sapiens
ttctgtgtaggaact

SEQ ID NO: 1785024 - DNA, 15 bp, Homo sapiens
tctgtgtaggaactg

SEQ ID NO: 1785025 - DNA, 15 bp, Homo sapiens
ctgtgtaggaactga

SEQ ID NO: 1785026 - DNA, 15 bp, Homo sapiens
tgtgtaggaactgac

SEQ ID NO: 1785027 - DNA, 15 bp, Homo sapiens
gtgtaggaactgaca

SEQ ID NO: 1785028 - DNA, 15 bp, Homo sapiens
tgtaggaactgacat

SEQ ID NO: 1785029 - DNA, 15 bp, Homo sapiens
gtaggaactgacatt

SEQ ID NO: 1785030 - DNA, 15 bp, Homo sapiens
taggaactgacatta

SEQ ID NO: 1785031 - DNA, 15 bp, Homo sapiens
aggaactgacattac

SEQ ID NO: 1785032 - DNA, 15 bp, Homo sapiens
ggaactgacattaca

SEQ ID NO: 1785033 - DNA, 15 bp, Homo sapiens
gaactgacattacag

SEQ ID NO: 1785034 - DNA, 15 bp, Homo sapiens
aactgacattacagt

SEQ ID NO: 1785035 - DNA, 15 bp, Homo sapiens
actgacattacagta

SEQ ID NO: 1785036 - DNA, 15 bp, Homo sapiens
ctgacattacagtat

SEQ ID NO: 1785037 - DNA, 15 bp, Homo sapiens
tgacattacagtatt

SEQ ID NO: 1785038 - DNA, 15 bp, Homo sapiens
gacattacagtattc

SEQ ID NO: 1785039 - DNA, 15 bp, Homo sapiens
acattacagtattct

SEQ ID NO: 1785040 - DNA, 15 bp, Homo sapiens
cattacagtattctg

SEQ ID NO: 1785041 - DNA, 15 bp, Homo sapiens
attacagtattctgt

SEQ ID NO: 1785042 - DNA, 15 bp, Homo sapiens
ttacagtattctgta

SEQ ID NO: 1785043 - DNA, 15 bp, Homo sapiens
tacagtattctgtat

SEQ ID NO: 1785044 - DNA, 15 bp, Homo sapiens
acagtattctgtatt

SEQ ID NO: 1785045 - DNA, 15 bp, Homo sapiens
cagtattctgtatta

SEQ ID NO: 1785046 - DNA, 15 bp, Homo sapiens
agtattctgtattag

SEQ ID NO: 1785047 - DNA, 15 bp, Homo sapiens
gtattctgtattagt

SEQ ID NO: 1785048 - DNA, 15 bp, Homo sapiens
tattctgtattagtg

SEQ ID NO: 1785049 - DNA, 15 bp, Homo sapiens
attctgtattagtgc

SEQ ID NO: 1785050 - DNA, 15 bp, Homo sapiens
ttctgtattagtgca

SEQ ID NO: 1785051 - DNA, 15 bp, Homo sapiens
tctgtattagtgcag

SEQ ID NO: 1785052 - DNA, 15 bp, Homo sapiens
ctgtattagtgcagg

SEQ ID NO: 1785053 - DNA, 15 bp, Homo sapiens
tgtattagtgcaggg

SEQ ID NO: 1785054 - DNA, 15 bp, Homo sapiens
gtattagtgcagggg

SEQ ID NO: 1785055 - DNA, 15 bp, Homo sapiens
tattagtgcaggggc

SEQ ID NO: 1785056 - DNA, 15 bp, Homo sapiens
attagtgcaggggcc

SEQ ID NO: 1785057 - DNA, 15 bp, Homo sapiens
ttagtgcaggggcca

SEQ ID NO: 1785058 - DNA, 15 bp, Homo sapiens
tagtgcaggggccat

SEQ ID NO: 1785059 - DNA, 15 bp, Homo sapiens
agtgcaggggccatt

SEQ ID NO: 1785060 - DNA, 15 bp, Homo sapiens
gtgcaggggccattt

SEQ ID NO: 1785061 - DNA, 15 bp, Homo sapiens
tgcaggggccatttt

SEQ ID NO: 1785062 - DNA, 15 bp, Homo sapiens
gcaggggccattttc

SEQ ID NO: 1785063 - DNA, 15 bp, Homo sapiens
caggggccattttcc

SEQ ID NO: 1785064 - DNA, 15 bp, Homo sapiens
aggggccattttcca

SEQ ID NO: 1785065 - DNA, 15 bp, Homo sapiens
ggggccattttccag

SEQ ID NO: 1785066 - DNA, 15 bp, Homo sapiens
gccattttccagaga

SEQ ID NO: 1785067 - DNA, 15 bp, Homo sapiens
ccattttccagagat

SEQ ID NO: 1785068 - DNA, 15 bp, Homo sapiens
cattttccagagatg

SEQ ID NO: 1785069 - DNA, 15 bp, Homo sapiens
attttccagagatgt

SEQ ID NO: 1785070 - DNA, 15 bp, Homo sapiens
ttttccagagatgtc

SEQ ID NO: 1785071 - DNA, 15 bp, Homo sapiens
tttccagagatgtca

SEQ ID NO: 1785072 - DNA, 15 bp, Homo sapiens
ttccagagatgtcat

SEQ ID NO: 1785073 - DNA, 15 bp, Homo sapiens
tccagagatgtcatt

SEQ ID NO: 1785074 - DNA, 15 bp, Homo sapiens
ccagagatgtcattt

SEQ ID NO: 1785075 - DNA, 15 bp, Homo sapiens
cagagatgtcatttt

SEQ ID NO: 1785076 - DNA, 15 bp, Homo sapiens
agagatgtcattttc

SEQ ID NO: 1785077 - DNA, 15 bp, Homo sapiens
gagatgtcattttca

SEQ ID NO: 1785078 - DNA, 15 bp, Homo sapiens
agatgtcattttcat

SEQ ID NO: 1785079 - DNA, 15 bp, Homo sapiens
gatgtcattttcatg

SEQ ID NO: 1785080 - DNA, 15 bp, Homo sapiens
atgtcattttcatgc

SEQ ID NO: 1785081 - DNA, 15 bp, Homo sapiens
tgtcattttcatgct

SEQ ID NO: 1785082 - DNA, 15 bp, Homo sapiens
gtcattttcatgcta

SEQ ID NO: 1785083 - DNA, 15 bp, Homo sapiens
tcattttcatgctaa

SEQ ID NO: 1785084 - DNA, 15 bp, Homo sapiens
cattttcatgctaac

SEQ ID NO: 1785085 - DNA, 15 bp, Homo sapiens
attttcatgctaact

SEQ ID NO: 1785086 - DNA, 15 bp, Homo sapiens
ttttcatgctaactt

SEQ ID NO: 1785087 - DNA, 15 bp, Homo sapiens
tttcatgctaacttg

SEQ ID NO: 1785088 - DNA, 15 bp, Homo sapiens
ttcatgctaacttgt

SEQ ID NO: 1785089 - DNA, 15 bp, Homo sapiens
tcatgctaacttgta

SEQ ID NO: 1785090 - DNA, 15 bp, Homo sapiens
catgctaacttgtac

SEQ ID NO: 1785091 - DNA, 15 bp, Homo sapiens
atgctaacttgtacc

SEQ ID NO: 1785092 - DNA, 15 bp, Homo sapiens
tgctaacttgtaccc

SEQ ID NO: 1785093 - DNA, 15 bp, Homo sapiens
gctaacttgtaccca

SEQ ID NO: 1785094 - DNA, 15 bp, Homo sapiens
ctaacttgtacccaa

SEQ ID NO: 1785095 - DNA, 15 bp, Homo sapiens
taacttgtacccaaa

SEQ ID NO: 1785096 - DNA, 15 bp, Homo sapiens
aacttgtacccaaag

SEQ ID NO: 1785097 - DNA, 15 bp, Homo sapiens
acttgtacccaaagt

SEQ ID NO: 1785098 - DNA, 15 bp, Homo sapiens
cttgtacccaaagtg

SEQ ID NO: 1785099 - DNA, 15 bp, Homo sapiens
ttgtacccaaagtgt

SEQ ID NO: 1785100 - DNA, 15 bp, Homo sapiens
tgtacccaaagtgtt

SEQ ID NO: 1785101 - DNA, 15 bp, Homo sapiens
gtacccaaagtgttt

SEQ ID NO: 1785102 - DNA, 15 bp, Homo sapiens
tacccaaagtgtttc

SEQ ID NO: 1785103 - DNA, 15 bp, Homo sapiens
acccaaagtgtttct

SEQ ID NO: 1785104 - DNA, 15 bp, Homo sapiens
cccaaagtgtttctg

SEQ ID NO: 1785105 - DNA, 15 bp, Homo sapiens
ccaaagtgtttctgg

SEQ ID NO: 1785106 - DNA, 15 bp, Homo sapiens
caaagtgtttctggc

SEQ ID NO: 1785107 - DNA, 15 bp, Homo sapiens
aaagtgtttctggca

SEQ ID NO: 1785108 - DNA, 15 bp, Homo sapiens
aagtgtttctggcat

SEQ ID NO: 1785109 - DNA, 15 bp, Homo sapiens
agtgtttctggcata

SEQ ID NO: 1785110 - DNA, 15 bp, Homo sapiens
gtgtttctggcatat

SEQ ID NO: 1785111 - DNA, 15 bp, Homo sapiens
tgtttctggcatatg

SEQ ID NO: 1785112 - DNA, 15 bp, Homo sapiens
gtttctggcatatgg

SEQ ID NO: 1785113 - DNA, 15 bp, Homo sapiens
ttctggcatatggag

SEQ ID NO: 1785114 - DNA, 15 bp, Homo sapiens
tctggcatatggaga

SEQ ID NO: 1785115 - DNA, 15 bp, Homo sapiens
ctggcatatggagac

SEQ ID NO: 1785116 - DNA, 15 bp, Homo sapiens
tggcatatggagacc

SEQ ID NO: 1785117 - DNA, 15 bp, Homo sapiens
ggcatatggagaccc

SEQ ID NO: 1785118 - DNA, 15 bp, Homo sapiens
gcatatggagaccct

SEQ ID NO: 1785119 - DNA, 15 bp, Homo sapiens
catatggagaccctg

SEQ ID NO: 1785120 - DNA, 15 bp, Homo sapiens
atatggagaccctgc

SEQ ID NO: 1785121 - DNA, 15 bp, Homo sapiens
tatggagaccctgcc

SEQ ID NO: 1785122 - DNA, 15 bp, Homo sapiens
atggagaccctgcct

SEQ ID NO: 1785123 - DNA, 15 bp, Homo sapiens
tggagaccctgcctt

SEQ ID NO: 1785124 - DNA, 15 bp, Homo sapiens
ggagaccctgccttc

SEQ ID NO: 1785125 - DNA, 15 bp, Homo sapiens
gagaccctgccttca

SEQ ID NO: 1785126 - DNA, 15 bp, Homo sapiens
agaccctgccttcat

SEQ ID NO: 1785127 - DNA, 15 bp, Homo sapiens
gaccctgccttcatg

SEQ ID NO: 1785128 - DNA, 15 bp, Homo sapiens
accctgccttcatgt

SEQ ID NO: 1785129 - DNA, 15 bp, Homo sapiens
ccctgccttcatgta

SEQ ID NO: 1785130 - DNA, 15 bp, Homo sapiens
cctgccttcatgtat

SEQ ID NO: 1785131 - DNA, 15 bp, Homo sapiens
ctgccttcatgtata

SEQ ID NO: 1785132 - DNA, 15 bp, Homo sapiens
tgccttcatgtatac

SEQ ID NO: 1785133 - DNA, 15 bp, Homo sapiens
gccttcatgtataca

SEQ ID NO: 1785134 - DNA, 15 bp, Homo sapiens
ccttcatgtatacat

SEQ ID NO: 1785135 - DNA, 15 bp, Homo sapiens
cttcatgtatacatt

SEQ ID NO: 1785136 - DNA, 15 bp, Homo sapiens
ttcatgtatacattt

SEQ ID NO: 1785137 - DNA, 15 bp, Homo sapiens
tcatgtatacatttg

SEQ ID NO: 1785138 - DNA, 15 bp, Homo sapiens
catgtatacatttgt

SEQ ID NO: 1785139 - DNA, 15 bp, Homo sapiens
atgtatacatttgtt

SEQ ID NO: 1785140 - DNA, 15 bp, Homo sapiens
tgtatacatttgttt

SEQ ID NO: 1785141 - DNA, 15 bp, Homo sapiens
gtatacatttgtttc

SEQ ID NO: 1785142 - DNA, 15 bp, Homo sapiens
tatacatttgtttcc

SEQ ID NO: 1785143 - DNA, 15 bp, Homo sapiens
atacatttgtttcct

SEQ ID NO: 1785144 - DNA, 15 bp, Homo sapiens
tacatttgtttccta

SEQ ID NO: 1785145 - DNA, 15 bp, Homo sapiens
acatttgtttcctaa

SEQ ID NO: 1785146 - DNA, 15 bp, Homo sapiens
catttgtttcctaag

SEQ ID NO: 1785147 - DNA, 15 bp, Homo sapiens
atttgtttcctaagt

SEQ ID NO: 1785148 - DNA, 15 bp, Homo sapiens
tttgtttcctaagta

SEQ ID NO: 1785149 - DNA, 15 bp, Homo sapiens
ttgtttcctaagtaa

SEQ ID NO: 1785150 - DNA, 15 bp, Homo sapiens
tgtttcctaagtaat

SEQ ID NO: 1785151 - DNA, 15 bp, Homo sapiens
gtttcctaagtaatg

SEQ ID NO: 1785152 - DNA, 15 bp, Homo sapiens
tttcctaagtaatgc

SEQ ID NO: 1785153 - DNA, 15 bp, Homo sapiens
ttcctaagtaatgca

SEQ ID NO: 1785154 - DNA, 15 bp, Homo sapiens
tcctaagtaatgcat

SEQ ID NO: 1785155 - DNA, 15 bp, Homo sapiens
cctaagtaatgcatt

SEQ ID NO: 1785156 - DNA, 15 bp, Homo sapiens
ctaagtaatgcattg

SEQ ID NO: 1785157 - DNA, 15 bp, Homo sapiens
taagtaatgcattgt

SEQ ID NO: 1785158 - DNA, 15 bp, Homo sapiens
aagtaatgcattgta

SEQ ID NO: 1785159 - DNA, 15 bp, Homo sapiens
agtaatgcattgtat

SEQ ID NO: 1785160 - DNA, 15 bp, Homo sapiens
gtaatgcattgtata

SEQ ID NO: 1785161 - DNA, 15 bp, Homo sapiens
taatgcattgtataa

SEQ ID NO: 1785162 - DNA, 15 bp, Homo sapiens
aatgcattgtataaa

SEQ ID NO: 1785163 - DNA, 15 bp, Homo sapiens
atgcattgtataaat

SEQ ID NO: 1785164 - DNA, 15 bp, Homo sapiens
tgcattgtataaata

SEQ ID NO: 1785165 - DNA, 15 bp, Homo sapiens
gcattgtataaataa

SEQ ID NO: 1785166 - DNA, 15 bp, Homo sapiens
cattgtataaataag

SEQ ID NO: 1785167 - DNA, 15 bp, Homo sapiens
attgtataaataagt

SEQ ID NO: 1785168 - DNA, 15 bp, Homo sapiens
ttgtataaataagtt

SEQ ID NO: 1785169 - DNA, 15 bp, Homo sapiens
tgtataaataagtta

SEQ ID NO: 1785170 - DNA, 15 bp, Homo sapiens
gtataaataagttaa

SEQ ID NO: 1785171 - DNA, 15 bp, Homo sapiens
tataaataagttaag

SEQ ID NO: 1785172 - DNA, 15 bp, Homo sapiens
ataaataagttaagc

SEQ ID NO: 1785173 - DNA, 15 bp, Homo sapiens
taaataagttaagcc

SEQ ID NO: 1785174 - DNA, 15 bp, Homo sapiens
aaataagttaagcct

SEQ ID NO: 1785175 - DNA, 15 bp, Homo sapiens
aataagttaagcctt

SEQ ID NO: 1785176 - DNA, 15 bp, Homo sapiens
ataagttaagccttg

SEQ ID NO: 1785177 - DNA, 15 bp, Homo sapiens
taagttaagccttgt

SEQ ID NO: 1785178 - DNA, 15 bp, Homo sapiens
aagttaagccttgtt

SEQ ID NO: 1785179 - DNA, 15 bp, Homo sapiens
agttaagccttgttt

SEQ ID NO: 1785180 - DNA, 15 bp, Homo sapiens
gttaagccttgtttt

SEQ ID NO: 1785181 - DNA, 15 bp, Homo sapiens
ttaagccttgttttt

SEQ ID NO: 1785182 - DNA, 15 bp, Homo sapiens
taagccttgtttttt

SEQ ID NO: 1785183 - DNA, 15 bp, Homo sapiens
aagccttgttttttt

SEQ ID NO: 1785184 - DNA, 15 bp, Homo sapiens
agccttgttttttta

SEQ ID NO: 1785185 - DNA, 15 bp, Homo sapiens
gccttgtttttttaa

SEQ ID NO: 1785186 - DNA, 15 bp, Homo sapiens
ccttgtttttttaaa

SEQ ID NO: 1785187 - DNA, 15 bp, Homo sapiens
cttgtttttttaaaa

SEQ ID NO: 1785188 - DNA, 15 bp, Homo sapiens
ttgtttttttaaaat

SEQ ID NO: 1785189 - DNA, 15 bp, Homo sapiens
tgtttttttaaaatt

SEQ ID NO: 1785190 - DNA, 15 bp, Homo sapiens
gtttttttaaaattc

SEQ ID NO: 1785191 - DNA, 15 bp, Homo sapiens
tttttttaaaattca

SEQ ID NO: 1785192 - DNA, 15 bp, Homo sapiens
ttttttaaaattcaa

SEQ ID NO: 1785193 - DNA, 15 bp, Homo sapiens
tttttaaaattcaag

SEQ ID NO: 1785194 - DNA, 15 bp, Homo sapiens
ttttaaaattcaaga

SEQ ID NO: 1785195 - DNA, 15 bp, Homo sapiens
tttaaaattcaagaa

SEQ ID NO: 1785196 - DNA, 15 bp, Homo sapiens
ttaaaattcaagaag

SEQ ID NO: 1785197 - DNA, 15 bp, Homo sapiens
taaaattcaagaagc

SEQ ID NO: 1785198 - DNA, 15 bp, Homo sapiens
aaaattcaagaagca

SEQ ID NO: 1785199 - DNA, 15 bp, Homo sapiens
aaattcaagaagcag

SEQ ID NO: 1785200 - DNA, 15 bp, Homo sapiens
aattcaagaagcagt

SEQ ID NO: 1785201 - DNA, 15 bp, Homo sapiens
attcaagaagcagtc

SEQ ID NO: 1785202 - DNA, 15 bp, Homo sapiens
ttcaagaagcagtca

SEQ ID NO: 1785203 - DNA, 15 bp, Homo sapiens
tcaagaagcagtcat

SEQ ID NO: 1785204 - DNA, 15 bp, Homo sapiens
caagaagcagtcatc

SEQ ID NO: 1785205 - DNA, 15 bp, Homo sapiens
aagaagcagtcatct

SEQ ID NO: 1785206 - DNA, 15 bp, Homo sapiens
agaagcagtcatctg

SEQ ID NO: 1785207 - DNA, 15 bp, Homo sapiens
gaagcagtcatctgt

SEQ ID NO: 1785208 - DNA, 15 bp, Homo sapiens
aagcagtcatctgta

SEQ ID NO: 1785209 - DNA, 15 bp, Homo sapiens
agcagtcatctgtaa

SEQ ID NO: 1785210 - DNA, 15 bp, Homo sapiens
gcagtcatctgtaaa

SEQ ID NO: 1785211 - DNA, 15 bp, Homo sapiens
cagtcatctgtaaac

SEQ ID NO: 1785212 - DNA, 15 bp, Homo sapiens
agtcatctgtaaact

SEQ ID NO: 1785213 - DNA, 15 bp, Homo sapiens
gtcatctgtaaactg

SEQ ID NO: 1785214 - DNA, 15 bp, Homo sapiens
tcatctgtaaactgc

SEQ ID NO: 1785215 - DNA, 15 bp, Homo sapiens
catctgtaaactgcc

SEQ ID NO: 1785216 - DNA, 15 bp, Homo sapiens
atctgtaaactgcca

SEQ ID NO: 1785217 - DNA, 15 bp, Homo sapiens
tctgtaaactgccag

SEQ ID NO: 1785218 - DNA, 15 bp, Homo sapiens
ctgtaaactgccagg

SEQ ID NO: 1785219 - DNA, 15 bp, Homo sapiens
tgtaaactgccagga

SEQ ID NO: 1785220 - DNA, 15 bp, Homo sapiens
gtaaactgccaggaa

SEQ ID NO: 1785221 - DNA, 15 bp, Homo sapiens
taaactgccaggaag

SEQ ID NO: 1785222 - DNA, 15 bp, Homo sapiens
aaactgccaggaagt

SEQ ID NO: 1785223 - DNA, 15 bp, Homo sapiens
aactgccaggaagtg

SEQ ID NO: 1785224 - DNA, 15 bp, Homo sapiens
actgccaggaagtgg

SEQ ID NO: 1785225 - DNA, 15 bp, Homo sapiens
ctgccaggaagtggt

SEQ ID NO: 1785226 - DNA, 15 bp, Homo sapiens
tgccaggaagtggtg

SEQ ID NO: 1785227 - DNA, 15 bp, Homo sapiens
gccaggaagtggtgt

SEQ ID NO: 1785228 - DNA, 15 bp, Homo sapiens
ccaggaagtggtgta

SEQ ID NO: 1785229 - DNA, 15 bp, Homo sapiens
caggaagtggtgtag

SEQ ID NO: 1785230 - DNA, 15 bp, Homo sapiens
aggaagtggtgtagg

SEQ ID NO: 1785231 - DNA, 15 bp, Homo sapiens
ggaagtggtgtaggc

SEQ ID NO: 1785232 - DNA, 15 bp, Homo sapiens
gaagtggtgtaggca

SEQ ID NO: 1785233 - DNA, 15 bp, Homo sapiens
aagtggtgtaggcac

SEQ ID NO: 1785234 - DNA, 15 bp, Homo sapiens
agtggtgtaggcact

SEQ ID NO: 1785235 - DNA, 15 bp, Homo sapiens
gtggtgtaggcactg

SEQ ID NO: 1785236 - DNA, 15 bp, Homo sapiens
tggtgtaggcactgg

SEQ ID NO: 1785237 - DNA, 15 bp, Homo sapiens
ggtgtaggcactggg

SEQ ID NO: 1785238 - DNA, 15 bp, Homo sapiens
gtgtaggcactggga

SEQ ID NO: 1785239 - DNA, 15 bp, Homo sapiens
tgtaggcactgggaa

SEQ ID NO: 1785240 - DNA, 15 bp, Homo sapiens
gtaggcactgggaat

SEQ ID NO: 1785241 - DNA, 15 bp, Homo sapiens
taggcactgggaata

SEQ ID NO: 1785242 - DNA, 15 bp, Homo sapiens
aggcactgggaatac

SEQ ID NO: 1785243 - DNA, 15 bp, Homo sapiens
ggcactgggaataca

SEQ ID NO: 1785244 - DNA, 15 bp, Homo sapiens
gcactgggaatacag

SEQ ID NO: 1785245 - DNA, 15 bp, Homo sapiens
cactgggaatacaga

SEQ ID NO: 1785246 - DNA, 15 bp, Homo sapiens
actgggaatacagaa

SEQ ID NO: 1785247 - DNA, 15 bp, Homo sapiens
ctgggaatacagaag

SEQ ID NO: 1785248 - DNA, 15 bp, Homo sapiens
tgggaatacagaagt

SEQ ID NO: 1785249 - DNA, 15 bp, Homo sapiens
gggaatacagaagta

SEQ ID NO: 1785250 - DNA, 15 bp, Homo sapiens
ggaatacagaagtaa

SEQ ID NO: 1785251 - DNA, 15 bp, Homo sapiens
gaatacagaagtaag

SEQ ID NO: 1785252 - DNA, 15 bp, Homo sapiens
aatacagaagtaaga

SEQ ID NO: 1785253 - DNA, 15 bp, Homo sapiens
atacagaagtaagat

SEQ ID NO: 1785254 - DNA, 15 bp, Homo sapiens
tacagaagtaagatg

SEQ ID NO: 1785255 - DNA, 15 bp, Homo sapiens
acagaagtaagatgg

SEQ ID NO: 1785256 - DNA, 15 bp, Homo sapiens
cagaagtaagatggc

SEQ ID NO: 1785257 - DNA, 15 bp, Homo sapiens
agaagtaagatggcc

SEQ ID NO: 1785258 - DNA, 15 bp, Homo sapiens
gaagtaagatggcct

SEQ ID NO: 1785259 - DNA, 15 bp, Homo sapiens
aagtaagatggcctg

SEQ ID NO: 1785260 - DNA, 15 bp, Homo sapiens
agtaagatggcctgg

SEQ ID NO: 1785261 - DNA, 15 bp, Homo sapiens
gtaagatggcctggg

SEQ ID NO: 1785262 - DNA, 15 bp, Homo sapiens
taagatggcctgggt

SEQ ID NO: 1785263 - DNA, 15 bp, Homo sapiens
aagatggcctgggtc

SEQ ID NO: 1785264 - DNA, 15 bp, Homo sapiens
agatggcctgggtcc

SEQ ID NO: 1785265 - DNA, 15 bp, Homo sapiens
gatggcctgggtcct

SEQ ID NO: 1785266 - DNA, 15 bp, Homo sapiens
atggcctgggtcctt

SEQ ID NO: 1785267 - DNA, 15 bp, Homo sapiens
tggcctgggtccttc

SEQ ID NO: 1785268 - DNA, 15 bp, Homo sapiens
ggcctgggtccttcc

SEQ ID NO: 1785269 - DNA, 15 bp, Homo sapiens
gcctgggtccttccc

SEQ ID NO: 1785270 - DNA, 15 bp, Homo sapiens
cctgggtccttcccc

SEQ ID NO: 1785271 - DNA, 15 bp, Homo sapiens
ctgggtccttcccct

SEQ ID NO: 1785272 - DNA, 15 bp, Homo sapiens
tgggtccttcccctc

SEQ ID NO: 1785273 - DNA, 15 bp, Homo sapiens
gggtccttcccctca

SEQ ID NO: 1785274 - DNA, 15 bp, Homo sapiens
ggtccttcccctcat

SEQ ID NO: 1785275 - DNA, 15 bp, Homo sapiens
gtccttcccctcata

SEQ ID NO: 1785276 - DNA, 15 bp, Homo sapiens
tccttcccctcatag

SEQ ID NO: 1785277 - DNA, 15 bp, Homo sapiens
ccttcccctcataga

SEQ ID NO: 1785278 - DNA, 15 bp, Homo sapiens
cttcccctcatagag

SEQ ID NO: 1785279 - DNA, 15 bp, Homo sapiens
ttcccctcatagagc

SEQ ID NO: 1785280 - DNA, 15 bp, Homo sapiens
tcccctcatagagct

SEQ ID NO: 1785281 - DNA, 15 bp, Homo sapiens
cccctcatagagctt

SEQ ID NO: 1785282 - DNA, 15 bp, Homo sapiens
ccctcatagagctta

SEQ ID NO: 1785283 - DNA, 15 bp, Homo sapiens
cctcatagagcttac

SEQ ID NO: 1785284 - DNA, 15 bp, Homo sapiens
ctcatagagcttaca

SEQ ID NO: 1785285 - DNA, 15 bp, Homo sapiens
tcatagagcttacat

SEQ ID NO: 1785286 - DNA, 15 bp, Homo sapiens
catagagcttacatt

SEQ ID NO: 1785287 - DNA, 15 bp, Homo sapiens
atagagcttacattc

SEQ ID NO: 1785288 - DNA, 15 bp, Homo sapiens
tagagcttacattct

SEQ ID NO: 1785289 - DNA, 15 bp, Homo sapiens
agagcttacattctg

SEQ ID NO: 1785290 - DNA, 15 bp, Homo sapiens
gagcttacattctgg

SEQ ID NO: 1785291 - DNA, 15 bp, Homo sapiens
agcttacattctgga

SEQ ID NO: 1785292 - DNA, 15 bp, Homo sapiens
gcttacattctggag

SEQ ID NO: 1785293 - DNA, 15 bp, Homo sapiens
cttacattctggagg

SEQ ID NO: 1785294 - DNA, 15 bp, Homo sapiens
ttacattctggagga

SEQ ID NO: 1785295 - DNA, 15 bp, Homo sapiens
tacattctggaggag

SEQ ID NO: 1785296 - DNA, 15 bp, Homo sapiens
acattctggaggagg

SEQ ID NO: 1785297 - DNA, 15 bp, Homo sapiens
cattctggaggagga

SEQ ID NO: 1785298 - DNA, 15 bp, Homo sapiens
attctggaggaggaa

SEQ ID NO: 1785299 - DNA, 15 bp, Homo sapiens
ttctggaggaggaac

SEQ ID NO: 1785300 - DNA, 15 bp, Homo sapiens
tctggaggaggaaca

SEQ ID NO: 1785301 - DNA, 15 bp, Homo sapiens
ctggaggaggaacac

SEQ ID NO: 1785302 - DNA, 15 bp, Homo sapiens
tggaggaggaacaca

SEQ ID NO: 1785303 - DNA, 15 bp, Homo sapiens
ggaggaggaacacag

SEQ ID NO: 1785304 - DNA, 15 bp, Homo sapiens
gaggaggaacacagg

SEQ ID NO: 1785305 - DNA, 15 bp, Homo sapiens
aggaggaacacaggc

SEQ ID NO: 1785306 - DNA, 15 bp, Homo sapiens
ggaggaacacaggca

SEQ ID NO: 1785307 - DNA, 15 bp, Homo sapiens
gaggaacacaggcaa

SEQ ID NO: 1785308 - DNA, 15 bp, Homo sapiens
aggaacacaggcaat

SEQ ID NO: 1785309 - DNA, 15 bp, Homo sapiens
ggaacacaggcaatg

SEQ ID NO: 1785310 - DNA, 15 bp, Homo sapiens
gaacacaggcaatga

SEQ ID NO: 1785311 - DNA, 15 bp, Homo sapiens
aacacaggcaatgaa

SEQ ID NO: 1785312 - DNA, 15 bp, Homo sapiens
acacaggcaatgaac

SEQ ID NO: 1785313 - DNA, 15 bp, Homo sapiens
cacaggcaatgaaca

SEQ ID NO: 1785314 - DNA, 15 bp, Homo sapiens
acaggcaatgaacaa

SEQ ID NO: 1785315 - DNA, 15 bp, Homo sapiens
caggcaatgaacaag

SEQ ID NO: 1785316 - DNA, 15 bp, Homo sapiens
aggcaatgaacaagt

SEQ ID NO: 1785317 - DNA, 15 bp, Homo sapiens
ggcaatgaacaagta

SEQ ID NO: 1785318 - DNA, 15 bp, Homo sapiens
gcaatgaacaagtaa

SEQ ID NO: 1785319 - DNA, 15 bp, Homo sapiens
caatgaacaagtaaa

SEQ ID NO: 1785320 - DNA, 15 bp, Homo sapiens
aatgaacaagtaaac

SEQ ID NO: 1785321 - DNA, 15 bp, Homo sapiens
atgaacaagtaaacc

SEQ ID NO: 1785322 - DNA, 15 bp, Homo sapiens
tgaacaagtaaacca

SEQ ID NO: 1785323 - DNA, 15 bp, Homo sapiens
gaacaagtaaaccaa

SEQ ID NO: 1785324 - DNA, 15 bp, Homo sapiens
aacaagtaaaccaag

SEQ ID NO: 1785325 - DNA, 15 bp, Homo sapiens
acaagtaaaccaaga

SEQ ID NO: 1785326 - DNA, 15 bp, Homo sapiens
caagtaaaccaagat

SEQ ID NO: 1785327 - DNA, 15 bp, Homo sapiens
aagtaaaccaagatg

SEQ ID NO: 1785328 - DNA, 15 bp, Homo sapiens
agtaaaccaagatgt

SEQ ID NO: 1785329 - DNA, 15 bp, Homo sapiens
gtaaaccaagatgta

SEQ ID NO: 1785330 - DNA, 15 bp, Homo sapiens
taaaccaagatgtaa

SEQ ID NO: 1785331 - DNA, 15 bp, Homo sapiens
aaaccaagatgtaag

SEQ ID NO: 1785332 - DNA, 15 bp, Homo sapiens
aaccaagatgtaaga

SEQ ID NO: 1785333 - DNA, 15 bp, Homo sapiens
accaagatgtaagat

SEQ ID NO: 1785334 - DNA, 15 bp, Homo sapiens
ccaagatgtaagatg

SEQ ID NO: 1785335 - DNA, 15 bp, Homo sapiens
caagatgtaagatga

SEQ ID NO: 1785336 - DNA, 15 bp, Homo sapiens
aagatgtaagatgat

SEQ ID NO: 1785337 - DNA, 15 bp, Homo sapiens
agatgtaagatgatt

SEQ ID NO: 1785338 - DNA, 15 bp, Homo sapiens
gatgtaagatgattt

SEQ ID NO: 1785339 - DNA, 15 bp, Homo sapiens
atgtaagatgatttt

SEQ ID NO: 1785340 - DNA, 15 bp, Homo sapiens
tgtaagatgatttta

SEQ ID NO: 1785341 - DNA, 15 bp, Homo sapiens
gtaagatgattttag

SEQ ID NO: 1785342 - DNA, 15 bp, Homo sapiens
taagatgattttaga

SEQ ID NO: 1785343 - DNA, 15 bp, Homo sapiens
aagatgattttagag

SEQ ID NO: 1785344 - DNA, 15 bp, Homo sapiens
agatgattttagagt

SEQ ID NO: 1785345 - DNA, 15 bp, Homo sapiens
gatgattttagagta

SEQ ID NO: 1785346 - DNA, 15 bp, Homo sapiens
atgattttagagtat

SEQ ID NO: 1785347 - DNA, 15 bp, Homo sapiens
tgattttagagtata

SEQ ID NO: 1785348 - DNA, 15 bp, Homo sapiens
gattttagagtataa

SEQ ID NO: 1785349 - DNA, 15 bp, Homo sapiens
attttagagtataat

SEQ ID NO: 1785350 - DNA, 15 bp, Homo sapiens
ttttagagtataata

SEQ ID NO: 1785351 - DNA, 15 bp, Homo sapiens
tttagagtataataa

SEQ ID NO: 1785352 - DNA, 15 bp, Homo sapiens
ttagagtataataag

SEQ ID NO: 1785353 - DNA, 15 bp, Homo sapiens
tagagtataataagt

SEQ ID NO: 1785354 - DNA, 15 bp, Homo sapiens
agagtataataagtg

SEQ ID NO: 1785355 - DNA, 15 bp, Homo sapiens
gagtataataagtgc

SEQ ID NO: 1785356 - DNA, 15 bp, Homo sapiens
agtataataagtgct

SEQ ID NO: 1785357 - DNA, 15 bp, Homo sapiens
gtataataagtgcta

SEQ ID NO: 1785358 - DNA, 15 bp, Homo sapiens
tataataagtgctac

SEQ ID NO: 1785359 - DNA, 15 bp, Homo sapiens
ataataagtgctaca

SEQ ID NO: 1785360 - DNA, 15 bp, Homo sapiens
taataagtgctacaa

SEQ ID NO: 1785361 - DNA, 15 bp, Homo sapiens
aataagtgctacaaa

SEQ ID NO: 1785362 - DNA, 15 bp, Homo sapiens
ataagtgctacaaag

SEQ ID NO: 1785363 - DNA, 15 bp, Homo sapiens
taagtgctacaaagg

SEQ ID NO: 1785364 - DNA, 15 bp, Homo sapiens
aagtgctacaaagga

SEQ ID NO: 1785365 - DNA, 15 bp, Homo sapiens
agtgctacaaaggaa

SEQ ID NO: 1785366 - DNA, 15 bp, Homo sapiens
gtgctacaaaggaaa

SEQ ID NO: 1785367 - DNA, 15 bp, Homo sapiens
tgctacaaaggaaat

SEQ ID NO: 1785368 - DNA, 15 bp, Homo sapiens
gctacaaaggaaata

SEQ ID NO: 1785369 - DNA, 15 bp, Homo sapiens
ctacaaaggaaataa

SEQ ID NO: 1785370 - DNA, 15 bp, Homo sapiens
tacaaaggaaataaa

SEQ ID NO: 1785371 - DNA, 15 bp, Homo sapiens
acaaaggaaataaac

SEQ ID NO: 1785372 - DNA, 15 bp, Homo sapiens
caaaggaaataaaca

SEQ ID NO: 1785373 - DNA, 15 bp, Homo sapiens
aaaggaaataaacag

SEQ ID NO: 1785374 - DNA, 15 bp, Homo sapiens
aaggaaataaacaga

SEQ ID NO: 1785375 - DNA, 15 bp, Homo sapiens
aggaaataaacagag

SEQ ID NO: 1785376 - DNA, 15 bp, Homo sapiens
ggaaataaacagagt

SEQ ID NO: 1785377 - DNA, 15 bp, Homo sapiens
gaaataaacagagtg

SEQ ID NO: 1785378 - DNA, 15 bp, Homo sapiens
aaataaacagagtgg

SEQ ID NO: 1785379 - DNA, 15 bp, Homo sapiens
aataaacagagtggt

SEQ ID NO: 1785380 - DNA, 15 bp, Homo sapiens
ataaacagagtggtg

SEQ ID NO: 1785381 - DNA, 15 bp, Homo sapiens
taaacagagtggtgt

SEQ ID NO: 1785382 - DNA, 15 bp, Homo sapiens
aaacagagtggtgtg

SEQ ID NO: 1785383 - DNA, 15 bp, Homo sapiens
aacagagtggtgtga

SEQ ID NO: 1785384 - DNA, 15 bp, Homo sapiens
acagagtggtgtgaa

SEQ ID NO: 1785385 - DNA, 15 bp, Homo sapiens
cagagtggtgtgaaa

SEQ ID NO: 1785386 - DNA, 15 bp, Homo sapiens
agagtggtgtgaaag

SEQ ID NO: 1785387 - DNA, 15 bp, Homo sapiens
gagtggtgtgaaaga

SEQ ID NO: 1785388 - DNA, 15 bp, Homo sapiens
agtggtgtgaaagag

SEQ ID NO: 1785389 - DNA, 15 bp, Homo sapiens
gtggtgtgaaagaga

SEQ ID NO: 1785390 - DNA, 15 bp, Homo sapiens
tggtgtgaaagagag

SEQ ID NO: 1785391 - DNA, 15 bp, Homo sapiens
ggtgtgaaagagaga

SEQ ID NO: 1785392 - DNA, 15 bp, Homo sapiens
gtgtgaaagagagaa

SEQ ID NO: 1785393 - DNA, 15 bp, Homo sapiens
tgtgaaagagagaaa

SEQ ID NO: 1785394 - DNA, 15 bp, Homo sapiens
gtgaaagagagaaac

SEQ ID NO: 1785395 - DNA, 15 bp, Homo sapiens
tgaaagagagaaacg

SEQ ID NO: 1785396 - DNA, 15 bp, Homo sapiens
gaaagagagaaacgg

SEQ ID NO: 1785397 - DNA, 15 bp, Homo sapiens
aaagagagaaacgga

SEQ ID NO: 1785398 - DNA, 15 bp, Homo sapiens
aagagagaaacggag

SEQ ID NO: 1785399 - DNA, 15 bp, Homo sapiens
agagagaaacggaga

SEQ ID NO: 1785400 - DNA, 15 bp, Homo sapiens
gagagaaacggagag

SEQ ID NO: 1785401 - DNA, 15 bp, Homo sapiens
agagaaacggagagg

SEQ ID NO: 1785402 - DNA, 15 bp, Homo sapiens
gagaaacggagaggc

SEQ ID NO: 1785403 - DNA, 15 bp, Homo sapiens
agaaacggagaggct

SEQ ID NO: 1785404 - DNA, 15 bp, Homo sapiens
gaaacggagaggctg

SEQ ID NO: 1785405 - DNA, 15 bp, Homo sapiens
aaacggagaggctga

SEQ ID NO: 1785406 - DNA, 15 bp, Homo sapiens
aacggagaggctgat

SEQ ID NO: 1785407 - DNA, 15 bp, Homo sapiens
acggagaggctgata

SEQ ID NO: 1785408 - DNA, 15 bp, Homo sapiens
cggagaggctgatag

SEQ ID NO: 1785409 - DNA, 15 bp, Homo sapiens
ggagaggctgataga

SEQ ID NO: 1785410 - DNA, 15 bp, Homo sapiens
gagaggctgatagaa

SEQ ID NO: 1785411 - DNA, 15 bp, Homo sapiens
agaggctgatagaat

SEQ ID NO: 1785412 - DNA, 15 bp, Homo sapiens
gaggctgatagaatg

SEQ ID NO: 1785413 - DNA, 15 bp, Homo sapiens
aggctgatagaatgc

SEQ ID NO: 1785414 - DNA, 15 bp, Homo sapiens
ggctgatagaatgct

SEQ ID NO: 1785415 - DNA, 15 bp, Homo sapiens
gctgatagaatgctt

SEQ ID NO: 1785416 - DNA, 15 bp, Homo sapiens
ctgatagaatgctta

SEQ ID NO: 1785417 - DNA, 15 bp, Homo sapiens
tgatagaatgcttag

SEQ ID NO: 1785418 - DNA, 15 bp, Homo sapiens
gatagaatgcttagt

SEQ ID NO: 1785419 - DNA, 15 bp, Homo sapiens
atagaatgcttagtg

SEQ ID NO: 1785420 - DNA, 15 bp, Homo sapiens
tagaatgcttagtgg

SEQ ID NO: 1785421 - DNA, 15 bp, Homo sapiens
agaatgcttagtggc

SEQ ID NO: 1785422 - DNA, 15 bp, Homo sapiens
gaatgcttagtggca

SEQ ID NO: 1785423 - DNA, 15 bp, Homo sapiens
aatgcttagtggcac

SEQ ID NO: 1785424 - DNA, 15 bp, Homo sapiens
atgcttagtggcact

SEQ ID NO: 1785425 - DNA, 15 bp, Homo sapiens
tgcttagtggcactt

SEQ ID NO: 1785426 - DNA, 15 bp, Homo sapiens
gcttagtggcacttt

SEQ ID NO: 1785427 - DNA, 15 bp, Homo sapiens
cttagtggcactttc

SEQ ID NO: 1785428 - DNA, 15 bp, Homo sapiens
ttagtggcactttcc

SEQ ID NO: 1785429 - DNA, 15 bp, Homo sapiens
tagtggcactttcct

SEQ ID NO: 1785430 - DNA, 15 bp, Homo sapiens
agtggcactttcctt

SEQ ID NO: 1785431 - DNA, 15 bp, Homo sapiens
gtggcactttccttt

SEQ ID NO: 1785432 - DNA, 15 bp, Homo sapiens
tggcactttcctttc

SEQ ID NO: 1785433 - DNA, 15 bp, Homo sapiens
ggcactttcctttct

SEQ ID NO: 1785434 - DNA, 15 bp, Homo sapiens
gcactttcctttctc

SEQ ID NO: 1785435 - DNA, 15 bp, Homo sapiens
cactttcctttctct

SEQ ID NO: 1785436 - DNA, 15 bp, Homo sapiens
actttcctttctctg

SEQ ID NO: 1785437 - DNA, 15 bp, Homo sapiens
ctttcctttctctga

SEQ ID NO: 1785438 - DNA, 15 bp, Homo sapiens
tttcctttctctgat

SEQ ID NO: 1785439 - DNA, 15 bp, Homo sapiens
ttcctttctctgata

SEQ ID NO: 1785440 - DNA, 15 bp, Homo sapiens
tcctttctctgataa

SEQ ID NO: 1785441 - DNA, 15 bp, Homo sapiens
cctttctctgataaa

SEQ ID NO: 1785442 - DNA, 15 bp, Homo sapiens
ctttctctgataaag

SEQ ID NO: 1785443 - DNA, 15 bp, Homo sapiens
tttctctgataaagt

SEQ ID NO: 1785444 - DNA, 15 bp, Homo sapiens
ttctctgataaagtg

SEQ ID NO: 1785445 - DNA, 15 bp, Homo sapiens
tctctgataaagtga

SEQ ID NO: 1785446 - DNA, 15 bp, Homo sapiens
ctctgataaagtgat

SEQ ID NO: 1785447 - DNA, 15 bp, Homo sapiens
tctgataaagtgata

SEQ ID NO: 1785448 - DNA, 15 bp, Homo sapiens
ctgataaagtgatat

SEQ ID NO: 1785449 - DNA, 15 bp, Homo sapiens
tgataaagtgatatt

SEQ ID NO: 1785450 - DNA, 15 bp, Homo sapiens
gataaagtgatattt

SEQ ID NO: 1785451 - DNA, 15 bp, Homo sapiens
ataaagtgatatttt

SEQ ID NO: 1785452 - DNA, 15 bp, Homo sapiens
taaagtgatattttg

SEQ ID NO: 1785453 - DNA, 15 bp, Homo sapiens
aaagtgatattttga

SEQ ID NO: 1785454 - DNA, 15 bp, Homo sapiens
aagtgatattttgac

SEQ ID NO: 1785455 - DNA, 15 bp, Homo sapiens
agtgatattttgacg

SEQ ID NO: 1785456 - DNA, 15 bp, Homo sapiens
gtgatattttgacgt

SEQ ID NO: 1785457 - DNA, 15 bp, Homo sapiens
tgatattttgacgtc

SEQ ID NO: 1785458 - DNA, 15 bp, Homo sapiens
gatattttgacgtca

SEQ ID NO: 1785459 - DNA, 15 bp, Homo sapiens
atattttgacgtcac

SEQ ID NO: 1785460 - DNA, 15 bp, Homo sapiens
tattttgacgtcaca

SEQ ID NO: 1785461 - DNA, 15 bp, Homo sapiens
attttgacgtcacac

SEQ ID NO: 1785462 - DNA, 15 bp, Homo sapiens
ttttgacgtcacacc

SEQ ID NO: 1785463 - DNA, 15 bp, Homo sapiens
tttgacgtcacacct

SEQ ID NO: 1785464 - DNA, 15 bp, Homo sapiens
ttgacgtcacacctg

SEQ ID NO: 1785465 - DNA, 15 bp, Homo sapiens
tgacgtcacacctga

SEQ ID NO: 1785466 - DNA, 15 bp, Homo sapiens
gacgtcacacctgaa

SEQ ID NO: 1785467 - DNA, 15 bp, Homo sapiens
acgtcacacctgaag

SEQ ID NO: 1785468 - DNA, 15 bp, Homo sapiens
cgtcacacctgaagg

SEQ ID NO: 1785469 - DNA, 15 bp, Homo sapiens
gtcacacctgaaggg

SEQ ID NO: 1785470 - DNA, 15 bp, Homo sapiens
tcacacctgaagggc

SEQ ID NO: 1785471 - DNA, 15 bp, Homo sapiens
cacacctgaagggca

SEQ ID NO: 1785472 - DNA, 15 bp, Homo sapiens
acacctgaagggcaa

SEQ ID NO: 1785473 - DNA, 15 bp, Homo sapiens
cacctgaagggcaag

SEQ ID NO: 1785474 - DNA, 15 bp, Homo sapiens
acctgaagggcaagc

SEQ ID NO: 1785475 - DNA, 15 bp, Homo sapiens
cctgaagggcaagct

SEQ ID NO: 1785476 - DNA, 15 bp, Homo sapiens
ctgaagggcaagctg

SEQ ID NO: 1785477 - DNA, 15 bp, Homo sapiens
tgaagggcaagctga

SEQ ID NO: 1785478 - DNA, 15 bp, Homo sapiens
gaagggcaagctgat

SEQ ID NO: 1785479 - DNA, 15 bp, Homo sapiens
aagggcaagctgatg

SEQ ID NO: 1785480 - DNA, 15 bp, Homo sapiens
agggcaagctgatgc

SEQ ID NO: 1785481 - DNA, 15 bp, Homo sapiens
gggcaagctgatgct

SEQ ID NO: 1785482 - DNA, 15 bp, Homo sapiens
ggcaagctgatgcta

SEQ ID NO: 1785483 - DNA, 15 bp, Homo sapiens
gcaagctgatgctag

SEQ ID NO: 1785484 - DNA, 15 bp, Homo sapiens
caagctgatgctagc

SEQ ID NO: 1785485 - DNA, 15 bp, Homo sapiens
aagctgatgctagct

SEQ ID NO: 1785486 - DNA, 15 bp, Homo sapiens
agctgatgctagcta

SEQ ID NO: 1785487 - DNA, 15 bp, Homo sapiens
gctgatgctagctag

SEQ ID NO: 1785488 - DNA, 15 bp, Homo sapiens
ctgatgctagctagg

SEQ ID NO: 1785489 - DNA, 15 bp, Homo sapiens
tgatgctagctaggc

SEQ ID NO: 1785490 - DNA, 15 bp, Homo sapiens
gatgctagctaggca

SEQ ID NO: 1785491 - DNA, 15 bp, Homo sapiens
atgctagctaggcaa

SEQ ID NO: 1785492 - DNA, 15 bp, Homo sapiens
tgctagctaggcaaa

SEQ ID NO: 1785493 - DNA, 15 bp, Homo sapiens
gctagctaggcaaaa

SEQ ID NO: 1785494 - DNA, 15 bp, Homo sapiens
ctagctaggcaaaaa

SEQ ID NO: 1785495 - DNA, 15 bp, Homo sapiens
tagctaggcaaaaac

SEQ ID NO: 1785496 - DNA, 15 bp, Homo sapiens
agctaggcaaaaacc

SEQ ID NO: 1785497 - DNA, 15 bp, Homo sapiens
gctaggcaaaaacct

SEQ ID NO: 1785498 - DNA, 15 bp, Homo sapiens
ctaggcaaaaacctg

SEQ ID NO: 1785499 - DNA, 15 bp, Homo sapiens
taggcaaaaacctgc

SEQ ID NO: 1785500 - DNA, 15 bp, Homo sapiens
aggcaaaaacctgca

SEQ ID NO: 1785501 - DNA, 15 bp, Homo sapiens
ggcaaaaacctgcat

SEQ ID NO: 1785502 - DNA, 15 bp, Homo sapiens
gcaaaaacctgcatg

SEQ ID NO: 1785503 - DNA, 15 bp, Homo sapiens
caaaaacctgcatga

SEQ ID NO: 1785504 - DNA, 15 bp, Homo sapiens
aaaaacctgcatgat

SEQ ID NO: 1785505 - DNA, 15 bp, Homo sapiens
aaaacctgcatgatg

SEQ ID NO: 1785506 - DNA, 15 bp, Homo sapiens
aaacctgcatgatgt

SEQ ID NO: 1785507 - DNA, 15 bp, Homo sapiens
aacctgcatgatgtg

SEQ ID NO: 1785508 - DNA, 15 bp, Homo sapiens
acctgcatgatgtgc

SEQ ID NO: 1785509 - DNA, 15 bp, Homo sapiens
cctgcatgatgtgca

SEQ ID NO: 1785510 - DNA, 15 bp, Homo sapiens
ctgcatgatgtgcat

SEQ ID NO: 1785511 - DNA, 15 bp, Homo sapiens
tgcatgatgtgcatt

SEQ ID NO: 1785512 - DNA, 15 bp, Homo sapiens
gcatgatgtgcattc

SEQ ID NO: 1785513 - DNA, 15 bp, Homo sapiens
catgatgtgcattcc

SEQ ID NO: 1785514 - DNA, 15 bp, Homo sapiens
atgatgtgcattcca

SEQ ID NO: 1785515 - DNA, 15 bp, Homo sapiens
tgatgtgcattccag

SEQ ID NO: 1785516 - DNA, 15 bp, Homo sapiens
gatgtgcattccagg

SEQ ID NO: 1785517 - DNA, 15 bp, Homo sapiens
atgtgcattccaggc

SEQ ID NO: 1785518 - DNA, 15 bp, Homo sapiens
tgtgcattccaggca

SEQ ID NO: 1785519 - DNA, 15 bp, Homo sapiens
gtgcattccaggcag

SEQ ID NO: 1785520 - DNA, 15 bp, Homo sapiens
tgcattccaggcaga

SEQ ID NO: 1785521 - DNA, 15 bp, Homo sapiens
gcattccaggcagaa

SEQ ID NO: 1785522 - DNA, 15 bp, Homo sapiens
cattccaggcagaac

SEQ ID NO: 1785523 - DNA, 15 bp, Homo sapiens
attccaggcagaaca

SEQ ID NO: 1785524 - DNA, 15 bp, Homo sapiens
ttccaggcagaacaa

SEQ ID NO: 1785525 - DNA, 15 bp, Homo sapiens
tccaggcagaacaaa

SEQ ID NO: 1785526 - DNA, 15 bp, Homo sapiens
ccaggcagaacaaac

SEQ ID NO: 1785527 - DNA, 15 bp, Homo sapiens
caggcagaacaaaca

SEQ ID NO: 1785528 - DNA, 15 bp, Homo sapiens
aggcagaacaaacag

SEQ ID NO: 1785529 - DNA, 15 bp, Homo sapiens
ggcagaacaaacagc

SEQ ID NO: 1785530 - DNA, 15 bp, Homo sapiens
gcagaacaaacagca

SEQ ID NO: 1785531 - DNA, 15 bp, Homo sapiens
cagaacaaacagcaa

SEQ ID NO: 1785532 - DNA, 15 bp, Homo sapiens
agaacaaacagcaag

SEQ ID NO: 1785533 - DNA, 15 bp, Homo sapiens
gaacaaacagcaagt

SEQ ID NO: 1785534 - DNA, 15 bp, Homo sapiens
aacaaacagcaagtg

SEQ ID NO: 1785535 - DNA, 15 bp, Homo sapiens
acaaacagcaagtgc

SEQ ID NO: 1785536 - DNA, 15 bp, Homo sapiens
caaacagcaagtgca

SEQ ID NO: 1785537 - DNA, 15 bp, Homo sapiens
aaacagcaagtgcag

SEQ ID NO: 1785538 - DNA, 15 bp, Homo sapiens
aacagcaagtgcagt

SEQ ID NO: 1785539 - DNA, 15 bp, Homo sapiens
acagcaagtgcagtg

SEQ ID NO: 1785540 - DNA, 15 bp, Homo sapiens
cagcaagtgcagtgg

SEQ ID NO: 1785541 - DNA, 15 bp, Homo sapiens
agcaagtgcagtggc

SEQ ID NO: 1785542 - DNA, 15 bp, Homo sapiens
gcaagtgcagtggct

SEQ ID NO: 1785543 - DNA, 15 bp, Homo sapiens
caagtgcagtggctg

SEQ ID NO: 1785544 - DNA, 15 bp, Homo sapiens
aagtgcagtggctgt

SEQ ID NO: 1785545 - DNA, 15 bp, Homo sapiens
agtgcagtggctgta

SEQ ID NO: 1785546 - DNA, 15 bp, Homo sapiens
gtgcagtggctgtag

SEQ ID NO: 1785547 - DNA, 15 bp, Homo sapiens
tgcagtggctgtagg

SEQ ID NO: 1785548 - DNA, 15 bp, Homo sapiens
gcagtggctgtaggg

SEQ ID NO: 1785549 - DNA, 15 bp, Homo sapiens
cagtggctgtagggc

SEQ ID NO: 1785550 - DNA, 15 bp, Homo sapiens
agtggctgtagggca

SEQ ID NO: 1785551 - DNA, 15 bp, Homo sapiens
gtggctgtagggcag

SEQ ID NO: 1785552 - DNA, 15 bp, Homo sapiens
tggctgtagggcaga

SEQ ID NO: 1785553 - DNA, 15 bp, Homo sapiens
ggctgtagggcagat

SEQ ID NO: 1785554 - DNA, 15 bp, Homo sapiens
gctgtagggcagatc

SEQ ID NO: 1785555 - DNA, 15 bp, Homo sapiens
ctgtagggcagatca

SEQ ID NO: 1785556 - DNA, 15 bp, Homo sapiens
tgtagggcagatcaa

SEQ ID NO: 1785557 - DNA, 15 bp, Homo sapiens
gtagggcagatcaaa

SEQ ID NO: 1785558 - DNA, 15 bp, Homo sapiens
tagggcagatcaaac

SEQ ID NO: 1785559 - DNA, 15 bp, Homo sapiens
agggcagatcaaact

SEQ ID NO: 1785560 - DNA, 15 bp, Homo sapiens
gggcagatcaaactt

SEQ ID NO: 1785561 - DNA, 15 bp, Homo sapiens
ggcagatcaaactta

SEQ ID NO: 1785562 - DNA, 15 bp, Homo sapiens
gcagatcaaacttag

SEQ ID NO: 1785563 - DNA, 15 bp, Homo sapiens
cagatcaaacttagc

SEQ ID NO: 1785564 - DNA, 15 bp, Homo sapiens
agatcaaacttagct

SEQ ID NO: 1785565 - DNA, 15 bp, Homo sapiens
gatcaaacttagctg

SEQ ID NO: 1785566 - DNA, 15 bp, Homo sapiens
atcaaacttagctgg

SEQ ID NO: 1785567 - DNA, 15 bp, Homo sapiens
tcaaacttagctgga

SEQ ID NO: 1785568 - DNA, 15 bp, Homo sapiens
caaacttagctggat

SEQ ID NO: 1785569 - DNA, 15 bp, Homo sapiens
aaacttagctggatt

SEQ ID NO: 1785570 - DNA, 15 bp, Homo sapiens
aacttagctggattt

SEQ ID NO: 1785571 - DNA, 15 bp, Homo sapiens
acttagctggattta

SEQ ID NO: 1785572 - DNA, 15 bp, Homo sapiens
cttagctggatttag

SEQ ID NO: 1785573 - DNA, 15 bp, Homo sapiens
ttagctggatttagg

SEQ ID NO: 1785574 - DNA, 15 bp, Homo sapiens
tagctggatttagga

SEQ ID NO: 1785575 - DNA, 15 bp, Homo sapiens
agctggatttaggaa

SEQ ID NO: 1785576 - DNA, 15 bp, Homo sapiens
gctggatttaggaac

SEQ ID NO: 1785577 - DNA, 15 bp, Homo sapiens
ctggatttaggaaca

SEQ ID NO: 1785578 - DNA, 15 bp, Homo sapiens
tggatttaggaacag

SEQ ID NO: 1785579 - DNA, 15 bp, Homo sapiens
ggatttaggaacaga

SEQ ID NO: 1785580 - DNA, 15 bp, Homo sapiens
gatttaggaacagaa

SEQ ID NO: 1785581 - DNA, 15 bp, Homo sapiens
atttaggaacagaaa

SEQ ID NO: 1785582 - DNA, 15 bp, Homo sapiens
tttaggaacagaaag

SEQ ID NO: 1785583 - DNA, 15 bp, Homo sapiens
ttaggaacagaaaga

SEQ ID NO: 1785584 - DNA, 15 bp, Homo sapiens
taggaacagaaagaa

SEQ ID NO: 1785585 - DNA, 15 bp, Homo sapiens
aggaacagaaagaaa

SEQ ID NO: 1785586 - DNA, 15 bp, Homo sapiens
ggaacagaaagaaag

SEQ ID NO: 1785587 - DNA, 15 bp, Homo sapiens
gaacagaaagaaaga

SEQ ID NO: 1785588 - DNA, 15 bp, Homo sapiens
aacagaaagaaagaa

SEQ ID NO: 1785589 - DNA, 15 bp, Homo sapiens
acagaaagaaagaaa

SEQ ID NO: 1785590 - DNA, 15 bp, Homo sapiens
cagaaagaaagaaat

SEQ ID NO: 1785591 - DNA, 15 bp, Homo sapiens
agaaagaaagaaatc

SEQ ID NO: 1785592 - DNA, 15 bp, Homo sapiens
gaaagaaagaaatcc

SEQ ID NO: 1785593 - DNA, 15 bp, Homo sapiens
aaagaaagaaatcct

SEQ ID NO: 1785594 - DNA, 15 bp, Homo sapiens
aagaaagaaatccta

SEQ ID NO: 1785595 - DNA, 15 bp, Homo sapiens
agaaagaaatcctag

SEQ ID NO: 1785596 - DNA, 15 bp, Homo sapiens
gaaagaaatcctagt

SEQ ID NO: 1785597 - DNA, 15 bp, Homo sapiens
aaagaaatcctagtg

SEQ ID NO: 1785598 - DNA, 15 bp, Homo sapiens
aagaaatcctagtgt

SEQ ID NO: 1785599 - DNA, 15 bp, Homo sapiens
agaaatcctagtgtg

SEQ ID NO: 1785600 - DNA, 15 bp, Homo sapiens
gaaatcctagtgtgg

SEQ ID NO: 1785601 - DNA, 15 bp, Homo sapiens
aaatcctagtgtggc

SEQ ID NO: 1785602 - DNA, 15 bp, Homo sapiens
aatcctagtgtggct

SEQ ID NO: 1785603 - DNA, 15 bp, Homo sapiens
atcctagtgtggctg

SEQ ID NO: 1785604 - DNA, 15 bp, Homo sapiens
tcctagtgtggctgg

SEQ ID NO: 1785605 - DNA, 15 bp, Homo sapiens
cctagtgtggctggg

SEQ ID NO: 1785606 - DNA, 15 bp, Homo sapiens
ctagtgtggctgggg

SEQ ID NO: 1785607 - DNA, 15 bp, Homo sapiens
tagtgtggctggggt

SEQ ID NO: 1785608 - DNA, 15 bp, Homo sapiens
agtgtggctggggta

SEQ ID NO: 1785609 - DNA, 15 bp, Homo sapiens
gtgtggctggggtat

SEQ ID NO: 1785610 - DNA, 15 bp, Homo sapiens
tgtggctggggtatt

SEQ ID NO: 1785611 - DNA, 15 bp, Homo sapiens
gtggctggggtattg

SEQ ID NO: 1785612 - DNA, 15 bp, Homo sapiens
tggctggggtattgg

SEQ ID NO: 1785613 - DNA, 15 bp, Homo sapiens
ggctggggtattgga

SEQ ID NO: 1785614 - DNA, 15 bp, Homo sapiens
gctggggtattggaa

SEQ ID NO: 1785615 - DNA, 15 bp, Homo sapiens
ctggggtattggaag

SEQ ID NO: 1785616 - DNA, 15 bp, Homo sapiens
tggggtattggaaga

SEQ ID NO: 1785617 - DNA, 15 bp, Homo sapiens
ggggtattggaagag

SEQ ID NO: 1785618 - DNA, 15 bp, Homo sapiens
gggtattggaagagg

SEQ ID NO: 1785619 - DNA, 15 bp, Homo sapiens
ggtattggaagagga

SEQ ID NO: 1785620 - DNA, 15 bp, Homo sapiens
gtattggaagaggag

SEQ ID NO: 1785621 - DNA, 15 bp, Homo sapiens
tattggaagaggaga

SEQ ID NO: 1785622 - DNA, 15 bp, Homo sapiens
attggaagaggagaa

SEQ ID NO: 1785623 - DNA, 15 bp, Homo sapiens
ttggaagaggagaat

SEQ ID NO: 1785624 - DNA, 15 bp, Homo sapiens
tggaagaggagaatg

SEQ ID NO: 1785625 - DNA, 15 bp, Homo sapiens
ggaagaggagaatgg

SEQ ID NO: 1785626 - DNA, 15 bp, Homo sapiens
gaagaggagaatggt

SEQ ID NO: 1785627 - DNA, 15 bp, Homo sapiens
aagaggagaatggtg

SEQ ID NO: 1785628 - DNA, 15 bp, Homo sapiens
agaggagaatggtgc

SEQ ID NO: 1785629 - DNA, 15 bp, Homo sapiens
gaggagaatggtgca

SEQ ID NO: 1785630 - DNA, 15 bp, Homo sapiens
aggagaatggtgcaa

SEQ ID NO: 1785631 - DNA, 15 bp, Homo sapiens
ggagaatggtgcaag

SEQ ID NO: 1785632 - DNA, 15 bp, Homo sapiens
gagaatggtgcaaga

SEQ ID NO: 1785633 - DNA, 15 bp, Homo sapiens
agaatggtgcaagat

SEQ ID NO: 1785634 - DNA, 15 bp, Homo sapiens
gaatggtgcaagatg

SEQ ID NO: 1785635 - DNA, 15 bp, Homo sapiens
aatggtgcaagatga

SEQ ID NO: 1785636 - DNA, 15 bp, Homo sapiens
atggtgcaagatgag

SEQ ID NO: 1785637 - DNA, 15 bp, Homo sapiens
tggtgcaagatgaga

SEQ ID NO: 1785638 - DNA, 15 bp, Homo sapiens
ggtgcaagatgagac

SEQ ID NO: 1785639 - DNA, 15 bp, Homo sapiens
gtgcaagatgagact

SEQ ID NO: 1785640 - DNA, 15 bp, Homo sapiens
tgcaagatgagactg

SEQ ID NO: 1785641 - DNA, 15 bp, Homo sapiens
gcaagatgagactga

SEQ ID NO: 1785642 - DNA, 15 bp, Homo sapiens
caagatgagactgaa

SEQ ID NO: 1785643 - DNA, 15 bp, Homo sapiens
aagatgagactgaag

SEQ ID NO: 1785644 - DNA, 15 bp, Homo sapiens
agatgagactgaaga

SEQ ID NO: 1785645 - DNA, 15 bp, Homo sapiens
gatgagactgaagag

SEQ ID NO: 1785646 - DNA, 15 bp, Homo sapiens
atgagactgaagagc

SEQ ID NO: 1785647 - DNA, 15 bp, Homo sapiens
tgagactgaagagct

SEQ ID NO: 1785648 - DNA, 15 bp, Homo sapiens
gagactgaagagcta

SEQ ID NO: 1785649 - DNA, 15 bp, Homo sapiens
agactgaagagctaa

SEQ ID NO: 1785650 - DNA, 15 bp, Homo sapiens
gactgaagagctaag

SEQ ID NO: 1785651 - DNA, 15 bp, Homo sapiens
actgaagagctaagc

SEQ ID NO: 1785652 - DNA, 15 bp, Homo sapiens
ctgaagagctaagct

SEQ ID NO: 1785653 - DNA, 15 bp, Homo sapiens
tgaagagctaagctg

SEQ ID NO: 1785654 - DNA, 15 bp, Homo sapiens
gaagagctaagctgg

SEQ ID NO: 1785655 - DNA, 15 bp, Homo sapiens
aagagctaagctggg

SEQ ID NO: 1785656 - DNA, 15 bp, Homo sapiens
agagctaagctgggg

SEQ ID NO: 1785657 - DNA, 15 bp, Homo sapiens
gagctaagctggggt

SEQ ID NO: 1785658 - DNA, 15 bp, Homo sapiens
agctaagctggggta

SEQ ID NO: 1785659 - DNA, 15 bp, Homo sapiens
gctaagctggggtag

SEQ ID NO: 1785660 - DNA, 15 bp, Homo sapiens
ctaagctggggtaga

SEQ ID NO: 1785661 - DNA, 15 bp, Homo sapiens
taagctggggtagat

SEQ ID NO: 1785662 - DNA, 15 bp, Homo sapiens
aagctggggtagatc

SEQ ID NO: 1785663 - DNA, 15 bp, Homo sapiens
agctggggtagatct

SEQ ID NO: 1785664 - DNA, 15 bp, Homo sapiens
gctggggtagatctt

SEQ ID NO: 1785665 - DNA, 15 bp, Homo sapiens
ctggggtagatcttg

SEQ ID NO: 1785666 - DNA, 15 bp, Homo sapiens
tggggtagatcttgt

SEQ ID NO: 1785667 - DNA, 15 bp, Homo sapiens
ggggtagatcttgta

SEQ ID NO: 1785668 - DNA, 15 bp, Homo sapiens
gggtagatcttgtag

SEQ ID NO: 1785669 - DNA, 15 bp, Homo sapiens
ggtagatcttgtaga

SEQ ID NO: 1785670 - DNA, 15 bp, Homo sapiens
gtagatcttgtagag

SEQ ID NO: 1785671 - DNA, 15 bp, Homo sapiens
tagatcttgtagaga

SEQ ID NO: 1785672 - DNA, 15 bp, Homo sapiens
agatcttgtagagat

SEQ ID NO: 1785673 - DNA, 15 bp, Homo sapiens
gatcttgtagagatc

SEQ ID NO: 1785674 - DNA, 15 bp, Homo sapiens
atcttgtagagatct

SEQ ID NO: 1785675 - DNA, 15 bp, Homo sapiens
tcttgtagagatctc

SEQ ID NO: 1785676 - DNA, 15 bp, Homo sapiens
cttgtagagatctcc

SEQ ID NO: 1785677 - DNA, 15 bp, Homo sapiens
ttgtagagatctcca

SEQ ID NO: 1785678 - DNA, 15 bp, Homo sapiens
tgtagagatctccac

SEQ ID NO: 1785679 - DNA, 15 bp, Homo sapiens
gtagagatctccact

SEQ ID NO: 1785680 - DNA, 15 bp, Homo sapiens
tagagatctccactc

SEQ ID NO: 1785681 - DNA, 15 bp, Homo sapiens
agagatctccactct

SEQ ID NO: 1785682 - DNA, 15 bp, Homo sapiens
gagatctccactctc

SEQ ID NO: 1785683 - DNA, 15 bp, Homo sapiens
agatctccactctct

SEQ ID NO: 1785684 - DNA, 15 bp, Homo sapiens
gatctccactctcta

SEQ ID NO: 1785685 - DNA, 15 bp, Homo sapiens
atctccactctctag

SEQ ID NO: 1785686 - DNA, 15 bp, Homo sapiens
tctccactctctagc

SEQ ID NO: 1785687 - DNA, 15 bp, Homo sapiens
ctccactctctagct

SEQ ID NO: 1785688 - DNA, 15 bp, Homo sapiens
tccactctctagctg

SEQ ID NO: 1785689 - DNA, 15 bp, Homo sapiens
ccactctctagctgc

SEQ ID NO: 1785690 - DNA, 15 bp, Homo sapiens
cactctctagctgct

SEQ ID NO: 1785691 - DNA, 15 bp, Homo sapiens
actctctagctgcta

SEQ ID NO: 1785692 - DNA, 15 bp, Homo sapiens
ctctctagctgctat

SEQ ID NO: 1785693 - DNA, 15 bp, Homo sapiens
tctctagctgctatc

SEQ ID NO: 1785694 - DNA, 15 bp, Homo sapiens
ctctagctgctatct

SEQ ID NO: 1785695 - DNA, 15 bp, Homo sapiens
tctagctgctatctg

SEQ ID NO: 1785696 - DNA, 15 bp, Homo sapiens
ctagctgctatctga

SEQ ID NO: 1785697 - DNA, 15 bp, Homo sapiens
tagctgctatctgaa

SEQ ID NO: 1785698 - DNA, 15 bp, Homo sapiens
agctgctatctgaag

SEQ ID NO: 1785699 - DNA, 15 bp, Homo sapiens
gctgctatctgaagt

SEQ ID NO: 1785700 - DNA, 15 bp, Homo sapiens
ctgctatctgaagta

SEQ ID NO: 1785701 - DNA, 15 bp, Homo sapiens
tgctatctgaagtac

SEQ ID NO: 1785702 - DNA, 15 bp, Homo sapiens
gctatctgaagtaca

SEQ ID NO: 1785703 - DNA, 15 bp, Homo sapiens
ctatctgaagtacag

SEQ ID NO: 1785704 - DNA, 15 bp, Homo sapiens
tatctgaagtacagg

SEQ ID NO: 1785705 - DNA, 15 bp, Homo sapiens
atctgaagtacaggt

SEQ ID NO: 1785706 - DNA, 15 bp, Homo sapiens
tctgaagtacaggtg

SEQ ID NO: 1785707 - DNA, 15 bp, Homo sapiens
ctgaagtacaggtgg

SEQ ID NO: 1785708 - DNA, 15 bp, Homo sapiens
tgaagtacaggtggg

SEQ ID NO: 1785709 - DNA, 15 bp, Homo sapiens
gaagtacaggtgggt

SEQ ID NO: 1785710 - DNA, 15 bp, Homo sapiens
aagtacaggtgggtt

SEQ ID NO: 1785711 - DNA, 15 bp, Homo sapiens
agtacaggtgggttt

SEQ ID NO: 1785712 - DNA, 15 bp, Homo sapiens
gtacaggtgggtttg

SEQ ID NO: 1785713 - DNA, 15 bp, Homo sapiens
tacaggtgggtttgg

SEQ ID NO: 1785714 - DNA, 15 bp, Homo sapiens
acaggtgggtttgga

SEQ ID NO: 1785715 - DNA, 15 bp, Homo sapiens
caggtgggtttggag

SEQ ID NO: 1785716 - DNA, 15 bp, Homo sapiens
aggtgggtttggagg

SEQ ID NO: 1785717 - DNA, 15 bp, Homo sapiens
ggtgggtttggagga

SEQ ID NO: 1785718 - DNA, 15 bp, Homo sapiens
gtgggtttggaggaa

SEQ ID NO: 1785719 - DNA, 15 bp, Homo sapiens
tgggtttggaggaaa

SEQ ID NO: 1785720 - DNA, 15 bp, Homo sapiens
gggtttggaggaaag

SEQ ID NO: 1785721 - DNA, 15 bp, Homo sapiens
ggtttggaggaaagg

SEQ ID NO: 1785722 - DNA, 15 bp, Homo sapiens
gtttggaggaaaggg

SEQ ID NO: 1785723 - DNA, 15 bp, Homo sapiens
tttggaggaaaggga

SEQ ID NO: 1785724 - DNA, 15 bp, Homo sapiens
ttggaggaaagggac

SEQ ID NO: 1785725 - DNA, 15 bp, Homo sapiens
tggaggaaagggaca

SEQ ID NO: 1785726 - DNA, 15 bp, Homo sapiens
ggaggaaagggacag

SEQ ID NO: 1785727 - DNA, 15 bp, Homo sapiens
gaggaaagggacagg

SEQ ID NO: 1785728 - DNA, 15 bp, Homo sapiens
aggaaagggacaggg

SEQ ID NO: 1785729 - DNA, 15 bp, Homo sapiens
ggaaagggacagggc

SEQ ID NO: 1785730 - DNA, 15 bp, Homo sapiens
gaaagggacagggca

SEQ ID NO: 1785731 - DNA, 15 bp, Homo sapiens
aaagggacagggcaa

SEQ ID NO: 1785732 - DNA, 15 bp, Homo sapiens
aagggacagggcaag

SEQ ID NO: 1785733 - DNA, 15 bp, Homo sapiens
agggacagggcaagg

SEQ ID NO: 1785734 - DNA, 15 bp, Homo sapiens
gggacagggcaaggc

SEQ ID NO: 1785735 - DNA, 15 bp, Homo sapiens
ggacagggcaaggca

SEQ ID NO: 1785736 - DNA, 15 bp, Homo sapiens
gacagggcaaggcaa

SEQ ID NO: 1785737 - DNA, 15 bp, Homo sapiens
acagggcaaggcaaa

SEQ ID NO: 1785738 - DNA, 15 bp, Homo sapiens
cagggcaaggcaaaa

SEQ ID NO: 1785739 - DNA, 15 bp, Homo sapiens
agggcaaggcaaaaa

SEQ ID NO: 1785740 - DNA, 15 bp, Homo sapiens
gggcaaggcaaaaag

SEQ ID NO: 1785741 - DNA, 15 bp, Homo sapiens
ggcaaggcaaaaagc

SEQ ID NO: 1785742 - DNA, 15 bp, Homo sapiens
gcaaggcaaaaagcg

SEQ ID NO: 1785743 - DNA, 15 bp, Homo sapiens
caaggcaaaaagcga

SEQ ID NO: 1785744 - DNA, 15 bp, Homo sapiens
aaggcaaaaagcgag

SEQ ID NO: 1785745 - DNA, 15 bp, Homo sapiens
aggcaaaaagcgagg

SEQ ID NO: 1785746 - DNA, 15 bp, Homo sapiens
ggcaaaaagcgagga

SEQ ID NO: 1785747 - DNA, 15 bp, Homo sapiens
gcaaaaagcgaggaa

SEQ ID NO: 1785748 - DNA, 15 bp, Homo sapiens
caaaaagcgaggaaa

SEQ ID NO: 1785749 - DNA, 15 bp, Homo sapiens
aaaaagcgaggaaac

SEQ ID NO: 1785750 - DNA, 15 bp, Homo sapiens
aaaagcgaggaaacc

SEQ ID NO: 1785751 - DNA, 15 bp, Homo sapiens
aaagcgaggaaacca

SEQ ID NO: 1785752 - DNA, 15 bp, Homo sapiens
aagcgaggaaaccaa

SEQ ID NO: 1785753 - DNA, 15 bp, Homo sapiens
agcgaggaaaccaat

SEQ ID NO: 1785754 - DNA, 15 bp, Homo sapiens
gcgaggaaaccaatt

SEQ ID NO: 1785755 - DNA, 15 bp, Homo sapiens
cgaggaaaccaattt

SEQ ID NO: 1785756 - DNA, 15 bp, Homo sapiens
gaggaaaccaatttg

SEQ ID NO: 1785757 - DNA, 15 bp, Homo sapiens
aggaaaccaatttgg

SEQ ID NO: 1785758 - DNA, 15 bp, Homo sapiens
ggaaaccaatttgga

SEQ ID NO: 1785759 - DNA, 15 bp, Homo sapiens
gaaaccaatttggag

SEQ ID NO: 1785760 - DNA, 15 bp, Homo sapiens
aaaccaatttggaga

SEQ ID NO: 1785761 - DNA, 15 bp, Homo sapiens
aaccaatttggagac

SEQ ID NO: 1785762 - DNA, 15 bp, Homo sapiens
accaatttggagact

SEQ ID NO: 1785763 - DNA, 15 bp, Homo sapiens
ccaatttggagacta

SEQ ID NO: 1785764 - DNA, 15 bp, Homo sapiens
caatttggagactat

SEQ ID NO: 1785765 - DNA, 15 bp, Homo sapiens
aatttggagactatt

SEQ ID NO: 1785766 - DNA, 15 bp, Homo sapiens
atttggagactattt

SEQ ID NO: 1785767 - DNA, 15 bp, Homo sapiens
tttggagactatttc

SEQ ID NO: 1785768 - DNA, 15 bp, Homo sapiens
ttggagactatttct

SEQ ID NO: 1785769 - DNA, 15 bp, Homo sapiens
tggagactatttctg

SEQ ID NO: 1785770 - DNA, 15 bp, Homo sapiens
ggagactatttctgt

SEQ ID NO: 1785771 - DNA, 15 bp, Homo sapiens
gagactatttctgta

SEQ ID NO: 1785772 - DNA, 15 bp, Homo sapiens
agactatttctgtag

SEQ ID NO: 1785773 - DNA, 15 bp, Homo sapiens
gactatttctgtagt

SEQ ID NO: 1785774 - DNA, 15 bp, Homo sapiens
actatttctgtagtt

SEQ ID NO: 1785775 - DNA, 15 bp, Homo sapiens
ctatttctgtagttc

SEQ ID NO: 1785776 - DNA, 15 bp, Homo sapiens
tatttctgtagttca

SEQ ID NO: 1785777 - DNA, 15 bp, Homo sapiens
atttctgtagttcag

SEQ ID NO: 1785778 - DNA, 15 bp, Homo sapiens
tttctgtagttcaga

SEQ ID NO: 1785779 - DNA, 15 bp, Homo sapiens
ttctgtagttcagat

SEQ ID NO: 1785780 - DNA, 15 bp, Homo sapiens
tctgtagttcagatg

SEQ ID NO: 1785781 - DNA, 15 bp, Homo sapiens
ctgtagttcagatga

SEQ ID NO: 1785782 - DNA, 15 bp, Homo sapiens
tgtagttcagatgag

SEQ ID NO: 1785783 - DNA, 15 bp, Homo sapiens
gtagttcagatgagg

SEQ ID NO: 1785784 - DNA, 15 bp, Homo sapiens
tagttcagatgaggg

SEQ ID NO: 1785785 - DNA, 15 bp, Homo sapiens
agttcagatgaggga

SEQ ID NO: 1785786 - DNA, 15 bp, Homo sapiens
gttcagatgagggat

SEQ ID NO: 1785787 - DNA, 15 bp, Homo sapiens
ttcagatgagggatg

SEQ ID NO: 1785788 - DNA, 15 bp, Homo sapiens
tcagatgagggatgt

SEQ ID NO: 1785789 - DNA, 15 bp, Homo sapiens
cagatgagggatgta

SEQ ID NO: 1785790 - DNA, 15 bp, Homo sapiens
agatgagggatgtag

SEQ ID NO: 1785791 - DNA, 15 bp, Homo sapiens
gatgagggatgtagg

SEQ ID NO: 1785792 - DNA, 15 bp, Homo sapiens
atgagggatgtaggt

SEQ ID NO: 1785793 - DNA, 15 bp, Homo sapiens
tgagggatgtaggtg

SEQ ID NO: 1785794 - DNA, 15 bp, Homo sapiens
gagggatgtaggtga

SEQ ID NO: 1785795 - DNA, 15 bp, Homo sapiens
agggatgtaggtgac

SEQ ID NO: 1785796 - DNA, 15 bp, Homo sapiens
gggatgtaggtgact

SEQ ID NO: 1785797 - DNA, 15 bp, Homo sapiens
ggatgtaggtgactt

SEQ ID NO: 1785798 - DNA, 15 bp, Homo sapiens
gatgtaggtgacttg

SEQ ID NO: 1785799 - DNA, 15 bp, Homo sapiens
atgtaggtgacttgg

SEQ ID NO: 1785800 - DNA, 15 bp, Homo sapiens
tgtaggtgacttggt

SEQ ID NO: 1785801 - DNA, 15 bp, Homo sapiens
gtaggtgacttggtc

SEQ ID NO: 1785802 - DNA, 15 bp, Homo sapiens
taggtgacttggtct

SEQ ID NO: 1785803 - DNA, 15 bp, Homo sapiens
aggtgacttggtcta

SEQ ID NO: 1785804 - DNA, 15 bp, Homo sapiens
ggtgacttggtctaa

SEQ ID NO: 1785805 - DNA, 15 bp, Homo sapiens
gtgacttggtctaag

SEQ ID NO: 1785806 - DNA, 15 bp, Homo sapiens
tgacttggtctaagg

SEQ ID NO: 1785807 - DNA, 15 bp, Homo sapiens
gacttggtctaaggt

SEQ ID NO: 1785808 - DNA, 15 bp, Homo sapiens
acttggtctaaggta

SEQ ID NO: 1785809 - DNA, 15 bp, Homo sapiens
cttggtctaaggtat

SEQ ID NO: 1785810 - DNA, 15 bp, Homo sapiens
ttggtctaaggtatg

SEQ ID NO: 1785811 - DNA, 15 bp, Homo sapiens
tggtctaaggtatgg

SEQ ID NO: 1785812 - DNA, 15 bp, Homo sapiens
ggtctaaggtatggt

SEQ ID NO: 1785813 - DNA, 15 bp, Homo sapiens
gtctaaggtatggta

SEQ ID NO: 1785814 - DNA, 15 bp, Homo sapiens
tctaaggtatggtat

SEQ ID NO: 1785815 - DNA, 15 bp, Homo sapiens
ctaaggtatggtatt

SEQ ID NO: 1785816 - DNA, 15 bp, Homo sapiens
taaggtatggtatta

SEQ ID NO: 1785817 - DNA, 15 bp, Homo sapiens
aaggtatggtattag

SEQ ID NO: 1785818 - DNA, 15 bp, Homo sapiens
aggtatggtattaga

SEQ ID NO: 1785819 - DNA, 15 bp, Homo sapiens
ggtatggtattagaa

SEQ ID NO: 1785820 - DNA, 15 bp, Homo sapiens
gtatggtattagaaa

SEQ ID NO: 1785821 - DNA, 15 bp, Homo sapiens
tatggtattagaaat

SEQ ID NO: 1785822 - DNA, 15 bp, Homo sapiens
atggtattagaaata

SEQ ID NO: 1785823 - DNA, 15 bp, Homo sapiens
tggtattagaaatag

SEQ ID NO: 1785824 - DNA, 15 bp, Homo sapiens
ggtattagaaataga

SEQ ID NO: 1785825 - DNA, 15 bp, Homo sapiens
gtattagaaatagaa

SEQ ID NO: 1785826 - DNA, 15 bp, Homo sapiens
tattagaaatagaaa

SEQ ID NO: 1785827 - DNA, 15 bp, Homo sapiens
attagaaatagaaat

SEQ ID NO: 1785828 - DNA, 15 bp, Homo sapiens
ttagaaatagaaatg

SEQ ID NO: 1785829 - DNA, 15 bp, Homo sapiens
tagaaatagaaatgg

SEQ ID NO: 1785830 - DNA, 15 bp, Homo sapiens
agaaatagaaatgga

SEQ ID NO: 1785831 - DNA, 15 bp, Homo sapiens
gaaatagaaatggag

SEQ ID NO: 1785832 - DNA, 15 bp, Homo sapiens
aaatagaaatggaga

SEQ ID NO: 1785833 - DNA, 15 bp, Homo sapiens
aatagaaatggagag

SEQ ID NO: 1785834 - DNA, 15 bp, Homo sapiens
atagaaatggagaga

SEQ ID NO: 1785835 - DNA, 15 bp, Homo sapiens
tagaaatggagagat

SEQ ID NO: 1785836 - DNA, 15 bp, Homo sapiens
agaaatggagagatc

SEQ ID NO: 1785837 - DNA, 15 bp, Homo sapiens
gaaatggagagatct

SEQ ID NO: 1785838 - DNA, 15 bp, Homo sapiens
aaatggagagatctg

SEQ ID NO: 1785839 - DNA, 15 bp, Homo sapiens
aatggagagatctgg

SEQ ID NO: 1785840 - DNA, 15 bp, Homo sapiens
atggagagatctggg

SEQ ID NO: 1785841 - DNA, 15 bp, Homo sapiens
tggagagatctgggg

SEQ ID NO: 1785842 - DNA, 15 bp, Homo sapiens
ggagagatctggggt

SEQ ID NO: 1785843 - DNA, 15 bp, Homo sapiens
gagagatctggggtg

SEQ ID NO: 1785844 - DNA, 15 bp, Homo sapiens
agagatctggggtgt

SEQ ID NO: 1785845 - DNA, 15 bp, Homo sapiens
gagatctggggtgta

SEQ ID NO: 1785846 - DNA, 15 bp, Homo sapiens
agatctggggtgtat

SEQ ID NO: 1785847 - DNA, 15 bp, Homo sapiens
gatctggggtgtatt

SEQ ID NO: 1785848 - DNA, 15 bp, Homo sapiens
atctggggtgtattt

SEQ ID NO: 1785849 - DNA, 15 bp, Homo sapiens
tctggggtgtattta

SEQ ID NO: 1785850 - DNA, 15 bp, Homo sapiens
ctggggtgtatttag

SEQ ID NO: 1785851 - DNA, 15 bp, Homo sapiens
tggggtgtatttaga

SEQ ID NO: 1785852 - DNA, 15 bp, Homo sapiens
ggggtgtatttagag

SEQ ID NO: 1785853 - DNA, 15 bp, Homo sapiens
gggtgtatttagaga

SEQ ID NO: 1785854 - DNA, 15 bp, Homo sapiens
ggtgtatttagagat

SEQ ID NO: 1785855 - DNA, 15 bp, Homo sapiens
gtgtatttagagata

SEQ ID NO: 1785856 - DNA, 15 bp, Homo sapiens
tgtatttagagataa

SEQ ID NO: 1785857 - DNA, 15 bp, Homo sapiens
gtatttagagataaa

SEQ ID NO: 1785858 - DNA, 15 bp, Homo sapiens
tatttagagataaat

SEQ ID NO: 1785859 - DNA, 15 bp, Homo sapiens
atttagagataaatt

SEQ ID NO: 1785860 - DNA, 15 bp, Homo sapiens
tttagagataaatta

SEQ ID NO: 1785861 - DNA, 15 bp, Homo sapiens
ttagagataaattaa

SEQ ID NO: 1785862 - DNA, 15 bp, Homo sapiens
tagagataaattaat

SEQ ID NO: 1785863 - DNA, 15 bp, Homo sapiens
agagataaattaata

SEQ ID NO: 1785864 - DNA, 15 bp, Homo sapiens
gagataaattaatag

SEQ ID NO: 1785865 - DNA, 15 bp, Homo sapiens
agataaattaatagg

SEQ ID NO: 1785866 - DNA, 15 bp, Homo sapiens
gataaattaataggt

SEQ ID NO: 1785867 - DNA, 15 bp, Homo sapiens
ataaattaataggtt

SEQ ID NO: 1785868 - DNA, 15 bp, Homo sapiens
taaattaataggttt

SEQ ID NO: 1785869 - DNA, 15 bp, Homo sapiens
aaattaataggtttt

SEQ ID NO: 1785870 - DNA, 15 bp, Homo sapiens
aattaataggtttta

SEQ ID NO: 1785871 - DNA, 15 bp, Homo sapiens
attaataggttttac

SEQ ID NO: 1785872 - DNA, 15 bp, Homo sapiens
ttaataggttttaca

SEQ ID NO: 1785873 - DNA, 15 bp, Homo sapiens
taataggttttacat

SEQ ID NO: 1785874 - DNA, 15 bp, Homo sapiens
aataggttttacatt

SEQ ID NO: 1785875 - DNA, 15 bp, Homo sapiens
ataggttttacattg

SEQ ID NO: 1785876 - DNA, 15 bp, Homo sapiens
taggttttacattgg

SEQ ID NO: 1785877 - DNA, 15 bp, Homo sapiens
aggttttacattggt

SEQ ID NO: 1785878 - DNA, 15 bp, Homo sapiens
ggttttacattggtt

SEQ ID NO: 1785879 - DNA, 15 bp, Homo sapiens
gttttacattggttt

SEQ ID NO: 1785880 - DNA, 15 bp, Homo sapiens
ttttacattggtttt

SEQ ID NO: 1785881 - DNA, 15 bp, Homo sapiens
tttacattggtttta

SEQ ID NO: 1785882 - DNA, 15 bp, Homo sapiens
ttacattggttttat

SEQ ID NO: 1785883 - DNA, 15 bp, Homo sapiens
tacattggttttatg

SEQ ID NO: 1785884 - DNA, 15 bp, Homo sapiens
acattggttttatgt

SEQ ID NO: 1785885 - DNA, 15 bp, Homo sapiens
cattggttttatgtt

SEQ ID NO: 1785886 - DNA, 15 bp, Homo sapiens
attggttttatgttg

SEQ ID NO: 1785887 - DNA, 15 bp, Homo sapiens
ttggttttatgttgg

SEQ ID NO: 1785888 - DNA, 15 bp, Homo sapiens
tggttttatgttgga

SEQ ID NO: 1785889 - DNA, 15 bp, Homo sapiens
ggttttatgttggat

SEQ ID NO: 1785890 - DNA, 15 bp, Homo sapiens
gttttatgttggatt

SEQ ID NO: 1785891 - DNA, 15 bp, Homo sapiens
ttttatgttggattt

SEQ ID NO: 1785892 - DNA, 15 bp, Homo sapiens
tttatgttggatttc

SEQ ID NO: 1785893 - DNA, 15 bp, Homo sapiens
ttatgttggatttca

SEQ ID NO: 1785894 - DNA, 15 bp, Homo sapiens
tatgttggatttcag

SEQ ID NO: 1785895 - DNA, 15 bp, Homo sapiens
atgttggatttcagg

SEQ ID NO: 1785896 - DNA, 15 bp, Homo sapiens
tgttggatttcagga

SEQ ID NO: 1785897 - DNA, 15 bp, Homo sapiens
gttggatttcaggaa

SEQ ID NO: 1785898 - DNA, 15 bp, Homo sapiens
ttggatttcaggaat

SEQ ID NO: 1785899 - DNA, 15 bp, Homo sapiens
tggatttcaggaatt

SEQ ID NO: 1785900 - DNA, 15 bp, Homo sapiens
ggatttcaggaattt

SEQ ID NO: 1785901 - DNA, 15 bp, Homo sapiens
gatttcaggaatttg

SEQ ID NO: 1785902 - DNA, 15 bp, Homo sapiens
atttcaggaatttgg

SEQ ID NO: 1785903 - DNA, 15 bp, Homo sapiens
tttcaggaatttgga

SEQ ID NO: 1785904 - DNA, 15 bp, Homo sapiens
ttcaggaatttggaa

SEQ ID NO: 1785905 - DNA, 15 bp, Homo sapiens
tcaggaatttggaaa

SEQ ID NO: 1785906 - DNA, 15 bp, Homo sapiens
caggaatttggaaaa

SEQ ID NO: 1785907 - DNA, 15 bp, Homo sapiens
aggaatttggaaaat

SEQ ID NO: 1785908 - DNA, 15 bp, Homo sapiens
ggaatttggaaaatg

SEQ ID NO: 1785909 - DNA, 15 bp, Homo sapiens
gaatttggaaaatgg

SEQ ID NO: 1785910 - DNA, 15 bp, Homo sapiens
aatttggaaaatgga

SEQ ID NO: 1785911 - DNA, 15 bp, Homo sapiens
atttggaaaatggag

SEQ ID NO: 1785912 - DNA, 15 bp, Homo sapiens
tttggaaaatggaga

SEQ ID NO: 1785913 - DNA, 15 bp, Homo sapiens
ttggaaaatggagaa

SEQ ID NO: 1785914 - DNA, 15 bp, Homo sapiens
tggaaaatggagaaa

SEQ ID NO: 1785915 - DNA, 15 bp, Homo sapiens
ggaaaatggagaaat

SEQ ID NO: 1785916 - DNA, 15 bp, Homo sapiens
gaaaatggagaaatt

SEQ ID NO: 1785917 - DNA, 15 bp, Homo sapiens
aaaatggagaaatta

SEQ ID NO: 1785918 - DNA, 15 bp, Homo sapiens
aaatggagaaattaa

SEQ ID NO: 1785919 - DNA, 15 bp, Homo sapiens
aatggagaaattaaa

SEQ ID NO: 1785920 - DNA, 15 bp, Homo sapiens
atggagaaattaaaa

SEQ ID NO: 1785921 - DNA, 15 bp, Homo sapiens
tggagaaattaaaaa

SEQ ID NO: 1785922 - DNA, 15 bp, Homo sapiens
ggagaaattaaaaat

SEQ ID NO: 1785923 - DNA, 15 bp, Homo sapiens
gagaaattaaaaata

SEQ ID NO: 1785924 - DNA, 15 bp, Homo sapiens
agaaattaaaaataa

SEQ ID NO: 1785925 - DNA, 15 bp, Homo sapiens
gaaattaaaaataac

SEQ ID NO: 1785926 - DNA, 15 bp, Homo sapiens
aaattaaaaataacc

SEQ ID NO: 1785927 - DNA, 15 bp, Homo sapiens
aattaaaaataaccc

SEQ ID NO: 1785928 - DNA, 15 bp, Homo sapiens
attaaaaataaccct

SEQ ID NO: 1785929 - DNA, 15 bp, Homo sapiens
ttaaaaataacccta

SEQ ID NO: 1785930 - DNA, 15 bp, Homo sapiens
taaaaataaccctag

SEQ ID NO: 1785931 - DNA, 15 bp, Homo sapiens
aaaaataaccctagg

SEQ ID NO: 1785932 - DNA, 15 bp, Homo sapiens
aaaataaccctaggt

SEQ ID NO: 1785933 - DNA, 15 bp, Homo sapiens
aaataaccctaggtt

SEQ ID NO: 1785934 - DNA, 15 bp, Homo sapiens
aataaccctaggttt

SEQ ID NO: 1785935 - DNA, 15 bp, Homo sapiens
ataaccctaggtttt

SEQ ID NO: 1785936 - DNA, 15 bp, Homo sapiens
taaccctaggttttt

SEQ ID NO: 1785937 - DNA, 15 bp, Homo sapiens
aaccctaggtttttg

SEQ ID NO: 1785938 - DNA, 15 bp, Homo sapiens
accctaggtttttga

SEQ ID NO: 1785939 - DNA, 15 bp, Homo sapiens
ccctaggtttttgac

SEQ ID NO: 1785940 - DNA, 15 bp, Homo sapiens
cctaggtttttgact

SEQ ID NO: 1785941 - DNA, 15 bp, Homo sapiens
ctaggtttttgactt

SEQ ID NO: 1785942 - DNA, 15 bp, Homo sapiens
taggtttttgactta

SEQ ID NO: 1785943 - DNA, 15 bp, Homo sapiens
aggtttttgacttaa

SEQ ID NO: 1785944 - DNA, 15 bp, Homo sapiens
ggtttttgacttaag

SEQ ID NO: 1785945 - DNA, 15 bp, Homo sapiens
gtttttgacttaaga

SEQ ID NO: 1785946 - DNA, 15 bp, Homo sapiens
tttttgacttaagac

SEQ ID NO: 1785947 - DNA, 15 bp, Homo sapiens
ttttgacttaagaca

SEQ ID NO: 1785948 - DNA, 15 bp, Homo sapiens
tttgacttaagacac

SEQ ID NO: 1785949 - DNA, 15 bp, Homo sapiens
ttgacttaagacact

SEQ ID NO: 1785950 - DNA, 15 bp, Homo sapiens
tgacttaagacacta

SEQ ID NO: 1785951 - DNA, 15 bp, Homo sapiens
gacttaagacactag

SEQ ID NO: 1785952 - DNA, 15 bp, Homo sapiens
acttaagacactaga

SEQ ID NO: 1785953 - DNA, 15 bp, Homo sapiens
cttaagacactagat

SEQ ID NO: 1785954 - DNA, 15 bp, Homo sapiens
ttaagacactagatg

SEQ ID NO: 1785955 - DNA, 15 bp, Homo sapiens
taagacactagatgt

SEQ ID NO: 1785956 - DNA, 15 bp, Homo sapiens
aagacactagatgta

SEQ ID NO: 1785957 - DNA, 15 bp, Homo sapiens
agacactagatgtaa

SEQ ID NO: 1785958 - DNA, 15 bp, Homo sapiens
gacactagatgtaat

SEQ ID NO: 1785959 - DNA, 15 bp, Homo sapiens
acactagatgtaatg

SEQ ID NO: 1785960 - DNA, 15 bp, Homo sapiens
cactagatgtaatgt

SEQ ID NO: 1785961 - DNA, 15 bp, Homo sapiens
actagatgtaatgtg

SEQ ID NO: 1785962 - DNA, 15 bp, Homo sapiens
ctagatgtaatgtgg

SEQ ID NO: 1785963 - DNA, 15 bp, Homo sapiens
tagatgtaatgtgga

SEQ ID NO: 1785964 - DNA, 15 bp, Homo sapiens
agatgtaatgtggag

SEQ ID NO: 1785965 - DNA, 15 bp, Homo sapiens
gatgtaatgtggagc

SEQ ID NO: 1785966 - DNA, 15 bp, Homo sapiens
atgtaatgtggagct

SEQ ID NO: 1785967 - DNA, 15 bp, Homo sapiens
tgtaatgtggagcta

SEQ ID NO: 1785968 - DNA, 15 bp, Homo sapiens
gtaatgtggagctat

SEQ ID NO: 1785969 - DNA, 15 bp, Homo sapiens
taatgtggagctatt

SEQ ID NO: 1785970 - DNA, 15 bp, Homo sapiens
aatgtggagctattc

SEQ ID NO: 1785971 - DNA, 15 bp, Homo sapiens
atgtggagctattct

SEQ ID NO: 1785972 - DNA, 15 bp, Homo sapiens
tgtggagctattctt

SEQ ID NO: 1785973 - DNA, 15 bp, Homo sapiens
gtggagctattcttt

SEQ ID NO: 1785974 - DNA, 15 bp, Homo sapiens
tggagctattctttg

SEQ ID NO: 1785975 - DNA, 15 bp, Homo sapiens
ggagctattctttga

SEQ ID NO: 1785976 - DNA, 15 bp, Homo sapiens
gagctattctttgag

SEQ ID NO: 1785977 - DNA, 15 bp, Homo sapiens
agctattctttgaga

SEQ ID NO: 1785978 - DNA, 15 bp, Homo sapiens
gctattctttgagat

SEQ ID NO: 1785979 - DNA, 15 bp, Homo sapiens
ctattctttgagatg

SEQ ID NO: 1785980 - DNA, 15 bp, Homo sapiens
tattctttgagatgg

SEQ ID NO: 1785981 - DNA, 15 bp, Homo sapiens
attctttgagatggg

SEQ ID NO: 1785982 - DNA, 15 bp, Homo sapiens
ttctttgagatggga

SEQ ID NO: 1785983 - DNA, 15 bp, Homo sapiens
tctttgagatgggaa

SEQ ID NO: 1785984 - DNA, 15 bp, Homo sapiens
ctttgagatgggaaa

SEQ ID NO: 1785985 - DNA, 15 bp, Homo sapiens
tttgagatgggaaaa

SEQ ID NO: 1785986 - DNA, 15 bp, Homo sapiens
ttgagatgggaaaat

SEQ ID NO: 1785987 - DNA, 15 bp, Homo sapiens
tgagatgggaaaata

SEQ ID NO: 1785988 - DNA, 15 bp, Homo sapiens
gagatgggaaaataa

SEQ ID NO: 1785989 - DNA, 15 bp, Homo sapiens
agatgggaaaataaa

SEQ ID NO: 1785990 - DNA, 15 bp, Homo sapiens
gatgggaaaataaat

SEQ ID NO: 1785991 - DNA, 15 bp, Homo sapiens
ggaaaataaatccag

SEQ ID NO: 1785992 - DNA, 15 bp, Homo sapiens
gaaaataaatccaga

SEQ ID NO: 1785993 - DNA, 15 bp, Homo sapiens
aaaataaatccagag

SEQ ID NO: 1785994 - DNA, 15 bp, Homo sapiens
aaataaatccagagc

SEQ ID NO: 1785995 - DNA, 15 bp, Homo sapiens
aataaatccagagct

SEQ ID NO: 1785996 - DNA, 15 bp, Homo sapiens
ataaatccagagctc

SEQ ID NO: 1785997 - DNA, 15 bp, Homo sapiens
taaatccagagctct

SEQ ID NO: 1785998 - DNA, 15 bp, Homo sapiens
aaatccagagctctg

SEQ ID NO: 1785999 - DNA, 15 bp, Homo sapiens
aatccagagctctgc

SEQ ID NO: 1786000 - DNA, 15 bp, Homo sapiens
atccagagctctgct

SEQ ID NO: 1786001 - DNA, 15 bp, Homo sapiens
tccagagctctgctt

SEQ ID NO: 1786002 - DNA, 15 bp, Homo sapiens
ccagagctctgcttt

SEQ ID NO: 1786003 - DNA, 15 bp, Homo sapiens
cagagctctgctttg

SEQ ID NO: 1786004 - DNA, 15 bp, Homo sapiens
agagctctgctttgt

SEQ ID NO: 1786005 - DNA, 15 bp, Homo sapiens
gagctctgctttgtt

SEQ ID NO: 1786006 - DNA, 15 bp, Homo sapiens
agctctgctttgttc

SEQ ID NO: 1786007 - DNA, 15 bp, Homo sapiens
gctctgctttgttct

SEQ ID NO: 1786008 - DNA, 15 bp, Homo sapiens
ctctgctttgttctt

SEQ ID NO: 1786009 - DNA, 15 bp, Homo sapiens
tctgctttgttctta

SEQ ID NO: 1786010 - DNA, 15 bp, Homo sapiens
ctgctttgttcttat

SEQ ID NO: 1786011 - DNA, 15 bp, Homo sapiens
tgctttgttcttatt

SEQ ID NO: 1786012 - DNA, 15 bp, Homo sapiens
gctttgttcttatta

SEQ ID NO: 1786013 - DNA, 15 bp, Homo sapiens
ctttgttcttattaa

SEQ ID NO: 1786014 - DNA, 15 bp, Homo sapiens
tttgttcttattaag

SEQ ID NO: 1786015 - DNA, 15 bp, Homo sapiens
ttgttcttattaagt

SEQ ID NO: 1786016 - DNA, 15 bp, Homo sapiens
tgttcttattaagtc

SEQ ID NO: 1786017 - DNA, 15 bp, Homo sapiens
gttcttattaagtct

SEQ ID NO: 1786018 - DNA, 15 bp, Homo sapiens
ttcttattaagtctg

SEQ ID NO: 1786019 - DNA, 15 bp, Homo sapiens
tcttattaagtctga

SEQ ID NO: 1786020 - DNA, 15 bp, Homo sapiens
cttattaagtctgag

SEQ ID NO: 1786021 - DNA, 15 bp, Homo sapiens
ttattaagtctgaga

SEQ ID NO: 1786022 - DNA, 15 bp, Homo sapiens
tattaagtctgagat

SEQ ID NO: 1786023 - DNA, 15 bp, Homo sapiens
attaagtctgagatt

SEQ ID NO: 1786024 - DNA, 15 bp, Homo sapiens
ttaagtctgagattc

SEQ ID NO: 1786025 - DNA, 15 bp, Homo sapiens
taagtctgagattcg

SEQ ID NO: 1786026 - DNA, 15 bp, Homo sapiens
aagtctgagattcga

SEQ ID NO: 1786027 - DNA, 15 bp, Homo sapiens
agtctgagattcgag

SEQ ID NO: 1786028 - DNA, 15 bp, Homo sapiens
gtctgagattcgagt

SEQ ID NO: 1786029 - DNA, 15 bp, Homo sapiens
tctgagattcgagta

SEQ ID NO: 1786030 - DNA, 15 bp, Homo sapiens
ctgagattcgagtag

SEQ ID NO: 1786031 - DNA, 15 bp, Homo sapiens
tgagattcgagtagt

SEQ ID NO: 1786032 - DNA, 15 bp, Homo sapiens
gagattcgagtagtt

SEQ ID NO: 1786033 - DNA, 15 bp, Homo sapiens
agattcgagtagtta

SEQ ID NO: 1786034 - DNA, 15 bp, Homo sapiens
gattcgagtagttat

SEQ ID NO: 1786035 - DNA, 15 bp, Homo sapiens
attcgagtagttata

SEQ ID NO: 1786036 - DNA, 15 bp, Homo sapiens
ttcgagtagttatat

SEQ ID NO: 1786037 - DNA, 15 bp, Homo sapiens
tcgagtagttatatc

SEQ ID NO: 1786038 - DNA, 15 bp, Homo sapiens
cgagtagttatatcc

SEQ ID NO: 1786039 - DNA, 15 bp, Homo sapiens
gagtagttatatccg

SEQ ID NO: 1786040 - DNA, 15 bp, Homo sapiens
agtagttatatccgg

SEQ ID NO: 1786041 - DNA, 15 bp, Homo sapiens
gtagttatatccggt

SEQ ID NO: 1786042 - DNA, 15 bp, Homo sapiens
tagttatatccggta

SEQ ID NO: 1786043 - DNA, 15 bp, Homo sapiens
agttatatccggtag

SEQ ID NO: 1786044 - DNA, 15 bp, Homo sapiens
gttatatccggtagg

SEQ ID NO: 1786045 - DNA, 15 bp, Homo sapiens
ttatatccggtaggt

SEQ ID NO: 1786046 - DNA, 15 bp, Homo sapiens
tatatccggtaggta

SEQ ID NO: 1786047 - DNA, 15 bp, Homo sapiens
atatccggtaggtaa

SEQ ID NO: 1786048 - DNA, 15 bp, Homo sapiens
tatccggtaggtaat

SEQ ID NO: 1786049 - DNA, 15 bp, Homo sapiens
atccggtaggtaatt

SEQ ID NO: 1786050 - DNA, 15 bp, Homo sapiens
tccggtaggtaattg

SEQ ID NO: 1786051 - DNA, 15 bp, Homo sapiens
ccggtaggtaattgg

SEQ ID NO: 1786052 - DNA, 15 bp, Homo sapiens
cggtaggtaattgga

SEQ ID NO: 1786053 - DNA, 15 bp, Homo sapiens
ggtaggtaattggag

SEQ ID NO: 1786054 - DNA, 15 bp, Homo sapiens
gtaggtaattggaga

SEQ ID NO: 1786055 - DNA, 15 bp, Homo sapiens
taggtaattggagat

SEQ ID NO: 1786056 - DNA, 15 bp, Homo sapiens
aggtaattggagatt

SEQ ID NO: 1786057 - DNA, 15 bp, Homo sapiens
ggtaattggagattt

SEQ ID NO: 1786058 - DNA, 15 bp, Homo sapiens
gtaattggagattta

SEQ ID NO: 1786059 - DNA, 15 bp, Homo sapiens
taattggagatttac

SEQ ID NO: 1786060 - DNA, 15 bp, Homo sapiens
aattggagatttaca

SEQ ID NO: 1786061 - DNA, 15 bp, Homo sapiens
attggagatttacac

SEQ ID NO: 1786062 - DNA, 15 bp, Homo sapiens
ttggagatttacacc

SEQ ID NO: 1786063 - DNA, 15 bp, Homo sapiens
tggagatttacacct

SEQ ID NO: 1786064 - DNA, 15 bp, Homo sapiens
ggagatttacaccta

SEQ ID NO: 1786065 - DNA, 15 bp, Homo sapiens
gagatttacacctag

SEQ ID NO: 1786066 - DNA, 15 bp, Homo sapiens
agatttacacctaga

SEQ ID NO: 1786067 - DNA, 15 bp, Homo sapiens
gatttacacctagaa

SEQ ID NO: 1786068 - DNA, 15 bp, Homo sapiens
atttacacctagaac

SEQ ID NO: 1786069 - DNA, 15 bp, Homo sapiens
tttacacctagaact

SEQ ID NO: 1786070 - DNA, 15 bp, Homo sapiens
ttacacctagaactt

SEQ ID NO: 1786071 - DNA, 15 bp, Homo sapiens
tacacctagaacttc

SEQ ID NO: 1786072 - DNA, 15 bp, Homo sapiens
acacctagaacttca

SEQ ID NO: 1786073 - DNA, 15 bp, Homo sapiens
cacctagaacttcag

SEQ ID NO: 1786074 - DNA, 15 bp, Homo sapiens
acctagaacttcaga

SEQ ID NO: 1786075 - DNA, 15 bp, Homo sapiens
cctagaacttcagag

SEQ ID NO: 1786076 - DNA, 15 bp, Homo sapiens
ctagaacttcagaga

SEQ ID NO: 1786077 - DNA, 15 bp, Homo sapiens
tagaacttcagagac

SEQ ID NO: 1786078 - DNA, 15 bp, Homo sapiens
agaacttcagagact

SEQ ID NO: 1786079 - DNA, 15 bp, Homo sapiens
gaacttcagagacta

SEQ ID NO: 1786080 - DNA, 15 bp, Homo sapiens
aacttcagagactaa

SEQ ID NO: 1786081 - DNA, 15 bp, Homo sapiens
acttcagagactaac

SEQ ID NO: 1786082 - DNA, 15 bp, Homo sapiens
cttcagagactaact

SEQ ID NO: 1786083 - DNA, 15 bp, Homo sapiens
ttcagagactaactt

SEQ ID NO: 1786084 - DNA, 15 bp, Homo sapiens
tcagagactaacttt

SEQ ID NO: 1786085 - DNA, 15 bp, Homo sapiens
cagagactaactttg

SEQ ID NO: 1786086 - DNA, 15 bp, Homo sapiens
agagactaactttgc

SEQ ID NO: 1786087 - DNA, 15 bp, Homo sapiens
gagactaactttgcc

SEQ ID NO: 1786088 - DNA, 15 bp, Homo sapiens
agactaactttgccc

SEQ ID NO: 1786089 - DNA, 15 bp, Homo sapiens
gactaactttgccca

SEQ ID NO: 1786090 - DNA, 15 bp, Homo sapiens
actaactttgcccaa

SEQ ID NO: 1786091 - DNA, 15 bp, Homo sapiens
ctaactttgcccaag

SEQ ID NO: 1786092 - DNA, 15 bp, Homo sapiens
taactttgcccaagt

SEQ ID NO: 1786093 - DNA, 15 bp, Homo sapiens
aactttgcccaagtt

SEQ ID NO: 1786094 - DNA, 15 bp, Homo sapiens
actttgcccaagtta

SEQ ID NO: 1786095 - DNA, 15 bp, Homo sapiens
ctttgcccaagttag

SEQ ID NO: 1786096 - DNA, 15 bp, Homo sapiens
tttgcccaagttagg

SEQ ID NO: 1786097 - DNA, 15 bp, Homo sapiens
ttgcccaagttaggc

SEQ ID NO: 1786098 - DNA, 15 bp, Homo sapiens
tgcccaagttaggcc

SEQ ID NO: 1786099 - DNA, 15 bp, Homo sapiens
gcccaagttaggcca

SEQ ID NO: 1786100 - DNA, 15 bp, Homo sapiens
cccaagttaggccag

SEQ ID NO: 1786101 - DNA, 15 bp, Homo sapiens
ccaagttaggccagt

SEQ ID NO: 1786102 - DNA, 15 bp, Homo sapiens
caagttaggccagtt

SEQ ID NO: 1786103 - DNA, 15 bp, Homo sapiens
aagttaggccagttt

SEQ ID NO: 1786104 - DNA, 15 bp, Homo sapiens
agttaggccagttta

SEQ ID NO: 1786105 - DNA, 15 bp, Homo sapiens
gttaggccagtttac

SEQ ID NO: 1786106 - DNA, 15 bp, Homo sapiens
ttaggccagtttacg

SEQ ID NO: 1786107 - DNA, 15 bp, Homo sapiens
taggccagtttacga

SEQ ID NO: 1786108 - DNA, 15 bp, Homo sapiens
aggccagtttacgat

SEQ ID NO: 1786109 - DNA, 15 bp, Homo sapiens
ggccagtttacgata

SEQ ID NO: 1786110 - DNA, 15 bp, Homo sapiens
gccagtttacgatac

SEQ ID NO: 1786111 - DNA, 15 bp, Homo sapiens
ccagtttacgatact

SEQ ID NO: 1786112 - DNA, 15 bp, Homo sapiens
cagtttacgatactg

SEQ ID NO: 1786113 - DNA, 15 bp, Homo sapiens
agtttacgatactgt

SEQ ID NO: 1786114 - DNA, 15 bp, Homo sapiens
gtttacgatactgtc

SEQ ID NO: 1786115 - DNA, 15 bp, Homo sapiens
tttacgatactgtca

SEQ ID NO: 1786116 - DNA, 15 bp, Homo sapiens
ttacgatactgtcag

SEQ ID NO: 1786117 - DNA, 15 bp, Homo sapiens
tacgatactgtcagt

SEQ ID NO: 1786118 - DNA, 15 bp, Homo sapiens
acgatactgtcagtg

SEQ ID NO: 1786119 - DNA, 15 bp, Homo sapiens
cgatactgtcagtga

SEQ ID NO: 1786120 - DNA, 15 bp, Homo sapiens
gatactgtcagtgaa

SEQ ID NO: 1786121 - DNA, 15 bp, Homo sapiens
atactgtcagtgaac

SEQ ID NO: 1786122 - DNA, 15 bp, Homo sapiens
tactgtcagtgaact

SEQ ID NO: 1786123 - DNA, 15 bp, Homo sapiens
actgtcagtgaactg

SEQ ID NO: 1786124 - DNA, 15 bp, Homo sapiens
ctgtcagtgaactga

SEQ ID NO: 1786125 - DNA, 15 bp, Homo sapiens
tgtcagtgaactgaa

SEQ ID NO: 1786126 - DNA, 15 bp, Homo sapiens
gtcagtgaactgaat

SEQ ID NO: 1786127 - DNA, 15 bp, Homo sapiens
tcagtgaactgaatg

SEQ ID NO: 1786128 - DNA, 15 bp, Homo sapiens
cagtgaactgaatga

SEQ ID NO: 1786129 - DNA, 15 bp, Homo sapiens
agtgaactgaatgaa

SEQ ID NO: 1786130 - DNA, 15 bp, Homo sapiens
gtgaactgaatgaaa

SEQ ID NO: 1786131 - DNA, 15 bp, Homo sapiens
tgaactgaatgaaaa

SEQ ID NO: 1786132 - DNA, 15 bp, Homo sapiens
gaactgaatgaaaat

SEQ ID NO: 1786133 - DNA, 15 bp, Homo sapiens
aactgaatgaaaatc

SEQ ID NO: 1786134 - DNA, 15 bp, Homo sapiens
actgaatgaaaatcc

SEQ ID NO: 1786135 - DNA, 15 bp, Homo sapiens
ctgaatgaaaatcca

SEQ ID NO: 1786136 - DNA, 15 bp, Homo sapiens
tgaatgaaaatccaa

SEQ ID NO: 1786137 - DNA, 15 bp, Homo sapiens
gaatgaaaatccaaa

SEQ ID NO: 1786138 - DNA, 15 bp, Homo sapiens
aatgaaaatccaaag

SEQ ID NO: 1786139 - DNA, 15 bp, Homo sapiens
atgaaaatccaaagt

SEQ ID NO: 1786140 - DNA, 15 bp, Homo sapiens
tgaaaatccaaagtg

SEQ ID NO: 1786141 - DNA, 15 bp, Homo sapiens
gaaaatccaaagtgg

SEQ ID NO: 1786142 - DNA, 15 bp, Homo sapiens
aaaatccaaagtgga

SEQ ID NO: 1786143 - DNA, 15 bp, Homo sapiens
aaatccaaagtggat

SEQ ID NO: 1786144 - DNA, 15 bp, Homo sapiens
aatccaaagtggata

SEQ ID NO: 1786145 - DNA, 15 bp, Homo sapiens
atccaaagtggatac

SEQ ID NO: 1786146 - DNA, 15 bp, Homo sapiens
tccaaagtggatact

SEQ ID NO: 1786147 - DNA, 15 bp, Homo sapiens
ccaaagtggatacta

SEQ ID NO: 1786148 - DNA, 15 bp, Homo sapiens
caaagtggatactag

SEQ ID NO: 1786149 - DNA, 15 bp, Homo sapiens
aaagtggatactaga

SEQ ID NO: 1786150 - DNA, 15 bp, Homo sapiens
aagtggatactagac

SEQ ID NO: 1786151 - DNA, 15 bp, Homo sapiens
agtggatactagacc

SEQ ID NO: 1786152 - DNA, 15 bp, Homo sapiens
gtggatactagacca

SEQ ID NO: 1786153 - DNA, 15 bp, Homo sapiens
tggatactagaccag

SEQ ID NO: 1786154 - DNA, 15 bp, Homo sapiens
ggatactagaccaga

SEQ ID NO: 1786155 - DNA, 15 bp, Homo sapiens
gatactagaccagac

SEQ ID NO: 1786156 - DNA, 15 bp, Homo sapiens
atactagaccagaca

SEQ ID NO: 1786157 - DNA, 15 bp, Homo sapiens
tactagaccagacac

SEQ ID NO: 1786158 - DNA, 15 bp, Homo sapiens
actagaccagacact

SEQ ID NO: 1786159 - DNA, 15 bp, Homo sapiens
ctagaccagacactg

SEQ ID NO: 1786160 - DNA, 15 bp, Homo sapiens
tagaccagacactgg

SEQ ID NO: 1786161 - DNA, 15 bp, Homo sapiens
agaccagacactggt

SEQ ID NO: 1786162 - DNA, 15 bp, Homo sapiens
gaccagacactggtc

SEQ ID NO: 1786163 - DNA, 15 bp, Homo sapiens
accagacactggtcc

SEQ ID NO: 1786164 - DNA, 15 bp, Homo sapiens
ccagacactggtcct

SEQ ID NO: 1786165 - DNA, 15 bp, Homo sapiens
cagacactggtcctt

SEQ ID NO: 1786166 - DNA, 15 bp, Homo sapiens
agacactggtccttc

SEQ ID NO: 1786167 - DNA, 15 bp, Homo sapiens
gacactggtccttct

SEQ ID NO: 1786168 - DNA, 15 bp, Homo sapiens
acactggtccttcta

SEQ ID NO: 1786169 - DNA, 15 bp, Homo sapiens
cactggtccttctaa

SEQ ID NO: 1786170 - DNA, 15 bp, Homo sapiens
actggtccttctaaa

SEQ ID NO: 1786171 - DNA, 15 bp, Homo sapiens
ctggtccttctaaaa

SEQ ID NO: 1786172 - DNA, 15 bp, Homo sapiens
tggtccttctaaaat

SEQ ID NO: 1786173 - DNA, 15 bp, Homo sapiens
ggtccttctaaaatc

SEQ ID NO: 1786174 - DNA, 15 bp, Homo sapiens
gtccttctaaaatca

SEQ ID NO: 1786175 - DNA, 15 bp, Homo sapiens
tccttctaaaatcat

SEQ ID NO: 1786176 - DNA, 15 bp, Homo sapiens
ccttctaaaatcatt

SEQ ID NO: 1786177 - DNA, 15 bp, Homo sapiens
cttctaaaatcattg

SEQ ID NO: 1786178 - DNA, 15 bp, Homo sapiens
ttctaaaatcattgt

SEQ ID NO: 1786179 - DNA, 15 bp, Homo sapiens
tctaaaatcattgtg

SEQ ID NO: 1786180 - DNA, 15 bp, Homo sapiens
ctaaaatcattgtga

SEQ ID NO: 1786181 - DNA, 15 bp, Homo sapiens
taaaatcattgtgat

SEQ ID NO: 1786182 - DNA, 15 bp, Homo sapiens
aaaatcattgtgata

SEQ ID NO: 1786183 - DNA, 15 bp, Homo sapiens
aaatcattgtgataa

SEQ ID NO: 1786184 - DNA, 15 bp, Homo sapiens
aatcattgtgataat

SEQ ID NO: 1786185 - DNA, 15 bp, Homo sapiens
atcattgtgataatg

SEQ ID NO: 1786186 - DNA, 15 bp, Homo sapiens
tcattgtgataatgg

SEQ ID NO: 1786187 - DNA, 15 bp, Homo sapiens
cattgtgataatggg

SEQ ID NO: 1786188 - DNA, 15 bp, Homo sapiens
attgtgataatgggt

SEQ ID NO: 1786189 - DNA, 15 bp, Homo sapiens
ttgtgataatgggtc

SEQ ID NO: 1786190 - DNA, 15 bp, Homo sapiens
tgtgataatgggtcg

SEQ ID NO: 1786191 - DNA, 15 bp, Homo sapiens
gtgataatgggtcgc

SEQ ID NO: 1786192 - DNA, 15 bp, Homo sapiens
tgataatgggtcgct

SEQ ID NO: 1786193 - DNA, 15 bp, Homo sapiens
gataatgggtcgctt

SEQ ID NO: 1786194 - DNA, 15 bp, Homo sapiens
ataatgggtcgcttt

SEQ ID NO: 1786195 - DNA, 15 bp, Homo sapiens
taatgggtcgctttt

SEQ ID NO: 1786196 - DNA, 15 bp, Homo sapiens
aatgggtcgcttttc

SEQ ID NO: 1786197 - DNA, 15 bp, Homo sapiens
atgggtcgcttttct

SEQ ID NO: 1786198 - DNA, 15 bp, Homo sapiens
tgggtcgcttttctt

SEQ ID NO: 1786199 - DNA, 15 bp, Homo sapiens
gggtcgcttttctta

SEQ ID NO: 1786200 - DNA, 15 bp, Homo sapiens
ggtcgcttttcttag

SEQ ID NO: 1786201 - DNA, 15 bp, Homo sapiens
gtcgcttttcttagt

SEQ ID NO: 1786202 - DNA, 15 bp, Homo sapiens
tcgcttttcttagtg

SEQ ID NO: 1786203 - DNA, 15 bp, Homo sapiens
cgcttttcttagtgt

SEQ ID NO: 1786204 - DNA, 15 bp, Homo sapiens
gcttttcttagtgta

SEQ ID NO: 1786205 - DNA, 15 bp, Homo sapiens
cttttcttagtgtac

SEQ ID NO: 1786206 - DNA, 15 bp, Homo sapiens
ttttcttagtgtact

SEQ ID NO: 1786207 - DNA, 15 bp, Homo sapiens
tttcttagtgtactg

SEQ ID NO: 1786208 - DNA, 15 bp, Homo sapiens
ttcttagtgtactgg

SEQ ID NO: 1786209 - DNA, 15 bp, Homo sapiens
tcttagtgtactggt

SEQ ID NO: 1786210 - DNA, 15 bp, Homo sapiens
cttagtgtactggtt

SEQ ID NO: 1786211 - DNA, 15 bp, Homo sapiens
ttagtgtactggtta

SEQ ID NO: 1786212 - DNA, 15 bp, Homo sapiens
tagtgtactggttaa

SEQ ID NO: 1786213 - DNA, 15 bp, Homo sapiens
agtgtactggttaat

SEQ ID NO: 1786214 - DNA, 15 bp, Homo sapiens
gtgtactggttaata

SEQ ID NO: 1786215 - DNA, 15 bp, Homo sapiens
tgtactggttaatat

SEQ ID NO: 1786216 - DNA, 15 bp, Homo sapiens
gtactggttaatata

SEQ ID NO: 1786217 - DNA, 15 bp, Homo sapiens
tactggttaatatac

SEQ ID NO: 1786218 - DNA, 15 bp, Homo sapiens
actggttaatatact

SEQ ID NO: 1786219 - DNA, 15 bp, Homo sapiens
ctggttaatatacta

SEQ ID NO: 1786220 - DNA, 15 bp, Homo sapiens
tggttaatatactac

SEQ ID NO: 1786221 - DNA, 15 bp, Homo sapiens
ggttaatatactacg

SEQ ID NO: 1786222 - DNA, 15 bp, Homo sapiens
gttaatatactacgt

SEQ ID NO: 1786223 - DNA, 15 bp, Homo sapiens
ttaatatactacgtg

SEQ ID NO: 1786224 - DNA, 15 bp, Homo sapiens
taatatactacgtgt

SEQ ID NO: 1786225 - DNA, 15 bp, Homo sapiens
aatatactacgtgtt

SEQ ID NO: 1786226 - DNA, 15 bp, Homo sapiens
atatactacgtgttg

SEQ ID NO: 1786227 - DNA, 15 bp, Homo sapiens
tatactacgtgttgt

SEQ ID NO: 1786228 - DNA, 15 bp, Homo sapiens
atactacgtgttgta

SEQ ID NO: 1786229 - DNA, 15 bp, Homo sapiens
tactacgtgttgtag

SEQ ID NO: 1786230 - DNA, 15 bp, Homo sapiens
actacgtgttgtaga

SEQ ID NO: 1786231 - DNA, 15 bp, Homo sapiens
ctacgtgttgtagaa

SEQ ID NO: 1786232 - DNA, 15 bp, Homo sapiens
tacgtgttgtagaaa

SEQ ID NO: 1786233 - DNA, 15 bp, Homo sapiens
acgtgttgtagaaac

SEQ ID NO: 1786234 - DNA, 15 bp, Homo sapiens
cgtgttgtagaaaca

SEQ ID NO: 1786235 - DNA, 15 bp, Homo sapiens
gtgttgtagaaacat

SEQ ID NO: 1786236 - DNA, 15 bp, Homo sapiens
tgttgtagaaacatc

SEQ ID NO: 1786237 - DNA, 15 bp, Homo sapiens
gttgtagaaacatcc

SEQ ID NO: 1786238 - DNA, 15 bp, Homo sapiens
ttgtagaaacatcca

SEQ ID NO: 1786239 - DNA, 15 bp, Homo sapiens
tgtagaaacatccat

SEQ ID NO: 1786240 - DNA, 15 bp, Homo sapiens
gtagaaacatccata

SEQ ID NO: 1786241 - DNA, 15 bp, Homo sapiens
tagaaacatccatag

SEQ ID NO: 1786242 - DNA, 15 bp, Homo sapiens
agaaacatccatagt

SEQ ID NO: 1786243 - DNA, 15 bp, Homo sapiens
gaaacatccatagta

SEQ ID NO: 1786244 - DNA, 15 bp, Homo sapiens
aaacatccatagtaa

SEQ ID NO: 1786245 - DNA, 15 bp, Homo sapiens
aacatccatagtaag

SEQ ID NO: 1786246 - DNA, 15 bp, Homo sapiens
acatccatagtaagg

SEQ ID NO: 1786247 - DNA, 15 bp, Homo sapiens
catccatagtaaggt

SEQ ID NO: 1786248 - DNA, 15 bp, Homo sapiens
atccatagtaaggta

SEQ ID NO: 1786249 - DNA, 15 bp, Homo sapiens
tccatagtaaggtac

SEQ ID NO: 1786250 - DNA, 15 bp, Homo sapiens
ccatagtaaggtaca

SEQ ID NO: 1786251 - DNA, 15 bp, Homo sapiens
catagtaaggtacaa

SEQ ID NO: 1786252 - DNA, 15 bp, Homo sapiens
atagtaaggtacaaa

SEQ ID NO: 1786253 - DNA, 15 bp, Homo sapiens
tagtaaggtacaaat

SEQ ID NO: 1786254 - DNA, 15 bp, Homo sapiens
agtaaggtacaaatt

SEQ ID NO: 1786255 - DNA, 15 bp, Homo sapiens
gtaaggtacaaattc

SEQ ID NO: 1786256 - DNA, 15 bp, Homo sapiens
taaggtacaaattct

SEQ ID NO: 1786257 - DNA, 15 bp, Homo sapiens
aaggtacaaattcta

SEQ ID NO: 1786258 - DNA, 15 bp, Homo sapiens
aggtacaaattctac

SEQ ID NO: 1786259 - DNA, 15 bp, Homo sapiens
ggtacaaattctact

SEQ ID NO: 1786260 - DNA, 15 bp, Homo sapiens
gtacaaattctactt

SEQ ID NO: 1786261 - DNA, 15 bp, Homo sapiens
tacaaattctacttc

SEQ ID NO: 1786262 - DNA, 15 bp, Homo sapiens
acaaattctacttcc

SEQ ID NO: 1786263 - DNA, 15 bp, Homo sapiens
caaattctacttcct

SEQ ID NO: 1786264 - DNA, 15 bp, Homo sapiens
aaattctacttcctg

SEQ ID NO: 1786265 - DNA, 15 bp, Homo sapiens
aattctacttcctgt

SEQ ID NO: 1786266 - DNA, 15 bp, Homo sapiens
attctacttcctgtt

SEQ ID NO: 1786267 - DNA, 15 bp, Homo sapiens
ttctacttcctgttc

SEQ ID NO: 1786268 - DNA, 15 bp, Homo sapiens
tctacttcctgttct

SEQ ID NO: 1786269 - DNA, 15 bp, Homo sapiens
ctacttcctgttctc

SEQ ID NO: 1786270 - DNA, 15 bp, Homo sapiens
tacttcctgttctct

SEQ ID NO: 1786271 - DNA, 15 bp, Homo sapiens
acttcctgttctctt

SEQ ID NO: 1786272 - DNA, 15 bp, Homo sapiens
cttcctgttctcttt

SEQ ID NO: 1786273 - DNA, 15 bp, Homo sapiens
ttcctgttctctttg

SEQ ID NO: 1786274 - DNA, 15 bp, Homo sapiens
tcctgttctctttgt

SEQ ID NO: 1786275 - DNA, 15 bp, Homo sapiens
cctgttctctttgtt

SEQ ID NO: 1786276 - DNA, 15 bp, Homo sapiens
ctgttctctttgttc

SEQ ID NO: 1786277 - DNA, 15 bp, Homo sapiens
tgttctctttgttct

SEQ ID NO: 1786278 - DNA, 15 bp, Homo sapiens
gttctctttgttctt

SEQ ID NO: 1786279 - DNA, 15 bp, Homo sapiens
ttctctttgttctta

SEQ ID NO: 1786280 - DNA, 15 bp, Homo sapiens
tctctttgttcttaa

SEQ ID NO: 1786281 - DNA, 15 bp, Homo sapiens
ctctttgttcttaaa

SEQ ID NO: 1786282 - DNA, 15 bp, Homo sapiens
tctttgttcttaaag

SEQ ID NO: 1786283 - DNA, 15 bp, Homo sapiens
ctttgttcttaaagt

SEQ ID NO: 1786284 - DNA, 15 bp, Homo sapiens
tttgttcttaaagtt

SEQ ID NO: 1786285 - DNA, 15 bp, Homo sapiens
ttgttcttaaagttt

SEQ ID NO: 1786286 - DNA, 15 bp, Homo sapiens
tgttcttaaagtttg

SEQ ID NO: 1786287 - DNA, 15 bp, Homo sapiens
gttcttaaagtttgt

SEQ ID NO: 1786288 - DNA, 15 bp, Homo sapiens
ttcttaaagtttgtc

SEQ ID NO: 1786289 - DNA, 15 bp, Homo sapiens
tcttaaagtttgtct

SEQ ID NO: 1786290 - DNA, 15 bp, Homo sapiens
cttaaagtttgtctt

SEQ ID NO: 1786291 - DNA, 15 bp, Homo sapiens
ttaaagtttgtcttt

SEQ ID NO: 1786292 - DNA, 15 bp, Homo sapiens
taaagtttgtcttta

SEQ ID NO: 1786293 - DNA, 15 bp, Homo sapiens
aaagtttgtctttaa

SEQ ID NO: 1786294 - DNA, 15 bp, Homo sapiens
aagtttgtctttaaa

SEQ ID NO: 1786295 - DNA, 15 bp, Homo sapiens
agtttgtctttaaaa

SEQ ID NO: 1786296 - DNA, 15 bp, Homo sapiens
gtttgtctttaaaaa

SEQ ID NO: 1786297 - DNA, 15 bp, Homo sapiens
tttgtctttaaaaat

SEQ ID NO: 1786298 - DNA, 15 bp, Homo sapiens
ttgtctttaaaaata

SEQ ID NO: 1786299 - DNA, 15 bp, Homo sapiens
tgtctttaaaaataa

SEQ ID NO: 1786300 - DNA, 15 bp, Homo sapiens
gtctttaaaaataag

SEQ ID NO: 1786301 - DNA, 15 bp, Homo sapiens
tctttaaaaataagt

SEQ ID NO: 1786302 - DNA, 15 bp, Homo sapiens
ctttaaaaataagtt

SEQ ID NO: 1786303 - DNA, 15 bp, Homo sapiens
tttaaaaataagttc

SEQ ID NO: 1786304 - DNA, 15 bp, Homo sapiens
ttaaaaataagttca

SEQ ID NO: 1786305 - DNA, 15 bp, Homo sapiens
taaaaataagttcat

SEQ ID NO: 1786306 - DNA, 15 bp, Homo sapiens
aaaaataagttcatt

SEQ ID NO: 1786307 - DNA, 15 bp, Homo sapiens
aaaataagttcattt

SEQ ID NO: 1786308 - DNA, 15 bp, Homo sapiens
aaataagttcatttg

SEQ ID NO: 1786309 - DNA, 15 bp, Homo sapiens
aataagttcatttgc

SEQ ID NO: 1786310 - DNA, 15 bp, Homo sapiens
ataagttcatttgcc

SEQ ID NO: 1786311 - DNA, 15 bp, Homo sapiens
taagttcatttgcca

SEQ ID NO: 1786312 - DNA, 15 bp, Homo sapiens
aagttcatttgccag

SEQ ID NO: 1786313 - DNA, 15 bp, Homo sapiens
agttcatttgccagc

SEQ ID NO: 1786314 - DNA, 15 bp, Homo sapiens
gttcatttgccagct

SEQ ID NO: 1786315 - DNA, 15 bp, Homo sapiens
ttcatttgccagcta

SEQ ID NO: 1786316 - DNA, 15 bp, Homo sapiens
tcatttgccagctac

SEQ ID NO: 1786317 - DNA, 15 bp, Homo sapiens
catttgccagctacc

SEQ ID NO: 1786318 - DNA, 15 bp, Homo sapiens
atttgccagctacca

SEQ ID NO: 1786319 - DNA, 15 bp, Homo sapiens
tttgccagctaccaa

SEQ ID NO: 1786320 - DNA, 15 bp, Homo sapiens
ttgccagctaccaaa

SEQ ID NO: 1786321 - DNA, 15 bp, Homo sapiens
tgccagctaccaaaa

SEQ ID NO: 1786322 - DNA, 15 bp, Homo sapiens
gccagctaccaaaag

SEQ ID NO: 1786323 - DNA, 15 bp, Homo sapiens
ccagctaccaaaaga

SEQ ID NO: 1786324 - DNA, 15 bp, Homo sapiens
cagctaccaaaagaa

SEQ ID NO: 1786325 - DNA, 15 bp, Homo sapiens
agctaccaaaagaaa

SEQ ID NO: 1786326 - DNA, 15 bp, Homo sapiens
gctaccaaaagaaaa

SEQ ID NO: 1786327 - DNA, 15 bp, Homo sapiens
ctaccaaaagaaaat

SEQ ID NO: 1786328 - DNA, 15 bp, Homo sapiens
taccaaaagaaaatc

SEQ ID NO: 1786329 - DNA, 15 bp, Homo sapiens
accaaaagaaaatca

SEQ ID NO: 1786330 - DNA, 15 bp, Homo sapiens
ccaaaagaaaatcag

SEQ ID NO: 1786331 - DNA, 15 bp, Homo sapiens
caaaagaaaatcaga

SEQ ID NO: 1786332 - DNA, 15 bp, Homo sapiens
aaaagaaaatcagaa

SEQ ID NO: 1786333 - DNA, 15 bp, Homo sapiens
aaagaaaatcagaaa

SEQ ID NO: 1786334 - DNA, 15 bp, Homo sapiens
aagaaaatcagaaag

SEQ ID NO: 1786335 - DNA, 15 bp, Homo sapiens
agaaaatcagaaagt

SEQ ID NO: 1786336 - DNA, 15 bp, Homo sapiens
gaaaatcagaaagta

SEQ ID NO: 1786337 - DNA, 15 bp, Homo sapiens
aaaatcagaaagtag

SEQ ID NO: 1786338 - DNA, 15 bp, Homo sapiens
aaatcagaaagtaga

SEQ ID NO: 1786339 - DNA, 15 bp, Homo sapiens
aatcagaaagtagat

SEQ ID NO: 1786340 - DNA, 15 bp, Homo sapiens
atcagaaagtagatc

SEQ ID NO: 1786341 - DNA, 15 bp, Homo sapiens
tcagaaagtagatct

SEQ ID NO: 1786342 - DNA, 15 bp, Homo sapiens
cagaaagtagatcta

SEQ ID NO: 1786343 - DNA, 15 bp, Homo sapiens
agaaagtagatctag

SEQ ID NO: 1786344 - DNA, 15 bp, Homo sapiens
gaaagtagatctaga

SEQ ID NO: 1786345 - DNA, 15 bp, Homo sapiens
aaagtagatctagat

SEQ ID NO: 1786346 - DNA, 15 bp, Homo sapiens
aagtagatctagatt

SEQ ID NO: 1786347 - DNA, 15 bp, Homo sapiens
agtagatctagatta

SEQ ID NO: 1786348 - DNA, 15 bp, Homo sapiens
gtagatctagattat

SEQ ID NO: 1786349 - DNA, 15 bp, Homo sapiens
tagatctagattatt

SEQ ID NO: 1786350 - DNA, 15 bp, Homo sapiens
agatctagattattc

SEQ ID NO: 1786351 - DNA, 15 bp, Homo sapiens
gatctagattattct

SEQ ID NO: 1786352 - DNA, 15 bp, Homo sapiens
atctagattattctg

SEQ ID NO: 1786353 - DNA, 15 bp, Homo sapiens
tctagattattctgt

SEQ ID NO: 1786354 - DNA, 15 bp, Homo sapiens
ctagattattctgtt

SEQ ID NO: 1786355 - DNA, 15 bp, Homo sapiens
tagattattctgtta

SEQ ID NO: 1786356 - DNA, 15 bp, Homo sapiens
agattattctgttaa

SEQ ID NO: 1786357 - DNA, 15 bp, Homo sapiens
gattattctgttaaa

SEQ ID NO: 1786358 - DNA, 15 bp, Homo sapiens
attattctgttaaat

SEQ ID NO: 1786359 - DNA, 15 bp, Homo sapiens
ttattctgttaaata

SEQ ID NO: 1786360 - DNA, 15 bp, Homo sapiens
tattctgttaaatag

SEQ ID NO: 1786361 - DNA, 15 bp, Homo sapiens
attctgttaaatagg

SEQ ID NO: 1786362 - DNA, 15 bp, Homo sapiens
ttctgttaaataggg

SEQ ID NO: 1786363 - DNA, 15 bp, Homo sapiens
tctgttaaatagggg

SEQ ID NO: 1786364 - DNA, 15 bp, Homo sapiens
ctgttaaataggggc

SEQ ID NO: 1786365 - DNA, 15 bp, Homo sapiens
tgttaaataggggca

SEQ ID NO: 1786366 - DNA, 15 bp, Homo sapiens
gttaaataggggcag

SEQ ID NO: 1786367 - DNA, 15 bp, Homo sapiens
ttaaataggggcagc

SEQ ID NO: 1786368 - DNA, 15 bp, Homo sapiens
taaataggggcagca

SEQ ID NO: 1786369 - DNA, 15 bp, Homo sapiens
aaataggggcagcac

SEQ ID NO: 1786370 - DNA, 15 bp, Homo sapiens
aataggggcagcaca

SEQ ID NO: 1786371 - DNA, 15 bp, Homo sapiens
ataggggcagcacag

SEQ ID NO: 1786372 - DNA, 15 bp, Homo sapiens
taggggcagcacaga

SEQ ID NO: 1786373 - DNA, 15 bp, Homo sapiens
aggggcagcacagaa

SEQ ID NO: 1786374 - DNA, 15 bp, Homo sapiens
ggggcagcacagaac

SEQ ID NO: 1786375 - DNA, 15 bp, Homo sapiens
gggcagcacagaacg

SEQ ID NO: 1786376 - DNA, 15 bp, Homo sapiens
ggcagcacagaacga

SEQ ID NO: 1786377 - DNA, 15 bp, Homo sapiens
gcagcacagaacgat

SEQ ID NO: 1786378 - DNA, 15 bp, Homo sapiens
cagcacagaacgata

SEQ ID NO: 1786379 - DNA, 15 bp, Homo sapiens
agcacagaacgataa

SEQ ID NO: 1786380 - DNA, 15 bp, Homo sapiens
gcacagaacgataat

SEQ ID NO: 1786381 - DNA, 15 bp, Homo sapiens
cacagaacgataata

SEQ ID NO: 1786382 - DNA, 15 bp, Homo sapiens
acagaacgataatat

SEQ ID NO: 1786383 - DNA, 15 bp, Homo sapiens
cagaacgataatatt

SEQ ID NO: 1786384 - DNA, 15 bp, Homo sapiens
agaacgataatattt

SEQ ID NO: 1786385 - DNA, 15 bp, Homo sapiens
gaacgataatatttg

SEQ ID NO: 1786386 - DNA, 15 bp, Homo sapiens
aacgataatatttgt

SEQ ID NO: 1786387 - DNA, 15 bp, Homo sapiens
acgataatatttgta

SEQ ID NO: 1786388 - DNA, 15 bp, Homo sapiens
cgataatatttgtaa

SEQ ID NO: 1786389 - DNA, 15 bp, Homo sapiens
gataatatttgtaat

SEQ ID NO: 1786390 - DNA, 15 bp, Homo sapiens
ataatatttgtaata

SEQ ID NO: 1786391 - DNA, 15 bp, Homo sapiens
taatatttgtaatat

SEQ ID NO: 1786392 - DNA, 15 bp, Homo sapiens
aatatttgtaatatc

SEQ ID NO: 1786393 - DNA, 15 bp, Homo sapiens
atatttgtaatatct

SEQ ID NO: 1786394 - DNA, 15 bp, Homo sapiens
tatttgtaatatctc

SEQ ID NO: 1786395 - DNA, 15 bp, Homo sapiens
atttgtaatatctct

SEQ ID NO: 1786396 - DNA, 15 bp, Homo sapiens
tttgtaatatctctg

SEQ ID NO: 1786397 - DNA, 15 bp, Homo sapiens
ttgtaatatctctgc

SEQ ID NO: 1786398 - DNA, 15 bp, Homo sapiens
tgtaatatctctgcc

SEQ ID NO: 1786399 - DNA, 15 bp, Homo sapiens
gtaatatctctgcct

SEQ ID NO: 1786400 - DNA, 15 bp, Homo sapiens
taatatctctgcctt

SEQ ID NO: 1786401 - DNA, 15 bp, Homo sapiens
aatatctctgccttg

SEQ ID NO: 1786402 - DNA, 15 bp, Homo sapiens
atatctctgccttga

SEQ ID NO: 1786403 - DNA, 15 bp, Homo sapiens
tatctctgccttgag

SEQ ID NO: 1786404 - DNA, 15 bp, Homo sapiens
atctctgccttgagt

SEQ ID NO: 1786405 - DNA, 15 bp, Homo sapiens
tctctgccttgagtt

SEQ ID NO: 1786406 - DNA, 15 bp, Homo sapiens
ctctgccttgagtta

SEQ ID NO: 1786407 - DNA, 15 bp, Homo sapiens
tctgccttgagttat

SEQ ID NO: 1786408 - DNA, 15 bp, Homo sapiens
ctgccttgagttatg

SEQ ID NO: 1786409 - DNA, 15 bp, Homo sapiens
tgccttgagttatgc

SEQ ID NO: 1786410 - DNA, 15 bp, Homo sapiens
gccttgagttatgcc

SEQ ID NO: 1786411 - DNA, 15 bp, Homo sapiens
ccttgagttatgcct

SEQ ID NO: 1786412 - DNA, 15 bp, Homo sapiens
cttgagttatgcctg

SEQ ID NO: 1786413 - DNA, 15 bp, Homo sapiens
ttgagttatgcctga

SEQ ID NO: 1786414 - DNA, 15 bp, Homo sapiens
tgagttatgcctgac

SEQ ID NO: 1786415 - DNA, 15 bp, Homo sapiens
gagttatgcctgaca

SEQ ID NO: 1786416 - DNA, 15 bp, Homo sapiens
agttatgcctgacat

SEQ ID NO: 1786417 - DNA, 15 bp, Homo sapiens
gttatgcctgacata

SEQ ID NO: 1786418 - DNA, 15 bp, Homo sapiens
ttatgcctgacatat

SEQ ID NO: 1786419 - DNA, 15 bp, Homo sapiens
tatgcctgacatatt

SEQ ID NO: 1786420 - DNA, 15 bp, Homo sapiens
atgcctgacatattt

SEQ ID NO: 1786421 - DNA, 15 bp, Homo sapiens
tgcctgacatattta

SEQ ID NO: 1786422 - DNA, 15 bp, Homo sapiens
gcctgacatatttag

SEQ ID NO: 1786423 - DNA, 15 bp, Homo sapiens
cctgacatatttagt

SEQ ID NO: 1786424 - DNA, 15 bp, Homo sapiens
ctgacatatttagta

SEQ ID NO: 1786425 - DNA, 15 bp, Homo sapiens
tgacatatttagtat

SEQ ID NO: 1786426 - DNA, 15 bp, Homo sapiens
gacatatttagtatg

SEQ ID NO: 1786427 - DNA, 15 bp, Homo sapiens
acatatttagtatgg

SEQ ID NO: 1786428 - DNA, 15 bp, Homo sapiens
catatttagtatggt

SEQ ID NO: 1786429 - DNA, 15 bp, Homo sapiens
atatttagtatggtg

SEQ ID NO: 1786430 - DNA, 15 bp, Homo sapiens
tatttagtatggtgt

SEQ ID NO: 1786431 - DNA, 15 bp, Homo sapiens
atttagtatggtgta

SEQ ID NO: 1786432 - DNA, 15 bp, Homo sapiens
tttagtatggtgtaa

SEQ ID NO: 1786433 - DNA, 15 bp, Homo sapiens
ttagtatggtgtaaa

SEQ ID NO: 1786434 - DNA, 15 bp, Homo sapiens
tagtatggtgtaaat

SEQ ID NO: 1786435 - DNA, 15 bp, Homo sapiens
agtatggtgtaaatc

SEQ ID NO: 1786436 - DNA, 15 bp, Homo sapiens
gtatggtgtaaatct

SEQ ID NO: 1786437 - DNA, 15 bp, Homo sapiens
tatggtgtaaatctg

SEQ ID NO: 1786438 - DNA, 15 bp, Homo sapiens
atggtgtaaatctgt

SEQ ID NO: 1786439 - DNA, 15 bp, Homo sapiens
tggtgtaaatctgtc

SEQ ID NO: 1786440 - DNA, 15 bp, Homo sapiens
ggtgtaaatctgtct

SEQ ID NO: 1786441 - DNA, 15 bp, Homo sapiens
gtgtaaatctgtctg

SEQ ID NO: 1786442 - DNA, 15 bp, Homo sapiens
tgtaaatctgtctga

SEQ ID NO: 1786443 - DNA, 15 bp, Homo sapiens
gtaaatctgtctgaa

SEQ ID NO: 1786444 - DNA, 15 bp, Homo sapiens
taaatctgtctgaat

SEQ ID NO: 1786445 - DNA, 15 bp, Homo sapiens
aaatctgtctgaata

SEQ ID NO: 1786446 - DNA, 15 bp, Homo sapiens
aatctgtctgaataa

SEQ ID NO: 1786447 - DNA, 15 bp, Homo sapiens
atctgtctgaataat

SEQ ID NO: 1786448 - DNA, 15 bp, Homo sapiens
tctgtctgaataatg

SEQ ID NO: 1786449 - DNA, 15 bp, Homo sapiens
ctgtctgaataatgt

SEQ ID NO: 1786450 - DNA, 15 bp, Homo sapiens
tgtctgaataatgtt

SEQ ID NO: 1786451 - DNA, 15 bp, Homo sapiens
gtctgaataatgtta

SEQ ID NO: 1786452 - DNA, 15 bp, Homo sapiens
tctgaataatgttat

SEQ ID NO: 1786453 - DNA, 15 bp, Homo sapiens
ctgaataatgttatt

SEQ ID NO: 1786454 - DNA, 15 bp, Homo sapiens
gaataatgttatttg

SEQ ID NO: 1786455 - DNA, 15 bp, Homo sapiens
aataatgttatttga

SEQ ID NO: 1786456 - DNA, 15 bp, Homo sapiens
ataatgttatttgaa

SEQ ID NO: 1786457 - DNA, 15 bp, Homo sapiens
taatgttatttgaag

SEQ ID NO: 1786458 - DNA, 15 bp, Homo sapiens
aatgttatttgaagt

SEQ ID NO: 1786459 - DNA, 15 bp, Homo sapiens
atgttatttgaagta

SEQ ID NO: 1786460 - DNA, 15 bp, Homo sapiens
tgttatttgaagtat

SEQ ID NO: 1786461 - DNA, 15 bp, Homo sapiens
gttatttgaagtatt

SEQ ID NO: 1786462 - DNA, 15 bp, Homo sapiens
ttatttgaagtatta

SEQ ID NO: 1786463 - DNA, 15 bp, Homo sapiens
tatttgaagtattaa

SEQ ID NO: 1786464 - DNA, 15 bp, Homo sapiens
atttgaagtattaat

SEQ ID NO: 1786465 - DNA, 15 bp, Homo sapiens
tttgaagtattaatt

SEQ ID NO: 1786466 - DNA, 15 bp, Homo sapiens
ttgaagtattaattc

SEQ ID NO: 1786467 - DNA, 15 bp, Homo sapiens
tgaagtattaattca

SEQ ID NO: 1786468 - DNA, 15 bp, Homo sapiens
gaagtattaattcat

SEQ ID NO: 1786469 - DNA, 15 bp, Homo sapiens
aagtattaattcata

SEQ ID NO: 1786470 - DNA, 15 bp, Homo sapiens
agtattaattcatag

SEQ ID NO: 1786471 - DNA, 15 bp, Homo sapiens
gtattaattcataga

SEQ ID NO: 1786472 - DNA, 15 bp, Homo sapiens
tattaattcatagaa

SEQ ID NO: 1786473 - DNA, 15 bp, Homo sapiens
attaattcatagaat

SEQ ID NO: 1786474 - DNA, 15 bp, Homo sapiens
ttaattcatagaatt

SEQ ID NO: 1786475 - DNA, 15 bp, Homo sapiens
taattcatagaattc

SEQ ID NO: 1786476 - DNA, 15 bp, Homo sapiens
aattcatagaattct

SEQ ID NO: 1786477 - DNA, 15 bp, Homo sapiens
attcatagaattctg

SEQ ID NO: 1786478 - DNA, 15 bp, Homo sapiens
ttcatagaattctgt

SEQ ID NO: 1786479 - DNA, 15 bp, Homo sapiens
tcatagaattctgta

SEQ ID NO: 1786480 - DNA, 15 bp, Homo sapiens
catagaattctgtac

SEQ ID NO: 1786481 - DNA, 15 bp, Homo sapiens
atagaattctgtact

SEQ ID NO: 1786482 - DNA, 15 bp, Homo sapiens
tagaattctgtactg

SEQ ID NO: 1786483 - DNA, 15 bp, Homo sapiens
agaattctgtactgt

SEQ ID NO: 1786484 - DNA, 15 bp, Homo sapiens
gaattctgtactgtg

SEQ ID NO: 1786485 - DNA, 15 bp, Homo sapiens
aattctgtactgtgt

SEQ ID NO: 1786486 - DNA, 15 bp, Homo sapiens
attctgtactgtgta

SEQ ID NO: 1786487 - DNA, 15 bp, Homo sapiens
ttctgtactgtgtaa

SEQ ID NO: 1786488 - DNA, 15 bp, Homo sapiens
tctgtactgtgtaat

SEQ ID NO: 1786489 - DNA, 15 bp, Homo sapiens
ctgtactgtgtaatt

SEQ ID NO: 1786490 - DNA, 15 bp, Homo sapiens
tgtactgtgtaattt

SEQ ID NO: 1786491 - DNA, 15 bp, Homo sapiens
gtactgtgtaattta

SEQ ID NO: 1786492 - DNA, 15 bp, Homo sapiens
tactgtgtaatttag

SEQ ID NO: 1786493 - DNA, 15 bp, Homo sapiens
actgtgtaatttagg

SEQ ID NO: 1786494 - DNA, 15 bp, Homo sapiens
ctgtgtaatttaggt

SEQ ID NO: 1786495 - DNA, 15 bp, Homo sapiens
tgtgtaatttaggtg

SEQ ID NO: 1786496 - DNA, 15 bp, Homo sapiens
gtgtaatttaggtgt

SEQ ID NO: 1786497 - DNA, 15 bp, Homo sapiens
tgtaatttaggtgtg

SEQ ID NO: 1786498 - DNA, 15 bp, Homo sapiens
gtaatttaggtgtgt

SEQ ID NO: 1786499 - DNA, 15 bp, Homo sapiens
taatttaggtgtgtg

SEQ ID NO: 1786500 - DNA, 15 bp, Homo sapiens
aatttaggtgtgtgt

SEQ ID NO: 1786501 - DNA, 15 bp, Homo sapiens
atttaggtgtgtgta

SEQ ID NO: 1786502 - DNA, 15 bp, Homo sapiens
tttaggtgtgtgtaa

SEQ ID NO: 1786503 - DNA, 15 bp, Homo sapiens
ttaggtgtgtgtaaa

SEQ ID NO: 1786504 - DNA, 15 bp, Homo sapiens
taggtgtgtgtaaat

SEQ ID NO: 1786505 - DNA, 15 bp, Homo sapiens
aggtgtgtgtaaatc

SEQ ID NO: 1786506 - DNA, 15 bp, Homo sapiens
ggtgtgtgtaaatct

SEQ ID NO: 1786507 - DNA, 15 bp, Homo sapiens
gtgtgtgtaaatctg

SEQ ID NO: 1786508 - DNA, 15 bp, Homo sapiens
tgtgtgtaaatctgt

SEQ ID NO: 1786509 - DNA, 15 bp, Homo sapiens
gtgtgtaaatctgtg

SEQ ID NO: 1786510 - DNA, 15 bp, Homo sapiens
tgtgtaaatctgtgt

SEQ ID NO: 1786511 - DNA, 15 bp, Homo sapiens
gtgtaaatctgtgtg

SEQ ID NO: 1786512 - DNA, 15 bp, Homo sapiens
tgtaaatctgtgtgt

SEQ ID NO: 1786513 - DNA, 15 bp, Homo sapiens
gtaaatctgtgtgta

SEQ ID NO: 1786514 - DNA, 15 bp, Homo sapiens
taaatctgtgtgtat

SEQ ID NO: 1786515 - DNA, 15 bp, Homo sapiens
aaatctgtgtgtata

SEQ ID NO: 1786516 - DNA, 15 bp, Homo sapiens
aatctgtgtgtataa

SEQ ID NO: 1786517 - DNA, 15 bp, Homo sapiens
atctgtgtgtataac

SEQ ID NO: 1786518 - DNA, 15 bp, Homo sapiens
tctgtgtgtataact

SEQ ID NO: 1786519 - DNA, 15 bp, Homo sapiens
ctgtgtgtataactg

SEQ ID NO: 1786520 - DNA, 15 bp, Homo sapiens
tgtgtgtataactga

SEQ ID NO: 1786521 - DNA, 15 bp, Homo sapiens
gtgtgtataactgaa

SEQ ID NO: 1786522 - DNA, 15 bp, Homo sapiens
tgtgtataactgaaa

SEQ ID NO: 1786523 - DNA, 15 bp, Homo sapiens
gtgtataactgaaat

SEQ ID NO: 1786524 - DNA, 15 bp, Homo sapiens
tgtataactgaaatc

SEQ ID NO: 1786525 - DNA, 15 bp, Homo sapiens
gtataactgaaatct

SEQ ID NO: 1786526 - DNA, 15 bp, Homo sapiens
tataactgaaatctt

SEQ ID NO: 1786527 - DNA, 15 bp, Homo sapiens
ataactgaaatctta

SEQ ID NO: 1786528 - DNA, 15 bp, Homo sapiens
taactgaaatcttag

SEQ ID NO: 1786529 - DNA, 15 bp, Homo sapiens
aactgaaatcttaga

SEQ ID NO: 1786530 - DNA, 15 bp, Homo sapiens
actgaaatcttagat

SEQ ID NO: 1786531 - DNA, 15 bp, Homo sapiens
ctgaaatcttagata

SEQ ID NO: 1786532 - DNA, 15 bp, Homo sapiens
tgaaatcttagatat

SEQ ID NO: 1786533 - DNA, 15 bp, Homo sapiens
gaaatcttagatatg

SEQ ID NO: 1786534 - DNA, 15 bp, Homo sapiens
aaatcttagatatga

SEQ ID NO: 1786535 - DNA, 15 bp, Homo sapiens
aatcttagatatgaa

SEQ ID NO: 1786536 - DNA, 15 bp, Homo sapiens
atcttagatatgaac

SEQ ID NO: 1786537 - DNA, 15 bp, Homo sapiens
tcttagatatgaacc

SEQ ID NO: 1786538 - DNA, 15 bp, Homo sapiens
cttagatatgaacca

SEQ ID NO: 1786539 - DNA, 15 bp, Homo sapiens
ttagatatgaaccat

SEQ ID NO: 1786540 - DNA, 15 bp, Homo sapiens
tagatatgaaccata

SEQ ID NO: 1786541 - DNA, 15 bp, Homo sapiens
agatatgaaccatag

SEQ ID NO: 1786542 - DNA, 15 bp, Homo sapiens
gatatgaaccatagt

SEQ ID NO: 1786543 - DNA, 15 bp, Homo sapiens
atatgaaccatagtt

SEQ ID NO: 1786544 - DNA, 15 bp, Homo sapiens
tatgaaccatagtta

SEQ ID NO: 1786545 - DNA, 15 bp, Homo sapiens
atgaaccatagttat

SEQ ID NO: 1786546 - DNA, 15 bp, Homo sapiens
tgaaccatagttatc

SEQ ID NO: 1786547 - DNA, 15 bp, Homo sapiens
gaaccatagttatcg

SEQ ID NO: 1786548 - DNA, 15 bp, Homo sapiens
aaccatagttatcgc

SEQ ID NO: 1786549 - DNA, 15 bp, Homo sapiens
accatagttatcgct

SEQ ID NO: 1786550 - DNA, 15 bp, Homo sapiens
ccatagttatcgcta

SEQ ID NO: 1786551 - DNA, 15 bp, Homo sapiens
catagttatcgctaa

SEQ ID NO: 1786552 - DNA, 15 bp, Homo sapiens
atagttatcgctaaa

SEQ ID NO: 1786553 - DNA, 15 bp, Homo sapiens
tagttatcgctaaaa

SEQ ID NO: 1786554 - DNA, 15 bp, Homo sapiens
agttatcgctaaaaa

SEQ ID NO: 1786555 - DNA, 15 bp, Homo sapiens
gttatcgctaaaaaa

SEQ ID NO: 1786556 - DNA, 15 bp, Homo sapiens
ttatcgctaaaaaaa

SEQ ID NO: 1786557 - DNA, 15 bp, Homo sapiens
tatcgctaaaaaaat

SEQ ID NO: 1786558 - DNA, 15 bp, Homo sapiens
atcgctaaaaaaatt

SEQ ID NO: 1786559 - DNA, 15 bp, Homo sapiens
tcgctaaaaaaattt

SEQ ID NO: 1786560 - DNA, 15 bp, Homo sapiens
cgctaaaaaaatttt

SEQ ID NO: 1786561 - DNA, 15 bp, Homo sapiens
gctaaaaaaattttt

SEQ ID NO: 1786562 - DNA, 15 bp, Homo sapiens
ctaaaaaaattttta

SEQ ID NO: 1786563 - DNA, 15 bp, Homo sapiens
taaaaaaatttttag

SEQ ID NO: 1786564 - DNA, 15 bp, Homo sapiens
aaaaaaatttttaga

SEQ ID NO: 1786565 - DNA, 15 bp, Homo sapiens
aaaaaatttttagaa

SEQ ID NO: 1786566 - DNA, 15 bp, Homo sapiens
aaaaatttttagaag

SEQ ID NO: 1786567 - DNA, 15 bp, Homo sapiens
aaaatttttagaagg

SEQ ID NO: 1786568 - DNA, 15 bp, Homo sapiens
aaatttttagaagga

SEQ ID NO: 1786569 - DNA, 15 bp, Homo sapiens
aatttttagaaggag

SEQ ID NO: 1786570 - DNA, 15 bp, Homo sapiens
atttttagaaggaga

SEQ ID NO: 1786571 - DNA, 15 bp, Homo sapiens
tttttagaaggagaa

SEQ ID NO: 1786572 - DNA, 15 bp, Homo sapiens
ttttagaaggagaat

SEQ ID NO: 1786573 - DNA, 15 bp, Homo sapiens
tttagaaggagaatc

SEQ ID NO: 1786574 - DNA, 15 bp, Homo sapiens
ttagaaggagaatca

SEQ ID NO: 1786575 - DNA, 15 bp, Homo sapiens
tagaaggagaatcac

SEQ ID NO: 1786576 - DNA, 15 bp, Homo sapiens
agaaggagaatcaca

SEQ ID NO: 1786577 - DNA, 15 bp, Homo sapiens
gaaggagaatcacaa

SEQ ID NO: 1786578 - DNA, 15 bp, Homo sapiens
aaggagaatcacaaa

SEQ ID NO: 1786579 - DNA, 15 bp, Homo sapiens
aggagaatcacaaaa

SEQ ID NO: 1786580 - DNA, 15 bp, Homo sapiens
ggagaatcacaaaaa

SEQ ID NO: 1786581 - DNA, 15 bp, Homo sapiens
gagaatcacaaaaac

SEQ ID NO: 1786582 - DNA, 15 bp, Homo sapiens
gaatcacaaaaacaa

SEQ ID NO: 1786583 - DNA, 15 bp, Homo sapiens
aatcacaaaaacaag

SEQ ID NO: 1786584 - DNA, 15 bp, Homo sapiens
atcacaaaaacaaga

SEQ ID NO: 1786585 - DNA, 15 bp, Homo sapiens
tcacaaaaacaagat

SEQ ID NO: 1786586 - DNA, 15 bp, Homo sapiens
cacaaaaacaagata

SEQ ID NO: 1786587 - DNA, 15 bp, Homo sapiens
acaaaaacaagataa

SEQ ID NO: 1786588 - DNA, 15 bp, Homo sapiens
caaaaacaagataac

SEQ ID NO: 1786589 - DNA, 15 bp, Homo sapiens
aaaaacaagataaca

SEQ ID NO: 1786590 - DNA, 15 bp, Homo sapiens
aaaacaagataacag

SEQ ID NO: 1786591 - DNA, 15 bp, Homo sapiens
aaacaagataacagt

SEQ ID NO: 1786592 - DNA, 15 bp, Homo sapiens
aacaagataacagta

SEQ ID NO: 1786593 - DNA, 15 bp, Homo sapiens
acaagataacagtat

SEQ ID NO: 1786594 - DNA, 15 bp, Homo sapiens
caagataacagtatt

SEQ ID NO: 1786595 - DNA, 15 bp, Homo sapiens
aagataacagtattt

SEQ ID NO: 1786596 - DNA, 15 bp, Homo sapiens
agataacagtattta

SEQ ID NO: 1786597 - DNA, 15 bp, Homo sapiens
gataacagtatttaa

SEQ ID NO: 1786598 - DNA, 15 bp, Homo sapiens
ataacagtatttaat

SEQ ID NO: 1786599 - DNA, 15 bp, Homo sapiens
taacagtatttaata

SEQ ID NO: 1786600 - DNA, 15 bp, Homo sapiens
aacagtatttaatat

SEQ ID NO: 1786601 - DNA, 15 bp, Homo sapiens
acagtatttaatatc

SEQ ID NO: 1786602 - DNA, 15 bp, Homo sapiens
cagtatttaatatca

SEQ ID NO: 1786603 - DNA, 15 bp, Homo sapiens
agtatttaatatcaa

SEQ ID NO: 1786604 - DNA, 15 bp, Homo sapiens
gtatttaatatcaat

SEQ ID NO: 1786605 - DNA, 15 bp, Homo sapiens
tatttaatatcaata

SEQ ID NO: 1786606 - DNA, 15 bp, Homo sapiens
atttaatatcaataa

SEQ ID NO: 1786607 - DNA, 15 bp, Homo sapiens
tttaatatcaataaa

SEQ ID NO: 1786608 - DNA, 15 bp, Homo sapiens
ttaatatcaataaat

SEQ ID NO: 1786609 - DNA, 15 bp, Homo sapiens
taatatcaataaatt

SEQ ID NO: 1786610 - DNA, 15 bp, Homo sapiens
aatatcaataaattg

SEQ ID NO: 1786611 - DNA, 15 bp, Homo sapiens
atatcaataaattgt

SEQ ID NO: 1786612 - DNA, 15 bp, Homo sapiens
tatcaataaattgtt

SEQ ID NO: 1786613 - DNA, 15 bp, Homo sapiens
atcaataaattgttt

SEQ ID NO: 1786614 - DNA, 15 bp, Homo sapiens
tcaataaattgtttt

SEQ ID NO: 1786615 - DNA, 15 bp, Homo sapiens
caataaattgttttt

SEQ ID NO: 1786616 - DNA, 15 bp, Homo sapiens
aataaattgtttttt

SEQ ID NO: 1786617 - DNA, 15 bp, Homo sapiens
ataaattgtttttta

SEQ ID NO: 1786618 - DNA, 15 bp, Homo sapiens
taaattgttttttaa

SEQ ID NO: 1786619 - DNA, 15 bp, Homo sapiens
aaattgttttttaag

SEQ ID NO: 1786620 - DNA, 15 bp, Homo sapiens
aattgttttttaagc

SEQ ID NO: 1786621 - DNA, 15 bp, Homo sapiens
attgttttttaagct

SEQ ID NO: 1786622 - DNA, 15 bp, Homo sapiens
ttgttttttaagctg

SEQ ID NO: 1786623 - DNA, 15 bp, Homo sapiens
tgttttttaagctgg

SEQ ID NO: 1786624 - DNA, 15 bp, Homo sapiens
gttttttaagctgga

SEQ ID NO: 1786625 - DNA, 15 bp, Homo sapiens
ttttttaagctggaa

SEQ ID NO: 1786626 - DNA, 15 bp, Homo sapiens
tttttaagctggaat

SEQ ID NO: 1786627 - DNA, 15 bp, Homo sapiens
ttttaagctggaatc

SEQ ID NO: 1786628 - DNA, 15 bp, Homo sapiens
tttaagctggaatca

SEQ ID NO: 1786629 - DNA, 15 bp, Homo sapiens
ttaagctggaatcac

SEQ ID NO: 1786630 - DNA, 15 bp, Homo sapiens
taagctggaatcacc

SEQ ID NO: 1786631 - DNA, 15 bp, Homo sapiens
aagctggaatcacct

SEQ ID NO: 1786632 - DNA, 15 bp, Homo sapiens
agctggaatcacctt

SEQ ID NO: 1786633 - DNA, 15 bp, Homo sapiens
gctggaatcacctta

SEQ ID NO: 1786634 - DNA, 15 bp, Homo sapiens
ctggaatcaccttat

SEQ ID NO: 1786635 - DNA, 15 bp, Homo sapiens
tggaatcaccttatg

SEQ ID NO: 1786636 - DNA, 15 bp, Homo sapiens
ggaatcaccttatgg

SEQ ID NO: 1786637 - DNA, 15 bp, Homo sapiens
gaatcaccttatggt

SEQ ID NO: 1786638 - DNA, 15 bp, Homo sapiens
aatcaccttatggtc

SEQ ID NO: 1786639 - DNA, 15 bp, Homo sapiens
atcaccttatggtct

SEQ ID NO: 1786640 - DNA, 15 bp, Homo sapiens
tcaccttatggtctc

SEQ ID NO: 1786641 - DNA, 15 bp, Homo sapiens
caccttatggtctca

SEQ ID NO: 1786642 - DNA, 15 bp, Homo sapiens
accttatggtctcaa

SEQ ID NO: 1786643 - DNA, 15 bp, Homo sapiens
ccttatggtctcaat

SEQ ID NO: 1786644 - DNA, 15 bp, Homo sapiens
cttatggtctcaata

SEQ ID NO: 1786645 - DNA, 15 bp, Homo sapiens
ttatggtctcaatac

SEQ ID NO: 1786646 - DNA, 15 bp, Homo sapiens
tatggtctcaatacc

SEQ ID NO: 1786647 - DNA, 15 bp, Homo sapiens
atggtctcaatacca

SEQ ID NO: 1786648 - DNA, 15 bp, Homo sapiens
tggtctcaataccac

SEQ ID NO: 1786649 - DNA, 15 bp, Homo sapiens
ggtctcaataccact

SEQ ID NO: 1786650 - DNA, 15 bp, Homo sapiens
gtctcaataccacta

SEQ ID NO: 1786651 - DNA, 15 bp, Homo sapiens
tctcaataccactat

SEQ ID NO: 1786652 - DNA, 15 bp, Homo sapiens
ctcaataccactata

SEQ ID NO: 1786653 - DNA, 15 bp, Homo sapiens
tcaataccactataa

SEQ ID NO: 1786654 - DNA, 15 bp, Homo sapiens
caataccactataat

SEQ ID NO: 1786655 - DNA, 15 bp, Homo sapiens
aataccactataatt

SEQ ID NO: 1786656 - DNA, 15 bp, Homo sapiens
ataccactataatta

SEQ ID NO: 1786657 - DNA, 15 bp, Homo sapiens
taccactataattat

SEQ ID NO: 1786658 - DNA, 15 bp, Homo sapiens
accactataattatt

SEQ ID NO: 1786659 - DNA, 15 bp, Homo sapiens
ccactataattatta

SEQ ID NO: 1786660 - DNA, 15 bp, Homo sapiens
cactataattattaa

SEQ ID NO: 1786661 - DNA, 15 bp, Homo sapiens
actataattattaaa

SEQ ID NO: 1786662 - DNA, 15 bp, Homo sapiens
ctataattattaaaa

SEQ ID NO: 1786663 - DNA, 15 bp, Homo sapiens
tataattattaaaat

SEQ ID NO: 1786664 - DNA, 15 bp, Homo sapiens
ataattattaaaatt

SEQ ID NO: 1786665 - DNA, 15 bp, Homo sapiens
taattattaaaattg

SEQ ID NO: 1786666 - DNA, 15 bp, Homo sapiens
aattattaaaattgt

SEQ ID NO: 1786667 - DNA, 15 bp, Homo sapiens
attattaaaattgta

SEQ ID NO: 1786668 - DNA, 15 bp, Homo sapiens
ttattaaaattgtac

SEQ ID NO: 1786669 - DNA, 15 bp, Homo sapiens
tattaaaattgtaca

SEQ ID NO: 1786670 - DNA, 15 bp, Homo sapiens
attaaaattgtacat

SEQ ID NO: 1786671 - DNA, 15 bp, Homo sapiens
ttaaaattgtacatt

SEQ ID NO: 1786672 - DNA, 15 bp, Homo sapiens
taaaattgtacatta

SEQ ID NO: 1786673 - DNA, 15 bp, Homo sapiens
aaaattgtacattat

SEQ ID NO: 1786674 - DNA, 15 bp, Homo sapiens
aaattgtacattata

SEQ ID NO: 1786675 - DNA, 15 bp, Homo sapiens
aattgtacattatac

SEQ ID NO: 1786676 - DNA, 15 bp, Homo sapiens
attgtacattataca

SEQ ID NO: 1786677 - DNA, 15 bp, Homo sapiens
ttgtacattatacat

SEQ ID NO: 1786678 - DNA, 15 bp, Homo sapiens
tgtacattatacata

SEQ ID NO: 1786679 - DNA, 15 bp, Homo sapiens
gtacattatacatat

SEQ ID NO: 1786680 - DNA, 15 bp, Homo sapiens
tacattatacatata

SEQ ID NO: 1786681 - DNA, 15 bp, Homo sapiens
acattatacatatat

SEQ ID NO: 1786682 - DNA, 15 bp, Homo sapiens
cattatacatatata

SEQ ID NO: 1786683 - DNA, 15 bp, Homo sapiens
attatacatatatag

SEQ ID NO: 1786684 - DNA, 15 bp, Homo sapiens
ttatacatatatagc

SEQ ID NO: 1786685 - DNA, 15 bp, Homo sapiens
tatacatatatagct

SEQ ID NO: 1786686 - DNA, 15 bp, Homo sapiens
atacatatatagcta

SEQ ID NO: 1786687 - DNA, 15 bp, Homo sapiens
tacatatatagctat

SEQ ID NO: 1786688 - DNA, 15 bp, Homo sapiens
acatatatagctatt

SEQ ID NO: 1786689 - DNA, 15 bp, Homo sapiens
catatatagctattt

SEQ ID NO: 1786690 - DNA, 15 bp, Homo sapiens
atatatagctatttt

SEQ ID NO: 1786691 - DNA, 15 bp, Homo sapiens
tatatagctattttt

SEQ ID NO: 1786692 - DNA, 15 bp, Homo sapiens
atatagctatttttt

SEQ ID NO: 1786693 - DNA, 15 bp, Homo sapiens
tatagctattttttt

SEQ ID NO: 1786694 - DNA, 15 bp, Homo sapiens
atagctatttttttc

SEQ ID NO: 1786695 - DNA, 15 bp, Homo sapiens
tagctatttttttct

SEQ ID NO: 1786696 - DNA, 15 bp, Homo sapiens
agctatttttttcta

SEQ ID NO: 1786697 - DNA, 15 bp, Homo sapiens
gctatttttttctaa

SEQ ID NO: 1786698 - DNA, 15 bp, Homo sapiens
ctatttttttctaat

SEQ ID NO: 1786699 - DNA, 15 bp, Homo sapiens
tatttttttctaata

SEQ ID NO: 1786700 - DNA, 15 bp, Homo sapiens
atttttttctaataa

SEQ ID NO: 1786701 - DNA, 15 bp, Homo sapiens
tttttttctaataag

SEQ ID NO: 1786702 - DNA, 15 bp, Homo sapiens
ttttttctaataagg

SEQ ID NO: 1786703 - DNA, 15 bp, Homo sapiens
tttttctaataaggc

SEQ ID NO: 1786704 - DNA, 15 bp, Homo sapiens
ttttctaataaggca

SEQ ID NO: 1786705 - DNA, 15 bp, Homo sapiens
tttctaataaggcag

SEQ ID NO: 1786706 - DNA, 15 bp, Homo sapiens
ttctaataaggcagt

SEQ ID NO: 1786707 - DNA, 15 bp, Homo sapiens
tctaataaggcagta

SEQ ID NO: 1786708 - DNA, 15 bp, Homo sapiens
ctaataaggcagtaa

SEQ ID NO: 1786709 - DNA, 15 bp, Homo sapiens
taataaggcagtaat

SEQ ID NO: 1786710 - DNA, 15 bp, Homo sapiens
aataaggcagtaatc

SEQ ID NO: 1786711 - DNA, 15 bp, Homo sapiens
ataaggcagtaatcc

SEQ ID NO: 1786712 - DNA, 15 bp, Homo sapiens
taaggcagtaatccc

SEQ ID NO: 1786713 - DNA, 15 bp, Homo sapiens
aaggcagtaatcccc

SEQ ID NO: 1786714 - DNA, 15 bp, Homo sapiens
aggcagtaatcccca

SEQ ID NO: 1786715 - DNA, 15 bp, Homo sapiens
ggcagtaatccccag

SEQ ID NO: 1786716 - DNA, 15 bp, Homo sapiens
gcagtaatccccagg

SEQ ID NO: 1786717 - DNA, 15 bp, Homo sapiens
cagtaatccccagga

SEQ ID NO: 1786718 - DNA, 15 bp, Homo sapiens
agtaatccccaggaa

SEQ ID NO: 1786719 - DNA, 15 bp, Homo sapiens
gtaatccccaggaaa

SEQ ID NO: 1786720 - DNA, 15 bp, Homo sapiens
taatccccaggaaaa

SEQ ID NO: 1786721 - DNA, 15 bp, Homo sapiens
aatccccaggaaaag

SEQ ID NO: 1786722 - DNA, 15 bp, Homo sapiens
atccccaggaaaagc

SEQ ID NO: 1786723 - DNA, 15 bp, Homo sapiens
tccccaggaaaagcc

SEQ ID NO: 1786724 - DNA, 15 bp, Homo sapiens
ccccaggaaaagcca

SEQ ID NO: 1786725 - DNA, 15 bp, Homo sapiens
cccaggaaaagccat

SEQ ID NO: 1786726 - DNA, 15 bp, Homo sapiens
ccaggaaaagccatt

SEQ ID NO: 1786727 - DNA, 15 bp, Homo sapiens
caggaaaagccattt

SEQ ID NO: 1786728 - DNA, 15 bp, Homo sapiens
aggaaaagccattta

SEQ ID NO: 1786729 - DNA, 15 bp, Homo sapiens
ggaaaagccatttat

SEQ ID NO: 1786730 - DNA, 15 bp, Homo sapiens
gaaaagccatttatt

SEQ ID NO: 1786731 - DNA, 15 bp, Homo sapiens
aaaagccatttatta

SEQ ID NO: 1786732 - DNA, 15 bp, Homo sapiens
aaagccatttattaa

SEQ ID NO: 1786733 - DNA, 15 bp, Homo sapiens
aagccatttattaaa

SEQ ID NO: 1786734 - DNA, 15 bp, Homo sapiens
agccatttattaaaa

SEQ ID NO: 1786735 - DNA, 15 bp, Homo sapiens
gccatttattaaaat

SEQ ID NO: 1786736 - DNA, 15 bp, Homo sapiens
ccatttattaaaata

SEQ ID NO: 1786737 - DNA, 15 bp, Homo sapiens
catttattaaaatag

SEQ ID NO: 1786738 - DNA, 15 bp, Homo sapiens
atttattaaaataga

SEQ ID NO: 1786739 - DNA, 15 bp, Homo sapiens
tttattaaaatagaa

SEQ ID NO: 1786740 - DNA, 15 bp, Homo sapiens
ttattaaaatagaat

SEQ ID NO: 1786741 - DNA, 15 bp, Homo sapiens
tattaaaatagaatt

SEQ ID NO: 1786742 - DNA, 15 bp, Homo sapiens
attaaaatagaatta

SEQ ID NO: 1786743 - DNA, 15 bp, Homo sapiens
ttaaaatagaattag

SEQ ID NO: 1786744 - DNA, 15 bp, Homo sapiens
taaaatagaattaga

SEQ ID NO: 1786745 - DNA, 15 bp, Homo sapiens
aaaatagaattagat

SEQ ID NO: 1786746 - DNA, 15 bp, Homo sapiens
aaatagaattagata

SEQ ID NO: 1786747 - DNA, 15 bp, Homo sapiens
aatagaattagatat

SEQ ID NO: 1786748 - DNA, 15 bp, Homo sapiens
atagaattagatatg

SEQ ID NO: 1786749 - DNA, 15 bp, Homo sapiens
tagaattagatatga

SEQ ID NO: 1786750 - DNA, 15 bp, Homo sapiens
agaattagatatgat

SEQ ID NO: 1786751 - DNA, 15 bp, Homo sapiens
gaattagatatgatg

SEQ ID NO: 1786752 - DNA, 15 bp, Homo sapiens
aattagatatgatga

SEQ ID NO: 1786753 - DNA, 15 bp, Homo sapiens
attagatatgatgat

SEQ ID NO: 1786754 - DNA, 15 bp, Homo sapiens
ttagatatgatgatg

SEQ ID NO: 1786755 - DNA, 15 bp, Homo sapiens
tagatatgatgatga

SEQ ID NO: 1786756 - DNA, 15 bp, Homo sapiens
agatatgatgatgac

SEQ ID NO: 1786757 - DNA, 15 bp, Homo sapiens
gatatgatgatgaca

SEQ ID NO: 1786758 - DNA, 15 bp, Homo sapiens
atatgatgatgacaa

SEQ ID NO: 1786759 - DNA, 15 bp, Homo sapiens
tatgatgatgacaag

SEQ ID NO: 1786760 - DNA, 15 bp, Homo sapiens
atgatgatgacaagc

SEQ ID NO: 1786761 - DNA, 15 bp, Homo sapiens
tgatgatgacaagca

SEQ ID NO: 1786762 - DNA, 15 bp, Homo sapiens
gatgatgacaagcag

SEQ ID NO: 1786763 - DNA, 15 bp, Homo sapiens
atgatgacaagcagt

SEQ ID NO: 1786764 - DNA, 15 bp, Homo sapiens
tgatgacaagcagtt

SEQ ID NO: 1786765 - DNA, 15 bp, Homo sapiens
gatgacaagcagttt

SEQ ID NO: 1786766 - DNA, 15 bp, Homo sapiens
atgacaagcagtttt

SEQ ID NO: 1786767 - DNA, 15 bp, Homo sapiens
tgacaagcagttttc

SEQ ID NO: 1786768 - DNA, 15 bp, Homo sapiens
gacaagcagttttcc

SEQ ID NO: 1786769 - DNA, 15 bp, Homo sapiens
acaagcagttttcct

SEQ ID NO: 1786770 - DNA, 15 bp, Homo sapiens
caagcagttttccta

SEQ ID NO: 1786771 - DNA, 15 bp, Homo sapiens
aagcagttttcctat

SEQ ID NO: 1786772 - DNA, 15 bp, Homo sapiens
agcagttttcctatt

SEQ ID NO: 1786773 - DNA, 15 bp, Homo sapiens
gcagttttcctatta

SEQ ID NO: 1786774 - DNA, 15 bp, Homo sapiens
cagttttcctattaa

SEQ ID NO: 1786775 - DNA, 15 bp, Homo sapiens
agttttcctattaat

SEQ ID NO: 1786776 - DNA, 15 bp, Homo sapiens
gttttcctattaata

SEQ ID NO: 1786777 - DNA, 15 bp, Homo sapiens
ttttcctattaatat

SEQ ID NO: 1786778 - DNA, 15 bp, Homo sapiens
tttcctattaatata

SEQ ID NO: 1786779 - DNA, 15 bp, Homo sapiens
ttcctattaatatat

SEQ ID NO: 1786780 - DNA, 15 bp, Homo sapiens
tcctattaatatatc

SEQ ID NO: 1786781 - DNA, 15 bp, Homo sapiens
cctattaatatatct

SEQ ID NO: 1786782 - DNA, 15 bp, Homo sapiens
ctattaatatatctt

SEQ ID NO: 1786783 - DNA, 15 bp, Homo sapiens
tattaatatatcttt

SEQ ID NO: 1786784 - DNA, 15 bp, Homo sapiens
attaatatatctttc

SEQ ID NO: 1786785 - DNA, 15 bp, Homo sapiens
ttaatatatctttcc

SEQ ID NO: 1786786 - DNA, 15 bp, Homo sapiens
taatatatctttccc

SEQ ID NO: 1786787 - DNA, 15 bp, Homo sapiens
aatatatctttccca

SEQ ID NO: 1786788 - DNA, 15 bp, Homo sapiens
atatatctttcccag

SEQ ID NO: 1786789 - DNA, 15 bp, Homo sapiens
tatatctttcccagc

SEQ ID NO: 1786790 - DNA, 15 bp, Homo sapiens
atatctttcccagct

SEQ ID NO: 1786791 - DNA, 15 bp, Homo sapiens
tatctttcccagctt

SEQ ID NO: 1786792 - DNA, 15 bp, Homo sapiens
atctttcccagcttg

SEQ ID NO: 1786793 - DNA, 15 bp, Homo sapiens
tctttcccagcttgc

SEQ ID NO: 1786794 - DNA, 15 bp, Homo sapiens
ctttcccagcttgca

SEQ ID NO: 1786795 - DNA, 15 bp, Homo sapiens
tttcccagcttgcat

SEQ ID NO: 1786796 - DNA, 15 bp, Homo sapiens
ttcccagcttgcatt

SEQ ID NO: 1786797 - DNA, 15 bp, Homo sapiens
tcccagcttgcattt

SEQ ID NO: 1786798 - DNA, 15 bp, Homo sapiens
cccagcttgcattta

SEQ ID NO: 1786799 - DNA, 15 bp, Homo sapiens
ccagcttgcatttaa

SEQ ID NO: 1786800 - DNA, 15 bp, Homo sapiens
cagcttgcatttaaa

SEQ ID NO: 1786801 - DNA, 15 bp, Homo sapiens
agcttgcatttaaat

SEQ ID NO: 1786802 - DNA, 15 bp, Homo sapiens
gcttgcatttaaata

SEQ ID NO: 1786803 - DNA, 15 bp, Homo sapiens
cttgcatttaaatag

SEQ ID NO: 1786804 - DNA, 15 bp, Homo sapiens
ttgcatttaaatagt

SEQ ID NO: 1786805 - DNA, 15 bp, Homo sapiens
tgcatttaaatagtc

SEQ ID NO: 1786806 - DNA, 15 bp, Homo sapiens
gcatttaaatagtct

SEQ ID NO: 1786807 - DNA, 15 bp, Homo sapiens
catttaaatagtctg

SEQ ID NO: 1786808 - DNA, 15 bp, Homo sapiens
atttaaatagtctgc

SEQ ID NO: 1786809 - DNA, 15 bp, Homo sapiens
tttaaatagtctgct

SEQ ID NO: 1786810 - DNA, 15 bp, Homo sapiens
ttaaatagtctgcta

SEQ ID NO: 1786811 - DNA, 15 bp, Homo sapiens
taaatagtctgctat

SEQ ID NO: 1786812 - DNA, 15 bp, Homo sapiens
aaatagtctgctata

SEQ ID NO: 1786813 - DNA, 15 bp, Homo sapiens
aatagtctgctataa

SEQ ID NO: 1786814 - DNA, 15 bp, Homo sapiens
atagtctgctataat

SEQ ID NO: 1786815 - DNA, 15 bp, Homo sapiens
tagtctgctataata

SEQ ID NO: 1786816 - DNA, 15 bp, Homo sapiens
agtctgctataatac

SEQ ID NO: 1786817 - DNA, 15 bp, Homo sapiens
gtctgctataatacc

SEQ ID NO: 1786818 - DNA, 15 bp, Homo sapiens
tctgctataatacca

SEQ ID NO: 1786819 - DNA, 15 bp, Homo sapiens
ctgctataataccaa

SEQ ID NO: 1786820 - DNA, 15 bp, Homo sapiens
tgctataataccaat

SEQ ID NO: 1786821 - DNA, 15 bp, Homo sapiens
gctataataccaatt

SEQ ID NO: 1786822 - DNA, 15 bp, Homo sapiens
ctataataccaatta

SEQ ID NO: 1786823 - DNA, 15 bp, Homo sapiens
tataataccaattaa

SEQ ID NO: 1786824 - DNA, 15 bp, Homo sapiens
ataataccaattaaa

SEQ ID NO: 1786825 - DNA, 15 bp, Homo sapiens
taataccaattaaat

SEQ ID NO: 1786826 - DNA, 15 bp, Homo sapiens
aataccaattaaata

SEQ ID NO: 1786827 - DNA, 15 bp, Homo sapiens
ataccaattaaatag

SEQ ID NO: 1786828 - DNA, 15 bp, Homo sapiens
taccaattaaataga

SEQ ID NO: 1786829 - DNA, 15 bp, Homo sapiens
accaattaaatagac

SEQ ID NO: 1786830 - DNA, 15 bp, Homo sapiens
ccaattaaatagaca

SEQ ID NO: 1786831 - DNA, 15 bp, Homo sapiens
caattaaatagacaa

SEQ ID NO: 1786832 - DNA, 15 bp, Homo sapiens
aattaaatagacaag

SEQ ID NO: 1786833 - DNA, 15 bp, Homo sapiens
attaaatagacaaga

SEQ ID NO: 1786834 - DNA, 15 bp, Homo sapiens
ttaaatagacaagat

SEQ ID NO: 1786835 - DNA, 15 bp, Homo sapiens
taaatagacaagatg

SEQ ID NO: 1786836 - DNA, 15 bp, Homo sapiens
aaatagacaagatgt

SEQ ID NO: 1786837 - DNA, 15 bp, Homo sapiens
aatagacaagatgta

SEQ ID NO: 1786838 - DNA, 15 bp, Homo sapiens
atagacaagatgtat

SEQ ID NO: 1786839 - DNA, 15 bp, Homo sapiens
tagacaagatgtatc

SEQ ID NO: 1786840 - DNA, 15 bp, Homo sapiens
agacaagatgtatct

SEQ ID NO: 1786841 - DNA, 15 bp, Homo sapiens
gacaagatgtatctg

SEQ ID NO: 1786842 - DNA, 15 bp, Homo sapiens
acaagatgtatctgg

SEQ ID NO: 1786843 - DNA, 15 bp, Homo sapiens
caagatgtatctggg

SEQ ID NO: 1786844 - DNA, 15 bp, Homo sapiens
aagatgtatctgggt

SEQ ID NO: 1786845 - DNA, 15 bp, Homo sapiens
agatgtatctgggtg

SEQ ID NO: 1786846 - DNA, 15 bp, Homo sapiens
gatgtatctgggtgt

SEQ ID NO: 1786847 - DNA, 15 bp, Homo sapiens
atgtatctgggtgta

SEQ ID NO: 1786848 - DNA, 15 bp, Homo sapiens
tgtatctgggtgtac

SEQ ID NO: 1786849 - DNA, 15 bp, Homo sapiens
gtatctgggtgtaca

SEQ ID NO: 1786850 - DNA, 15 bp, Homo sapiens
tatctgggtgtacaa

SEQ ID NO: 1786851 - DNA, 15 bp, Homo sapiens
atctgggtgtacaac

SEQ ID NO: 1786852 - DNA, 15 bp, Homo sapiens
tctgggtgtacaacc

SEQ ID NO: 1786853 - DNA, 15 bp, Homo sapiens
ctgggtgtacaacct

SEQ ID NO: 1786854 - DNA, 15 bp, Homo sapiens
tgggtgtacaacctt

SEQ ID NO: 1786855 - DNA, 15 bp, Homo sapiens
gggtgtacaaccttg

SEQ ID NO: 1786856 - DNA, 15 bp, Homo sapiens
ggtgtacaaccttga

SEQ ID NO: 1786857 - DNA, 15 bp, Homo sapiens
gtgtacaaccttgaa

SEQ ID NO: 1786858 - DNA, 15 bp, Homo sapiens
tgtacaaccttgaag

SEQ ID NO: 1786859 - DNA, 15 bp, Homo sapiens
gtacaaccttgaagt

SEQ ID NO: 1786860 - DNA, 15 bp, Homo sapiens
tacaaccttgaagtg

SEQ ID NO: 1786861 - DNA, 15 bp, Homo sapiens
acaaccttgaagtgt

SEQ ID NO: 1786862 - DNA, 15 bp, Homo sapiens
caaccttgaagtgta

SEQ ID NO: 1786863 - DNA, 15 bp, Homo sapiens
aaccttgaagtgtat

SEQ ID NO: 1786864 - DNA, 15 bp, Homo sapiens
accttgaagtgtatg

SEQ ID NO: 1786865 - DNA, 15 bp, Homo sapiens
ccttgaagtgtatgt

SEQ ID NO: 1786866 - DNA, 15 bp, Homo sapiens
cttgaagtgtatgta

SEQ ID NO: 1786867 - DNA, 15 bp, Homo sapiens
ttgaagtgtatgtat

SEQ ID NO: 1786868 - DNA, 15 bp, Homo sapiens
tgaagtgtatgtata

SEQ ID NO: 1786869 - DNA, 15 bp, Homo sapiens
gaagtgtatgtataa

SEQ ID NO: 1786870 - DNA, 15 bp, Homo sapiens
aagtgtatgtataat

SEQ ID NO: 1786871 - DNA, 15 bp, Homo sapiens
agtgtatgtataatc

SEQ ID NO: 1786872 - DNA, 15 bp, Homo sapiens
gtgtatgtataatct

SEQ ID NO: 1786873 - DNA, 15 bp, Homo sapiens
tgtatgtataatctg

SEQ ID NO: 1786874 - DNA, 15 bp, Homo sapiens
gtatgtataatctgt

SEQ ID NO: 1786875 - DNA, 15 bp, Homo sapiens
tatgtataatctgtg

SEQ ID NO: 1786876 - DNA, 15 bp, Homo sapiens
atgtataatctgtga

SEQ ID NO: 1786877 - DNA, 15 bp, Homo sapiens
tgtataatctgtgat

SEQ ID NO: 1786878 - DNA, 15 bp, Homo sapiens
gtataatctgtgatt

SEQ ID NO: 1786879 - DNA, 15 bp, Homo sapiens
tataatctgtgattc

SEQ ID NO: 1786880 - DNA, 15 bp, Homo sapiens
ataatctgtgattct

SEQ ID NO: 1786881 - DNA, 15 bp, Homo sapiens
taatctgtgattctt

SEQ ID NO: 1786882 - DNA, 15 bp, Homo sapiens
aatctgtgattctta

SEQ ID NO: 1786883 - DNA, 15 bp, Homo sapiens
atctgtgattcttag

SEQ ID NO: 1786884 - DNA, 15 bp, Homo sapiens
tctgtgattcttagc

SEQ ID NO: 1786885 - DNA, 15 bp, Homo sapiens
ctgtgattcttagcc

SEQ ID NO: 1786886 - DNA, 15 bp, Homo sapiens
tgtgattcttagcca

SEQ ID NO: 1786887 - DNA, 15 bp, Homo sapiens
gtgattcttagccaa

SEQ ID NO: 1786888 - DNA, 15 bp, Homo sapiens
tgattcttagccaac

SEQ ID NO: 1786889 - DNA, 15 bp, Homo sapiens
gattcttagccaact

SEQ ID NO: 1786890 - DNA, 15 bp, Homo sapiens
attcttagccaactt

SEQ ID NO: 1786891 - DNA, 15 bp, Homo sapiens
ttcttagccaacttg

SEQ ID NO: 1786892 - DNA, 15 bp, Homo sapiens
tcttagccaacttga

SEQ ID NO: 1786893 - DNA, 15 bp, Homo sapiens
cttagccaacttgaa

SEQ ID NO: 1786894 - DNA, 15 bp, Homo sapiens
ttagccaacttgaaa

SEQ ID NO: 1786895 - DNA, 15 bp, Homo sapiens
tagccaacttgaaat

SEQ ID NO: 1786896 - DNA, 15 bp, Homo sapiens
agccaacttgaaatg

SEQ ID NO: 1786897 - DNA, 15 bp, Homo sapiens
gccaacttgaaatga

SEQ ID NO: 1786898 - DNA, 15 bp, Homo sapiens
ccaacttgaaatgaa

SEQ ID NO: 1786899 - DNA, 15 bp, Homo sapiens
caacttgaaatgaag

SEQ ID NO: 1786900 - DNA, 15 bp, Homo sapiens
aacttgaaatgaaga

SEQ ID NO: 1786901 - DNA, 15 bp, Homo sapiens
acttgaaatgaagac

SEQ ID NO: 1786902 - DNA, 15 bp, Homo sapiens
cttgaaatgaagact

SEQ ID NO: 1786903 - DNA, 15 bp, Homo sapiens
ttgaaatgaagactt

SEQ ID NO: 1786904 - DNA, 15 bp, Homo sapiens
tgaaatgaagacttt

SEQ ID NO: 1786905 - DNA, 15 bp, Homo sapiens
gaaatgaagactttt

SEQ ID NO: 1786906 - DNA, 15 bp, Homo sapiens
aaatgaagacttttc

SEQ ID NO: 1786907 - DNA, 15 bp, Homo sapiens
aatgaagacttttcc

SEQ ID NO: 1786908 - DNA, 15 bp, Homo sapiens
atgaagacttttcct

SEQ ID NO: 1786909 - DNA, 15 bp, Homo sapiens
tgaagacttttcctt

SEQ ID NO: 1786910 - DNA, 15 bp, Homo sapiens
gaagacttttccttt

SEQ ID NO: 1786911 - DNA, 15 bp, Homo sapiens
aagacttttccttta

SEQ ID NO: 1786912 - DNA, 15 bp, Homo sapiens
agacttttcctttaa

SEQ ID NO: 1786913 - DNA, 15 bp, Homo sapiens
gacttttcctttaaa

SEQ ID NO: 1786914 - DNA, 15 bp, Homo sapiens
acttttcctttaaat

SEQ ID NO: 1786915 - DNA, 15 bp, Homo sapiens
cttttcctttaaata

SEQ ID NO: 1786916 - DNA, 15 bp, Homo sapiens
ttttcctttaaatat

SEQ ID NO: 1786917 - DNA, 15 bp, Homo sapiens
tttcctttaaatata

SEQ ID NO: 1786918 - DNA, 15 bp, Homo sapiens
ttcctttaaatatat

SEQ ID NO: 1786919 - DNA, 15 bp, Homo sapiens
tcctttaaatatatc

SEQ ID NO: 1786920 - DNA, 15 bp, Homo sapiens
cctttaaatatatct

SEQ ID NO: 1786921 - DNA, 15 bp, Homo sapiens
ctttaaatatatcta

SEQ ID NO: 1786922 - DNA, 15 bp, Homo sapiens
tttaaatatatctag

SEQ ID NO: 1786923 - DNA, 15 bp, Homo sapiens
ttaaatatatctagg

SEQ ID NO: 1786924 - DNA, 15 bp, Homo sapiens
taaatatatctaggt

SEQ ID NO: 1786925 - DNA, 15 bp, Homo sapiens
aaatatatctaggta

SEQ ID NO: 1786926 - DNA, 15 bp, Homo sapiens
aatatatctaggtat

SEQ ID NO: 1786927 - DNA, 15 bp, Homo sapiens
atatatctaggtatc

SEQ ID NO: 1786928 - DNA, 15 bp, Homo sapiens
tatatctaggtatct

SEQ ID NO: 1786929 - DNA, 15 bp, Homo sapiens
atatctaggtatctt

SEQ ID NO: 1786930 - DNA, 15 bp, Homo sapiens
tatctaggtatcttt

SEQ ID NO: 1786931 - DNA, 15 bp, Homo sapiens
atctaggtatctttc

SEQ ID NO: 1786932 - DNA, 15 bp, Homo sapiens
tctaggtatctttct

SEQ ID NO: 1786933 - DNA, 15 bp, Homo sapiens
ctaggtatctttctc

SEQ ID NO: 1786934 - DNA, 15 bp, Homo sapiens
taggtatctttctcc

SEQ ID NO: 1786935 - DNA, 15 bp, Homo sapiens
aggtatctttctcct

SEQ ID NO: 1786936 - DNA, 15 bp, Homo sapiens
ggtatctttctcctg

SEQ ID NO: 1786937 - DNA, 15 bp, Homo sapiens
gtatctttctcctgt

SEQ ID NO: 1786938 - DNA, 15 bp, Homo sapiens
tatctttctcctgta

SEQ ID NO: 1786939 - DNA, 15 bp, Homo sapiens
atctttctcctgtaa

SEQ ID NO: 1786940 - DNA, 15 bp, Homo sapiens
tctttctcctgtaag

SEQ ID NO: 1786941 - DNA, 15 bp, Homo sapiens
ctttctcctgtaaga

SEQ ID NO: 1786942 - DNA, 15 bp, Homo sapiens
tttctcctgtaagat

SEQ ID NO: 1786943 - DNA, 15 bp, Homo sapiens
ttctcctgtaagatc

SEQ ID NO: 1786944 - DNA, 15 bp, Homo sapiens
tctcctgtaagatct

SEQ ID NO: 1786945 - DNA, 15 bp, Homo sapiens
ctcctgtaagatctc

SEQ ID NO: 1786946 - DNA, 15 bp, Homo sapiens
tcctgtaagatctcc

SEQ ID NO: 1786947 - DNA, 15 bp, Homo sapiens
cctgtaagatctcca

SEQ ID NO: 1786948 - DNA, 15 bp, Homo sapiens
ctgtaagatctccaa

SEQ ID NO: 1786949 - DNA, 15 bp, Homo sapiens
tgtaagatctccaaa

SEQ ID NO: 1786950 - DNA, 15 bp, Homo sapiens
gtaagatctccaaag

SEQ ID NO: 1786951 - DNA, 15 bp, Homo sapiens
taagatctccaaaga

SEQ ID NO: 1786952 - DNA, 15 bp, Homo sapiens
aagatctccaaagaa

SEQ ID NO: 1786953 - DNA, 15 bp, Homo sapiens
agatctccaaagaaa

SEQ ID NO: 1786954 - DNA, 15 bp, Homo sapiens
gatctccaaagaaaa

SEQ ID NO: 1786955 - DNA, 15 bp, Homo sapiens
atctccaaagaaaaa

SEQ ID NO: 1786956 - DNA, 15 bp, Homo sapiens
tctccaaagaaaaaa

SEQ ID NO: 1786957 - DNA, 15 bp, Homo sapiens
ctccaaagaaaaaag

SEQ ID NO: 1786958 - DNA, 15 bp, Homo sapiens
tccaaagaaaaaagg

SEQ ID NO: 1786959 - DNA, 15 bp, Homo sapiens
ccaaagaaaaaaggt

SEQ ID NO: 1786960 - DNA, 15 bp, Homo sapiens
caaagaaaaaaggtt

SEQ ID NO: 1786961 - DNA, 15 bp, Homo sapiens
aaagaaaaaaggttc

SEQ ID NO: 1786962 - DNA, 15 bp, Homo sapiens
aagaaaaaaggttca

SEQ ID NO: 1786963 - DNA, 15 bp, Homo sapiens
agaaaaaaggttcaa

SEQ ID NO: 1786964 - DNA, 15 bp, Homo sapiens
gaaaaaaggttcaac

SEQ ID NO: 1786965 - DNA, 15 bp, Homo sapiens
aaaaaaggttcaact

SEQ ID NO: 1786966 - DNA, 15 bp, Homo sapiens
aaaaaggttcaacta

SEQ ID NO: 1786967 - DNA, 15 bp, Homo sapiens
aaaaggttcaactac

SEQ ID NO: 1786968 - DNA, 15 bp, Homo sapiens
aaaggttcaactacg

SEQ ID NO: 1786969 - DNA, 15 bp, Homo sapiens
aaggttcaactacgc

SEQ ID NO: 1786970 - DNA, 15 bp, Homo sapiens
aggttcaactacgcg

SEQ ID NO: 1786971 - DNA, 15 bp, Homo sapiens
ggttcaactacgcgt

SEQ ID NO: 1786972 - DNA, 15 bp, Homo sapiens
gttcaactacgcgtg

SEQ ID NO: 1786973 - DNA, 15 bp, Homo sapiens
ttcaactacgcgtgt

SEQ ID NO: 1786974 - DNA, 15 bp, Homo sapiens
tcaactacgcgtgta

SEQ ID NO: 1786975 - DNA, 15 bp, Homo sapiens
caactacgcgtgtaa

SEQ ID NO: 1786976 - DNA, 15 bp, Homo sapiens
aactacgcgtgtaaa

SEQ ID NO: 1786977 - DNA, 15 bp, Homo sapiens
actacgcgtgtaaat

SEQ ID NO: 1786978 - DNA, 15 bp, Homo sapiens
ctacgcgtgtaaatt

SEQ ID NO: 1786979 - DNA, 15 bp, Homo sapiens
tacgcgtgtaaattc

SEQ ID NO: 1786980 - DNA, 15 bp, Homo sapiens
acgcgtgtaaattct

SEQ ID NO: 1786981 - DNA, 15 bp, Homo sapiens
cgcgtgtaaattcta

SEQ ID NO: 1786982 - DNA, 15 bp, Homo sapiens
gcgtgtaaattctac

SEQ ID NO: 1786983 - DNA, 15 bp, Homo sapiens
cgtgtaaattctact

SEQ ID NO: 1786984 - DNA, 15 bp, Homo sapiens
gtgtaaattctactg

SEQ ID NO: 1786985 - DNA, 15 bp, Homo sapiens
tgtaaattctactgc

SEQ ID NO: 1786986 - DNA, 15 bp, Homo sapiens
gtaaattctactgca

SEQ ID NO: 1786987 - DNA, 15 bp, Homo sapiens
taaattctactgcaa

SEQ ID NO: 1786988 - DNA, 15 bp, Homo sapiens
aaattctactgcaaa

SEQ ID NO: 1786989 - DNA, 15 bp, Homo sapiens
aattctactgcaaat

SEQ ID NO: 1786990 - DNA, 15 bp, Homo sapiens
attctactgcaaatg

SEQ ID NO: 1786991 - DNA, 15 bp, Homo sapiens
ttctactgcaaatgc

SEQ ID NO: 1786992 - DNA, 15 bp, Homo sapiens
tctactgcaaatgca

SEQ ID NO: 1786993 - DNA, 15 bp, Homo sapiens
ctactgcaaatgcag

SEQ ID NO: 1786994 - DNA, 15 bp, Homo sapiens
tactgcaaatgcaga

SEQ ID NO: 1786995 - DNA, 15 bp, Homo sapiens
actgcaaatgcagag

SEQ ID NO: 1786996 - DNA, 15 bp, Homo sapiens
ctgcaaatgcagaga

SEQ ID NO: 1786997 - DNA, 15 bp, Homo sapiens
tgcaaatgcagagac

SEQ ID NO: 1786998 - DNA, 15 bp, Homo sapiens
gcaaatgcagagaca

SEQ ID NO: 1786999 - DNA, 15 bp, Homo sapiens
caaatgcagagacac

SEQ ID NO: 1787000 - DNA, 15 bp, Homo sapiens
aaatgcagagacaca

SEQ ID NO: 1787001 - DNA, 15 bp, Homo sapiens
aatgcagagacacaa

SEQ ID NO: 1787002 - DNA, 15 bp, Homo sapiens
atgcagagacacaag

SEQ ID NO: 1787003 - DNA, 15 bp, Homo sapiens
tgcagagacacaagc

SEQ ID NO: 1787004 - DNA, 15 bp, Homo sapiens
gcagagacacaagca

SEQ ID NO: 1787005 - DNA, 15 bp, Homo sapiens
cagagacacaagcaa

SEQ ID NO: 1787006 - DNA, 15 bp, Homo sapiens
agagacacaagcaac

SEQ ID NO: 1787007 - DNA, 15 bp, Homo sapiens
gagacacaagcaacc

SEQ ID NO: 1787008 - DNA, 15 bp, Homo sapiens
agacacaagcaacct

SEQ ID NO: 1787009 - DNA, 15 bp, Homo sapiens
gacacaagcaacctc

SEQ ID NO: 1787010 - DNA, 15 bp, Homo sapiens
acacaagcaacctca

SEQ ID NO: 1787011 - DNA, 15 bp, Homo sapiens
cacaagcaacctcag

SEQ ID NO: 1787012 - DNA, 15 bp, Homo sapiens
acaagcaacctcagc

SEQ ID NO: 1787013 - DNA, 15 bp, Homo sapiens
caagcaacctcagcc

SEQ ID NO: 1787014 - DNA, 15 bp, Homo sapiens
aagcaacctcagcct

SEQ ID NO: 1787015 - DNA, 15 bp, Homo sapiens
agcaacctcagcctt

SEQ ID NO: 1787016 - DNA, 15 bp, Homo sapiens
gcaacctcagccttc

SEQ ID NO: 1787017 - DNA, 15 bp, Homo sapiens
caacctcagccttcc

SEQ ID NO: 1787018 - DNA, 15 bp, Homo sapiens
aacctcagccttcca

SEQ ID NO: 1787019 - DNA, 15 bp, Homo sapiens
acctcagccttccag

SEQ ID NO: 1787020 - DNA, 15 bp, Homo sapiens
cctcagccttccaga

SEQ ID NO: 1787021 - DNA, 15 bp, Homo sapiens
ctcagccttccagac

SEQ ID NO: 1787022 - DNA, 15 bp, Homo sapiens
tcagccttccagacc

SEQ ID NO: 1787023 - DNA, 15 bp, Homo sapiens
cagccttccagaccc

SEQ ID NO: 1787024 - DNA, 15 bp, Homo sapiens
agccttccagaccca

SEQ ID NO: 1787025 - DNA, 15 bp, Homo sapiens
gccttccagacccag

SEQ ID NO: 1787026 - DNA, 15 bp, Homo sapiens
ccttccagacccaga

SEQ ID NO: 1787027 - DNA, 15 bp, Homo sapiens
cttccagacccagaa

SEQ ID NO: 1787028 - DNA, 15 bp, Homo sapiens
ttccagacccagaag

SEQ ID NO: 1787029 - DNA, 15 bp, Homo sapiens
tccagacccagaagc

SEQ ID NO: 1787030 - DNA, 15 bp, Homo sapiens
ccagacccagaagcc

SEQ ID NO: 1787031 - DNA, 15 bp, Homo sapiens
cagacccagaagcca

SEQ ID NO: 1787032 - DNA, 15 bp, Homo sapiens
agacccagaagccat

SEQ ID NO: 1787033 - DNA, 15 bp, Homo sapiens
gacccagaagccatt

SEQ ID NO: 1787034 - DNA, 15 bp, Homo sapiens
acccagaagccattg

SEQ ID NO: 1787035 - DNA, 15 bp, Homo sapiens
cccagaagccattga

SEQ ID NO: 1787036 - DNA, 15 bp, Homo sapiens
ccagaagccattgaa

SEQ ID NO: 1787037 - DNA, 15 bp, Homo sapiens
cagaagccattgaaa

SEQ ID NO: 1787038 - DNA, 15 bp, Homo sapiens
agaagccattgaaat

SEQ ID NO: 1787039 - DNA, 15 bp, Homo sapiens
gaagccattgaaatc

SEQ ID NO: 1787040 - DNA, 15 bp, Homo sapiens
aagccattgaaatct

SEQ ID NO: 1787041 - DNA, 15 bp, Homo sapiens
agccattgaaatcta

SEQ ID NO: 1787042 - DNA, 15 bp, Homo sapiens
gccattgaaatctac

SEQ ID NO: 1787043 - DNA, 15 bp, Homo sapiens
ccattgaaatctacc

SEQ ID NO: 1787044 - DNA, 15 bp, Homo sapiens
cattgaaatctacct

SEQ ID NO: 1787045 - DNA, 15 bp, Homo sapiens
attgaaatctacctc

SEQ ID NO: 1787046 - DNA, 15 bp, Homo sapiens
ttgaaatctacctct

SEQ ID NO: 1787047 - DNA, 15 bp, Homo sapiens
tgaaatctacctctc

SEQ ID NO: 1787048 - DNA, 15 bp, Homo sapiens
gaaatctacctctct

SEQ ID NO: 1787049 - DNA, 15 bp, Homo sapiens
aaatctacctctctt

SEQ ID NO: 1787050 - DNA, 15 bp, Homo sapiens
aatctacctctcttt

SEQ ID NO: 1787051 - DNA, 15 bp, Homo sapiens
atctacctctctttc

SEQ ID NO: 1787052 - DNA, 15 bp, Homo sapiens
tctacctctctttca

SEQ ID NO: 1787053 - DNA, 15 bp, Homo sapiens
ctacctctctttcac

SEQ ID NO: 1787054 - DNA, 15 bp, Homo sapiens
tacctctctttcact

SEQ ID NO: 1787055 - DNA, 15 bp, Homo sapiens
acctctctttcactg

SEQ ID NO: 1787056 - DNA, 15 bp, Homo sapiens
cctctctttcactgt

SEQ ID NO: 1787057 - DNA, 15 bp, Homo sapiens
ctctctttcactgtt

SEQ ID NO: 1787058 - DNA, 15 bp, Homo sapiens
tctctttcactgttt

SEQ ID NO: 1787059 - DNA, 15 bp, Homo sapiens
ctctttcactgtttt

SEQ ID NO: 1787060 - DNA, 15 bp, Homo sapiens
aaatctaatgtaatg

SEQ ID NO: 1787061 - DNA, 15 bp, Homo sapiens
aatctaatgtaatgg

SEQ ID NO: 1787062 - DNA, 15 bp, Homo sapiens
atctaatgtaatggg

SEQ ID NO: 1787063 - DNA, 15 bp, Homo sapiens
tctaatgtaatgggt

SEQ ID NO: 1787064 - DNA, 15 bp, Homo sapiens
ctaatgtaatgggtc

SEQ ID NO: 1787065 - DNA, 15 bp, Homo sapiens
taatgtaatgggtcc

SEQ ID NO: 1787066 - DNA, 15 bp, Homo sapiens
aatgtaatgggtcca

SEQ ID NO: 1787067 - DNA, 15 bp, Homo sapiens
atgtaatgggtccac

SEQ ID NO: 1787068 - DNA, 15 bp, Homo sapiens
tgtaatgggtccacc

SEQ ID NO: 1787069 - DNA, 15 bp, Homo sapiens
gtaatgggtccacca

SEQ ID NO: 1787070 - DNA, 15 bp, Homo sapiens
taatgggtccaccaa

SEQ ID NO: 1787071 - DNA, 15 bp, Homo sapiens
aatgggtccaccaaa

SEQ ID NO: 1787072 - DNA, 15 bp, Homo sapiens
atgggtccaccaaaa

SEQ ID NO: 1787073 - DNA, 15 bp, Homo sapiens
tgggtccaccaaaac

SEQ ID NO: 1787074 - DNA, 15 bp, Homo sapiens
gggtccaccaaaaca

SEQ ID NO: 1787075 - DNA, 15 bp, Homo sapiens
ggtccaccaaaacat

SEQ ID NO: 1787076 - DNA, 15 bp, Homo sapiens
gtccaccaaaacatt

SEQ ID NO: 1787077 - DNA, 15 bp, Homo sapiens
tccaccaaaacatta

SEQ ID NO: 1787078 - DNA, 15 bp, Homo sapiens
ccaccaaaacattaa

SEQ ID NO: 1787079 - DNA, 15 bp, Homo sapiens
caccaaaacattaaa

SEQ ID NO: 1787080 - DNA, 15 bp, Homo sapiens
accaaaacattaaat

SEQ ID NO: 1787081 - DNA, 15 bp, Homo sapiens
ccaaaacattaaata

SEQ ID NO: 1787082 - DNA, 15 bp, Homo sapiens
caaaacattaaataa

SEQ ID NO: 1787083 - DNA, 15 bp, Homo sapiens
aaaacattaaataaa

SEQ ID NO: 1787084 - DNA, 15 bp, Homo sapiens
aaacattaaataaat

SEQ ID NO: 1787085 - DNA, 15 bp, Homo sapiens
aacattaaataaata

SEQ ID NO: 1787086 - DNA, 15 bp, Homo sapiens
acattaaataaataa

SEQ ID NO: 1787087 - DNA, 15 bp, Homo sapiens
cattaaataaataat

SEQ ID NO: 1787088 - DNA, 15 bp, Homo sapiens
attaaataaataatc

SEQ ID NO: 1787089 - DNA, 15 bp, Homo sapiens
ttaaataaataatct

SEQ ID NO: 1787090 - DNA, 15 bp, Homo sapiens
taaataaataatcta

SEQ ID NO: 1787091 - DNA, 15 bp, Homo sapiens
aaataaataatctac

SEQ ID NO: 1787092 - DNA, 15 bp, Homo sapiens
aataaataatctact

SEQ ID NO: 1787093 - DNA, 15 bp, Homo sapiens
ataaataatctactt

SEQ ID NO: 1787094 - DNA, 15 bp, Homo sapiens
taaataatctacttt

SEQ ID NO: 1787095 - DNA, 15 bp, Homo sapiens
aaataatctactttt

SEQ ID NO: 1787096 - DNA, 15 bp, Homo sapiens
aataatctacttttt

SEQ ID NO: 1787097 - DNA, 15 bp, Homo sapiens
ataatctactttttt

SEQ ID NO: 1787098 - DNA, 15 bp, Homo sapiens
taatctacttttttg

SEQ ID NO: 1787099 - DNA, 15 bp, Homo sapiens
aatctacttttttgt

SEQ ID NO: 1787100 - DNA, 15 bp, Homo sapiens
atctacttttttgtt

SEQ ID NO: 1787101 - DNA, 15 bp, Homo sapiens
tctacttttttgttt

SEQ ID NO: 1787102 - DNA, 15 bp, Homo sapiens
ctacttttttgtttt

SEQ ID NO: 1787103 - DNA, 15 bp, Homo sapiens
tacttttttgttttt

SEQ ID NO: 1787104 - DNA, 15 bp, Homo sapiens
acttttttgtttttg

SEQ ID NO: 1787105 - DNA, 15 bp, Homo sapiens
cttttttgtttttgc

SEQ ID NO: 1787106 - DNA, 15 bp, Homo sapiens
ttttttgtttttgct

SEQ ID NO: 1787107 - DNA, 15 bp, Homo sapiens
tttttgtttttgctc

SEQ ID NO: 1787108 - DNA, 15 bp, Homo sapiens
ttttgtttttgctct

SEQ ID NO: 1787109 - DNA, 15 bp, Homo sapiens
tttgtttttgctcta

SEQ ID NO: 1787110 - DNA, 15 bp, Homo sapiens
ttgtttttgctctag

SEQ ID NO: 1787111 - DNA, 15 bp, Homo sapiens
tgtttttgctctagc

SEQ ID NO: 1787112 - DNA, 15 bp, Homo sapiens
gtttttgctctagcc

SEQ ID NO: 1787113 - DNA, 15 bp, Homo sapiens
tttttgctctagccc

SEQ ID NO: 1787114 - DNA, 15 bp, Homo sapiens
ttttgctctagcccc

SEQ ID NO: 1787115 - DNA, 15 bp, Homo sapiens
tttgctctagccccc

SEQ ID NO: 1787116 - DNA, 15 bp, Homo sapiens
ttgctctagccccct

SEQ ID NO: 1787117 - DNA, 15 bp, Homo sapiens
tgctctagcccccta

SEQ ID NO: 1787118 - DNA, 15 bp, Homo sapiens
gctctagccccctac

SEQ ID NO: 1787119 - DNA, 15 bp, Homo sapiens
ctctagccccctacc

SEQ ID NO: 1787120 - DNA, 15 bp, Homo sapiens
tctagccccctacct

SEQ ID NO: 1787121 - DNA, 15 bp, Homo sapiens
ctagccccctacctt

SEQ ID NO: 1787122 - DNA, 15 bp, Homo sapiens
tagccccctaccttg

SEQ ID NO: 1787123 - DNA, 15 bp, Homo sapiens
agccccctaccttgt

SEQ ID NO: 1787124 - DNA, 15 bp, Homo sapiens
gccccctaccttgtc

SEQ ID NO: 1787125 - DNA, 15 bp, Homo sapiens
ccccctaccttgtca

SEQ ID NO: 1787126 - DNA, 15 bp, Homo sapiens
cccctaccttgtcac

SEQ ID NO: 1787127 - DNA, 15 bp, Homo sapiens
ccctaccttgtcacc

SEQ ID NO: 1787128 - DNA, 15 bp, Homo sapiens
cctaccttgtcacca

SEQ ID NO: 1787129 - DNA, 15 bp, Homo sapiens
ctaccttgtcaccaa

SEQ ID NO: 1787130 - DNA, 15 bp, Homo sapiens
taccttgtcaccaat

SEQ ID NO: 1787131 - DNA, 15 bp, Homo sapiens
accttgtcaccaata

SEQ ID NO: 1787132 - DNA, 15 bp, Homo sapiens
ccttgtcaccaatac

SEQ ID NO: 1787133 - DNA, 15 bp, Homo sapiens
cttgtcaccaatacc

SEQ ID NO: 1787134 - DNA, 15 bp, Homo sapiens
ttgtcaccaatacct

SEQ ID NO: 1787135 - DNA, 15 bp, Homo sapiens
tgtcaccaatacctc

SEQ ID NO: 1787136 - DNA, 15 bp, Homo sapiens
gtcaccaatacctca

SEQ ID NO: 1787137 - DNA, 15 bp, Homo sapiens
tcaccaatacctcac

SEQ ID NO: 1787138 - DNA, 15 bp, Homo sapiens
caccaatacctcaca

SEQ ID NO: 1787139 - DNA, 15 bp, Homo sapiens
accaatacctcacat

SEQ ID NO: 1787140 - DNA, 15 bp, Homo sapiens
ccaatacctcacatt

SEQ ID NO: 1787141 - DNA, 15 bp, Homo sapiens
caatacctcacattc

SEQ ID NO: 1787142 - DNA, 15 bp, Homo sapiens
aatacctcacattcc

SEQ ID NO: 1787143 - DNA, 15 bp, Homo sapiens
atacctcacattcct

SEQ ID NO: 1787144 - DNA, 15 bp, Homo sapiens
tacctcacattcctc

SEQ ID NO: 1787145 - DNA, 15 bp, Homo sapiens
acctcacattcctcg

SEQ ID NO: 1787146 - DNA, 15 bp, Homo sapiens
cctcacattcctcga

SEQ ID NO: 1787147 - DNA, 15 bp, Homo sapiens
ctcacattcctcgaa

SEQ ID NO: 1787148 - DNA, 15 bp, Homo sapiens
tcacattcctcgaag

SEQ ID NO: 1787149 - DNA, 15 bp, Homo sapiens
cacattcctcgaagc

SEQ ID NO: 1787150 - DNA, 15 bp, Homo sapiens
acattcctcgaagcc

SEQ ID NO: 1787151 - DNA, 15 bp, Homo sapiens
cattcctcgaagccc

SEQ ID NO: 1787152 - DNA, 15 bp, Homo sapiens
attcctcgaagccct

SEQ ID NO: 1787153 - DNA, 15 bp, Homo sapiens
ttcctcgaagccctt

SEQ ID NO: 1787154 - DNA, 15 bp, Homo sapiens
tcctcgaagccctta

SEQ ID NO: 1787155 - DNA, 15 bp, Homo sapiens
cctcgaagcccttac

SEQ ID NO: 1787156 - DNA, 15 bp, Homo sapiens
ctcgaagcccttaca

SEQ ID NO: 1787157 - DNA, 15 bp, Homo sapiens
tcgaagcccttacaa

SEQ ID NO: 1787158 - DNA, 15 bp, Homo sapiens
cgaagcccttacaag

SEQ ID NO: 1787159 - DNA, 15 bp, Homo sapiens
gaagcccttacaagt

SEQ ID NO: 1787160 - DNA, 15 bp, Homo sapiens
aagcccttacaagtt

SEQ ID NO: 1787161 - DNA, 15 bp, Homo sapiens
agcccttacaagttt

SEQ ID NO: 1787162 - DNA, 15 bp, Homo sapiens
gcccttacaagtttc

SEQ ID NO: 1787163 - DNA, 15 bp, Homo sapiens
cccttacaagtttcc

SEQ ID NO: 1787164 - DNA, 15 bp, Homo sapiens
ccttacaagtttcct

SEQ ID NO: 1787165 - DNA, 15 bp, Homo sapiens
cttacaagtttccta

SEQ ID NO: 1787166 - DNA, 15 bp, Homo sapiens
ttacaagtttcctag

SEQ ID NO: 1787167 - DNA, 15 bp, Homo sapiens
tacaagtttcctagt

SEQ ID NO: 1787168 - DNA, 15 bp, Homo sapiens
acaagtttcctagtt

SEQ ID NO: 1787169 - DNA, 15 bp, Homo sapiens
caagtttcctagttc

SEQ ID NO: 1787170 - DNA, 15 bp, Homo sapiens
aagtttcctagttca

SEQ ID NO: 1787171 - DNA, 15 bp, Homo sapiens
agtttcctagttcac

SEQ ID NO: 1787172 - DNA, 15 bp, Homo sapiens
gtttcctagttcacc

SEQ ID NO: 1787173 - DNA, 15 bp, Homo sapiens
tttcctagttcaccc

SEQ ID NO: 1787174 - DNA, 15 bp, Homo sapiens
ttcctagttcaccct

SEQ ID NO: 1787175 - DNA, 15 bp, Homo sapiens
tcctagttcaccctt

SEQ ID NO: 1787176 - DNA, 15 bp, Homo sapiens
cctagttcaccctta

SEQ ID NO: 1787177 - DNA, 15 bp, Homo sapiens
ctagttcacccttac

SEQ ID NO: 1787178 - DNA, 15 bp, Homo sapiens
tagttcacccttacg

SEQ ID NO: 1787179 - DNA, 15 bp, Homo sapiens
agttcacccttacgg

SEQ ID NO: 1787180 - DNA, 15 bp, Homo sapiens
gttcacccttacgga

SEQ ID NO: 1787181 - DNA, 15 bp, Homo sapiens
ttcacccttacggat

SEQ ID NO: 1787182 - DNA, 15 bp, Homo sapiens
tcacccttacggatt

SEQ ID NO: 1787183 - DNA, 15 bp, Homo sapiens
cacccttacggattc

SEQ ID NO: 1787184 - DNA, 15 bp, Homo sapiens
acccttacggattcc

SEQ ID NO: 1787185 - DNA, 15 bp, Homo sapiens
cccttacggattcct

SEQ ID NO: 1787186 - DNA, 15 bp, Homo sapiens
ccttacggattcctg

SEQ ID NO: 1787187 - DNA, 15 bp, Homo sapiens
cttacggattcctgg

SEQ ID NO: 1787188 - DNA, 15 bp, Homo sapiens
ttacggattcctgga

SEQ ID NO: 1787189 - DNA, 15 bp, Homo sapiens
tacggattcctggag

SEQ ID NO: 1787190 - DNA, 15 bp, Homo sapiens
acggattcctggagg

SEQ ID NO: 1787191 - DNA, 15 bp, Homo sapiens
cggattcctggaggg

SEQ ID NO: 1787192 - DNA, 15 bp, Homo sapiens
ggattcctggaggga

SEQ ID NO: 1787193 - DNA, 15 bp, Homo sapiens
gattcctggagggaa

SEQ ID NO: 1787194 - DNA, 15 bp, Homo sapiens
attcctggagggaac

SEQ ID NO: 1787195 - DNA, 15 bp, Homo sapiens
ttcctggagggaaca

SEQ ID NO: 1787196 - DNA, 15 bp, Homo sapiens
tcctggagggaacat

SEQ ID NO: 1787197 - DNA, 15 bp, Homo sapiens
cctggagggaacatc

SEQ ID NO: 1787198 - DNA, 15 bp, Homo sapiens
ctggagggaacatct

SEQ ID NO: 1787199 - DNA, 15 bp, Homo sapiens
tggagggaacatcta

SEQ ID NO: 1787200 - DNA, 15 bp, Homo sapiens
ggagggaacatctat

SEQ ID NO: 1787201 - DNA, 15 bp, Homo sapiens
gagggaacatctata

SEQ ID NO: 1787202 - DNA, 15 bp, Homo sapiens
agggaacatctatat

SEQ ID NO: 1787203 - DNA, 15 bp, Homo sapiens
gggaacatctatatt

SEQ ID NO: 1787204 - DNA, 15 bp, Homo sapiens
ggaacatctatattt

SEQ ID NO: 1787205 - DNA, 15 bp, Homo sapiens
gaacatctatatttc

SEQ ID NO: 1787206 - DNA, 15 bp, Homo sapiens
aacatctatatttca

SEQ ID NO: 1787207 - DNA, 15 bp, Homo sapiens
acatctatatttcac

SEQ ID NO: 1787208 - DNA, 15 bp, Homo sapiens
catctatatttcacc

SEQ ID NO: 1787209 - DNA, 15 bp, Homo sapiens
atctatatttcaccc

SEQ ID NO: 1787210 - DNA, 15 bp, Homo sapiens
tctatatttcacccc

SEQ ID NO: 1787211 - DNA, 15 bp, Homo sapiens
ctatatttcacccct

SEQ ID NO: 1787212 - DNA, 15 bp, Homo sapiens
tatatttcacccctg

SEQ ID NO: 1787213 - DNA, 15 bp, Homo sapiens
atatttcacccctga

SEQ ID NO: 1787214 - DNA, 15 bp, Homo sapiens
tatttcacccctgaa

SEQ ID NO: 1787215 - DNA, 15 bp, Homo sapiens
atttcacccctgaag

SEQ ID NO: 1787216 - DNA, 15 bp, Homo sapiens
tttcacccctgaaga

SEQ ID NO: 1787217 - DNA, 15 bp, Homo sapiens
ttcacccctgaagag

SEQ ID NO: 1787218 - DNA, 15 bp, Homo sapiens
tcacccctgaagagt

SEQ ID NO: 1787219 - DNA, 15 bp, Homo sapiens
cacccctgaagagtc

SEQ ID NO: 1787220 - DNA, 15 bp, Homo sapiens
acccctgaagagtcc

SEQ ID NO: 1787221 - DNA, 15 bp, Homo sapiens
cccctgaagagtcca

SEQ ID NO: 1787222 - DNA, 15 bp, Homo sapiens
ccctgaagagtccat

SEQ ID NO: 1787223 - DNA, 15 bp, Homo sapiens
cctgaagagtccata

SEQ ID NO: 1787224 - DNA, 15 bp, Homo sapiens
ctgaagagtccatat

SEQ ID NO: 1787225 - DNA, 15 bp, Homo sapiens
tgaagagtccatata

SEQ ID NO: 1787226 - DNA, 15 bp, Homo sapiens
gaagagtccatataa

SEQ ID NO: 1787227 - DNA, 15 bp, Homo sapiens
aagagtccatataaa

SEQ ID NO: 1787228 - DNA, 15 bp, Homo sapiens
agagtccatataaaa

SEQ ID NO: 1787229 - DNA, 15 bp, Homo sapiens
gagtccatataaaat

SEQ ID NO: 1787230 - DNA, 15 bp, Homo sapiens
agtccatataaaatt

SEQ ID NO: 1787231 - DNA, 15 bp, Homo sapiens
gtccatataaaattt

SEQ ID NO: 1787232 - DNA, 15 bp, Homo sapiens
tccatataaaatttc

SEQ ID NO: 1787233 - DNA, 15 bp, Homo sapiens
ccatataaaatttca

SEQ ID NO: 1787234 - DNA, 15 bp, Homo sapiens
catataaaatttcag

SEQ ID NO: 1787235 - DNA, 15 bp, Homo sapiens
atataaaatttcaga

SEQ ID NO: 1787236 - DNA, 15 bp, Homo sapiens
tataaaatttcagaa

SEQ ID NO: 1787237 - DNA, 15 bp, Homo sapiens
ataaaatttcagaag

SEQ ID NO: 1787238 - DNA, 15 bp, Homo sapiens
taaaatttcagaagg

SEQ ID NO: 1787239 - DNA, 15 bp, Homo sapiens
aaaatttcagaaggt

SEQ ID NO: 1787240 - DNA, 15 bp, Homo sapiens
aaatttcagaaggtc

SEQ ID NO: 1787241 - DNA, 15 bp, Homo sapiens
aatttcagaaggtct

SEQ ID NO: 1787242 - DNA, 15 bp, Homo sapiens
atttcagaaggtctg

SEQ ID NO: 1787243 - DNA, 15 bp, Homo sapiens
tttcagaaggtctgc

SEQ ID NO: 1787244 - DNA, 15 bp, Homo sapiens
ttcagaaggtctgcc

SEQ ID NO: 1787245 - DNA, 15 bp, Homo sapiens
tcagaaggtctgcca

SEQ ID NO: 1787246 - DNA, 15 bp, Homo sapiens
cagaaggtctgccaa

SEQ ID NO: 1787247 - DNA, 15 bp, Homo sapiens
agaaggtctgccaac

SEQ ID NO: 1787248 - DNA, 15 bp, Homo sapiens
gaaggtctgccaaca

SEQ ID NO: 1787249 - DNA, 15 bp, Homo sapiens
aaggtctgccaacac

SEQ ID NO: 1787250 - DNA, 15 bp, Homo sapiens
aggtctgccaacacc

SEQ ID NO: 1787251 - DNA, 15 bp, Homo sapiens
ggtctgccaacacca

SEQ ID NO: 1787252 - DNA, 15 bp, Homo sapiens
gtctgccaacaccaa

SEQ ID NO: 1787253 - DNA, 15 bp, Homo sapiens
tctgccaacaccaac

SEQ ID NO: 1787254 - DNA, 15 bp, Homo sapiens
ctgccaacaccaaca

SEQ ID NO: 1787255 - DNA, 15 bp, Homo sapiens
tgccaacaccaacaa

SEQ ID NO: 1787256 - DNA, 15 bp, Homo sapiens
gccaacaccaacaaa

SEQ ID NO: 1787257 - DNA, 15 bp, Homo sapiens
ccaacaccaacaaaa

SEQ ID NO: 1787258 - DNA, 15 bp, Homo sapiens
caacaccaacaaaaa

SEQ ID NO: 1787259 - DNA, 15 bp, Homo sapiens
aacaccaacaaaaat

SEQ ID NO: 1787260 - DNA, 15 bp, Homo sapiens
acaccaacaaaaatg

SEQ ID NO: 1787261 - DNA, 15 bp, Homo sapiens
caccaacaaaaatga

SEQ ID NO: 1787262 - DNA, 15 bp, Homo sapiens
accaacaaaaatgac

SEQ ID NO: 1787263 - DNA, 15 bp, Homo sapiens
ccaacaaaaatgact

SEQ ID NO: 1787264 - DNA, 15 bp, Homo sapiens
caacaaaaatgactc

SEQ ID NO: 1787265 - DNA, 15 bp, Homo sapiens
aacaaaaatgactcc

SEQ ID NO: 1787266 - DNA, 15 bp, Homo sapiens
acaaaaatgactcca

SEQ ID NO: 1787267 - DNA, 15 bp, Homo sapiens
caaaaatgactccaa

SEQ ID NO: 1787268 - DNA, 15 bp, Homo sapiens
aaaaatgactccaag

SEQ ID NO: 1787269 - DNA, 15 bp, Homo sapiens
aaaatgactccaaga

SEQ ID NO: 1787270 - DNA, 15 bp, Homo sapiens
aaatgactccaagat

SEQ ID NO: 1787271 - DNA, 15 bp, Homo sapiens
aatgactccaagatc

SEQ ID NO: 1787272 - DNA, 15 bp, Homo sapiens
atgactccaagatca

SEQ ID NO: 1787273 - DNA, 15 bp, Homo sapiens
tgactccaagatcaa

SEQ ID NO: 1787274 - DNA, 15 bp, Homo sapiens
gactccaagatcaag

SEQ ID NO: 1787275 - DNA, 15 bp, Homo sapiens
actccaagatcaagg

SEQ ID NO: 1787276 - DNA, 15 bp, Homo sapiens
ctccaagatcaaggt

SEQ ID NO: 1787277 - DNA, 15 bp, Homo sapiens
tccaagatcaaggtg

SEQ ID NO: 1787278 - DNA, 15 bp, Homo sapiens
ccaagatcaaggtgt

SEQ ID NO: 1787279 - DNA, 15 bp, Homo sapiens
caagatcaaggtgtg

SEQ ID NO: 1787280 - DNA, 15 bp, Homo sapiens
aagatcaaggtgtgt

SEQ ID NO: 1787281 - DNA, 15 bp, Homo sapiens
agatcaaggtgtgtg

SEQ ID NO: 1787282 - DNA, 15 bp, Homo sapiens
gatcaaggtgtgtgt

SEQ ID NO: 1787283 - DNA, 15 bp, Homo sapiens
atcaaggtgtgtgtt

SEQ ID NO: 1787284 - DNA, 15 bp, Homo sapiens
tcaaggtgtgtgttt

SEQ ID NO: 1787285 - DNA, 15 bp, Homo sapiens
caaggtgtgtgtttt

SEQ ID NO: 1787286 - DNA, 15 bp, Homo sapiens
aaggtgtgtgttttc

SEQ ID NO: 1787287 - DNA, 15 bp, Homo sapiens
aggtgtgtgttttct

SEQ ID NO: 1787288 - DNA, 15 bp, Homo sapiens
ggtgtgtgttttctc

SEQ ID NO: 1787289 - DNA, 15 bp, Homo sapiens
gtgtgtgttttctct

SEQ ID NO: 1787290 - DNA, 15 bp, Homo sapiens
tgtgtgttttctctt

SEQ ID NO: 1787291 - DNA, 15 bp, Homo sapiens
gtgtgttttctcttt

SEQ ID NO: 1787292 - DNA, 15 bp, Homo sapiens
tgtgttttctcttta

SEQ ID NO: 1787293 - DNA, 15 bp, Homo sapiens
gtgttttctctttag

SEQ ID NO: 1787294 - DNA, 15 bp, Homo sapiens
tgttttctctttagg

SEQ ID NO: 1787295 - DNA, 15 bp, Homo sapiens
gttttctctttaggg

SEQ ID NO: 1787296 - DNA, 15 bp, Homo sapiens
ttttctctttaggga

SEQ ID NO: 1787297 - DNA, 15 bp, Homo sapiens
tttctctttagggaa

SEQ ID NO: 1787298 - DNA, 15 bp, Homo sapiens
ttctctttagggaag

SEQ ID NO: 1787299 - DNA, 15 bp, Homo sapiens
tctctttagggaagt

SEQ ID NO: 1787300 - DNA, 15 bp, Homo sapiens
ctctttagggaagta

SEQ ID NO: 1787301 - DNA, 15 bp, Homo sapiens
tctttagggaagtag

SEQ ID NO: 1787302 - DNA, 15 bp, Homo sapiens
ctttagggaagtagt

SEQ ID NO: 1787303 - DNA, 15 bp, Homo sapiens
tttagggaagtagta

SEQ ID NO: 1787304 - DNA, 15 bp, Homo sapiens
ttagggaagtagtaa

SEQ ID NO: 1787305 - DNA, 15 bp, Homo sapiens
tagggaagtagtaaa

SEQ ID NO: 1787306 - DNA, 15 bp, Homo sapiens
agggaagtagtaaag

SEQ ID NO: 1787307 - DNA, 15 bp, Homo sapiens
gggaagtagtaaaga

SEQ ID NO: 1787308 - DNA, 15 bp, Homo sapiens
ggaagtagtaaagaa

SEQ ID NO: 1787309 - DNA, 15 bp, Homo sapiens
gaagtagtaaagaat

SEQ ID NO: 1787310 - DNA, 15 bp, Homo sapiens
aagtagtaaagaatg

SEQ ID NO: 1787311 - DNA, 15 bp, Homo sapiens
agtagtaaagaatga

SEQ ID NO: 1787312 - DNA, 15 bp, Homo sapiens
gtagtaaagaatgag

SEQ ID NO: 1787313 - DNA, 15 bp, Homo sapiens
tagtaaagaatgaga

SEQ ID NO: 1787314 - DNA, 15 bp, Homo sapiens
agtaaagaatgagag

SEQ ID NO: 1787315 - DNA, 15 bp, Homo sapiens
gtaaagaatgagagg

SEQ ID NO: 1787316 - DNA, 15 bp, Homo sapiens
taaagaatgagaggg

SEQ ID NO: 1787317 - DNA, 15 bp, Homo sapiens
aaagaatgagagggg

SEQ ID NO: 1787318 - DNA, 15 bp, Homo sapiens
aagaatgagaggggg

SEQ ID NO: 1787319 - DNA, 15 bp, Homo sapiens
agaatgagaggggga

SEQ ID NO: 1787320 - DNA, 15 bp, Homo sapiens
gaatgagagggggat

SEQ ID NO: 1787321 - DNA, 15 bp, Homo sapiens
aatgagagggggatt

SEQ ID NO: 1787322 - DNA, 15 bp, Homo sapiens
atgagagggggatta

SEQ ID NO: 1787323 - DNA, 15 bp, Homo sapiens
tgagagggggattat

SEQ ID NO: 1787324 - DNA, 15 bp, Homo sapiens
gagagggggattatt

SEQ ID NO: 1787325 - DNA, 15 bp, Homo sapiens
agagggggattattt

SEQ ID NO: 1787326 - DNA, 15 bp, Homo sapiens
gagggggattatttt

SEQ ID NO: 1787327 - DNA, 15 bp, Homo sapiens
agggggattattttg

SEQ ID NO: 1787328 - DNA, 15 bp, Homo sapiens
gggggattattttga

SEQ ID NO: 1787329 - DNA, 15 bp, Homo sapiens
ggggattattttgat

SEQ ID NO: 1787330 - DNA, 15 bp, Homo sapiens
gggattattttgatc

SEQ ID NO: 1787331 - DNA, 15 bp, Homo sapiens
ggattattttgatcc

SEQ ID NO: 1787332 - DNA, 15 bp, Homo sapiens
gattattttgatcca

SEQ ID NO: 1787333 - DNA, 15 bp, Homo sapiens
attattttgatccaa

SEQ ID NO: 1787334 - DNA, 15 bp, Homo sapiens
ttattttgatccaag

SEQ ID NO: 1787335 - DNA, 15 bp, Homo sapiens
tattttgatccaaga

SEQ ID NO: 1787336 - DNA, 15 bp, Homo sapiens
attttgatccaagaa

SEQ ID NO: 1787337 - DNA, 15 bp, Homo sapiens
ttttgatccaagaat

SEQ ID NO: 1787338 - DNA, 15 bp, Homo sapiens
tttgatccaagaata

SEQ ID NO: 1787339 - DNA, 15 bp, Homo sapiens
ttgatccaagaataa

SEQ ID NO: 1787340 - DNA, 15 bp, Homo sapiens
tgatccaagaataaa

SEQ ID NO: 1787341 - DNA, 15 bp, Homo sapiens
gatccaagaataaaa

SEQ ID NO: 1787342 - DNA, 15 bp, Homo sapiens
atccaagaataaaaa

SEQ ID NO: 1787343 - DNA, 15 bp, Homo sapiens
tccaagaataaaaaa

SEQ ID NO: 1787344 - DNA, 15 bp, Homo sapiens
ccaagaataaaaaat

SEQ ID NO: 1787345 - DNA, 15 bp, Homo sapiens
caagaataaaaaata

SEQ ID NO: 1787346 - DNA, 15 bp, Homo sapiens
aagaataaaaaatat

SEQ ID NO: 1787347 - DNA, 15 bp, Homo sapiens
agaataaaaaatata

SEQ ID NO: 1787348 - DNA, 15 bp, Homo sapiens
gaataaaaaatataa

SEQ ID NO: 1787349 - DNA, 15 bp, Homo sapiens
aataaaaaatataaa

SEQ ID NO: 1787350 - DNA, 15 bp, Homo sapiens
ataaaaaatataaag

SEQ ID NO: 1787351 - DNA, 15 bp, Homo sapiens
taaaaaatataaagc

SEQ ID NO: 1787352 - DNA, 15 bp, Homo sapiens
aaaaaatataaagca

SEQ ID NO: 1787353 - DNA, 15 bp, Homo sapiens
aaaaatataaagcat

SEQ ID NO: 1787354 - DNA, 15 bp, Homo sapiens
aaaatataaagcatt

SEQ ID NO: 1787355 - DNA, 15 bp, Homo sapiens
aaatataaagcattc

SEQ ID NO: 1787356 - DNA, 15 bp, Homo sapiens
aatataaagcattct

SEQ ID NO: 1787357 - DNA, 15 bp, Homo sapiens
atataaagcattctt

SEQ ID NO: 1787358 - DNA, 15 bp, Homo sapiens
tataaagcattcttc

SEQ ID NO: 1787359 - DNA, 15 bp, Homo sapiens
ataaagcattcttca

SEQ ID NO: 1787360 - DNA, 15 bp, Homo sapiens
taaagcattcttcat

SEQ ID NO: 1787361 - DNA, 15 bp, Homo sapiens
aaagcattcttcatt

SEQ ID NO: 1787362 - DNA, 15 bp, Homo sapiens
aagcattcttcattt

SEQ ID NO: 1787363 - DNA, 15 bp, Homo sapiens
agcattcttcatttc

SEQ ID NO: 1787364 - DNA, 15 bp, Homo sapiens
gcattcttcatttca

SEQ ID NO: 1787365 - DNA, 15 bp, Homo sapiens
cattcttcatttcaa

SEQ ID NO: 1787366 - DNA, 15 bp, Homo sapiens
attcttcatttcaaa

SEQ ID NO: 1787367 - DNA, 15 bp, Homo sapiens
ttcttcatttcaaat

SEQ ID NO: 1787368 - DNA, 15 bp, Homo sapiens
tcttcatttcaaata

SEQ ID NO: 1787369 - DNA, 15 bp, Homo sapiens
cttcatttcaaataa

SEQ ID NO: 1787370 - DNA, 15 bp, Homo sapiens
ttcatttcaaataag

SEQ ID NO: 1787371 - DNA, 15 bp, Homo sapiens
tcatttcaaataagc

SEQ ID NO: 1787372 - DNA, 15 bp, Homo sapiens
catttcaaataagct

SEQ ID NO: 1787373 - DNA, 15 bp, Homo sapiens
atttcaaataagcta

SEQ ID NO: 1787374 - DNA, 15 bp, Homo sapiens
tttcaaataagctag

SEQ ID NO: 1787375 - DNA, 15 bp, Homo sapiens
ttcaaataagctaga

SEQ ID NO: 1787376 - DNA, 15 bp, Homo sapiens
tcaaataagctagac

SEQ ID NO: 1787377 - DNA, 15 bp, Homo sapiens
caaataagctagact

SEQ ID NO: 1787378 - DNA, 15 bp, Homo sapiens
aaataagctagactc

SEQ ID NO: 1787379 - DNA, 15 bp, Homo sapiens
aataagctagactct

SEQ ID NO: 1787380 - DNA, 15 bp, Homo sapiens
ataagctagactctt

SEQ ID NO: 1787381 - DNA, 15 bp, Homo sapiens
taagctagactcttg

SEQ ID NO: 1787382 - DNA, 15 bp, Homo sapiens
aagctagactcttga

SEQ ID NO: 1787383 - DNA, 15 bp, Homo sapiens
agctagactcttgaa

SEQ ID NO: 1787384 - DNA, 15 bp, Homo sapiens
gctagactcttgaaa

SEQ ID NO: 1787385 - DNA, 15 bp, Homo sapiens
ctagactcttgaaac

SEQ ID NO: 1787386 - DNA, 15 bp, Homo sapiens
tagactcttgaaact

SEQ ID NO: 1787387 - DNA, 15 bp, Homo sapiens
agactcttgaaactc

SEQ ID NO: 1787388 - DNA, 15 bp, Homo sapiens
gactcttgaaactct

SEQ ID NO: 1787389 - DNA, 15 bp, Homo sapiens
actcttgaaactcta

SEQ ID NO: 1787390 - DNA, 15 bp, Homo sapiens
ctcttgaaactctat

SEQ ID NO: 1787391 - DNA, 15 bp, Homo sapiens
tcttgaaactctatt

SEQ ID NO: 1787392 - DNA, 15 bp, Homo sapiens
cttgaaactctattt

SEQ ID NO: 1787393 - DNA, 15 bp, Homo sapiens
ttgaaactctatttg

SEQ ID NO: 1787394 - DNA, 15 bp, Homo sapiens
tgaaactctatttgc

SEQ ID NO: 1787395 - DNA, 15 bp, Homo sapiens
gaaactctatttgct

SEQ ID NO: 1787396 - DNA, 15 bp, Homo sapiens
aaactctatttgctt

SEQ ID NO: 1787397 - DNA, 15 bp, Homo sapiens
aactctatttgctta

SEQ ID NO: 1787398 - DNA, 15 bp, Homo sapiens
actctatttgcttat

SEQ ID NO: 1787399 - DNA, 15 bp, Homo sapiens
ctctatttgcttatt

SEQ ID NO: 1787400 - DNA, 15 bp, Homo sapiens
tctatttgcttattt

SEQ ID NO: 1787401 - DNA, 15 bp, Homo sapiens
ctatttgcttattta

SEQ ID NO: 1787402 - DNA, 15 bp, Homo sapiens
tatttgcttatttaa

SEQ ID NO: 1787403 - DNA, 15 bp, Homo sapiens
atttgcttatttaag

SEQ ID NO: 1787404 - DNA, 15 bp, Homo sapiens
tttgcttatttaagt

SEQ ID NO: 1787405 - DNA, 15 bp, Homo sapiens
ttgcttatttaagta

SEQ ID NO: 1787406 - DNA, 15 bp, Homo sapiens
tgcttatttaagtaa

SEQ ID NO: 1787407 - DNA, 15 bp, Homo sapiens
gcttatttaagtaac

SEQ ID NO: 1787408 - DNA, 15 bp, Homo sapiens
cttatttaagtaaca

SEQ ID NO: 1787409 - DNA, 15 bp, Homo sapiens
ttatttaagtaacat

SEQ ID NO: 1787410 - DNA, 15 bp, Homo sapiens
tatttaagtaacata

SEQ ID NO: 1787411 - DNA, 15 bp, Homo sapiens
atttaagtaacataa

SEQ ID NO: 1787412 - DNA, 15 bp, Homo sapiens
tttaagtaacataat

SEQ ID NO: 1787413 - DNA, 15 bp, Homo sapiens
ttaagtaacataata

SEQ ID NO: 1787414 - DNA, 15 bp, Homo sapiens
taagtaacataataa

SEQ ID NO: 1787415 - DNA, 15 bp, Homo sapiens
aagtaacataataag

SEQ ID NO: 1787416 - DNA, 15 bp, Homo sapiens
agtaacataataaga

SEQ ID NO: 1787417 - DNA, 15 bp, Homo sapiens
gtaacataataagaa

SEQ ID NO: 1787418 - DNA, 15 bp, Homo sapiens
taacataataagaat

SEQ ID NO: 1787419 - DNA, 15 bp, Homo sapiens
aacataataagaata

SEQ ID NO: 1787420 - DNA, 15 bp, Homo sapiens
acataataagaatat

SEQ ID NO: 1787421 - DNA, 15 bp, Homo sapiens
cataataagaatatg

SEQ ID NO: 1787422 - DNA, 15 bp, Homo sapiens
ataataagaatatgg

SEQ ID NO: 1787423 - DNA, 15 bp, Homo sapiens
taataagaatatggg

SEQ ID NO: 1787424 - DNA, 15 bp, Homo sapiens
aataagaatatgggg

SEQ ID NO: 1787425 - DNA, 15 bp, Homo sapiens
ataagaatatggggg

SEQ ID NO: 1787426 - DNA, 15 bp, Homo sapiens
taagaatatgggggc

SEQ ID NO: 1787427 - DNA, 15 bp, Homo sapiens
aagaatatgggggcg

SEQ ID NO: 1787428 - DNA, 15 bp, Homo sapiens
agaatatgggggcgg

SEQ ID NO: 1787429 - DNA, 15 bp, Homo sapiens
gaatatgggggcggg

SEQ ID NO: 1787430 - DNA, 15 bp, Homo sapiens
aatatgggggcgggg

SEQ ID NO: 1787431 - DNA, 15 bp, Homo sapiens
atatgggggcggggt

SEQ ID NO: 1787432 - DNA, 15 bp, Homo sapiens
tatgggggcggggtg

SEQ ID NO: 1787433 - DNA, 15 bp, Homo sapiens
atgggggcggggtga

SEQ ID NO: 1787434 - DNA, 15 bp, Homo sapiens
tgggggcggggtgaa

SEQ ID NO: 1787435 - DNA, 15 bp, Homo sapiens
gggggcggggtgaag

SEQ ID NO: 1787436 - DNA, 15 bp, Homo sapiens
ggggcggggtgaaga

SEQ ID NO: 1787437 - DNA, 15 bp, Homo sapiens
gggcggggtgaagaa

SEQ ID NO: 1787438 - DNA, 15 bp, Homo sapiens
ggcggggtgaagaaa

SEQ ID NO: 1787439 - DNA, 15 bp, Homo sapiens
gcggggtgaagaaaa

SEQ ID NO: 1787440 - DNA, 15 bp, Homo sapiens
cggggtgaagaaaat

SEQ ID NO: 1787441 - DNA, 15 bp, Homo sapiens
ggggtgaagaaaatc

SEQ ID NO: 1787442 - DNA, 15 bp, Homo sapiens
gggtgaagaaaatct

SEQ ID NO: 1787443 - DNA, 15 bp, Homo sapiens
ggtgaagaaaatcta

SEQ ID NO: 1787444 - DNA, 15 bp, Homo sapiens
gtgaagaaaatctat

SEQ ID NO: 1787445 - DNA, 15 bp, Homo sapiens
tgaagaaaatctatt

SEQ ID NO: 1787446 - DNA, 15 bp, Homo sapiens
gaagaaaatctattt

SEQ ID NO: 1787447 - DNA, 15 bp, Homo sapiens
aagaaaatctattta

SEQ ID NO: 1787448 - DNA, 15 bp, Homo sapiens
agaaaatctatttac

SEQ ID NO: 1787449 - DNA, 15 bp, Homo sapiens
gaaaatctatttacg

SEQ ID NO: 1787450 - DNA, 15 bp, Homo sapiens
aaaatctatttacga

SEQ ID NO: 1787451 - DNA, 15 bp, Homo sapiens
aaatctatttacgac

SEQ ID NO: 1787452 - DNA, 15 bp, Homo sapiens
aatctatttacgact

SEQ ID NO: 1787453 - DNA, 15 bp, Homo sapiens
atctatttacgactt

SEQ ID NO: 1787454 - DNA, 15 bp, Homo sapiens
tctatttacgactta

SEQ ID NO: 1787455 - DNA, 15 bp, Homo sapiens
ctatttacgacttaa

SEQ ID NO: 1787456 - DNA, 15 bp, Homo sapiens
tatttacgacttaag

SEQ ID NO: 1787457 - DNA, 15 bp, Homo sapiens
atttacgacttaagc

SEQ ID NO: 1787458 - DNA, 15 bp, Homo sapiens
tttacgacttaagca

SEQ ID NO: 1787459 - DNA, 15 bp, Homo sapiens
ttacgacttaagcaa

SEQ ID NO: 1787460 - DNA, 15 bp, Homo sapiens
tacgacttaagcaac

SEQ ID NO: 1787461 - DNA, 15 bp, Homo sapiens
acgacttaagcaacg

SEQ ID NO: 1787462 - DNA, 15 bp, Homo sapiens
cgacttaagcaacgc

SEQ ID NO: 1787463 - DNA, 15 bp, Homo sapiens
gacttaagcaacgca

SEQ ID NO: 1787464 - DNA, 15 bp, Homo sapiens
acttaagcaacgcaa

SEQ ID NO: 1787465 - DNA, 15 bp, Homo sapiens
cttaagcaacgcaag

SEQ ID NO: 1787466 - DNA, 15 bp, Homo sapiens
ttaagcaacgcaaga

SEQ ID NO: 1787467 - DNA, 15 bp, Homo sapiens
taagcaacgcaagat

SEQ ID NO: 1787468 - DNA, 15 bp, Homo sapiens
aagcaacgcaagatg

SEQ ID NO: 1787469 - DNA, 15 bp, Homo sapiens
agcaacgcaagatgg

SEQ ID NO: 1787470 - DNA, 15 bp, Homo sapiens
gcaacgcaagatggc

SEQ ID NO: 1787471 - DNA, 15 bp, Homo sapiens
caacgcaagatggcc

SEQ ID NO: 1787472 - DNA, 15 bp, Homo sapiens
aacgcaagatggccg

SEQ ID NO: 1787473 - DNA, 15 bp, Homo sapiens
acgcaagatggccga

SEQ ID NO: 1787474 - DNA, 15 bp, Homo sapiens
cgcaagatggccgaa

SEQ ID NO: 1787475 - DNA, 15 bp, Homo sapiens
gcaagatggccgaat

SEQ ID NO: 1787476 - DNA, 15 bp, Homo sapiens
caagatggccgaata

SEQ ID NO: 1787477 - DNA, 15 bp, Homo sapiens
tggccgaataggaac

SEQ ID NO: 1787478 - DNA, 15 bp, Homo sapiens
ggccgaataggaaca

SEQ ID NO: 1787479 - DNA, 15 bp, Homo sapiens
gccgaataggaacag

SEQ ID NO: 1787480 - DNA, 15 bp, Homo sapiens
ccgaataggaacagc

SEQ ID NO: 1787481 - DNA, 15 bp, Homo sapiens
cgaataggaacagct

SEQ ID NO: 1787482 - DNA, 15 bp, Homo sapiens
gaataggaacagctc

SEQ ID NO: 1787483 - DNA, 15 bp, Homo sapiens
aataggaacagctcc

SEQ ID NO: 1787484 - DNA, 15 bp, Homo sapiens
ataggaacagctccg

SEQ ID NO: 1787485 - DNA, 15 bp, Homo sapiens
taggaacagctccgg

SEQ ID NO: 1787486 - DNA, 15 bp, Homo sapiens
aggaacagctccggt

SEQ ID NO: 1787487 - DNA, 15 bp, Homo sapiens
ggaacagctccggtc

SEQ ID NO: 1787488 - DNA, 15 bp, Homo sapiens
gaacagctccggtct

SEQ ID NO: 1787489 - DNA, 15 bp, Homo sapiens
aacagctccggtcta

SEQ ID NO: 1787490 - DNA, 15 bp, Homo sapiens
acagctccggtctac

SEQ ID NO: 1787491 - DNA, 15 bp, Homo sapiens
cagctccggtctaca

SEQ ID NO: 1787492 - DNA, 15 bp, Homo sapiens
agctccggtctacag

SEQ ID NO: 1787493 - DNA, 15 bp, Homo sapiens
gctccggtctacagc

SEQ ID NO: 1787494 - DNA, 15 bp, Homo sapiens
ctccggtctacagct

SEQ ID NO: 1787495 - DNA, 15 bp, Homo sapiens
tccggtctacagctc

SEQ ID NO: 1787496 - DNA, 15 bp, Homo sapiens
ccggtctacagctcc

SEQ ID NO: 1787497 - DNA, 15 bp, Homo sapiens
cggtctacagctccc

SEQ ID NO: 1787498 - DNA, 15 bp, Homo sapiens
ggtctacagctccca

SEQ ID NO: 1787499 - DNA, 15 bp, Homo sapiens
tctacagctcccagc

SEQ ID NO: 1787500 - DNA, 15 bp, Homo sapiens
ctacagctcccagcg

SEQ ID NO: 1787501 - DNA, 15 bp, Homo sapiens
tacagctcccagcgt

SEQ ID NO: 1787502 - DNA, 15 bp, Homo sapiens
acagctcccagcgtg

SEQ ID NO: 1787503 - DNA, 15 bp, Homo sapiens
cagctcccagcgtga

SEQ ID NO: 1787504 - DNA, 15 bp, Homo sapiens
agctcccagcgtgag

SEQ ID NO: 1787505 - DNA, 15 bp, Homo sapiens
gctcccagcgtgagc

SEQ ID NO: 1787506 - DNA, 15 bp, Homo sapiens
ctcccagcgtgagcg

SEQ ID NO: 1787507 - DNA, 15 bp, Homo sapiens
tcccagcgtgagcga

SEQ ID NO: 1787508 - DNA, 15 bp, Homo sapiens
cccagcgtgagcgac

SEQ ID NO: 1787509 - DNA, 15 bp, Homo sapiens
ccagcgtgagcgacg

SEQ ID NO: 1787510 - DNA, 15 bp, Homo sapiens
cagcgtgagcgacgc

SEQ ID NO: 1787511 - DNA, 15 bp, Homo sapiens
agcgtgagcgacgca

SEQ ID NO: 1787512 - DNA, 15 bp, Homo sapiens
gcgtgagcgacgcag

SEQ ID NO: 1787513 - DNA, 15 bp, Homo sapiens
cgtgagcgacgcaga

SEQ ID NO: 1787514 - DNA, 15 bp, Homo sapiens
gtgagcgacgcagaa

SEQ ID NO: 1787515 - DNA, 15 bp, Homo sapiens
tgagcgacgcagaag

SEQ ID NO: 1787516 - DNA, 15 bp, Homo sapiens
gagcgacgcagaaga

SEQ ID NO: 1787517 - DNA, 15 bp, Homo sapiens
agcgacgcagaagac

SEQ ID NO: 1787518 - DNA, 15 bp, Homo sapiens
gcgacgcagaagacg

SEQ ID NO: 1787519 - DNA, 15 bp, Homo sapiens
cgacgcagaagacgg

SEQ ID NO: 1787520 - DNA, 15 bp, Homo sapiens
gacgcagaagacggg

SEQ ID NO: 1787521 - DNA, 15 bp, Homo sapiens
acgcagaagacgggt

SEQ ID NO: 1787522 - DNA, 15 bp, Homo sapiens
cgcagaagacgggtg

SEQ ID NO: 1787523 - DNA, 15 bp, Homo sapiens
gcagaagacgggtga

SEQ ID NO: 1787524 - DNA, 15 bp, Homo sapiens
cagaagacgggtgat

SEQ ID NO: 1787525 - DNA, 15 bp, Homo sapiens
agaagacgggtgatt

SEQ ID NO: 1787526 - DNA, 15 bp, Homo sapiens
gaagacgggtgattt

SEQ ID NO: 1787527 - DNA, 15 bp, Homo sapiens
aagacgggtgatttc

SEQ ID NO: 1787528 - DNA, 15 bp, Homo sapiens
agacgggtgatttct

SEQ ID NO: 1787529 - DNA, 15 bp, Homo sapiens
gacgggtgatttctg

SEQ ID NO: 1787530 - DNA, 15 bp, Homo sapiens
acgggtgatttctgc

SEQ ID NO: 1787531 - DNA, 15 bp, Homo sapiens
cgggtgatttctgca

SEQ ID NO: 1787532 - DNA, 15 bp, Homo sapiens
gggtgatttctgcat

SEQ ID NO: 1787533 - DNA, 15 bp, Homo sapiens
ggtgatttctgcatt

SEQ ID NO: 1787534 - DNA, 15 bp, Homo sapiens
gtgatttctgcattt

SEQ ID NO: 1787535 - DNA, 15 bp, Homo sapiens
tgatttctgcatttc

SEQ ID NO: 1787536 - DNA, 15 bp, Homo sapiens
gatttctgcatttcc

SEQ ID NO: 1787537 - DNA, 15 bp, Homo sapiens
atttctgcatttcca

SEQ ID NO: 1787538 - DNA, 15 bp, Homo sapiens
tttctgcatttccat

SEQ ID NO: 1787539 - DNA, 15 bp, Homo sapiens
ttctgcatttccatc

SEQ ID NO: 1787540 - DNA, 15 bp, Homo sapiens
tctgcatttccatct

SEQ ID NO: 1787541 - DNA, 15 bp, Homo sapiens
ctgcatttccatctg

SEQ ID NO: 1787542 - DNA, 15 bp, Homo sapiens
tgcatttccatctga

SEQ ID NO: 1787543 - DNA, 15 bp, Homo sapiens
gcatttccatctgag

SEQ ID NO: 1787544 - DNA, 15 bp, Homo sapiens
catttccatctgagg

SEQ ID NO: 1787545 - DNA, 15 bp, Homo sapiens
atttccatctgaggt

SEQ ID NO: 1787546 - DNA, 15 bp, Homo sapiens
tttccatctgaggta

SEQ ID NO: 1787547 - DNA, 15 bp, Homo sapiens
ttccatctgaggtac

SEQ ID NO: 1787548 - DNA, 15 bp, Homo sapiens
tccatctgaggtacc

SEQ ID NO: 1787549 - DNA, 15 bp, Homo sapiens
ccatctgaggtaccg

SEQ ID NO: 1787550 - DNA, 15 bp, Homo sapiens
catctgaggtaccgg

SEQ ID NO: 1787551 - DNA, 15 bp, Homo sapiens
atctgaggtaccggg

SEQ ID NO: 1787552 - DNA, 15 bp, Homo sapiens
tctgaggtaccgggt

SEQ ID NO: 1787553 - DNA, 15 bp, Homo sapiens
ctgaggtaccgggtt

SEQ ID NO: 1787554 - DNA, 15 bp, Homo sapiens
tgaggtaccgggttc

SEQ ID NO: 1787555 - DNA, 15 bp, Homo sapiens
gaggtaccgggttca

SEQ ID NO: 1787556 - DNA, 15 bp, Homo sapiens
aggtaccgggttcat

SEQ ID NO: 1787557 - DNA, 15 bp, Homo sapiens
ggtaccgggttcatc

SEQ ID NO: 1787558 - DNA, 15 bp, Homo sapiens
gtaccgggttcatct

SEQ ID NO: 1787559 - DNA, 15 bp, Homo sapiens
taccgggttcatctc

SEQ ID NO: 1787560 - DNA, 15 bp, Homo sapiens
accgggttcatctca

SEQ ID NO: 1787561 - DNA, 15 bp, Homo sapiens
ccgggttcatctcac

SEQ ID NO: 1787562 - DNA, 15 bp, Homo sapiens
cgggttcatctcact

SEQ ID NO: 1787563 - DNA, 15 bp, Homo sapiens
gggttcatctcacta

SEQ ID NO: 1787564 - DNA, 15 bp, Homo sapiens
ggttcatctcactag

SEQ ID NO: 1787565 - DNA, 15 bp, Homo sapiens
gttcatctcactagg

SEQ ID NO: 1787566 - DNA, 15 bp, Homo sapiens
ttcatctcactaggg

SEQ ID NO: 1787567 - DNA, 15 bp, Homo sapiens
tcatctcactaggga

SEQ ID NO: 1787568 - DNA, 15 bp, Homo sapiens
catctcactagggag

SEQ ID NO: 1787569 - DNA, 15 bp, Homo sapiens
atctcactagggagt

SEQ ID NO: 1787570 - DNA, 15 bp, Homo sapiens
tctcactagggagtg

SEQ ID NO: 1787571 - DNA, 15 bp, Homo sapiens
ctcactagggagtgc

SEQ ID NO: 1787572 - DNA, 15 bp, Homo sapiens
tcactagggagtgcc

SEQ ID NO: 1787573 - DNA, 15 bp, Homo sapiens
cactagggagtgcca

SEQ ID NO: 1787574 - DNA, 15 bp, Homo sapiens
actagggagtgccag

SEQ ID NO: 1787575 - DNA, 15 bp, Homo sapiens
ctagggagtgccaga

SEQ ID NO: 1787576 - DNA, 15 bp, Homo sapiens
tagggagtgccagac

SEQ ID NO: 1787577 - DNA, 15 bp, Homo sapiens
agggagtgccagaca

SEQ ID NO: 1787578 - DNA, 15 bp, Homo sapiens
gggagtgccagacag

SEQ ID NO: 1787579 - DNA, 15 bp, Homo sapiens
ggagtgccagacagt

SEQ ID NO: 1787580 - DNA, 15 bp, Homo sapiens
gagtgccagacagtg

SEQ ID NO: 1787581 - DNA, 15 bp, Homo sapiens
agtgccagacagtgg

SEQ ID NO: 1787582 - DNA, 15 bp, Homo sapiens
gtgccagacagtggg

SEQ ID NO: 1787583 - DNA, 15 bp, Homo sapiens
tgccagacagtgggc

SEQ ID NO: 1787584 - DNA, 15 bp, Homo sapiens
gccagacagtgggcg

SEQ ID NO: 1787585 - DNA, 15 bp, Homo sapiens
ccagacagtgggcgc

SEQ ID NO: 1787586 - DNA, 15 bp, Homo sapiens
cagacagtgggcgca

SEQ ID NO: 1787587 - DNA, 15 bp, Homo sapiens
agacagtgggcgcag

SEQ ID NO: 1787588 - DNA, 15 bp, Homo sapiens
gacagtgggcgcagg

SEQ ID NO: 1787589 - DNA, 15 bp, Homo sapiens
acagtgggcgcaggc

SEQ ID NO: 1787590 - DNA, 15 bp, Homo sapiens
cagtgggcgcaggcc

SEQ ID NO: 1787591 - DNA, 15 bp, Homo sapiens
agtgggcgcaggcca

SEQ ID NO: 1787592 - DNA, 15 bp, Homo sapiens
gtgggcgcaggccag

SEQ ID NO: 1787593 - DNA, 15 bp, Homo sapiens
tgggcgcaggccagt

SEQ ID NO: 1787594 - DNA, 15 bp, Homo sapiens
gggcgcaggccagtg

SEQ ID NO: 1787595 - DNA, 15 bp, Homo sapiens
ggcgcaggccagtgt

SEQ ID NO: 1787596 - DNA, 15 bp, Homo sapiens
gcgcaggccagtgtg

SEQ ID NO: 1787597 - DNA, 15 bp, Homo sapiens
cgcaggccagtgtgt

SEQ ID NO: 1787598 - DNA, 15 bp, Homo sapiens
gcaggccagtgtgtg

SEQ ID NO: 1787599 - DNA, 15 bp, Homo sapiens
caggccagtgtgtgt

SEQ ID NO: 1787600 - DNA, 15 bp, Homo sapiens
aggccagtgtgtgtg

SEQ ID NO: 1787601 - DNA, 15 bp, Homo sapiens
ggccagtgtgtgtgc

SEQ ID NO: 1787602 - DNA, 15 bp, Homo sapiens
gccagtgtgtgtgcg

SEQ ID NO: 1787603 - DNA, 15 bp, Homo sapiens
ccagtgtgtgtgcgc

SEQ ID NO: 1787604 - DNA, 15 bp, Homo sapiens
cagtgtgtgtgcgca

SEQ ID NO: 1787605 - DNA, 15 bp, Homo sapiens
agtgtgtgtgcgcac

SEQ ID NO: 1787606 - DNA, 15 bp, Homo sapiens
gtgtgtgtgcgcacc

SEQ ID NO: 1787607 - DNA, 15 bp, Homo sapiens
tgtgtgtgcgcaccg

SEQ ID NO: 1787608 - DNA, 15 bp, Homo sapiens
gtgtgtgcgcaccgt

SEQ ID NO: 1787609 - DNA, 15 bp, Homo sapiens
tgtgtgcgcaccgtg

SEQ ID NO: 1787610 - DNA, 15 bp, Homo sapiens
gtgtgcgcaccgtgt

SEQ ID NO: 1787611 - DNA, 15 bp, Homo sapiens
tgtgcgcaccgtgtg

SEQ ID NO: 1787612 - DNA, 15 bp, Homo sapiens
gtgcgcaccgtgtgc

SEQ ID NO: 1787613 - DNA, 15 bp, Homo sapiens
tgcgcaccgtgtgcg

SEQ ID NO: 1787614 - DNA, 15 bp, Homo sapiens
gcgcaccgtgtgcga

SEQ ID NO: 1787615 - DNA, 15 bp, Homo sapiens
cgcaccgtgtgcgag

SEQ ID NO: 1787616 - DNA, 15 bp, Homo sapiens
gcaccgtgtgcgagc

SEQ ID NO: 1787617 - DNA, 15 bp, Homo sapiens
caccgtgtgcgagcc

SEQ ID NO: 1787618 - DNA, 15 bp, Homo sapiens
accgtgtgcgagccg

SEQ ID NO: 1787619 - DNA, 15 bp, Homo sapiens
ccgtgtgcgagccga

SEQ ID NO: 1787620 - DNA, 15 bp, Homo sapiens
cgtgtgcgagccgaa

SEQ ID NO: 1787621 - DNA, 15 bp, Homo sapiens
gtgtgcgagccgaag

SEQ ID NO: 1787622 - DNA, 15 bp, Homo sapiens
tgtgcgagccgaagc

SEQ ID NO: 1787623 - DNA, 15 bp, Homo sapiens
gtgcgagccgaagca

SEQ ID NO: 1787624 - DNA, 15 bp, Homo sapiens
tgcgagccgaagcag

SEQ ID NO: 1787625 - DNA, 15 bp, Homo sapiens
gcgagccgaagcagg

SEQ ID NO: 1787626 - DNA, 15 bp, Homo sapiens
cgagccgaagcaggg

SEQ ID NO: 1787627 - DNA, 15 bp, Homo sapiens
gagccgaagcagggc

SEQ ID NO: 1787628 - DNA, 15 bp, Homo sapiens
agccgaagcagggcg

SEQ ID NO: 1787629 - DNA, 15 bp, Homo sapiens
gccgaagcagggcga

SEQ ID NO: 1787630 - DNA, 15 bp, Homo sapiens
ccgaagcagggcgag

SEQ ID NO: 1787631 - DNA, 15 bp, Homo sapiens
cgaagcagggcgagg

SEQ ID NO: 1787632 - DNA, 15 bp, Homo sapiens
gaagcagggcgaggc

SEQ ID NO: 1787633 - DNA, 15 bp, Homo sapiens
gcagggcgaggcatt

SEQ ID NO: 1787634 - DNA, 15 bp, Homo sapiens
cagggcgaggcattg

SEQ ID NO: 1787635 - DNA, 15 bp, Homo sapiens
agggcgaggcattgc

SEQ ID NO: 1787636 - DNA, 15 bp, Homo sapiens
gggcgaggcattgcc

SEQ ID NO: 1787637 - DNA, 15 bp, Homo sapiens
ggcgaggcattgcct

SEQ ID NO: 1787638 - DNA, 15 bp, Homo sapiens
gcgaggcattgcctc

SEQ ID NO: 1787639 - DNA, 15 bp, Homo sapiens
cgaggcattgcctca

SEQ ID NO: 1787640 - DNA, 15 bp, Homo sapiens
gaggcattgcctcac

SEQ ID NO: 1787641 - DNA, 15 bp, Homo sapiens
aggcattgcctcacc

SEQ ID NO: 1787642 - DNA, 15 bp, Homo sapiens
ggcattgcctcacct

SEQ ID NO: 1787643 - DNA, 15 bp, Homo sapiens
gcattgcctcacctg

SEQ ID NO: 1787644 - DNA, 15 bp, Homo sapiens
cattgcctcacctgg

SEQ ID NO: 1787645 - DNA, 15 bp, Homo sapiens
attgcctcacctggg

SEQ ID NO: 1787646 - DNA, 15 bp, Homo sapiens
ttgcctcacctggga

SEQ ID NO: 1787647 - DNA, 15 bp, Homo sapiens
tgcctcacctgggaa

SEQ ID NO: 1787648 - DNA, 15 bp, Homo sapiens
gcctcacctgggaag

SEQ ID NO: 1787649 - DNA, 15 bp, Homo sapiens
ctcacctgggaagcg

SEQ ID NO: 1787650 - DNA, 15 bp, Homo sapiens
tcacctgggaagcgc

SEQ ID NO: 1787651 - DNA, 15 bp, Homo sapiens
cacctgggaagcgca

SEQ ID NO: 1787652 - DNA, 15 bp, Homo sapiens
acctgggaagcgcaa

SEQ ID NO: 1787653 - DNA, 15 bp, Homo sapiens
cctgggaagcgcaag

SEQ ID NO: 1787654 - DNA, 15 bp, Homo sapiens
ctgggaagcgcaagg

SEQ ID NO: 1787655 - DNA, 15 bp, Homo sapiens
tgggaagcgcaaggg

SEQ ID NO: 1787656 - DNA, 15 bp, Homo sapiens
gggaagcgcaagggg

SEQ ID NO: 1787657 - DNA, 15 bp, Homo sapiens
ggaagcgcaaggggt

SEQ ID NO: 1787658 - DNA, 15 bp, Homo sapiens
gaagcgcaaggggtc

SEQ ID NO: 1787659 - DNA, 15 bp, Homo sapiens
aagcgcaaggggtca

SEQ ID NO: 1787660 - DNA, 15 bp, Homo sapiens
agcgcaaggggtcag

SEQ ID NO: 1787661 - DNA, 15 bp, Homo sapiens
gcgcaaggggtcagg

SEQ ID NO: 1787662 - DNA, 15 bp, Homo sapiens
cgcaaggggtcaggg

SEQ ID NO: 1787663 - DNA, 15 bp, Homo sapiens
gcaaggggtcaggga

SEQ ID NO: 1787664 - DNA, 15 bp, Homo sapiens
caaggggtcagggag

SEQ ID NO: 1787665 - DNA, 15 bp, Homo sapiens
aaggggtcagggagt

SEQ ID NO: 1787666 - DNA, 15 bp, Homo sapiens
aggggtcagggagtt

SEQ ID NO: 1787667 - DNA, 15 bp, Homo sapiens
ggggtcagggagttc

SEQ ID NO: 1787668 - DNA, 15 bp, Homo sapiens
gggtcagggagttcc

SEQ ID NO: 1787669 - DNA, 15 bp, Homo sapiens
ggtcagggagttccc

SEQ ID NO: 1787670 - DNA, 15 bp, Homo sapiens
gtcagggagttccct

SEQ ID NO: 1787671 - DNA, 15 bp, Homo sapiens
tcagggagttccctt

SEQ ID NO: 1787672 - DNA, 15 bp, Homo sapiens
cagggagttcccttt

SEQ ID NO: 1787673 - DNA, 15 bp, Homo sapiens
agggagttccctttc

SEQ ID NO: 1787674 - DNA, 15 bp, Homo sapiens
gggagttccctttcc

SEQ ID NO: 1787675 - DNA, 15 bp, Homo sapiens
ggagttccctttccg

SEQ ID NO: 1787676 - DNA, 15 bp, Homo sapiens
gagttccctttccga

SEQ ID NO: 1787677 - DNA, 15 bp, Homo sapiens
agttccctttccgag

SEQ ID NO: 1787678 - DNA, 15 bp, Homo sapiens
gttccctttccgagt

SEQ ID NO: 1787679 - DNA, 15 bp, Homo sapiens
ttccctttccgagtc

SEQ ID NO: 1787680 - DNA, 15 bp, Homo sapiens
tccctttccgagtca

SEQ ID NO: 1787681 - DNA, 15 bp, Homo sapiens
ccctttccgagtcaa

SEQ ID NO: 1787682 - DNA, 15 bp, Homo sapiens
cctttccgagtcaaa

SEQ ID NO: 1787683 - DNA, 15 bp, Homo sapiens
ctttccgagtcaaag

SEQ ID NO: 1787684 - DNA, 15 bp, Homo sapiens
tttccgagtcaaaga

SEQ ID NO: 1787685 - DNA, 15 bp, Homo sapiens
ttccgagtcaaagaa

SEQ ID NO: 1787686 - DNA, 15 bp, Homo sapiens
tccgagtcaaagaaa

SEQ ID NO: 1787687 - DNA, 15 bp, Homo sapiens
ccgagtcaaagaaag

SEQ ID NO: 1787688 - DNA, 15 bp, Homo sapiens
cgagtcaaagaaagg

SEQ ID NO: 1787689 - DNA, 15 bp, Homo sapiens
gagtcaaagaaaggg

SEQ ID NO: 1787690 - DNA, 15 bp, Homo sapiens
agtcaaagaaagggg

SEQ ID NO: 1787691 - DNA, 15 bp, Homo sapiens
gtcaaagaaaggggt

SEQ ID NO: 1787692 - DNA, 15 bp, Homo sapiens
tcaaagaaaggggtg

SEQ ID NO: 1787693 - DNA, 15 bp, Homo sapiens
caaagaaaggggtga

SEQ ID NO: 1787694 - DNA, 15 bp, Homo sapiens
aaagaaaggggtgac

SEQ ID NO: 1787695 - DNA, 15 bp, Homo sapiens
aagaaaggggtgacg

SEQ ID NO: 1787696 - DNA, 15 bp, Homo sapiens
agaaaggggtgacgg

SEQ ID NO: 1787697 - DNA, 15 bp, Homo sapiens
gaaaggggtgacgga

SEQ ID NO: 1787698 - DNA, 15 bp, Homo sapiens
aaaggggtgacggac

SEQ ID NO: 1787699 - DNA, 15 bp, Homo sapiens
aaggggtgacggacg

SEQ ID NO: 1787700 - DNA, 15 bp, Homo sapiens
aggggtgacggacgc

SEQ ID NO: 1787701 - DNA, 15 bp, Homo sapiens
ggggtgacggacgca

SEQ ID NO: 1787702 - DNA, 15 bp, Homo sapiens
gggtgacggacgcac

SEQ ID NO: 1787703 - DNA, 15 bp, Homo sapiens
ggtgacggacgcacc

SEQ ID NO: 1787704 - DNA, 15 bp, Homo sapiens
gtgacggacgcacct

SEQ ID NO: 1787705 - DNA, 15 bp, Homo sapiens
tgacggacgcacctg

SEQ ID NO: 1787706 - DNA, 15 bp, Homo sapiens
gacggacgcacctgg

SEQ ID NO: 1787707 - DNA, 15 bp, Homo sapiens
acggacgcacctgga

SEQ ID NO: 1787708 - DNA, 15 bp, Homo sapiens
cggacgcacctggaa

SEQ ID NO: 1787709 - DNA, 15 bp, Homo sapiens
ggacgcacctggaaa

SEQ ID NO: 1787710 - DNA, 15 bp, Homo sapiens
gacgcacctggaaaa

SEQ ID NO: 1787711 - DNA, 15 bp, Homo sapiens
acgcacctggaaaat

SEQ ID NO: 1787712 - DNA, 15 bp, Homo sapiens
cgcacctggaaaatc

SEQ ID NO: 1787713 - DNA, 15 bp, Homo sapiens
ggtcactcccacccg

SEQ ID NO: 1787714 - DNA, 15 bp, Homo sapiens
gtcactcccacccga

SEQ ID NO: 1787715 - DNA, 15 bp, Homo sapiens
tcactcccacccgaa

SEQ ID NO: 1787716 - DNA, 15 bp, Homo sapiens
cactcccacccgaat

SEQ ID NO: 1787717 - DNA, 15 bp, Homo sapiens
actcccacccgaata

SEQ ID NO: 1787718 - DNA, 15 bp, Homo sapiens
ctcccacccgaatat

SEQ ID NO: 1787719 - DNA, 15 bp, Homo sapiens
tcccacccgaatatt

SEQ ID NO: 1787720 - DNA, 15 bp, Homo sapiens
cccacccgaatattg

SEQ ID NO: 1787721 - DNA, 15 bp, Homo sapiens
ccacccgaatattgc

SEQ ID NO: 1787722 - DNA, 15 bp, Homo sapiens
cacccgaatattgca

SEQ ID NO: 1787723 - DNA, 15 bp, Homo sapiens
acccgaatattgcac

SEQ ID NO: 1787724 - DNA, 15 bp, Homo sapiens
cccgaatattgcact

SEQ ID NO: 1787725 - DNA, 15 bp, Homo sapiens
ccgaatattgcactt

SEQ ID NO: 1787726 - DNA, 15 bp, Homo sapiens
cgaatattgcacttt

SEQ ID NO: 1787727 - DNA, 15 bp, Homo sapiens
gaatattgcactttt

SEQ ID NO: 1787728 - DNA, 15 bp, Homo sapiens
aatattgcacttttc

SEQ ID NO: 1787729 - DNA, 15 bp, Homo sapiens
tattgcacttttcag

SEQ ID NO: 1787730 - DNA, 15 bp, Homo sapiens
attgcacttttcaga

SEQ ID NO: 1787731 - DNA, 15 bp, Homo sapiens
ttgcacttttcagac

SEQ ID NO: 1787732 - DNA, 15 bp, Homo sapiens
tgcacttttcagacc

SEQ ID NO: 1787733 - DNA, 15 bp, Homo sapiens
gcacttttcagaccg

SEQ ID NO: 1787734 - DNA, 15 bp, Homo sapiens
cacttttcagaccgg

SEQ ID NO: 1787735 - DNA, 15 bp, Homo sapiens
acttttcagaccggc

SEQ ID NO: 1787736 - DNA, 15 bp, Homo sapiens
cttttcagaccggct

SEQ ID NO: 1787737 - DNA, 15 bp, Homo sapiens
ttttcagaccggctt

SEQ ID NO: 1787738 - DNA, 15 bp, Homo sapiens
tttcagaccggctta

SEQ ID NO: 1787739 - DNA, 15 bp, Homo sapiens
ttcagaccggcttaa

SEQ ID NO: 1787740 - DNA, 15 bp, Homo sapiens
tcagaccggcttaag

SEQ ID NO: 1787741 - DNA, 15 bp, Homo sapiens
cagaccggcttaaga

SEQ ID NO: 1787742 - DNA, 15 bp, Homo sapiens
agaccggcttaagaa

SEQ ID NO: 1787743 - DNA, 15 bp, Homo sapiens
gaccggcttaagaaa

SEQ ID NO: 1787744 - DNA, 15 bp, Homo sapiens
accggcttaagaaac

SEQ ID NO: 1787745 - DNA, 15 bp, Homo sapiens
ccggcttaagaaacg

SEQ ID NO: 1787746 - DNA, 15 bp, Homo sapiens
cggcttaagaaacgg

SEQ ID NO: 1787747 - DNA, 15 bp, Homo sapiens
ggcttaagaaacggc

SEQ ID NO: 1787748 - DNA, 15 bp, Homo sapiens
gcttaagaaacggcg

SEQ ID NO: 1787749 - DNA, 15 bp, Homo sapiens
cttaagaaacggcgc

SEQ ID NO: 1787750 - DNA, 15 bp, Homo sapiens
ttaagaaacggcgca

SEQ ID NO: 1787751 - DNA, 15 bp, Homo sapiens
taagaaacggcgcac

SEQ ID NO: 1787752 - DNA, 15 bp, Homo sapiens
aagaaacggcgcacc

SEQ ID NO: 1787753 - DNA, 15 bp, Homo sapiens
agaaacggcgcacca

SEQ ID NO: 1787754 - DNA, 15 bp, Homo sapiens
gaaacggcgcaccac

SEQ ID NO: 1787755 - DNA, 15 bp, Homo sapiens
aaacggcgcaccacg

SEQ ID NO: 1787756 - DNA, 15 bp, Homo sapiens
aacggcgcaccacga

SEQ ID NO: 1787757 - DNA, 15 bp, Homo sapiens
acggcgcaccacgag

SEQ ID NO: 1787758 - DNA, 15 bp, Homo sapiens
cggcgcaccacgaga

SEQ ID NO: 1787759 - DNA, 15 bp, Homo sapiens
ggcgcaccacgagac

SEQ ID NO: 1787760 - DNA, 15 bp, Homo sapiens
gcgcaccacgagact

SEQ ID NO: 1787761 - DNA, 15 bp, Homo sapiens
cgcaccacgagacta

SEQ ID NO: 1787762 - DNA, 15 bp, Homo sapiens
gcaccacgagactat

SEQ ID NO: 1787763 - DNA, 15 bp, Homo sapiens
caccacgagactata

SEQ ID NO: 1787764 - DNA, 15 bp, Homo sapiens
accacgagactatat

SEQ ID NO: 1787765 - DNA, 15 bp, Homo sapiens
ccacgagactatatc

SEQ ID NO: 1787766 - DNA, 15 bp, Homo sapiens
cacgagactatatcc

SEQ ID NO: 1787767 - DNA, 15 bp, Homo sapiens
acgagactatatccc

SEQ ID NO: 1787768 - DNA, 15 bp, Homo sapiens
cgagactatatccca

SEQ ID NO: 1787769 - DNA, 15 bp, Homo sapiens
gagactatatcccac

SEQ ID NO: 1787770 - DNA, 15 bp, Homo sapiens
agactatatcccaca

SEQ ID NO: 1787771 - DNA, 15 bp, Homo sapiens
gactatatcccacac

SEQ ID NO: 1787772 - DNA, 15 bp, Homo sapiens
actatatcccacacc

SEQ ID NO: 1787773 - DNA, 15 bp, Homo sapiens
ctatatcccacacct

SEQ ID NO: 1787774 - DNA, 15 bp, Homo sapiens
tatatcccacacctg

SEQ ID NO: 1787775 - DNA, 15 bp, Homo sapiens
atatcccacacctgg

SEQ ID NO: 1787776 - DNA, 15 bp, Homo sapiens
tatcccacacctggc

SEQ ID NO: 1787777 - DNA, 15 bp, Homo sapiens
atcccacacctggct

SEQ ID NO: 1787778 - DNA, 15 bp, Homo sapiens
tcccacacctggctc

SEQ ID NO: 1787779 - DNA, 15 bp, Homo sapiens
cccacacctggctca

SEQ ID NO: 1787780 - DNA, 15 bp, Homo sapiens
ccacacctggctcag

SEQ ID NO: 1787781 - DNA, 15 bp, Homo sapiens
cacacctggctcaga

SEQ ID NO: 1787782 - DNA, 15 bp, Homo sapiens
acacctggctcagag

SEQ ID NO: 1787783 - DNA, 15 bp, Homo sapiens
cacctggctcagagg

SEQ ID NO: 1787784 - DNA, 15 bp, Homo sapiens
acctggctcagaggg

SEQ ID NO: 1787785 - DNA, 15 bp, Homo sapiens
cctggctcagagggt

SEQ ID NO: 1787786 - DNA, 15 bp, Homo sapiens
ctggctcagagggtc

SEQ ID NO: 1787787 - DNA, 15 bp, Homo sapiens
tggctcagagggtcc

SEQ ID NO: 1787788 - DNA, 15 bp, Homo sapiens
ggctcagagggtcct

SEQ ID NO: 1787789 - DNA, 15 bp, Homo sapiens
gctcagagggtccta

SEQ ID NO: 1787790 - DNA, 15 bp, Homo sapiens
ctcagagggtcctac

SEQ ID NO: 1787791 - DNA, 15 bp, Homo sapiens
tcagagggtcctacg

SEQ ID NO: 1787792 - DNA, 15 bp, Homo sapiens
cagagggtcctacgc

SEQ ID NO: 1787793 - DNA, 15 bp, Homo sapiens
agagggtcctacgcc

SEQ ID NO: 1787794 - DNA, 15 bp, Homo sapiens
gagggtcctacgccc

SEQ ID NO: 1787795 - DNA, 15 bp, Homo sapiens
agggtcctacgccca

SEQ ID NO: 1787796 - DNA, 15 bp, Homo sapiens
gggtcctacgcccac

SEQ ID NO: 1787797 - DNA, 15 bp, Homo sapiens
ggtcctacgcccacg

SEQ ID NO: 1787798 - DNA, 15 bp, Homo sapiens
gtcctacgcccacgg

SEQ ID NO: 1787799 - DNA, 15 bp, Homo sapiens
tcctacgcccacgga

SEQ ID NO: 1787800 - DNA, 15 bp, Homo sapiens
cctacgcccacggaa

SEQ ID NO: 1787801 - DNA, 15 bp, Homo sapiens
ctacgcccacggaat

SEQ ID NO: 1787802 - DNA, 15 bp, Homo sapiens
tacgcccacggaatc

SEQ ID NO: 1787803 - DNA, 15 bp, Homo sapiens
acgcccacggaatct

SEQ ID NO: 1787804 - DNA, 15 bp, Homo sapiens
cgcccacggaatctc

SEQ ID NO: 1787805 - DNA, 15 bp, Homo sapiens
gcccacggaatctcg

SEQ ID NO: 1787806 - DNA, 15 bp, Homo sapiens
cccacggaatctcgc

SEQ ID NO: 1787807 - DNA, 15 bp, Homo sapiens
ccacggaatctcgct

SEQ ID NO: 1787808 - DNA, 15 bp, Homo sapiens
cacggaatctcgctg

SEQ ID NO: 1787809 - DNA, 15 bp, Homo sapiens
acggaatctcgctga

SEQ ID NO: 1787810 - DNA, 15 bp, Homo sapiens
cggaatctcgctgat

SEQ ID NO: 1787811 - DNA, 15 bp, Homo sapiens
ggaatctcgctgatt

SEQ ID NO: 1787812 - DNA, 15 bp, Homo sapiens
gaatctcgctgattg

SEQ ID NO: 1787813 - DNA, 15 bp, Homo sapiens
aatctcgctgattgc

SEQ ID NO: 1787814 - DNA, 15 bp, Homo sapiens
atctcgctgattgct

SEQ ID NO: 1787815 - DNA, 15 bp, Homo sapiens
tctcgctgattgcta

SEQ ID NO: 1787816 - DNA, 15 bp, Homo sapiens
ctcgctgattgctag

SEQ ID NO: 1787817 - DNA, 15 bp, Homo sapiens
tcgctgattgctagc

SEQ ID NO: 1787818 - DNA, 15 bp, Homo sapiens
cgctgattgctagca

SEQ ID NO: 1787819 - DNA, 15 bp, Homo sapiens
gctgattgctagcac

SEQ ID NO: 1787820 - DNA, 15 bp, Homo sapiens
ctgattgctagcaca

SEQ ID NO: 1787821 - DNA, 15 bp, Homo sapiens
tgattgctagcacag

SEQ ID NO: 1787822 - DNA, 15 bp, Homo sapiens
gattgctagcacagc

SEQ ID NO: 1787823 - DNA, 15 bp, Homo sapiens
agcacagcagtctgt

SEQ ID NO: 1787824 - DNA, 15 bp, Homo sapiens
gcacagcagtctgtg

SEQ ID NO: 1787825 - DNA, 15 bp, Homo sapiens
cacagcagtctgtga

SEQ ID NO: 1787826 - DNA, 15 bp, Homo sapiens
acagcagtctgtgat

SEQ ID NO: 1787827 - DNA, 15 bp, Homo sapiens
cagcagtctgtgatc

SEQ ID NO: 1787828 - DNA, 15 bp, Homo sapiens
agcagtctgtgatca

SEQ ID NO: 1787829 - DNA, 15 bp, Homo sapiens
gcagtctgtgatcaa

SEQ ID NO: 1787830 - DNA, 15 bp, Homo sapiens
cagtctgtgatcaaa

SEQ ID NO: 1787831 - DNA, 15 bp, Homo sapiens
agtctgtgatcaaac

SEQ ID NO: 1787832 - DNA, 15 bp, Homo sapiens
gtctgtgatcaaact

SEQ ID NO: 1787833 - DNA, 15 bp, Homo sapiens
tctgtgatcaaactg

SEQ ID NO: 1787834 - DNA, 15 bp, Homo sapiens
ctgtgatcaaactgc

SEQ ID NO: 1787835 - DNA, 15 bp, Homo sapiens
tgtgatcaaactgca

SEQ ID NO: 1787836 - DNA, 15 bp, Homo sapiens
gtgatcaaactgcaa

SEQ ID NO: 1787837 - DNA, 15 bp, Homo sapiens
tgatcaaactgcaag

SEQ ID NO: 1787838 - DNA, 15 bp, Homo sapiens
tcaaactgcaaggcg

SEQ ID NO: 1787839 - DNA, 15 bp, Homo sapiens
caaactgcaaggcgg

SEQ ID NO: 1787840 - DNA, 15 bp, Homo sapiens
aaactgcaaggcggc

SEQ ID NO: 1787841 - DNA, 15 bp, Homo sapiens
aactgcaaggcggca

SEQ ID NO: 1787842 - DNA, 15 bp, Homo sapiens
actgcaaggcggcag

SEQ ID NO: 1787843 - DNA, 15 bp, Homo sapiens
ctgcaaggcggcagc

SEQ ID NO: 1787844 - DNA, 15 bp, Homo sapiens
tgcaaggcggcagcg

SEQ ID NO: 1787845 - DNA, 15 bp, Homo sapiens
gcaaggcggcagcga

SEQ ID NO: 1787846 - DNA, 15 bp, Homo sapiens
caaggcggcagcgag

SEQ ID NO: 1787847 - DNA, 15 bp, Homo sapiens
aaggcggcagcgagg

SEQ ID NO: 1787848 - DNA, 15 bp, Homo sapiens
aggcggcagcgaggc

SEQ ID NO: 1787849 - DNA, 15 bp, Homo sapiens
ggcggcagcgaggct

SEQ ID NO: 1787850 - DNA, 15 bp, Homo sapiens
gcggcagcgaggctg

SEQ ID NO: 1787851 - DNA, 15 bp, Homo sapiens
cggcagcgaggctgg

SEQ ID NO: 1787852 - DNA, 15 bp, Homo sapiens
ggcagcgaggctggg

SEQ ID NO: 1787853 - DNA, 15 bp, Homo sapiens
gcagcgaggctgggg

SEQ ID NO: 1787854 - DNA, 15 bp, Homo sapiens
cagcgaggctggggg

SEQ ID NO: 1787855 - DNA, 15 bp, Homo sapiens
agcgaggctggggga

SEQ ID NO: 1787856 - DNA, 15 bp, Homo sapiens
gcgaggctgggggag

SEQ ID NO: 1787857 - DNA, 15 bp, Homo sapiens
cgaggctgggggagg

SEQ ID NO: 1787858 - DNA, 15 bp, Homo sapiens
gaggctgggggaggg

SEQ ID NO: 1787859 - DNA, 15 bp, Homo sapiens
aggctgggggagggg

SEQ ID NO: 1787860 - DNA, 15 bp, Homo sapiens
ggctgggggaggggc

SEQ ID NO: 1787861 - DNA, 15 bp, Homo sapiens
gctgggggaggggcg

SEQ ID NO: 1787862 - DNA, 15 bp, Homo sapiens
ctgggggaggggcgc

SEQ ID NO: 1787863 - DNA, 15 bp, Homo sapiens
tgggggaggggcgcc

SEQ ID NO: 1787864 - DNA, 15 bp, Homo sapiens
gggggaggggcgcct

SEQ ID NO: 1787865 - DNA, 15 bp, Homo sapiens
ggggaggggcgcctg

SEQ ID NO: 1787866 - DNA, 15 bp, Homo sapiens
gggaggggcgcctgc

SEQ ID NO: 1787867 - DNA, 15 bp, Homo sapiens
ggaggggcgcctgcc

SEQ ID NO: 1787868 - DNA, 15 bp, Homo sapiens
gaggggcgcctgcca

SEQ ID NO: 1787869 - DNA, 15 bp, Homo sapiens
aggggcgcctgccat

SEQ ID NO: 1787870 - DNA, 15 bp, Homo sapiens
ggggcgcctgccatt

SEQ ID NO: 1787871 - DNA, 15 bp, Homo sapiens
gggcgcctgccattg

SEQ ID NO: 1787872 - DNA, 15 bp, Homo sapiens
ggcgcctgccattgc

SEQ ID NO: 1787873 - DNA, 15 bp, Homo sapiens
gcgcctgccattgcc

SEQ ID NO: 1787874 - DNA, 15 bp, Homo sapiens
cgcctgccattgccc

SEQ ID NO: 1787875 - DNA, 15 bp, Homo sapiens
gcctgccattgccca

SEQ ID NO: 1787876 - DNA, 15 bp, Homo sapiens
cctgccattgcccag

SEQ ID NO: 1787877 - DNA, 15 bp, Homo sapiens
ctgccattgcccagg

SEQ ID NO: 1787878 - DNA, 15 bp, Homo sapiens
tgccattgcccaggc

SEQ ID NO: 1787879 - DNA, 15 bp, Homo sapiens
gccattgcccaggct

SEQ ID NO: 1787880 - DNA, 15 bp, Homo sapiens
ccattgcccaggctt

SEQ ID NO: 1787881 - DNA, 15 bp, Homo sapiens
cattgcccaggcttg

SEQ ID NO: 1787882 - DNA, 15 bp, Homo sapiens
attgcccaggcttgc

SEQ ID NO: 1787883 - DNA, 15 bp, Homo sapiens
ttgcccaggcttgct

SEQ ID NO: 1787884 - DNA, 15 bp, Homo sapiens
tgcccaggcttgctt

SEQ ID NO: 1787885 - DNA, 15 bp, Homo sapiens
gcccaggcttgctta

SEQ ID NO: 1787886 - DNA, 15 bp, Homo sapiens
cccaggcttgcttag

SEQ ID NO: 1787887 - DNA, 15 bp, Homo sapiens
ccaggcttgcttagg

SEQ ID NO: 1787888 - DNA, 15 bp, Homo sapiens
caggcttgcttaggt

SEQ ID NO: 1787889 - DNA, 15 bp, Homo sapiens
aggcttgcttaggta

SEQ ID NO: 1787890 - DNA, 15 bp, Homo sapiens
ggcttgcttaggtaa

SEQ ID NO: 1787891 - DNA, 15 bp, Homo sapiens
gcttgcttaggtaaa

SEQ ID NO: 1787892 - DNA, 15 bp, Homo sapiens
cttgcttaggtaaac

SEQ ID NO: 1787893 - DNA, 15 bp, Homo sapiens
ttgcttaggtaaaca

SEQ ID NO: 1787894 - DNA, 15 bp, Homo sapiens
tgcttaggtaaacaa

SEQ ID NO: 1787895 - DNA, 15 bp, Homo sapiens
gcttaggtaaacaaa

SEQ ID NO: 1787896 - DNA, 15 bp, Homo sapiens
cttaggtaaacaaag

SEQ ID NO: 1787897 - DNA, 15 bp, Homo sapiens
ttaggtaaacaaagc

SEQ ID NO: 1787898 - DNA, 15 bp, Homo sapiens
taggtaaacaaagca

SEQ ID NO: 1787899 - DNA, 15 bp, Homo sapiens
aggtaaacaaagcag

SEQ ID NO: 1787900 - DNA, 15 bp, Homo sapiens
ggtaaacaaagcagc

SEQ ID NO: 1787901 - DNA, 15 bp, Homo sapiens
gtaaacaaagcagcc

SEQ ID NO: 1787902 - DNA, 15 bp, Homo sapiens
taaacaaagcagccg

SEQ ID NO: 1787903 - DNA, 15 bp, Homo sapiens
aaacaaagcagccgg

SEQ ID NO: 1787904 - DNA, 15 bp, Homo sapiens
aacaaagcagccggg

SEQ ID NO: 1787905 - DNA, 15 bp, Homo sapiens
acaaagcagccggga

SEQ ID NO: 1787906 - DNA, 15 bp, Homo sapiens
caaagcagccgggaa

SEQ ID NO: 1787907 - DNA, 15 bp, Homo sapiens
aaagcagccgggaag

SEQ ID NO: 1787908 - DNA, 15 bp, Homo sapiens
aagcagccgggaagc

SEQ ID NO: 1787909 - DNA, 15 bp, Homo sapiens
agcagccgggaagct

SEQ ID NO: 1787910 - DNA, 15 bp, Homo sapiens
gcagccgggaagctc

SEQ ID NO: 1787911 - DNA, 15 bp, Homo sapiens
cagccgggaagctcg

SEQ ID NO: 1787912 - DNA, 15 bp, Homo sapiens
agccgggaagctcga

SEQ ID NO: 1787913 - DNA, 15 bp, Homo sapiens
gccgggaagctcgaa

SEQ ID NO: 1787914 - DNA, 15 bp, Homo sapiens
ccgggaagctcgaac

SEQ ID NO: 1787915 - DNA, 15 bp, Homo sapiens
cgggaagctcgaact

SEQ ID NO: 1787916 - DNA, 15 bp, Homo sapiens
gggaagctcgaactg

SEQ ID NO: 1787917 - DNA, 15 bp, Homo sapiens
ggaagctcgaactgg

SEQ ID NO: 1787918 - DNA, 15 bp, Homo sapiens
gaagctcgaactggg

SEQ ID NO: 1787919 - DNA, 15 bp, Homo sapiens
aagctcgaactgggt

SEQ ID NO: 1787920 - DNA, 15 bp, Homo sapiens
agctcgaactgggtg

SEQ ID NO: 1787921 - DNA, 15 bp, Homo sapiens
gctcgaactgggtgg

SEQ ID NO: 1787922 - DNA, 15 bp, Homo sapiens
ctcgaactgggtgga

SEQ ID NO: 1787923 - DNA, 15 bp, Homo sapiens
tcgaactgggtggag

SEQ ID NO: 1787924 - DNA, 15 bp, Homo sapiens
cgaactgggtggagc

SEQ ID NO: 1787925 - DNA, 15 bp, Homo sapiens
gggtggagcccacca

SEQ ID NO: 1787926 - DNA, 15 bp, Homo sapiens
ggtggagcccaccac

SEQ ID NO: 1787927 - DNA, 15 bp, Homo sapiens
gtggagcccaccaca

SEQ ID NO: 1787928 - DNA, 15 bp, Homo sapiens
tggagcccaccacag

SEQ ID NO: 1787929 - DNA, 15 bp, Homo sapiens
ggagcccaccacagg

SEQ ID NO: 1787930 - DNA, 15 bp, Homo sapiens
gagcccaccacaggt

SEQ ID NO: 1787931 - DNA, 15 bp, Homo sapiens
agcccaccacaggtc

SEQ ID NO: 1787932 - DNA, 15 bp, Homo sapiens
gcccaccacaggtca

SEQ ID NO: 1787933 - DNA, 15 bp, Homo sapiens
cccaccacaggtcaa

SEQ ID NO: 1787934 - DNA, 15 bp, Homo sapiens
ccaccacaggtcaag

SEQ ID NO: 1787935 - DNA, 15 bp, Homo sapiens
caccacaggtcaagg

SEQ ID NO: 1787936 - DNA, 15 bp, Homo sapiens
accacaggtcaagga

SEQ ID NO: 1787937 - DNA, 15 bp, Homo sapiens
ccacaggtcaaggag

SEQ ID NO: 1787938 - DNA, 15 bp, Homo sapiens
cacaggtcaaggagg

SEQ ID NO: 1787939 - DNA, 15 bp, Homo sapiens
acaggtcaaggaggc

SEQ ID NO: 1787940 - DNA, 15 bp, Homo sapiens
aggcctgcctgcctt

SEQ ID NO: 1787941 - DNA, 15 bp, Homo sapiens
ggcctgcctgccttt

SEQ ID NO: 1787942 - DNA, 15 bp, Homo sapiens
gcctgcctgcctttg

SEQ ID NO: 1787943 - DNA, 15 bp, Homo sapiens
cctgcctgcctttgt

SEQ ID NO: 1787944 - DNA, 15 bp, Homo sapiens
ctgcctgcctttgta

SEQ ID NO: 1787945 - DNA, 15 bp, Homo sapiens
tgcctgcctttgtag

SEQ ID NO: 1787946 - DNA, 15 bp, Homo sapiens
gcctgcctttgtagg

SEQ ID NO: 1787947 - DNA, 15 bp, Homo sapiens
cctgcctttgtaggc

SEQ ID NO: 1787948 - DNA, 15 bp, Homo sapiens
ctgcctttgtaggct

SEQ ID NO: 1787949 - DNA, 15 bp, Homo sapiens
tgcctttgtaggctc

SEQ ID NO: 1787950 - DNA, 15 bp, Homo sapiens
gcctttgtaggctcc

SEQ ID NO: 1787951 - DNA, 15 bp, Homo sapiens
cctttgtaggctcca

SEQ ID NO: 1787952 - DNA, 15 bp, Homo sapiens
ctttgtaggctccac

SEQ ID NO: 1787953 - DNA, 15 bp, Homo sapiens
tttgtaggctccacc

SEQ ID NO: 1787954 - DNA, 15 bp, Homo sapiens
ttgtaggctccacct

SEQ ID NO: 1787955 - DNA, 15 bp, Homo sapiens
tgtaggctccacctc

SEQ ID NO: 1787956 - DNA, 15 bp, Homo sapiens
gtaggctccacctct

SEQ ID NO: 1787957 - DNA, 15 bp, Homo sapiens
taggctccacctctg

SEQ ID NO: 1787958 - DNA, 15 bp, Homo sapiens
aggctccacctctgg

SEQ ID NO: 1787959 - DNA, 15 bp, Homo sapiens
ggctccacctctggg

SEQ ID NO: 1787960 - DNA, 15 bp, Homo sapiens
gctccacctctgggg

SEQ ID NO: 1787961 - DNA, 15 bp, Homo sapiens
ctccacctctggggg

SEQ ID NO: 1787962 - DNA, 15 bp, Homo sapiens
ctgggggcagggcac

SEQ ID NO: 1787963 - DNA, 15 bp, Homo sapiens
tgggggcagggcaca

SEQ ID NO: 1787964 - DNA, 15 bp, Homo sapiens
gggggcagggcacag

SEQ ID NO: 1787965 - DNA, 15 bp, Homo sapiens
ggggcagggcacaga

SEQ ID NO: 1787966 - DNA, 15 bp, Homo sapiens
gggcagggcacagac

SEQ ID NO: 1787967 - DNA, 15 bp, Homo sapiens
ggcagggcacagaca

SEQ ID NO: 1787968 - DNA, 15 bp, Homo sapiens
gcagggcacagacaa

SEQ ID NO: 1787969 - DNA, 15 bp, Homo sapiens
cagggcacagacaaa

SEQ ID NO: 1787970 - DNA, 15 bp, Homo sapiens
agggcacagacaaac

SEQ ID NO: 1787971 - DNA, 15 bp, Homo sapiens
gggcacagacaaaca

SEQ ID NO: 1787972 - DNA, 15 bp, Homo sapiens
ggcacagacaaacaa

SEQ ID NO: 1787973 - DNA, 15 bp, Homo sapiens
gcacagacaaacaaa

SEQ ID NO: 1787974 - DNA, 15 bp, Homo sapiens
cacagacaaacaaaa

SEQ ID NO: 1787975 - DNA, 15 bp, Homo sapiens
cagacaaacaaaaag

SEQ ID NO: 1787976 - DNA, 15 bp, Homo sapiens
agacaaacaaaaaga

SEQ ID NO: 1787977 - DNA, 15 bp, Homo sapiens
gacaaacaaaaagac

SEQ ID NO: 1787978 - DNA, 15 bp, Homo sapiens
acaaacaaaaagaca

SEQ ID NO: 1787979 - DNA, 15 bp, Homo sapiens
caaacaaaaagacag

SEQ ID NO: 1787980 - DNA, 15 bp, Homo sapiens
aaacaaaaagacagc

SEQ ID NO: 1787981 - DNA, 15 bp, Homo sapiens
aacaaaaagacagca

SEQ ID NO: 1787982 - DNA, 15 bp, Homo sapiens
acaaaaagacagcag

SEQ ID NO: 1787983 - DNA, 15 bp, Homo sapiens
caaaaagacagcagt

SEQ ID NO: 1787984 - DNA, 15 bp, Homo sapiens
aaaaagacagcagta

SEQ ID NO: 1787985 - DNA, 15 bp, Homo sapiens
aaaagacagcagtaa

SEQ ID NO: 1787986 - DNA, 15 bp, Homo sapiens
aaagacagcagtaac

SEQ ID NO: 1787987 - DNA, 15 bp, Homo sapiens
aagacagcagtaacc

SEQ ID NO: 1787988 - DNA, 15 bp, Homo sapiens
agacagcagtaacct

SEQ ID NO: 1787989 - DNA, 15 bp, Homo sapiens
gacagcagtaacctc

SEQ ID NO: 1787990 - DNA, 15 bp, Homo sapiens
acagcagtaacctct

SEQ ID NO: 1787991 - DNA, 15 bp, Homo sapiens
cagcagtaacctctg

SEQ ID NO: 1787992 - DNA, 15 bp, Homo sapiens
agcagtaacctctgc

SEQ ID NO: 1787993 - DNA, 15 bp, Homo sapiens
gcagtaacctctgca

SEQ ID NO: 1787994 - DNA, 15 bp, Homo sapiens
cagtaacctctgcag

SEQ ID NO: 1787995 - DNA, 15 bp, Homo sapiens
agtaacctctgcaga

SEQ ID NO: 1787996 - DNA, 15 bp, Homo sapiens
gtaacctctgcagac

SEQ ID NO: 1787997 - DNA, 15 bp, Homo sapiens
taacctctgcagact

SEQ ID NO: 1787998 - DNA, 15 bp, Homo sapiens
ctctgcagacttaag

SEQ ID NO: 1787999 - DNA, 15 bp, Homo sapiens
tctgcagacttaagt

SEQ ID NO: 1788000 - DNA, 15 bp, Homo sapiens
ctgcagacttaagtg

SEQ ID NO: 1788001 - DNA, 15 bp, Homo sapiens
gcagacttaagtgtc

SEQ ID NO: 1788002 - DNA, 15 bp, Homo sapiens
cagacttaagtgtcc

SEQ ID NO: 1788003 - DNA, 15 bp, Homo sapiens
agacttaagtgtccc

SEQ ID NO: 1788004 - DNA, 15 bp, Homo sapiens
gacttaagtgtccct

SEQ ID NO: 1788005 - DNA, 15 bp, Homo sapiens
acttaagtgtccctg

SEQ ID NO: 1788006 - DNA, 15 bp, Homo sapiens
cttaagtgtccctgt

SEQ ID NO: 1788007 - DNA, 15 bp, Homo sapiens
ttaagtgtccctgtc

SEQ ID NO: 1788008 - DNA, 15 bp, Homo sapiens
taagtgtccctgtct

SEQ ID NO: 1788009 - DNA, 15 bp, Homo sapiens
aagtgtccctgtctg

SEQ ID NO: 1788010 - DNA, 15 bp, Homo sapiens
agtgtccctgtctga

SEQ ID NO: 1788011 - DNA, 15 bp, Homo sapiens
gtgtccctgtctgac

SEQ ID NO: 1788012 - DNA, 15 bp, Homo sapiens
acagctttgaagaga

SEQ ID NO: 1788013 - DNA, 15 bp, Homo sapiens
cagctttgaagagag

SEQ ID NO: 1788014 - DNA, 15 bp, Homo sapiens
agctttgaagagagc

SEQ ID NO: 1788015 - DNA, 15 bp, Homo sapiens
gctttgaagagagca

SEQ ID NO: 1788016 - DNA, 15 bp, Homo sapiens
ctttgaagagagcag

SEQ ID NO: 1788017 - DNA, 15 bp, Homo sapiens
tttgaagagagcagt

SEQ ID NO: 1788018 - DNA, 15 bp, Homo sapiens
ttgaagagagcagtg

SEQ ID NO: 1788019 - DNA, 15 bp, Homo sapiens
tgaagagagcagtgg

SEQ ID NO: 1788020 - DNA, 15 bp, Homo sapiens
gaagagagcagtggt

SEQ ID NO: 1788021 - DNA, 15 bp, Homo sapiens
aagagagcagtggtt

SEQ ID NO: 1788022 - DNA, 15 bp, Homo sapiens
agagagcagtggttc

SEQ ID NO: 1788023 - DNA, 15 bp, Homo sapiens
gagagcagtggttct

SEQ ID NO: 1788024 - DNA, 15 bp, Homo sapiens
agagcagtggttctc

SEQ ID NO: 1788025 - DNA, 15 bp, Homo sapiens
gagcagtggttctcc

SEQ ID NO: 1788026 - DNA, 15 bp, Homo sapiens
agcagtggttctccc

SEQ ID NO: 1788027 - DNA, 15 bp, Homo sapiens
gcagtggttctccca

SEQ ID NO: 1788028 - DNA, 15 bp, Homo sapiens
cagtggttctcccag

SEQ ID NO: 1788029 - DNA, 15 bp, Homo sapiens
tggttctcccagcac

SEQ ID NO: 1788030 - DNA, 15 bp, Homo sapiens
ggttctcccagcacg

SEQ ID NO: 1788031 - DNA, 15 bp, Homo sapiens
gttctcccagcacgc

SEQ ID NO: 1788032 - DNA, 15 bp, Homo sapiens
ttctcccagcacgca

SEQ ID NO: 1788033 - DNA, 15 bp, Homo sapiens
tctcccagcacgcag

SEQ ID NO: 1788034 - DNA, 15 bp, Homo sapiens
ctcccagcacgcagc

SEQ ID NO: 1788035 - DNA, 15 bp, Homo sapiens
tcccagcacgcagct

SEQ ID NO: 1788036 - DNA, 15 bp, Homo sapiens
cccagcacgcagctg

SEQ ID NO: 1788037 - DNA, 15 bp, Homo sapiens
ccagcacgcagctgg

SEQ ID NO: 1788038 - DNA, 15 bp, Homo sapiens
cagcacgcagctgga

SEQ ID NO: 1788039 - DNA, 15 bp, Homo sapiens
agcacgcagctggag

SEQ ID NO: 1788040 - DNA, 15 bp, Homo sapiens
gcacgcagctggaga

SEQ ID NO: 1788041 - DNA, 15 bp, Homo sapiens
cacgcagctggagat

SEQ ID NO: 1788042 - DNA, 15 bp, Homo sapiens
acgcagctggagatc

SEQ ID NO: 1788043 - DNA, 15 bp, Homo sapiens
cgcagctggagatct

SEQ ID NO: 1788044 - DNA, 15 bp, Homo sapiens
gcagctggagatctg

SEQ ID NO: 1788045 - DNA, 15 bp, Homo sapiens
cagctggagatctga

SEQ ID NO: 1788046 - DNA, 15 bp, Homo sapiens
agctggagatctgag

SEQ ID NO: 1788047 - DNA, 15 bp, Homo sapiens
gctggagatctgaga

SEQ ID NO: 1788048 - DNA, 15 bp, Homo sapiens
ctggagatctgagaa

SEQ ID NO: 1788049 - DNA, 15 bp, Homo sapiens
tggagatctgagaac

SEQ ID NO: 1788050 - DNA, 15 bp, Homo sapiens
ggagatctgagaacg

SEQ ID NO: 1788051 - DNA, 15 bp, Homo sapiens
gagatctgagaacgg

SEQ ID NO: 1788052 - DNA, 15 bp, Homo sapiens
agatctgagaacggg

SEQ ID NO: 1788053 - DNA, 15 bp, Homo sapiens
gatctgagaacgggc

SEQ ID NO: 1788054 - DNA, 15 bp, Homo sapiens
atctgagaacgggca

SEQ ID NO: 1788055 - DNA, 15 bp, Homo sapiens
tctgagaacgggcag

SEQ ID NO: 1788056 - DNA, 15 bp, Homo sapiens
ctgagaacgggcaga

SEQ ID NO: 1788057 - DNA, 15 bp, Homo sapiens
tgagaacgggcagac

SEQ ID NO: 1788058 - DNA, 15 bp, Homo sapiens
gagaacgggcagact

SEQ ID NO: 1788059 - DNA, 15 bp, Homo sapiens
agaacgggcagactg

SEQ ID NO: 1788060 - DNA, 15 bp, Homo sapiens
gaacgggcagactgc

SEQ ID NO: 1788061 - DNA, 15 bp, Homo sapiens
aacgggcagactgcc

SEQ ID NO: 1788062 - DNA, 15 bp, Homo sapiens
acgggcagactgcct

SEQ ID NO: 1788063 - DNA, 15 bp, Homo sapiens
cgggcagactgcctc

SEQ ID NO: 1788064 - DNA, 15 bp, Homo sapiens
gggcagactgcctcc

SEQ ID NO: 1788065 - DNA, 15 bp, Homo sapiens
ggcagactgcctcct

SEQ ID NO: 1788066 - DNA, 15 bp, Homo sapiens
gcagactgcctcctc

SEQ ID NO: 1788067 - DNA, 15 bp, Homo sapiens
tccctgacccctgac

SEQ ID NO: 1788068 - DNA, 15 bp, Homo sapiens
ccctgacccctgacc

SEQ ID NO: 1788069 - DNA, 15 bp, Homo sapiens
cctgacccctgaccc

SEQ ID NO: 1788070 - DNA, 15 bp, Homo sapiens
ctgacccctgacccc

SEQ ID NO: 1788071 - DNA, 15 bp, Homo sapiens
tgacccctgaccccc

SEQ ID NO: 1788072 - DNA, 15 bp, Homo sapiens
gacccctgacccccg

SEQ ID NO: 1788073 - DNA, 15 bp, Homo sapiens
acccctgacccccga

SEQ ID NO: 1788074 - DNA, 15 bp, Homo sapiens
cccctgacccccgag

SEQ ID NO: 1788075 - DNA, 15 bp, Homo sapiens
ccctgacccccgagc

SEQ ID NO: 1788076 - DNA, 15 bp, Homo sapiens
cctgacccccgagca

SEQ ID NO: 1788077 - DNA, 15 bp, Homo sapiens
ctgacccccgagcag

SEQ ID NO: 1788078 - DNA, 15 bp, Homo sapiens
tgacccccgagcagc

SEQ ID NO: 1788079 - DNA, 15 bp, Homo sapiens
gacccccgagcagcc

SEQ ID NO: 1788080 - DNA, 15 bp, Homo sapiens
acccccgagcagcct

SEQ ID NO: 1788081 - DNA, 15 bp, Homo sapiens
cccccgagcagccta

SEQ ID NO: 1788082 - DNA, 15 bp, Homo sapiens
ccccgagcagcctaa

SEQ ID NO: 1788083 - DNA, 15 bp, Homo sapiens
cccgagcagcctaac

SEQ ID NO: 1788084 - DNA, 15 bp, Homo sapiens
ccgagcagcctaact

SEQ ID NO: 1788085 - DNA, 15 bp, Homo sapiens
cgagcagcctaactg

SEQ ID NO: 1788086 - DNA, 15 bp, Homo sapiens
gagcagcctaactgg

SEQ ID NO: 1788087 - DNA, 15 bp, Homo sapiens
agcagcctaactggg

SEQ ID NO: 1788088 - DNA, 15 bp, Homo sapiens
gcagcctaactggga

SEQ ID NO: 1788089 - DNA, 15 bp, Homo sapiens
cagcctaactgggag

SEQ ID NO: 1788090 - DNA, 15 bp, Homo sapiens
taactgggaggcacc

SEQ ID NO: 1788091 - DNA, 15 bp, Homo sapiens
aactgggaggcaccc

SEQ ID NO: 1788092 - DNA, 15 bp, Homo sapiens
actgggaggcacccc

SEQ ID NO: 1788093 - DNA, 15 bp, Homo sapiens
ctgggaggcaccccc

SEQ ID NO: 1788094 - DNA, 15 bp, Homo sapiens
tgggaggcacccccc

SEQ ID NO: 1788095 - DNA, 15 bp, Homo sapiens
gggaggcacccccca

SEQ ID NO: 1788096 - DNA, 15 bp, Homo sapiens
ggaggcaccccccag

SEQ ID NO: 1788097 - DNA, 15 bp, Homo sapiens
gaggcaccccccagc

SEQ ID NO: 1788098 - DNA, 15 bp, Homo sapiens
aggcaccccccagca

SEQ ID NO: 1788099 - DNA, 15 bp, Homo sapiens
ggcaccccccagcag

SEQ ID NO: 1788100 - DNA, 15 bp, Homo sapiens
gcaccccccagcagg

SEQ ID NO: 1788101 - DNA, 15 bp, Homo sapiens
caccccccagcaggg

SEQ ID NO: 1788102 - DNA, 15 bp, Homo sapiens
accccccagcagggg

SEQ ID NO: 1788103 - DNA, 15 bp, Homo sapiens
ccccccagcaggggc

SEQ ID NO: 1788104 - DNA, 15 bp, Homo sapiens
cccccagcaggggca

SEQ ID NO: 1788105 - DNA, 15 bp, Homo sapiens
ccccagcaggggcac

SEQ ID NO: 1788106 - DNA, 15 bp, Homo sapiens
cccagcaggggcaca

SEQ ID NO: 1788107 - DNA, 15 bp, Homo sapiens
ccagcaggggcacac

SEQ ID NO: 1788108 - DNA, 15 bp, Homo sapiens
cagcaggggcacact

SEQ ID NO: 1788109 - DNA, 15 bp, Homo sapiens
agcaggggcacactg

SEQ ID NO: 1788110 - DNA, 15 bp, Homo sapiens
gcaggggcacactga

SEQ ID NO: 1788111 - DNA, 15 bp, Homo sapiens
caggggcacactgac

SEQ ID NO: 1788112 - DNA, 15 bp, Homo sapiens
aggggcacactgaca

SEQ ID NO: 1788113 - DNA, 15 bp, Homo sapiens
ggggcacactgacac

SEQ ID NO: 1788114 - DNA, 15 bp, Homo sapiens
gggcacactgacacc

SEQ ID NO: 1788115 - DNA, 15 bp, Homo sapiens
ggcacactgacacct

SEQ ID NO: 1788116 - DNA, 15 bp, Homo sapiens
gcacactgacacctc

SEQ ID NO: 1788117 - DNA, 15 bp, Homo sapiens
cacactgacacctca

SEQ ID NO: 1788118 - DNA, 15 bp, Homo sapiens
acactgacacctcac

SEQ ID NO: 1788119 - DNA, 15 bp, Homo sapiens
cactgacacctcaca

SEQ ID NO: 1788120 - DNA, 15 bp, Homo sapiens
actgacacctcacaa

SEQ ID NO: 1788121 - DNA, 15 bp, Homo sapiens
ctgacacctcacaag

SEQ ID NO: 1788122 - DNA, 15 bp, Homo sapiens
tgacacctcacaagg

SEQ ID NO: 1788123 - DNA, 15 bp, Homo sapiens
gacacctcacaaggc

SEQ ID NO: 1788124 - DNA, 15 bp, Homo sapiens
acacctcacaaggca

SEQ ID NO: 1788125 - DNA, 15 bp, Homo sapiens
cacctcacaaggcag

SEQ ID NO: 1788126 - DNA, 15 bp, Homo sapiens
acctcacaaggcagg

SEQ ID NO: 1788127 - DNA, 15 bp, Homo sapiens
cctcacaaggcaggg

SEQ ID NO: 1788128 - DNA, 15 bp, Homo sapiens
ctcacaaggcagggt

SEQ ID NO: 1788129 - DNA, 15 bp, Homo sapiens
tcacaaggcagggta

SEQ ID NO: 1788130 - DNA, 15 bp, Homo sapiens
cacaaggcagggtat

SEQ ID NO: 1788131 - DNA, 15 bp, Homo sapiens
acaaggcagggtatt

SEQ ID NO: 1788132 - DNA, 15 bp, Homo sapiens
caaggcagggtattc

SEQ ID NO: 1788133 - DNA, 15 bp, Homo sapiens
aaggcagggtattcc

SEQ ID NO: 1788134 - DNA, 15 bp, Homo sapiens
aggcagggtattcca

SEQ ID NO: 1788135 - DNA, 15 bp, Homo sapiens
ggcagggtattccaa

SEQ ID NO: 1788136 - DNA, 15 bp, Homo sapiens
gcagggtattccaac

SEQ ID NO: 1788137 - DNA, 15 bp, Homo sapiens
cagggtattccaaca

SEQ ID NO: 1788138 - DNA, 15 bp, Homo sapiens
agggtattccaacag

SEQ ID NO: 1788139 - DNA, 15 bp, Homo sapiens
gggtattccaacaga

SEQ ID NO: 1788140 - DNA, 15 bp, Homo sapiens
ggtattccaacagac

SEQ ID NO: 1788141 - DNA, 15 bp, Homo sapiens
gtattccaacagacc

SEQ ID NO: 1788142 - DNA, 15 bp, Homo sapiens
tattccaacagacct

SEQ ID NO: 1788143 - DNA, 15 bp, Homo sapiens
attccaacagacctg

SEQ ID NO: 1788144 - DNA, 15 bp, Homo sapiens
ttccaacagacctgc

SEQ ID NO: 1788145 - DNA, 15 bp, Homo sapiens
gctgagggtcctgtc

SEQ ID NO: 1788146 - DNA, 15 bp, Homo sapiens
ctgagggtcctgtct

SEQ ID NO: 1788147 - DNA, 15 bp, Homo sapiens
tgagggtcctgtctg

SEQ ID NO: 1788148 - DNA, 15 bp, Homo sapiens
gagggtcctgtctgt

SEQ ID NO: 1788149 - DNA, 15 bp, Homo sapiens
agggtcctgtctgtt

SEQ ID NO: 1788150 - DNA, 15 bp, Homo sapiens
gggtcctgtctgtta

SEQ ID NO: 1788151 - DNA, 15 bp, Homo sapiens
ggtcctgtctgttag

SEQ ID NO: 1788152 - DNA, 15 bp, Homo sapiens
gtcctgtctgttaga

SEQ ID NO: 1788153 - DNA, 15 bp, Homo sapiens
tcctgtctgttagaa

SEQ ID NO: 1788154 - DNA, 15 bp, Homo sapiens
cctgtctgttagaag

SEQ ID NO: 1788155 - DNA, 15 bp, Homo sapiens
ctgtctgttagaagg

SEQ ID NO: 1788156 - DNA, 15 bp, Homo sapiens
tgtctgttagaagga

SEQ ID NO: 1788157 - DNA, 15 bp, Homo sapiens
gtctgttagaaggaa

SEQ ID NO: 1788158 - DNA, 15 bp, Homo sapiens
tctgttagaaggaaa

SEQ ID NO: 1788159 - DNA, 15 bp, Homo sapiens
aggaaaactaacaac

SEQ ID NO: 1788160 - DNA, 15 bp, Homo sapiens
ggaaaactaacaacc

SEQ ID NO: 1788161 - DNA, 15 bp, Homo sapiens
gaaaactaacaacca

SEQ ID NO: 1788162 - DNA, 15 bp, Homo sapiens
aaaactaacaaccag

SEQ ID NO: 1788163 - DNA, 15 bp, Homo sapiens
aaactaacaaccaga

SEQ ID NO: 1788164 - DNA, 15 bp, Homo sapiens
aactaacaaccagaa

SEQ ID NO: 1788165 - DNA, 15 bp, Homo sapiens
actaacaaccagaaa

SEQ ID NO: 1788166 - DNA, 15 bp, Homo sapiens
ctaacaaccagaaag

SEQ ID NO: 1788167 - DNA, 15 bp, Homo sapiens
taacaaccagaaagg

SEQ ID NO: 1788168 - DNA, 15 bp, Homo sapiens
aacaaccagaaagga

SEQ ID NO: 1788169 - DNA, 15 bp, Homo sapiens
acaaccagaaaggac

SEQ ID NO: 1788170 - DNA, 15 bp, Homo sapiens
caaccagaaaggaca

SEQ ID NO: 1788171 - DNA, 15 bp, Homo sapiens
aaccagaaaggacat

SEQ ID NO: 1788172 - DNA, 15 bp, Homo sapiens
accagaaaggacatc

SEQ ID NO: 1788173 - DNA, 15 bp, Homo sapiens
ccagaaaggacatct

SEQ ID NO: 1788174 - DNA, 15 bp, Homo sapiens
cagaaaggacatcta

SEQ ID NO: 1788175 - DNA, 15 bp, Homo sapiens
agaaaggacatctac

SEQ ID NO: 1788176 - DNA, 15 bp, Homo sapiens
gaaaggacatctaca

SEQ ID NO: 1788177 - DNA, 15 bp, Homo sapiens
aaaggacatctacac

SEQ ID NO: 1788178 - DNA, 15 bp, Homo sapiens
aaggacatctacacc

SEQ ID NO: 1788179 - DNA, 15 bp, Homo sapiens
aggacatctacaccg

SEQ ID NO: 1788180 - DNA, 15 bp, Homo sapiens
ggacatctacaccga

SEQ ID NO: 1788181 - DNA, 15 bp, Homo sapiens
gacatctacaccgaa

SEQ ID NO: 1788182 - DNA, 15 bp, Homo sapiens
acatctacaccgaaa

SEQ ID NO: 1788183 - DNA, 15 bp, Homo sapiens
catctacaccgaaaa

SEQ ID NO: 1788184 - DNA, 15 bp, Homo sapiens
atctacaccgaaaac

SEQ ID NO: 1788185 - DNA, 15 bp, Homo sapiens
tctacaccgaaaacc

SEQ ID NO: 1788186 - DNA, 15 bp, Homo sapiens
ctacaccgaaaaccc

SEQ ID NO: 1788187 - DNA, 15 bp, Homo sapiens
tacaccgaaaaccca

SEQ ID NO: 1788188 - DNA, 15 bp, Homo sapiens
acaccgaaaacccat

SEQ ID NO: 1788189 - DNA, 15 bp, Homo sapiens
caccgaaaacccatc

SEQ ID NO: 1788190 - DNA, 15 bp, Homo sapiens
accgaaaacccatct

SEQ ID NO: 1788191 - DNA, 15 bp, Homo sapiens
ccgaaaacccatctg

SEQ ID NO: 1788192 - DNA, 15 bp, Homo sapiens
cgaaaacccatctgt

SEQ ID NO: 1788193 - DNA, 15 bp, Homo sapiens
gaaaacccatctgta

SEQ ID NO: 1788194 - DNA, 15 bp, Homo sapiens
aaaacccatctgtac

SEQ ID NO: 1788195 - DNA, 15 bp, Homo sapiens
aaacccatctgtaca

SEQ ID NO: 1788196 - DNA, 15 bp, Homo sapiens
aacccatctgtacat

SEQ ID NO: 1788197 - DNA, 15 bp, Homo sapiens
acccatctgtacatc

SEQ ID NO: 1788198 - DNA, 15 bp, Homo sapiens
cccatctgtacatca

SEQ ID NO: 1788199 - DNA, 15 bp, Homo sapiens
ccatctgtacatcac

SEQ ID NO: 1788200 - DNA, 15 bp, Homo sapiens
catctgtacatcacc

SEQ ID NO: 1788201 - DNA, 15 bp, Homo sapiens
atctgtacatcacca

SEQ ID NO: 1788202 - DNA, 15 bp, Homo sapiens
tctgtacatcaccat

SEQ ID NO: 1788203 - DNA, 15 bp, Homo sapiens
ctgtacatcaccatc

SEQ ID NO: 1788204 - DNA, 15 bp, Homo sapiens
tgtacatcaccatca

SEQ ID NO: 1788205 - DNA, 15 bp, Homo sapiens
gtacatcaccatcat

SEQ ID NO: 1788206 - DNA, 15 bp, Homo sapiens
tacatcaccatcatc

SEQ ID NO: 1788207 - DNA, 15 bp, Homo sapiens
acatcaccatcatca

SEQ ID NO: 1788208 - DNA, 15 bp, Homo sapiens
catcaccatcatcaa

SEQ ID NO: 1788209 - DNA, 15 bp, Homo sapiens
catcaaagaccaaaa

SEQ ID NO: 1788210 - DNA, 15 bp, Homo sapiens
atcaaagaccaaaag

SEQ ID NO: 1788211 - DNA, 15 bp, Homo sapiens
tcaaagaccaaaagt

SEQ ID NO: 1788212 - DNA, 15 bp, Homo sapiens
caaagaccaaaagta

SEQ ID NO: 1788213 - DNA, 15 bp, Homo sapiens
aaagaccaaaagtag

SEQ ID NO: 1788214 - DNA, 15 bp, Homo sapiens
aagaccaaaagtaga

SEQ ID NO: 1788215 - DNA, 15 bp, Homo sapiens
agaccaaaagtagat

SEQ ID NO: 1788216 - DNA, 15 bp, Homo sapiens
gaccaaaagtagata

SEQ ID NO: 1788217 - DNA, 15 bp, Homo sapiens
accaaaagtagataa

SEQ ID NO: 1788218 - DNA, 15 bp, Homo sapiens
ccaaaagtagataaa

SEQ ID NO: 1788219 - DNA, 15 bp, Homo sapiens
caaaagtagataaaa

SEQ ID NO: 1788220 - DNA, 15 bp, Homo sapiens
aaaagtagataaaac

SEQ ID NO: 1788221 - DNA, 15 bp, Homo sapiens
aaagtagataaaacc

SEQ ID NO: 1788222 - DNA, 15 bp, Homo sapiens
aagtagataaaacca

SEQ ID NO: 1788223 - DNA, 15 bp, Homo sapiens
agtagataaaaccac

SEQ ID NO: 1788224 - DNA, 15 bp, Homo sapiens
tggggaaaaaacaga

SEQ ID NO: 1788225 - DNA, 15 bp, Homo sapiens
ggggaaaaaacagaa

SEQ ID NO: 1788226 - DNA, 15 bp, Homo sapiens
gggaaaaaacagaac

SEQ ID NO: 1788227 - DNA, 15 bp, Homo sapiens
ggaaaaaacagaaca

SEQ ID NO: 1788228 - DNA, 15 bp, Homo sapiens
gaaaaaacagaacag

SEQ ID NO: 1788229 - DNA, 15 bp, Homo sapiens
aaaaaacagaacaga

SEQ ID NO: 1788230 - DNA, 15 bp, Homo sapiens
aaaaacagaacagaa

SEQ ID NO: 1788231 - DNA, 15 bp, Homo sapiens
aaaacagaacagaaa

SEQ ID NO: 1788232 - DNA, 15 bp, Homo sapiens
aaacagaacagaaaa

SEQ ID NO: 1788233 - DNA, 15 bp, Homo sapiens
aacagaacagaaaaa

SEQ ID NO: 1788234 - DNA, 15 bp, Homo sapiens
acagaacagaaaaac

SEQ ID NO: 1788235 - DNA, 15 bp, Homo sapiens
cagaacagaaaaact

SEQ ID NO: 1788236 - DNA, 15 bp, Homo sapiens
agaacagaaaaactg

SEQ ID NO: 1788237 - DNA, 15 bp, Homo sapiens
gaacagaaaaactgg

SEQ ID NO: 1788238 - DNA, 15 bp, Homo sapiens
aacagaaaaactgga

SEQ ID NO: 1788239 - DNA, 15 bp, Homo sapiens
acagaaaaactggaa

SEQ ID NO: 1788240 - DNA, 15 bp, Homo sapiens
cagaaaaactggaaa

SEQ ID NO: 1788241 - DNA, 15 bp, Homo sapiens
agaaaaactggaaac

SEQ ID NO: 1788242 - DNA, 15 bp, Homo sapiens
gaaaaactggaaact

SEQ ID NO: 1788243 - DNA, 15 bp, Homo sapiens
aaaaactggaaactc

SEQ ID NO: 1788244 - DNA, 15 bp, Homo sapiens
aaaactggaaactct

SEQ ID NO: 1788245 - DNA, 15 bp, Homo sapiens
aaactggaaactcta

SEQ ID NO: 1788246 - DNA, 15 bp, Homo sapiens
aactggaaactctaa

SEQ ID NO: 1788247 - DNA, 15 bp, Homo sapiens
actggaaactctaaa

SEQ ID NO: 1788248 - DNA, 15 bp, Homo sapiens
ctggaaactctaaaa

SEQ ID NO: 1788249 - DNA, 15 bp, Homo sapiens
tggaaactctaaaac

SEQ ID NO: 1788250 - DNA, 15 bp, Homo sapiens
ggaaactctaaaacg

SEQ ID NO: 1788251 - DNA, 15 bp, Homo sapiens
gaaactctaaaacgc

SEQ ID NO: 1788252 - DNA, 15 bp, Homo sapiens
aaactctaaaacgca

SEQ ID NO: 1788253 - DNA, 15 bp, Homo sapiens
aactctaaaacgcag

SEQ ID NO: 1788254 - DNA, 15 bp, Homo sapiens
actctaaaacgcaga

SEQ ID NO: 1788255 - DNA, 15 bp, Homo sapiens
ctctaaaacgcagag

SEQ ID NO: 1788256 - DNA, 15 bp, Homo sapiens
tctaaaacgcagagc

SEQ ID NO: 1788257 - DNA, 15 bp, Homo sapiens
ctaaaacgcagagcg

SEQ ID NO: 1788258 - DNA, 15 bp, Homo sapiens
taaaacgcagagcgc

SEQ ID NO: 1788259 - DNA, 15 bp, Homo sapiens
aaaacgcagagcgcc

SEQ ID NO: 1788260 - DNA, 15 bp, Homo sapiens
aaacgcagagcgcct

SEQ ID NO: 1788261 - DNA, 15 bp, Homo sapiens
aacgcagagcgcctc

SEQ ID NO: 1788262 - DNA, 15 bp, Homo sapiens
acgcagagcgcctct

SEQ ID NO: 1788263 - DNA, 15 bp, Homo sapiens
cgcagagcgcctctc

SEQ ID NO: 1788264 - DNA, 15 bp, Homo sapiens
gcagagcgcctctcc

SEQ ID NO: 1788265 - DNA, 15 bp, Homo sapiens
cagagcgcctctcct

SEQ ID NO: 1788266 - DNA, 15 bp, Homo sapiens
agagcgcctctcctc

SEQ ID NO: 1788267 - DNA, 15 bp, Homo sapiens
gagcgcctctcctcc

SEQ ID NO: 1788268 - DNA, 15 bp, Homo sapiens
agcgcctctcctcct

SEQ ID NO: 1788269 - DNA, 15 bp, Homo sapiens
gcgcctctcctcctc

SEQ ID NO: 1788270 - DNA, 15 bp, Homo sapiens
cgcctctcctcctcc

SEQ ID NO: 1788271 - DNA, 15 bp, Homo sapiens
gcctctcctcctcca

SEQ ID NO: 1788272 - DNA, 15 bp, Homo sapiens
cctctcctcctccaa

SEQ ID NO: 1788273 - DNA, 15 bp, Homo sapiens
ctctcctcctccaaa

SEQ ID NO: 1788274 - DNA, 15 bp, Homo sapiens
tctcctcctccaaag

SEQ ID NO: 1788275 - DNA, 15 bp, Homo sapiens
ctcctcctccaaagg

SEQ ID NO: 1788276 - DNA, 15 bp, Homo sapiens
tcctcctccaaagga

SEQ ID NO: 1788277 - DNA, 15 bp, Homo sapiens
cctcctccaaaggaa

SEQ ID NO: 1788278 - DNA, 15 bp, Homo sapiens
ctcctccaaaggaac

SEQ ID NO: 1788279 - DNA, 15 bp, Homo sapiens
tcctccaaaggaaca

SEQ ID NO: 1788280 - DNA, 15 bp, Homo sapiens
cctccaaaggaacac

SEQ ID NO: 1788281 - DNA, 15 bp, Homo sapiens
ctccaaaggaacaca

SEQ ID NO: 1788282 - DNA, 15 bp, Homo sapiens
tccaaaggaacacag

SEQ ID NO: 1788283 - DNA, 15 bp, Homo sapiens
ccaaaggaacacagt

SEQ ID NO: 1788284 - DNA, 15 bp, Homo sapiens
caaaggaacacagtt

SEQ ID NO: 1788285 - DNA, 15 bp, Homo sapiens
aaaggaacacagttc

SEQ ID NO: 1788286 - DNA, 15 bp, Homo sapiens
aaggaacacagttcc

SEQ ID NO: 1788287 - DNA, 15 bp, Homo sapiens
aggaacacagttcct

SEQ ID NO: 1788288 - DNA, 15 bp, Homo sapiens
ggaacacagttcctc

SEQ ID NO: 1788289 - DNA, 15 bp, Homo sapiens
gaacacagttcctca

SEQ ID NO: 1788290 - DNA, 15 bp, Homo sapiens
aacacagttcctcac

SEQ ID NO: 1788291 - DNA, 15 bp, Homo sapiens
acacagttcctcacc

SEQ ID NO: 1788292 - DNA, 15 bp, Homo sapiens
cacagttcctcacca

SEQ ID NO: 1788293 - DNA, 15 bp, Homo sapiens
acagttcctcaccag

SEQ ID NO: 1788294 - DNA, 15 bp, Homo sapiens
cagttcctcaccagc

SEQ ID NO: 1788295 - DNA, 15 bp, Homo sapiens
agttcctcaccagca

SEQ ID NO: 1788296 - DNA, 15 bp, Homo sapiens
gttcctcaccagcaa

SEQ ID NO: 1788297 - DNA, 15 bp, Homo sapiens
ttcctcaccagcaac

SEQ ID NO: 1788298 - DNA, 15 bp, Homo sapiens
tcctcaccagcaacg

SEQ ID NO: 1788299 - DNA, 15 bp, Homo sapiens
cctcaccagcaacgg

SEQ ID NO: 1788300 - DNA, 15 bp, Homo sapiens
ctcaccagcaacgga

SEQ ID NO: 1788301 - DNA, 15 bp, Homo sapiens
tcaccagcaacggaa

SEQ ID NO: 1788302 - DNA, 15 bp, Homo sapiens
caccagcaacggaac

SEQ ID NO: 1788303 - DNA, 15 bp, Homo sapiens
accagcaacggaaca

SEQ ID NO: 1788304 - DNA, 15 bp, Homo sapiens
ccagcaacggaacaa

SEQ ID NO: 1788305 - DNA, 15 bp, Homo sapiens
cagcaacggaacaaa

SEQ ID NO: 1788306 - DNA, 15 bp, Homo sapiens
gcaacggaacaaagt

SEQ ID NO: 1788307 - DNA, 15 bp, Homo sapiens
caacggaacaaagtt

SEQ ID NO: 1788308 - DNA, 15 bp, Homo sapiens
aacggaacaaagttg

SEQ ID NO: 1788309 - DNA, 15 bp, Homo sapiens
acggaacaaagttgg

SEQ ID NO: 1788310 - DNA, 15 bp, Homo sapiens
cggaacaaagttgga

SEQ ID NO: 1788311 - DNA, 15 bp, Homo sapiens
ggaacaaagttggac

SEQ ID NO: 1788312 - DNA, 15 bp, Homo sapiens
gaacaaagttggacg

SEQ ID NO: 1788313 - DNA, 15 bp, Homo sapiens
aacaaagttggacgg

SEQ ID NO: 1788314 - DNA, 15 bp, Homo sapiens
acaaagttggacgga

SEQ ID NO: 1788315 - DNA, 15 bp, Homo sapiens
caaagttggacggag

SEQ ID NO: 1788316 - DNA, 15 bp, Homo sapiens
aaagttggacggaga

SEQ ID NO: 1788317 - DNA, 15 bp, Homo sapiens
aagttggacggagaa

SEQ ID NO: 1788318 - DNA, 15 bp, Homo sapiens
agttggacggagaat

SEQ ID NO: 1788319 - DNA, 15 bp, Homo sapiens
gttggacggagaatg

SEQ ID NO: 1788320 - DNA, 15 bp, Homo sapiens
ttggacggagaatga

SEQ ID NO: 1788321 - DNA, 15 bp, Homo sapiens
tggacggagaatgac

SEQ ID NO: 1788322 - DNA, 15 bp, Homo sapiens
ggacggagaatgact

SEQ ID NO: 1788323 - DNA, 15 bp, Homo sapiens
gacggagaatgactt

SEQ ID NO: 1788324 - DNA, 15 bp, Homo sapiens
acggagaatgacttt

SEQ ID NO: 1788325 - DNA, 15 bp, Homo sapiens
cggagaatgactttg

SEQ ID NO: 1788326 - DNA, 15 bp, Homo sapiens
aatgactttgacgag

SEQ ID NO: 1788327 - DNA, 15 bp, Homo sapiens
atgactttgacgagc

SEQ ID NO: 1788328 - DNA, 15 bp, Homo sapiens
tgactttgacgagct

SEQ ID NO: 1788329 - DNA, 15 bp, Homo sapiens
gactttgacgagctg

SEQ ID NO: 1788330 - DNA, 15 bp, Homo sapiens
actttgacgagctga

SEQ ID NO: 1788331 - DNA, 15 bp, Homo sapiens
ctttgacgagctgag

SEQ ID NO: 1788332 - DNA, 15 bp, Homo sapiens
tttgacgagctgaga

SEQ ID NO: 1788333 - DNA, 15 bp, Homo sapiens
ttgacgagctgagag

SEQ ID NO: 1788334 - DNA, 15 bp, Homo sapiens
tgacgagctgagaga

SEQ ID NO: 1788335 - DNA, 15 bp, Homo sapiens
gacgagctgagagaa

SEQ ID NO: 1788336 - DNA, 15 bp, Homo sapiens
acgagctgagagaag

SEQ ID NO: 1788337 - DNA, 15 bp, Homo sapiens
cgagctgagagaaga

SEQ ID NO: 1788338 - DNA, 15 bp, Homo sapiens
gagctgagagaagaa

SEQ ID NO: 1788339 - DNA, 15 bp, Homo sapiens
agctgagagaagaag

SEQ ID NO: 1788340 - DNA, 15 bp, Homo sapiens
gctgagagaagaagg

SEQ ID NO: 1788341 - DNA, 15 bp, Homo sapiens
ctgagagaagaaggt

SEQ ID NO: 1788342 - DNA, 15 bp, Homo sapiens
tgagagaagaaggtt

SEQ ID NO: 1788343 - DNA, 15 bp, Homo sapiens
gagagaagaaggttt

SEQ ID NO: 1788344 - DNA, 15 bp, Homo sapiens
agagaagaaggtttc

SEQ ID NO: 1788345 - DNA, 15 bp, Homo sapiens
gagaagaaggtttca

SEQ ID NO: 1788346 - DNA, 15 bp, Homo sapiens
agaagaaggtttcag

SEQ ID NO: 1788347 - DNA, 15 bp, Homo sapiens
gaagaaggtttcaga

SEQ ID NO: 1788348 - DNA, 15 bp, Homo sapiens
aagaaggtttcagac

SEQ ID NO: 1788349 - DNA, 15 bp, Homo sapiens
agaaggtttcagacg

SEQ ID NO: 1788350 - DNA, 15 bp, Homo sapiens
gaaggtttcagacga

SEQ ID NO: 1788351 - DNA, 15 bp, Homo sapiens
aaggtttcagacgat

SEQ ID NO: 1788352 - DNA, 15 bp, Homo sapiens
aggtttcagacgatc

SEQ ID NO: 1788353 - DNA, 15 bp, Homo sapiens
ggtttcagacgatca

SEQ ID NO: 1788354 - DNA, 15 bp, Homo sapiens
gtttcagacgatcaa

SEQ ID NO: 1788355 - DNA, 15 bp, Homo sapiens
tttcagacgatcaaa

SEQ ID NO: 1788356 - DNA, 15 bp, Homo sapiens
ttcagacgatcaaat

SEQ ID NO: 1788357 - DNA, 15 bp, Homo sapiens
tcagacgatcaaatt

SEQ ID NO: 1788358 - DNA, 15 bp, Homo sapiens
cagacgatcaaatta

SEQ ID NO: 1788359 - DNA, 15 bp, Homo sapiens
agacgatcaaattac

SEQ ID NO: 1788360 - DNA, 15 bp, Homo sapiens
gacgatcaaattact

SEQ ID NO: 1788361 - DNA, 15 bp, Homo sapiens
acgatcaaattactc

SEQ ID NO: 1788362 - DNA, 15 bp, Homo sapiens
cgatcaaattactct

SEQ ID NO: 1788363 - DNA, 15 bp, Homo sapiens
gatcaaattactctg

SEQ ID NO: 1788364 - DNA, 15 bp, Homo sapiens
atcaaattactctga

SEQ ID NO: 1788365 - DNA, 15 bp, Homo sapiens
tcaaattactctgag

SEQ ID NO: 1788366 - DNA, 15 bp, Homo sapiens
caaattactctgagc

SEQ ID NO: 1788367 - DNA, 15 bp, Homo sapiens
aaattactctgagct

SEQ ID NO: 1788368 - DNA, 15 bp, Homo sapiens
aattactctgagcta

SEQ ID NO: 1788369 - DNA, 15 bp, Homo sapiens
attactctgagctac

SEQ ID NO: 1788370 - DNA, 15 bp, Homo sapiens
ttactctgagctacg

SEQ ID NO: 1788371 - DNA, 15 bp, Homo sapiens
tactctgagctacgg

SEQ ID NO: 1788372 - DNA, 15 bp, Homo sapiens
actctgagctacggg

SEQ ID NO: 1788373 - DNA, 15 bp, Homo sapiens
ctctgagctacggga

SEQ ID NO: 1788374 - DNA, 15 bp, Homo sapiens
tctgagctacgggag

SEQ ID NO: 1788375 - DNA, 15 bp, Homo sapiens
ctgagctacgggagg

SEQ ID NO: 1788376 - DNA, 15 bp, Homo sapiens
tgagctacgggagga

SEQ ID NO: 1788377 - DNA, 15 bp, Homo sapiens
gagctacgggaggac

SEQ ID NO: 1788378 - DNA, 15 bp, Homo sapiens
agctacgggaggaca

SEQ ID NO: 1788379 - DNA, 15 bp, Homo sapiens
gctacgggaggacat

SEQ ID NO: 1788380 - DNA, 15 bp, Homo sapiens
ctacgggaggacatt

SEQ ID NO: 1788381 - DNA, 15 bp, Homo sapiens
tacgggaggacattc

SEQ ID NO: 1788382 - DNA, 15 bp, Homo sapiens
acgggaggacattca

SEQ ID NO: 1788383 - DNA, 15 bp, Homo sapiens
cgggaggacattcaa

SEQ ID NO: 1788384 - DNA, 15 bp, Homo sapiens
gggaggacattcaaa

SEQ ID NO: 1788385 - DNA, 15 bp, Homo sapiens
ggaggacattcaaac

SEQ ID NO: 1788386 - DNA, 15 bp, Homo sapiens
gaggacattcaaacc

SEQ ID NO: 1788387 - DNA, 15 bp, Homo sapiens
aggacattcaaacca

SEQ ID NO: 1788388 - DNA, 15 bp, Homo sapiens
ggacattcaaaccaa

SEQ ID NO: 1788389 - DNA, 15 bp, Homo sapiens
gacattcaaaccaaa

SEQ ID NO: 1788390 - DNA, 15 bp, Homo sapiens
acattcaaaccaaag

SEQ ID NO: 1788391 - DNA, 15 bp, Homo sapiens
cattcaaaccaaagg

SEQ ID NO: 1788392 - DNA, 15 bp, Homo sapiens
attcaaaccaaaggc

SEQ ID NO: 1788393 - DNA, 15 bp, Homo sapiens
ttcaaaccaaaggca

SEQ ID NO: 1788394 - DNA, 15 bp, Homo sapiens
tcaaaccaaaggcaa

SEQ ID NO: 1788395 - DNA, 15 bp, Homo sapiens
caaaccaaaggcaaa

SEQ ID NO: 1788396 - DNA, 15 bp, Homo sapiens
aaaccaaaggcaaag

SEQ ID NO: 1788397 - DNA, 15 bp, Homo sapiens
aaccaaaggcaaaga

SEQ ID NO: 1788398 - DNA, 15 bp, Homo sapiens
accaaaggcaaagaa

SEQ ID NO: 1788399 - DNA, 15 bp, Homo sapiens
ccaaaggcaaagaag

SEQ ID NO: 1788400 - DNA, 15 bp, Homo sapiens
caaaggcaaagaagt

SEQ ID NO: 1788401 - DNA, 15 bp, Homo sapiens
aaaggcaaagaagtt

SEQ ID NO: 1788402 - DNA, 15 bp, Homo sapiens
aaggcaaagaagttg

SEQ ID NO: 1788403 - DNA, 15 bp, Homo sapiens
aggcaaagaagttga

SEQ ID NO: 1788404 - DNA, 15 bp, Homo sapiens
ggcaaagaagttgaa

SEQ ID NO: 1788405 - DNA, 15 bp, Homo sapiens
gcaaagaagttgaaa

SEQ ID NO: 1788406 - DNA, 15 bp, Homo sapiens
caaagaagttgaaaa

SEQ ID NO: 1788407 - DNA, 15 bp, Homo sapiens
aaagaagttgaaaac

SEQ ID NO: 1788408 - DNA, 15 bp, Homo sapiens
aagaagttgaaaact

SEQ ID NO: 1788409 - DNA, 15 bp, Homo sapiens
agaagttgaaaactt

SEQ ID NO: 1788410 - DNA, 15 bp, Homo sapiens
gaagttgaaaacttt

SEQ ID NO: 1788411 - DNA, 15 bp, Homo sapiens
aagttgaaaactttg

SEQ ID NO: 1788412 - DNA, 15 bp, Homo sapiens
agttgaaaactttga

SEQ ID NO: 1788413 - DNA, 15 bp, Homo sapiens
gttgaaaactttgaa

SEQ ID NO: 1788414 - DNA, 15 bp, Homo sapiens
ttgaaaactttgaaa

SEQ ID NO: 1788415 - DNA, 15 bp, Homo sapiens
tgaaaactttgaaaa

SEQ ID NO: 1788416 - DNA, 15 bp, Homo sapiens
gaaaactttgaaaaa

SEQ ID NO: 1788417 - DNA, 15 bp, Homo sapiens
aaaactttgaaaaaa

SEQ ID NO: 1788418 - DNA, 15 bp, Homo sapiens
aaactttgaaaaaaa

SEQ ID NO: 1788419 - DNA, 15 bp, Homo sapiens
aactttgaaaaaaat

SEQ ID NO: 1788420 - DNA, 15 bp, Homo sapiens
actttgaaaaaaatt

SEQ ID NO: 1788421 - DNA, 15 bp, Homo sapiens
ctttgaaaaaaattt

SEQ ID NO: 1788422 - DNA, 15 bp, Homo sapiens
ttgaaaaaaatttag

SEQ ID NO: 1788423 - DNA, 15 bp, Homo sapiens
tgaaaaaaatttaga

SEQ ID NO: 1788424 - DNA, 15 bp, Homo sapiens
gaaaaaaatttagaa

SEQ ID NO: 1788425 - DNA, 15 bp, Homo sapiens
aaaaaaatttagaag

SEQ ID NO: 1788426 - DNA, 15 bp, Homo sapiens
aaaaaatttagaaga

SEQ ID NO: 1788427 - DNA, 15 bp, Homo sapiens
aaaaatttagaagaa

SEQ ID NO: 1788428 - DNA, 15 bp, Homo sapiens
aaaatttagaagaat

SEQ ID NO: 1788429 - DNA, 15 bp, Homo sapiens
aaatttagaagaata

SEQ ID NO: 1788430 - DNA, 15 bp, Homo sapiens
aatttagaagaatat

SEQ ID NO: 1788431 - DNA, 15 bp, Homo sapiens
atttagaagaatata

SEQ ID NO: 1788432 - DNA, 15 bp, Homo sapiens
tttagaagaatatat

SEQ ID NO: 1788433 - DNA, 15 bp, Homo sapiens
ttagaagaatatata

SEQ ID NO: 1788434 - DNA, 15 bp, Homo sapiens
tagaagaatatataa

SEQ ID NO: 1788435 - DNA, 15 bp, Homo sapiens
agaagaatatataac

SEQ ID NO: 1788436 - DNA, 15 bp, Homo sapiens
gaagaatatataact

SEQ ID NO: 1788437 - DNA, 15 bp, Homo sapiens
aagaatatataacta

SEQ ID NO: 1788438 - DNA, 15 bp, Homo sapiens
agaatatataactag

SEQ ID NO: 1788439 - DNA, 15 bp, Homo sapiens
gaatatataactaga

SEQ ID NO: 1788440 - DNA, 15 bp, Homo sapiens
aatatataactagaa

SEQ ID NO: 1788441 - DNA, 15 bp, Homo sapiens
atatataactagaat

SEQ ID NO: 1788442 - DNA, 15 bp, Homo sapiens
tatataactagaata

SEQ ID NO: 1788443 - DNA, 15 bp, Homo sapiens
atataactagaataa

SEQ ID NO: 1788444 - DNA, 15 bp, Homo sapiens
tataactagaataac

SEQ ID NO: 1788445 - DNA, 15 bp, Homo sapiens
ataactagaataacc

SEQ ID NO: 1788446 - DNA, 15 bp, Homo sapiens
aactagaataaccaa

SEQ ID NO: 1788447 - DNA, 15 bp, Homo sapiens
actagaataaccaat

SEQ ID NO: 1788448 - DNA, 15 bp, Homo sapiens
ctagaataaccaata

SEQ ID NO: 1788449 - DNA, 15 bp, Homo sapiens
tagaataaccaatac

SEQ ID NO: 1788450 - DNA, 15 bp, Homo sapiens
agaataaccaataca

SEQ ID NO: 1788451 - DNA, 15 bp, Homo sapiens
gaataaccaatacag

SEQ ID NO: 1788452 - DNA, 15 bp, Homo sapiens
aataaccaatacaga

SEQ ID NO: 1788453 - DNA, 15 bp, Homo sapiens
ataaccaatacagag

SEQ ID NO: 1788454 - DNA, 15 bp, Homo sapiens
taaccaatacagaga

SEQ ID NO: 1788455 - DNA, 15 bp, Homo sapiens
aaccaatacagagaa

SEQ ID NO: 1788456 - DNA, 15 bp, Homo sapiens
accaatacagagaag

SEQ ID NO: 1788457 - DNA, 15 bp, Homo sapiens
ccaatacagagaagt

SEQ ID NO: 1788458 - DNA, 15 bp, Homo sapiens
caatacagagaagtg

SEQ ID NO: 1788459 - DNA, 15 bp, Homo sapiens
aatacagagaagtgc

SEQ ID NO: 1788460 - DNA, 15 bp, Homo sapiens
atacagagaagtgct

SEQ ID NO: 1788461 - DNA, 15 bp, Homo sapiens
tacagagaagtgctt

SEQ ID NO: 1788462 - DNA, 15 bp, Homo sapiens
acagagaagtgctta

SEQ ID NO: 1788463 - DNA, 15 bp, Homo sapiens
cagagaagtgcttaa

SEQ ID NO: 1788464 - DNA, 15 bp, Homo sapiens
agagaagtgcttaaa

SEQ ID NO: 1788465 - DNA, 15 bp, Homo sapiens
gagaagtgcttaaag

SEQ ID NO: 1788466 - DNA, 15 bp, Homo sapiens
agaagtgcttaaagg

SEQ ID NO: 1788467 - DNA, 15 bp, Homo sapiens
gaagtgcttaaagga

SEQ ID NO: 1788468 - DNA, 15 bp, Homo sapiens
aagtgcttaaaggag

SEQ ID NO: 1788469 - DNA, 15 bp, Homo sapiens
agtgcttaaaggagc

SEQ ID NO: 1788470 - DNA, 15 bp, Homo sapiens
gtgcttaaaggagct

SEQ ID NO: 1788471 - DNA, 15 bp, Homo sapiens
tgcttaaaggagctg

SEQ ID NO: 1788472 - DNA, 15 bp, Homo sapiens
gcttaaaggagctga

SEQ ID NO: 1788473 - DNA, 15 bp, Homo sapiens
cttaaaggagctgat

SEQ ID NO: 1788474 - DNA, 15 bp, Homo sapiens
ttaaaggagctgatg

SEQ ID NO: 1788475 - DNA, 15 bp, Homo sapiens
taaaggagctgatgg

SEQ ID NO: 1788476 - DNA, 15 bp, Homo sapiens
aaaggagctgatgga

SEQ ID NO: 1788477 - DNA, 15 bp, Homo sapiens
aaggagctgatggag

SEQ ID NO: 1788478 - DNA, 15 bp, Homo sapiens
aggagctgatggagc

SEQ ID NO: 1788479 - DNA, 15 bp, Homo sapiens
ggagctgatggagct

SEQ ID NO: 1788480 - DNA, 15 bp, Homo sapiens
agctgatggagctga

SEQ ID NO: 1788481 - DNA, 15 bp, Homo sapiens
gctgatggagctgaa

SEQ ID NO: 1788482 - DNA, 15 bp, Homo sapiens
gatggagctgaaaac

SEQ ID NO: 1788483 - DNA, 15 bp, Homo sapiens
atggagctgaaaacc

SEQ ID NO: 1788484 - DNA, 15 bp, Homo sapiens
tggagctgaaaacca

SEQ ID NO: 1788485 - DNA, 15 bp, Homo sapiens
ggagctgaaaaccaa

SEQ ID NO: 1788486 - DNA, 15 bp, Homo sapiens
gagctgaaaaccaag

SEQ ID NO: 1788487 - DNA, 15 bp, Homo sapiens
agctgaaaaccaagg

SEQ ID NO: 1788488 - DNA, 15 bp, Homo sapiens
gctgaaaaccaaggc

SEQ ID NO: 1788489 - DNA, 15 bp, Homo sapiens
ctgaaaaccaaggct

SEQ ID NO: 1788490 - DNA, 15 bp, Homo sapiens
tgaaaaccaaggctc

SEQ ID NO: 1788491 - DNA, 15 bp, Homo sapiens
gaaaaccaaggctcg

SEQ ID NO: 1788492 - DNA, 15 bp, Homo sapiens
aaaaccaaggctcga

SEQ ID NO: 1788493 - DNA, 15 bp, Homo sapiens
aaaccaaggctcgag

SEQ ID NO: 1788494 - DNA, 15 bp, Homo sapiens
aaccaaggctcgaga

SEQ ID NO: 1788495 - DNA, 15 bp, Homo sapiens
accaaggctcgagaa

SEQ ID NO: 1788496 - DNA, 15 bp, Homo sapiens
ccaaggctcgagaac

SEQ ID NO: 1788497 - DNA, 15 bp, Homo sapiens
caaggctcgagaact

SEQ ID NO: 1788498 - DNA, 15 bp, Homo sapiens
aaggctcgagaacta

SEQ ID NO: 1788499 - DNA, 15 bp, Homo sapiens
aggctcgagaactac

SEQ ID NO: 1788500 - DNA, 15 bp, Homo sapiens
ggctcgagaactacg

SEQ ID NO: 1788501 - DNA, 15 bp, Homo sapiens
gctcgagaactacgt

SEQ ID NO: 1788502 - DNA, 15 bp, Homo sapiens
ctcgagaactacgtg

SEQ ID NO: 1788503 - DNA, 15 bp, Homo sapiens
tcgagaactacgtga

SEQ ID NO: 1788504 - DNA, 15 bp, Homo sapiens
cgagaactacgtgaa

SEQ ID NO: 1788505 - DNA, 15 bp, Homo sapiens
gagaactacgtgaag

SEQ ID NO: 1788506 - DNA, 15 bp, Homo sapiens
agaactacgtgaaga

SEQ ID NO: 1788507 - DNA, 15 bp, Homo sapiens
gaactacgtgaagaa

SEQ ID NO: 1788508 - DNA, 15 bp, Homo sapiens
aactacgtgaagaat

SEQ ID NO: 1788509 - DNA, 15 bp, Homo sapiens
actacgtgaagaatg

SEQ ID NO: 1788510 - DNA, 15 bp, Homo sapiens
ctacgtgaagaatgc

SEQ ID NO: 1788511 - DNA, 15 bp, Homo sapiens
tacgtgaagaatgca

SEQ ID NO: 1788512 - DNA, 15 bp, Homo sapiens
acgtgaagaatgcag

SEQ ID NO: 1788513 - DNA, 15 bp, Homo sapiens
cgtgaagaatgcaga

SEQ ID NO: 1788514 - DNA, 15 bp, Homo sapiens
gtgaagaatgcagaa

SEQ ID NO: 1788515 - DNA, 15 bp, Homo sapiens
tgaagaatgcagaag

SEQ ID NO: 1788516 - DNA, 15 bp, Homo sapiens
gaagaatgcagaagc

SEQ ID NO: 1788517 - DNA, 15 bp, Homo sapiens
aagaatgcagaagcc

SEQ ID NO: 1788518 - DNA, 15 bp, Homo sapiens
agaatgcagaagcct

SEQ ID NO: 1788519 - DNA, 15 bp, Homo sapiens
gaatgcagaagcctc

SEQ ID NO: 1788520 - DNA, 15 bp, Homo sapiens
aatgcagaagcctca

SEQ ID NO: 1788521 - DNA, 15 bp, Homo sapiens
gcagaagcctcagga

SEQ ID NO: 1788522 - DNA, 15 bp, Homo sapiens
cagaagcctcaggag

SEQ ID NO: 1788523 - DNA, 15 bp, Homo sapiens
agaagcctcaggagc

SEQ ID NO: 1788524 - DNA, 15 bp, Homo sapiens
gaagcctcaggagcc

SEQ ID NO: 1788525 - DNA, 15 bp, Homo sapiens
aagcctcaggagcca

SEQ ID NO: 1788526 - DNA, 15 bp, Homo sapiens
agcctcaggagccaa

SEQ ID NO: 1788527 - DNA, 15 bp, Homo sapiens
gcctcaggagccaat

SEQ ID NO: 1788528 - DNA, 15 bp, Homo sapiens
cctcaggagccaatg

SEQ ID NO: 1788529 - DNA, 15 bp, Homo sapiens
ctcaggagccaatgc

SEQ ID NO: 1788530 - DNA, 15 bp, Homo sapiens
tcaggagccaatgcg

SEQ ID NO: 1788531 - DNA, 15 bp, Homo sapiens
caggagccaatgcga

SEQ ID NO: 1788532 - DNA, 15 bp, Homo sapiens
aggagccaatgcgat

SEQ ID NO: 1788533 - DNA, 15 bp, Homo sapiens
ggagccaatgcgatc

SEQ ID NO: 1788534 - DNA, 15 bp, Homo sapiens
gagccaatgcgatca

SEQ ID NO: 1788535 - DNA, 15 bp, Homo sapiens
agccaatgcgatcaa

SEQ ID NO: 1788536 - DNA, 15 bp, Homo sapiens
gccaatgcgatcaac

SEQ ID NO: 1788537 - DNA, 15 bp, Homo sapiens
ccaatgcgatcaact

SEQ ID NO: 1788538 - DNA, 15 bp, Homo sapiens
caatgcgatcaactg

SEQ ID NO: 1788539 - DNA, 15 bp, Homo sapiens
aatgcgatcaactgg

SEQ ID NO: 1788540 - DNA, 15 bp, Homo sapiens
atgcgatcaactgga

SEQ ID NO: 1788541 - DNA, 15 bp, Homo sapiens
tgcgatcaactggaa

SEQ ID NO: 1788542 - DNA, 15 bp, Homo sapiens
gcgatcaactggaag

SEQ ID NO: 1788543 - DNA, 15 bp, Homo sapiens
cgatcaactggaaga

SEQ ID NO: 1788544 - DNA, 15 bp, Homo sapiens
gatcaactggaagaa

SEQ ID NO: 1788545 - DNA, 15 bp, Homo sapiens
atcaactggaagaaa

SEQ ID NO: 1788546 - DNA, 15 bp, Homo sapiens
tcaactggaagaaag

SEQ ID NO: 1788547 - DNA, 15 bp, Homo sapiens
caactggaagaaagg

SEQ ID NO: 1788548 - DNA, 15 bp, Homo sapiens
aactggaagaaaggg

SEQ ID NO: 1788549 - DNA, 15 bp, Homo sapiens
actggaagaaagggt

SEQ ID NO: 1788550 - DNA, 15 bp, Homo sapiens
ctggaagaaagggta

SEQ ID NO: 1788551 - DNA, 15 bp, Homo sapiens
tggaagaaagggtat

SEQ ID NO: 1788552 - DNA, 15 bp, Homo sapiens
ggaagaaagggtatc

SEQ ID NO: 1788553 - DNA, 15 bp, Homo sapiens
gaagaaagggtatca

SEQ ID NO: 1788554 - DNA, 15 bp, Homo sapiens
aagaaagggtatcag

SEQ ID NO: 1788555 - DNA, 15 bp, Homo sapiens
agaaagggtatcagc

SEQ ID NO: 1788556 - DNA, 15 bp, Homo sapiens
gaaagggtatcagca

SEQ ID NO: 1788557 - DNA, 15 bp, Homo sapiens
aaagggtatcagcaa

SEQ ID NO: 1788558 - DNA, 15 bp, Homo sapiens
aagggtatcagcaat

SEQ ID NO: 1788559 - DNA, 15 bp, Homo sapiens
agggtatcagcaatg

SEQ ID NO: 1788560 - DNA, 15 bp, Homo sapiens
gggtatcagcaatgg

SEQ ID NO: 1788561 - DNA, 15 bp, Homo sapiens
ggtatcagcaatgga

SEQ ID NO: 1788562 - DNA, 15 bp, Homo sapiens
gtatcagcaatggaa

SEQ ID NO: 1788563 - DNA, 15 bp, Homo sapiens
tatcagcaatggaag

SEQ ID NO: 1788564 - DNA, 15 bp, Homo sapiens
atcagcaatggaaga

SEQ ID NO: 1788565 - DNA, 15 bp, Homo sapiens
tcagcaatggaagat

SEQ ID NO: 1788566 - DNA, 15 bp, Homo sapiens
cagcaatggaagatg

SEQ ID NO: 1788567 - DNA, 15 bp, Homo sapiens
agcaatggaagatga

SEQ ID NO: 1788568 - DNA, 15 bp, Homo sapiens
gcaatggaagatgaa

SEQ ID NO: 1788569 - DNA, 15 bp, Homo sapiens
caatggaagatgaaa

SEQ ID NO: 1788570 - DNA, 15 bp, Homo sapiens
aatggaagatgaaat

SEQ ID NO: 1788571 - DNA, 15 bp, Homo sapiens
atggaagatgaaatg

SEQ ID NO: 1788572 - DNA, 15 bp, Homo sapiens
tggaagatgaaatga

SEQ ID NO: 1788573 - DNA, 15 bp, Homo sapiens
ggaagatgaaatgaa

SEQ ID NO: 1788574 - DNA, 15 bp, Homo sapiens
gaagatgaaatgaat

SEQ ID NO: 1788575 - DNA, 15 bp, Homo sapiens
aagatgaaatgaatg

SEQ ID NO: 1788576 - DNA, 15 bp, Homo sapiens
agatgaaatgaatga

SEQ ID NO: 1788577 - DNA, 15 bp, Homo sapiens
gatgaaatgaatgaa

SEQ ID NO: 1788578 - DNA, 15 bp, Homo sapiens
atgaaatgaatgaaa

SEQ ID NO: 1788579 - DNA, 15 bp, Homo sapiens
tgaaatgaatgaaat

SEQ ID NO: 1788580 - DNA, 15 bp, Homo sapiens
gaaatgaatgaaatg

SEQ ID NO: 1788581 - DNA, 15 bp, Homo sapiens
aaatgaatgaaatga

SEQ ID NO: 1788582 - DNA, 15 bp, Homo sapiens
aatgaatgaaatgaa

SEQ ID NO: 1788583 - DNA, 15 bp, Homo sapiens
atgaatgaaatgaag

SEQ ID NO: 1788584 - DNA, 15 bp, Homo sapiens
tgaatgaaatgaagt

SEQ ID NO: 1788585 - DNA, 15 bp, Homo sapiens
gaatgaaatgaagtg

SEQ ID NO: 1788586 - DNA, 15 bp, Homo sapiens
aatgaaatgaagtga

SEQ ID NO: 1788587 - DNA, 15 bp, Homo sapiens
atgaaatgaagtgag

SEQ ID NO: 1788588 - DNA, 15 bp, Homo sapiens
tgaaatgaagtgaga

SEQ ID NO: 1788589 - DNA, 15 bp, Homo sapiens
gaaatgaagtgagaa

SEQ ID NO: 1788590 - DNA, 15 bp, Homo sapiens
aaatgaagtgagaag

SEQ ID NO: 1788591 - DNA, 15 bp, Homo sapiens
aatgaagtgagaagg

SEQ ID NO: 1788592 - DNA, 15 bp, Homo sapiens
atgaagtgagaaggg

SEQ ID NO: 1788593 - DNA, 15 bp, Homo sapiens
tgaagtgagaaggga

SEQ ID NO: 1788594 - DNA, 15 bp, Homo sapiens
aagtgagaagggaag

SEQ ID NO: 1788595 - DNA, 15 bp, Homo sapiens
agtgagaagggaagt

SEQ ID NO: 1788596 - DNA, 15 bp, Homo sapiens
gtgagaagggaagtt

SEQ ID NO: 1788597 - DNA, 15 bp, Homo sapiens
tgagaagggaagttt

SEQ ID NO: 1788598 - DNA, 15 bp, Homo sapiens
gagaagggaagttta

SEQ ID NO: 1788599 - DNA, 15 bp, Homo sapiens
agaagggaagtttag

SEQ ID NO: 1788600 - DNA, 15 bp, Homo sapiens
gaagggaagtttaga

SEQ ID NO: 1788601 - DNA, 15 bp, Homo sapiens
aagggaagtttagag

SEQ ID NO: 1788602 - DNA, 15 bp, Homo sapiens
agggaagtttagaga

SEQ ID NO: 1788603 - DNA, 15 bp, Homo sapiens
gggaagtttagagaa

SEQ ID NO: 1788604 - DNA, 15 bp, Homo sapiens
ggaagtttagagaaa

SEQ ID NO: 1788605 - DNA, 15 bp, Homo sapiens
gaagtttagagaaaa

SEQ ID NO: 1788606 - DNA, 15 bp, Homo sapiens
aagtttagagaaaaa

SEQ ID NO: 1788607 - DNA, 15 bp, Homo sapiens
agtttagagaaaaaa

SEQ ID NO: 1788608 - DNA, 15 bp, Homo sapiens
gtttagagaaaaaag

SEQ ID NO: 1788609 - DNA, 15 bp, Homo sapiens
tttagagaaaaaaga

SEQ ID NO: 1788610 - DNA, 15 bp, Homo sapiens
agagaaaaaagaata

SEQ ID NO: 1788611 - DNA, 15 bp, Homo sapiens
gagaaaaaagaataa

SEQ ID NO: 1788612 - DNA, 15 bp, Homo sapiens
agaaaaaagaataaa

SEQ ID NO: 1788613 - DNA, 15 bp, Homo sapiens
gaaaaaagaataaaa

SEQ ID NO: 1788614 - DNA, 15 bp, Homo sapiens
aaaaagaataaaaag

SEQ ID NO: 1788615 - DNA, 15 bp, Homo sapiens
aaaagaataaaaaga

SEQ ID NO: 1788616 - DNA, 15 bp, Homo sapiens
aaagaataaaaagaa

SEQ ID NO: 1788617 - DNA, 15 bp, Homo sapiens
aagaataaaaagaaa

SEQ ID NO: 1788618 - DNA, 15 bp, Homo sapiens
agaataaaaagaaat

SEQ ID NO: 1788619 - DNA, 15 bp, Homo sapiens
gaataaaaagaaatg

SEQ ID NO: 1788620 - DNA, 15 bp, Homo sapiens
aataaaaagaaatga

SEQ ID NO: 1788621 - DNA, 15 bp, Homo sapiens
ataaaaagaaatgag

SEQ ID NO: 1788622 - DNA, 15 bp, Homo sapiens
taaaaagaaatgagc

SEQ ID NO: 1788623 - DNA, 15 bp, Homo sapiens
aaaaagaaatgagca

SEQ ID NO: 1788624 - DNA, 15 bp, Homo sapiens
aaaagaaatgagcaa

SEQ ID NO: 1788625 - DNA, 15 bp, Homo sapiens
aaagaaatgagcaaa

SEQ ID NO: 1788626 - DNA, 15 bp, Homo sapiens
aagaaatgagcaaag

SEQ ID NO: 1788627 - DNA, 15 bp, Homo sapiens
agaaatgagcaaagc

SEQ ID NO: 1788628 - DNA, 15 bp, Homo sapiens
gaaatgagcaaagcc

SEQ ID NO: 1788629 - DNA, 15 bp, Homo sapiens
aaatgagcaaagcct

SEQ ID NO: 1788630 - DNA, 15 bp, Homo sapiens
aatgagcaaagcctc

SEQ ID NO: 1788631 - DNA, 15 bp, Homo sapiens
atgagcaaagcctcc

SEQ ID NO: 1788632 - DNA, 15 bp, Homo sapiens
tgagcaaagcctcca

SEQ ID NO: 1788633 - DNA, 15 bp, Homo sapiens
gagcaaagcctccaa

SEQ ID NO: 1788634 - DNA, 15 bp, Homo sapiens
agcaaagcctccaag

SEQ ID NO: 1788635 - DNA, 15 bp, Homo sapiens
gcaaagcctccaaga

SEQ ID NO: 1788636 - DNA, 15 bp, Homo sapiens
gcctccaagaaatat

SEQ ID NO: 1788637 - DNA, 15 bp, Homo sapiens
cctccaagaaatatg

SEQ ID NO: 1788638 - DNA, 15 bp, Homo sapiens
ctccaagaaatatgg

SEQ ID NO: 1788639 - DNA, 15 bp, Homo sapiens
tccaagaaatatggg

SEQ ID NO: 1788640 - DNA, 15 bp, Homo sapiens
ccaagaaatatggga

SEQ ID NO: 1788641 - DNA, 15 bp, Homo sapiens
caagaaatatgggac

SEQ ID NO: 1788642 - DNA, 15 bp, Homo sapiens
aagaaatatgggact

SEQ ID NO: 1788643 - DNA, 15 bp, Homo sapiens
agaaatatgggacta

SEQ ID NO: 1788644 - DNA, 15 bp, Homo sapiens
gaaatatgggactat

SEQ ID NO: 1788645 - DNA, 15 bp, Homo sapiens
aaatatgggactatg

SEQ ID NO: 1788646 - DNA, 15 bp, Homo sapiens
aatatgggactatgt

SEQ ID NO: 1788647 - DNA, 15 bp, Homo sapiens
atatgggactatgtg

SEQ ID NO: 1788648 - DNA, 15 bp, Homo sapiens
tatgggactatgtga

SEQ ID NO: 1788649 - DNA, 15 bp, Homo sapiens
atgggactatgtgaa

SEQ ID NO: 1788650 - DNA, 15 bp, Homo sapiens
tgggactatgtgaaa

SEQ ID NO: 1788651 - DNA, 15 bp, Homo sapiens
gtgaaaagaccaaat

SEQ ID NO: 1788652 - DNA, 15 bp, Homo sapiens
tgaaaagaccaaatc

SEQ ID NO: 1788653 - DNA, 15 bp, Homo sapiens
gaaaagaccaaatct

SEQ ID NO: 1788654 - DNA, 15 bp, Homo sapiens
aaaagaccaaatcta

SEQ ID NO: 1788655 - DNA, 15 bp, Homo sapiens
aaagaccaaatctac

SEQ ID NO: 1788656 - DNA, 15 bp, Homo sapiens
aagaccaaatctacg

SEQ ID NO: 1788657 - DNA, 15 bp, Homo sapiens
agaccaaatctacgt

SEQ ID NO: 1788658 - DNA, 15 bp, Homo sapiens
gaccaaatctacgtc

SEQ ID NO: 1788659 - DNA, 15 bp, Homo sapiens
accaaatctacgtct

SEQ ID NO: 1788660 - DNA, 15 bp, Homo sapiens
ccaaatctacgtctg

SEQ ID NO: 1788661 - DNA, 15 bp, Homo sapiens
caaatctacgtctga

SEQ ID NO: 1788662 - DNA, 15 bp, Homo sapiens
aaatctacgtctgat

SEQ ID NO: 1788663 - DNA, 15 bp, Homo sapiens
aatctacgtctgatt

SEQ ID NO: 1788664 - DNA, 15 bp, Homo sapiens
atctacgtctgattg

SEQ ID NO: 1788665 - DNA, 15 bp, Homo sapiens
tctacgtctgattgg

SEQ ID NO: 1788666 - DNA, 15 bp, Homo sapiens
ctacgtctgattggt

SEQ ID NO: 1788667 - DNA, 15 bp, Homo sapiens
tacgtctgattggtg

SEQ ID NO: 1788668 - DNA, 15 bp, Homo sapiens
acgtctgattggtgt

SEQ ID NO: 1788669 - DNA, 15 bp, Homo sapiens
cgtctgattggtgta

SEQ ID NO: 1788670 - DNA, 15 bp, Homo sapiens
gtctgattggtgtac

SEQ ID NO: 1788671 - DNA, 15 bp, Homo sapiens
tctgattggtgtacc

SEQ ID NO: 1788672 - DNA, 15 bp, Homo sapiens
ctgattggtgtacct

SEQ ID NO: 1788673 - DNA, 15 bp, Homo sapiens
gtacctgaaagtgat

SEQ ID NO: 1788674 - DNA, 15 bp, Homo sapiens
tacctgaaagtgatg

SEQ ID NO: 1788675 - DNA, 15 bp, Homo sapiens
acctgaaagtgatgt

SEQ ID NO: 1788676 - DNA, 15 bp, Homo sapiens
cctgaaagtgatgtg

SEQ ID NO: 1788677 - DNA, 15 bp, Homo sapiens
ctgaaagtgatgtgg

SEQ ID NO: 1788678 - DNA, 15 bp, Homo sapiens
tgaaagtgatgtgga

SEQ ID NO: 1788679 - DNA, 15 bp, Homo sapiens
gaaagtgatgtggag

SEQ ID NO: 1788680 - DNA, 15 bp, Homo sapiens
aaagtgatgtggaga

SEQ ID NO: 1788681 - DNA, 15 bp, Homo sapiens
aagtgatgtggagaa

SEQ ID NO: 1788682 - DNA, 15 bp, Homo sapiens
agtgatgtggagaat

SEQ ID NO: 1788683 - DNA, 15 bp, Homo sapiens
gtgatgtggagaatg

SEQ ID NO: 1788684 - DNA, 15 bp, Homo sapiens
tgatgtggagaatgg

SEQ ID NO: 1788685 - DNA, 15 bp, Homo sapiens
gatgtggagaatgga

SEQ ID NO: 1788686 - DNA, 15 bp, Homo sapiens
atgtggagaatggaa

SEQ ID NO: 1788687 - DNA, 15 bp, Homo sapiens
tgtggagaatggaac

SEQ ID NO: 1788688 - DNA, 15 bp, Homo sapiens
gtggagaatggaacc

SEQ ID NO: 1788689 - DNA, 15 bp, Homo sapiens
tggagaatggaacca

SEQ ID NO: 1788690 - DNA, 15 bp, Homo sapiens
ggagaatggaaccaa

SEQ ID NO: 1788691 - DNA, 15 bp, Homo sapiens
gagaatggaaccaag

SEQ ID NO: 1788692 - DNA, 15 bp, Homo sapiens
agaatggaaccaagt

SEQ ID NO: 1788693 - DNA, 15 bp, Homo sapiens
gaatggaaccaagtt

SEQ ID NO: 1788694 - DNA, 15 bp, Homo sapiens
aatggaaccaagttg

SEQ ID NO: 1788695 - DNA, 15 bp, Homo sapiens
atggaaccaagttgg

SEQ ID NO: 1788696 - DNA, 15 bp, Homo sapiens
tggaaccaagttgga

SEQ ID NO: 1788697 - DNA, 15 bp, Homo sapiens
ggaaccaagttggaa

SEQ ID NO: 1788698 - DNA, 15 bp, Homo sapiens
ttggaaaacactctg

SEQ ID NO: 1788699 - DNA, 15 bp, Homo sapiens
tggaaaacactctgc

SEQ ID NO: 1788700 - DNA, 15 bp, Homo sapiens
ggaaaacactctgca

SEQ ID NO: 1788701 - DNA, 15 bp, Homo sapiens
gaaaacactctgcag

SEQ ID NO: 1788702 - DNA, 15 bp, Homo sapiens
aaaacactctgcagg

SEQ ID NO: 1788703 - DNA, 15 bp, Homo sapiens
aaacactctgcagga

SEQ ID NO: 1788704 - DNA, 15 bp, Homo sapiens
aacactctgcaggat

SEQ ID NO: 1788705 - DNA, 15 bp, Homo sapiens
acactctgcaggata

SEQ ID NO: 1788706 - DNA, 15 bp, Homo sapiens
cactctgcaggatat

SEQ ID NO: 1788707 - DNA, 15 bp, Homo sapiens
actctgcaggatatt

SEQ ID NO: 1788708 - DNA, 15 bp, Homo sapiens
ctctgcaggatatta

SEQ ID NO: 1788709 - DNA, 15 bp, Homo sapiens
tctgcaggatattat

SEQ ID NO: 1788710 - DNA, 15 bp, Homo sapiens
ctgcaggatattatc

SEQ ID NO: 1788711 - DNA, 15 bp, Homo sapiens
tgcaggatattatcc

SEQ ID NO: 1788712 - DNA, 15 bp, Homo sapiens
gcaggatattatcca

SEQ ID NO: 1788713 - DNA, 15 bp, Homo sapiens
attatccaggagaac

SEQ ID NO: 1788714 - DNA, 15 bp, Homo sapiens
ttatccaggagaact

SEQ ID NO: 1788715 - DNA, 15 bp, Homo sapiens
tatccaggagaactt

SEQ ID NO: 1788716 - DNA, 15 bp, Homo sapiens
atccaggagaacttc

SEQ ID NO: 1788717 - DNA, 15 bp, Homo sapiens
tccaggagaacttcc

SEQ ID NO: 1788718 - DNA, 15 bp, Homo sapiens
ccaggagaacttccc

SEQ ID NO: 1788719 - DNA, 15 bp, Homo sapiens
caggagaacttcccc

SEQ ID NO: 1788720 - DNA, 15 bp, Homo sapiens
aggagaacttcccca

SEQ ID NO: 1788721 - DNA, 15 bp, Homo sapiens
ggagaacttccccaa

SEQ ID NO: 1788722 - DNA, 15 bp, Homo sapiens
gagaacttccccaat

SEQ ID NO: 1788723 - DNA, 15 bp, Homo sapiens
agaacttccccaatc

SEQ ID NO: 1788724 - DNA, 15 bp, Homo sapiens
gaacttccccaatct

SEQ ID NO: 1788725 - DNA, 15 bp, Homo sapiens
aacttccccaatcta

SEQ ID NO: 1788726 - DNA, 15 bp, Homo sapiens
acttccccaatctag

SEQ ID NO: 1788727 - DNA, 15 bp, Homo sapiens
cttccccaatctagc

SEQ ID NO: 1788728 - DNA, 15 bp, Homo sapiens
ttccccaatctagca

SEQ ID NO: 1788729 - DNA, 15 bp, Homo sapiens
tccccaatctagcaa

SEQ ID NO: 1788730 - DNA, 15 bp, Homo sapiens
ccccaatctagcaag

SEQ ID NO: 1788731 - DNA, 15 bp, Homo sapiens
cccaatctagcaagg

SEQ ID NO: 1788732 - DNA, 15 bp, Homo sapiens
ccaatctagcaaggc

SEQ ID NO: 1788733 - DNA, 15 bp, Homo sapiens
caatctagcaaggca

SEQ ID NO: 1788734 - DNA, 15 bp, Homo sapiens
aatctagcaaggcag

SEQ ID NO: 1788735 - DNA, 15 bp, Homo sapiens
atctagcaaggcagg

SEQ ID NO: 1788736 - DNA, 15 bp, Homo sapiens
tctagcaaggcaggc

SEQ ID NO: 1788737 - DNA, 15 bp, Homo sapiens
ctagcaaggcaggcc

SEQ ID NO: 1788738 - DNA, 15 bp, Homo sapiens
tagcaaggcaggcca

SEQ ID NO: 1788739 - DNA, 15 bp, Homo sapiens
agcaaggcaggccaa

SEQ ID NO: 1788740 - DNA, 15 bp, Homo sapiens
gcaaggcaggccaac

SEQ ID NO: 1788741 - DNA, 15 bp, Homo sapiens
caaggcaggccaacg

SEQ ID NO: 1788742 - DNA, 15 bp, Homo sapiens
aaggcaggccaacgt

SEQ ID NO: 1788743 - DNA, 15 bp, Homo sapiens
aggcaggccaacgtt

SEQ ID NO: 1788744 - DNA, 15 bp, Homo sapiens
ggcaggccaacgttc

SEQ ID NO: 1788745 - DNA, 15 bp, Homo sapiens
gcaggccaacgttca

SEQ ID NO: 1788746 - DNA, 15 bp, Homo sapiens
caggccaacgttcag

SEQ ID NO: 1788747 - DNA, 15 bp, Homo sapiens
aggccaacgttcaga

SEQ ID NO: 1788748 - DNA, 15 bp, Homo sapiens
ggccaacgttcagat

SEQ ID NO: 1788749 - DNA, 15 bp, Homo sapiens
gccaacgttcagatt

SEQ ID NO: 1788750 - DNA, 15 bp, Homo sapiens
ccaacgttcagattc

SEQ ID NO: 1788751 - DNA, 15 bp, Homo sapiens
caacgttcagattca

SEQ ID NO: 1788752 - DNA, 15 bp, Homo sapiens
aacgttcagattcag

SEQ ID NO: 1788753 - DNA, 15 bp, Homo sapiens
acgttcagattcagg

SEQ ID NO: 1788754 - DNA, 15 bp, Homo sapiens
cgttcagattcagga

SEQ ID NO: 1788755 - DNA, 15 bp, Homo sapiens
gttcagattcaggaa

SEQ ID NO: 1788756 - DNA, 15 bp, Homo sapiens
ttcagattcaggaaa

SEQ ID NO: 1788757 - DNA, 15 bp, Homo sapiens
tcagattcaggaaat

SEQ ID NO: 1788758 - DNA, 15 bp, Homo sapiens
cagattcaggaaata

SEQ ID NO: 1788759 - DNA, 15 bp, Homo sapiens
agattcaggaaatac

SEQ ID NO: 1788760 - DNA, 15 bp, Homo sapiens
gattcaggaaataca

SEQ ID NO: 1788761 - DNA, 15 bp, Homo sapiens
gaaatacagagaacg

SEQ ID NO: 1788762 - DNA, 15 bp, Homo sapiens
aaatacagagaacgc

SEQ ID NO: 1788763 - DNA, 15 bp, Homo sapiens
aatacagagaacgcc

SEQ ID NO: 1788764 - DNA, 15 bp, Homo sapiens
atacagagaacgcca

SEQ ID NO: 1788765 - DNA, 15 bp, Homo sapiens
tacagagaacgccac

SEQ ID NO: 1788766 - DNA, 15 bp, Homo sapiens
acagagaacgccaca

SEQ ID NO: 1788767 - DNA, 15 bp, Homo sapiens
cagagaacgccacaa

SEQ ID NO: 1788768 - DNA, 15 bp, Homo sapiens
agagaacgccacaaa

SEQ ID NO: 1788769 - DNA, 15 bp, Homo sapiens
gagaacgccacaaag

SEQ ID NO: 1788770 - DNA, 15 bp, Homo sapiens
agaacgccacaaaga

SEQ ID NO: 1788771 - DNA, 15 bp, Homo sapiens
gaacgccacaaagat

SEQ ID NO: 1788772 - DNA, 15 bp, Homo sapiens
aacgccacaaagata

SEQ ID NO: 1788773 - DNA, 15 bp, Homo sapiens
acgccacaaagatac

SEQ ID NO: 1788774 - DNA, 15 bp, Homo sapiens
cgccacaaagatact

SEQ ID NO: 1788775 - DNA, 15 bp, Homo sapiens
gccacaaagatactc

SEQ ID NO: 1788776 - DNA, 15 bp, Homo sapiens
caaagatactcctcg

SEQ ID NO: 1788777 - DNA, 15 bp, Homo sapiens
aaagatactcctcga

SEQ ID NO: 1788778 - DNA, 15 bp, Homo sapiens
aagatactcctcgag

SEQ ID NO: 1788779 - DNA, 15 bp, Homo sapiens
agatactcctcgaga

SEQ ID NO: 1788780 - DNA, 15 bp, Homo sapiens
gatactcctcgagaa

SEQ ID NO: 1788781 - DNA, 15 bp, Homo sapiens
atactcctcgagaag

SEQ ID NO: 1788782 - DNA, 15 bp, Homo sapiens
tactcctcgagaaga

SEQ ID NO: 1788783 - DNA, 15 bp, Homo sapiens
actcctcgagaagag

SEQ ID NO: 1788784 - DNA, 15 bp, Homo sapiens
ctcctcgagaagagc

SEQ ID NO: 1788785 - DNA, 15 bp, Homo sapiens
tcctcgagaagagca

SEQ ID NO: 1788786 - DNA, 15 bp, Homo sapiens
cctcgagaagagcaa

SEQ ID NO: 1788787 - DNA, 15 bp, Homo sapiens
ctcgagaagagcaac

SEQ ID NO: 1788788 - DNA, 15 bp, Homo sapiens
tcgagaagagcaact

SEQ ID NO: 1788789 - DNA, 15 bp, Homo sapiens
cgagaagagcaactc

SEQ ID NO: 1788790 - DNA, 15 bp, Homo sapiens
gagaagagcaactcc

SEQ ID NO: 1788791 - DNA, 15 bp, Homo sapiens
agaagagcaactcca

SEQ ID NO: 1788792 - DNA, 15 bp, Homo sapiens
gaagagcaactccaa

SEQ ID NO: 1788793 - DNA, 15 bp, Homo sapiens
aagagcaactccaag

SEQ ID NO: 1788794 - DNA, 15 bp, Homo sapiens
agagcaactccaaga

SEQ ID NO: 1788795 - DNA, 15 bp, Homo sapiens
gagcaactccaagac

SEQ ID NO: 1788796 - DNA, 15 bp, Homo sapiens
agcaactccaagaca

SEQ ID NO: 1788797 - DNA, 15 bp, Homo sapiens
gcaactccaagacac

SEQ ID NO: 1788798 - DNA, 15 bp, Homo sapiens
caactccaagacaca

SEQ ID NO: 1788799 - DNA, 15 bp, Homo sapiens
aactccaagacacat

SEQ ID NO: 1788800 - DNA, 15 bp, Homo sapiens
actccaagacacata

SEQ ID NO: 1788801 - DNA, 15 bp, Homo sapiens
ctccaagacacataa

SEQ ID NO: 1788802 - DNA, 15 bp, Homo sapiens
tccaagacacataat

SEQ ID NO: 1788803 - DNA, 15 bp, Homo sapiens
ccaagacacataatt

SEQ ID NO: 1788804 - DNA, 15 bp, Homo sapiens
caagacacataattg

SEQ ID NO: 1788805 - DNA, 15 bp, Homo sapiens
aagacacataattgt

SEQ ID NO: 1788806 - DNA, 15 bp, Homo sapiens
agacacataattgtc

SEQ ID NO: 1788807 - DNA, 15 bp, Homo sapiens
gacacataattgtca

SEQ ID NO: 1788808 - DNA, 15 bp, Homo sapiens
acacataattgtcag

SEQ ID NO: 1788809 - DNA, 15 bp, Homo sapiens
cacataattgtcaga

SEQ ID NO: 1788810 - DNA, 15 bp, Homo sapiens
acataattgtcagat

SEQ ID NO: 1788811 - DNA, 15 bp, Homo sapiens
cataattgtcagatt

SEQ ID NO: 1788812 - DNA, 15 bp, Homo sapiens
ataattgtcagattc

SEQ ID NO: 1788813 - DNA, 15 bp, Homo sapiens
taattgtcagattca

SEQ ID NO: 1788814 - DNA, 15 bp, Homo sapiens
aattgtcagattcac

SEQ ID NO: 1788815 - DNA, 15 bp, Homo sapiens
attgtcagattcacc

SEQ ID NO: 1788816 - DNA, 15 bp, Homo sapiens
ttgtcagattcacca

SEQ ID NO: 1788817 - DNA, 15 bp, Homo sapiens
tgtcagattcaccaa

SEQ ID NO: 1788818 - DNA, 15 bp, Homo sapiens
gtcagattcaccaaa

SEQ ID NO: 1788819 - DNA, 15 bp, Homo sapiens
tcagattcaccaaag

SEQ ID NO: 1788820 - DNA, 15 bp, Homo sapiens
cagattcaccaaagt

SEQ ID NO: 1788821 - DNA, 15 bp, Homo sapiens
agattcaccaaagtt

SEQ ID NO: 1788822 - DNA, 15 bp, Homo sapiens
gattcaccaaagttg

SEQ ID NO: 1788823 - DNA, 15 bp, Homo sapiens
attcaccaaagttga

SEQ ID NO: 1788824 - DNA, 15 bp, Homo sapiens
ttcaccaaagttgaa

SEQ ID NO: 1788825 - DNA, 15 bp, Homo sapiens
tcaccaaagttgaaa

SEQ ID NO: 1788826 - DNA, 15 bp, Homo sapiens
caccaaagttgaaat

SEQ ID NO: 1788827 - DNA, 15 bp, Homo sapiens
accaaagttgaaatg

SEQ ID NO: 1788828 - DNA, 15 bp, Homo sapiens
ccaaagttgaaatga

SEQ ID NO: 1788829 - DNA, 15 bp, Homo sapiens
caaagttgaaatgaa

SEQ ID NO: 1788830 - DNA, 15 bp, Homo sapiens
aaagttgaaatgaag

SEQ ID NO: 1788831 - DNA, 15 bp, Homo sapiens
aagttgaaatgaagg

SEQ ID NO: 1788832 - DNA, 15 bp, Homo sapiens
agttgaaatgaagga

SEQ ID NO: 1788833 - DNA, 15 bp, Homo sapiens
gaaaaaatgttaagg

SEQ ID NO: 1788834 - DNA, 15 bp, Homo sapiens
aaaaaatgttaaggg

SEQ ID NO: 1788835 - DNA, 15 bp, Homo sapiens
aaaaatgttaagggc

SEQ ID NO: 1788836 - DNA, 15 bp, Homo sapiens
aaaatgttaagggca

SEQ ID NO: 1788837 - DNA, 15 bp, Homo sapiens
aaatgttaagggcag

SEQ ID NO: 1788838 - DNA, 15 bp, Homo sapiens
aatgttaagggcagc

SEQ ID NO: 1788839 - DNA, 15 bp, Homo sapiens
atgttaagggcagcc

SEQ ID NO: 1788840 - DNA, 15 bp, Homo sapiens
tgttaagggcagcca

SEQ ID NO: 1788841 - DNA, 15 bp, Homo sapiens
gttaagggcagccag

SEQ ID NO: 1788842 - DNA, 15 bp, Homo sapiens
ttaagggcagccaga

SEQ ID NO: 1788843 - DNA, 15 bp, Homo sapiens
taagggcagccagag

SEQ ID NO: 1788844 - DNA, 15 bp, Homo sapiens
aagggcagccagaga

SEQ ID NO: 1788845 - DNA, 15 bp, Homo sapiens
agggcagccagagag

SEQ ID NO: 1788846 - DNA, 15 bp, Homo sapiens
gggcagccagagaga

SEQ ID NO: 1788847 - DNA, 15 bp, Homo sapiens
ggcagccagagagaa

SEQ ID NO: 1788848 - DNA, 15 bp, Homo sapiens
aaggtcgggttaccc

SEQ ID NO: 1788849 - DNA, 15 bp, Homo sapiens
aggtcgggttaccct

SEQ ID NO: 1788850 - DNA, 15 bp, Homo sapiens
ggtcgggttaccctc

SEQ ID NO: 1788851 - DNA, 15 bp, Homo sapiens
gtcgggttaccctca

SEQ ID NO: 1788852 - DNA, 15 bp, Homo sapiens
tcgggttaccctcaa

SEQ ID NO: 1788853 - DNA, 15 bp, Homo sapiens
cgggttaccctcaaa

SEQ ID NO: 1788854 - DNA, 15 bp, Homo sapiens
gggttaccctcaaag

SEQ ID NO: 1788855 - DNA, 15 bp, Homo sapiens
ggttaccctcaaagg

SEQ ID NO: 1788856 - DNA, 15 bp, Homo sapiens
gttaccctcaaagga

SEQ ID NO: 1788857 - DNA, 15 bp, Homo sapiens
ttaccctcaaaggaa

SEQ ID NO: 1788858 - DNA, 15 bp, Homo sapiens
taccctcaaaggaaa

SEQ ID NO: 1788859 - DNA, 15 bp, Homo sapiens
accctcaaaggaaag

SEQ ID NO: 1788860 - DNA, 15 bp, Homo sapiens
ccctcaaaggaaagc

SEQ ID NO: 1788861 - DNA, 15 bp, Homo sapiens
cctcaaaggaaagcc

SEQ ID NO: 1788862 - DNA, 15 bp, Homo sapiens
ctcaaaggaaagccc

SEQ ID NO: 1788863 - DNA, 15 bp, Homo sapiens
tcaaaggaaagccca

SEQ ID NO: 1788864 - DNA, 15 bp, Homo sapiens
caaaggaaagcccat

SEQ ID NO: 1788865 - DNA, 15 bp, Homo sapiens
aaaggaaagcccatc

SEQ ID NO: 1788866 - DNA, 15 bp, Homo sapiens
aaggaaagcccatca

SEQ ID NO: 1788867 - DNA, 15 bp, Homo sapiens
aggaaagcccatcag

SEQ ID NO: 1788868 - DNA, 15 bp, Homo sapiens
ggaaagcccatcaga

SEQ ID NO: 1788869 - DNA, 15 bp, Homo sapiens
gaaagcccatcagac

SEQ ID NO: 1788870 - DNA, 15 bp, Homo sapiens
aaagcccatcagact

SEQ ID NO: 1788871 - DNA, 15 bp, Homo sapiens
gcccatcagactaac

SEQ ID NO: 1788872 - DNA, 15 bp, Homo sapiens
cccatcagactaaca

SEQ ID NO: 1788873 - DNA, 15 bp, Homo sapiens
ccatcagactaacag

SEQ ID NO: 1788874 - DNA, 15 bp, Homo sapiens
catcagactaacagc

SEQ ID NO: 1788875 - DNA, 15 bp, Homo sapiens
atcagactaacagcg

SEQ ID NO: 1788876 - DNA, 15 bp, Homo sapiens
tcagactaacagcgg

SEQ ID NO: 1788877 - DNA, 15 bp, Homo sapiens
cagactaacagcgga

SEQ ID NO: 1788878 - DNA, 15 bp, Homo sapiens
agactaacagcggat

SEQ ID NO: 1788879 - DNA, 15 bp, Homo sapiens
gactaacagcggatc

SEQ ID NO: 1788880 - DNA, 15 bp, Homo sapiens
actaacagcggatct

SEQ ID NO: 1788881 - DNA, 15 bp, Homo sapiens
ctaacagcggatctc

SEQ ID NO: 1788882 - DNA, 15 bp, Homo sapiens
taacagcggatctct

SEQ ID NO: 1788883 - DNA, 15 bp, Homo sapiens
aacagcggatctctc

SEQ ID NO: 1788884 - DNA, 15 bp, Homo sapiens
acagcggatctctcg

SEQ ID NO: 1788885 - DNA, 15 bp, Homo sapiens
cagcggatctctcgg

SEQ ID NO: 1788886 - DNA, 15 bp, Homo sapiens
agcggatctctcggc

SEQ ID NO: 1788887 - DNA, 15 bp, Homo sapiens
gcggatctctcggca

SEQ ID NO: 1788888 - DNA, 15 bp, Homo sapiens
cggatctctcggcag

SEQ ID NO: 1788889 - DNA, 15 bp, Homo sapiens
ggatctctcggcaga

SEQ ID NO: 1788890 - DNA, 15 bp, Homo sapiens
gatctctcggcagaa

SEQ ID NO: 1788891 - DNA, 15 bp, Homo sapiens
atctctcggcagaaa

SEQ ID NO: 1788892 - DNA, 15 bp, Homo sapiens
tctctcggcagaaac

SEQ ID NO: 1788893 - DNA, 15 bp, Homo sapiens
ctctcggcagaaacc

SEQ ID NO: 1788894 - DNA, 15 bp, Homo sapiens
tctcggcagaaacct

SEQ ID NO: 1788895 - DNA, 15 bp, Homo sapiens
ctcggcagaaacctt

SEQ ID NO: 1788896 - DNA, 15 bp, Homo sapiens
tcggcagaaacctta

SEQ ID NO: 1788897 - DNA, 15 bp, Homo sapiens
cggcagaaaccttac

SEQ ID NO: 1788898 - DNA, 15 bp, Homo sapiens
ggcagaaaccttaca

SEQ ID NO: 1788899 - DNA, 15 bp, Homo sapiens
gcagaaaccttacaa

SEQ ID NO: 1788900 - DNA, 15 bp, Homo sapiens
cagaaaccttacaag

SEQ ID NO: 1788901 - DNA, 15 bp, Homo sapiens
agaaaccttacaagc

SEQ ID NO: 1788902 - DNA, 15 bp, Homo sapiens
gaaaccttacaagcc

SEQ ID NO: 1788903 - DNA, 15 bp, Homo sapiens
aaaccttacaagcca

SEQ ID NO: 1788904 - DNA, 15 bp, Homo sapiens
aaccttacaagccag

SEQ ID NO: 1788905 - DNA, 15 bp, Homo sapiens
accttacaagccaga

SEQ ID NO: 1788906 - DNA, 15 bp, Homo sapiens
ccttacaagccagaa

SEQ ID NO: 1788907 - DNA, 15 bp, Homo sapiens
cttacaagccagaag

SEQ ID NO: 1788908 - DNA, 15 bp, Homo sapiens
ttacaagccagaaga

SEQ ID NO: 1788909 - DNA, 15 bp, Homo sapiens
tacaagccagaagag

SEQ ID NO: 1788910 - DNA, 15 bp, Homo sapiens
acaagccagaagaga

SEQ ID NO: 1788911 - DNA, 15 bp, Homo sapiens
caagccagaagagag

SEQ ID NO: 1788912 - DNA, 15 bp, Homo sapiens
aagccagaagagagt

SEQ ID NO: 1788913 - DNA, 15 bp, Homo sapiens
agccagaagagagtg

SEQ ID NO: 1788914 - DNA, 15 bp, Homo sapiens
gccagaagagagtgg

SEQ ID NO: 1788915 - DNA, 15 bp, Homo sapiens
ccagaagagagtggg

SEQ ID NO: 1788916 - DNA, 15 bp, Homo sapiens
cagaagagagtgggg

SEQ ID NO: 1788917 - DNA, 15 bp, Homo sapiens
agaagagagtggggg

SEQ ID NO: 1788918 - DNA, 15 bp, Homo sapiens
gaagagagtgggggc

SEQ ID NO: 1788919 - DNA, 15 bp, Homo sapiens
aagagagtgggggcc

SEQ ID NO: 1788920 - DNA, 15 bp, Homo sapiens
agagagtgggggcca

SEQ ID NO: 1788921 - DNA, 15 bp, Homo sapiens
gagagtgggggccaa

SEQ ID NO: 1788922 - DNA, 15 bp, Homo sapiens
cattcttaaagaaaa

SEQ ID NO: 1788923 - DNA, 15 bp, Homo sapiens
attcttaaagaaaag

SEQ ID NO: 1788924 - DNA, 15 bp, Homo sapiens
ttcttaaagaaaaga

SEQ ID NO: 1788925 - DNA, 15 bp, Homo sapiens
tcttaaagaaaagaa

SEQ ID NO: 1788926 - DNA, 15 bp, Homo sapiens
cttaaagaaaagaat

SEQ ID NO: 1788927 - DNA, 15 bp, Homo sapiens
ttaaagaaaagaatt

SEQ ID NO: 1788928 - DNA, 15 bp, Homo sapiens
taaagaaaagaattt

SEQ ID NO: 1788929 - DNA, 15 bp, Homo sapiens
aaagaaaagaatttt

SEQ ID NO: 1788930 - DNA, 15 bp, Homo sapiens
aagaaaagaattttc

SEQ ID NO: 1788931 - DNA, 15 bp, Homo sapiens
agaaaagaattttca

SEQ ID NO: 1788932 - DNA, 15 bp, Homo sapiens
gaaaagaattttcaa

SEQ ID NO: 1788933 - DNA, 15 bp, Homo sapiens
aaaagaattttcaac

SEQ ID NO: 1788934 - DNA, 15 bp, Homo sapiens
aaagaattttcaacc

SEQ ID NO: 1788935 - DNA, 15 bp, Homo sapiens
aagaattttcaaccc

SEQ ID NO: 1788936 - DNA, 15 bp, Homo sapiens
agaattttcaaccca

SEQ ID NO: 1788937 - DNA, 15 bp, Homo sapiens
tcaacccagaatttc

SEQ ID NO: 1788938 - DNA, 15 bp, Homo sapiens
caacccagaatttca

SEQ ID NO: 1788939 - DNA, 15 bp, Homo sapiens
aacccagaatttcat

SEQ ID NO: 1788940 - DNA, 15 bp, Homo sapiens
acccagaatttcata

SEQ ID NO: 1788941 - DNA, 15 bp, Homo sapiens
cccagaatttcatat

SEQ ID NO: 1788942 - DNA, 15 bp, Homo sapiens
ccagaatttcatatc

SEQ ID NO: 1788943 - DNA, 15 bp, Homo sapiens
cagaatttcatatcc

SEQ ID NO: 1788944 - DNA, 15 bp, Homo sapiens
agaatttcatatcca

SEQ ID NO: 1788945 - DNA, 15 bp, Homo sapiens
gaatttcatatccag

SEQ ID NO: 1788946 - DNA, 15 bp, Homo sapiens
aatttcatatccagc

SEQ ID NO: 1788947 - DNA, 15 bp, Homo sapiens
atttcatatccagcc

SEQ ID NO: 1788948 - DNA, 15 bp, Homo sapiens
tttcatatccagcca

SEQ ID NO: 1788949 - DNA, 15 bp, Homo sapiens
ttcatatccagccaa

SEQ ID NO: 1788950 - DNA, 15 bp, Homo sapiens
tcatatccagccaaa

SEQ ID NO: 1788951 - DNA, 15 bp, Homo sapiens
catatccagccaaac

SEQ ID NO: 1788952 - DNA, 15 bp, Homo sapiens
atatccagccaaact

SEQ ID NO: 1788953 - DNA, 15 bp, Homo sapiens
gcttcataagtgaag

SEQ ID NO: 1788954 - DNA, 15 bp, Homo sapiens
cttcataagtgaagg

SEQ ID NO: 1788955 - DNA, 15 bp, Homo sapiens
ttcataagtgaagga

SEQ ID NO: 1788956 - DNA, 15 bp, Homo sapiens
tcataagtgaaggag

SEQ ID NO: 1788957 - DNA, 15 bp, Homo sapiens
cataagtgaaggaga

SEQ ID NO: 1788958 - DNA, 15 bp, Homo sapiens
ataagtgaaggagaa

SEQ ID NO: 1788959 - DNA, 15 bp, Homo sapiens
taagtgaaggagaaa

SEQ ID NO: 1788960 - DNA, 15 bp, Homo sapiens
aagtgaaggagaaat

SEQ ID NO: 1788961 - DNA, 15 bp, Homo sapiens
agtgaaggagaaata

SEQ ID NO: 1788962 - DNA, 15 bp, Homo sapiens
gtgaaggagaaataa

SEQ ID NO: 1788963 - DNA, 15 bp, Homo sapiens
tgaaggagaaataaa

SEQ ID NO: 1788964 - DNA, 15 bp, Homo sapiens
gaaggagaaataaaa

SEQ ID NO: 1788965 - DNA, 15 bp, Homo sapiens
aaggagaaataaaat

SEQ ID NO: 1788966 - DNA, 15 bp, Homo sapiens
aggagaaataaaatc

SEQ ID NO: 1788967 - DNA, 15 bp, Homo sapiens
ggagaaataaaatcc

SEQ ID NO: 1788968 - DNA, 15 bp, Homo sapiens
gaaataaaatccttt

SEQ ID NO: 1788969 - DNA, 15 bp, Homo sapiens
aaataaaatccttta

SEQ ID NO: 1788970 - DNA, 15 bp, Homo sapiens
aataaaatcctttac

SEQ ID NO: 1788971 - DNA, 15 bp, Homo sapiens
ataaaatcctttaca

SEQ ID NO: 1788972 - DNA, 15 bp, Homo sapiens
taaaatcctttacag

SEQ ID NO: 1788973 - DNA, 15 bp, Homo sapiens
aaaatcctttacaga

SEQ ID NO: 1788974 - DNA, 15 bp, Homo sapiens
aaatcctttacagac

SEQ ID NO: 1788975 - DNA, 15 bp, Homo sapiens
aatcctttacagaca

SEQ ID NO: 1788976 - DNA, 15 bp, Homo sapiens
atcctttacagacaa

SEQ ID NO: 1788977 - DNA, 15 bp, Homo sapiens
tcctttacagacaag

SEQ ID NO: 1788978 - DNA, 15 bp, Homo sapiens
cctttacagacaagc

SEQ ID NO: 1788979 - DNA, 15 bp, Homo sapiens
ctttacagacaagca

SEQ ID NO: 1788980 - DNA, 15 bp, Homo sapiens
tttacagacaagcaa

SEQ ID NO: 1788981 - DNA, 15 bp, Homo sapiens
ttacagacaagcaaa

SEQ ID NO: 1788982 - DNA, 15 bp, Homo sapiens
tacagacaagcaaat

SEQ ID NO: 1788983 - DNA, 15 bp, Homo sapiens
acagacaagcaaatg

SEQ ID NO: 1788984 - DNA, 15 bp, Homo sapiens
cagacaagcaaatgc

SEQ ID NO: 1788985 - DNA, 15 bp, Homo sapiens
agacaagcaaatgct

SEQ ID NO: 1788986 - DNA, 15 bp, Homo sapiens
gacaagcaaatgctg

SEQ ID NO: 1788987 - DNA, 15 bp, Homo sapiens
acaagcaaatgctga

SEQ ID NO: 1788988 - DNA, 15 bp, Homo sapiens
caagcaaatgctgag

SEQ ID NO: 1788989 - DNA, 15 bp, Homo sapiens
aagcaaatgctgaga

SEQ ID NO: 1788990 - DNA, 15 bp, Homo sapiens
agcaaatgctgagag

SEQ ID NO: 1788991 - DNA, 15 bp, Homo sapiens
gcaaatgctgagaga

SEQ ID NO: 1788992 - DNA, 15 bp, Homo sapiens
caaatgctgagagat

SEQ ID NO: 1788993 - DNA, 15 bp, Homo sapiens
aaatgctgagagatt

SEQ ID NO: 1788994 - DNA, 15 bp, Homo sapiens
aatgctgagagattt

SEQ ID NO: 1788995 - DNA, 15 bp, Homo sapiens
atgctgagagatttt

SEQ ID NO: 1788996 - DNA, 15 bp, Homo sapiens
tgctgagagattttg

SEQ ID NO: 1788997 - DNA, 15 bp, Homo sapiens
gctgagagattttgt

SEQ ID NO: 1788998 - DNA, 15 bp, Homo sapiens
ctgagagattttgtc

SEQ ID NO: 1788999 - DNA, 15 bp, Homo sapiens
accaccaggcctgcc

SEQ ID NO: 1789000 - DNA, 15 bp, Homo sapiens
ccaccaggcctgccc

SEQ ID NO: 1789001 - DNA, 15 bp, Homo sapiens
caccaggcctgccct

SEQ ID NO: 1789002 - DNA, 15 bp, Homo sapiens
accaggcctgcccta

SEQ ID NO: 1789003 - DNA, 15 bp, Homo sapiens
ccaggcctgccctaa

SEQ ID NO: 1789004 - DNA, 15 bp, Homo sapiens
caggcctgccctaaa

SEQ ID NO: 1789005 - DNA, 15 bp, Homo sapiens
aggcctgccctaaaa

SEQ ID NO: 1789006 - DNA, 15 bp, Homo sapiens
ggcctgccctaaaag

SEQ ID NO: 1789007 - DNA, 15 bp, Homo sapiens
gcctgccctaaaaga

SEQ ID NO: 1789008 - DNA, 15 bp, Homo sapiens
cctgccctaaaagag

SEQ ID NO: 1789009 - DNA, 15 bp, Homo sapiens
ctgccctaaaagagc

SEQ ID NO: 1789010 - DNA, 15 bp, Homo sapiens
tgccctaaaagagct

SEQ ID NO: 1789011 - DNA, 15 bp, Homo sapiens
gccctaaaagagctc

SEQ ID NO: 1789012 - DNA, 15 bp, Homo sapiens
ccctaaaagagctcc

SEQ ID NO: 1789013 - DNA, 15 bp, Homo sapiens
cctaaaagagctcct

SEQ ID NO: 1789014 - DNA, 15 bp, Homo sapiens
ctaaaagagctcctg

SEQ ID NO: 1789015 - DNA, 15 bp, Homo sapiens
taaaagagctcctga

SEQ ID NO: 1789016 - DNA, 15 bp, Homo sapiens
aaaagagctcctgaa

SEQ ID NO: 1789017 - DNA, 15 bp, Homo sapiens
aaagagctcctgaag

SEQ ID NO: 1789018 - DNA, 15 bp, Homo sapiens
ctcctgaaggaagcg

SEQ ID NO: 1789019 - DNA, 15 bp, Homo sapiens
tcctgaaggaagcgc

SEQ ID NO: 1789020 - DNA, 15 bp, Homo sapiens
cctgaaggaagcgct

SEQ ID NO: 1789021 - DNA, 15 bp, Homo sapiens
ctgaaggaagcgcta

SEQ ID NO: 1789022 - DNA, 15 bp, Homo sapiens
tgaaggaagcgctaa

SEQ ID NO: 1789023 - DNA, 15 bp, Homo sapiens
gaaggaagcgctaaa

SEQ ID NO: 1789024 - DNA, 15 bp, Homo sapiens
aaggaagcgctaaac

SEQ ID NO: 1789025 - DNA, 15 bp, Homo sapiens
aggaagcgctaaaca

SEQ ID NO: 1789026 - DNA, 15 bp, Homo sapiens
ggaagcgctaaacat

SEQ ID NO: 1789027 - DNA, 15 bp, Homo sapiens
gaagcgctaaacatg

SEQ ID NO: 1789028 - DNA, 15 bp, Homo sapiens
aagcgctaaacatgg

SEQ ID NO: 1789029 - DNA, 15 bp, Homo sapiens
agcgctaaacatgga

SEQ ID NO: 1789030 - DNA, 15 bp, Homo sapiens
gcgctaaacatggaa

SEQ ID NO: 1789031 - DNA, 15 bp, Homo sapiens
cgctaaacatggaaa

SEQ ID NO: 1789032 - DNA, 15 bp, Homo sapiens
gctaaacatggaaag

SEQ ID NO: 1789033 - DNA, 15 bp, Homo sapiens
ctaaacatggaaagg

SEQ ID NO: 1789034 - DNA, 15 bp, Homo sapiens
taaacatggaaagga

SEQ ID NO: 1789035 - DNA, 15 bp, Homo sapiens
aaacatggaaaggaa

SEQ ID NO: 1789036 - DNA, 15 bp, Homo sapiens
aacatggaaaggaac

SEQ ID NO: 1789037 - DNA, 15 bp, Homo sapiens
acatggaaaggaaca

SEQ ID NO: 1789038 - DNA, 15 bp, Homo sapiens
catggaaaggaacaa

SEQ ID NO: 1789039 - DNA, 15 bp, Homo sapiens
atggaaaggaacaac

SEQ ID NO: 1789040 - DNA, 15 bp, Homo sapiens
tggaaaggaacaacc

SEQ ID NO: 1789041 - DNA, 15 bp, Homo sapiens
ggaaaggaacaaccg

SEQ ID NO: 1789042 - DNA, 15 bp, Homo sapiens
gaaaggaacaaccgg

SEQ ID NO: 1789043 - DNA, 15 bp, Homo sapiens
aaaggaacaaccggt

SEQ ID NO: 1789044 - DNA, 15 bp, Homo sapiens
aaggaacaaccggta

SEQ ID NO: 1789045 - DNA, 15 bp, Homo sapiens
aggaacaaccggtac

SEQ ID NO: 1789046 - DNA, 15 bp, Homo sapiens
ggaacaaccggtacc

SEQ ID NO: 1789047 - DNA, 15 bp, Homo sapiens
gaacaaccggtacca

SEQ ID NO: 1789048 - DNA, 15 bp, Homo sapiens
aacaaccggtaccag

SEQ ID NO: 1789049 - DNA, 15 bp, Homo sapiens
acaaccggtaccagc

SEQ ID NO: 1789050 - DNA, 15 bp, Homo sapiens
caaccggtaccagcc

SEQ ID NO: 1789051 - DNA, 15 bp, Homo sapiens
aaccggtaccagccg

SEQ ID NO: 1789052 - DNA, 15 bp, Homo sapiens
accggtaccagccgc

SEQ ID NO: 1789053 - DNA, 15 bp, Homo sapiens
ccggtaccagccgct

SEQ ID NO: 1789054 - DNA, 15 bp, Homo sapiens
cggtaccagccgctg

SEQ ID NO: 1789055 - DNA, 15 bp, Homo sapiens
ggtaccagccgctgc

SEQ ID NO: 1789056 - DNA, 15 bp, Homo sapiens
gtaccagccgctgca

SEQ ID NO: 1789057 - DNA, 15 bp, Homo sapiens
taccagccgctgcaa

SEQ ID NO: 1789058 - DNA, 15 bp, Homo sapiens
accagccgctgcaaa

SEQ ID NO: 1789059 - DNA, 15 bp, Homo sapiens
ccagccgctgcaaaa

SEQ ID NO: 1789060 - DNA, 15 bp, Homo sapiens
cagccgctgcaaaat

SEQ ID NO: 1789061 - DNA, 15 bp, Homo sapiens
agccgctgcaaaatc

SEQ ID NO: 1789062 - DNA, 15 bp, Homo sapiens
gccgctgcaaaatca

SEQ ID NO: 1789063 - DNA, 15 bp, Homo sapiens
ccgctgcaaaatcat

SEQ ID NO: 1789064 - DNA, 15 bp, Homo sapiens
cgctgcaaaatcatg

SEQ ID NO: 1789065 - DNA, 15 bp, Homo sapiens
gctgcaaaatcatgc

SEQ ID NO: 1789066 - DNA, 15 bp, Homo sapiens
ctgcaaaatcatgcc

SEQ ID NO: 1789067 - DNA, 15 bp, Homo sapiens
tgcaaaatcatgcca

SEQ ID NO: 1789068 - DNA, 15 bp, Homo sapiens
gcaaaatcatgccaa

SEQ ID NO: 1789069 - DNA, 15 bp, Homo sapiens
caaaatcatgccaaa

SEQ ID NO: 1789070 - DNA, 15 bp, Homo sapiens
aaaatcatgccaaaa

SEQ ID NO: 1789071 - DNA, 15 bp, Homo sapiens
aaatcatgccaaaat

SEQ ID NO: 1789072 - DNA, 15 bp, Homo sapiens
aatcatgccaaaatg

SEQ ID NO: 1789073 - DNA, 15 bp, Homo sapiens
atcatgccaaaatgt

SEQ ID NO: 1789074 - DNA, 15 bp, Homo sapiens
tcatgccaaaatgta

SEQ ID NO: 1789075 - DNA, 15 bp, Homo sapiens
catgccaaaatgtaa

SEQ ID NO: 1789076 - DNA, 15 bp, Homo sapiens
atgccaaaatgtaaa

SEQ ID NO: 1789077 - DNA, 15 bp, Homo sapiens
tgccaaaatgtaaag

SEQ ID NO: 1789078 - DNA, 15 bp, Homo sapiens
gccaaaatgtaaaga

SEQ ID NO: 1789079 - DNA, 15 bp, Homo sapiens
ccaaaatgtaaagac

SEQ ID NO: 1789080 - DNA, 15 bp, Homo sapiens
caaaatgtaaagacc

SEQ ID NO: 1789081 - DNA, 15 bp, Homo sapiens
aaaatgtaaagacca

SEQ ID NO: 1789082 - DNA, 15 bp, Homo sapiens
aaatgtaaagaccat

SEQ ID NO: 1789083 - DNA, 15 bp, Homo sapiens
aatgtaaagaccatc

SEQ ID NO: 1789084 - DNA, 15 bp, Homo sapiens
atgtaaagaccatcg

SEQ ID NO: 1789085 - DNA, 15 bp, Homo sapiens
tgtaaagaccatcga

SEQ ID NO: 1789086 - DNA, 15 bp, Homo sapiens
gtaaagaccatcgag

SEQ ID NO: 1789087 - DNA, 15 bp, Homo sapiens
taaagaccatcgaga

SEQ ID NO: 1789088 - DNA, 15 bp, Homo sapiens
aaagaccatcgagac

SEQ ID NO: 1789089 - DNA, 15 bp, Homo sapiens
aagaccatcgagact

SEQ ID NO: 1789090 - DNA, 15 bp, Homo sapiens
agaccatcgagacta

SEQ ID NO: 1789091 - DNA, 15 bp, Homo sapiens
gaccatcgagactag

SEQ ID NO: 1789092 - DNA, 15 bp, Homo sapiens
accatcgagactagg

SEQ ID NO: 1789093 - DNA, 15 bp, Homo sapiens
ccatcgagactagga

SEQ ID NO: 1789094 - DNA, 15 bp, Homo sapiens
catcgagactaggaa

SEQ ID NO: 1789095 - DNA, 15 bp, Homo sapiens
atcgagactaggaag

SEQ ID NO: 1789096 - DNA, 15 bp, Homo sapiens
tcgagactaggaaga

SEQ ID NO: 1789097 - DNA, 15 bp, Homo sapiens
cgagactaggaagaa

SEQ ID NO: 1789098 - DNA, 15 bp, Homo sapiens
gagactaggaagaaa

SEQ ID NO: 1789099 - DNA, 15 bp, Homo sapiens
agactaggaagaaac

SEQ ID NO: 1789100 - DNA, 15 bp, Homo sapiens
gactaggaagaaact

SEQ ID NO: 1789101 - DNA, 15 bp, Homo sapiens
actaggaagaaactg

SEQ ID NO: 1789102 - DNA, 15 bp, Homo sapiens
ctaggaagaaactgc

SEQ ID NO: 1789103 - DNA, 15 bp, Homo sapiens
taggaagaaactgca

SEQ ID NO: 1789104 - DNA, 15 bp, Homo sapiens
aggaagaaactgcat

SEQ ID NO: 1789105 - DNA, 15 bp, Homo sapiens
ggaagaaactgcatc

SEQ ID NO: 1789106 - DNA, 15 bp, Homo sapiens
gaagaaactgcatca

SEQ ID NO: 1789107 - DNA, 15 bp, Homo sapiens
aagaaactgcatcaa

SEQ ID NO: 1789108 - DNA, 15 bp, Homo sapiens
agaaactgcatcaac

SEQ ID NO: 1789109 - DNA, 15 bp, Homo sapiens
gaaactgcatcaact

SEQ ID NO: 1789110 - DNA, 15 bp, Homo sapiens
aaactgcatcaacta

SEQ ID NO: 1789111 - DNA, 15 bp, Homo sapiens
aactgcatcaactaa

SEQ ID NO: 1789112 - DNA, 15 bp, Homo sapiens
actgcatcaactaat

SEQ ID NO: 1789113 - DNA, 15 bp, Homo sapiens
ctgcatcaactaatg

SEQ ID NO: 1789114 - DNA, 15 bp, Homo sapiens
tgcatcaactaatga

SEQ ID NO: 1789115 - DNA, 15 bp, Homo sapiens
gcatcaactaatgag

SEQ ID NO: 1789116 - DNA, 15 bp, Homo sapiens
catcaactaatgagc

SEQ ID NO: 1789117 - DNA, 15 bp, Homo sapiens
atcaactaatgagca

SEQ ID NO: 1789118 - DNA, 15 bp, Homo sapiens
tcaactaatgagcaa

SEQ ID NO: 1789119 - DNA, 15 bp, Homo sapiens
caactaatgagcaaa

SEQ ID NO: 1789120 - DNA, 15 bp, Homo sapiens
aactaatgagcaaaa

SEQ ID NO: 1789121 - DNA, 15 bp, Homo sapiens
actaatgagcaaaat

SEQ ID NO: 1789122 - DNA, 15 bp, Homo sapiens
ctaatgagcaaaatc

SEQ ID NO: 1789123 - DNA, 15 bp, Homo sapiens
taatgagcaaaatca

SEQ ID NO: 1789124 - DNA, 15 bp, Homo sapiens
aatgagcaaaatcac

SEQ ID NO: 1789125 - DNA, 15 bp, Homo sapiens
atgagcaaaatcacc

SEQ ID NO: 1789126 - DNA, 15 bp, Homo sapiens
tgagcaaaatcacca

SEQ ID NO: 1789127 - DNA, 15 bp, Homo sapiens
gagcaaaatcaccag

SEQ ID NO: 1789128 - DNA, 15 bp, Homo sapiens
agcaaaatcaccagc

SEQ ID NO: 1789129 - DNA, 15 bp, Homo sapiens
gcaaaatcaccagct

SEQ ID NO: 1789130 - DNA, 15 bp, Homo sapiens
caaaatcaccagcta

SEQ ID NO: 1789131 - DNA, 15 bp, Homo sapiens
aaaatcaccagctaa

SEQ ID NO: 1789132 - DNA, 15 bp, Homo sapiens
aaatcaccagctaac

SEQ ID NO: 1789133 - DNA, 15 bp, Homo sapiens
aatcaccagctaaca

SEQ ID NO: 1789134 - DNA, 15 bp, Homo sapiens
atcaccagctaacat

SEQ ID NO: 1789135 - DNA, 15 bp, Homo sapiens
tcaccagctaacatc

SEQ ID NO: 1789136 - DNA, 15 bp, Homo sapiens
caccagctaacatca

SEQ ID NO: 1789137 - DNA, 15 bp, Homo sapiens
accagctaacatcat

SEQ ID NO: 1789138 - DNA, 15 bp, Homo sapiens
ccagctaacatcata

SEQ ID NO: 1789139 - DNA, 15 bp, Homo sapiens
cagctaacatcataa

SEQ ID NO: 1789140 - DNA, 15 bp, Homo sapiens
agctaacatcataat

SEQ ID NO: 1789141 - DNA, 15 bp, Homo sapiens
gctaacatcataatg

SEQ ID NO: 1789142 - DNA, 15 bp, Homo sapiens
ctaacatcataatga

SEQ ID NO: 1789143 - DNA, 15 bp, Homo sapiens
taacatcataatgac

SEQ ID NO: 1789144 - DNA, 15 bp, Homo sapiens
aacatcataatgaca

SEQ ID NO: 1789145 - DNA, 15 bp, Homo sapiens
acatcataatgacag

SEQ ID NO: 1789146 - DNA, 15 bp, Homo sapiens
taatgacaggatcaa

SEQ ID NO: 1789147 - DNA, 15 bp, Homo sapiens
aatgacaggatcaaa

SEQ ID NO: 1789148 - DNA, 15 bp, Homo sapiens
atgacaggatcaaat

SEQ ID NO: 1789149 - DNA, 15 bp, Homo sapiens
tgacaggatcaaatt

SEQ ID NO: 1789150 - DNA, 15 bp, Homo sapiens
gacaggatcaaattc

SEQ ID NO: 1789151 - DNA, 15 bp, Homo sapiens
acaggatcaaattca

SEQ ID NO: 1789152 - DNA, 15 bp, Homo sapiens
caggatcaaattcac

SEQ ID NO: 1789153 - DNA, 15 bp, Homo sapiens
aggatcaaattcaca

SEQ ID NO: 1789154 - DNA, 15 bp, Homo sapiens
ggatcaaattcacac

SEQ ID NO: 1789155 - DNA, 15 bp, Homo sapiens
gatcaaattcacaca

SEQ ID NO: 1789156 - DNA, 15 bp, Homo sapiens
atcaaattcacacat

SEQ ID NO: 1789157 - DNA, 15 bp, Homo sapiens
tcaaattcacacata

SEQ ID NO: 1789158 - DNA, 15 bp, Homo sapiens
caaattcacacataa

SEQ ID NO: 1789159 - DNA, 15 bp, Homo sapiens
aaattcacacataac

SEQ ID NO: 1789160 - DNA, 15 bp, Homo sapiens
aattcacacataaca

SEQ ID NO: 1789161 - DNA, 15 bp, Homo sapiens
attcacacataacaa

SEQ ID NO: 1789162 - DNA, 15 bp, Homo sapiens
ttcacacataacaat

SEQ ID NO: 1789163 - DNA, 15 bp, Homo sapiens
tcacacataacaata

SEQ ID NO: 1789164 - DNA, 15 bp, Homo sapiens
cacacataacaatat

SEQ ID NO: 1789165 - DNA, 15 bp, Homo sapiens
acacataacaatatt

SEQ ID NO: 1789166 - DNA, 15 bp, Homo sapiens
cacataacaatatta

SEQ ID NO: 1789167 - DNA, 15 bp, Homo sapiens
acataacaatattaa

SEQ ID NO: 1789168 - DNA, 15 bp, Homo sapiens
cataacaatattaac

SEQ ID NO: 1789169 - DNA, 15 bp, Homo sapiens
ataacaatattaact

SEQ ID NO: 1789170 - DNA, 15 bp, Homo sapiens
taacaatattaactt

SEQ ID NO: 1789171 - DNA, 15 bp, Homo sapiens
aacaatattaacttt

SEQ ID NO: 1789172 - DNA, 15 bp, Homo sapiens
acaatattaacttta

SEQ ID NO: 1789173 - DNA, 15 bp, Homo sapiens
caatattaactttaa

SEQ ID NO: 1789174 - DNA, 15 bp, Homo sapiens
aatattaactttaaa

SEQ ID NO: 1789175 - DNA, 15 bp, Homo sapiens
atattaactttaaat

SEQ ID NO: 1789176 - DNA, 15 bp, Homo sapiens
tattaactttaaata

SEQ ID NO: 1789177 - DNA, 15 bp, Homo sapiens
attaactttaaatat

SEQ ID NO: 1789178 - DNA, 15 bp, Homo sapiens
ttaactttaaatata

SEQ ID NO: 1789179 - DNA, 15 bp, Homo sapiens
taactttaaatataa

SEQ ID NO: 1789180 - DNA, 15 bp, Homo sapiens
aactttaaatataaa

SEQ ID NO: 1789181 - DNA, 15 bp, Homo sapiens
actttaaatataaat

SEQ ID NO: 1789182 - DNA, 15 bp, Homo sapiens
ctttaaatataaatg

SEQ ID NO: 1789183 - DNA, 15 bp, Homo sapiens
tttaaatataaatgg

SEQ ID NO: 1789184 - DNA, 15 bp, Homo sapiens
ttaaatataaatgga

SEQ ID NO: 1789185 - DNA, 15 bp, Homo sapiens
aaatataaatggact

SEQ ID NO: 1789186 - DNA, 15 bp, Homo sapiens
aatataaatggacta

SEQ ID NO: 1789187 - DNA, 15 bp, Homo sapiens
atataaatggactaa

SEQ ID NO: 1789188 - DNA, 15 bp, Homo sapiens
tataaatggactaaa

SEQ ID NO: 1789189 - DNA, 15 bp, Homo sapiens
ataaatggactaaat

SEQ ID NO: 1789190 - DNA, 15 bp, Homo sapiens
taaatggactaaatt

SEQ ID NO: 1789191 - DNA, 15 bp, Homo sapiens
aaatggactaaattc

SEQ ID NO: 1789192 - DNA, 15 bp, Homo sapiens
aatggactaaattct

SEQ ID NO: 1789193 - DNA, 15 bp, Homo sapiens
atggactaaattctg

SEQ ID NO: 1789194 - DNA, 15 bp, Homo sapiens
tggactaaattctgc

SEQ ID NO: 1789195 - DNA, 15 bp, Homo sapiens
ggactaaattctgca

SEQ ID NO: 1789196 - DNA, 15 bp, Homo sapiens
gactaaattctgcaa

SEQ ID NO: 1789197 - DNA, 15 bp, Homo sapiens
actaaattctgcaat

SEQ ID NO: 1789198 - DNA, 15 bp, Homo sapiens
ctaaattctgcaatt

SEQ ID NO: 1789199 - DNA, 15 bp, Homo sapiens
taaattctgcaatta

SEQ ID NO: 1789200 - DNA, 15 bp, Homo sapiens
aaattctgcaattaa

SEQ ID NO: 1789201 - DNA, 15 bp, Homo sapiens
aattctgcaattaaa

SEQ ID NO: 1789202 - DNA, 15 bp, Homo sapiens
attctgcaattaaaa

SEQ ID NO: 1789203 - DNA, 15 bp, Homo sapiens
ttctgcaattaaaag

SEQ ID NO: 1789204 - DNA, 15 bp, Homo sapiens
tctgcaattaaaaga

SEQ ID NO: 1789205 - DNA, 15 bp, Homo sapiens
ctgcaattaaaagac

SEQ ID NO: 1789206 - DNA, 15 bp, Homo sapiens
tgcaattaaaagaca

SEQ ID NO: 1789207 - DNA, 15 bp, Homo sapiens
gcaattaaaagacac

SEQ ID NO: 1789208 - DNA, 15 bp, Homo sapiens
tgctgtattcaggaa

SEQ ID NO: 1789209 - DNA, 15 bp, Homo sapiens
gctgtattcaggaaa

SEQ ID NO: 1789210 - DNA, 15 bp, Homo sapiens
ctgtattcaggaaac

SEQ ID NO: 1789211 - DNA, 15 bp, Homo sapiens
tgtattcaggaaacc

SEQ ID NO: 1789212 - DNA, 15 bp, Homo sapiens
gtattcaggaaaccc

SEQ ID NO: 1789213 - DNA, 15 bp, Homo sapiens
tattcaggaaaccca

SEQ ID NO: 1789214 - DNA, 15 bp, Homo sapiens
attcaggaaacccat

SEQ ID NO: 1789215 - DNA, 15 bp, Homo sapiens
ttcaggaaacccatc

SEQ ID NO: 1789216 - DNA, 15 bp, Homo sapiens
tcaggaaacccatct

SEQ ID NO: 1789217 - DNA, 15 bp, Homo sapiens
caggaaacccatctc

SEQ ID NO: 1789218 - DNA, 15 bp, Homo sapiens
aggaaacccatctca

SEQ ID NO: 1789219 - DNA, 15 bp, Homo sapiens
ggaaacccatctcac

SEQ ID NO: 1789220 - DNA, 15 bp, Homo sapiens
gaaacccatctcacg

SEQ ID NO: 1789221 - DNA, 15 bp, Homo sapiens
aaacccatctcacgt

SEQ ID NO: 1789222 - DNA, 15 bp, Homo sapiens
aacccatctcacgtg

SEQ ID NO: 1789223 - DNA, 15 bp, Homo sapiens
acccatctcacgtgc

SEQ ID NO: 1789224 - DNA, 15 bp, Homo sapiens
cccatctcacgtgca

SEQ ID NO: 1789225 - DNA, 15 bp, Homo sapiens
ccatctcacgtgcag

SEQ ID NO: 1789226 - DNA, 15 bp, Homo sapiens
catctcacgtgcaga

SEQ ID NO: 1789227 - DNA, 15 bp, Homo sapiens
atctcacgtgcagag

SEQ ID NO: 1789228 - DNA, 15 bp, Homo sapiens
tctcacgtgcagaga

SEQ ID NO: 1789229 - DNA, 15 bp, Homo sapiens
ctcacgtgcagagac

SEQ ID NO: 1789230 - DNA, 15 bp, Homo sapiens
tcacgtgcagagaca

SEQ ID NO: 1789231 - DNA, 15 bp, Homo sapiens
cacgtgcagagacac

SEQ ID NO: 1789232 - DNA, 15 bp, Homo sapiens
acgtgcagagacaca

SEQ ID NO: 1789233 - DNA, 15 bp, Homo sapiens
cgtgcagagacacac

SEQ ID NO: 1789234 - DNA, 15 bp, Homo sapiens
gtgcagagacacaca

SEQ ID NO: 1789235 - DNA, 15 bp, Homo sapiens
tgcagagacacacat

SEQ ID NO: 1789236 - DNA, 15 bp, Homo sapiens
gcagagacacacata

SEQ ID NO: 1789237 - DNA, 15 bp, Homo sapiens
cagagacacacatag

SEQ ID NO: 1789238 - DNA, 15 bp, Homo sapiens
agagacacacatagg

SEQ ID NO: 1789239 - DNA, 15 bp, Homo sapiens
gagacacacataggc

SEQ ID NO: 1789240 - DNA, 15 bp, Homo sapiens
agacacacataggct

SEQ ID NO: 1789241 - DNA, 15 bp, Homo sapiens
gacacacataggctc

SEQ ID NO: 1789242 - DNA, 15 bp, Homo sapiens
acacacataggctca

SEQ ID NO: 1789243 - DNA, 15 bp, Homo sapiens
cacacataggctcaa

SEQ ID NO: 1789244 - DNA, 15 bp, Homo sapiens
acacataggctcaaa

SEQ ID NO: 1789245 - DNA, 15 bp, Homo sapiens
cacataggctcaaaa

SEQ ID NO: 1789246 - DNA, 15 bp, Homo sapiens
acataggctcaaaat

SEQ ID NO: 1789247 - DNA, 15 bp, Homo sapiens
cataggctcaaaata

SEQ ID NO: 1789248 - DNA, 15 bp, Homo sapiens
ataggctcaaaataa

SEQ ID NO: 1789249 - DNA, 15 bp, Homo sapiens
taggctcaaaataaa

SEQ ID NO: 1789250 - DNA, 15 bp, Homo sapiens
aggctcaaaataaaa

SEQ ID NO: 1789251 - DNA, 15 bp, Homo sapiens
ggctcaaaataaaag

SEQ ID NO: 1789252 - DNA, 15 bp, Homo sapiens
gctcaaaataaaagg

SEQ ID NO: 1789253 - DNA, 15 bp, Homo sapiens
ctcaaaataaaagga

SEQ ID NO: 1789254 - DNA, 15 bp, Homo sapiens
tcaaaataaaaggat

SEQ ID NO: 1789255 - DNA, 15 bp, Homo sapiens
caaaataaaaggatg

SEQ ID NO: 1789256 - DNA, 15 bp, Homo sapiens
aaaataaaaggatgg

SEQ ID NO: 1789257 - DNA, 15 bp, Homo sapiens
aaataaaaggatgga

SEQ ID NO: 1789258 - DNA, 15 bp, Homo sapiens
aataaaaggatggag

SEQ ID NO: 1789259 - DNA, 15 bp, Homo sapiens
ataaaaggatggagg

SEQ ID NO: 1789260 - DNA, 15 bp, Homo sapiens
taaaaggatggagga

SEQ ID NO: 1789261 - DNA, 15 bp, Homo sapiens
aaaaggatggaggaa

SEQ ID NO: 1789262 - DNA, 15 bp, Homo sapiens
aaaggatggaggaag

SEQ ID NO: 1789263 - DNA, 15 bp, Homo sapiens
aaggatggaggaaga

SEQ ID NO: 1789264 - DNA, 15 bp, Homo sapiens
aggatggaggaagat

SEQ ID NO: 1789265 - DNA, 15 bp, Homo sapiens
ggatggaggaagatc

SEQ ID NO: 1789266 - DNA, 15 bp, Homo sapiens
gatggaggaagatct

SEQ ID NO: 1789267 - DNA, 15 bp, Homo sapiens
atggaggaagatcta

SEQ ID NO: 1789268 - DNA, 15 bp, Homo sapiens
tggaggaagatctac

SEQ ID NO: 1789269 - DNA, 15 bp, Homo sapiens
ggaggaagatctacc

SEQ ID NO: 1789270 - DNA, 15 bp, Homo sapiens
gaggaagatctacca

SEQ ID NO: 1789271 - DNA, 15 bp, Homo sapiens
aggaagatctaccaa

SEQ ID NO: 1789272 - DNA, 15 bp, Homo sapiens
ggaagatctaccaag

SEQ ID NO: 1789273 - DNA, 15 bp, Homo sapiens
gaagatctaccaagc

SEQ ID NO: 1789274 - DNA, 15 bp, Homo sapiens
aagatctaccaagcc

SEQ ID NO: 1789275 - DNA, 15 bp, Homo sapiens
agatctaccaagcca

SEQ ID NO: 1789276 - DNA, 15 bp, Homo sapiens
gatctaccaagccaa

SEQ ID NO: 1789277 - DNA, 15 bp, Homo sapiens
atctaccaagccaat

SEQ ID NO: 1789278 - DNA, 15 bp, Homo sapiens
tctaccaagccaatg

SEQ ID NO: 1789279 - DNA, 15 bp, Homo sapiens
ctaccaagccaatgg

SEQ ID NO: 1789280 - DNA, 15 bp, Homo sapiens
taccaagccaatgga

SEQ ID NO: 1789281 - DNA, 15 bp, Homo sapiens
accaagccaatggaa

SEQ ID NO: 1789282 - DNA, 15 bp, Homo sapiens
ccaagccaatggaaa

SEQ ID NO: 1789283 - DNA, 15 bp, Homo sapiens
caagccaatggaaaa

SEQ ID NO: 1789284 - DNA, 15 bp, Homo sapiens
aagccaatggaaaac

SEQ ID NO: 1789285 - DNA, 15 bp, Homo sapiens
agccaatggaaaaca

SEQ ID NO: 1789286 - DNA, 15 bp, Homo sapiens
gccaatggaaaacaa

SEQ ID NO: 1789287 - DNA, 15 bp, Homo sapiens
ccaatggaaaacaaa

SEQ ID NO: 1789288 - DNA, 15 bp, Homo sapiens
caatggaaaacaaaa

SEQ ID NO: 1789289 - DNA, 15 bp, Homo sapiens
aatggaaaacaaaaa

SEQ ID NO: 1789290 - DNA, 15 bp, Homo sapiens
atggaaaacaaaaaa

SEQ ID NO: 1789291 - DNA, 15 bp, Homo sapiens
tggaaaacaaaaaaa

SEQ ID NO: 1789292 - DNA, 15 bp, Homo sapiens
ggaaaacaaaaaaag

SEQ ID NO: 1789293 - DNA, 15 bp, Homo sapiens
gaaaacaaaaaaagg

SEQ ID NO: 1789294 - DNA, 15 bp, Homo sapiens
aaacaaaaaaaggca

SEQ ID NO: 1789295 - DNA, 15 bp, Homo sapiens
aacaaaaaaaggcag

SEQ ID NO: 1789296 - DNA, 15 bp, Homo sapiens
acaaaaaaaggcagg

SEQ ID NO: 1789297 - DNA, 15 bp, Homo sapiens
caaaaaaaggcaggg

SEQ ID NO: 1789298 - DNA, 15 bp, Homo sapiens
aaaaaaaggcagggg

SEQ ID NO: 1789299 - DNA, 15 bp, Homo sapiens
aaaaaaggcaggggt

SEQ ID NO: 1789300 - DNA, 15 bp, Homo sapiens
aaaaaggcaggggtt

SEQ ID NO: 1789301 - DNA, 15 bp, Homo sapiens
aaaaggcaggggttg

SEQ ID NO: 1789302 - DNA, 15 bp, Homo sapiens
aaaggcaggggttgc

SEQ ID NO: 1789303 - DNA, 15 bp, Homo sapiens
aaggcaggggttgca

SEQ ID NO: 1789304 - DNA, 15 bp, Homo sapiens
aggcaggggttgcaa

SEQ ID NO: 1789305 - DNA, 15 bp, Homo sapiens
ggcaggggttgcaat

SEQ ID NO: 1789306 - DNA, 15 bp, Homo sapiens
gcaatcctagtctcg

SEQ ID NO: 1789307 - DNA, 15 bp, Homo sapiens
caatcctagtctcgg

SEQ ID NO: 1789308 - DNA, 15 bp, Homo sapiens
aatcctagtctcgga

SEQ ID NO: 1789309 - DNA, 15 bp, Homo sapiens
atcctagtctcggat

SEQ ID NO: 1789310 - DNA, 15 bp, Homo sapiens
tcctagtctcggata

SEQ ID NO: 1789311 - DNA, 15 bp, Homo sapiens
cctagtctcggataa

SEQ ID NO: 1789312 - DNA, 15 bp, Homo sapiens
ctagtctcggataaa

SEQ ID NO: 1789313 - DNA, 15 bp, Homo sapiens
tagtctcggataaaa

SEQ ID NO: 1789314 - DNA, 15 bp, Homo sapiens
agtctcggataaaac

SEQ ID NO: 1789315 - DNA, 15 bp, Homo sapiens
gtctcggataaaaca

SEQ ID NO: 1789316 - DNA, 15 bp, Homo sapiens
tctcggataaaacag

SEQ ID NO: 1789317 - DNA, 15 bp, Homo sapiens
ctcggataaaacaga

SEQ ID NO: 1789318 - DNA, 15 bp, Homo sapiens
tcggataaaacagac

SEQ ID NO: 1789319 - DNA, 15 bp, Homo sapiens
cggataaaacagact

SEQ ID NO: 1789320 - DNA, 15 bp, Homo sapiens
ggataaaacagactt

SEQ ID NO: 1789321 - DNA, 15 bp, Homo sapiens
gactttaaaccaaca

SEQ ID NO: 1789322 - DNA, 15 bp, Homo sapiens
actttaaaccaacaa

SEQ ID NO: 1789323 - DNA, 15 bp, Homo sapiens
ctttaaaccaacaaa

SEQ ID NO: 1789324 - DNA, 15 bp, Homo sapiens
tttaaaccaacaaag

SEQ ID NO: 1789325 - DNA, 15 bp, Homo sapiens
ttaaaccaacaaaga

SEQ ID NO: 1789326 - DNA, 15 bp, Homo sapiens
taaaccaacaaagat

SEQ ID NO: 1789327 - DNA, 15 bp, Homo sapiens
aaaccaacaaagatc

SEQ ID NO: 1789328 - DNA, 15 bp, Homo sapiens
aaccaacaaagatca

SEQ ID NO: 1789329 - DNA, 15 bp, Homo sapiens
accaacaaagatcaa

SEQ ID NO: 1789330 - DNA, 15 bp, Homo sapiens
ccaacaaagatcaaa

SEQ ID NO: 1789331 - DNA, 15 bp, Homo sapiens
caacaaagatcaaaa

SEQ ID NO: 1789332 - DNA, 15 bp, Homo sapiens
aacaaagatcaaaag

SEQ ID NO: 1789333 - DNA, 15 bp, Homo sapiens
acaaagatcaaaaga

SEQ ID NO: 1789334 - DNA, 15 bp, Homo sapiens
caaagatcaaaagag

SEQ ID NO: 1789335 - DNA, 15 bp, Homo sapiens
aaagatcaaaagaga

SEQ ID NO: 1789336 - DNA, 15 bp, Homo sapiens
aagatcaaaagagac

SEQ ID NO: 1789337 - DNA, 15 bp, Homo sapiens
agatcaaaagagaca

SEQ ID NO: 1789338 - DNA, 15 bp, Homo sapiens
gatcaaaagagacaa

SEQ ID NO: 1789339 - DNA, 15 bp, Homo sapiens
atcaaaagagacaaa

SEQ ID NO: 1789340 - DNA, 15 bp, Homo sapiens
tcaaaagagacaaag

SEQ ID NO: 1789341 - DNA, 15 bp, Homo sapiens
caaaagagacaaaga

SEQ ID NO: 1789342 - DNA, 15 bp, Homo sapiens
aaaagagacaaagaa

SEQ ID NO: 1789343 - DNA, 15 bp, Homo sapiens
aaagagacaaagaag

SEQ ID NO: 1789344 - DNA, 15 bp, Homo sapiens
aagagacaaagaagg

SEQ ID NO: 1789345 - DNA, 15 bp, Homo sapiens
agagacaaagaaggc

SEQ ID NO: 1789346 - DNA, 15 bp, Homo sapiens
gagacaaagaaggcc

SEQ ID NO: 1789347 - DNA, 15 bp, Homo sapiens
agacaaagaaggcca

SEQ ID NO: 1789348 - DNA, 15 bp, Homo sapiens
gacaaagaaggccat

SEQ ID NO: 1789349 - DNA, 15 bp, Homo sapiens
acaaagaaggccatt

SEQ ID NO: 1789350 - DNA, 15 bp, Homo sapiens
caaagaaggccatta

SEQ ID NO: 1789351 - DNA, 15 bp, Homo sapiens
aaagaaggccattac

SEQ ID NO: 1789352 - DNA, 15 bp, Homo sapiens
aagaaggccattaca

SEQ ID NO: 1789353 - DNA, 15 bp, Homo sapiens
agaaggccattacat

SEQ ID NO: 1789354 - DNA, 15 bp, Homo sapiens
gaaggccattacata

SEQ ID NO: 1789355 - DNA, 15 bp, Homo sapiens
aaggccattacataa

SEQ ID NO: 1789356 - DNA, 15 bp, Homo sapiens
aggccattacataat

SEQ ID NO: 1789357 - DNA, 15 bp, Homo sapiens
ggccattacataatg

SEQ ID NO: 1789358 - DNA, 15 bp, Homo sapiens
gccattacataatgg

SEQ ID NO: 1789359 - DNA, 15 bp, Homo sapiens
ccattacataatggt

SEQ ID NO: 1789360 - DNA, 15 bp, Homo sapiens
gtaaagggatcaatt

SEQ ID NO: 1789361 - DNA, 15 bp, Homo sapiens
taaagggatcaattc

SEQ ID NO: 1789362 - DNA, 15 bp, Homo sapiens
aaagggatcaattca

SEQ ID NO: 1789363 - DNA, 15 bp, Homo sapiens
aagggatcaattcaa

SEQ ID NO: 1789364 - DNA, 15 bp, Homo sapiens
agggatcaattcaac

SEQ ID NO: 1789365 - DNA, 15 bp, Homo sapiens
gggatcaattcaaca

SEQ ID NO: 1789366 - DNA, 15 bp, Homo sapiens
ggatcaattcaacaa

SEQ ID NO: 1789367 - DNA, 15 bp, Homo sapiens
gatcaattcaacaag

SEQ ID NO: 1789368 - DNA, 15 bp, Homo sapiens
atcaattcaacaaga

SEQ ID NO: 1789369 - DNA, 15 bp, Homo sapiens
tcaattcaacaagag

SEQ ID NO: 1789370 - DNA, 15 bp, Homo sapiens
caattcaacaagagg

SEQ ID NO: 1789371 - DNA, 15 bp, Homo sapiens
aattcaacaagagga

SEQ ID NO: 1789372 - DNA, 15 bp, Homo sapiens
attcaacaagaggag

SEQ ID NO: 1789373 - DNA, 15 bp, Homo sapiens
ttcaacaagaggagc

SEQ ID NO: 1789374 - DNA, 15 bp, Homo sapiens
tcaacaagaggagct

SEQ ID NO: 1789375 - DNA, 15 bp, Homo sapiens
caacaagaggagcta

SEQ ID NO: 1789376 - DNA, 15 bp, Homo sapiens
aacaagaggagctaa

SEQ ID NO: 1789377 - DNA, 15 bp, Homo sapiens
acaagaggagctaac

SEQ ID NO: 1789378 - DNA, 15 bp, Homo sapiens
caagaggagctaact

SEQ ID NO: 1789379 - DNA, 15 bp, Homo sapiens
aagaggagctaacta

SEQ ID NO: 1789380 - DNA, 15 bp, Homo sapiens
agaggagctaactat

SEQ ID NO: 1789381 - DNA, 15 bp, Homo sapiens
gaggagctaactatc

SEQ ID NO: 1789382 - DNA, 15 bp, Homo sapiens
aggagctaactatcc

SEQ ID NO: 1789383 - DNA, 15 bp, Homo sapiens
ggagctaactatcct

SEQ ID NO: 1789384 - DNA, 15 bp, Homo sapiens
gctaactatcctaaa

SEQ ID NO: 1789385 - DNA, 15 bp, Homo sapiens
ctaactatcctaaat

SEQ ID NO: 1789386 - DNA, 15 bp, Homo sapiens
taactatcctaaatg

SEQ ID NO: 1789387 - DNA, 15 bp, Homo sapiens
aactatcctaaatgt

SEQ ID NO: 1789388 - DNA, 15 bp, Homo sapiens
actatcctaaatgtt

SEQ ID NO: 1789389 - DNA, 15 bp, Homo sapiens
ctatcctaaatgttt

SEQ ID NO: 1789390 - DNA, 15 bp, Homo sapiens
tatcctaaatgttta

SEQ ID NO: 1789391 - DNA, 15 bp, Homo sapiens
atcctaaatgtttat

SEQ ID NO: 1789392 - DNA, 15 bp, Homo sapiens
tcctaaatgtttatg

SEQ ID NO: 1789393 - DNA, 15 bp, Homo sapiens
cctaaatgtttatgc

SEQ ID NO: 1789394 - DNA, 15 bp, Homo sapiens
ctaaatgtttatgca

SEQ ID NO: 1789395 - DNA, 15 bp, Homo sapiens
taaatgtttatgcac

SEQ ID NO: 1789396 - DNA, 15 bp, Homo sapiens
aaatgtttatgcacc

SEQ ID NO: 1789397 - DNA, 15 bp, Homo sapiens
aatgtttatgcaccc

SEQ ID NO: 1789398 - DNA, 15 bp, Homo sapiens
atgtttatgcaccca

SEQ ID NO: 1789399 - DNA, 15 bp, Homo sapiens
tgtttatgcacccaa

SEQ ID NO: 1789400 - DNA, 15 bp, Homo sapiens
gtttatgcacccaat

SEQ ID NO: 1789401 - DNA, 15 bp, Homo sapiens
tttatgcacccaata

SEQ ID NO: 1789402 - DNA, 15 bp, Homo sapiens
ttatgcacccaatac

SEQ ID NO: 1789403 - DNA, 15 bp, Homo sapiens
ataaagcaagtcctg

SEQ ID NO: 1789404 - DNA, 15 bp, Homo sapiens
taaagcaagtcctga

SEQ ID NO: 1789405 - DNA, 15 bp, Homo sapiens
aaagcaagtcctgag

SEQ ID NO: 1789406 - DNA, 15 bp, Homo sapiens
aagcaagtcctgagt

SEQ ID NO: 1789407 - DNA, 15 bp, Homo sapiens
agcaagtcctgagtg

SEQ ID NO: 1789408 - DNA, 15 bp, Homo sapiens
gcaagtcctgagtga

SEQ ID NO: 1789409 - DNA, 15 bp, Homo sapiens
caagtcctgagtgac

SEQ ID NO: 1789410 - DNA, 15 bp, Homo sapiens
aagtcctgagtgacc

SEQ ID NO: 1789411 - DNA, 15 bp, Homo sapiens
agtcctgagtgacct

SEQ ID NO: 1789412 - DNA, 15 bp, Homo sapiens
gtcctgagtgaccta

SEQ ID NO: 1789413 - DNA, 15 bp, Homo sapiens
tcctgagtgacctac

SEQ ID NO: 1789414 - DNA, 15 bp, Homo sapiens
cctgagtgacctaca

SEQ ID NO: 1789415 - DNA, 15 bp, Homo sapiens
ctgagtgacctacaa

SEQ ID NO: 1789416 - DNA, 15 bp, Homo sapiens
tgagtgacctacaaa

SEQ ID NO: 1789417 - DNA, 15 bp, Homo sapiens
gagtgacctacaaag

SEQ ID NO: 1789418 - DNA, 15 bp, Homo sapiens
agtgacctacaaaga

SEQ ID NO: 1789419 - DNA, 15 bp, Homo sapiens
gtgacctacaaagag

SEQ ID NO: 1789420 - DNA, 15 bp, Homo sapiens
tgacctacaaagaga

SEQ ID NO: 1789421 - DNA, 15 bp, Homo sapiens
tagactcccacacat

SEQ ID NO: 1789422 - DNA, 15 bp, Homo sapiens
agactcccacacatt

SEQ ID NO: 1789423 - DNA, 15 bp, Homo sapiens
gactcccacacatta

SEQ ID NO: 1789424 - DNA, 15 bp, Homo sapiens
actcccacacattaa

SEQ ID NO: 1789425 - DNA, 15 bp, Homo sapiens
ctcccacacattaat

SEQ ID NO: 1789426 - DNA, 15 bp, Homo sapiens
tcccacacattaata

SEQ ID NO: 1789427 - DNA, 15 bp, Homo sapiens
cccacacattaataa

SEQ ID NO: 1789428 - DNA, 15 bp, Homo sapiens
ccacacattaataat

SEQ ID NO: 1789429 - DNA, 15 bp, Homo sapiens
cacacattaataatg

SEQ ID NO: 1789430 - DNA, 15 bp, Homo sapiens
acacattaataatgg

SEQ ID NO: 1789431 - DNA, 15 bp, Homo sapiens
cacattaataatggg

SEQ ID NO: 1789432 - DNA, 15 bp, Homo sapiens
acattaataatggga

SEQ ID NO: 1789433 - DNA, 15 bp, Homo sapiens
cattaataatgggag

SEQ ID NO: 1789434 - DNA, 15 bp, Homo sapiens
attaataatgggaga

SEQ ID NO: 1789435 - DNA, 15 bp, Homo sapiens
ttaataatgggagac

SEQ ID NO: 1789436 - DNA, 15 bp, Homo sapiens
taataatgggagact

SEQ ID NO: 1789437 - DNA, 15 bp, Homo sapiens
aataatgggagactt

SEQ ID NO: 1789438 - DNA, 15 bp, Homo sapiens
ataatgggagacttt

SEQ ID NO: 1789439 - DNA, 15 bp, Homo sapiens
taatgggagacttta

SEQ ID NO: 1789440 - DNA, 15 bp, Homo sapiens
aatgggagactttaa

SEQ ID NO: 1789441 - DNA, 15 bp, Homo sapiens
atgggagactttaac

SEQ ID NO: 1789442 - DNA, 15 bp, Homo sapiens
caccccactgtcaac

SEQ ID NO: 1789443 - DNA, 15 bp, Homo sapiens
accccactgtcaaca

SEQ ID NO: 1789444 - DNA, 15 bp, Homo sapiens
ccccactgtcaacat

SEQ ID NO: 1789445 - DNA, 15 bp, Homo sapiens
cccactgtcaacatt

SEQ ID NO: 1789446 - DNA, 15 bp, Homo sapiens
ccactgtcaacatta

SEQ ID NO: 1789447 - DNA, 15 bp, Homo sapiens
cactgtcaacattag

SEQ ID NO: 1789448 - DNA, 15 bp, Homo sapiens
actgtcaacattaga

SEQ ID NO: 1789449 - DNA, 15 bp, Homo sapiens
ctgtcaacattagac

SEQ ID NO: 1789450 - DNA, 15 bp, Homo sapiens
tgtcaacattagaca

SEQ ID NO: 1789451 - DNA, 15 bp, Homo sapiens
gtcaacattagacag

SEQ ID NO: 1789452 - DNA, 15 bp, Homo sapiens
tcaacattagacaga

SEQ ID NO: 1789453 - DNA, 15 bp, Homo sapiens
caacattagacagat

SEQ ID NO: 1789454 - DNA, 15 bp, Homo sapiens
aacattagacagatc

SEQ ID NO: 1789455 - DNA, 15 bp, Homo sapiens
acattagacagatca

SEQ ID NO: 1789456 - DNA, 15 bp, Homo sapiens
cattagacagatcaa

SEQ ID NO: 1789457 - DNA, 15 bp, Homo sapiens
attagacagatcaac

SEQ ID NO: 1789458 - DNA, 15 bp, Homo sapiens
ttagacagatcaacg

SEQ ID NO: 1789459 - DNA, 15 bp, Homo sapiens
tagacagatcaacga

SEQ ID NO: 1789460 - DNA, 15 bp, Homo sapiens
agacagatcaacgag

SEQ ID NO: 1789461 - DNA, 15 bp, Homo sapiens
gacagatcaacgaga

SEQ ID NO: 1789462 - DNA, 15 bp, Homo sapiens
acagatcaacgagac

SEQ ID NO: 1789463 - DNA, 15 bp, Homo sapiens
cagatcaacgagaca

SEQ ID NO: 1789464 - DNA, 15 bp, Homo sapiens
agatcaacgagacag

SEQ ID NO: 1789465 - DNA, 15 bp, Homo sapiens
gatcaacgagacaga

SEQ ID NO: 1789466 - DNA, 15 bp, Homo sapiens
atcaacgagacagaa

SEQ ID NO: 1789467 - DNA, 15 bp, Homo sapiens
tcaacgagacagaaa

SEQ ID NO: 1789468 - DNA, 15 bp, Homo sapiens
caacgagacagaaag

SEQ ID NO: 1789469 - DNA, 15 bp, Homo sapiens
aacgagacagaaagt

SEQ ID NO: 1789470 - DNA, 15 bp, Homo sapiens
acgagacagaaagtc

SEQ ID NO: 1789471 - DNA, 15 bp, Homo sapiens
cgagacagaaagtca

SEQ ID NO: 1789472 - DNA, 15 bp, Homo sapiens
gagacagaaagtcaa

SEQ ID NO: 1789473 - DNA, 15 bp, Homo sapiens
agacagaaagtcaac

SEQ ID NO: 1789474 - DNA, 15 bp, Homo sapiens
gacagaaagtcaaca

SEQ ID NO: 1789475 - DNA, 15 bp, Homo sapiens
acagaaagtcaacaa

SEQ ID NO: 1789476 - DNA, 15 bp, Homo sapiens
cagaaagtcaacaag

SEQ ID NO: 1789477 - DNA, 15 bp, Homo sapiens
agaaagtcaacaagg

SEQ ID NO: 1789478 - DNA, 15 bp, Homo sapiens
gaaagtcaacaagga

SEQ ID NO: 1789479 - DNA, 15 bp, Homo sapiens
aaagtcaacaaggat

SEQ ID NO: 1789480 - DNA, 15 bp, Homo sapiens
aagtcaacaaggata

SEQ ID NO: 1789481 - DNA, 15 bp, Homo sapiens
agtcaacaaggatac

SEQ ID NO: 1789482 - DNA, 15 bp, Homo sapiens
gtcaacaaggatacc

SEQ ID NO: 1789483 - DNA, 15 bp, Homo sapiens
tcaacaaggataccc

SEQ ID NO: 1789484 - DNA, 15 bp, Homo sapiens
caacaaggataccca

SEQ ID NO: 1789485 - DNA, 15 bp, Homo sapiens
aacaaggatacccag

SEQ ID NO: 1789486 - DNA, 15 bp, Homo sapiens
acaaggatacccagg

SEQ ID NO: 1789487 - DNA, 15 bp, Homo sapiens
caaggatacccagga

SEQ ID NO: 1789488 - DNA, 15 bp, Homo sapiens
aaggatacccaggaa

SEQ ID NO: 1789489 - DNA, 15 bp, Homo sapiens
aggatacccaggaat

SEQ ID NO: 1789490 - DNA, 15 bp, Homo sapiens
ggatacccaggaatt

SEQ ID NO: 1789491 - DNA, 15 bp, Homo sapiens
gatacccaggaattg

SEQ ID NO: 1789492 - DNA, 15 bp, Homo sapiens
atacccaggaattga

SEQ ID NO: 1789493 - DNA, 15 bp, Homo sapiens
tacccaggaattgaa

SEQ ID NO: 1789494 - DNA, 15 bp, Homo sapiens
acccaggaattgaac

SEQ ID NO: 1789495 - DNA, 15 bp, Homo sapiens
cccaggaattgaact

SEQ ID NO: 1789496 - DNA, 15 bp, Homo sapiens
ccaggaattgaactc

SEQ ID NO: 1789497 - DNA, 15 bp, Homo sapiens
caggaattgaactca

SEQ ID NO: 1789498 - DNA, 15 bp, Homo sapiens
aggaattgaactcag

SEQ ID NO: 1789499 - DNA, 15 bp, Homo sapiens
ggaattgaactcagc

SEQ ID NO: 1789500 - DNA, 15 bp, Homo sapiens
gaattgaactcagct

SEQ ID NO: 1789501 - DNA, 15 bp, Homo sapiens
aattgaactcagctc

SEQ ID NO: 1789502 - DNA, 15 bp, Homo sapiens
attgaactcagctct

SEQ ID NO: 1789503 - DNA, 15 bp, Homo sapiens
aaatcaacagaatat

SEQ ID NO: 1789504 - DNA, 15 bp, Homo sapiens
aatcaacagaatata

SEQ ID NO: 1789505 - DNA, 15 bp, Homo sapiens
atcaacagaatatac

SEQ ID NO: 1789506 - DNA, 15 bp, Homo sapiens
tcaacagaatatacc

SEQ ID NO: 1789507 - DNA, 15 bp, Homo sapiens
caacagaatatacct

SEQ ID NO: 1789508 - DNA, 15 bp, Homo sapiens
aacagaatatacctt

SEQ ID NO: 1789509 - DNA, 15 bp, Homo sapiens
acagaatataccttt

SEQ ID NO: 1789510 - DNA, 15 bp, Homo sapiens
cagaatatacctttt

SEQ ID NO: 1789511 - DNA, 15 bp, Homo sapiens
agaatataccttttt

SEQ ID NO: 1789512 - DNA, 15 bp, Homo sapiens
gaatatacctttttt

SEQ ID NO: 1789513 - DNA, 15 bp, Homo sapiens
aatataccttttttt

SEQ ID NO: 1789514 - DNA, 15 bp, Homo sapiens
atatacctttttttc

SEQ ID NO: 1789515 - DNA, 15 bp, Homo sapiens
tatacctttttttca

SEQ ID NO: 1789516 - DNA, 15 bp, Homo sapiens
atacctttttttcag

SEQ ID NO: 1789517 - DNA, 15 bp, Homo sapiens
tacctttttttcagc

SEQ ID NO: 1789518 - DNA, 15 bp, Homo sapiens
acctttttttcagca

SEQ ID NO: 1789519 - DNA, 15 bp, Homo sapiens
cctttttttcagcac

SEQ ID NO: 1789520 - DNA, 15 bp, Homo sapiens
ctttttttcagcacc

SEQ ID NO: 1789521 - DNA, 15 bp, Homo sapiens
tttttttcagcacca

SEQ ID NO: 1789522 - DNA, 15 bp, Homo sapiens
ttttttcagcaccac

SEQ ID NO: 1789523 - DNA, 15 bp, Homo sapiens
tttttcagcaccaca

SEQ ID NO: 1789524 - DNA, 15 bp, Homo sapiens
ttttcagcaccacac

SEQ ID NO: 1789525 - DNA, 15 bp, Homo sapiens
tttcagcaccacacc

SEQ ID NO: 1789526 - DNA, 15 bp, Homo sapiens
ttcagcaccacacca

SEQ ID NO: 1789527 - DNA, 15 bp, Homo sapiens
tcagcaccacaccac

SEQ ID NO: 1789528 - DNA, 15 bp, Homo sapiens
cagcaccacaccaca

SEQ ID NO: 1789529 - DNA, 15 bp, Homo sapiens
agcaccacaccacac

SEQ ID NO: 1789530 - DNA, 15 bp, Homo sapiens
gcaccacaccacacc

SEQ ID NO: 1789531 - DNA, 15 bp, Homo sapiens
caccacaccacacct

SEQ ID NO: 1789532 - DNA, 15 bp, Homo sapiens
accacaccacaccta

SEQ ID NO: 1789533 - DNA, 15 bp, Homo sapiens
ccacaccacacctat

SEQ ID NO: 1789534 - DNA, 15 bp, Homo sapiens
cacaccacacctatt

SEQ ID NO: 1789535 - DNA, 15 bp, Homo sapiens
acaccacacctattc

SEQ ID NO: 1789536 - DNA, 15 bp, Homo sapiens
caccacacctattcc

SEQ ID NO: 1789537 - DNA, 15 bp, Homo sapiens
accacacctattcca

SEQ ID NO: 1789538 - DNA, 15 bp, Homo sapiens
ccacacctattccaa

SEQ ID NO: 1789539 - DNA, 15 bp, Homo sapiens
cacacctattccaaa

SEQ ID NO: 1789540 - DNA, 15 bp, Homo sapiens
acacctattccaaaa

SEQ ID NO: 1789541 - DNA, 15 bp, Homo sapiens
cacctattccaaaat

SEQ ID NO: 1789542 - DNA, 15 bp, Homo sapiens
acctattccaaaatt

SEQ ID NO: 1789543 - DNA, 15 bp, Homo sapiens
cctattccaaaattg

SEQ ID NO: 1789544 - DNA, 15 bp, Homo sapiens
ctattccaaaattga

SEQ ID NO: 1789545 - DNA, 15 bp, Homo sapiens
tattccaaaattgac

SEQ ID NO: 1789546 - DNA, 15 bp, Homo sapiens
attccaaaattgacc

SEQ ID NO: 1789547 - DNA, 15 bp, Homo sapiens
ttccaaaattgacca

SEQ ID NO: 1789548 - DNA, 15 bp, Homo sapiens
tccaaaattgaccac

SEQ ID NO: 1789549 - DNA, 15 bp, Homo sapiens
ccaaaattgaccaca

SEQ ID NO: 1789550 - DNA, 15 bp, Homo sapiens
caaaattgaccacat

SEQ ID NO: 1789551 - DNA, 15 bp, Homo sapiens
aaaattgaccacata

SEQ ID NO: 1789552 - DNA, 15 bp, Homo sapiens
aaattgaccacatag

SEQ ID NO: 1789553 - DNA, 15 bp, Homo sapiens
aattgaccacatagt

SEQ ID NO: 1789554 - DNA, 15 bp, Homo sapiens
attgaccacatagtt

SEQ ID NO: 1789555 - DNA, 15 bp, Homo sapiens
ttgaccacatagttg

SEQ ID NO: 1789556 - DNA, 15 bp, Homo sapiens
tgaccacatagttgg

SEQ ID NO: 1789557 - DNA, 15 bp, Homo sapiens
gaccacatagttgga

SEQ ID NO: 1789558 - DNA, 15 bp, Homo sapiens
accacatagttggaa

SEQ ID NO: 1789559 - DNA, 15 bp, Homo sapiens
ccacatagttggaag

SEQ ID NO: 1789560 - DNA, 15 bp, Homo sapiens
cacatagttggaagt

SEQ ID NO: 1789561 - DNA, 15 bp, Homo sapiens
acatagttggaagta

SEQ ID NO: 1789562 - DNA, 15 bp, Homo sapiens
catagttggaagtaa

SEQ ID NO: 1789563 - DNA, 15 bp, Homo sapiens
atagttggaagtaaa

SEQ ID NO: 1789564 - DNA, 15 bp, Homo sapiens
tagttggaagtaaag

SEQ ID NO: 1789565 - DNA, 15 bp, Homo sapiens
agttggaagtaaagc

SEQ ID NO: 1789566 - DNA, 15 bp, Homo sapiens
gttggaagtaaagct

SEQ ID NO: 1789567 - DNA, 15 bp, Homo sapiens
ttggaagtaaagctc

SEQ ID NO: 1789568 - DNA, 15 bp, Homo sapiens
tggaagtaaagctct

SEQ ID NO: 1789569 - DNA, 15 bp, Homo sapiens
ggaagtaaagctctc

SEQ ID NO: 1789570 - DNA, 15 bp, Homo sapiens
gaagtaaagctctcc

SEQ ID NO: 1789571 - DNA, 15 bp, Homo sapiens
aagtaaagctctcct

SEQ ID NO: 1789572 - DNA, 15 bp, Homo sapiens
agtaaagctctcctc

SEQ ID NO: 1789573 - DNA, 15 bp, Homo sapiens
gtaaagctctcctca

SEQ ID NO: 1789574 - DNA, 15 bp, Homo sapiens
taaagctctcctcag

SEQ ID NO: 1789575 - DNA, 15 bp, Homo sapiens
aaagctctcctcagc

SEQ ID NO: 1789576 - DNA, 15 bp, Homo sapiens
aagctctcctcagca

SEQ ID NO: 1789577 - DNA, 15 bp, Homo sapiens
agctctcctcagcaa

SEQ ID NO: 1789578 - DNA, 15 bp, Homo sapiens
gctctcctcagcaaa

SEQ ID NO: 1789579 - DNA, 15 bp, Homo sapiens
ctctcctcagcaaat

SEQ ID NO: 1789580 - DNA, 15 bp, Homo sapiens
tctcctcagcaaatg

SEQ ID NO: 1789581 - DNA, 15 bp, Homo sapiens
ctcctcagcaaatgt

SEQ ID NO: 1789582 - DNA, 15 bp, Homo sapiens
tcctcagcaaatgta

SEQ ID NO: 1789583 - DNA, 15 bp, Homo sapiens
cctcagcaaatgtaa

SEQ ID NO: 1789584 - DNA, 15 bp, Homo sapiens
ctcagcaaatgtaaa

SEQ ID NO: 1789585 - DNA, 15 bp, Homo sapiens
tcagcaaatgtaaaa

SEQ ID NO: 1789586 - DNA, 15 bp, Homo sapiens
cagcaaatgtaaaag

SEQ ID NO: 1789587 - DNA, 15 bp, Homo sapiens
agcaaatgtaaaaga

SEQ ID NO: 1789588 - DNA, 15 bp, Homo sapiens
gcaaatgtaaaagaa

SEQ ID NO: 1789589 - DNA, 15 bp, Homo sapiens
caaatgtaaaagaac

SEQ ID NO: 1789590 - DNA, 15 bp, Homo sapiens
aaatgtaaaagaaca

SEQ ID NO: 1789591 - DNA, 15 bp, Homo sapiens
aatgtaaaagaacag

SEQ ID NO: 1789592 - DNA, 15 bp, Homo sapiens
atgtaaaagaacaga

SEQ ID NO: 1789593 - DNA, 15 bp, Homo sapiens
tgtaaaagaacagaa

SEQ ID NO: 1789594 - DNA, 15 bp, Homo sapiens
gtaaaagaacagaaa

SEQ ID NO: 1789595 - DNA, 15 bp, Homo sapiens
taaaagaacagaaat

SEQ ID NO: 1789596 - DNA, 15 bp, Homo sapiens
aaaagaacagaaatt

SEQ ID NO: 1789597 - DNA, 15 bp, Homo sapiens
aaagaacagaaatta

SEQ ID NO: 1789598 - DNA, 15 bp, Homo sapiens
aagaacagaaattat

SEQ ID NO: 1789599 - DNA, 15 bp, Homo sapiens
agaacagaaattata

SEQ ID NO: 1789600 - DNA, 15 bp, Homo sapiens
gaacagaaattataa

SEQ ID NO: 1789601 - DNA, 15 bp, Homo sapiens
aacagaaattataac

SEQ ID NO: 1789602 - DNA, 15 bp, Homo sapiens
acagaaattataaca

SEQ ID NO: 1789603 - DNA, 15 bp, Homo sapiens
cagaaattataacaa

SEQ ID NO: 1789604 - DNA, 15 bp, Homo sapiens
agaaattataacaaa

SEQ ID NO: 1789605 - DNA, 15 bp, Homo sapiens
gaaattataacaaac

SEQ ID NO: 1789606 - DNA, 15 bp, Homo sapiens
aaattataacaaact

SEQ ID NO: 1789607 - DNA, 15 bp, Homo sapiens
aattataacaaacta

SEQ ID NO: 1789608 - DNA, 15 bp, Homo sapiens
attataacaaactat

SEQ ID NO: 1789609 - DNA, 15 bp, Homo sapiens
ttataacaaactatc

SEQ ID NO: 1789610 - DNA, 15 bp, Homo sapiens
tataacaaactatct

SEQ ID NO: 1789611 - DNA, 15 bp, Homo sapiens
ataacaaactatctc

SEQ ID NO: 1789612 - DNA, 15 bp, Homo sapiens
taacaaactatctct

SEQ ID NO: 1789613 - DNA, 15 bp, Homo sapiens
aacaaactatctctc

SEQ ID NO: 1789614 - DNA, 15 bp, Homo sapiens
acaaactatctctca

SEQ ID NO: 1789615 - DNA, 15 bp, Homo sapiens
caaactatctctcag

SEQ ID NO: 1789616 - DNA, 15 bp, Homo sapiens
aaactatctctcaga

SEQ ID NO: 1789617 - DNA, 15 bp, Homo sapiens
aactatctctcagac

SEQ ID NO: 1789618 - DNA, 15 bp, Homo sapiens
actatctctcagacc

SEQ ID NO: 1789619 - DNA, 15 bp, Homo sapiens
ctatctctcagacca

SEQ ID NO: 1789620 - DNA, 15 bp, Homo sapiens
tatctctcagaccac

SEQ ID NO: 1789621 - DNA, 15 bp, Homo sapiens
atctctcagaccaca

SEQ ID NO: 1789622 - DNA, 15 bp, Homo sapiens
tctctcagaccacag

SEQ ID NO: 1789623 - DNA, 15 bp, Homo sapiens
ctctcagaccacagt

SEQ ID NO: 1789624 - DNA, 15 bp, Homo sapiens
tctcagaccacagtg

SEQ ID NO: 1789625 - DNA, 15 bp, Homo sapiens
ctcagaccacagtgc

SEQ ID NO: 1789626 - DNA, 15 bp, Homo sapiens
tcagaccacagtgca

SEQ ID NO: 1789627 - DNA, 15 bp, Homo sapiens
cagaccacagtgcaa

SEQ ID NO: 1789628 - DNA, 15 bp, Homo sapiens
agaccacagtgcaat

SEQ ID NO: 1789629 - DNA, 15 bp, Homo sapiens
gaccacagtgcaatc

SEQ ID NO: 1789630 - DNA, 15 bp, Homo sapiens
accacagtgcaatca

SEQ ID NO: 1789631 - DNA, 15 bp, Homo sapiens
ccacagtgcaatcaa

SEQ ID NO: 1789632 - DNA, 15 bp, Homo sapiens
cacagtgcaatcaaa

SEQ ID NO: 1789633 - DNA, 15 bp, Homo sapiens
acagtgcaatcaaac

SEQ ID NO: 1789634 - DNA, 15 bp, Homo sapiens
cagtgcaatcaaact

SEQ ID NO: 1789635 - DNA, 15 bp, Homo sapiens
agtgcaatcaaacta

SEQ ID NO: 1789636 - DNA, 15 bp, Homo sapiens
gtgcaatcaaactag

SEQ ID NO: 1789637 - DNA, 15 bp, Homo sapiens
tgcaatcaaactaga

SEQ ID NO: 1789638 - DNA, 15 bp, Homo sapiens
gcaatcaaactagaa

SEQ ID NO: 1789639 - DNA, 15 bp, Homo sapiens
caatcaaactagaac

SEQ ID NO: 1789640 - DNA, 15 bp, Homo sapiens
aatcaaactagaact

SEQ ID NO: 1789641 - DNA, 15 bp, Homo sapiens
atcaaactagaactc

SEQ ID NO: 1789642 - DNA, 15 bp, Homo sapiens
tcaaactagaactca

SEQ ID NO: 1789643 - DNA, 15 bp, Homo sapiens
caaactagaactcag

SEQ ID NO: 1789644 - DNA, 15 bp, Homo sapiens
aaactagaactcagg

SEQ ID NO: 1789645 - DNA, 15 bp, Homo sapiens
aactagaactcagga

SEQ ID NO: 1789646 - DNA, 15 bp, Homo sapiens
actagaactcaggat

SEQ ID NO: 1789647 - DNA, 15 bp, Homo sapiens
ctagaactcaggatt

SEQ ID NO: 1789648 - DNA, 15 bp, Homo sapiens
ctcaggattaagaat

SEQ ID NO: 1789649 - DNA, 15 bp, Homo sapiens
tcaggattaagaatc

SEQ ID NO: 1789650 - DNA, 15 bp, Homo sapiens
caggattaagaatct

SEQ ID NO: 1789651 - DNA, 15 bp, Homo sapiens
aggattaagaatctc

SEQ ID NO: 1789652 - DNA, 15 bp, Homo sapiens
ggattaagaatctca

SEQ ID NO: 1789653 - DNA, 15 bp, Homo sapiens
gattaagaatctcac

SEQ ID NO: 1789654 - DNA, 15 bp, Homo sapiens
attaagaatctcact

SEQ ID NO: 1789655 - DNA, 15 bp, Homo sapiens
ttaagaatctcactc

SEQ ID NO: 1789656 - DNA, 15 bp, Homo sapiens
taagaatctcactca

SEQ ID NO: 1789657 - DNA, 15 bp, Homo sapiens
aagaatctcactcaa

SEQ ID NO: 1789658 - DNA, 15 bp, Homo sapiens
agaatctcactcaaa

SEQ ID NO: 1789659 - DNA, 15 bp, Homo sapiens
gaatctcactcaaag

SEQ ID NO: 1789660 - DNA, 15 bp, Homo sapiens
aatctcactcaaagc

SEQ ID NO: 1789661 - DNA, 15 bp, Homo sapiens
atctcactcaaagcc

SEQ ID NO: 1789662 - DNA, 15 bp, Homo sapiens
tctcactcaaagccg

SEQ ID NO: 1789663 - DNA, 15 bp, Homo sapiens
ctcactcaaagccgc

SEQ ID NO: 1789664 - DNA, 15 bp, Homo sapiens
tcactcaaagccgct

SEQ ID NO: 1789665 - DNA, 15 bp, Homo sapiens
cactcaaagccgctc

SEQ ID NO: 1789666 - DNA, 15 bp, Homo sapiens
actcaaagccgctca

SEQ ID NO: 1789667 - DNA, 15 bp, Homo sapiens
ctcaaagccgctcaa

SEQ ID NO: 1789668 - DNA, 15 bp, Homo sapiens
tcaaagccgctcaac

SEQ ID NO: 1789669 - DNA, 15 bp, Homo sapiens
caaagccgctcaact

SEQ ID NO: 1789670 - DNA, 15 bp, Homo sapiens
aaagccgctcaacta

SEQ ID NO: 1789671 - DNA, 15 bp, Homo sapiens
aagccgctcaactac

SEQ ID NO: 1789672 - DNA, 15 bp, Homo sapiens
agccgctcaactaca

SEQ ID NO: 1789673 - DNA, 15 bp, Homo sapiens
gccgctcaactacat

SEQ ID NO: 1789674 - DNA, 15 bp, Homo sapiens
ccgctcaactacatg

SEQ ID NO: 1789675 - DNA, 15 bp, Homo sapiens
cgctcaactacatgg

SEQ ID NO: 1789676 - DNA, 15 bp, Homo sapiens
gctcaactacatgga

SEQ ID NO: 1789677 - DNA, 15 bp, Homo sapiens
ctcaactacatggaa

SEQ ID NO: 1789678 - DNA, 15 bp, Homo sapiens
tcaactacatggaaa

SEQ ID NO: 1789679 - DNA, 15 bp, Homo sapiens
caactacatggaaac

SEQ ID NO: 1789680 - DNA, 15 bp, Homo sapiens
aactacatggaaact

SEQ ID NO: 1789681 - DNA, 15 bp, Homo sapiens
actacatggaaactg

SEQ ID NO: 1789682 - DNA, 15 bp, Homo sapiens
ctacatggaaactga

SEQ ID NO: 1789683 - DNA, 15 bp, Homo sapiens
tacatggaaactgaa

SEQ ID NO: 1789684 - DNA, 15 bp, Homo sapiens
acatggaaactgaac

SEQ ID NO: 1789685 - DNA, 15 bp, Homo sapiens
aactgaacaacctgc

SEQ ID NO: 1789686 - DNA, 15 bp, Homo sapiens
actgaacaacctgct

SEQ ID NO: 1789687 - DNA, 15 bp, Homo sapiens
ctgaacaacctgctc

SEQ ID NO: 1789688 - DNA, 15 bp, Homo sapiens
tgaacaacctgctcc

SEQ ID NO: 1789689 - DNA, 15 bp, Homo sapiens
gaacaacctgctcct

SEQ ID NO: 1789690 - DNA, 15 bp, Homo sapiens
aacaacctgctcctg

SEQ ID NO: 1789691 - DNA, 15 bp, Homo sapiens
acaacctgctcctga

SEQ ID NO: 1789692 - DNA, 15 bp, Homo sapiens
caacctgctcctgaa

SEQ ID NO: 1789693 - DNA, 15 bp, Homo sapiens
aacctgctcctgaat

SEQ ID NO: 1789694 - DNA, 15 bp, Homo sapiens
acctgctcctgaatg

SEQ ID NO: 1789695 - DNA, 15 bp, Homo sapiens
cctgctcctgaatga

SEQ ID NO: 1789696 - DNA, 15 bp, Homo sapiens
ctgctcctgaatgac

SEQ ID NO: 1789697 - DNA, 15 bp, Homo sapiens
tgctcctgaatgact

SEQ ID NO: 1789698 - DNA, 15 bp, Homo sapiens
gctcctgaatgacta

SEQ ID NO: 1789699 - DNA, 15 bp, Homo sapiens
ctcctgaatgactac

SEQ ID NO: 1789700 - DNA, 15 bp, Homo sapiens
tcctgaatgactact

SEQ ID NO: 1789701 - DNA, 15 bp, Homo sapiens
cctgaatgactactg

SEQ ID NO: 1789702 - DNA, 15 bp, Homo sapiens
ctgaatgactactgg

SEQ ID NO: 1789703 - DNA, 15 bp, Homo sapiens
tgaatgactactggg

SEQ ID NO: 1789704 - DNA, 15 bp, Homo sapiens
gaatgactactgggt

SEQ ID NO: 1789705 - DNA, 15 bp, Homo sapiens
aatgactactgggta

SEQ ID NO: 1789706 - DNA, 15 bp, Homo sapiens
atgactactgggtac

SEQ ID NO: 1789707 - DNA, 15 bp, Homo sapiens
tgactactgggtaca

SEQ ID NO: 1789708 - DNA, 15 bp, Homo sapiens
gactactgggtacat

SEQ ID NO: 1789709 - DNA, 15 bp, Homo sapiens
actactgggtacata

SEQ ID NO: 1789710 - DNA, 15 bp, Homo sapiens
ctactgggtacataa

SEQ ID NO: 1789711 - DNA, 15 bp, Homo sapiens
tactgggtacataac

SEQ ID NO: 1789712 - DNA, 15 bp, Homo sapiens
actgggtacataacg

SEQ ID NO: 1789713 - DNA, 15 bp, Homo sapiens
ctgggtacataacga

SEQ ID NO: 1789714 - DNA, 15 bp, Homo sapiens
tgggtacataacgaa

SEQ ID NO: 1789715 - DNA, 15 bp, Homo sapiens
gggtacataacgaaa

SEQ ID NO: 1789716 - DNA, 15 bp, Homo sapiens
ggtacataacgaaat

SEQ ID NO: 1789717 - DNA, 15 bp, Homo sapiens
gtacataacgaaatg

SEQ ID NO: 1789718 - DNA, 15 bp, Homo sapiens
tacataacgaaatga

SEQ ID NO: 1789719 - DNA, 15 bp, Homo sapiens
acataacgaaatgaa

SEQ ID NO: 1789720 - DNA, 15 bp, Homo sapiens
cataacgaaatgaag

SEQ ID NO: 1789721 - DNA, 15 bp, Homo sapiens
ataacgaaatgaagg

SEQ ID NO: 1789722 - DNA, 15 bp, Homo sapiens
taacgaaatgaaggc

SEQ ID NO: 1789723 - DNA, 15 bp, Homo sapiens
aacgaaatgaaggca

SEQ ID NO: 1789724 - DNA, 15 bp, Homo sapiens
acgaaatgaaggcag

SEQ ID NO: 1789725 - DNA, 15 bp, Homo sapiens
cgaaatgaaggcaga

SEQ ID NO: 1789726 - DNA, 15 bp, Homo sapiens
gaaatgaaggcagaa

SEQ ID NO: 1789727 - DNA, 15 bp, Homo sapiens
aaatgaaggcagaaa

SEQ ID NO: 1789728 - DNA, 15 bp, Homo sapiens
aatgaaggcagaaat

SEQ ID NO: 1789729 - DNA, 15 bp, Homo sapiens
atgaaggcagaaata

SEQ ID NO: 1789730 - DNA, 15 bp, Homo sapiens
tgaaggcagaaataa

SEQ ID NO: 1789731 - DNA, 15 bp, Homo sapiens
gaaggcagaaataaa

SEQ ID NO: 1789732 - DNA, 15 bp, Homo sapiens
aaggcagaaataaag

SEQ ID NO: 1789733 - DNA, 15 bp, Homo sapiens
aggcagaaataaaga

SEQ ID NO: 1789734 - DNA, 15 bp, Homo sapiens
ggcagaaataaagat

SEQ ID NO: 1789735 - DNA, 15 bp, Homo sapiens
gcagaaataaagatg

SEQ ID NO: 1789736 - DNA, 15 bp, Homo sapiens
cagaaataaagatgt

SEQ ID NO: 1789737 - DNA, 15 bp, Homo sapiens
agaaataaagatgtt

SEQ ID NO: 1789738 - DNA, 15 bp, Homo sapiens
gaaataaagatgttc

SEQ ID NO: 1789739 - DNA, 15 bp, Homo sapiens
aaataaagatgttct

SEQ ID NO: 1789740 - DNA, 15 bp, Homo sapiens
aataaagatgttctt

SEQ ID NO: 1789741 - DNA, 15 bp, Homo sapiens
ataaagatgttcttt

SEQ ID NO: 1789742 - DNA, 15 bp, Homo sapiens
taaagatgttctttg

SEQ ID NO: 1789743 - DNA, 15 bp, Homo sapiens
aaagatgttctttga

SEQ ID NO: 1789744 - DNA, 15 bp, Homo sapiens
aagatgttctttgaa

SEQ ID NO: 1789745 - DNA, 15 bp, Homo sapiens
agatgttctttgaaa

SEQ ID NO: 1789746 - DNA, 15 bp, Homo sapiens
gatgttctttgaaac

SEQ ID NO: 1789747 - DNA, 15 bp, Homo sapiens
atgttctttgaaacc

SEQ ID NO: 1789748 - DNA, 15 bp, Homo sapiens
tgttctttgaaacca

SEQ ID NO: 1789749 - DNA, 15 bp, Homo sapiens
ttctttgaaaccaac

SEQ ID NO: 1789750 - DNA, 15 bp, Homo sapiens
tctttgaaaccaacg

SEQ ID NO: 1789751 - DNA, 15 bp, Homo sapiens
ctttgaaaccaacga

SEQ ID NO: 1789752 - DNA, 15 bp, Homo sapiens
tttgaaaccaacgag

SEQ ID NO: 1789753 - DNA, 15 bp, Homo sapiens
ttgaaaccaacgaga

SEQ ID NO: 1789754 - DNA, 15 bp, Homo sapiens
tgaaaccaacgagaa

SEQ ID NO: 1789755 - DNA, 15 bp, Homo sapiens
gaaaccaacgagaac

SEQ ID NO: 1789756 - DNA, 15 bp, Homo sapiens
aaaccaacgagaaca

SEQ ID NO: 1789757 - DNA, 15 bp, Homo sapiens
aaccaacgagaacaa

SEQ ID NO: 1789758 - DNA, 15 bp, Homo sapiens
accaacgagaacaaa

SEQ ID NO: 1789759 - DNA, 15 bp, Homo sapiens
ccaacgagaacaaag

SEQ ID NO: 1789760 - DNA, 15 bp, Homo sapiens
caacgagaacaaaga

SEQ ID NO: 1789761 - DNA, 15 bp, Homo sapiens
aacgagaacaaagac

SEQ ID NO: 1789762 - DNA, 15 bp, Homo sapiens
acgagaacaaagaca

SEQ ID NO: 1789763 - DNA, 15 bp, Homo sapiens
cgagaacaaagacac

SEQ ID NO: 1789764 - DNA, 15 bp, Homo sapiens
gagaacaaagacacc

SEQ ID NO: 1789765 - DNA, 15 bp, Homo sapiens
agaacaaagacacca

SEQ ID NO: 1789766 - DNA, 15 bp, Homo sapiens
gaacaaagacaccac

SEQ ID NO: 1789767 - DNA, 15 bp, Homo sapiens
aacaaagacaccaca

SEQ ID NO: 1789768 - DNA, 15 bp, Homo sapiens
acaaagacaccacat

SEQ ID NO: 1789769 - DNA, 15 bp, Homo sapiens
caaagacaccacata

SEQ ID NO: 1789770 - DNA, 15 bp, Homo sapiens
aaagacaccacatac

SEQ ID NO: 1789771 - DNA, 15 bp, Homo sapiens
aagacaccacatacc

SEQ ID NO: 1789772 - DNA, 15 bp, Homo sapiens
agacaccacatacca

SEQ ID NO: 1789773 - DNA, 15 bp, Homo sapiens
gacaccacataccag

SEQ ID NO: 1789774 - DNA, 15 bp, Homo sapiens
acaccacataccaga

SEQ ID NO: 1789775 - DNA, 15 bp, Homo sapiens
caccacataccagaa

SEQ ID NO: 1789776 - DNA, 15 bp, Homo sapiens
accacataccagaat

SEQ ID NO: 1789777 - DNA, 15 bp, Homo sapiens
ccacataccagaatc

SEQ ID NO: 1789778 - DNA, 15 bp, Homo sapiens
cacataccagaatct

SEQ ID NO: 1789779 - DNA, 15 bp, Homo sapiens
acataccagaatctc

SEQ ID NO: 1789780 - DNA, 15 bp, Homo sapiens
cataccagaatctct

SEQ ID NO: 1789781 - DNA, 15 bp, Homo sapiens
ataccagaatctctg

SEQ ID NO: 1789782 - DNA, 15 bp, Homo sapiens
taccagaatctctgg

SEQ ID NO: 1789783 - DNA, 15 bp, Homo sapiens
accagaatctctggg

SEQ ID NO: 1789784 - DNA, 15 bp, Homo sapiens
ccagaatctctggga

SEQ ID NO: 1789785 - DNA, 15 bp, Homo sapiens
cagaatctctgggac

SEQ ID NO: 1789786 - DNA, 15 bp, Homo sapiens
agaatctctgggaca

SEQ ID NO: 1789787 - DNA, 15 bp, Homo sapiens
gaatctctgggacac

SEQ ID NO: 1789788 - DNA, 15 bp, Homo sapiens
atctctgggacacat

SEQ ID NO: 1789789 - DNA, 15 bp, Homo sapiens
tctctgggacacatt

SEQ ID NO: 1789790 - DNA, 15 bp, Homo sapiens
ctctgggacacattc

SEQ ID NO: 1789791 - DNA, 15 bp, Homo sapiens
tctgggacacattca

SEQ ID NO: 1789792 - DNA, 15 bp, Homo sapiens
ctgggacacattcaa

SEQ ID NO: 1789793 - DNA, 15 bp, Homo sapiens
tgggacacattcaaa

SEQ ID NO: 1789794 - DNA, 15 bp, Homo sapiens
gggacacattcaaag

SEQ ID NO: 1789795 - DNA, 15 bp, Homo sapiens
ggacacattcaaagc

SEQ ID NO: 1789796 - DNA, 15 bp, Homo sapiens
gacacattcaaagca

SEQ ID NO: 1789797 - DNA, 15 bp, Homo sapiens
acacattcaaagcag

SEQ ID NO: 1789798 - DNA, 15 bp, Homo sapiens
cacattcaaagcagt

SEQ ID NO: 1789799 - DNA, 15 bp, Homo sapiens
acattcaaagcagtg

SEQ ID NO: 1789800 - DNA, 15 bp, Homo sapiens
cattcaaagcagtgt

SEQ ID NO: 1789801 - DNA, 15 bp, Homo sapiens
attcaaagcagtgtg

SEQ ID NO: 1789802 - DNA, 15 bp, Homo sapiens
ttcaaagcagtgtgt

SEQ ID NO: 1789803 - DNA, 15 bp, Homo sapiens
tcaaagcagtgtgta

SEQ ID NO: 1789804 - DNA, 15 bp, Homo sapiens
caaagcagtgtgtag

SEQ ID NO: 1789805 - DNA, 15 bp, Homo sapiens
aaagcagtgtgtaga

SEQ ID NO: 1789806 - DNA, 15 bp, Homo sapiens
aagcagtgtgtagag

SEQ ID NO: 1789807 - DNA, 15 bp, Homo sapiens
agcagtgtgtagagg

SEQ ID NO: 1789808 - DNA, 15 bp, Homo sapiens
gcagtgtgtagaggg

SEQ ID NO: 1789809 - DNA, 15 bp, Homo sapiens
cagtgtgtagaggga

SEQ ID NO: 1789810 - DNA, 15 bp, Homo sapiens
agtgtgtagagggaa

SEQ ID NO: 1789811 - DNA, 15 bp, Homo sapiens
gtgtgtagagggaaa

SEQ ID NO: 1789812 - DNA, 15 bp, Homo sapiens
tgtgtagagggaaat

SEQ ID NO: 1789813 - DNA, 15 bp, Homo sapiens
gtgtagagggaaatt

SEQ ID NO: 1789814 - DNA, 15 bp, Homo sapiens
tgtagagggaaattt

SEQ ID NO: 1789815 - DNA, 15 bp, Homo sapiens
gtagagggaaattta

SEQ ID NO: 1789816 - DNA, 15 bp, Homo sapiens
tagagggaaatttat

SEQ ID NO: 1789817 - DNA, 15 bp, Homo sapiens
agagggaaatttata

SEQ ID NO: 1789818 - DNA, 15 bp, Homo sapiens
gagggaaatttatag

SEQ ID NO: 1789819 - DNA, 15 bp, Homo sapiens
agggaaatttatagc

SEQ ID NO: 1789820 - DNA, 15 bp, Homo sapiens
gggaaatttatagca

SEQ ID NO: 1789821 - DNA, 15 bp, Homo sapiens
ggaaatttatagcac

SEQ ID NO: 1789822 - DNA, 15 bp, Homo sapiens
gaaatttatagcact

SEQ ID NO: 1789823 - DNA, 15 bp, Homo sapiens
aaatttatagcacta

SEQ ID NO: 1789824 - DNA, 15 bp, Homo sapiens
aatttatagcactaa

SEQ ID NO: 1789825 - DNA, 15 bp, Homo sapiens
atttatagcactaaa

SEQ ID NO: 1789826 - DNA, 15 bp, Homo sapiens
tagcactaaatgcct

SEQ ID NO: 1789827 - DNA, 15 bp, Homo sapiens
agcactaaatgccta

SEQ ID NO: 1789828 - DNA, 15 bp, Homo sapiens
gcactaaatgcctac

SEQ ID NO: 1789829 - DNA, 15 bp, Homo sapiens
cactaaatgcctaca

SEQ ID NO: 1789830 - DNA, 15 bp, Homo sapiens
actaaatgcctacaa

SEQ ID NO: 1789831 - DNA, 15 bp, Homo sapiens
ctaaatgcctacaag

SEQ ID NO: 1789832 - DNA, 15 bp, Homo sapiens
taaatgcctacaaga

SEQ ID NO: 1789833 - DNA, 15 bp, Homo sapiens
aaatgcctacaagag

SEQ ID NO: 1789834 - DNA, 15 bp, Homo sapiens
aatgcctacaagaga

SEQ ID NO: 1789835 - DNA, 15 bp, Homo sapiens
atgcctacaagagaa

SEQ ID NO: 1789836 - DNA, 15 bp, Homo sapiens
tgcctacaagagaaa

SEQ ID NO: 1789837 - DNA, 15 bp, Homo sapiens
gcctacaagagaaag

SEQ ID NO: 1789838 - DNA, 15 bp, Homo sapiens
cctacaagagaaagc

SEQ ID NO: 1789839 - DNA, 15 bp, Homo sapiens
ctacaagagaaagca

SEQ ID NO: 1789840 - DNA, 15 bp, Homo sapiens
tacaagagaaagcag

SEQ ID NO: 1789841 - DNA, 15 bp, Homo sapiens
acaagagaaagcagg

SEQ ID NO: 1789842 - DNA, 15 bp, Homo sapiens
caagagaaagcagga

SEQ ID NO: 1789843 - DNA, 15 bp, Homo sapiens
aagagaaagcaggaa

SEQ ID NO: 1789844 - DNA, 15 bp, Homo sapiens
agagaaagcaggaaa

SEQ ID NO: 1789845 - DNA, 15 bp, Homo sapiens
gagaaagcaggaaag

SEQ ID NO: 1789846 - DNA, 15 bp, Homo sapiens
agaaagcaggaaaga

SEQ ID NO: 1789847 - DNA, 15 bp, Homo sapiens
gaaagcaggaaagat

SEQ ID NO: 1789848 - DNA, 15 bp, Homo sapiens
aaagcaggaaagatc

SEQ ID NO: 1789849 - DNA, 15 bp, Homo sapiens
aagcaggaaagatcc

SEQ ID NO: 1789850 - DNA, 15 bp, Homo sapiens
agcaggaaagatcca

SEQ ID NO: 1789851 - DNA, 15 bp, Homo sapiens
gcaggaaagatccaa

SEQ ID NO: 1789852 - DNA, 15 bp, Homo sapiens
caggaaagatccaaa

SEQ ID NO: 1789853 - DNA, 15 bp, Homo sapiens
aggaaagatccaaaa

SEQ ID NO: 1789854 - DNA, 15 bp, Homo sapiens
ggaaagatccaaaat

SEQ ID NO: 1789855 - DNA, 15 bp, Homo sapiens
gaaagatccaaaatt

SEQ ID NO: 1789856 - DNA, 15 bp, Homo sapiens
aaagatccaaaattg

SEQ ID NO: 1789857 - DNA, 15 bp, Homo sapiens
aagatccaaaattga

SEQ ID NO: 1789858 - DNA, 15 bp, Homo sapiens
agatccaaaattgac

SEQ ID NO: 1789859 - DNA, 15 bp, Homo sapiens
gatccaaaattgaca

SEQ ID NO: 1789860 - DNA, 15 bp, Homo sapiens
atccaaaattgacac

SEQ ID NO: 1789861 - DNA, 15 bp, Homo sapiens
tccaaaattgacacc

SEQ ID NO: 1789862 - DNA, 15 bp, Homo sapiens
ccaaaattgacaccc

SEQ ID NO: 1789863 - DNA, 15 bp, Homo sapiens
caaaattgacaccct

SEQ ID NO: 1789864 - DNA, 15 bp, Homo sapiens
ttaaaagaactagaa

SEQ ID NO: 1789865 - DNA, 15 bp, Homo sapiens
taaaagaactagaaa

SEQ ID NO: 1789866 - DNA, 15 bp, Homo sapiens
aaaagaactagaaaa

SEQ ID NO: 1789867 - DNA, 15 bp, Homo sapiens
aaagaactagaaaag

SEQ ID NO: 1789868 - DNA, 15 bp, Homo sapiens
aagaactagaaaagc

SEQ ID NO: 1789869 - DNA, 15 bp, Homo sapiens
agaactagaaaagca

SEQ ID NO: 1789870 - DNA, 15 bp, Homo sapiens
aactagaaaagcaag

SEQ ID NO: 1789871 - DNA, 15 bp, Homo sapiens
actagaaaagcaaga

SEQ ID NO: 1789872 - DNA, 15 bp, Homo sapiens
ctagaaaagcaagag

SEQ ID NO: 1789873 - DNA, 15 bp, Homo sapiens
tagaaaagcaagagc

SEQ ID NO: 1789874 - DNA, 15 bp, Homo sapiens
agaaaagcaagagca

SEQ ID NO: 1789875 - DNA, 15 bp, Homo sapiens
gaaaagcaagagcaa

SEQ ID NO: 1789876 - DNA, 15 bp, Homo sapiens
aaaagcaagagcaaa

SEQ ID NO: 1789877 - DNA, 15 bp, Homo sapiens
aaagcaagagcaaac

SEQ ID NO: 1789878 - DNA, 15 bp, Homo sapiens
aagcaagagcaaaca

SEQ ID NO: 1789879 - DNA, 15 bp, Homo sapiens
agcaagagcaaacac

SEQ ID NO: 1789880 - DNA, 15 bp, Homo sapiens
gcaagagcaaacaca

SEQ ID NO: 1789881 - DNA, 15 bp, Homo sapiens
caagagcaaacacat

SEQ ID NO: 1789882 - DNA, 15 bp, Homo sapiens
aagagcaaacacatt

SEQ ID NO: 1789883 - DNA, 15 bp, Homo sapiens
agagcaaacacattc

SEQ ID NO: 1789884 - DNA, 15 bp, Homo sapiens
gagcaaacacattca

SEQ ID NO: 1789885 - DNA, 15 bp, Homo sapiens
agcaaacacattcaa

SEQ ID NO: 1789886 - DNA, 15 bp, Homo sapiens
gcaaacacattcaaa

SEQ ID NO: 1789887 - DNA, 15 bp, Homo sapiens
caaacacattcaaaa

SEQ ID NO: 1789888 - DNA, 15 bp, Homo sapiens
aaacacattcaaaag

SEQ ID NO: 1789889 - DNA, 15 bp, Homo sapiens
aacacattcaaaagc

SEQ ID NO: 1789890 - DNA, 15 bp, Homo sapiens
acacattcaaaagct

SEQ ID NO: 1789891 - DNA, 15 bp, Homo sapiens
cacattcaaaagcta

SEQ ID NO: 1789892 - DNA, 15 bp, Homo sapiens
acattcaaaagctag

SEQ ID NO: 1789893 - DNA, 15 bp, Homo sapiens
cattcaaaagctagc

SEQ ID NO: 1789894 - DNA, 15 bp, Homo sapiens
aaagctagcagaagg

SEQ ID NO: 1789895 - DNA, 15 bp, Homo sapiens
aagctagcagaaggc

SEQ ID NO: 1789896 - DNA, 15 bp, Homo sapiens
agctagcagaaggca

SEQ ID NO: 1789897 - DNA, 15 bp, Homo sapiens
gctagcagaaggcaa

SEQ ID NO: 1789898 - DNA, 15 bp, Homo sapiens
ctagcagaaggcaag

SEQ ID NO: 1789899 - DNA, 15 bp, Homo sapiens
tagcagaaggcaaga

SEQ ID NO: 1789900 - DNA, 15 bp, Homo sapiens
agcagaaggcaagaa

SEQ ID NO: 1789901 - DNA, 15 bp, Homo sapiens
gcagaaggcaagaaa

SEQ ID NO: 1789902 - DNA, 15 bp, Homo sapiens
cagaaggcaagaaat

SEQ ID NO: 1789903 - DNA, 15 bp, Homo sapiens
agaaggcaagaaata

SEQ ID NO: 1789904 - DNA, 15 bp, Homo sapiens
gaaggcaagaaataa

SEQ ID NO: 1789905 - DNA, 15 bp, Homo sapiens
aaggcaagaaataac

SEQ ID NO: 1789906 - DNA, 15 bp, Homo sapiens
aggcaagaaataact

SEQ ID NO: 1789907 - DNA, 15 bp, Homo sapiens
ggcaagaaataacta

SEQ ID NO: 1789908 - DNA, 15 bp, Homo sapiens
gcaagaaataactaa

SEQ ID NO: 1789909 - DNA, 15 bp, Homo sapiens
caagaaataactaaa

SEQ ID NO: 1789910 - DNA, 15 bp, Homo sapiens
aagaaataactaaaa

SEQ ID NO: 1789911 - DNA, 15 bp, Homo sapiens
agaaataactaaaat

SEQ ID NO: 1789912 - DNA, 15 bp, Homo sapiens
gaaataactaaaatc

SEQ ID NO: 1789913 - DNA, 15 bp, Homo sapiens
aaataactaaaatca

SEQ ID NO: 1789914 - DNA, 15 bp, Homo sapiens
aataactaaaatcag

SEQ ID NO: 1789915 - DNA, 15 bp, Homo sapiens
ataactaaaatcaga

SEQ ID NO: 1789916 - DNA, 15 bp, Homo sapiens
taactaaaatcagag

SEQ ID NO: 1789917 - DNA, 15 bp, Homo sapiens
aactaaaatcagagc

SEQ ID NO: 1789918 - DNA, 15 bp, Homo sapiens
actaaaatcagagca

SEQ ID NO: 1789919 - DNA, 15 bp, Homo sapiens
ctaaaatcagagcag

SEQ ID NO: 1789920 - DNA, 15 bp, Homo sapiens
taaaatcagagcaga

SEQ ID NO: 1789921 - DNA, 15 bp, Homo sapiens
aaaatcagagcagaa

SEQ ID NO: 1789922 - DNA, 15 bp, Homo sapiens
aaatcagagcagaac

SEQ ID NO: 1789923 - DNA, 15 bp, Homo sapiens
aatcagagcagaact

SEQ ID NO: 1789924 - DNA, 15 bp, Homo sapiens
atcagagcagaactg

SEQ ID NO: 1789925 - DNA, 15 bp, Homo sapiens
tcagagcagaactga

SEQ ID NO: 1789926 - DNA, 15 bp, Homo sapiens
cagagcagaactgaa

SEQ ID NO: 1789927 - DNA, 15 bp, Homo sapiens
agagcagaactgaag

SEQ ID NO: 1789928 - DNA, 15 bp, Homo sapiens
gagcagaactgaagg

SEQ ID NO: 1789929 - DNA, 15 bp, Homo sapiens
agcagaactgaagga

SEQ ID NO: 1789930 - DNA, 15 bp, Homo sapiens
gcagaactgaaggaa

SEQ ID NO: 1789931 - DNA, 15 bp, Homo sapiens
cagaactgaaggaaa

SEQ ID NO: 1789932 - DNA, 15 bp, Homo sapiens
agaactgaaggaaat

SEQ ID NO: 1789933 - DNA, 15 bp, Homo sapiens
gaactgaaggaaata

SEQ ID NO: 1789934 - DNA, 15 bp, Homo sapiens
aactgaaggaaatag

SEQ ID NO: 1789935 - DNA, 15 bp, Homo sapiens
actgaaggaaataga

SEQ ID NO: 1789936 - DNA, 15 bp, Homo sapiens
ctgaaggaaatagag

SEQ ID NO: 1789937 - DNA, 15 bp, Homo sapiens
tgaaggaaatagaga

SEQ ID NO: 1789938 - DNA, 15 bp, Homo sapiens
gaaggaaatagagac

SEQ ID NO: 1789939 - DNA, 15 bp, Homo sapiens
aaggaaatagagaca

SEQ ID NO: 1789940 - DNA, 15 bp, Homo sapiens
aggaaatagagacac

SEQ ID NO: 1789941 - DNA, 15 bp, Homo sapiens
ggaaatagagacaca

SEQ ID NO: 1789942 - DNA, 15 bp, Homo sapiens
gaaatagagacacaa

SEQ ID NO: 1789943 - DNA, 15 bp, Homo sapiens
aaatagagacacaaa

SEQ ID NO: 1789944 - DNA, 15 bp, Homo sapiens
aatagagacacaaaa

SEQ ID NO: 1789945 - DNA, 15 bp, Homo sapiens
atagagacacaaaaa

SEQ ID NO: 1789946 - DNA, 15 bp, Homo sapiens
tagagacacaaaaaa

SEQ ID NO: 1789947 - DNA, 15 bp, Homo sapiens
agagacacaaaaaac

SEQ ID NO: 1789948 - DNA, 15 bp, Homo sapiens
gagacacaaaaaacc

SEQ ID NO: 1789949 - DNA, 15 bp, Homo sapiens
agacacaaaaaaccc

SEQ ID NO: 1789950 - DNA, 15 bp, Homo sapiens
gacacaaaaaaccct

SEQ ID NO: 1789951 - DNA, 15 bp, Homo sapiens
acacaaaaaaccctt

SEQ ID NO: 1789952 - DNA, 15 bp, Homo sapiens
cacaaaaaacccttc

SEQ ID NO: 1789953 - DNA, 15 bp, Homo sapiens
acaaaaaacccttca

SEQ ID NO: 1789954 - DNA, 15 bp, Homo sapiens
caaaaaacccttcaa

SEQ ID NO: 1789955 - DNA, 15 bp, Homo sapiens
aaaaaacccttcaaa

SEQ ID NO: 1789956 - DNA, 15 bp, Homo sapiens
aacccttcaaaaaaa

SEQ ID NO: 1789957 - DNA, 15 bp, Homo sapiens
acccttcaaaaaaat

SEQ ID NO: 1789958 - DNA, 15 bp, Homo sapiens
cccttcaaaaaaatc

SEQ ID NO: 1789959 - DNA, 15 bp, Homo sapiens
ccttcaaaaaaatca

SEQ ID NO: 1789960 - DNA, 15 bp, Homo sapiens
cttcaaaaaaatcaa

SEQ ID NO: 1789961 - DNA, 15 bp, Homo sapiens
ttcaaaaaaatcaat

SEQ ID NO: 1789962 - DNA, 15 bp, Homo sapiens
tcaaaaaaatcaatg

SEQ ID NO: 1789963 - DNA, 15 bp, Homo sapiens
caaaaaaatcaatga

SEQ ID NO: 1789964 - DNA, 15 bp, Homo sapiens
ctggttttttgaaag

SEQ ID NO: 1789965 - DNA, 15 bp, Homo sapiens
tggttttttgaaagg

SEQ ID NO: 1789966 - DNA, 15 bp, Homo sapiens
ggttttttgaaagga

SEQ ID NO: 1789967 - DNA, 15 bp, Homo sapiens
gttttttgaaaggat

SEQ ID NO: 1789968 - DNA, 15 bp, Homo sapiens
ttttttgaaaggatc

SEQ ID NO: 1789969 - DNA, 15 bp, Homo sapiens
tttttgaaaggatca

SEQ ID NO: 1789970 - DNA, 15 bp, Homo sapiens
ttttgaaaggatcaa

SEQ ID NO: 1789971 - DNA, 15 bp, Homo sapiens
tttgaaaggatcaac

SEQ ID NO: 1789972 - DNA, 15 bp, Homo sapiens
ttgaaaggatcaaca

SEQ ID NO: 1789973 - DNA, 15 bp, Homo sapiens
tgaaaggatcaacaa

SEQ ID NO: 1789974 - DNA, 15 bp, Homo sapiens
gaaaggatcaacaaa

SEQ ID NO: 1789975 - DNA, 15 bp, Homo sapiens
aaaggatcaacaaaa

SEQ ID NO: 1789976 - DNA, 15 bp, Homo sapiens
aaggatcaacaaaat

SEQ ID NO: 1789977 - DNA, 15 bp, Homo sapiens
aggatcaacaaaatt

SEQ ID NO: 1789978 - DNA, 15 bp, Homo sapiens
ggatcaacaaaattg

SEQ ID NO: 1789979 - DNA, 15 bp, Homo sapiens
gatcaacaaaattga

SEQ ID NO: 1789980 - DNA, 15 bp, Homo sapiens
atcaacaaaattgat

SEQ ID NO: 1789981 - DNA, 15 bp, Homo sapiens
tcaacaaaattgata

SEQ ID NO: 1789982 - DNA, 15 bp, Homo sapiens
caacaaaattgatag

SEQ ID NO: 1789983 - DNA, 15 bp, Homo sapiens
aacaaaattgataga

SEQ ID NO: 1789984 - DNA, 15 bp, Homo sapiens
acaaaattgatagac

SEQ ID NO: 1789985 - DNA, 15 bp, Homo sapiens
caaaattgatagacc

SEQ ID NO: 1789986 - DNA, 15 bp, Homo sapiens
aaaattgatagaccg

SEQ ID NO: 1789987 - DNA, 15 bp, Homo sapiens
aaattgatagaccgc

SEQ ID NO: 1789988 - DNA, 15 bp, Homo sapiens
aattgatagaccgct

SEQ ID NO: 1789989 - DNA, 15 bp, Homo sapiens
attgatagaccgcta

SEQ ID NO: 1789990 - DNA, 15 bp, Homo sapiens
ttgatagaccgctag

SEQ ID NO: 1789991 - DNA, 15 bp, Homo sapiens
tgatagaccgctagc

SEQ ID NO: 1789992 - DNA, 15 bp, Homo sapiens
gatagaccgctagca

SEQ ID NO: 1789993 - DNA, 15 bp, Homo sapiens
atagaccgctagcaa

SEQ ID NO: 1789994 - DNA, 15 bp, Homo sapiens
tagaccgctagcaag

SEQ ID NO: 1789995 - DNA, 15 bp, Homo sapiens
agaccgctagcaaga

SEQ ID NO: 1789996 - DNA, 15 bp, Homo sapiens
gaccgctagcaagac

SEQ ID NO: 1789997 - DNA, 15 bp, Homo sapiens
accgctagcaagact

SEQ ID NO: 1789998 - DNA, 15 bp, Homo sapiens
ccgctagcaagacta

SEQ ID NO: 1789999 - DNA, 15 bp, Homo sapiens
cgctagcaagactaa

SEQ ID NO: 1790000 - DNA, 15 bp, Homo sapiens
gctagcaagactaat

SEQ ID NO: 1790001 - DNA, 15 bp, Homo sapiens
ctagcaagactaata

SEQ ID NO: 1790002 - DNA, 15 bp, Homo sapiens
tagcaagactaataa

SEQ ID NO: 1790003 - DNA, 15 bp, Homo sapiens
agcaagactaataaa

SEQ ID NO: 1790004 - DNA, 15 bp, Homo sapiens
gcaagactaataaag

SEQ ID NO: 1790005 - DNA, 15 bp, Homo sapiens
caagactaataaaga

SEQ ID NO: 1790006 - DNA, 15 bp, Homo sapiens
aagactaataaagaa

SEQ ID NO: 1790007 - DNA, 15 bp, Homo sapiens
agactaataaagaaa

SEQ ID NO: 1790008 - DNA, 15 bp, Homo sapiens
gactaataaagaaaa

SEQ ID NO: 1790009 - DNA, 15 bp, Homo sapiens
actaataaagaaaaa

SEQ ID NO: 1790010 - DNA, 15 bp, Homo sapiens
ctaataaagaaaaaa

SEQ ID NO: 1790011 - DNA, 15 bp, Homo sapiens
taataaagaaaaaaa

SEQ ID NO: 1790012 - DNA, 15 bp, Homo sapiens
aataaagaaaaaaag

SEQ ID NO: 1790013 - DNA, 15 bp, Homo sapiens
ataaagaaaaaaaga

SEQ ID NO: 1790014 - DNA, 15 bp, Homo sapiens
taaagaaaaaaagag

SEQ ID NO: 1790015 - DNA, 15 bp, Homo sapiens
aaagaaaaaaagaga

SEQ ID NO: 1790016 - DNA, 15 bp, Homo sapiens
aagaaaaaaagagag

SEQ ID NO: 1790017 - DNA, 15 bp, Homo sapiens
aaaaagagagaagaa

SEQ ID NO: 1790018 - DNA, 15 bp, Homo sapiens
gacacaataaaaaat

SEQ ID NO: 1790019 - DNA, 15 bp, Homo sapiens
acacaataaaaaatg

SEQ ID NO: 1790020 - DNA, 15 bp, Homo sapiens
cacaataaaaaatga

SEQ ID NO: 1790021 - DNA, 15 bp, Homo sapiens
acaataaaaaatgat

SEQ ID NO: 1790022 - DNA, 15 bp, Homo sapiens
caataaaaaatgata

SEQ ID NO: 1790023 - DNA, 15 bp, Homo sapiens
aataaaaaatgataa

SEQ ID NO: 1790024 - DNA, 15 bp, Homo sapiens
ataaaaaatgataaa

SEQ ID NO: 1790025 - DNA, 15 bp, Homo sapiens
taaaaaatgataaag

SEQ ID NO: 1790026 - DNA, 15 bp, Homo sapiens
aaaaaatgataaagg

SEQ ID NO: 1790027 - DNA, 15 bp, Homo sapiens
aaaaatgataaaggg

SEQ ID NO: 1790028 - DNA, 15 bp, Homo sapiens
aaaatgataaagggg

SEQ ID NO: 1790029 - DNA, 15 bp, Homo sapiens
aaatgataaagggga

SEQ ID NO: 1790030 - DNA, 15 bp, Homo sapiens
aatgataaaggggat

SEQ ID NO: 1790031 - DNA, 15 bp, Homo sapiens
atgataaaggggata

SEQ ID NO: 1790032 - DNA, 15 bp, Homo sapiens
tgataaaggggatat

SEQ ID NO: 1790033 - DNA, 15 bp, Homo sapiens
gataaaggggatatc

SEQ ID NO: 1790034 - DNA, 15 bp, Homo sapiens
ataaaggggatatca

SEQ ID NO: 1790035 - DNA, 15 bp, Homo sapiens
ggggatatcaccacc

SEQ ID NO: 1790036 - DNA, 15 bp, Homo sapiens
gggatatcaccaccg

SEQ ID NO: 1790037 - DNA, 15 bp, Homo sapiens
ggatatcaccaccga

SEQ ID NO: 1790038 - DNA, 15 bp, Homo sapiens
gatatcaccaccgat

SEQ ID NO: 1790039 - DNA, 15 bp, Homo sapiens
atatcaccaccgatc

SEQ ID NO: 1790040 - DNA, 15 bp, Homo sapiens
tatcaccaccgatcc

SEQ ID NO: 1790041 - DNA, 15 bp, Homo sapiens
atcaccaccgatccc

SEQ ID NO: 1790042 - DNA, 15 bp, Homo sapiens
tcaccaccgatccca

SEQ ID NO: 1790043 - DNA, 15 bp, Homo sapiens
caccaccgatcccac

SEQ ID NO: 1790044 - DNA, 15 bp, Homo sapiens
accaccgatcccaca

SEQ ID NO: 1790045 - DNA, 15 bp, Homo sapiens
ccaccgatcccacag

SEQ ID NO: 1790046 - DNA, 15 bp, Homo sapiens
caccgatcccacaga

SEQ ID NO: 1790047 - DNA, 15 bp, Homo sapiens
accgatcccacagaa

SEQ ID NO: 1790048 - DNA, 15 bp, Homo sapiens
ccgatcccacagaaa

SEQ ID NO: 1790049 - DNA, 15 bp, Homo sapiens
cgatcccacagaaat

SEQ ID NO: 1790050 - DNA, 15 bp, Homo sapiens
catcagagaatacta

SEQ ID NO: 1790051 - DNA, 15 bp, Homo sapiens
atcagagaatactac

SEQ ID NO: 1790052 - DNA, 15 bp, Homo sapiens
tcagagaatactaca

SEQ ID NO: 1790053 - DNA, 15 bp, Homo sapiens
cagagaatactacaa

SEQ ID NO: 1790054 - DNA, 15 bp, Homo sapiens
agagaatactacaaa

SEQ ID NO: 1790055 - DNA, 15 bp, Homo sapiens
gagaatactacaaac

SEQ ID NO: 1790056 - DNA, 15 bp, Homo sapiens
agaatactacaaaca

SEQ ID NO: 1790057 - DNA, 15 bp, Homo sapiens
gaatactacaaacac

SEQ ID NO: 1790058 - DNA, 15 bp, Homo sapiens
aatactacaaacacc

SEQ ID NO: 1790059 - DNA, 15 bp, Homo sapiens
atactacaaacacct

SEQ ID NO: 1790060 - DNA, 15 bp, Homo sapiens
tactacaaacacctc

SEQ ID NO: 1790061 - DNA, 15 bp, Homo sapiens
actacaaacacctct

SEQ ID NO: 1790062 - DNA, 15 bp, Homo sapiens
ctacaaacacctcta

SEQ ID NO: 1790063 - DNA, 15 bp, Homo sapiens
tacaaacacctctac

SEQ ID NO: 1790064 - DNA, 15 bp, Homo sapiens
acaaacacctctacg

SEQ ID NO: 1790065 - DNA, 15 bp, Homo sapiens
caaacacctctacgc

SEQ ID NO: 1790066 - DNA, 15 bp, Homo sapiens
aaacacctctacgca

SEQ ID NO: 1790067 - DNA, 15 bp, Homo sapiens
aacacctctacgcaa

SEQ ID NO: 1790068 - DNA, 15 bp, Homo sapiens
acacctctacgcaaa

SEQ ID NO: 1790069 - DNA, 15 bp, Homo sapiens
cacctctacgcaaat

SEQ ID NO: 1790070 - DNA, 15 bp, Homo sapiens
acctctacgcaaata

SEQ ID NO: 1790071 - DNA, 15 bp, Homo sapiens
cctctacgcaaataa

SEQ ID NO: 1790072 - DNA, 15 bp, Homo sapiens
ctctacgcaaataaa

SEQ ID NO: 1790073 - DNA, 15 bp, Homo sapiens
tctacgcaaataaac

SEQ ID NO: 1790074 - DNA, 15 bp, Homo sapiens
ctacgcaaataaact

SEQ ID NO: 1790075 - DNA, 15 bp, Homo sapiens
tacgcaaataaacta

SEQ ID NO: 1790076 - DNA, 15 bp, Homo sapiens
acgcaaataaactag

SEQ ID NO: 1790077 - DNA, 15 bp, Homo sapiens
cgcaaataaactaga

SEQ ID NO: 1790078 - DNA, 15 bp, Homo sapiens
gcaaataaactagaa

SEQ ID NO: 1790079 - DNA, 15 bp, Homo sapiens
caaataaactagaaa

SEQ ID NO: 1790080 - DNA, 15 bp, Homo sapiens
aaataaactagaaaa

SEQ ID NO: 1790081 - DNA, 15 bp, Homo sapiens
aataaactagaaaat

SEQ ID NO: 1790082 - DNA, 15 bp, Homo sapiens
ataaactagaaaatc

SEQ ID NO: 1790083 - DNA, 15 bp, Homo sapiens
taaactagaaaatct

SEQ ID NO: 1790084 - DNA, 15 bp, Homo sapiens
aaactagaaaatcta

SEQ ID NO: 1790085 - DNA, 15 bp, Homo sapiens
aactagaaaatctag

SEQ ID NO: 1790086 - DNA, 15 bp, Homo sapiens
actagaaaatctaga

SEQ ID NO: 1790087 - DNA, 15 bp, Homo sapiens
ctagaaaatctagag

SEQ ID NO: 1790088 - DNA, 15 bp, Homo sapiens
tagaaaatctagagg

SEQ ID NO: 1790089 - DNA, 15 bp, Homo sapiens
agaaaatctagagga

SEQ ID NO: 1790090 - DNA, 15 bp, Homo sapiens
gaaaatctagaggaa

SEQ ID NO: 1790091 - DNA, 15 bp, Homo sapiens
aaaatctagaggaaa

SEQ ID NO: 1790092 - DNA, 15 bp, Homo sapiens
aaatctagaggaaat

SEQ ID NO: 1790093 - DNA, 15 bp, Homo sapiens
aatctagaggaaatg

SEQ ID NO: 1790094 - DNA, 15 bp, Homo sapiens
atctagaggaaatgg

SEQ ID NO: 1790095 - DNA, 15 bp, Homo sapiens
tctagaggaaatgga

SEQ ID NO: 1790096 - DNA, 15 bp, Homo sapiens
ctagaggaaatggat

SEQ ID NO: 1790097 - DNA, 15 bp, Homo sapiens
tagaggaaatggata

SEQ ID NO: 1790098 - DNA, 15 bp, Homo sapiens
agaggaaatggatac

SEQ ID NO: 1790099 - DNA, 15 bp, Homo sapiens
gaggaaatggataca

SEQ ID NO: 1790100 - DNA, 15 bp, Homo sapiens
aggaaatggatacat

SEQ ID NO: 1790101 - DNA, 15 bp, Homo sapiens
ggaaatggatacatt

SEQ ID NO: 1790102 - DNA, 15 bp, Homo sapiens
gaaatggatacattc

SEQ ID NO: 1790103 - DNA, 15 bp, Homo sapiens
aaatggatacattcc

SEQ ID NO: 1790104 - DNA, 15 bp, Homo sapiens
aatggatacattcct

SEQ ID NO: 1790105 - DNA, 15 bp, Homo sapiens
atggatacattcctc

SEQ ID NO: 1790106 - DNA, 15 bp, Homo sapiens
tggatacattcctcg

SEQ ID NO: 1790107 - DNA, 15 bp, Homo sapiens
ggatacattcctcga

SEQ ID NO: 1790108 - DNA, 15 bp, Homo sapiens
gatacattcctcgac

SEQ ID NO: 1790109 - DNA, 15 bp, Homo sapiens
atacattcctcgaca

SEQ ID NO: 1790110 - DNA, 15 bp, Homo sapiens
tacattcctcgacac

SEQ ID NO: 1790111 - DNA, 15 bp, Homo sapiens
acattcctcgacaca

SEQ ID NO: 1790112 - DNA, 15 bp, Homo sapiens
cattcctcgacacat

SEQ ID NO: 1790113 - DNA, 15 bp, Homo sapiens
attcctcgacacata

SEQ ID NO: 1790114 - DNA, 15 bp, Homo sapiens
ttcctcgacacatac

SEQ ID NO: 1790115 - DNA, 15 bp, Homo sapiens
tcctcgacacataca

SEQ ID NO: 1790116 - DNA, 15 bp, Homo sapiens
cctcgacacatacac

SEQ ID NO: 1790117 - DNA, 15 bp, Homo sapiens
ctcgacacatacact

SEQ ID NO: 1790118 - DNA, 15 bp, Homo sapiens
tcgacacatacactc

SEQ ID NO: 1790119 - DNA, 15 bp, Homo sapiens
cgacacatacactct

SEQ ID NO: 1790120 - DNA, 15 bp, Homo sapiens
gacacatacactctc

SEQ ID NO: 1790121 - DNA, 15 bp, Homo sapiens
acacatacactctcc

SEQ ID NO: 1790122 - DNA, 15 bp, Homo sapiens
cacatacactctccc

SEQ ID NO: 1790123 - DNA, 15 bp, Homo sapiens
acatacactctccca

SEQ ID NO: 1790124 - DNA, 15 bp, Homo sapiens
catacactctcccaa

SEQ ID NO: 1790125 - DNA, 15 bp, Homo sapiens
atacactctcccaag

SEQ ID NO: 1790126 - DNA, 15 bp, Homo sapiens
tacactctcccaaga

SEQ ID NO: 1790127 - DNA, 15 bp, Homo sapiens
acactctcccaagac

SEQ ID NO: 1790128 - DNA, 15 bp, Homo sapiens
cactctcccaagact

SEQ ID NO: 1790129 - DNA, 15 bp, Homo sapiens
actctcccaagacta

SEQ ID NO: 1790130 - DNA, 15 bp, Homo sapiens
ctctcccaagactaa

SEQ ID NO: 1790131 - DNA, 15 bp, Homo sapiens
tctcccaagactaaa

SEQ ID NO: 1790132 - DNA, 15 bp, Homo sapiens
ctcccaagactaaac

SEQ ID NO: 1790133 - DNA, 15 bp, Homo sapiens
tcccaagactaaacc

SEQ ID NO: 1790134 - DNA, 15 bp, Homo sapiens
cccaagactaaacca

SEQ ID NO: 1790135 - DNA, 15 bp, Homo sapiens
ccaagactaaaccag

SEQ ID NO: 1790136 - DNA, 15 bp, Homo sapiens
caagactaaaccagg

SEQ ID NO: 1790137 - DNA, 15 bp, Homo sapiens
aagactaaaccagga

SEQ ID NO: 1790138 - DNA, 15 bp, Homo sapiens
agactaaaccaggaa

SEQ ID NO: 1790139 - DNA, 15 bp, Homo sapiens
gactaaaccaggaag

SEQ ID NO: 1790140 - DNA, 15 bp, Homo sapiens
actaaaccaggaaga

SEQ ID NO: 1790141 - DNA, 15 bp, Homo sapiens
ctaaaccaggaagaa

SEQ ID NO: 1790142 - DNA, 15 bp, Homo sapiens
aaccaggaagaagtt

SEQ ID NO: 1790143 - DNA, 15 bp, Homo sapiens
accaggaagaagttg

SEQ ID NO: 1790144 - DNA, 15 bp, Homo sapiens
ccaggaagaagttga

SEQ ID NO: 1790145 - DNA, 15 bp, Homo sapiens
caggaagaagttgaa

SEQ ID NO: 1790146 - DNA, 15 bp, Homo sapiens
aggaagaagttgaat

SEQ ID NO: 1790147 - DNA, 15 bp, Homo sapiens
ggaagaagttgaatc

SEQ ID NO: 1790148 - DNA, 15 bp, Homo sapiens
gaagaagttgaatct

SEQ ID NO: 1790149 - DNA, 15 bp, Homo sapiens
aagaagttgaatctc

SEQ ID NO: 1790150 - DNA, 15 bp, Homo sapiens
agaagttgaatctct

SEQ ID NO: 1790151 - DNA, 15 bp, Homo sapiens
gaagttgaatctctg

SEQ ID NO: 1790152 - DNA, 15 bp, Homo sapiens
aagttgaatctctga

SEQ ID NO: 1790153 - DNA, 15 bp, Homo sapiens
agttgaatctctgaa

SEQ ID NO: 1790154 - DNA, 15 bp, Homo sapiens
gttgaatctctgaat

SEQ ID NO: 1790155 - DNA, 15 bp, Homo sapiens
ttgaatctctgaata

SEQ ID NO: 1790156 - DNA, 15 bp, Homo sapiens
tgaatctctgaatag

SEQ ID NO: 1790157 - DNA, 15 bp, Homo sapiens
gaatctctgaataga

SEQ ID NO: 1790158 - DNA, 15 bp, Homo sapiens
aatctctgaatagac

SEQ ID NO: 1790159 - DNA, 15 bp, Homo sapiens
atctctgaatagacc

SEQ ID NO: 1790160 - DNA, 15 bp, Homo sapiens
tctctgaatagacca

SEQ ID NO: 1790161 - DNA, 15 bp, Homo sapiens
ctctgaatagaccaa

SEQ ID NO: 1790162 - DNA, 15 bp, Homo sapiens
tctgaatagaccaat

SEQ ID NO: 1790163 - DNA, 15 bp, Homo sapiens
atagaccaataacag

SEQ ID NO: 1790164 - DNA, 15 bp, Homo sapiens
tagaccaataacagg

SEQ ID NO: 1790165 - DNA, 15 bp, Homo sapiens
agaccaataacaggc

SEQ ID NO: 1790166 - DNA, 15 bp, Homo sapiens
gaccaataacaggct

SEQ ID NO: 1790167 - DNA, 15 bp, Homo sapiens
accaataacaggctc

SEQ ID NO: 1790168 - DNA, 15 bp, Homo sapiens
ccaataacaggctct

SEQ ID NO: 1790169 - DNA, 15 bp, Homo sapiens
caataacaggctctg

SEQ ID NO: 1790170 - DNA, 15 bp, Homo sapiens
aataacaggctctga

SEQ ID NO: 1790171 - DNA, 15 bp, Homo sapiens
ataacaggctctgaa

SEQ ID NO: 1790172 - DNA, 15 bp, Homo sapiens
taacaggctctgaaa

SEQ ID NO: 1790173 - DNA, 15 bp, Homo sapiens
aacaggctctgaaat

SEQ ID NO: 1790174 - DNA, 15 bp, Homo sapiens
acaggctctgaaatt

SEQ ID NO: 1790175 - DNA, 15 bp, Homo sapiens
caggctctgaaattg

SEQ ID NO: 1790176 - DNA, 15 bp, Homo sapiens
aggctctgaaattgt

SEQ ID NO: 1790177 - DNA, 15 bp, Homo sapiens
ggctctgaaattgtg

SEQ ID NO: 1790178 - DNA, 15 bp, Homo sapiens
gctctgaaattgtgg

SEQ ID NO: 1790179 - DNA, 15 bp, Homo sapiens
ctctgaaattgtggc

SEQ ID NO: 1790180 - DNA, 15 bp, Homo sapiens
tctgaaattgtggca

SEQ ID NO: 1790181 - DNA, 15 bp, Homo sapiens
ctgaaattgtggcaa

SEQ ID NO: 1790182 - DNA, 15 bp, Homo sapiens
tgaaattgtggcaat

SEQ ID NO: 1790183 - DNA, 15 bp, Homo sapiens
gaaattgtggcaata

SEQ ID NO: 1790184 - DNA, 15 bp, Homo sapiens
aaattgtggcaataa

SEQ ID NO: 1790185 - DNA, 15 bp, Homo sapiens
aattgtggcaataat

SEQ ID NO: 1790186 - DNA, 15 bp, Homo sapiens
attgtggcaataatc

SEQ ID NO: 1790187 - DNA, 15 bp, Homo sapiens
ttgtggcaataatca

SEQ ID NO: 1790188 - DNA, 15 bp, Homo sapiens
tgtggcaataatcaa

SEQ ID NO: 1790189 - DNA, 15 bp, Homo sapiens
gtggcaataatcaat

SEQ ID NO: 1790190 - DNA, 15 bp, Homo sapiens
tggcaataatcaata

SEQ ID NO: 1790191 - DNA, 15 bp, Homo sapiens
ggcaataatcaatag

SEQ ID NO: 1790192 - DNA, 15 bp, Homo sapiens
gcaataatcaatagt

SEQ ID NO: 1790193 - DNA, 15 bp, Homo sapiens
caataatcaatagtt

SEQ ID NO: 1790194 - DNA, 15 bp, Homo sapiens
aataatcaatagttt

SEQ ID NO: 1790195 - DNA, 15 bp, Homo sapiens
ataatcaatagttta

SEQ ID NO: 1790196 - DNA, 15 bp, Homo sapiens
taatcaatagtttac

SEQ ID NO: 1790197 - DNA, 15 bp, Homo sapiens
aatcaatagtttacc

SEQ ID NO: 1790198 - DNA, 15 bp, Homo sapiens
atcaatagtttacca

SEQ ID NO: 1790199 - DNA, 15 bp, Homo sapiens
tcaatagtttaccaa

SEQ ID NO: 1790200 - DNA, 15 bp, Homo sapiens
caatagtttaccaac

SEQ ID NO: 1790201 - DNA, 15 bp, Homo sapiens
aatagtttaccaacc

SEQ ID NO: 1790202 - DNA, 15 bp, Homo sapiens
atagtttaccaacca

SEQ ID NO: 1790203 - DNA, 15 bp, Homo sapiens
tagtttaccaaccaa

SEQ ID NO: 1790204 - DNA, 15 bp, Homo sapiens
agtttaccaaccaaa

SEQ ID NO: 1790205 - DNA, 15 bp, Homo sapiens
gtttaccaaccaaaa

SEQ ID NO: 1790206 - DNA, 15 bp, Homo sapiens
tttaccaaccaaaaa

SEQ ID NO: 1790207 - DNA, 15 bp, Homo sapiens
ttaccaaccaaaaag

SEQ ID NO: 1790208 - DNA, 15 bp, Homo sapiens
taccaaccaaaaaga

SEQ ID NO: 1790209 - DNA, 15 bp, Homo sapiens
accaaccaaaaagag

SEQ ID NO: 1790210 - DNA, 15 bp, Homo sapiens
ccaaccaaaaagagt

SEQ ID NO: 1790211 - DNA, 15 bp, Homo sapiens
caaccaaaaagagtc

SEQ ID NO: 1790212 - DNA, 15 bp, Homo sapiens
aaccaaaaagagtcc

SEQ ID NO: 1790213 - DNA, 15 bp, Homo sapiens
accaaaaagagtcca

SEQ ID NO: 1790214 - DNA, 15 bp, Homo sapiens
ccaaaaagagtccag

SEQ ID NO: 1790215 - DNA, 15 bp, Homo sapiens
caaaaagagtccagg

SEQ ID NO: 1790216 - DNA, 15 bp, Homo sapiens
aaaaagagtccagga

SEQ ID NO: 1790217 - DNA, 15 bp, Homo sapiens
aaaagagtccaggac

SEQ ID NO: 1790218 - DNA, 15 bp, Homo sapiens
aaagagtccaggacc

SEQ ID NO: 1790219 - DNA, 15 bp, Homo sapiens
aagagtccaggacca

SEQ ID NO: 1790220 - DNA, 15 bp, Homo sapiens
agagtccaggaccag

SEQ ID NO: 1790221 - DNA, 15 bp, Homo sapiens
gagtccaggaccaga

SEQ ID NO: 1790222 - DNA, 15 bp, Homo sapiens
agtccaggaccagat

SEQ ID NO: 1790223 - DNA, 15 bp, Homo sapiens
gtccaggaccagatg

SEQ ID NO: 1790224 - DNA, 15 bp, Homo sapiens
tccaggaccagatgg

SEQ ID NO: 1790225 - DNA, 15 bp, Homo sapiens
ccaggaccagatgga

SEQ ID NO: 1790226 - DNA, 15 bp, Homo sapiens
caggaccagatggat

SEQ ID NO: 1790227 - DNA, 15 bp, Homo sapiens
aggaccagatggatt

SEQ ID NO: 1790228 - DNA, 15 bp, Homo sapiens
ggaccagatggattc

SEQ ID NO: 1790229 - DNA, 15 bp, Homo sapiens
gaccagatggattca

SEQ ID NO: 1790230 - DNA, 15 bp, Homo sapiens
accagatggattcac

SEQ ID NO: 1790231 - DNA, 15 bp, Homo sapiens
ccagatggattcaca

SEQ ID NO: 1790232 - DNA, 15 bp, Homo sapiens
gatggattcacagcc

SEQ ID NO: 1790233 - DNA, 15 bp, Homo sapiens
atggattcacagccg

SEQ ID NO: 1790234 - DNA, 15 bp, Homo sapiens
tggattcacagccga

SEQ ID NO: 1790235 - DNA, 15 bp, Homo sapiens
ggattcacagccgaa

SEQ ID NO: 1790236 - DNA, 15 bp, Homo sapiens
gattcacagccgaat

SEQ ID NO: 1790237 - DNA, 15 bp, Homo sapiens
attcacagccgaatt

SEQ ID NO: 1790238 - DNA, 15 bp, Homo sapiens
ttcacagccgaattc

SEQ ID NO: 1790239 - DNA, 15 bp, Homo sapiens
tcacagccgaattct

SEQ ID NO: 1790240 - DNA, 15 bp, Homo sapiens
cacagccgaattcta

SEQ ID NO: 1790241 - DNA, 15 bp, Homo sapiens
acagccgaattctac

SEQ ID NO: 1790242 - DNA, 15 bp, Homo sapiens
cagccgaattctacc

SEQ ID NO: 1790243 - DNA, 15 bp, Homo sapiens
agccgaattctacca

SEQ ID NO: 1790244 - DNA, 15 bp, Homo sapiens
gccgaattctaccag

SEQ ID NO: 1790245 - DNA, 15 bp, Homo sapiens
ccgaattctaccaga

SEQ ID NO: 1790246 - DNA, 15 bp, Homo sapiens
cgaattctaccagag

SEQ ID NO: 1790247 - DNA, 15 bp, Homo sapiens
gaattctaccagagg

SEQ ID NO: 1790248 - DNA, 15 bp, Homo sapiens
aattctaccagaggt

SEQ ID NO: 1790249 - DNA, 15 bp, Homo sapiens
attctaccagaggta

SEQ ID NO: 1790250 - DNA, 15 bp, Homo sapiens
ttctaccagaggtac

SEQ ID NO: 1790251 - DNA, 15 bp, Homo sapiens
tctaccagaggtaca

SEQ ID NO: 1790252 - DNA, 15 bp, Homo sapiens
ctaccagaggtacaa

SEQ ID NO: 1790253 - DNA, 15 bp, Homo sapiens
taccagaggtacaag

SEQ ID NO: 1790254 - DNA, 15 bp, Homo sapiens
accagaggtacaagg

SEQ ID NO: 1790255 - DNA, 15 bp, Homo sapiens
aggtacaaggaggaa

SEQ ID NO: 1790256 - DNA, 15 bp, Homo sapiens
ggtacaaggaggaac

SEQ ID NO: 1790257 - DNA, 15 bp, Homo sapiens
gtacaaggaggaact

SEQ ID NO: 1790258 - DNA, 15 bp, Homo sapiens
tacaaggaggaactg

SEQ ID NO: 1790259 - DNA, 15 bp, Homo sapiens
acaaggaggaactgg

SEQ ID NO: 1790260 - DNA, 15 bp, Homo sapiens
caaggaggaactggt

SEQ ID NO: 1790261 - DNA, 15 bp, Homo sapiens
aaggaggaactggta

SEQ ID NO: 1790262 - DNA, 15 bp, Homo sapiens
aggaggaactggtac

SEQ ID NO: 1790263 - DNA, 15 bp, Homo sapiens
ggaggaactggtacc

SEQ ID NO: 1790264 - DNA, 15 bp, Homo sapiens
gaggaactggtacca

SEQ ID NO: 1790265 - DNA, 15 bp, Homo sapiens
aggaactggtaccat

SEQ ID NO: 1790266 - DNA, 15 bp, Homo sapiens
ggaactggtaccatt

SEQ ID NO: 1790267 - DNA, 15 bp, Homo sapiens
gaactggtaccattc

SEQ ID NO: 1790268 - DNA, 15 bp, Homo sapiens
aactggtaccattcc

SEQ ID NO: 1790269 - DNA, 15 bp, Homo sapiens
actggtaccattcct

SEQ ID NO: 1790270 - DNA, 15 bp, Homo sapiens
ctggtaccattcctt

SEQ ID NO: 1790271 - DNA, 15 bp, Homo sapiens
tggtaccattccttc

SEQ ID NO: 1790272 - DNA, 15 bp, Homo sapiens
ggtaccattccttct

SEQ ID NO: 1790273 - DNA, 15 bp, Homo sapiens
gtaccattccttctg

SEQ ID NO: 1790274 - DNA, 15 bp, Homo sapiens
taccattccttctga

SEQ ID NO: 1790275 - DNA, 15 bp, Homo sapiens
accattccttctgaa

SEQ ID NO: 1790276 - DNA, 15 bp, Homo sapiens
ccattccttctgaaa

SEQ ID NO: 1790277 - DNA, 15 bp, Homo sapiens
cattccttctgaaac

SEQ ID NO: 1790278 - DNA, 15 bp, Homo sapiens
tgaaactattccaat

SEQ ID NO: 1790279 - DNA, 15 bp, Homo sapiens
gaaactattccaatc

SEQ ID NO: 1790280 - DNA, 15 bp, Homo sapiens
aaactattccaatca

SEQ ID NO: 1790281 - DNA, 15 bp, Homo sapiens
aactattccaatcaa

SEQ ID NO: 1790282 - DNA, 15 bp, Homo sapiens
actattccaatcaat

SEQ ID NO: 1790283 - DNA, 15 bp, Homo sapiens
ctattccaatcaata

SEQ ID NO: 1790284 - DNA, 15 bp, Homo sapiens
tattccaatcaatag

SEQ ID NO: 1790285 - DNA, 15 bp, Homo sapiens
attccaatcaataga

SEQ ID NO: 1790286 - DNA, 15 bp, Homo sapiens
ttccaatcaatagaa

SEQ ID NO: 1790287 - DNA, 15 bp, Homo sapiens
tccaatcaatagaaa

SEQ ID NO: 1790288 - DNA, 15 bp, Homo sapiens
ccaatcaatagaaaa

SEQ ID NO: 1790289 - DNA, 15 bp, Homo sapiens
caatcaatagaaaaa

SEQ ID NO: 1790290 - DNA, 15 bp, Homo sapiens
aatcaatagaaaaag

SEQ ID NO: 1790291 - DNA, 15 bp, Homo sapiens
atcaatagaaaaaga

SEQ ID NO: 1790292 - DNA, 15 bp, Homo sapiens
tcaatagaaaaagag

SEQ ID NO: 1790293 - DNA, 15 bp, Homo sapiens
caatagaaaaagagg

SEQ ID NO: 1790294 - DNA, 15 bp, Homo sapiens
aatagaaaaagaggg

SEQ ID NO: 1790295 - DNA, 15 bp, Homo sapiens
atagaaaaagaggga

SEQ ID NO: 1790296 - DNA, 15 bp, Homo sapiens
tagaaaaagagggaa

SEQ ID NO: 1790297 - DNA, 15 bp, Homo sapiens
agaaaaagagggaat

SEQ ID NO: 1790298 - DNA, 15 bp, Homo sapiens
gaaaaagagggaatc

SEQ ID NO: 1790299 - DNA, 15 bp, Homo sapiens
aaaaagagggaatcc

SEQ ID NO: 1790300 - DNA, 15 bp, Homo sapiens
aaaagagggaatcct

SEQ ID NO: 1790301 - DNA, 15 bp, Homo sapiens
aaagagggaatcctc

SEQ ID NO: 1790302 - DNA, 15 bp, Homo sapiens
aagagggaatcctcc

SEQ ID NO: 1790303 - DNA, 15 bp, Homo sapiens
agagggaatcctccc

SEQ ID NO: 1790304 - DNA, 15 bp, Homo sapiens
gagggaatcctccct

SEQ ID NO: 1790305 - DNA, 15 bp, Homo sapiens
agggaatcctcccta

SEQ ID NO: 1790306 - DNA, 15 bp, Homo sapiens
gggaatcctccctaa

SEQ ID NO: 1790307 - DNA, 15 bp, Homo sapiens
ggaatcctccctaac

SEQ ID NO: 1790308 - DNA, 15 bp, Homo sapiens
gaatcctccctaact

SEQ ID NO: 1790309 - DNA, 15 bp, Homo sapiens
aatcctccctaactc

SEQ ID NO: 1790310 - DNA, 15 bp, Homo sapiens
atcctccctaactca

SEQ ID NO: 1790311 - DNA, 15 bp, Homo sapiens
tcctccctaactcat

SEQ ID NO: 1790312 - DNA, 15 bp, Homo sapiens
cctccctaactcatt

SEQ ID NO: 1790313 - DNA, 15 bp, Homo sapiens
ctccctaactcattt

SEQ ID NO: 1790314 - DNA, 15 bp, Homo sapiens
tccctaactcatttt

SEQ ID NO: 1790315 - DNA, 15 bp, Homo sapiens
ccctaactcatttta

SEQ ID NO: 1790316 - DNA, 15 bp, Homo sapiens
cctaactcattttat

SEQ ID NO: 1790317 - DNA, 15 bp, Homo sapiens
ctaactcattttatg

SEQ ID NO: 1790318 - DNA, 15 bp, Homo sapiens
taactcattttatga

SEQ ID NO: 1790319 - DNA, 15 bp, Homo sapiens
aactcattttatgag

SEQ ID NO: 1790320 - DNA, 15 bp, Homo sapiens
actcattttatgagg

SEQ ID NO: 1790321 - DNA, 15 bp, Homo sapiens
ctcattttatgaggc

SEQ ID NO: 1790322 - DNA, 15 bp, Homo sapiens
tcattttatgaggcc

SEQ ID NO: 1790323 - DNA, 15 bp, Homo sapiens
cattttatgaggcca

SEQ ID NO: 1790324 - DNA, 15 bp, Homo sapiens
attttatgaggccag

SEQ ID NO: 1790325 - DNA, 15 bp, Homo sapiens
ttttatgaggccagc

SEQ ID NO: 1790326 - DNA, 15 bp, Homo sapiens
tttatgaggccagca

SEQ ID NO: 1790327 - DNA, 15 bp, Homo sapiens
ttatgaggccagcat

SEQ ID NO: 1790328 - DNA, 15 bp, Homo sapiens
tatgaggccagcatc

SEQ ID NO: 1790329 - DNA, 15 bp, Homo sapiens
atgaggccagcatca

SEQ ID NO: 1790330 - DNA, 15 bp, Homo sapiens
tgaggccagcatcat

SEQ ID NO: 1790331 - DNA, 15 bp, Homo sapiens
gaggccagcatcatt

SEQ ID NO: 1790332 - DNA, 15 bp, Homo sapiens
aggccagcatcattc

SEQ ID NO: 1790333 - DNA, 15 bp, Homo sapiens
ggccagcatcattct

SEQ ID NO: 1790334 - DNA, 15 bp, Homo sapiens
gccagcatcattctg

SEQ ID NO: 1790335 - DNA, 15 bp, Homo sapiens
ccagcatcattctga

SEQ ID NO: 1790336 - DNA, 15 bp, Homo sapiens
cagcatcattctgat

SEQ ID NO: 1790337 - DNA, 15 bp, Homo sapiens
agcatcattctgata

SEQ ID NO: 1790338 - DNA, 15 bp, Homo sapiens
gcatcattctgatac

SEQ ID NO: 1790339 - DNA, 15 bp, Homo sapiens
catcattctgatacc

SEQ ID NO: 1790340 - DNA, 15 bp, Homo sapiens
atcattctgatacca

SEQ ID NO: 1790341 - DNA, 15 bp, Homo sapiens
tcattctgataccaa

SEQ ID NO: 1790342 - DNA, 15 bp, Homo sapiens
cattctgataccaaa

SEQ ID NO: 1790343 - DNA, 15 bp, Homo sapiens
attctgataccaaag

SEQ ID NO: 1790344 - DNA, 15 bp, Homo sapiens
ttctgataccaaagc

SEQ ID NO: 1790345 - DNA, 15 bp, Homo sapiens
tctgataccaaagcc

SEQ ID NO: 1790346 - DNA, 15 bp, Homo sapiens
ctgataccaaagccg

SEQ ID NO: 1790347 - DNA, 15 bp, Homo sapiens
tgataccaaagccgg

SEQ ID NO: 1790348 - DNA, 15 bp, Homo sapiens
gataccaaagccggg

SEQ ID NO: 1790349 - DNA, 15 bp, Homo sapiens
ataccaaagccgggc

SEQ ID NO: 1790350 - DNA, 15 bp, Homo sapiens
taccaaagccgggca

SEQ ID NO: 1790351 - DNA, 15 bp, Homo sapiens
accaaagccgggcag

SEQ ID NO: 1790352 - DNA, 15 bp, Homo sapiens
ccaaagccgggcaga

SEQ ID NO: 1790353 - DNA, 15 bp, Homo sapiens
caaagccgggcagag

SEQ ID NO: 1790354 - DNA, 15 bp, Homo sapiens
aaagccgggcagaga

SEQ ID NO: 1790355 - DNA, 15 bp, Homo sapiens
aagccgggcagagac

SEQ ID NO: 1790356 - DNA, 15 bp, Homo sapiens
agccgggcagagaca

SEQ ID NO: 1790357 - DNA, 15 bp, Homo sapiens
gccgggcagagacac

SEQ ID NO: 1790358 - DNA, 15 bp, Homo sapiens
ccgggcagagacaca

SEQ ID NO: 1790359 - DNA, 15 bp, Homo sapiens
cgggcagagacacag

SEQ ID NO: 1790360 - DNA, 15 bp, Homo sapiens
gggcagagacacagc

SEQ ID NO: 1790361 - DNA, 15 bp, Homo sapiens
ggcagagacacagcc

SEQ ID NO: 1790362 - DNA, 15 bp, Homo sapiens
gcagagacacagcca

SEQ ID NO: 1790363 - DNA, 15 bp, Homo sapiens
cagagacacagccaa

SEQ ID NO: 1790364 - DNA, 15 bp, Homo sapiens
agagacacagccaaa

SEQ ID NO: 1790365 - DNA, 15 bp, Homo sapiens
gagacacagccaaaa

SEQ ID NO: 1790366 - DNA, 15 bp, Homo sapiens
agacacagccaaaaa

SEQ ID NO: 1790367 - DNA, 15 bp, Homo sapiens
gacacagccaaaaaa

SEQ ID NO: 1790368 - DNA, 15 bp, Homo sapiens
acacagccaaaaaag

SEQ ID NO: 1790369 - DNA, 15 bp, Homo sapiens
cacagccaaaaaaga

SEQ ID NO: 1790370 - DNA, 15 bp, Homo sapiens
acagccaaaaaagag

SEQ ID NO: 1790371 - DNA, 15 bp, Homo sapiens
cagccaaaaaagaga

SEQ ID NO: 1790372 - DNA, 15 bp, Homo sapiens
agccaaaaaagagaa

SEQ ID NO: 1790373 - DNA, 15 bp, Homo sapiens
gccaaaaaagagaat

SEQ ID NO: 1790374 - DNA, 15 bp, Homo sapiens
ccaaaaaagagaatt

SEQ ID NO: 1790375 - DNA, 15 bp, Homo sapiens
caaaaaagagaattt

SEQ ID NO: 1790376 - DNA, 15 bp, Homo sapiens
aaaaaagagaatttt

SEQ ID NO: 1790377 - DNA, 15 bp, Homo sapiens
aaaaagagaatttta

SEQ ID NO: 1790378 - DNA, 15 bp, Homo sapiens
aaaagagaattttag

SEQ ID NO: 1790379 - DNA, 15 bp, Homo sapiens
aaagagaattttaga

SEQ ID NO: 1790380 - DNA, 15 bp, Homo sapiens
aagagaattttagac

SEQ ID NO: 1790381 - DNA, 15 bp, Homo sapiens
agagaattttagacc

SEQ ID NO: 1790382 - DNA, 15 bp, Homo sapiens
gagaattttagacca

SEQ ID NO: 1790383 - DNA, 15 bp, Homo sapiens
agaattttagaccaa

SEQ ID NO: 1790384 - DNA, 15 bp, Homo sapiens
gaattttagaccaat

SEQ ID NO: 1790385 - DNA, 15 bp, Homo sapiens
aattttagaccaata

SEQ ID NO: 1790386 - DNA, 15 bp, Homo sapiens
attttagaccaatat

SEQ ID NO: 1790387 - DNA, 15 bp, Homo sapiens
ttttagaccaatatc

SEQ ID NO: 1790388 - DNA, 15 bp, Homo sapiens
tttagaccaatatcc

SEQ ID NO: 1790389 - DNA, 15 bp, Homo sapiens
ttagaccaatatcct

SEQ ID NO: 1790390 - DNA, 15 bp, Homo sapiens
tagaccaatatcctt

SEQ ID NO: 1790391 - DNA, 15 bp, Homo sapiens
agaccaatatccttg

SEQ ID NO: 1790392 - DNA, 15 bp, Homo sapiens
gaccaatatccttga

SEQ ID NO: 1790393 - DNA, 15 bp, Homo sapiens
accaatatccttgat

SEQ ID NO: 1790394 - DNA, 15 bp, Homo sapiens
atatccttgatgaac

SEQ ID NO: 1790395 - DNA, 15 bp, Homo sapiens
tatccttgatgaaca

SEQ ID NO: 1790396 - DNA, 15 bp, Homo sapiens
atccttgatgaacat

SEQ ID NO: 1790397 - DNA, 15 bp, Homo sapiens
tccttgatgaacatt

SEQ ID NO: 1790398 - DNA, 15 bp, Homo sapiens
ccttgatgaacattg

SEQ ID NO: 1790399 - DNA, 15 bp, Homo sapiens
cttgatgaacattga

SEQ ID NO: 1790400 - DNA, 15 bp, Homo sapiens
ttgatgaacattgat

SEQ ID NO: 1790401 - DNA, 15 bp, Homo sapiens
tgatgaacattgatg

SEQ ID NO: 1790402 - DNA, 15 bp, Homo sapiens
gatgaacattgatgc

SEQ ID NO: 1790403 - DNA, 15 bp, Homo sapiens
atgaacattgatgca

SEQ ID NO: 1790404 - DNA, 15 bp, Homo sapiens
tgaacattgatgcaa

SEQ ID NO: 1790405 - DNA, 15 bp, Homo sapiens
gaacattgatgcaaa

SEQ ID NO: 1790406 - DNA, 15 bp, Homo sapiens
aacattgatgcaaaa

SEQ ID NO: 1790407 - DNA, 15 bp, Homo sapiens
acattgatgcaaaaa

SEQ ID NO: 1790408 - DNA, 15 bp, Homo sapiens
cattgatgcaaaaat

SEQ ID NO: 1790409 - DNA, 15 bp, Homo sapiens
attgatgcaaaaatc

SEQ ID NO: 1790410 - DNA, 15 bp, Homo sapiens
ttgatgcaaaaatcc

SEQ ID NO: 1790411 - DNA, 15 bp, Homo sapiens
tgatgcaaaaatcct

SEQ ID NO: 1790412 - DNA, 15 bp, Homo sapiens
gatgcaaaaatcctc

SEQ ID NO: 1790413 - DNA, 15 bp, Homo sapiens
atgcaaaaatcctca

SEQ ID NO: 1790414 - DNA, 15 bp, Homo sapiens
tgcaaaaatcctcaa

SEQ ID NO: 1790415 - DNA, 15 bp, Homo sapiens
gcaaaaatcctcaat

SEQ ID NO: 1790416 - DNA, 15 bp, Homo sapiens
caaaaatcctcaata

SEQ ID NO: 1790417 - DNA, 15 bp, Homo sapiens
aaaaatcctcaataa

SEQ ID NO: 1790418 - DNA, 15 bp, Homo sapiens
aaaatcctcaataaa

SEQ ID NO: 1790419 - DNA, 15 bp, Homo sapiens
aaatcctcaataaaa

SEQ ID NO: 1790420 - DNA, 15 bp, Homo sapiens
aatcctcaataaaat

SEQ ID NO: 1790421 - DNA, 15 bp, Homo sapiens
atcctcaataaaata

SEQ ID NO: 1790422 - DNA, 15 bp, Homo sapiens
tcctcaataaaatac

SEQ ID NO: 1790423 - DNA, 15 bp, Homo sapiens
aaatactggcaaacc

SEQ ID NO: 1790424 - DNA, 15 bp, Homo sapiens
aatactggcaaaccg

SEQ ID NO: 1790425 - DNA, 15 bp, Homo sapiens
atactggcaaaccga

SEQ ID NO: 1790426 - DNA, 15 bp, Homo sapiens
tactggcaaaccgaa

SEQ ID NO: 1790427 - DNA, 15 bp, Homo sapiens
actggcaaaccgaat

SEQ ID NO: 1790428 - DNA, 15 bp, Homo sapiens
ctggcaaaccgaatc

SEQ ID NO: 1790429 - DNA, 15 bp, Homo sapiens
tggcaaaccgaatcc

SEQ ID NO: 1790430 - DNA, 15 bp, Homo sapiens
ggcaaaccgaatcca

SEQ ID NO: 1790431 - DNA, 15 bp, Homo sapiens
gcaaaccgaatccag

SEQ ID NO: 1790432 - DNA, 15 bp, Homo sapiens
caaaccgaatccagc

SEQ ID NO: 1790433 - DNA, 15 bp, Homo sapiens
aaaccgaatccagca

SEQ ID NO: 1790434 - DNA, 15 bp, Homo sapiens
aaccgaatccagcag

SEQ ID NO: 1790435 - DNA, 15 bp, Homo sapiens
accgaatccagcagc

SEQ ID NO: 1790436 - DNA, 15 bp, Homo sapiens
ccgaatccagcagca

SEQ ID NO: 1790437 - DNA, 15 bp, Homo sapiens
cgaatccagcagcac

SEQ ID NO: 1790438 - DNA, 15 bp, Homo sapiens
gaatccagcagcaca

SEQ ID NO: 1790439 - DNA, 15 bp, Homo sapiens
aatccagcagcacat

SEQ ID NO: 1790440 - DNA, 15 bp, Homo sapiens
atccagcagcacatc

SEQ ID NO: 1790441 - DNA, 15 bp, Homo sapiens
tccagcagcacatca

SEQ ID NO: 1790442 - DNA, 15 bp, Homo sapiens
ccagcagcacatcaa

SEQ ID NO: 1790443 - DNA, 15 bp, Homo sapiens
cagcagcacatcaaa

SEQ ID NO: 1790444 - DNA, 15 bp, Homo sapiens
agcagcacatcaaaa

SEQ ID NO: 1790445 - DNA, 15 bp, Homo sapiens
gcagcacatcaaaaa

SEQ ID NO: 1790446 - DNA, 15 bp, Homo sapiens
cagcacatcaaaaag

SEQ ID NO: 1790447 - DNA, 15 bp, Homo sapiens
tgacccagccatccc

SEQ ID NO: 1790448 - DNA, 15 bp, Homo sapiens
gacccagccatccca

SEQ ID NO: 1790449 - DNA, 15 bp, Homo sapiens
acccagccatcccat

SEQ ID NO: 1790450 - DNA, 15 bp, Homo sapiens
cccagccatcccatt

SEQ ID NO: 1790451 - DNA, 15 bp, Homo sapiens
ccagccatcccatta

SEQ ID NO: 1790452 - DNA, 15 bp, Homo sapiens
cagccatcccattac

SEQ ID NO: 1790453 - DNA, 15 bp, Homo sapiens
agccatcccattact

SEQ ID NO: 1790454 - DNA, 15 bp, Homo sapiens
gccatcccattactg

SEQ ID NO: 1790455 - DNA, 15 bp, Homo sapiens
ccatcccattactgg

SEQ ID NO: 1790456 - DNA, 15 bp, Homo sapiens
catcccattactggg

SEQ ID NO: 1790457 - DNA, 15 bp, Homo sapiens
atcccattactgggt

SEQ ID NO: 1790458 - DNA, 15 bp, Homo sapiens
tcccattactgggta

SEQ ID NO: 1790459 - DNA, 15 bp, Homo sapiens
atatacccaaaggac

SEQ ID NO: 1790460 - DNA, 15 bp, Homo sapiens
tatacccaaaggact

SEQ ID NO: 1790461 - DNA, 15 bp, Homo sapiens
atacccaaaggacta

SEQ ID NO: 1790462 - DNA, 15 bp, Homo sapiens
tacccaaaggactat

SEQ ID NO: 1790463 - DNA, 15 bp, Homo sapiens
acccaaaggactata

SEQ ID NO: 1790464 - DNA, 15 bp, Homo sapiens
cccaaaggactataa

SEQ ID NO: 1790465 - DNA, 15 bp, Homo sapiens
ccaaaggactataaa

SEQ ID NO: 1790466 - DNA, 15 bp, Homo sapiens
caaaggactataaat

SEQ ID NO: 1790467 - DNA, 15 bp, Homo sapiens
aaaggactataaatc

SEQ ID NO: 1790468 - DNA, 15 bp, Homo sapiens
aaggactataaatca

SEQ ID NO: 1790469 - DNA, 15 bp, Homo sapiens
aggactataaatcat

SEQ ID NO: 1790470 - DNA, 15 bp, Homo sapiens
ggactataaatcatg

SEQ ID NO: 1790471 - DNA, 15 bp, Homo sapiens
gactataaatcatgc

SEQ ID NO: 1790472 - DNA, 15 bp, Homo sapiens
actataaatcatgct

SEQ ID NO: 1790473 - DNA, 15 bp, Homo sapiens
ctataaatcatgctg

SEQ ID NO: 1790474 - DNA, 15 bp, Homo sapiens
tataaatcatgctgc

SEQ ID NO: 1790475 - DNA, 15 bp, Homo sapiens
ataaatcatgctgct

SEQ ID NO: 1790476 - DNA, 15 bp, Homo sapiens
taaatcatgctgcta

SEQ ID NO: 1790477 - DNA, 15 bp, Homo sapiens
aaatcatgctgctat

SEQ ID NO: 1790478 - DNA, 15 bp, Homo sapiens
aatcatgctgctata

SEQ ID NO: 1790479 - DNA, 15 bp, Homo sapiens
atcatgctgctataa

SEQ ID NO: 1790480 - DNA, 15 bp, Homo sapiens
tcatgctgctataaa

SEQ ID NO: 1790481 - DNA, 15 bp, Homo sapiens
catgctgctataaag

SEQ ID NO: 1790482 - DNA, 15 bp, Homo sapiens
atgctgctataaaga

SEQ ID NO: 1790483 - DNA, 15 bp, Homo sapiens
tgctgctataaagac

SEQ ID NO: 1790484 - DNA, 15 bp, Homo sapiens
gctgctataaagaca

SEQ ID NO: 1790485 - DNA, 15 bp, Homo sapiens
ctgctataaagacac

SEQ ID NO: 1790486 - DNA, 15 bp, Homo sapiens
tgctataaagacaca

SEQ ID NO: 1790487 - DNA, 15 bp, Homo sapiens
gctataaagacacat

SEQ ID NO: 1790488 - DNA, 15 bp, Homo sapiens
gcacacgtatgttta

SEQ ID NO: 1790489 - DNA, 15 bp, Homo sapiens
cacacgtatgtttat

SEQ ID NO: 1790490 - DNA, 15 bp, Homo sapiens
acacgtatgtttatt

SEQ ID NO: 1790491 - DNA, 15 bp, Homo sapiens
cacgtatgtttattg

SEQ ID NO: 1790492 - DNA, 15 bp, Homo sapiens
acgtatgtttattgt

SEQ ID NO: 1790493 - DNA, 15 bp, Homo sapiens
cgtatgtttattgtg

SEQ ID NO: 1790494 - DNA, 15 bp, Homo sapiens
gtatgtttattgtgg

SEQ ID NO: 1790495 - DNA, 15 bp, Homo sapiens
tatgtttattgtggc

SEQ ID NO: 1790496 - DNA, 15 bp, Homo sapiens
atgtttattgtggca

SEQ ID NO: 1790497 - DNA, 15 bp, Homo sapiens
tgtttattgtggcac

SEQ ID NO: 1790498 - DNA, 15 bp, Homo sapiens
gtttattgtggcact

SEQ ID NO: 1790499 - DNA, 15 bp, Homo sapiens
tttattgtggcacta

SEQ ID NO: 1790500 - DNA, 15 bp, Homo sapiens
ttattgtggcactat

SEQ ID NO: 1790501 - DNA, 15 bp, Homo sapiens
tattgtggcactatt

SEQ ID NO: 1790502 - DNA, 15 bp, Homo sapiens
attgtggcactattc

SEQ ID NO: 1790503 - DNA, 15 bp, Homo sapiens
ttgtggcactattca

SEQ ID NO: 1790504 - DNA, 15 bp, Homo sapiens
tgtggcactattcac

SEQ ID NO: 1790505 - DNA, 15 bp, Homo sapiens
gtggcactattcaca

SEQ ID NO: 1790506 - DNA, 15 bp, Homo sapiens
tggcactattcacaa

SEQ ID NO: 1790507 - DNA, 15 bp, Homo sapiens
aaccaacccaaatgt

SEQ ID NO: 1790508 - DNA, 15 bp, Homo sapiens
accaacccaaatgtc

SEQ ID NO: 1790509 - DNA, 15 bp, Homo sapiens
ccaacccaaatgtcc

SEQ ID NO: 1790510 - DNA, 15 bp, Homo sapiens
caacccaaatgtcca

SEQ ID NO: 1790511 - DNA, 15 bp, Homo sapiens
aacccaaatgtccaa

SEQ ID NO: 1790512 - DNA, 15 bp, Homo sapiens
acccaaatgtccaac

SEQ ID NO: 1790513 - DNA, 15 bp, Homo sapiens
cccaaatgtccaaca

SEQ ID NO: 1790514 - DNA, 15 bp, Homo sapiens
ccaaatgtccaacaa

SEQ ID NO: 1790515 - DNA, 15 bp, Homo sapiens
caaatgtccaacaat

SEQ ID NO: 1790516 - DNA, 15 bp, Homo sapiens
aaatgtccaacaatg

SEQ ID NO: 1790517 - DNA, 15 bp, Homo sapiens
aatgtccaacaatga

SEQ ID NO: 1790518 - DNA, 15 bp, Homo sapiens
atgtccaacaatgat

SEQ ID NO: 1790519 - DNA, 15 bp, Homo sapiens
tgtccaacaatgata

SEQ ID NO: 1790520 - DNA, 15 bp, Homo sapiens
gtccaacaatgatag

SEQ ID NO: 1790521 - DNA, 15 bp, Homo sapiens
tccaacaatgataga

SEQ ID NO: 1790522 - DNA, 15 bp, Homo sapiens
ccaacaatgatagac

SEQ ID NO: 1790523 - DNA, 15 bp, Homo sapiens
caacaatgatagact

SEQ ID NO: 1790524 - DNA, 15 bp, Homo sapiens
aacaatgatagactg

SEQ ID NO: 1790525 - DNA, 15 bp, Homo sapiens
acaatgatagactgg

SEQ ID NO: 1790526 - DNA, 15 bp, Homo sapiens
gatagactggattaa

SEQ ID NO: 1790527 - DNA, 15 bp, Homo sapiens
atagactggattaag

SEQ ID NO: 1790528 - DNA, 15 bp, Homo sapiens
tagactggattaaga

SEQ ID NO: 1790529 - DNA, 15 bp, Homo sapiens
agactggattaagaa

SEQ ID NO: 1790530 - DNA, 15 bp, Homo sapiens
gactggattaagaaa

SEQ ID NO: 1790531 - DNA, 15 bp, Homo sapiens
actggattaagaaaa

SEQ ID NO: 1790532 - DNA, 15 bp, Homo sapiens
ctggattaagaaaat

SEQ ID NO: 1790533 - DNA, 15 bp, Homo sapiens
tggattaagaaaatg

SEQ ID NO: 1790534 - DNA, 15 bp, Homo sapiens
ggattaagaaaatgt

SEQ ID NO: 1790535 - DNA, 15 bp, Homo sapiens
gattaagaaaatgtg

SEQ ID NO: 1790536 - DNA, 15 bp, Homo sapiens
attaagaaaatgtgg

SEQ ID NO: 1790537 - DNA, 15 bp, Homo sapiens
ttaagaaaatgtggc

SEQ ID NO: 1790538 - DNA, 15 bp, Homo sapiens
taagaaaatgtggca

SEQ ID NO: 1790539 - DNA, 15 bp, Homo sapiens
tatacaccatggaat

SEQ ID NO: 1790540 - DNA, 15 bp, Homo sapiens
atacaccatggaata

SEQ ID NO: 1790541 - DNA, 15 bp, Homo sapiens
tacaccatggaatac

SEQ ID NO: 1790542 - DNA, 15 bp, Homo sapiens
acaccatggaatact

SEQ ID NO: 1790543 - DNA, 15 bp, Homo sapiens
caccatggaatacta

SEQ ID NO: 1790544 - DNA, 15 bp, Homo sapiens
accatggaatactat

SEQ ID NO: 1790545 - DNA, 15 bp, Homo sapiens
tactatgcagccata

SEQ ID NO: 1790546 - DNA, 15 bp, Homo sapiens
gcagccataaaaaat

SEQ ID NO: 1790547 - DNA, 15 bp, Homo sapiens
cagccataaaaaatg

SEQ ID NO: 1790548 - DNA, 15 bp, Homo sapiens
agccataaaaaatga

SEQ ID NO: 1790549 - DNA, 15 bp, Homo sapiens
gccataaaaaatgat

SEQ ID NO: 1790550 - DNA, 15 bp, Homo sapiens
ccataaaaaatgatg

SEQ ID NO: 1790551 - DNA, 15 bp, Homo sapiens
cataaaaaatgatga

SEQ ID NO: 1790552 - DNA, 15 bp, Homo sapiens
ataaaaaatgatgag

SEQ ID NO: 1790553 - DNA, 15 bp, Homo sapiens
taaaaaatgatgagt

SEQ ID NO: 1790554 - DNA, 15 bp, Homo sapiens
aaaaaatgatgagtt

SEQ ID NO: 1790555 - DNA, 15 bp, Homo sapiens
aaaaatgatgagttc

SEQ ID NO: 1790556 - DNA, 15 bp, Homo sapiens
aaaatgatgagttca

SEQ ID NO: 1790557 - DNA, 15 bp, Homo sapiens
aaatgatgagttcat

SEQ ID NO: 1790558 - DNA, 15 bp, Homo sapiens
aatgatgagttcatg

SEQ ID NO: 1790559 - DNA, 15 bp, Homo sapiens
atgatgagttcatgt

SEQ ID NO: 1790560 - DNA, 15 bp, Homo sapiens
tgatgagttcatgtc

SEQ ID NO: 1790561 - DNA, 15 bp, Homo sapiens
gttcatgtcctttgt

SEQ ID NO: 1790562 - DNA, 15 bp, Homo sapiens
ttcatgtcctttgta

SEQ ID NO: 1790563 - DNA, 15 bp, Homo sapiens
tcatgtcctttgtag

SEQ ID NO: 1790564 - DNA, 15 bp, Homo sapiens
catgtcctttgtagg

SEQ ID NO: 1790565 - DNA, 15 bp, Homo sapiens
atgtcctttgtaggg

SEQ ID NO: 1790566 - DNA, 15 bp, Homo sapiens
tgtcctttgtaggga

SEQ ID NO: 1790567 - DNA, 15 bp, Homo sapiens
gtcctttgtagggac

SEQ ID NO: 1790568 - DNA, 15 bp, Homo sapiens
tcctttgtagggaca

SEQ ID NO: 1790569 - DNA, 15 bp, Homo sapiens
cctttgtagggacat

SEQ ID NO: 1790570 - DNA, 15 bp, Homo sapiens
ctttgtagggacatg

SEQ ID NO: 1790571 - DNA, 15 bp, Homo sapiens
tttgtagggacatgg

SEQ ID NO: 1790572 - DNA, 15 bp, Homo sapiens
ttgtagggacatgga

SEQ ID NO: 1790573 - DNA, 15 bp, Homo sapiens
tgtagggacatggat

SEQ ID NO: 1790574 - DNA, 15 bp, Homo sapiens
gtagggacatggatg

SEQ ID NO: 1790575 - DNA, 15 bp, Homo sapiens
tagggacatggatga

SEQ ID NO: 1790576 - DNA, 15 bp, Homo sapiens
gggacatggatgaaa

SEQ ID NO: 1790577 - DNA, 15 bp, Homo sapiens
ggacatggatgaaat

SEQ ID NO: 1790578 - DNA, 15 bp, Homo sapiens
gacatggatgaaatt

SEQ ID NO: 1790579 - DNA, 15 bp, Homo sapiens
acatggatgaaattg

SEQ ID NO: 1790580 - DNA, 15 bp, Homo sapiens
catggatgaaattgg

SEQ ID NO: 1790581 - DNA, 15 bp, Homo sapiens
atggatgaaattgga

SEQ ID NO: 1790582 - DNA, 15 bp, Homo sapiens
tggatgaaattggaa

SEQ ID NO: 1790583 - DNA, 15 bp, Homo sapiens
ggatgaaattggaaa

SEQ ID NO: 1790584 - DNA, 15 bp, Homo sapiens
gatgaaattggaaac

SEQ ID NO: 1790585 - DNA, 15 bp, Homo sapiens
atgaaattggaaacc

SEQ ID NO: 1790586 - DNA, 15 bp, Homo sapiens
tgaaattggaaacca

SEQ ID NO: 1790587 - DNA, 15 bp, Homo sapiens
gaaattggaaaccat

SEQ ID NO: 1790588 - DNA, 15 bp, Homo sapiens
aaattggaaaccatc

SEQ ID NO: 1790589 - DNA, 15 bp, Homo sapiens
aattggaaaccatca

SEQ ID NO: 1790590 - DNA, 15 bp, Homo sapiens
attggaaaccatcat

SEQ ID NO: 1790591 - DNA, 15 bp, Homo sapiens
ttggaaaccatcatt

SEQ ID NO: 1790592 - DNA, 15 bp, Homo sapiens
accatcattctcagt

SEQ ID NO: 1790593 - DNA, 15 bp, Homo sapiens
ccatcattctcagta

SEQ ID NO: 1790594 - DNA, 15 bp, Homo sapiens
catcattctcagtaa

SEQ ID NO: 1790595 - DNA, 15 bp, Homo sapiens
atcattctcagtaaa

SEQ ID NO: 1790596 - DNA, 15 bp, Homo sapiens
tcattctcagtaaac

SEQ ID NO: 1790597 - DNA, 15 bp, Homo sapiens
cattctcagtaaact

SEQ ID NO: 1790598 - DNA, 15 bp, Homo sapiens
attctcagtaaacta

SEQ ID NO: 1790599 - DNA, 15 bp, Homo sapiens
ttctcagtaaactat

SEQ ID NO: 1790600 - DNA, 15 bp, Homo sapiens
tctcagtaaactatc

SEQ ID NO: 1790601 - DNA, 15 bp, Homo sapiens
ctcagtaaactatcg

SEQ ID NO: 1790602 - DNA, 15 bp, Homo sapiens
tcagtaaactatcgc

SEQ ID NO: 1790603 - DNA, 15 bp, Homo sapiens
cagtaaactatcgca

SEQ ID NO: 1790604 - DNA, 15 bp, Homo sapiens
agtaaactatcgcaa

SEQ ID NO: 1790605 - DNA, 15 bp, Homo sapiens
gtaaactatcgcaag

SEQ ID NO: 1790606 - DNA, 15 bp, Homo sapiens
taaactatcgcaaga

SEQ ID NO: 1790607 - DNA, 15 bp, Homo sapiens
aaactatcgcaagaa

SEQ ID NO: 1790608 - DNA, 15 bp, Homo sapiens
aactatcgcaagaac

SEQ ID NO: 1790609 - DNA, 15 bp, Homo sapiens
actatcgcaagaaca

SEQ ID NO: 1790610 - DNA, 15 bp, Homo sapiens
ctatcgcaagaacaa

SEQ ID NO: 1790611 - DNA, 15 bp, Homo sapiens
tatcgcaagaacaaa

SEQ ID NO: 1790612 - DNA, 15 bp, Homo sapiens
atcgcaagaacaaaa

SEQ ID NO: 1790613 - DNA, 15 bp, Homo sapiens
tcgcaagaacaaaaa

SEQ ID NO: 1790614 - DNA, 15 bp, Homo sapiens
cgcaagaacaaaaaa

SEQ ID NO: 1790615 - DNA, 15 bp, Homo sapiens
gcaagaacaaaaaac

SEQ ID NO: 1790616 - DNA, 15 bp, Homo sapiens
caagaacaaaaaacc

SEQ ID NO: 1790617 - DNA, 15 bp, Homo sapiens
aagaacaaaaaacca

SEQ ID NO: 1790618 - DNA, 15 bp, Homo sapiens
agaacaaaaaaccaa

SEQ ID NO: 1790619 - DNA, 15 bp, Homo sapiens
gaacaaaaaaccaaa

SEQ ID NO: 1790620 - DNA, 15 bp, Homo sapiens
aacaaaaaaccaaac

SEQ ID NO: 1790621 - DNA, 15 bp, Homo sapiens
acaaaaaaccaaaca

SEQ ID NO: 1790622 - DNA, 15 bp, Homo sapiens
caaaaaaccaaacac

SEQ ID NO: 1790623 - DNA, 15 bp, Homo sapiens
aaaaaaccaaacacc

SEQ ID NO: 1790624 - DNA, 15 bp, Homo sapiens
aaaaaccaaacaccg

SEQ ID NO: 1790625 - DNA, 15 bp, Homo sapiens
accaaacaccgcata

SEQ ID NO: 1790626 - DNA, 15 bp, Homo sapiens
ccaaacaccgcatat

SEQ ID NO: 1790627 - DNA, 15 bp, Homo sapiens
caaacaccgcatatt

SEQ ID NO: 1790628 - DNA, 15 bp, Homo sapiens
aaacaccgcatattc

SEQ ID NO: 1790629 - DNA, 15 bp, Homo sapiens
aacaccgcatattct

SEQ ID NO: 1790630 - DNA, 15 bp, Homo sapiens
acaccgcatattctc

SEQ ID NO: 1790631 - DNA, 15 bp, Homo sapiens
caccgcatattctca

SEQ ID NO: 1790632 - DNA, 15 bp, Homo sapiens
accgcatattctcac

SEQ ID NO: 1790633 - DNA, 15 bp, Homo sapiens
ccgcatattctcact

SEQ ID NO: 1790634 - DNA, 15 bp, Homo sapiens
cgcatattctcactc

SEQ ID NO: 1790635 - DNA, 15 bp, Homo sapiens
tattctcactcatag

SEQ ID NO: 1790636 - DNA, 15 bp, Homo sapiens
attctcactcatagg

SEQ ID NO: 1790637 - DNA, 15 bp, Homo sapiens
ttctcactcataggt

SEQ ID NO: 1790638 - DNA, 15 bp, Homo sapiens
tctcactcataggtg

SEQ ID NO: 1790639 - DNA, 15 bp, Homo sapiens
ctcactcataggtgg

SEQ ID NO: 1790640 - DNA, 15 bp, Homo sapiens
tcactcataggtggg

SEQ ID NO: 1790641 - DNA, 15 bp, Homo sapiens
cactcataggtggga

SEQ ID NO: 1790642 - DNA, 15 bp, Homo sapiens
actcataggtgggaa

SEQ ID NO: 1790643 - DNA, 15 bp, Homo sapiens
ctcataggtgggaat

SEQ ID NO: 1790644 - DNA, 15 bp, Homo sapiens
tcataggtgggaatt

SEQ ID NO: 1790645 - DNA, 15 bp, Homo sapiens
cataggtgggaattg

SEQ ID NO: 1790646 - DNA, 15 bp, Homo sapiens
ataggtgggaattga

SEQ ID NO: 1790647 - DNA, 15 bp, Homo sapiens
taggtgggaattgaa

SEQ ID NO: 1790648 - DNA, 15 bp, Homo sapiens
aggtgggaattgaac

SEQ ID NO: 1790649 - DNA, 15 bp, Homo sapiens
ggtgggaattgaaca

SEQ ID NO: 1790650 - DNA, 15 bp, Homo sapiens
gtgggaattgaacaa

SEQ ID NO: 1790651 - DNA, 15 bp, Homo sapiens
tgggaattgaacaat

SEQ ID NO: 1790652 - DNA, 15 bp, Homo sapiens
gggaattgaacaatg

SEQ ID NO: 1790653 - DNA, 15 bp, Homo sapiens
ggaattgaacaatga

SEQ ID NO: 1790654 - DNA, 15 bp, Homo sapiens
gaattgaacaatgag

SEQ ID NO: 1790655 - DNA, 15 bp, Homo sapiens
aattgaacaatgaga

SEQ ID NO: 1790656 - DNA, 15 bp, Homo sapiens
attgaacaatgagat

SEQ ID NO: 1790657 - DNA, 15 bp, Homo sapiens
ttgaacaatgagatc

SEQ ID NO: 1790658 - DNA, 15 bp, Homo sapiens
tgaacaatgagatca

SEQ ID NO: 1790659 - DNA, 15 bp, Homo sapiens
gaacaatgagatcac

SEQ ID NO: 1790660 - DNA, 15 bp, Homo sapiens
aacaatgagatcaca

SEQ ID NO: 1790661 - DNA, 15 bp, Homo sapiens
acaatgagatcacat

SEQ ID NO: 1790662 - DNA, 15 bp, Homo sapiens
caatgagatcacatg

SEQ ID NO: 1790663 - DNA, 15 bp, Homo sapiens
aatgagatcacatgg

SEQ ID NO: 1790664 - DNA, 15 bp, Homo sapiens
atgagatcacatgga

SEQ ID NO: 1790665 - DNA, 15 bp, Homo sapiens
tgagatcacatggac

SEQ ID NO: 1790666 - DNA, 15 bp, Homo sapiens
gagatcacatggaca

SEQ ID NO: 1790667 - DNA, 15 bp, Homo sapiens
agatcacatggacac

SEQ ID NO: 1790668 - DNA, 15 bp, Homo sapiens
gatcacatggacaca

SEQ ID NO: 1790669 - DNA, 15 bp, Homo sapiens
atcacatggacacag

SEQ ID NO: 1790670 - DNA, 15 bp, Homo sapiens
tcacatggacacagg

SEQ ID NO: 1790671 - DNA, 15 bp, Homo sapiens
cacaggaaggggaat

SEQ ID NO: 1790672 - DNA, 15 bp, Homo sapiens
acaggaaggggaata

SEQ ID NO: 1790673 - DNA, 15 bp, Homo sapiens
caggaaggggaatat

SEQ ID NO: 1790674 - DNA, 15 bp, Homo sapiens
aggaaggggaatatc

SEQ ID NO: 1790675 - DNA, 15 bp, Homo sapiens
ggaaggggaatatca

SEQ ID NO: 1790676 - DNA, 15 bp, Homo sapiens
gaaggggaatatcac

SEQ ID NO: 1790677 - DNA, 15 bp, Homo sapiens
aaggggaatatcaca

SEQ ID NO: 1790678 - DNA, 15 bp, Homo sapiens
aggggaatatcacac

SEQ ID NO: 1790679 - DNA, 15 bp, Homo sapiens
ggggaatatcacact

SEQ ID NO: 1790680 - DNA, 15 bp, Homo sapiens
gggaatatcacactc

SEQ ID NO: 1790681 - DNA, 15 bp, Homo sapiens
ggaatatcacactct

SEQ ID NO: 1790682 - DNA, 15 bp, Homo sapiens
gaatatcacactctg

SEQ ID NO: 1790683 - DNA, 15 bp, Homo sapiens
aatatcacactctgg

SEQ ID NO: 1790684 - DNA, 15 bp, Homo sapiens
atatcacactctggg

SEQ ID NO: 1790685 - DNA, 15 bp, Homo sapiens
tatcacactctgggg

SEQ ID NO: 1790686 - DNA, 15 bp, Homo sapiens
actctggggactgtg

SEQ ID NO: 1790687 - DNA, 15 bp, Homo sapiens
ctctggggactgtgg

SEQ ID NO: 1790688 - DNA, 15 bp, Homo sapiens
tctggggactgtggt

SEQ ID NO: 1790689 - DNA, 15 bp, Homo sapiens
ctggggactgtggtg

SEQ ID NO: 1790690 - DNA, 15 bp, Homo sapiens
tggggactgtggtgg

SEQ ID NO: 1790691 - DNA, 15 bp, Homo sapiens
ggggactgtggtggg

SEQ ID NO: 1790692 - DNA, 15 bp, Homo sapiens
gggactgtggtgggg

SEQ ID NO: 1790693 - DNA, 15 bp, Homo sapiens
ggactgtggtggggt

SEQ ID NO: 1790694 - DNA, 15 bp, Homo sapiens
gactgtggtggggtc

SEQ ID NO: 1790695 - DNA, 15 bp, Homo sapiens
actgtggtggggtcg

SEQ ID NO: 1790696 - DNA, 15 bp, Homo sapiens
ctgtggtggggtcgg

SEQ ID NO: 1790697 - DNA, 15 bp, Homo sapiens
tgtggtggggtcggg

SEQ ID NO: 1790698 - DNA, 15 bp, Homo sapiens
gtggtggggtcgggg

SEQ ID NO: 1790699 - DNA, 15 bp, Homo sapiens
tggtggggtcggggg

SEQ ID NO: 1790700 - DNA, 15 bp, Homo sapiens
ggtggggtcggggga

SEQ ID NO: 1790701 - DNA, 15 bp, Homo sapiens
gtggggtcgggggag

SEQ ID NO: 1790702 - DNA, 15 bp, Homo sapiens
tggggtcgggggagg

SEQ ID NO: 1790703 - DNA, 15 bp, Homo sapiens
ggggtcgggggaggg

SEQ ID NO: 1790704 - DNA, 15 bp, Homo sapiens
gggtcgggggagggg

SEQ ID NO: 1790705 - DNA, 15 bp, Homo sapiens
ggtcgggggaggggg

SEQ ID NO: 1790706 - DNA, 15 bp, Homo sapiens
gtcgggggagggggg

SEQ ID NO: 1790707 - DNA, 15 bp, Homo sapiens
tcgggggagggggga

SEQ ID NO: 1790708 - DNA, 15 bp, Homo sapiens
cgggggaggggggag

SEQ ID NO: 1790709 - DNA, 15 bp, Homo sapiens
gggggagggatagca

SEQ ID NO: 1790710 - DNA, 15 bp, Homo sapiens
ggagggatagcattg

SEQ ID NO: 1790711 - DNA, 15 bp, Homo sapiens
gagggatagcattgg

SEQ ID NO: 1790712 - DNA, 15 bp, Homo sapiens
agggatagcattggg

SEQ ID NO: 1790713 - DNA, 15 bp, Homo sapiens
gggatagcattggga

SEQ ID NO: 1790714 - DNA, 15 bp, Homo sapiens
ggatagcattgggag

SEQ ID NO: 1790715 - DNA, 15 bp, Homo sapiens
gatagcattgggaga

SEQ ID NO: 1790716 - DNA, 15 bp, Homo sapiens
atagcattgggagat

SEQ ID NO: 1790717 - DNA, 15 bp, Homo sapiens
tagcattgggagata

SEQ ID NO: 1790718 - DNA, 15 bp, Homo sapiens
agcattgggagatat

SEQ ID NO: 1790719 - DNA, 15 bp, Homo sapiens
gcattgggagatata

SEQ ID NO: 1790720 - DNA, 15 bp, Homo sapiens
cattgggagatatac

SEQ ID NO: 1790721 - DNA, 15 bp, Homo sapiens
attgggagatatacc

SEQ ID NO: 1790722 - DNA, 15 bp, Homo sapiens
aatgctagatgacac

SEQ ID NO: 1790723 - DNA, 15 bp, Homo sapiens
atgctagatgacacg

SEQ ID NO: 1790724 - DNA, 15 bp, Homo sapiens
tgctagatgacacgt

SEQ ID NO: 1790725 - DNA, 15 bp, Homo sapiens
gctagatgacacgtt

SEQ ID NO: 1790726 - DNA, 15 bp, Homo sapiens
ctagatgacacgtta

SEQ ID NO: 1790727 - DNA, 15 bp, Homo sapiens
tagatgacacgttag

SEQ ID NO: 1790728 - DNA, 15 bp, Homo sapiens
agatgacacgttagt

SEQ ID NO: 1790729 - DNA, 15 bp, Homo sapiens
gatgacacgttagtg

SEQ ID NO: 1790730 - DNA, 15 bp, Homo sapiens
atgacacgttagtgg

SEQ ID NO: 1790731 - DNA, 15 bp, Homo sapiens
tgacacgttagtggg

SEQ ID NO: 1790732 - DNA, 15 bp, Homo sapiens
gacacgttagtgggt

SEQ ID NO: 1790733 - DNA, 15 bp, Homo sapiens
acacgttagtgggtg

SEQ ID NO: 1790734 - DNA, 15 bp, Homo sapiens
cacgttagtgggtgc

SEQ ID NO: 1790735 - DNA, 15 bp, Homo sapiens
acgttagtgggtgca

SEQ ID NO: 1790736 - DNA, 15 bp, Homo sapiens
cgttagtgggtgcag

SEQ ID NO: 1790737 - DNA, 15 bp, Homo sapiens
ttagtgggtgcagca

SEQ ID NO: 1790738 - DNA, 15 bp, Homo sapiens
tagtgggtgcagcac

SEQ ID NO: 1790739 - DNA, 15 bp, Homo sapiens
agtgggtgcagcaca

SEQ ID NO: 1790740 - DNA, 15 bp, Homo sapiens
gtgggtgcagcacac

SEQ ID NO: 1790741 - DNA, 15 bp, Homo sapiens
tgggtgcagcacacc

SEQ ID NO: 1790742 - DNA, 15 bp, Homo sapiens
gggtgcagcacacca

SEQ ID NO: 1790743 - DNA, 15 bp, Homo sapiens
ggtgcagcacaccag

SEQ ID NO: 1790744 - DNA, 15 bp, Homo sapiens
gtgcagcacaccagc

SEQ ID NO: 1790745 - DNA, 15 bp, Homo sapiens
tgcagcacaccagca

SEQ ID NO: 1790746 - DNA, 15 bp, Homo sapiens
gcagcacaccagcat

SEQ ID NO: 1790747 - DNA, 15 bp, Homo sapiens
cagcacaccagcatg

SEQ ID NO: 1790748 - DNA, 15 bp, Homo sapiens
agcacaccagcatgg

SEQ ID NO: 1790749 - DNA, 15 bp, Homo sapiens
gcacaccagcatggc

SEQ ID NO: 1790750 - DNA, 15 bp, Homo sapiens
cacaccagcatggca

SEQ ID NO: 1790751 - DNA, 15 bp, Homo sapiens
acaccagcatggcac

SEQ ID NO: 1790752 - DNA, 15 bp, Homo sapiens
caccagcatggcaca

SEQ ID NO: 1790753 - DNA, 15 bp, Homo sapiens
accagcatggcacat

SEQ ID NO: 1790754 - DNA, 15 bp, Homo sapiens
ccagcatggcacatg

SEQ ID NO: 1790755 - DNA, 15 bp, Homo sapiens
cagcatggcacatgt

SEQ ID NO: 1790756 - DNA, 15 bp, Homo sapiens
agcatggcacatgta

SEQ ID NO: 1790757 - DNA, 15 bp, Homo sapiens
gcatggcacatgtat

SEQ ID NO: 1790758 - DNA, 15 bp, Homo sapiens
catggcacatgtata

SEQ ID NO: 1790759 - DNA, 15 bp, Homo sapiens
atggcacatgtatac

SEQ ID NO: 1790760 - DNA, 15 bp, Homo sapiens
tggcacatgtataca

SEQ ID NO: 1790761 - DNA, 15 bp, Homo sapiens
ggcacatgtatacat

SEQ ID NO: 1790762 - DNA, 15 bp, Homo sapiens
gcacatgtatacata

SEQ ID NO: 1790763 - DNA, 15 bp, Homo sapiens
cacatgtatacatat

SEQ ID NO: 1790764 - DNA, 15 bp, Homo sapiens
acatgtatacatatg

SEQ ID NO: 1790765 - DNA, 15 bp, Homo sapiens
catgtatacatatgt

SEQ ID NO: 1790766 - DNA, 15 bp, Homo sapiens
atgtatacatatgta

SEQ ID NO: 1790767 - DNA, 15 bp, Homo sapiens
aactaacctgcacaa

SEQ ID NO: 1790768 - DNA, 15 bp, Homo sapiens
actaacctgcacaat

SEQ ID NO: 1790769 - DNA, 15 bp, Homo sapiens
ctaacctgcacaatg

SEQ ID NO: 1790770 - DNA, 15 bp, Homo sapiens
taacctgcacaatgt

SEQ ID NO: 1790771 - DNA, 15 bp, Homo sapiens
aacctgcacaatgtg

SEQ ID NO: 1790772 - DNA, 15 bp, Homo sapiens
acctgcacaatgtgc

SEQ ID NO: 1790773 - DNA, 15 bp, Homo sapiens
cctgcacaatgtgca

SEQ ID NO: 1790774 - DNA, 15 bp, Homo sapiens
ctgcacaatgtgcac

SEQ ID NO: 1790775 - DNA, 15 bp, Homo sapiens
tgcacaatgtgcaca

SEQ ID NO: 1790776 - DNA, 15 bp, Homo sapiens
gcacaatgtgcacat

SEQ ID NO: 1790777 - DNA, 15 bp, Homo sapiens
cacaatgtgcacatg

SEQ ID NO: 1790778 - DNA, 15 bp, Homo sapiens
acaatgtgcacatgt

SEQ ID NO: 1790779 - DNA, 15 bp, Homo sapiens
caatgtgcacatgta

SEQ ID NO: 1790780 - DNA, 15 bp, Homo sapiens
aatgtgcacatgtac

SEQ ID NO: 1790781 - DNA, 15 bp, Homo sapiens
atgtgcacatgtacc

SEQ ID NO: 1790782 - DNA, 15 bp, Homo sapiens
taccctaaaacttag

SEQ ID NO: 1790783 - DNA, 15 bp, Homo sapiens
accctaaaacttaga

SEQ ID NO: 1790784 - DNA, 15 bp, Homo sapiens
ccctaaaacttagag

SEQ ID NO: 1790785 - DNA, 15 bp, Homo sapiens
cctaaaacttagagt

SEQ ID NO: 1790786 - DNA, 15 bp, Homo sapiens
ctaaaacttagagta

SEQ ID NO: 1790787 - DNA, 15 bp, Homo sapiens
taaaacttagagtat

SEQ ID NO: 1790788 - DNA, 15 bp, Homo sapiens
aaaacttagagtata

SEQ ID NO: 1790789 - DNA, 15 bp, Homo sapiens
aaacttagagtataa

SEQ ID NO: 1790790 - DNA, 15 bp, Homo sapiens
aacttagagtataat

SEQ ID NO: 1790791 - DNA, 15 bp, Homo sapiens
acttagagtataata

SEQ ID NO: 1790792 - DNA, 15 bp, Homo sapiens
cttagagtataataa

SEQ ID NO: 1790793 - DNA, 15 bp, Homo sapiens
ttagagtataataaa

SEQ ID NO: 1790794 - DNA, 15 bp, Homo sapiens
tagagtataataaaa

SEQ ID NO: 1790795 - DNA, 15 bp, Homo sapiens
agagtataataaaaa

SEQ ID NO: 1790796 - DNA, 15 bp, Homo sapiens
gagtataataaaaaa

SEQ ID NO: 1790797 - DNA, 15 bp, Homo sapiens
agtataataaaaaat

SEQ ID NO: 1790798 - DNA, 15 bp, Homo sapiens
gtataataaaaaata

SEQ ID NO: 1790799 - DNA, 15 bp, Homo sapiens
tataataaaaaatat

SEQ ID NO: 1790800 - DNA, 15 bp, Homo sapiens
ataataaaaaatata

SEQ ID NO: 1790801 - DNA, 15 bp, Homo sapiens
taataaaaaatataa

SEQ ID NO: 1790802 - DNA, 15 bp, Homo sapiens
ataaaaaatataaat

SEQ ID NO: 1790803 - DNA, 15 bp, Homo sapiens
taaaaaatataaata

SEQ ID NO: 1790804 - DNA, 15 bp, Homo sapiens
aaatataaataaaaa

SEQ ID NO: 1790805 - DNA, 15 bp, Homo sapiens
aatataaataaaaaa

SEQ ID NO: 1790806 - DNA, 15 bp, Homo sapiens
atataaataaaaaaa

SEQ ID NO: 1790807 - DNA, 15 bp, Homo sapiens
tataaataaaaaaaa

SEQ ID NO: 1790808 - DNA, 15 bp, Homo sapiens
ataaataaaaaaaaa

SEQ ID NO: 1790809 - DNA, 15 bp, Homo sapiens
taaataaaaaaaaaa

SEQ ID NO: 1790810 - DNA, 15 bp, Homo sapiens
aaaaaaaaagaaaat

SEQ ID NO: 1790811 - DNA, 15 bp, Homo sapiens
aaaaaaaagaaaatc

SEQ ID NO: 1790812 - DNA, 15 bp, Homo sapiens
aaaaaaagaaaatct

SEQ ID NO: 1790813 - DNA, 15 bp, Homo sapiens
aaaaaagaaaatcta

SEQ ID NO: 1790814 - DNA, 15 bp, Homo sapiens
aaaaagaaaatctat

SEQ ID NO: 1790815 - DNA, 15 bp, Homo sapiens
aaaagaaaatctatt

SEQ ID NO: 1790816 - DNA, 15 bp, Homo sapiens
aaagaaaatctattt

SEQ ID NO: 1790817 - DNA, 15 bp, Homo sapiens
gaaaatctatttact

SEQ ID NO: 1790818 - DNA, 15 bp, Homo sapiens
aaaatctatttactt

SEQ ID NO: 1790819 - DNA, 15 bp, Homo sapiens
aaatctatttacttg

SEQ ID NO: 1790820 - DNA, 15 bp, Homo sapiens
aatctatttacttgg

SEQ ID NO: 1790821 - DNA, 15 bp, Homo sapiens
atctatttacttgga

SEQ ID NO: 1790822 - DNA, 15 bp, Homo sapiens
tctatttacttggat

SEQ ID NO: 1790823 - DNA, 15 bp, Homo sapiens
ctatttacttggatg

SEQ ID NO: 1790824 - DNA, 15 bp, Homo sapiens
tatttacttggatgg

SEQ ID NO: 1790825 - DNA, 15 bp, Homo sapiens
atttacttggatggg

SEQ ID NO: 1790826 - DNA, 15 bp, Homo sapiens
tttacttggatgggt

SEQ ID NO: 1790827 - DNA, 15 bp, Homo sapiens
ttacttggatgggtt

SEQ ID NO: 1790828 - DNA, 15 bp, Homo sapiens
tacttggatgggttt

SEQ ID NO: 1790829 - DNA, 15 bp, Homo sapiens
acttggatgggttta

SEQ ID NO: 1790830 - DNA, 15 bp, Homo sapiens
cttggatgggtttac

SEQ ID NO: 1790831 - DNA, 15 bp, Homo sapiens
ttggatgggtttaca

SEQ ID NO: 1790832 - DNA, 15 bp, Homo sapiens
tggatgggtttacag

SEQ ID NO: 1790833 - DNA, 15 bp, Homo sapiens
ggatgggtttacaga

SEQ ID NO: 1790834 - DNA, 15 bp, Homo sapiens
gatgggtttacagat

SEQ ID NO: 1790835 - DNA, 15 bp, Homo sapiens
atgggtttacagatt

SEQ ID NO: 1790836 - DNA, 15 bp, Homo sapiens
tgggtttacagattt

SEQ ID NO: 1790837 - DNA, 15 bp, Homo sapiens
gggtttacagattta

SEQ ID NO: 1790838 - DNA, 15 bp, Homo sapiens
ggtttacagatttag

SEQ ID NO: 1790839 - DNA, 15 bp, Homo sapiens
gtttacagatttagt

SEQ ID NO: 1790840 - DNA, 15 bp, Homo sapiens
tttacagatttagtt

SEQ ID NO: 1790841 - DNA, 15 bp, Homo sapiens
ttacagatttagtta

SEQ ID NO: 1790842 - DNA, 15 bp, Homo sapiens
tacagatttagttat

SEQ ID NO: 1790843 - DNA, 15 bp, Homo sapiens
acagatttagttatc

SEQ ID NO: 1790844 - DNA, 15 bp, Homo sapiens
cagatttagttatca

SEQ ID NO: 1790845 - DNA, 15 bp, Homo sapiens
agatttagttatcag

SEQ ID NO: 1790846 - DNA, 15 bp, Homo sapiens
gatttagttatcagc

SEQ ID NO: 1790847 - DNA, 15 bp, Homo sapiens
atttagttatcagct

SEQ ID NO: 1790848 - DNA, 15 bp, Homo sapiens
tttagttatcagctt

SEQ ID NO: 1790849 - DNA, 15 bp, Homo sapiens
ttagttatcagcttt

SEQ ID NO: 1790850 - DNA, 15 bp, Homo sapiens
tagttatcagctttc

SEQ ID NO: 1790851 - DNA, 15 bp, Homo sapiens
agttatcagctttcc

SEQ ID NO: 1790852 - DNA, 15 bp, Homo sapiens
gttatcagctttcct

SEQ ID NO: 1790853 - DNA, 15 bp, Homo sapiens
ttatcagctttcctg

SEQ ID NO: 1790854 - DNA, 15 bp, Homo sapiens
tatcagctttcctga

SEQ ID NO: 1790855 - DNA, 15 bp, Homo sapiens
atcagctttcctgac

SEQ ID NO: 1790856 - DNA, 15 bp, Homo sapiens
tcagctttcctgact

SEQ ID NO: 1790857 - DNA, 15 bp, Homo sapiens
cagctttcctgactg

SEQ ID NO: 1790858 - DNA, 15 bp, Homo sapiens
agctttcctgactgt

SEQ ID NO: 1790859 - DNA, 15 bp, Homo sapiens
gctttcctgactgtt

SEQ ID NO: 1790860 - DNA, 15 bp, Homo sapiens
ctttcctgactgtta

SEQ ID NO: 1790861 - DNA, 15 bp, Homo sapiens
tttcctgactgttag

SEQ ID NO: 1790862 - DNA, 15 bp, Homo sapiens
ttcctgactgttagg

SEQ ID NO: 1790863 - DNA, 15 bp, Homo sapiens
tcctgactgttaggt

SEQ ID NO: 1790864 - DNA, 15 bp, Homo sapiens
cctgactgttaggta

SEQ ID NO: 1790865 - DNA, 15 bp, Homo sapiens
ctgactgttaggtat

SEQ ID NO: 1790866 - DNA, 15 bp, Homo sapiens
tgactgttaggtatc

SEQ ID NO: 1790867 - DNA, 15 bp, Homo sapiens
gactgttaggtatct

SEQ ID NO: 1790868 - DNA, 15 bp, Homo sapiens
actgttaggtatctt

SEQ ID NO: 1790869 - DNA, 15 bp, Homo sapiens
ctgttaggtatcttc

SEQ ID NO: 1790870 - DNA, 15 bp, Homo sapiens
tgttaggtatcttct

SEQ ID NO: 1790871 - DNA, 15 bp, Homo sapiens
gttaggtatcttctt

SEQ ID NO: 1790872 - DNA, 15 bp, Homo sapiens
ttaggtatcttcttt

SEQ ID NO: 1790873 - DNA, 15 bp, Homo sapiens
taggtatcttctttt

SEQ ID NO: 1790874 - DNA, 15 bp, Homo sapiens
aggtatcttcttttg

SEQ ID NO: 1790875 - DNA, 15 bp, Homo sapiens
ggtatcttcttttga

SEQ ID NO: 1790876 - DNA, 15 bp, Homo sapiens
gtatcttcttttgag

SEQ ID NO: 1790877 - DNA, 15 bp, Homo sapiens
tatcttcttttgaga

SEQ ID NO: 1790878 - DNA, 15 bp, Homo sapiens
atcttcttttgagaa

SEQ ID NO: 1790879 - DNA, 15 bp, Homo sapiens
tcttcttttgagaac

SEQ ID NO: 1790880 - DNA, 15 bp, Homo sapiens
cttcttttgagaaca

SEQ ID NO: 1790881 - DNA, 15 bp, Homo sapiens
ttcttttgagaacaa

SEQ ID NO: 1790882 - DNA, 15 bp, Homo sapiens
tcttttgagaacaat

SEQ ID NO: 1790883 - DNA, 15 bp, Homo sapiens
cttttgagaacaatt

SEQ ID NO: 1790884 - DNA, 15 bp, Homo sapiens
ttttgagaacaattt

SEQ ID NO: 1790885 - DNA, 15 bp, Homo sapiens
tttgagaacaatttg

SEQ ID NO: 1790886 - DNA, 15 bp, Homo sapiens
ttgagaacaatttga

SEQ ID NO: 1790887 - DNA, 15 bp, Homo sapiens
tgagaacaatttgag

SEQ ID NO: 1790888 - DNA, 15 bp, Homo sapiens
gagaacaatttgaga

SEQ ID NO: 1790889 - DNA, 15 bp, Homo sapiens
agaacaatttgagaa

SEQ ID NO: 1790890 - DNA, 15 bp, Homo sapiens
gaacaatttgagaac

SEQ ID NO: 1790891 - DNA, 15 bp, Homo sapiens
aacaatttgagaacc

SEQ ID NO: 1790892 - DNA, 15 bp, Homo sapiens
acaatttgagaacca

SEQ ID NO: 1790893 - DNA, 15 bp, Homo sapiens
caatttgagaaccag

SEQ ID NO: 1790894 - DNA, 15 bp, Homo sapiens
aatttgagaaccagt

SEQ ID NO: 1790895 - DNA, 15 bp, Homo sapiens
atttgagaaccagtt

SEQ ID NO: 1790896 - DNA, 15 bp, Homo sapiens
tttgagaaccagttt

SEQ ID NO: 1790897 - DNA, 15 bp, Homo sapiens
ttgagaaccagtttg

SEQ ID NO: 1790898 - DNA, 15 bp, Homo sapiens
tgagaaccagtttgg

SEQ ID NO: 1790899 - DNA, 15 bp, Homo sapiens
gagaaccagtttggt

SEQ ID NO: 1790900 - DNA, 15 bp, Homo sapiens
agaaccagtttggtt

SEQ ID NO: 1790901 - DNA, 15 bp, Homo sapiens
gaaccagtttggtta

SEQ ID NO: 1790902 - DNA, 15 bp, Homo sapiens
aaccagtttggttat

SEQ ID NO: 1790903 - DNA, 15 bp, Homo sapiens
accagtttggttata

SEQ ID NO: 1790904 - DNA, 15 bp, Homo sapiens
ccagtttggttatat

SEQ ID NO: 1790905 - DNA, 15 bp, Homo sapiens
cagtttggttatatg

SEQ ID NO: 1790906 - DNA, 15 bp, Homo sapiens
agtttggttatatgt

SEQ ID NO: 1790907 - DNA, 15 bp, Homo sapiens
gtttggttatatgtt

SEQ ID NO: 1790908 - DNA, 15 bp, Homo sapiens
tttggttatatgttt

SEQ ID NO: 1790909 - DNA, 15 bp, Homo sapiens
ttggttatatgtttc

SEQ ID NO: 1790910 - DNA, 15 bp, Homo sapiens
tggttatatgtttca

SEQ ID NO: 1790911 - DNA, 15 bp, Homo sapiens
ggttatatgtttcaa

SEQ ID NO: 1790912 - DNA, 15 bp, Homo sapiens
gttatatgtttcaaa

SEQ ID NO: 1790913 - DNA, 15 bp, Homo sapiens
ttatatgtttcaaaa

SEQ ID NO: 1790914 - DNA, 15 bp, Homo sapiens
tatatgtttcaaaac

SEQ ID NO: 1790915 - DNA, 15 bp, Homo sapiens
atatgtttcaaaaca

SEQ ID NO: 1790916 - DNA, 15 bp, Homo sapiens
tatgtttcaaaacac

SEQ ID NO: 1790917 - DNA, 15 bp, Homo sapiens
atgtttcaaaacact

SEQ ID NO: 1790918 - DNA, 15 bp, Homo sapiens
tgtttcaaaacactt

SEQ ID NO: 1790919 - DNA, 15 bp, Homo sapiens
gtttcaaaacacttt

SEQ ID NO: 1790920 - DNA, 15 bp, Homo sapiens
tttcaaaacactttt

SEQ ID NO: 1790921 - DNA, 15 bp, Homo sapiens
ttcaaaacactttta

SEQ ID NO: 1790922 - DNA, 15 bp, Homo sapiens
tcaaaacacttttat

SEQ ID NO: 1790923 - DNA, 15 bp, Homo sapiens
caaaacacttttata

SEQ ID NO: 1790924 - DNA, 15 bp, Homo sapiens
aaaacacttttatat

SEQ ID NO: 1790925 - DNA, 15 bp, Homo sapiens
aaacacttttatatt

SEQ ID NO: 1790926 - DNA, 15 bp, Homo sapiens
aacacttttatattt

SEQ ID NO: 1790927 - DNA, 15 bp, Homo sapiens
acacttttatatttt

SEQ ID NO: 1790928 - DNA, 15 bp, Homo sapiens
cacttttatattttt

SEQ ID NO: 1790929 - DNA, 15 bp, Homo sapiens
acttttatatttttt

SEQ ID NO: 1790930 - DNA, 15 bp, Homo sapiens
cttttatatttttta

SEQ ID NO: 1790931 - DNA, 15 bp, Homo sapiens
ttttatattttttaa

SEQ ID NO: 1790932 - DNA, 15 bp, Homo sapiens
tttatattttttaaa

SEQ ID NO: 1790933 - DNA, 15 bp, Homo sapiens
ttatattttttaaat

SEQ ID NO: 1790934 - DNA, 15 bp, Homo sapiens
tatattttttaaata

SEQ ID NO: 1790935 - DNA, 15 bp, Homo sapiens
atattttttaaatag

SEQ ID NO: 1790936 - DNA, 15 bp, Homo sapiens
tattttttaaatagc

SEQ ID NO: 1790937 - DNA, 15 bp, Homo sapiens
attttttaaatagcc

SEQ ID NO: 1790938 - DNA, 15 bp, Homo sapiens
ttttttaaatagcca

SEQ ID NO: 1790939 - DNA, 15 bp, Homo sapiens
tttttaaatagccaa

SEQ ID NO: 1790940 - DNA, 15 bp, Homo sapiens
ttttaaatagccaat

SEQ ID NO: 1790941 - DNA, 15 bp, Homo sapiens
tttaaatagccaatc

SEQ ID NO: 1790942 - DNA, 15 bp, Homo sapiens
ttaaatagccaatct

SEQ ID NO: 1790943 - DNA, 15 bp, Homo sapiens
taaatagccaatctg

SEQ ID NO: 1790944 - DNA, 15 bp, Homo sapiens
aaatagccaatctgc

SEQ ID NO: 1790945 - DNA, 15 bp, Homo sapiens
aatagccaatctgct

SEQ ID NO: 1790946 - DNA, 15 bp, Homo sapiens
atagccaatctgcta

SEQ ID NO: 1790947 - DNA, 15 bp, Homo sapiens
tagccaatctgctaa

SEQ ID NO: 1790948 - DNA, 15 bp, Homo sapiens
agccaatctgctaaa

SEQ ID NO: 1790949 - DNA, 15 bp, Homo sapiens
gccaatctgctaaac

SEQ ID NO: 1790950 - DNA, 15 bp, Homo sapiens
ccaatctgctaaaca

SEQ ID NO: 1790951 - DNA, 15 bp, Homo sapiens
caatctgctaaacaa

SEQ ID NO: 1790952 - DNA, 15 bp, Homo sapiens
aatctgctaaacaaa

SEQ ID NO: 1790953 - DNA, 15 bp, Homo sapiens
atctgctaaacaaag

SEQ ID NO: 1790954 - DNA, 15 bp, Homo sapiens
tctgctaaacaaagc

SEQ ID NO: 1790955 - DNA, 15 bp, Homo sapiens
ctgctaaacaaagca

SEQ ID NO: 1790956 - DNA, 15 bp, Homo sapiens
tgctaaacaaagcag

SEQ ID NO: 1790957 - DNA, 15 bp, Homo sapiens
gctaaacaaagcagg

SEQ ID NO: 1790958 - DNA, 15 bp, Homo sapiens
ctaaacaaagcaggt

SEQ ID NO: 1790959 - DNA, 15 bp, Homo sapiens
taaacaaagcaggtt

SEQ ID NO: 1790960 - DNA, 15 bp, Homo sapiens
aaacaaagcaggtta

SEQ ID NO: 1790961 - DNA, 15 bp, Homo sapiens
aacaaagcaggttac

SEQ ID NO: 1790962 - DNA, 15 bp, Homo sapiens
acaaagcaggttact

SEQ ID NO: 1790963 - DNA, 15 bp, Homo sapiens
caaagcaggttactt

SEQ ID NO: 1790964 - DNA, 15 bp, Homo sapiens
aaagcaggttacttt

SEQ ID NO: 1790965 - DNA, 15 bp, Homo sapiens
aagcaggttacttta

SEQ ID NO: 1790966 - DNA, 15 bp, Homo sapiens
agcaggttactttag

SEQ ID NO: 1790967 - DNA, 15 bp, Homo sapiens
gcaggttactttagg

SEQ ID NO: 1790968 - DNA, 15 bp, Homo sapiens
caggttactttaggt

SEQ ID NO: 1790969 - DNA, 15 bp, Homo sapiens
aggttactttaggtt

SEQ ID NO: 1790970 - DNA, 15 bp, Homo sapiens
ggttactttaggttg

SEQ ID NO: 1790971 - DNA, 15 bp, Homo sapiens
ttactttaggttgag

SEQ ID NO: 1790972 - DNA, 15 bp, Homo sapiens
tactttaggttgagt

SEQ ID NO: 1790973 - DNA, 15 bp, Homo sapiens
actttaggttgagta

SEQ ID NO: 1790974 - DNA, 15 bp, Homo sapiens
ctttaggttgagtac

SEQ ID NO: 1790975 - DNA, 15 bp, Homo sapiens
tttaggttgagtact

SEQ ID NO: 1790976 - DNA, 15 bp, Homo sapiens
ttaggttgagtactt

SEQ ID NO: 1790977 - DNA, 15 bp, Homo sapiens
taggttgagtacttt

SEQ ID NO: 1790978 - DNA, 15 bp, Homo sapiens
aggttgagtactttt

SEQ ID NO: 1790979 - DNA, 15 bp, Homo sapiens
ggttgagtactttta

SEQ ID NO: 1790980 - DNA, 15 bp, Homo sapiens
gttgagtacttttag

SEQ ID NO: 1790981 - DNA, 15 bp, Homo sapiens
ttgagtacttttagt

SEQ ID NO: 1790982 - DNA, 15 bp, Homo sapiens
tgagtacttttagtt

SEQ ID NO: 1790983 - DNA, 15 bp, Homo sapiens
gagtacttttagttt

SEQ ID NO: 1790984 - DNA, 15 bp, Homo sapiens
agtacttttagtttg

SEQ ID NO: 1790985 - DNA, 15 bp, Homo sapiens
gtacttttagtttgc

SEQ ID NO: 1790986 - DNA, 15 bp, Homo sapiens
tacttttagtttgca

SEQ ID NO: 1790987 - DNA, 15 bp, Homo sapiens
acttttagtttgcag

SEQ ID NO: 1790988 - DNA, 15 bp, Homo sapiens
cttttagtttgcagt

SEQ ID NO: 1790989 - DNA, 15 bp, Homo sapiens
ttttagtttgcagtt

SEQ ID NO: 1790990 - DNA, 15 bp, Homo sapiens
tttagtttgcagttt

SEQ ID NO: 1790991 - DNA, 15 bp, Homo sapiens
ttagtttgcagttta

SEQ ID NO: 1790992 - DNA, 15 bp, Homo sapiens
tagtttgcagtttat

SEQ ID NO: 1790993 - DNA, 15 bp, Homo sapiens
agtttgcagtttatt

SEQ ID NO: 1790994 - DNA, 15 bp, Homo sapiens
gtttgcagtttattg

SEQ ID NO: 1790995 - DNA, 15 bp, Homo sapiens
tttgcagtttattgg

SEQ ID NO: 1790996 - DNA, 15 bp, Homo sapiens
ttgcagtttattgga

SEQ ID NO: 1790997 - DNA, 15 bp, Homo sapiens
tgcagtttattggat

SEQ ID NO: 1790998 - DNA, 15 bp, Homo sapiens
gcagtttattggatg

SEQ ID NO: 1790999 - DNA, 15 bp, Homo sapiens
cagtttattggatgt

SEQ ID NO: 1791000 - DNA, 15 bp, Homo sapiens
agtttattggatgtc

SEQ ID NO: 1791001 - DNA, 15 bp, Homo sapiens
gtttattggatgtcc

SEQ ID NO: 1791002 - DNA, 15 bp, Homo sapiens
tttattggatgtcct

SEQ ID NO: 1791003 - DNA, 15 bp, Homo sapiens
ttattggatgtcctg

SEQ ID NO: 1791004 - DNA, 15 bp, Homo sapiens
tattggatgtcctgt

SEQ ID NO: 1791005 - DNA, 15 bp, Homo sapiens
attggatgtcctgta

SEQ ID NO: 1791006 - DNA, 15 bp, Homo sapiens
ttggatgtcctgtaa

SEQ ID NO: 1791007 - DNA, 15 bp, Homo sapiens
tggatgtcctgtaag

SEQ ID NO: 1791008 - DNA, 15 bp, Homo sapiens
ggatgtcctgtaagt

SEQ ID NO: 1791009 - DNA, 15 bp, Homo sapiens
gatgtcctgtaagtt

SEQ ID NO: 1791010 - DNA, 15 bp, Homo sapiens
atgtcctgtaagttt

SEQ ID NO: 1791011 - DNA, 15 bp, Homo sapiens
tgtcctgtaagtttt

SEQ ID NO: 1791012 - DNA, 15 bp, Homo sapiens
gtcctgtaagttttg

SEQ ID NO: 1791013 - DNA, 15 bp, Homo sapiens
tcctgtaagttttgc

SEQ ID NO: 1791014 - DNA, 15 bp, Homo sapiens
cctgtaagttttgct

SEQ ID NO: 1791015 - DNA, 15 bp, Homo sapiens
ctgtaagttttgctt

SEQ ID NO: 1791016 - DNA, 15 bp, Homo sapiens
tgtaagttttgcttc

SEQ ID NO: 1791017 - DNA, 15 bp, Homo sapiens
gtaagttttgcttcc

SEQ ID NO: 1791018 - DNA, 15 bp, Homo sapiens
taagttttgcttcct

SEQ ID NO: 1791019 - DNA, 15 bp, Homo sapiens
aagttttgcttcctg

SEQ ID NO: 1791020 - DNA, 15 bp, Homo sapiens
agttttgcttcctgt

SEQ ID NO: 1791021 - DNA, 15 bp, Homo sapiens
gttttgcttcctgtg

SEQ ID NO: 1791022 - DNA, 15 bp, Homo sapiens
ttttgcttcctgtgg

SEQ ID NO: 1791023 - DNA, 15 bp, Homo sapiens
tttgcttcctgtgga

SEQ ID NO: 1791024 - DNA, 15 bp, Homo sapiens
ttgcttcctgtggat

SEQ ID NO: 1791025 - DNA, 15 bp, Homo sapiens
tgcttcctgtggatt

SEQ ID NO: 1791026 - DNA, 15 bp, Homo sapiens
gcttcctgtggattt

SEQ ID NO: 1791027 - DNA, 15 bp, Homo sapiens
cttcctgtggatttt

SEQ ID NO: 1791028 - DNA, 15 bp, Homo sapiens
ttcctgtggattttt

SEQ ID NO: 1791029 - DNA, 15 bp, Homo sapiens
tcctgtggatttttt

SEQ ID NO: 1791030 - DNA, 15 bp, Homo sapiens
cctgtggattttttt

SEQ ID NO: 1791031 - DNA, 15 bp, Homo sapiens
ctgtggatttttttc

SEQ ID NO: 1791032 - DNA, 15 bp, Homo sapiens
tgtggatttttttcc

SEQ ID NO: 1791033 - DNA, 15 bp, Homo sapiens
gtggatttttttcct

SEQ ID NO: 1791034 - DNA, 15 bp, Homo sapiens
tggatttttttcctt

SEQ ID NO: 1791035 - DNA, 15 bp, Homo sapiens
ggatttttttccttt

SEQ ID NO: 1791036 - DNA, 15 bp, Homo sapiens
gatttttttcctttt

SEQ ID NO: 1791037 - DNA, 15 bp, Homo sapiens
atttttttccttttg

SEQ ID NO: 1791038 - DNA, 15 bp, Homo sapiens
tttttttccttttgc

SEQ ID NO: 1791039 - DNA, 15 bp, Homo sapiens
ttttttccttttgct

SEQ ID NO: 1791040 - DNA, 15 bp, Homo sapiens
tttttccttttgctt

SEQ ID NO: 1791041 - DNA, 15 bp, Homo sapiens
ttttccttttgcttg

SEQ ID NO: 1791042 - DNA, 15 bp, Homo sapiens
tttccttttgcttgt

SEQ ID NO: 1791043 - DNA, 15 bp, Homo sapiens
ttccttttgcttgtt

SEQ ID NO: 1791044 - DNA, 15 bp, Homo sapiens
tccttttgcttgtta

SEQ ID NO: 1791045 - DNA, 15 bp, Homo sapiens
ccttttgcttgttat

SEQ ID NO: 1791046 - DNA, 15 bp, Homo sapiens
cttttgcttgttata

SEQ ID NO: 1791047 - DNA, 15 bp, Homo sapiens
ttttgcttgttatat

SEQ ID NO: 1791048 - DNA, 15 bp, Homo sapiens
tttgcttgttatatt

SEQ ID NO: 1791049 - DNA, 15 bp, Homo sapiens
ttgcttgttatatta

SEQ ID NO: 1791050 - DNA, 15 bp, Homo sapiens
tgcttgttatattaa

SEQ ID NO: 1791051 - DNA, 15 bp, Homo sapiens
gcttgttatattaaa

SEQ ID NO: 1791052 - DNA, 15 bp, Homo sapiens
cttgttatattaaat

SEQ ID NO: 1791053 - DNA, 15 bp, Homo sapiens
ttgttatattaaatg

SEQ ID NO: 1791054 - DNA, 15 bp, Homo sapiens
tgttatattaaatgt

SEQ ID NO: 1791055 - DNA, 15 bp, Homo sapiens
gttatattaaatgta

SEQ ID NO: 1791056 - DNA, 15 bp, Homo sapiens
ttatattaaatgtag

SEQ ID NO: 1791057 - DNA, 15 bp, Homo sapiens
tatattaaatgtaga

SEQ ID NO: 1791058 - DNA, 15 bp, Homo sapiens
atattaaatgtagat

SEQ ID NO: 1791059 - DNA, 15 bp, Homo sapiens
tattaaatgtagatt

SEQ ID NO: 1791060 - DNA, 15 bp, Homo sapiens
attaaatgtagatta

SEQ ID NO: 1791061 - DNA, 15 bp, Homo sapiens
ttaaatgtagattac

SEQ ID NO: 1791062 - DNA, 15 bp, Homo sapiens
taaatgtagattact

SEQ ID NO: 1791063 - DNA, 15 bp, Homo sapiens
aaatgtagattactg

SEQ ID NO: 1791064 - DNA, 15 bp, Homo sapiens
aatgtagattactgt

SEQ ID NO: 1791065 - DNA, 15 bp, Homo sapiens
atgtagattactgtc

SEQ ID NO: 1791066 - DNA, 15 bp, Homo sapiens
tgtagattactgtca

SEQ ID NO: 1791067 - DNA, 15 bp, Homo sapiens
gtagattactgtcaa

SEQ ID NO: 1791068 - DNA, 15 bp, Homo sapiens
tagattactgtcaat

SEQ ID NO: 1791069 - DNA, 15 bp, Homo sapiens
agattactgtcaatt

SEQ ID NO: 1791070 - DNA, 15 bp, Homo sapiens
gattactgtcaatta

SEQ ID NO: 1791071 - DNA, 15 bp, Homo sapiens
attactgtcaattaa

SEQ ID NO: 1791072 - DNA, 15 bp, Homo sapiens
ttactgtcaattaag

SEQ ID NO: 1791073 - DNA, 15 bp, Homo sapiens
tactgtcaattaagt

SEQ ID NO: 1791074 - DNA, 15 bp, Homo sapiens
actgtcaattaagtc

SEQ ID NO: 1791075 - DNA, 15 bp, Homo sapiens
ctgtcaattaagtct

SEQ ID NO: 1791076 - DNA, 15 bp, Homo sapiens
tgtcaattaagtctt

SEQ ID NO: 1791077 - DNA, 15 bp, Homo sapiens
gtcaattaagtcttt

SEQ ID NO: 1791078 - DNA, 15 bp, Homo sapiens
tcaattaagtcttta

SEQ ID NO: 1791079 - DNA, 15 bp, Homo sapiens
caattaagtctttag

SEQ ID NO: 1791080 - DNA, 15 bp, Homo sapiens
aattaagtctttaga

SEQ ID NO: 1791081 - DNA, 15 bp, Homo sapiens
attaagtctttagag

SEQ ID NO: 1791082 - DNA, 15 bp, Homo sapiens
ttaagtctttagagg

SEQ ID NO: 1791083 - DNA, 15 bp, Homo sapiens
taagtctttagaggt

SEQ ID NO: 1791084 - DNA, 15 bp, Homo sapiens
aagtctttagaggtc

SEQ ID NO: 1791085 - DNA, 15 bp, Homo sapiens
agtctttagaggtcc

SEQ ID NO: 1791086 - DNA, 15 bp, Homo sapiens
gtctttagaggtcca

SEQ ID NO: 1791087 - DNA, 15 bp, Homo sapiens
tctttagaggtccat

SEQ ID NO: 1791088 - DNA, 15 bp, Homo sapiens
ctttagaggtccatc

SEQ ID NO: 1791089 - DNA, 15 bp, Homo sapiens
tttagaggtccatcc

SEQ ID NO: 1791090 - DNA, 15 bp, Homo sapiens
ttagaggtccatccc

SEQ ID NO: 1791091 - DNA, 15 bp, Homo sapiens
tagaggtccatccct

SEQ ID NO: 1791092 - DNA, 15 bp, Homo sapiens
agaggtccatcccta

SEQ ID NO: 1791093 - DNA, 15 bp, Homo sapiens
gaggtccatccctaa

SEQ ID NO: 1791094 - DNA, 15 bp, Homo sapiens
aggtccatccctaat

SEQ ID NO: 1791095 - DNA, 15 bp, Homo sapiens
ggtccatccctaatc

SEQ ID NO: 1791096 - DNA, 15 bp, Homo sapiens
gtccatccctaatcc

SEQ ID NO: 1791097 - DNA, 15 bp, Homo sapiens
tccatccctaatcct

SEQ ID NO: 1791098 - DNA, 15 bp, Homo sapiens
ccatccctaatcctg

SEQ ID NO: 1791099 - DNA, 15 bp, Homo sapiens
catccctaatcctgc

SEQ ID NO: 1791100 - DNA, 15 bp, Homo sapiens
atccctaatcctgct

SEQ ID NO: 1791101 - DNA, 15 bp, Homo sapiens
tccctaatcctgctg

SEQ ID NO: 1791102 - DNA, 15 bp, Homo sapiens
ccctaatcctgctgg

SEQ ID NO: 1791103 - DNA, 15 bp, Homo sapiens
cctaatcctgctggc

SEQ ID NO: 1791104 - DNA, 15 bp, Homo sapiens
ctaatcctgctggcg

SEQ ID NO: 1791105 - DNA, 15 bp, Homo sapiens
taatcctgctggcgg

SEQ ID NO: 1791106 - DNA, 15 bp, Homo sapiens
aatcctgctggcggc

SEQ ID NO: 1791107 - DNA, 15 bp, Homo sapiens
atcctgctggcggcc

SEQ ID NO: 1791108 - DNA, 15 bp, Homo sapiens
tcctgctggcggcct

SEQ ID NO: 1791109 - DNA, 15 bp, Homo sapiens
cctgctggcggcctc

SEQ ID NO: 1791110 - DNA, 15 bp, Homo sapiens
ctgctggcggcctct

SEQ ID NO: 1791111 - DNA, 15 bp, Homo sapiens
tgctggcggcctctt

SEQ ID NO: 1791112 - DNA, 15 bp, Homo sapiens
gctggcggcctcttt

SEQ ID NO: 1791113 - DNA, 15 bp, Homo sapiens
ctggcggcctcttta

SEQ ID NO: 1791114 - DNA, 15 bp, Homo sapiens
tggcggcctctttac

SEQ ID NO: 1791115 - DNA, 15 bp, Homo sapiens
ggcggcctctttacc

SEQ ID NO: 1791116 - DNA, 15 bp, Homo sapiens
gcggcctctttacca

SEQ ID NO: 1791117 - DNA, 15 bp, Homo sapiens
cggcctctttaccac

SEQ ID NO: 1791118 - DNA, 15 bp, Homo sapiens
ggcctctttaccacc

SEQ ID NO: 1791119 - DNA, 15 bp, Homo sapiens
gcctctttaccacct

SEQ ID NO: 1791120 - DNA, 15 bp, Homo sapiens
cctctttaccacctc

SEQ ID NO: 1791121 - DNA, 15 bp, Homo sapiens
ctctttaccacctca

SEQ ID NO: 1791122 - DNA, 15 bp, Homo sapiens
tctttaccacctcac

SEQ ID NO: 1791123 - DNA, 15 bp, Homo sapiens
ctttaccacctcacc

SEQ ID NO: 1791124 - DNA, 15 bp, Homo sapiens
tttaccacctcacct

SEQ ID NO: 1791125 - DNA, 15 bp, Homo sapiens
ttaccacctcacctt

SEQ ID NO: 1791126 - DNA, 15 bp, Homo sapiens
taccacctcaccttg

SEQ ID NO: 1791127 - DNA, 15 bp, Homo sapiens
accacctcaccttgg

SEQ ID NO: 1791128 - DNA, 15 bp, Homo sapiens
ccacctcaccttggg

SEQ ID NO: 1791129 - DNA, 15 bp, Homo sapiens
cacctcaccttgggc

SEQ ID NO: 1791130 - DNA, 15 bp, Homo sapiens
acctcaccttgggca

SEQ ID NO: 1791131 - DNA, 15 bp, Homo sapiens
cctcaccttgggcag

SEQ ID NO: 1791132 - DNA, 15 bp, Homo sapiens
ctcaccttgggcagg

SEQ ID NO: 1791133 - DNA, 15 bp, Homo sapiens
tcaccttgggcaggt

SEQ ID NO: 1791134 - DNA, 15 bp, Homo sapiens
caccttgggcaggtc

SEQ ID NO: 1791135 - DNA, 15 bp, Homo sapiens
accttgggcaggtct

SEQ ID NO: 1791136 - DNA, 15 bp, Homo sapiens
ccttgggcaggtctc

SEQ ID NO: 1791137 - DNA, 15 bp, Homo sapiens
cttgggcaggtctct

SEQ ID NO: 1791138 - DNA, 15 bp, Homo sapiens
ttgggcaggtctcta

SEQ ID NO: 1791139 - DNA, 15 bp, Homo sapiens
tgggcaggtctctat

SEQ ID NO: 1791140 - DNA, 15 bp, Homo sapiens
gggcaggtctctatc

SEQ ID NO: 1791141 - DNA, 15 bp, Homo sapiens
ggcaggtctctatct

SEQ ID NO: 1791142 - DNA, 15 bp, Homo sapiens
gcaggtctctatctg

SEQ ID NO: 1791143 - DNA, 15 bp, Homo sapiens
caggtctctatctgt

SEQ ID NO: 1791144 - DNA, 15 bp, Homo sapiens
aggtctctatctgta

SEQ ID NO: 1791145 - DNA, 15 bp, Homo sapiens
ggtctctatctgtac

SEQ ID NO: 1791146 - DNA, 15 bp, Homo sapiens
gtctctatctgtact

SEQ ID NO: 1791147 - DNA, 15 bp, Homo sapiens
tctctatctgtactt

SEQ ID NO: 1791148 - DNA, 15 bp, Homo sapiens
ctctatctgtacttc

SEQ ID NO: 1791149 - DNA, 15 bp, Homo sapiens
tctatctgtacttca

SEQ ID NO: 1791150 - DNA, 15 bp, Homo sapiens
ctatctgtacttcac

SEQ ID NO: 1791151 - DNA, 15 bp, Homo sapiens
tatctgtacttcaca

SEQ ID NO: 1791152 - DNA, 15 bp, Homo sapiens
atctgtacttcacaa

SEQ ID NO: 1791153 - DNA, 15 bp, Homo sapiens
tctgtacttcacaag

SEQ ID NO: 1791154 - DNA, 15 bp, Homo sapiens
ctgtacttcacaagg

SEQ ID NO: 1791155 - DNA, 15 bp, Homo sapiens
tgtacttcacaaggg

SEQ ID NO: 1791156 - DNA, 15 bp, Homo sapiens
gtacttcacaagggt

SEQ ID NO: 1791157 - DNA, 15 bp, Homo sapiens
tacttcacaagggtg

SEQ ID NO: 1791158 - DNA, 15 bp, Homo sapiens
acttcacaagggtgc

SEQ ID NO: 1791159 - DNA, 15 bp, Homo sapiens
cttcacaagggtgct

SEQ ID NO: 1791160 - DNA, 15 bp, Homo sapiens
ttcacaagggtgctg

SEQ ID NO: 1791161 - DNA, 15 bp, Homo sapiens
tcacaagggtgctgt

SEQ ID NO: 1791162 - DNA, 15 bp, Homo sapiens
cacaagggtgctgtg

SEQ ID NO: 1791163 - DNA, 15 bp, Homo sapiens
acaagggtgctgtgg

SEQ ID NO: 1791164 - DNA, 15 bp, Homo sapiens
caagggtgctgtgga

SEQ ID NO: 1791165 - DNA, 15 bp, Homo sapiens
aagggtgctgtggat

SEQ ID NO: 1791166 - DNA, 15 bp, Homo sapiens
agggtgctgtggatc

SEQ ID NO: 1791167 - DNA, 15 bp, Homo sapiens
gggtgctgtggatca

SEQ ID NO: 1791168 - DNA, 15 bp, Homo sapiens
ggtgctgtggatcag

SEQ ID NO: 1791169 - DNA, 15 bp, Homo sapiens
gtgctgtggatcagg

SEQ ID NO: 1791170 - DNA, 15 bp, Homo sapiens
tgctgtggatcaggg

SEQ ID NO: 1791171 - DNA, 15 bp, Homo sapiens
gctgtggatcaggga

SEQ ID NO: 1791172 - DNA, 15 bp, Homo sapiens
ctgtggatcagggaa

SEQ ID NO: 1791173 - DNA, 15 bp, Homo sapiens
tgtggatcagggaaa

SEQ ID NO: 1791174 - DNA, 15 bp, Homo sapiens
gtggatcagggaaat

SEQ ID NO: 1791175 - DNA, 15 bp, Homo sapiens
tggatcagggaaatg

SEQ ID NO: 1791176 - DNA, 15 bp, Homo sapiens
ggatcagggaaatga

SEQ ID NO: 1791177 - DNA, 15 bp, Homo sapiens
gatcagggaaatgat

SEQ ID NO: 1791178 - DNA, 15 bp, Homo sapiens
atcagggaaatgatg

SEQ ID NO: 1791179 - DNA, 15 bp, Homo sapiens
tcagggaaatgatga

SEQ ID NO: 1791180 - DNA, 15 bp, Homo sapiens
cagggaaatgatgag

SEQ ID NO: 1791181 - DNA, 15 bp, Homo sapiens
agggaaatgatgagt

SEQ ID NO: 1791182 - DNA, 15 bp, Homo sapiens
gggaaatgatgagta

SEQ ID NO: 1791183 - DNA, 15 bp, Homo sapiens
ggaaatgatgagtat

SEQ ID NO: 1791184 - DNA, 15 bp, Homo sapiens
gaaatgatgagtatg

SEQ ID NO: 1791185 - DNA, 15 bp, Homo sapiens
aaatgatgagtatga

SEQ ID NO: 1791186 - DNA, 15 bp, Homo sapiens
aatgatgagtatgaa

SEQ ID NO: 1791187 - DNA, 15 bp, Homo sapiens
atgatgagtatgaag

SEQ ID NO: 1791188 - DNA, 15 bp, Homo sapiens
tgatgagtatgaagc

SEQ ID NO: 1791189 - DNA, 15 bp, Homo sapiens
gatgagtatgaagct

SEQ ID NO: 1791190 - DNA, 15 bp, Homo sapiens
atgagtatgaagctg

SEQ ID NO: 1791191 - DNA, 15 bp, Homo sapiens
tgagtatgaagctgt

SEQ ID NO: 1791192 - DNA, 15 bp, Homo sapiens
gagtatgaagctgtt

SEQ ID NO: 1791193 - DNA, 15 bp, Homo sapiens
agtatgaagctgttt

SEQ ID NO: 1791194 - DNA, 15 bp, Homo sapiens
gtatgaagctgtttt

SEQ ID NO: 1791195 - DNA, 15 bp, Homo sapiens
tatgaagctgtttta

SEQ ID NO: 1791196 - DNA, 15 bp, Homo sapiens
atgaagctgttttaa

SEQ ID NO: 1791197 - DNA, 15 bp, Homo sapiens
tgaagctgttttaaa

SEQ ID NO: 1791198 - DNA, 15 bp, Homo sapiens
gaagctgttttaaat

SEQ ID NO: 1791199 - DNA, 15 bp, Homo sapiens
aagctgttttaaatt

SEQ ID NO: 1791200 - DNA, 15 bp, Homo sapiens
agctgttttaaattc

SEQ ID NO: 1791201 - DNA, 15 bp, Homo sapiens
gctgttttaaattct

SEQ ID NO: 1791202 - DNA, 15 bp, Homo sapiens
ctgttttaaattctc

SEQ ID NO: 1791203 - DNA, 15 bp, Homo sapiens
tgttttaaattctca

SEQ ID NO: 1791204 - DNA, 15 bp, Homo sapiens
gttttaaattctcag

SEQ ID NO: 1791205 - DNA, 15 bp, Homo sapiens
ttttaaattctcaga

SEQ ID NO: 1791206 - DNA, 15 bp, Homo sapiens
tttaaattctcagat

SEQ ID NO: 1791207 - DNA, 15 bp, Homo sapiens
ttaaattctcagatg

SEQ ID NO: 1791208 - DNA, 15 bp, Homo sapiens
taaattctcagatga

SEQ ID NO: 1791209 - DNA, 15 bp, Homo sapiens
aaattctcagatgaa

SEQ ID NO: 1791210 - DNA, 15 bp, Homo sapiens
aattctcagatgaaa

SEQ ID NO: 1791211 - DNA, 15 bp, Homo sapiens
attctcagatgaaag

SEQ ID NO: 1791212 - DNA, 15 bp, Homo sapiens
ttctcagatgaaagg

SEQ ID NO: 1791213 - DNA, 15 bp, Homo sapiens
tctcagatgaaaggt

SEQ ID NO: 1791214 - DNA, 15 bp, Homo sapiens
ctcagatgaaaggtt

SEQ ID NO: 1791215 - DNA, 15 bp, Homo sapiens
tcagatgaaaggttg

SEQ ID NO: 1791216 - DNA, 15 bp, Homo sapiens
cagatgaaaggttgt

SEQ ID NO: 1791217 - DNA, 15 bp, Homo sapiens
agatgaaaggttgta

SEQ ID NO: 1791218 - DNA, 15 bp, Homo sapiens
gatgaaaggttgtat

SEQ ID NO: 1791219 - DNA, 15 bp, Homo sapiens
atgaaaggttgtatg

SEQ ID NO: 1791220 - DNA, 15 bp, Homo sapiens
tgaaaggttgtatgc

SEQ ID NO: 1791221 - DNA, 15 bp, Homo sapiens
gaaaggttgtatgca

SEQ ID NO: 1791222 - DNA, 15 bp, Homo sapiens
aaaggttgtatgcaa

SEQ ID NO: 1791223 - DNA, 15 bp, Homo sapiens
aaggttgtatgcaac

SEQ ID NO: 1791224 - DNA, 15 bp, Homo sapiens
aggttgtatgcaact

SEQ ID NO: 1791225 - DNA, 15 bp, Homo sapiens
ggttgtatgcaacta

SEQ ID NO: 1791226 - DNA, 15 bp, Homo sapiens
gttgtatgcaactac

SEQ ID NO: 1791227 - DNA, 15 bp, Homo sapiens
ttgtatgcaactaca

SEQ ID NO: 1791228 - DNA, 15 bp, Homo sapiens
tgtatgcaactacaa

SEQ ID NO: 1791229 - DNA, 15 bp, Homo sapiens
gtatgcaactacaaa

SEQ ID NO: 1791230 - DNA, 15 bp, Homo sapiens
tatgcaactacaaat

SEQ ID NO: 1791231 - DNA, 15 bp, Homo sapiens
atgcaactacaaatc

SEQ ID NO: 1791232 - DNA, 15 bp, Homo sapiens
tgcaactacaaatca

SEQ ID NO: 1791233 - DNA, 15 bp, Homo sapiens
gcaactacaaatcat

SEQ ID NO: 1791234 - DNA, 15 bp, Homo sapiens
caactacaaatcatt

SEQ ID NO: 1791235 - DNA, 15 bp, Homo sapiens
aactacaaatcatta

SEQ ID NO: 1791236 - DNA, 15 bp, Homo sapiens
actacaaatcattat

SEQ ID NO: 1791237 - DNA, 15 bp, Homo sapiens
ctacaaatcattata

SEQ ID NO: 1791238 - DNA, 15 bp, Homo sapiens
tacaaatcattatat

SEQ ID NO: 1791239 - DNA, 15 bp, Homo sapiens
acaaatcattatatt

SEQ ID NO: 1791240 - DNA, 15 bp, Homo sapiens
caaatcattatatta

SEQ ID NO: 1791241 - DNA, 15 bp, Homo sapiens
aaatcattatattat

SEQ ID NO: 1791242 - DNA, 15 bp, Homo sapiens
aatcattatattatc

SEQ ID NO: 1791243 - DNA, 15 bp, Homo sapiens
atcattatattatct

SEQ ID NO: 1791244 - DNA, 15 bp, Homo sapiens
tcattatattatctt

SEQ ID NO: 1791245 - DNA, 15 bp, Homo sapiens
cattatattatcttc

SEQ ID NO: 1791246 - DNA, 15 bp, Homo sapiens
attatattatcttcc

SEQ ID NO: 1791247 - DNA, 15 bp, Homo sapiens
ttatattatcttcca

SEQ ID NO: 1791248 - DNA, 15 bp, Homo sapiens
tatattatcttccac

SEQ ID NO: 1791249 - DNA, 15 bp, Homo sapiens
atattatcttccaca

SEQ ID NO: 1791250 - DNA, 15 bp, Homo sapiens
tattatcttccacat

SEQ ID NO: 1791251 - DNA, 15 bp, Homo sapiens
attatcttccacatc

SEQ ID NO: 1791252 - DNA, 15 bp, Homo sapiens
ttatcttccacatcc

SEQ ID NO: 1791253 - DNA, 15 bp, Homo sapiens
tatcttccacatcca

SEQ ID NO: 1791254 - DNA, 15 bp, Homo sapiens
atcttccacatccaa

SEQ ID NO: 1791255 - DNA, 15 bp, Homo sapiens
tcttccacatccaac

SEQ ID NO: 1791256 - DNA, 15 bp, Homo sapiens
cttccacatccaacc

SEQ ID NO: 1791257 - DNA, 15 bp, Homo sapiens
ttccacatccaacca

SEQ ID NO: 1791258 - DNA, 15 bp, Homo sapiens
tccacatccaaccac

SEQ ID NO: 1791259 - DNA, 15 bp, Homo sapiens
ccacatccaaccaca

SEQ ID NO: 1791260 - DNA, 15 bp, Homo sapiens
cacatccaaccacaa

SEQ ID NO: 1791261 - DNA, 15 bp, Homo sapiens
acatccaaccacaag

SEQ ID NO: 1791262 - DNA, 15 bp, Homo sapiens
catccaaccacaagt

SEQ ID NO: 1791263 - DNA, 15 bp, Homo sapiens
atccaaccacaagtg

SEQ ID NO: 1791264 - DNA, 15 bp, Homo sapiens
tccaaccacaagtgc

SEQ ID NO: 1791265 - DNA, 15 bp, Homo sapiens
ccaaccacaagtgct

SEQ ID NO: 1791266 - DNA, 15 bp, Homo sapiens
caaccacaagtgctc

SEQ ID NO: 1791267 - DNA, 15 bp, Homo sapiens
aaccacaagtgctct

SEQ ID NO: 1791268 - DNA, 15 bp, Homo sapiens
accacaagtgctctc

SEQ ID NO: 1791269 - DNA, 15 bp, Homo sapiens
ccacaagtgctctct

SEQ ID NO: 1791270 - DNA, 15 bp, Homo sapiens
cacaagtgctctcta

SEQ ID NO: 1791271 - DNA, 15 bp, Homo sapiens
acaagtgctctctag

SEQ ID NO: 1791272 - DNA, 15 bp, Homo sapiens
caagtgctctctagc

SEQ ID NO: 1791273 - DNA, 15 bp, Homo sapiens
aagtgctctctagct

SEQ ID NO: 1791274 - DNA, 15 bp, Homo sapiens
agtgctctctagctt

SEQ ID NO: 1791275 - DNA, 15 bp, Homo sapiens
gtgctctctagcttt

SEQ ID NO: 1791276 - DNA, 15 bp, Homo sapiens
tgctctctagctttg

SEQ ID NO: 1791277 - DNA, 15 bp, Homo sapiens
gctctctagctttga

SEQ ID NO: 1791278 - DNA, 15 bp, Homo sapiens
ctctctagctttgaa

SEQ ID NO: 1791279 - DNA, 15 bp, Homo sapiens
tctctagctttgaag

SEQ ID NO: 1791280 - DNA, 15 bp, Homo sapiens
ctctagctttgaagt

SEQ ID NO: 1791281 - DNA, 15 bp, Homo sapiens
tctagctttgaagtg

SEQ ID NO: 1791282 - DNA, 15 bp, Homo sapiens
ctagctttgaagtgc

SEQ ID NO: 1791283 - DNA, 15 bp, Homo sapiens
tagctttgaagtgct

SEQ ID NO: 1791284 - DNA, 15 bp, Homo sapiens
agctttgaagtgctt

SEQ ID NO: 1791285 - DNA, 15 bp, Homo sapiens
gctttgaagtgcttc

SEQ ID NO: 1791286 - DNA, 15 bp, Homo sapiens
ctttgaagtgcttca

SEQ ID NO: 1791287 - DNA, 15 bp, Homo sapiens
tttgaagtgcttcag

SEQ ID NO: 1791288 - DNA, 15 bp, Homo sapiens
ttgaagtgcttcagt

SEQ ID NO: 1791289 - DNA, 15 bp, Homo sapiens
tgaagtgcttcagtt

SEQ ID NO: 1791290 - DNA, 15 bp, Homo sapiens
gaagtgcttcagttg

SEQ ID NO: 1791291 - DNA, 15 bp, Homo sapiens
aagtgcttcagttga

SEQ ID NO: 1791292 - DNA, 15 bp, Homo sapiens
agtgcttcagttgac

SEQ ID NO: 1791293 - DNA, 15 bp, Homo sapiens
gtgcttcagttgact

SEQ ID NO: 1791294 - DNA, 15 bp, Homo sapiens
tgcttcagttgacta

SEQ ID NO: 1791295 - DNA, 15 bp, Homo sapiens
gcttcagttgactaa

SEQ ID NO: 1791296 - DNA, 15 bp, Homo sapiens
cttcagttgactaat

SEQ ID NO: 1791297 - DNA, 15 bp, Homo sapiens
ttcagttgactaatt

SEQ ID NO: 1791298 - DNA, 15 bp, Homo sapiens
tcagttgactaatta

SEQ ID NO: 1791299 - DNA, 15 bp, Homo sapiens
cagttgactaattat

SEQ ID NO: 1791300 - DNA, 15 bp, Homo sapiens
agttgactaattata

SEQ ID NO: 1791301 - DNA, 15 bp, Homo sapiens
gttgactaattatat

SEQ ID NO: 1791302 - DNA, 15 bp, Homo sapiens
ttgactaattatatg

SEQ ID NO: 1791303 - DNA, 15 bp, Homo sapiens
tgactaattatatgt

SEQ ID NO: 1791304 - DNA, 15 bp, Homo sapiens
gactaattatatgtt

SEQ ID NO: 1791305 - DNA, 15 bp, Homo sapiens
actaattatatgtta

SEQ ID NO: 1791306 - DNA, 15 bp, Homo sapiens
ctaattatatgttat

SEQ ID NO: 1791307 - DNA, 15 bp, Homo sapiens
taattatatgttatc

SEQ ID NO: 1791308 - DNA, 15 bp, Homo sapiens
aattatatgttatca

SEQ ID NO: 1791309 - DNA, 15 bp, Homo sapiens
attatatgttatcat

SEQ ID NO: 1791310 - DNA, 15 bp, Homo sapiens
ttatatgttatcatg

SEQ ID NO: 1791311 - DNA, 15 bp, Homo sapiens
tatatgttatcatgg

SEQ ID NO: 1791312 - DNA, 15 bp, Homo sapiens
atatgttatcatggg

SEQ ID NO: 1791313 - DNA, 15 bp, Homo sapiens
tatgttatcatgggc

SEQ ID NO: 1791314 - DNA, 15 bp, Homo sapiens
atgttatcatgggct

SEQ ID NO: 1791315 - DNA, 15 bp, Homo sapiens
tgttatcatgggcta

SEQ ID NO: 1791316 - DNA, 15 bp, Homo sapiens
gttatcatgggctat

SEQ ID NO: 1791317 - DNA, 15 bp, Homo sapiens
ttatcatgggctatt

SEQ ID NO: 1791318 - DNA, 15 bp, Homo sapiens
tatcatgggctattt

SEQ ID NO: 1791319 - DNA, 15 bp, Homo sapiens
atcatgggctatttg

SEQ ID NO: 1791320 - DNA, 15 bp, Homo sapiens
tcatgggctatttga

SEQ ID NO: 1791321 - DNA, 15 bp, Homo sapiens
catgggctatttgaa

SEQ ID NO: 1791322 - DNA, 15 bp, Homo sapiens
atgggctatttgaaa

SEQ ID NO: 1791323 - DNA, 15 bp, Homo sapiens
tgggctatttgaaac

SEQ ID NO: 1791324 - DNA, 15 bp, Homo sapiens
gggctatttgaaact

SEQ ID NO: 1791325 - DNA, 15 bp, Homo sapiens
ggctatttgaaactg

SEQ ID NO: 1791326 - DNA, 15 bp, Homo sapiens
gctatttgaaactga

SEQ ID NO: 1791327 - DNA, 15 bp, Homo sapiens
ctatttgaaactgac

SEQ ID NO: 1791328 - DNA, 15 bp, Homo sapiens
tatttgaaactgact

SEQ ID NO: 1791329 - DNA, 15 bp, Homo sapiens
atttgaaactgactt

SEQ ID NO: 1791330 - DNA, 15 bp, Homo sapiens
tttgaaactgacttt

SEQ ID NO: 1791331 - DNA, 15 bp, Homo sapiens
ttgaaactgacttta

SEQ ID NO: 1791332 - DNA, 15 bp, Homo sapiens
tgaaactgactttat

SEQ ID NO: 1791333 - DNA, 15 bp, Homo sapiens
gaaactgactttatt

SEQ ID NO: 1791334 - DNA, 15 bp, Homo sapiens
aaactgactttattt

SEQ ID NO: 1791335 - DNA, 15 bp, Homo sapiens
aactgactttatttg

SEQ ID NO: 1791336 - DNA, 15 bp, Homo sapiens
actgactttatttgt

SEQ ID NO: 1791337 - DNA, 15 bp, Homo sapiens
ctgactttatttgtg

SEQ ID NO: 1791338 - DNA, 15 bp, Homo sapiens
tgactttatttgtgt

SEQ ID NO: 1791339 - DNA, 15 bp, Homo sapiens
gactttatttgtgtg

SEQ ID NO: 1791340 - DNA, 15 bp, Homo sapiens
actttatttgtgtga

SEQ ID NO: 1791341 - DNA, 15 bp, Homo sapiens
ctttatttgtgtgaa

SEQ ID NO: 1791342 - DNA, 15 bp, Homo sapiens
tttatttgtgtgaag

SEQ ID NO: 1791343 - DNA, 15 bp, Homo sapiens
ttatttgtgtgaagt

SEQ ID NO: 1791344 - DNA, 15 bp, Homo sapiens
tatttgtgtgaagta

SEQ ID NO: 1791345 - DNA, 15 bp, Homo sapiens
atttgtgtgaagtag

SEQ ID NO: 1791346 - DNA, 15 bp, Homo sapiens
tttgtgtgaagtagg

SEQ ID NO: 1791347 - DNA, 15 bp, Homo sapiens
ttgtgtgaagtagga

SEQ ID NO: 1791348 - DNA, 15 bp, Homo sapiens
tgtgtgaagtaggag

SEQ ID NO: 1791349 - DNA, 15 bp, Homo sapiens
gtgtgaagtaggagg

SEQ ID NO: 1791350 - DNA, 15 bp, Homo sapiens
tgtgaagtaggaggc

SEQ ID NO: 1791351 - DNA, 15 bp, Homo sapiens
gtgaagtaggaggca

SEQ ID NO: 1791352 - DNA, 15 bp, Homo sapiens
tgaagtaggaggcag

SEQ ID NO: 1791353 - DNA, 15 bp, Homo sapiens
gaagtaggaggcaga

SEQ ID NO: 1791354 - DNA, 15 bp, Homo sapiens
aagtaggaggcagat

SEQ ID NO: 1791355 - DNA, 15 bp, Homo sapiens
agtaggaggcagatt

SEQ ID NO: 1791356 - DNA, 15 bp, Homo sapiens
gtaggaggcagatta

SEQ ID NO: 1791357 - DNA, 15 bp, Homo sapiens
taggaggcagattag

SEQ ID NO: 1791358 - DNA, 15 bp, Homo sapiens
aggaggcagattagc

SEQ ID NO: 1791359 - DNA, 15 bp, Homo sapiens
ggaggcagattagct

SEQ ID NO: 1791360 - DNA, 15 bp, Homo sapiens
gaggcagattagcta

SEQ ID NO: 1791361 - DNA, 15 bp, Homo sapiens
aggcagattagctag

SEQ ID NO: 1791362 - DNA, 15 bp, Homo sapiens
ggcagattagctagt

SEQ ID NO: 1791363 - DNA, 15 bp, Homo sapiens
gcagattagctagta

SEQ ID NO: 1791364 - DNA, 15 bp, Homo sapiens
cagattagctagtat

SEQ ID NO: 1791365 - DNA, 15 bp, Homo sapiens
agattagctagtata

SEQ ID NO: 1791366 - DNA, 15 bp, Homo sapiens
gattagctagtatag

SEQ ID NO: 1791367 - DNA, 15 bp, Homo sapiens
attagctagtatagt

SEQ ID NO: 1791368 - DNA, 15 bp, Homo sapiens
ttagctagtatagtt

SEQ ID NO: 1791369 - DNA, 15 bp, Homo sapiens
tagctagtatagtta

SEQ ID NO: 1791370 - DNA, 15 bp, Homo sapiens
agctagtatagttaa

SEQ ID NO: 1791371 - DNA, 15 bp, Homo sapiens
gctagtatagttaat

SEQ ID NO: 1791372 - DNA, 15 bp, Homo sapiens
ctagtatagttaatg

SEQ ID NO: 1791373 - DNA, 15 bp, Homo sapiens
tagtatagttaatgt

SEQ ID NO: 1791374 - DNA, 15 bp, Homo sapiens
agtatagttaatgta

SEQ ID NO: 1791375 - DNA, 15 bp, Homo sapiens
gtatagttaatgtag

SEQ ID NO: 1791376 - DNA, 15 bp, Homo sapiens
tatagttaatgtagt

SEQ ID NO: 1791377 - DNA, 15 bp, Homo sapiens
atagttaatgtagtc

SEQ ID NO: 1791378 - DNA, 15 bp, Homo sapiens
tagttaatgtagtct

SEQ ID NO: 1791379 - DNA, 15 bp, Homo sapiens
agttaatgtagtctc

SEQ ID NO: 1791380 - DNA, 15 bp, Homo sapiens
gttaatgtagtctca

SEQ ID NO: 1791381 - DNA, 15 bp, Homo sapiens
ttaatgtagtctcat

SEQ ID NO: 1791382 - DNA, 15 bp, Homo sapiens
taatgtagtctcatc

SEQ ID NO: 1791383 - DNA, 15 bp, Homo sapiens
aatgtagtctcatct

SEQ ID NO: 1791384 - DNA, 15 bp, Homo sapiens
atgtagtctcatctc

SEQ ID NO: 1791385 - DNA, 15 bp, Homo sapiens
tgtagtctcatctca

SEQ ID NO: 1791386 - DNA, 15 bp, Homo sapiens
gtagtctcatctcag

SEQ ID NO: 1791387 - DNA, 15 bp, Homo sapiens
tagtctcatctcaga

SEQ ID NO: 1791388 - DNA, 15 bp, Homo sapiens
agtctcatctcagaa

SEQ ID NO: 1791389 - DNA, 15 bp, Homo sapiens
gtctcatctcagaaa

SEQ ID NO: 1791390 - DNA, 15 bp, Homo sapiens
tctcatctcagaaat

SEQ ID NO: 1791391 - DNA, 15 bp, Homo sapiens
ctcatctcagaaatt

SEQ ID NO: 1791392 - DNA, 15 bp, Homo sapiens
tcatctcagaaatta

SEQ ID NO: 1791393 - DNA, 15 bp, Homo sapiens
catctcagaaattat

SEQ ID NO: 1791394 - DNA, 15 bp, Homo sapiens
atctcagaaattatc

SEQ ID NO: 1791395 - DNA, 15 bp, Homo sapiens
tctcagaaattatca

SEQ ID NO: 1791396 - DNA, 15 bp, Homo sapiens
ctcagaaattatcag

SEQ ID NO: 1791397 - DNA, 15 bp, Homo sapiens
tcagaaattatcagc

SEQ ID NO: 1791398 - DNA, 15 bp, Homo sapiens
cagaaattatcagcc

SEQ ID NO: 1791399 - DNA, 15 bp, Homo sapiens
agaaattatcagccc

SEQ ID NO: 1791400 - DNA, 15 bp, Homo sapiens
gaaattatcagccca

SEQ ID NO: 1791401 - DNA, 15 bp, Homo sapiens
aaattatcagcccat

SEQ ID NO: 1791402 - DNA, 15 bp, Homo sapiens
aattatcagcccata

SEQ ID NO: 1791403 - DNA, 15 bp, Homo sapiens
attatcagcccatat

SEQ ID NO: 1791404 - DNA, 15 bp, Homo sapiens
ttatcagcccatatg

SEQ ID NO: 1791405 - DNA, 15 bp, Homo sapiens
tatcagcccatatgg

SEQ ID NO: 1791406 - DNA, 15 bp, Homo sapiens
atcagcccatatggt

SEQ ID NO: 1791407 - DNA, 15 bp, Homo sapiens
tcagcccatatggtt

SEQ ID NO: 1791408 - DNA, 15 bp, Homo sapiens
cagcccatatggttg

SEQ ID NO: 1791409 - DNA, 15 bp, Homo sapiens
agcccatatggttgt

SEQ ID NO: 1791410 - DNA, 15 bp, Homo sapiens
gcccatatggttgta

SEQ ID NO: 1791411 - DNA, 15 bp, Homo sapiens
cccatatggttgtac

SEQ ID NO: 1791412 - DNA, 15 bp, Homo sapiens
ccatatggttgtacc

SEQ ID NO: 1791413 - DNA, 15 bp, Homo sapiens
catatggttgtacct

SEQ ID NO: 1791414 - DNA, 15 bp, Homo sapiens
atatggttgtaccta

SEQ ID NO: 1791415 - DNA, 15 bp, Homo sapiens
tatggttgtacctaa

SEQ ID NO: 1791416 - DNA, 15 bp, Homo sapiens
atggttgtacctaat

SEQ ID NO: 1791417 - DNA, 15 bp, Homo sapiens
tggttgtacctaatg

SEQ ID NO: 1791418 - DNA, 15 bp, Homo sapiens
ggttgtacctaatgg

SEQ ID NO: 1791419 - DNA, 15 bp, Homo sapiens
gttgtacctaatggg

SEQ ID NO: 1791420 - DNA, 15 bp, Homo sapiens
ttgtacctaatgggc

SEQ ID NO: 1791421 - DNA, 15 bp, Homo sapiens
tgtacctaatgggca

SEQ ID NO: 1791422 - DNA, 15 bp, Homo sapiens
gtacctaatgggcaa

SEQ ID NO: 1791423 - DNA, 15 bp, Homo sapiens
tacctaatgggcaag

SEQ ID NO: 1791424 - DNA, 15 bp, Homo sapiens
acctaatgggcaaga

SEQ ID NO: 1791425 - DNA, 15 bp, Homo sapiens
cctaatgggcaagaa

SEQ ID NO: 1791426 - DNA, 15 bp, Homo sapiens
ctaatgggcaagaaa

SEQ ID NO: 1791427 - DNA, 15 bp, Homo sapiens
taatgggcaagaaaa

SEQ ID NO: 1791428 - DNA, 15 bp, Homo sapiens
aatgggcaagaaaag

SEQ ID NO: 1791429 - DNA, 15 bp, Homo sapiens
atgggcaagaaaagg

SEQ ID NO: 1791430 - DNA, 15 bp, Homo sapiens
tgggcaagaaaaggg

SEQ ID NO: 1791431 - DNA, 15 bp, Homo sapiens
gggcaagaaaagggg

SEQ ID NO: 1791432 - DNA, 15 bp, Homo sapiens
ggcaagaaaaggggg

SEQ ID NO: 1791433 - DNA, 15 bp, Homo sapiens
gcaagaaaagggggc

SEQ ID NO: 1791434 - DNA, 15 bp, Homo sapiens
caagaaaagggggca

SEQ ID NO: 1791435 - DNA, 15 bp, Homo sapiens
aagaaaagggggcat

SEQ ID NO: 1791436 - DNA, 15 bp, Homo sapiens
agaaaagggggcata

SEQ ID NO: 1791437 - DNA, 15 bp, Homo sapiens
gaaaagggggcatat

SEQ ID NO: 1791438 - DNA, 15 bp, Homo sapiens
aaaagggggcatatg

SEQ ID NO: 1791439 - DNA, 15 bp, Homo sapiens
aaagggggcatatgt

SEQ ID NO: 1791440 - DNA, 15 bp, Homo sapiens
aagggggcatatgtt

SEQ ID NO: 1791441 - DNA, 15 bp, Homo sapiens
agggggcatatgttg

SEQ ID NO: 1791442 - DNA, 15 bp, Homo sapiens
gggggcatatgttgg

SEQ ID NO: 1791443 - DNA, 15 bp, Homo sapiens
ggggcatatgttggc

SEQ ID NO: 1791444 - DNA, 15 bp, Homo sapiens
gggcatatgttggcc

SEQ ID NO: 1791445 - DNA, 15 bp, Homo sapiens
ggcatatgttggcct

SEQ ID NO: 1791446 - DNA, 15 bp, Homo sapiens
gcatatgttggcctt

SEQ ID NO: 1791447 - DNA, 15 bp, Homo sapiens
catatgttggccttt

SEQ ID NO: 1791448 - DNA, 15 bp, Homo sapiens
atatgttggcctttc

SEQ ID NO: 1791449 - DNA, 15 bp, Homo sapiens
tatgttggcctttca

SEQ ID NO: 1791450 - DNA, 15 bp, Homo sapiens
atgttggcctttcag

SEQ ID NO: 1791451 - DNA, 15 bp, Homo sapiens
tgttggcctttcaga

SEQ ID NO: 1791452 - DNA, 15 bp, Homo sapiens
gttggcctttcagaa

SEQ ID NO: 1791453 - DNA, 15 bp, Homo sapiens
ttggcctttcagaaa

SEQ ID NO: 1791454 - DNA, 15 bp, Homo sapiens
tggcctttcagaaaa

SEQ ID NO: 1791455 - DNA, 15 bp, Homo sapiens
ggcctttcagaaaat

SEQ ID NO: 1791456 - DNA, 15 bp, Homo sapiens
gcctttcagaaaata

SEQ ID NO: 1791457 - DNA, 15 bp, Homo sapiens
cctttcagaaaatat

SEQ ID NO: 1791458 - DNA, 15 bp, Homo sapiens
ctttcagaaaatatt

SEQ ID NO: 1791459 - DNA, 15 bp, Homo sapiens
tttcagaaaatattt

SEQ ID NO: 1791460 - DNA, 15 bp, Homo sapiens
ttcagaaaatatttg

SEQ ID NO: 1791461 - DNA, 15 bp, Homo sapiens
tcagaaaatatttgc

SEQ ID NO: 1791462 - DNA, 15 bp, Homo sapiens
cagaaaatatttgca

SEQ ID NO: 1791463 - DNA, 15 bp, Homo sapiens
agaaaatatttgcat

SEQ ID NO: 1791464 - DNA, 15 bp, Homo sapiens
gaaaatatttgcatg

SEQ ID NO: 1791465 - DNA, 15 bp, Homo sapiens
aaaatatttgcatgg

SEQ ID NO: 1791466 - DNA, 15 bp, Homo sapiens
aaatatttgcatggt

SEQ ID NO: 1791467 - DNA, 15 bp, Homo sapiens
aatatttgcatggta

SEQ ID NO: 1791468 - DNA, 15 bp, Homo sapiens
atatttgcatggtat

SEQ ID NO: 1791469 - DNA, 15 bp, Homo sapiens
tatttgcatggtata

SEQ ID NO: 1791470 - DNA, 15 bp, Homo sapiens
atttgcatggtatat

SEQ ID NO: 1791471 - DNA, 15 bp, Homo sapiens
tttgcatggtatatt

SEQ ID NO: 1791472 - DNA, 15 bp, Homo sapiens
ttgcatggtatattt

SEQ ID NO: 1791473 - DNA, 15 bp, Homo sapiens
tgcatggtatattta

SEQ ID NO: 1791474 - DNA, 15 bp, Homo sapiens
gcatggtatatttaa

SEQ ID NO: 1791475 - DNA, 15 bp, Homo sapiens
catggtatatttaat

SEQ ID NO: 1791476 - DNA, 15 bp, Homo sapiens
atggtatatttaatt

SEQ ID NO: 1791477 - DNA, 15 bp, Homo sapiens
tggtatatttaatta

SEQ ID NO: 1791478 - DNA, 15 bp, Homo sapiens
ggtatatttaattat

SEQ ID NO: 1791479 - DNA, 15 bp, Homo sapiens
gtatatttaattatt

SEQ ID NO: 1791480 - DNA, 15 bp, Homo sapiens
tatatttaattattt

SEQ ID NO: 1791481 - DNA, 15 bp, Homo sapiens
atatttaattattta

SEQ ID NO: 1791482 - DNA, 15 bp, Homo sapiens
tatttaattatttaa

SEQ ID NO: 1791483 - DNA, 15 bp, Homo sapiens
atttaattatttaag

SEQ ID NO: 1791484 - DNA, 15 bp, Homo sapiens
tttaattatttaagt

SEQ ID NO: 1791485 - DNA, 15 bp, Homo sapiens
ttaattatttaagta

SEQ ID NO: 1791486 - DNA, 15 bp, Homo sapiens
taattatttaagtag

SEQ ID NO: 1791487 - DNA, 15 bp, Homo sapiens
aattatttaagtagt

SEQ ID NO: 1791488 - DNA, 15 bp, Homo sapiens
attatttaagtagta

SEQ ID NO: 1791489 - DNA, 15 bp, Homo sapiens
ttatttaagtagtac

SEQ ID NO: 1791490 - DNA, 15 bp, Homo sapiens
tatttaagtagtacg

SEQ ID NO: 1791491 - DNA, 15 bp, Homo sapiens
atttaagtagtacgt

SEQ ID NO: 1791492 - DNA, 15 bp, Homo sapiens
tttaagtagtacgta

SEQ ID NO: 1791493 - DNA, 15 bp, Homo sapiens
ttaagtagtacgtac

SEQ ID NO: 1791494 - DNA, 15 bp, Homo sapiens
taagtagtacgtact

SEQ ID NO: 1791495 - DNA, 15 bp, Homo sapiens
aagtagtacgtactc

SEQ ID NO: 1791496 - DNA, 15 bp, Homo sapiens
agtagtacgtactca

SEQ ID NO: 1791497 - DNA, 15 bp, Homo sapiens
gtagtacgtactcat

SEQ ID NO: 1791498 - DNA, 15 bp, Homo sapiens
tagtacgtactcatt

SEQ ID NO: 1791499 - DNA, 15 bp, Homo sapiens
agtacgtactcatta

SEQ ID NO: 1791500 - DNA, 15 bp, Homo sapiens
gtacgtactcattat

SEQ ID NO: 1791501 - DNA, 15 bp, Homo sapiens
tacgtactcattata

SEQ ID NO: 1791502 - DNA, 15 bp, Homo sapiens
acgtactcattataa

SEQ ID NO: 1791503 - DNA, 15 bp, Homo sapiens
cgtactcattataaa

SEQ ID NO: 1791504 - DNA, 15 bp, Homo sapiens
gtactcattataaaa

SEQ ID NO: 1791505 - DNA, 15 bp, Homo sapiens
tactcattataaaaa

SEQ ID NO: 1791506 - DNA, 15 bp, Homo sapiens
actcattataaaaat

SEQ ID NO: 1791507 - DNA, 15 bp, Homo sapiens
ctcattataaaaatt

SEQ ID NO: 1791508 - DNA, 15 bp, Homo sapiens
tcattataaaaattt

SEQ ID NO: 1791509 - DNA, 15 bp, Homo sapiens
cattataaaaatttc

SEQ ID NO: 1791510 - DNA, 15 bp, Homo sapiens
attataaaaatttca

SEQ ID NO: 1791511 - DNA, 15 bp, Homo sapiens
ttataaaaatttcaa

SEQ ID NO: 1791512 - DNA, 15 bp, Homo sapiens
tataaaaatttcaaa

SEQ ID NO: 1791513 - DNA, 15 bp, Homo sapiens
ataaaaatttcaaac

SEQ ID NO: 1791514 - DNA, 15 bp, Homo sapiens
taaaaatttcaaact

SEQ ID NO: 1791515 - DNA, 15 bp, Homo sapiens
aaaaatttcaaactc

SEQ ID NO: 1791516 - DNA, 15 bp, Homo sapiens
aaaatttcaaactct

SEQ ID NO: 1791517 - DNA, 15 bp, Homo sapiens
aaatttcaaactcta

SEQ ID NO: 1791518 - DNA, 15 bp, Homo sapiens
aatttcaaactctac

SEQ ID NO: 1791519 - DNA, 15 bp, Homo sapiens
atttcaaactctaca

SEQ ID NO: 1791520 - DNA, 15 bp, Homo sapiens
tttcaaactctacag

SEQ ID NO: 1791521 - DNA, 15 bp, Homo sapiens
ttcaaactctacaga

SEQ ID NO: 1791522 - DNA, 15 bp, Homo sapiens
tcaaactctacagaa

SEQ ID NO: 1791523 - DNA, 15 bp, Homo sapiens
caaactctacagaaa

SEQ ID NO: 1791524 - DNA, 15 bp, Homo sapiens
aaactctacagaaaa

SEQ ID NO: 1791525 - DNA, 15 bp, Homo sapiens
aactctacagaaaaa

SEQ ID NO: 1791526 - DNA, 15 bp, Homo sapiens
actctacagaaaaat

SEQ ID NO: 1791527 - DNA, 15 bp, Homo sapiens
ctctacagaaaaata

SEQ ID NO: 1791528 - DNA, 15 bp, Homo sapiens
tctacagaaaaatat

SEQ ID NO: 1791529 - DNA, 15 bp, Homo sapiens
ctacagaaaaatatg

SEQ ID NO: 1791530 - DNA, 15 bp, Homo sapiens
tacagaaaaatatga

SEQ ID NO: 1791531 - DNA, 15 bp, Homo sapiens
acagaaaaatatgaa

SEQ ID NO: 1791532 - DNA, 15 bp, Homo sapiens
cagaaaaatatgaag

SEQ ID NO: 1791533 - DNA, 15 bp, Homo sapiens
agaaaaatatgaagt

SEQ ID NO: 1791534 - DNA, 15 bp, Homo sapiens
gaaaaatatgaagta

SEQ ID NO: 1791535 - DNA, 15 bp, Homo sapiens
aaaaatatgaagtaa

SEQ ID NO: 1791536 - DNA, 15 bp, Homo sapiens
aaaatatgaagtaag

SEQ ID NO: 1791537 - DNA, 15 bp, Homo sapiens
aaatatgaagtaaga

SEQ ID NO: 1791538 - DNA, 15 bp, Homo sapiens
aatatgaagtaagaa

SEQ ID NO: 1791539 - DNA, 15 bp, Homo sapiens
atatgaagtaagaaa

SEQ ID NO: 1791540 - DNA, 15 bp, Homo sapiens
tatgaagtaagaaat

SEQ ID NO: 1791541 - DNA, 15 bp, Homo sapiens
atgaagtaagaaata

SEQ ID NO: 1791542 - DNA, 15 bp, Homo sapiens
tgaagtaagaaataa

SEQ ID NO: 1791543 - DNA, 15 bp, Homo sapiens
gaagtaagaaataat

SEQ ID NO: 1791544 - DNA, 15 bp, Homo sapiens
aagtaagaaataatt

SEQ ID NO: 1791545 - DNA, 15 bp, Homo sapiens
agtaagaaataattg

SEQ ID NO: 1791546 - DNA, 15 bp, Homo sapiens
gtaagaaataattgg

SEQ ID NO: 1791547 - DNA, 15 bp, Homo sapiens
taagaaataattggc

SEQ ID NO: 1791548 - DNA, 15 bp, Homo sapiens
aagaaataattggca

SEQ ID NO: 1791549 - DNA, 15 bp, Homo sapiens
agaaataattggcaa

SEQ ID NO: 1791550 - DNA, 15 bp, Homo sapiens
gaaataattggcaat

SEQ ID NO: 1791551 - DNA, 15 bp, Homo sapiens
aaataattggcaata

SEQ ID NO: 1791552 - DNA, 15 bp, Homo sapiens
aataattggcaatat

SEQ ID NO: 1791553 - DNA, 15 bp, Homo sapiens
ataattggcaatatg

SEQ ID NO: 1791554 - DNA, 15 bp, Homo sapiens
taattggcaatatga

SEQ ID NO: 1791555 - DNA, 15 bp, Homo sapiens
aattggcaatatgat

SEQ ID NO: 1791556 - DNA, 15 bp, Homo sapiens
attggcaatatgata

SEQ ID NO: 1791557 - DNA, 15 bp, Homo sapiens
ttggcaatatgatac

SEQ ID NO: 1791558 - DNA, 15 bp, Homo sapiens
tggcaatatgataca

SEQ ID NO: 1791559 - DNA, 15 bp, Homo sapiens
ggcaatatgatacaa

SEQ ID NO: 1791560 - DNA, 15 bp, Homo sapiens
gcaatatgatacaaa

SEQ ID NO: 1791561 - DNA, 15 bp, Homo sapiens
caatatgatacaaat

SEQ ID NO: 1791562 - DNA, 15 bp, Homo sapiens
aatatgatacaaatg

SEQ ID NO: 1791563 - DNA, 15 bp, Homo sapiens
atatgatacaaatgc

SEQ ID NO: 1791564 - DNA, 15 bp, Homo sapiens
tatgatacaaatgct

SEQ ID NO: 1791565 - DNA, 15 bp, Homo sapiens
atgatacaaatgctc

SEQ ID NO: 1791566 - DNA, 15 bp, Homo sapiens
tgatacaaatgctct

SEQ ID NO: 1791567 - DNA, 15 bp, Homo sapiens
gatacaaatgctctc

SEQ ID NO: 1791568 - DNA, 15 bp, Homo sapiens
atacaaatgctctca

SEQ ID NO: 1791569 - DNA, 15 bp, Homo sapiens
tacaaatgctctcat

SEQ ID NO: 1791570 - DNA, 15 bp, Homo sapiens
acaaatgctctcatg

SEQ ID NO: 1791571 - DNA, 15 bp, Homo sapiens
caaatgctctcatgt

SEQ ID NO: 1791572 - DNA, 15 bp, Homo sapiens
aaatgctctcatgtg

SEQ ID NO: 1791573 - DNA, 15 bp, Homo sapiens
aatgctctcatgtgt

SEQ ID NO: 1791574 - DNA, 15 bp, Homo sapiens
atgctctcatgtgtc

SEQ ID NO: 1791575 - DNA, 15 bp, Homo sapiens
tgctctcatgtgtct

SEQ ID NO: 1791576 - DNA, 15 bp, Homo sapiens
gctctcatgtgtctc

SEQ ID NO: 1791577 - DNA, 15 bp, Homo sapiens
ctctcatgtgtctct

SEQ ID NO: 1791578 - DNA, 15 bp, Homo sapiens
tctcatgtgtctctg

SEQ ID NO: 1791579 - DNA, 15 bp, Homo sapiens
ctcatgtgtctctgt

SEQ ID NO: 1791580 - DNA, 15 bp, Homo sapiens
tcatgtgtctctgta

SEQ ID NO: 1791581 - DNA, 15 bp, Homo sapiens
catgtgtctctgtat

SEQ ID NO: 1791582 - DNA, 15 bp, Homo sapiens
atgtgtctctgtatc

SEQ ID NO: 1791583 - DNA, 15 bp, Homo sapiens
tgtgtctctgtatca

SEQ ID NO: 1791584 - DNA, 15 bp, Homo sapiens
gtgtctctgtatcat

SEQ ID NO: 1791585 - DNA, 15 bp, Homo sapiens
tgtctctgtatcatc

SEQ ID NO: 1791586 - DNA, 15 bp, Homo sapiens
gtctctgtatcatcc

SEQ ID NO: 1791587 - DNA, 15 bp, Homo sapiens
tctctgtatcatcct

SEQ ID NO: 1791588 - DNA, 15 bp, Homo sapiens
ctctgtatcatcctt

SEQ ID NO: 1791589 - DNA, 15 bp, Homo sapiens
tctgtatcatccttt

SEQ ID NO: 1791590 - DNA, 15 bp, Homo sapiens
ctgtatcatccttta

SEQ ID NO: 1791591 - DNA, 15 bp, Homo sapiens
tgtatcatcctttat

SEQ ID NO: 1791592 - DNA, 15 bp, Homo sapiens
gtatcatcctttatt

SEQ ID NO: 1791593 - DNA, 15 bp, Homo sapiens
tatcatcctttattt

SEQ ID NO: 1791594 - DNA, 15 bp, Homo sapiens
atcatcctttattta

SEQ ID NO: 1791595 - DNA, 15 bp, Homo sapiens
tcatcctttatttat

SEQ ID NO: 1791596 - DNA, 15 bp, Homo sapiens
catcctttatttatt

SEQ ID NO: 1791597 - DNA, 15 bp, Homo sapiens
atcctttatttattt

SEQ ID NO: 1791598 - DNA, 15 bp, Homo sapiens
tcctttatttatttg

SEQ ID NO: 1791599 - DNA, 15 bp, Homo sapiens
cctttatttatttgg

SEQ ID NO: 1791600 - DNA, 15 bp, Homo sapiens
ctttatttatttggt

SEQ ID NO: 1791601 - DNA, 15 bp, Homo sapiens
tttatttatttggtg

SEQ ID NO: 1791602 - DNA, 15 bp, Homo sapiens
ttatttatttggtgt

SEQ ID NO: 1791603 - DNA, 15 bp, Homo sapiens
tatttatttggtgtt

SEQ ID NO: 1791604 - DNA, 15 bp, Homo sapiens
atttatttggtgttc

SEQ ID NO: 1791605 - DNA, 15 bp, Homo sapiens
tttatttggtgttct

SEQ ID NO: 1791606 - DNA, 15 bp, Homo sapiens
ttatttggtgttctt

SEQ ID NO: 1791607 - DNA, 15 bp, Homo sapiens
tatttggtgttcttg

SEQ ID NO: 1791608 - DNA, 15 bp, Homo sapiens
atttggtgttcttgt

SEQ ID NO: 1791609 - DNA, 15 bp, Homo sapiens
tttggtgttcttgta

SEQ ID NO: 1791610 - DNA, 15 bp, Homo sapiens
ttggtgttcttgtag

SEQ ID NO: 1791611 - DNA, 15 bp, Homo sapiens
tggtgttcttgtagt

SEQ ID NO: 1791612 - DNA, 15 bp, Homo sapiens
ggtgttcttgtagtt

SEQ ID NO: 1791613 - DNA, 15 bp, Homo sapiens
gtgttcttgtagttg

SEQ ID NO: 1791614 - DNA, 15 bp, Homo sapiens
tgttcttgtagttgg

SEQ ID NO: 1791615 - DNA, 15 bp, Homo sapiens
gttcttgtagttgga

SEQ ID NO: 1791616 - DNA, 15 bp, Homo sapiens
ttcttgtagttggat

SEQ ID NO: 1791617 - DNA, 15 bp, Homo sapiens
tcttgtagttggata

SEQ ID NO: 1791618 - DNA, 15 bp, Homo sapiens
cttgtagttggatat

SEQ ID NO: 1791619 - DNA, 15 bp, Homo sapiens
ttgtagttggatatc

SEQ ID NO: 1791620 - DNA, 15 bp, Homo sapiens
tgtagttggatatct

SEQ ID NO: 1791621 - DNA, 15 bp, Homo sapiens
gtagttggatatctg

SEQ ID NO: 1791622 - DNA, 15 bp, Homo sapiens
tagttggatatctgt

SEQ ID NO: 1791623 - DNA, 15 bp, Homo sapiens
agttggatatctgtg

SEQ ID NO: 1791624 - DNA, 15 bp, Homo sapiens
gttggatatctgtgt

SEQ ID NO: 1791625 - DNA, 15 bp, Homo sapiens
ttggatatctgtgta

SEQ ID NO: 1791626 - DNA, 15 bp, Homo sapiens
tggatatctgtgtac

SEQ ID NO: 1791627 - DNA, 15 bp, Homo sapiens
ggatatctgtgtact

SEQ ID NO: 1791628 - DNA, 15 bp, Homo sapiens
gatatctgtgtactg

SEQ ID NO: 1791629 - DNA, 15 bp, Homo sapiens
atatctgtgtactga

SEQ ID NO: 1791630 - DNA, 15 bp, Homo sapiens
tatctgtgtactgat

SEQ ID NO: 1791631 - DNA, 15 bp, Homo sapiens
atctgtgtactgata

SEQ ID NO: 1791632 - DNA, 15 bp, Homo sapiens
tctgtgtactgatat

SEQ ID NO: 1791633 - DNA, 15 bp, Homo sapiens
ctgtgtactgatatc

SEQ ID NO: 1791634 - DNA, 15 bp, Homo sapiens
tgtgtactgatatct

SEQ ID NO: 1791635 - DNA, 15 bp, Homo sapiens
gtgtactgatatcta

SEQ ID NO: 1791636 - DNA, 15 bp, Homo sapiens
tgtactgatatctac

SEQ ID NO: 1791637 - DNA, 15 bp, Homo sapiens
gtactgatatctact

SEQ ID NO: 1791638 - DNA, 15 bp, Homo sapiens
tactgatatctacta

SEQ ID NO: 1791639 - DNA, 15 bp, Homo sapiens
actgatatctactac

SEQ ID NO: 1791640 - DNA, 15 bp, Homo sapiens
ctgatatctactact

SEQ ID NO: 1791641 - DNA, 15 bp, Homo sapiens
tgatatctactactt

SEQ ID NO: 1791642 - DNA, 15 bp, Homo sapiens
gatatctactacttg

SEQ ID NO: 1791643 - DNA, 15 bp, Homo sapiens
atatctactacttgt

SEQ ID NO: 1791644 - DNA, 15 bp, Homo sapiens
tatctactacttgtt

SEQ ID NO: 1791645 - DNA, 15 bp, Homo sapiens
atctactacttgttc

SEQ ID NO: 1791646 - DNA, 15 bp, Homo sapiens
tctactacttgttct

SEQ ID NO: 1791647 - DNA, 15 bp, Homo sapiens
ctactacttgttcta

SEQ ID NO: 1791648 - DNA, 15 bp, Homo sapiens
tactacttgttctaa

SEQ ID NO: 1791649 - DNA, 15 bp, Homo sapiens
actacttgttctaag

SEQ ID NO: 1791650 - DNA, 15 bp, Homo sapiens
ctacttgttctaagc

SEQ ID NO: 1791651 - DNA, 15 bp, Homo sapiens
tacttgttctaagct

SEQ ID NO: 1791652 - DNA, 15 bp, Homo sapiens
acttgttctaagctg

SEQ ID NO: 1791653 - DNA, 15 bp, Homo sapiens
cttgttctaagctgc

SEQ ID NO: 1791654 - DNA, 15 bp, Homo sapiens
ttgttctaagctgct

SEQ ID NO: 1791655 - DNA, 15 bp, Homo sapiens
tgttctaagctgcta

SEQ ID NO: 1791656 - DNA, 15 bp, Homo sapiens
gttctaagctgctaa

SEQ ID NO: 1791657 - DNA, 15 bp, Homo sapiens
ttctaagctgctaag

SEQ ID NO: 1791658 - DNA, 15 bp, Homo sapiens
tctaagctgctaaga

SEQ ID NO: 1791659 - DNA, 15 bp, Homo sapiens
ctaagctgctaagat

SEQ ID NO: 1791660 - DNA, 15 bp, Homo sapiens
taagctgctaagatg

SEQ ID NO: 1791661 - DNA, 15 bp, Homo sapiens
aagctgctaagatgc

SEQ ID NO: 1791662 - DNA, 15 bp, Homo sapiens
agctgctaagatgcc

SEQ ID NO: 1791663 - DNA, 15 bp, Homo sapiens
gctgctaagatgcca

SEQ ID NO: 1791664 - DNA, 15 bp, Homo sapiens
ctgctaagatgccac

SEQ ID NO: 1791665 - DNA, 15 bp, Homo sapiens
tgctaagatgccacg

SEQ ID NO: 1791666 - DNA, 15 bp, Homo sapiens
gctaagatgccacgt

SEQ ID NO: 1791667 - DNA, 15 bp, Homo sapiens
ctaagatgccacgtc

SEQ ID NO: 1791668 - DNA, 15 bp, Homo sapiens
taagatgccacgtca

SEQ ID NO: 1791669 - DNA, 15 bp, Homo sapiens
aagatgccacgtcat

SEQ ID NO: 1791670 - DNA, 15 bp, Homo sapiens
agatgccacgtcatg

SEQ ID NO: 1791671 - DNA, 15 bp, Homo sapiens
gatgccacgtcatgt

SEQ ID NO: 1791672 - DNA, 15 bp, Homo sapiens
atgccacgtcatgtc

SEQ ID NO: 1791673 - DNA, 15 bp, Homo sapiens
tgccacgtcatgtct

SEQ ID NO: 1791674 - DNA, 15 bp, Homo sapiens
gccacgtcatgtcta

SEQ ID NO: 1791675 - DNA, 15 bp, Homo sapiens
ccacgtcatgtctat

SEQ ID NO: 1791676 - DNA, 15 bp, Homo sapiens
cacgtcatgtctatt

SEQ ID NO: 1791677 - DNA, 15 bp, Homo sapiens
acgtcatgtctattt

SEQ ID NO: 1791678 - DNA, 15 bp, Homo sapiens
cgtcatgtctattta

SEQ ID NO: 1791679 - DNA, 15 bp, Homo sapiens
gtcatgtctatttaa

SEQ ID NO: 1791680 - DNA, 15 bp, Homo sapiens
tcatgtctatttaag

SEQ ID NO: 1791681 - DNA, 15 bp, Homo sapiens
catgtctatttaaga

SEQ ID NO: 1791682 - DNA, 15 bp, Homo sapiens
atgtctatttaagaa

SEQ ID NO: 1791683 - DNA, 15 bp, Homo sapiens
tgtctatttaagaaa

SEQ ID NO: 1791684 - DNA, 15 bp, Homo sapiens
gtctatttaagaaaa

SEQ ID NO: 1791685 - DNA, 15 bp, Homo sapiens
tctatttaagaaaat

SEQ ID NO: 1791686 - DNA, 15 bp, Homo sapiens
atttaagaaaattta

SEQ ID NO: 1791687 - DNA, 15 bp, Homo sapiens
tttaagaaaatttac

SEQ ID NO: 1791688 - DNA, 15 bp, Homo sapiens
ttaagaaaatttaca

SEQ ID NO: 1791689 - DNA, 15 bp, Homo sapiens
taagaaaatttacat

SEQ ID NO: 1791690 - DNA, 15 bp, Homo sapiens
aagaaaatttacatt

SEQ ID NO: 1791691 - DNA, 15 bp, Homo sapiens
agaaaatttacattg

SEQ ID NO: 1791692 - DNA, 15 bp, Homo sapiens
gaaaatttacattgt

SEQ ID NO: 1791693 - DNA, 15 bp, Homo sapiens
aaaatttacattgtt

SEQ ID NO: 1791694 - DNA, 15 bp, Homo sapiens
aaatttacattgttc

SEQ ID NO: 1791695 - DNA, 15 bp, Homo sapiens
aatttacattgttcc

SEQ ID NO: 1791696 - DNA, 15 bp, Homo sapiens
atttacattgttcca

SEQ ID NO: 1791697 - DNA, 15 bp, Homo sapiens
tttacattgttccat

SEQ ID NO: 1791698 - DNA, 15 bp, Homo sapiens
ttacattgttccatg

SEQ ID NO: 1791699 - DNA, 15 bp, Homo sapiens
tacattgttccatgc

SEQ ID NO: 1791700 - DNA, 15 bp, Homo sapiens
acattgttccatgcc

SEQ ID NO: 1791701 - DNA, 15 bp, Homo sapiens
cattgttccatgcca

SEQ ID NO: 1791702 - DNA, 15 bp, Homo sapiens
attgttccatgccac

SEQ ID NO: 1791703 - DNA, 15 bp, Homo sapiens
ttgttccatgccact

SEQ ID NO: 1791704 - DNA, 15 bp, Homo sapiens
tgttccatgccacta

SEQ ID NO: 1791705 - DNA, 15 bp, Homo sapiens
gttccatgccactat

SEQ ID NO: 1791706 - DNA, 15 bp, Homo sapiens
ttccatgccactata

SEQ ID NO: 1791707 - DNA, 15 bp, Homo sapiens
tccatgccactatat

SEQ ID NO: 1791708 - DNA, 15 bp, Homo sapiens
ccatgccactatatg

SEQ ID NO: 1791709 - DNA, 15 bp, Homo sapiens
catgccactatatga

SEQ ID NO: 1791710 - DNA, 15 bp, Homo sapiens
atgccactatatgaa

SEQ ID NO: 1791711 - DNA, 15 bp, Homo sapiens
tgccactatatgaaa

SEQ ID NO: 1791712 - DNA, 15 bp, Homo sapiens
gccactatatgaaaa

SEQ ID NO: 1791713 - DNA, 15 bp, Homo sapiens
ccactatatgaaaat

SEQ ID NO: 1791714 - DNA, 15 bp, Homo sapiens
cactatatgaaaatg

SEQ ID NO: 1791715 - DNA, 15 bp, Homo sapiens
actatatgaaaatgt

SEQ ID NO: 1791716 - DNA, 15 bp, Homo sapiens
ctatatgaaaatgta

SEQ ID NO: 1791717 - DNA, 15 bp, Homo sapiens
atatgaaaatgtata

SEQ ID NO: 1791718 - DNA, 15 bp, Homo sapiens
tatgaaaatgtatac

SEQ ID NO: 1791719 - DNA, 15 bp, Homo sapiens
atgaaaatgtatact

SEQ ID NO: 1791720 - DNA, 15 bp, Homo sapiens
tgaaaatgtatactt

SEQ ID NO: 1791721 - DNA, 15 bp, Homo sapiens
gaaaatgtatactta

SEQ ID NO: 1791722 - DNA, 15 bp, Homo sapiens
aaaatgtatacttag

SEQ ID NO: 1791723 - DNA, 15 bp, Homo sapiens
aaatgtatacttagg

SEQ ID NO: 1791724 - DNA, 15 bp, Homo sapiens
aatgtatacttaggt

SEQ ID NO: 1791725 - DNA, 15 bp, Homo sapiens
atgtatacttaggta

SEQ ID NO: 1791726 - DNA, 15 bp, Homo sapiens
tgtatacttaggtag

SEQ ID NO: 1791727 - DNA, 15 bp, Homo sapiens
gtatacttaggtagt

SEQ ID NO: 1791728 - DNA, 15 bp, Homo sapiens
tatacttaggtagtt

SEQ ID NO: 1791729 - DNA, 15 bp, Homo sapiens
atacttaggtagttt

SEQ ID NO: 1791730 - DNA, 15 bp, Homo sapiens
tacttaggtagtttt

SEQ ID NO: 1791731 - DNA, 15 bp, Homo sapiens
acttaggtagttttt

SEQ ID NO: 1791732 - DNA, 15 bp, Homo sapiens
cttaggtagtttttt

SEQ ID NO: 1791733 - DNA, 15 bp, Homo sapiens
ttaggtagttttttt

SEQ ID NO: 1791734 - DNA, 15 bp, Homo sapiens
taggtagtttttttt

SEQ ID NO: 1791735 - DNA, 15 bp, Homo sapiens
aggtagtttttttta

SEQ ID NO: 1791736 - DNA, 15 bp, Homo sapiens
ggtagttttttttaa

SEQ ID NO: 1791737 - DNA, 15 bp, Homo sapiens
gtagttttttttaat

SEQ ID NO: 1791738 - DNA, 15 bp, Homo sapiens
tagttttttttaata

SEQ ID NO: 1791739 - DNA, 15 bp, Homo sapiens
agttttttttaatag

SEQ ID NO: 1791740 - DNA, 15 bp, Homo sapiens
gttttttttaatagt

SEQ ID NO: 1791741 - DNA, 15 bp, Homo sapiens
ttttttttaatagtg

SEQ ID NO: 1791742 - DNA, 15 bp, Homo sapiens
tttttttaatagtga

SEQ ID NO: 1791743 - DNA, 15 bp, Homo sapiens
ttttttaatagtgat

SEQ ID NO: 1791744 - DNA, 15 bp, Homo sapiens
tttttaatagtgata

SEQ ID NO: 1791745 - DNA, 15 bp, Homo sapiens
ttttaatagtgataa

SEQ ID NO: 1791746 - DNA, 15 bp, Homo sapiens
tttaatagtgataat

SEQ ID NO: 1791747 - DNA, 15 bp, Homo sapiens
ttaatagtgataatt

SEQ ID NO: 1791748 - DNA, 15 bp, Homo sapiens
taatagtgataatta

SEQ ID NO: 1791749 - DNA, 15 bp, Homo sapiens
aatagtgataattag

SEQ ID NO: 1791750 - DNA, 15 bp, Homo sapiens
atagtgataattagt

SEQ ID NO: 1791751 - DNA, 15 bp, Homo sapiens
tagtgataattagtc

SEQ ID NO: 1791752 - DNA, 15 bp, Homo sapiens
agtgataattagtcc

SEQ ID NO: 1791753 - DNA, 15 bp, Homo sapiens
gtgataattagtcca

SEQ ID NO: 1791754 - DNA, 15 bp, Homo sapiens
tgataattagtccat

SEQ ID NO: 1791755 - DNA, 15 bp, Homo sapiens
gataattagtccata

SEQ ID NO: 1791756 - DNA, 15 bp, Homo sapiens
ataattagtccatat

SEQ ID NO: 1791757 - DNA, 15 bp, Homo sapiens
taattagtccatatt

SEQ ID NO: 1791758 - DNA, 15 bp, Homo sapiens
aattagtccatatta

SEQ ID NO: 1791759 - DNA, 15 bp, Homo sapiens
attagtccatattat

SEQ ID NO: 1791760 - DNA, 15 bp, Homo sapiens
ttagtccatattatg

SEQ ID NO: 1791761 - DNA, 15 bp, Homo sapiens
tagtccatattatgg

SEQ ID NO: 1791762 - DNA, 15 bp, Homo sapiens
agtccatattatggt

SEQ ID NO: 1791763 - DNA, 15 bp, Homo sapiens
gtccatattatggtg

SEQ ID NO: 1791764 - DNA, 15 bp, Homo sapiens
tccatattatggtga

SEQ ID NO: 1791765 - DNA, 15 bp, Homo sapiens
ccatattatggtgat

SEQ ID NO: 1791766 - DNA, 15 bp, Homo sapiens
catattatggtgata

SEQ ID NO: 1791767 - DNA, 15 bp, Homo sapiens
atattatggtgataa

SEQ ID NO: 1791768 - DNA, 15 bp, Homo sapiens
tattatggtgataat

SEQ ID NO: 1791769 - DNA, 15 bp, Homo sapiens
attatggtgataatg

SEQ ID NO: 1791770 - DNA, 15 bp, Homo sapiens
ttatggtgataatga

SEQ ID NO: 1791771 - DNA, 15 bp, Homo sapiens
tatggtgataatgat

SEQ ID NO: 1791772 - DNA, 15 bp, Homo sapiens
atggtgataatgatg

SEQ ID NO: 1791773 - DNA, 15 bp, Homo sapiens
tggtgataatgatgg

SEQ ID NO: 1791774 - DNA, 15 bp, Homo sapiens
ggtgataatgatggc

SEQ ID NO: 1791775 - DNA, 15 bp, Homo sapiens
gtgataatgatggct

SEQ ID NO: 1791776 - DNA, 15 bp, Homo sapiens
tgataatgatggcta

SEQ ID NO: 1791777 - DNA, 15 bp, Homo sapiens
gataatgatggctac

SEQ ID NO: 1791778 - DNA, 15 bp, Homo sapiens
ataatgatggctact

SEQ ID NO: 1791779 - DNA, 15 bp, Homo sapiens
taatgatggctactt

SEQ ID NO: 1791780 - DNA, 15 bp, Homo sapiens
aatgatggctacttg

SEQ ID NO: 1791781 - DNA, 15 bp, Homo sapiens
atgatggctacttgc

SEQ ID NO: 1791782 - DNA, 15 bp, Homo sapiens
tgatggctacttgct

SEQ ID NO: 1791783 - DNA, 15 bp, Homo sapiens
gatggctacttgctg

SEQ ID NO: 1791784 - DNA, 15 bp, Homo sapiens
atggctacttgctga

SEQ ID NO: 1791785 - DNA, 15 bp, Homo sapiens
tggctacttgctgat

SEQ ID NO: 1791786 - DNA, 15 bp, Homo sapiens
ggctacttgctgatc

SEQ ID NO: 1791787 - DNA, 15 bp, Homo sapiens
gctacttgctgatcc

SEQ ID NO: 1791788 - DNA, 15 bp, Homo sapiens
ctacttgctgatcct

SEQ ID NO: 1791789 - DNA, 15 bp, Homo sapiens
tacttgctgatcctt

SEQ ID NO: 1791790 - DNA, 15 bp, Homo sapiens
acttgctgatcctta

SEQ ID NO: 1791791 - DNA, 15 bp, Homo sapiens
cttgctgatccttag

SEQ ID NO: 1791792 - DNA, 15 bp, Homo sapiens
ttgctgatccttagt

SEQ ID NO: 1791793 - DNA, 15 bp, Homo sapiens
tgctgatccttagtg

SEQ ID NO: 1791794 - DNA, 15 bp, Homo sapiens
gctgatccttagtga

SEQ ID NO: 1791795 - DNA, 15 bp, Homo sapiens
ctgatccttagtgaa

SEQ ID NO: 1791796 - DNA, 15 bp, Homo sapiens
tgatccttagtgaaa

SEQ ID NO: 1791797 - DNA, 15 bp, Homo sapiens
gatccttagtgaaat

SEQ ID NO: 1791798 - DNA, 15 bp, Homo sapiens
atccttagtgaaata

SEQ ID NO: 1791799 - DNA, 15 bp, Homo sapiens
tccttagtgaaataa

SEQ ID NO: 1791800 - DNA, 15 bp, Homo sapiens
ccttagtgaaataaa

SEQ ID NO: 1791801 - DNA, 15 bp, Homo sapiens
cttagtgaaataaat

SEQ ID NO: 1791802 - DNA, 15 bp, Homo sapiens
ttagtgaaataaatt

SEQ ID NO: 1791803 - DNA, 15 bp, Homo sapiens
tagtgaaataaattc

SEQ ID NO: 1791804 - DNA, 15 bp, Homo sapiens
agtgaaataaattct

SEQ ID NO: 1791805 - DNA, 15 bp, Homo sapiens
gtgaaataaattctg

SEQ ID NO: 1791806 - DNA, 15 bp, Homo sapiens
tgaaataaattctgt

SEQ ID NO: 1791807 - DNA, 15 bp, Homo sapiens
gaaataaattctgtg

SEQ ID NO: 1791808 - DNA, 15 bp, Homo sapiens
aaataaattctgtgt

SEQ ID NO: 1791809 - DNA, 15 bp, Homo sapiens
aataaattctgtgtt

SEQ ID NO: 1791810 - DNA, 15 bp, Homo sapiens
ataaattctgtgttg

SEQ ID NO: 1791811 - DNA, 15 bp, Homo sapiens
taaattctgtgttgg

SEQ ID NO: 1791812 - DNA, 15 bp, Homo sapiens
aaattctgtgttggt

SEQ ID NO: 1791813 - DNA, 15 bp, Homo sapiens
attctgtgttggtat

SEQ ID NO: 1791814 - DNA, 15 bp, Homo sapiens
ttctgtgttggtatt

SEQ ID NO: 1791815 - DNA, 15 bp, Homo sapiens
tctgtgttggtattc

SEQ ID NO: 1791816 - DNA, 15 bp, Homo sapiens
ctgtgttggtattct

SEQ ID NO: 1791817 - DNA, 15 bp, Homo sapiens
tgtgttggtattctt

SEQ ID NO: 1791818 - DNA, 15 bp, Homo sapiens
gtgttggtattcttc

SEQ ID NO: 1791819 - DNA, 15 bp, Homo sapiens
tgttggtattcttca

SEQ ID NO: 1791820 - DNA, 15 bp, Homo sapiens
gttggtattcttcag

SEQ ID NO: 1791821 - DNA, 15 bp, Homo sapiens
ttggtattcttcagc

SEQ ID NO: 1791822 - DNA, 15 bp, Homo sapiens
tggtattcttcagca

SEQ ID NO: 1791823 - DNA, 15 bp, Homo sapiens
ggtattcttcagcaa

SEQ ID NO: 1791824 - DNA, 15 bp, Homo sapiens
gtattcttcagcaaa

SEQ ID NO: 1791825 - DNA, 15 bp, Homo sapiens
tattcttcagcaaaa

SEQ ID NO: 1791826 - DNA, 15 bp, Homo sapiens
attcttcagcaaaaa

SEQ ID NO: 1791827 - DNA, 15 bp, Homo sapiens
ttcttcagcaaaaac

SEQ ID NO: 1791828 - DNA, 15 bp, Homo sapiens
tcttcagcaaaaacg

SEQ ID NO: 1791829 - DNA, 15 bp, Homo sapiens
cttcagcaaaaacgt

SEQ ID NO: 1791830 - DNA, 15 bp, Homo sapiens
ttcagcaaaaacgtc

SEQ ID NO: 1791831 - DNA, 15 bp, Homo sapiens
tcagcaaaaacgtca

SEQ ID NO: 1791832 - DNA, 15 bp, Homo sapiens
cagcaaaaacgtcac

SEQ ID NO: 1791833 - DNA, 15 bp, Homo sapiens
agcaaaaacgtcaca

SEQ ID NO: 1791834 - DNA, 15 bp, Homo sapiens
gcaaaaacgtcacat

SEQ ID NO: 1791835 - DNA, 15 bp, Homo sapiens
caaaaacgtcacatt

SEQ ID NO: 1791836 - DNA, 15 bp, Homo sapiens
aaaaacgtcacattc

SEQ ID NO: 1791837 - DNA, 15 bp, Homo sapiens
aaaacgtcacattct

SEQ ID NO: 1791838 - DNA, 15 bp, Homo sapiens
aaacgtcacattctg

SEQ ID NO: 1791839 - DNA, 15 bp, Homo sapiens
aacgtcacattctga

SEQ ID NO: 1791840 - DNA, 15 bp, Homo sapiens
acgtcacattctgaa

SEQ ID NO: 1791841 - DNA, 15 bp, Homo sapiens
cgtcacattctgaac

SEQ ID NO: 1791842 - DNA, 15 bp, Homo sapiens
gtcacattctgaaca

SEQ ID NO: 1791843 - DNA, 15 bp, Homo sapiens
tcacattctgaacat

SEQ ID NO: 1791844 - DNA, 15 bp, Homo sapiens
cacattctgaacatc

SEQ ID NO: 1791845 - DNA, 15 bp, Homo sapiens
acattctgaacatcc

SEQ ID NO: 1791846 - DNA, 15 bp, Homo sapiens
cattctgaacatcct

SEQ ID NO: 1791847 - DNA, 15 bp, Homo sapiens
attctgaacatccta

SEQ ID NO: 1791848 - DNA, 15 bp, Homo sapiens
ttctgaacatcctaa

SEQ ID NO: 1791849 - DNA, 15 bp, Homo sapiens
tctgaacatcctaac

SEQ ID NO: 1791850 - DNA, 15 bp, Homo sapiens
ctgaacatcctaact

SEQ ID NO: 1791851 - DNA, 15 bp, Homo sapiens
tgaacatcctaacta

SEQ ID NO: 1791852 - DNA, 15 bp, Homo sapiens
gaacatcctaactaa

SEQ ID NO: 1791853 - DNA, 15 bp, Homo sapiens
aacatcctaactaat

SEQ ID NO: 1791854 - DNA, 15 bp, Homo sapiens
acatcctaactaata

SEQ ID NO: 1791855 - DNA, 15 bp, Homo sapiens
catcctaactaataa

SEQ ID NO: 1791856 - DNA, 15 bp, Homo sapiens
atcctaactaataaa

SEQ ID NO: 1791857 - DNA, 15 bp, Homo sapiens
tcctaactaataaat

SEQ ID NO: 1791858 - DNA, 15 bp, Homo sapiens
cctaactaataaatc

SEQ ID NO: 1791859 - DNA, 15 bp, Homo sapiens
ctaactaataaatca

SEQ ID NO: 1791860 - DNA, 15 bp, Homo sapiens
taactaataaatcat

SEQ ID NO: 1791861 - DNA, 15 bp, Homo sapiens
aactaataaatcatt

SEQ ID NO: 1791862 - DNA, 15 bp, Homo sapiens
actaataaatcattg

SEQ ID NO: 1791863 - DNA, 15 bp, Homo sapiens
ctaataaatcattga

SEQ ID NO: 1791864 - DNA, 15 bp, Homo sapiens
taataaatcattgac

SEQ ID NO: 1791865 - DNA, 15 bp, Homo sapiens
aataaatcattgacc

SEQ ID NO: 1791866 - DNA, 15 bp, Homo sapiens
ataaatcattgacca

SEQ ID NO: 1791867 - DNA, 15 bp, Homo sapiens
taaatcattgaccag

SEQ ID NO: 1791868 - DNA, 15 bp, Homo sapiens
aaatcattgaccagg

SEQ ID NO: 1791869 - DNA, 15 bp, Homo sapiens
aatcattgaccaggc

SEQ ID NO: 1791870 - DNA, 15 bp, Homo sapiens
atcattgaccaggca

SEQ ID NO: 1791871 - DNA, 15 bp, Homo sapiens
tcattgaccaggcat

SEQ ID NO: 1791872 - DNA, 15 bp, Homo sapiens
cattgaccaggcatt

SEQ ID NO: 1791873 - DNA, 15 bp, Homo sapiens
attgaccaggcatta

SEQ ID NO: 1791874 - DNA, 15 bp, Homo sapiens
ttgaccaggcattag

SEQ ID NO: 1791875 - DNA, 15 bp, Homo sapiens
tgaccaggcattagg

SEQ ID NO: 1791876 - DNA, 15 bp, Homo sapiens
gaccaggcattagga

SEQ ID NO: 1791877 - DNA, 15 bp, Homo sapiens
accaggcattaggag

SEQ ID NO: 1791878 - DNA, 15 bp, Homo sapiens
ccaggcattaggaga

SEQ ID NO: 1791879 - DNA, 15 bp, Homo sapiens
caggcattaggagag

SEQ ID NO: 1791880 - DNA, 15 bp, Homo sapiens
aggcattaggagagc

SEQ ID NO: 1791881 - DNA, 15 bp, Homo sapiens
ggcattaggagagca

SEQ ID NO: 1791882 - DNA, 15 bp, Homo sapiens
gcattaggagagcat

SEQ ID NO: 1791883 - DNA, 15 bp, Homo sapiens
cattaggagagcatc

SEQ ID NO: 1791884 - DNA, 15 bp, Homo sapiens
attaggagagcatct

SEQ ID NO: 1791885 - DNA, 15 bp, Homo sapiens
ttaggagagcatctt

SEQ ID NO: 1791886 - DNA, 15 bp, Homo sapiens
taggagagcatctta

SEQ ID NO: 1791887 - DNA, 15 bp, Homo sapiens
aggagagcatcttaa

SEQ ID NO: 1791888 - DNA, 15 bp, Homo sapiens
ggagagcatcttaac

SEQ ID NO: 1791889 - DNA, 15 bp, Homo sapiens
gagagcatcttaaca

SEQ ID NO: 1791890 - DNA, 15 bp, Homo sapiens
agagcatcttaacac

SEQ ID NO: 1791891 - DNA, 15 bp, Homo sapiens
gagcatcttaacact

SEQ ID NO: 1791892 - DNA, 15 bp, Homo sapiens
agcatcttaacactc

SEQ ID NO: 1791893 - DNA, 15 bp, Homo sapiens
gcatcttaacactct

SEQ ID NO: 1791894 - DNA, 15 bp, Homo sapiens
catcttaacactcta

SEQ ID NO: 1791895 - DNA, 15 bp, Homo sapiens
atcttaacactctac

SEQ ID NO: 1791896 - DNA, 15 bp, Homo sapiens
tcttaacactctacc

SEQ ID NO: 1791897 - DNA, 15 bp, Homo sapiens
cttaacactctaccc

SEQ ID NO: 1791898 - DNA, 15 bp, Homo sapiens
ttaacactctaccca

SEQ ID NO: 1791899 - DNA, 15 bp, Homo sapiens
taacactctacccag

SEQ ID NO: 1791900 - DNA, 15 bp, Homo sapiens
aacactctacccagt

SEQ ID NO: 1791901 - DNA, 15 bp, Homo sapiens
acactctacccagta

SEQ ID NO: 1791902 - DNA, 15 bp, Homo sapiens
cactctacccagtac

SEQ ID NO: 1791903 - DNA, 15 bp, Homo sapiens
actctacccagtaca

SEQ ID NO: 1791904 - DNA, 15 bp, Homo sapiens
ctctacccagtacat

SEQ ID NO: 1791905 - DNA, 15 bp, Homo sapiens
tctacccagtacatt

SEQ ID NO: 1791906 - DNA, 15 bp, Homo sapiens
ctacccagtacattt

SEQ ID NO: 1791907 - DNA, 15 bp, Homo sapiens
tacccagtacattta

SEQ ID NO: 1791908 - DNA, 15 bp, Homo sapiens
acccagtacatttag

SEQ ID NO: 1791909 - DNA, 15 bp, Homo sapiens
cccagtacatttagg

SEQ ID NO: 1791910 - DNA, 15 bp, Homo sapiens
ccagtacatttaggt

SEQ ID NO: 1791911 - DNA, 15 bp, Homo sapiens
cagtacatttaggta

SEQ ID NO: 1791912 - DNA, 15 bp, Homo sapiens
agtacatttaggtac

SEQ ID NO: 1791913 - DNA, 15 bp, Homo sapiens
gtacatttaggtact

SEQ ID NO: 1791914 - DNA, 15 bp, Homo sapiens
tacatttaggtactc

SEQ ID NO: 1791915 - DNA, 15 bp, Homo sapiens
acatttaggtactct

SEQ ID NO: 1791916 - DNA, 15 bp, Homo sapiens
catttaggtactctg

SEQ ID NO: 1791917 - DNA, 15 bp, Homo sapiens
atttaggtactctgg

SEQ ID NO: 1791918 - DNA, 15 bp, Homo sapiens
tttaggtactctggt

SEQ ID NO: 1791919 - DNA, 15 bp, Homo sapiens
ttaggtactctggtt

SEQ ID NO: 1791920 - DNA, 15 bp, Homo sapiens
taggtactctggtta

SEQ ID NO: 1791921 - DNA, 15 bp, Homo sapiens
aggtactctggttaa

SEQ ID NO: 1791922 - DNA, 15 bp, Homo sapiens
ggtactctggttaat

SEQ ID NO: 1791923 - DNA, 15 bp, Homo sapiens
gtactctggttaatc

SEQ ID NO: 1791924 - DNA, 15 bp, Homo sapiens
tactctggttaatca

SEQ ID NO: 1791925 - DNA, 15 bp, Homo sapiens
actctggttaatcaa

SEQ ID NO: 1791926 - DNA, 15 bp, Homo sapiens
ctctggttaatcaaa

SEQ ID NO: 1791927 - DNA, 15 bp, Homo sapiens
tctggttaatcaaat

SEQ ID NO: 1791928 - DNA, 15 bp, Homo sapiens
ctggttaatcaaata

SEQ ID NO: 1791929 - DNA, 15 bp, Homo sapiens
tggttaatcaaatat

SEQ ID NO: 1791930 - DNA, 15 bp, Homo sapiens
ggttaatcaaatatt

SEQ ID NO: 1791931 - DNA, 15 bp, Homo sapiens
gttaatcaaatatta

SEQ ID NO: 1791932 - DNA, 15 bp, Homo sapiens
ttaatcaaatattat

SEQ ID NO: 1791933 - DNA, 15 bp, Homo sapiens
taatcaaatattata

SEQ ID NO: 1791934 - DNA, 15 bp, Homo sapiens
aatcaaatattatat

SEQ ID NO: 1791935 - DNA, 15 bp, Homo sapiens
atcaaatattatatg

SEQ ID NO: 1791936 - DNA, 15 bp, Homo sapiens
tcaaatattatatgt

SEQ ID NO: 1791937 - DNA, 15 bp, Homo sapiens
caaatattatatgta

SEQ ID NO: 1791938 - DNA, 15 bp, Homo sapiens
aaatattatatgtag

SEQ ID NO: 1791939 - DNA, 15 bp, Homo sapiens
aatattatatgtaga

SEQ ID NO: 1791940 - DNA, 15 bp, Homo sapiens
atattatatgtagag

SEQ ID NO: 1791941 - DNA, 15 bp, Homo sapiens
tattatatgtagagt

SEQ ID NO: 1791942 - DNA, 15 bp, Homo sapiens
attatatgtagagtg

SEQ ID NO: 1791943 - DNA, 15 bp, Homo sapiens
ttatatgtagagtga

SEQ ID NO: 1791944 - DNA, 15 bp, Homo sapiens
tatatgtagagtgat

SEQ ID NO: 1791945 - DNA, 15 bp, Homo sapiens
atatgtagagtgatg

SEQ ID NO: 1791946 - DNA, 15 bp, Homo sapiens
tatgtagagtgatgg

SEQ ID NO: 1791947 - DNA, 15 bp, Homo sapiens
atgtagagtgatggc

SEQ ID NO: 1791948 - DNA, 15 bp, Homo sapiens
tgtagagtgatggcc

SEQ ID NO: 1791949 - DNA, 15 bp, Homo sapiens
gtagagtgatggcca

SEQ ID NO: 1791950 - DNA, 15 bp, Homo sapiens
tagagtgatggccac

SEQ ID NO: 1791951 - DNA, 15 bp, Homo sapiens
agagtgatggccact

SEQ ID NO: 1791952 - DNA, 15 bp, Homo sapiens
gagtgatggccactt

SEQ ID NO: 1791953 - DNA, 15 bp, Homo sapiens
agtgatggccactta

SEQ ID NO: 1791954 - DNA, 15 bp, Homo sapiens
gtgatggccacttat

SEQ ID NO: 1791955 - DNA, 15 bp, Homo sapiens
tgatggccacttatc

SEQ ID NO: 1791956 - DNA, 15 bp, Homo sapiens
gatggccacttatca

SEQ ID NO: 1791957 - DNA, 15 bp, Homo sapiens
atggccacttatcaa

SEQ ID NO: 1791958 - DNA, 15 bp, Homo sapiens
tggccacttatcaag

SEQ ID NO: 1791959 - DNA, 15 bp, Homo sapiens
ggccacttatcaagg

SEQ ID NO: 1791960 - DNA, 15 bp, Homo sapiens
gccacttatcaagga

SEQ ID NO: 1791961 - DNA, 15 bp, Homo sapiens
ccacttatcaaggaa

SEQ ID NO: 1791962 - DNA, 15 bp, Homo sapiens
cacttatcaaggaat

SEQ ID NO: 1791963 - DNA, 15 bp, Homo sapiens
acttatcaaggaatt

SEQ ID NO: 1791964 - DNA, 15 bp, Homo sapiens
cttatcaaggaattg

SEQ ID NO: 1791965 - DNA, 15 bp, Homo sapiens
ttatcaaggaattgg

SEQ ID NO: 1791966 - DNA, 15 bp, Homo sapiens
tatcaaggaattgga

SEQ ID NO: 1791967 - DNA, 15 bp, Homo sapiens
atcaaggaattggag

SEQ ID NO: 1791968 - DNA, 15 bp, Homo sapiens
tcaaggaattggagg

SEQ ID NO: 1791969 - DNA, 15 bp, Homo sapiens
caaggaattggaggg

SEQ ID NO: 1791970 - DNA, 15 bp, Homo sapiens
aaggaattggagggc

SEQ ID NO: 1791971 - DNA, 15 bp, Homo sapiens
aggaattggagggca

SEQ ID NO: 1791972 - DNA, 15 bp, Homo sapiens
ggaattggagggcaa

SEQ ID NO: 1791973 - DNA, 15 bp, Homo sapiens
gaattggagggcaaa

SEQ ID NO: 1791974 - DNA, 15 bp, Homo sapiens
aattggagggcaaaa

SEQ ID NO: 1791975 - DNA, 15 bp, Homo sapiens
attggagggcaaaaa

SEQ ID NO: 1791976 - DNA, 15 bp, Homo sapiens
ttggagggcaaaaaa

SEQ ID NO: 1791977 - DNA, 15 bp, Homo sapiens
tggagggcaaaaaaa

SEQ ID NO: 1791978 - DNA, 15 bp, Homo sapiens
ggagggcaaaaaaat

SEQ ID NO: 1791979 - DNA, 15 bp, Homo sapiens
gagggcaaaaaaatc

SEQ ID NO: 1791980 - DNA, 15 bp, Homo sapiens
agggcaaaaaaatct

SEQ ID NO: 1791981 - DNA, 15 bp, Homo sapiens
gggcaaaaaaatctc

SEQ ID NO: 1791982 - DNA, 15 bp, Homo sapiens
ggcaaaaaaatctct

SEQ ID NO: 1791983 - DNA, 15 bp, Homo sapiens
gcaaaaaaatctcta

SEQ ID NO: 1791984 - DNA, 15 bp, Homo sapiens
caaaaaaatctctat

SEQ ID NO: 1791985 - DNA, 15 bp, Homo sapiens
aaaaaaatctctata

SEQ ID NO: 1791986 - DNA, 15 bp, Homo sapiens
aaaaaatctctatat

SEQ ID NO: 1791987 - DNA, 15 bp, Homo sapiens
aaaaatctctatatt

SEQ ID NO: 1791988 - DNA, 15 bp, Homo sapiens
aaaatctctatattc

SEQ ID NO: 1791989 - DNA, 15 bp, Homo sapiens
aaatctctatattca

SEQ ID NO: 1791990 - DNA, 15 bp, Homo sapiens
aatctctatattcac

SEQ ID NO: 1791991 - DNA, 15 bp, Homo sapiens
atctctatattcact

SEQ ID NO: 1791992 - DNA, 15 bp, Homo sapiens
tctctatattcacta

SEQ ID NO: 1791993 - DNA, 15 bp, Homo sapiens
ctctatattcactag

SEQ ID NO: 1791994 - DNA, 15 bp, Homo sapiens
tctatattcactagt

SEQ ID NO: 1791995 - DNA, 15 bp, Homo sapiens
ctatattcactagtt

SEQ ID NO: 1791996 - DNA, 15 bp, Homo sapiens
tatattcactagttc

SEQ ID NO: 1791997 - DNA, 15 bp, Homo sapiens
atattcactagttcc

SEQ ID NO: 1791998 - DNA, 15 bp, Homo sapiens
tattcactagttcca

SEQ ID NO: 1791999 - DNA, 15 bp, Homo sapiens
attcactagttccat

SEQ ID NO: 1792000 - DNA, 15 bp, Homo sapiens
ttcactagttccatg

SEQ ID NO: 1792001 - DNA, 15 bp, Homo sapiens
tcactagttccatgt

SEQ ID NO: 1792002 - DNA, 15 bp, Homo sapiens
cactagttccatgtt

SEQ ID NO: 1792003 - DNA, 15 bp, Homo sapiens
actagttccatgttc

SEQ ID NO: 1792004 - DNA, 15 bp, Homo sapiens
ctagttccatgttca

SEQ ID NO: 1792005 - DNA, 15 bp, Homo sapiens
tagttccatgttcat

SEQ ID NO: 1792006 - DNA, 15 bp, Homo sapiens
agttccatgttcatg

SEQ ID NO: 1792007 - DNA, 15 bp, Homo sapiens
gttccatgttcatgt

SEQ ID NO: 1792008 - DNA, 15 bp, Homo sapiens
ttccatgttcatgtt

SEQ ID NO: 1792009 - DNA, 15 bp, Homo sapiens
tccatgttcatgttt

SEQ ID NO: 1792010 - DNA, 15 bp, Homo sapiens
ccatgttcatgtttt

SEQ ID NO: 1792011 - DNA, 15 bp, Homo sapiens
catgttcatgttttc

SEQ ID NO: 1792012 - DNA, 15 bp, Homo sapiens
atgttcatgttttca

SEQ ID NO: 1792013 - DNA, 15 bp, Homo sapiens
tgttcatgttttcaa

SEQ ID NO: 1792014 - DNA, 15 bp, Homo sapiens
gttcatgttttcaaa

SEQ ID NO: 1792015 - DNA, 15 bp, Homo sapiens
ttcatgttttcaaat

SEQ ID NO: 1792016 - DNA, 15 bp, Homo sapiens
tcatgttttcaaatc

SEQ ID NO: 1792017 - DNA, 15 bp, Homo sapiens
catgttttcaaatct

SEQ ID NO: 1792018 - DNA, 15 bp, Homo sapiens
atgttttcaaatctt

SEQ ID NO: 1792019 - DNA, 15 bp, Homo sapiens
tgttttcaaatcttt

SEQ ID NO: 1792020 - DNA, 15 bp, Homo sapiens
gttttcaaatctttg

SEQ ID NO: 1792021 - DNA, 15 bp, Homo sapiens
ttttcaaatctttgt

SEQ ID NO: 1792022 - DNA, 15 bp, Homo sapiens
tttcaaatctttgtc

SEQ ID NO: 1792023 - DNA, 15 bp, Homo sapiens
ttcaaatctttgtcg

SEQ ID NO: 1792024 - DNA, 15 bp, Homo sapiens
tcaaatctttgtcga

SEQ ID NO: 1792025 - DNA, 15 bp, Homo sapiens
caaatctttgtcgag

SEQ ID NO: 1792026 - DNA, 15 bp, Homo sapiens
aaatctttgtcgagt

SEQ ID NO: 1792027 - DNA, 15 bp, Homo sapiens
aatctttgtcgagtc

SEQ ID NO: 1792028 - DNA, 15 bp, Homo sapiens
atctttgtcgagtca

SEQ ID NO: 1792029 - DNA, 15 bp, Homo sapiens
tctttgtcgagtcat

SEQ ID NO: 1792030 - DNA, 15 bp, Homo sapiens
ctttgtcgagtcatg

SEQ ID NO: 1792031 - DNA, 15 bp, Homo sapiens
tttgtcgagtcatgt

SEQ ID NO: 1792032 - DNA, 15 bp, Homo sapiens
ttgtcgagtcatgtc

SEQ ID NO: 1792033 - DNA, 15 bp, Homo sapiens
tgtcgagtcatgtca

SEQ ID NO: 1792034 - DNA, 15 bp, Homo sapiens
gtcgagtcatgtcag

SEQ ID NO: 1792035 - DNA, 15 bp, Homo sapiens
tcgagtcatgtcagg

SEQ ID NO: 1792036 - DNA, 15 bp, Homo sapiens
cgagtcatgtcaggc

SEQ ID NO: 1792037 - DNA, 15 bp, Homo sapiens
gagtcatgtcaggct

SEQ ID NO: 1792038 - DNA, 15 bp, Homo sapiens
agtcatgtcaggcta

SEQ ID NO: 1792039 - DNA, 15 bp, Homo sapiens
gtcatgtcaggctaa

SEQ ID NO: 1792040 - DNA, 15 bp, Homo sapiens
tcatgtcaggctaat

SEQ ID NO: 1792041 - DNA, 15 bp, Homo sapiens
catgtcaggctaatg

SEQ ID NO: 1792042 - DNA, 15 bp, Homo sapiens
atgtcaggctaatga

SEQ ID NO: 1792043 - DNA, 15 bp, Homo sapiens
tgtcaggctaatgat

SEQ ID NO: 1792044 - DNA, 15 bp, Homo sapiens
gtcaggctaatgatg

SEQ ID NO: 1792045 - DNA, 15 bp, Homo sapiens
tcaggctaatgatgt

SEQ ID NO: 1792046 - DNA, 15 bp, Homo sapiens
caggctaatgatgtt

SEQ ID NO: 1792047 - DNA, 15 bp, Homo sapiens
aggctaatgatgttc

SEQ ID NO: 1792048 - DNA, 15 bp, Homo sapiens
ggctaatgatgttct

SEQ ID NO: 1792049 - DNA, 15 bp, Homo sapiens
gctaatgatgttctt

SEQ ID NO: 1792050 - DNA, 15 bp, Homo sapiens
ctaatgatgttcttc

SEQ ID NO: 1792051 - DNA, 15 bp, Homo sapiens
taatgatgttcttca

SEQ ID NO: 1792052 - DNA, 15 bp, Homo sapiens
aatgatgttcttcag

SEQ ID NO: 1792053 - DNA, 15 bp, Homo sapiens
atgatgttcttcagc

SEQ ID NO: 1792054 - DNA, 15 bp, Homo sapiens
tgatgttcttcagct

SEQ ID NO: 1792055 - DNA, 15 bp, Homo sapiens
gatgttcttcagctt

SEQ ID NO: 1792056 - DNA, 15 bp, Homo sapiens
atgttcttcagcttt

SEQ ID NO: 1792057 - DNA, 15 bp, Homo sapiens
tgttcttcagcttta

SEQ ID NO: 1792058 - DNA, 15 bp, Homo sapiens
gttcttcagctttat

SEQ ID NO: 1792059 - DNA, 15 bp, Homo sapiens
ttcttcagctttatt

SEQ ID NO: 1792060 - DNA, 15 bp, Homo sapiens
tcttcagctttatta

SEQ ID NO: 1792061 - DNA, 15 bp, Homo sapiens
cttcagctttattat

SEQ ID NO: 1792062 - DNA, 15 bp, Homo sapiens
ttcagctttattata

SEQ ID NO: 1792063 - DNA, 15 bp, Homo sapiens
tcagctttattataa

SEQ ID NO: 1792064 - DNA, 15 bp, Homo sapiens
cagctttattataaa

SEQ ID NO: 1792065 - DNA, 15 bp, Homo sapiens
agctttattataaag

SEQ ID NO: 1792066 - DNA, 15 bp, Homo sapiens
gctttattataaaga

SEQ ID NO: 1792067 - DNA, 15 bp, Homo sapiens
ctttattataaagaa

SEQ ID NO: 1792068 - DNA, 15 bp, Homo sapiens
tttattataaagaac

SEQ ID NO: 1792069 - DNA, 15 bp, Homo sapiens
ttattataaagaaca

SEQ ID NO: 1792070 - DNA, 15 bp, Homo sapiens
tattataaagaacat

SEQ ID NO: 1792071 - DNA, 15 bp, Homo sapiens
attataaagaacata

SEQ ID NO: 1792072 - DNA, 15 bp, Homo sapiens
ttataaagaacataa

SEQ ID NO: 1792073 - DNA, 15 bp, Homo sapiens
tataaagaacataaa

SEQ ID NO: 1792074 - DNA, 15 bp, Homo sapiens
ataaagaacataaat

SEQ ID NO: 1792075 - DNA, 15 bp, Homo sapiens
taaagaacataaatt

SEQ ID NO: 1792076 - DNA, 15 bp, Homo sapiens
aaagaacataaatta

SEQ ID NO: 1792077 - DNA, 15 bp, Homo sapiens
aagaacataaattat

SEQ ID NO: 1792078 - DNA, 15 bp, Homo sapiens
agaacataaattata

SEQ ID NO: 1792079 - DNA, 15 bp, Homo sapiens
gaacataaattatat

SEQ ID NO: 1792080 - DNA, 15 bp, Homo sapiens
aacataaattatatg

SEQ ID NO: 1792081 - DNA, 15 bp, Homo sapiens
acataaattatatgg

SEQ ID NO: 1792082 - DNA, 15 bp, Homo sapiens
cataaattatatggt

SEQ ID NO: 1792083 - DNA, 15 bp, Homo sapiens
ataaattatatggtt

SEQ ID NO: 1792084 - DNA, 15 bp, Homo sapiens
taaattatatggttc

SEQ ID NO: 1792085 - DNA, 15 bp, Homo sapiens
aaattatatggttca

SEQ ID NO: 1792086 - DNA, 15 bp, Homo sapiens
aattatatggttcaa

SEQ ID NO: 1792087 - DNA, 15 bp, Homo sapiens
attatatggttcaaa

SEQ ID NO: 1792088 - DNA, 15 bp, Homo sapiens
ttatatggttcaaat

SEQ ID NO: 1792089 - DNA, 15 bp, Homo sapiens
tatatggttcaaata

SEQ ID NO: 1792090 - DNA, 15 bp, Homo sapiens
atatggttcaaataa

SEQ ID NO: 1792091 - DNA, 15 bp, Homo sapiens
tatggttcaaataaa

SEQ ID NO: 1792092 - DNA, 15 bp, Homo sapiens
atggttcaaataaag

SEQ ID NO: 1792093 - DNA, 15 bp, Homo sapiens
tggttcaaataaaga

SEQ ID NO: 1792094 - DNA, 15 bp, Homo sapiens
ggttcaaataaagac

SEQ ID NO: 1792095 - DNA, 15 bp, Homo sapiens
gttcaaataaagaca

SEQ ID NO: 1792096 - DNA, 15 bp, Homo sapiens
ttcaaataaagacag

SEQ ID NO: 1792097 - DNA, 15 bp, Homo sapiens
tcaaataaagacaga

SEQ ID NO: 1792098 - DNA, 15 bp, Homo sapiens
caaataaagacagac

SEQ ID NO: 1792099 - DNA, 15 bp, Homo sapiens
aaataaagacagact

SEQ ID NO: 1792100 - DNA, 15 bp, Homo sapiens
aataaagacagacta

SEQ ID NO: 1792101 - DNA, 15 bp, Homo sapiens
ataaagacagactaa

SEQ ID NO: 1792102 - DNA, 15 bp, Homo sapiens
taaagacagactaat

SEQ ID NO: 1792103 - DNA, 15 bp, Homo sapiens
aaagacagactaata

SEQ ID NO: 1792104 - DNA, 15 bp, Homo sapiens
aagacagactaataa

SEQ ID NO: 1792105 - DNA, 15 bp, Homo sapiens
agacagactaataaa

SEQ ID NO: 1792106 - DNA, 15 bp, Homo sapiens
gacagactaataaag

SEQ ID NO: 1792107 - DNA, 15 bp, Homo sapiens
acagactaataaaga

SEQ ID NO: 1792108 - DNA, 15 bp, Homo sapiens
cagactaataaagat

SEQ ID NO: 1792109 - DNA, 15 bp, Homo sapiens
agactaataaagatt

SEQ ID NO: 1792110 - DNA, 15 bp, Homo sapiens
gactaataaagattt

SEQ ID NO: 1792111 - DNA, 15 bp, Homo sapiens
actaataaagatttc

SEQ ID NO: 1792112 - DNA, 15 bp, Homo sapiens
ctaataaagatttct

SEQ ID NO: 1792113 - DNA, 15 bp, Homo sapiens
taataaagatttctg

SEQ ID NO: 1792114 - DNA, 15 bp, Homo sapiens
aataaagatttctga

SEQ ID NO: 1792115 - DNA, 15 bp, Homo sapiens
ataaagatttctgac

SEQ ID NO: 1792116 - DNA, 15 bp, Homo sapiens
taaagatttctgact

SEQ ID NO: 1792117 - DNA, 15 bp, Homo sapiens
aaagatttctgactc

SEQ ID NO: 1792118 - DNA, 15 bp, Homo sapiens
aagatttctgactct

SEQ ID NO: 1792119 - DNA, 15 bp, Homo sapiens
agatttctgactcta

SEQ ID NO: 1792120 - DNA, 15 bp, Homo sapiens
gatttctgactctat

SEQ ID NO: 1792121 - DNA, 15 bp, Homo sapiens
atttctgactctatg

SEQ ID NO: 1792122 - DNA, 15 bp, Homo sapiens
tttctgactctatga

SEQ ID NO: 1792123 - DNA, 15 bp, Homo sapiens
ttctgactctatgat

SEQ ID NO: 1792124 - DNA, 15 bp, Homo sapiens
tctgactctatgata

SEQ ID NO: 1792125 - DNA, 15 bp, Homo sapiens
ctgactctatgatat

SEQ ID NO: 1792126 - DNA, 15 bp, Homo sapiens
tgactctatgatata

SEQ ID NO: 1792127 - DNA, 15 bp, Homo sapiens
gactctatgatatat

SEQ ID NO: 1792128 - DNA, 15 bp, Homo sapiens
actctatgatatatg

SEQ ID NO: 1792129 - DNA, 15 bp, Homo sapiens
ctctatgatatatga

SEQ ID NO: 1792130 - DNA, 15 bp, Homo sapiens
tctatgatatatgat

SEQ ID NO: 1792131 - DNA, 15 bp, Homo sapiens
ctatgatatatgata

SEQ ID NO: 1792132 - DNA, 15 bp, Homo sapiens
tatgatatatgataa

SEQ ID NO: 1792133 - DNA, 15 bp, Homo sapiens
atgatatatgataaa

SEQ ID NO: 1792134 - DNA, 15 bp, Homo sapiens
tgatatatgataaat

SEQ ID NO: 1792135 - DNA, 15 bp, Homo sapiens
gatatatgataaata

SEQ ID NO: 1792136 - DNA, 15 bp, Homo sapiens
atatatgataaatag

SEQ ID NO: 1792137 - DNA, 15 bp, Homo sapiens
tatatgataaatagc

SEQ ID NO: 1792138 - DNA, 15 bp, Homo sapiens
atatgataaatagcc

SEQ ID NO: 1792139 - DNA, 15 bp, Homo sapiens
tatgataaatagcct

SEQ ID NO: 1792140 - DNA, 15 bp, Homo sapiens
atgataaatagcctt

SEQ ID NO: 1792141 - DNA, 15 bp, Homo sapiens
tgataaatagccttt

SEQ ID NO: 1792142 - DNA, 15 bp, Homo sapiens
gataaatagccttta

SEQ ID NO: 1792143 - DNA, 15 bp, Homo sapiens
ataaatagcctttac

SEQ ID NO: 1792144 - DNA, 15 bp, Homo sapiens
taaatagcctttact

SEQ ID NO: 1792145 - DNA, 15 bp, Homo sapiens
aaatagcctttacta

SEQ ID NO: 1792146 - DNA, 15 bp, Homo sapiens
aatagcctttactat

SEQ ID NO: 1792147 - DNA, 15 bp, Homo sapiens
atagcctttactata

SEQ ID NO: 1792148 - DNA, 15 bp, Homo sapiens
tagcctttactatat

SEQ ID NO: 1792149 - DNA, 15 bp, Homo sapiens
agcctttactatatc

SEQ ID NO: 1792150 - DNA, 15 bp, Homo sapiens
gcctttactatatca

SEQ ID NO: 1792151 - DNA, 15 bp, Homo sapiens
cctttactatatcaa

SEQ ID NO: 1792152 - DNA, 15 bp, Homo sapiens
ctttactatatcaat

SEQ ID NO: 1792153 - DNA, 15 bp, Homo sapiens
tttactatatcaata

SEQ ID NO: 1792154 - DNA, 15 bp, Homo sapiens
ttactatatcaatat

SEQ ID NO: 1792155 - DNA, 15 bp, Homo sapiens
tactatatcaatata

SEQ ID NO: 1792156 - DNA, 15 bp, Homo sapiens
actatatcaatatag

SEQ ID NO: 1792157 - DNA, 15 bp, Homo sapiens
ctatatcaatataga

SEQ ID NO: 1792158 - DNA, 15 bp, Homo sapiens
tatatcaatatagat

SEQ ID NO: 1792159 - DNA, 15 bp, Homo sapiens
atatcaatatagatg

SEQ ID NO: 1792160 - DNA, 15 bp, Homo sapiens
tatcaatatagatgc

SEQ ID NO: 1792161 - DNA, 15 bp, Homo sapiens
atcaatatagatgct

SEQ ID NO: 1792162 - DNA, 15 bp, Homo sapiens
tcaatatagatgcta

SEQ ID NO: 1792163 - DNA, 15 bp, Homo sapiens
caatatagatgctaa

SEQ ID NO: 1792164 - DNA, 15 bp, Homo sapiens
aatatagatgctaat

SEQ ID NO: 1792165 - DNA, 15 bp, Homo sapiens
atatagatgctaatt

SEQ ID NO: 1792166 - DNA, 15 bp, Homo sapiens
tatagatgctaatta

SEQ ID NO: 1792167 - DNA, 15 bp, Homo sapiens
atagatgctaattag

SEQ ID NO: 1792168 - DNA, 15 bp, Homo sapiens
tagatgctaattaga

SEQ ID NO: 1792169 - DNA, 15 bp, Homo sapiens
agatgctaattagaa

SEQ ID NO: 1792170 - DNA, 15 bp, Homo sapiens
gatgctaattagaat

SEQ ID NO: 1792171 - DNA, 15 bp, Homo sapiens
atgctaattagaatt

SEQ ID NO: 1792172 - DNA, 15 bp, Homo sapiens
tgctaattagaattc

SEQ ID NO: 1792173 - DNA, 15 bp, Homo sapiens
gctaattagaattct

SEQ ID NO: 1792174 - DNA, 15 bp, Homo sapiens
ctaattagaattctg

SEQ ID NO: 1792175 - DNA, 15 bp, Homo sapiens
taattagaattctga

SEQ ID NO: 1792176 - DNA, 15 bp, Homo sapiens
aattagaattctgat

SEQ ID NO: 1792177 - DNA, 15 bp, Homo sapiens
attagaattctgatt

SEQ ID NO: 1792178 - DNA, 15 bp, Homo sapiens
ttagaattctgatta

SEQ ID NO: 1792179 - DNA, 15 bp, Homo sapiens
tagaattctgattat

SEQ ID NO: 1792180 - DNA, 15 bp, Homo sapiens
agaattctgattatt

SEQ ID NO: 1792181 - DNA, 15 bp, Homo sapiens
gaattctgattatta

SEQ ID NO: 1792182 - DNA, 15 bp, Homo sapiens
aattctgattattac

SEQ ID NO: 1792183 - DNA, 15 bp, Homo sapiens
attctgattattact

SEQ ID NO: 1792184 - DNA, 15 bp, Homo sapiens
ttctgattattactt

SEQ ID NO: 1792185 - DNA, 15 bp, Homo sapiens
tctgattattactta

SEQ ID NO: 1792186 - DNA, 15 bp, Homo sapiens
ctgattattacttaa

SEQ ID NO: 1792187 - DNA, 15 bp, Homo sapiens
tgattattacttaat

SEQ ID NO: 1792188 - DNA, 15 bp, Homo sapiens
gattattacttaata

SEQ ID NO: 1792189 - DNA, 15 bp, Homo sapiens
attattacttaatat

SEQ ID NO: 1792190 - DNA, 15 bp, Homo sapiens
ttattacttaatatt

SEQ ID NO: 1792191 - DNA, 15 bp, Homo sapiens
tattacttaatattc

SEQ ID NO: 1792192 - DNA, 15 bp, Homo sapiens
attacttaatattct

SEQ ID NO: 1792193 - DNA, 15 bp, Homo sapiens
ttacttaatattcta

SEQ ID NO: 1792194 - DNA, 15 bp, Homo sapiens
tacttaatattctaa

SEQ ID NO: 1792195 - DNA, 15 bp, Homo sapiens
acttaatattctaag

SEQ ID NO: 1792196 - DNA, 15 bp, Homo sapiens
cttaatattctaagt

SEQ ID NO: 1792197 - DNA, 15 bp, Homo sapiens
ttaatattctaagtt

SEQ ID NO: 1792198 - DNA, 15 bp, Homo sapiens
taatattctaagttt

SEQ ID NO: 1792199 - DNA, 15 bp, Homo sapiens
aatattctaagtttt

SEQ ID NO: 1792200 - DNA, 15 bp, Homo sapiens
atattctaagttttt

SEQ ID NO: 1792201 - DNA, 15 bp, Homo sapiens
tattctaagtttttt

SEQ ID NO: 1792202 - DNA, 15 bp, Homo sapiens
attctaagttttttc

SEQ ID NO: 1792203 - DNA, 15 bp, Homo sapiens
ttctaagttttttcc

SEQ ID NO: 1792204 - DNA, 15 bp, Homo sapiens
tctaagttttttcca

SEQ ID NO: 1792205 - DNA, 15 bp, Homo sapiens
ctaagttttttccaa

SEQ ID NO: 1792206 - DNA, 15 bp, Homo sapiens
taagttttttccaaa

SEQ ID NO: 1792207 - DNA, 15 bp, Homo sapiens
aagttttttccaaat

SEQ ID NO: 1792208 - DNA, 15 bp, Homo sapiens
agttttttccaaata

SEQ ID NO: 1792209 - DNA, 15 bp, Homo sapiens
gttttttccaaatat

SEQ ID NO: 1792210 - DNA, 15 bp, Homo sapiens
ttttttccaaatata

SEQ ID NO: 1792211 - DNA, 15 bp, Homo sapiens
tttttccaaatataa

SEQ ID NO: 1792212 - DNA, 15 bp, Homo sapiens
ttttccaaatataac

SEQ ID NO: 1792213 - DNA, 15 bp, Homo sapiens
tttccaaatataact

SEQ ID NO: 1792214 - DNA, 15 bp, Homo sapiens
ttccaaatataactt

SEQ ID NO: 1792215 - DNA, 15 bp, Homo sapiens
tccaaatataacttg

SEQ ID NO: 1792216 - DNA, 15 bp, Homo sapiens
ccaaatataacttga

SEQ ID NO: 1792217 - DNA, 15 bp, Homo sapiens
caaatataacttgaa

SEQ ID NO: 1792218 - DNA, 15 bp, Homo sapiens
aaatataacttgaat

SEQ ID NO: 1792219 - DNA, 15 bp, Homo sapiens
aatataacttgaatt

SEQ ID NO: 1792220 - DNA, 15 bp, Homo sapiens
atataacttgaattt

SEQ ID NO: 1792221 - DNA, 15 bp, Homo sapiens
tataacttgaatttt

SEQ ID NO: 1792222 - DNA, 15 bp, Homo sapiens
ataacttgaatttta

SEQ ID NO: 1792223 - DNA, 15 bp, Homo sapiens
taacttgaattttaa

SEQ ID NO: 1792224 - DNA, 15 bp, Homo sapiens
aacttgaattttaaa

SEQ ID NO: 1792225 - DNA, 15 bp, Homo sapiens
acttgaattttaaat

SEQ ID NO: 1792226 - DNA, 15 bp, Homo sapiens
cttgaattttaaatg

SEQ ID NO: 1792227 - DNA, 15 bp, Homo sapiens
ttgaattttaaatga

SEQ ID NO: 1792228 - DNA, 15 bp, Homo sapiens
tgaattttaaatgag

SEQ ID NO: 1792229 - DNA, 15 bp, Homo sapiens
gaattttaaatgaga

SEQ ID NO: 1792230 - DNA, 15 bp, Homo sapiens
aattttaaatgagaa

SEQ ID NO: 1792231 - DNA, 15 bp, Homo sapiens
attttaaatgagaaa

SEQ ID NO: 1792232 - DNA, 15 bp, Homo sapiens
ttttaaatgagaaaa

SEQ ID NO: 1792233 - DNA, 15 bp, Homo sapiens
tttaaatgagaaaat

SEQ ID NO: 1792234 - DNA, 15 bp, Homo sapiens
ttaaatgagaaaata

SEQ ID NO: 1792235 - DNA, 15 bp, Homo sapiens
taaatgagaaaatat

SEQ ID NO: 1792236 - DNA, 15 bp, Homo sapiens
aaatgagaaaatatg

SEQ ID NO: 1792237 - DNA, 15 bp, Homo sapiens
aatgagaaaatatga

SEQ ID NO: 1792238 - DNA, 15 bp, Homo sapiens
atgagaaaatatgaa

SEQ ID NO: 1792239 - DNA, 15 bp, Homo sapiens
tgagaaaatatgaaa

SEQ ID NO: 1792240 - DNA, 15 bp, Homo sapiens
gagaaaatatgaaag

SEQ ID NO: 1792241 - DNA, 15 bp, Homo sapiens
agaaaatatgaaaga

SEQ ID NO: 1792242 - DNA, 15 bp, Homo sapiens
gaaaatatgaaagaa

SEQ ID NO: 1792243 - DNA, 15 bp, Homo sapiens
aaaatatgaaagaaa

SEQ ID NO: 1792244 - DNA, 15 bp, Homo sapiens
aaatatgaaagaaat

SEQ ID NO: 1792245 - DNA, 15 bp, Homo sapiens
aatatgaaagaaatt

SEQ ID NO: 1792246 - DNA, 15 bp, Homo sapiens
atatgaaagaaattt

SEQ ID NO: 1792247 - DNA, 15 bp, Homo sapiens
tatgaaagaaatttg

SEQ ID NO: 1792248 - DNA, 15 bp, Homo sapiens
atgaaagaaatttga

SEQ ID NO: 1792249 - DNA, 15 bp, Homo sapiens
tgaaagaaatttgat

SEQ ID NO: 1792250 - DNA, 15 bp, Homo sapiens
gaaagaaatttgata

SEQ ID NO: 1792251 - DNA, 15 bp, Homo sapiens
aaagaaatttgataa

SEQ ID NO: 1792252 - DNA, 15 bp, Homo sapiens
aagaaatttgataac

SEQ ID NO: 1792253 - DNA, 15 bp, Homo sapiens
agaaatttgataact

SEQ ID NO: 1792254 - DNA, 15 bp, Homo sapiens
gaaatttgataactt

SEQ ID NO: 1792255 - DNA, 15 bp, Homo sapiens
aaatttgataactta

SEQ ID NO: 1792256 - DNA, 15 bp, Homo sapiens
aatttgataacttac

SEQ ID NO: 1792257 - DNA, 15 bp, Homo sapiens
atttgataacttacc

SEQ ID NO: 1792258 - DNA, 15 bp, Homo sapiens
tttgataacttaccc

SEQ ID NO: 1792259 - DNA, 15 bp, Homo sapiens
ttgataacttaccca

SEQ ID NO: 1792260 - DNA, 15 bp, Homo sapiens
tgataacttacccat

SEQ ID NO: 1792261 - DNA, 15 bp, Homo sapiens
gataacttacccatt

SEQ ID NO: 1792262 - DNA, 15 bp, Homo sapiens
ataacttacccattg

SEQ ID NO: 1792263 - DNA, 15 bp, Homo sapiens
taacttacccattga

SEQ ID NO: 1792264 - DNA, 15 bp, Homo sapiens
aacttacccattgat

SEQ ID NO: 1792265 - DNA, 15 bp, Homo sapiens
acttacccattgatt

SEQ ID NO: 1792266 - DNA, 15 bp, Homo sapiens
cttacccattgattt

SEQ ID NO: 1792267 - DNA, 15 bp, Homo sapiens
ttacccattgattta

SEQ ID NO: 1792268 - DNA, 15 bp, Homo sapiens
tacccattgatttat

SEQ ID NO: 1792269 - DNA, 15 bp, Homo sapiens
acccattgatttatg

SEQ ID NO: 1792270 - DNA, 15 bp, Homo sapiens
cccattgatttatga

SEQ ID NO: 1792271 - DNA, 15 bp, Homo sapiens
ccattgatttatgaa

SEQ ID NO: 1792272 - DNA, 15 bp, Homo sapiens
cattgatttatgaag

SEQ ID NO: 1792273 - DNA, 15 bp, Homo sapiens
attgatttatgaaga

SEQ ID NO: 1792274 - DNA, 15 bp, Homo sapiens
ttgatttatgaagaa

SEQ ID NO: 1792275 - DNA, 15 bp, Homo sapiens
tgatttatgaagaac

SEQ ID NO: 1792276 - DNA, 15 bp, Homo sapiens
gatttatgaagaact

SEQ ID NO: 1792277 - DNA, 15 bp, Homo sapiens
atttatgaagaacta

SEQ ID NO: 1792278 - DNA, 15 bp, Homo sapiens
tttatgaagaactaa

SEQ ID NO: 1792279 - DNA, 15 bp, Homo sapiens
ttatgaagaactaag

SEQ ID NO: 1792280 - DNA, 15 bp, Homo sapiens
tatgaagaactaagt

SEQ ID NO: 1792281 - DNA, 15 bp, Homo sapiens
atgaagaactaagta

SEQ ID NO: 1792282 - DNA, 15 bp, Homo sapiens
tgaagaactaagtag

SEQ ID NO: 1792283 - DNA, 15 bp, Homo sapiens
gaagaactaagtagg

SEQ ID NO: 1792284 - DNA, 15 bp, Homo sapiens
aagaactaagtaggg

SEQ ID NO: 1792285 - DNA, 15 bp, Homo sapiens
agaactaagtagggg

SEQ ID NO: 1792286 - DNA, 15 bp, Homo sapiens
gaactaagtaggggt

SEQ ID NO: 1792287 - DNA, 15 bp, Homo sapiens
aactaagtaggggta

SEQ ID NO: 1792288 - DNA, 15 bp, Homo sapiens
actaagtaggggtaa

SEQ ID NO: 1792289 - DNA, 15 bp, Homo sapiens
ctaagtaggggtaac

SEQ ID NO: 1792290 - DNA, 15 bp, Homo sapiens
taagtaggggtaacc

SEQ ID NO: 1792291 - DNA, 15 bp, Homo sapiens
aagtaggggtaacct

SEQ ID NO: 1792292 - DNA, 15 bp, Homo sapiens
agtaggggtaacctt

SEQ ID NO: 1792293 - DNA, 15 bp, Homo sapiens
gtaggggtaaccttg

SEQ ID NO: 1792294 - DNA, 15 bp, Homo sapiens
taggggtaaccttga

SEQ ID NO: 1792295 - DNA, 15 bp, Homo sapiens
aggggtaaccttgaa

SEQ ID NO: 1792296 - DNA, 15 bp, Homo sapiens
ggggtaaccttgaaa

SEQ ID NO: 1792297 - DNA, 15 bp, Homo sapiens
gggtaaccttgaaac

SEQ ID NO: 1792298 - DNA, 15 bp, Homo sapiens
ggtaaccttgaaact

SEQ ID NO: 1792299 - DNA, 15 bp, Homo sapiens
gtaaccttgaaactt

SEQ ID NO: 1792300 - DNA, 15 bp, Homo sapiens
taaccttgaaacttg

SEQ ID NO: 1792301 - DNA, 15 bp, Homo sapiens
aaccttgaaacttgc

SEQ ID NO: 1792302 - DNA, 15 bp, Homo sapiens
accttgaaacttgcc

SEQ ID NO: 1792303 - DNA, 15 bp, Homo sapiens
ccttgaaacttgcct

SEQ ID NO: 1792304 - DNA, 15 bp, Homo sapiens
cttgaaacttgcctt

SEQ ID NO: 1792305 - DNA, 15 bp, Homo sapiens
ttgaaacttgccttt

SEQ ID NO: 1792306 - DNA, 15 bp, Homo sapiens
tgaaacttgcctttg

SEQ ID NO: 1792307 - DNA, 15 bp, Homo sapiens
gaaacttgcctttgc

SEQ ID NO: 1792308 - DNA, 15 bp, Homo sapiens
aaacttgcctttgcc

SEQ ID NO: 1792309 - DNA, 15 bp, Homo sapiens
aacttgcctttgccc

SEQ ID NO: 1792310 - DNA, 15 bp, Homo sapiens
acttgcctttgccct

SEQ ID NO: 1792311 - DNA, 15 bp, Homo sapiens
cttgcctttgccctc

SEQ ID NO: 1792312 - DNA, 15 bp, Homo sapiens
ttgcctttgccctcc

SEQ ID NO: 1792313 - DNA, 15 bp, Homo sapiens
tgcctttgccctccc

SEQ ID NO: 1792314 - DNA, 15 bp, Homo sapiens
gcctttgccctccct

SEQ ID NO: 1792315 - DNA, 15 bp, Homo sapiens
cctttgccctcccta

SEQ ID NO: 1792316 - DNA, 15 bp, Homo sapiens
ctttgccctccctaa

SEQ ID NO: 1792317 - DNA, 15 bp, Homo sapiens
tttgccctccctaaa

SEQ ID NO: 1792318 - DNA, 15 bp, Homo sapiens
ttgccctccctaaat

SEQ ID NO: 1792319 - DNA, 15 bp, Homo sapiens
tgccctccctaaata

SEQ ID NO: 1792320 - DNA, 15 bp, Homo sapiens
gccctccctaaatat

SEQ ID NO: 1792321 - DNA, 15 bp, Homo sapiens
ccctccctaaatatg

SEQ ID NO: 1792322 - DNA, 15 bp, Homo sapiens
cctccctaaatatgg

SEQ ID NO: 1792323 - DNA, 15 bp, Homo sapiens
ctccctaaatatggg

SEQ ID NO: 1792324 - DNA, 15 bp, Homo sapiens
tccctaaatatgggc

SEQ ID NO: 1792325 - DNA, 15 bp, Homo sapiens
ccctaaatatgggca

SEQ ID NO: 1792326 - DNA, 15 bp, Homo sapiens
cctaaatatgggcaa

SEQ ID NO: 1792327 - DNA, 15 bp, Homo sapiens
ctaaatatgggcaat

SEQ ID NO: 1792328 - DNA, 15 bp, Homo sapiens
taaatatgggcaatg

SEQ ID NO: 1792329 - DNA, 15 bp, Homo sapiens
aaatatgggcaatgg

SEQ ID NO: 1792330 - DNA, 15 bp, Homo sapiens
aatatgggcaatggc

SEQ ID NO: 1792331 - DNA, 15 bp, Homo sapiens
atatgggcaatggca

SEQ ID NO: 1792332 - DNA, 15 bp, Homo sapiens
tatgggcaatggcag

SEQ ID NO: 1792333 - DNA, 15 bp, Homo sapiens
atgggcaatggcaga

SEQ ID NO: 1792334 - DNA, 15 bp, Homo sapiens
tgggcaatggcagaa

SEQ ID NO: 1792335 - DNA, 15 bp, Homo sapiens
gggcaatggcagaat

SEQ ID NO: 1792336 - DNA, 15 bp, Homo sapiens
ggcaatggcagaata

SEQ ID NO: 1792337 - DNA, 15 bp, Homo sapiens
gcaatggcagaatat

SEQ ID NO: 1792338 - DNA, 15 bp, Homo sapiens
caatggcagaatatg

SEQ ID NO: 1792339 - DNA, 15 bp, Homo sapiens
aatggcagaatatgt

SEQ ID NO: 1792340 - DNA, 15 bp, Homo sapiens
atggcagaatatgtt

SEQ ID NO: 1792341 - DNA, 15 bp, Homo sapiens
tggcagaatatgttc

SEQ ID NO: 1792342 - DNA, 15 bp, Homo sapiens
ggcagaatatgttct

SEQ ID NO: 1792343 - DNA, 15 bp, Homo sapiens
gcagaatatgttctt

SEQ ID NO: 1792344 - DNA, 15 bp, Homo sapiens
cagaatatgttcttg

SEQ ID NO: 1792345 - DNA, 15 bp, Homo sapiens
agaatatgttcttgc

SEQ ID NO: 1792346 - DNA, 15 bp, Homo sapiens
gaatatgttcttgca

SEQ ID NO: 1792347 - DNA, 15 bp, Homo sapiens
aatatgttcttgcag

SEQ ID NO: 1792348 - DNA, 15 bp, Homo sapiens
atatgttcttgcaga

SEQ ID NO: 1792349 - DNA, 15 bp, Homo sapiens
tatgttcttgcagac

SEQ ID NO: 1792350 - DNA, 15 bp, Homo sapiens
atgttcttgcagacc

SEQ ID NO: 1792351 - DNA, 15 bp, Homo sapiens
tgttcttgcagacct

SEQ ID NO: 1792352 - DNA, 15 bp, Homo sapiens
gttcttgcagaccta

SEQ ID NO: 1792353 - DNA, 15 bp, Homo sapiens
ttcttgcagacctat

SEQ ID NO: 1792354 - DNA, 15 bp, Homo sapiens
tcttgcagacctata

SEQ ID NO: 1792355 - DNA, 15 bp, Homo sapiens
cttgcagacctataa

SEQ ID NO: 1792356 - DNA, 15 bp, Homo sapiens
ttgcagacctataac

SEQ ID NO: 1792357 - DNA, 15 bp, Homo sapiens
tgcagacctataact

SEQ ID NO: 1792358 - DNA, 15 bp, Homo sapiens
gcagacctataactt

SEQ ID NO: 1792359 - DNA, 15 bp, Homo sapiens
cagacctataacttt

SEQ ID NO: 1792360 - DNA, 15 bp, Homo sapiens
agacctataactttt

SEQ ID NO: 1792361 - DNA, 15 bp, Homo sapiens
gacctataacttttg

SEQ ID NO: 1792362 - DNA, 15 bp, Homo sapiens
acctataacttttgc

SEQ ID NO: 1792363 - DNA, 15 bp, Homo sapiens
cctataacttttgct

SEQ ID NO: 1792364 - DNA, 15 bp, Homo sapiens
ctataacttttgctt

SEQ ID NO: 1792365 - DNA, 15 bp, Homo sapiens
tataacttttgcttt

SEQ ID NO: 1792366 - DNA, 15 bp, Homo sapiens
ataacttttgcttta

SEQ ID NO: 1792367 - DNA, 15 bp, Homo sapiens
taacttttgctttaa

SEQ ID NO: 1792368 - DNA, 15 bp, Homo sapiens
aacttttgctttaaa

SEQ ID NO: 1792369 - DNA, 15 bp, Homo sapiens
acttttgctttaaaa

SEQ ID NO: 1792370 - DNA, 15 bp, Homo sapiens
cttttgctttaaaac

SEQ ID NO: 1792371 - DNA, 15 bp, Homo sapiens
ttttgctttaaaact

SEQ ID NO: 1792372 - DNA, 15 bp, Homo sapiens
tttgctttaaaacta

SEQ ID NO: 1792373 - DNA, 15 bp, Homo sapiens
ttgctttaaaactaa

SEQ ID NO: 1792374 - DNA, 15 bp, Homo sapiens
tgctttaaaactaag

SEQ ID NO: 1792375 - DNA, 15 bp, Homo sapiens
gctttaaaactaaga

SEQ ID NO: 1792376 - DNA, 15 bp, Homo sapiens
ctttaaaactaagag

SEQ ID NO: 1792377 - DNA, 15 bp, Homo sapiens
tttaaaactaagaga

SEQ ID NO: 1792378 - DNA, 15 bp, Homo sapiens
ttaaaactaagagac

SEQ ID NO: 1792379 - DNA, 15 bp, Homo sapiens
taaaactaagagact

SEQ ID NO: 1792380 - DNA, 15 bp, Homo sapiens
aaaactaagagacta

SEQ ID NO: 1792381 - DNA, 15 bp, Homo sapiens
aaactaagagactag

SEQ ID NO: 1792382 - DNA, 15 bp, Homo sapiens
aactaagagactagg

SEQ ID NO: 1792383 - DNA, 15 bp, Homo sapiens
actaagagactaggt

SEQ ID NO: 1792384 - DNA, 15 bp, Homo sapiens
ctaagagactaggtg

SEQ ID NO: 1792385 - DNA, 15 bp, Homo sapiens
taagagactaggtga

SEQ ID NO: 1792386 - DNA, 15 bp, Homo sapiens
aagagactaggtgag

SEQ ID NO: 1792387 - DNA, 15 bp, Homo sapiens
agagactaggtgagt

SEQ ID NO: 1792388 - DNA, 15 bp, Homo sapiens
gagactaggtgagta

SEQ ID NO: 1792389 - DNA, 15 bp, Homo sapiens
agactaggtgagtat

SEQ ID NO: 1792390 - DNA, 15 bp, Homo sapiens
gactaggtgagtata

SEQ ID NO: 1792391 - DNA, 15 bp, Homo sapiens
actaggtgagtatat

SEQ ID NO: 1792392 - DNA, 15 bp, Homo sapiens
ctaggtgagtatatg

SEQ ID NO: 1792393 - DNA, 15 bp, Homo sapiens
taggtgagtatatga

SEQ ID NO: 1792394 - DNA, 15 bp, Homo sapiens
aggtgagtatatgat

SEQ ID NO: 1792395 - DNA, 15 bp, Homo sapiens
ggtgagtatatgatt

SEQ ID NO: 1792396 - DNA, 15 bp, Homo sapiens
gtgagtatatgatta

SEQ ID NO: 1792397 - DNA, 15 bp, Homo sapiens
tgagtatatgattag

SEQ ID NO: 1792398 - DNA, 15 bp, Homo sapiens
gagtatatgattaga

SEQ ID NO: 1792399 - DNA, 15 bp, Homo sapiens
agtatatgattagac

SEQ ID NO: 1792400 - DNA, 15 bp, Homo sapiens
gtatatgattagacg

SEQ ID NO: 1792401 - DNA, 15 bp, Homo sapiens
tatatgattagacgg

SEQ ID NO: 1792402 - DNA, 15 bp, Homo sapiens
atatgattagacggg

SEQ ID NO: 1792403 - DNA, 15 bp, Homo sapiens
tatgattagacgggc

SEQ ID NO: 1792404 - DNA, 15 bp, Homo sapiens
atgattagacgggca

SEQ ID NO: 1792405 - DNA, 15 bp, Homo sapiens
tgattagacgggcac

SEQ ID NO: 1792406 - DNA, 15 bp, Homo sapiens
gattagacgggcact

SEQ ID NO: 1792407 - DNA, 15 bp, Homo sapiens
attagacgggcactg

SEQ ID NO: 1792408 - DNA, 15 bp, Homo sapiens
ttagacgggcactgt

SEQ ID NO: 1792409 - DNA, 15 bp, Homo sapiens
tagacgggcactgtt

SEQ ID NO: 1792410 - DNA, 15 bp, Homo sapiens
agacgggcactgtta

SEQ ID NO: 1792411 - DNA, 15 bp, Homo sapiens
gacgggcactgttag

SEQ ID NO: 1792412 - DNA, 15 bp, Homo sapiens
acgggcactgttaga

SEQ ID NO: 1792413 - DNA, 15 bp, Homo sapiens
cgggcactgttagaa

SEQ ID NO: 1792414 - DNA, 15 bp, Homo sapiens
gggcactgttagaat

SEQ ID NO: 1792415 - DNA, 15 bp, Homo sapiens
ggcactgttagaata

SEQ ID NO: 1792416 - DNA, 15 bp, Homo sapiens
gcactgttagaataa

SEQ ID NO: 1792417 - DNA, 15 bp, Homo sapiens
cactgttagaataat

SEQ ID NO: 1792418 - DNA, 15 bp, Homo sapiens
actgttagaataatt

SEQ ID NO: 1792419 - DNA, 15 bp, Homo sapiens
ctgttagaataattc

SEQ ID NO: 1792420 - DNA, 15 bp, Homo sapiens
tgttagaataattcc

SEQ ID NO: 1792421 - DNA, 15 bp, Homo sapiens
gttagaataattccc

SEQ ID NO: 1792422 - DNA, 15 bp, Homo sapiens
ttagaataattccca

SEQ ID NO: 1792423 - DNA, 15 bp, Homo sapiens
tagaataattcccaa

SEQ ID NO: 1792424 - DNA, 15 bp, Homo sapiens
agaataattcccaaa

SEQ ID NO: 1792425 - DNA, 15 bp, Homo sapiens
gaataattcccaaat

SEQ ID NO: 1792426 - DNA, 15 bp, Homo sapiens
aataattcccaaatg

SEQ ID NO: 1792427 - DNA, 15 bp, Homo sapiens
ataattcccaaatga

SEQ ID NO: 1792428 - DNA, 15 bp, Homo sapiens
taattcccaaatgaa

SEQ ID NO: 1792429 - DNA, 15 bp, Homo sapiens
aattcccaaatgaat

SEQ ID NO: 1792430 - DNA, 15 bp, Homo sapiens
attcccaaatgaata

SEQ ID NO: 1792431 - DNA, 15 bp, Homo sapiens
ttcccaaatgaatat

SEQ ID NO: 1792432 - DNA, 15 bp, Homo sapiens
tcccaaatgaatata

SEQ ID NO: 1792433 - DNA, 15 bp, Homo sapiens
cccaaatgaatatag

SEQ ID NO: 1792434 - DNA, 15 bp, Homo sapiens
ccaaatgaatatagt

SEQ ID NO: 1792435 - DNA, 15 bp, Homo sapiens
caaatgaatatagtt

SEQ ID NO: 1792436 - DNA, 15 bp, Homo sapiens
aaatgaatatagttt

SEQ ID NO: 1792437 - DNA, 15 bp, Homo sapiens
aatgaatatagtttg

SEQ ID NO: 1792438 - DNA, 15 bp, Homo sapiens
atgaatatagtttgt

SEQ ID NO: 1792439 - DNA, 15 bp, Homo sapiens
tgaatatagtttgtc

SEQ ID NO: 1792440 - DNA, 15 bp, Homo sapiens
gaatatagtttgtca

SEQ ID NO: 1792441 - DNA, 15 bp, Homo sapiens
aatatagtttgtcag

SEQ ID NO: 1792442 - DNA, 15 bp, Homo sapiens
atatagtttgtcagt

SEQ ID NO: 1792443 - DNA, 15 bp, Homo sapiens
tatagtttgtcagtg

SEQ ID NO: 1792444 - DNA, 15 bp, Homo sapiens
atagtttgtcagtgg

SEQ ID NO: 1792445 - DNA, 15 bp, Homo sapiens
tagtttgtcagtggt

SEQ ID NO: 1792446 - DNA, 15 bp, Homo sapiens
agtttgtcagtggtt

SEQ ID NO: 1792447 - DNA, 15 bp, Homo sapiens
gtttgtcagtggttc

SEQ ID NO: 1792448 - DNA, 15 bp, Homo sapiens
tttgtcagtggttct

SEQ ID NO: 1792449 - DNA, 15 bp, Homo sapiens
ttgtcagtggttcta

SEQ ID NO: 1792450 - DNA, 15 bp, Homo sapiens
tgtcagtggttctag

SEQ ID NO: 1792451 - DNA, 15 bp, Homo sapiens
gtcagtggttctagg

SEQ ID NO: 1792452 - DNA, 15 bp, Homo sapiens
tcagtggttctaggg

SEQ ID NO: 1792453 - DNA, 15 bp, Homo sapiens
cagtggttctagggt

SEQ ID NO: 1792454 - DNA, 15 bp, Homo sapiens
agtggttctagggta

SEQ ID NO: 1792455 - DNA, 15 bp, Homo sapiens
gtggttctagggtag

SEQ ID NO: 1792456 - DNA, 15 bp, Homo sapiens
tggttctagggtaga

SEQ ID NO: 1792457 - DNA, 15 bp, Homo sapiens
ggttctagggtagag

SEQ ID NO: 1792458 - DNA, 15 bp, Homo sapiens
gttctagggtagagg

SEQ ID NO: 1792459 - DNA, 15 bp, Homo sapiens
ttctagggtagaggt

SEQ ID NO: 1792460 - DNA, 15 bp, Homo sapiens
tctagggtagaggta

SEQ ID NO: 1792461 - DNA, 15 bp, Homo sapiens
ctagggtagaggtaa

SEQ ID NO: 1792462 - DNA, 15 bp, Homo sapiens
tagggtagaggtaac

SEQ ID NO: 1792463 - DNA, 15 bp, Homo sapiens
agggtagaggtaacc

SEQ ID NO: 1792464 - DNA, 15 bp, Homo sapiens
gggtagaggtaacct

SEQ ID NO: 1792465 - DNA, 15 bp, Homo sapiens
ggtagaggtaacctt

SEQ ID NO: 1792466 - DNA, 15 bp, Homo sapiens
gtagaggtaaccttt

SEQ ID NO: 1792467 - DNA, 15 bp, Homo sapiens
tagaggtaaccttta

SEQ ID NO: 1792468 - DNA, 15 bp, Homo sapiens
agaggtaacctttaa

SEQ ID NO: 1792469 - DNA, 15 bp, Homo sapiens
gaggtaacctttaat

SEQ ID NO: 1792470 - DNA, 15 bp, Homo sapiens
aggtaacctttaatt

SEQ ID NO: 1792471 - DNA, 15 bp, Homo sapiens
ggtaacctttaattt

SEQ ID NO: 1792472 - DNA, 15 bp, Homo sapiens
gtaacctttaatttg

SEQ ID NO: 1792473 - DNA, 15 bp, Homo sapiens
taacctttaatttgg

SEQ ID NO: 1792474 - DNA, 15 bp, Homo sapiens
aacctttaatttggt

SEQ ID NO: 1792475 - DNA, 15 bp, Homo sapiens
acctttaatttggta

SEQ ID NO: 1792476 - DNA, 15 bp, Homo sapiens
cctttaatttggtat

SEQ ID NO: 1792477 - DNA, 15 bp, Homo sapiens
ctttaatttggtatt

SEQ ID NO: 1792478 - DNA, 15 bp, Homo sapiens
tttaatttggtattc

SEQ ID NO: 1792479 - DNA, 15 bp, Homo sapiens
ttaatttggtattcc

SEQ ID NO: 1792480 - DNA, 15 bp, Homo sapiens
taatttggtattcct

SEQ ID NO: 1792481 - DNA, 15 bp, Homo sapiens
aatttggtattccta

SEQ ID NO: 1792482 - DNA, 15 bp, Homo sapiens
atttggtattcctaa

SEQ ID NO: 1792483 - DNA, 15 bp, Homo sapiens
tttggtattcctaat

SEQ ID NO: 1792484 - DNA, 15 bp, Homo sapiens
ttggtattcctaata

SEQ ID NO: 1792485 - DNA, 15 bp, Homo sapiens
tggtattcctaatag

SEQ ID NO: 1792486 - DNA, 15 bp, Homo sapiens
ggtattcctaatagt

SEQ ID NO: 1792487 - DNA, 15 bp, Homo sapiens
gtattcctaatagtt

SEQ ID NO: 1792488 - DNA, 15 bp, Homo sapiens
tattcctaatagttc

SEQ ID NO: 1792489 - DNA, 15 bp, Homo sapiens
attcctaatagttca

SEQ ID NO: 1792490 - DNA, 15 bp, Homo sapiens
ttcctaatagttcag

SEQ ID NO: 1792491 - DNA, 15 bp, Homo sapiens
tcctaatagttcaga

SEQ ID NO: 1792492 - DNA, 15 bp, Homo sapiens
cctaatagttcagaa

SEQ ID NO: 1792493 - DNA, 15 bp, Homo sapiens
ctaatagttcagaat

SEQ ID NO: 1792494 - DNA, 15 bp, Homo sapiens
taatagttcagaatg

SEQ ID NO: 1792495 - DNA, 15 bp, Homo sapiens
aatagttcagaatga

SEQ ID NO: 1792496 - DNA, 15 bp, Homo sapiens
atagttcagaatgat

SEQ ID NO: 1792497 - DNA, 15 bp, Homo sapiens
tagttcagaatgatg

SEQ ID NO: 1792498 - DNA, 15 bp, Homo sapiens
agttcagaatgatgt

SEQ ID NO: 1792499 - DNA, 15 bp, Homo sapiens
gttcagaatgatgta

SEQ ID NO: 1792500 - DNA, 15 bp, Homo sapiens
ttcagaatgatgtat

SEQ ID NO: 1792501 - DNA, 15 bp, Homo sapiens
tcagaatgatgtatt

SEQ ID NO: 1792502 - DNA, 15 bp, Homo sapiens
cagaatgatgtattt

SEQ ID NO: 1792503 - DNA, 15 bp, Homo sapiens
agaatgatgtattta

SEQ ID NO: 1792504 - DNA, 15 bp, Homo sapiens
gaatgatgtatttat

SEQ ID NO: 1792505 - DNA, 15 bp, Homo sapiens
aatgatgtatttatg

SEQ ID NO: 1792506 - DNA, 15 bp, Homo sapiens
atgatgtatttatgc

SEQ ID NO: 1792507 - DNA, 15 bp, Homo sapiens
tgatgtatttatgct

SEQ ID NO: 1792508 - DNA, 15 bp, Homo sapiens
gatgtatttatgctc

SEQ ID NO: 1792509 - DNA, 15 bp, Homo sapiens
atgtatttatgctca

SEQ ID NO: 1792510 - DNA, 15 bp, Homo sapiens
tgtatttatgctcat

SEQ ID NO: 1792511 - DNA, 15 bp, Homo sapiens
gtatttatgctcatc

SEQ ID NO: 1792512 - DNA, 15 bp, Homo sapiens
tatttatgctcatct

SEQ ID NO: 1792513 - DNA, 15 bp, Homo sapiens
atttatgctcatctc

SEQ ID NO: 1792514 - DNA, 15 bp, Homo sapiens
tttatgctcatctct

SEQ ID NO: 1792515 - DNA, 15 bp, Homo sapiens
ttatgctcatctctg

SEQ ID NO: 1792516 - DNA, 15 bp, Homo sapiens
tatgctcatctctgc

SEQ ID NO: 1792517 - DNA, 15 bp, Homo sapiens
atgctcatctctgca

SEQ ID NO: 1792518 - DNA, 15 bp, Homo sapiens
tgctcatctctgcaa

SEQ ID NO: 1792519 - DNA, 15 bp, Homo sapiens
gctcatctctgcaaa

SEQ ID NO: 1792520 - DNA, 15 bp, Homo sapiens
ctcatctctgcaaaa

SEQ ID NO: 1792521 - DNA, 15 bp, Homo sapiens
tcatctctgcaaaat

SEQ ID NO: 1792522 - DNA, 15 bp, Homo sapiens
catctctgcaaaatt

SEQ ID NO: 1792523 - DNA, 15 bp, Homo sapiens
atctctgcaaaattg

SEQ ID NO: 1792524 - DNA, 15 bp, Homo sapiens
tctctgcaaaattgt

SEQ ID NO: 1792525 - DNA, 15 bp, Homo sapiens
ctctgcaaaattgta

SEQ ID NO: 1792526 - DNA, 15 bp, Homo sapiens
tctgcaaaattgtat

SEQ ID NO: 1792527 - DNA, 15 bp, Homo sapiens
ctgcaaaattgtata

SEQ ID NO: 1792528 - DNA, 15 bp, Homo sapiens
tgcaaaattgtatat

SEQ ID NO: 1792529 - DNA, 15 bp, Homo sapiens
gcaaaattgtatatg

SEQ ID NO: 1792530 - DNA, 15 bp, Homo sapiens
caaaattgtatatgg

SEQ ID NO: 1792531 - DNA, 15 bp, Homo sapiens
aaaattgtatatggt

SEQ ID NO: 1792532 - DNA, 15 bp, Homo sapiens
aaattgtatatggtt

SEQ ID NO: 1792533 - DNA, 15 bp, Homo sapiens
aattgtatatggttt

SEQ ID NO: 1792534 - DNA, 15 bp, Homo sapiens
attgtatatggtttt

SEQ ID NO: 1792535 - DNA, 15 bp, Homo sapiens
ttgtatatggttttt

SEQ ID NO: 1792536 - DNA, 15 bp, Homo sapiens
tgtatatggtttttt

SEQ ID NO: 1792537 - DNA, 15 bp, Homo sapiens
gtatatggtttttta

SEQ ID NO: 1792538 - DNA, 15 bp, Homo sapiens
tatatggttttttat

SEQ ID NO: 1792539 - DNA, 15 bp, Homo sapiens
atatggttttttatt

SEQ ID NO: 1792540 - DNA, 15 bp, Homo sapiens
tatggttttttatta

SEQ ID NO: 1792541 - DNA, 15 bp, Homo sapiens
atggttttttattac

SEQ ID NO: 1792542 - DNA, 15 bp, Homo sapiens
tggttttttattact

SEQ ID NO: 1792543 - DNA, 15 bp, Homo sapiens
ggttttttattacta

SEQ ID NO: 1792544 - DNA, 15 bp, Homo sapiens
gttttttattactaa

SEQ ID NO: 1792545 - DNA, 15 bp, Homo sapiens
ttttttattactaat

SEQ ID NO: 1792546 - DNA, 15 bp, Homo sapiens
tttttattactaatt

SEQ ID NO: 1792547 - DNA, 15 bp, Homo sapiens
ttttattactaattg

SEQ ID NO: 1792548 - DNA, 15 bp, Homo sapiens
tttattactaattgg

SEQ ID NO: 1792549 - DNA, 15 bp, Homo sapiens
ttattactaattggt

SEQ ID NO: 1792550 - DNA, 15 bp, Homo sapiens
tattactaattggta

SEQ ID NO: 1792551 - DNA, 15 bp, Homo sapiens
attactaattggtat

SEQ ID NO: 1792552 - DNA, 15 bp, Homo sapiens
ttactaattggtatt

SEQ ID NO: 1792553 - DNA, 15 bp, Homo sapiens
tactaattggtattt

SEQ ID NO: 1792554 - DNA, 15 bp, Homo sapiens
actaattggtatttc

SEQ ID NO: 1792555 - DNA, 15 bp, Homo sapiens
ctaattggtatttca

SEQ ID NO: 1792556 - DNA, 15 bp, Homo sapiens
taattggtatttcat

SEQ ID NO: 1792557 - DNA, 15 bp, Homo sapiens
aattggtatttcatc

SEQ ID NO: 1792558 - DNA, 15 bp, Homo sapiens
attggtatttcatct

SEQ ID NO: 1792559 - DNA, 15 bp, Homo sapiens
ttggtatttcatctt

SEQ ID NO: 1792560 - DNA, 15 bp, Homo sapiens
tggtatttcatctta

SEQ ID NO: 1792561 - DNA, 15 bp, Homo sapiens
ggtatttcatcttaa

SEQ ID NO: 1792562 - DNA, 15 bp, Homo sapiens
gtatttcatcttaac

SEQ ID NO: 1792563 - DNA, 15 bp, Homo sapiens
tatttcatcttaact

SEQ ID NO: 1792564 - DNA, 15 bp, Homo sapiens
atttcatcttaactt

SEQ ID NO: 1792565 - DNA, 15 bp, Homo sapiens
tttcatcttaacttg

SEQ ID NO: 1792566 - DNA, 15 bp, Homo sapiens
ttcatcttaacttga

SEQ ID NO: 1792567 - DNA, 15 bp, Homo sapiens
tcatcttaacttgac

SEQ ID NO: 1792568 - DNA, 15 bp, Homo sapiens
catcttaacttgaca

SEQ ID NO: 1792569 - DNA, 15 bp, Homo sapiens
atcttaacttgacag

SEQ ID NO: 1792570 - DNA, 15 bp, Homo sapiens
tcttaacttgacaga

SEQ ID NO: 1792571 - DNA, 15 bp, Homo sapiens
cttaacttgacagaa

SEQ ID NO: 1792572 - DNA, 15 bp, Homo sapiens
ttaacttgacagaat

SEQ ID NO: 1792573 - DNA, 15 bp, Homo sapiens
taacttgacagaatc

SEQ ID NO: 1792574 - DNA, 15 bp, Homo sapiens
aacttgacagaatct

SEQ ID NO: 1792575 - DNA, 15 bp, Homo sapiens
acttgacagaatctt

SEQ ID NO: 1792576 - DNA, 15 bp, Homo sapiens
cttgacagaatctta

SEQ ID NO: 1792577 - DNA, 15 bp, Homo sapiens
ttgacagaatcttag

SEQ ID NO: 1792578 - DNA, 15 bp, Homo sapiens
tgacagaatcttagt

SEQ ID NO: 1792579 - DNA, 15 bp, Homo sapiens
gacagaatcttagta

SEQ ID NO: 1792580 - DNA, 15 bp, Homo sapiens
acagaatcttagtat

SEQ ID NO: 1792581 - DNA, 15 bp, Homo sapiens
cagaatcttagtatc

SEQ ID NO: 1792582 - DNA, 15 bp, Homo sapiens
agaatcttagtatca

SEQ ID NO: 1792583 - DNA, 15 bp, Homo sapiens
gaatcttagtatcaa

SEQ ID NO: 1792584 - DNA, 15 bp, Homo sapiens
aatcttagtatcaat

SEQ ID NO: 1792585 - DNA, 15 bp, Homo sapiens
atcttagtatcaatt

SEQ ID NO: 1792586 - DNA, 15 bp, Homo sapiens
tcttagtatcaattg

SEQ ID NO: 1792587 - DNA, 15 bp, Homo sapiens
cttagtatcaattgg

SEQ ID NO: 1792588 - DNA, 15 bp, Homo sapiens
ttagtatcaattggt

SEQ ID NO: 1792589 - DNA, 15 bp, Homo sapiens
tagtatcaattggtg

SEQ ID NO: 1792590 - DNA, 15 bp, Homo sapiens
agtatcaattggtga

SEQ ID NO: 1792591 - DNA, 15 bp, Homo sapiens
gtatcaattggtgaa

SEQ ID NO: 1792592 - DNA, 15 bp, Homo sapiens
tatcaattggtgaat

SEQ ID NO: 1792593 - DNA, 15 bp, Homo sapiens
atcaattggtgaatc

SEQ ID NO: 1792594 - DNA, 15 bp, Homo sapiens
tcaattggtgaatca

SEQ ID NO: 1792595 - DNA, 15 bp, Homo sapiens
caattggtgaatcat

SEQ ID NO: 1792596 - DNA, 15 bp, Homo sapiens
aattggtgaatcatt

SEQ ID NO: 1792597 - DNA, 15 bp, Homo sapiens
attggtgaatcattc

SEQ ID NO: 1792598 - DNA, 15 bp, Homo sapiens
ttggtgaatcattcg

SEQ ID NO: 1792599 - DNA, 15 bp, Homo sapiens
tggtgaatcattcgg

SEQ ID NO: 1792600 - DNA, 15 bp, Homo sapiens
ggtgaatcattcggg

SEQ ID NO: 1792601 - DNA, 15 bp, Homo sapiens
gtgaatcattcgggg

SEQ ID NO: 1792602 - DNA, 15 bp, Homo sapiens
tgaatcattcggggt

SEQ ID NO: 1792603 - DNA, 15 bp, Homo sapiens
gaatcattcggggtg

SEQ ID NO: 1792604 - DNA, 15 bp, Homo sapiens
aatcattcggggtga

SEQ ID NO: 1792605 - DNA, 15 bp, Homo sapiens
atcattcggggtgag

SEQ ID NO: 1792606 - DNA, 15 bp, Homo sapiens
tcattcggggtgagt

SEQ ID NO: 1792607 - DNA, 15 bp, Homo sapiens
cattcggggtgagta

SEQ ID NO: 1792608 - DNA, 15 bp, Homo sapiens
attcggggtgagtat

SEQ ID NO: 1792609 - DNA, 15 bp, Homo sapiens
ttcggggtgagtatt

SEQ ID NO: 1792610 - DNA, 15 bp, Homo sapiens
tcggggtgagtattt

SEQ ID NO: 1792611 - DNA, 15 bp, Homo sapiens
cggggtgagtatttt

SEQ ID NO: 1792612 - DNA, 15 bp, Homo sapiens
ggggtgagtattttc

SEQ ID NO: 1792613 - DNA, 15 bp, Homo sapiens
gggtgagtattttct

SEQ ID NO: 1792614 - DNA, 15 bp, Homo sapiens
ggtgagtattttctt

SEQ ID NO: 1792615 - DNA, 15 bp, Homo sapiens
gtgagtattttcttt

SEQ ID NO: 1792616 - DNA, 15 bp, Homo sapiens
tgagtattttctttc

SEQ ID NO: 1792617 - DNA, 15 bp, Homo sapiens
gagtattttctttct

SEQ ID NO: 1792618 - DNA, 15 bp, Homo sapiens
agtattttctttcta

SEQ ID NO: 1792619 - DNA, 15 bp, Homo sapiens
gtattttctttctat

SEQ ID NO: 1792620 - DNA, 15 bp, Homo sapiens
tattttctttctatg

SEQ ID NO: 1792621 - DNA, 15 bp, Homo sapiens
attttctttctatga

SEQ ID NO: 1792622 - DNA, 15 bp, Homo sapiens
ttttctttctatgaa

SEQ ID NO: 1792623 - DNA, 15 bp, Homo sapiens
tttctttctatgaaa

SEQ ID NO: 1792624 - DNA, 15 bp, Homo sapiens
ttctttctatgaaat

SEQ ID NO: 1792625 - DNA, 15 bp, Homo sapiens
tctttctatgaaata

SEQ ID NO: 1792626 - DNA, 15 bp, Homo sapiens
ctttctatgaaatat

SEQ ID NO: 1792627 - DNA, 15 bp, Homo sapiens
tttctatgaaatata

SEQ ID NO: 1792628 - DNA, 15 bp, Homo sapiens
ttctatgaaatataa

SEQ ID NO: 1792629 - DNA, 15 bp, Homo sapiens
tctatgaaatataat

SEQ ID NO: 1792630 - DNA, 15 bp, Homo sapiens
ctatgaaatataata

SEQ ID NO: 1792631 - DNA, 15 bp, Homo sapiens
tatgaaatataatag

SEQ ID NO: 1792632 - DNA, 15 bp, Homo sapiens
atgaaatataatagt

SEQ ID NO: 1792633 - DNA, 15 bp, Homo sapiens
tgaaatataatagta

SEQ ID NO: 1792634 - DNA, 15 bp, Homo sapiens
gaaatataatagtat

SEQ ID NO: 1792635 - DNA, 15 bp, Homo sapiens
aaatataatagtatg

SEQ ID NO: 1792636 - DNA, 15 bp, Homo sapiens
aatataatagtatgc

SEQ ID NO: 1792637 - DNA, 15 bp, Homo sapiens
atataatagtatgca

SEQ ID NO: 1792638 - DNA, 15 bp, Homo sapiens
tataatagtatgcat

SEQ ID NO: 1792639 - DNA, 15 bp, Homo sapiens
ataatagtatgcatt

SEQ ID NO: 1792640 - DNA, 15 bp, Homo sapiens
taatagtatgcattg

SEQ ID NO: 1792641 - DNA, 15 bp, Homo sapiens
aatagtatgcattgt

SEQ ID NO: 1792642 - DNA, 15 bp, Homo sapiens
atagtatgcattgta

SEQ ID NO: 1792643 - DNA, 15 bp, Homo sapiens
tagtatgcattgtaa

SEQ ID NO: 1792644 - DNA, 15 bp, Homo sapiens
agtatgcattgtaag

SEQ ID NO: 1792645 - DNA, 15 bp, Homo sapiens
gtatgcattgtaagt

SEQ ID NO: 1792646 - DNA, 15 bp, Homo sapiens
tatgcattgtaagta

SEQ ID NO: 1792647 - DNA, 15 bp, Homo sapiens
atgcattgtaagtat

SEQ ID NO: 1792648 - DNA, 15 bp, Homo sapiens
tgcattgtaagtata

SEQ ID NO: 1792649 - DNA, 15 bp, Homo sapiens
gcattgtaagtataa

SEQ ID NO: 1792650 - DNA, 15 bp, Homo sapiens
cattgtaagtataaa

SEQ ID NO: 1792651 - DNA, 15 bp, Homo sapiens
ttgtaagtataaaag

SEQ ID NO: 1792652 - DNA, 15 bp, Homo sapiens
tgtaagtataaaaga

SEQ ID NO: 1792653 - DNA, 15 bp, Homo sapiens
gtaagtataaaagaa

SEQ ID NO: 1792654 - DNA, 15 bp, Homo sapiens
taagtataaaagaaa

SEQ ID NO: 1792655 - DNA, 15 bp, Homo sapiens
aagtataaaagaaat

SEQ ID NO: 1792656 - DNA, 15 bp, Homo sapiens
agtataaaagaaatt

SEQ ID NO: 1792657 - DNA, 15 bp, Homo sapiens
gtataaaagaaatta

SEQ ID NO: 1792658 - DNA, 15 bp, Homo sapiens
tataaaagaaattaa

SEQ ID NO: 1792659 - DNA, 15 bp, Homo sapiens
ataaaagaaattaaa

SEQ ID NO: 1792660 - DNA, 15 bp, Homo sapiens
taaaagaaattaaag

SEQ ID NO: 1792661 - DNA, 15 bp, Homo sapiens
aaaagaaattaaagc

SEQ ID NO: 1792662 - DNA, 15 bp, Homo sapiens
aaagaaattaaagct

SEQ ID NO: 1792663 - DNA, 15 bp, Homo sapiens
aagaaattaaagctt

SEQ ID NO: 1792664 - DNA, 15 bp, Homo sapiens
agaaattaaagcttt

SEQ ID NO: 1792665 - DNA, 15 bp, Homo sapiens
gaaattaaagctttc

SEQ ID NO: 1792666 - DNA, 15 bp, Homo sapiens
aaattaaagctttct

SEQ ID NO: 1792667 - DNA, 15 bp, Homo sapiens
aattaaagctttcta

SEQ ID NO: 1792668 - DNA, 15 bp, Homo sapiens
attaaagctttctat

SEQ ID NO: 1792669 - DNA, 15 bp, Homo sapiens
ttaaagctttctata

SEQ ID NO: 1792670 - DNA, 15 bp, Homo sapiens
taaagctttctataa

SEQ ID NO: 1792671 - DNA, 15 bp, Homo sapiens
aaagctttctataat

SEQ ID NO: 1792672 - DNA, 15 bp, Homo sapiens
aagctttctataatt

SEQ ID NO: 1792673 - DNA, 15 bp, Homo sapiens
agctttctataattt

SEQ ID NO: 1792674 - DNA, 15 bp, Homo sapiens
gctttctataatttg

SEQ ID NO: 1792675 - DNA, 15 bp, Homo sapiens
ctttctataatttga

SEQ ID NO: 1792676 - DNA, 15 bp, Homo sapiens
tttctataatttgaa

SEQ ID NO: 1792677 - DNA, 15 bp, Homo sapiens
ttctataatttgaat

SEQ ID NO: 1792678 - DNA, 15 bp, Homo sapiens
tctataatttgaatt

SEQ ID NO: 1792679 - DNA, 15 bp, Homo sapiens
ctataatttgaattt

SEQ ID NO: 1792680 - DNA, 15 bp, Homo sapiens
tataatttgaatttc

SEQ ID NO: 1792681 - DNA, 15 bp, Homo sapiens
ataatttgaatttcc

SEQ ID NO: 1792682 - DNA, 15 bp, Homo sapiens
taatttgaatttcca

SEQ ID NO: 1792683 - DNA, 15 bp, Homo sapiens
aatttgaatttccaa

SEQ ID NO: 1792684 - DNA, 15 bp, Homo sapiens
atttgaatttccaaa

SEQ ID NO: 1792685 - DNA, 15 bp, Homo sapiens
tttgaatttccaaat

SEQ ID NO: 1792686 - DNA, 15 bp, Homo sapiens
ttgaatttccaaatg

SEQ ID NO: 1792687 - DNA, 15 bp, Homo sapiens
tgaatttccaaatgc

SEQ ID NO: 1792688 - DNA, 15 bp, Homo sapiens
gaatttccaaatgca

SEQ ID NO: 1792689 - DNA, 15 bp, Homo sapiens
aatttccaaatgcag

SEQ ID NO: 1792690 - DNA, 15 bp, Homo sapiens
atttccaaatgcagt

SEQ ID NO: 1792691 - DNA, 15 bp, Homo sapiens
tttccaaatgcagtt

SEQ ID NO: 1792692 - DNA, 15 bp, Homo sapiens
ttccaaatgcagtta

SEQ ID NO: 1792693 - DNA, 15 bp, Homo sapiens
tccaaatgcagttat

SEQ ID NO: 1792694 - DNA, 15 bp, Homo sapiens
ccaaatgcagttatt

SEQ ID NO: 1792695 - DNA, 15 bp, Homo sapiens
caaatgcagttattc

SEQ ID NO: 1792696 - DNA, 15 bp, Homo sapiens
aaatgcagttattca

SEQ ID NO: 1792697 - DNA, 15 bp, Homo sapiens
aatgcagttattcaa

SEQ ID NO: 1792698 - DNA, 15 bp, Homo sapiens
atgcagttattcaaa

SEQ ID NO: 1792699 - DNA, 15 bp, Homo sapiens
tgcagttattcaaac

SEQ ID NO: 1792700 - DNA, 15 bp, Homo sapiens
gcagttattcaaaca

SEQ ID NO: 1792701 - DNA, 15 bp, Homo sapiens
cagttattcaaacac

SEQ ID NO: 1792702 - DNA, 15 bp, Homo sapiens
agttattcaaacacc

SEQ ID NO: 1792703 - DNA, 15 bp, Homo sapiens
gttattcaaacacct

SEQ ID NO: 1792704 - DNA, 15 bp, Homo sapiens
ttattcaaacacctc

SEQ ID NO: 1792705 - DNA, 15 bp, Homo sapiens
tattcaaacacctca

SEQ ID NO: 1792706 - DNA, 15 bp, Homo sapiens
attcaaacacctcat

SEQ ID NO: 1792707 - DNA, 15 bp, Homo sapiens
ttcaaacacctcatc

SEQ ID NO: 1792708 - DNA, 15 bp, Homo sapiens
tcaaacacctcatcc

SEQ ID NO: 1792709 - DNA, 15 bp, Homo sapiens
caaacacctcatcca

SEQ ID NO: 1792710 - DNA, 15 bp, Homo sapiens
aaacacctcatccag

SEQ ID NO: 1792711 - DNA, 15 bp, Homo sapiens
aacacctcatccagg

SEQ ID NO: 1792712 - DNA, 15 bp, Homo sapiens
acacctcatccaggc

SEQ ID NO: 1792713 - DNA, 15 bp, Homo sapiens
cacctcatccaggca

SEQ ID NO: 1792714 - DNA, 15 bp, Homo sapiens
acctcatccaggcat

SEQ ID NO: 1792715 - DNA, 15 bp, Homo sapiens
cctcatccaggcata

SEQ ID NO: 1792716 - DNA, 15 bp, Homo sapiens
ctcatccaggcatat

SEQ ID NO: 1792717 - DNA, 15 bp, Homo sapiens
tcatccaggcatatt

SEQ ID NO: 1792718 - DNA, 15 bp, Homo sapiens
catccaggcatattg

SEQ ID NO: 1792719 - DNA, 15 bp, Homo sapiens
atccaggcatattgc

SEQ ID NO: 1792720 - DNA, 15 bp, Homo sapiens
tccaggcatattgca

SEQ ID NO: 1792721 - DNA, 15 bp, Homo sapiens
ccaggcatattgcat

SEQ ID NO: 1792722 - DNA, 15 bp, Homo sapiens
caggcatattgcata

SEQ ID NO: 1792723 - DNA, 15 bp, Homo sapiens
aggcatattgcatag

SEQ ID NO: 1792724 - DNA, 15 bp, Homo sapiens
ggcatattgcataga

SEQ ID NO: 1792725 - DNA, 15 bp, Homo sapiens
gcatattgcatagaa

SEQ ID NO: 1792726 - DNA, 15 bp, Homo sapiens
catattgcatagaat

SEQ ID NO: 1792727 - DNA, 15 bp, Homo sapiens
atattgcatagaatt

SEQ ID NO: 1792728 - DNA, 15 bp, Homo sapiens
tattgcatagaattt

SEQ ID NO: 1792729 - DNA, 15 bp, Homo sapiens
attgcatagaatttt

SEQ ID NO: 1792730 - DNA, 15 bp, Homo sapiens
ttgcatagaatttta

SEQ ID NO: 1792731 - DNA, 15 bp, Homo sapiens
tgcatagaattttat

SEQ ID NO: 1792732 - DNA, 15 bp, Homo sapiens
gcatagaattttatg

SEQ ID NO: 1792733 - DNA, 15 bp, Homo sapiens
catagaattttatga

SEQ ID NO: 1792734 - DNA, 15 bp, Homo sapiens
atagaattttatgag

SEQ ID NO: 1792735 - DNA, 15 bp, Homo sapiens
tagaattttatgaga

SEQ ID NO: 1792736 - DNA, 15 bp, Homo sapiens
agaattttatgagat

SEQ ID NO: 1792737 - DNA, 15 bp, Homo sapiens
gaattttatgagata

SEQ ID NO: 1792738 - DNA, 15 bp, Homo sapiens
aattttatgagatat

SEQ ID NO: 1792739 - DNA, 15 bp, Homo sapiens
attttatgagatata

SEQ ID NO: 1792740 - DNA, 15 bp, Homo sapiens
ttttatgagatatat

SEQ ID NO: 1792741 - DNA, 15 bp, Homo sapiens
tttatgagatatata

SEQ ID NO: 1792742 - DNA, 15 bp, Homo sapiens
ttatgagatatatat

SEQ ID NO: 1792743 - DNA, 15 bp, Homo sapiens
tatgagatatatata

SEQ ID NO: 1792744 - DNA, 15 bp, Homo sapiens
atgagatatatatat

SEQ ID NO: 1792745 - DNA, 15 bp, Homo sapiens
tgagatatatatatc

SEQ ID NO: 1792746 - DNA, 15 bp, Homo sapiens
gagatatatatatct

SEQ ID NO: 1792747 - DNA, 15 bp, Homo sapiens
agatatatatatctc

SEQ ID NO: 1792748 - DNA, 15 bp, Homo sapiens
gatatatatatctca

SEQ ID NO: 1792749 - DNA, 15 bp, Homo sapiens
atatatatatctcag

SEQ ID NO: 1792750 - DNA, 15 bp, Homo sapiens
tatatatatctcaga

SEQ ID NO: 1792751 - DNA, 15 bp, Homo sapiens
atatatatctcagat

SEQ ID NO: 1792752 - DNA, 15 bp, Homo sapiens
tatatatctcagatt

SEQ ID NO: 1792753 - DNA, 15 bp, Homo sapiens
atatatctcagattt

SEQ ID NO: 1792754 - DNA, 15 bp, Homo sapiens
tatatctcagattta

SEQ ID NO: 1792755 - DNA, 15 bp, Homo sapiens
atatctcagatttac

SEQ ID NO: 1792756 - DNA, 15 bp, Homo sapiens
tatctcagatttact

SEQ ID NO: 1792757 - DNA, 15 bp, Homo sapiens
atctcagatttactt

SEQ ID NO: 1792758 - DNA, 15 bp, Homo sapiens
tctcagatttacttt

SEQ ID NO: 1792759 - DNA, 15 bp, Homo sapiens
ctcagatttactttc

SEQ ID NO: 1792760 - DNA, 15 bp, Homo sapiens
tcagatttactttca

SEQ ID NO: 1792761 - DNA, 15 bp, Homo sapiens
cagatttactttcaa

SEQ ID NO: 1792762 - DNA, 15 bp, Homo sapiens
agatttactttcaaa

SEQ ID NO: 1792763 - DNA, 15 bp, Homo sapiens
gatttactttcaaat

SEQ ID NO: 1792764 - DNA, 15 bp, Homo sapiens
atttactttcaaatc

SEQ ID NO: 1792765 - DNA, 15 bp, Homo sapiens
tttactttcaaatca

SEQ ID NO: 1792766 - DNA, 15 bp, Homo sapiens
ttactttcaaatcaa

SEQ ID NO: 1792767 - DNA, 15 bp, Homo sapiens
tactttcaaatcaag

SEQ ID NO: 1792768 - DNA, 15 bp, Homo sapiens
actttcaaatcaagt

SEQ ID NO: 1792769 - DNA, 15 bp, Homo sapiens
ctttcaaatcaagtt

SEQ ID NO: 1792770 - DNA, 15 bp, Homo sapiens
tttcaaatcaagttt

SEQ ID NO: 1792771 - DNA, 15 bp, Homo sapiens
ttcaaatcaagttta

SEQ ID NO: 1792772 - DNA, 15 bp, Homo sapiens
tcaaatcaagtttaa

SEQ ID NO: 1792773 - DNA, 15 bp, Homo sapiens
caaatcaagtttaat

SEQ ID NO: 1792774 - DNA, 15 bp, Homo sapiens
aaatcaagtttaatc

SEQ ID NO: 1792775 - DNA, 15 bp, Homo sapiens
aatcaagtttaatct

SEQ ID NO: 1792776 - DNA, 15 bp, Homo sapiens
atcaagtttaatctc

SEQ ID NO: 1792777 - DNA, 15 bp, Homo sapiens
tcaagtttaatctca

SEQ ID NO: 1792778 - DNA, 15 bp, Homo sapiens
caagtttaatctcaa

SEQ ID NO: 1792779 - DNA, 15 bp, Homo sapiens
aagtttaatctcaaa

SEQ ID NO: 1792780 - DNA, 15 bp, Homo sapiens
agtttaatctcaaat

SEQ ID NO: 1792781 - DNA, 15 bp, Homo sapiens
gtttaatctcaaatc

SEQ ID NO: 1792782 - DNA, 15 bp, Homo sapiens
tttaatctcaaatca

SEQ ID NO: 1792783 - DNA, 15 bp, Homo sapiens
ttaatctcaaatcat

SEQ ID NO: 1792784 - DNA, 15 bp, Homo sapiens
taatctcaaatcata

SEQ ID NO: 1792785 - DNA, 15 bp, Homo sapiens
aatctcaaatcatac

SEQ ID NO: 1792786 - DNA, 15 bp, Homo sapiens
atctcaaatcatact

SEQ ID NO: 1792787 - DNA, 15 bp, Homo sapiens
tctcaaatcatactc

SEQ ID NO: 1792788 - DNA, 15 bp, Homo sapiens
ctcaaatcatactcc

SEQ ID NO: 1792789 - DNA, 15 bp, Homo sapiens
tcaaatcatactcct

SEQ ID NO: 1792790 - DNA, 15 bp, Homo sapiens
caaatcatactccta

SEQ ID NO: 1792791 - DNA, 15 bp, Homo sapiens
aaatcatactcctaa

SEQ ID NO: 1792792 - DNA, 15 bp, Homo sapiens
aatcatactcctaat

SEQ ID NO: 1792793 - DNA, 15 bp, Homo sapiens
atcatactcctaatt

SEQ ID NO: 1792794 - DNA, 15 bp, Homo sapiens
tcatactcctaattg

SEQ ID NO: 1792795 - DNA, 15 bp, Homo sapiens
catactcctaattgg

SEQ ID NO: 1792796 - DNA, 15 bp, Homo sapiens
atactcctaattggt

SEQ ID NO: 1792797 - DNA, 15 bp, Homo sapiens
tactcctaattggtg

SEQ ID NO: 1792798 - DNA, 15 bp, Homo sapiens
actcctaattggtga

SEQ ID NO: 1792799 - DNA, 15 bp, Homo sapiens
ctcctaattggtgaa

SEQ ID NO: 1792800 - DNA, 15 bp, Homo sapiens
tcctaattggtgaac

SEQ ID NO: 1792801 - DNA, 15 bp, Homo sapiens
cctaattggtgaact

SEQ ID NO: 1792802 - DNA, 15 bp, Homo sapiens
ctaattggtgaactt

SEQ ID NO: 1792803 - DNA, 15 bp, Homo sapiens
taattggtgaacttc

SEQ ID NO: 1792804 - DNA, 15 bp, Homo sapiens
aattggtgaacttca

SEQ ID NO: 1792805 - DNA, 15 bp, Homo sapiens
attggtgaacttcaa

SEQ ID NO: 1792806 - DNA, 15 bp, Homo sapiens
ttggtgaacttcaaa

SEQ ID NO: 1792807 - DNA, 15 bp, Homo sapiens
tggtgaacttcaaaa

SEQ ID NO: 1792808 - DNA, 15 bp, Homo sapiens
ggtgaacttcaaaac

SEQ ID NO: 1792809 - DNA, 15 bp, Homo sapiens
gtgaacttcaaaact

SEQ ID NO: 1792810 - DNA, 15 bp, Homo sapiens
tgaacttcaaaactt

SEQ ID NO: 1792811 - DNA, 15 bp, Homo sapiens
gaacttcaaaacttt

SEQ ID NO: 1792812 - DNA, 15 bp, Homo sapiens
aacttcaaaactttt

SEQ ID NO: 1792813 - DNA, 15 bp, Homo sapiens
acttcaaaacttttc

SEQ ID NO: 1792814 - DNA, 15 bp, Homo sapiens
cttcaaaacttttct

SEQ ID NO: 1792815 - DNA, 15 bp, Homo sapiens
ttcaaaacttttcta

SEQ ID NO: 1792816 - DNA, 15 bp, Homo sapiens
tcaaaacttttctaa

SEQ ID NO: 1792817 - DNA, 15 bp, Homo sapiens
caaaacttttctaaa

SEQ ID NO: 1792818 - DNA, 15 bp, Homo sapiens
aaaacttttctaaat

SEQ ID NO: 1792819 - DNA, 15 bp, Homo sapiens
aaacttttctaaata

SEQ ID NO: 1792820 - DNA, 15 bp, Homo sapiens
aacttttctaaatat

SEQ ID NO: 1792821 - DNA, 15 bp, Homo sapiens
acttttctaaatatc

SEQ ID NO: 1792822 - DNA, 15 bp, Homo sapiens
cttttctaaatatcc

SEQ ID NO: 1792823 - DNA, 15 bp, Homo sapiens
ttttctaaatatcca

SEQ ID NO: 1792824 - DNA, 15 bp, Homo sapiens
tttctaaatatccac

SEQ ID NO: 1792825 - DNA, 15 bp, Homo sapiens
ttctaaatatccact

SEQ ID NO: 1792826 - DNA, 15 bp, Homo sapiens
tctaaatatccactt

SEQ ID NO: 1792827 - DNA, 15 bp, Homo sapiens
ctaaatatccacttg

SEQ ID NO: 1792828 - DNA, 15 bp, Homo sapiens
taaatatccacttga

SEQ ID NO: 1792829 - DNA, 15 bp, Homo sapiens
aaatatccacttgag

SEQ ID NO: 1792830 - DNA, 15 bp, Homo sapiens
aatatccacttgaga

SEQ ID NO: 1792831 - DNA, 15 bp, Homo sapiens
atatccacttgagat

SEQ ID NO: 1792832 - DNA, 15 bp, Homo sapiens
tatccacttgagatt

SEQ ID NO: 1792833 - DNA, 15 bp, Homo sapiens
atccacttgagatta

SEQ ID NO: 1792834 - DNA, 15 bp, Homo sapiens
tccacttgagattat

SEQ ID NO: 1792835 - DNA, 15 bp, Homo sapiens
ccacttgagattata

SEQ ID NO: 1792836 - DNA, 15 bp, Homo sapiens
cacttgagattatat

SEQ ID NO: 1792837 - DNA, 15 bp, Homo sapiens
acttgagattatata

SEQ ID NO: 1792838 - DNA, 15 bp, Homo sapiens
cttgagattatataa

SEQ ID NO: 1792839 - DNA, 15 bp, Homo sapiens
ttgagattatataat

SEQ ID NO: 1792840 - DNA, 15 bp, Homo sapiens
tgagattatataata

SEQ ID NO: 1792841 - DNA, 15 bp, Homo sapiens
gagattatataatac

SEQ ID NO: 1792842 - DNA, 15 bp, Homo sapiens
agattatataataca

SEQ ID NO: 1792843 - DNA, 15 bp, Homo sapiens
gattatataatacat

SEQ ID NO: 1792844 - DNA, 15 bp, Homo sapiens
attatataatacata

SEQ ID NO: 1792845 - DNA, 15 bp, Homo sapiens
ttatataatacatat

SEQ ID NO: 1792846 - DNA, 15 bp, Homo sapiens
tataatacatatata

SEQ ID NO: 1792847 - DNA, 15 bp, Homo sapiens
ataatacatatatac

SEQ ID NO: 1792848 - DNA, 15 bp, Homo sapiens
taatacatatataca

SEQ ID NO: 1792849 - DNA, 15 bp, Homo sapiens
aatacatatatacat

SEQ ID NO: 1792850 - DNA, 15 bp, Homo sapiens
atacatatatacatt

SEQ ID NO: 1792851 - DNA, 15 bp, Homo sapiens
acatatatacatttg

SEQ ID NO: 1792852 - DNA, 15 bp, Homo sapiens
catatatacatttgt

SEQ ID NO: 1792853 - DNA, 15 bp, Homo sapiens
atatatacatttgtg

SEQ ID NO: 1792854 - DNA, 15 bp, Homo sapiens
tatatacatttgtgt

SEQ ID NO: 1792855 - DNA, 15 bp, Homo sapiens
atatacatttgtgta

SEQ ID NO: 1792856 - DNA, 15 bp, Homo sapiens
tatacatttgtgtat

SEQ ID NO: 1792857 - DNA, 15 bp, Homo sapiens
atacatttgtgtata

SEQ ID NO: 1792858 - DNA, 15 bp, Homo sapiens
tacatttgtgtatat

SEQ ID NO: 1792859 - DNA, 15 bp, Homo sapiens
acatttgtgtatata

SEQ ID NO: 1792860 - DNA, 15 bp, Homo sapiens
catttgtgtatatac

SEQ ID NO: 1792861 - DNA, 15 bp, Homo sapiens
atttgtgtatataca

SEQ ID NO: 1792862 - DNA, 15 bp, Homo sapiens
tttgtgtatatacat

SEQ ID NO: 1792863 - DNA, 15 bp, Homo sapiens
ttgtgtatatacata

SEQ ID NO: 1792864 - DNA, 15 bp, Homo sapiens
tgtgtatatacatac

SEQ ID NO: 1792865 - DNA, 15 bp, Homo sapiens
gtgtatatacataca

SEQ ID NO: 1792866 - DNA, 15 bp, Homo sapiens
tgtatatacatacat

SEQ ID NO: 1792867 - DNA, 15 bp, Homo sapiens
gtatatacatacata

SEQ ID NO: 1792868 - DNA, 15 bp, Homo sapiens
atatacatacatata

SEQ ID NO: 1792869 - DNA, 15 bp, Homo sapiens
tacatacatatatac

SEQ ID NO: 1792870 - DNA, 15 bp, Homo sapiens
acatacatatatacg

SEQ ID NO: 1792871 - DNA, 15 bp, Homo sapiens
catacatatatacgt

SEQ ID NO: 1792872 - DNA, 15 bp, Homo sapiens
atacatatatacgtg

SEQ ID NO: 1792873 - DNA, 15 bp, Homo sapiens
tacatatatacgtga

SEQ ID NO: 1792874 - DNA, 15 bp, Homo sapiens
acatatatacgtgag

SEQ ID NO: 1792875 - DNA, 15 bp, Homo sapiens
catatatacgtgagc

SEQ ID NO: 1792876 - DNA, 15 bp, Homo sapiens
atatatacgtgagct

SEQ ID NO: 1792877 - DNA, 15 bp, Homo sapiens
tatatacgtgagctg

SEQ ID NO: 1792878 - DNA, 15 bp, Homo sapiens
atatacgtgagctgt

SEQ ID NO: 1792879 - DNA, 15 bp, Homo sapiens
tatacgtgagctgtt

SEQ ID NO: 1792880 - DNA, 15 bp, Homo sapiens
atacgtgagctgttt

SEQ ID NO: 1792881 - DNA, 15 bp, Homo sapiens
tacgtgagctgtttt

SEQ ID NO: 1792882 - DNA, 15 bp, Homo sapiens
acgtgagctgttttt

SEQ ID NO: 1792883 - DNA, 15 bp, Homo sapiens
cgtgagctgtttttg

SEQ ID NO: 1792884 - DNA, 15 bp, Homo sapiens
gtgagctgtttttgc

SEQ ID NO: 1792885 - DNA, 15 bp, Homo sapiens
tgagctgtttttgct

SEQ ID NO: 1792886 - DNA, 15 bp, Homo sapiens
gagctgtttttgctc

SEQ ID NO: 1792887 - DNA, 15 bp, Homo sapiens
agctgtttttgctca

SEQ ID NO: 1792888 - DNA, 15 bp, Homo sapiens
gctgtttttgctcac

SEQ ID NO: 1792889 - DNA, 15 bp, Homo sapiens
ctgtttttgctcaca

SEQ ID NO: 1792890 - DNA, 15 bp, Homo sapiens
tgtttttgctcacaa

SEQ ID NO: 1792891 - DNA, 15 bp, Homo sapiens
gtttttgctcacaac

SEQ ID NO: 1792892 - DNA, 15 bp, Homo sapiens
tttttgctcacaaca

SEQ ID NO: 1792893 - DNA, 15 bp, Homo sapiens
ttttgctcacaacat

SEQ ID NO: 1792894 - DNA, 15 bp, Homo sapiens
tttgctcacaacatt

SEQ ID NO: 1792895 - DNA, 15 bp, Homo sapiens
ttgctcacaacattt

SEQ ID NO: 1792896 - DNA, 15 bp, Homo sapiens
tgctcacaacatttc

SEQ ID NO: 1792897 - DNA, 15 bp, Homo sapiens
gctcacaacatttct

SEQ ID NO: 1792898 - DNA, 15 bp, Homo sapiens
ctcacaacatttcta

SEQ ID NO: 1792899 - DNA, 15 bp, Homo sapiens
tcacaacatttctat

SEQ ID NO: 1792900 - DNA, 15 bp, Homo sapiens
cacaacatttctatc

SEQ ID NO: 1792901 - DNA, 15 bp, Homo sapiens
acaacatttctatca

SEQ ID NO: 1792902 - DNA, 15 bp, Homo sapiens
caacatttctatcac

SEQ ID NO: 1792903 - DNA, 15 bp, Homo sapiens
aacatttctatcacc

SEQ ID NO: 1792904 - DNA, 15 bp, Homo sapiens
acatttctatcacca

SEQ ID NO: 1792905 - DNA, 15 bp, Homo sapiens
catttctatcaccaa

SEQ ID NO: 1792906 - DNA, 15 bp, Homo sapiens
atttctatcaccaaa

SEQ ID NO: 1792907 - DNA, 15 bp, Homo sapiens
tttctatcaccaaat

SEQ ID NO: 1792908 - DNA, 15 bp, Homo sapiens
ttctatcaccaaatg

SEQ ID NO: 1792909 - DNA, 15 bp, Homo sapiens
tctatcaccaaatgt

SEQ ID NO: 1792910 - DNA, 15 bp, Homo sapiens
ctatcaccaaatgtg

SEQ ID NO: 1792911 - DNA, 15 bp, Homo sapiens
tatcaccaaatgtgt

SEQ ID NO: 1792912 - DNA, 15 bp, Homo sapiens
atcaccaaatgtgtg

SEQ ID NO: 1792913 - DNA, 15 bp, Homo sapiens
tcaccaaatgtgtga

SEQ ID NO: 1792914 - DNA, 15 bp, Homo sapiens
caccaaatgtgtgag

SEQ ID NO: 1792915 - DNA, 15 bp, Homo sapiens
accaaatgtgtgaga

SEQ ID NO: 1792916 - DNA, 15 bp, Homo sapiens
ccaaatgtgtgagat

SEQ ID NO: 1792917 - DNA, 15 bp, Homo sapiens
caaatgtgtgagatt

SEQ ID NO: 1792918 - DNA, 15 bp, Homo sapiens
aaatgtgtgagattt

SEQ ID NO: 1792919 - DNA, 15 bp, Homo sapiens
aatgtgtgagatttt

SEQ ID NO: 1792920 - DNA, 15 bp, Homo sapiens
atgtgtgagattttt

SEQ ID NO: 1792921 - DNA, 15 bp, Homo sapiens
tgtgtgagatttttt

SEQ ID NO: 1792922 - DNA, 15 bp, Homo sapiens
gtgtgagattttttt

SEQ ID NO: 1792923 - DNA, 15 bp, Homo sapiens
tgtgagatttttttc

SEQ ID NO: 1792924 - DNA, 15 bp, Homo sapiens
gtgagatttttttct

SEQ ID NO: 1792925 - DNA, 15 bp, Homo sapiens
tgagatttttttctc

SEQ ID NO: 1792926 - DNA, 15 bp, Homo sapiens
gagatttttttctca

SEQ ID NO: 1792927 - DNA, 15 bp, Homo sapiens
agatttttttctcac

SEQ ID NO: 1792928 - DNA, 15 bp, Homo sapiens
gatttttttctcacc

SEQ ID NO: 1792929 - DNA, 15 bp, Homo sapiens
atttttttctcaccc

SEQ ID NO: 1792930 - DNA, 15 bp, Homo sapiens
tttttttctcaccca

SEQ ID NO: 1792931 - DNA, 15 bp, Homo sapiens
ttttttctcacccaa

SEQ ID NO: 1792932 - DNA, 15 bp, Homo sapiens
tttttctcacccaaa

SEQ ID NO: 1792933 - DNA, 15 bp, Homo sapiens
ttttctcacccaaat

SEQ ID NO: 1792934 - DNA, 15 bp, Homo sapiens
tttctcacccaaatc

SEQ ID NO: 1792935 - DNA, 15 bp, Homo sapiens
ttctcacccaaatct

SEQ ID NO: 1792936 - DNA, 15 bp, Homo sapiens
tctcacccaaatcta

SEQ ID NO: 1792937 - DNA, 15 bp, Homo sapiens
ctcacccaaatctat

SEQ ID NO: 1792938 - DNA, 15 bp, Homo sapiens
tcacccaaatctatt

SEQ ID NO: 1792939 - DNA, 15 bp, Homo sapiens
cacccaaatctattc

SEQ ID NO: 1792940 - DNA, 15 bp, Homo sapiens
acccaaatctattct

SEQ ID NO: 1792941 - DNA, 15 bp, Homo sapiens
cccaaatctattctt

SEQ ID NO: 1792942 - DNA, 15 bp, Homo sapiens
ccaaatctattcttc

SEQ ID NO: 1792943 - DNA, 15 bp, Homo sapiens
caaatctattcttca

SEQ ID NO: 1792944 - DNA, 15 bp, Homo sapiens
aaatctattcttcaa

SEQ ID NO: 1792945 - DNA, 15 bp, Homo sapiens
aatctattcttcaac

SEQ ID NO: 1792946 - DNA, 15 bp, Homo sapiens
atctattcttcaact

SEQ ID NO: 1792947 - DNA, 15 bp, Homo sapiens
tctattcttcaactc

SEQ ID NO: 1792948 - DNA, 15 bp, Homo sapiens
ctattcttcaactct

SEQ ID NO: 1792949 - DNA, 15 bp, Homo sapiens
tattcttcaactctc

SEQ ID NO: 1792950 - DNA, 15 bp, Homo sapiens
attcttcaactctct

SEQ ID NO: 1792951 - DNA, 15 bp, Homo sapiens
ttcttcaactctctg

SEQ ID NO: 1792952 - DNA, 15 bp, Homo sapiens
tcttcaactctctgg

SEQ ID NO: 1792953 - DNA, 15 bp, Homo sapiens
cttcaactctctggt

SEQ ID NO: 1792954 - DNA, 15 bp, Homo sapiens
ttcaactctctggtg

SEQ ID NO: 1792955 - DNA, 15 bp, Homo sapiens
tcaactctctggtgt

SEQ ID NO: 1792956 - DNA, 15 bp, Homo sapiens
caactctctggtgtt

SEQ ID NO: 1792957 - DNA, 15 bp, Homo sapiens
aactctctggtgttc

SEQ ID NO: 1792958 - DNA, 15 bp, Homo sapiens
actctctggtgttct

SEQ ID NO: 1792959 - DNA, 15 bp, Homo sapiens
ctctctggtgttcta

SEQ ID NO: 1792960 - DNA, 15 bp, Homo sapiens
tctctggtgttctac

SEQ ID NO: 1792961 - DNA, 15 bp, Homo sapiens
ctctggtgttctaca

SEQ ID NO: 1792962 - DNA, 15 bp, Homo sapiens
tctggtgttctacaa

SEQ ID NO: 1792963 - DNA, 15 bp, Homo sapiens
ctggtgttctacaat

SEQ ID NO: 1792964 - DNA, 15 bp, Homo sapiens
tggtgttctacaatt

SEQ ID NO: 1792965 - DNA, 15 bp, Homo sapiens
ggtgttctacaattc

SEQ ID NO: 1792966 - DNA, 15 bp, Homo sapiens
gtgttctacaattca

SEQ ID NO: 1792967 - DNA, 15 bp, Homo sapiens
tgttctacaattcaa

SEQ ID NO: 1792968 - DNA, 15 bp, Homo sapiens
gttctacaattcaat

SEQ ID NO: 1792969 - DNA, 15 bp, Homo sapiens
ttctacaattcaatt

SEQ ID NO: 1792970 - DNA, 15 bp, Homo sapiens
tctacaattcaattc

SEQ ID NO: 1792971 - DNA, 15 bp, Homo sapiens
ctacaattcaattca

SEQ ID NO: 1792972 - DNA, 15 bp, Homo sapiens
tacaattcaattcaa

SEQ ID NO: 1792973 - DNA, 15 bp, Homo sapiens
acaattcaattcaat

SEQ ID NO: 1792974 - DNA, 15 bp, Homo sapiens
caattcaattcaatt

SEQ ID NO: 1792975 - DNA, 15 bp, Homo sapiens
aattcaattcaattc

SEQ ID NO: 1792976 - DNA, 15 bp, Homo sapiens
attcaattcaattct

SEQ ID NO: 1792977 - DNA, 15 bp, Homo sapiens
ttcaattcaattctg

SEQ ID NO: 1792978 - DNA, 15 bp, Homo sapiens
tcaattcaattctga

SEQ ID NO: 1792979 - DNA, 15 bp, Homo sapiens
caattcaattctgac

SEQ ID NO: 1792980 - DNA, 15 bp, Homo sapiens
aattcaattctgaca

SEQ ID NO: 1792981 - DNA, 15 bp, Homo sapiens
attcaattctgacac

SEQ ID NO: 1792982 - DNA, 15 bp, Homo sapiens
ttcaattctgacact

SEQ ID NO: 1792983 - DNA, 15 bp, Homo sapiens
tcaattctgacacta

SEQ ID NO: 1792984 - DNA, 15 bp, Homo sapiens
caattctgacactaa

SEQ ID NO: 1792985 - DNA, 15 bp, Homo sapiens
aattctgacactaat

SEQ ID NO: 1792986 - DNA, 15 bp, Homo sapiens
attctgacactaatt

SEQ ID NO: 1792987 - DNA, 15 bp, Homo sapiens
ttctgacactaatta

SEQ ID NO: 1792988 - DNA, 15 bp, Homo sapiens
tctgacactaattac

SEQ ID NO: 1792989 - DNA, 15 bp, Homo sapiens
ctgacactaattacc

SEQ ID NO: 1792990 - DNA, 15 bp, Homo sapiens
tgacactaattaccc

SEQ ID NO: 1792991 - DNA, 15 bp, Homo sapiens
gacactaattaccca

SEQ ID NO: 1792992 - DNA, 15 bp, Homo sapiens
acactaattacccag

SEQ ID NO: 1792993 - DNA, 15 bp, Homo sapiens
cactaattacccaga

SEQ ID NO: 1792994 - DNA, 15 bp, Homo sapiens
actaattacccagag

SEQ ID NO: 1792995 - DNA, 15 bp, Homo sapiens
ctaattacccagagt

SEQ ID NO: 1792996 - DNA, 15 bp, Homo sapiens
taattacccagagtc

SEQ ID NO: 1792997 - DNA, 15 bp, Homo sapiens
aattacccagagtca

SEQ ID NO: 1792998 - DNA, 15 bp, Homo sapiens
attacccagagtcag

SEQ ID NO: 1792999 - DNA, 15 bp, Homo sapiens
ttacccagagtcagc

SEQ ID NO: 1793000 - DNA, 15 bp, Homo sapiens
tacccagagtcagca

SEQ ID NO: 1793001 - DNA, 15 bp, Homo sapiens
acccagagtcagcat

SEQ ID NO: 1793002 - DNA, 15 bp, Homo sapiens
cccagagtcagcatc

SEQ ID NO: 1793003 - DNA, 15 bp, Homo sapiens
ccagagtcagcatca

SEQ ID NO: 1793004 - DNA, 15 bp, Homo sapiens
cagagtcagcatcag

SEQ ID NO: 1793005 - DNA, 15 bp, Homo sapiens
agagtcagcatcaga

SEQ ID NO: 1793006 - DNA, 15 bp, Homo sapiens
gagtcagcatcagac

SEQ ID NO: 1793007 - DNA, 15 bp, Homo sapiens
agtcagcatcagact

SEQ ID NO: 1793008 - DNA, 15 bp, Homo sapiens
gtcagcatcagactc

SEQ ID NO: 1793009 - DNA, 15 bp, Homo sapiens
tcagcatcagactcc

SEQ ID NO: 1793010 - DNA, 15 bp, Homo sapiens
cagcatcagactcca

SEQ ID NO: 1793011 - DNA, 15 bp, Homo sapiens
agcatcagactccac

SEQ ID NO: 1793012 - DNA, 15 bp, Homo sapiens
gcatcagactccaca

SEQ ID NO: 1793013 - DNA, 15 bp, Homo sapiens
catcagactccacag

SEQ ID NO: 1793014 - DNA, 15 bp, Homo sapiens
atcagactccacagg

SEQ ID NO: 1793015 - DNA, 15 bp, Homo sapiens
tcagactccacaggt

SEQ ID NO: 1793016 - DNA, 15 bp, Homo sapiens
cagactccacaggtt

SEQ ID NO: 1793017 - DNA, 15 bp, Homo sapiens
agactccacaggttc

SEQ ID NO: 1793018 - DNA, 15 bp, Homo sapiens
gactccacaggttca

SEQ ID NO: 1793019 - DNA, 15 bp, Homo sapiens
actccacaggttcaa

SEQ ID NO: 1793020 - DNA, 15 bp, Homo sapiens
ctccacaggttcaag

SEQ ID NO: 1793021 - DNA, 15 bp, Homo sapiens
tccacaggttcaagg

SEQ ID NO: 1793022 - DNA, 15 bp, Homo sapiens
ccacaggttcaaggg

SEQ ID NO: 1793023 - DNA, 15 bp, Homo sapiens
cacaggttcaagggc

SEQ ID NO: 1793024 - DNA, 15 bp, Homo sapiens
acaggttcaagggct

SEQ ID NO: 1793025 - DNA, 15 bp, Homo sapiens
caggttcaagggctc

SEQ ID NO: 1793026 - DNA, 15 bp, Homo sapiens
aggttcaagggctca

SEQ ID NO: 1793027 - DNA, 15 bp, Homo sapiens
ggttcaagggctcag

SEQ ID NO: 1793028 - DNA, 15 bp, Homo sapiens
gttcaagggctcagt

SEQ ID NO: 1793029 - DNA, 15 bp, Homo sapiens
ttcaagggctcagtc

SEQ ID NO: 1793030 - DNA, 15 bp, Homo sapiens
tcaagggctcagtcc

SEQ ID NO: 1793031 - DNA, 15 bp, Homo sapiens
caagggctcagtccc

SEQ ID NO: 1793032 - DNA, 15 bp, Homo sapiens
aagggctcagtccca

SEQ ID NO: 1793033 - DNA, 15 bp, Homo sapiens
gggctcagtcccaca

SEQ ID NO: 1793034 - DNA, 15 bp, Homo sapiens
ggctcagtcccacaa

SEQ ID NO: 1793035 - DNA, 15 bp, Homo sapiens
gctcagtcccacaaa

SEQ ID NO: 1793036 - DNA, 15 bp, Homo sapiens
ctcagtcccacaaaa

SEQ ID NO: 1793037 - DNA, 15 bp, Homo sapiens
tcagtcccacaaaaa

SEQ ID NO: 1793038 - DNA, 15 bp, Homo sapiens
cagtcccacaaaaat

SEQ ID NO: 1793039 - DNA, 15 bp, Homo sapiens
agtcccacaaaaatg

SEQ ID NO: 1793040 - DNA, 15 bp, Homo sapiens
gtcccacaaaaatgg

SEQ ID NO: 1793041 - DNA, 15 bp, Homo sapiens
tcccacaaaaatggt

SEQ ID NO: 1793042 - DNA, 15 bp, Homo sapiens
cccacaaaaatggtc

SEQ ID NO: 1793043 - DNA, 15 bp, Homo sapiens
ccacaaaaatggtct

SEQ ID NO: 1793044 - DNA, 15 bp, Homo sapiens
cacaaaaatggtctc

SEQ ID NO: 1793045 - DNA, 15 bp, Homo sapiens
acaaaaatggtctca

SEQ ID NO: 1793046 - DNA, 15 bp, Homo sapiens
caaaaatggtctcac

SEQ ID NO: 1793047 - DNA, 15 bp, Homo sapiens
aaaaatggtctcact

SEQ ID NO: 1793048 - DNA, 15 bp, Homo sapiens
aaaatggtctcactg

SEQ ID NO: 1793049 - DNA, 15 bp, Homo sapiens
aaatggtctcactgc

SEQ ID NO: 1793050 - DNA, 15 bp, Homo sapiens
aatggtctcactgca

SEQ ID NO: 1793051 - DNA, 15 bp, Homo sapiens
atggtctcactgcag

SEQ ID NO: 1793052 - DNA, 15 bp, Homo sapiens
tggtctcactgcaga

SEQ ID NO: 1793053 - DNA, 15 bp, Homo sapiens
ggtctcactgcagac

SEQ ID NO: 1793054 - DNA, 15 bp, Homo sapiens
gtctcactgcagaca

SEQ ID NO: 1793055 - DNA, 15 bp, Homo sapiens
tctcactgcagacac

SEQ ID NO: 1793056 - DNA, 15 bp, Homo sapiens
ctcactgcagacacc

SEQ ID NO: 1793057 - DNA, 15 bp, Homo sapiens
tcactgcagacacca

SEQ ID NO: 1793058 - DNA, 15 bp, Homo sapiens
cactgcagacaccag

SEQ ID NO: 1793059 - DNA, 15 bp, Homo sapiens
actgcagacaccagt

SEQ ID NO: 1793060 - DNA, 15 bp, Homo sapiens
ctgcagacaccagtc

SEQ ID NO: 1793061 - DNA, 15 bp, Homo sapiens
tgcagacaccagtca

SEQ ID NO: 1793062 - DNA, 15 bp, Homo sapiens
gcagacaccagtcac

SEQ ID NO: 1793063 - DNA, 15 bp, Homo sapiens
cagacaccagtcaca

SEQ ID NO: 1793064 - DNA, 15 bp, Homo sapiens
agacaccagtcacaa

SEQ ID NO: 1793065 - DNA, 15 bp, Homo sapiens
gacaccagtcacaag

SEQ ID NO: 1793066 - DNA, 15 bp, Homo sapiens
acaccagtcacaagt

SEQ ID NO: 1793067 - DNA, 15 bp, Homo sapiens
caccagtcacaagtg

SEQ ID NO: 1793068 - DNA, 15 bp, Homo sapiens
accagtcacaagtgt

SEQ ID NO: 1793069 - DNA, 15 bp, Homo sapiens
ccagtcacaagtgtc

SEQ ID NO: 1793070 - DNA, 15 bp, Homo sapiens
cagtcacaagtgtca

SEQ ID NO: 1793071 - DNA, 15 bp, Homo sapiens
agtcacaagtgtcag

SEQ ID NO: 1793072 - DNA, 15 bp, Homo sapiens
gtcacaagtgtcagg

SEQ ID NO: 1793073 - DNA, 15 bp, Homo sapiens
tcacaagtgtcaggt

SEQ ID NO: 1793074 - DNA, 15 bp, Homo sapiens
cacaagtgtcaggtc

SEQ ID NO: 1793075 - DNA, 15 bp, Homo sapiens
acaagtgtcaggtcc

SEQ ID NO: 1793076 - DNA, 15 bp, Homo sapiens
caagtgtcaggtccc

SEQ ID NO: 1793077 - DNA, 15 bp, Homo sapiens
aagtgtcaggtcccc

SEQ ID NO: 1793078 - DNA, 15 bp, Homo sapiens
agtgtcaggtcccca

SEQ ID NO: 1793079 - DNA, 15 bp, Homo sapiens
gtgtcaggtccccag

SEQ ID NO: 1793080 - DNA, 15 bp, Homo sapiens
tgtcaggtccccagg

SEQ ID NO: 1793081 - DNA, 15 bp, Homo sapiens
gtcaggtccccaggc

SEQ ID NO: 1793082 - DNA, 15 bp, Homo sapiens
tcaggtccccaggct

SEQ ID NO: 1793083 - DNA, 15 bp, Homo sapiens
caggtccccaggcta

SEQ ID NO: 1793084 - DNA, 15 bp, Homo sapiens
aggtccccaggctac

SEQ ID NO: 1793085 - DNA, 15 bp, Homo sapiens
ggtccccaggctaca

SEQ ID NO: 1793086 - DNA, 15 bp, Homo sapiens
gtccccaggctacac

SEQ ID NO: 1793087 - DNA, 15 bp, Homo sapiens
tccccaggctacacc

SEQ ID NO: 1793088 - DNA, 15 bp, Homo sapiens
ccccaggctacacca

SEQ ID NO: 1793089 - DNA, 15 bp, Homo sapiens
cccaggctacaccac

SEQ ID NO: 1793090 - DNA, 15 bp, Homo sapiens
ccaggctacaccaca

SEQ ID NO: 1793091 - DNA, 15 bp, Homo sapiens
caggctacaccacac

SEQ ID NO: 1793092 - DNA, 15 bp, Homo sapiens
aggctacaccacact

SEQ ID NO: 1793093 - DNA, 15 bp, Homo sapiens
ggctacaccacactt

SEQ ID NO: 1793094 - DNA, 15 bp, Homo sapiens
gctacaccacacttc

SEQ ID NO: 1793095 - DNA, 15 bp, Homo sapiens
ctacaccacacttcc

SEQ ID NO: 1793096 - DNA, 15 bp, Homo sapiens
tacaccacacttccg

SEQ ID NO: 1793097 - DNA, 15 bp, Homo sapiens
acaccacacttccgt

SEQ ID NO: 1793098 - DNA, 15 bp, Homo sapiens
caccacacttccgtc

SEQ ID NO: 1793099 - DNA, 15 bp, Homo sapiens
accacacttccgtct

SEQ ID NO: 1793100 - DNA, 15 bp, Homo sapiens
ccacacttccgtctg

SEQ ID NO: 1793101 - DNA, 15 bp, Homo sapiens
cacacttccgtctga

SEQ ID NO: 1793102 - DNA, 15 bp, Homo sapiens
acacttccgtctgac

SEQ ID NO: 1793103 - DNA, 15 bp, Homo sapiens
cacttccgtctgact

SEQ ID NO: 1793104 - DNA, 15 bp, Homo sapiens
acttccgtctgactt

SEQ ID NO: 1793105 - DNA, 15 bp, Homo sapiens
cttccgtctgacttg

SEQ ID NO: 1793106 - DNA, 15 bp, Homo sapiens
ttccgtctgacttga

SEQ ID NO: 1793107 - DNA, 15 bp, Homo sapiens
tccgtctgacttgaa

SEQ ID NO: 1793108 - DNA, 15 bp, Homo sapiens
ccgtctgacttgaat

SEQ ID NO: 1793109 - DNA, 15 bp, Homo sapiens
cgtctgacttgaata

SEQ ID NO: 1793110 - DNA, 15 bp, Homo sapiens
gtctgacttgaatac

SEQ ID NO: 1793111 - DNA, 15 bp, Homo sapiens
tctgacttgaatacg

SEQ ID NO: 1793112 - DNA, 15 bp, Homo sapiens
ctgacttgaatacga

SEQ ID NO: 1793113 - DNA, 15 bp, Homo sapiens
tgacttgaatacgaa

SEQ ID NO: 1793114 - DNA, 15 bp, Homo sapiens
gacttgaatacgaag

SEQ ID NO: 1793115 - DNA, 15 bp, Homo sapiens
acttgaatacgaagt

SEQ ID NO: 1793116 - DNA, 15 bp, Homo sapiens
cttgaatacgaagtt

SEQ ID NO: 1793117 - DNA, 15 bp, Homo sapiens
ttgaatacgaagttg

SEQ ID NO: 1793118 - DNA, 15 bp, Homo sapiens
tgaatacgaagttgg

SEQ ID NO: 1793119 - DNA, 15 bp, Homo sapiens
gaatacgaagttggg

SEQ ID NO: 1793120 - DNA, 15 bp, Homo sapiens
aatacgaagttgggg

SEQ ID NO: 1793121 - DNA, 15 bp, Homo sapiens
atacgaagttggggg

SEQ ID NO: 1793122 - DNA, 15 bp, Homo sapiens
tacgaagttgggggg

SEQ ID NO: 1793123 - DNA, 15 bp, Homo sapiens
acgaagttggggggt

SEQ ID NO: 1793124 - DNA, 15 bp, Homo sapiens
cgaagttggggggtt

SEQ ID NO: 1793125 - DNA, 15 bp, Homo sapiens
gaagttggggggttc

SEQ ID NO: 1793126 - DNA, 15 bp, Homo sapiens
aagttggggggttcc

SEQ ID NO: 1793127 - DNA, 15 bp, Homo sapiens
agttggggggttccg

SEQ ID NO: 1793128 - DNA, 15 bp, Homo sapiens
gttggggggttccga

SEQ ID NO: 1793129 - DNA, 15 bp, Homo sapiens
ttggggggttccgat

SEQ ID NO: 1793130 - DNA, 15 bp, Homo sapiens
tggggggttccgata

SEQ ID NO: 1793131 - DNA, 15 bp, Homo sapiens
ggggggttccgatag

SEQ ID NO: 1793132 - DNA, 15 bp, Homo sapiens
gggggttccgatagt

SEQ ID NO: 1793133 - DNA, 15 bp, Homo sapiens
ggggttccgatagtg

SEQ ID NO: 1793134 - DNA, 15 bp, Homo sapiens
gggttccgatagtgc

SEQ ID NO: 1793135 - DNA, 15 bp, Homo sapiens
ggttccgatagtgcc

SEQ ID NO: 1793136 - DNA, 15 bp, Homo sapiens
gttccgatagtgcct

SEQ ID NO: 1793137 - DNA, 15 bp, Homo sapiens
ttccgatagtgcctc

SEQ ID NO: 1793138 - DNA, 15 bp, Homo sapiens
tccgatagtgcctct

SEQ ID NO: 1793139 - DNA, 15 bp, Homo sapiens
ccgatagtgcctctt

SEQ ID NO: 1793140 - DNA, 15 bp, Homo sapiens
cgatagtgcctcttc

SEQ ID NO: 1793141 - DNA, 15 bp, Homo sapiens
gatagtgcctcttcc

SEQ ID NO: 1793142 - DNA, 15 bp, Homo sapiens
atagtgcctcttcct

SEQ ID NO: 1793143 - DNA, 15 bp, Homo sapiens
tagtgcctcttcctt

SEQ ID NO: 1793144 - DNA, 15 bp, Homo sapiens
agtgcctcttcctta

SEQ ID NO: 1793145 - DNA, 15 bp, Homo sapiens
gtgcctcttccttac

SEQ ID NO: 1793146 - DNA, 15 bp, Homo sapiens
tgcctcttccttaca

SEQ ID NO: 1793147 - DNA, 15 bp, Homo sapiens
gcctcttccttacag

SEQ ID NO: 1793148 - DNA, 15 bp, Homo sapiens
cctcttccttacagt

SEQ ID NO: 1793149 - DNA, 15 bp, Homo sapiens
ctcttccttacagtt

SEQ ID NO: 1793150 - DNA, 15 bp, Homo sapiens
tcttccttacagttt

SEQ ID NO: 1793151 - DNA, 15 bp, Homo sapiens
cttccttacagtttg

SEQ ID NO: 1793152 - DNA, 15 bp, Homo sapiens
ttccttacagtttga

SEQ ID NO: 1793153 - DNA, 15 bp, Homo sapiens
tccttacagtttgat

SEQ ID NO: 1793154 - DNA, 15 bp, Homo sapiens
ccttacagtttgatc

SEQ ID NO: 1793155 - DNA, 15 bp, Homo sapiens
cttacagtttgatcc

SEQ ID NO: 1793156 - DNA, 15 bp, Homo sapiens
ttacagtttgatcca

SEQ ID NO: 1793157 - DNA, 15 bp, Homo sapiens
tacagtttgatccac

SEQ ID NO: 1793158 - DNA, 15 bp, Homo sapiens
acagtttgatccact

SEQ ID NO: 1793159 - DNA, 15 bp, Homo sapiens
cagtttgatccactg

SEQ ID NO: 1793160 - DNA, 15 bp, Homo sapiens
agtttgatccactgc

SEQ ID NO: 1793161 - DNA, 15 bp, Homo sapiens
gtttgatccactgcc

SEQ ID NO: 1793162 - DNA, 15 bp, Homo sapiens
tttgatccactgcca

SEQ ID NO: 1793163 - DNA, 15 bp, Homo sapiens
ttgatccactgccag

SEQ ID NO: 1793164 - DNA, 15 bp, Homo sapiens
tgatccactgccaga

SEQ ID NO: 1793165 - DNA, 15 bp, Homo sapiens
gatccactgccagaa

SEQ ID NO: 1793166 - DNA, 15 bp, Homo sapiens
atccactgccagaac

SEQ ID NO: 1793167 - DNA, 15 bp, Homo sapiens
tccactgccagaact

SEQ ID NO: 1793168 - DNA, 15 bp, Homo sapiens
ccactgccagaacta

SEQ ID NO: 1793169 - DNA, 15 bp, Homo sapiens
cactgccagaactac

SEQ ID NO: 1793170 - DNA, 15 bp, Homo sapiens
actgccagaactact

SEQ ID NO: 1793171 - DNA, 15 bp, Homo sapiens
ctgccagaactactc

SEQ ID NO: 1793172 - DNA, 15 bp, Homo sapiens
tgccagaactactca

SEQ ID NO: 1793173 - DNA, 15 bp, Homo sapiens
gccagaactactcac

SEQ ID NO: 1793174 - DNA, 15 bp, Homo sapiens
ccagaactactcaca

SEQ ID NO: 1793175 - DNA, 15 bp, Homo sapiens
cagaactactcacaa

SEQ ID NO: 1793176 - DNA, 15 bp, Homo sapiens
agaactactcacaaa

SEQ ID NO: 1793177 - DNA, 15 bp, Homo sapiens
gaactactcacaaaa

SEQ ID NO: 1793178 - DNA, 15 bp, Homo sapiens
aactactcacaaaac

SEQ ID NO: 1793179 - DNA, 15 bp, Homo sapiens
actactcacaaaact

SEQ ID NO: 1793180 - DNA, 15 bp, Homo sapiens
ctactcacaaaactc

SEQ ID NO: 1793181 - DNA, 15 bp, Homo sapiens
tactcacaaaactct

SEQ ID NO: 1793182 - DNA, 15 bp, Homo sapiens
actcacaaaactctg

SEQ ID NO: 1793183 - DNA, 15 bp, Homo sapiens
ctcacaaaactctgg

SEQ ID NO: 1793184 - DNA, 15 bp, Homo sapiens
tcacaaaactctgga

SEQ ID NO: 1793185 - DNA, 15 bp, Homo sapiens
cacaaaactctggaa

SEQ ID NO: 1793186 - DNA, 15 bp, Homo sapiens
acaaaactctggaaa

SEQ ID NO: 1793187 - DNA, 15 bp, Homo sapiens
caaaactctggaaaa

SEQ ID NO: 1793188 - DNA, 15 bp, Homo sapiens
aaaactctggaaaat

SEQ ID NO: 1793189 - DNA, 15 bp, Homo sapiens
aaactctggaaaata

SEQ ID NO: 1793190 - DNA, 15 bp, Homo sapiens
aactctggaaaatat

SEQ ID NO: 1793191 - DNA, 15 bp, Homo sapiens
actctggaaaatatt

SEQ ID NO: 1793192 - DNA, 15 bp, Homo sapiens
ctctggaaaatattc

SEQ ID NO: 1793193 - DNA, 15 bp, Homo sapiens
tctggaaaatattct

SEQ ID NO: 1793194 - DNA, 15 bp, Homo sapiens
ctggaaaatattcta

SEQ ID NO: 1793195 - DNA, 15 bp, Homo sapiens
tggaaaatattctac

SEQ ID NO: 1793196 - DNA, 15 bp, Homo sapiens
ggaaaatattctact

SEQ ID NO: 1793197 - DNA, 15 bp, Homo sapiens
gaaaatattctactt

SEQ ID NO: 1793198 - DNA, 15 bp, Homo sapiens
aaaatattctactta

SEQ ID NO: 1793199 - DNA, 15 bp, Homo sapiens
aaatattctacttac

SEQ ID NO: 1793200 - DNA, 15 bp, Homo sapiens
aatattctacttact

SEQ ID NO: 1793201 - DNA, 15 bp, Homo sapiens
atattctacttacta

SEQ ID NO: 1793202 - DNA, 15 bp, Homo sapiens
tattctacttactat

SEQ ID NO: 1793203 - DNA, 15 bp, Homo sapiens
attctacttactatt

SEQ ID NO: 1793204 - DNA, 15 bp, Homo sapiens
ttctacttactatta

SEQ ID NO: 1793205 - DNA, 15 bp, Homo sapiens
tctacttactattat

SEQ ID NO: 1793206 - DNA, 15 bp, Homo sapiens
ctacttactattatc

SEQ ID NO: 1793207 - DNA, 15 bp, Homo sapiens
tacttactattatca

SEQ ID NO: 1793208 - DNA, 15 bp, Homo sapiens
acttactattatcag

SEQ ID NO: 1793209 - DNA, 15 bp, Homo sapiens
cttactattatcagt

SEQ ID NO: 1793210 - DNA, 15 bp, Homo sapiens
ttactattatcagtt

SEQ ID NO: 1793211 - DNA, 15 bp, Homo sapiens
tactattatcagttc

SEQ ID NO: 1793212 - DNA, 15 bp, Homo sapiens
actattatcagttca

SEQ ID NO: 1793213 - DNA, 15 bp, Homo sapiens
ctattatcagttcat

SEQ ID NO: 1793214 - DNA, 15 bp, Homo sapiens
tattatcagttcatc

SEQ ID NO: 1793215 - DNA, 15 bp, Homo sapiens
attatcagttcatca

SEQ ID NO: 1793216 - DNA, 15 bp, Homo sapiens
ttatcagttcatcat

SEQ ID NO: 1793217 - DNA, 15 bp, Homo sapiens
tatcagttcatcata

SEQ ID NO: 1793218 - DNA, 15 bp, Homo sapiens
atcagttcatcataa

SEQ ID NO: 1793219 - DNA, 15 bp, Homo sapiens
tcagttcatcataaa

SEQ ID NO: 1793220 - DNA, 15 bp, Homo sapiens
cagttcatcataaaa

SEQ ID NO: 1793221 - DNA, 15 bp, Homo sapiens
agttcatcataaaag

SEQ ID NO: 1793222 - DNA, 15 bp, Homo sapiens
gttcatcataaaaga

SEQ ID NO: 1793223 - DNA, 15 bp, Homo sapiens
ttcatcataaaagat

SEQ ID NO: 1793224 - DNA, 15 bp, Homo sapiens
tcatcataaaagata

SEQ ID NO: 1793225 - DNA, 15 bp, Homo sapiens
catcataaaagatac

SEQ ID NO: 1793226 - DNA, 15 bp, Homo sapiens
atcataaaagataca

SEQ ID NO: 1793227 - DNA, 15 bp, Homo sapiens
tcataaaagatacaa

SEQ ID NO: 1793228 - DNA, 15 bp, Homo sapiens
cataaaagatacaaa

SEQ ID NO: 1793229 - DNA, 15 bp, Homo sapiens
ataaaagatacaaat

SEQ ID NO: 1793230 - DNA, 15 bp, Homo sapiens
taaaagatacaaatg

SEQ ID NO: 1793231 - DNA, 15 bp, Homo sapiens
aaaagatacaaatga

SEQ ID NO: 1793232 - DNA, 15 bp, Homo sapiens
aaagatacaaatgaa

SEQ ID NO: 1793233 - DNA, 15 bp, Homo sapiens
aagatacaaatgaac

SEQ ID NO: 1793234 - DNA, 15 bp, Homo sapiens
agatacaaatgaaca

SEQ ID NO: 1793235 - DNA, 15 bp, Homo sapiens
gatacaaatgaacag

SEQ ID NO: 1793236 - DNA, 15 bp, Homo sapiens
atacaaatgaacagc

SEQ ID NO: 1793237 - DNA, 15 bp, Homo sapiens
tacaaatgaacagcc

SEQ ID NO: 1793238 - DNA, 15 bp, Homo sapiens
acaaatgaacagcca

SEQ ID NO: 1793239 - DNA, 15 bp, Homo sapiens
caaatgaacagccag

SEQ ID NO: 1793240 - DNA, 15 bp, Homo sapiens
aaatgaacagccaga

SEQ ID NO: 1793241 - DNA, 15 bp, Homo sapiens
aatgaacagccagat

SEQ ID NO: 1793242 - DNA, 15 bp, Homo sapiens
atgaacagccagatg

SEQ ID NO: 1793243 - DNA, 15 bp, Homo sapiens
tgaacagccagatga

SEQ ID NO: 1793244 - DNA, 15 bp, Homo sapiens
gaacagccagatgaa

SEQ ID NO: 1793245 - DNA, 15 bp, Homo sapiens
aacagccagatgaag

SEQ ID NO: 1793246 - DNA, 15 bp, Homo sapiens
acagccagatgaaga

SEQ ID NO: 1793247 - DNA, 15 bp, Homo sapiens
cagccagatgaagaa

SEQ ID NO: 1793248 - DNA, 15 bp, Homo sapiens
agccagatgaagaaa

SEQ ID NO: 1793249 - DNA, 15 bp, Homo sapiens
gccagatgaagaaat

SEQ ID NO: 1793250 - DNA, 15 bp, Homo sapiens
ccagatgaagaaata

SEQ ID NO: 1793251 - DNA, 15 bp, Homo sapiens
cagatgaagaaatat

SEQ ID NO: 1793252 - DNA, 15 bp, Homo sapiens
agatgaagaaatatt

SEQ ID NO: 1793253 - DNA, 15 bp, Homo sapiens
gatgaagaaatatta

SEQ ID NO: 1793254 - DNA, 15 bp, Homo sapiens
atgaagaaatattat

SEQ ID NO: 1793255 - DNA, 15 bp, Homo sapiens
tgaagaaatattata

SEQ ID NO: 1793256 - DNA, 15 bp, Homo sapiens
gaagaaatattatat

SEQ ID NO: 1793257 - DNA, 15 bp, Homo sapiens
aagaaatattatata

SEQ ID NO: 1793258 - DNA, 15 bp, Homo sapiens
agaaatattatatag

SEQ ID NO: 1793259 - DNA, 15 bp, Homo sapiens
gaaatattatatagg

SEQ ID NO: 1793260 - DNA, 15 bp, Homo sapiens
aaatattatataggg

SEQ ID NO: 1793261 - DNA, 15 bp, Homo sapiens
aatattatatagggt

SEQ ID NO: 1793262 - DNA, 15 bp, Homo sapiens
atattatatagggtg

SEQ ID NO: 1793263 - DNA, 15 bp, Homo sapiens
tattatatagggtga

SEQ ID NO: 1793264 - DNA, 15 bp, Homo sapiens
attatatagggtgag

SEQ ID NO: 1793265 - DNA, 15 bp, Homo sapiens
ttatatagggtgagg

SEQ ID NO: 1793266 - DNA, 15 bp, Homo sapiens
tatatagggtgaggt

SEQ ID NO: 1793267 - DNA, 15 bp, Homo sapiens
atatagggtgaggtc

SEQ ID NO: 1793268 - DNA, 15 bp, Homo sapiens
tatagggtgaggtcc

SEQ ID NO: 1793269 - DNA, 15 bp, Homo sapiens
atagggtgaggtcca

SEQ ID NO: 1793270 - DNA, 15 bp, Homo sapiens
tagggtgaggtccag

SEQ ID NO: 1793271 - DNA, 15 bp, Homo sapiens
agggtgaggtccaga

SEQ ID NO: 1793272 - DNA, 15 bp, Homo sapiens
gggtgaggtccagaa

SEQ ID NO: 1793273 - DNA, 15 bp, Homo sapiens
ggtgaggtccagaag

SEQ ID NO: 1793274 - DNA, 15 bp, Homo sapiens
gtgaggtccagaaga

SEQ ID NO: 1793275 - DNA, 15 bp, Homo sapiens
tgaggtccagaagag

SEQ ID NO: 1793276 - DNA, 15 bp, Homo sapiens
gaggtccagaagagt

SEQ ID NO: 1793277 - DNA, 15 bp, Homo sapiens
aggtccagaagagtc

SEQ ID NO: 1793278 - DNA, 15 bp, Homo sapiens
ggtccagaagagtcc

SEQ ID NO: 1793279 - DNA, 15 bp, Homo sapiens
gtccagaagagtccc

SEQ ID NO: 1793280 - DNA, 15 bp, Homo sapiens
tccagaagagtccct

SEQ ID NO: 1793281 - DNA, 15 bp, Homo sapiens
ccagaagagtcccta

SEQ ID NO: 1793282 - DNA, 15 bp, Homo sapiens
cagaagagtccctag

SEQ ID NO: 1793283 - DNA, 15 bp, Homo sapiens
agaagagtccctagc

SEQ ID NO: 1793284 - DNA, 15 bp, Homo sapiens
gaagagtccctagca

SEQ ID NO: 1793285 - DNA, 15 bp, Homo sapiens
aagagtccctagcac

SEQ ID NO: 1793286 - DNA, 15 bp, Homo sapiens
agagtccctagcaca

SEQ ID NO: 1793287 - DNA, 15 bp, Homo sapiens
gagtccctagcacag

SEQ ID NO: 1793288 - DNA, 15 bp, Homo sapiens
agtccctagcacagg

SEQ ID NO: 1793289 - DNA, 15 bp, Homo sapiens
gtccctagcacaggg

SEQ ID NO: 1793290 - DNA, 15 bp, Homo sapiens
tccctagcacagggg

SEQ ID NO: 1793291 - DNA, 15 bp, Homo sapiens
ccctagcacaggggc

SEQ ID NO: 1793292 - DNA, 15 bp, Homo sapiens
cctagcacaggggct

SEQ ID NO: 1793293 - DNA, 15 bp, Homo sapiens
ctagcacaggggctt

SEQ ID NO: 1793294 - DNA, 15 bp, Homo sapiens
tagcacaggggcttc

SEQ ID NO: 1793295 - DNA, 15 bp, Homo sapiens
agcacaggggcttct

SEQ ID NO: 1793296 - DNA, 15 bp, Homo sapiens
gcacaggggcttctg

SEQ ID NO: 1793297 - DNA, 15 bp, Homo sapiens
cacaggggcttctgt

SEQ ID NO: 1793298 - DNA, 15 bp, Homo sapiens
acaggggcttctgtc

SEQ ID NO: 1793299 - DNA, 15 bp, Homo sapiens
caggggcttctgtcc

SEQ ID NO: 1793300 - DNA, 15 bp, Homo sapiens
aggggcttctgtccc

SEQ ID NO: 1793301 - DNA, 15 bp, Homo sapiens
ggggcttctgtccct

SEQ ID NO: 1793302 - DNA, 15 bp, Homo sapiens
gggcttctgtccctg

SEQ ID NO: 1793303 - DNA, 15 bp, Homo sapiens
ggcttctgtccctgg

SEQ ID NO: 1793304 - DNA, 15 bp, Homo sapiens
gcttctgtccctggg

SEQ ID NO: 1793305 - DNA, 15 bp, Homo sapiens
cttctgtccctgggg

SEQ ID NO: 1793306 - DNA, 15 bp, Homo sapiens
ttctgtccctgggga

SEQ ID NO: 1793307 - DNA, 15 bp, Homo sapiens
tctgtccctggggag

SEQ ID NO: 1793308 - DNA, 15 bp, Homo sapiens
tgtccctggggagtt

SEQ ID NO: 1793309 - DNA, 15 bp, Homo sapiens
gtccctggggagttg

SEQ ID NO: 1793310 - DNA, 15 bp, Homo sapiens
tccctggggagttgg

SEQ ID NO: 1793311 - DNA, 15 bp, Homo sapiens
ccctggggagttggg

SEQ ID NO: 1793312 - DNA, 15 bp, Homo sapiens
cctggggagttgggg

SEQ ID NO: 1793313 - DNA, 15 bp, Homo sapiens
ctggggagttggggt

SEQ ID NO: 1793314 - DNA, 15 bp, Homo sapiens
tggggagttggggtg

SEQ ID NO: 1793315 - DNA, 15 bp, Homo sapiens
ggggagttggggtgc

SEQ ID NO: 1793316 - DNA, 15 bp, Homo sapiens
gggagttggggtgca

SEQ ID NO: 1793317 - DNA, 15 bp, Homo sapiens
ggagttggggtgcac

SEQ ID NO: 1793318 - DNA, 15 bp, Homo sapiens
gagttggggtgcacc

SEQ ID NO: 1793319 - DNA, 15 bp, Homo sapiens
agttggggtgcacca

SEQ ID NO: 1793320 - DNA, 15 bp, Homo sapiens
gttggggtgcaccac

SEQ ID NO: 1793321 - DNA, 15 bp, Homo sapiens
ttggggtgcaccacc

SEQ ID NO: 1793322 - DNA, 15 bp, Homo sapiens
tggggtgcaccacct

SEQ ID NO: 1793323 - DNA, 15 bp, Homo sapiens
ggggtgcaccacctt

SEQ ID NO: 1793324 - DNA, 15 bp, Homo sapiens
gggtgcaccaccttc

SEQ ID NO: 1793325 - DNA, 15 bp, Homo sapiens
ggtgcaccaccttcc

SEQ ID NO: 1793326 - DNA, 15 bp, Homo sapiens
gtgcaccaccttcct

SEQ ID NO: 1793327 - DNA, 15 bp, Homo sapiens
tgcaccaccttccta

SEQ ID NO: 1793328 - DNA, 15 bp, Homo sapiens
gcaccaccttcctag

SEQ ID NO: 1793329 - DNA, 15 bp, Homo sapiens
caccaccttcctagc

SEQ ID NO: 1793330 - DNA, 15 bp, Homo sapiens
accaccttcctagca

SEQ ID NO: 1793331 - DNA, 15 bp, Homo sapiens
ccaccttcctagcac

SEQ ID NO: 1793332 - DNA, 15 bp, Homo sapiens
caccttcctagcact

SEQ ID NO: 1793333 - DNA, 15 bp, Homo sapiens
accttcctagcactt

SEQ ID NO: 1793334 - DNA, 15 bp, Homo sapiens
ccttcctagcactta

SEQ ID NO: 1793335 - DNA, 15 bp, Homo sapiens
cttcctagcacttag

SEQ ID NO: 1793336 - DNA, 15 bp, Homo sapiens
ttcctagcacttaga

SEQ ID NO: 1793337 - DNA, 15 bp, Homo sapiens
tcctagcacttagac

SEQ ID NO: 1793338 - DNA, 15 bp, Homo sapiens
cctagcacttagaca

SEQ ID NO: 1793339 - DNA, 15 bp, Homo sapiens
ctagcacttagacat

SEQ ID NO: 1793340 - DNA, 15 bp, Homo sapiens
tagcacttagacatg

SEQ ID NO: 1793341 - DNA, 15 bp, Homo sapiens
agcacttagacatgt

SEQ ID NO: 1793342 - DNA, 15 bp, Homo sapiens
gcacttagacatgtt

SEQ ID NO: 1793343 - DNA, 15 bp, Homo sapiens
cacttagacatgttt

SEQ ID NO: 1793344 - DNA, 15 bp, Homo sapiens
acttagacatgttta

SEQ ID NO: 1793345 - DNA, 15 bp, Homo sapiens
cttagacatgtttac

SEQ ID NO: 1793346 - DNA, 15 bp, Homo sapiens
ttagacatgtttacc

SEQ ID NO: 1793347 - DNA, 15 bp, Homo sapiens
tagacatgtttacca

SEQ ID NO: 1793348 - DNA, 15 bp, Homo sapiens
agacatgtttaccaa

SEQ ID NO: 1793349 - DNA, 15 bp, Homo sapiens
gacatgtttaccaac

SEQ ID NO: 1793350 - DNA, 15 bp, Homo sapiens
acatgtttaccaact

SEQ ID NO: 1793351 - DNA, 15 bp, Homo sapiens
catgtttaccaactc

SEQ ID NO: 1793352 - DNA, 15 bp, Homo sapiens
atgtttaccaactcc

SEQ ID NO: 1793353 - DNA, 15 bp, Homo sapiens
tgtttaccaactcca

SEQ ID NO: 1793354 - DNA, 15 bp, Homo sapiens
gtttaccaactccaa

SEQ ID NO: 1793355 - DNA, 15 bp, Homo sapiens
tttaccaactccaaa

SEQ ID NO: 1793356 - DNA, 15 bp, Homo sapiens
ttaccaactccaaag

SEQ ID NO: 1793357 - DNA, 15 bp, Homo sapiens
taccaactccaaaga

SEQ ID NO: 1793358 - DNA, 15 bp, Homo sapiens
accaactccaaagat

SEQ ID NO: 1793359 - DNA, 15 bp, Homo sapiens
ccaactccaaagatc

SEQ ID NO: 1793360 - DNA, 15 bp, Homo sapiens
caactccaaagatct

SEQ ID NO: 1793361 - DNA, 15 bp, Homo sapiens
aactccaaagatctc

SEQ ID NO: 1793362 - DNA, 15 bp, Homo sapiens
actccaaagatctcc

SEQ ID NO: 1793363 - DNA, 15 bp, Homo sapiens
ctccaaagatctccc

SEQ ID NO: 1793364 - DNA, 15 bp, Homo sapiens
tccaaagatctccca

SEQ ID NO: 1793365 - DNA, 15 bp, Homo sapiens
ccaaagatctcccaa

SEQ ID NO: 1793366 - DNA, 15 bp, Homo sapiens
caaagatctcccaac

SEQ ID NO: 1793367 - DNA, 15 bp, Homo sapiens
aaagatctcccaacc

SEQ ID NO: 1793368 - DNA, 15 bp, Homo sapiens
aagatctcccaacct

SEQ ID NO: 1793369 - DNA, 15 bp, Homo sapiens
agatctcccaacctt

SEQ ID NO: 1793370 - DNA, 15 bp, Homo sapiens
gatctcccaacctta

SEQ ID NO: 1793371 - DNA, 15 bp, Homo sapiens
atctcccaaccttat

SEQ ID NO: 1793372 - DNA, 15 bp, Homo sapiens
tctcccaaccttatt

SEQ ID NO: 1793373 - DNA, 15 bp, Homo sapiens
ctcccaaccttattg

SEQ ID NO: 1793374 - DNA, 15 bp, Homo sapiens
tcccaaccttattgt

SEQ ID NO: 1793375 - DNA, 15 bp, Homo sapiens
cccaaccttattgtt

SEQ ID NO: 1793376 - DNA, 15 bp, Homo sapiens
ccaaccttattgttg

SEQ ID NO: 1793377 - DNA, 15 bp, Homo sapiens
caaccttattgttga

SEQ ID NO: 1793378 - DNA, 15 bp, Homo sapiens
aaccttattgttgag

SEQ ID NO: 1793379 - DNA, 15 bp, Homo sapiens
accttattgttgagg

SEQ ID NO: 1793380 - DNA, 15 bp, Homo sapiens
ccttattgttgaggg

SEQ ID NO: 1793381 - DNA, 15 bp, Homo sapiens
cttattgttgagggg

SEQ ID NO: 1793382 - DNA, 15 bp, Homo sapiens
ttattgttgaggggt

SEQ ID NO: 1793383 - DNA, 15 bp, Homo sapiens
tattgttgaggggtt

SEQ ID NO: 1793384 - DNA, 15 bp, Homo sapiens
attgttgaggggttt

SEQ ID NO: 1793385 - DNA, 15 bp, Homo sapiens
ttgttgaggggtttt

SEQ ID NO: 1793386 - DNA, 15 bp, Homo sapiens
tgttgaggggttttt

SEQ ID NO: 1793387 - DNA, 15 bp, Homo sapiens
gttgaggggttttta

SEQ ID NO: 1793388 - DNA, 15 bp, Homo sapiens
ttgaggggtttttat

SEQ ID NO: 1793389 - DNA, 15 bp, Homo sapiens
tgaggggtttttatg

SEQ ID NO: 1793390 - DNA, 15 bp, Homo sapiens
gaggggtttttatgg

SEQ ID NO: 1793391 - DNA, 15 bp, Homo sapiens
aggggtttttatggg

SEQ ID NO: 1793392 - DNA, 15 bp, Homo sapiens
ggggtttttatgggg

SEQ ID NO: 1793393 - DNA, 15 bp, Homo sapiens
gggtttttatggggg

SEQ ID NO: 1793394 - DNA, 15 bp, Homo sapiens
ggtttttatgggggt

SEQ ID NO: 1793395 - DNA, 15 bp, Homo sapiens
gtttttatgggggtt

SEQ ID NO: 1793396 - DNA, 15 bp, Homo sapiens
tttttatgggggttt

SEQ ID NO: 1793397 - DNA, 15 bp, Homo sapiens
ttttatgggggtttc

SEQ ID NO: 1793398 - DNA, 15 bp, Homo sapiens
tttatgggggtttca

SEQ ID NO: 1793399 - DNA, 15 bp, Homo sapiens
ttatgggggtttcat

SEQ ID NO: 1793400 - DNA, 15 bp, Homo sapiens
tatgggggtttcatt

SEQ ID NO: 1793401 - DNA, 15 bp, Homo sapiens
atgggggtttcatta

SEQ ID NO: 1793402 - DNA, 15 bp, Homo sapiens
tgggggtttcattat

SEQ ID NO: 1793403 - DNA, 15 bp, Homo sapiens
gggggtttcattata

SEQ ID NO: 1793404 - DNA, 15 bp, Homo sapiens
ggggtttcattatat

SEQ ID NO: 1793405 - DNA, 15 bp, Homo sapiens
gggtttcattatata

SEQ ID NO: 1793406 - DNA, 15 bp, Homo sapiens
ggtttcattatatag

SEQ ID NO: 1793407 - DNA, 15 bp, Homo sapiens
gtttcattatatagg

SEQ ID NO: 1793408 - DNA, 15 bp, Homo sapiens
tttcattatataggc

SEQ ID NO: 1793409 - DNA, 15 bp, Homo sapiens
ttcattatataggca

SEQ ID NO: 1793410 - DNA, 15 bp, Homo sapiens
tcattatataggcat

SEQ ID NO: 1793411 - DNA, 15 bp, Homo sapiens
cattatataggcata

SEQ ID NO: 1793412 - DNA, 15 bp, Homo sapiens
attatataggcataa

SEQ ID NO: 1793413 - DNA, 15 bp, Homo sapiens
ttatataggcataat

SEQ ID NO: 1793414 - DNA, 15 bp, Homo sapiens
tatataggcataatt

SEQ ID NO: 1793415 - DNA, 15 bp, Homo sapiens
atataggcataattg

SEQ ID NO: 1793416 - DNA, 15 bp, Homo sapiens
tataggcataattga

SEQ ID NO: 1793417 - DNA, 15 bp, Homo sapiens
ataggcataattgat

SEQ ID NO: 1793418 - DNA, 15 bp, Homo sapiens
taggcataattgatt

SEQ ID NO: 1793419 - DNA, 15 bp, Homo sapiens
aggcataattgatta

SEQ ID NO: 1793420 - DNA, 15 bp, Homo sapiens
ggcataattgattaa

SEQ ID NO: 1793421 - DNA, 15 bp, Homo sapiens
gcataattgattaac

SEQ ID NO: 1793422 - DNA, 15 bp, Homo sapiens
cataattgattaact

SEQ ID NO: 1793423 - DNA, 15 bp, Homo sapiens
ataattgattaactc

SEQ ID NO: 1793424 - DNA, 15 bp, Homo sapiens
taattgattaactca

SEQ ID NO: 1793425 - DNA, 15 bp, Homo sapiens
aattgattaactcaa

SEQ ID NO: 1793426 - DNA, 15 bp, Homo sapiens
attgattaactcaat

SEQ ID NO: 1793427 - DNA, 15 bp, Homo sapiens
ttgattaactcaatt

SEQ ID NO: 1793428 - DNA, 15 bp, Homo sapiens
tgattaactcaattt

SEQ ID NO: 1793429 - DNA, 15 bp, Homo sapiens
gattaactcaatttc

SEQ ID NO: 1793430 - DNA, 15 bp, Homo sapiens
attaactcaatttcc

SEQ ID NO: 1793431 - DNA, 15 bp, Homo sapiens
ttaactcaatttcca

SEQ ID NO: 1793432 - DNA, 15 bp, Homo sapiens
taactcaatttccaa

SEQ ID NO: 1793433 - DNA, 15 bp, Homo sapiens
aactcaatttccaac

SEQ ID NO: 1793434 - DNA, 15 bp, Homo sapiens
actcaatttccaacc

SEQ ID NO: 1793435 - DNA, 15 bp, Homo sapiens
ctcaatttccaaccc

SEQ ID NO: 1793436 - DNA, 15 bp, Homo sapiens
tcaatttccaacccc

SEQ ID NO: 1793437 - DNA, 15 bp, Homo sapiens
caatttccaaccccc

SEQ ID NO: 1793438 - DNA, 15 bp, Homo sapiens
aatttccaaccccct

SEQ ID NO: 1793439 - DNA, 15 bp, Homo sapiens
atttccaaccccctc

SEQ ID NO: 1793440 - DNA, 15 bp, Homo sapiens
tttccaaccccctcc

SEQ ID NO: 1793441 - DNA, 15 bp, Homo sapiens
ttccaaccccctccc

SEQ ID NO: 1793442 - DNA, 15 bp, Homo sapiens
tccaaccccctcccc

SEQ ID NO: 1793443 - DNA, 15 bp, Homo sapiens
ccaaccccctcccct

SEQ ID NO: 1793444 - DNA, 15 bp, Homo sapiens
caaccccctcccctc

SEQ ID NO: 1793445 - DNA, 15 bp, Homo sapiens
aaccccctcccctcc

SEQ ID NO: 1793446 - DNA, 15 bp, Homo sapiens
ccccctcccctccct

SEQ ID NO: 1793447 - DNA, 15 bp, Homo sapiens
cccctcccctccctg

SEQ ID NO: 1793448 - DNA, 15 bp, Homo sapiens
ccctcccctccctgg

SEQ ID NO: 1793449 - DNA, 15 bp, Homo sapiens
cctcccctccctgga

SEQ ID NO: 1793450 - DNA, 15 bp, Homo sapiens
ctcccctccctggat

SEQ ID NO: 1793451 - DNA, 15 bp, Homo sapiens
tcccctccctggata

SEQ ID NO: 1793452 - DNA, 15 bp, Homo sapiens
cccctccctggatag

SEQ ID NO: 1793453 - DNA, 15 bp, Homo sapiens
ccctccctggataga

SEQ ID NO: 1793454 - DNA, 15 bp, Homo sapiens
cctccctggatagag

SEQ ID NO: 1793455 - DNA, 15 bp, Homo sapiens
ctccctggatagagg

SEQ ID NO: 1793456 - DNA, 15 bp, Homo sapiens
tccctggatagaggg

SEQ ID NO: 1793457 - DNA, 15 bp, Homo sapiens
ccctggatagagggt

SEQ ID NO: 1793458 - DNA, 15 bp, Homo sapiens
cctggatagagggtg

SEQ ID NO: 1793459 - DNA, 15 bp, Homo sapiens
ctggatagagggtgg

SEQ ID NO: 1793460 - DNA, 15 bp, Homo sapiens
tggatagagggtggg

SEQ ID NO: 1793461 - DNA, 15 bp, Homo sapiens
ggatagagggtgggg

SEQ ID NO: 1793462 - DNA, 15 bp, Homo sapiens
gatagagggtggggc

SEQ ID NO: 1793463 - DNA, 15 bp, Homo sapiens
atagagggtggggct

SEQ ID NO: 1793464 - DNA, 15 bp, Homo sapiens
tagagggtggggctg

SEQ ID NO: 1793465 - DNA, 15 bp, Homo sapiens
agagggtggggctga

SEQ ID NO: 1793466 - DNA, 15 bp, Homo sapiens
gagggtggggctgaa

SEQ ID NO: 1793467 - DNA, 15 bp, Homo sapiens
agggtggggctgaaa

SEQ ID NO: 1793468 - DNA, 15 bp, Homo sapiens
gggtggggctgaaag

SEQ ID NO: 1793469 - DNA, 15 bp, Homo sapiens
ggtggggctgaaagt

SEQ ID NO: 1793470 - DNA, 15 bp, Homo sapiens
gtggggctgaaagtt

SEQ ID NO: 1793471 - DNA, 15 bp, Homo sapiens
tggggctgaaagttc

SEQ ID NO: 1793472 - DNA, 15 bp, Homo sapiens
ggggctgaaagttcc

SEQ ID NO: 1793473 - DNA, 15 bp, Homo sapiens
gggctgaaagttcca

SEQ ID NO: 1793474 - DNA, 15 bp, Homo sapiens
ggctgaaagttccaa

SEQ ID NO: 1793475 - DNA, 15 bp, Homo sapiens
gctgaaagttccaag

SEQ ID NO: 1793476 - DNA, 15 bp, Homo sapiens
ctgaaagttccaagc

SEQ ID NO: 1793477 - DNA, 15 bp, Homo sapiens
gttccaagcttctac

SEQ ID NO: 1793478 - DNA, 15 bp, Homo sapiens
ttccaagcttctact

SEQ ID NO: 1793479 - DNA, 15 bp, Homo sapiens
tccaagcttctactc

SEQ ID NO: 1793480 - DNA, 15 bp, Homo sapiens
ccaagcttctactca

SEQ ID NO: 1793481 - DNA, 15 bp, Homo sapiens
caagcttctactcaa

SEQ ID NO: 1793482 - DNA, 15 bp, Homo sapiens
aagcttctactcaag

SEQ ID NO: 1793483 - DNA, 15 bp, Homo sapiens
agcttctactcaaga

SEQ ID NO: 1793484 - DNA, 15 bp, Homo sapiens
gcttctactcaagac

SEQ ID NO: 1793485 - DNA, 15 bp, Homo sapiens
cttctactcaagact

SEQ ID NO: 1793486 - DNA, 15 bp, Homo sapiens
ttctactcaagactt

SEQ ID NO: 1793487 - DNA, 15 bp, Homo sapiens
tctactcaagacttg

SEQ ID NO: 1793488 - DNA, 15 bp, Homo sapiens
ctactcaagacttgg

SEQ ID NO: 1793489 - DNA, 15 bp, Homo sapiens
tactcaagacttggt

SEQ ID NO: 1793490 - DNA, 15 bp, Homo sapiens
actcaagacttggtc

SEQ ID NO: 1793491 - DNA, 15 bp, Homo sapiens
ctcaagacttggtct

SEQ ID NO: 1793492 - DNA, 15 bp, Homo sapiens
tcaagacttggtctt

SEQ ID NO: 1793493 - DNA, 15 bp, Homo sapiens
caagacttggtcttt

SEQ ID NO: 1793494 - DNA, 15 bp, Homo sapiens
aagacttggtctttc

SEQ ID NO: 1793495 - DNA, 15 bp, Homo sapiens
agacttggtctttct

SEQ ID NO: 1793496 - DNA, 15 bp, Homo sapiens
gacttggtctttctg

SEQ ID NO: 1793497 - DNA, 15 bp, Homo sapiens
acttggtctttctgg

SEQ ID NO: 1793498 - DNA, 15 bp, Homo sapiens
cttggtctttctggc

SEQ ID NO: 1793499 - DNA, 15 bp, Homo sapiens
ttggtctttctggca

SEQ ID NO: 1793500 - DNA, 15 bp, Homo sapiens
tggtctttctggcaa

SEQ ID NO: 1793501 - DNA, 15 bp, Homo sapiens
ggtctttctggcaac

SEQ ID NO: 1793502 - DNA, 15 bp, Homo sapiens
gtctttctggcaacc

SEQ ID NO: 1793503 - DNA, 15 bp, Homo sapiens
tctttctggcaacca

SEQ ID NO: 1793504 - DNA, 15 bp, Homo sapiens
ctttctggcaaccag

SEQ ID NO: 1793505 - DNA, 15 bp, Homo sapiens
tttctggcaaccagc

SEQ ID NO: 1793506 - DNA, 15 bp, Homo sapiens
ttctggcaaccagct

SEQ ID NO: 1793507 - DNA, 15 bp, Homo sapiens
tctggcaaccagctt

SEQ ID NO: 1793508 - DNA, 15 bp, Homo sapiens
ctggcaaccagcttc

SEQ ID NO: 1793509 - DNA, 15 bp, Homo sapiens
tggcaaccagcttcc

SEQ ID NO: 1793510 - DNA, 15 bp, Homo sapiens
ggcaaccagcttcca

SEQ ID NO: 1793511 - DNA, 15 bp, Homo sapiens
gcaaccagcttccat

SEQ ID NO: 1793512 - DNA, 15 bp, Homo sapiens
caaccagcttccatc

SEQ ID NO: 1793513 - DNA, 15 bp, Homo sapiens
aaccagcttccatcc

SEQ ID NO: 1793514 - DNA, 15 bp, Homo sapiens
accagcttccatcct

SEQ ID NO: 1793515 - DNA, 15 bp, Homo sapiens
ccagcttccatccta

SEQ ID NO: 1793516 - DNA, 15 bp, Homo sapiens
cagcttccatcctaa

SEQ ID NO: 1793517 - DNA, 15 bp, Homo sapiens
agcttccatcctaaa

SEQ ID NO: 1793518 - DNA, 15 bp, Homo sapiens
gcttccatcctaaat

SEQ ID NO: 1793519 - DNA, 15 bp, Homo sapiens
cttccatcctaaatt

SEQ ID NO: 1793520 - DNA, 15 bp, Homo sapiens
ttccatcctaaatta

SEQ ID NO: 1793521 - DNA, 15 bp, Homo sapiens
tccatcctaaattag

SEQ ID NO: 1793522 - DNA, 15 bp, Homo sapiens
catcctaaattagct

SEQ ID NO: 1793523 - DNA, 15 bp, Homo sapiens
atcctaaattagcta

SEQ ID NO: 1793524 - DNA, 15 bp, Homo sapiens
tcctaaattagctag

SEQ ID NO: 1793525 - DNA, 15 bp, Homo sapiens
cctaaattagctagg

SEQ ID NO: 1793526 - DNA, 15 bp, Homo sapiens
ctaaattagctaggt

SEQ ID NO: 1793527 - DNA, 15 bp, Homo sapiens
taaattagctaggta

SEQ ID NO: 1793528 - DNA, 15 bp, Homo sapiens
aaattagctaggtac

SEQ ID NO: 1793529 - DNA, 15 bp, Homo sapiens
aattagctaggtacc

SEQ ID NO: 1793530 - DNA, 15 bp, Homo sapiens
attagctaggtaccc

SEQ ID NO: 1793531 - DNA, 15 bp, Homo sapiens
ttagctaggtaccca

SEQ ID NO: 1793532 - DNA, 15 bp, Homo sapiens
tagctaggtacccac

SEQ ID NO: 1793533 - DNA, 15 bp, Homo sapiens
agctaggtacccacc

SEQ ID NO: 1793534 - DNA, 15 bp, Homo sapiens
gctaggtacccacca

SEQ ID NO: 1793535 - DNA, 15 bp, Homo sapiens
ctaggtacccaccaa

SEQ ID NO: 1793536 - DNA, 15 bp, Homo sapiens
taggtacccaccaag

SEQ ID NO: 1793537 - DNA, 15 bp, Homo sapiens
aggtacccaccaagt

SEQ ID NO: 1793538 - DNA, 15 bp, Homo sapiens
ggtacccaccaagta

SEQ ID NO: 1793539 - DNA, 15 bp, Homo sapiens
gtacccaccaagtat

SEQ ID NO: 1793540 - DNA, 15 bp, Homo sapiens
tacccaccaagtatc

SEQ ID NO: 1793541 - DNA, 15 bp, Homo sapiens
acccaccaagtatca

SEQ ID NO: 1793542 - DNA, 15 bp, Homo sapiens
cccaccaagtatcac

SEQ ID NO: 1793543 - DNA, 15 bp, Homo sapiens
ccaccaagtatcacc

SEQ ID NO: 1793544 - DNA, 15 bp, Homo sapiens
caccaagtatcacct

SEQ ID NO: 1793545 - DNA, 15 bp, Homo sapiens
accaagtatcacctc

SEQ ID NO: 1793546 - DNA, 15 bp, Homo sapiens
ccaagtatcacctca

SEQ ID NO: 1793547 - DNA, 15 bp, Homo sapiens
caagtatcacctcat

SEQ ID NO: 1793548 - DNA, 15 bp, Homo sapiens
aagtatcacctcatt

SEQ ID NO: 1793549 - DNA, 15 bp, Homo sapiens
agtatcacctcatta

SEQ ID NO: 1793550 - DNA, 15 bp, Homo sapiens
gtatcacctcattag

SEQ ID NO: 1793551 - DNA, 15 bp, Homo sapiens
tatcacctcattaga

SEQ ID NO: 1793552 - DNA, 15 bp, Homo sapiens
atcacctcattagaa

SEQ ID NO: 1793553 - DNA, 15 bp, Homo sapiens
tcacctcattagaac

SEQ ID NO: 1793554 - DNA, 15 bp, Homo sapiens
cacctcattagaaca

SEQ ID NO: 1793555 - DNA, 15 bp, Homo sapiens
acctcattagaacaa

SEQ ID NO: 1793556 - DNA, 15 bp, Homo sapiens
cctcattagaacaaa

SEQ ID NO: 1793557 - DNA, 15 bp, Homo sapiens
ctcattagaacaaaa

SEQ ID NO: 1793558 - DNA, 15 bp, Homo sapiens
tcattagaacaaaag

SEQ ID NO: 1793559 - DNA, 15 bp, Homo sapiens
cattagaacaaaaga

SEQ ID NO: 1793560 - DNA, 15 bp, Homo sapiens
attagaacaaaagat

SEQ ID NO: 1793561 - DNA, 15 bp, Homo sapiens
ttagaacaaaagatg

SEQ ID NO: 1793562 - DNA, 15 bp, Homo sapiens
tagaacaaaagatgg

SEQ ID NO: 1793563 - DNA, 15 bp, Homo sapiens
agaacaaaagatggt

SEQ ID NO: 1793564 - DNA, 15 bp, Homo sapiens
gaacaaaagatggtc

SEQ ID NO: 1793565 - DNA, 15 bp, Homo sapiens
aacaaaagatggtcc

SEQ ID NO: 1793566 - DNA, 15 bp, Homo sapiens
acaaaagatggtccc

SEQ ID NO: 1793567 - DNA, 15 bp, Homo sapiens
caaaagatggtccca

SEQ ID NO: 1793568 - DNA, 15 bp, Homo sapiens
aaaagatggtcccat

SEQ ID NO: 1793569 - DNA, 15 bp, Homo sapiens
aaagatggtcccatc

SEQ ID NO: 1793570 - DNA, 15 bp, Homo sapiens
aagatggtcccatca

SEQ ID NO: 1793571 - DNA, 15 bp, Homo sapiens
agatggtcccatcac

SEQ ID NO: 1793572 - DNA, 15 bp, Homo sapiens
gatggtcccatcacc

SEQ ID NO: 1793573 - DNA, 15 bp, Homo sapiens
atggtcccatcaccc

SEQ ID NO: 1793574 - DNA, 15 bp, Homo sapiens
tggtcccatcaccct

SEQ ID NO: 1793575 - DNA, 15 bp, Homo sapiens
ggtcccatcaccctt

SEQ ID NO: 1793576 - DNA, 15 bp, Homo sapiens
gtcccatcaccctta

SEQ ID NO: 1793577 - DNA, 15 bp, Homo sapiens
tcccatcacccttat

SEQ ID NO: 1793578 - DNA, 15 bp, Homo sapiens
cccatcacccttatc

SEQ ID NO: 1793579 - DNA, 15 bp, Homo sapiens
ccatcacccttatca

SEQ ID NO: 1793580 - DNA, 15 bp, Homo sapiens
catcacccttatcac

SEQ ID NO: 1793581 - DNA, 15 bp, Homo sapiens
atcacccttatcaca

SEQ ID NO: 1793582 - DNA, 15 bp, Homo sapiens
tcacccttatcacac

SEQ ID NO: 1793583 - DNA, 15 bp, Homo sapiens
cacccttatcacaca

SEQ ID NO: 1793584 - DNA, 15 bp, Homo sapiens
acccttatcacacat

SEQ ID NO: 1793585 - DNA, 15 bp, Homo sapiens
cccttatcacacatg

SEQ ID NO: 1793586 - DNA, 15 bp, Homo sapiens
ccttatcacacatga

SEQ ID NO: 1793587 - DNA, 15 bp, Homo sapiens
cttatcacacatgaa

SEQ ID NO: 1793588 - DNA, 15 bp, Homo sapiens
ttatcacacatgaaa

SEQ ID NO: 1793589 - DNA, 15 bp, Homo sapiens
tatcacacatgaaat

SEQ ID NO: 1793590 - DNA, 15 bp, Homo sapiens
atcacacatgaaatt

SEQ ID NO: 1793591 - DNA, 15 bp, Homo sapiens
tcacacatgaaattc

SEQ ID NO: 1793592 - DNA, 15 bp, Homo sapiens
cacacatgaaattcg

SEQ ID NO: 1793593 - DNA, 15 bp, Homo sapiens
acacatgaaattcga

SEQ ID NO: 1793594 - DNA, 15 bp, Homo sapiens
cacatgaaattcgaa

SEQ ID NO: 1793595 - DNA, 15 bp, Homo sapiens
acatgaaattcgaag

SEQ ID NO: 1793596 - DNA, 15 bp, Homo sapiens
catgaaattcgaagg

SEQ ID NO: 1793597 - DNA, 15 bp, Homo sapiens
atgaaattcgaaggg

SEQ ID NO: 1793598 - DNA, 15 bp, Homo sapiens
tgaaattcgaagggt

SEQ ID NO: 1793599 - DNA, 15 bp, Homo sapiens
gaaattcgaagggtt

SEQ ID NO: 1793600 - DNA, 15 bp, Homo sapiens
aaattcgaagggttt

SEQ ID NO: 1793601 - DNA, 15 bp, Homo sapiens
aattcgaagggtttt

SEQ ID NO: 1793602 - DNA, 15 bp, Homo sapiens
attcgaagggtttta

SEQ ID NO: 1793603 - DNA, 15 bp, Homo sapiens
ttcgaagggttttag

SEQ ID NO: 1793604 - DNA, 15 bp, Homo sapiens
tcgaagggttttagg

SEQ ID NO: 1793605 - DNA, 15 bp, Homo sapiens
cgaagggttttagga

SEQ ID NO: 1793606 - DNA, 15 bp, Homo sapiens
gaagggttttaggag

SEQ ID NO: 1793607 - DNA, 15 bp, Homo sapiens
aagggttttaggagc

SEQ ID NO: 1793608 - DNA, 15 bp, Homo sapiens
agggttttaggagct

SEQ ID NO: 1793609 - DNA, 15 bp, Homo sapiens
gggttttaggagctc

SEQ ID NO: 1793610 - DNA, 15 bp, Homo sapiens
ggttttaggagctct

SEQ ID NO: 1793611 - DNA, 15 bp, Homo sapiens
gttttaggagctctg

SEQ ID NO: 1793612 - DNA, 15 bp, Homo sapiens
ttttaggagctctgt

SEQ ID NO: 1793613 - DNA, 15 bp, Homo sapiens
tttaggagctctgtc

SEQ ID NO: 1793614 - DNA, 15 bp, Homo sapiens
ttaggagctctgtcc

SEQ ID NO: 1793615 - DNA, 15 bp, Homo sapiens
taggagctctgtccc

SEQ ID NO: 1793616 - DNA, 15 bp, Homo sapiens
aggagctctgtccca

SEQ ID NO: 1793617 - DNA, 15 bp, Homo sapiens
ggagctctgtcccag

SEQ ID NO: 1793618 - DNA, 15 bp, Homo sapiens
gagctctgtcccagg

SEQ ID NO: 1793619 - DNA, 15 bp, Homo sapiens
agctctgtcccagga

SEQ ID NO: 1793620 - DNA, 15 bp, Homo sapiens
gctctgtcccaggaa

SEQ ID NO: 1793621 - DNA, 15 bp, Homo sapiens
ctctgtcccaggaac

SEQ ID NO: 1793622 - DNA, 15 bp, Homo sapiens
tctgtcccaggaacc

SEQ ID NO: 1793623 - DNA, 15 bp, Homo sapiens
ctgtcccaggaacca

SEQ ID NO: 1793624 - DNA, 15 bp, Homo sapiens
tgtcccaggaaccag

SEQ ID NO: 1793625 - DNA, 15 bp, Homo sapiens
gtcccaggaaccagg

SEQ ID NO: 1793626 - DNA, 15 bp, Homo sapiens
tcccaggaaccaggg

SEQ ID NO: 1793627 - DNA, 15 bp, Homo sapiens
cccaggaaccaggga

SEQ ID NO: 1793628 - DNA, 15 bp, Homo sapiens
ccaggaaccagggac

SEQ ID NO: 1793629 - DNA, 15 bp, Homo sapiens
caggaaccagggaca

SEQ ID NO: 1793630 - DNA, 15 bp, Homo sapiens
aggaaccagggacaa

SEQ ID NO: 1793631 - DNA, 15 bp, Homo sapiens
ggaaccagggacaaa

SEQ ID NO: 1793632 - DNA, 15 bp, Homo sapiens
gaaccagggacaaag

SEQ ID NO: 1793633 - DNA, 15 bp, Homo sapiens
aaccagggacaaaga

SEQ ID NO: 1793634 - DNA, 15 bp, Homo sapiens
accagggacaaagac

SEQ ID NO: 1793635 - DNA, 15 bp, Homo sapiens
ccagggacaaagacc

SEQ ID NO: 1793636 - DNA, 15 bp, Homo sapiens
cagggacaaagacca

SEQ ID NO: 1793637 - DNA, 15 bp, Homo sapiens
agggacaaagaccaa

SEQ ID NO: 1793638 - DNA, 15 bp, Homo sapiens
gggacaaagaccaaa

SEQ ID NO: 1793639 - DNA, 15 bp, Homo sapiens
ggacaaagaccaaat

SEQ ID NO: 1793640 - DNA, 15 bp, Homo sapiens
gacaaagaccaaata

SEQ ID NO: 1793641 - DNA, 15 bp, Homo sapiens
acaaagaccaaatat

SEQ ID NO: 1793642 - DNA, 15 bp, Homo sapiens
caaagaccaaatatc

SEQ ID NO: 1793643 - DNA, 15 bp, Homo sapiens
aaagaccaaatatct

SEQ ID NO: 1793644 - DNA, 15 bp, Homo sapiens
aagaccaaatatctt

SEQ ID NO: 1793645 - DNA, 15 bp, Homo sapiens
agaccaaatatcttt

SEQ ID NO: 1793646 - DNA, 15 bp, Homo sapiens
gaccaaatatctttc

SEQ ID NO: 1793647 - DNA, 15 bp, Homo sapiens
accaaatatctttca

SEQ ID NO: 1793648 - DNA, 15 bp, Homo sapiens
ccaaatatctttcaa

SEQ ID NO: 1793649 - DNA, 15 bp, Homo sapiens
caaatatctttcaat

SEQ ID NO: 1793650 - DNA, 15 bp, Homo sapiens
aaatatctttcaatg

SEQ ID NO: 1793651 - DNA, 15 bp, Homo sapiens
aatatctttcaatga

SEQ ID NO: 1793652 - DNA, 15 bp, Homo sapiens
atatctttcaatgat

SEQ ID NO: 1793653 - DNA, 15 bp, Homo sapiens
tatctttcaatgata

SEQ ID NO: 1793654 - DNA, 15 bp, Homo sapiens
atctttcaatgatac

SEQ ID NO: 1793655 - DNA, 15 bp, Homo sapiens
tctttcaatgatacc

SEQ ID NO: 1793656 - DNA, 15 bp, Homo sapiens
ctttcaatgatacca

SEQ ID NO: 1793657 - DNA, 15 bp, Homo sapiens
tttcaatgataccat

SEQ ID NO: 1793658 - DNA, 15 bp, Homo sapiens
ttcaatgataccatg

SEQ ID NO: 1793659 - DNA, 15 bp, Homo sapiens
tcaatgataccatgt

SEQ ID NO: 1793660 - DNA, 15 bp, Homo sapiens
caatgataccatgta

SEQ ID NO: 1793661 - DNA, 15 bp, Homo sapiens
aatgataccatgtat

SEQ ID NO: 1793662 - DNA, 15 bp, Homo sapiens
atgataccatgtatg

SEQ ID NO: 1793663 - DNA, 15 bp, Homo sapiens
tgataccatgtatgt

SEQ ID NO: 1793664 - DNA, 15 bp, Homo sapiens
gataccatgtatgta

SEQ ID NO: 1793665 - DNA, 15 bp, Homo sapiens
ataccatgtatgtat

SEQ ID NO: 1793666 - DNA, 15 bp, Homo sapiens
taccatgtatgtatg

SEQ ID NO: 1793667 - DNA, 15 bp, Homo sapiens
accatgtatgtatgt

SEQ ID NO: 1793668 - DNA, 15 bp, Homo sapiens
ccatgtatgtatgta

SEQ ID NO: 1793669 - DNA, 15 bp, Homo sapiens
catgtatgtatgtac

SEQ ID NO: 1793670 - DNA, 15 bp, Homo sapiens
atgtatgtatgtaca

SEQ ID NO: 1793671 - DNA, 15 bp, Homo sapiens
tgtatgtatgtacat

SEQ ID NO: 1793672 - DNA, 15 bp, Homo sapiens
gtatgtatgtacata

SEQ ID NO: 1793673 - DNA, 15 bp, Homo sapiens
tatgtatgtacataa

SEQ ID NO: 1793674 - DNA, 15 bp, Homo sapiens
atgtatgtacataac

SEQ ID NO: 1793675 - DNA, 15 bp, Homo sapiens
tgtatgtacataacc

SEQ ID NO: 1793676 - DNA, 15 bp, Homo sapiens
gtatgtacataacct

SEQ ID NO: 1793677 - DNA, 15 bp, Homo sapiens
tatgtacataacctc

SEQ ID NO: 1793678 - DNA, 15 bp, Homo sapiens
atgtacataacctca

SEQ ID NO: 1793679 - DNA, 15 bp, Homo sapiens
tgtacataacctcac

SEQ ID NO: 1793680 - DNA, 15 bp, Homo sapiens
gtacataacctcaca

SEQ ID NO: 1793681 - DNA, 15 bp, Homo sapiens
tacataacctcacag

SEQ ID NO: 1793682 - DNA, 15 bp, Homo sapiens
acataacctcacagg

SEQ ID NO: 1793683 - DNA, 15 bp, Homo sapiens
cataacctcacagga

SEQ ID NO: 1793684 - DNA, 15 bp, Homo sapiens
ataacctcacaggaa

SEQ ID NO: 1793685 - DNA, 15 bp, Homo sapiens
taacctcacaggaat

SEQ ID NO: 1793686 - DNA, 15 bp, Homo sapiens
aacctcacaggaatc

SEQ ID NO: 1793687 - DNA, 15 bp, Homo sapiens
acctcacaggaatct

SEQ ID NO: 1793688 - DNA, 15 bp, Homo sapiens
cctcacaggaatctt

SEQ ID NO: 1793689 - DNA, 15 bp, Homo sapiens
ctcacaggaatcttt

SEQ ID NO: 1793690 - DNA, 15 bp, Homo sapiens
tcacaggaatcttta

SEQ ID NO: 1793691 - DNA, 15 bp, Homo sapiens
cacaggaatctttat

SEQ ID NO: 1793692 - DNA, 15 bp, Homo sapiens
acaggaatctttata

SEQ ID NO: 1793693 - DNA, 15 bp, Homo sapiens
caggaatctttataa

SEQ ID NO: 1793694 - DNA, 15 bp, Homo sapiens
aggaatctttataaa

SEQ ID NO: 1793695 - DNA, 15 bp, Homo sapiens
ggaatctttataaaa

SEQ ID NO: 1793696 - DNA, 15 bp, Homo sapiens
gaatctttataaaac

SEQ ID NO: 1793697 - DNA, 15 bp, Homo sapiens
aatctttataaaaca

SEQ ID NO: 1793698 - DNA, 15 bp, Homo sapiens
atctttataaaacaa

SEQ ID NO: 1793699 - DNA, 15 bp, Homo sapiens
tctttataaaacaat

SEQ ID NO: 1793700 - DNA, 15 bp, Homo sapiens
ctttataaaacaatt

SEQ ID NO: 1793701 - DNA, 15 bp, Homo sapiens
tttataaaacaattt

SEQ ID NO: 1793702 - DNA, 15 bp, Homo sapiens
ttataaaacaatttt

SEQ ID NO: 1793703 - DNA, 15 bp, Homo sapiens
tataaaacaattttg

SEQ ID NO: 1793704 - DNA, 15 bp, Homo sapiens
ataaaacaattttga

SEQ ID NO: 1793705 - DNA, 15 bp, Homo sapiens
taaaacaattttgaa

SEQ ID NO: 1793706 - DNA, 15 bp, Homo sapiens
aaaacaattttgaaa

SEQ ID NO: 1793707 - DNA, 15 bp, Homo sapiens
aaacaattttgaaat

SEQ ID NO: 1793708 - DNA, 15 bp, Homo sapiens
aacaattttgaaatt

SEQ ID NO: 1793709 - DNA, 15 bp, Homo sapiens
acaattttgaaattc

SEQ ID NO: 1793710 - DNA, 15 bp, Homo sapiens
caattttgaaattca

SEQ ID NO: 1793711 - DNA, 15 bp, Homo sapiens
aattttgaaattcac

SEQ ID NO: 1793712 - DNA, 15 bp, Homo sapiens
attttgaaattcact

SEQ ID NO: 1793713 - DNA, 15 bp, Homo sapiens
ttttgaaattcactc

SEQ ID NO: 1793714 - DNA, 15 bp, Homo sapiens
tttgaaattcactca

SEQ ID NO: 1793715 - DNA, 15 bp, Homo sapiens
ttgaaattcactcat

SEQ ID NO: 1793716 - DNA, 15 bp, Homo sapiens
tgaaattcactcatt

SEQ ID NO: 1793717 - DNA, 15 bp, Homo sapiens
gaaattcactcatta

SEQ ID NO: 1793718 - DNA, 15 bp, Homo sapiens
aaattcactcattat

SEQ ID NO: 1793719 - DNA, 15 bp, Homo sapiens
aattcactcattatg

SEQ ID NO: 1793720 - DNA, 15 bp, Homo sapiens
attcactcattatga

SEQ ID NO: 1793721 - DNA, 15 bp, Homo sapiens
ttcactcattatgag

SEQ ID NO: 1793722 - DNA, 15 bp, Homo sapiens
tcactcattatgagt

SEQ ID NO: 1793723 - DNA, 15 bp, Homo sapiens
cactcattatgagtg

SEQ ID NO: 1793724 - DNA, 15 bp, Homo sapiens
actcattatgagtgt

SEQ ID NO: 1793725 - DNA, 15 bp, Homo sapiens
ctcattatgagtgtg

SEQ ID NO: 1793726 - DNA, 15 bp, Homo sapiens
tcattatgagtgtga

SEQ ID NO: 1793727 - DNA, 15 bp, Homo sapiens
cattatgagtgtgat

SEQ ID NO: 1793728 - DNA, 15 bp, Homo sapiens
attatgagtgtgatt

SEQ ID NO: 1793729 - DNA, 15 bp, Homo sapiens
ttatgagtgtgattt

SEQ ID NO: 1793730 - DNA, 15 bp, Homo sapiens
tatgagtgtgatttg

SEQ ID NO: 1793731 - DNA, 15 bp, Homo sapiens
atgagtgtgatttga

SEQ ID NO: 1793732 - DNA, 15 bp, Homo sapiens
tgagtgtgatttgaa

SEQ ID NO: 1793733 - DNA, 15 bp, Homo sapiens
gagtgtgatttgaaa

SEQ ID NO: 1793734 - DNA, 15 bp, Homo sapiens
agtgtgatttgaaat

SEQ ID NO: 1793735 - DNA, 15 bp, Homo sapiens
gtgtgatttgaaatg

SEQ ID NO: 1793736 - DNA, 15 bp, Homo sapiens
tgtgatttgaaatga

SEQ ID NO: 1793737 - DNA, 15 bp, Homo sapiens
gtgatttgaaatgag

SEQ ID NO: 1793738 - DNA, 15 bp, Homo sapiens
tgatttgaaatgaga

SEQ ID NO: 1793739 - DNA, 15 bp, Homo sapiens
gatttgaaatgagat

SEQ ID NO: 1793740 - DNA, 15 bp, Homo sapiens
atttgaaatgagata

SEQ ID NO: 1793741 - DNA, 15 bp, Homo sapiens
tttgaaatgagatac

SEQ ID NO: 1793742 - DNA, 15 bp, Homo sapiens
ttgaaatgagatact

SEQ ID NO: 1793743 - DNA, 15 bp, Homo sapiens
tgaaatgagatactc

SEQ ID NO: 1793744 - DNA, 15 bp, Homo sapiens
gaaatgagatactcc

SEQ ID NO: 1793745 - DNA, 15 bp, Homo sapiens
aaatgagatactcca

SEQ ID NO: 1793746 - DNA, 15 bp, Homo sapiens
aatgagatactccaa

SEQ ID NO: 1793747 - DNA, 15 bp, Homo sapiens
atgagatactccaaa

SEQ ID NO: 1793748 - DNA, 15 bp, Homo sapiens
tgagatactccaaaa

SEQ ID NO: 1793749 - DNA, 15 bp, Homo sapiens
gagatactccaaaat

SEQ ID NO: 1793750 - DNA, 15 bp, Homo sapiens
agatactccaaaatg

SEQ ID NO: 1793751 - DNA, 15 bp, Homo sapiens
gatactccaaaatgt

SEQ ID NO: 1793752 - DNA, 15 bp, Homo sapiens
atactccaaaatgta

SEQ ID NO: 1793753 - DNA, 15 bp, Homo sapiens
tactccaaaatgtaa

SEQ ID NO: 1793754 - DNA, 15 bp, Homo sapiens
actccaaaatgtaag

SEQ ID NO: 1793755 - DNA, 15 bp, Homo sapiens
ctccaaaatgtaagc

SEQ ID NO: 1793756 - DNA, 15 bp, Homo sapiens
tccaaaatgtaagcc

SEQ ID NO: 1793757 - DNA, 15 bp, Homo sapiens
ccaaaatgtaagccc

SEQ ID NO: 1793758 - DNA, 15 bp, Homo sapiens
caaaatgtaagcccg

SEQ ID NO: 1793759 - DNA, 15 bp, Homo sapiens
aaaatgtaagcccga

SEQ ID NO: 1793760 - DNA, 15 bp, Homo sapiens
aaatgtaagcccgat

SEQ ID NO: 1793761 - DNA, 15 bp, Homo sapiens
aatgtaagcccgata

SEQ ID NO: 1793762 - DNA, 15 bp, Homo sapiens
atgtaagcccgatat

SEQ ID NO: 1793763 - DNA, 15 bp, Homo sapiens
tgtaagcccgatatc

SEQ ID NO: 1793764 - DNA, 15 bp, Homo sapiens
gtaagcccgatatcc

SEQ ID NO: 1793765 - DNA, 15 bp, Homo sapiens
taagcccgatatcca

SEQ ID NO: 1793766 - DNA, 15 bp, Homo sapiens
aagcccgatatccaa

SEQ ID NO: 1793767 - DNA, 15 bp, Homo sapiens
agcccgatatccaaa

SEQ ID NO: 1793768 - DNA, 15 bp, Homo sapiens
gcccgatatccaaat

SEQ ID NO: 1793769 - DNA, 15 bp, Homo sapiens
cccgatatccaaatg

SEQ ID NO: 1793770 - DNA, 15 bp, Homo sapiens
ccgatatccaaatgt

SEQ ID NO: 1793771 - DNA, 15 bp, Homo sapiens
cgatatccaaatgtc

SEQ ID NO: 1793772 - DNA, 15 bp, Homo sapiens
gatatccaaatgtca

SEQ ID NO: 1793773 - DNA, 15 bp, Homo sapiens
atatccaaatgtcac

SEQ ID NO: 1793774 - DNA, 15 bp, Homo sapiens
tatccaaatgtcacc

SEQ ID NO: 1793775 - DNA, 15 bp, Homo sapiens
atccaaatgtcacca

SEQ ID NO: 1793776 - DNA, 15 bp, Homo sapiens
tccaaatgtcaccag

SEQ ID NO: 1793777 - DNA, 15 bp, Homo sapiens
ccaaatgtcaccagc

SEQ ID NO: 1793778 - DNA, 15 bp, Homo sapiens
caaatgtcaccagcc

SEQ ID NO: 1793779 - DNA, 15 bp, Homo sapiens
aaatgtcaccagcct

SEQ ID NO: 1793780 - DNA, 15 bp, Homo sapiens
aatgtcaccagcctg

SEQ ID NO: 1793781 - DNA, 15 bp, Homo sapiens
atgtcaccagcctgt

SEQ ID NO: 1793782 - DNA, 15 bp, Homo sapiens
tgtcaccagcctgtc

SEQ ID NO: 1793783 - DNA, 15 bp, Homo sapiens
gtcaccagcctgtcc

SEQ ID NO: 1793784 - DNA, 15 bp, Homo sapiens
tcaccagcctgtccc

SEQ ID NO: 1793785 - DNA, 15 bp, Homo sapiens
caccagcctgtccct

SEQ ID NO: 1793786 - DNA, 15 bp, Homo sapiens
accagcctgtccctg

SEQ ID NO: 1793787 - DNA, 15 bp, Homo sapiens
ccagcctgtccctgc

SEQ ID NO: 1793788 - DNA, 15 bp, Homo sapiens
cagcctgtccctgcc

SEQ ID NO: 1793789 - DNA, 15 bp, Homo sapiens
agcctgtccctgcct

SEQ ID NO: 1793790 - DNA, 15 bp, Homo sapiens
gcctgtccctgccta

SEQ ID NO: 1793791 - DNA, 15 bp, Homo sapiens
cctgtccctgcctac

SEQ ID NO: 1793792 - DNA, 15 bp, Homo sapiens
ctgtccctgcctact

SEQ ID NO: 1793793 - DNA, 15 bp, Homo sapiens
tgtccctgcctactg

SEQ ID NO: 1793794 - DNA, 15 bp, Homo sapiens
gtccctgcctactgg

SEQ ID NO: 1793795 - DNA, 15 bp, Homo sapiens
tccctgcctactggt

SEQ ID NO: 1793796 - DNA, 15 bp, Homo sapiens
ccctgcctactggtc

SEQ ID NO: 1793797 - DNA, 15 bp, Homo sapiens
cctgcctactggtct

SEQ ID NO: 1793798 - DNA, 15 bp, Homo sapiens
ctgcctactggtctc

SEQ ID NO: 1793799 - DNA, 15 bp, Homo sapiens
tgcctactggtctcc

SEQ ID NO: 1793800 - DNA, 15 bp, Homo sapiens
gcctactggtctcct

SEQ ID NO: 1793801 - DNA, 15 bp, Homo sapiens
cctactggtctcctt

SEQ ID NO: 1793802 - DNA, 15 bp, Homo sapiens
ctactggtctccttc

SEQ ID NO: 1793803 - DNA, 15 bp, Homo sapiens
tactggtctccttcc

SEQ ID NO: 1793804 - DNA, 15 bp, Homo sapiens
actggtctccttcca

SEQ ID NO: 1793805 - DNA, 15 bp, Homo sapiens
ctggtctccttccat

SEQ ID NO: 1793806 - DNA, 15 bp, Homo sapiens
tggtctccttccata

SEQ ID NO: 1793807 - DNA, 15 bp, Homo sapiens
ggtctccttccatac

SEQ ID NO: 1793808 - DNA, 15 bp, Homo sapiens
gtctccttccataca

SEQ ID NO: 1793809 - DNA, 15 bp, Homo sapiens
tctccttccatacat

SEQ ID NO: 1793810 - DNA, 15 bp, Homo sapiens
ctccttccatacata

SEQ ID NO: 1793811 - DNA, 15 bp, Homo sapiens
tccttccatacatat

SEQ ID NO: 1793812 - DNA, 15 bp, Homo sapiens
ccttccatacatatg

SEQ ID NO: 1793813 - DNA, 15 bp, Homo sapiens
cttccatacatatgc

SEQ ID NO: 1793814 - DNA, 15 bp, Homo sapiens
ttccatacatatgca

SEQ ID NO: 1793815 - DNA, 15 bp, Homo sapiens
tccatacatatgcac

SEQ ID NO: 1793816 - DNA, 15 bp, Homo sapiens
ccatacatatgcact

SEQ ID NO: 1793817 - DNA, 15 bp, Homo sapiens
catacatatgcactt

SEQ ID NO: 1793818 - DNA, 15 bp, Homo sapiens
atacatatgcacttt

SEQ ID NO: 1793819 - DNA, 15 bp, Homo sapiens
tacatatgcactttt

SEQ ID NO: 1793820 - DNA, 15 bp, Homo sapiens
acatatgcacttttt

SEQ ID NO: 1793821 - DNA, 15 bp, Homo sapiens
catatgcactttttg

SEQ ID NO: 1793822 - DNA, 15 bp, Homo sapiens
atatgcactttttgc

SEQ ID NO: 1793823 - DNA, 15 bp, Homo sapiens
tatgcactttttgct

SEQ ID NO: 1793824 - DNA, 15 bp, Homo sapiens
atgcactttttgctt

SEQ ID NO: 1793825 - DNA, 15 bp, Homo sapiens
tgcactttttgcttg

SEQ ID NO: 1793826 - DNA, 15 bp, Homo sapiens
gcactttttgcttgt

SEQ ID NO: 1793827 - DNA, 15 bp, Homo sapiens
cactttttgcttgtc

SEQ ID NO: 1793828 - DNA, 15 bp, Homo sapiens
actttttgcttgtcc

SEQ ID NO: 1793829 - DNA, 15 bp, Homo sapiens
ctttttgcttgtcct

SEQ ID NO: 1793830 - DNA, 15 bp, Homo sapiens
tttttgcttgtcctt

SEQ ID NO: 1793831 - DNA, 15 bp, Homo sapiens
ttttgcttgtccttc

SEQ ID NO: 1793832 - DNA, 15 bp, Homo sapiens
tttgcttgtccttcc

SEQ ID NO: 1793833 - DNA, 15 bp, Homo sapiens
ttgcttgtccttcct

SEQ ID NO: 1793834 - DNA, 15 bp, Homo sapiens
tgcttgtccttcctc

SEQ ID NO: 1793835 - DNA, 15 bp, Homo sapiens
gcttgtccttcctct

SEQ ID NO: 1793836 - DNA, 15 bp, Homo sapiens
cttgtccttcctctc

SEQ ID NO: 1793837 - DNA, 15 bp, Homo sapiens
ttgtccttcctctca

SEQ ID NO: 1793838 - DNA, 15 bp, Homo sapiens
tgtccttcctctcag

SEQ ID NO: 1793839 - DNA, 15 bp, Homo sapiens
gtccttcctctcaga

SEQ ID NO: 1793840 - DNA, 15 bp, Homo sapiens
tccttcctctcagac

SEQ ID NO: 1793841 - DNA, 15 bp, Homo sapiens
ccttcctctcagact

SEQ ID NO: 1793842 - DNA, 15 bp, Homo sapiens
cttcctctcagactt

SEQ ID NO: 1793843 - DNA, 15 bp, Homo sapiens
ttcctctcagacttc

SEQ ID NO: 1793844 - DNA, 15 bp, Homo sapiens
tcctctcagacttct

SEQ ID NO: 1793845 - DNA, 15 bp, Homo sapiens
cctctcagacttcta

SEQ ID NO: 1793846 - DNA, 15 bp, Homo sapiens
ctctcagacttctag

SEQ ID NO: 1793847 - DNA, 15 bp, Homo sapiens
tctcagacttctagg

SEQ ID NO: 1793848 - DNA, 15 bp, Homo sapiens
ctcagacttctagga

SEQ ID NO: 1793849 - DNA, 15 bp, Homo sapiens
tcagacttctaggat

SEQ ID NO: 1793850 - DNA, 15 bp, Homo sapiens
cagacttctaggata

SEQ ID NO: 1793851 - DNA, 15 bp, Homo sapiens
agacttctaggatat

SEQ ID NO: 1793852 - DNA, 15 bp, Homo sapiens
gacttctaggatatt

SEQ ID NO: 1793853 - DNA, 15 bp, Homo sapiens
acttctaggatattc

SEQ ID NO: 1793854 - DNA, 15 bp, Homo sapiens
cttctaggatattct

SEQ ID NO: 1793855 - DNA, 15 bp, Homo sapiens
ttctaggatattctt

SEQ ID NO: 1793856 - DNA, 15 bp, Homo sapiens
tctaggatattcttt

SEQ ID NO: 1793857 - DNA, 15 bp, Homo sapiens
ctaggatattctttt

SEQ ID NO: 1793858 - DNA, 15 bp, Homo sapiens
taggatattcttttt

SEQ ID NO: 1793859 - DNA, 15 bp, Homo sapiens
aggatattctttttc

SEQ ID NO: 1793860 - DNA, 15 bp, Homo sapiens
ggatattctttttct

SEQ ID NO: 1793861 - DNA, 15 bp, Homo sapiens
gatattctttttctg

SEQ ID NO: 1793862 - DNA, 15 bp, Homo sapiens
atattctttttctgg

SEQ ID NO: 1793863 - DNA, 15 bp, Homo sapiens
tattctttttctggt

SEQ ID NO: 1793864 - DNA, 15 bp, Homo sapiens
attctttttctggta

SEQ ID NO: 1793865 - DNA, 15 bp, Homo sapiens
ttctttttctggtac

SEQ ID NO: 1793866 - DNA, 15 bp, Homo sapiens
tctttttctggtaca

SEQ ID NO: 1793867 - DNA, 15 bp, Homo sapiens
ctttttctggtacac

SEQ ID NO: 1793868 - DNA, 15 bp, Homo sapiens
tttttctggtacact

SEQ ID NO: 1793869 - DNA, 15 bp, Homo sapiens
ttttctggtacactg

SEQ ID NO: 1793870 - DNA, 15 bp, Homo sapiens
tttctggtacactga

SEQ ID NO: 1793871 - DNA, 15 bp, Homo sapiens
ttctggtacactgat

SEQ ID NO: 1793872 - DNA, 15 bp, Homo sapiens
tctggtacactgatt

SEQ ID NO: 1793873 - DNA, 15 bp, Homo sapiens
ctggtacactgatta

SEQ ID NO: 1793874 - DNA, 15 bp, Homo sapiens
tggtacactgattag

SEQ ID NO: 1793875 - DNA, 15 bp, Homo sapiens
ggtacactgattagg

SEQ ID NO: 1793876 - DNA, 15 bp, Homo sapiens
gtacactgattagga

SEQ ID NO: 1793877 - DNA, 15 bp, Homo sapiens
tacactgattaggaa

SEQ ID NO: 1793878 - DNA, 15 bp, Homo sapiens
acactgattaggaat

SEQ ID NO: 1793879 - DNA, 15 bp, Homo sapiens
cactgattaggaatt

SEQ ID NO: 1793880 - DNA, 15 bp, Homo sapiens
actgattaggaattg

SEQ ID NO: 1793881 - DNA, 15 bp, Homo sapiens
ctgattaggaattgt

SEQ ID NO: 1793882 - DNA, 15 bp, Homo sapiens
tgattaggaattgtt

SEQ ID NO: 1793883 - DNA, 15 bp, Homo sapiens
gattaggaattgttt

SEQ ID NO: 1793884 - DNA, 15 bp, Homo sapiens
attaggaattgtttg

SEQ ID NO: 1793885 - DNA, 15 bp, Homo sapiens
ttaggaattgtttgc

SEQ ID NO: 1793886 - DNA, 15 bp, Homo sapiens
taggaattgtttgca

SEQ ID NO: 1793887 - DNA, 15 bp, Homo sapiens
aggaattgtttgcat

SEQ ID NO: 1793888 - DNA, 15 bp, Homo sapiens
ggaattgtttgcatg

SEQ ID NO: 1793889 - DNA, 15 bp, Homo sapiens
gaattgtttgcatga

SEQ ID NO: 1793890 - DNA, 15 bp, Homo sapiens
aattgtttgcatgag

SEQ ID NO: 1793891 - DNA, 15 bp, Homo sapiens
attgtttgcatgaga

SEQ ID NO: 1793892 - DNA, 15 bp, Homo sapiens
ttgtttgcatgagat

SEQ ID NO: 1793893 - DNA, 15 bp, Homo sapiens
tgtttgcatgagatc

SEQ ID NO: 1793894 - DNA, 15 bp, Homo sapiens
gtttgcatgagatcc

SEQ ID NO: 1793895 - DNA, 15 bp, Homo sapiens
tttgcatgagatcct

SEQ ID NO: 1793896 - DNA, 15 bp, Homo sapiens
ttgcatgagatcctg

SEQ ID NO: 1793897 - DNA, 15 bp, Homo sapiens
tgcatgagatcctgc

SEQ ID NO: 1793898 - DNA, 15 bp, Homo sapiens
gcatgagatcctgcc

SEQ ID NO: 1793899 - DNA, 15 bp, Homo sapiens
catgagatcctgcct

SEQ ID NO: 1793900 - DNA, 15 bp, Homo sapiens
gagatcctgcctcag

SEQ ID NO: 1793901 - DNA, 15 bp, Homo sapiens
agatcctgcctcagt

SEQ ID NO: 1793902 - DNA, 15 bp, Homo sapiens
gatcctgcctcagtg

SEQ ID NO: 1793903 - DNA, 15 bp, Homo sapiens
atcctgcctcagtga

SEQ ID NO: 1793904 - DNA, 15 bp, Homo sapiens
tcctgcctcagtgaa

SEQ ID NO: 1793905 - DNA, 15 bp, Homo sapiens
cctgcctcagtgaaa

SEQ ID NO: 1793906 - DNA, 15 bp, Homo sapiens
ctgcctcagtgaaag

SEQ ID NO: 1793907 - DNA, 15 bp, Homo sapiens
tgcctcagtgaaagt

SEQ ID NO: 1793908 - DNA, 15 bp, Homo sapiens
gcctcagtgaaagtg

SEQ ID NO: 1793909 - DNA, 15 bp, Homo sapiens
cctcagtgaaagtgg

SEQ ID NO: 1793910 - DNA, 15 bp, Homo sapiens
ctcagtgaaagtggc

SEQ ID NO: 1793911 - DNA, 15 bp, Homo sapiens
tcagtgaaagtggca

SEQ ID NO: 1793912 - DNA, 15 bp, Homo sapiens
cagtgaaagtggcag

SEQ ID NO: 1793913 - DNA, 15 bp, Homo sapiens
agtgaaagtggcaga

SEQ ID NO: 1793914 - DNA, 15 bp, Homo sapiens
gtgaaagtggcagag

SEQ ID NO: 1793915 - DNA, 15 bp, Homo sapiens
tgaaagtggcagagc

SEQ ID NO: 1793916 - DNA, 15 bp, Homo sapiens
gaaagtggcagagct

SEQ ID NO: 1793917 - DNA, 15 bp, Homo sapiens
aaagtggcagagctt

SEQ ID NO: 1793918 - DNA, 15 bp, Homo sapiens
aagtggcagagcttc

SEQ ID NO: 1793919 - DNA, 15 bp, Homo sapiens
agtggcagagcttca

SEQ ID NO: 1793920 - DNA, 15 bp, Homo sapiens
gtggcagagcttcat

SEQ ID NO: 1793921 - DNA, 15 bp, Homo sapiens
tggcagagcttcatt

SEQ ID NO: 1793922 - DNA, 15 bp, Homo sapiens
ggcagagcttcattc

SEQ ID NO: 1793923 - DNA, 15 bp, Homo sapiens
gcagagcttcattct

SEQ ID NO: 1793924 - DNA, 15 bp, Homo sapiens
cagagcttcattcta

SEQ ID NO: 1793925 - DNA, 15 bp, Homo sapiens
agagcttcattctag

SEQ ID NO: 1793926 - DNA, 15 bp, Homo sapiens
gagcttcattctagg

SEQ ID NO: 1793927 - DNA, 15 bp, Homo sapiens
agcttcattctagga

SEQ ID NO: 1793928 - DNA, 15 bp, Homo sapiens
gcttcattctaggag

SEQ ID NO: 1793929 - DNA, 15 bp, Homo sapiens
cttcattctaggaga

SEQ ID NO: 1793930 - DNA, 15 bp, Homo sapiens
ttcattctaggagat

SEQ ID NO: 1793931 - DNA, 15 bp, Homo sapiens
tcattctaggagatc

SEQ ID NO: 1793932 - DNA, 15 bp, Homo sapiens
cattctaggagatcc

SEQ ID NO: 1793933 - DNA, 15 bp, Homo sapiens
attctaggagatcca

SEQ ID NO: 1793934 - DNA, 15 bp, Homo sapiens
ttctaggagatccaa

SEQ ID NO: 1793935 - DNA, 15 bp, Homo sapiens
tctaggagatccaag

SEQ ID NO: 1793936 - DNA, 15 bp, Homo sapiens
ctaggagatccaagg

SEQ ID NO: 1793937 - DNA, 15 bp, Homo sapiens
taggagatccaaggg

SEQ ID NO: 1793938 - DNA, 15 bp, Homo sapiens
aggagatccaaggga

SEQ ID NO: 1793939 - DNA, 15 bp, Homo sapiens
ggagatccaagggaa

SEQ ID NO: 1793940 - DNA, 15 bp, Homo sapiens
gagatccaagggaaa

SEQ ID NO: 1793941 - DNA, 15 bp, Homo sapiens
agatccaagggaaag

SEQ ID NO: 1793942 - DNA, 15 bp, Homo sapiens
gatccaagggaaagc

SEQ ID NO: 1793943 - DNA, 15 bp, Homo sapiens
atccaagggaaagct

SEQ ID NO: 1793944 - DNA, 15 bp, Homo sapiens
tccaagggaaagctt

SEQ ID NO: 1793945 - DNA, 15 bp, Homo sapiens
ccaagggaaagcttt

SEQ ID NO: 1793946 - DNA, 15 bp, Homo sapiens
caagggaaagctttg

SEQ ID NO: 1793947 - DNA, 15 bp, Homo sapiens
aagggaaagctttgc

SEQ ID NO: 1793948 - DNA, 15 bp, Homo sapiens
agggaaagctttgct

SEQ ID NO: 1793949 - DNA, 15 bp, Homo sapiens
gggaaagctttgctt

SEQ ID NO: 1793950 - DNA, 15 bp, Homo sapiens
ggaaagctttgcttt

SEQ ID NO: 1793951 - DNA, 15 bp, Homo sapiens
gaaagctttgctttg

SEQ ID NO: 1793952 - DNA, 15 bp, Homo sapiens
aaagctttgctttga

SEQ ID NO: 1793953 - DNA, 15 bp, Homo sapiens
aagctttgctttgaa

SEQ ID NO: 1793954 - DNA, 15 bp, Homo sapiens
agctttgctttgaaa

SEQ ID NO: 1793955 - DNA, 15 bp, Homo sapiens
gctttgctttgaaac

SEQ ID NO: 1793956 - DNA, 15 bp, Homo sapiens
ctttgctttgaaaca

SEQ ID NO: 1793957 - DNA, 15 bp, Homo sapiens
tttgctttgaaacat

SEQ ID NO: 1793958 - DNA, 15 bp, Homo sapiens
ttgctttgaaacatt

SEQ ID NO: 1793959 - DNA, 15 bp, Homo sapiens
tgctttgaaacattt

SEQ ID NO: 1793960 - DNA, 15 bp, Homo sapiens
gctttgaaacattta

SEQ ID NO: 1793961 - DNA, 15 bp, Homo sapiens
ctttgaaacatttat

SEQ ID NO: 1793962 - DNA, 15 bp, Homo sapiens
tttgaaacatttatt

SEQ ID NO: 1793963 - DNA, 15 bp, Homo sapiens
ttgaaacatttattc

SEQ ID NO: 1793964 - DNA, 15 bp, Homo sapiens
tgaaacatttattct

SEQ ID NO: 1793965 - DNA, 15 bp, Homo sapiens
gaaacatttattcta

SEQ ID NO: 1793966 - DNA, 15 bp, Homo sapiens
aaacatttattctag

SEQ ID NO: 1793967 - DNA, 15 bp, Homo sapiens
aacatttattctagg

SEQ ID NO: 1793968 - DNA, 15 bp, Homo sapiens
acatttattctaggc

SEQ ID NO: 1793969 - DNA, 15 bp, Homo sapiens
catttattctaggct

SEQ ID NO: 1793970 - DNA, 15 bp, Homo sapiens
atttattctaggctg

SEQ ID NO: 1793971 - DNA, 15 bp, Homo sapiens
tttattctaggctgc

SEQ ID NO: 1793972 - DNA, 15 bp, Homo sapiens
ttattctaggctgca

SEQ ID NO: 1793973 - DNA, 15 bp, Homo sapiens
tattctaggctgcaa

SEQ ID NO: 1793974 - DNA, 15 bp, Homo sapiens
attctaggctgcaaa

SEQ ID NO: 1793975 - DNA, 15 bp, Homo sapiens
ttctaggctgcaaat

SEQ ID NO: 1793976 - DNA, 15 bp, Homo sapiens
tctaggctgcaaatc

SEQ ID NO: 1793977 - DNA, 15 bp, Homo sapiens
ctaggctgcaaatcc

SEQ ID NO: 1793978 - DNA, 15 bp, Homo sapiens
taggctgcaaatcca

SEQ ID NO: 1793979 - DNA, 15 bp, Homo sapiens
aggctgcaaatccac

SEQ ID NO: 1793980 - DNA, 15 bp, Homo sapiens
ggctgcaaatccaca

SEQ ID NO: 1793981 - DNA, 15 bp, Homo sapiens
gctgcaaatccacaa

SEQ ID NO: 1793982 - DNA, 15 bp, Homo sapiens
ctgcaaatccacaac

SEQ ID NO: 1793983 - DNA, 15 bp, Homo sapiens
tgcaaatccacaacc

SEQ ID NO: 1793984 - DNA, 15 bp, Homo sapiens
gcaaatccacaaccc

SEQ ID NO: 1793985 - DNA, 15 bp, Homo sapiens
caaatccacaaccct

SEQ ID NO: 1793986 - DNA, 15 bp, Homo sapiens
aaatccacaacccta

SEQ ID NO: 1793987 - DNA, 15 bp, Homo sapiens
aatccacaaccctag

SEQ ID NO: 1793988 - DNA, 15 bp, Homo sapiens
atccacaaccctagt

SEQ ID NO: 1793989 - DNA, 15 bp, Homo sapiens
tccacaaccctagtt

SEQ ID NO: 1793990 - DNA, 15 bp, Homo sapiens
ccacaaccctagttg

SEQ ID NO: 1793991 - DNA, 15 bp, Homo sapiens
cacaaccctagttgg

SEQ ID NO: 1793992 - DNA, 15 bp, Homo sapiens
acaaccctagttggc

SEQ ID NO: 1793993 - DNA, 15 bp, Homo sapiens
caaccctagttggcc

SEQ ID NO: 1793994 - DNA, 15 bp, Homo sapiens
aaccctagttggcct

SEQ ID NO: 1793995 - DNA, 15 bp, Homo sapiens
accctagttggcctt

SEQ ID NO: 1793996 - DNA, 15 bp, Homo sapiens
ccctagttggccttc

SEQ ID NO: 1793997 - DNA, 15 bp, Homo sapiens
cctagttggccttcc

SEQ ID NO: 1793998 - DNA, 15 bp, Homo sapiens
ctagttggccttcca

SEQ ID NO: 1793999 - DNA, 15 bp, Homo sapiens
tagttggccttccat

SEQ ID NO: 1794000 - DNA, 15 bp, Homo sapiens
agttggccttccatt

SEQ ID NO: 1794001 - DNA, 15 bp, Homo sapiens
gttggccttccatta

SEQ ID NO: 1794002 - DNA, 15 bp, Homo sapiens
ttggccttccattaa

SEQ ID NO: 1794003 - DNA, 15 bp, Homo sapiens
tggccttccattaaa

SEQ ID NO: 1794004 - DNA, 15 bp, Homo sapiens
ggccttccattaaag

SEQ ID NO: 1794005 - DNA, 15 bp, Homo sapiens
gccttccattaaagt

SEQ ID NO: 1794006 - DNA, 15 bp, Homo sapiens
ccttccattaaagtc

SEQ ID NO: 1794007 - DNA, 15 bp, Homo sapiens
cttccattaaagtca

SEQ ID NO: 1794008 - DNA, 15 bp, Homo sapiens
ttccattaaagtcac

SEQ ID NO: 1794009 - DNA, 15 bp, Homo sapiens
tccattaaagtcact

SEQ ID NO: 1794010 - DNA, 15 bp, Homo sapiens
ccattaaagtcacta

SEQ ID NO: 1794011 - DNA, 15 bp, Homo sapiens
cattaaagtcactaa

SEQ ID NO: 1794012 - DNA, 15 bp, Homo sapiens
attaaagtcactaat

SEQ ID NO: 1794013 - DNA, 15 bp, Homo sapiens
ttaaagtcactaatt

SEQ ID NO: 1794014 - DNA, 15 bp, Homo sapiens
taaagtcactaattc

SEQ ID NO: 1794015 - DNA, 15 bp, Homo sapiens
aaagtcactaattca

SEQ ID NO: 1794016 - DNA, 15 bp, Homo sapiens
aagtcactaattcag

SEQ ID NO: 1794017 - DNA, 15 bp, Homo sapiens
agtcactaattcagc

SEQ ID NO: 1794018 - DNA, 15 bp, Homo sapiens
gtcactaattcagca

SEQ ID NO: 1794019 - DNA, 15 bp, Homo sapiens
tcactaattcagcag

SEQ ID NO: 1794020 - DNA, 15 bp, Homo sapiens
cactaattcagcagt

SEQ ID NO: 1794021 - DNA, 15 bp, Homo sapiens
actaattcagcagtc

SEQ ID NO: 1794022 - DNA, 15 bp, Homo sapiens
ctaattcagcagtcc

SEQ ID NO: 1794023 - DNA, 15 bp, Homo sapiens
taattcagcagtccc

SEQ ID NO: 1794024 - DNA, 15 bp, Homo sapiens
aattcagcagtccca

SEQ ID NO: 1794025 - DNA, 15 bp, Homo sapiens
attcagcagtcccat

SEQ ID NO: 1794026 - DNA, 15 bp, Homo sapiens
ttcagcagtcccata

SEQ ID NO: 1794027 - DNA, 15 bp, Homo sapiens
tcagcagtcccatat

SEQ ID NO: 1794028 - DNA, 15 bp, Homo sapiens
cagcagtcccatatt

SEQ ID NO: 1794029 - DNA, 15 bp, Homo sapiens
agcagtcccatattc

SEQ ID NO: 1794030 - DNA, 15 bp, Homo sapiens
gcagtcccatattca

SEQ ID NO: 1794031 - DNA, 15 bp, Homo sapiens
cagtcccatattcaa

SEQ ID NO: 1794032 - DNA, 15 bp, Homo sapiens
agtcccatattcaat

SEQ ID NO: 1794033 - DNA, 15 bp, Homo sapiens
gtcccatattcaata

SEQ ID NO: 1794034 - DNA, 15 bp, Homo sapiens
tcccatattcaatat

SEQ ID NO: 1794035 - DNA, 15 bp, Homo sapiens
cccatattcaatatg

SEQ ID NO: 1794036 - DNA, 15 bp, Homo sapiens
ccatattcaatatgc

SEQ ID NO: 1794037 - DNA, 15 bp, Homo sapiens
catattcaatatgca

SEQ ID NO: 1794038 - DNA, 15 bp, Homo sapiens
atattcaatatgcat

SEQ ID NO: 1794039 - DNA, 15 bp, Homo sapiens
tattcaatatgcatt

SEQ ID NO: 1794040 - DNA, 15 bp, Homo sapiens
attcaatatgcatta

SEQ ID NO: 1794041 - DNA, 15 bp, Homo sapiens
ttcaatatgcattac

SEQ ID NO: 1794042 - DNA, 15 bp, Homo sapiens
tcaatatgcattact

SEQ ID NO: 1794043 - DNA, 15 bp, Homo sapiens
caatatgcattactg

SEQ ID NO: 1794044 - DNA, 15 bp, Homo sapiens
aatatgcattactgt

SEQ ID NO: 1794045 - DNA, 15 bp, Homo sapiens
atatgcattactgtt

SEQ ID NO: 1794046 - DNA, 15 bp, Homo sapiens
tatgcattactgtta

SEQ ID NO: 1794047 - DNA, 15 bp, Homo sapiens
atgcattactgttaa

SEQ ID NO: 1794048 - DNA, 15 bp, Homo sapiens
tgcattactgttaat

SEQ ID NO: 1794049 - DNA, 15 bp, Homo sapiens
gcattactgttaata

SEQ ID NO: 1794050 - DNA, 15 bp, Homo sapiens
cattactgttaatat

SEQ ID NO: 1794051 - DNA, 15 bp, Homo sapiens
attactgttaatatg

SEQ ID NO: 1794052 - DNA, 15 bp, Homo sapiens
ttactgttaatatgt

SEQ ID NO: 1794053 - DNA, 15 bp, Homo sapiens
tactgttaatatgtt

SEQ ID NO: 1794054 - DNA, 15 bp, Homo sapiens
actgttaatatgttg

SEQ ID NO: 1794055 - DNA, 15 bp, Homo sapiens
ctgttaatatgttgc

SEQ ID NO: 1794056 - DNA, 15 bp, Homo sapiens
tgttaatatgttgca

SEQ ID NO: 1794057 - DNA, 15 bp, Homo sapiens
gttaatatgttgcac

SEQ ID NO: 1794058 - DNA, 15 bp, Homo sapiens
ttaatatgttgcacc

SEQ ID NO: 1794059 - DNA, 15 bp, Homo sapiens
taatatgttgcacca

SEQ ID NO: 1794060 - DNA, 15 bp, Homo sapiens
aatatgttgcaccat

SEQ ID NO: 1794061 - DNA, 15 bp, Homo sapiens
atatgttgcaccatc

SEQ ID NO: 1794062 - DNA, 15 bp, Homo sapiens
tatgttgcaccatct

SEQ ID NO: 1794063 - DNA, 15 bp, Homo sapiens
atgttgcaccatctc

SEQ ID NO: 1794064 - DNA, 15 bp, Homo sapiens
tgttgcaccatctcc

SEQ ID NO: 1794065 - DNA, 15 bp, Homo sapiens
gttgcaccatctcca

SEQ ID NO: 1794066 - DNA, 15 bp, Homo sapiens
ttgcaccatctccat

SEQ ID NO: 1794067 - DNA, 15 bp, Homo sapiens
tgcaccatctccatt

SEQ ID NO: 1794068 - DNA, 15 bp, Homo sapiens
gcaccatctccattc

SEQ ID NO: 1794069 - DNA, 15 bp, Homo sapiens
caccatctccattcc

SEQ ID NO: 1794070 - DNA, 15 bp, Homo sapiens
accatctccattccc

SEQ ID NO: 1794071 - DNA, 15 bp, Homo sapiens
ccatctccattcccc

SEQ ID NO: 1794072 - DNA, 15 bp, Homo sapiens
catctccattcccct

SEQ ID NO: 1794073 - DNA, 15 bp, Homo sapiens
atctccattcccctg

SEQ ID NO: 1794074 - DNA, 15 bp, Homo sapiens
tctccattcccctga

SEQ ID NO: 1794075 - DNA, 15 bp, Homo sapiens
ctccattcccctgag

SEQ ID NO: 1794076 - DNA, 15 bp, Homo sapiens
tccattcccctgaga

SEQ ID NO: 1794077 - DNA, 15 bp, Homo sapiens
ccattcccctgagag

SEQ ID NO: 1794078 - DNA, 15 bp, Homo sapiens
cattcccctgagagc

SEQ ID NO: 1794079 - DNA, 15 bp, Homo sapiens
attcccctgagagct

SEQ ID NO: 1794080 - DNA, 15 bp, Homo sapiens
ttcccctgagagctt

SEQ ID NO: 1794081 - DNA, 15 bp, Homo sapiens
tcccctgagagctta

SEQ ID NO: 1794082 - DNA, 15 bp, Homo sapiens
cccctgagagcttat

SEQ ID NO: 1794083 - DNA, 15 bp, Homo sapiens
ccctgagagcttata

SEQ ID NO: 1794084 - DNA, 15 bp, Homo sapiens
cctgagagcttatat

SEQ ID NO: 1794085 - DNA, 15 bp, Homo sapiens
ctgagagcttatatt

SEQ ID NO: 1794086 - DNA, 15 bp, Homo sapiens
tgagagcttatattt

SEQ ID NO: 1794087 - DNA, 15 bp, Homo sapiens
gagagcttatatttt

SEQ ID NO: 1794088 - DNA, 15 bp, Homo sapiens
agagcttatattttt

SEQ ID NO: 1794089 - DNA, 15 bp, Homo sapiens
gagcttatattttta

SEQ ID NO: 1794090 - DNA, 15 bp, Homo sapiens
agcttatatttttaa

SEQ ID NO: 1794091 - DNA, 15 bp, Homo sapiens
gcttatatttttaat

SEQ ID NO: 1794092 - DNA, 15 bp, Homo sapiens
cttatatttttaatt

SEQ ID NO: 1794093 - DNA, 15 bp, Homo sapiens
ttatatttttaattt

SEQ ID NO: 1794094 - DNA, 15 bp, Homo sapiens
tatatttttaatttt

SEQ ID NO: 1794095 - DNA, 15 bp, Homo sapiens
atatttttaattttt

SEQ ID NO: 1794096 - DNA, 15 bp, Homo sapiens
tatttttaattttta

SEQ ID NO: 1794097 - DNA, 15 bp, Homo sapiens
atttttaatttttaa

SEQ ID NO: 1794098 - DNA, 15 bp, Homo sapiens
ttttaatttttaaat

SEQ ID NO: 1794099 - DNA, 15 bp, Homo sapiens
tttaatttttaaatt

SEQ ID NO: 1794100 - DNA, 15 bp, Homo sapiens
ttaatttttaaattt

SEQ ID NO: 1794101 - DNA, 15 bp, Homo sapiens
taatttttaaatttt

SEQ ID NO: 1794102 - DNA, 15 bp, Homo sapiens
aatttttaaattttt

SEQ ID NO: 1794103 - DNA, 15 bp, Homo sapiens
ttaaatttttatttt

SEQ ID NO: 1794104 - DNA, 15 bp, Homo sapiens
taaatttttattttt

SEQ ID NO: 1794105 - DNA, 15 bp, Homo sapiens
aaatttttattttta

SEQ ID NO: 1794106 - DNA, 15 bp, Homo sapiens
aatttttatttttag

SEQ ID NO: 1794107 - DNA, 15 bp, Homo sapiens
atttttatttttaga

SEQ ID NO: 1794108 - DNA, 15 bp, Homo sapiens
tttttatttttagag

SEQ ID NO: 1794109 - DNA, 15 bp, Homo sapiens
ttttatttttagaga

SEQ ID NO: 1794110 - DNA, 15 bp, Homo sapiens
tttatttttagagac

SEQ ID NO: 1794111 - DNA, 15 bp, Homo sapiens
ttatttttagagaca

SEQ ID NO: 1794112 - DNA, 15 bp, Homo sapiens
tatttttagagacag

SEQ ID NO: 1794113 - DNA, 15 bp, Homo sapiens
atttttagagacagt

SEQ ID NO: 1794114 - DNA, 15 bp, Homo sapiens
tttttagagacagtg

SEQ ID NO: 1794115 - DNA, 15 bp, Homo sapiens
ttttagagacagtgt

SEQ ID NO: 1794116 - DNA, 15 bp, Homo sapiens
tttagagacagtgtc

SEQ ID NO: 1794117 - DNA, 15 bp, Homo sapiens
ttagagacagtgtct

SEQ ID NO: 1794118 - DNA, 15 bp, Homo sapiens
tagagacagtgtctc

SEQ ID NO: 1794119 - DNA, 15 bp, Homo sapiens
gacagtgtctcactc

SEQ ID NO: 1794120 - DNA, 15 bp, Homo sapiens
acagtgtctcactct

SEQ ID NO: 1794121 - DNA, 15 bp, Homo sapiens
cagtgtctcactctg

SEQ ID NO: 1794122 - DNA, 15 bp, Homo sapiens
agtgtctcactctgt

SEQ ID NO: 1794123 - DNA, 15 bp, Homo sapiens
gtgtctcactctgtc

SEQ ID NO: 1794124 - DNA, 15 bp, Homo sapiens
tgtctcactctgtca

SEQ ID NO: 1794125 - DNA, 15 bp, Homo sapiens
cactctgtcacctac

SEQ ID NO: 1794126 - DNA, 15 bp, Homo sapiens
actctgtcacctact

SEQ ID NO: 1794127 - DNA, 15 bp, Homo sapiens
ctctgtcacctactt

SEQ ID NO: 1794128 - DNA, 15 bp, Homo sapiens
tctgtcacctactta

SEQ ID NO: 1794129 - DNA, 15 bp, Homo sapiens
ctgtcacctacttat

SEQ ID NO: 1794130 - DNA, 15 bp, Homo sapiens
tgtcacctacttatt

SEQ ID NO: 1794131 - DNA, 15 bp, Homo sapiens
gtcacctacttatta

SEQ ID NO: 1794132 - DNA, 15 bp, Homo sapiens
tcacctacttattat

SEQ ID NO: 1794133 - DNA, 15 bp, Homo sapiens
cacctacttattata

SEQ ID NO: 1794134 - DNA, 15 bp, Homo sapiens
acctacttattataa

SEQ ID NO: 1794135 - DNA, 15 bp, Homo sapiens
cctacttattataac

SEQ ID NO: 1794136 - DNA, 15 bp, Homo sapiens
ctacttattataacc

SEQ ID NO: 1794137 - DNA, 15 bp, Homo sapiens
tacttattataacct

SEQ ID NO: 1794138 - DNA, 15 bp, Homo sapiens
acttattataacctc

SEQ ID NO: 1794139 - DNA, 15 bp, Homo sapiens
cttattataacctca

SEQ ID NO: 1794140 - DNA, 15 bp, Homo sapiens
ttattataacctcaa

SEQ ID NO: 1794141 - DNA, 15 bp, Homo sapiens
tattataacctcaaa

SEQ ID NO: 1794142 - DNA, 15 bp, Homo sapiens
attataacctcaaac

SEQ ID NO: 1794143 - DNA, 15 bp, Homo sapiens
ttataacctcaaact

SEQ ID NO: 1794144 - DNA, 15 bp, Homo sapiens
tataacctcaaactc

SEQ ID NO: 1794145 - DNA, 15 bp, Homo sapiens
ataacctcaaactcc

SEQ ID NO: 1794146 - DNA, 15 bp, Homo sapiens
taacctcaaactcct

SEQ ID NO: 1794147 - DNA, 15 bp, Homo sapiens
aacctcaaactcctc

SEQ ID NO: 1794148 - DNA, 15 bp, Homo sapiens
acctcaaactcctcg

SEQ ID NO: 1794149 - DNA, 15 bp, Homo sapiens
cctcaaactcctcgg

SEQ ID NO: 1794150 - DNA, 15 bp, Homo sapiens
ctcaaactcctcggc

SEQ ID NO: 1794151 - DNA, 15 bp, Homo sapiens
tcaaactcctcggcc

SEQ ID NO: 1794152 - DNA, 15 bp, Homo sapiens
caaactcctcggccc

SEQ ID NO: 1794153 - DNA, 15 bp, Homo sapiens
aaactcctcggccca

SEQ ID NO: 1794154 - DNA, 15 bp, Homo sapiens
aactcctcggcccaa

SEQ ID NO: 1794155 - DNA, 15 bp, Homo sapiens
actcctcggcccaag

SEQ ID NO: 1794156 - DNA, 15 bp, Homo sapiens
ctcctcggcccaagc

SEQ ID NO: 1794157 - DNA, 15 bp, Homo sapiens
tcctcggcccaagca

SEQ ID NO: 1794158 - DNA, 15 bp, Homo sapiens
cctcggcccaagcag

SEQ ID NO: 1794159 - DNA, 15 bp, Homo sapiens
ctcggcccaagcagt

SEQ ID NO: 1794160 - DNA, 15 bp, Homo sapiens
tcggcccaagcagtc

SEQ ID NO: 1794161 - DNA, 15 bp, Homo sapiens
cggcccaagcagtcc

SEQ ID NO: 1794162 - DNA, 15 bp, Homo sapiens
ggcccaagcagtcct

SEQ ID NO: 1794163 - DNA, 15 bp, Homo sapiens
gcccaagcagtcctc

SEQ ID NO: 1794164 - DNA, 15 bp, Homo sapiens
cccaagcagtcctct

SEQ ID NO: 1794165 - DNA, 15 bp, Homo sapiens
ccaagcagtcctctc

SEQ ID NO: 1794166 - DNA, 15 bp, Homo sapiens
caagcagtcctctca

SEQ ID NO: 1794167 - DNA, 15 bp, Homo sapiens
aagcagtcctctcac

SEQ ID NO: 1794168 - DNA, 15 bp, Homo sapiens
agcagtcctctcacc

SEQ ID NO: 1794169 - DNA, 15 bp, Homo sapiens
gcagtcctctcacct

SEQ ID NO: 1794170 - DNA, 15 bp, Homo sapiens
cagtcctctcacctt

SEQ ID NO: 1794171 - DNA, 15 bp, Homo sapiens
agtcctctcacctta

SEQ ID NO: 1794172 - DNA, 15 bp, Homo sapiens
gtcctctcaccttag

SEQ ID NO: 1794173 - DNA, 15 bp, Homo sapiens
tcctctcaccttagc

SEQ ID NO: 1794174 - DNA, 15 bp, Homo sapiens
cctctcaccttagcc

SEQ ID NO: 1794175 - DNA, 15 bp, Homo sapiens
ctctcaccttagcct

SEQ ID NO: 1794176 - DNA, 15 bp, Homo sapiens
tctcaccttagcctc

SEQ ID NO: 1794177 - DNA, 15 bp, Homo sapiens
ctcaccttagcctcc

SEQ ID NO: 1794178 - DNA, 15 bp, Homo sapiens
tcaccttagcctccc

SEQ ID NO: 1794179 - DNA, 15 bp, Homo sapiens
ttagcctcccaagtt

SEQ ID NO: 1794180 - DNA, 15 bp, Homo sapiens
tagcctcccaagttg

SEQ ID NO: 1794181 - DNA, 15 bp, Homo sapiens
agcctcccaagttgc

SEQ ID NO: 1794182 - DNA, 15 bp, Homo sapiens
gcctcccaagttgcc

SEQ ID NO: 1794183 - DNA, 15 bp, Homo sapiens
cctcccaagttgcca

SEQ ID NO: 1794184 - DNA, 15 bp, Homo sapiens
ctcccaagttgccag

SEQ ID NO: 1794185 - DNA, 15 bp, Homo sapiens
tcccaagttgccagg

SEQ ID NO: 1794186 - DNA, 15 bp, Homo sapiens
cccaagttgccagga

SEQ ID NO: 1794187 - DNA, 15 bp, Homo sapiens
ccaagttgccaggac

SEQ ID NO: 1794188 - DNA, 15 bp, Homo sapiens
caagttgccaggact

SEQ ID NO: 1794189 - DNA, 15 bp, Homo sapiens
aagttgccaggacta

SEQ ID NO: 1794190 - DNA, 15 bp, Homo sapiens
agttgccaggactac

SEQ ID NO: 1794191 - DNA, 15 bp, Homo sapiens
gttgccaggactaca

SEQ ID NO: 1794192 - DNA, 15 bp, Homo sapiens
ttgccaggactacag

SEQ ID NO: 1794193 - DNA, 15 bp, Homo sapiens
tgccaggactacagg

SEQ ID NO: 1794194 - DNA, 15 bp, Homo sapiens
gccaggactacaggc

SEQ ID NO: 1794195 - DNA, 15 bp, Homo sapiens
ccaggactacaggca

SEQ ID NO: 1794196 - DNA, 15 bp, Homo sapiens
caggactacaggcat

SEQ ID NO: 1794197 - DNA, 15 bp, Homo sapiens
aggactacaggcatg

SEQ ID NO: 1794198 - DNA, 15 bp, Homo sapiens
catgcaccaccatgt

SEQ ID NO: 1794199 - DNA, 15 bp, Homo sapiens
atgcaccaccatgtc

SEQ ID NO: 1794200 - DNA, 15 bp, Homo sapiens
tgcaccaccatgtcc

SEQ ID NO: 1794201 - DNA, 15 bp, Homo sapiens
gcaccaccatgtcca

SEQ ID NO: 1794202 - DNA, 15 bp, Homo sapiens
caccaccatgtccag

SEQ ID NO: 1794203 - DNA, 15 bp, Homo sapiens
accaccatgtccagc

SEQ ID NO: 1794204 - DNA, 15 bp, Homo sapiens
ccaccatgtccagct

SEQ ID NO: 1794205 - DNA, 15 bp, Homo sapiens
caccatgtccagcta

SEQ ID NO: 1794206 - DNA, 15 bp, Homo sapiens
atgtccagctaattt

SEQ ID NO: 1794207 - DNA, 15 bp, Homo sapiens
tgtccagctaatttt

SEQ ID NO: 1794208 - DNA, 15 bp, Homo sapiens
tccagctaattttta

SEQ ID NO: 1794209 - DNA, 15 bp, Homo sapiens
ccagctaatttttaa

SEQ ID NO: 1794210 - DNA, 15 bp, Homo sapiens
cagctaatttttaaa

SEQ ID NO: 1794211 - DNA, 15 bp, Homo sapiens
agctaatttttaaat

SEQ ID NO: 1794212 - DNA, 15 bp, Homo sapiens
gctaatttttaaatt

SEQ ID NO: 1794213 - DNA, 15 bp, Homo sapiens
ctaatttttaaattt

SEQ ID NO: 1794214 - DNA, 15 bp, Homo sapiens
atttttaaatttttt

SEQ ID NO: 1794215 - DNA, 15 bp, Homo sapiens
tttttaaattttttg

SEQ ID NO: 1794216 - DNA, 15 bp, Homo sapiens
ttttaaattttttgt

SEQ ID NO: 1794217 - DNA, 15 bp, Homo sapiens
tttaaattttttgta

SEQ ID NO: 1794218 - DNA, 15 bp, Homo sapiens
ttaaattttttgtag

SEQ ID NO: 1794219 - DNA, 15 bp, Homo sapiens
taaattttttgtaga

SEQ ID NO: 1794220 - DNA, 15 bp, Homo sapiens
aaattttttgtagag

SEQ ID NO: 1794221 - DNA, 15 bp, Homo sapiens
tgtagagacagggtt

SEQ ID NO: 1794222 - DNA, 15 bp, Homo sapiens
agagacagggttttc

SEQ ID NO: 1794223 - DNA, 15 bp, Homo sapiens
gagacagggttttct

SEQ ID NO: 1794224 - DNA, 15 bp, Homo sapiens
agacagggttttcta

SEQ ID NO: 1794225 - DNA, 15 bp, Homo sapiens
gacagggttttctat

SEQ ID NO: 1794226 - DNA, 15 bp, Homo sapiens
acagggttttctatg

SEQ ID NO: 1794227 - DNA, 15 bp, Homo sapiens
cagggttttctatgt

SEQ ID NO: 1794228 - DNA, 15 bp, Homo sapiens
agggttttctatgtt

SEQ ID NO: 1794229 - DNA, 15 bp, Homo sapiens
gggttttctatgttg

SEQ ID NO: 1794230 - DNA, 15 bp, Homo sapiens
ggttttctatgttgg

SEQ ID NO: 1794231 - DNA, 15 bp, Homo sapiens
gttttctatgttggc

SEQ ID NO: 1794232 - DNA, 15 bp, Homo sapiens
ttttctatgttggcc

SEQ ID NO: 1794233 - DNA, 15 bp, Homo sapiens
tttctatgttggcca

SEQ ID NO: 1794234 - DNA, 15 bp, Homo sapiens
ttctatgttggccag

SEQ ID NO: 1794235 - DNA, 15 bp, Homo sapiens
tctatgttggccaga

SEQ ID NO: 1794236 - DNA, 15 bp, Homo sapiens
ctatgttggccagat

SEQ ID NO: 1794237 - DNA, 15 bp, Homo sapiens
tatgttggccagatt

SEQ ID NO: 1794238 - DNA, 15 bp, Homo sapiens
atgttggccagattg

SEQ ID NO: 1794239 - DNA, 15 bp, Homo sapiens
tgttggccagattgg

SEQ ID NO: 1794240 - DNA, 15 bp, Homo sapiens
gttggccagattggt

SEQ ID NO: 1794241 - DNA, 15 bp, Homo sapiens
ttggccagattggta

SEQ ID NO: 1794242 - DNA, 15 bp, Homo sapiens
tggccagattggtat

SEQ ID NO: 1794243 - DNA, 15 bp, Homo sapiens
ggccagattggtatt

SEQ ID NO: 1794244 - DNA, 15 bp, Homo sapiens
gccagattggtattg

SEQ ID NO: 1794245 - DNA, 15 bp, Homo sapiens
ccagattggtattga

SEQ ID NO: 1794246 - DNA, 15 bp, Homo sapiens
cagattggtattgaa

SEQ ID NO: 1794247 - DNA, 15 bp, Homo sapiens
agattggtattgaac

SEQ ID NO: 1794248 - DNA, 15 bp, Homo sapiens
gattggtattgaact

SEQ ID NO: 1794249 - DNA, 15 bp, Homo sapiens
attggtattgaactc

SEQ ID NO: 1794250 - DNA, 15 bp, Homo sapiens
ttggtattgaactcc

SEQ ID NO: 1794251 - DNA, 15 bp, Homo sapiens
tggtattgaactcct

SEQ ID NO: 1794252 - DNA, 15 bp, Homo sapiens
ggtattgaactcctg

SEQ ID NO: 1794253 - DNA, 15 bp, Homo sapiens
gtattgaactcctgg

SEQ ID NO: 1794254 - DNA, 15 bp, Homo sapiens
tattgaactcctggc

SEQ ID NO: 1794255 - DNA, 15 bp, Homo sapiens
attgaactcctggct

SEQ ID NO: 1794256 - DNA, 15 bp, Homo sapiens
gaactcctggcttcc

SEQ ID NO: 1794257 - DNA, 15 bp, Homo sapiens
aactcctggcttcca

SEQ ID NO: 1794258 - DNA, 15 bp, Homo sapiens
actcctggcttccac

SEQ ID NO: 1794259 - DNA, 15 bp, Homo sapiens
ctcctggcttccacg

SEQ ID NO: 1794260 - DNA, 15 bp, Homo sapiens
tcctggcttccacga

SEQ ID NO: 1794261 - DNA, 15 bp, Homo sapiens
cctggcttccacgat

SEQ ID NO: 1794262 - DNA, 15 bp, Homo sapiens
ctggcttccacgata

SEQ ID NO: 1794263 - DNA, 15 bp, Homo sapiens
tggcttccacgatac

SEQ ID NO: 1794264 - DNA, 15 bp, Homo sapiens
ggcttccacgatacc

SEQ ID NO: 1794265 - DNA, 15 bp, Homo sapiens
gcttccacgataccc

SEQ ID NO: 1794266 - DNA, 15 bp, Homo sapiens
cttccacgatacccc

SEQ ID NO: 1794267 - DNA, 15 bp, Homo sapiens
ttccacgataccccg

SEQ ID NO: 1794268 - DNA, 15 bp, Homo sapiens
tccacgataccccgt

SEQ ID NO: 1794269 - DNA, 15 bp, Homo sapiens
ccacgataccccgtc

SEQ ID NO: 1794270 - DNA, 15 bp, Homo sapiens
cacgataccccgtct

SEQ ID NO: 1794271 - DNA, 15 bp, Homo sapiens
acgataccccgtctc

SEQ ID NO: 1794272 - DNA, 15 bp, Homo sapiens
cgataccccgtctca

SEQ ID NO: 1794273 - DNA, 15 bp, Homo sapiens
gataccccgtctcag

SEQ ID NO: 1794274 - DNA, 15 bp, Homo sapiens
ataccccgtctcagc

SEQ ID NO: 1794275 - DNA, 15 bp, Homo sapiens
taccccgtctcagcc

SEQ ID NO: 1794276 - DNA, 15 bp, Homo sapiens
accccgtctcagcct

SEQ ID NO: 1794277 - DNA, 15 bp, Homo sapiens
ccccgtctcagcctc

SEQ ID NO: 1794278 - DNA, 15 bp, Homo sapiens
cccgtctcagcctcc

SEQ ID NO: 1794279 - DNA, 15 bp, Homo sapiens
ccgtctcagcctccc

SEQ ID NO: 1794280 - DNA, 15 bp, Homo sapiens
cgtctcagcctccca

SEQ ID NO: 1794281 - DNA, 15 bp, Homo sapiens
cagcctcccaaagaa

SEQ ID NO: 1794282 - DNA, 15 bp, Homo sapiens
agcctcccaaagaac

SEQ ID NO: 1794283 - DNA, 15 bp, Homo sapiens
gcctcccaaagaact

SEQ ID NO: 1794284 - DNA, 15 bp, Homo sapiens
cctcccaaagaactg

SEQ ID NO: 1794285 - DNA, 15 bp, Homo sapiens
ctcccaaagaactgg

SEQ ID NO: 1794286 - DNA, 15 bp, Homo sapiens
tcccaaagaactggg

SEQ ID NO: 1794287 - DNA, 15 bp, Homo sapiens
cccaaagaactggga

SEQ ID NO: 1794288 - DNA, 15 bp, Homo sapiens
ccaaagaactgggat

SEQ ID NO: 1794289 - DNA, 15 bp, Homo sapiens
caaagaactgggatt

SEQ ID NO: 1794290 - DNA, 15 bp, Homo sapiens
aaagaactgggatta

SEQ ID NO: 1794291 - DNA, 15 bp, Homo sapiens
aagaactgggattac

SEQ ID NO: 1794292 - DNA, 15 bp, Homo sapiens
agaactgggattaca

SEQ ID NO: 1794293 - DNA, 15 bp, Homo sapiens
gaactgggattacag

SEQ ID NO: 1794294 - DNA, 15 bp, Homo sapiens
aactgggattacaga

SEQ ID NO: 1794295 - DNA, 15 bp, Homo sapiens
actgggattacagat

SEQ ID NO: 1794296 - DNA, 15 bp, Homo sapiens
cagatgtgagccact

SEQ ID NO: 1794297 - DNA, 15 bp, Homo sapiens
agatgtgagccactg

SEQ ID NO: 1794298 - DNA, 15 bp, Homo sapiens
gatgtgagccactgc

SEQ ID NO: 1794299 - DNA, 15 bp, Homo sapiens
atgtgagccactgca

SEQ ID NO: 1794300 - DNA, 15 bp, Homo sapiens
tgtgagccactgcac

SEQ ID NO: 1794301 - DNA, 15 bp, Homo sapiens
ctgcacctggccaga

SEQ ID NO: 1794302 - DNA, 15 bp, Homo sapiens
tgcacctggccagag

SEQ ID NO: 1794303 - DNA, 15 bp, Homo sapiens
gcacctggccagaga

SEQ ID NO: 1794304 - DNA, 15 bp, Homo sapiens
cacctggccagagag

SEQ ID NO: 1794305 - DNA, 15 bp, Homo sapiens
acctggccagagagc

SEQ ID NO: 1794306 - DNA, 15 bp, Homo sapiens
cctggccagagagct

SEQ ID NO: 1794307 - DNA, 15 bp, Homo sapiens
ctggccagagagctt

SEQ ID NO: 1794308 - DNA, 15 bp, Homo sapiens
tggccagagagctta

SEQ ID NO: 1794309 - DNA, 15 bp, Homo sapiens
ggccagagagcttat

SEQ ID NO: 1794310 - DNA, 15 bp, Homo sapiens
gccagagagcttata

SEQ ID NO: 1794311 - DNA, 15 bp, Homo sapiens
ccagagagcttatat

SEQ ID NO: 1794312 - DNA, 15 bp, Homo sapiens
cagagagcttatatt

SEQ ID NO: 1794313 - DNA, 15 bp, Homo sapiens
agagagcttatattc

SEQ ID NO: 1794314 - DNA, 15 bp, Homo sapiens
gagagcttatattct

SEQ ID NO: 1794315 - DNA, 15 bp, Homo sapiens
agagcttatattctt

SEQ ID NO: 1794316 - DNA, 15 bp, Homo sapiens
gagcttatattctta

SEQ ID NO: 1794317 - DNA, 15 bp, Homo sapiens
agcttatattcttat

SEQ ID NO: 1794318 - DNA, 15 bp, Homo sapiens
gcttatattcttata

SEQ ID NO: 1794319 - DNA, 15 bp, Homo sapiens
cttatattcttatag

SEQ ID NO: 1794320 - DNA, 15 bp, Homo sapiens
ttatattcttatagg

SEQ ID NO: 1794321 - DNA, 15 bp, Homo sapiens
tatattcttatagga

SEQ ID NO: 1794322 - DNA, 15 bp, Homo sapiens
atattcttataggaa

SEQ ID NO: 1794323 - DNA, 15 bp, Homo sapiens
tattcttataggaat

SEQ ID NO: 1794324 - DNA, 15 bp, Homo sapiens
attcttataggaatg

SEQ ID NO: 1794325 - DNA, 15 bp, Homo sapiens
ttcttataggaatgg

SEQ ID NO: 1794326 - DNA, 15 bp, Homo sapiens
tcttataggaatggg

SEQ ID NO: 1794327 - DNA, 15 bp, Homo sapiens
cttataggaatggga

SEQ ID NO: 1794328 - DNA, 15 bp, Homo sapiens
ttataggaatgggaa

SEQ ID NO: 1794329 - DNA, 15 bp, Homo sapiens
tataggaatgggaag

SEQ ID NO: 1794330 - DNA, 15 bp, Homo sapiens
ataggaatgggaaga

SEQ ID NO: 1794331 - DNA, 15 bp, Homo sapiens
taggaatgggaagac

SEQ ID NO: 1794332 - DNA, 15 bp, Homo sapiens
aggaatgggaagact

SEQ ID NO: 1794333 - DNA, 15 bp, Homo sapiens
ggaatgggaagactg

SEQ ID NO: 1794334 - DNA, 15 bp, Homo sapiens
gaatgggaagactgc

SEQ ID NO: 1794335 - DNA, 15 bp, Homo sapiens
aatgggaagactgcc

SEQ ID NO: 1794336 - DNA, 15 bp, Homo sapiens
atgggaagactgcct

SEQ ID NO: 1794337 - DNA, 15 bp, Homo sapiens
tgggaagactgccta

SEQ ID NO: 1794338 - DNA, 15 bp, Homo sapiens
gggaagactgcctat

SEQ ID NO: 1794339 - DNA, 15 bp, Homo sapiens
ggaagactgcctatg

SEQ ID NO: 1794340 - DNA, 15 bp, Homo sapiens
gaagactgcctatgt

SEQ ID NO: 1794341 - DNA, 15 bp, Homo sapiens
aagactgcctatgtt

SEQ ID NO: 1794342 - DNA, 15 bp, Homo sapiens
agactgcctatgtta

SEQ ID NO: 1794343 - DNA, 15 bp, Homo sapiens
gactgcctatgttat

SEQ ID NO: 1794344 - DNA, 15 bp, Homo sapiens
actgcctatgttatg

SEQ ID NO: 1794345 - DNA, 15 bp, Homo sapiens
ctgcctatgttatgt

SEQ ID NO: 1794346 - DNA, 15 bp, Homo sapiens
tgcctatgttatgtg

SEQ ID NO: 1794347 - DNA, 15 bp, Homo sapiens
gcctatgttatgtgt

SEQ ID NO: 1794348 - DNA, 15 bp, Homo sapiens
cctatgttatgtgtt

SEQ ID NO: 1794349 - DNA, 15 bp, Homo sapiens
ctatgttatgtgttg

SEQ ID NO: 1794350 - DNA, 15 bp, Homo sapiens
tatgttatgtgttgc

SEQ ID NO: 1794351 - DNA, 15 bp, Homo sapiens
atgttatgtgttgct

SEQ ID NO: 1794352 - DNA, 15 bp, Homo sapiens
tgttatgtgttgcta

SEQ ID NO: 1794353 - DNA, 15 bp, Homo sapiens
gttatgtgttgctac

SEQ ID NO: 1794354 - DNA, 15 bp, Homo sapiens
ttatgtgttgctaca

SEQ ID NO: 1794355 - DNA, 15 bp, Homo sapiens
tatgtgttgctacat

SEQ ID NO: 1794356 - DNA, 15 bp, Homo sapiens
atgtgttgctacata

SEQ ID NO: 1794357 - DNA, 15 bp, Homo sapiens
tgtgttgctacataa

SEQ ID NO: 1794358 - DNA, 15 bp, Homo sapiens
gtgttgctacataat

SEQ ID NO: 1794359 - DNA, 15 bp, Homo sapiens
tgttgctacataata

SEQ ID NO: 1794360 - DNA, 15 bp, Homo sapiens
gttgctacataatac

SEQ ID NO: 1794361 - DNA, 15 bp, Homo sapiens
ttgctacataataca

SEQ ID NO: 1794362 - DNA, 15 bp, Homo sapiens
tgctacataatacat

SEQ ID NO: 1794363 - DNA, 15 bp, Homo sapiens
gctacataatacatt

SEQ ID NO: 1794364 - DNA, 15 bp, Homo sapiens
ctacataatacatta

SEQ ID NO: 1794365 - DNA, 15 bp, Homo sapiens
tacataatacattac

SEQ ID NO: 1794366 - DNA, 15 bp, Homo sapiens
acataatacattacc

SEQ ID NO: 1794367 - DNA, 15 bp, Homo sapiens
cataatacattaccc

SEQ ID NO: 1794368 - DNA, 15 bp, Homo sapiens
ataatacattacccc

SEQ ID NO: 1794369 - DNA, 15 bp, Homo sapiens
taatacattaccccc

SEQ ID NO: 1794370 - DNA, 15 bp, Homo sapiens
aatacattaccccca

SEQ ID NO: 1794371 - DNA, 15 bp, Homo sapiens
atacattacccccaa

SEQ ID NO: 1794372 - DNA, 15 bp, Homo sapiens
tacattacccccaaa

SEQ ID NO: 1794373 - DNA, 15 bp, Homo sapiens
acattacccccaaac

SEQ ID NO: 1794374 - DNA, 15 bp, Homo sapiens
cattacccccaaact

SEQ ID NO: 1794375 - DNA, 15 bp, Homo sapiens
attacccccaaactt

SEQ ID NO: 1794376 - DNA, 15 bp, Homo sapiens
ttacccccaaactta

SEQ ID NO: 1794377 - DNA, 15 bp, Homo sapiens
tacccccaaacttag

SEQ ID NO: 1794378 - DNA, 15 bp, Homo sapiens
acccccaaacttagt

SEQ ID NO: 1794379 - DNA, 15 bp, Homo sapiens
cccccaaacttagtg

SEQ ID NO: 1794380 - DNA, 15 bp, Homo sapiens
ccccaaacttagtga

SEQ ID NO: 1794381 - DNA, 15 bp, Homo sapiens
cccaaacttagtgac

SEQ ID NO: 1794382 - DNA, 15 bp, Homo sapiens
ccaaacttagtgact

SEQ ID NO: 1794383 - DNA, 15 bp, Homo sapiens
caaacttagtgactt

SEQ ID NO: 1794384 - DNA, 15 bp, Homo sapiens
aaacttagtgactta

SEQ ID NO: 1794385 - DNA, 15 bp, Homo sapiens
aacttagtgacttaa

SEQ ID NO: 1794386 - DNA, 15 bp, Homo sapiens
acttagtgacttaaa

SEQ ID NO: 1794387 - DNA, 15 bp, Homo sapiens
cttagtgacttaaaa

SEQ ID NO: 1794388 - DNA, 15 bp, Homo sapiens
ttagtgacttaaaac

SEQ ID NO: 1794389 - DNA, 15 bp, Homo sapiens
tagtgacttaaaaca

SEQ ID NO: 1794390 - DNA, 15 bp, Homo sapiens
agtgacttaaaacaa

SEQ ID NO: 1794391 - DNA, 15 bp, Homo sapiens
gtgacttaaaacaaa

SEQ ID NO: 1794392 - DNA, 15 bp, Homo sapiens
tgacttaaaacaaac

SEQ ID NO: 1794393 - DNA, 15 bp, Homo sapiens
gacttaaaacaaacg

SEQ ID NO: 1794394 - DNA, 15 bp, Homo sapiens
acttaaaacaaacgc

SEQ ID NO: 1794395 - DNA, 15 bp, Homo sapiens
cttaaaacaaacgct

SEQ ID NO: 1794396 - DNA, 15 bp, Homo sapiens
ttaaaacaaacgctt

SEQ ID NO: 1794397 - DNA, 15 bp, Homo sapiens
taaaacaaacgctta

SEQ ID NO: 1794398 - DNA, 15 bp, Homo sapiens
aaaacaaacgcttat

SEQ ID NO: 1794399 - DNA, 15 bp, Homo sapiens
aaacaaacgcttatt

SEQ ID NO: 1794400 - DNA, 15 bp, Homo sapiens
aacaaacgcttatta

SEQ ID NO: 1794401 - DNA, 15 bp, Homo sapiens
acaaacgcttattat

SEQ ID NO: 1794402 - DNA, 15 bp, Homo sapiens
caaacgcttattatc

SEQ ID NO: 1794403 - DNA, 15 bp, Homo sapiens
aaacgcttattatct

SEQ ID NO: 1794404 - DNA, 15 bp, Homo sapiens
aacgcttattatctc

SEQ ID NO: 1794405 - DNA, 15 bp, Homo sapiens
acgcttattatctcc

SEQ ID NO: 1794406 - DNA, 15 bp, Homo sapiens
cgcttattatctcca

SEQ ID NO: 1794407 - DNA, 15 bp, Homo sapiens
gcttattatctccat

SEQ ID NO: 1794408 - DNA, 15 bp, Homo sapiens
cttattatctccatt

SEQ ID NO: 1794409 - DNA, 15 bp, Homo sapiens
ttattatctccattt

SEQ ID NO: 1794410 - DNA, 15 bp, Homo sapiens
tattatctccatttc

SEQ ID NO: 1794411 - DNA, 15 bp, Homo sapiens
attatctccatttct

SEQ ID NO: 1794412 - DNA, 15 bp, Homo sapiens
ttatctccatttctg

SEQ ID NO: 1794413 - DNA, 15 bp, Homo sapiens
tatctccatttctgt

SEQ ID NO: 1794414 - DNA, 15 bp, Homo sapiens
atctccatttctgtg

SEQ ID NO: 1794415 - DNA, 15 bp, Homo sapiens
tctccatttctgtgg

SEQ ID NO: 1794416 - DNA, 15 bp, Homo sapiens
ctccatttctgtggg

SEQ ID NO: 1794417 - DNA, 15 bp, Homo sapiens
tccatttctgtgggt

SEQ ID NO: 1794418 - DNA, 15 bp, Homo sapiens
ccatttctgtgggtc

SEQ ID NO: 1794419 - DNA, 15 bp, Homo sapiens
catttctgtgggtca

SEQ ID NO: 1794420 - DNA, 15 bp, Homo sapiens
atttctgtgggtcaa

SEQ ID NO: 1794421 - DNA, 15 bp, Homo sapiens
tttctgtgggtcaat

SEQ ID NO: 1794422 - DNA, 15 bp, Homo sapiens
ttctgtgggtcaata

SEQ ID NO: 1794423 - DNA, 15 bp, Homo sapiens
tctgtgggtcaataa

SEQ ID NO: 1794424 - DNA, 15 bp, Homo sapiens
ctgtgggtcaataat

SEQ ID NO: 1794425 - DNA, 15 bp, Homo sapiens
tgtgggtcaataatc

SEQ ID NO: 1794426 - DNA, 15 bp, Homo sapiens
gtgggtcaataatct

SEQ ID NO: 1794427 - DNA, 15 bp, Homo sapiens
tgggtcaataatcta

SEQ ID NO: 1794428 - DNA, 15 bp, Homo sapiens
gggtcaataatctag

SEQ ID NO: 1794429 - DNA, 15 bp, Homo sapiens
ggtcaataatctagg

SEQ ID NO: 1794430 - DNA, 15 bp, Homo sapiens
gtcaataatctaggc

SEQ ID NO: 1794431 - DNA, 15 bp, Homo sapiens
tcaataatctaggca

SEQ ID NO: 1794432 - DNA, 15 bp, Homo sapiens
caataatctaggcat

SEQ ID NO: 1794433 - DNA, 15 bp, Homo sapiens
aataatctaggcatg

SEQ ID NO: 1794434 - DNA, 15 bp, Homo sapiens
ataatctaggcatga

SEQ ID NO: 1794435 - DNA, 15 bp, Homo sapiens
taatctaggcatgac

SEQ ID NO: 1794436 - DNA, 15 bp, Homo sapiens
aatctaggcatgact

SEQ ID NO: 1794437 - DNA, 15 bp, Homo sapiens
atctaggcatgactt

SEQ ID NO: 1794438 - DNA, 15 bp, Homo sapiens
tctaggcatgactta

SEQ ID NO: 1794439 - DNA, 15 bp, Homo sapiens
ctaggcatgacttag

SEQ ID NO: 1794440 - DNA, 15 bp, Homo sapiens
taggcatgacttagc

SEQ ID NO: 1794441 - DNA, 15 bp, Homo sapiens
aggcatgacttagct

SEQ ID NO: 1794442 - DNA, 15 bp, Homo sapiens
ggcatgacttagctg

SEQ ID NO: 1794443 - DNA, 15 bp, Homo sapiens
gcatgacttagctgg

SEQ ID NO: 1794444 - DNA, 15 bp, Homo sapiens
catgacttagctggg

SEQ ID NO: 1794445 - DNA, 15 bp, Homo sapiens
atgacttagctgggc

SEQ ID NO: 1794446 - DNA, 15 bp, Homo sapiens
tgacttagctgggcc

SEQ ID NO: 1794447 - DNA, 15 bp, Homo sapiens
gacttagctgggcca

SEQ ID NO: 1794448 - DNA, 15 bp, Homo sapiens
acttagctgggccag

SEQ ID NO: 1794449 - DNA, 15 bp, Homo sapiens
cttagctgggccaga

SEQ ID NO: 1794450 - DNA, 15 bp, Homo sapiens
ttagctgggccagag

SEQ ID NO: 1794451 - DNA, 15 bp, Homo sapiens
tagctgggccagagt

SEQ ID NO: 1794452 - DNA, 15 bp, Homo sapiens
agctgggccagagtt

SEQ ID NO: 1794453 - DNA, 15 bp, Homo sapiens
gctgggccagagttt

SEQ ID NO: 1794454 - DNA, 15 bp, Homo sapiens
ctgggccagagtttc

SEQ ID NO: 1794455 - DNA, 15 bp, Homo sapiens
tgggccagagtttct

SEQ ID NO: 1794456 - DNA, 15 bp, Homo sapiens
gggccagagtttctc

SEQ ID NO: 1794457 - DNA, 15 bp, Homo sapiens
ggccagagtttctcc

SEQ ID NO: 1794458 - DNA, 15 bp, Homo sapiens
gccagagtttctcca

SEQ ID NO: 1794459 - DNA, 15 bp, Homo sapiens
ccagagtttctccaa

SEQ ID NO: 1794460 - DNA, 15 bp, Homo sapiens
cagagtttctccaaa

SEQ ID NO: 1794461 - DNA, 15 bp, Homo sapiens
agagtttctccaaag

SEQ ID NO: 1794462 - DNA, 15 bp, Homo sapiens
gagtttctccaaagt

SEQ ID NO: 1794463 - DNA, 15 bp, Homo sapiens
agtttctccaaagtc

SEQ ID NO: 1794464 - DNA, 15 bp, Homo sapiens
gtttctccaaagtct

SEQ ID NO: 1794465 - DNA, 15 bp, Homo sapiens
tttctccaaagtctg

SEQ ID NO: 1794466 - DNA, 15 bp, Homo sapiens
ttctccaaagtctgt

SEQ ID NO: 1794467 - DNA, 15 bp, Homo sapiens
tctccaaagtctgtg

SEQ ID NO: 1794468 - DNA, 15 bp, Homo sapiens
ctccaaagtctgtga

SEQ ID NO: 1794469 - DNA, 15 bp, Homo sapiens
tccaaagtctgtgat

SEQ ID NO: 1794470 - DNA, 15 bp, Homo sapiens
ccaaagtctgtgatc

SEQ ID NO: 1794471 - DNA, 15 bp, Homo sapiens
caaagtctgtgatca

SEQ ID NO: 1794472 - DNA, 15 bp, Homo sapiens
aaagtctgtgatcaa

SEQ ID NO: 1794473 - DNA, 15 bp, Homo sapiens
aagtctgtgatcaag

SEQ ID NO: 1794474 - DNA, 15 bp, Homo sapiens
agtctgtgatcaagg

SEQ ID NO: 1794475 - DNA, 15 bp, Homo sapiens
gtctgtgatcaaggt

SEQ ID NO: 1794476 - DNA, 15 bp, Homo sapiens
tctgtgatcaaggtg

SEQ ID NO: 1794477 - DNA, 15 bp, Homo sapiens
ctgtgatcaaggtgt

SEQ ID NO: 1794478 - DNA, 15 bp, Homo sapiens
tgtgatcaaggtgtc

SEQ ID NO: 1794479 - DNA, 15 bp, Homo sapiens
gtgatcaaggtgtca

SEQ ID NO: 1794480 - DNA, 15 bp, Homo sapiens
tgatcaaggtgtcag

SEQ ID NO: 1794481 - DNA, 15 bp, Homo sapiens
gatcaaggtgtcagt

SEQ ID NO: 1794482 - DNA, 15 bp, Homo sapiens
atcaaggtgtcagtt

SEQ ID NO: 1794483 - DNA, 15 bp, Homo sapiens
tcaaggtgtcagttg

SEQ ID NO: 1794484 - DNA, 15 bp, Homo sapiens
caaggtgtcagttgg

SEQ ID NO: 1794485 - DNA, 15 bp, Homo sapiens
aaggtgtcagttggg

SEQ ID NO: 1794486 - DNA, 15 bp, Homo sapiens
aggtgtcagttgggc

SEQ ID NO: 1794487 - DNA, 15 bp, Homo sapiens
ggtgtcagttgggct

SEQ ID NO: 1794488 - DNA, 15 bp, Homo sapiens
gtgtcagttgggctg

SEQ ID NO: 1794489 - DNA, 15 bp, Homo sapiens
tgtcagttgggctgg

SEQ ID NO: 1794490 - DNA, 15 bp, Homo sapiens
gtcagttgggctggg

SEQ ID NO: 1794491 - DNA, 15 bp, Homo sapiens
tcagttgggctgggc

SEQ ID NO: 1794492 - DNA, 15 bp, Homo sapiens
cagttgggctgggcc

SEQ ID NO: 1794493 - DNA, 15 bp, Homo sapiens
agttgggctgggcct

SEQ ID NO: 1794494 - DNA, 15 bp, Homo sapiens
gttgggctgggcctg

SEQ ID NO: 1794495 - DNA, 15 bp, Homo sapiens
ttgggctgggcctgc

SEQ ID NO: 1794496 - DNA, 15 bp, Homo sapiens
tgggctgggcctgca

SEQ ID NO: 1794497 - DNA, 15 bp, Homo sapiens
gggctgggcctgcag

SEQ ID NO: 1794498 - DNA, 15 bp, Homo sapiens
ggctgggcctgcagt

SEQ ID NO: 1794499 - DNA, 15 bp, Homo sapiens
gctgggcctgcagtc

SEQ ID NO: 1794500 - DNA, 15 bp, Homo sapiens
ctgggcctgcagtca

SEQ ID NO: 1794501 - DNA, 15 bp, Homo sapiens
tgggcctgcagtcat

SEQ ID NO: 1794502 - DNA, 15 bp, Homo sapiens
gggcctgcagtcatc

SEQ ID NO: 1794503 - DNA, 15 bp, Homo sapiens
ggcctgcagtcatct

SEQ ID NO: 1794504 - DNA, 15 bp, Homo sapiens
gcctgcagtcatctc

SEQ ID NO: 1794505 - DNA, 15 bp, Homo sapiens
cctgcagtcatctca

SEQ ID NO: 1794506 - DNA, 15 bp, Homo sapiens
ctgcagtcatctcaa

SEQ ID NO: 1794507 - DNA, 15 bp, Homo sapiens
tgcagtcatctcaag

SEQ ID NO: 1794508 - DNA, 15 bp, Homo sapiens
gcagtcatctcaagg

SEQ ID NO: 1794509 - DNA, 15 bp, Homo sapiens
cagtcatctcaaggc

SEQ ID NO: 1794510 - DNA, 15 bp, Homo sapiens
agtcatctcaaggct

SEQ ID NO: 1794511 - DNA, 15 bp, Homo sapiens
gtcatctcaaggctc

SEQ ID NO: 1794512 - DNA, 15 bp, Homo sapiens
tcatctcaaggctcc

SEQ ID NO: 1794513 - DNA, 15 bp, Homo sapiens
catctcaaggctcca

SEQ ID NO: 1794514 - DNA, 15 bp, Homo sapiens
atctcaaggctccac

SEQ ID NO: 1794515 - DNA, 15 bp, Homo sapiens
tctcaaggctccact

SEQ ID NO: 1794516 - DNA, 15 bp, Homo sapiens
ctcaaggctccacta

SEQ ID NO: 1794517 - DNA, 15 bp, Homo sapiens
tcaaggctccactag

SEQ ID NO: 1794518 - DNA, 15 bp, Homo sapiens
caaggctccactaga

SEQ ID NO: 1794519 - DNA, 15 bp, Homo sapiens
aaggctccactagag

SEQ ID NO: 1794520 - DNA, 15 bp, Homo sapiens
aggctccactagagg

SEQ ID NO: 1794521 - DNA, 15 bp, Homo sapiens
ggctccactagagga

SEQ ID NO: 1794522 - DNA, 15 bp, Homo sapiens
gctccactagaggag

SEQ ID NO: 1794523 - DNA, 15 bp, Homo sapiens
ctccactagaggagc

SEQ ID NO: 1794524 - DNA, 15 bp, Homo sapiens
tccactagaggagca

SEQ ID NO: 1794525 - DNA, 15 bp, Homo sapiens
ccactagaggagcat

SEQ ID NO: 1794526 - DNA, 15 bp, Homo sapiens
cactagaggagcatt

SEQ ID NO: 1794527 - DNA, 15 bp, Homo sapiens
actagaggagcattc

SEQ ID NO: 1794528 - DNA, 15 bp, Homo sapiens
ctagaggagcattca

SEQ ID NO: 1794529 - DNA, 15 bp, Homo sapiens
tagaggagcattcac

SEQ ID NO: 1794530 - DNA, 15 bp, Homo sapiens
agaggagcattcact

SEQ ID NO: 1794531 - DNA, 15 bp, Homo sapiens
gaggagcattcactg

SEQ ID NO: 1794532 - DNA, 15 bp, Homo sapiens
aggagcattcactgg

SEQ ID NO: 1794533 - DNA, 15 bp, Homo sapiens
ggagcattcactggc

SEQ ID NO: 1794534 - DNA, 15 bp, Homo sapiens
gagcattcactggca

SEQ ID NO: 1794535 - DNA, 15 bp, Homo sapiens
agcattcactggcag

SEQ ID NO: 1794536 - DNA, 15 bp, Homo sapiens
gcattcactggcaga

SEQ ID NO: 1794537 - DNA, 15 bp, Homo sapiens
cattcactggcagac

SEQ ID NO: 1794538 - DNA, 15 bp, Homo sapiens
attcactggcagact

SEQ ID NO: 1794539 - DNA, 15 bp, Homo sapiens
ttcactggcagactt

SEQ ID NO: 1794540 - DNA, 15 bp, Homo sapiens
tcactggcagactta

SEQ ID NO: 1794541 - DNA, 15 bp, Homo sapiens
cactggcagacttat

SEQ ID NO: 1794542 - DNA, 15 bp, Homo sapiens
actggcagacttatt

SEQ ID NO: 1794543 - DNA, 15 bp, Homo sapiens
ctggcagacttattc

SEQ ID NO: 1794544 - DNA, 15 bp, Homo sapiens
tggcagacttattca

SEQ ID NO: 1794545 - DNA, 15 bp, Homo sapiens
ggcagacttattcaa

SEQ ID NO: 1794546 - DNA, 15 bp, Homo sapiens
gcagacttattcaaa

SEQ ID NO: 1794547 - DNA, 15 bp, Homo sapiens
cagacttattcaaat

SEQ ID NO: 1794548 - DNA, 15 bp, Homo sapiens
agacttattcaaatg

SEQ ID NO: 1794549 - DNA, 15 bp, Homo sapiens
gacttattcaaatgg

SEQ ID NO: 1794550 - DNA, 15 bp, Homo sapiens
acttattcaaatggc

SEQ ID NO: 1794551 - DNA, 15 bp, Homo sapiens
cttattcaaatggct

SEQ ID NO: 1794552 - DNA, 15 bp, Homo sapiens
ttattcaaatggctg

SEQ ID NO: 1794553 - DNA, 15 bp, Homo sapiens
tattcaaatggctgt

SEQ ID NO: 1794554 - DNA, 15 bp, Homo sapiens
attcaaatggctgtt

SEQ ID NO: 1794555 - DNA, 15 bp, Homo sapiens
ttcaaatggctgttg

SEQ ID NO: 1794556 - DNA, 15 bp, Homo sapiens
tcaaatggctgttgg

SEQ ID NO: 1794557 - DNA, 15 bp, Homo sapiens
caaatggctgttggc

SEQ ID NO: 1794558 - DNA, 15 bp, Homo sapiens
aaatggctgttggct

SEQ ID NO: 1794559 - DNA, 15 bp, Homo sapiens
aatggctgttggctg

SEQ ID NO: 1794560 - DNA, 15 bp, Homo sapiens
atggctgttggctga

SEQ ID NO: 1794561 - DNA, 15 bp, Homo sapiens
tggctgttggctgat

SEQ ID NO: 1794562 - DNA, 15 bp, Homo sapiens
ggctgttggctgatc

SEQ ID NO: 1794563 - DNA, 15 bp, Homo sapiens
gctgttggctgatcc

SEQ ID NO: 1794564 - DNA, 15 bp, Homo sapiens
ctgttggctgatcct

SEQ ID NO: 1794565 - DNA, 15 bp, Homo sapiens
tgttggctgatcctc

SEQ ID NO: 1794566 - DNA, 15 bp, Homo sapiens
gttggctgatcctcg

SEQ ID NO: 1794567 - DNA, 15 bp, Homo sapiens
ttggctgatcctcga

SEQ ID NO: 1794568 - DNA, 15 bp, Homo sapiens
tggctgatcctcgat

SEQ ID NO: 1794569 - DNA, 15 bp, Homo sapiens
ggctgatcctcgatg

SEQ ID NO: 1794570 - DNA, 15 bp, Homo sapiens
gctgatcctcgatgg

SEQ ID NO: 1794571 - DNA, 15 bp, Homo sapiens
ctgatcctcgatggc

SEQ ID NO: 1794572 - DNA, 15 bp, Homo sapiens
tgatcctcgatggct

SEQ ID NO: 1794573 - DNA, 15 bp, Homo sapiens
gatcctcgatggcta

SEQ ID NO: 1794574 - DNA, 15 bp, Homo sapiens
atcctcgatggctat

SEQ ID NO: 1794575 - DNA, 15 bp, Homo sapiens
tcctcgatggctatt

SEQ ID NO: 1794576 - DNA, 15 bp, Homo sapiens
cctcgatggctattg

SEQ ID NO: 1794577 - DNA, 15 bp, Homo sapiens
ctcgatggctattgg

SEQ ID NO: 1794578 - DNA, 15 bp, Homo sapiens
tcgatggctattggc

SEQ ID NO: 1794579 - DNA, 15 bp, Homo sapiens
cgatggctattggcc

SEQ ID NO: 1794580 - DNA, 15 bp, Homo sapiens
gatggctattggccc

SEQ ID NO: 1794581 - DNA, 15 bp, Homo sapiens
atggctattggcccc

SEQ ID NO: 1794582 - DNA, 15 bp, Homo sapiens
tggctattggcccct

SEQ ID NO: 1794583 - DNA, 15 bp, Homo sapiens
ggctattggcccctc

SEQ ID NO: 1794584 - DNA, 15 bp, Homo sapiens
gctattggcccctct

SEQ ID NO: 1794585 - DNA, 15 bp, Homo sapiens
ctattggcccctcta

SEQ ID NO: 1794586 - DNA, 15 bp, Homo sapiens
tattggcccctctat

SEQ ID NO: 1794587 - DNA, 15 bp, Homo sapiens
attggcccctctatt

SEQ ID NO: 1794588 - DNA, 15 bp, Homo sapiens
ttggcccctctattg

SEQ ID NO: 1794589 - DNA, 15 bp, Homo sapiens
tggcccctctattgg

SEQ ID NO: 1794590 - DNA, 15 bp, Homo sapiens
ggcccctctattggt

SEQ ID NO: 1794591 - DNA, 15 bp, Homo sapiens
gcccctctattggtt

SEQ ID NO: 1794592 - DNA, 15 bp, Homo sapiens
cccctctattggttt

SEQ ID NO: 1794593 - DNA, 15 bp, Homo sapiens
ccctctattggtttc

SEQ ID NO: 1794594 - DNA, 15 bp, Homo sapiens
cctctattggtttct

SEQ ID NO: 1794595 - DNA, 15 bp, Homo sapiens
ctctattggtttctt

SEQ ID NO: 1794596 - DNA, 15 bp, Homo sapiens
tctattggtttcttg

SEQ ID NO: 1794597 - DNA, 15 bp, Homo sapiens
ctattggtttcttgc

SEQ ID NO: 1794598 - DNA, 15 bp, Homo sapiens
tattggtttcttgcc

SEQ ID NO: 1794599 - DNA, 15 bp, Homo sapiens
attggtttcttgccc

SEQ ID NO: 1794600 - DNA, 15 bp, Homo sapiens
ttggtttcttgccct

SEQ ID NO: 1794601 - DNA, 15 bp, Homo sapiens
tggtttcttgccctt

SEQ ID NO: 1794602 - DNA, 15 bp, Homo sapiens
ggtttcttgcccttg

SEQ ID NO: 1794603 - DNA, 15 bp, Homo sapiens
gtttcttgcccttgg

SEQ ID NO: 1794604 - DNA, 15 bp, Homo sapiens
tttcttgcccttggg

SEQ ID NO: 1794605 - DNA, 15 bp, Homo sapiens
ttcttgcccttgggc

SEQ ID NO: 1794606 - DNA, 15 bp, Homo sapiens
tcttgcccttgggcc

SEQ ID NO: 1794607 - DNA, 15 bp, Homo sapiens
cttgcccttgggccc
